United States Patent Application Publication US 2025/0154528 A1 - sequence listing, part 3

SEQ ID NO: 92835 - protein, 7 aa, synthetic construct
KSNPNAF

SEQ ID NO: 92836 - protein, 7 aa, synthetic construct
DRLDKNK

SEQ ID NO: 92837 - protein, 7 aa, synthetic construct
REKHSLH

SEQ ID NO: 92838 - protein, 7 aa, synthetic construct
FAGQNQH

SEQ ID NO: 92839 - protein, 7 aa, synthetic construct
EVKVQIM

SEQ ID NO: 92840 - protein, 7 aa, synthetic construct
PHFAQLD

SEQ ID NO: 92841 - protein, 7 aa, synthetic construct
QFKLVHP

SEQ ID NO: 92842 - protein, 7 aa, synthetic construct
RAEHYHQ

SEQ ID NO: 92843 - protein, 7 aa, synthetic construct
ANKSAEV

SEQ ID NO: 92844 - protein, 7 aa, synthetic construct
KGPDKSF

SEQ ID NO: 92845 - protein, 7 aa, synthetic construct
KFHDNDI

SEQ ID NO: 92846 - protein, 7 aa, synthetic construct
SKDHGTF

SEQ ID NO: 92847 - protein, 7 aa, synthetic construct
WRGGPVI

SEQ ID NO: 92848 - protein, 7 aa, synthetic construct
LAPYPRQ

SEQ ID NO: 92849 - protein, 7 aa, synthetic construct
VMEKFPQ

SEQ ID NO: 92850 - protein, 7 aa, synthetic construct
KPVSDQQ

SEQ ID NO: 92851 - protein, 7 aa, synthetic construct
IHPDSVT

SEQ ID NO: 92852 - protein, 7 aa, synthetic construct
IFELGNK

SEQ ID NO: 92853 - protein, 7 aa, synthetic construct
MSGPREV

SEQ ID NO: 92854 - protein, 7 aa, synthetic construct
NPIGEPL

SEQ ID NO: 92855 - protein, 7 aa, synthetic construct
LKLAEVS

SEQ ID NO: 92856 - protein, 7 aa, synthetic construct
HLQRQVQ

SEQ ID NO: 92857 - protein, 7 aa, synthetic construct
ARPKEGP

SEQ ID NO: 92858 - protein, 7 aa, synthetic construct
SVVQYDP

SEQ ID NO: 92859 - protein, 7 aa, synthetic construct
YEMGGAP

SEQ ID NO: 92860 - protein, 7 aa, synthetic construct
FYGEMKV

SEQ ID NO: 92861 - protein, 7 aa, synthetic construct
YKPGEHE

SEQ ID NO: 92862 - protein, 7 aa, synthetic construct
RQPSNAP

SEQ ID NO: 92863 - protein, 7 aa, synthetic construct
WDTNRYS

SEQ ID NO: 92864 - protein, 7 aa, synthetic construct
EIQGHKY

SEQ ID NO: 92865 - protein, 7 aa, synthetic construct
GLHPVVE

SEQ ID NO: 92866 - protein, 7 aa, synthetic construct
AHDRMHV

SEQ ID NO: 92867 - protein, 7 aa, synthetic construct
YVKEEKR

SEQ ID NO: 92868 - protein, 7 aa, synthetic construct
KWELASG

SEQ ID NO: 92869 - protein, 7 aa, synthetic construct
RDNKGQD

SEQ ID NO: 92870 - protein, 7 aa, synthetic construct
KDGAWTT

SEQ ID NO: 92871 - protein, 7 aa, synthetic construct
YNATQSM

SEQ ID NO: 92872 - protein, 7 aa, synthetic construct
KEMAKSE

SEQ ID NO: 92873 - protein, 7 aa, synthetic construct
HMAHAQQ

SEQ ID NO: 92874 - protein, 7 aa, synthetic construct
NRKEILY

SEQ ID NO: 92875 - protein, 7 aa, synthetic construct
SNSQSVF

SEQ ID NO: 92876 - protein, 7 aa, synthetic construct
MRKDEYR

SEQ ID NO: 92877 - protein, 7 aa, synthetic construct
KVDPHRA

SEQ ID NO: 92878 - protein, 7 aa, synthetic construct
SEPAVRM

SEQ ID NO: 92879 - protein, 7 aa, synthetic construct
KNHSGDW

SEQ ID NO: 92880 - protein, 7 aa, synthetic construct
HPYHHEE

SEQ ID NO: 92881 - protein, 7 aa, synthetic construct
KHQESEL

SEQ ID NO: 92882 - protein, 7 aa, synthetic construct
FGEIGRS

SEQ ID NO: 92883 - protein, 7 aa, synthetic construct
MVGYQSK

SEQ ID NO: 92884 - protein, 7 aa, synthetic construct
VGHMMPT

SEQ ID NO: 92885 - protein, 7 aa, synthetic construct
SDFKLMS

SEQ ID NO: 92886 - protein, 7 aa, synthetic construct
KVPSNND

SEQ ID NO: 92887 - protein, 7 aa, synthetic construct
HQDQYQA

SEQ ID NO: 92888 - protein, 7 aa, synthetic construct
DRNASEM

SEQ ID NO: 92889 - protein, 7 aa, synthetic construct
FTEHHEL

SEQ ID NO: 92890 - protein, 7 aa, synthetic construct
KHNLANY

SEQ ID NO: 92891 - protein, 7 aa, synthetic construct
KMGATKE

SEQ ID NO: 92892 - protein, 7 aa, synthetic construct
TQTPMVK

SEQ ID NO: 92893 - protein, 7 aa, synthetic construct
STQKAQV

SEQ ID NO: 92894 - protein, 7 aa, synthetic construct
RVPPAMA

SEQ ID NO: 92895 - protein, 7 aa, synthetic construct
NTVAGHF

SEQ ID NO: 92896 - protein, 7 aa, synthetic construct
EMMNSKT

SEQ ID NO: 92897 - protein, 7 aa, synthetic construct
RTAMQND

SEQ ID NO: 92898 - protein, 7 aa, synthetic construct
FAPVTVS

SEQ ID NO: 92899 - protein, 7 aa, synthetic construct
VPMQQPM

SEQ ID NO: 92900 - protein, 7 aa, synthetic construct
MAKFALG

SEQ ID NO: 92901 - protein, 7 aa, synthetic construct
DTIHGPR

SEQ ID NO: 92902 - protein, 7 aa, synthetic construct
MDDRYFG

SEQ ID NO: 92903 - protein, 7 aa, synthetic construct
NSQIRDL

SEQ ID NO: 92904 - protein, 7 aa, synthetic construct
PHNMGNI

SEQ ID NO: 92905 - protein, 7 aa, synthetic construct
SEKKVVW

SEQ ID NO: 92906 - protein, 7 aa, synthetic construct
KNAPDWT

SEQ ID NO: 92907 - protein, 7 aa, synthetic construct
PNRTGMD

SEQ ID NO: 92908 - protein, 7 aa, synthetic construct
FFQDLPP

SEQ ID NO: 92909 - protein, 7 aa, synthetic construct
PPNTPKY

SEQ ID NO: 92910 - protein, 7 aa, synthetic construct
GPGARDK

SEQ ID NO: 92911 - protein, 7 aa, synthetic construct
MEQRGYH

SEQ ID NO: 92912 - protein, 7 aa, synthetic construct
LFKSDMP

SEQ ID NO: 92913 - protein, 7 aa, synthetic construct
TVGNKAM

SEQ ID NO: 92914 - protein, 7 aa, synthetic construct
NLVNVDI

SEQ ID NO: 92915 - protein, 7 aa, synthetic construct
KPHADNY

SEQ ID NO: 92916 - protein, 7 aa, synthetic construct
ANAPTVA

SEQ ID NO: 92917 - protein, 7 aa, synthetic construct
EDKVASA

SEQ ID NO: 92918 - protein, 7 aa, synthetic construct
STEHMAG

SEQ ID NO: 92919 - protein, 7 aa, synthetic construct
YLSKAVE

SEQ ID NO: 92920 - protein, 7 aa, synthetic construct
FNQTNLP

SEQ ID NO: 92921 - protein, 7 aa, synthetic construct
MKQDLHF

SEQ ID NO: 92922 - protein, 7 aa, synthetic construct
GQTSHND

SEQ ID NO: 92923 - protein, 7 aa, synthetic construct
MGAKGFE

SEQ ID NO: 92924 - protein, 7 aa, synthetic construct
YEKPRAA

SEQ ID NO: 92925 - protein, 7 aa, synthetic construct
SSKLESK

SEQ ID NO: 92926 - protein, 7 aa, synthetic construct
MIQNKLA

SEQ ID NO: 92927 - protein, 7 aa, synthetic construct
FQNNERY

SEQ ID NO: 92928 - protein, 7 aa, synthetic construct
PNSARPW

SEQ ID NO: 92929 - protein, 7 aa, synthetic construct
LTPAWTA

SEQ ID NO: 92930 - protein, 7 aa, synthetic construct
SLSILKS

SEQ ID NO: 92931 - protein, 7 aa, synthetic construct
KEWLPNG

SEQ ID NO: 92932 - protein, 7 aa, synthetic construct
SPHTMNH

SEQ ID NO: 92933 - protein, 7 aa, synthetic construct
ALGTAHF

SEQ ID NO: 92934 - protein, 7 aa, synthetic construct
SVPIKNM

SEQ ID NO: 92935 - protein, 7 aa, synthetic construct
HDLAKNL

SEQ ID NO: 92936 - protein, 7 aa, synthetic construct
GEPTKAT

SEQ ID NO: 92937 - protein, 7 aa, synthetic construct
QHGLDNR

SEQ ID NO: 92938 - protein, 7 aa, synthetic construct
SPYSIRP

SEQ ID NO: 92939 - protein, 7 aa, synthetic construct
HSASDVP

SEQ ID NO: 92940 - protein, 7 aa, synthetic construct
QQSTNSL

SEQ ID NO: 92941 - protein, 7 aa, synthetic construct
TDRKNLI

SEQ ID NO: 92942 - protein, 7 aa, synthetic construct
GISTIHE

SEQ ID NO: 92943 - protein, 7 aa, synthetic construct
FVIHHEG

SEQ ID NO: 92944 - protein, 7 aa, synthetic construct
FMPGKET

SEQ ID NO: 92945 - protein, 7 aa, synthetic construct
AGMSLHH

SEQ ID NO: 92946 - protein, 7 aa, synthetic construct
KDNATPL

SEQ ID NO: 92947 - protein, 7 aa, synthetic construct
FVRTHDQ

SEQ ID NO: 92948 - protein, 7 aa, synthetic construct
NKLMNTA

SEQ ID NO: 92949 - protein, 7 aa, synthetic construct
MAYKEER

SEQ ID NO: 92950 - protein, 7 aa, synthetic construct
RQTIVEK

SEQ ID NO: 92951 - protein, 7 aa, synthetic construct
GVQKGSG

SEQ ID NO: 92952 - protein, 7 aa, synthetic construct
VRLGDKE

SEQ ID NO: 92953 - protein, 7 aa, synthetic construct
MAKPIRD

SEQ ID NO: 92954 - protein, 7 aa, synthetic construct
MSSSRDA

SEQ ID NO: 92955 - protein, 7 aa, synthetic construct
MSQAHQD

SEQ ID NO: 92956 - protein, 7 aa, synthetic construct
KSMSQQV

SEQ ID NO: 92957 - protein, 7 aa, synthetic construct
DEREKSY

SEQ ID NO: 92958 - protein, 7 aa, synthetic construct
VLQAMEN

SEQ ID NO: 92959 - protein, 7 aa, synthetic construct
NQKYGIH

SEQ ID NO: 92960 - protein, 7 aa, synthetic construct
NTPTGSH

SEQ ID NO: 92961 - protein, 7 aa, synthetic construct
MGIVNTK

SEQ ID NO: 92962 - protein, 7 aa, synthetic construct
FDMKTII

SEQ ID NO: 92963 - protein, 7 aa, synthetic construct
NQMQKNP

SEQ ID NO: 92964 - protein, 7 aa, synthetic construct
NKYTMVM

SEQ ID NO: 92965 - protein, 7 aa, synthetic construct
STIMPAH

SEQ ID NO: 92966 - protein, 7 aa, synthetic construct
IEHLSSV

SEQ ID NO: 92967 - protein, 7 aa, synthetic construct
FNAERMT

SEQ ID NO: 92968 - protein, 7 aa, synthetic construct
TGAGSKA

SEQ ID NO: 92969 - protein, 7 aa, synthetic construct
SSKQTQS

SEQ ID NO: 92970 - protein, 7 aa, synthetic construct
KINPGHQ

SEQ ID NO: 92971 - protein, 7 aa, synthetic construct
GHHGTYL

SEQ ID NO: 92972 - protein, 7 aa, synthetic construct
NIHQKTS

SEQ ID NO: 92973 - protein, 7 aa, synthetic construct
NYRQVAA

SEQ ID NO: 92974 - protein, 7 aa, synthetic construct
AHSESRK

SEQ ID NO: 92975 - protein, 7 aa, synthetic construct
AFERQVR

SEQ ID NO: 92976 - protein, 7 aa, synthetic construct
SMKKSEP

SEQ ID NO: 92977 - protein, 7 aa, synthetic construct
HLPVNDS

SEQ ID NO: 92978 - protein, 7 aa, synthetic construct
QMSQAPH

SEQ ID NO: 92979 - protein, 7 aa, synthetic construct
QNPHLQE

SEQ ID NO: 92980 - protein, 7 aa, synthetic construct
SLIENKA

SEQ ID NO: 92981 - protein, 7 aa, synthetic construct
YAHSLTG

SEQ ID NO: 92982 - protein, 7 aa, synthetic construct
GWGKDMG

SEQ ID NO: 92983 - protein, 7 aa, synthetic construct
KIHGDMH

SEQ ID NO: 92984 - protein, 7 aa, synthetic construct
FPSSADP

SEQ ID NO: 92985 - protein, 7 aa, synthetic construct
IILNQPK

SEQ ID NO: 92986 - protein, 7 aa, synthetic construct
SFETTHS

SEQ ID NO: 92987 - protein, 7 aa, synthetic construct
VESYHNG

SEQ ID NO: 92988 - protein, 7 aa, synthetic construct
RVMTMPN

SEQ ID NO: 92989 - protein, 7 aa, synthetic construct
DTKNMSQ

SEQ ID NO: 92990 - protein, 7 aa, synthetic construct
LIKKDET

SEQ ID NO: 92991 - protein, 7 aa, synthetic construct
RANDGVG

SEQ ID NO: 92992 - protein, 7 aa, synthetic construct
AKFAPYN

SEQ ID NO: 92993 - protein, 7 aa, synthetic construct
EPTMAHA

SEQ ID NO: 92994 - protein, 7 aa, synthetic construct
KGVKGDA

SEQ ID NO: 92995 - protein, 7 aa, synthetic construct
FGVVNQI

SEQ ID NO: 92996 - protein, 7 aa, synthetic construct
QNWTKDS

SEQ ID NO: 92997 - protein, 7 aa, synthetic construct
RMGAYEP

SEQ ID NO: 92998 - protein, 7 aa, synthetic construct
RTSQNIQ

SEQ ID NO: 92999 - protein, 7 aa, synthetic construct
KQSNLTL

SEQ ID NO: 93000 - protein, 7 aa, synthetic construct
DKVYPKN

SEQ ID NO: 93001 - protein, 7 aa, synthetic construct
VNMKIGV

SEQ ID NO: 93002 - protein, 7 aa, synthetic construct
NKLGSIH

SEQ ID NO: 93003 - protein, 7 aa, synthetic construct
WTMATQS

SEQ ID NO: 93004 - protein, 7 aa, synthetic construct
MPDMKTK

SEQ ID NO: 93005 - protein, 7 aa, synthetic construct
SARMPPP

SEQ ID NO: 93006 - protein, 7 aa, synthetic construct
TSVMNPA

SEQ ID NO: 93007 - protein, 7 aa, synthetic construct
PPPKLPV

SEQ ID NO: 93008 - protein, 7 aa, synthetic construct
KNPNDMG

SEQ ID NO: 93009 - protein, 7 aa, synthetic construct
IMLRDRP

SEQ ID NO: 93010 - protein, 7 aa, synthetic construct
QMHAEFK

SEQ ID NO: 93011 - protein, 7 aa, synthetic construct
GHSLHPL

SEQ ID NO: 93012 - protein, 7 aa, synthetic construct
KWGQQDK

SEQ ID NO: 93013 - protein, 7 aa, synthetic construct
AQGTKGV

SEQ ID NO: 93014 - protein, 7 aa, synthetic construct
RTEVVNI

SEQ ID NO: 93015 - protein, 7 aa, synthetic construct
VAKYDTK

SEQ ID NO: 93016 - protein, 7 aa, synthetic construct
KFDNGMS

SEQ ID NO: 93017 - protein, 7 aa, synthetic construct
LVADATV

SEQ ID NO: 93018 - protein, 7 aa, synthetic construct
VGRHVVT

SEQ ID NO: 93019 - protein, 7 aa, synthetic construct
HGLGGIP

SEQ ID NO: 93020 - protein, 7 aa, synthetic construct
TTHRQAF

SEQ ID NO: 93021 - protein, 7 aa, synthetic construct
VPTSVHD

SEQ ID NO: 93022 - protein, 7 aa, synthetic construct
SPPWTET

SEQ ID NO: 93023 - protein, 7 aa, synthetic construct
VKFDVGK

SEQ ID NO: 93024 - protein, 7 aa, synthetic construct
PSKNSGV

SEQ ID NO: 93025 - protein, 7 aa, synthetic construct
GTDAKEY

SEQ ID NO: 93026 - protein, 7 aa, synthetic construct
LASQMMA

SEQ ID NO: 93027 - protein, 7 aa, synthetic construct
QMNATSM

SEQ ID NO: 93028 - protein, 7 aa, synthetic construct
ALDRMPE

SEQ ID NO: 93029 - protein, 7 aa, synthetic construct
HMSLNGR

SEQ ID NO: 93030 - protein, 7 aa, synthetic construct
PANVTRD

SEQ ID NO: 93031 - protein, 7 aa, synthetic construct
PSQIHSP

SEQ ID NO: 93032 - protein, 7 aa, synthetic construct
PNGKMVG

SEQ ID NO: 93033 - protein, 7 aa, synthetic construct
IRHADPY

SEQ ID NO: 93034 - protein, 7 aa, synthetic construct
LTSPVAF

SEQ ID NO: 93035 - protein, 7 aa, synthetic construct
TPVATMA

SEQ ID NO: 93036 - protein, 7 aa, synthetic construct
KIKITDS

SEQ ID NO: 93037 - protein, 7 aa, synthetic construct
HHNITSQ

SEQ ID NO: 93038 - protein, 7 aa, synthetic construct
QLAGPGE

SEQ ID NO: 93039 - protein, 7 aa, synthetic construct
QDHKVST

SEQ ID NO: 93040 - protein, 7 aa, synthetic construct
HKETSTM

SEQ ID NO: 93041 - protein, 7 aa, synthetic construct
NGLAQAY

SEQ ID NO: 93042 - protein, 7 aa, synthetic construct
HAQGKSI

SEQ ID NO: 93043 - protein, 7 aa, synthetic construct
VASTNHN

SEQ ID NO: 93044 - protein, 7 aa, synthetic construct
VAGYMND

SEQ ID NO: 93045 - protein, 7 aa, synthetic construct
KSVVPSN

SEQ ID NO: 93046 - protein, 7 aa, synthetic construct
IDYSVRT

SEQ ID NO: 93047 - protein, 7 aa, synthetic construct
MQHEPKR

SEQ ID NO: 93048 - protein, 7 aa, synthetic construct
GNHASGE

SEQ ID NO: 93049 - protein, 7 aa, synthetic construct
GPADFKV

SEQ ID NO: 93050 - protein, 7 aa, synthetic construct
NEAHVAH

SEQ ID NO: 93051 - protein, 7 aa, synthetic construct
MKVSEYY

SEQ ID NO: 93052 - protein, 7 aa, synthetic construct
MSEKMHK

SEQ ID NO: 93053 - protein, 7 aa, synthetic construct
INHAGPG

SEQ ID NO: 93054 - protein, 7 aa, synthetic construct
TMNPMMM

SEQ ID NO: 93055 - protein, 7 aa, synthetic construct
KKDVVER

SEQ ID NO: 93056 - protein, 7 aa, synthetic construct
IHNERRM

SEQ ID NO: 93057 - protein, 7 aa, synthetic construct
DLHRTSD

SEQ ID NO: 93058 - protein, 7 aa, synthetic construct
STDIRIT

SEQ ID NO: 93059 - protein, 7 aa, synthetic construct
SIPRSIL

SEQ ID NO: 93060 - protein, 7 aa, synthetic construct
PVLGLKH

SEQ ID NO: 93061 - protein, 7 aa, synthetic construct
ADRVYTH

SEQ ID NO: 93062 - protein, 7 aa, synthetic construct
IPQQLAP

SEQ ID NO: 93063 - protein, 7 aa, synthetic construct
RYGPAPT

SEQ ID NO: 93064 - protein, 7 aa, synthetic construct
LSSHSME

SEQ ID NO: 93065 - protein, 7 aa, synthetic construct
DNKAHLE

SEQ ID NO: 93066 - protein, 7 aa, synthetic construct
RTANYPL

SEQ ID NO: 93067 - protein, 7 aa, synthetic construct
WITRESH

SEQ ID NO: 93068 - protein, 7 aa, synthetic construct
RDVTNKF

SEQ ID NO: 93069 - protein, 7 aa, synthetic construct
LEGKSIH

SEQ ID NO: 93070 - protein, 7 aa, synthetic construct
VHPRSET

SEQ ID NO: 93071 - protein, 7 aa, synthetic construct
KYLKGFD

SEQ ID NO: 93072 - protein, 7 aa, synthetic construct
RDVSNLG

SEQ ID NO: 93073 - protein, 7 aa, synthetic construct
PMSIQNI

SEQ ID NO: 93074 - protein, 7 aa, synthetic construct
QRQYPMD

SEQ ID NO: 93075 - protein, 7 aa, synthetic construct
EITGLQR

SEQ ID NO: 93076 - protein, 7 aa, synthetic construct
AKGDDQR

SEQ ID NO: 93077 - protein, 7 aa, synthetic construct
ILIKAAG

SEQ ID NO: 93078 - protein, 7 aa, synthetic construct
VRDGHTA

SEQ ID NO: 93079 - protein, 7 aa, synthetic construct
KLKDQSA

SEQ ID NO: 93080 - protein, 7 aa, synthetic construct
SNKSMKD

SEQ ID NO: 93081 - protein, 7 aa, synthetic construct
TVNYELP

SEQ ID NO: 93082 - protein, 7 aa, synthetic construct
MNIRVER

SEQ ID NO: 93083 - protein, 7 aa, synthetic construct
SFPQSPH

SEQ ID NO: 93084 - protein, 7 aa, synthetic construct
VGTGQEL

SEQ ID NO: 93085 - protein, 7 aa, synthetic construct
PHSDYGG

SEQ ID NO: 93086 - protein, 7 aa, synthetic construct
SDQKERY

SEQ ID NO: 93087 - protein, 7 aa, synthetic construct
TKKSAEV

SEQ ID NO: 93088 - protein, 7 aa, synthetic construct
NAQTMPL

SEQ ID NO: 93089 - protein, 7 aa, synthetic construct
FHTMTRE

SEQ ID NO: 93090 - protein, 7 aa, synthetic construct
NRLELEV

SEQ ID NO: 93091 - protein, 7 aa, synthetic construct
TKPQGMG

SEQ ID NO: 93092 - protein, 7 aa, synthetic construct
VTAKVEY

SEQ ID NO: 93093 - protein, 7 aa, synthetic construct
NIDKMHP

SEQ ID NO: 93094 - protein, 7 aa, synthetic construct
AADIQKN

SEQ ID NO: 93095 - protein, 7 aa, synthetic construct
QKAHSPA

SEQ ID NO: 93096 - protein, 7 aa, synthetic construct
QLAGRNM

SEQ ID NO: 93097 - protein, 7 aa, synthetic construct
PFERDMS

SEQ ID NO: 93098 - protein, 7 aa, synthetic construct
QPTSSRQ

SEQ ID NO: 93099 - protein, 7 aa, synthetic construct
SNNLSVS

SEQ ID NO: 93100 - protein, 7 aa, synthetic construct
HHGPNFQ

SEQ ID NO: 93101 - protein, 7 aa, synthetic construct
TGSPFDG

SEQ ID NO: 93102 - protein, 7 aa, synthetic construct
TPQGRSM

SEQ ID NO: 93103 - protein, 7 aa, synthetic construct
PTEVNKG

SEQ ID NO: 93104 - protein, 7 aa, synthetic construct
GTAVGQW

SEQ ID NO: 93105 - protein, 7 aa, synthetic construct
YRHNLFE

SEQ ID NO: 93106 - protein, 7 aa, synthetic construct
DVFFAKP

SEQ ID NO: 93107 - protein, 7 aa, synthetic construct
QSMHVDR

SEQ ID NO: 93108 - protein, 7 aa, synthetic construct
HQLSDPV

SEQ ID NO: 93109 - protein, 7 aa, synthetic construct
QPQMRNV

SEQ ID NO: 93110 - protein, 7 aa, synthetic construct
DHMNGHS

SEQ ID NO: 93111 - protein, 7 aa, synthetic construct
QVFDHRN

SEQ ID NO: 93112 - protein, 7 aa, synthetic construct
AAKDGIQ

SEQ ID NO: 93113 - protein, 7 aa, synthetic construct
GIGHAAK

SEQ ID NO: 93114 - protein, 7 aa, synthetic construct
RTPVIGH

SEQ ID NO: 93115 - protein, 7 aa, synthetic construct
MKPGGNN

SEQ ID NO: 93116 - protein, 7 aa, synthetic construct
NRTVVEG

SEQ ID NO: 93117 - protein, 7 aa, synthetic construct
WHPHGTT

SEQ ID NO: 93118 - protein, 7 aa, synthetic construct
RQVAIAD

SEQ ID NO: 93119 - protein, 7 aa, synthetic construct
ANRQHMA

SEQ ID NO: 93120 - protein, 7 aa, synthetic construct
VHAQSGM

SEQ ID NO: 93121 - protein, 7 aa, synthetic construct
YTELHVA

SEQ ID NO: 93122 - protein, 7 aa, synthetic construct
EMHKGMD

SEQ ID NO: 93123 - protein, 7 aa, synthetic construct
LDRTSDN

SEQ ID NO: 93124 - protein, 7 aa, synthetic construct
SLMNHVP

SEQ ID NO: 93125 - protein, 7 aa, synthetic construct
NTKVSHM

SEQ ID NO: 93126 - protein, 7 aa, synthetic construct
LHAENKR

SEQ ID NO: 93127 - protein, 7 aa, synthetic construct
MRGSDNK

SEQ ID NO: 93128 - protein, 7 aa, synthetic construct
TARSKID

SEQ ID NO: 93129 - protein, 7 aa, synthetic construct
YMPGSVP

SEQ ID NO: 93130 - protein, 7 aa, synthetic construct
VSEFGTA

SEQ ID NO: 93131 - protein, 7 aa, synthetic construct
IKSTEAW

SEQ ID NO: 93132 - protein, 7 aa, synthetic construct
QENMNTL

SEQ ID NO: 93133 - protein, 7 aa, synthetic construct
GPMTMPM

SEQ ID NO: 93134 - protein, 7 aa, synthetic construct
MAEYRTV

SEQ ID NO: 93135 - protein, 7 aa, synthetic construct
NPRVDDN

SEQ ID NO: 93136 - protein, 7 aa, synthetic construct
HVNIEQK

SEQ ID NO: 93137 - protein, 7 aa, synthetic construct
KQQGDMY

SEQ ID NO: 93138 - protein, 7 aa, synthetic construct
QGGIIRI

SEQ ID NO: 93139 - protein, 7 aa, synthetic construct
ALNVIGN

SEQ ID NO: 93140 - protein, 7 aa, synthetic construct
FNRNYNS

SEQ ID NO: 93141 - protein, 7 aa, synthetic construct
SQLKDET

SEQ ID NO: 93142 - protein, 7 aa, synthetic construct
KVTNNSD

SEQ ID NO: 93143 - protein, 7 aa, synthetic construct
KAVEKNP

SEQ ID NO: 93144 - protein, 7 aa, synthetic construct
GSRHDFI

SEQ ID NO: 93145 - protein, 7 aa, synthetic construct
HDAGNSV

SEQ ID NO: 93146 - protein, 7 aa, synthetic construct
MYNSKIP

SEQ ID NO: 93147 - protein, 7 aa, synthetic construct
QHNALNG

SEQ ID NO: 93148 - protein, 7 aa, synthetic construct
VHMKIDS

SEQ ID NO: 93149 - protein, 7 aa, synthetic construct
IPGANPS

SEQ ID NO: 93150 - protein, 7 aa, synthetic construct
TRPPNNA

SEQ ID NO: 93151 - protein, 7 aa, synthetic construct
RDRPAVM

SEQ ID NO: 93152 - protein, 7 aa, synthetic construct
PITKSNH

SEQ ID NO: 93153 - protein, 7 aa, synthetic construct
AIKTSTT

SEQ ID NO: 93154 - protein, 7 aa, synthetic construct
MAHNSPM

SEQ ID NO: 93155 - protein, 7 aa, synthetic construct
WQTQSID

SEQ ID NO: 93156 - protein, 7 aa, synthetic construct
ERVNGYH

SEQ ID NO: 93157 - protein, 7 aa, synthetic construct
YEGIYRT

SEQ ID NO: 93158 - protein, 7 aa, synthetic construct
NLNARTV

SEQ ID NO: 93159 - protein, 7 aa, synthetic construct
QSDLVSS

SEQ ID NO: 93160 - protein, 7 aa, synthetic construct
KRIVSEI

SEQ ID NO: 93161 - protein, 7 aa, synthetic construct
NQGDAAT

SEQ ID NO: 93162 - protein, 7 aa, synthetic construct
QTDKQVV

SEQ ID NO: 93163 - protein, 7 aa, synthetic construct
ARTNNTP

SEQ ID NO: 93164 - protein, 7 aa, synthetic construct
GINVPAG

SEQ ID NO: 93165 - protein, 7 aa, synthetic construct
AFVQGHI

SEQ ID NO: 93166 - protein, 7 aa, synthetic construct
MPTMGMD

SEQ ID NO: 93167 - protein, 7 aa, synthetic construct
ISSLMRP

SEQ ID NO: 93168 - protein, 7 aa, synthetic construct
SFEKAAA

SEQ ID NO: 93169 - protein, 7 aa, synthetic construct
FGQTLMS

SEQ ID NO: 93170 - protein, 7 aa, synthetic construct
RAFGDYS

SEQ ID NO: 93171 - protein, 7 aa, synthetic construct
NKNPNTP

SEQ ID NO: 93172 - protein, 7 aa, synthetic construct
GEGPKMF

SEQ ID NO: 93173 - protein, 7 aa, synthetic construct
TKAFTSQ

SEQ ID NO: 93174 - protein, 7 aa, synthetic construct
TEPHYGV

SEQ ID NO: 93175 - protein, 7 aa, synthetic construct
PHSHIQP

SEQ ID NO: 93176 - protein, 7 aa, synthetic construct
HHQIKFP

SEQ ID NO: 93177 - protein, 7 aa, synthetic construct
HQEQGKR

SEQ ID NO: 93178 - protein, 7 aa, synthetic construct
WHELAGH

SEQ ID NO: 93179 - protein, 7 aa, synthetic construct
VHERTFG

SEQ ID NO: 93180 - protein, 7 aa, synthetic construct
GHVTSRD

SEQ ID NO: 93181 - protein, 7 aa, synthetic construct
QGNWMMD

SEQ ID NO: 93182 - protein, 7 aa, synthetic construct
MYGIKTD

SEQ ID NO: 93183 - protein, 7 aa, synthetic construct
TRDVRES

SEQ ID NO: 93184 - protein, 7 aa, synthetic construct
VKITEPQ

SEQ ID NO: 93185 - protein, 7 aa, synthetic construct
TQSTKSA

SEQ ID NO: 93186 - protein, 7 aa, synthetic construct
ENKNFAD

SEQ ID NO: 93187 - protein, 7 aa, synthetic construct
ANMVRHS

SEQ ID NO: 93188 - protein, 7 aa, synthetic construct
APMGSSF

SEQ ID NO: 93189 - protein, 7 aa, synthetic construct
PHENQKP

SEQ ID NO: 93190 - protein, 7 aa, synthetic construct
SQEHKYK

SEQ ID NO: 93191 - protein, 7 aa, synthetic construct
QFKQTYT

SEQ ID NO: 93192 - protein, 7 aa, synthetic construct
RDAQQIA

SEQ ID NO: 93193 - protein, 7 aa, synthetic construct
KRDSREQ

SEQ ID NO: 93194 - protein, 7 aa, synthetic construct
DYYHKQP

SEQ ID NO: 93195 - protein, 7 aa, synthetic construct
QTTPNVH

SEQ ID NO: 93196 - protein, 7 aa, synthetic construct
GPSQMLM

SEQ ID NO: 93197 - protein, 7 aa, synthetic construct
IQTVNTH

SEQ ID NO: 93198 - protein, 7 aa, synthetic construct
YESGKAV

SEQ ID NO: 93199 - protein, 7 aa, synthetic construct
NTQLARS

SEQ ID NO: 93200 - protein, 7 aa, synthetic construct
RSTNEMS

SEQ ID NO: 93201 - protein, 7 aa, synthetic construct
NADHPLT

SEQ ID NO: 93202 - protein, 7 aa, synthetic construct
QIQGPII

SEQ ID NO: 93203 - protein, 7 aa, synthetic construct
HWDLKDA

SEQ ID NO: 93204 - protein, 7 aa, synthetic construct
WRAMKTD

SEQ ID NO: 93205 - protein, 7 aa, synthetic construct
ESGGNHS

SEQ ID NO: 93206 - protein, 7 aa, synthetic construct
MIPNHGK

SEQ ID NO: 93207 - protein, 7 aa, synthetic construct
PYKGQHF

SEQ ID NO: 93208 - protein, 7 aa, synthetic construct
KDKNPSH

SEQ ID NO: 93209 - protein, 7 aa, synthetic construct
KYDAGIG

SEQ ID NO: 93210 - protein, 7 aa, synthetic construct
QKQPGAS

SEQ ID NO: 93211 - protein, 7 aa, synthetic construct
TSKADHI

SEQ ID NO: 93212 - protein, 7 aa, synthetic construct
DTVILKV

SEQ ID NO: 93213 - protein, 7 aa, synthetic construct
AMKPETF

SEQ ID NO: 93214 - protein, 7 aa, synthetic construct
PRGQNVA

SEQ ID NO: 93215 - protein, 7 aa, synthetic construct
DAYAHGP

SEQ ID NO: 93216 - protein, 7 aa, synthetic construct
YKKTDIE

SEQ ID NO: 93217 - protein, 7 aa, synthetic construct
LQHTDTA

SEQ ID NO: 93218 - protein, 7 aa, synthetic construct
KESHLPD

SEQ ID NO: 93219 - protein, 7 aa, synthetic construct
GQANAII

SEQ ID NO: 93220 - protein, 7 aa, synthetic construct
KSQMAVG

SEQ ID NO: 93221 - protein, 7 aa, synthetic construct
SRQIDRI

SEQ ID NO: 93222 - protein, 7 aa, synthetic construct
IDAHLMK

SEQ ID NO: 93223 - protein, 7 aa, synthetic construct
VVGVADM

SEQ ID NO: 93224 - protein, 7 aa, synthetic construct
TKMDPAT

SEQ ID NO: 93225 - protein, 7 aa, synthetic construct
QMRNGGM

SEQ ID NO: 93226 - protein, 7 aa, synthetic construct
DSLGWAK

SEQ ID NO: 93227 - protein, 7 aa, synthetic construct
QHTVIEH

SEQ ID NO: 93228 - protein, 7 aa, synthetic construct
VVMRQSE

SEQ ID NO: 93229 - protein, 7 aa, synthetic construct
AFDGPSP

SEQ ID NO: 93230 - protein, 7 aa, synthetic construct
WSGKEQS

SEQ ID NO: 93231 - protein, 7 aa, synthetic construct
PTHVPHA

SEQ ID NO: 93232 - protein, 7 aa, synthetic construct
QFQLGSH

SEQ ID NO: 93233 - protein, 7 aa, synthetic construct
LFSQKMG

SEQ ID NO: 93234 - protein, 7 aa, synthetic construct
HDDKWMP

SEQ ID NO: 93235 - protein, 7 aa, synthetic construct
YIEKHTN

SEQ ID NO: 93236 - protein, 7 aa, synthetic construct
ANSTHTF

SEQ ID NO: 93237 - protein, 7 aa, synthetic construct
KDQPVTR

SEQ ID NO: 93238 - protein, 7 aa, synthetic construct
NNVLRED

SEQ ID NO: 93239 - protein, 7 aa, synthetic construct
AAQGQHP

SEQ ID NO: 93240 - protein, 7 aa, synthetic construct
NPNQITI

SEQ ID NO: 93241 - protein, 7 aa, synthetic construct
PIGVKNE

SEQ ID NO: 93242 - protein, 7 aa, synthetic construct
LVRIAQG

SEQ ID NO: 93243 - protein, 7 aa, synthetic construct
HRAVSLS

SEQ ID NO: 93244 - protein, 7 aa, synthetic construct
MRGRAEL

SEQ ID NO: 93245 - protein, 7 aa, synthetic construct
DNAQLKF

SEQ ID NO: 93246 - protein, 7 aa, synthetic construct
QNSALNI

SEQ ID NO: 93247 - protein, 7 aa, synthetic construct
QRNQSQS

SEQ ID NO: 93248 - protein, 7 aa, synthetic construct
TNRSSNW

SEQ ID NO: 93249 - protein, 7 aa, synthetic construct
QDKPRGD

SEQ ID NO: 93250 - protein, 7 aa, synthetic construct
RGTMNSI

SEQ ID NO: 93251 - protein, 7 aa, synthetic construct
REAIVTS

SEQ ID NO: 93252 - protein, 7 aa, synthetic construct
GANDGTY

SEQ ID NO: 93253 - protein, 7 aa, synthetic construct
LQQKFEK

SEQ ID NO: 93254 - protein, 7 aa, synthetic construct
NRGPQNV

SEQ ID NO: 93255 - protein, 7 aa, synthetic construct
YINAEQK

SEQ ID NO: 93256 - protein, 7 aa, synthetic construct
GAYNIPM

SEQ ID NO: 93257 - protein, 7 aa, synthetic construct
LAKEWID

SEQ ID NO: 93258 - protein, 7 aa, synthetic construct
YNSWMGE

SEQ ID NO: 93259 - protein, 7 aa, synthetic construct
IDEMKWQ

SEQ ID NO: 93260 - protein, 7 aa, synthetic construct
AKKHIDM

SEQ ID NO: 93261 - protein, 7 aa, synthetic construct
PKHEGWL

SEQ ID NO: 93262 - protein, 7 aa, synthetic construct
KQQHVYI

SEQ ID NO: 93263 - protein, 7 aa, synthetic construct
WPGPKEA

SEQ ID NO: 93264 - protein, 7 aa, synthetic construct
GRHLQEK

SEQ ID NO: 93265 - protein, 7 aa, synthetic construct
VPRDQGV

SEQ ID NO: 93266 - protein, 7 aa, synthetic construct
MKKDSTG

SEQ ID NO: 93267 - protein, 7 aa, synthetic construct
SSKYPAV

SEQ ID NO: 93268 - protein, 7 aa, synthetic construct
MQQGYHD

SEQ ID NO: 93269 - protein, 7 aa, synthetic construct
DGKTVSM

SEQ ID NO: 93270 - protein, 7 aa, synthetic construct
NRAVMEE

SEQ ID NO: 93271 - protein, 7 aa, synthetic construct
RSEPAKT

SEQ ID NO: 93272 - protein, 7 aa, synthetic construct
KQGDKDL

SEQ ID NO: 93273 - protein, 7 aa, synthetic construct
TKDYMEI

SEQ ID NO: 93274 - protein, 7 aa, synthetic construct
QRTPSMP

SEQ ID NO: 93275 - protein, 7 aa, synthetic construct
DKQESST

SEQ ID NO: 93276 - protein, 7 aa, synthetic construct
IAYGAPA

SEQ ID NO: 93277 - protein, 7 aa, synthetic construct
AGSAIVI

SEQ ID NO: 93278 - protein, 7 aa, synthetic construct
WQEMRTV

SEQ ID NO: 93279 - protein, 7 aa, synthetic construct
GDGPPRG

SEQ ID NO: 93280 - protein, 7 aa, synthetic construct
WGALQHD

SEQ ID NO: 93281 - protein, 7 aa, synthetic construct
PDRASFR

SEQ ID NO: 93282 - protein, 7 aa, synthetic construct
KQNGSMS

SEQ ID NO: 93283 - protein, 7 aa, synthetic construct
IGIGNKI

SEQ ID NO: 93284 - protein, 7 aa, synthetic construct
KSNGLGS

SEQ ID NO: 93285 - protein, 7 aa, synthetic construct
MEKNNNN

SEQ ID NO: 93286 - protein, 7 aa, synthetic construct
NASNRSS

SEQ ID NO: 93287 - protein, 7 aa, synthetic construct
EAESKRY

SEQ ID NO: 93288 - protein, 7 aa, synthetic construct
RDQWKTG

SEQ ID NO: 93289 - protein, 7 aa, synthetic construct
QVVNAIP

SEQ ID NO: 93290 - protein, 7 aa, synthetic construct
DFDKRLH

SEQ ID NO: 93291 - protein, 7 aa, synthetic construct
GLNSNIL

SEQ ID NO: 93292 - protein, 7 aa, synthetic construct
VRPSDET

SEQ ID NO: 93293 - protein, 7 aa, synthetic construct
PNNFIKD

SEQ ID NO: 93294 - protein, 7 aa, synthetic construct
TKMMEKN

SEQ ID NO: 93295 - protein, 7 aa, synthetic construct
YDHSKFP

SEQ ID NO: 93296 - protein, 7 aa, synthetic construct
TMNQNQF

SEQ ID NO: 93297 - protein, 7 aa, synthetic construct
VNDHTQR

SEQ ID NO: 93298 - protein, 7 aa, synthetic construct
SNYSRPT

SEQ ID NO: 93299 - protein, 7 aa, synthetic construct
PNNQITV

SEQ ID NO: 93300 - protein, 7 aa, synthetic construct
KNAMGTA

SEQ ID NO: 93301 - protein, 7 aa, synthetic construct
NEMKPNA

SEQ ID NO: 93302 - protein, 7 aa, synthetic construct
TSHPASD

SEQ ID NO: 93303 - protein, 7 aa, synthetic construct
KEFGVDK

SEQ ID NO: 93304 - protein, 7 aa, synthetic construct
YRGIETV

SEQ ID NO: 93305 - protein, 7 aa, synthetic construct
RDTKHPQ

SEQ ID NO: 93306 - protein, 7 aa, synthetic construct
RETNYVH

SEQ ID NO: 93307 - protein, 7 aa, synthetic construct
HRFEGLA

SEQ ID NO: 93308 - protein, 7 aa, synthetic construct
QSSAMAI

SEQ ID NO: 93309 - protein, 7 aa, synthetic construct
LRVPYDM

SEQ ID NO: 93310 - protein, 7 aa, synthetic construct
AVQTRGG

SEQ ID NO: 93311 - protein, 7 aa, synthetic construct
AHMGNRN

SEQ ID NO: 93312 - protein, 7 aa, synthetic construct
FVPQGNR

SEQ ID NO: 93313 - protein, 7 aa, synthetic construct
QAHEREA

SEQ ID NO: 93314 - protein, 7 aa, synthetic construct
YGLSTSP

SEQ ID NO: 93315 - protein, 7 aa, synthetic construct
NYQPSLG

SEQ ID NO: 93316 - protein, 7 aa, synthetic construct
WKTTMNI

SEQ ID NO: 93317 - protein, 7 aa, synthetic construct
YYTPSKN

SEQ ID NO: 93318 - protein, 7 aa, synthetic construct
HNNIKFG

SEQ ID NO: 93319 - protein, 7 aa, synthetic construct
PQWKNEN

SEQ ID NO: 93320 - protein, 7 aa, synthetic construct
YGQGKDS

SEQ ID NO: 93321 - protein, 7 aa, synthetic construct
MHDVTDR

SEQ ID NO: 93322 - protein, 7 aa, synthetic construct
GHKPQVG

SEQ ID NO: 93323 - protein, 7 aa, synthetic construct
SLSGMIM

SEQ ID NO: 93324 - protein, 7 aa, synthetic construct
PDSNRLV

SEQ ID NO: 93325 - protein, 7 aa, synthetic construct
MNAATIM

SEQ ID NO: 93326 - protein, 7 aa, synthetic construct
GLINPKA

SEQ ID NO: 93327 - protein, 7 aa, synthetic construct
SINIANS

SEQ ID NO: 93328 - protein, 7 aa, synthetic construct
DSHNGFA

SEQ ID NO: 93329 - protein, 7 aa, synthetic construct
WKHGILS

SEQ ID NO: 93330 - protein, 7 aa, synthetic construct
RPPAIDA

SEQ ID NO: 93331 - protein, 7 aa, synthetic construct
AMFAPAG

SEQ ID NO: 93332 - protein, 7 aa, synthetic construct
KYVDNIT

SEQ ID NO: 93333 - protein, 7 aa, synthetic construct
AYSKSPE

SEQ ID NO: 93334 - protein, 7 aa, synthetic construct
GNSANFK

SEQ ID NO: 93335 - protein, 7 aa, synthetic construct
DMAHTVA

SEQ ID NO: 93336 - protein, 7 aa, synthetic construct
TNKGDPY

SEQ ID NO: 93337 - protein, 7 aa, synthetic construct
AKEAAVT

SEQ ID NO: 93338 - protein, 7 aa, synthetic construct
APTGSTR

SEQ ID NO: 93339 - protein, 7 aa, synthetic construct
PTHFDGA

SEQ ID NO: 93340 - protein, 7 aa, synthetic construct
WDRLDRS

SEQ ID NO: 93341 - protein, 7 aa, synthetic construct
TGPQIAG

SEQ ID NO: 93342 - protein, 7 aa, synthetic construct
VHSKSEI

SEQ ID NO: 93343 - protein, 7 aa, synthetic construct
QQGDKMI

SEQ ID NO: 93344 - protein, 7 aa, synthetic construct
KYPPMIS

SEQ ID NO: 93345 - protein, 7 aa, synthetic construct
ATKDMIK

SEQ ID NO: 93346 - protein, 7 aa, synthetic construct
RQVQFNE

SEQ ID NO: 93347 - protein, 7 aa, synthetic construct
MQAKDGS

SEQ ID NO: 93348 - protein, 7 aa, synthetic construct
LLNKPEY

SEQ ID NO: 93349 - protein, 7 aa, synthetic construct
AENMKAK

SEQ ID NO: 93350 - protein, 7 aa, synthetic construct
MQPRVVE

SEQ ID NO: 93351 - protein, 7 aa, synthetic construct
IIKHELE

SEQ ID NO: 93352 - protein, 7 aa, synthetic construct
EFPRIGL

SEQ ID NO: 93353 - protein, 7 aa, synthetic construct
AFSHAAI

SEQ ID NO: 93354 - protein, 7 aa, synthetic construct
ISFMQKA

SEQ ID NO: 93355 - protein, 7 aa, synthetic construct
FENKGAP

SEQ ID NO: 93356 - protein, 7 aa, synthetic construct
LLGGAFD

SEQ ID NO: 93357 - protein, 7 aa, synthetic construct
QKGSLQD

SEQ ID NO: 93358 - protein, 7 aa, synthetic construct
GYAGMMV

SEQ ID NO: 93359 - protein, 7 aa, synthetic construct
ADQLKGW

SEQ ID NO: 93360 - protein, 7 aa, synthetic construct
TFDKLVL

SEQ ID NO: 93361 - protein, 7 aa, synthetic construct
PDGQFYR

SEQ ID NO: 93362 - protein, 7 aa, synthetic construct
NPSTVRS

SEQ ID NO: 93363 - protein, 7 aa, synthetic construct
RKNAPDV

SEQ ID NO: 93364 - protein, 7 aa, synthetic construct
PPRGPAT

SEQ ID NO: 93365 - protein, 7 aa, synthetic construct
VVKAQQE

SEQ ID NO: 93366 - protein, 7 aa, synthetic construct
SSAKQSW

SEQ ID NO: 93367 - protein, 7 aa, synthetic construct
KQVNESS

SEQ ID NO: 93368 - protein, 7 aa, synthetic construct
SNDSKGV

SEQ ID NO: 93369 - protein, 7 aa, synthetic construct
GFIKPDP

SEQ ID NO: 93370 - protein, 7 aa, synthetic construct
SRTVSDH

SEQ ID NO: 93371 - protein, 7 aa, synthetic construct
PDVLYER

SEQ ID NO: 93372 - protein, 7 aa, synthetic construct
PDRHANN

SEQ ID NO: 93373 - protein, 7 aa, synthetic construct
KPIDAAS

SEQ ID NO: 93374 - protein, 7 aa, synthetic construct
GQRDLVL

SEQ ID NO: 93375 - protein, 7 aa, synthetic construct
YAGELAP

SEQ ID NO: 93376 - protein, 7 aa, synthetic construct
ASIHTQK

SEQ ID NO: 93377 - protein, 7 aa, synthetic construct
KPDARGF

SEQ ID NO: 93378 - protein, 7 aa, synthetic construct
MGQNHHT

SEQ ID NO: 93379 - protein, 7 aa, synthetic construct
AVFPAHD

SEQ ID NO: 93380 - protein, 7 aa, synthetic construct
PQRHMPV

SEQ ID NO: 93381 - protein, 7 aa, synthetic construct
LKVPDGN

SEQ ID NO: 93382 - protein, 7 aa, synthetic construct
AGMKYIP

SEQ ID NO: 93383 - protein, 7 aa, synthetic construct
EMKAHIF

SEQ ID NO: 93384 - protein, 7 aa, synthetic construct
TNHPITG

SEQ ID NO: 93385 - protein, 7 aa, synthetic construct
WELAVGA

SEQ ID NO: 93386 - protein, 7 aa, synthetic construct
KADFRDY

SEQ ID NO: 93387 - protein, 7 aa, synthetic construct
ETHAARD

SEQ ID NO: 93388 - protein, 7 aa, synthetic construct
NNQFERL

SEQ ID NO: 93389 - protein, 7 aa, synthetic construct
PARQSAP

SEQ ID NO: 93390 - protein, 7 aa, synthetic construct
IVHRNDS

SEQ ID NO: 93391 - protein, 7 aa, synthetic construct
HIHGLVM

SEQ ID NO: 93392 - protein, 7 aa, synthetic construct
PHTAQHA

SEQ ID NO: 93393 - protein, 7 aa, synthetic construct
GLTFQLE

SEQ ID NO: 93394 - protein, 7 aa, synthetic construct
INHPQRI

SEQ ID NO: 93395 - protein, 7 aa, synthetic construct
DGYGPSK

SEQ ID NO: 93396 - protein, 7 aa, synthetic construct
MYQTKTY

SEQ ID NO: 93397 - protein, 7 aa, synthetic construct
KRDVREL

SEQ ID NO: 93398 - protein, 7 aa, synthetic construct
FKDFNML

SEQ ID NO: 93399 - protein, 7 aa, synthetic construct
YWDKHAD

SEQ ID NO: 93400 - protein, 7 aa, synthetic construct
ILERPHG

SEQ ID NO: 93401 - protein, 7 aa, synthetic construct
TIAINNQ

SEQ ID NO: 93402 - protein, 7 aa, synthetic construct
IGFHDNN

SEQ ID NO: 93403 - protein, 7 aa, synthetic construct
HTQTSPD

SEQ ID NO: 93404 - protein, 7 aa, synthetic construct
SKSYVSM

SEQ ID NO: 93405 - protein, 7 aa, synthetic construct
YSSKGHV

SEQ ID NO: 93406 - protein, 7 aa, synthetic construct
TAMVKGP

SEQ ID NO: 93407 - protein, 7 aa, synthetic construct
LNGQERH

SEQ ID NO: 93408 - protein, 7 aa, synthetic construct
HPVQDFG

SEQ ID NO: 93409 - protein, 7 aa, synthetic construct
YNMAASM

SEQ ID NO: 93410 - protein, 7 aa, synthetic construct
TLKDNQV

SEQ ID NO: 93411 - protein, 7 aa, synthetic construct
GRIPAIA

SEQ ID NO: 93412 - protein, 7 aa, synthetic construct
QVGDNPT

SEQ ID NO: 93413 - protein, 7 aa, synthetic construct
FKEAKSI

SEQ ID NO: 93414 - protein, 7 aa, synthetic construct
WREESHK

SEQ ID NO: 93415 - protein, 7 aa, synthetic construct
VPLNPAK

SEQ ID NO: 93416 - protein, 7 aa, synthetic construct
HAIYVRE

SEQ ID NO: 93417 - protein, 7 aa, synthetic construct
KYNGNSS

SEQ ID NO: 93418 - protein, 7 aa, synthetic construct
GAKWEVV

SEQ ID NO: 93419 - protein, 7 aa, synthetic construct
SQRLTGN

SEQ ID NO: 93420 - protein, 7 aa, synthetic construct
NTQSAPY

SEQ ID NO: 93421 - protein, 7 aa, synthetic construct
GKHQSYA

SEQ ID NO: 93422 - protein, 7 aa, synthetic construct
DIRFQDP

SEQ ID NO: 93423 - protein, 7 aa, synthetic construct
FKARYIE

SEQ ID NO: 93424 - protein, 7 aa, synthetic construct
YANINVN

SEQ ID NO: 93425 - protein, 7 aa, synthetic construct
IAKMVQS

SEQ ID NO: 93426 - protein, 7 aa, synthetic construct
GIRQVEI

SEQ ID NO: 93427 - protein, 7 aa, synthetic construct
QAHHENN

SEQ ID NO: 93428 - protein, 7 aa, synthetic construct
EIRMQPV

SEQ ID NO: 93429 - protein, 7 aa, synthetic construct
GNEQKSY

SEQ ID NO: 93430 - protein, 7 aa, synthetic construct
QTARLTV

SEQ ID NO: 93431 - protein, 7 aa, synthetic construct
KTGQQLS

SEQ ID NO: 93432 - protein, 7 aa, synthetic construct
KPQQTVS

SEQ ID NO: 93433 - protein, 7 aa, synthetic construct
KVKMVEH

SEQ ID NO: 93434 - protein, 7 aa, synthetic construct
IITHQKH

SEQ ID NO: 93435 - protein, 7 aa, synthetic construct
KEQQHMN

SEQ ID NO: 93436 - protein, 7 aa, synthetic construct
HPPLPSD

SEQ ID NO: 93437 - protein, 7 aa, synthetic construct
MEHSKQT

SEQ ID NO: 93438 - protein, 7 aa, synthetic construct
DKRETGM

SEQ ID NO: 93439 - protein, 7 aa, synthetic construct
SPMRAAQ

SEQ ID NO: 93440 - protein, 7 aa, synthetic construct
RPGIVIE

SEQ ID NO: 93441 - protein, 7 aa, synthetic construct
MDLPAHG

SEQ ID NO: 93442 - protein, 7 aa, synthetic construct
PNNTVIH

SEQ ID NO: 93443 - protein, 7 aa, synthetic construct
PNHHQRL

SEQ ID NO: 93444 - protein, 7 aa, synthetic construct
TMQKYAM

SEQ ID NO: 93445 - protein, 7 aa, synthetic construct
AHISARN

SEQ ID NO: 93446 - protein, 7 aa, synthetic construct
VHQMTRA

SEQ ID NO: 93447 - protein, 7 aa, synthetic construct
IMQRANI

SEQ ID NO: 93448 - protein, 7 aa, synthetic construct
RIYGDDH

SEQ ID NO: 93449 - protein, 7 aa, synthetic construct
TKPTSSV

SEQ ID NO: 93450 - protein, 7 aa, synthetic construct
AEMAQNR

SEQ ID NO: 93451 - protein, 7 aa, synthetic construct
WERGALL

SEQ ID NO: 93452 - protein, 7 aa, synthetic construct
RTPENSI

SEQ ID NO: 93453 - protein, 7 aa, synthetic construct
FAISNQM

SEQ ID NO: 93454 - protein, 7 aa, synthetic construct
HSLNTVQ

SEQ ID NO: 93455 - protein, 7 aa, synthetic construct
GFQAGDM

SEQ ID NO: 93456 - protein, 7 aa, synthetic construct
MRIKHIE

SEQ ID NO: 93457 - protein, 7 aa, synthetic construct
KQTNPNA

SEQ ID NO: 93458 - protein, 7 aa, synthetic construct
LRTHPFD

SEQ ID NO: 93459 - protein, 7 aa, synthetic construct
MPNHVNH

SEQ ID NO: 93460 - protein, 7 aa, synthetic construct
SRNSVNG

SEQ ID NO: 93461 - protein, 7 aa, synthetic construct
PQVKQYN

SEQ ID NO: 93462 - protein, 7 aa, synthetic construct
MAGAGPY

SEQ ID NO: 93463 - protein, 7 aa, synthetic construct
TADPSHH

SEQ ID NO: 93464 - protein, 7 aa, synthetic construct
VLREYDS

SEQ ID NO: 93465 - protein, 7 aa, synthetic construct
LIHPSIG

SEQ ID NO: 93466 - protein, 7 aa, synthetic construct
DKYVHAP

SEQ ID NO: 93467 - protein, 7 aa, synthetic construct
QSGTYRA

SEQ ID NO: 93468 - protein, 7 aa, synthetic construct
GDHNGHV

SEQ ID NO: 93469 - protein, 7 aa, synthetic construct
FHSIFTE

SEQ ID NO: 93470 - protein, 7 aa, synthetic construct
SLVGMIS

SEQ ID NO: 93471 - protein, 7 aa, synthetic construct
CVGTPPC

SEQ ID NO: 93472 - protein, 7 aa, synthetic construct
LHRMGNM

SEQ ID NO: 93473 - protein, 7 aa, synthetic construct
AERKVEP

SEQ ID NO: 93474 - protein, 7 aa, synthetic construct
REGHQGN

SEQ ID NO: 93475 - protein, 7 aa, synthetic construct
STMDASK

SEQ ID NO: 93476 - protein, 7 aa, synthetic construct
GPHRVPT

SEQ ID NO: 93477 - protein, 7 aa, synthetic construct
WTSTSAM

SEQ ID NO: 93478 - protein, 7 aa, synthetic construct
MASKEHE

SEQ ID NO: 93479 - protein, 7 aa, synthetic construct
PNRLMAT

SEQ ID NO: 93480 - protein, 7 aa, synthetic construct
VERTQTL

SEQ ID NO: 93481 - protein, 7 aa, synthetic construct
TSHNYHE

SEQ ID NO: 93482 - protein, 7 aa, synthetic construct
MYGDKGV

SEQ ID NO: 93483 - protein, 7 aa, synthetic construct
SVVKGAA

SEQ ID NO: 93484 - protein, 7 aa, synthetic construct
DNTPAHS

SEQ ID NO: 93485 - protein, 7 aa, synthetic construct
RPVSQQG

SEQ ID NO: 93486 - protein, 7 aa, synthetic construct
NKGVGSA

SEQ ID NO: 93487 - protein, 7 aa, synthetic construct
LSLKTDW

SEQ ID NO: 93488 - protein, 7 aa, synthetic construct
YDFKENF

SEQ ID NO: 93489 - protein, 7 aa, synthetic construct
PYGSTGS

SEQ ID NO: 93490 - protein, 7 aa, synthetic construct
NHYRALD

SEQ ID NO: 93491 - protein, 7 aa, synthetic construct
NPFNNVQ

SEQ ID NO: 93492 - protein, 7 aa, synthetic construct
GNFVSEW

SEQ ID NO: 93493 - protein, 7 aa, synthetic construct
YGTERMK

SEQ ID NO: 93494 - protein, 7 aa, synthetic construct
NVTVSNS

SEQ ID NO: 93495 - protein, 7 aa, synthetic construct
RAEEKFM

SEQ ID NO: 93496 - protein, 7 aa, synthetic construct
EVKFVNT

SEQ ID NO: 93497 - protein, 7 aa, synthetic construct
ITIQTHP

SEQ ID NO: 93498 - protein, 7 aa, synthetic construct
PNVSPNI

SEQ ID NO: 93499 - protein, 7 aa, synthetic construct
GMQGRAS

SEQ ID NO: 93500 - protein, 7 aa, synthetic construct
VMHVLHP

SEQ ID NO: 93501 - protein, 7 aa, synthetic construct
HIIGLPT

SEQ ID NO: 93502 - protein, 7 aa, synthetic construct
MAPKVDF

SEQ ID NO: 93503 - protein, 7 aa, synthetic construct
VTSNKMA

SEQ ID NO: 93504 - protein, 7 aa, synthetic construct
DVHGAFR

SEQ ID NO: 93505 - protein, 7 aa, synthetic construct
KPTNQSP

SEQ ID NO: 93506 - protein, 7 aa, synthetic construct
YVNNPYG

SEQ ID NO: 93507 - protein, 7 aa, synthetic construct
DMKEMQI

SEQ ID NO: 93508 - protein, 7 aa, synthetic construct
KTAKENS

SEQ ID NO: 93509 - protein, 7 aa, synthetic construct
DNKMQVV

SEQ ID NO: 93510 - protein, 7 aa, synthetic construct
TTIQLVK

SEQ ID NO: 93511 - protein, 7 aa, synthetic construct
QQANYPV

SEQ ID NO: 93512 - protein, 7 aa, synthetic construct
IHQGEFT

SEQ ID NO: 93513 - protein, 7 aa, synthetic construct
MSPSKMF

SEQ ID NO: 93514 - protein, 7 aa, synthetic construct
LKPDQGI

SEQ ID NO: 93515 - protein, 7 aa, synthetic construct
SVGHWDA

SEQ ID NO: 93516 - protein, 7 aa, synthetic construct
NTEVVFV

SEQ ID NO: 93517 - protein, 7 aa, synthetic construct
KVTMNDW

SEQ ID NO: 93518 - protein, 7 aa, synthetic construct
RIADNYK

SEQ ID NO: 93519 - protein, 7 aa, synthetic construct
LNNIRFN

SEQ ID NO: 93520 - protein, 7 aa, synthetic construct
QALTKDL

SEQ ID NO: 93521 - protein, 7 aa, synthetic construct
VMPITDK

SEQ ID NO: 93522 - protein, 7 aa, synthetic construct
MVNHKYE

SEQ ID NO: 93523 - protein, 7 aa, synthetic construct
NHTTDRR

SEQ ID NO: 93524 - protein, 7 aa, synthetic construct
AETIIRG

SEQ ID NO: 93525 - protein, 7 aa, synthetic construct
VATYGTK

SEQ ID NO: 93526 - protein, 7 aa, synthetic construct
TRQTGET

SEQ ID NO: 93527 - protein, 7 aa, synthetic construct
VPKSQQS

SEQ ID NO: 93528 - protein, 7 aa, synthetic construct
GMQAREL

SEQ ID NO: 93529 - protein, 7 aa, synthetic construct
DPMLKNK

SEQ ID NO: 93530 - protein, 7 aa, synthetic construct
MRNGHFD

SEQ ID NO: 93531 - protein, 7 aa, synthetic construct
NHMNGQH

SEQ ID NO: 93532 - protein, 7 aa, synthetic construct
SESGWAP

SEQ ID NO: 93533 - protein, 7 aa, synthetic construct
KQLEGMS

SEQ ID NO: 93534 - protein, 7 aa, synthetic construct
TPQNENV

SEQ ID NO: 93535 - protein, 7 aa, synthetic construct
YNRTEIR

SEQ ID NO: 93536 - protein, 7 aa, synthetic construct
KDTQFIT

SEQ ID NO: 93537 - protein, 7 aa, synthetic construct
NSPLPSR

SEQ ID NO: 93538 - protein, 7 aa, synthetic construct
DTKRMTP

SEQ ID NO: 93539 - protein, 7 aa, synthetic construct
LLRDKQI

SEQ ID NO: 93540 - protein, 7 aa, synthetic construct
QNMKYVH

SEQ ID NO: 93541 - protein, 7 aa, synthetic construct
NPPHERE

SEQ ID NO: 93542 - protein, 7 aa, synthetic construct
RSNMMEE

SEQ ID NO: 93543 - protein, 7 aa, synthetic construct
HMRAEST

SEQ ID NO: 93544 - protein, 7 aa, synthetic construct
FPRMDLH

SEQ ID NO: 93545 - protein, 7 aa, synthetic construct
FKVIKYE

SEQ ID NO: 93546 - protein, 7 aa, synthetic construct
ALPDMKW

SEQ ID NO: 93547 - protein, 7 aa, synthetic construct
NWTQVPA

SEQ ID NO: 93548 - protein, 7 aa, synthetic construct
RWEQGNK

SEQ ID NO: 93549 - protein, 7 aa, synthetic construct
NTKVNGE

SEQ ID NO: 93550 - protein, 7 aa, synthetic construct
LIAAEIS

SEQ ID NO: 93551 - protein, 7 aa, synthetic construct
KLHYEDA

SEQ ID NO: 93552 - protein, 7 aa, synthetic construct
TPAEYKQ

SEQ ID NO: 93553 - protein, 7 aa, synthetic construct
TQTRELL

SEQ ID NO: 93554 - protein, 7 aa, synthetic construct
VQQKTQQ

SEQ ID NO: 93555 - protein, 7 aa, synthetic construct
GWSERKE

SEQ ID NO: 93556 - protein, 7 aa, synthetic construct
GTRRFPE

SEQ ID NO: 93557 - protein, 7 aa, synthetic construct
LSGDSKI

SEQ ID NO: 93558 - protein, 7 aa, synthetic construct
SQRNPVW

SEQ ID NO: 93559 - protein, 7 aa, synthetic construct
WNNRTVV

SEQ ID NO: 93560 - protein, 7 aa, synthetic construct
QTLNASA

SEQ ID NO: 93561 - protein, 7 aa, synthetic construct
SLMADPK

SEQ ID NO: 93562 - protein, 7 aa, synthetic construct
MMHGHVV

SEQ ID NO: 93563 - protein, 7 aa, synthetic construct
TMHNLAE

SEQ ID NO: 93564 - protein, 7 aa, synthetic construct
SQMSYTV

SEQ ID NO: 93565 - protein, 7 aa, synthetic construct
WKQNMYN

SEQ ID NO: 93566 - protein, 7 aa, synthetic construct
LKLQREP

SEQ ID NO: 93567 - protein, 7 aa, synthetic construct
GIKASIA

SEQ ID NO: 93568 - protein, 7 aa, synthetic construct
ASVPAHR

SEQ ID NO: 93569 - protein, 7 aa, synthetic construct
FRHSMQP

SEQ ID NO: 93570 - protein, 7 aa, synthetic construct
TMGNYTP

SEQ ID NO: 93571 - protein, 7 aa, synthetic construct
KMTGPPA

SEQ ID NO: 93572 - protein, 7 aa, synthetic construct
PTQSKSF

SEQ ID NO: 93573 - protein, 7 aa, synthetic construct
KLMPSLV

SEQ ID NO: 93574 - protein, 7 aa, synthetic construct
VGVHYIE

SEQ ID NO: 93575 - protein, 7 aa, synthetic construct
SIYPTSN

SEQ ID NO: 93576 - protein, 7 aa, synthetic construct
TGTSDNM

SEQ ID NO: 93577 - protein, 7 aa, synthetic construct
GMRNTNG

SEQ ID NO: 93578 - protein, 7 aa, synthetic construct
KPTNFAQ

SEQ ID NO: 93579 - protein, 7 aa, synthetic construct
VNVERKL

SEQ ID NO: 93580 - protein, 7 aa, synthetic construct
SPPASVM

SEQ ID NO: 93581 - protein, 7 aa, synthetic construct
PDTLRGV

SEQ ID NO: 93582 - protein, 7 aa, synthetic construct
KGNAATM

SEQ ID NO: 93583 - protein, 7 aa, synthetic construct
YRQMMGS

SEQ ID NO: 93584 - protein, 7 aa, synthetic construct
DFLEQNR

SEQ ID NO: 93585 - protein, 7 aa, synthetic construct
TTMHKSE

SEQ ID NO: 93586 - protein, 7 aa, synthetic construct
TRNVSNE

SEQ ID NO: 93587 - protein, 7 aa, synthetic construct
HQGPTPE

SEQ ID NO: 93588 - protein, 7 aa, synthetic construct
ADARELG

SEQ ID NO: 93589 - protein, 7 aa, synthetic construct
QNLIKSP

SEQ ID NO: 93590 - protein, 7 aa, synthetic construct
QMKESYK

SEQ ID NO: 93591 - protein, 7 aa, synthetic construct
FDKHMVV

SEQ ID NO: 93592 - protein, 7 aa, synthetic construct
LTEWRSA

SEQ ID NO: 93593 - protein, 7 aa, synthetic construct
NSPDMKV

SEQ ID NO: 93594 - protein, 7 aa, synthetic construct
NGMGHTI

SEQ ID NO: 93595 - protein, 7 aa, synthetic construct
VAHANKD

SEQ ID NO: 93596 - protein, 7 aa, synthetic construct
HGSESVA

SEQ ID NO: 93597 - protein, 7 aa, synthetic construct
KMPNEGF

SEQ ID NO: 93598 - protein, 7 aa, synthetic construct
VFDSTVG

SEQ ID NO: 93599 - protein, 7 aa, synthetic construct
FEKNAAK

SEQ ID NO: 93600 - protein, 7 aa, synthetic construct
TNGKNSV

SEQ ID NO: 93601 - protein, 7 aa, synthetic construct
VHKVYAM

SEQ ID NO: 93602 - protein, 7 aa, synthetic construct
HYGDMKA

SEQ ID NO: 93603 - protein, 7 aa, synthetic construct
KINQKVI

SEQ ID NO: 93604 - protein, 7 aa, synthetic construct
KKTTQGD

SEQ ID NO: 93605 - protein, 7 aa, synthetic construct
TERPMTH

SEQ ID NO: 93606 - protein, 7 aa, synthetic construct
NQIGHGF

SEQ ID NO: 93607 - protein, 7 aa, synthetic construct
TIDDRKI

SEQ ID NO: 93608 - protein, 7 aa, synthetic construct
TVAFQPE

SEQ ID NO: 93609 - protein, 7 aa, synthetic construct
FVRLDQN

SEQ ID NO: 93610 - protein, 7 aa, synthetic construct
NKSTGTP

SEQ ID NO: 93611 - protein, 7 aa, synthetic construct
RPQNGQP

SEQ ID NO: 93612 - protein, 7 aa, synthetic construct
DEWNPVA

SEQ ID NO: 93613 - protein, 7 aa, synthetic construct
DTQKAYS

SEQ ID NO: 93614 - protein, 7 aa, synthetic construct
DTILLAK

SEQ ID NO: 93615 - protein, 7 aa, synthetic construct
MGKSLIV

SEQ ID NO: 93616 - protein, 7 aa, synthetic construct
FTKTQTI

SEQ ID NO: 93617 - protein, 7 aa, synthetic construct
VKHDAEW

SEQ ID NO: 93618 - protein, 7 aa, synthetic construct
RMDEKTK

SEQ ID NO: 93619 - protein, 7 aa, synthetic construct
PMHSNVK

SEQ ID NO: 93620 - protein, 7 aa, synthetic construct
APGGTAV

SEQ ID NO: 93621 - protein, 7 aa, synthetic construct
LEKRPHQ

SEQ ID NO: 93622 - protein, 7 aa, synthetic construct
HSLQHPM

SEQ ID NO: 93623 - protein, 7 aa, synthetic construct
MHQEVNV

SEQ ID NO: 93624 - protein, 7 aa, synthetic construct
GREVNKI

SEQ ID NO: 93625 - protein, 7 aa, synthetic construct
PHFERNL

SEQ ID NO: 93626 - protein, 7 aa, synthetic construct
TTMSTYL

SEQ ID NO: 93627 - protein, 7 aa, synthetic construct
DRLGQSP

SEQ ID NO: 93628 - protein, 7 aa, synthetic construct
VIREKLS

SEQ ID NO: 93629 - protein, 7 aa, synthetic construct
QIRSDNL

SEQ ID NO: 93630 - protein, 7 aa, synthetic construct
DFREIPA

SEQ ID NO: 93631 - protein, 7 aa, synthetic construct
RQTKENS

SEQ ID NO: 93632 - protein, 7 aa, synthetic construct
TMGDKYY

SEQ ID NO: 93633 - protein, 7 aa, synthetic construct
DNHYENK

SEQ ID NO: 93634 - protein, 7 aa, synthetic construct
EDGKLRK

SEQ ID NO: 93635 - protein, 7 aa, synthetic construct
NDATGLG

SEQ ID NO: 93636 - protein, 7 aa, synthetic construct
GHQNLQK

SEQ ID NO: 93637 - protein, 7 aa, synthetic construct
TYGPSME

SEQ ID NO: 93638 - protein, 7 aa, synthetic construct
ESMQGKT

SEQ ID NO: 93639 - protein, 7 aa, synthetic construct
MIDQGRI

SEQ ID NO: 93640 - protein, 7 aa, synthetic construct
GKSQVGM

SEQ ID NO: 93641 - protein, 7 aa, synthetic construct
NGQLQMR

SEQ ID NO: 93642 - protein, 7 aa, synthetic construct
MGKTQNS

SEQ ID NO: 93643 - protein, 7 aa, synthetic construct
KEQIRES

SEQ ID NO: 93644 - protein, 7 aa, synthetic construct
YDNNGAK

SEQ ID NO: 93645 - protein, 7 aa, synthetic construct
PRPSSNP

SEQ ID NO: 93646 - protein, 7 aa, synthetic construct
SGADVRV

SEQ ID NO: 93647 - protein, 7 aa, synthetic construct
GPVTRQA

SEQ ID NO: 93648 - protein, 7 aa, synthetic construct
TPHGRMF

SEQ ID NO: 93649 - protein, 7 aa, synthetic construct
RRGDGYF

SEQ ID NO: 93650 - protein, 7 aa, synthetic construct
GTFAEPP

SEQ ID NO: 93651 - protein, 7 aa, synthetic construct
WYSKETA

SEQ ID NO: 93652 - protein, 7 aa, synthetic construct
SASEQHF

SEQ ID NO: 93653 - protein, 7 aa, synthetic construct
VKHPTLI

SEQ ID NO: 93654 - protein, 7 aa, synthetic construct
HNVDADS

SEQ ID NO: 93655 - protein, 7 aa, synthetic construct
DNQKYHI

SEQ ID NO: 93656 - protein, 7 aa, synthetic construct
QVNIMKQ

SEQ ID NO: 93657 - protein, 7 aa, synthetic construct
NQVFEKH

SEQ ID NO: 93658 - protein, 7 aa, synthetic construct
LEFAQQH

SEQ ID NO: 93659 - protein, 7 aa, synthetic construct
TFKEYKT

SEQ ID NO: 93660 - protein, 7 aa, synthetic construct
LHQVPMA

SEQ ID NO: 93661 - protein, 7 aa, synthetic construct
MIPTMVQ

SEQ ID NO: 93662 - protein, 7 aa, synthetic construct
CHKFECD

SEQ ID NO: 93663 - protein, 7 aa, synthetic construct
NGKMSDE

SEQ ID NO: 93664 - protein, 7 aa, synthetic construct
VKNSAMA

SEQ ID NO: 93665 - protein, 7 aa, synthetic construct
QYSTLSL

SEQ ID NO: 93666 - protein, 7 aa, synthetic construct
HTAPSLE

SEQ ID NO: 93667 - protein, 7 aa, synthetic construct
LITNHAL

SEQ ID NO: 93668 - protein, 7 aa, synthetic construct
RAENFQD

SEQ ID NO: 93669 - protein, 7 aa, synthetic construct
AFDVQQK

SEQ ID NO: 93670 - protein, 7 aa, synthetic construct
PMNIKPM

SEQ ID NO: 93671 - protein, 7 aa, synthetic construct
LQPLPIR

SEQ ID NO: 93672 - protein, 7 aa, synthetic construct
DVQTKAS

SEQ ID NO: 93673 - protein, 7 aa, synthetic construct
PHLHVQP

SEQ ID NO: 93674 - protein, 7 aa, synthetic construct
KMTIPDE

SEQ ID NO: 93675 - protein, 7 aa, synthetic construct
SGRSMYE

SEQ ID NO: 93676 - protein, 7 aa, synthetic construct
HQHEPSH

SEQ ID NO: 93677 - protein, 7 aa, synthetic construct
VVRQGDW

SEQ ID NO: 93678 - protein, 7 aa, synthetic construct
QGRTKDP

SEQ ID NO: 93679 - protein, 7 aa, synthetic construct
TSPQRMS

SEQ ID NO: 93680 - protein, 7 aa, synthetic construct
PFASVKG

SEQ ID NO: 93681 - protein, 7 aa, synthetic construct
HPEMRVR

SEQ ID NO: 93682 - protein, 7 aa, synthetic construct
LVMPPNS

SEQ ID NO: 93683 - protein, 7 aa, synthetic construct
YRQPSQD

SEQ ID NO: 93684 - protein, 7 aa, synthetic construct
YGQHYPK

SEQ ID NO: 93685 - protein, 7 aa, synthetic construct
HTRVEML

SEQ ID NO: 93686 - protein, 7 aa, synthetic construct
VNDYHND

SEQ ID NO: 93687 - protein, 7 aa, synthetic construct
LRRNQDE

SEQ ID NO: 93688 - protein, 7 aa, synthetic construct
GKAQSSV

SEQ ID NO: 93689 - protein, 7 aa, synthetic construct
HLVEMRA

SEQ ID NO: 93690 - protein, 7 aa, synthetic construct
FINGHHP

SEQ ID NO: 93691 - protein, 7 aa, synthetic construct
SRNSEVK

SEQ ID NO: 93692 - protein, 7 aa, synthetic construct
HFIDKSM

SEQ ID NO: 93693 - protein, 7 aa, synthetic construct
MMAGLDS

SEQ ID NO: 93694 - protein, 7 aa, synthetic construct
VHSDQVA

SEQ ID NO: 93695 - protein, 7 aa, synthetic construct
TAVEKHV

SEQ ID NO: 93696 - protein, 7 aa, synthetic construct
QMNAKSA

SEQ ID NO: 93697 - protein, 7 aa, synthetic construct
GVPTAQL

SEQ ID NO: 93698 - protein, 7 aa, synthetic construct
DAKSNDV

SEQ ID NO: 93699 - protein, 7 aa, synthetic construct
QHAQQNI

SEQ ID NO: 93700 - protein, 7 aa, synthetic construct
RFAPAVT

SEQ ID NO: 93701 - protein, 7 aa, synthetic construct
HTHFAAV

SEQ ID NO: 93702 - protein, 7 aa, synthetic construct
KSGNGSA

SEQ ID NO: 93703 - protein, 7 aa, synthetic construct
DLNHVTS

SEQ ID NO: 93704 - protein, 7 aa, synthetic construct
PSHIQQG

SEQ ID NO: 93705 - protein, 7 aa, synthetic construct
MRPDIMV

SEQ ID NO: 93706 - protein, 7 aa, synthetic construct
KKTADHP

SEQ ID NO: 93707 - protein, 7 aa, synthetic construct
EKDMKYM

SEQ ID NO: 93708 - protein, 7 aa, synthetic construct
LYMGIGE

SEQ ID NO: 93709 - protein, 7 aa, synthetic construct
ANAGSII

SEQ ID NO: 93710 - protein, 7 aa, synthetic construct
HAASTVM

SEQ ID NO: 93711 - protein, 7 aa, synthetic construct
YGGREST

SEQ ID NO: 93712 - protein, 7 aa, synthetic construct
SQVKISI

SEQ ID NO: 93713 - protein, 7 aa, synthetic construct
NGGLNGN

SEQ ID NO: 93714 - protein, 7 aa, synthetic construct
KTIDSME

SEQ ID NO: 93715 - protein, 7 aa, synthetic construct
TQVAHIA

SEQ ID NO: 93716 - protein, 7 aa, synthetic construct
AGERMDK

SEQ ID NO: 93717 - protein, 7 aa, synthetic construct
AWSPKEY

SEQ ID NO: 93718 - protein, 7 aa, synthetic construct
SDAMTSA

SEQ ID NO: 93719 - protein, 7 aa, synthetic construct
WNGMNKM

SEQ ID NO: 93720 - protein, 7 aa, synthetic construct
NLGKIEP

SEQ ID NO: 93721 - protein, 7 aa, synthetic construct
PLNTPGI

SEQ ID NO: 93722 - protein, 7 aa, synthetic construct
QNIRISM

SEQ ID NO: 93723 - protein, 7 aa, synthetic construct
MKDTEYA

SEQ ID NO: 93724 - protein, 7 aa, synthetic construct
SMDGTPY

SEQ ID NO: 93725 - protein, 7 aa, synthetic construct
GMMPHKN

SEQ ID NO: 93726 - protein, 7 aa, synthetic construct
NHNAGVD

SEQ ID NO: 93727 - protein, 7 aa, synthetic construct
QRGNNQI

SEQ ID NO: 93728 - protein, 7 aa, synthetic construct
LMKDTFS

SEQ ID NO: 93729 - protein, 7 aa, synthetic construct
QEQLRHM

SEQ ID NO: 93730 - protein, 7 aa, synthetic construct
DKNAALP

SEQ ID NO: 93731 - protein, 7 aa, synthetic construct
WPINANG

SEQ ID NO: 93732 - protein, 7 aa, synthetic construct
HTHVNMK

SEQ ID NO: 93733 - protein, 7 aa, synthetic construct
DKMSPMH

SEQ ID NO: 93734 - protein, 7 aa, synthetic construct
NYANAKP

SEQ ID NO: 93735 - protein, 7 aa, synthetic construct
KKEARTD

SEQ ID NO: 93736 - protein, 7 aa, synthetic construct
EFVEKAG

SEQ ID NO: 93737 - protein, 7 aa, synthetic construct
DYEHVRK

SEQ ID NO: 93738 - protein, 7 aa, synthetic construct
ENHYKVT

SEQ ID NO: 93739 - protein, 7 aa, synthetic construct
GMRDAPH

SEQ ID NO: 93740 - protein, 7 aa, synthetic construct
GARYGEK

SEQ ID NO: 93741 - protein, 7 aa, synthetic construct
SEQYRTL

SEQ ID NO: 93742 - protein, 7 aa, synthetic construct
PRSGGAD

SEQ ID NO: 93743 - protein, 7 aa, synthetic construct
TRAMMMD

SEQ ID NO: 93744 - protein, 7 aa, synthetic construct
KNNQGMN

SEQ ID NO: 93745 - protein, 7 aa, synthetic construct
RREEVVL

SEQ ID NO: 93746 - protein, 7 aa, synthetic construct
LEVNRGA

SEQ ID NO: 93747 - protein, 7 aa, synthetic construct
SLKDQTG

SEQ ID NO: 93748 - protein, 7 aa, synthetic construct
KGIQDRY

SEQ ID NO: 93749 - protein, 7 aa, synthetic construct
VKIQPLD

SEQ ID NO: 93750 - protein, 7 aa, synthetic construct
DKHNNLA

SEQ ID NO: 93751 - protein, 7 aa, synthetic construct
RDFKFEP

SEQ ID NO: 93752 - protein, 7 aa, synthetic construct
WNKMHFD

SEQ ID NO: 93753 - protein, 7 aa, synthetic construct
TSMRLTM

SEQ ID NO: 93754 - protein, 7 aa, synthetic construct
KAYQAPE

SEQ ID NO: 93755 - protein, 7 aa, synthetic construct
DNQKRHI

SEQ ID NO: 93756 - protein, 7 aa, synthetic construct
DANKGQM

SEQ ID NO: 93757 - protein, 7 aa, synthetic construct
KSTNGTA

SEQ ID NO: 93758 - protein, 7 aa, synthetic construct
MEPWHKG

SEQ ID NO: 93759 - protein, 7 aa, synthetic construct
DFVKRMG

SEQ ID NO: 93760 - protein, 7 aa, synthetic construct
QMFKGDK

SEQ ID NO: 93761 - protein, 7 aa, synthetic construct
ILEVKRP

SEQ ID NO: 93762 - protein, 7 aa, synthetic construct
YTNINIA

SEQ ID NO: 93763 - protein, 7 aa, synthetic construct
TGEWMAA

SEQ ID NO: 93764 - protein, 7 aa, synthetic construct
ADNMGRM

SEQ ID NO: 93765 - protein, 7 aa, synthetic construct
GKAMGAD

SEQ ID NO: 93766 - protein, 7 aa, synthetic construct
MVPIIKG

SEQ ID NO: 93767 - protein, 7 aa, synthetic construct
KMTHHLD

SEQ ID NO: 93768 - protein, 7 aa, synthetic construct
VGEFQHK

SEQ ID NO: 93769 - protein, 7 aa, synthetic construct
LSQREEH

SEQ ID NO: 93770 - protein, 7 aa, synthetic construct
GTYAISH

SEQ ID NO: 93771 - protein, 7 aa, synthetic construct
EGSLVIR

SEQ ID NO: 93772 - protein, 7 aa, synthetic construct
PVAPGSS

SEQ ID NO: 93773 - protein, 7 aa, synthetic construct
NTTNEKV

SEQ ID NO: 93774 - protein, 7 aa, synthetic construct
DKKPTNG

SEQ ID NO: 93775 - protein, 7 aa, synthetic construct
GELKGYR

SEQ ID NO: 93776 - protein, 7 aa, synthetic construct
TLLLHGP

SEQ ID NO: 93777 - protein, 7 aa, synthetic construct
AKMARAE

SEQ ID NO: 93778 - protein, 7 aa, synthetic construct
ARGDEPI

SEQ ID NO: 93779 - protein, 7 aa, synthetic construct
AHSQATG

SEQ ID NO: 93780 - protein, 7 aa, synthetic construct
MWDQVHE

SEQ ID NO: 93781 - protein, 7 aa, synthetic construct
VPHQGHD

SEQ ID NO: 93782 - protein, 7 aa, synthetic construct
VKKVSYD

SEQ ID NO: 93783 - protein, 7 aa, synthetic construct
AQNKQQF

SEQ ID NO: 93784 - protein, 7 aa, synthetic construct
ISSSSQW

SEQ ID NO: 93785 - protein, 7 aa, synthetic construct
GMKRIEG

SEQ ID NO: 93786 - protein, 7 aa, synthetic construct
MSSSIVM

SEQ ID NO: 93787 - protein, 7 aa, synthetic construct
SLSYGIT

SEQ ID NO: 93788 - protein, 7 aa, synthetic construct
WNQGTHL

SEQ ID NO: 93789 - protein, 7 aa, synthetic construct
ATKIESA

SEQ ID NO: 93790 - protein, 7 aa, synthetic construct
TSDRSVV

SEQ ID NO: 93791 - protein, 7 aa, synthetic construct
TRSQGAG

SEQ ID NO: 93792 - protein, 7 aa, synthetic construct
GAGPYIM

SEQ ID NO: 93793 - protein, 7 aa, synthetic construct
DKVYLHK

SEQ ID NO: 93794 - protein, 7 aa, synthetic construct
LTASHYG

SEQ ID NO: 93795 - protein, 7 aa, synthetic construct
AGVSKQY

SEQ ID NO: 93796 - protein, 7 aa, synthetic construct
PQPTKTA

SEQ ID NO: 93797 - protein, 7 aa, synthetic construct
KMIHAED

SEQ ID NO: 93798 - protein, 7 aa, synthetic construct
MEPFVLA

SEQ ID NO: 93799 - protein, 7 aa, synthetic construct
GSHPIAT

SEQ ID NO: 93800 - protein, 7 aa, synthetic construct
HSLPSVN

SEQ ID NO: 93801 - protein, 7 aa, synthetic construct
PNQPNYA

SEQ ID NO: 93802 - protein, 7 aa, synthetic construct
ETDYKRP

SEQ ID NO: 93803 - protein, 7 aa, synthetic construct
FQTDAIK

SEQ ID NO: 93804 - protein, 7 aa, synthetic construct
YQHVTQR

SEQ ID NO: 93805 - protein, 7 aa, synthetic construct
RHAVLPN

SEQ ID NO: 93806 - protein, 7 aa, synthetic construct
EKPIAMS

SEQ ID NO: 93807 - protein, 7 aa, synthetic construct
GSLPRNM

SEQ ID NO: 93808 - protein, 7 aa, synthetic construct
AKSRPEL

SEQ ID NO: 93809 - protein, 7 aa, synthetic construct
TPSYPKL

SEQ ID NO: 93810 - protein, 7 aa, synthetic construct
DNQLKMF

SEQ ID NO: 93811 - protein, 7 aa, synthetic construct
LIIGGPF

SEQ ID NO: 93812 - protein, 7 aa, synthetic construct
VKGDHSG

SEQ ID NO: 93813 - protein, 7 aa, synthetic construct
WKSHQFA

SEQ ID NO: 93814 - protein, 7 aa, synthetic construct
GYQLIKA

SEQ ID NO: 93815 - protein, 7 aa, synthetic construct
HAQPIGT

SEQ ID NO: 93816 - protein, 7 aa, synthetic construct
HQPHHGP

SEQ ID NO: 93817 - protein, 7 aa, synthetic construct
IFQTGIH

SEQ ID NO: 93818 - protein, 7 aa, synthetic construct
SARAEQP

SEQ ID NO: 93819 - protein, 7 aa, synthetic construct
TYQQEHG

SEQ ID NO: 93820 - protein, 7 aa, synthetic construct
PLHITKN

SEQ ID NO: 93821 - protein, 7 aa, synthetic construct
KSNNTAF

SEQ ID NO: 93822 - protein, 7 aa, synthetic construct
MNDGART

SEQ ID NO: 93823 - protein, 7 aa, synthetic construct
SIAATQK

SEQ ID NO: 93824 - protein, 7 aa, synthetic construct
SGMIGIE

SEQ ID NO: 93825 - protein, 7 aa, synthetic construct
NSAVRSF

SEQ ID NO: 93826 - protein, 7 aa, synthetic construct
KKDPSSN

SEQ ID NO: 93827 - protein, 7 aa, synthetic construct
MHREVHS

SEQ ID NO: 93828 - protein, 7 aa, synthetic construct
IQLEPDK

SEQ ID NO: 93829 - protein, 7 aa, synthetic construct
ITNITKY

SEQ ID NO: 93830 - protein, 7 aa, synthetic construct
QDKHAFV

SEQ ID NO: 93831 - protein, 7 aa, synthetic construct
QLASDAH

SEQ ID NO: 93832 - protein, 7 aa, synthetic construct
VHLGLGA

SEQ ID NO: 93833 - protein, 7 aa, synthetic construct
VVGGESR

SEQ ID NO: 93834 - protein, 7 aa, synthetic construct
SHGYVVT

SEQ ID NO: 93835 - protein, 7 aa, synthetic construct
VGHVPGV

SEQ ID NO: 93836 - protein, 7 aa, synthetic construct
AERRLMA

SEQ ID NO: 93837 - protein, 7 aa, synthetic construct
EKAQVAA

SEQ ID NO: 93838 - protein, 7 aa, synthetic construct
MSIGQHF

SEQ ID NO: 93839 - protein, 7 aa, synthetic construct
MRDARDS

SEQ ID NO: 93840 - protein, 7 aa, synthetic construct
KPDIENV

SEQ ID NO: 93841 - protein, 7 aa, synthetic construct
IHSGTNQ

SEQ ID NO: 93842 - protein, 7 aa, synthetic construct
LPPMSQH

SEQ ID NO: 93843 - protein, 7 aa, synthetic construct
VQGQHQD

SEQ ID NO: 93844 - protein, 7 aa, synthetic construct
ENKDKEA

SEQ ID NO: 93845 - protein, 7 aa, synthetic construct
NRDGMVH

SEQ ID NO: 93846 - protein, 7 aa, synthetic construct
GGSGPLL

SEQ ID NO: 93847 - protein, 7 aa, synthetic construct
HAPRYIS

SEQ ID NO: 93848 - protein, 7 aa, synthetic construct
VTAATDR

SEQ ID NO: 93849 - protein, 7 aa, synthetic construct
NNMQIRA

SEQ ID NO: 93850 - protein, 7 aa, synthetic construct
LQLKGNE

SEQ ID NO: 93851 - protein, 7 aa, synthetic construct
IHPEPDQ

SEQ ID NO: 93852 - protein, 7 aa, synthetic construct
MVSIKSS

SEQ ID NO: 93853 - protein, 7 aa, synthetic construct
AVVHLNQ

SEQ ID NO: 93854 - protein, 7 aa, synthetic construct
IAHELSP

SEQ ID NO: 93855 - protein, 7 aa, synthetic construct
SKASYNA

SEQ ID NO: 93856 - protein, 7 aa, synthetic construct
STVAMNR

SEQ ID NO: 93857 - protein, 7 aa, synthetic construct
SQNKTPQ

SEQ ID NO: 93858 - protein, 7 aa, synthetic construct
DDGKIAH

SEQ ID NO: 93859 - protein, 7 aa, synthetic construct
QINLVKQ

SEQ ID NO: 93860 - protein, 7 aa, synthetic construct
ANQSEGA

SEQ ID NO: 93861 - protein, 7 aa, synthetic construct
ATPAMTN

SEQ ID NO: 93862 - protein, 7 aa, synthetic construct
QTAPVAR

SEQ ID NO: 93863 - protein, 7 aa, synthetic construct
DQKGMMQ

SEQ ID NO: 93864 - protein, 7 aa, synthetic construct
GMLKDAF

SEQ ID NO: 93865 - protein, 7 aa, synthetic construct
SREVDAH

SEQ ID NO: 93866 - protein, 7 aa, synthetic construct
KNNPGGA

SEQ ID NO: 93867 - protein, 7 aa, synthetic construct
NVHNMIH

SEQ ID NO: 93868 - protein, 7 aa, synthetic construct
QMRPVIA

SEQ ID NO: 93869 - protein, 7 aa, synthetic construct
WSTAYKV

SEQ ID NO: 93870 - protein, 7 aa, synthetic construct
ALSVNAV

SEQ ID NO: 93871 - protein, 7 aa, synthetic construct
AHSSVVA

SEQ ID NO: 93872 - protein, 7 aa, synthetic construct
SSSIEAG

SEQ ID NO: 93873 - protein, 7 aa, synthetic construct
GIHMAHQ

SEQ ID NO: 93874 - protein, 7 aa, synthetic construct
LSNGRSI

SEQ ID NO: 93875 - protein, 7 aa, synthetic construct
LNRKTDD

SEQ ID NO: 93876 - protein, 7 aa, synthetic construct
QTNQTYH

SEQ ID NO: 93877 - protein, 7 aa, synthetic construct
VSRNIFE

SEQ ID NO: 93878 - protein, 7 aa, synthetic construct
QEEKVRA

SEQ ID NO: 93879 - protein, 7 aa, synthetic construct
VGSKNMW

SEQ ID NO: 93880 - protein, 7 aa, synthetic construct
MDVMRPK

SEQ ID NO: 93881 - protein, 7 aa, synthetic construct
WRGVRES

SEQ ID NO: 93882 - protein, 7 aa, synthetic construct
LYRNQER

SEQ ID NO: 93883 - protein, 7 aa, synthetic construct
RKDAEFR

SEQ ID NO: 93884 - protein, 7 aa, synthetic construct
YTKTIFA

SEQ ID NO: 93885 - protein, 7 aa, synthetic construct
RGEINVD

SEQ ID NO: 93886 - protein, 7 aa, synthetic construct
ITQYTTI

SEQ ID NO: 93887 - protein, 7 aa, synthetic construct
ANTTQNI

SEQ ID NO: 93888 - protein, 7 aa, synthetic construct
GFISAGH

SEQ ID NO: 93889 - protein, 7 aa, synthetic construct
MVKDYHD

SEQ ID NO: 93890 - protein, 7 aa, synthetic construct
SRSMNAS

SEQ ID NO: 93891 - protein, 7 aa, synthetic construct
HIVGMPL

SEQ ID NO: 93892 - protein, 7 aa, synthetic construct
TMNGTIK

SEQ ID NO: 93893 - protein, 7 aa, synthetic construct
DAGPIAR

SEQ ID NO: 93894 - protein, 7 aa, synthetic construct
NANYPNL

SEQ ID NO: 93895 - protein, 7 aa, synthetic construct
KHQNNPN

SEQ ID NO: 93896 - protein, 7 aa, synthetic construct
AKNAQNG

SEQ ID NO: 93897 - protein, 7 aa, synthetic construct
INESRHQ

SEQ ID NO: 93898 - protein, 7 aa, synthetic construct
MNQSYLM

SEQ ID NO: 93899 - protein, 7 aa, synthetic construct
NLEMRAQ

SEQ ID NO: 93900 - protein, 7 aa, synthetic construct
EGRSNQM

SEQ ID NO: 93901 - protein, 7 aa, synthetic construct
TKVGGMS

SEQ ID NO: 93902 - protein, 7 aa, synthetic construct
DLRTEKA

SEQ ID NO: 93903 - protein, 7 aa, synthetic construct
LHETGTV

SEQ ID NO: 93904 - protein, 7 aa, synthetic construct
GRANMMA

SEQ ID NO: 93905 - protein, 7 aa, synthetic construct
QFTSTEG

SEQ ID NO: 93906 - protein, 7 aa, synthetic construct
ETMMQAK

SEQ ID NO: 93907 - protein, 7 aa, synthetic construct
TSSIWQG

SEQ ID NO: 93908 - protein, 7 aa, synthetic construct
PLVGPQT

SEQ ID NO: 93909 - protein, 7 aa, synthetic construct
ESQKAFN

SEQ ID NO: 93910 - protein, 7 aa, synthetic construct
IREKDYD

SEQ ID NO: 93911 - protein, 7 aa, synthetic construct
QMHENRM

SEQ ID NO: 93912 - protein, 7 aa, synthetic construct
SPALQDK

SEQ ID NO: 93913 - protein, 7 aa, synthetic construct
TYHQAQM

SEQ ID NO: 93914 - protein, 7 aa, synthetic construct
NTAISDR

SEQ ID NO: 93915 - protein, 7 aa, synthetic construct
PKIQAHI

SEQ ID NO: 93916 - protein, 7 aa, synthetic construct
AHPGVRF

SEQ ID NO: 93917 - protein, 7 aa, synthetic construct
TREQKPG

SEQ ID NO: 93918 - protein, 7 aa, synthetic construct
TISGYRS

SEQ ID NO: 93919 - protein, 7 aa, synthetic construct
DAKDRRI

SEQ ID NO: 93920 - protein, 7 aa, synthetic construct
GKQANGE

SEQ ID NO: 93921 - protein, 7 aa, synthetic construct
SMNHLHD

SEQ ID NO: 93922 - protein, 7 aa, synthetic construct
DTPNTRI

SEQ ID NO: 93923 - protein, 7 aa, synthetic construct
VKQALER

SEQ ID NO: 93924 - protein, 7 aa, synthetic construct
GVQRGSP

SEQ ID NO: 93925 - protein, 7 aa, synthetic construct
NLQNNHW

SEQ ID NO: 93926 - protein, 7 aa, synthetic construct
NQTPNSD

SEQ ID NO: 93927 - protein, 7 aa, synthetic construct
REGVANK

SEQ ID NO: 93928 - protein, 7 aa, synthetic construct
QRNQGQS

SEQ ID NO: 93929 - protein, 7 aa, synthetic construct
HLKNFEQ

SEQ ID NO: 93930 - protein, 7 aa, synthetic construct
HPYSGQN

SEQ ID NO: 93931 - protein, 7 aa, synthetic construct
IRITDDN

SEQ ID NO: 93932 - protein, 7 aa, synthetic construct
FSDVATI

SEQ ID NO: 93933 - protein, 7 aa, synthetic construct
FAKYEMV

SEQ ID NO: 93934 - protein, 7 aa, synthetic construct
TQRQEEA

SEQ ID NO: 93935 - protein, 7 aa, synthetic construct
IEVQSKG

SEQ ID NO: 93936 - protein, 7 aa, synthetic construct
SNSNEYP

SEQ ID NO: 93937 - protein, 7 aa, synthetic construct
SERRFND

SEQ ID NO: 93938 - protein, 7 aa, synthetic construct
HMPKRDL

SEQ ID NO: 93939 - protein, 7 aa, synthetic construct
SMRPMDY

SEQ ID NO: 93940 - protein, 7 aa, synthetic construct
ANMYKTE

SEQ ID NO: 93941 - protein, 7 aa, synthetic construct
RNTNEVV

SEQ ID NO: 93942 - protein, 7 aa, synthetic construct
TSPQMTY

SEQ ID NO: 93943 - protein, 7 aa, synthetic construct
FMPRLQA

SEQ ID NO: 93944 - protein, 7 aa, synthetic construct
KIEAINP

SEQ ID NO: 93945 - protein, 7 aa, synthetic construct
FGHETQT

SEQ ID NO: 93946 - protein, 7 aa, synthetic construct
AYPAHSS

SEQ ID NO: 93947 - protein, 7 aa, synthetic construct
KQTQNNQ

SEQ ID NO: 93948 - protein, 7 aa, synthetic construct
TKVVSTN

SEQ ID NO: 93949 - protein, 7 aa, synthetic construct
QQMARAP

SEQ ID NO: 93950 - protein, 7 aa, synthetic construct
HWDNGEM

SEQ ID NO: 93951 - protein, 7 aa, synthetic construct
HYPSSNH

SEQ ID NO: 93952 - protein, 7 aa, synthetic construct
TFEAAKR

SEQ ID NO: 93953 - protein, 7 aa, synthetic construct
DPHKKPM

SEQ ID NO: 93954 - protein, 7 aa, synthetic construct
DGPNGKT

SEQ ID NO: 93955 - protein, 7 aa, synthetic construct
SKKDGNN

SEQ ID NO: 93956 - protein, 7 aa, synthetic construct
VVGNHSW

SEQ ID NO: 93957 - protein, 7 aa, synthetic construct
IIQQNSI

SEQ ID NO: 93958 - protein, 7 aa, synthetic construct
NKNSAQP

SEQ ID NO: 93959 - protein, 7 aa, synthetic construct
DFIENTK

SEQ ID NO: 93960 - protein, 7 aa, synthetic construct
KFAQSTI

SEQ ID NO: 93961 - protein, 7 aa, synthetic construct
LQPHIHM

SEQ ID NO: 93962 - protein, 7 aa, synthetic construct
FENKSVP

SEQ ID NO: 93963 - protein, 7 aa, synthetic construct
KNQMAIV

SEQ ID NO: 93964 - protein, 7 aa, synthetic construct
KMHQQLA

SEQ ID NO: 93965 - protein, 7 aa, synthetic construct
PSRHTEA

SEQ ID NO: 93966 - protein, 7 aa, synthetic construct
KDHIAPD

SEQ ID NO: 93967 - protein, 7 aa, synthetic construct
ISGNSVS

SEQ ID NO: 93968 - protein, 7 aa, synthetic construct
ISHQHDL

SEQ ID NO: 93969 - protein, 7 aa, synthetic construct
YPDRHDA

SEQ ID NO: 93970 - protein, 7 aa, synthetic construct
MGKQNKD

SEQ ID NO: 93971 - protein, 7 aa, synthetic construct
KNNTVAG

SEQ ID NO: 93972 - protein, 7 aa, synthetic construct
PLNKLDK

SEQ ID NO: 93973 - protein, 7 aa, synthetic construct
PANFNEK

SEQ ID NO: 93974 - protein, 7 aa, synthetic construct
VGPNIIT

SEQ ID NO: 93975 - protein, 7 aa, synthetic construct
MSEHERH

SEQ ID NO: 93976 - protein, 7 aa, synthetic construct
KDLNYTI

SEQ ID NO: 93977 - protein, 7 aa, synthetic construct
QMDLGKV

SEQ ID NO: 93978 - protein, 7 aa, synthetic construct
DSFNGRI

SEQ ID NO: 93979 - protein, 7 aa, synthetic construct
NKWGVVS

SEQ ID NO: 93980 - protein, 7 aa, synthetic construct
NWNNERK

SEQ ID NO: 93981 - protein, 7 aa, synthetic construct
KPSQGAA

SEQ ID NO: 93982 - protein, 7 aa, synthetic construct
WPTTRDQ

SEQ ID NO: 93983 - protein, 7 aa, synthetic construct
IYTDKPH

SEQ ID NO: 93984 - protein, 7 aa, synthetic construct
GAPNSPW

SEQ ID NO: 93985 - protein, 7 aa, synthetic construct
DEKRYAA

SEQ ID NO: 93986 - protein, 7 aa, synthetic construct
WDTNKRG

SEQ ID NO: 93987 - protein, 7 aa, synthetic construct
DYKEAIR

SEQ ID NO: 93988 - protein, 7 aa, synthetic construct
ETSYHQR

SEQ ID NO: 93989 - protein, 7 aa, synthetic construct
VPFGNMD

SEQ ID NO: 93990 - protein, 7 aa, synthetic construct
WQPDMAN

SEQ ID NO: 93991 - protein, 7 aa, synthetic construct
VISSGEE

SEQ ID NO: 93992 - protein, 7 aa, synthetic construct
GHFTTIG

SEQ ID NO: 93993 - protein, 7 aa, synthetic construct
IVADQRS

SEQ ID NO: 93994 - protein, 7 aa, synthetic construct
WVRNLDG

SEQ ID NO: 93995 - protein, 7 aa, synthetic construct
PATPDFF

SEQ ID NO: 93996 - protein, 7 aa, synthetic construct
RPAPGST

SEQ ID NO: 93997 - protein, 7 aa, synthetic construct
HNFHLDD

SEQ ID NO: 93998 - protein, 7 aa, synthetic construct
KNGPTIA

SEQ ID NO: 93999 - protein, 7 aa, synthetic construct
MQTAMAR

SEQ ID NO: 94000 - protein, 7 aa, synthetic construct
LKGNYPV

SEQ ID NO: 94001 - protein, 7 aa, synthetic construct
KFQDGII

SEQ ID NO: 94002 - protein, 7 aa, synthetic construct
YPGTNDI

SEQ ID NO: 94003 - protein, 7 aa, synthetic construct
PQVVASA

SEQ ID NO: 94004 - protein, 7 aa, synthetic construct
RHKIEVD

SEQ ID NO: 94005 - protein, 7 aa, synthetic construct
IQSQPAQ

SEQ ID NO: 94006 - protein, 7 aa, synthetic construct
DTNGPKA

SEQ ID NO: 94007 - protein, 7 aa, synthetic construct
QEYDHGR

SEQ ID NO: 94008 - protein, 7 aa, synthetic construct
VYDKRHE

SEQ ID NO: 94009 - protein, 7 aa, synthetic construct
GLTGKQN

SEQ ID NO: 94010 - protein, 7 aa, synthetic construct
AENNYNR

SEQ ID NO: 94011 - protein, 7 aa, synthetic construct
DQKWVAK

SEQ ID NO: 94012 - protein, 7 aa, synthetic construct
NAHAPNK

SEQ ID NO: 94013 - protein, 7 aa, synthetic construct
FMETDKS

SEQ ID NO: 94014 - protein, 7 aa, synthetic construct
MTAAAIG

SEQ ID NO: 94015 - protein, 7 aa, synthetic construct
SDMPASK

SEQ ID NO: 94016 - protein, 7 aa, synthetic construct
VKEFAEK

SEQ ID NO: 94017 - protein, 7 aa, synthetic construct
INTGPGN

SEQ ID NO: 94018 - protein, 7 aa, synthetic construct
AVKGELG

SEQ ID NO: 94019 - protein, 7 aa, synthetic construct
QTAQYNA

SEQ ID NO: 94020 - protein, 7 aa, synthetic construct
GQNREKI

SEQ ID NO: 94021 - protein, 7 aa, synthetic construct
SRNPGMV

SEQ ID NO: 94022 - protein, 7 aa, synthetic construct
TIIPSVA

SEQ ID NO: 94023 - protein, 7 aa, synthetic construct
LVSLSEM

SEQ ID NO: 94024 - protein, 7 aa, synthetic construct
IRQNQTW

SEQ ID NO: 94025 - protein, 7 aa, synthetic construct
WMVPGSD

SEQ ID NO: 94026 - protein, 7 aa, synthetic construct
PYGKWES

SEQ ID NO: 94027 - protein, 7 aa, synthetic construct
NTGNFMV

SEQ ID NO: 94028 - protein, 7 aa, synthetic construct
NMHPRTT

SEQ ID NO: 94029 - protein, 7 aa, synthetic construct
RPNGEYP

SEQ ID NO: 94030 - protein, 7 aa, synthetic construct
YHAGTTL

SEQ ID NO: 94031 - protein, 7 aa, synthetic construct
FQQQKKE

SEQ ID NO: 94032 - protein, 7 aa, synthetic construct
LENVQNK

SEQ ID NO: 94033 - protein, 7 aa, synthetic construct
YVQGKPA

SEQ ID NO: 94034 - protein, 7 aa, synthetic construct
MKPNPTG

SEQ ID NO: 94035 - protein, 7 aa, synthetic construct
KGLMVGI

SEQ ID NO: 94036 - protein, 7 aa, synthetic construct
INRPHMN

SEQ ID NO: 94037 - protein, 7 aa, synthetic construct
GPLQYHG

SEQ ID NO: 94038 - protein, 7 aa, synthetic construct
RLLTNNE

SEQ ID NO: 94039 - protein, 7 aa, synthetic construct
DFHHNTS

SEQ ID NO: 94040 - protein, 7 aa, synthetic construct
SIHIGPP

SEQ ID NO: 94041 - protein, 7 aa, synthetic construct
LTKENMH

SEQ ID NO: 94042 - protein, 7 aa, synthetic construct
NGLHIPE

SEQ ID NO: 94043 - protein, 7 aa, synthetic construct
MIDRHAA

SEQ ID NO: 94044 - protein, 7 aa, synthetic construct
GATTAII

SEQ ID NO: 94045 - protein, 7 aa, synthetic construct
IAPGYEV

SEQ ID NO: 94046 - protein, 7 aa, synthetic construct
YGKAHVF

SEQ ID NO: 94047 - protein, 7 aa, synthetic construct
KNYSNTP

SEQ ID NO: 94048 - protein, 7 aa, synthetic construct
NGKEMPQ

SEQ ID NO: 94049 - protein, 7 aa, synthetic construct
KDGYVVP

SEQ ID NO: 94050 - protein, 7 aa, synthetic construct
RTPPEKD

SEQ ID NO: 94051 - protein, 7 aa, synthetic construct
HRTQPMV

SEQ ID NO: 94052 - protein, 7 aa, synthetic construct
KSDQHEH

SEQ ID NO: 94053 - protein, 7 aa, synthetic construct
LADLSRE

SEQ ID NO: 94054 - protein, 7 aa, synthetic construct
THIGPQK

SEQ ID NO: 94055 - protein, 7 aa, synthetic construct
EIRSSDR

SEQ ID NO: 94056 - protein, 7 aa, synthetic construct
PAHSIEG

SEQ ID NO: 94057 - protein, 7 aa, synthetic construct
QGGLNKE

SEQ ID NO: 94058 - protein, 7 aa, synthetic construct
HRPGYFD

SEQ ID NO: 94059 - protein, 7 aa, synthetic construct
MKPTSMA

SEQ ID NO: 94060 - protein, 7 aa, synthetic construct
FSDTRIK

SEQ ID NO: 94061 - protein, 7 aa, synthetic construct
NEHRDKM

SEQ ID NO: 94062 - protein, 7 aa, synthetic construct
LITREAT

SEQ ID NO: 94063 - protein, 7 aa, synthetic construct
HEGYRIP

SEQ ID NO: 94064 - protein, 7 aa, synthetic construct
MDFKAYE

SEQ ID NO: 94065 - protein, 7 aa, synthetic construct
SRVNTDL

SEQ ID NO: 94066 - protein, 7 aa, synthetic construct
LDQDLKN

SEQ ID NO: 94067 - protein, 7 aa, synthetic construct
GNVRHED

SEQ ID NO: 94068 - protein, 7 aa, synthetic construct
GPIVNPQ

SEQ ID NO: 94069 - protein, 7 aa, synthetic construct
MDRFIMA

SEQ ID NO: 94070 - protein, 7 aa, synthetic construct
SKERLEP

SEQ ID NO: 94071 - protein, 7 aa, synthetic construct
VKKMSDS

SEQ ID NO: 94072 - protein, 7 aa, synthetic construct
INGNGEV

SEQ ID NO: 94073 - protein, 7 aa, synthetic construct
FNKAAIL

SEQ ID NO: 94074 - protein, 7 aa, synthetic construct
WTQNQGN

SEQ ID NO: 94075 - protein, 7 aa, synthetic construct
GMIAPNN

SEQ ID NO: 94076 - protein, 7 aa, synthetic construct
RIDASQT

SEQ ID NO: 94077 - protein, 7 aa, synthetic construct
KQTVAPA

SEQ ID NO: 94078 - protein, 7 aa, synthetic construct
DVWTPKT

SEQ ID NO: 94079 - protein, 7 aa, synthetic construct
KKEGSYV

SEQ ID NO: 94080 - protein, 7 aa, synthetic construct
REVGQDQ

SEQ ID NO: 94081 - protein, 7 aa, synthetic construct
TVSQAPV

SEQ ID NO: 94082 - protein, 7 aa, synthetic construct
GTSTYQI

SEQ ID NO: 94083 - protein, 7 aa, synthetic construct
WASVGEP

SEQ ID NO: 94084 - protein, 7 aa, synthetic construct
KQADGPG

SEQ ID NO: 94085 - protein, 7 aa, synthetic construct
RKETAAL

SEQ ID NO: 94086 - protein, 7 aa, synthetic construct
GGHVEPK

SEQ ID NO: 94087 - protein, 7 aa, synthetic construct
MREEPTK

SEQ ID NO: 94088 - protein, 7 aa, synthetic construct
MTKVNKD

SEQ ID NO: 94089 - protein, 7 aa, synthetic construct
LITVNSI

SEQ ID NO: 94090 - protein, 7 aa, synthetic construct
LHIHGGP

SEQ ID NO: 94091 - protein, 7 aa, synthetic construct
REWTTGN

SEQ ID NO: 94092 - protein, 7 aa, synthetic construct
RSLQNTL

SEQ ID NO: 94093 - protein, 7 aa, synthetic construct
GGPRANH

SEQ ID NO: 94094 - protein, 7 aa, synthetic construct
DQNMTMG

SEQ ID NO: 94095 - protein, 7 aa, synthetic construct
LHGHQYG

SEQ ID NO: 94096 - protein, 7 aa, synthetic construct
FKMEQPA

SEQ ID NO: 94097 - protein, 7 aa, synthetic construct
HAAIQKV

SEQ ID NO: 94098 - protein, 7 aa, synthetic construct
SSYTANS

SEQ ID NO: 94099 - protein, 7 aa, synthetic construct
MMVAHGP

SEQ ID NO: 94100 - protein, 7 aa, synthetic construct
ERTQLEM

SEQ ID NO: 94101 - protein, 7 aa, synthetic construct
EFSSKNA

SEQ ID NO: 94102 - protein, 7 aa, synthetic construct
WQKELVT

SEQ ID NO: 94103 - protein, 7 aa, synthetic construct
KSGNGSY

SEQ ID NO: 94104 - protein, 7 aa, synthetic construct
DQKIRQH

SEQ ID NO: 94105 - protein, 7 aa, synthetic construct
SIRLESA

SEQ ID NO: 94106 - protein, 7 aa, synthetic construct
VAQMMSD

SEQ ID NO: 94107 - protein, 7 aa, synthetic construct
RPSTGVA

SEQ ID NO: 94108 - protein, 7 aa, synthetic construct
PGFSVQN

SEQ ID NO: 94109 - protein, 7 aa, synthetic construct
FKGENNL

SEQ ID NO: 94110 - protein, 7 aa, synthetic construct
NRQAVNG

SEQ ID NO: 94111 - protein, 7 aa, synthetic construct
VAALYPA

SEQ ID NO: 94112 - protein, 7 aa, synthetic construct
RKTEWDI

SEQ ID NO: 94113 - protein, 7 aa, synthetic construct
PLNPEQR

SEQ ID NO: 94114 - protein, 7 aa, synthetic construct
IVTSENK

SEQ ID NO: 94115 - protein, 7 aa, synthetic construct
EHKAEAY

SEQ ID NO: 94116 - protein, 7 aa, synthetic construct
YRQNPDP

SEQ ID NO: 94117 - protein, 7 aa, synthetic construct
AIHFKVE

SEQ ID NO: 94118 - protein, 7 aa, synthetic construct
RDSQRSD

SEQ ID NO: 94119 - protein, 7 aa, synthetic construct
HRVVSGH

SEQ ID NO: 94120 - protein, 7 aa, synthetic construct
FPMKMNG

SEQ ID NO: 94121 - protein, 7 aa, synthetic construct
GKSSVFI

SEQ ID NO: 94122 - protein, 7 aa, synthetic construct
IAVSKLP

SEQ ID NO: 94123 - protein, 7 aa, synthetic construct
SDRKGME

SEQ ID NO: 94124 - protein, 7 aa, synthetic construct
SYLANKI

SEQ ID NO: 94125 - protein, 7 aa, synthetic construct
EIMPSRR

SEQ ID NO: 94126 - protein, 7 aa, synthetic construct
MTGEGFG

SEQ ID NO: 94127 - protein, 7 aa, synthetic construct
VINGAAF

SEQ ID NO: 94128 - protein, 7 aa, synthetic construct
KFPDDRP

SEQ ID NO: 94129 - protein, 7 aa, synthetic construct
KTQQNAS

SEQ ID NO: 94130 - protein, 7 aa, synthetic construct
DHGKAPR

SEQ ID NO: 94131 - protein, 7 aa, synthetic construct
IYDAKTS

SEQ ID NO: 94132 - protein, 7 aa, synthetic construct
ASHSVRM

SEQ ID NO: 94133 - protein, 7 aa, synthetic construct
MANKYYD

SEQ ID NO: 94134 - protein, 7 aa, synthetic construct
LPRNKEV

SEQ ID NO: 94135 - protein, 7 aa, synthetic construct
PRKVESS

SEQ ID NO: 94136 - protein, 7 aa, synthetic construct
VRKDDYG

SEQ ID NO: 94137 - protein, 7 aa, synthetic construct
THFIHNA

SEQ ID NO: 94138 - protein, 7 aa, synthetic construct
VSGKTQS

SEQ ID NO: 94139 - protein, 7 aa, synthetic construct
DMDIRVP

SEQ ID NO: 94140 - protein, 7 aa, synthetic construct
INSTYLA

SEQ ID NO: 94141 - protein, 7 aa, synthetic construct
GFTETIM

SEQ ID NO: 94142 - protein, 7 aa, synthetic construct
GKTGTLG

SEQ ID NO: 94143 - protein, 7 aa, synthetic construct
NGATRGE

SEQ ID NO: 94144 - protein, 7 aa, synthetic construct
PAPFTAS

SEQ ID NO: 94145 - protein, 7 aa, synthetic construct
TTDLQNN

SEQ ID NO: 94146 - protein, 7 aa, synthetic construct
PGISKLY

SEQ ID NO: 94147 - protein, 7 aa, synthetic construct
GVKWLDE

SEQ ID NO: 94148 - protein, 7 aa, synthetic construct
IVGLQQL

SEQ ID NO: 94149 - protein, 7 aa, synthetic construct
HHRQPLD

SEQ ID NO: 94150 - protein, 7 aa, synthetic construct
EHRERVF

SEQ ID NO: 94151 - protein, 7 aa, synthetic construct
MEPTALS

SEQ ID NO: 94152 - protein, 7 aa, synthetic construct
GISHKPS

SEQ ID NO: 94153 - protein, 7 aa, synthetic construct
QNFAGSF

SEQ ID NO: 94154 - protein, 7 aa, synthetic construct
HNHNVGI

SEQ ID NO: 94155 - protein, 7 aa, synthetic construct
SKYSQQA

SEQ ID NO: 94156 - protein, 7 aa, synthetic construct
KTNFADS

SEQ ID NO: 94157 - protein, 7 aa, synthetic construct
KLHHIAN

SEQ ID NO: 94158 - protein, 7 aa, synthetic construct
IDTMVAP

SEQ ID NO: 94159 - protein, 7 aa, synthetic construct
VNKLLGD

SEQ ID NO: 94160 - protein, 7 aa, synthetic construct
TKDPTQH

SEQ ID NO: 94161 - protein, 7 aa, synthetic construct
YSGMTSR

SEQ ID NO: 94162 - protein, 7 aa, synthetic construct
NEHKSVG

SEQ ID NO: 94163 - protein, 7 aa, synthetic construct
VMDFKGE

SEQ ID NO: 94164 - protein, 7 aa, synthetic construct
AKIQESS

SEQ ID NO: 94165 - protein, 7 aa, synthetic construct
QHINTVP

SEQ ID NO: 94166 - protein, 7 aa, synthetic construct
SLDQRNK

SEQ ID NO: 94167 - protein, 7 aa, synthetic construct
PHDIGGS

SEQ ID NO: 94168 - protein, 7 aa, synthetic construct
RESLPYI

SEQ ID NO: 94169 - protein, 7 aa, synthetic construct
ERLSGYS

SEQ ID NO: 94170 - protein, 7 aa, synthetic construct
LAAARVM

SEQ ID NO: 94171 - protein, 7 aa, synthetic construct
NDPSTPK

SEQ ID NO: 94172 - protein, 7 aa, synthetic construct
GQVSTIY

SEQ ID NO: 94173 - protein, 7 aa, synthetic construct
QMVRPHP

SEQ ID NO: 94174 - protein, 7 aa, synthetic construct
IRVYAAD

SEQ ID NO: 94175 - protein, 7 aa, synthetic construct
PRTSPGA

SEQ ID NO: 94176 - protein, 7 aa, synthetic construct
FANLEAK

SEQ ID NO: 94177 - protein, 7 aa, synthetic construct
NLAGTLE

SEQ ID NO: 94178 - protein, 7 aa, synthetic construct
RHQPYDI

SEQ ID NO: 94179 - protein, 7 aa, synthetic construct
HAKMVTH

SEQ ID NO: 94180 - protein, 7 aa, synthetic construct
KMESYPY

SEQ ID NO: 94181 - protein, 7 aa, synthetic construct
GMEKNYV

SEQ ID NO: 94182 - protein, 7 aa, synthetic construct
QAAMKQY

SEQ ID NO: 94183 - protein, 7 aa, synthetic construct
ILTRKEV

SEQ ID NO: 94184 - protein, 7 aa, synthetic construct
PSQRPEL

SEQ ID NO: 94185 - protein, 7 aa, synthetic construct
AIRSIPT

SEQ ID NO: 94186 - protein, 7 aa, synthetic construct
KQNVQSS

SEQ ID NO: 94187 - protein, 7 aa, synthetic construct
NLDRMQF

SEQ ID NO: 94188 - protein, 7 aa, synthetic construct
NMLPEKE

SEQ ID NO: 94189 - protein, 7 aa, synthetic construct
TLHNDFV

SEQ ID NO: 94190 - protein, 7 aa, synthetic construct
DETLKYG

SEQ ID NO: 94191 - protein, 7 aa, synthetic construct
STPRAEF

SEQ ID NO: 94192 - protein, 7 aa, synthetic construct
WKGGEYH

SEQ ID NO: 94193 - protein, 7 aa, synthetic construct
SQWKNNG

SEQ ID NO: 94194 - protein, 7 aa, synthetic construct
TDGSYSR

SEQ ID NO: 94195 - protein, 7 aa, synthetic construct
ASFKEHE

SEQ ID NO: 94196 - protein, 7 aa, synthetic construct
REPAHLI

SEQ ID NO: 94197 - protein, 7 aa, synthetic construct
RLPADDM

SEQ ID NO: 94198 - protein, 7 aa, synthetic construct
TNSMPYA

SEQ ID NO: 94199 - protein, 7 aa, synthetic construct
KQTSGSV

SEQ ID NO: 94200 - protein, 7 aa, synthetic construct
GEKMQKS

SEQ ID NO: 94201 - protein, 7 aa, synthetic construct
HHDYNQS

SEQ ID NO: 94202 - protein, 7 aa, synthetic construct
GKTAPND

SEQ ID NO: 94203 - protein, 7 aa, synthetic construct
NELSQRP

SEQ ID NO: 94204 - protein, 7 aa, synthetic construct
ATKSTQP

SEQ ID NO: 94205 - protein, 7 aa, synthetic construct
AVVTKSY

SEQ ID NO: 94206 - protein, 7 aa, synthetic construct
DHEKYVL

SEQ ID NO: 94207 - protein, 7 aa, synthetic construct
PENQVYK

SEQ ID NO: 94208 - protein, 7 aa, synthetic construct
DEKFFQK

SEQ ID NO: 94209 - protein, 7 aa, synthetic construct
LSVHGES

SEQ ID NO: 94210 - protein, 7 aa, synthetic construct
SAMPGAM

SEQ ID NO: 94211 - protein, 7 aa, synthetic construct
NVLGGEN

SEQ ID NO: 94212 - protein, 7 aa, synthetic construct
GNPQHGK

SEQ ID NO: 94213 - protein, 7 aa, synthetic construct
EPDRKAM

SEQ ID NO: 94214 - protein, 7 aa, synthetic construct
LASQPHQ

SEQ ID NO: 94215 - protein, 7 aa, synthetic construct
IAEHTSF

SEQ ID NO: 94216 - protein, 7 aa, synthetic construct
LDAMKHN

SEQ ID NO: 94217 - protein, 7 aa, synthetic construct
QAPYQMS

SEQ ID NO: 94218 - protein, 7 aa, synthetic construct
VHGQFIQ

SEQ ID NO: 94219 - protein, 7 aa, synthetic construct
MKQSFGM

SEQ ID NO: 94220 - protein, 7 aa, synthetic construct
LHGPMSN

SEQ ID NO: 94221 - protein, 7 aa, synthetic construct
KNPNPQA

SEQ ID NO: 94222 - protein, 7 aa, synthetic construct
AVSQSGT

SEQ ID NO: 94223 - protein, 7 aa, synthetic construct
REDMLHS

SEQ ID NO: 94224 - protein, 7 aa, synthetic construct
GMSTRQP

SEQ ID NO: 94225 - protein, 7 aa, synthetic construct
KHVHIEM

SEQ ID NO: 94226 - protein, 7 aa, synthetic construct
ITPVTLE

SEQ ID NO: 94227 - protein, 7 aa, synthetic construct
ATKEKMF

SEQ ID NO: 94228 - protein, 7 aa, synthetic construct
QRLIEGM

SEQ ID NO: 94229 - protein, 7 aa, synthetic construct
MPAMTGM

SEQ ID NO: 94230 - protein, 7 aa, synthetic construct
VMNAPKD

SEQ ID NO: 94231 - protein, 7 aa, synthetic construct
QATMNKG

SEQ ID NO: 94232 - protein, 7 aa, synthetic construct
NIGGGYS

SEQ ID NO: 94233 - protein, 7 aa, synthetic construct
FKPPGIG

SEQ ID NO: 94234 - protein, 7 aa, synthetic construct
GVPKIGD

SEQ ID NO: 94235 - protein, 7 aa, synthetic construct
FFSTHGA

SEQ ID NO: 94236 - protein, 7 aa, synthetic construct
GRVQMPP

SEQ ID NO: 94237 - protein, 7 aa, synthetic construct
IETFKRD

SEQ ID NO: 94238 - protein, 7 aa, synthetic construct
YNTQAQY

SEQ ID NO: 94239 - protein, 7 aa, synthetic construct
STHAEPM

SEQ ID NO: 94240 - protein, 7 aa, synthetic construct
NPTGYLP

SEQ ID NO: 94241 - protein, 7 aa, synthetic construct
HGKPHGS

SEQ ID NO: 94242 - protein, 7 aa, synthetic construct
FRAHSAM

SEQ ID NO: 94243 - protein, 7 aa, synthetic construct
MYDGSRT

SEQ ID NO: 94244 - protein, 7 aa, synthetic construct
FVPDPRQ

SEQ ID NO: 94245 - protein, 7 aa, synthetic construct
NDITQKM

SEQ ID NO: 94246 - protein, 7 aa, synthetic construct
IPKQMDF

SEQ ID NO: 94247 - protein, 7 aa, synthetic construct
YVTASVA

SEQ ID NO: 94248 - protein, 7 aa, synthetic construct
ISLHNKE

SEQ ID NO: 94249 - protein, 7 aa, synthetic construct
FKTPQEP

SEQ ID NO: 94250 - protein, 7 aa, synthetic construct
KWQAQGT

SEQ ID NO: 94251 - protein, 7 aa, synthetic construct
EYPRADS

SEQ ID NO: 94252 - protein, 7 aa, synthetic construct
AQRPERD

SEQ ID NO: 94253 - protein, 7 aa, synthetic construct
VPRHPVM

SEQ ID NO: 94254 - protein, 7 aa, synthetic construct
TAKERDM

SEQ ID NO: 94255 - protein, 7 aa, synthetic construct
KMLNPTQ

SEQ ID NO: 94256 - protein, 7 aa, synthetic construct
IGNGRHT

SEQ ID NO: 94257 - protein, 7 aa, synthetic construct
YMDIHHT

SEQ ID NO: 94258 - protein, 7 aa, synthetic construct
MRLHSTV

SEQ ID NO: 94259 - protein, 7 aa, synthetic construct
WPNQSQR

SEQ ID NO: 94260 - protein, 7 aa, synthetic construct
IGPSLIE

SEQ ID NO: 94261 - protein, 7 aa, synthetic construct
RKDTPLT

SEQ ID NO: 94262 - protein, 7 aa, synthetic construct
KNGPSNV

SEQ ID NO: 94263 - protein, 7 aa, synthetic construct
LSQPTIV

SEQ ID NO: 94264 - protein, 7 aa, synthetic construct
QTRPDAV

SEQ ID NO: 94265 - protein, 7 aa, synthetic construct
DKQDWTL

SEQ ID NO: 94266 - protein, 7 aa, synthetic construct
MKVGMRD

SEQ ID NO: 94267 - protein, 7 aa, synthetic construct
VNVTLQQ

SEQ ID NO: 94268 - protein, 7 aa, synthetic construct
ENENRMG

SEQ ID NO: 94269 - protein, 7 aa, synthetic construct
AKGTTGS

SEQ ID NO: 94270 - protein, 7 aa, synthetic construct
QPTNGTV

SEQ ID NO: 94271 - protein, 7 aa, synthetic construct
KELPFRG

SEQ ID NO: 94272 - protein, 7 aa, synthetic construct
HANGVHF

SEQ ID NO: 94273 - protein, 7 aa, synthetic construct
MNSAMQM

SEQ ID NO: 94274 - protein, 7 aa, synthetic construct
VKVQTAL

SEQ ID NO: 94275 - protein, 7 aa, synthetic construct
KLLLNAG

SEQ ID NO: 94276 - protein, 7 aa, synthetic construct
PGKQLPP

SEQ ID NO: 94277 - protein, 7 aa, synthetic construct
IKEIKKD

SEQ ID NO: 94278 - protein, 7 aa, synthetic construct
KVTTGQG

SEQ ID NO: 94279 - protein, 7 aa, synthetic construct
GKDPPKP

SEQ ID NO: 94280 - protein, 7 aa, synthetic construct
SMKTNSA

SEQ ID NO: 94281 - protein, 7 aa, synthetic construct
RLGVDPH

SEQ ID NO: 94282 - protein, 7 aa, synthetic construct
NATSTGS

SEQ ID NO: 94283 - protein, 7 aa, synthetic construct
NHSTHTG

SEQ ID NO: 94284 - protein, 7 aa, synthetic construct
PESNRHV

SEQ ID NO: 94285 - protein, 7 aa, synthetic construct
TANTISY

SEQ ID NO: 94286 - protein, 7 aa, synthetic construct
SAAHQKW

SEQ ID NO: 94287 - protein, 7 aa, synthetic construct
HKLHMEY

SEQ ID NO: 94288 - protein, 7 aa, synthetic construct
MTKHSVD

SEQ ID NO: 94289 - protein, 7 aa, synthetic construct
IFHSHHG

SEQ ID NO: 94290 - protein, 7 aa, synthetic construct
DVSGQHY

SEQ ID NO: 94291 - protein, 7 aa, synthetic construct
HRTFLGE

SEQ ID NO: 94292 - protein, 7 aa, synthetic construct
GATPANV

SEQ ID NO: 94293 - protein, 7 aa, synthetic construct
LDIVNGR

SEQ ID NO: 94294 - protein, 7 aa, synthetic construct
KNDAPQQ

SEQ ID NO: 94295 - protein, 7 aa, synthetic construct
VVQKEGN

SEQ ID NO: 94296 - protein, 7 aa, synthetic construct
YNKKDEG

SEQ ID NO: 94297 - protein, 7 aa, synthetic construct
GSGKEIR

SEQ ID NO: 94298 - protein, 7 aa, synthetic construct
EYRTTEP

SEQ ID NO: 94299 - protein, 7 aa, synthetic construct
KQFDQSN

SEQ ID NO: 94300 - protein, 7 aa, synthetic construct
HMNQKQA

SEQ ID NO: 94301 - protein, 7 aa, synthetic construct
IQFTSLD

SEQ ID NO: 94302 - protein, 7 aa, synthetic construct
NRQGTSP

SEQ ID NO: 94303 - protein, 7 aa, synthetic construct
RYNPQSS

SEQ ID NO: 94304 - protein, 7 aa, synthetic construct
TATKDAE

SEQ ID NO: 94305 - protein, 7 aa, synthetic construct
QGITHSP

SEQ ID NO: 94306 - protein, 7 aa, synthetic construct
FKAIEQM

SEQ ID NO: 94307 - protein, 7 aa, synthetic construct
ANFPQNT

SEQ ID NO: 94308 - protein, 7 aa, synthetic construct
HSLKANF

SEQ ID NO: 94309 - protein, 7 aa, synthetic construct
IRLQIGG

SEQ ID NO: 94310 - protein, 7 aa, synthetic construct
TGQAAAN

SEQ ID NO: 94311 - protein, 7 aa, synthetic construct
GIWNNGD

SEQ ID NO: 94312 - protein, 7 aa, synthetic construct
NKNAITG

SEQ ID NO: 94313 - protein, 7 aa, synthetic construct
RPTDVAG

SEQ ID NO: 94314 - protein, 7 aa, synthetic construct
WHKVDVA

SEQ ID NO: 94315 - protein, 7 aa, synthetic construct
RGIVQLG

SEQ ID NO: 94316 - protein, 7 aa, synthetic construct
MITGAQH

SEQ ID NO: 94317 - protein, 7 aa, synthetic construct
VDVRTPG

SEQ ID NO: 94318 - protein, 7 aa, synthetic construct
SYNDQKG

SEQ ID NO: 94319 - protein, 7 aa, synthetic construct
GQAFERP

SEQ ID NO: 94320 - protein, 7 aa, synthetic construct
TKSNMEF

SEQ ID NO: 94321 - protein, 7 aa, synthetic construct
LNQYMKI

SEQ ID NO: 94322 - protein, 7 aa, synthetic construct
VPIRPNV

SEQ ID NO: 94323 - protein, 7 aa, synthetic construct
DFKDKAW

SEQ ID NO: 94324 - protein, 7 aa, synthetic construct
WEPRDTG

SEQ ID NO: 94325 - protein, 7 aa, synthetic construct
MYQGGMV

SEQ ID NO: 94326 - protein, 7 aa, synthetic construct
HKGFDYA

SEQ ID NO: 94327 - protein, 7 aa, synthetic construct
YARQAII

SEQ ID NO: 94328 - protein, 7 aa, synthetic construct
NRMDTVP

SEQ ID NO: 94329 - protein, 7 aa, synthetic construct
PLYGNTV

SEQ ID NO: 94330 - protein, 7 aa, synthetic construct
TGAGIMI

SEQ ID NO: 94331 - protein, 7 aa, synthetic construct
QAVNVMH

SEQ ID NO: 94332 - protein, 7 aa, synthetic construct
AGAPRAI

SEQ ID NO: 94333 - protein, 7 aa, synthetic construct
HVLSAPY

SEQ ID NO: 94334 - protein, 7 aa, synthetic construct
PLWNNEV

SEQ ID NO: 94335 - protein, 7 aa, synthetic construct
KTQTQRD

SEQ ID NO: 94336 - protein, 7 aa, synthetic construct
INDFAAM

SEQ ID NO: 94337 - protein, 7 aa, synthetic construct
EFTRPGH

SEQ ID NO: 94338 - protein, 7 aa, synthetic construct
SGQTHQL

SEQ ID NO: 94339 - protein, 7 aa, synthetic construct
LPSANAP

SEQ ID NO: 94340 - protein, 7 aa, synthetic construct
APRTQIP

SEQ ID NO: 94341 - protein, 7 aa, synthetic construct
FKTPSNA

SEQ ID NO: 94342 - protein, 7 aa, synthetic construct
SYHGAVT

SEQ ID NO: 94343 - protein, 7 aa, synthetic construct
GKFRDGT

SEQ ID NO: 94344 - protein, 7 aa, synthetic construct
DNKNYHD

SEQ ID NO: 94345 - protein, 7 aa, synthetic construct
TRVNTTV

SEQ ID NO: 94346 - protein, 7 aa, synthetic construct
GSHMDRG

SEQ ID NO: 94347 - protein, 7 aa, synthetic construct
NARDDVQ

SEQ ID NO: 94348 - protein, 7 aa, synthetic construct
EKHLNQR

SEQ ID NO: 94349 - protein, 7 aa, synthetic construct
ILTKNPE

SEQ ID NO: 94350 - protein, 7 aa, synthetic construct
KQQDKFE

SEQ ID NO: 94351 - protein, 7 aa, synthetic construct
YFEKHRS

SEQ ID NO: 94352 - protein, 7 aa, synthetic construct
ITSVIGH

SEQ ID NO: 94353 - protein, 7 aa, synthetic construct
TVMKMSQ

SEQ ID NO: 94354 - protein, 7 aa, synthetic construct
VGRQYVQ

SEQ ID NO: 94355 - protein, 7 aa, synthetic construct
DWATHAA

SEQ ID NO: 94356 - protein, 7 aa, synthetic construct
SDQPRLH

SEQ ID NO: 94357 - protein, 7 aa, synthetic construct
FPKSMNI

SEQ ID NO: 94358 - protein, 7 aa, synthetic construct
NFETRAF

SEQ ID NO: 94359 - protein, 7 aa, synthetic construct
GVPFLHA

SEQ ID NO: 94360 - protein, 7 aa, synthetic construct
RSEHVFG

SEQ ID NO: 94361 - protein, 7 aa, synthetic construct
GVKDQLV

SEQ ID NO: 94362 - protein, 7 aa, synthetic construct
YRQTLNA

SEQ ID NO: 94363 - protein, 7 aa, synthetic construct
TPRGTGN

SEQ ID NO: 94364 - protein, 7 aa, synthetic construct
VHYSVKP

SEQ ID NO: 94365 - protein, 7 aa, synthetic construct
NVVGRTI

SEQ ID NO: 94366 - protein, 7 aa, synthetic construct
IKQGVKD

SEQ ID NO: 94367 - protein, 7 aa, synthetic construct
IAKSDNI

SEQ ID NO: 94368 - protein, 7 aa, synthetic construct
VTPTSNP

SEQ ID NO: 94369 - protein, 7 aa, synthetic construct
VSSHNAV

SEQ ID NO: 94370 - protein, 7 aa, synthetic construct
EGPKQSK

SEQ ID NO: 94371 - protein, 7 aa, synthetic construct
IEGKVGY

SEQ ID NO: 94372 - protein, 7 aa, synthetic construct
LPKMHTT

SEQ ID NO: 94373 - protein, 7 aa, synthetic construct
TKPPGQP

SEQ ID NO: 94374 - protein, 7 aa, synthetic construct
WAETASK

SEQ ID NO: 94375 - protein, 7 aa, synthetic construct
PTYKPGT

SEQ ID NO: 94376 - protein, 7 aa, synthetic construct
QREATRY

SEQ ID NO: 94377 - protein, 7 aa, synthetic construct
QAYEKFP

SEQ ID NO: 94378 - protein, 7 aa, synthetic construct
YDNRFVS

SEQ ID NO: 94379 - protein, 7 aa, synthetic construct
SNGQSIT

SEQ ID NO: 94380 - protein, 7 aa, synthetic construct
YAPQIKS

SEQ ID NO: 94381 - protein, 7 aa, synthetic construct
RYPDTHK

SEQ ID NO: 94382 - protein, 7 aa, synthetic construct
PGNDKYN

SEQ ID NO: 94383 - protein, 7 aa, synthetic construct
GLSSYTP

SEQ ID NO: 94384 - protein, 7 aa, synthetic construct
WHLLRED

SEQ ID NO: 94385 - protein, 7 aa, synthetic construct
AAALSHS

SEQ ID NO: 94386 - protein, 7 aa, synthetic construct
TQSKGTS

SEQ ID NO: 94387 - protein, 7 aa, synthetic construct
AAIAHQV

SEQ ID NO: 94388 - protein, 7 aa, synthetic construct
ESVRHLV

SEQ ID NO: 94389 - protein, 7 aa, synthetic construct
ERANTQP

SEQ ID NO: 94390 - protein, 7 aa, synthetic construct
RNGPGVG

SEQ ID NO: 94391 - protein, 7 aa, synthetic construct
YIQEQAS

SEQ ID NO: 94392 - protein, 7 aa, synthetic construct
TPQTRFT

SEQ ID NO: 94393 - protein, 7 aa, synthetic construct
GLQEGPG

SEQ ID NO: 94394 - protein, 7 aa, synthetic construct
EVVHHSL

SEQ ID NO: 94395 - protein, 7 aa, synthetic construct
IPKHVDM

SEQ ID NO: 94396 - protein, 7 aa, synthetic construct
MQQGNRY

SEQ ID NO: 94397 - protein, 7 aa, synthetic construct
DQPGRKT

SEQ ID NO: 94398 - protein, 7 aa, synthetic construct
WSNHPKT

SEQ ID NO: 94399 - protein, 7 aa, synthetic construct
DLNFGKI

SEQ ID NO: 94400 - protein, 7 aa, synthetic construct
KVSYGES

SEQ ID NO: 94401 - protein, 7 aa, synthetic construct
IPQDYPR

SEQ ID NO: 94402 - protein, 7 aa, synthetic construct
QHGKLVQ

SEQ ID NO: 94403 - protein, 7 aa, synthetic construct
QQKSPDL

SEQ ID NO: 94404 - protein, 7 aa, synthetic construct
WSGQLAA

SEQ ID NO: 94405 - protein, 7 aa, synthetic construct
RQDGIMA

SEQ ID NO: 94406 - protein, 7 aa, synthetic construct
VGKGTQP

SEQ ID NO: 94407 - protein, 7 aa, synthetic construct
TSAHQVE

SEQ ID NO: 94408 - protein, 7 aa, synthetic construct
FLNEMHH

SEQ ID NO: 94409 - protein, 7 aa, synthetic construct
ENQNVPT

SEQ ID NO: 94410 - protein, 7 aa, synthetic construct
DMALIRP

SEQ ID NO: 94411 - protein, 7 aa, synthetic construct
TDTYMRS

SEQ ID NO: 94412 - protein, 7 aa, synthetic construct
SPNGEVT

SEQ ID NO: 94413 - protein, 7 aa, synthetic construct
KTSETYH

SEQ ID NO: 94414 - protein, 7 aa, synthetic construct
RIKDIHL

SEQ ID NO: 94415 - protein, 7 aa, synthetic construct
VHQHRVS

SEQ ID NO: 94416 - protein, 7 aa, synthetic construct
VRHAGHF

SEQ ID NO: 94417 - protein, 7 aa, synthetic construct
YRLQYSD

SEQ ID NO: 94418 - protein, 7 aa, synthetic construct
NVLANGH

SEQ ID NO: 94419 - protein, 7 aa, synthetic construct
GINVKSY

SEQ ID NO: 94420 - protein, 7 aa, synthetic construct
VVEPKVR

SEQ ID NO: 94421 - protein, 7 aa, synthetic construct
PQAHAHP

SEQ ID NO: 94422 - protein, 7 aa, synthetic construct
QGSKMQI

SEQ ID NO: 94423 - protein, 7 aa, synthetic construct
SPKVHVL

SEQ ID NO: 94424 - protein, 7 aa, synthetic construct
DKADNKV

SEQ ID NO: 94425 - protein, 7 aa, synthetic construct
NREPMNI

SEQ ID NO: 94426 - protein, 7 aa, synthetic construct
KPVSIVG

SEQ ID NO: 94427 - protein, 7 aa, synthetic construct
QDMGPKL

SEQ ID NO: 94428 - protein, 7 aa, synthetic construct
TTQNFNP

SEQ ID NO: 94429 - protein, 7 aa, synthetic construct
QTAAMTE

SEQ ID NO: 94430 - protein, 7 aa, synthetic construct
WSQSPVK

SEQ ID NO: 94431 - protein, 7 aa, synthetic construct
HTPDWEM

SEQ ID NO: 94432 - protein, 7 aa, synthetic construct
RDLNMER

SEQ ID NO: 94433 - protein, 7 aa, synthetic construct
QIHEKNH

SEQ ID NO: 94434 - protein, 7 aa, synthetic construct
IDPKASP

SEQ ID NO: 94435 - protein, 7 aa, synthetic construct
YEPWKDT

SEQ ID NO: 94436 - protein, 7 aa, synthetic construct
MNMSINA

SEQ ID NO: 94437 - protein, 7 aa, synthetic construct
VKMGNQA

SEQ ID NO: 94438 - protein, 7 aa, synthetic construct
EKGNAAG

SEQ ID NO: 94439 - protein, 7 aa, synthetic construct
PQPGTQF

SEQ ID NO: 94440 - protein, 7 aa, synthetic construct
AEKGSAH

SEQ ID NO: 94441 - protein, 7 aa, synthetic construct
YAKVYVD

SEQ ID NO: 94442 - protein, 7 aa, synthetic construct
THGFGLD

SEQ ID NO: 94443 - protein, 7 aa, synthetic construct
HSGAMAG

SEQ ID NO: 94444 - protein, 7 aa, synthetic construct
LGHSPTT

SEQ ID NO: 94445 - protein, 7 aa, synthetic construct
QKEWSIG

SEQ ID NO: 94446 - protein, 7 aa, synthetic construct
KQENRLP

SEQ ID NO: 94447 - protein, 7 aa, synthetic construct
FIHEPRQ

SEQ ID NO: 94448 - protein, 7 aa, synthetic construct
TDKWNIE

SEQ ID NO: 94449 - protein, 7 aa, synthetic construct
KKASGID

SEQ ID NO: 94450 - protein, 7 aa, synthetic construct
FLPIHID

SEQ ID NO: 94451 - protein, 7 aa, synthetic construct
GMGPFEK

SEQ ID NO: 94452 - protein, 7 aa, synthetic construct
KPKGLME

SEQ ID NO: 94453 - protein, 7 aa, synthetic construct
PKTMQTT

SEQ ID NO: 94454 - protein, 7 aa, synthetic construct
KKDGAQA

SEQ ID NO: 94455 - protein, 7 aa, synthetic construct
FEATKTG

SEQ ID NO: 94456 - protein, 7 aa, synthetic construct
SIDQHSY

SEQ ID NO: 94457 - protein, 7 aa, synthetic construct
HWAQGHA

SEQ ID NO: 94458 - protein, 7 aa, synthetic construct
NAHQGKP

SEQ ID NO: 94459 - protein, 7 aa, synthetic construct
VGANLPM

SEQ ID NO: 94460 - protein, 7 aa, synthetic construct
SELPIRA

SEQ ID NO: 94461 - protein, 7 aa, synthetic construct
YKNMAIL

SEQ ID NO: 94462 - protein, 7 aa, synthetic construct
KSQKEDM

SEQ ID NO: 94463 - protein, 7 aa, synthetic construct
ARHLPGL

SEQ ID NO: 94464 - protein, 7 aa, synthetic construct
YLGTPQI

SEQ ID NO: 94465 - protein, 7 aa, synthetic construct
SGYMSVA

SEQ ID NO: 94466 - protein, 7 aa, synthetic construct
ARANNYE

SEQ ID NO: 94467 - protein, 7 aa, synthetic construct
HDHAITH

SEQ ID NO: 94468 - protein, 7 aa, synthetic construct
FSISEPA

SEQ ID NO: 94469 - protein, 7 aa, synthetic construct
AKGNASA

SEQ ID NO: 94470 - protein, 7 aa, synthetic construct
ESMSRLV

SEQ ID NO: 94471 - protein, 7 aa, synthetic construct
DTHHETR

SEQ ID NO: 94472 - protein, 7 aa, synthetic construct
QHRMNDY

SEQ ID NO: 94473 - protein, 7 aa, synthetic construct
MEGHNGS

SEQ ID NO: 94474 - protein, 7 aa, synthetic construct
KIMVGPM

SEQ ID NO: 94475 - protein, 7 aa, synthetic construct
VNSHYMA

SEQ ID NO: 94476 - protein, 7 aa, synthetic construct
QKMGPNQ

SEQ ID NO: 94477 - protein, 7 aa, synthetic construct
SWDQHQL

SEQ ID NO: 94478 - protein, 7 aa, synthetic construct
NIQSHSM

SEQ ID NO: 94479 - protein, 7 aa, synthetic construct
FNKNMHP

SEQ ID NO: 94480 - protein, 7 aa, synthetic construct
GDPNLGR

SEQ ID NO: 94481 - protein, 7 aa, synthetic construct
DRTSSLM

SEQ ID NO: 94482 - protein, 7 aa, synthetic construct
ASANMQK

SEQ ID NO: 94483 - protein, 7 aa, synthetic construct
AIDRLMD

SEQ ID NO: 94484 - protein, 7 aa, synthetic construct
LVIGTEP

SEQ ID NO: 94485 - protein, 7 aa, synthetic construct
GLSQANL

SEQ ID NO: 94486 - protein, 7 aa, synthetic construct
QLINRGV

SEQ ID NO: 94487 - protein, 7 aa, synthetic construct
MRDVNWT

SEQ ID NO: 94488 - protein, 7 aa, synthetic construct
RYTIGEH

SEQ ID NO: 94489 - protein, 7 aa, synthetic construct
NPDRPAS

SEQ ID NO: 94490 - protein, 7 aa, synthetic construct
RHEHMEI

SEQ ID NO: 94491 - protein, 7 aa, synthetic construct
VIDMHMS

SEQ ID NO: 94492 - protein, 7 aa, synthetic construct
SANKPDY

SEQ ID NO: 94493 - protein, 7 aa, synthetic construct
SDSKLQI

SEQ ID NO: 94494 - protein, 7 aa, synthetic construct
MHTPVQV

SEQ ID NO: 94495 - protein, 7 aa, synthetic construct
DKETKNA

SEQ ID NO: 94496 - protein, 7 aa, synthetic construct
WRTTQYD

SEQ ID NO: 94497 - protein, 7 aa, synthetic construct
MNTPAMT

SEQ ID NO: 94498 - protein, 7 aa, synthetic construct
TGKSNMA

SEQ ID NO: 94499 - protein, 7 aa, synthetic construct
TYNPIRN

SEQ ID NO: 94500 - protein, 7 aa, synthetic construct
VQTAGNK

SEQ ID NO: 94501 - protein, 7 aa, synthetic construct
GGPPMES

SEQ ID NO: 94502 - protein, 7 aa, synthetic construct
KTSGNRE

SEQ ID NO: 94503 - protein, 7 aa, synthetic construct
QVIQRSP

SEQ ID NO: 94504 - protein, 7 aa, synthetic construct
LSHSVST

SEQ ID NO: 94505 - protein, 7 aa, synthetic construct
YDAGLYK

SEQ ID NO: 94506 - protein, 7 aa, synthetic construct
QSFKLEL

SEQ ID NO: 94507 - protein, 7 aa, synthetic construct
RPTMAPT

SEQ ID NO: 94508 - protein, 7 aa, synthetic construct
KNQSSHE

SEQ ID NO: 94509 - protein, 7 aa, synthetic construct
PVLRGQA

SEQ ID NO: 94510 - protein, 7 aa, synthetic construct
PVNSAGR

SEQ ID NO: 94511 - protein, 7 aa, synthetic construct
EKTFPMQ

SEQ ID NO: 94512 - protein, 7 aa, synthetic construct
AIQISHT

SEQ ID NO: 94513 - protein, 7 aa, synthetic construct
YKVHEPK

SEQ ID NO: 94514 - protein, 7 aa, synthetic construct
LQHVRHQ

SEQ ID NO: 94515 - protein, 7 aa, synthetic construct
PGHNADA

SEQ ID NO: 94516 - protein, 7 aa, synthetic construct
KYPVHPN

SEQ ID NO: 94517 - protein, 7 aa, synthetic construct
PYLNVPA

SEQ ID NO: 94518 - protein, 7 aa, synthetic construct
VDHHHYV

SEQ ID NO: 94519 - protein, 7 aa, synthetic construct
KEMPNPN

SEQ ID NO: 94520 - protein, 7 aa, synthetic construct
HKIHQTD

SEQ ID NO: 94521 - protein, 7 aa, synthetic construct
IHPKIFS

SEQ ID NO: 94522 - protein, 7 aa, synthetic construct
PSIGPHA

SEQ ID NO: 94523 - protein, 7 aa, synthetic construct
GSEGHFP

SEQ ID NO: 94524 - protein, 7 aa, synthetic construct
PAHHEVA

SEQ ID NO: 94525 - protein, 7 aa, synthetic construct
KEVPHHG

SEQ ID NO: 94526 - protein, 7 aa, synthetic construct
RQHHASM

SEQ ID NO: 94527 - protein, 7 aa, synthetic construct
LVDYKHV

SEQ ID NO: 94528 - protein, 7 aa, synthetic construct
VEKSNTW

SEQ ID NO: 94529 - protein, 7 aa, synthetic construct
IISGYQP

SEQ ID NO: 94530 - protein, 7 aa, synthetic construct
EAMNANR

SEQ ID NO: 94531 - protein, 7 aa, synthetic construct
VKINLAE

SEQ ID NO: 94532 - protein, 7 aa, synthetic construct
VGDIQKK

SEQ ID NO: 94533 - protein, 7 aa, synthetic construct
VPEPRVF

SEQ ID NO: 94534 - protein, 7 aa, synthetic construct
NAEGLRG

SEQ ID NO: 94535 - protein, 7 aa, synthetic construct
SNRATPA

SEQ ID NO: 94536 - protein, 7 aa, synthetic construct
PYPTAGI

SEQ ID NO: 94537 - protein, 7 aa, synthetic construct
GEHMPQG

SEQ ID NO: 94538 - protein, 7 aa, synthetic construct
ESGAKVI

SEQ ID NO: 94539 - protein, 7 aa, synthetic construct
NKDGNIA

SEQ ID NO: 94540 - protein, 7 aa, synthetic construct
YKDSQMN

SEQ ID NO: 94541 - protein, 7 aa, synthetic construct
SIPGHRQ

SEQ ID NO: 94542 - protein, 7 aa, synthetic construct
QARQFTH

SEQ ID NO: 94543 - protein, 7 aa, synthetic construct
MRVGFES

SEQ ID NO: 94544 - protein, 7 aa, synthetic construct
NMHMAKF

SEQ ID NO: 94545 - protein, 7 aa, synthetic construct
GQFVVNE

SEQ ID NO: 94546 - protein, 7 aa, synthetic construct
ISTSTKD

SEQ ID NO: 94547 - protein, 7 aa, synthetic construct
NPKASQA

SEQ ID NO: 94548 - protein, 7 aa, synthetic construct
MYKIIPA

SEQ ID NO: 94549 - protein, 7 aa, synthetic construct
SNIGDFA

SEQ ID NO: 94550 - protein, 7 aa, synthetic construct
MQAHSDT

SEQ ID NO: 94551 - protein, 7 aa, synthetic construct
MSDHIMS

SEQ ID NO: 94552 - protein, 7 aa, synthetic construct
EHAQHFK

SEQ ID NO: 94553 - protein, 7 aa, synthetic construct
SLRGDPS

SEQ ID NO: 94554 - protein, 7 aa, synthetic construct
NAPSKDL

SEQ ID NO: 94555 - protein, 7 aa, synthetic construct
KDYKLYD

SEQ ID NO: 94556 - protein, 7 aa, synthetic construct
QSPATSR

SEQ ID NO: 94557 - protein, 7 aa, synthetic construct
APGTLKE

SEQ ID NO: 94558 - protein, 7 aa, synthetic construct
KARMDIS

SEQ ID NO: 94559 - protein, 7 aa, synthetic construct
SAHQPYI

SEQ ID NO: 94560 - protein, 7 aa, synthetic construct
FEQRFKD

SEQ ID NO: 94561 - protein, 7 aa, synthetic construct
HKTSELH

SEQ ID NO: 94562 - protein, 7 aa, synthetic construct
KYPEWPA

SEQ ID NO: 94563 - protein, 7 aa, synthetic construct
GLNPIKF

SEQ ID NO: 94564 - protein, 7 aa, synthetic construct
KYEKDQR

SEQ ID NO: 94565 - protein, 7 aa, synthetic construct
RRVQDGM

SEQ ID NO: 94566 - protein, 7 aa, synthetic construct
RPNSIQA

SEQ ID NO: 94567 - protein, 7 aa, synthetic construct
SISMEGA

SEQ ID NO: 94568 - protein, 7 aa, synthetic construct
KQSARID

SEQ ID NO: 94569 - protein, 7 aa, synthetic construct
EPAFMLG

SEQ ID NO: 94570 - protein, 7 aa, synthetic construct
GLITKFQ

SEQ ID NO: 94571 - protein, 7 aa, synthetic construct
HYKIYAD

SEQ ID NO: 94572 - protein, 7 aa, synthetic construct
KFQLHGS

SEQ ID NO: 94573 - protein, 7 aa, synthetic construct
EQMMNRV

SEQ ID NO: 94574 - protein, 7 aa, synthetic construct
GAPMPGG

SEQ ID NO: 94575 - protein, 7 aa, synthetic construct
LVEQRKQ

SEQ ID NO: 94576 - protein, 7 aa, synthetic construct
KYETNGL

SEQ ID NO: 94577 - protein, 7 aa, synthetic construct
NPYNAAK

SEQ ID NO: 94578 - protein, 7 aa, synthetic construct
ATPPGFK

SEQ ID NO: 94579 - protein, 7 aa, synthetic construct
NLPFQTN

SEQ ID NO: 94580 - protein, 7 aa, synthetic construct
HRSQEEF

SEQ ID NO: 94581 - protein, 7 aa, synthetic construct
WDPGHGR

SEQ ID NO: 94582 - protein, 7 aa, synthetic construct
KNGVQYV

SEQ ID NO: 94583 - protein, 7 aa, synthetic construct
GKQDKAS

SEQ ID NO: 94584 - protein, 7 aa, synthetic construct
GAPSKVQ

SEQ ID NO: 94585 - protein, 7 aa, synthetic construct
AKILAME

SEQ ID NO: 94586 - protein, 7 aa, synthetic construct
DRVAVNN

SEQ ID NO: 94587 - protein, 7 aa, synthetic construct
VFDKSAK

SEQ ID NO: 94588 - protein, 7 aa, synthetic construct
HEKNHDF

SEQ ID NO: 94589 - protein, 7 aa, synthetic construct
HFHELSS

SEQ ID NO: 94590 - protein, 7 aa, synthetic construct
ERTAYQG

SEQ ID NO: 94591 - protein, 7 aa, synthetic construct
QELHQGS

SEQ ID NO: 94592 - protein, 7 aa, synthetic construct
INQKNQM

SEQ ID NO: 94593 - protein, 7 aa, synthetic construct
LFDKGNK

SEQ ID NO: 94594 - protein, 7 aa, synthetic construct
DPQGSKI

SEQ ID NO: 94595 - protein, 7 aa, synthetic construct
FHAIFED

SEQ ID NO: 94596 - protein, 7 aa, synthetic construct
GMGIGYA

SEQ ID NO: 94597 - protein, 7 aa, synthetic construct
TYKHHPM

SEQ ID NO: 94598 - protein, 7 aa, synthetic construct
IAPQGVS

SEQ ID NO: 94599 - protein, 7 aa, synthetic construct
KPTNVML

SEQ ID NO: 94600 - protein, 7 aa, synthetic construct
SVGTKHI

SEQ ID NO: 94601 - protein, 7 aa, synthetic construct
IGNIPVV

SEQ ID NO: 94602 - protein, 7 aa, synthetic construct
QDRVHQE

SEQ ID NO: 94603 - protein, 7 aa, synthetic construct
QKPMNAA

SEQ ID NO: 94604 - protein, 7 aa, synthetic construct
PTPKNGA

SEQ ID NO: 94605 - protein, 7 aa, synthetic construct
YEERHTM

SEQ ID NO: 94606 - protein, 7 aa, synthetic construct
GSQVMKF

SEQ ID NO: 94607 - protein, 7 aa, synthetic construct
KEKPDKH

SEQ ID NO: 94608 - protein, 7 aa, synthetic construct
LSVKVFQ

SEQ ID NO: 94609 - protein, 7 aa, synthetic construct
TGISKEV

SEQ ID NO: 94610 - protein, 7 aa, synthetic construct
MSSALNT

SEQ ID NO: 94611 - protein, 7 aa, synthetic construct
VSTQLLP

SEQ ID NO: 94612 - protein, 7 aa, synthetic construct
PLLSQLG

SEQ ID NO: 94613 - protein, 7 aa, synthetic construct
KENRLIM

SEQ ID NO: 94614 - protein, 7 aa, synthetic construct
KNSTGIS

SEQ ID NO: 94615 - protein, 7 aa, synthetic construct
KQFADTD

SEQ ID NO: 94616 - protein, 7 aa, synthetic construct
MHPVQGK

SEQ ID NO: 94617 - protein, 7 aa, synthetic construct
PIRDTVH

SEQ ID NO: 94618 - protein, 7 aa, synthetic construct
TAGPRQP

SEQ ID NO: 94619 - protein, 7 aa, synthetic construct
GNGRDEM

SEQ ID NO: 94620 - protein, 7 aa, synthetic construct
DLGKEIA

SEQ ID NO: 94621 - protein, 7 aa, synthetic construct
GKTQPGL

SEQ ID NO: 94622 - protein, 7 aa, synthetic construct
KSNESFW

SEQ ID NO: 94623 - protein, 7 aa, synthetic construct
INAAGPV

SEQ ID NO: 94624 - protein, 7 aa, synthetic construct
ARTNERY

SEQ ID NO: 94625 - protein, 7 aa, synthetic construct
VINPHLE

SEQ ID NO: 94626 - protein, 7 aa, synthetic construct
SEKFYGG

SEQ ID NO: 94627 - protein, 7 aa, synthetic construct
GYNQAVT

SEQ ID NO: 94628 - protein, 7 aa, synthetic construct
KQQHEWM

SEQ ID NO: 94629 - protein, 7 aa, synthetic construct
AGPSAHM

SEQ ID NO: 94630 - protein, 7 aa, synthetic construct
VQQDMGG

SEQ ID NO: 94631 - protein, 7 aa, synthetic construct
TERVDLT

SEQ ID NO: 94632 - protein, 7 aa, synthetic construct
VPMNMAM

SEQ ID NO: 94633 - protein, 7 aa, synthetic construct
KDTNHTN

SEQ ID NO: 94634 - protein, 7 aa, synthetic construct
GTGQMIH

SEQ ID NO: 94635 - protein, 7 aa, synthetic construct
RQNTEVK

SEQ ID NO: 94636 - protein, 7 aa, synthetic construct
SLANIKP

SEQ ID NO: 94637 - protein, 7 aa, synthetic construct
YADRRDV

SEQ ID NO: 94638 - protein, 7 aa, synthetic construct
TTYPPHA

SEQ ID NO: 94639 - protein, 7 aa, synthetic construct
FSKVNQV

SEQ ID NO: 94640 - protein, 7 aa, synthetic construct
PEIHNGP

SEQ ID NO: 94641 - protein, 7 aa, synthetic construct
DKQETKQ

SEQ ID NO: 94642 - protein, 7 aa, synthetic construct
ASDRLII

SEQ ID NO: 94643 - protein, 7 aa, synthetic construct
FFQAMDK

SEQ ID NO: 94644 - protein, 7 aa, synthetic construct
QMNHKHE

SEQ ID NO: 94645 - protein, 7 aa, synthetic construct
YLKAQVG

SEQ ID NO: 94646 - protein, 7 aa, synthetic construct
MAQGYMA

SEQ ID NO: 94647 - protein, 7 aa, synthetic construct
ERMHVID

SEQ ID NO: 94648 - protein, 7 aa, synthetic construct
KVASSNA

SEQ ID NO: 94649 - protein, 7 aa, synthetic construct
GYQKYPD

SEQ ID NO: 94650 - protein, 7 aa, synthetic construct
HNVKVMP

SEQ ID NO: 94651 - protein, 7 aa, synthetic construct
HAEHPHS

SEQ ID NO: 94652 - protein, 7 aa, synthetic construct
MKSTAPG

SEQ ID NO: 94653 - protein, 7 aa, synthetic construct
RIIDPLG

SEQ ID NO: 94654 - protein, 7 aa, synthetic construct
TYAHGHH

SEQ ID NO: 94655 - protein, 7 aa, synthetic construct
DKYAAGM

SEQ ID NO: 94656 - protein, 7 aa, synthetic construct
HLNTNFP

SEQ ID NO: 94657 - protein, 7 aa, synthetic construct
VVDQRHM

SEQ ID NO: 94658 - protein, 7 aa, synthetic construct
RRHDVDH

SEQ ID NO: 94659 - protein, 7 aa, synthetic construct
KYPQHHQ

SEQ ID NO: 94660 - protein, 7 aa, synthetic construct
VARVMDM

SEQ ID NO: 94661 - protein, 7 aa, synthetic construct
PDRQHPE

SEQ ID NO: 94662 - protein, 7 aa, synthetic construct
QATNPAD

SEQ ID NO: 94663 - protein, 7 aa, synthetic construct
QDKSFMS

SEQ ID NO: 94664 - protein, 7 aa, synthetic construct
LYGSTPV

SEQ ID NO: 94665 - protein, 7 aa, synthetic construct
PVGGEGK

SEQ ID NO: 94666 - protein, 7 aa, synthetic construct
ITHPQKF

SEQ ID NO: 94667 - protein, 7 aa, synthetic construct
HQNEKNG

SEQ ID NO: 94668 - protein, 7 aa, synthetic construct
PGMPRIE

SEQ ID NO: 94669 - protein, 7 aa, synthetic construct
GKPTPYQ

SEQ ID NO: 94670 - protein, 7 aa, synthetic construct
LEVHRDS

SEQ ID NO: 94671 - protein, 7 aa, synthetic construct
EAAIHFK

SEQ ID NO: 94672 - protein, 7 aa, synthetic construct
KNQAPGI

SEQ ID NO: 94673 - protein, 7 aa, synthetic construct
IIPPISE

SEQ ID NO: 94674 - protein, 7 aa, synthetic construct
WGPKNMD

SEQ ID NO: 94675 - protein, 7 aa, synthetic construct
FRDHLGG

SEQ ID NO: 94676 - protein, 7 aa, synthetic construct
LTPANAT

SEQ ID NO: 94677 - protein, 7 aa, synthetic construct
TVSMVLA

SEQ ID NO: 94678 - protein, 7 aa, synthetic construct
HSQMSPI

SEQ ID NO: 94679 - protein, 7 aa, synthetic construct
NAKDQLQ

SEQ ID NO: 94680 - protein, 7 aa, synthetic construct
WSQSERF

SEQ ID NO: 94681 - protein, 7 aa, synthetic construct
PHPVNMG

SEQ ID NO: 94682 - protein, 7 aa, synthetic construct
HHPDAMR

SEQ ID NO: 94683 - protein, 7 aa, synthetic construct
FTGQAQR

SEQ ID NO: 94684 - protein, 7 aa, synthetic construct
KTATSGN

SEQ ID NO: 94685 - protein, 7 aa, synthetic construct
PHLKIIG

SEQ ID NO: 94686 - protein, 7 aa, synthetic construct
YAKYDNK

SEQ ID NO: 94687 - protein, 7 aa, synthetic construct
KHMNDPE

SEQ ID NO: 94688 - protein, 7 aa, synthetic construct
GLSKYAA

SEQ ID NO: 94689 - protein, 7 aa, synthetic construct
KGMTNQA

SEQ ID NO: 94690 - protein, 7 aa, synthetic construct
LFTDSDK

SEQ ID NO: 94691 - protein, 7 aa, synthetic construct
YIPVQVN

SEQ ID NO: 94692 - protein, 7 aa, synthetic construct
IHAHQPE

SEQ ID NO: 94693 - protein, 7 aa, synthetic construct
IRHLDNY

SEQ ID NO: 94694 - protein, 7 aa, synthetic construct
NGYTTPV

SEQ ID NO: 94695 - protein, 7 aa, synthetic construct
SMQAGGF

SEQ ID NO: 94696 - protein, 7 aa, synthetic construct
IIYDRAD

SEQ ID NO: 94697 - protein, 7 aa, synthetic construct
SLAGEKS

SEQ ID NO: 94698 - protein, 7 aa, synthetic construct
RQPAQTA

SEQ ID NO: 94699 - protein, 7 aa, synthetic construct
GTHDKNK

SEQ ID NO: 94700 - protein, 7 aa, synthetic construct
QPPMYKL

SEQ ID NO: 94701 - protein, 7 aa, synthetic construct
YVPADIQ

SEQ ID NO: 94702 - protein, 7 aa, synthetic construct
NTFPSVA

SEQ ID NO: 94703 - protein, 7 aa, synthetic construct
QLRNVSH

SEQ ID NO: 94704 - protein, 7 aa, synthetic construct
SQQNGNV

SEQ ID NO: 94705 - protein, 7 aa, synthetic construct
WSAPSKH

SEQ ID NO: 94706 - protein, 7 aa, synthetic construct
NMNPENH

SEQ ID NO: 94707 - protein, 7 aa, synthetic construct
YVQNQNH

SEQ ID NO: 94708 - protein, 7 aa, synthetic construct
ITPKAPW

SEQ ID NO: 94709 - protein, 7 aa, synthetic construct
FITPANE

SEQ ID NO: 94710 - protein, 7 aa, synthetic construct
INHRTYA

SEQ ID NO: 94711 - protein, 7 aa, synthetic construct
VMSQNKY

SEQ ID NO: 94712 - protein, 7 aa, synthetic construct
QKENVRV

SEQ ID NO: 94713 - protein, 7 aa, synthetic construct
HSNDIVK

SEQ ID NO: 94714 - protein, 7 aa, synthetic construct
ETLQHKK

SEQ ID NO: 94715 - protein, 7 aa, synthetic construct
EILGPKV

SEQ ID NO: 94716 - protein, 7 aa, synthetic construct
RKGDSAP

SEQ ID NO: 94717 - protein, 7 aa, synthetic construct
ELDVYAG

SEQ ID NO: 94718 - protein, 7 aa, synthetic construct
IFPTTGV

SEQ ID NO: 94719 - protein, 7 aa, synthetic construct
FGNPNHH

SEQ ID NO: 94720 - protein, 7 aa, synthetic construct
YHGFNIE

SEQ ID NO: 94721 - protein, 7 aa, synthetic construct
HPVRDSP

SEQ ID NO: 94722 - protein, 7 aa, synthetic construct
KKIYPEG

SEQ ID NO: 94723 - protein, 7 aa, synthetic construct
LHKDMPY

SEQ ID NO: 94724 - protein, 7 aa, synthetic construct
LAHGRNY

SEQ ID NO: 94725 - protein, 7 aa, synthetic construct
IPASAVI

SEQ ID NO: 94726 - protein, 7 aa, synthetic construct
RQLANED

SEQ ID NO: 94727 - protein, 7 aa, synthetic construct
ERDKANS

SEQ ID NO: 94728 - protein, 7 aa, synthetic construct
TGVFPMG

SEQ ID NO: 94729 - protein, 7 aa, synthetic construct
GNQLDPG

SEQ ID NO: 94730 - protein, 7 aa, synthetic construct
NKSSVNG

SEQ ID NO: 94731 - protein, 7 aa, synthetic construct
NFEMKVA

SEQ ID NO: 94732 - protein, 7 aa, synthetic construct
VKTSSYQ

SEQ ID NO: 94733 - protein, 7 aa, synthetic construct
NRHIMLG

SEQ ID NO: 94734 - protein, 7 aa, synthetic construct
TRFEMMG

SEQ ID NO: 94735 - protein, 7 aa, synthetic construct
RNFEKAN

SEQ ID NO: 94736 - protein, 7 aa, synthetic construct
TKLEVGV

SEQ ID NO: 94737 - protein, 7 aa, synthetic construct
MKPSSIA

SEQ ID NO: 94738 - protein, 7 aa, synthetic construct
PVINVAA

SEQ ID NO: 94739 - protein, 7 aa, synthetic construct
ISGMHLA

SEQ ID NO: 94740 - protein, 7 aa, synthetic construct
DLHVDPG

SEQ ID NO: 94741 - protein, 7 aa, synthetic construct
PTNRTFL

SEQ ID NO: 94742 - protein, 7 aa, synthetic construct
WAGLHID

SEQ ID NO: 94743 - protein, 7 aa, synthetic construct
GHVNRIM

SEQ ID NO: 94744 - protein, 7 aa, synthetic construct
PAGLMPE

SEQ ID NO: 94745 - protein, 7 aa, synthetic construct
GLSKESE

SEQ ID NO: 94746 - protein, 7 aa, synthetic construct
SQQAQYK

SEQ ID NO: 94747 - protein, 7 aa, synthetic construct
RNNETNP

SEQ ID NO: 94748 - protein, 7 aa, synthetic construct
DRALQMK

SEQ ID NO: 94749 - protein, 7 aa, synthetic construct
RVMPAHA

SEQ ID NO: 94750 - protein, 7 aa, synthetic construct
NSSVMMG

SEQ ID NO: 94751 - protein, 7 aa, synthetic construct
KFKMQVP

SEQ ID NO: 94752 - protein, 7 aa, synthetic construct
DDKGSTR

SEQ ID NO: 94753 - protein, 7 aa, synthetic construct
NHGISRV

SEQ ID NO: 94754 - protein, 7 aa, synthetic construct
LNAYINS

SEQ ID NO: 94755 - protein, 7 aa, synthetic construct
KYTMLVE

SEQ ID NO: 94756 - protein, 7 aa, synthetic construct
TMIPKEH

SEQ ID NO: 94757 - protein, 7 aa, synthetic construct
KEEHLPF

SEQ ID NO: 94758 - protein, 7 aa, synthetic construct
RQDPLLI

SEQ ID NO: 94759 - protein, 7 aa, synthetic construct
GTHMNNI

SEQ ID NO: 94760 - protein, 7 aa, synthetic construct
LRDPMNQ

SEQ ID NO: 94761 - protein, 7 aa, synthetic construct
GRKEAFA

SEQ ID NO: 94762 - protein, 7 aa, synthetic construct
LDYPERH

SEQ ID NO: 94763 - protein, 7 aa, synthetic construct
DIQRYPH

SEQ ID NO: 94764 - protein, 7 aa, synthetic construct
TVDGSAT

SEQ ID NO: 94765 - protein, 7 aa, synthetic construct
WASDTRN

SEQ ID NO: 94766 - protein, 7 aa, synthetic construct
AHSMTAI

SEQ ID NO: 94767 - protein, 7 aa, synthetic construct
FPGAVRF

SEQ ID NO: 94768 - protein, 7 aa, synthetic construct
HQEQMPS

SEQ ID NO: 94769 - protein, 7 aa, synthetic construct
FAANDHS

SEQ ID NO: 94770 - protein, 7 aa, synthetic construct
MENTTPY

SEQ ID NO: 94771 - protein, 7 aa, synthetic construct
GYDDSKR

SEQ ID NO: 94772 - protein, 7 aa, synthetic construct
NDSPPFR

SEQ ID NO: 94773 - protein, 7 aa, synthetic construct
TGKTTSS

SEQ ID NO: 94774 - protein, 7 aa, synthetic construct
LPDQNKF

SEQ ID NO: 94775 - protein, 7 aa, synthetic construct
RIEEGRN

SEQ ID NO: 94776 - protein, 7 aa, synthetic construct
QATEFVI

SEQ ID NO: 94777 - protein, 7 aa, synthetic construct
QVVSLGS

SEQ ID NO: 94778 - protein, 7 aa, synthetic construct
VQIKHNF

SEQ ID NO: 94779 - protein, 7 aa, synthetic construct
RGELHIE

SEQ ID NO: 94780 - protein, 7 aa, synthetic construct
LAAKEWA

SEQ ID NO: 94781 - protein, 7 aa, synthetic construct
ELKPPRN

SEQ ID NO: 94782 - protein, 7 aa, synthetic construct
YELNPGA

SEQ ID NO: 94783 - protein, 7 aa, synthetic construct
ISINYKE

SEQ ID NO: 94784 - protein, 7 aa, synthetic construct
WSTVDTS

SEQ ID NO: 94785 - protein, 7 aa, synthetic construct
QDGGHHP

SEQ ID NO: 94786 - protein, 7 aa, synthetic construct
PTSQIGT

SEQ ID NO: 94787 - protein, 7 aa, synthetic construct
VGQYAIM

SEQ ID NO: 94788 - protein, 7 aa, synthetic construct
THVIKQF

SEQ ID NO: 94789 - protein, 7 aa, synthetic construct
SGNQNAR

SEQ ID NO: 94790 - protein, 7 aa, synthetic construct
IGFGGRG

SEQ ID NO: 94791 - protein, 7 aa, synthetic construct
KPSQATP

SEQ ID NO: 94792 - protein, 7 aa, synthetic construct
HTRMDPM

SEQ ID NO: 94793 - protein, 7 aa, synthetic construct
DANEKNR

SEQ ID NO: 94794 - protein, 7 aa, synthetic construct
NQQRSGQ

SEQ ID NO: 94795 - protein, 7 aa, synthetic construct
QERHEKS

SEQ ID NO: 94796 - protein, 7 aa, synthetic construct
INQMPGQ

SEQ ID NO: 94797 - protein, 7 aa, synthetic construct
TNINSLD

SEQ ID NO: 94798 - protein, 7 aa, synthetic construct
GADRTVD

SEQ ID NO: 94799 - protein, 7 aa, synthetic construct
KSPDHDF

SEQ ID NO: 94800 - protein, 7 aa, synthetic construct
GGKTDII

SEQ ID NO: 94801 - protein, 7 aa, synthetic construct
FVPQESG

SEQ ID NO: 94802 - protein, 7 aa, synthetic construct
RLDAHDG

SEQ ID NO: 94803 - protein, 7 aa, synthetic construct
KVNQGNA

SEQ ID NO: 94804 - protein, 7 aa, synthetic construct
GMMTEKI

SEQ ID NO: 94805 - protein, 7 aa, synthetic construct
KDSMTPR

SEQ ID NO: 94806 - protein, 7 aa, synthetic construct
LDKTPMF

SEQ ID NO: 94807 - protein, 7 aa, synthetic construct
TMNRNGY

SEQ ID NO: 94808 - protein, 7 aa, synthetic construct
YGKMMDI

SEQ ID NO: 94809 - protein, 7 aa, synthetic construct
SQVNKPW

SEQ ID NO: 94810 - protein, 7 aa, synthetic construct
TQSMMHK

SEQ ID NO: 94811 - protein, 7 aa, synthetic construct
QENTPAH

SEQ ID NO: 94812 - protein, 7 aa, synthetic construct
ERYPMQG

SEQ ID NO: 94813 - protein, 7 aa, synthetic construct
FKQSQTS

SEQ ID NO: 94814 - protein, 7 aa, synthetic construct
RDHAAYD

SEQ ID NO: 94815 - protein, 7 aa, synthetic construct
PKQTGSI

SEQ ID NO: 94816 - protein, 7 aa, synthetic construct
ERFMEAE

SEQ ID NO: 94817 - protein, 7 aa, synthetic construct
HHANLNE

SEQ ID NO: 94818 - protein, 7 aa, synthetic construct
LAVQGSV

SEQ ID NO: 94819 - protein, 7 aa, synthetic construct
THASNHK

SEQ ID NO: 94820 - protein, 7 aa, synthetic construct
MAQDPKA

SEQ ID NO: 94821 - protein, 7 aa, synthetic construct
GQPMSIL

SEQ ID NO: 94822 - protein, 7 aa, synthetic construct
PTHTTVF

SEQ ID NO: 94823 - protein, 7 aa, synthetic construct
NNVRREL

SEQ ID NO: 94824 - protein, 7 aa, synthetic construct
SEWRSHE

SEQ ID NO: 94825 - protein, 7 aa, synthetic construct
LAFGGAM

SEQ ID NO: 94826 - protein, 7 aa, synthetic construct
RLSLSEY

SEQ ID NO: 94827 - protein, 7 aa, synthetic construct
FTDMSKY

SEQ ID NO: 94828 - protein, 7 aa, synthetic construct
TDLIKLT

SEQ ID NO: 94829 - protein, 7 aa, synthetic construct
WRLESTQ

SEQ ID NO: 94830 - protein, 7 aa, synthetic construct
ERVKEQT

SEQ ID NO: 94831 - protein, 7 aa, synthetic construct
VGERYSA

SEQ ID NO: 94832 - protein, 7 aa, synthetic construct
NERYGKT

SEQ ID NO: 94833 - protein, 7 aa, synthetic construct
DFRATVM

SEQ ID NO: 94834 - protein, 7 aa, synthetic construct
KIQTHGL

SEQ ID NO: 94835 - protein, 7 aa, synthetic construct
TMSRGYI

SEQ ID NO: 94836 - protein, 7 aa, synthetic construct
IYPVGAT

SEQ ID NO: 94837 - protein, 7 aa, synthetic construct
AKEPPST

SEQ ID NO: 94838 - protein, 7 aa, synthetic construct
DNQLMAR

SEQ ID NO: 94839 - protein, 7 aa, synthetic construct
KSSDPLT

SEQ ID NO: 94840 - protein, 7 aa, synthetic construct
YPHKKDD

SEQ ID NO: 94841 - protein, 7 aa, synthetic construct
FTKNNSY

SEQ ID NO: 94842 - protein, 7 aa, synthetic construct
KDMKEQK

SEQ ID NO: 94843 - protein, 7 aa, synthetic construct
HENMRYE

SEQ ID NO: 94844 - protein, 7 aa, synthetic construct
VSQALDK

SEQ ID NO: 94845 - protein, 7 aa, synthetic construct
VGGGKWE

SEQ ID NO: 94846 - protein, 7 aa, synthetic construct
PKAGTTS

SEQ ID NO: 94847 - protein, 7 aa, synthetic construct
AQYQLQP

SEQ ID NO: 94848 - protein, 7 aa, synthetic construct
NTHGDKD

SEQ ID NO: 94849 - protein, 7 aa, synthetic construct
AHRIPLA

SEQ ID NO: 94850 - protein, 7 aa, synthetic construct
PFEKDII

SEQ ID NO: 94851 - protein, 7 aa, synthetic construct
GHQGDKG

SEQ ID NO: 94852 - protein, 7 aa, synthetic construct
QQTGPKW

SEQ ID NO: 94853 - protein, 7 aa, synthetic construct
QEPQLRR

SEQ ID NO: 94854 - protein, 7 aa, synthetic construct
MTNASQR

SEQ ID NO: 94855 - protein, 7 aa, synthetic construct
RQTATDQ

SEQ ID NO: 94856 - protein, 7 aa, synthetic construct
RVVRIEH

SEQ ID NO: 94857 - protein, 7 aa, synthetic construct
LMQQMQV

SEQ ID NO: 94858 - protein, 7 aa, synthetic construct
KLAQEVK

SEQ ID NO: 94859 - protein, 7 aa, synthetic construct
KWNHASA

SEQ ID NO: 94860 - protein, 7 aa, synthetic construct
IQSDQQV

SEQ ID NO: 94861 - protein, 7 aa, synthetic construct
MGRDKVM

SEQ ID NO: 94862 - protein, 7 aa, synthetic construct
ITGPNGS

SEQ ID NO: 94863 - protein, 7 aa, synthetic construct
QGTTPNM

SEQ ID NO: 94864 - protein, 7 aa, synthetic construct
HKSKMNE

SEQ ID NO: 94865 - protein, 7 aa, synthetic construct
GKEFAND

SEQ ID NO: 94866 - protein, 7 aa, synthetic construct
LAVNWTG

SEQ ID NO: 94867 - protein, 7 aa, synthetic construct
THSQVVK

SEQ ID NO: 94868 - protein, 7 aa, synthetic construct
RQASAMS

SEQ ID NO: 94869 - protein, 7 aa, synthetic construct
PPSLNKT

SEQ ID NO: 94870 - protein, 7 aa, synthetic construct
SFLAHGP

SEQ ID NO: 94871 - protein, 7 aa, synthetic construct
DKNQIMV

SEQ ID NO: 94872 - protein, 7 aa, synthetic construct
AMLKMQE

SEQ ID NO: 94873 - protein, 7 aa, synthetic construct
SDQAHSR

SEQ ID NO: 94874 - protein, 7 aa, synthetic construct
PSDKNDA

SEQ ID NO: 94875 - protein, 7 aa, synthetic construct
NASVKPP

SEQ ID NO: 94876 - protein, 7 aa, synthetic construct
TPSPNKF

SEQ ID NO: 94877 - protein, 7 aa, synthetic construct
QQFESTK

SEQ ID NO: 94878 - protein, 7 aa, synthetic construct
NSMNVDK

SEQ ID NO: 94879 - protein, 7 aa, synthetic construct
RKELSPE

SEQ ID NO: 94880 - protein, 7 aa, synthetic construct
YQPTKAY

SEQ ID NO: 94881 - protein, 7 aa, synthetic construct
ATQKTHE

SEQ ID NO: 94882 - protein, 7 aa, synthetic construct
KDLISQS

SEQ ID NO: 94883 - protein, 7 aa, synthetic construct
TYHSNTL

SEQ ID NO: 94884 - protein, 7 aa, synthetic construct
VVGAYPM

SEQ ID NO: 94885 - protein, 7 aa, synthetic construct
MVYGRQG

SEQ ID NO: 94886 - protein, 7 aa, synthetic construct
TMGRSQE

SEQ ID NO: 94887 - protein, 7 aa, synthetic construct
NHASYPI

SEQ ID NO: 94888 - protein, 7 aa, synthetic construct
KDTPTVI

SEQ ID NO: 94889 - protein, 7 aa, synthetic construct
HSQTVGL

SEQ ID NO: 94890 - protein, 7 aa, synthetic construct
WKGSKDI

SEQ ID NO: 94891 - protein, 7 aa, synthetic construct
FGNASGQ

SEQ ID NO: 94892 - protein, 7 aa, synthetic construct
KPPNVAA

SEQ ID NO: 94893 - protein, 7 aa, synthetic construct
SPTIPKV

SEQ ID NO: 94894 - protein, 7 aa, synthetic construct
IQQSGQH

SEQ ID NO: 94895 - protein, 7 aa, synthetic construct
YRTTAFQ

SEQ ID NO: 94896 - protein, 7 aa, synthetic construct
NYRDKIM

SEQ ID NO: 94897 - protein, 7 aa, synthetic construct
SAMPSDK

SEQ ID NO: 94898 - protein, 7 aa, synthetic construct
SMGHPLI

SEQ ID NO: 94899 - protein, 7 aa, synthetic construct
DGPNILK

SEQ ID NO: 94900 - protein, 7 aa, synthetic construct
TGPDKFL

SEQ ID NO: 94901 - protein, 7 aa, synthetic construct
LPKMEIF

SEQ ID NO: 94902 - protein, 7 aa, synthetic construct
NISPRVT

SEQ ID NO: 94903 - protein, 7 aa, synthetic construct
HQGPWPA

SEQ ID NO: 94904 - protein, 7 aa, synthetic construct
VLNYRSG

SEQ ID NO: 94905 - protein, 7 aa, synthetic construct
DEKWKSE

SEQ ID NO: 94906 - protein, 7 aa, synthetic construct
PREARFV

SEQ ID NO: 94907 - protein, 7 aa, synthetic construct
SNRNSVE

SEQ ID NO: 94908 - protein, 7 aa, synthetic construct
ASMGNLR

SEQ ID NO: 94909 - protein, 7 aa, synthetic construct
PDMLTMK

SEQ ID NO: 94910 - protein, 7 aa, synthetic construct
VNLNRTL

SEQ ID NO: 94911 - protein, 7 aa, synthetic construct
NGKSMPW

SEQ ID NO: 94912 - protein, 7 aa, synthetic construct
INDKFDM

SEQ ID NO: 94913 - protein, 7 aa, synthetic construct
FPSKENW

SEQ ID NO: 94914 - protein, 7 aa, synthetic construct
GLGGINP

SEQ ID NO: 94915 - protein, 7 aa, synthetic construct
VGMMQNM

SEQ ID NO: 94916 - protein, 7 aa, synthetic construct
PDKPQKI

SEQ ID NO: 94917 - protein, 7 aa, synthetic construct
VPINGHT

SEQ ID NO: 94918 - protein, 7 aa, synthetic construct
WDRVHDT

SEQ ID NO: 94919 - protein, 7 aa, synthetic construct
NGHTEKS

SEQ ID NO: 94920 - protein, 7 aa, synthetic construct
HNANKLW

SEQ ID NO: 94921 - protein, 7 aa, synthetic construct
YYGFKDD

SEQ ID NO: 94922 - protein, 7 aa, synthetic construct
MGTNFNE

SEQ ID NO: 94923 - protein, 7 aa, synthetic construct
GSMPKNA

SEQ ID NO: 94924 - protein, 7 aa, synthetic construct
NELKDRA

SEQ ID NO: 94925 - protein, 7 aa, synthetic construct
VMGKWES

SEQ ID NO: 94926 - protein, 7 aa, synthetic construct
KPDWTSN

SEQ ID NO: 94927 - protein, 7 aa, synthetic construct
TEVMHER

SEQ ID NO: 94928 - protein, 7 aa, synthetic construct
HSAGLNT

SEQ ID NO: 94929 - protein, 7 aa, synthetic construct
TYLQQRA

SEQ ID NO: 94930 - protein, 7 aa, synthetic construct
KESHPFR

SEQ ID NO: 94931 - protein, 7 aa, synthetic construct
HDRESLT

SEQ ID NO: 94932 - protein, 7 aa, synthetic construct
GNRENYG

SEQ ID NO: 94933 - protein, 7 aa, synthetic construct
KEFTSHH

SEQ ID NO: 94934 - protein, 7 aa, synthetic construct
TWPHEKM

SEQ ID NO: 94935 - protein, 7 aa, synthetic construct
SSGMKIL

SEQ ID NO: 94936 - protein, 7 aa, synthetic construct
QTNIVAI

SEQ ID NO: 94937 - protein, 7 aa, synthetic construct
NKAPSDA

SEQ ID NO: 94938 - protein, 7 aa, synthetic construct
QFASAAP

SEQ ID NO: 94939 - protein, 7 aa, synthetic construct
QYNSRMH

SEQ ID NO: 94940 - protein, 7 aa, synthetic construct
VRSDQLH

SEQ ID NO: 94941 - protein, 7 aa, synthetic construct
NSAHPTT

SEQ ID NO: 94942 - protein, 7 aa, synthetic construct
FAADASY

SEQ ID NO: 94943 - protein, 7 aa, synthetic construct
WYPDAPS

SEQ ID NO: 94944 - protein, 7 aa, synthetic construct
AMNKIYV

SEQ ID NO: 94945 - protein, 7 aa, synthetic construct
WTNKALL

SEQ ID NO: 94946 - protein, 7 aa, synthetic construct
QQRGAPP

SEQ ID NO: 94947 - protein, 7 aa, synthetic construct
GVLNMPG

SEQ ID NO: 94948 - protein, 7 aa, synthetic construct
ANYHETK

SEQ ID NO: 94949 - protein, 7 aa, synthetic construct
AAPYQEK

SEQ ID NO: 94950 - protein, 7 aa, synthetic construct
DFSSDTF

SEQ ID NO: 94951 - protein, 7 aa, synthetic construct
HDNKYPK

SEQ ID NO: 94952 - protein, 7 aa, synthetic construct
ENQKMTY

SEQ ID NO: 94953 - protein, 7 aa, synthetic construct
KIAGTGL

SEQ ID NO: 94954 - protein, 7 aa, synthetic construct
QELQHIA

SEQ ID NO: 94955 - protein, 7 aa, synthetic construct
RYTKDGA

SEQ ID NO: 94956 - protein, 7 aa, synthetic construct
QISPHSG

SEQ ID NO: 94957 - protein, 7 aa, synthetic construct
SGQRERY

SEQ ID NO: 94958 - protein, 7 aa, synthetic construct
LKNEIIK

SEQ ID NO: 94959 - protein, 7 aa, synthetic construct
IGLNEAV

SEQ ID NO: 94960 - protein, 7 aa, synthetic construct
ALAHKNA

SEQ ID NO: 94961 - protein, 7 aa, synthetic construct
FSKHATY

SEQ ID NO: 94962 - protein, 7 aa, synthetic construct
ETKHTEP

SEQ ID NO: 94963 - protein, 7 aa, synthetic construct
DLPRHML

SEQ ID NO: 94964 - protein, 7 aa, synthetic construct
GKHMEWT

SEQ ID NO: 94965 - protein, 7 aa, synthetic construct
TGDKGAS

SEQ ID NO: 94966 - protein, 7 aa, synthetic construct
IKITNIN

SEQ ID NO: 94967 - protein, 7 aa, synthetic construct
FADSGTR

SEQ ID NO: 94968 - protein, 7 aa, synthetic construct
VHPEAHK

SEQ ID NO: 94969 - protein, 7 aa, synthetic construct
SSHVPLT

SEQ ID NO: 94970 - protein, 7 aa, synthetic construct
LGHNFAM

SEQ ID NO: 94971 - protein, 7 aa, synthetic construct
NKLNQRD

SEQ ID NO: 94972 - protein, 7 aa, synthetic construct
VGDWTLK

SEQ ID NO: 94973 - protein, 7 aa, synthetic construct
NVAPKFE

SEQ ID NO: 94974 - protein, 7 aa, synthetic construct
TPIPHQH

SEQ ID NO: 94975 - protein, 7 aa, synthetic construct
NGYPMAG

SEQ ID NO: 94976 - protein, 7 aa, synthetic construct
TFPVATR

SEQ ID NO: 94977 - protein, 7 aa, synthetic construct
MAEPSKK

SEQ ID NO: 94978 - protein, 7 aa, synthetic construct
GTPNIPH

SEQ ID NO: 94979 - protein, 7 aa, synthetic construct
GIDHIAA

SEQ ID NO: 94980 - protein, 7 aa, synthetic construct
MERSHAM

SEQ ID NO: 94981 - protein, 7 aa, synthetic construct
LQTRSGY

SEQ ID NO: 94982 - protein, 7 aa, synthetic construct
PLPSRTH

SEQ ID NO: 94983 - protein, 7 aa, synthetic construct
TGKTGNA

SEQ ID NO: 94984 - protein, 7 aa, synthetic construct
TTGKHPY

SEQ ID NO: 94985 - protein, 7 aa, synthetic construct
VSAAGNH

SEQ ID NO: 94986 - protein, 7 aa, synthetic construct
QHRVDFD

SEQ ID NO: 94987 - protein, 7 aa, synthetic construct
TAGDQNT

SEQ ID NO: 94988 - protein, 7 aa, synthetic construct
GLMGEPT

SEQ ID NO: 94989 - protein, 7 aa, synthetic construct
SQKAIKE

SEQ ID NO: 94990 - protein, 7 aa, synthetic construct
QLHGIKV

SEQ ID NO: 94991 - protein, 7 aa, synthetic construct
VNRNGQA

SEQ ID NO: 94992 - protein, 7 aa, synthetic construct
TWEPRQP

SEQ ID NO: 94993 - protein, 7 aa, synthetic construct
TESAHVI

SEQ ID NO: 94994 - protein, 7 aa, synthetic construct
MGKLAYH

SEQ ID NO: 94995 - protein, 7 aa, synthetic construct
DRHKDIS

SEQ ID NO: 94996 - protein, 7 aa, synthetic construct
LGVDKRF

SEQ ID NO: 94997 - protein, 7 aa, synthetic construct
REVKISH

SEQ ID NO: 94998 - protein, 7 aa, synthetic construct
IRSMVGP

SEQ ID NO: 94999 - protein, 7 aa, synthetic construct
TSHQHGP

SEQ ID NO: 95000 - protein, 7 aa, synthetic construct
RPMRVEM

SEQ ID NO: 95001 - protein, 7 aa, synthetic construct
GLRILHD

SEQ ID NO: 95002 - protein, 7 aa, synthetic construct
KLPGLEM

SEQ ID NO: 95003 - protein, 7 aa, synthetic construct
QNRTTGP

SEQ ID NO: 95004 - protein, 7 aa, synthetic construct
RGQWKEP

SEQ ID NO: 95005 - protein, 7 aa, synthetic construct
FTNFDQG

SEQ ID NO: 95006 - protein, 7 aa, synthetic construct
GKTMSGA

SEQ ID NO: 95007 - protein, 7 aa, synthetic construct
QFKEPEH

SEQ ID NO: 95008 - protein, 7 aa, synthetic construct
KPLFQHD

SEQ ID NO: 95009 - protein, 7 aa, synthetic construct
KELPQIA

SEQ ID NO: 95010 - protein, 7 aa, synthetic construct
VNRQNPM

SEQ ID NO: 95011 - protein, 7 aa, synthetic construct
KMQHLAH

SEQ ID NO: 95012 - protein, 7 aa, synthetic construct
IDVVRDH

SEQ ID NO: 95013 - protein, 7 aa, synthetic construct
YPVEQRT

SEQ ID NO: 95014 - protein, 7 aa, synthetic construct
GDIQFPR

SEQ ID NO: 95015 - protein, 7 aa, synthetic construct
QQKQAHI

SEQ ID NO: 95016 - protein, 7 aa, synthetic construct
PARGDDP

SEQ ID NO: 95017 - protein, 7 aa, synthetic construct
WRDNIKD

SEQ ID NO: 95018 - protein, 7 aa, synthetic construct
VLARGSH

SEQ ID NO: 95019 - protein, 7 aa, synthetic construct
PVYAEPK

SEQ ID NO: 95020 - protein, 7 aa, synthetic construct
PDKDRGG

SEQ ID NO: 95021 - protein, 7 aa, synthetic construct
GYQAQLN

SEQ ID NO: 95022 - protein, 7 aa, synthetic construct
RPTSSTS

SEQ ID NO: 95023 - protein, 7 aa, synthetic construct
KIPTQSS

SEQ ID NO: 95024 - protein, 7 aa, synthetic construct
GKHDDKN

SEQ ID NO: 95025 - protein, 7 aa, synthetic construct
DGKTSQI

SEQ ID NO: 95026 - protein, 7 aa, synthetic construct
EAGVNLI

SEQ ID NO: 95027 - protein, 7 aa, synthetic construct
NYPKMHH

SEQ ID NO: 95028 - protein, 7 aa, synthetic construct
HMANPRD

SEQ ID NO: 95029 - protein, 7 aa, synthetic construct
KPNDPLS

SEQ ID NO: 95030 - protein, 7 aa, synthetic construct
MPAYLTN

SEQ ID NO: 95031 - protein, 7 aa, synthetic construct
AIPKSLE

SEQ ID NO: 95032 - protein, 7 aa, synthetic construct
GFANSTQ

SEQ ID NO: 95033 - protein, 7 aa, synthetic construct
YPTKSGA

SEQ ID NO: 95034 - protein, 7 aa, synthetic construct
SRSTYHA

SEQ ID NO: 95035 - protein, 7 aa, synthetic construct
HAFQQRG

SEQ ID NO: 95036 - protein, 7 aa, synthetic construct
SVKADRA

SEQ ID NO: 95037 - protein, 7 aa, synthetic construct
VRYDSNA

SEQ ID NO: 95038 - protein, 7 aa, synthetic construct
QGTKPAC

SEQ ID NO: 95039 - protein, 7 aa, synthetic construct
KVRQEME

SEQ ID NO: 95040 - protein, 7 aa, synthetic construct
AMDRVGT

SEQ ID NO: 95041 - protein, 7 aa, synthetic construct
TDMKSLN

SEQ ID NO: 95042 - protein, 7 aa, synthetic construct
EQQNMWK

SEQ ID NO: 95043 - protein, 7 aa, synthetic construct
IQPNKAP

SEQ ID NO: 95044 - protein, 7 aa, synthetic construct
KYEKQMI

SEQ ID NO: 95045 - protein, 7 aa, synthetic construct
VLKADWS

SEQ ID NO: 95046 - protein, 7 aa, synthetic construct
KTHTLNY

SEQ ID NO: 95047 - protein, 7 aa, synthetic construct
GTKVNTQ

SEQ ID NO: 95048 - protein, 7 aa, synthetic construct
PQKEPTV

SEQ ID NO: 95049 - protein, 7 aa, synthetic construct
AGYAVAT

SEQ ID NO: 95050 - protein, 7 aa, synthetic construct
EANQERS

SEQ ID NO: 95051 - protein, 7 aa, synthetic construct
VAHQDSR

SEQ ID NO: 95052 - protein, 7 aa, synthetic construct
GLSPVPM

SEQ ID NO: 95053 - protein, 7 aa, synthetic construct
RQNSHTW

SEQ ID NO: 95054 - protein, 7 aa, synthetic construct
KHVMQKE

SEQ ID NO: 95055 - protein, 7 aa, synthetic construct
NNKTMRP

SEQ ID NO: 95056 - protein, 7 aa, synthetic construct
QYKDGQW

SEQ ID NO: 95057 - protein, 7 aa, synthetic construct
LVQRDAT

SEQ ID NO: 95058 - protein, 7 aa, synthetic construct
MMAQNRT

SEQ ID NO: 95059 - protein, 7 aa, synthetic construct
SDNHDRP

SEQ ID NO: 95060 - protein, 7 aa, synthetic construct
LKHDHDS

SEQ ID NO: 95061 - protein, 7 aa, synthetic construct
QAANLMT

SEQ ID NO: 95062 - protein, 7 aa, synthetic construct
NFQTRNG

SEQ ID NO: 95063 - protein, 7 aa, synthetic construct
IFPKGTH

SEQ ID NO: 95064 - protein, 7 aa, synthetic construct
QNAVVGQ

SEQ ID NO: 95065 - protein, 7 aa, synthetic construct
RDILKPD

SEQ ID NO: 95066 - protein, 7 aa, synthetic construct
YTDFTPD

SEQ ID NO: 95067 - protein, 7 aa, synthetic construct
TEGALRW

SEQ ID NO: 95068 - protein, 7 aa, synthetic construct
HFKHDLD

SEQ ID NO: 95069 - protein, 7 aa, synthetic construct
KQIDVNP

SEQ ID NO: 95070 - protein, 7 aa, synthetic construct
DLMTREK

SEQ ID NO: 95071 - protein, 7 aa, synthetic construct
SSSYIHD

SEQ ID NO: 95072 - protein, 7 aa, synthetic construct
RSTNGIP

SEQ ID NO: 95073 - protein, 7 aa, synthetic construct
PYNSGEK

SEQ ID NO: 95074 - protein, 7 aa, synthetic construct
PGEKGMV

SEQ ID NO: 95075 - protein, 7 aa, synthetic construct
QQPHVRH

SEQ ID NO: 95076 - protein, 7 aa, synthetic construct
KPYPMLD

SEQ ID NO: 95077 - protein, 7 aa, synthetic construct
AQQLQHM

SEQ ID NO: 95078 - protein, 7 aa, synthetic construct
PGQAKAN

SEQ ID NO: 95079 - protein, 7 aa, synthetic construct
NEQITQV

SEQ ID NO: 95080 - protein, 7 aa, synthetic construct
GVHHRAE

SEQ ID NO: 95081 - protein, 7 aa, synthetic construct
TSKTKDA

SEQ ID NO: 95082 - protein, 7 aa, synthetic construct
HNDQGKL

SEQ ID NO: 95083 - protein, 7 aa, synthetic construct
NTQTTFM

SEQ ID NO: 95084 - protein, 7 aa, synthetic construct
SSDQFKF

SEQ ID NO: 95085 - protein, 7 aa, synthetic construct
SVQWLEE

SEQ ID NO: 95086 - protein, 7 aa, synthetic construct
HAASVMT

SEQ ID NO: 95087 - protein, 7 aa, synthetic construct
YQTTPVK

SEQ ID NO: 95088 - protein, 7 aa, synthetic construct
KNDNPNP

SEQ ID NO: 95089 - protein, 7 aa, synthetic construct
NVFGHYE

SEQ ID NO: 95090 - protein, 7 aa, synthetic construct
ASFTPGA

SEQ ID NO: 95091 - protein, 7 aa, synthetic construct
LQINGSQ

SEQ ID NO: 95092 - protein, 7 aa, synthetic construct
VQDRRDT

SEQ ID NO: 95093 - protein, 7 aa, synthetic construct
ACRGVCD

SEQ ID NO: 95094 - protein, 7 aa, synthetic construct
HSNEPQK

SEQ ID NO: 95095 - protein, 7 aa, synthetic construct
QGNYPEI

SEQ ID NO: 95096 - protein, 7 aa, synthetic construct
PMGTKMA

SEQ ID NO: 95097 - protein, 7 aa, synthetic construct
ASTEVGV

SEQ ID NO: 95098 - protein, 7 aa, synthetic construct
FMTQRDN

SEQ ID NO: 95099 - protein, 7 aa, synthetic construct
AVDMKNS

SEQ ID NO: 95100 - protein, 7 aa, synthetic construct
HLNVHEM

SEQ ID NO: 95101 - protein, 7 aa, synthetic construct
VPGMMGD

SEQ ID NO: 95102 - protein, 7 aa, synthetic construct
NYAAPLL

SEQ ID NO: 95103 - protein, 7 aa, synthetic construct
ELIAKKM

SEQ ID NO: 95104 - protein, 7 aa, synthetic construct
YSNSKTP

SEQ ID NO: 95105 - protein, 7 aa, synthetic construct
TATRVQG

SEQ ID NO: 95106 - protein, 7 aa, synthetic construct
QSASMMG

SEQ ID NO: 95107 - protein, 7 aa, synthetic construct
AWERVGS

SEQ ID NO: 95108 - protein, 7 aa, synthetic construct
NGMGSTE

SEQ ID NO: 95109 - protein, 7 aa, synthetic construct
ISNKVPI

SEQ ID NO: 95110 - protein, 7 aa, synthetic construct
SQQLQRN

SEQ ID NO: 95111 - protein, 7 aa, synthetic construct
GWAHAGE

SEQ ID NO: 95112 - protein, 7 aa, synthetic construct
TNAVIYE

SEQ ID NO: 95113 - protein, 7 aa, synthetic construct
LREKYIT

SEQ ID NO: 95114 - protein, 7 aa, synthetic construct
GKPNQSM

SEQ ID NO: 95115 - protein, 7 aa, synthetic construct
KMNEQMP

SEQ ID NO: 95116 - protein, 7 aa, synthetic construct
KISISEE

SEQ ID NO: 95117 - protein, 7 aa, synthetic construct
ARHPHAT

SEQ ID NO: 95118 - protein, 7 aa, synthetic construct
FFQTGMD

SEQ ID NO: 95119 - protein, 7 aa, synthetic construct
NREYSSM

SEQ ID NO: 95120 - protein, 7 aa, synthetic construct
QQFAKGL

SEQ ID NO: 95121 - protein, 7 aa, synthetic construct
VVDRSRL

SEQ ID NO: 95122 - protein, 7 aa, synthetic construct
IHQPSQT

SEQ ID NO: 95123 - protein, 7 aa, synthetic construct
NHMTTQK

SEQ ID NO: 95124 - protein, 7 aa, synthetic construct
EKWEGEL

SEQ ID NO: 95125 - protein, 7 aa, synthetic construct
DVSQSFG

SEQ ID NO: 95126 - protein, 7 aa, synthetic construct
GVSSTPK

SEQ ID NO: 95127 - protein, 7 aa, synthetic construct
PNVDRPK

SEQ ID NO: 95128 - protein, 7 aa, synthetic construct
QDWKGVV

SEQ ID NO: 95129 - protein, 7 aa, synthetic construct
YKVLYPE

SEQ ID NO: 95130 - protein, 7 aa, synthetic construct
VDEGRGG

SEQ ID NO: 95131 - protein, 7 aa, synthetic construct
GNTAWTG

SEQ ID NO: 95132 - protein, 7 aa, synthetic construct
TNFGVPV

SEQ ID NO: 95133 - protein, 7 aa, synthetic construct
TGTWEAR

SEQ ID NO: 95134 - protein, 7 aa, synthetic construct
RTFADAK

SEQ ID NO: 95135 - protein, 7 aa, synthetic construct
GALLVEG

SEQ ID NO: 95136 - protein, 7 aa, synthetic construct
IKSSVVF

SEQ ID NO: 95137 - protein, 7 aa, synthetic construct
MLNSHFE

SEQ ID NO: 95138 - protein, 7 aa, synthetic construct
VMEAFQA

SEQ ID NO: 95139 - protein, 7 aa, synthetic construct
AMQKDKF

SEQ ID NO: 95140 - protein, 7 aa, synthetic construct
TGGLNLI

SEQ ID NO: 95141 - protein, 7 aa, synthetic construct
PQFMDGR

SEQ ID NO: 95142 - protein, 7 aa, synthetic construct
PWTSQTS

SEQ ID NO: 95143 - protein, 7 aa, synthetic construct
KTSNGAP

SEQ ID NO: 95144 - protein, 7 aa, synthetic construct
TYRQDGR

SEQ ID NO: 95145 - protein, 7 aa, synthetic construct
NTNSKTA

SEQ ID NO: 95146 - protein, 7 aa, synthetic construct
LDFIEKK

SEQ ID NO: 95147 - protein, 7 aa, synthetic construct
SLPAKHH

SEQ ID NO: 95148 - protein, 7 aa, synthetic construct
LAPRIQT

SEQ ID NO: 95149 - protein, 7 aa, synthetic construct
DVYKPMM

SEQ ID NO: 95150 - protein, 7 aa, synthetic construct
YKDSSHI

SEQ ID NO: 95151 - protein, 7 aa, synthetic construct
RQINIAD

SEQ ID NO: 95152 - protein, 7 aa, synthetic construct
RPDIHSV

SEQ ID NO: 95153 - protein, 7 aa, synthetic construct
PGSFAPN

SEQ ID NO: 95154 - protein, 7 aa, synthetic construct
HDVPAMP

SEQ ID NO: 95155 - protein, 7 aa, synthetic construct
IKSTNQA

SEQ ID NO: 95156 - protein, 7 aa, synthetic construct
RGPHQPY

SEQ ID NO: 95157 - protein, 7 aa, synthetic construct
HHDERPF

SEQ ID NO: 95158 - protein, 7 aa, synthetic construct
MHHADRL

SEQ ID NO: 95159 - protein, 7 aa, synthetic construct
MQNAPQK

SEQ ID NO: 95160 - protein, 7 aa, synthetic construct
VHNLAQD

SEQ ID NO: 95161 - protein, 7 aa, synthetic construct
ENRNVSQ

SEQ ID NO: 95162 - protein, 7 aa, synthetic construct
VAAPSHP

SEQ ID NO: 95163 - protein, 7 aa, synthetic construct
IEREWTV

SEQ ID NO: 95164 - protein, 7 aa, synthetic construct
NNAIGQG

SEQ ID NO: 95165 - protein, 7 aa, synthetic construct
RFGREAD

SEQ ID NO: 95166 - protein, 7 aa, synthetic construct
PTGIPSR

SEQ ID NO: 95167 - protein, 7 aa, synthetic construct
MSRDDML

SEQ ID NO: 95168 - protein, 7 aa, synthetic construct
TIPRDFN

SEQ ID NO: 95169 - protein, 7 aa, synthetic construct
QQQSMNN

SEQ ID NO: 95170 - protein, 7 aa, synthetic construct
EFEPQRN

SEQ ID NO: 95171 - protein, 7 aa, synthetic construct
PSHQQAP

SEQ ID NO: 95172 - protein, 7 aa, synthetic construct
HERQPHV

SEQ ID NO: 95173 - protein, 7 aa, synthetic construct
TRNPPQY

SEQ ID NO: 95174 - protein, 7 aa, synthetic construct
PVKIHDI

SEQ ID NO: 95175 - protein, 7 aa, synthetic construct
HEPFKLS

SEQ ID NO: 95176 - protein, 7 aa, synthetic construct
PWNPTKV

SEQ ID NO: 95177 - protein, 7 aa, synthetic construct
RMDNLMS

SEQ ID NO: 95178 - protein, 7 aa, synthetic construct
AAKMYNE

SEQ ID NO: 95179 - protein, 7 aa, synthetic construct
QVPLKQV

SEQ ID NO: 95180 - protein, 7 aa, synthetic construct
RLGLFEG

SEQ ID NO: 95181 - protein, 7 aa, synthetic construct
SPSRPHH

SEQ ID NO: 95182 - protein, 7 aa, synthetic construct
SSQNVIP

SEQ ID NO: 95183 - protein, 7 aa, synthetic construct
MKIPEVQ

SEQ ID NO: 95184 - protein, 7 aa, synthetic construct
TKAEYMV

SEQ ID NO: 95185 - protein, 7 aa, synthetic construct
TQIGSYV

SEQ ID NO: 95186 - protein, 7 aa, synthetic construct
KFDSIQG

SEQ ID NO: 95187 - protein, 7 aa, synthetic construct
GQKNIEN

SEQ ID NO: 95188 - protein, 7 aa, synthetic construct
SVNKMTY

SEQ ID NO: 95189 - protein, 7 aa, synthetic construct
YPAKREL

SEQ ID NO: 95190 - protein, 7 aa, synthetic construct
LLAHNDF

SEQ ID NO: 95191 - protein, 7 aa, synthetic construct
VGTFFAE

SEQ ID NO: 95192 - protein, 7 aa, synthetic construct
LHQSNRI

SEQ ID NO: 95193 - protein, 7 aa, synthetic construct
WPKDKEA

SEQ ID NO: 95194 - protein, 7 aa, synthetic construct
YGHLRFE

SEQ ID NO: 95195 - protein, 7 aa, synthetic construct
TMPIPHN

SEQ ID NO: 95196 - protein, 7 aa, synthetic construct
WRQKPDL

SEQ ID NO: 95197 - protein, 7 aa, synthetic construct
DAHKNNE

SEQ ID NO: 95198 - protein, 7 aa, synthetic construct
RWTDVSA

SEQ ID NO: 95199 - protein, 7 aa, synthetic construct
KFIKVMD

SEQ ID NO: 95200 - protein, 7 aa, synthetic construct
QHMLNVP

SEQ ID NO: 95201 - protein, 7 aa, synthetic construct
TQGINGL

SEQ ID NO: 95202 - protein, 7 aa, synthetic construct
WKMTDTV

SEQ ID NO: 95203 - protein, 7 aa, synthetic construct
RWSDGVQ

SEQ ID NO: 95204 - protein, 7 aa, synthetic construct
PIGQGRE

SEQ ID NO: 95205 - protein, 7 aa, synthetic construct
KHGQHGN

SEQ ID NO: 95206 - protein, 7 aa, synthetic construct
HDMRART

SEQ ID NO: 95207 - protein, 7 aa, synthetic construct
YGANAEM

SEQ ID NO: 95208 - protein, 7 aa, synthetic construct
LERQNGK

SEQ ID NO: 95209 - protein, 7 aa, synthetic construct
NLHTTLH

SEQ ID NO: 95210 - protein, 7 aa, synthetic construct
NYQHPVK

SEQ ID NO: 95211 - protein, 7 aa, synthetic construct
NDQTHPA

SEQ ID NO: 95212 - protein, 7 aa, synthetic construct
KINKDSV

SEQ ID NO: 95213 - protein, 7 aa, synthetic construct
RRESGEG

SEQ ID NO: 95214 - protein, 7 aa, synthetic construct
TLTVVGM

SEQ ID NO: 95215 - protein, 7 aa, synthetic construct
EKANGYL

SEQ ID NO: 95216 - protein, 7 aa, synthetic construct
HERILRE

SEQ ID NO: 95217 - protein, 7 aa, synthetic construct
KPIEKDM

SEQ ID NO: 95218 - protein, 7 aa, synthetic construct
SDTHMPK

SEQ ID NO: 95219 - protein, 7 aa, synthetic construct
YANNRHH

SEQ ID NO: 95220 - protein, 7 aa, synthetic construct
GYTKSDG

SEQ ID NO: 95221 - protein, 7 aa, synthetic construct
LKPMFID

SEQ ID NO: 95222 - protein, 7 aa, synthetic construct
EMSKPMT

SEQ ID NO: 95223 - protein, 7 aa, synthetic construct
RVQVNDR

SEQ ID NO: 95224 - protein, 7 aa, synthetic construct
VSTAHKE

SEQ ID NO: 95225 - protein, 7 aa, synthetic construct
KVATSAP

SEQ ID NO: 95226 - protein, 7 aa, synthetic construct
GQAVRQV

SEQ ID NO: 95227 - protein, 7 aa, synthetic construct
PMNRNNG

SEQ ID NO: 95228 - protein, 7 aa, synthetic construct
SAHQYMV

SEQ ID NO: 95229 - protein, 7 aa, synthetic construct
VKSSNTG

SEQ ID NO: 95230 - protein, 7 aa, synthetic construct
KTGLVMV

SEQ ID NO: 95231 - protein, 7 aa, synthetic construct
GKPPAIA

SEQ ID NO: 95232 - protein, 7 aa, synthetic construct
SAYAPVD

SEQ ID NO: 95233 - protein, 7 aa, synthetic construct
SATMTIM

SEQ ID NO: 95234 - protein, 7 aa, synthetic construct
KEFGGDA

SEQ ID NO: 95235 - protein, 7 aa, synthetic construct
KIPAFQM

SEQ ID NO: 95236 - protein, 7 aa, synthetic construct
MVQGGTI

SEQ ID NO: 95237 - protein, 7 aa, synthetic construct
KAQQYDP

SEQ ID NO: 95238 - protein, 7 aa, synthetic construct
KTVIAYS

SEQ ID NO: 95239 - protein, 7 aa, synthetic construct
NMAAHKH

SEQ ID NO: 95240 - protein, 7 aa, synthetic construct
MTGVAKV

SEQ ID NO: 95241 - protein, 7 aa, synthetic construct
QRLEQNL

SEQ ID NO: 95242 - protein, 7 aa, synthetic construct
QIMKDLH

SEQ ID NO: 95243 - protein, 7 aa, synthetic construct
YSTTRMS

SEQ ID NO: 95244 - protein, 7 aa, synthetic construct
IHQSKID

SEQ ID NO: 95245 - protein, 7 aa, synthetic construct
TIISPLT

SEQ ID NO: 95246 - protein, 7 aa, synthetic construct
QQHVKTY

SEQ ID NO: 95247 - protein, 7 aa, synthetic construct
GQKDIVS

SEQ ID NO: 95248 - protein, 7 aa, synthetic construct
RTTDRVM

SEQ ID NO: 95249 - protein, 7 aa, synthetic construct
DETKVYM

SEQ ID NO: 95250 - protein, 7 aa, synthetic construct
SDSNPMR

SEQ ID NO: 95251 - protein, 7 aa, synthetic construct
VDGHHFP

SEQ ID NO: 95252 - protein, 7 aa, synthetic construct
NSMNNKP

SEQ ID NO: 95253 - protein, 7 aa, synthetic construct
AFSLKQT

SEQ ID NO: 95254 - protein, 7 aa, synthetic construct
AVKATYE

SEQ ID NO: 95255 - protein, 7 aa, synthetic construct
DRKLMEG

SEQ ID NO: 95256 - protein, 7 aa, synthetic construct
SMNHSPE

SEQ ID NO: 95257 - protein, 7 aa, synthetic construct
GYQTKNP

SEQ ID NO: 95258 - protein, 7 aa, synthetic construct
PTSGIGM

SEQ ID NO: 95259 - protein, 7 aa, synthetic construct
HQHRMGI

SEQ ID NO: 95260 - protein, 7 aa, synthetic construct
MKHEEKV

SEQ ID NO: 95261 - protein, 7 aa, synthetic construct
RQDAVHK

SEQ ID NO: 95262 - protein, 7 aa, synthetic construct
SKNFDES

SEQ ID NO: 95263 - protein, 7 aa, synthetic construct
WMDGRRT

SEQ ID NO: 95264 - protein, 7 aa, synthetic construct
SSTKGMF

SEQ ID NO: 95265 - protein, 7 aa, synthetic construct
KKDNSDQ

SEQ ID NO: 95266 - protein, 7 aa, synthetic construct
SPSYDTN

SEQ ID NO: 95267 - protein, 7 aa, synthetic construct
WSSEAGF

SEQ ID NO: 95268 - protein, 7 aa, synthetic construct
GPAGSPQ

SEQ ID NO: 95269 - protein, 7 aa, synthetic construct
TRPPQSV

SEQ ID NO: 95270 - protein, 7 aa, synthetic construct
FQREAFN

SEQ ID NO: 95271 - protein, 7 aa, synthetic construct
ARGVLKP

SEQ ID NO: 95272 - protein, 7 aa, synthetic construct
QGMTDLG

SEQ ID NO: 95273 - protein, 7 aa, synthetic construct
GMMQAMP

SEQ ID NO: 95274 - protein, 7 aa, synthetic construct
VTMGTTK

SEQ ID NO: 95275 - protein, 7 aa, synthetic construct
KHAMSQM

SEQ ID NO: 95276 - protein, 7 aa, synthetic construct
GQRAADW

SEQ ID NO: 95277 - protein, 7 aa, synthetic construct
IIAKGQH

SEQ ID NO: 95278 - protein, 7 aa, synthetic construct
NSREAAM

SEQ ID NO: 95279 - protein, 7 aa, synthetic construct
EGVHVKI

SEQ ID NO: 95280 - protein, 7 aa, synthetic construct
SNLKSHT

SEQ ID NO: 95281 - protein, 7 aa, synthetic construct
SDVRHTM

SEQ ID NO: 95282 - protein, 7 aa, synthetic construct
AGTHLHY

SEQ ID NO: 95283 - protein, 7 aa, synthetic construct
TVKMMHV

SEQ ID NO: 95284 - protein, 7 aa, synthetic construct
EIYVQKD

SEQ ID NO: 95285 - protein, 7 aa, synthetic construct
TNMGKNA

SEQ ID NO: 95286 - protein, 7 aa, synthetic construct
VAMNTLK

SEQ ID NO: 95287 - protein, 7 aa, synthetic construct
EHHSSPG

SEQ ID NO: 95288 - protein, 7 aa, synthetic construct
TGSNPPL

SEQ ID NO: 95289 - protein, 7 aa, synthetic construct
HSNQIHP

SEQ ID NO: 95290 - protein, 7 aa, synthetic construct
KPPGNMS

SEQ ID NO: 95291 - protein, 7 aa, synthetic construct
GLASQHH

SEQ ID NO: 95292 - protein, 7 aa, synthetic construct
GEGQWDR

SEQ ID NO: 95293 - protein, 7 aa, synthetic construct
QMLPKFN

SEQ ID NO: 95294 - protein, 7 aa, synthetic construct
VVYTNQH

SEQ ID NO: 95295 - protein, 7 aa, synthetic construct
HKTADIP

SEQ ID NO: 95296 - protein, 7 aa, synthetic construct
PQISMPL

SEQ ID NO: 95297 - protein, 7 aa, synthetic construct
GWTKGQL

SEQ ID NO: 95298 - protein, 7 aa, synthetic construct
YSHNVQT

SEQ ID NO: 95299 - protein, 7 aa, synthetic construct
MAMPNEH

SEQ ID NO: 95300 - protein, 7 aa, synthetic construct
YQELNVA

SEQ ID NO: 95301 - protein, 7 aa, synthetic construct
GITRFPT

SEQ ID NO: 95302 - protein, 7 aa, synthetic construct
GSDVRNQ

SEQ ID NO: 95303 - protein, 7 aa, synthetic construct
ATSTTKM

SEQ ID NO: 95304 - protein, 7 aa, synthetic construct
YHMVNHV

SEQ ID NO: 95305 - protein, 7 aa, synthetic construct
GGHIRVD

SEQ ID NO: 95306 - protein, 7 aa, synthetic construct
GPTVVRE

SEQ ID NO: 95307 - protein, 7 aa, synthetic construct
WPESQVK

SEQ ID NO: 95308 - protein, 7 aa, synthetic construct
MLKERQW

SEQ ID NO: 95309 - protein, 7 aa, synthetic construct
LPPYQER

SEQ ID NO: 95310 - protein, 7 aa, synthetic construct
NNERNVQ

SEQ ID NO: 95311 - protein, 7 aa, synthetic construct
NKGLELQ

SEQ ID NO: 95312 - protein, 7 aa, synthetic construct
QDSMPKI

SEQ ID NO: 95313 - protein, 7 aa, synthetic construct
YKVEWKG

SEQ ID NO: 95314 - protein, 7 aa, synthetic construct
QRHSDSN

SEQ ID NO: 95315 - protein, 7 aa, synthetic construct
QTGHVQS

SEQ ID NO: 95316 - protein, 7 aa, synthetic construct
MKHHPTI

SEQ ID NO: 95317 - protein, 7 aa, synthetic construct
APMRDMT

SEQ ID NO: 95318 - protein, 7 aa, synthetic construct
QTYTSIT

SEQ ID NO: 95319 - protein, 7 aa, synthetic construct
ERRNIND

SEQ ID NO: 95320 - protein, 7 aa, synthetic construct
NMPMSPI

SEQ ID NO: 95321 - protein, 7 aa, synthetic construct
QALKVNV

SEQ ID NO: 95322 - protein, 7 aa, synthetic construct
VGETMRS

SEQ ID NO: 95323 - protein, 7 aa, synthetic construct
QRNQEAA

SEQ ID NO: 95324 - protein, 7 aa, synthetic construct
MHTRFQP

SEQ ID NO: 95325 - protein, 7 aa, synthetic construct
LAPSLTL

SEQ ID NO: 95326 - protein, 7 aa, synthetic construct
KASDNFV

SEQ ID NO: 95327 - protein, 7 aa, synthetic construct
LQERTGF

SEQ ID NO: 95328 - protein, 7 aa, synthetic construct
GQGAHRG

SEQ ID NO: 95329 - protein, 7 aa, synthetic construct
VDHRAPK

SEQ ID NO: 95330 - protein, 7 aa, synthetic construct
DSGRSFE

SEQ ID NO: 95331 - protein, 7 aa, synthetic construct
NGATDMR

SEQ ID NO: 95332 - protein, 7 aa, synthetic construct
EDQKRTV

SEQ ID NO: 95333 - protein, 7 aa, synthetic construct
LSAALSN

SEQ ID NO: 95334 - protein, 7 aa, synthetic construct
PPKMEEK

SEQ ID NO: 95335 - protein, 7 aa, synthetic construct
KAERHQV

SEQ ID NO: 95336 - protein, 7 aa, synthetic construct
QDHKMET

SEQ ID NO: 95337 - protein, 7 aa, synthetic construct
RVSQVDV

SEQ ID NO: 95338 - protein, 7 aa, synthetic construct
HKDYSRT

SEQ ID NO: 95339 - protein, 7 aa, synthetic construct
DQVHTGP

SEQ ID NO: 95340 - protein, 7 aa, synthetic construct
QNGHEQF

SEQ ID NO: 95341 - protein, 7 aa, synthetic construct
MMHSTIV

SEQ ID NO: 95342 - protein, 7 aa, synthetic construct
MDQSLKE

SEQ ID NO: 95343 - protein, 7 aa, synthetic construct
GMQQKNS

SEQ ID NO: 95344 - protein, 7 aa, synthetic construct
VSKPDQH

SEQ ID NO: 95345 - protein, 7 aa, synthetic construct
SEVGVAK

SEQ ID NO: 95346 - protein, 7 aa, synthetic construct
HAGHAVK

SEQ ID NO: 95347 - protein, 7 aa, synthetic construct
PTALQVA

SEQ ID NO: 95348 - protein, 7 aa, synthetic construct
DRIANTA

SEQ ID NO: 95349 - protein, 7 aa, synthetic construct
SMKVANE

SEQ ID NO: 95350 - protein, 7 aa, synthetic construct
YLEFHEP

SEQ ID NO: 95351 - protein, 7 aa, synthetic construct
NAGSMKA

SEQ ID NO: 95352 - protein, 7 aa, synthetic construct
AAERHYH

SEQ ID NO: 95353 - protein, 7 aa, synthetic construct
KPTPQGA

SEQ ID NO: 95354 - protein, 7 aa, synthetic construct
KQKDRAE

SEQ ID NO: 95355 - protein, 7 aa, synthetic construct
RQNANLD

SEQ ID NO: 95356 - protein, 7 aa, synthetic construct
MHSMTHH

SEQ ID NO: 95357 - protein, 7 aa, synthetic construct
IGQWANN

SEQ ID NO: 95358 - protein, 7 aa, synthetic construct
WNNENVN

SEQ ID NO: 95359 - protein, 7 aa, synthetic construct
PISSQVM

SEQ ID NO: 95360 - protein, 7 aa, synthetic construct
VVMSDHS

SEQ ID NO: 95361 - protein, 7 aa, synthetic construct
AQNTKIH

SEQ ID NO: 95362 - protein, 7 aa, synthetic construct
VIVDRGM

SEQ ID NO: 95363 - protein, 7 aa, synthetic construct
HTTKGMF

SEQ ID NO: 95364 - protein, 7 aa, synthetic construct
SKPSANA

SEQ ID NO: 95365 - protein, 7 aa, synthetic construct
TERGTGH

SEQ ID NO: 95366 - protein, 7 aa, synthetic construct
FLRDANV

SEQ ID NO: 95367 - protein, 7 aa, synthetic construct
MNSKSGP

SEQ ID NO: 95368 - protein, 7 aa, synthetic construct
VSKTHDL

SEQ ID NO: 95369 - protein, 7 aa, synthetic construct
IGVVNTL

SEQ ID NO: 95370 - protein, 7 aa, synthetic construct
RMPNNSA

SEQ ID NO: 95371 - protein, 7 aa, synthetic construct
IEPKHAY

SEQ ID NO: 95372 - protein, 7 aa, synthetic construct
SAWLTQE

SEQ ID NO: 95373 - protein, 7 aa, synthetic construct
VNHDSRH

SEQ ID NO: 95374 - protein, 7 aa, synthetic construct
GRENIGK

SEQ ID NO: 95375 - protein, 7 aa, synthetic construct
YVGYEQI

SEQ ID NO: 95376 - protein, 7 aa, synthetic construct
GVFSPLP

SEQ ID NO: 95377 - protein, 7 aa, synthetic construct
DRTIPHL

SEQ ID NO: 95378 - protein, 7 aa, synthetic construct
HSQHLRS

SEQ ID NO: 95379 - protein, 7 aa, synthetic construct
HPPVHLQ

SEQ ID NO: 95380 - protein, 7 aa, synthetic construct
LKHMFNA

SEQ ID NO: 95381 - protein, 7 aa, synthetic construct
YPENMEH

SEQ ID NO: 95382 - protein, 7 aa, synthetic construct
KTKVHDM

SEQ ID NO: 95383 - protein, 7 aa, synthetic construct
GTHSLEP

SEQ ID NO: 95384 - protein, 7 aa, synthetic construct
PGTLRFE

SEQ ID NO: 95385 - protein, 7 aa, synthetic construct
STQGNVW

SEQ ID NO: 95386 - protein, 7 aa, synthetic construct
VLGPKQI

SEQ ID NO: 95387 - protein, 7 aa, synthetic construct
YKQMQQL

SEQ ID NO: 95388 - protein, 7 aa, synthetic construct
RRNAQVE

SEQ ID NO: 95389 - protein, 7 aa, synthetic construct
TRMSIRD

SEQ ID NO: 95390 - protein, 7 aa, synthetic construct
GAPQGMH

SEQ ID NO: 95391 - protein, 7 aa, synthetic construct
PNQKSGN

SEQ ID NO: 95392 - protein, 7 aa, synthetic construct
WHDSKRM

SEQ ID NO: 95393 - protein, 7 aa, synthetic construct
YDIRGVA

SEQ ID NO: 95394 - protein, 7 aa, synthetic construct
HHPYSGG

SEQ ID NO: 95395 - protein, 7 aa, synthetic construct
KTNPAML

SEQ ID NO: 95396 - protein, 7 aa, synthetic construct
QYGEQKI

SEQ ID NO: 95397 - protein, 7 aa, synthetic construct
LGPDSKF

SEQ ID NO: 95398 - protein, 7 aa, synthetic construct
AMAPFNK

SEQ ID NO: 95399 - protein, 7 aa, synthetic construct
GSPSRES

SEQ ID NO: 95400 - protein, 7 aa, synthetic construct
RRVYDDT

SEQ ID NO: 95401 - protein, 7 aa, synthetic construct
QNKHEEG

SEQ ID NO: 95402 - protein, 7 aa, synthetic construct
NSNMIKS

SEQ ID NO: 95403 - protein, 7 aa, synthetic construct
IKYAYQD

SEQ ID NO: 95404 - protein, 7 aa, synthetic construct
ERSLDYK

SEQ ID NO: 95405 - protein, 7 aa, synthetic construct
EEMKKDF

SEQ ID NO: 95406 - protein, 7 aa, synthetic construct
MFQEFNG

SEQ ID NO: 95407 - protein, 7 aa, synthetic construct
NKVYAQE

SEQ ID NO: 95408 - protein, 7 aa, synthetic construct
NMMQVTV

SEQ ID NO: 95409 - protein, 7 aa, synthetic construct
HFPETAI

SEQ ID NO: 95410 - protein, 7 aa, synthetic construct
VEFRSER

SEQ ID NO: 95411 - protein, 7 aa, synthetic construct
QPVGKQS

SEQ ID NO: 95412 - protein, 7 aa, synthetic construct
TPGPNTN

SEQ ID NO: 95413 - protein, 7 aa, synthetic construct
FLGGRIA

SEQ ID NO: 95414 - protein, 7 aa, synthetic construct
HMHMGFD

SEQ ID NO: 95415 - protein, 7 aa, synthetic construct
GIGATAG

SEQ ID NO: 95416 - protein, 7 aa, synthetic construct
AVKVTID

SEQ ID NO: 95417 - protein, 7 aa, synthetic construct
NPQLNPV

SEQ ID NO: 95418 - protein, 7 aa, synthetic construct
PQKAELF

SEQ ID NO: 95419 - protein, 7 aa, synthetic construct
DGLSLAS

SEQ ID NO: 95420 - protein, 7 aa, synthetic construct
IREELNV

SEQ ID NO: 95421 - protein, 7 aa, synthetic construct
CPLVSCG

SEQ ID NO: 95422 - protein, 7 aa, synthetic construct
SNDLHAS

SEQ ID NO: 95423 - protein, 7 aa, synthetic construct
HHHNIEA

SEQ ID NO: 95424 - protein, 7 aa, synthetic construct
QAHSHGI

SEQ ID NO: 95425 - protein, 7 aa, synthetic construct
HNMTVSL

SEQ ID NO: 95426 - protein, 7 aa, synthetic construct
TTYPKHP

SEQ ID NO: 95427 - protein, 7 aa, synthetic construct
VSHAIAT

SEQ ID NO: 95428 - protein, 7 aa, synthetic construct
TQNRTIW

SEQ ID NO: 95429 - protein, 7 aa, synthetic construct
QAAHTMG

SEQ ID NO: 95430 - protein, 7 aa, synthetic construct
FITGTSI

SEQ ID NO: 95431 - protein, 7 aa, synthetic construct
PIQKLRD

SEQ ID NO: 95432 - protein, 7 aa, synthetic construct
NSHAIEA

SEQ ID NO: 95433 - protein, 7 aa, synthetic construct
TPQFIRA

SEQ ID NO: 95434 - protein, 7 aa, synthetic construct
WDAAGPA

SEQ ID NO: 95435 - protein, 7 aa, synthetic construct
QRSGIHE

SEQ ID NO: 95436 - protein, 7 aa, synthetic construct
FYLKNGN

SEQ ID NO: 95437 - protein, 7 aa, synthetic construct
KWSNGGM

SEQ ID NO: 95438 - protein, 7 aa, synthetic construct
SKKDQKD

SEQ ID NO: 95439 - protein, 7 aa, synthetic construct
IHLGTTM

SEQ ID NO: 95440 - protein, 7 aa, synthetic construct
HSHDQPS

SEQ ID NO: 95441 - protein, 7 aa, synthetic construct
DFHEFAA

SEQ ID NO: 95442 - protein, 7 aa, synthetic construct
RIASLER

SEQ ID NO: 95443 - protein, 7 aa, synthetic construct
EDRKQIP

SEQ ID NO: 95444 - protein, 7 aa, synthetic construct
RPGEEVM

SEQ ID NO: 95445 - protein, 7 aa, synthetic construct
NTNYVKY

SEQ ID NO: 95446 - protein, 7 aa, synthetic construct
KFIEKRE

SEQ ID NO: 95447 - protein, 7 aa, synthetic construct
RSYETPM

SEQ ID NO: 95448 - protein, 7 aa, synthetic construct
WDRKTIG

SEQ ID NO: 95449 - protein, 7 aa, synthetic construct
AREEWHH

SEQ ID NO: 95450 - protein, 7 aa, synthetic construct
WHVNAAD

SEQ ID NO: 95451 - protein, 7 aa, synthetic construct
AWDNKAR

SEQ ID NO: 95452 - protein, 7 aa, synthetic construct
RKDQIAN

SEQ ID NO: 95453 - protein, 7 aa, synthetic construct
NISQIRA

SEQ ID NO: 95454 - protein, 7 aa, synthetic construct
WLKSSTP

SEQ ID NO: 95455 - protein, 7 aa, synthetic construct
AGQNFLK

SEQ ID NO: 95456 - protein, 7 aa, synthetic construct
TAAGKFT

SEQ ID NO: 95457 - protein, 7 aa, synthetic construct
SFYAAEK

SEQ ID NO: 95458 - protein, 7 aa, synthetic construct
ISNMISE

SEQ ID NO: 95459 - protein, 7 aa, synthetic construct
HHINAIP

SEQ ID NO: 95460 - protein, 7 aa, synthetic construct
HKLPPID

SEQ ID NO: 95461 - protein, 7 aa, synthetic construct
MTHSTAY

SEQ ID NO: 95462 - protein, 7 aa, synthetic construct
TSIQYLG

SEQ ID NO: 95463 - protein, 7 aa, synthetic construct
RYKAVDV

SEQ ID NO: 95464 - protein, 7 aa, synthetic construct
MKGVQHS

SEQ ID NO: 95465 - protein, 7 aa, synthetic construct
QMIQNGA

SEQ ID NO: 95466 - protein, 7 aa, synthetic construct
QLRNMEF

SEQ ID NO: 95467 - protein, 7 aa, synthetic construct
HTYSQKT

SEQ ID NO: 95468 - protein, 7 aa, synthetic construct
PPVKDNG

SEQ ID NO: 95469 - protein, 7 aa, synthetic construct
SQFPVVD

SEQ ID NO: 95470 - protein, 7 aa, synthetic construct
KEGHHVH

SEQ ID NO: 95471 - protein, 7 aa, synthetic construct
NPGKAGN

SEQ ID NO: 95472 - protein, 7 aa, synthetic construct
KQTQLQV

SEQ ID NO: 95473 - protein, 7 aa, synthetic construct
AVTRVEH

SEQ ID NO: 95474 - protein, 7 aa, synthetic construct
NRLNTII

SEQ ID NO: 95475 - protein, 7 aa, synthetic construct
YMQSDNP

SEQ ID NO: 95476 - protein, 7 aa, synthetic construct
THQNQSM

SEQ ID NO: 95477 - protein, 7 aa, synthetic construct
HSPEWPA

SEQ ID NO: 95478 - protein, 7 aa, synthetic construct
VPPGDFV

SEQ ID NO: 95479 - protein, 7 aa, synthetic construct
NPMKAVQ

SEQ ID NO: 95480 - protein, 7 aa, synthetic construct
PDKYKMG

SEQ ID NO: 95481 - protein, 7 aa, synthetic construct
NPMVGTY

SEQ ID NO: 95482 - protein, 7 aa, synthetic construct
PTHQQIL

SEQ ID NO: 95483 - protein, 7 aa, synthetic construct
RDAPYKL

SEQ ID NO: 95484 - protein, 7 aa, synthetic construct
PVGKMAE

SEQ ID NO: 95485 - protein, 7 aa, synthetic construct
EITDGGK

SEQ ID NO: 95486 - protein, 7 aa, synthetic construct
YAPDKIG

SEQ ID NO: 95487 - protein, 7 aa, synthetic construct
RLKLNEQ

SEQ ID NO: 95488 - protein, 7 aa, synthetic construct
YGSVLQK

SEQ ID NO: 95489 - protein, 7 aa, synthetic construct
KTVTVSD

SEQ ID NO: 95490 - protein, 7 aa, synthetic construct
IVSQSPF

SEQ ID NO: 95491 - protein, 7 aa, synthetic construct
NSNVTQK

SEQ ID NO: 95492 - protein, 7 aa, synthetic construct
KVVPEPD

SEQ ID NO: 95493 - protein, 7 aa, synthetic construct
THRITEA

SEQ ID NO: 95494 - protein, 7 aa, synthetic construct
YPIDKQW

SEQ ID NO: 95495 - protein, 7 aa, synthetic construct
HGNFSNV

SEQ ID NO: 95496 - protein, 7 aa, synthetic construct
VRMKEFA

SEQ ID NO: 95497 - protein, 7 aa, synthetic construct
AMTPGYK

SEQ ID NO: 95498 - protein, 7 aa, synthetic construct
RTTDNWK

SEQ ID NO: 95499 - protein, 7 aa, synthetic construct
KPVSYDT

SEQ ID NO: 95500 - protein, 7 aa, synthetic construct
APPLMSN

SEQ ID NO: 95501 - protein, 7 aa, synthetic construct
PFRSEFS

SEQ ID NO: 95502 - protein, 7 aa, synthetic construct
GGRVSSY

SEQ ID NO: 95503 - protein, 7 aa, synthetic construct
TLAEQNR

SEQ ID NO: 95504 - protein, 7 aa, synthetic construct
DKEHTPF

SEQ ID NO: 95505 - protein, 7 aa, synthetic construct
WKVTGQE

SEQ ID NO: 95506 - protein, 7 aa, synthetic construct
RADNPVK

SEQ ID NO: 95507 - protein, 7 aa, synthetic construct
PHNRNNL

SEQ ID NO: 95508 - protein, 7 aa, synthetic construct
KKHDQWP

SEQ ID NO: 95509 - protein, 7 aa, synthetic construct
GKSAQGA

SEQ ID NO: 95510 - protein, 7 aa, synthetic construct
AGQHILP

SEQ ID NO: 95511 - protein, 7 aa, synthetic construct
PIQHDHM

SEQ ID NO: 95512 - protein, 7 aa, synthetic construct
NMVHGSG

SEQ ID NO: 95513 - protein, 7 aa, synthetic construct
HIIKSNP

SEQ ID NO: 95514 - protein, 7 aa, synthetic construct
SVSQVGK

SEQ ID NO: 95515 - protein, 7 aa, synthetic construct
APMTQSH

SEQ ID NO: 95516 - protein, 7 aa, synthetic construct
FKVKIVD

SEQ ID NO: 95517 - protein, 7 aa, synthetic construct
WTKSMIT

SEQ ID NO: 95518 - protein, 7 aa, synthetic construct
PPRPNMM

SEQ ID NO: 95519 - protein, 7 aa, synthetic construct
WSDRNDV

SEQ ID NO: 95520 - protein, 7 aa, synthetic construct
YHEITYN

SEQ ID NO: 95521 - protein, 7 aa, synthetic construct
ANEIMAH

SEQ ID NO: 95522 - protein, 7 aa, synthetic construct
VLAQRQQ

SEQ ID NO: 95523 - protein, 7 aa, synthetic construct
FGHREQN

SEQ ID NO: 95524 - protein, 7 aa, synthetic construct
DLFLSKD

SEQ ID NO: 95525 - protein, 7 aa, synthetic construct
LALRPAT

SEQ ID NO: 95526 - protein, 7 aa, synthetic construct
TGDMLFA

SEQ ID NO: 95527 - protein, 7 aa, synthetic construct
PQSQQTI

SEQ ID NO: 95528 - protein, 7 aa, synthetic construct
QVDMVKI

SEQ ID NO: 95529 - protein, 7 aa, synthetic construct
RMTNMQH

SEQ ID NO: 95530 - protein, 7 aa, synthetic construct
GHTGAII

SEQ ID NO: 95531 - protein, 7 aa, synthetic construct
GLRYDGN

SEQ ID NO: 95532 - protein, 7 aa, synthetic construct
TTNKAQA

SEQ ID NO: 95533 - protein, 7 aa, synthetic construct
PRTSQGE

SEQ ID NO: 95534 - protein, 7 aa, synthetic construct
HVMQTLD

SEQ ID NO: 95535 - protein, 7 aa, synthetic construct
FKNIDAT

SEQ ID NO: 95536 - protein, 7 aa, synthetic construct
TLQSVKY

SEQ ID NO: 95537 - protein, 7 aa, synthetic construct
TTAGRGP

SEQ ID NO: 95538 - protein, 7 aa, synthetic construct
GQPGKQV

SEQ ID NO: 95539 - protein, 7 aa, synthetic construct
MPRVTDQ

SEQ ID NO: 95540 - protein, 7 aa, synthetic construct
RQEPREG

SEQ ID NO: 95541 - protein, 7 aa, synthetic construct
EAHSMSE

SEQ ID NO: 95542 - protein, 7 aa, synthetic construct
MAPDRER

SEQ ID NO: 95543 - protein, 7 aa, synthetic construct
FEGGKNN

SEQ ID NO: 95544 - protein, 7 aa, synthetic construct
ELHKHGT

SEQ ID NO: 95545 - protein, 7 aa, synthetic construct
RTSTEMG

SEQ ID NO: 95546 - protein, 7 aa, synthetic construct
PLKRTSE

SEQ ID NO: 95547 - protein, 7 aa, synthetic construct
MIKPPMG

SEQ ID NO: 95548 - protein, 7 aa, synthetic construct
NWPKHEN

SEQ ID NO: 95549 - protein, 7 aa, synthetic construct
MHLGNME

SEQ ID NO: 95550 - protein, 7 aa, synthetic construct
SLKMDVT

SEQ ID NO: 95551 - protein, 7 aa, synthetic construct
TGPNKTN

SEQ ID NO: 95552 - protein, 7 aa, synthetic construct
KTPGNVN

SEQ ID NO: 95553 - protein, 7 aa, synthetic construct
AVYQGVS

SEQ ID NO: 95554 - protein, 7 aa, synthetic construct
TPIQQDK

SEQ ID NO: 95555 - protein, 7 aa, synthetic construct
QEGRIDR

SEQ ID NO: 95556 - protein, 7 aa, synthetic construct
DMSTVHH

SEQ ID NO: 95557 - protein, 7 aa, synthetic construct
TTVKDYQ

SEQ ID NO: 95558 - protein, 7 aa, synthetic construct
ASQEHLS

SEQ ID NO: 95559 - protein, 7 aa, synthetic construct
TPAKLEL

SEQ ID NO: 95560 - protein, 7 aa, synthetic construct
SNVGHLP

SEQ ID NO: 95561 - protein, 7 aa, synthetic construct
DYPSNGG

SEQ ID NO: 95562 - protein, 7 aa, synthetic construct
FVSNVAV

SEQ ID NO: 95563 - protein, 7 aa, synthetic construct
VVAMNHN

SEQ ID NO: 95564 - protein, 7 aa, synthetic construct
PYIGESV

SEQ ID NO: 95565 - protein, 7 aa, synthetic construct
SRTEGTY

SEQ ID NO: 95566 - protein, 7 aa, synthetic construct
WKMNDTD

SEQ ID NO: 95567 - protein, 7 aa, synthetic construct
DWRHKGD

SEQ ID NO: 95568 - protein, 7 aa, synthetic construct
VSAMQPF

SEQ ID NO: 95569 - protein, 7 aa, synthetic construct
KDQHKHQ

SEQ ID NO: 95570 - protein, 7 aa, synthetic construct
PFDKTGD

SEQ ID NO: 95571 - protein, 7 aa, synthetic construct
YKQNQSS

SEQ ID NO: 95572 - protein, 7 aa, synthetic construct
YHHGPLN

SEQ ID NO: 95573 - protein, 7 aa, synthetic construct
NPKQSNA

SEQ ID NO: 95574 - protein, 7 aa, synthetic construct
RQAPNVT

SEQ ID NO: 95575 - protein, 7 aa, synthetic construct
GKPPGAA

SEQ ID NO: 95576 - protein, 7 aa, synthetic construct
PIHDRPR

SEQ ID NO: 95577 - protein, 7 aa, synthetic construct
EPRPAVL

SEQ ID NO: 95578 - protein, 7 aa, synthetic construct
PVARVMA

SEQ ID NO: 95579 - protein, 7 aa, synthetic construct
EIGSMRG

SEQ ID NO: 95580 - protein, 7 aa, synthetic construct
YAGDFVA

SEQ ID NO: 95581 - protein, 7 aa, synthetic construct
GTQNKLL

SEQ ID NO: 95582 - protein, 7 aa, synthetic construct
KVDSKSH

SEQ ID NO: 95583 - protein, 7 aa, synthetic construct
KSDSSRV

SEQ ID NO: 95584 - protein, 7 aa, synthetic construct
IRDAEPY

SEQ ID NO: 95585 - protein, 7 aa, synthetic construct
SPSDTKT

SEQ ID NO: 95586 - protein, 7 aa, synthetic construct
SMIEGKS

SEQ ID NO: 95587 - protein, 7 aa, synthetic construct
GDFHPQP

SEQ ID NO: 95588 - protein, 7 aa, synthetic construct
MKVITAS

SEQ ID NO: 95589 - protein, 7 aa, synthetic construct
GQNEPRV

SEQ ID NO: 95590 - protein, 7 aa, synthetic construct
VYVSKNN

SEQ ID NO: 95591 - protein, 7 aa, synthetic construct
SAAHQAE

SEQ ID NO: 95592 - protein, 7 aa, synthetic construct
VMPFQGD

SEQ ID NO: 95593 - protein, 7 aa, synthetic construct
FDGKIRI

SEQ ID NO: 95594 - protein, 7 aa, synthetic construct
QLKSPVI

SEQ ID NO: 95595 - protein, 7 aa, synthetic construct
KHIKYET

SEQ ID NO: 95596 - protein, 7 aa, synthetic construct
KQHTSAP

SEQ ID NO: 95597 - protein, 7 aa, synthetic construct
FGQRDMS

SEQ ID NO: 95598 - protein, 7 aa, synthetic construct
MSRHAGG

SEQ ID NO: 95599 - protein, 7 aa, synthetic construct
QIPGHHD

SEQ ID NO: 95600 - protein, 7 aa, synthetic construct
TGISEKM

SEQ ID NO: 95601 - protein, 7 aa, synthetic construct
KQETVTN

SEQ ID NO: 95602 - protein, 7 aa, synthetic construct
PLKPLEE

SEQ ID NO: 95603 - protein, 7 aa, synthetic construct
KYGHSAS

SEQ ID NO: 95604 - protein, 7 aa, synthetic construct
LAQLPSF

SEQ ID NO: 95605 - protein, 7 aa, synthetic construct
LQPAPFG

SEQ ID NO: 95606 - protein, 7 aa, synthetic construct
VMDKKNA

SEQ ID NO: 95607 - protein, 7 aa, synthetic construct
DHRIMHD

SEQ ID NO: 95608 - protein, 7 aa, synthetic construct
QMQKDDS

SEQ ID NO: 95609 - protein, 7 aa, synthetic construct
QHPKTNW

SEQ ID NO: 95610 - protein, 7 aa, synthetic construct
ADLLDKK

SEQ ID NO: 95611 - protein, 7 aa, synthetic construct
GYQTENK

SEQ ID NO: 95612 - protein, 7 aa, synthetic construct
RTTPIGT

SEQ ID NO: 95613 - protein, 7 aa, synthetic construct
QMGMLHE

SEQ ID NO: 95614 - protein, 7 aa, synthetic construct
NNALSTF

SEQ ID NO: 95615 - protein, 7 aa, synthetic construct
RNDRYGA

SEQ ID NO: 95616 - protein, 7 aa, synthetic construct
HTPTPNV

SEQ ID NO: 95617 - protein, 7 aa, synthetic construct
PKIISTP

SEQ ID NO: 95618 - protein, 7 aa, synthetic construct
LKIETRG

SEQ ID NO: 95619 - protein, 7 aa, synthetic construct
KNQSQLS

SEQ ID NO: 95620 - protein, 7 aa, synthetic construct
EGDKSKY

SEQ ID NO: 95621 - protein, 7 aa, synthetic construct
GGVNYAT

SEQ ID NO: 95622 - protein, 7 aa, synthetic construct
AYPGVKV

SEQ ID NO: 95623 - protein, 7 aa, synthetic construct
LFAPNMG

SEQ ID NO: 95624 - protein, 7 aa, synthetic construct
PPEKHMI

SEQ ID NO: 95625 - protein, 7 aa, synthetic construct
SVHTLDA

SEQ ID NO: 95626 - protein, 7 aa, synthetic construct
IFKHPND

SEQ ID NO: 95627 - protein, 7 aa, synthetic construct
VQNILAS

SEQ ID NO: 95628 - protein, 7 aa, synthetic construct
RATMVTT

SEQ ID NO: 95629 - protein, 7 aa, synthetic construct
LAAHHVL

SEQ ID NO: 95630 - protein, 7 aa, synthetic construct
TEKPAMG

SEQ ID NO: 95631 - protein, 7 aa, synthetic construct
GQHITVH

SEQ ID NO: 95632 - protein, 7 aa, synthetic construct
APTTHIH

SEQ ID NO: 95633 - protein, 7 aa, synthetic construct
ESSPRIL

SEQ ID NO: 95634 - protein, 7 aa, synthetic construct
PTEPLRT

SEQ ID NO: 95635 - protein, 7 aa, synthetic construct
IISGLKQ

SEQ ID NO: 95636 - protein, 7 aa, synthetic construct
AAREIDP

SEQ ID NO: 95637 - protein, 7 aa, synthetic construct
GSSMPMT

SEQ ID NO: 95638 - protein, 7 aa, synthetic construct
NDKHPQS

SEQ ID NO: 95639 - protein, 7 aa, synthetic construct
NLQAPLV

SEQ ID NO: 95640 - protein, 7 aa, synthetic construct
QYSTIVE

SEQ ID NO: 95641 - protein, 7 aa, synthetic construct
YGDMRPA

SEQ ID NO: 95642 - protein, 7 aa, synthetic construct
KVMEPFV

SEQ ID NO: 95643 - protein, 7 aa, synthetic construct
DMHHSRY

SEQ ID NO: 95644 - protein, 7 aa, synthetic construct
GRLISTP

SEQ ID NO: 95645 - protein, 7 aa, synthetic construct
PGHDGQK

SEQ ID NO: 95646 - protein, 7 aa, synthetic construct
DQTLTRI

SEQ ID NO: 95647 - protein, 7 aa, synthetic construct
YADAGRR

SEQ ID NO: 95648 - protein, 7 aa, synthetic construct
VAVLNNP

SEQ ID NO: 95649 - protein, 7 aa, synthetic construct
GGKQQFA

SEQ ID NO: 95650 - protein, 7 aa, synthetic construct
HKQHHIS

SEQ ID NO: 95651 - protein, 7 aa, synthetic construct
FFKTEQK

SEQ ID NO: 95652 - protein, 7 aa, synthetic construct
MFAEKHE

SEQ ID NO: 95653 - protein, 7 aa, synthetic construct
TIVKSIN

SEQ ID NO: 95654 - protein, 7 aa, synthetic construct
NPVAKEY

SEQ ID NO: 95655 - protein, 7 aa, synthetic construct
GYNSMRS

SEQ ID NO: 95656 - protein, 7 aa, synthetic construct
GFVSNHP

SEQ ID NO: 95657 - protein, 7 aa, synthetic construct
ELAQRTV

SEQ ID NO: 95658 - protein, 7 aa, synthetic construct
KMQTQAV

SEQ ID NO: 95659 - protein, 7 aa, synthetic construct
SHMPEGT

SEQ ID NO: 95660 - protein, 7 aa, synthetic construct
HPKQVVN

SEQ ID NO: 95661 - protein, 7 aa, synthetic construct
IKEVAIF

SEQ ID NO: 95662 - protein, 7 aa, synthetic construct
SYAPMAP

SEQ ID NO: 95663 - protein, 7 aa, synthetic construct
IDKARNA

SEQ ID NO: 95664 - protein, 7 aa, synthetic construct
FANNLFA

SEQ ID NO: 95665 - protein, 7 aa, synthetic construct
EERMIGK

SEQ ID NO: 95666 - protein, 7 aa, synthetic construct
PKYTGMN

SEQ ID NO: 95667 - protein, 7 aa, synthetic construct
STQNRGA

SEQ ID NO: 95668 - protein, 7 aa, synthetic construct
DHFHMRA

SEQ ID NO: 95669 - protein, 7 aa, synthetic construct
HPAPKEE

SEQ ID NO: 95670 - protein, 7 aa, synthetic construct
VQVHTQQ

SEQ ID NO: 95671 - protein, 7 aa, synthetic construct
CYQTNKC

SEQ ID NO: 95672 - protein, 7 aa, synthetic construct
WDMAFKG

SEQ ID NO: 95673 - protein, 7 aa, synthetic construct
HTMSAIN

SEQ ID NO: 95674 - protein, 7 aa, synthetic construct
PGDHKIQ

SEQ ID NO: 95675 - protein, 7 aa, synthetic construct
TVTKWED

SEQ ID NO: 95676 - protein, 7 aa, synthetic construct
GQKTVQA

SEQ ID NO: 95677 - protein, 7 aa, synthetic construct
QSQKTQP

SEQ ID NO: 95678 - protein, 7 aa, synthetic construct
SDAKNDY

SEQ ID NO: 95679 - protein, 7 aa, synthetic construct
YPERDHK

SEQ ID NO: 95680 - protein, 7 aa, synthetic construct
WADGERY

SEQ ID NO: 95681 - protein, 7 aa, synthetic construct
KIKDYPY

SEQ ID NO: 95682 - protein, 7 aa, synthetic construct
GTKETHP

SEQ ID NO: 95683 - protein, 7 aa, synthetic construct
EDSSRHH

SEQ ID NO: 95684 - protein, 7 aa, synthetic construct
GLMTNSL

SEQ ID NO: 95685 - protein, 7 aa, synthetic construct
VMDKKQL

SEQ ID NO: 95686 - protein, 7 aa, synthetic construct
FMGTPGA

SEQ ID NO: 95687 - protein, 7 aa, synthetic construct
GGHVSTE

SEQ ID NO: 95688 - protein, 7 aa, synthetic construct
YDKSSVM

SEQ ID NO: 95689 - protein, 7 aa, synthetic construct
IQSYENF

SEQ ID NO: 95690 - protein, 7 aa, synthetic construct
ATINHRM

SEQ ID NO: 95691 - protein, 7 aa, synthetic construct
FGMGIPH

SEQ ID NO: 95692 - protein, 7 aa, synthetic construct
PIHKEYD

SEQ ID NO: 95693 - protein, 7 aa, synthetic construct
TVDNLMG

SEQ ID NO: 95694 - protein, 7 aa, synthetic construct
DRGDSSL

SEQ ID NO: 95695 - protein, 7 aa, synthetic construct
WMKKDAQ

SEQ ID NO: 95696 - protein, 7 aa, synthetic construct
YPINQQT

SEQ ID NO: 95697 - protein, 7 aa, synthetic construct
YAALTNY

SEQ ID NO: 95698 - protein, 7 aa, synthetic construct
KLVYEQN

SEQ ID NO: 95699 - protein, 7 aa, synthetic construct
PRGTTVG

SEQ ID NO: 95700 - protein, 7 aa, synthetic construct
NKAKQEL

SEQ ID NO: 95701 - protein, 7 aa, synthetic construct
PAGMLPN

SEQ ID NO: 95702 - protein, 7 aa, synthetic construct
HGGGYHD

SEQ ID NO: 95703 - protein, 7 aa, synthetic construct
QMNNGQK

SEQ ID NO: 95704 - protein, 7 aa, synthetic construct
RAQEFQG

SEQ ID NO: 95705 - protein, 7 aa, synthetic construct
HSPQEER

SEQ ID NO: 95706 - protein, 7 aa, synthetic construct
GIPHSEK

SEQ ID NO: 95707 - protein, 7 aa, synthetic construct
PPSNDNH

SEQ ID NO: 95708 - protein, 7 aa, synthetic construct
AQPFVPN

SEQ ID NO: 95709 - protein, 7 aa, synthetic construct
DRQTRGL

SEQ ID NO: 95710 - protein, 7 aa, synthetic construct
RGGGIPF

SEQ ID NO: 95711 - protein, 7 aa, synthetic construct
EASQYSK

SEQ ID NO: 95712 - protein, 7 aa, synthetic construct
KDKNTGG

SEQ ID NO: 95713 - protein, 7 aa, synthetic construct
AGSHQLH

SEQ ID NO: 95714 - protein, 7 aa, synthetic construct
QNMQSHR

SEQ ID NO: 95715 - protein, 7 aa, synthetic construct
MMKMATP

SEQ ID NO: 95716 - protein, 7 aa, synthetic construct
EKFKGQH

SEQ ID NO: 95717 - protein, 7 aa, synthetic construct
RAREQTY

SEQ ID NO: 95718 - protein, 7 aa, synthetic construct
NVFYHEA

SEQ ID NO: 95719 - protein, 7 aa, synthetic construct
LETHSPH

SEQ ID NO: 95720 - protein, 7 aa, synthetic construct
RPEVFAA

SEQ ID NO: 95721 - protein, 7 aa, synthetic construct
QHSAIGV

SEQ ID NO: 95722 - protein, 7 aa, synthetic construct
DRQSQEV

SEQ ID NO: 95723 - protein, 7 aa, synthetic construct
AKMFMPE

SEQ ID NO: 95724 - protein, 7 aa, synthetic construct
VTNPKTW

SEQ ID NO: 95725 - protein, 7 aa, synthetic construct
FKPVDPP

SEQ ID NO: 95726 - protein, 7 aa, synthetic construct
TSNVNKA

SEQ ID NO: 95727 - protein, 7 aa, synthetic construct
ANTEKQQ

SEQ ID NO: 95728 - protein, 7 aa, synthetic construct
LVRADDY

SEQ ID NO: 95729 - protein, 7 aa, synthetic construct
DVNNHIN

SEQ ID NO: 95730 - protein, 7 aa, synthetic construct
VAKGELN

SEQ ID NO: 95731 - protein, 7 aa, synthetic construct
IDGKGAS

SEQ ID NO: 95732 - protein, 7 aa, synthetic construct
TVNLASG

SEQ ID NO: 95733 - protein, 7 aa, synthetic construct
HGKFLHV

SEQ ID NO: 95734 - protein, 7 aa, synthetic construct
ANKNENL

SEQ ID NO: 95735 - protein, 7 aa, synthetic construct
IALTHQT

SEQ ID NO: 95736 - protein, 7 aa, synthetic construct
FKKGSDE

SEQ ID NO: 95737 - protein, 7 aa, synthetic construct
TIKFQMQ

SEQ ID NO: 95738 - protein, 7 aa, synthetic construct
IVNKIDA

SEQ ID NO: 95739 - protein, 7 aa, synthetic construct
KAEMNMA

SEQ ID NO: 95740 - protein, 7 aa, synthetic construct
KHTIPDD

SEQ ID NO: 95741 - protein, 7 aa, synthetic construct
WNAGHDS

SEQ ID NO: 95742 - protein, 7 aa, synthetic construct
AMALNME

SEQ ID NO: 95743 - protein, 7 aa, synthetic construct
SQKNMAE

SEQ ID NO: 95744 - protein, 7 aa, synthetic construct
EGPYQHE

SEQ ID NO: 95745 - protein, 7 aa, synthetic construct
FLHSVKP

SEQ ID NO: 95746 - protein, 7 aa, synthetic construct
LKDHERN

SEQ ID NO: 95747 - protein, 7 aa, synthetic construct
RQEFQEH

SEQ ID NO: 95748 - protein, 7 aa, synthetic construct
WHPEFSG

SEQ ID NO: 95749 - protein, 7 aa, synthetic construct
PPSTGGM

SEQ ID NO: 95750 - protein, 7 aa, synthetic construct
QSNFLIE

SEQ ID NO: 95751 - protein, 7 aa, synthetic construct
YSDAKQQ

SEQ ID NO: 95752 - protein, 7 aa, synthetic construct
QAAMLNK

SEQ ID NO: 95753 - protein, 7 aa, synthetic construct
HPHHQGT

SEQ ID NO: 95754 - protein, 7 aa, synthetic construct
TMAKDQT

SEQ ID NO: 95755 - protein, 7 aa, synthetic construct
IHRGDFL

SEQ ID NO: 95756 - protein, 7 aa, synthetic construct
MFRKDVV

SEQ ID NO: 95757 - protein, 7 aa, synthetic construct
QNKHIVI

SEQ ID NO: 95758 - protein, 7 aa, synthetic construct
YRHSPEL

SEQ ID NO: 95759 - protein, 7 aa, synthetic construct
GEHRYMV

SEQ ID NO: 95760 - protein, 7 aa, synthetic construct
AGAPPTI

SEQ ID NO: 95761 - protein, 7 aa, synthetic construct
IYHNTQD

SEQ ID NO: 95762 - protein, 7 aa, synthetic construct
AGHQSVV

SEQ ID NO: 95763 - protein, 7 aa, synthetic construct
PTVRNAD

SEQ ID NO: 95764 - protein, 7 aa, synthetic construct
QGLSHRP

SEQ ID NO: 95765 - protein, 7 aa, synthetic construct
GTKPVQL

SEQ ID NO: 95766 - protein, 7 aa, synthetic construct
HWDQANR

SEQ ID NO: 95767 - protein, 7 aa, synthetic construct
SDTGKYE

SEQ ID NO: 95768 - protein, 7 aa, synthetic construct
DVRHPQM

SEQ ID NO: 95769 - protein, 7 aa, synthetic construct
FQQNQKT

SEQ ID NO: 95770 - protein, 7 aa, synthetic construct
VAKSYQA

SEQ ID NO: 95771 - protein, 7 aa, synthetic construct
PGKDSRD

SEQ ID NO: 95772 - protein, 7 aa, synthetic construct
AKMESSM

SEQ ID NO: 95773 - protein, 7 aa, synthetic construct
QTSHMPL

SEQ ID NO: 95774 - protein, 7 aa, synthetic construct
APINHRS

SEQ ID NO: 95775 - protein, 7 aa, synthetic construct
ATQPPGI

SEQ ID NO: 95776 - protein, 7 aa, synthetic construct
HQRYQNA

SEQ ID NO: 95777 - protein, 7 aa, synthetic construct
GQHVANT

SEQ ID NO: 95778 - protein, 7 aa, synthetic construct
ADTQRHR

SEQ ID NO: 95779 - protein, 7 aa, synthetic construct
ANQHDNI

SEQ ID NO: 95780 - protein, 7 aa, synthetic construct
VVGTQIR

SEQ ID NO: 95781 - protein, 7 aa, synthetic construct
WRDGIGK

SEQ ID NO: 95782 - protein, 7 aa, synthetic construct
TMSQTDL

SEQ ID NO: 95783 - protein, 7 aa, synthetic construct
RQADLAQ

SEQ ID NO: 95784 - protein, 7 aa, synthetic construct
KPQVVLG

SEQ ID NO: 95785 - protein, 7 aa, synthetic construct
PSNFQGY

SEQ ID NO: 95786 - protein, 7 aa, synthetic construct
KTAGATF

SEQ ID NO: 95787 - protein, 7 aa, synthetic construct
KDGKFHH

SEQ ID NO: 95788 - protein, 7 aa, synthetic construct
HRYLENA

SEQ ID NO: 95789 - protein, 7 aa, synthetic construct
EFHGIQA

SEQ ID NO: 95790 - protein, 7 aa, synthetic construct
WMDHTKA

SEQ ID NO: 95791 - protein, 7 aa, synthetic construct
EIKDSRK

SEQ ID NO: 95792 - protein, 7 aa, synthetic construct
YWENGHE

SEQ ID NO: 95793 - protein, 7 aa, synthetic construct
AKDTVGI

SEQ ID NO: 95794 - protein, 7 aa, synthetic construct
ASHIELK

SEQ ID NO: 95795 - protein, 7 aa, synthetic construct
WGGKFEP

SEQ ID NO: 95796 - protein, 7 aa, synthetic construct
SNAGSIT

SEQ ID NO: 95797 - protein, 7 aa, synthetic construct
IEMKTKD

SEQ ID NO: 95798 - protein, 7 aa, synthetic construct
TGGVQAM

SEQ ID NO: 95799 - protein, 7 aa, synthetic construct
LFGTPNN

SEQ ID NO: 95800 - protein, 7 aa, synthetic construct
GRDHNNA

SEQ ID NO: 95801 - protein, 7 aa, synthetic construct
KTSEYEA

SEQ ID NO: 95802 - protein, 7 aa, synthetic construct
ITDVNRY

SEQ ID NO: 95803 - protein, 7 aa, synthetic construct
SGMPNFR

SEQ ID NO: 95804 - protein, 7 aa, synthetic construct
TKQVDTQ

SEQ ID NO: 95805 - protein, 7 aa, synthetic construct
GQQMALM

SEQ ID NO: 95806 - protein, 7 aa, synthetic construct
HFHPAQE

SEQ ID NO: 95807 - protein, 7 aa, synthetic construct
NASQQQL

SEQ ID NO: 95808 - protein, 7 aa, synthetic construct
EEKRSHS

SEQ ID NO: 95809 - protein, 7 aa, synthetic construct
KDKREVI

SEQ ID NO: 95810 - protein, 7 aa, synthetic construct
QFARKGE

SEQ ID NO: 95811 - protein, 7 aa, synthetic construct
TASLERT

SEQ ID NO: 95812 - protein, 7 aa, synthetic construct
WQNGAVV

SEQ ID NO: 95813 - protein, 7 aa, synthetic construct
GFETKTH

SEQ ID NO: 95814 - protein, 7 aa, synthetic construct
GAALKAV

SEQ ID NO: 95815 - protein, 7 aa, synthetic construct
HPADRPG

SEQ ID NO: 95816 - protein, 7 aa, synthetic construct
NGQIKIS

SEQ ID NO: 95817 - protein, 7 aa, synthetic construct
TTAAGKA

SEQ ID NO: 95818 - protein, 7 aa, synthetic construct
PAELRKN

SEQ ID NO: 95819 - protein, 7 aa, synthetic construct
DMAKSGR

SEQ ID NO: 95820 - protein, 7 aa, synthetic construct
RMVDFKP

SEQ ID NO: 95821 - protein, 7 aa, synthetic construct
HHMATQK

SEQ ID NO: 95822 - protein, 7 aa, synthetic construct
MPFVNQP

SEQ ID NO: 95823 - protein, 7 aa, synthetic construct
GEAIKIS

SEQ ID NO: 95824 - protein, 7 aa, synthetic construct
GGPAQYG

SEQ ID NO: 95825 - protein, 7 aa, synthetic construct
RERNMYP

SEQ ID NO: 95826 - protein, 7 aa, synthetic construct
AKANAGI

SEQ ID NO: 95827 - protein, 7 aa, synthetic construct
NEHNKIM

SEQ ID NO: 95828 - protein, 7 aa, synthetic construct
TAFRTEH

SEQ ID NO: 95829 - protein, 7 aa, synthetic construct
RNIQNFQ

SEQ ID NO: 95830 - protein, 7 aa, synthetic construct
ASNLPKV

SEQ ID NO: 95831 - protein, 7 aa, synthetic construct
TQPTGQK

SEQ ID NO: 95832 - protein, 7 aa, synthetic construct
ERMRNSE

SEQ ID NO: 95833 - protein, 7 aa, synthetic construct
ITEKPLV

SEQ ID NO: 95834 - protein, 7 aa, synthetic construct
EAQKMDK

SEQ ID NO: 95835 - protein, 7 aa, synthetic construct
ERHIDTD

SEQ ID NO: 95836 - protein, 7 aa, synthetic construct
DREHGVN

SEQ ID NO: 95837 - protein, 7 aa, synthetic construct
ELHSKAG

SEQ ID NO: 95838 - protein, 7 aa, synthetic construct
FDYVPKS

SEQ ID NO: 95839 - protein, 7 aa, synthetic construct
DGPHMRL

SEQ ID NO: 95840 - protein, 7 aa, synthetic construct
KIELSNN

SEQ ID NO: 95841 - protein, 7 aa, synthetic construct
VNSSNEY

SEQ ID NO: 95842 - protein, 7 aa, synthetic construct
MNFNVRE

SEQ ID NO: 95843 - protein, 7 aa, synthetic construct
TIKHIDI

SEQ ID NO: 95844 - protein, 7 aa, synthetic construct
KGSTESS

SEQ ID NO: 95845 - protein, 7 aa, synthetic construct
APPIIAQ

SEQ ID NO: 95846 - protein, 7 aa, synthetic construct
LGPKVYH

SEQ ID NO: 95847 - protein, 7 aa, synthetic construct
VGPTLPL

SEQ ID NO: 95848 - protein, 7 aa, synthetic construct
EKATKQP

SEQ ID NO: 95849 - protein, 7 aa, synthetic construct
KAMDGTA

SEQ ID NO: 95850 - protein, 7 aa, synthetic construct
RGDREMQ

SEQ ID NO: 95851 - protein, 7 aa, synthetic construct
PLLAPVS

SEQ ID NO: 95852 - protein, 7 aa, synthetic construct
KITTWPD

SEQ ID NO: 95853 - protein, 7 aa, synthetic construct
GFKYGEP

SEQ ID NO: 95854 - protein, 7 aa, synthetic construct
SSLTSEH

SEQ ID NO: 95855 - protein, 7 aa, synthetic construct
LALPEHH

SEQ ID NO: 95856 - protein, 7 aa, synthetic construct
HFPTNEM

SEQ ID NO: 95857 - protein, 7 aa, synthetic construct
GYYNKIP

SEQ ID NO: 95858 - protein, 7 aa, synthetic construct
NTAVLAH

SEQ ID NO: 95859 - protein, 7 aa, synthetic construct
KVAPHMS

SEQ ID NO: 95860 - protein, 7 aa, synthetic construct
SSGMNIH

SEQ ID NO: 95861 - protein, 7 aa, synthetic construct
GSMVVMS

SEQ ID NO: 95862 - protein, 7 aa, synthetic construct
LRHPEFG

SEQ ID NO: 95863 - protein, 7 aa, synthetic construct
SSKMVDN

SEQ ID NO: 95864 - protein, 7 aa, synthetic construct
ITKGPEP

SEQ ID NO: 95865 - protein, 7 aa, synthetic construct
NHPGPIQ

SEQ ID NO: 95866 - protein, 7 aa, synthetic construct
GMANYQH

SEQ ID NO: 95867 - protein, 7 aa, synthetic construct
YGAQIQT

SEQ ID NO: 95868 - protein, 7 aa, synthetic construct
GGGEHPL

SEQ ID NO: 95869 - protein, 7 aa, synthetic construct
AAIRDRA

SEQ ID NO: 95870 - protein, 7 aa, synthetic construct
DSAPSRE

SEQ ID NO: 95871 - protein, 7 aa, synthetic construct
GQHHAAA

SEQ ID NO: 95872 - protein, 7 aa, synthetic construct
SLGVGNL

SEQ ID NO: 95873 - protein, 7 aa, synthetic construct
DRKYREG

SEQ ID NO: 95874 - protein, 7 aa, synthetic construct
IAHHTTE

SEQ ID NO: 95875 - protein, 7 aa, synthetic construct
IQSVNMD

SEQ ID NO: 95876 - protein, 7 aa, synthetic construct
PANVTYT

SEQ ID NO: 95877 - protein, 7 aa, synthetic construct
PSLNPAL

SEQ ID NO: 95878 - protein, 7 aa, synthetic construct
SPANTPP

SEQ ID NO: 95879 - protein, 7 aa, synthetic construct
PKSPTQS

SEQ ID NO: 95880 - protein, 7 aa, synthetic construct
DEHRQMF

SEQ ID NO: 95881 - protein, 7 aa, synthetic construct
FAAKYFD

SEQ ID NO: 95882 - protein, 7 aa, synthetic construct
IGPHKAT

SEQ ID NO: 95883 - protein, 7 aa, synthetic construct
PAGRKED

SEQ ID NO: 95884 - protein, 7 aa, synthetic construct
FENNWKI

SEQ ID NO: 95885 - protein, 7 aa, synthetic construct
LHAVHNA

SEQ ID NO: 95886 - protein, 7 aa, synthetic construct
MMNVKAM

SEQ ID NO: 95887 - protein, 7 aa, synthetic construct
LNPSVLT

SEQ ID NO: 95888 - protein, 7 aa, synthetic construct
RFKLVEN

SEQ ID NO: 95889 - protein, 7 aa, synthetic construct
PLDVGPI

SEQ ID NO: 95890 - protein, 7 aa, synthetic construct
QPKHQTH

SEQ ID NO: 95891 - protein, 7 aa, synthetic construct
DKPFTVM

SEQ ID NO: 95892 - protein, 7 aa, synthetic construct
IAEMSHR

SEQ ID NO: 95893 - protein, 7 aa, synthetic construct
WANPGIP

SEQ ID NO: 95894 - protein, 7 aa, synthetic construct
EVDKRFK

SEQ ID NO: 95895 - protein, 7 aa, synthetic construct
PHTEQHG

SEQ ID NO: 95896 - protein, 7 aa, synthetic construct
WTNGKDA

SEQ ID NO: 95897 - protein, 7 aa, synthetic construct
HHSVAQR

SEQ ID NO: 95898 - protein, 7 aa, synthetic construct
RNAEHQN

SEQ ID NO: 95899 - protein, 7 aa, synthetic construct
KQTREDG

SEQ ID NO: 95900 - protein, 7 aa, synthetic construct
KALASQA

SEQ ID NO: 95901 - protein, 7 aa, synthetic construct
MVREFSP

SEQ ID NO: 95902 - protein, 7 aa, synthetic construct
LKEHTRW

SEQ ID NO: 95903 - protein, 7 aa, synthetic construct
HKKPEYM

SEQ ID NO: 95904 - protein, 7 aa, synthetic construct
QPGWSEH

SEQ ID NO: 95905 - protein, 7 aa, synthetic construct
LNARFDL

SEQ ID NO: 95906 - protein, 7 aa, synthetic construct
YDTPAHP

SEQ ID NO: 95907 - protein, 7 aa, synthetic construct
WPIVGDS

SEQ ID NO: 95908 - protein, 7 aa, synthetic construct
GPHNDQG

SEQ ID NO: 95909 - protein, 7 aa, synthetic construct
SGKAFHT

SEQ ID NO: 95910 - protein, 7 aa, synthetic construct
RGYSNDM

SEQ ID NO: 95911 - protein, 7 aa, synthetic construct
KGTQVVD

SEQ ID NO: 95912 - protein, 7 aa, synthetic construct
QTSTGWE

SEQ ID NO: 95913 - protein, 7 aa, synthetic construct
RLTETWS

SEQ ID NO: 95914 - protein, 7 aa, synthetic construct
TALSQGT

SEQ ID NO: 95915 - protein, 7 aa, synthetic construct
HFGVGKD

SEQ ID NO: 95916 - protein, 7 aa, synthetic construct
VYLEKSS

SEQ ID NO: 95917 - protein, 7 aa, synthetic construct
GFKGPST

SEQ ID NO: 95918 - protein, 7 aa, synthetic construct
LYGDGPN

SEQ ID NO: 95919 - protein, 7 aa, synthetic construct
AMGTMDS

SEQ ID NO: 95920 - protein, 7 aa, synthetic construct
RYMGSAP

SEQ ID NO: 95921 - protein, 7 aa, synthetic construct
VVPKEPR

SEQ ID NO: 95922 - protein, 7 aa, synthetic construct
RFSHEGS

SEQ ID NO: 95923 - protein, 7 aa, synthetic construct
HNRQQFQ

SEQ ID NO: 95924 - protein, 7 aa, synthetic construct
AVARVHL

SEQ ID NO: 95925 - protein, 7 aa, synthetic construct
LNGKQQY

SEQ ID NO: 95926 - protein, 7 aa, synthetic construct
IFNRMDT

SEQ ID NO: 95927 - protein, 7 aa, synthetic construct
MDINRDG

SEQ ID NO: 95928 - protein, 7 aa, synthetic construct
PNMQKQI

SEQ ID NO: 95929 - protein, 7 aa, synthetic construct
KESKTMT

SEQ ID NO: 95930 - protein, 7 aa, synthetic construct
NGRAYND

SEQ ID NO: 95931 - protein, 7 aa, synthetic construct
GMTPLTY

SEQ ID NO: 95932 - protein, 7 aa, synthetic construct
AHANLNK

SEQ ID NO: 95933 - protein, 7 aa, synthetic construct
RLNSEQW

SEQ ID NO: 95934 - protein, 7 aa, synthetic construct
DTHAKDL

SEQ ID NO: 95935 - protein, 7 aa, synthetic construct
SPYFQTP

SEQ ID NO: 95936 - protein, 7 aa, synthetic construct
KKEQIDT

SEQ ID NO: 95937 - protein, 7 aa, synthetic construct
HYTGSRT

SEQ ID NO: 95938 - protein, 7 aa, synthetic construct
ARAESRH

SEQ ID NO: 95939 - protein, 7 aa, synthetic construct
THEKYGI

SEQ ID NO: 95940 - protein, 7 aa, synthetic construct
NIRSQHT

SEQ ID NO: 95941 - protein, 7 aa, synthetic construct
EYRDQKT

SEQ ID NO: 95942 - protein, 7 aa, synthetic construct
MVPDRHH

SEQ ID NO: 95943 - protein, 7 aa, synthetic construct
SAMQKHL

SEQ ID NO: 95944 - protein, 7 aa, synthetic construct
HMMKDMI

SEQ ID NO: 95945 - protein, 7 aa, synthetic construct
YHPKMDK

SEQ ID NO: 95946 - protein, 7 aa, synthetic construct
WAPKDSF

SEQ ID NO: 95947 - protein, 7 aa, synthetic construct
LAKALHQ

SEQ ID NO: 95948 - protein, 7 aa, synthetic construct
TTKQMLH

SEQ ID NO: 95949 - protein, 7 aa, synthetic construct
MPNAQQP

SEQ ID NO: 95950 - protein, 7 aa, synthetic construct
VHNAQIQ

SEQ ID NO: 95951 - protein, 7 aa, synthetic construct
QKQNISS

SEQ ID NO: 95952 - protein, 7 aa, synthetic construct
NGITNHA

SEQ ID NO: 95953 - protein, 7 aa, synthetic construct
EREAVNV

SEQ ID NO: 95954 - protein, 7 aa, synthetic construct
ISMRNSH

SEQ ID NO: 95955 - protein, 7 aa, synthetic construct
EFKVKWD

SEQ ID NO: 95956 - protein, 7 aa, synthetic construct
NKPYSQP

SEQ ID NO: 95957 - protein, 7 aa, synthetic construct
QGATQHC

SEQ ID NO: 95958 - protein, 7 aa, synthetic construct
PDRTHAL

SEQ ID NO: 95959 - protein, 7 aa, synthetic construct
LEYHAAK

SEQ ID NO: 95960 - protein, 7 aa, synthetic construct
TQMDTRE

SEQ ID NO: 95961 - protein, 7 aa, synthetic construct
SLKERLP

SEQ ID NO: 95962 - protein, 7 aa, synthetic construct
QKSDQEM

SEQ ID NO: 95963 - protein, 7 aa, synthetic construct
QPNWDKL

SEQ ID NO: 95964 - protein, 7 aa, synthetic construct
IADAYGP

SEQ ID NO: 95965 - protein, 7 aa, synthetic construct
APMMLKN

SEQ ID NO: 95966 - protein, 7 aa, synthetic construct
YEGWMHP

SEQ ID NO: 95967 - protein, 7 aa, synthetic construct
NPMTANN

SEQ ID NO: 95968 - protein, 7 aa, synthetic construct
SKSGVNA

SEQ ID NO: 95969 - protein, 7 aa, synthetic construct
ISPTMEV

SEQ ID NO: 95970 - protein, 7 aa, synthetic construct
TDRPPYP

SEQ ID NO: 95971 - protein, 7 aa, synthetic construct
TRSMTNP

SEQ ID NO: 95972 - protein, 7 aa, synthetic construct
KAAIEAI

SEQ ID NO: 95973 - protein, 7 aa, synthetic construct
KSGGIPS

SEQ ID NO: 95974 - protein, 7 aa, synthetic construct
TEQQKSH

SEQ ID NO: 95975 - protein, 7 aa, synthetic construct
PPVRSEH

SEQ ID NO: 95976 - protein, 7 aa, synthetic construct
VTHNVQF

SEQ ID NO: 95977 - protein, 7 aa, synthetic construct
HYTAEFP

SEQ ID NO: 95978 - protein, 7 aa, synthetic construct
QSPRFME

SEQ ID NO: 95979 - protein, 7 aa, synthetic construct
KMDAVIG

SEQ ID NO: 95980 - protein, 7 aa, synthetic construct
FQGPPDV

SEQ ID NO: 95981 - protein, 7 aa, synthetic construct
TKNSANG

SEQ ID NO: 95982 - protein, 7 aa, synthetic construct
NHSERQE

SEQ ID NO: 95983 - protein, 7 aa, synthetic construct
LQQGPHV

SEQ ID NO: 95984 - protein, 7 aa, synthetic construct
YTNKGAT

SEQ ID NO: 95985 - protein, 7 aa, synthetic construct
HMSDHAI

SEQ ID NO: 95986 - protein, 7 aa, synthetic construct
LRIGDPA

SEQ ID NO: 95987 - protein, 7 aa, synthetic construct
NEHRLPD

SEQ ID NO: 95988 - protein, 7 aa, synthetic construct
HYGVRLE

SEQ ID NO: 95989 - protein, 7 aa, synthetic construct
PINHTQV

SEQ ID NO: 95990 - protein, 7 aa, synthetic construct
MPGGALG

SEQ ID NO: 95991 - protein, 7 aa, synthetic construct
AMKTVGA

SEQ ID NO: 95992 - protein, 7 aa, synthetic construct
FNKHVEF

SEQ ID NO: 95993 - protein, 7 aa, synthetic construct
YTGQTSD

SEQ ID NO: 95994 - protein, 7 aa, synthetic construct
ANWEAKT

SEQ ID NO: 95995 - protein, 7 aa, synthetic construct
YVHEKGL

SEQ ID NO: 95996 - protein, 7 aa, synthetic construct
GNPNYRI

SEQ ID NO: 95997 - protein, 7 aa, synthetic construct
PTGGKQP

SEQ ID NO: 95998 - protein, 7 aa, synthetic construct
NIDMNHK

SEQ ID NO: 95999 - protein, 7 aa, synthetic construct
FEQYKQR

SEQ ID NO: 96000 - protein, 7 aa, synthetic construct
SRGGLHD

SEQ ID NO: 96001 - protein, 7 aa, synthetic construct
RVTGQED

SEQ ID NO: 96002 - protein, 7 aa, synthetic construct
SNRGQEK

SEQ ID NO: 96003 - protein, 7 aa, synthetic construct
REPFTDL

SEQ ID NO: 96004 - protein, 7 aa, synthetic construct
EQIVNLE

SEQ ID NO: 96005 - protein, 7 aa, synthetic construct
QGIPGEG

SEQ ID NO: 96006 - protein, 7 aa, synthetic construct
KQWSKME

SEQ ID NO: 96007 - protein, 7 aa, synthetic construct
HIVHSTP

SEQ ID NO: 96008 - protein, 7 aa, synthetic construct
FPKIMEE

SEQ ID NO: 96009 - protein, 7 aa, synthetic construct
RQDTASP

SEQ ID NO: 96010 - protein, 7 aa, synthetic construct
QERMEAR

SEQ ID NO: 96011 - protein, 7 aa, synthetic construct
NFHSHDM

SEQ ID NO: 96012 - protein, 7 aa, synthetic construct
EVSRGQA

SEQ ID NO: 96013 - protein, 7 aa, synthetic construct
FITKVTS

SEQ ID NO: 96014 - protein, 7 aa, synthetic construct
SSKSTMG

SEQ ID NO: 96015 - protein, 7 aa, synthetic construct
VSGMQRD

SEQ ID NO: 96016 - protein, 7 aa, synthetic construct
EQHHKLT

SEQ ID NO: 96017 - protein, 7 aa, synthetic construct
KQAEGNV

SEQ ID NO: 96018 - protein, 7 aa, synthetic construct
RHNHQVP

SEQ ID NO: 96019 - protein, 7 aa, synthetic construct
GNFGSQI

SEQ ID NO: 96020 - protein, 7 aa, synthetic construct
GYRIGAN

SEQ ID NO: 96021 - protein, 7 aa, synthetic construct
QRNGTAY

SEQ ID NO: 96022 - protein, 7 aa, synthetic construct
QTFPRQP

SEQ ID NO: 96023 - protein, 7 aa, synthetic construct
NFEVMRQ

SEQ ID NO: 96024 - protein, 7 aa, synthetic construct
NVDNGQR

SEQ ID NO: 96025 - protein, 7 aa, synthetic construct
DQRMHTH

SEQ ID NO: 96026 - protein, 7 aa, synthetic construct
RWSKEHE

SEQ ID NO: 96027 - protein, 7 aa, synthetic construct
SVIARAQ

SEQ ID NO: 96028 - protein, 7 aa, synthetic construct
VLVAGSP

SEQ ID NO: 96029 - protein, 7 aa, synthetic construct
QQYRGNN

SEQ ID NO: 96030 - protein, 7 aa, synthetic construct
VHEHWDK

SEQ ID NO: 96031 - protein, 7 aa, synthetic construct
LGHEVHK

SEQ ID NO: 96032 - protein, 7 aa, synthetic construct
NQKNSVG

SEQ ID NO: 96033 - protein, 7 aa, synthetic construct
RRVAEAT

SEQ ID NO: 96034 - protein, 7 aa, synthetic construct
VGQNSET

SEQ ID NO: 96035 - protein, 7 aa, synthetic construct
TMKMVHT

SEQ ID NO: 96036 - protein, 7 aa, synthetic construct
AVTQQQW

SEQ ID NO: 96037 - protein, 7 aa, synthetic construct
RQDQQNA

SEQ ID NO: 96038 - protein, 7 aa, synthetic construct
NVRREML

SEQ ID NO: 96039 - protein, 7 aa, synthetic construct
SMLKNAF

SEQ ID NO: 96040 - protein, 7 aa, synthetic construct
FMIQSPA

SEQ ID NO: 96041 - protein, 7 aa, synthetic construct
NYPSKLI

SEQ ID NO: 96042 - protein, 7 aa, synthetic construct
ISEMMKV

SEQ ID NO: 96043 - protein, 7 aa, synthetic construct
GKGMHET

SEQ ID NO: 96044 - protein, 7 aa, synthetic construct
LYEGPGN

SEQ ID NO: 96045 - protein, 7 aa, synthetic construct
DSHNRGN

SEQ ID NO: 96046 - protein, 7 aa, synthetic construct
VAYSVSP

SEQ ID NO: 96047 - protein, 7 aa, synthetic construct
IYRAATV

SEQ ID NO: 96048 - protein, 7 aa, synthetic construct
VASAPII

SEQ ID NO: 96049 - protein, 7 aa, synthetic construct
RLGEAIT

SEQ ID NO: 96050 - protein, 7 aa, synthetic construct
KVFSLND

SEQ ID NO: 96051 - protein, 7 aa, synthetic construct
TPIQLIQ

SEQ ID NO: 96052 - protein, 7 aa, synthetic construct
PIKAEWS

SEQ ID NO: 96053 - protein, 7 aa, synthetic construct
LKRPVDN

SEQ ID NO: 96054 - protein, 7 aa, synthetic construct
TKDTQVN

SEQ ID NO: 96055 - protein, 7 aa, synthetic construct
PAHPFNG

SEQ ID NO: 96056 - protein, 7 aa, synthetic construct
EGYKSMM

SEQ ID NO: 96057 - protein, 7 aa, synthetic construct
NGPSTFR

SEQ ID NO: 96058 - protein, 7 aa, synthetic construct
APSMTSV

SEQ ID NO: 96059 - protein, 7 aa, synthetic construct
LVRQSTL

SEQ ID NO: 96060 - protein, 7 aa, synthetic construct
EFVKDKM

SEQ ID NO: 96061 - protein, 7 aa, synthetic construct
KLSASRE

SEQ ID NO: 96062 - protein, 7 aa, synthetic construct
APPHHGM

SEQ ID NO: 96063 - protein, 7 aa, synthetic construct
SNKSSGP

SEQ ID NO: 96064 - protein, 7 aa, synthetic construct
HKGMILP

SEQ ID NO: 96065 - protein, 7 aa, synthetic construct
QNRKLDN

SEQ ID NO: 96066 - protein, 7 aa, synthetic construct
YANNQKG

SEQ ID NO: 96067 - protein, 7 aa, synthetic construct
IHRTAFN

SEQ ID NO: 96068 - protein, 7 aa, synthetic construct
HSATIQQ

SEQ ID NO: 96069 - protein, 7 aa, synthetic construct
FPTSTSP

SEQ ID NO: 96070 - protein, 7 aa, synthetic construct
PKGNGQG

SEQ ID NO: 96071 - protein, 7 aa, synthetic construct
DLQLPRH

SEQ ID NO: 96072 - protein, 7 aa, synthetic construct
ELQSQPA

SEQ ID NO: 96073 - protein, 7 aa, synthetic construct
FSQFPAG

SEQ ID NO: 96074 - protein, 7 aa, synthetic construct
PHPGLPP

SEQ ID NO: 96075 - protein, 7 aa, synthetic construct
VVAHIGH

SEQ ID NO: 96076 - protein, 7 aa, synthetic construct
MTGQRQP

SEQ ID NO: 96077 - protein, 7 aa, synthetic construct
AYHHSNG

SEQ ID NO: 96078 - protein, 7 aa, synthetic construct
KDNHPYD

SEQ ID NO: 96079 - protein, 7 aa, synthetic construct
YATGFKE

SEQ ID NO: 96080 - protein, 7 aa, synthetic construct
VHNPQSS

SEQ ID NO: 96081 - protein, 7 aa, synthetic construct
STGVTFE

SEQ ID NO: 96082 - protein, 7 aa, synthetic construct
PNLTGVR

SEQ ID NO: 96083 - protein, 7 aa, synthetic construct
PYRATMN

SEQ ID NO: 96084 - protein, 7 aa, synthetic construct
NKDAATR

SEQ ID NO: 96085 - protein, 7 aa, synthetic construct
MKGKDHN

SEQ ID NO: 96086 - protein, 7 aa, synthetic construct
PMKAQVP

SEQ ID NO: 96087 - protein, 7 aa, synthetic construct
YNPEPGL

SEQ ID NO: 96088 - protein, 7 aa, synthetic construct
VNNKSSA

SEQ ID NO: 96089 - protein, 7 aa, synthetic construct
EHDHVKI

SEQ ID NO: 96090 - protein, 7 aa, synthetic construct
IVHPAST

SEQ ID NO: 96091 - protein, 7 aa, synthetic construct
YVSNRLE

SEQ ID NO: 96092 - protein, 7 aa, synthetic construct
VVGNVKM

SEQ ID NO: 96093 - protein, 7 aa, synthetic construct
MNQDGRA

SEQ ID NO: 96094 - protein, 7 aa, synthetic construct
YTLQAER

SEQ ID NO: 96095 - protein, 7 aa, synthetic construct
TMLQQKQ

SEQ ID NO: 96096 - protein, 7 aa, synthetic construct
DKRPMQL

SEQ ID NO: 96097 - protein, 7 aa, synthetic construct
KMPGSSD

SEQ ID NO: 96098 - protein, 7 aa, synthetic construct
ARSNTSP

SEQ ID NO: 96099 - protein, 7 aa, synthetic construct
KIVTDSI

SEQ ID NO: 96100 - protein, 7 aa, synthetic construct
KIADNAD

SEQ ID NO: 96101 - protein, 7 aa, synthetic construct
DHQGTPL

SEQ ID NO: 96102 - protein, 7 aa, synthetic construct
EGMSATP

SEQ ID NO: 96103 - protein, 7 aa, synthetic construct
KYGQNQG

SEQ ID NO: 96104 - protein, 7 aa, synthetic construct
KGSEKMM

SEQ ID NO: 96105 - protein, 7 aa, synthetic construct
VVNNLSV

SEQ ID NO: 96106 - protein, 7 aa, synthetic construct
SKDQPYT

SEQ ID NO: 96107 - protein, 7 aa, synthetic construct
PTVKLLE

SEQ ID NO: 96108 - protein, 7 aa, synthetic construct
PSNMMNS

SEQ ID NO: 96109 - protein, 7 aa, synthetic construct
EPSSTYE

SEQ ID NO: 96110 - protein, 7 aa, synthetic construct
VHSTPDQ

SEQ ID NO: 96111 - protein, 7 aa, synthetic construct
GHAASLY

SEQ ID NO: 96112 - protein, 7 aa, synthetic construct
YMGMGHH

SEQ ID NO: 96113 - protein, 7 aa, synthetic construct
MQYPESY

SEQ ID NO: 96114 - protein, 7 aa, synthetic construct
PYLSNNT

SEQ ID NO: 96115 - protein, 7 aa, synthetic construct
MKDDSSM

SEQ ID NO: 96116 - protein, 7 aa, synthetic construct
NAHRVTD

SEQ ID NO: 96117 - protein, 7 aa, synthetic construct
YPERQQY

SEQ ID NO: 96118 - protein, 7 aa, synthetic construct
VNMGDRM

SEQ ID NO: 96119 - protein, 7 aa, synthetic construct
VPMKNIH

SEQ ID NO: 96120 - protein, 7 aa, synthetic construct
TLDSQPG

SEQ ID NO: 96121 - protein, 7 aa, synthetic construct
QKQLNNW

SEQ ID NO: 96122 - protein, 7 aa, synthetic construct
GYPKHPA

SEQ ID NO: 96123 - protein, 7 aa, synthetic construct
HITQSMD

SEQ ID NO: 96124 - protein, 7 aa, synthetic construct
AFRTEKS

SEQ ID NO: 96125 - protein, 7 aa, synthetic construct
ARVEHNA

SEQ ID NO: 96126 - protein, 7 aa, synthetic construct
QTHTDGN

SEQ ID NO: 96127 - protein, 7 aa, synthetic construct
MVGANGD

SEQ ID NO: 96128 - protein, 7 aa, synthetic construct
SDKVPMY

SEQ ID NO: 96129 - protein, 7 aa, synthetic construct
VLAHLEG

SEQ ID NO: 96130 - protein, 7 aa, synthetic construct
TGAQVEP

SEQ ID NO: 96131 - protein, 7 aa, synthetic construct
PTQKHDG

SEQ ID NO: 96132 - protein, 7 aa, synthetic construct
RIENMNE

SEQ ID NO: 96133 - protein, 7 aa, synthetic construct
VIGPSFP

SEQ ID NO: 96134 - protein, 7 aa, synthetic construct
KKDPNFA

SEQ ID NO: 96135 - protein, 7 aa, synthetic construct
FKNSISG

SEQ ID NO: 96136 - protein, 7 aa, synthetic construct
YQKTDHD

SEQ ID NO: 96137 - protein, 7 aa, synthetic construct
MNGLKIL

SEQ ID NO: 96138 - protein, 7 aa, synthetic construct
PAQSMQH

SEQ ID NO: 96139 - protein, 7 aa, synthetic construct
PKDGRTE

SEQ ID NO: 96140 - protein, 7 aa, synthetic construct
HYHVTVP

SEQ ID NO: 96141 - protein, 7 aa, synthetic construct
YDHAYQI

SEQ ID NO: 96142 - protein, 7 aa, synthetic construct
RGSSNQC

SEQ ID NO: 96143 - protein, 7 aa, synthetic construct
GKMTFPN

SEQ ID NO: 96144 - protein, 7 aa, synthetic construct
LQSTAIN

SEQ ID NO: 96145 - protein, 7 aa, synthetic construct
ATNLPMA

SEQ ID NO: 96146 - protein, 7 aa, synthetic construct
PMDQKFT

SEQ ID NO: 96147 - protein, 7 aa, synthetic construct
TNKVYER

SEQ ID NO: 96148 - protein, 7 aa, synthetic construct
MNHMPES

SEQ ID NO: 96149 - protein, 7 aa, synthetic construct
DGGTSRL

SEQ ID NO: 96150 - protein, 7 aa, synthetic construct
RAWTQDG

SEQ ID NO: 96151 - protein, 7 aa, synthetic construct
MLNDNRT

SEQ ID NO: 96152 - protein, 7 aa, synthetic construct
RGADTAV

SEQ ID NO: 96153 - protein, 7 aa, synthetic construct
INAVNGQ

SEQ ID NO: 96154 - protein, 7 aa, synthetic construct
LADVHTM

SEQ ID NO: 96155 - protein, 7 aa, synthetic construct
PDRAIGS

SEQ ID NO: 96156 - protein, 7 aa, synthetic construct
NLHQKDH

SEQ ID NO: 96157 - protein, 7 aa, synthetic construct
QGGKNTA

SEQ ID NO: 96158 - protein, 7 aa, synthetic construct
SEFITHE

SEQ ID NO: 96159 - protein, 7 aa, synthetic construct
GHQGAPM

SEQ ID NO: 96160 - protein, 7 aa, synthetic construct
NQMHGKI

SEQ ID NO: 96161 - protein, 7 aa, synthetic construct
DAAKVAR

SEQ ID NO: 96162 - protein, 7 aa, synthetic construct
NNLAVPF

SEQ ID NO: 96163 - protein, 7 aa, synthetic construct
NSMPRHA

SEQ ID NO: 96164 - protein, 7 aa, synthetic construct
IDQGRYI

SEQ ID NO: 96165 - protein, 7 aa, synthetic construct
ASVPERG

SEQ ID NO: 96166 - protein, 7 aa, synthetic construct
IQDQKTI

SEQ ID NO: 96167 - protein, 7 aa, synthetic construct
GPLPHNM

SEQ ID NO: 96168 - protein, 7 aa, synthetic construct
GSAHPGY

SEQ ID NO: 96169 - protein, 7 aa, synthetic construct
QSIQVNG

SEQ ID NO: 96170 - protein, 7 aa, synthetic construct
PTYPEAG

SEQ ID NO: 96171 - protein, 7 aa, synthetic construct
RHGPEKY

SEQ ID NO: 96172 - protein, 7 aa, synthetic construct
FEIGWAE

SEQ ID NO: 96173 - protein, 7 aa, synthetic construct
PSGHIES

SEQ ID NO: 96174 - protein, 7 aa, synthetic construct
FAHHSDV

SEQ ID NO: 96175 - protein, 7 aa, synthetic construct
MQPSGGG

SEQ ID NO: 96176 - protein, 7 aa, synthetic construct
WANDRTQ

SEQ ID NO: 96177 - protein, 7 aa, synthetic construct
YSGLAKH

SEQ ID NO: 96178 - protein, 7 aa, synthetic construct
YSQGKDL

SEQ ID NO: 96179 - protein, 7 aa, synthetic construct
DKPPWAS

SEQ ID NO: 96180 - protein, 7 aa, synthetic construct
VLGPGSF

SEQ ID NO: 96181 - protein, 7 aa, synthetic construct
TPNHHLV

SEQ ID NO: 96182 - protein, 7 aa, synthetic construct
TSHDREI

SEQ ID NO: 96183 - protein, 7 aa, synthetic construct
GNYNKDM

SEQ ID NO: 96184 - protein, 7 aa, synthetic construct
MLGVHMP

SEQ ID NO: 96185 - protein, 7 aa, synthetic construct
GMSKATA

SEQ ID NO: 96186 - protein, 7 aa, synthetic construct
PRGGHSS

SEQ ID NO: 96187 - protein, 7 aa, synthetic construct
YTANEHS

SEQ ID NO: 96188 - protein, 7 aa, synthetic construct
DYIDTVK

SEQ ID NO: 96189 - protein, 7 aa, synthetic construct
NMIKNHP

SEQ ID NO: 96190 - protein, 7 aa, synthetic construct
DMPKEMK

SEQ ID NO: 96191 - protein, 7 aa, synthetic construct
VDASATV

SEQ ID NO: 96192 - protein, 7 aa, synthetic construct
NQGIVVG

SEQ ID NO: 96193 - protein, 7 aa, synthetic construct
AILPKME

SEQ ID NO: 96194 - protein, 7 aa, synthetic construct
VAKDMRT

SEQ ID NO: 96195 - protein, 7 aa, synthetic construct
RTQTSPS

SEQ ID NO: 96196 - protein, 7 aa, synthetic construct
PWKQYEA

SEQ ID NO: 96197 - protein, 7 aa, synthetic construct
WLEGYKD

SEQ ID NO: 96198 - protein, 7 aa, synthetic construct
VDKIMYP

SEQ ID NO: 96199 - protein, 7 aa, synthetic construct
EVPRLTG

SEQ ID NO: 96200 - protein, 7 aa, synthetic construct
IFSKGGQ

SEQ ID NO: 96201 - protein, 7 aa, synthetic construct
NMQSNKH

SEQ ID NO: 96202 - protein, 7 aa, synthetic construct
VMAHGLS

SEQ ID NO: 96203 - protein, 7 aa, synthetic construct
PMHKNAS

SEQ ID NO: 96204 - protein, 7 aa, synthetic construct
NMSQKEM

SEQ ID NO: 96205 - protein, 7 aa, synthetic construct
IEHAHSV

SEQ ID NO: 96206 - protein, 7 aa, synthetic construct
ARHSQFE

SEQ ID NO: 96207 - protein, 7 aa, synthetic construct
PTVAEHK

SEQ ID NO: 96208 - protein, 7 aa, synthetic construct
IAALGLK

SEQ ID NO: 96209 - protein, 7 aa, synthetic construct
LMAGREF

SEQ ID NO: 96210 - protein, 7 aa, synthetic construct
MKTMDQL

SEQ ID NO: 96211 - protein, 7 aa, synthetic construct
YRMSVGD

SEQ ID NO: 96212 - protein, 7 aa, synthetic construct
NTKNNSN

SEQ ID NO: 96213 - protein, 7 aa, synthetic construct
KGMDMKL

SEQ ID NO: 96214 - protein, 7 aa, synthetic construct
IHRVQMN

SEQ ID NO: 96215 - protein, 7 aa, synthetic construct
IQGGPMF

SEQ ID NO: 96216 - protein, 7 aa, synthetic construct
STKDVVG

SEQ ID NO: 96217 - protein, 7 aa, synthetic construct
KREATNS

SEQ ID NO: 96218 - protein, 7 aa, synthetic construct
YLPHQPL

SEQ ID NO: 96219 - protein, 7 aa, synthetic construct
PDYQLKG

SEQ ID NO: 96220 - protein, 7 aa, synthetic construct
ATGVKGL

SEQ ID NO: 96221 - protein, 7 aa, synthetic construct
REDFISM

SEQ ID NO: 96222 - protein, 7 aa, synthetic construct
PNKAMVI

SEQ ID NO: 96223 - protein, 7 aa, synthetic construct
FSPTHLV

SEQ ID NO: 96224 - protein, 7 aa, synthetic construct
RFPDNEG

SEQ ID NO: 96225 - protein, 7 aa, synthetic construct
IRTAVTG

SEQ ID NO: 96226 - protein, 7 aa, synthetic construct
ILLPSDM

SEQ ID NO: 96227 - protein, 7 aa, synthetic construct
NAPGRGA

SEQ ID NO: 96228 - protein, 7 aa, synthetic construct
GFMNDAP

SEQ ID NO: 96229 - protein, 7 aa, synthetic construct
KQEALNH

SEQ ID NO: 96230 - protein, 7 aa, synthetic construct
AAGPNPI

SEQ ID NO: 96231 - protein, 7 aa, synthetic construct
MDRSYPM

SEQ ID NO: 96232 - protein, 7 aa, synthetic construct
WKPVVNP

SEQ ID NO: 96233 - protein, 7 aa, synthetic construct
MMSDPIG

SEQ ID NO: 96234 - protein, 7 aa, synthetic construct
QIPTAGD

SEQ ID NO: 96235 - protein, 7 aa, synthetic construct
DPPSLKN

SEQ ID NO: 96236 - protein, 7 aa, synthetic construct
NRQSIQQ

SEQ ID NO: 96237 - protein, 7 aa, synthetic construct
TANRVTE

SEQ ID NO: 96238 - protein, 7 aa, synthetic construct
MLGQPLA

SEQ ID NO: 96239 - protein, 7 aa, synthetic construct
QRHFDVG

SEQ ID NO: 96240 - protein, 7 aa, synthetic construct
ATSTENF

SEQ ID NO: 96241 - protein, 7 aa, synthetic construct
KYQPADG

SEQ ID NO: 96242 - protein, 7 aa, synthetic construct
WADKEWA

SEQ ID NO: 96243 - protein, 7 aa, synthetic construct
WSMGLKE

SEQ ID NO: 96244 - protein, 7 aa, synthetic construct
HTSNNFA

SEQ ID NO: 96245 - protein, 7 aa, synthetic construct
SPEARQS

SEQ ID NO: 96246 - protein, 7 aa, synthetic construct
HEPIAKQ

SEQ ID NO: 96247 - protein, 7 aa, synthetic construct
RVGDANH

SEQ ID NO: 96248 - protein, 7 aa, synthetic construct
PDTKYSP

SEQ ID NO: 96249 - protein, 7 aa, synthetic construct
TNIVHAE

SEQ ID NO: 96250 - protein, 7 aa, synthetic construct
PDMRHQV

SEQ ID NO: 96251 - protein, 7 aa, synthetic construct
KGYETLL

SEQ ID NO: 96252 - protein, 7 aa, synthetic construct
NHHGAAR

SEQ ID NO: 96253 - protein, 7 aa, synthetic construct
RHPGFHA

SEQ ID NO: 96254 - protein, 7 aa, synthetic construct
KQAQEHF

SEQ ID NO: 96255 - protein, 7 aa, synthetic construct
MMPFHNG

SEQ ID NO: 96256 - protein, 7 aa, synthetic construct
VVPIKQM

SEQ ID NO: 96257 - protein, 7 aa, synthetic construct
RANITHF

SEQ ID NO: 96258 - protein, 7 aa, synthetic construct
VRNDNGK

SEQ ID NO: 96259 - protein, 7 aa, synthetic construct
LYIKSSE

SEQ ID NO: 96260 - protein, 7 aa, synthetic construct
YLRDHGE

SEQ ID NO: 96261 - protein, 7 aa, synthetic construct
NAKSGSP

SEQ ID NO: 96262 - protein, 7 aa, synthetic construct
VANMHGY

SEQ ID NO: 96263 - protein, 7 aa, synthetic construct
QNMRQIP

SEQ ID NO: 96264 - protein, 7 aa, synthetic construct
NLWKDSV

SEQ ID NO: 96265 - protein, 7 aa, synthetic construct
NGNHENY

SEQ ID NO: 96266 - protein, 7 aa, synthetic construct
GMRTFPV

SEQ ID NO: 96267 - protein, 7 aa, synthetic construct
LKETMGA

SEQ ID NO: 96268 - protein, 7 aa, synthetic construct
SLHNTHE

SEQ ID NO: 96269 - protein, 7 aa, synthetic construct
YTNSVKD

SEQ ID NO: 96270 - protein, 7 aa, synthetic construct
MKNGTNN

SEQ ID NO: 96271 - protein, 7 aa, synthetic construct
GYNSRSL

SEQ ID NO: 96272 - protein, 7 aa, synthetic construct
GQYIQQV

SEQ ID NO: 96273 - protein, 7 aa, synthetic construct
KGGYMSS

SEQ ID NO: 96274 - protein, 7 aa, synthetic construct
VQSTKQG

SEQ ID NO: 96275 - protein, 7 aa, synthetic construct
KTYPQDD

SEQ ID NO: 96276 - protein, 7 aa, synthetic construct
PASVKDW

SEQ ID NO: 96277 - protein, 7 aa, synthetic construct
KNNLDLI

SEQ ID NO: 96278 - protein, 7 aa, synthetic construct
TKSGNTA

SEQ ID NO: 96279 - protein, 7 aa, synthetic construct
MHNFVGP

SEQ ID NO: 96280 - protein, 7 aa, synthetic construct
KPGERMQ

SEQ ID NO: 96281 - protein, 7 aa, synthetic construct
GMKHQSL

SEQ ID NO: 96282 - protein, 7 aa, synthetic construct
TSEPQRS

SEQ ID NO: 96283 - protein, 7 aa, synthetic construct
GRHKIEG

SEQ ID NO: 96284 - protein, 7 aa, synthetic construct
DHPSPRA

SEQ ID NO: 96285 - protein, 7 aa, synthetic construct
ANHTSVM

SEQ ID NO: 96286 - protein, 7 aa, synthetic construct
NERQVFI

SEQ ID NO: 96287 - protein, 7 aa, synthetic construct
DSKIQTM

SEQ ID NO: 96288 - protein, 7 aa, synthetic construct
NIVAKAN

SEQ ID NO: 96289 - protein, 7 aa, synthetic construct
EARQNYS

SEQ ID NO: 96290 - protein, 7 aa, synthetic construct
PIYHGKG

SEQ ID NO: 96291 - protein, 7 aa, synthetic construct
LMNAHRT

SEQ ID NO: 96292 - protein, 7 aa, synthetic construct
IVPKQPW

SEQ ID NO: 96293 - protein, 7 aa, synthetic construct
SSNNPGW

SEQ ID NO: 96294 - protein, 7 aa, synthetic construct
HGPVQRP

SEQ ID NO: 96295 - protein, 7 aa, synthetic construct
KEFETRV

SEQ ID NO: 96296 - protein, 7 aa, synthetic construct
SKNQAWI

SEQ ID NO: 96297 - protein, 7 aa, synthetic construct
AHPPNGF

SEQ ID NO: 96298 - protein, 7 aa, synthetic construct
KGMQVQG

SEQ ID NO: 96299 - protein, 7 aa, synthetic construct
QWSNTLP

SEQ ID NO: 96300 - protein, 7 aa, synthetic construct
QHSAPTT

SEQ ID NO: 96301 - protein, 7 aa, synthetic construct
FGGIAPH

SEQ ID NO: 96302 - protein, 7 aa, synthetic construct
SIILGDK

SEQ ID NO: 96303 - protein, 7 aa, synthetic construct
AHFQLQA

SEQ ID NO: 96304 - protein, 7 aa, synthetic construct
SKMTVSF

SEQ ID NO: 96305 - protein, 7 aa, synthetic construct
HTAVPIN

SEQ ID NO: 96306 - protein, 7 aa, synthetic construct
AQGNGGA

SEQ ID NO: 96307 - protein, 7 aa, synthetic construct
RVVEGAP

SEQ ID NO: 96308 - protein, 7 aa, synthetic construct
KAFHDYD

SEQ ID NO: 96309 - protein, 7 aa, synthetic construct
HTHSSNA

SEQ ID NO: 96310 - protein, 7 aa, synthetic construct
MSKDSIM

SEQ ID NO: 96311 - protein, 7 aa, synthetic construct
MGIHGKL

SEQ ID NO: 96312 - protein, 7 aa, synthetic construct
KATNLLT

SEQ ID NO: 96313 - protein, 7 aa, synthetic construct
GMGWQEA

SEQ ID NO: 96314 - protein, 7 aa, synthetic construct
SSTHHHH

SEQ ID NO: 96315 - protein, 7 aa, synthetic construct
QNLRIDR

SEQ ID NO: 96316 - protein, 7 aa, synthetic construct
PEFNPAS

SEQ ID NO: 96317 - protein, 7 aa, synthetic construct
LERAPHY

SEQ ID NO: 96318 - protein, 7 aa, synthetic construct
RFDSAAE

SEQ ID NO: 96319 - protein, 7 aa, synthetic construct
QDPLTKL

SEQ ID NO: 96320 - protein, 7 aa, synthetic construct
LQIKDIN

SEQ ID NO: 96321 - protein, 7 aa, synthetic construct
DTTTKQL

SEQ ID NO: 96322 - protein, 7 aa, synthetic construct
MTSKDNP

SEQ ID NO: 96323 - protein, 7 aa, synthetic construct
YMFNKSP

SEQ ID NO: 96324 - protein, 7 aa, synthetic construct
EYKGLEY

SEQ ID NO: 96325 - protein, 7 aa, synthetic construct
PTTPVHL

SEQ ID NO: 96326 - protein, 7 aa, synthetic construct
YHDNMTV

SEQ ID NO: 96327 - protein, 7 aa, synthetic construct
IGNVHLK

SEQ ID NO: 96328 - protein, 7 aa, synthetic construct
AQKQDLP

SEQ ID NO: 96329 - protein, 7 aa, synthetic construct
ENAHAQP

SEQ ID NO: 96330 - protein, 7 aa, synthetic construct
DHGGQHF

SEQ ID NO: 96331 - protein, 7 aa, synthetic construct
TTRGGEQ

SEQ ID NO: 96332 - protein, 7 aa, synthetic construct
KTVGGEH

SEQ ID NO: 96333 - protein, 7 aa, synthetic construct
IADIYTS

SEQ ID NO: 96334 - protein, 7 aa, synthetic construct
GGAQPLL

SEQ ID NO: 96335 - protein, 7 aa, synthetic construct
KVNNEVA

SEQ ID NO: 96336 - protein, 7 aa, synthetic construct
EPVNSQR

SEQ ID NO: 96337 - protein, 7 aa, synthetic construct
GVSVNLV

SEQ ID NO: 96338 - protein, 7 aa, synthetic construct
KADHSNK

SEQ ID NO: 96339 - protein, 7 aa, synthetic construct
GQGGFLH

SEQ ID NO: 96340 - protein, 7 aa, synthetic construct
TENLVRG

SEQ ID NO: 96341 - protein, 7 aa, synthetic construct
KQHAIIH

SEQ ID NO: 96342 - protein, 7 aa, synthetic construct
VTNKDQG

SEQ ID NO: 96343 - protein, 7 aa, synthetic construct
NALPTSR

SEQ ID NO: 96344 - protein, 7 aa, synthetic construct
ISHYMGA

SEQ ID NO: 96345 - protein, 7 aa, synthetic construct
VGEKMLT

SEQ ID NO: 96346 - protein, 7 aa, synthetic construct
IRHTGSA

SEQ ID NO: 96347 - protein, 7 aa, synthetic construct
HPAPATY

SEQ ID NO: 96348 - protein, 7 aa, synthetic construct
GEVRNDR

SEQ ID NO: 96349 - protein, 7 aa, synthetic construct
NNGKNTN

SEQ ID NO: 96350 - protein, 7 aa, synthetic construct
MGPPGIK

SEQ ID NO: 96351 - protein, 7 aa, synthetic construct
HEDRMLT

SEQ ID NO: 96352 - protein, 7 aa, synthetic construct
ESHYEKG

SEQ ID NO: 96353 - protein, 7 aa, synthetic construct
PQPHTAT

SEQ ID NO: 96354 - protein, 7 aa, synthetic construct
WRHEGSE

SEQ ID NO: 96355 - protein, 7 aa, synthetic construct
HLSHIEE

SEQ ID NO: 96356 - protein, 7 aa, synthetic construct
GVTRLNN

SEQ ID NO: 96357 - protein, 7 aa, synthetic construct
TDPHAIR

SEQ ID NO: 96358 - protein, 7 aa, synthetic construct
IHGQIHY

SEQ ID NO: 96359 - protein, 7 aa, synthetic construct
KWVKAPE

SEQ ID NO: 96360 - protein, 7 aa, synthetic construct
ELYKPLT

SEQ ID NO: 96361 - protein, 7 aa, synthetic construct
KSARNDD

SEQ ID NO: 96362 - protein, 7 aa, synthetic construct
NKDAGPP

SEQ ID NO: 96363 - protein, 7 aa, synthetic construct
TSKQQSV

SEQ ID NO: 96364 - protein, 7 aa, synthetic construct
NIDISPR

SEQ ID NO: 96365 - protein, 7 aa, synthetic construct
ADFIPNS

SEQ ID NO: 96366 - protein, 7 aa, synthetic construct
VVYKHHP

SEQ ID NO: 96367 - protein, 7 aa, synthetic construct
IESYHKV

SEQ ID NO: 96368 - protein, 7 aa, synthetic construct
DLKMLSM

SEQ ID NO: 96369 - protein, 7 aa, synthetic construct
NKWVDVA

SEQ ID NO: 96370 - protein, 7 aa, synthetic construct
SPQHDKQ

SEQ ID NO: 96371 - protein, 7 aa, synthetic construct
YKHPEFP

SEQ ID NO: 96372 - protein, 7 aa, synthetic construct
STAAGVR

SEQ ID NO: 96373 - protein, 7 aa, synthetic construct
MLSKQMQ

SEQ ID NO: 96374 - protein, 7 aa, synthetic construct
MTFHGNH

SEQ ID NO: 96375 - protein, 7 aa, synthetic construct
PPRELGY

SEQ ID NO: 96376 - protein, 7 aa, synthetic construct
NPNRMQV

SEQ ID NO: 96377 - protein, 7 aa, synthetic construct
HVRSNTD

SEQ ID NO: 96378 - protein, 7 aa, synthetic construct
LQEKGNT

SEQ ID NO: 96379 - protein, 7 aa, synthetic construct
NPLAPMQ

SEQ ID NO: 96380 - protein, 7 aa, synthetic construct
PIPNSNW

SEQ ID NO: 96381 - protein, 7 aa, synthetic construct
AMRPGSE

SEQ ID NO: 96382 - protein, 7 aa, synthetic construct
ASPRTPQ

SEQ ID NO: 96383 - protein, 7 aa, synthetic construct
RKQDTDM

SEQ ID NO: 96384 - protein, 7 aa, synthetic construct
PDIKGWT

SEQ ID NO: 96385 - protein, 7 aa, synthetic construct
MITNMGN

SEQ ID NO: 96386 - protein, 7 aa, synthetic construct
MIKHHID

SEQ ID NO: 96387 - protein, 7 aa, synthetic construct
DRNFKVQ

SEQ ID NO: 96388 - protein, 7 aa, synthetic construct
GKGLEPQ

SEQ ID NO: 96389 - protein, 7 aa, synthetic construct
TLETFKA

SEQ ID NO: 96390 - protein, 7 aa, synthetic construct
ARNIEKW

SEQ ID NO: 96391 - protein, 7 aa, synthetic construct
FNEGHIR

SEQ ID NO: 96392 - protein, 7 aa, synthetic construct
VTTGDQG

SEQ ID NO: 96393 - protein, 7 aa, synthetic construct
HLQPTRQ

SEQ ID NO: 96394 - protein, 7 aa, synthetic construct
WRQAHED

SEQ ID NO: 96395 - protein, 7 aa, synthetic construct
GPVTVGM

SEQ ID NO: 96396 - protein, 7 aa, synthetic construct
GQQRTQV

SEQ ID NO: 96397 - protein, 7 aa, synthetic construct
NRYTRAE

SEQ ID NO: 96398 - protein, 7 aa, synthetic construct
APNKFVP

SEQ ID NO: 96399 - protein, 7 aa, synthetic construct
NGPKHAD

SEQ ID NO: 96400 - protein, 7 aa, synthetic construct
SSKVFIA

SEQ ID NO: 96401 - protein, 7 aa, synthetic construct
DHTGRHL

SEQ ID NO: 96402 - protein, 7 aa, synthetic construct
AERAVFA

SEQ ID NO: 96403 - protein, 7 aa, synthetic construct
PEDKHGV

SEQ ID NO: 96404 - protein, 7 aa, synthetic construct
PRIKDGV

SEQ ID NO: 96405 - protein, 7 aa, synthetic construct
NPQNVIE

SEQ ID NO: 96406 - protein, 7 aa, synthetic construct
FYEGSNA

SEQ ID NO: 96407 - protein, 7 aa, synthetic construct
RKLHDGH

SEQ ID NO: 96408 - protein, 7 aa, synthetic construct
FDTRLQD

SEQ ID NO: 96409 - protein, 7 aa, synthetic construct
ATPSMVI

SEQ ID NO: 96410 - protein, 7 aa, synthetic construct
AATSPLG

SEQ ID NO: 96411 - protein, 7 aa, synthetic construct
TPTTGGV

SEQ ID NO: 96412 - protein, 7 aa, synthetic construct
TVIKYER

SEQ ID NO: 96413 - protein, 7 aa, synthetic construct
GQKMYAE

SEQ ID NO: 96414 - protein, 7 aa, synthetic construct
PHNGGGW

SEQ ID NO: 96415 - protein, 7 aa, synthetic construct
RGNYHSP

SEQ ID NO: 96416 - protein, 7 aa, synthetic construct
VEQSKTH

SEQ ID NO: 96417 - protein, 7 aa, synthetic construct
NMPFNTK

SEQ ID NO: 96418 - protein, 7 aa, synthetic construct
RWEDTNR

SEQ ID NO: 96419 - protein, 7 aa, synthetic construct
LLPGFPE

SEQ ID NO: 96420 - protein, 7 aa, synthetic construct
IEKQFYN

SEQ ID NO: 96421 - protein, 7 aa, synthetic construct
RAELVKM

SEQ ID NO: 96422 - protein, 7 aa, synthetic construct
SGAAAFA

SEQ ID NO: 96423 - protein, 7 aa, synthetic construct
GVANVES

SEQ ID NO: 96424 - protein, 7 aa, synthetic construct
IIPRGHQ

SEQ ID NO: 96425 - protein, 7 aa, synthetic construct
NAKNQND

SEQ ID NO: 96426 - protein, 7 aa, synthetic construct
WTAVASV

SEQ ID NO: 96427 - protein, 7 aa, synthetic construct
QHAQALK

SEQ ID NO: 96428 - protein, 7 aa, synthetic construct
SKSSELL

SEQ ID NO: 96429 - protein, 7 aa, synthetic construct
TLNFDKP

SEQ ID NO: 96430 - protein, 7 aa, synthetic construct
SWSGTND

SEQ ID NO: 96431 - protein, 7 aa, synthetic construct
VGQKQDD

SEQ ID NO: 96432 - protein, 7 aa, synthetic construct
TSNPSLV

SEQ ID NO: 96433 - protein, 7 aa, synthetic construct
ANQNKWG

SEQ ID NO: 96434 - protein, 7 aa, synthetic construct
FQPFIKG

SEQ ID NO: 96435 - protein, 7 aa, synthetic construct
VVIPNHV

SEQ ID NO: 96436 - protein, 7 aa, synthetic construct
MPARAWD

SEQ ID NO: 96437 - protein, 7 aa, synthetic construct
WDHMHTK

SEQ ID NO: 96438 - protein, 7 aa, synthetic construct
VTHRPNH

SEQ ID NO: 96439 - protein, 7 aa, synthetic construct
APSTAGL

SEQ ID NO: 96440 - protein, 7 aa, synthetic construct
TKTYHNV

SEQ ID NO: 96441 - protein, 7 aa, synthetic construct
KYNTSAP

SEQ ID NO: 96442 - protein, 7 aa, synthetic construct
VRADMQL

SEQ ID NO: 96443 - protein, 7 aa, synthetic construct
WMEATHK

SEQ ID NO: 96444 - protein, 7 aa, synthetic construct
DFRAQKT

SEQ ID NO: 96445 - protein, 7 aa, synthetic construct
GHPVKTN

SEQ ID NO: 96446 - protein, 7 aa, synthetic construct
WHETATV

SEQ ID NO: 96447 - protein, 7 aa, synthetic construct
MVALGRP

SEQ ID NO: 96448 - protein, 7 aa, synthetic construct
SRETGEK

SEQ ID NO: 96449 - protein, 7 aa, synthetic construct
KYSPPKE

SEQ ID NO: 96450 - protein, 7 aa, synthetic construct
RKDDDRP

SEQ ID NO: 96451 - protein, 7 aa, synthetic construct
GGVVTIS

SEQ ID NO: 96452 - protein, 7 aa, synthetic construct
FQSPHNQ

SEQ ID NO: 96453 - protein, 7 aa, synthetic construct
GKNDKQG

SEQ ID NO: 96454 - protein, 7 aa, synthetic construct
KLHGHPN

SEQ ID NO: 96455 - protein, 7 aa, synthetic construct
DIPRASN

SEQ ID NO: 96456 - protein, 7 aa, synthetic construct
LKLHDDF

SEQ ID NO: 96457 - protein, 7 aa, synthetic construct
AVQGHMK

SEQ ID NO: 96458 - protein, 7 aa, synthetic construct
LIPVQRT

SEQ ID NO: 96459 - protein, 7 aa, synthetic construct
PPSFSTD

SEQ ID NO: 96460 - protein, 7 aa, synthetic construct
IDSHHAL

SEQ ID NO: 96461 - protein, 7 aa, synthetic construct
PVKQAQH

SEQ ID NO: 96462 - protein, 7 aa, synthetic construct
IITYTGG

SEQ ID NO: 96463 - protein, 7 aa, synthetic construct
FQKIDQT

SEQ ID NO: 96464 - protein, 7 aa, synthetic construct
AGERGAY

SEQ ID NO: 96465 - protein, 7 aa, synthetic construct
HVTSMTE

SEQ ID NO: 96466 - protein, 7 aa, synthetic construct
SQLHYTP

SEQ ID NO: 96467 - protein, 7 aa, synthetic construct
VHLPRNS

SEQ ID NO: 96468 - protein, 7 aa, synthetic construct
WNDFNKV

SEQ ID NO: 96469 - protein, 7 aa, synthetic construct
KEDWTPQ

SEQ ID NO: 96470 - protein, 7 aa, synthetic construct
FKLDAEH

SEQ ID NO: 96471 - protein, 7 aa, synthetic construct
WIAGNAP

SEQ ID NO: 96472 - protein, 7 aa, synthetic construct
KAMDRKD

SEQ ID NO: 96473 - protein, 7 aa, synthetic construct
AHRIDGR

SEQ ID NO: 96474 - protein, 7 aa, synthetic construct
PFGQQTS

SEQ ID NO: 96475 - protein, 7 aa, synthetic construct
TKETFRV

SEQ ID NO: 96476 - protein, 7 aa, synthetic construct
FVQAQKY

SEQ ID NO: 96477 - protein, 7 aa, synthetic construct
MFKGLGH

SEQ ID NO: 96478 - protein, 7 aa, synthetic construct
TGNRAMA

SEQ ID NO: 96479 - protein, 7 aa, synthetic construct
VDRGMLA

SEQ ID NO: 96480 - protein, 7 aa, synthetic construct
LQGIKEP

SEQ ID NO: 96481 - protein, 7 aa, synthetic construct
RPTWETE

SEQ ID NO: 96482 - protein, 7 aa, synthetic construct
QFKPAGG

SEQ ID NO: 96483 - protein, 7 aa, synthetic construct
HLHYETA

SEQ ID NO: 96484 - protein, 7 aa, synthetic construct
REVVLVS

SEQ ID NO: 96485 - protein, 7 aa, synthetic construct
MGMENAS

SEQ ID NO: 96486 - protein, 7 aa, synthetic construct
GPRAVGS

SEQ ID NO: 96487 - protein, 7 aa, synthetic construct
WAPLMSS

SEQ ID NO: 96488 - protein, 7 aa, synthetic construct
HQVNHAN

SEQ ID NO: 96489 - protein, 7 aa, synthetic construct
TYKANVF

SEQ ID NO: 96490 - protein, 7 aa, synthetic construct
TGHHVGS

SEQ ID NO: 96491 - protein, 7 aa, synthetic construct
PNALAAE

SEQ ID NO: 96492 - protein, 7 aa, synthetic construct
ATANSEP

SEQ ID NO: 96493 - protein, 7 aa, synthetic construct
VSEYRED

SEQ ID NO: 96494 - protein, 7 aa, synthetic construct
IVSGLSN

SEQ ID NO: 96495 - protein, 7 aa, synthetic construct
TKPDNTK

SEQ ID NO: 96496 - protein, 7 aa, synthetic construct
PQLTSDG

SEQ ID NO: 96497 - protein, 7 aa, synthetic construct
NDLARGL

SEQ ID NO: 96498 - protein, 7 aa, synthetic construct
GQHDVKQ

SEQ ID NO: 96499 - protein, 7 aa, synthetic construct
HRSATQN

SEQ ID NO: 96500 - protein, 7 aa, synthetic construct
IPDGKYQ

SEQ ID NO: 96501 - protein, 7 aa, synthetic construct
QTFKMVD

SEQ ID NO: 96502 - protein, 7 aa, synthetic construct
EPISPMN

SEQ ID NO: 96503 - protein, 7 aa, synthetic construct
GAQNQYY

SEQ ID NO: 96504 - protein, 7 aa, synthetic construct
KMHSNQV

SEQ ID NO: 96505 - protein, 7 aa, synthetic construct
HITMPHS

SEQ ID NO: 96506 - protein, 7 aa, synthetic construct
YQVYTAS

SEQ ID NO: 96507 - protein, 7 aa, synthetic construct
MNKNSKD

SEQ ID NO: 96508 - protein, 7 aa, synthetic construct
RQTTSTA

SEQ ID NO: 96509 - protein, 7 aa, synthetic construct
FLDVQNV

SEQ ID NO: 96510 - protein, 7 aa, synthetic construct
VKSMGRE

SEQ ID NO: 96511 - protein, 7 aa, synthetic construct
YTDYIPL

SEQ ID NO: 96512 - protein, 7 aa, synthetic construct
GGHNNVG

SEQ ID NO: 96513 - protein, 7 aa, synthetic construct
QRQPGNA

SEQ ID NO: 96514 - protein, 7 aa, synthetic construct
RNIGQNS

SEQ ID NO: 96515 - protein, 7 aa, synthetic construct
AFHKHIE

SEQ ID NO: 96516 - protein, 7 aa, synthetic construct
VKAMAKP

SEQ ID NO: 96517 - protein, 7 aa, synthetic construct
ASNVPSI

SEQ ID NO: 96518 - protein, 7 aa, synthetic construct
AAEKVVS

SEQ ID NO: 96519 - protein, 7 aa, synthetic construct
RQQDRLV

SEQ ID NO: 96520 - protein, 7 aa, synthetic construct
AMREAQW

SEQ ID NO: 96521 - protein, 7 aa, synthetic construct
SSKSWNE

SEQ ID NO: 96522 - protein, 7 aa, synthetic construct
NAEKADW

SEQ ID NO: 96523 - protein, 7 aa, synthetic construct
KALDNKD

SEQ ID NO: 96524 - protein, 7 aa, synthetic construct
VVKASFM

SEQ ID NO: 96525 - protein, 7 aa, synthetic construct
IAAQVGA

SEQ ID NO: 96526 - protein, 7 aa, synthetic construct
TPKTSQT

SEQ ID NO: 96527 - protein, 7 aa, synthetic construct
DFSVKTQ

SEQ ID NO: 96528 - protein, 7 aa, synthetic construct
FNDSGRH

SEQ ID NO: 96529 - protein, 7 aa, synthetic construct
DIDKMAR

SEQ ID NO: 96530 - protein, 7 aa, synthetic construct
FGKLEAP

SEQ ID NO: 96531 - protein, 7 aa, synthetic construct
GIAAHSG

SEQ ID NO: 96532 - protein, 7 aa, synthetic construct
VVTKQDN

SEQ ID NO: 96533 - protein, 7 aa, synthetic construct
FIDKNMH

SEQ ID NO: 96534 - protein, 7 aa, synthetic construct
GKLHDQE

SEQ ID NO: 96535 - protein, 7 aa, synthetic construct
WMKSKLD

SEQ ID NO: 96536 - protein, 7 aa, synthetic construct
SINNVPG

SEQ ID NO: 96537 - protein, 7 aa, synthetic construct
MARLTEQ

SEQ ID NO: 96538 - protein, 7 aa, synthetic construct
SPIEMRM

SEQ ID NO: 96539 - protein, 7 aa, synthetic construct
AALKYTP

SEQ ID NO: 96540 - protein, 7 aa, synthetic construct
KATNNLL

SEQ ID NO: 96541 - protein, 7 aa, synthetic construct
RKDQSHG

SEQ ID NO: 96542 - protein, 7 aa, synthetic construct
ANVQANV

SEQ ID NO: 96543 - protein, 7 aa, synthetic construct
FFDPIKD

SEQ ID NO: 96544 - protein, 7 aa, synthetic construct
FIPVNAQ

SEQ ID NO: 96545 - protein, 7 aa, synthetic construct
KQSKESW

SEQ ID NO: 96546 - protein, 7 aa, synthetic construct
HQQITKM

SEQ ID NO: 96547 - protein, 7 aa, synthetic construct
YQVNPSR

SEQ ID NO: 96548 - protein, 7 aa, synthetic construct
GLRNHDS

SEQ ID NO: 96549 - protein, 7 aa, synthetic construct
AQPYYDK

SEQ ID NO: 96550 - protein, 7 aa, synthetic construct
GIPYNMN

SEQ ID NO: 96551 - protein, 7 aa, synthetic construct
NADRGVR

SEQ ID NO: 96552 - protein, 7 aa, synthetic construct
TNGPGKY

SEQ ID NO: 96553 - protein, 7 aa, synthetic construct
THNWKIE

SEQ ID NO: 96554 - protein, 7 aa, synthetic construct
WHGDISG

SEQ ID NO: 96555 - protein, 7 aa, synthetic construct
VRPDGAE

SEQ ID NO: 96556 - protein, 7 aa, synthetic construct
NRQTERA

SEQ ID NO: 96557 - protein, 7 aa, synthetic construct
KSTQTNS

SEQ ID NO: 96558 - protein, 7 aa, synthetic construct
NHHGQIY

SEQ ID NO: 96559 - protein, 7 aa, synthetic construct
RIDTGKY

SEQ ID NO: 96560 - protein, 7 aa, synthetic construct
SKNEATP

SEQ ID NO: 96561 - protein, 7 aa, synthetic construct
RKIGFEQ

SEQ ID NO: 96562 - protein, 7 aa, synthetic construct
HVASGAW

SEQ ID NO: 96563 - protein, 7 aa, synthetic construct
SDKIAHG

SEQ ID NO: 96564 - protein, 7 aa, synthetic construct
NLTANNV

SEQ ID NO: 96565 - protein, 7 aa, synthetic construct
IVRNGPD

SEQ ID NO: 96566 - protein, 7 aa, synthetic construct
PQKDMQG

SEQ ID NO: 96567 - protein, 7 aa, synthetic construct
IIQERKD

SEQ ID NO: 96568 - protein, 7 aa, synthetic construct
VSYTVGD

SEQ ID NO: 96569 - protein, 7 aa, synthetic construct
GALGSPG

SEQ ID NO: 96570 - protein, 7 aa, synthetic construct
FAALHNN

SEQ ID NO: 96571 - protein, 7 aa, synthetic construct
MNASEHP

SEQ ID NO: 96572 - protein, 7 aa, synthetic construct
NLDYNTA

SEQ ID NO: 96573 - protein, 7 aa, synthetic construct
MDGKYPY

SEQ ID NO: 96574 - protein, 7 aa, synthetic construct
ISMNQQS

SEQ ID NO: 96575 - protein, 7 aa, synthetic construct
DASLHMG

SEQ ID NO: 96576 - protein, 7 aa, synthetic construct
MAKALLG

SEQ ID NO: 96577 - protein, 7 aa, synthetic construct
VMTDAPR

SEQ ID NO: 96578 - protein, 7 aa, synthetic construct
KFRPPTE

SEQ ID NO: 96579 - protein, 7 aa, synthetic construct
NDYKHMT

SEQ ID NO: 96580 - protein, 7 aa, synthetic construct
FVHNKFV

SEQ ID NO: 96581 - protein, 7 aa, synthetic construct
QKAIFVE

SEQ ID NO: 96582 - protein, 7 aa, synthetic construct
LQGTIVL

SEQ ID NO: 96583 - protein, 7 aa, synthetic construct
TRDPTWD

SEQ ID NO: 96584 - protein, 7 aa, synthetic construct
ANTLPKY

SEQ ID NO: 96585 - protein, 7 aa, synthetic construct
AEHTVQV

SEQ ID NO: 96586 - protein, 7 aa, synthetic construct
NAKFTMI

SEQ ID NO: 96587 - protein, 7 aa, synthetic construct
YKPNVNA

SEQ ID NO: 96588 - protein, 7 aa, synthetic construct
RDSPQWS

SEQ ID NO: 96589 - protein, 7 aa, synthetic construct
SLRVIGE

SEQ ID NO: 96590 - protein, 7 aa, synthetic construct
GIYSLGA

SEQ ID NO: 96591 - protein, 7 aa, synthetic construct
HTNTKQV

SEQ ID NO: 96592 - protein, 7 aa, synthetic construct
TKSSPSG

SEQ ID NO: 96593 - protein, 7 aa, synthetic construct
NKTEPAD

SEQ ID NO: 96594 - protein, 7 aa, synthetic construct
RTSPQPY

SEQ ID NO: 96595 - protein, 7 aa, synthetic construct
FHEGTKA

SEQ ID NO: 96596 - protein, 7 aa, synthetic construct
PGQARIY

SEQ ID NO: 96597 - protein, 7 aa, synthetic construct
LQLPKNS

SEQ ID NO: 96598 - protein, 7 aa, synthetic construct
KKGPEQF

SEQ ID NO: 96599 - protein, 7 aa, synthetic construct
KGSPMGA

SEQ ID NO: 96600 - protein, 7 aa, synthetic construct
SNNQMDR

SEQ ID NO: 96601 - protein, 7 aa, synthetic construct
IILKNQM

SEQ ID NO: 96602 - protein, 7 aa, synthetic construct
HGQIGGI

SEQ ID NO: 96603 - protein, 7 aa, synthetic construct
FDTQKLF

SEQ ID NO: 96604 - protein, 7 aa, synthetic construct
VAHTKAP

SEQ ID NO: 96605 - protein, 7 aa, synthetic construct
VVPGQDM

SEQ ID NO: 96606 - protein, 7 aa, synthetic construct
GGQNYAI

SEQ ID NO: 96607 - protein, 7 aa, synthetic construct
IPHQHYE

SEQ ID NO: 96608 - protein, 7 aa, synthetic construct
MIHKQTD

SEQ ID NO: 96609 - protein, 7 aa, synthetic construct
YPRNYTD

SEQ ID NO: 96610 - protein, 7 aa, synthetic construct
PGNQQIG

SEQ ID NO: 96611 - protein, 7 aa, synthetic construct
NTFKPME

SEQ ID NO: 96612 - protein, 7 aa, synthetic construct
VHKTHHN

SEQ ID NO: 96613 - protein, 7 aa, synthetic construct
HPESKMM

SEQ ID NO: 96614 - protein, 7 aa, synthetic construct
TQEMGAR

SEQ ID NO: 96615 - protein, 7 aa, synthetic construct
MEKRPLI

SEQ ID NO: 96616 - protein, 7 aa, synthetic construct
KIPQQGW

SEQ ID NO: 96617 - protein, 7 aa, synthetic construct
KQGNLNM

SEQ ID NO: 96618 - protein, 7 aa, synthetic construct
VGAQHGD

SEQ ID NO: 96619 - protein, 7 aa, synthetic construct
RGADAMQ

SEQ ID NO: 96620 - protein, 7 aa, synthetic construct
DMPQMTK

SEQ ID NO: 96621 - protein, 7 aa, synthetic construct
EYKDGAG

SEQ ID NO: 96622 - protein, 7 aa, synthetic construct
NTNAMAF

SEQ ID NO: 96623 - protein, 7 aa, synthetic construct
WIKDGMM

SEQ ID NO: 96624 - protein, 7 aa, synthetic construct
DLKWLHE

SEQ ID NO: 96625 - protein, 7 aa, synthetic construct
CRKSDQG

SEQ ID NO: 96626 - protein, 7 aa, synthetic construct
HFQRSAA

SEQ ID NO: 96627 - protein, 7 aa, synthetic construct
INEHTHG

SEQ ID NO: 96628 - protein, 7 aa, synthetic construct
DKLRMHA

SEQ ID NO: 96629 - protein, 7 aa, synthetic construct
HKEWSKE

SEQ ID NO: 96630 - protein, 7 aa, synthetic construct
HMTLRME

SEQ ID NO: 96631 - protein, 7 aa, synthetic construct
THEPNKS

SEQ ID NO: 96632 - protein, 7 aa, synthetic construct
YPKNEVL

SEQ ID NO: 96633 - protein, 7 aa, synthetic construct
GAAPSIM

SEQ ID NO: 96634 - protein, 7 aa, synthetic construct
KDLKMEL

SEQ ID NO: 96635 - protein, 7 aa, synthetic construct
KHDDRPA

SEQ ID NO: 96636 - protein, 7 aa, synthetic construct
SHVMEPK

SEQ ID NO: 96637 - protein, 7 aa, synthetic construct
EIRIGTS

SEQ ID NO: 96638 - protein, 7 aa, synthetic construct
FLARKDG

SEQ ID NO: 96639 - protein, 7 aa, synthetic construct
VHDNKYR

SEQ ID NO: 96640 - protein, 7 aa, synthetic construct
QDGGRLV

SEQ ID NO: 96641 - protein, 7 aa, synthetic construct
KADKMER

SEQ ID NO: 96642 - protein, 7 aa, synthetic construct
KITVAET

SEQ ID NO: 96643 - protein, 7 aa, synthetic construct
MGIYSQD

SEQ ID NO: 96644 - protein, 7 aa, synthetic construct
MKQEDGN

SEQ ID NO: 96645 - protein, 7 aa, synthetic construct
KSNTGNA

SEQ ID NO: 96646 - protein, 7 aa, synthetic construct
PRSQMDL

SEQ ID NO: 96647 - protein, 7 aa, synthetic construct
DSGYRVD

SEQ ID NO: 96648 - protein, 7 aa, synthetic construct
THGTNYD

SEQ ID NO: 96649 - protein, 7 aa, synthetic construct
ANHIHSE

SEQ ID NO: 96650 - protein, 7 aa, synthetic construct
QQTNIIA

SEQ ID NO: 96651 - protein, 7 aa, synthetic construct
LNVADMG

SEQ ID NO: 96652 - protein, 7 aa, synthetic construct
DGISRIA

SEQ ID NO: 96653 - protein, 7 aa, synthetic construct
RNTHTDD

SEQ ID NO: 96654 - protein, 7 aa, synthetic construct
VNMTRQY

SEQ ID NO: 96655 - protein, 7 aa, synthetic construct
NSPKHYY

SEQ ID NO: 96656 - protein, 7 aa, synthetic construct
RAVLEPS

SEQ ID NO: 96657 - protein, 7 aa, synthetic construct
ASVSVKY

SEQ ID NO: 96658 - protein, 7 aa, synthetic construct
DEYVPRT

SEQ ID NO: 96659 - protein, 7 aa, synthetic construct
ERTMVAS

SEQ ID NO: 96660 - protein, 7 aa, synthetic construct
GQSYKET

SEQ ID NO: 96661 - protein, 7 aa, synthetic construct
TILLAHE

SEQ ID NO: 96662 - protein, 7 aa, synthetic construct
NHVSKQV

SEQ ID NO: 96663 - protein, 7 aa, synthetic construct
RHPRENT

SEQ ID NO: 96664 - protein, 7 aa, synthetic construct
HTSTDMH

SEQ ID NO: 96665 - protein, 7 aa, synthetic construct
VPIGASK

SEQ ID NO: 96666 - protein, 7 aa, synthetic construct
KSSQGTP

SEQ ID NO: 96667 - protein, 7 aa, synthetic construct
RPLGHHM

SEQ ID NO: 96668 - protein, 7 aa, synthetic construct
PKPSPFS

SEQ ID NO: 96669 - protein, 7 aa, synthetic construct
SGDRISI

SEQ ID NO: 96670 - protein, 7 aa, synthetic construct
QQGANMR

SEQ ID NO: 96671 - protein, 7 aa, synthetic construct
MAALTIE

SEQ ID NO: 96672 - protein, 7 aa, synthetic construct
DTKWPGV

SEQ ID NO: 96673 - protein, 7 aa, synthetic construct
FPNYDQA

SEQ ID NO: 96674 - protein, 7 aa, synthetic construct
TSAELKP

SEQ ID NO: 96675 - protein, 7 aa, synthetic construct
MVRAYPS

SEQ ID NO: 96676 - protein, 7 aa, synthetic construct
MVPGKTL

SEQ ID NO: 96677 - protein, 7 aa, synthetic construct
GLNVFSE

SEQ ID NO: 96678 - protein, 7 aa, synthetic construct
LPTIATM

SEQ ID NO: 96679 - protein, 7 aa, synthetic construct
YAPNPKS

SEQ ID NO: 96680 - protein, 7 aa, synthetic construct
PKEQSTN

SEQ ID NO: 96681 - protein, 7 aa, synthetic construct
ALGNTMS

SEQ ID NO: 96682 - protein, 7 aa, synthetic construct
YRHEVGT

SEQ ID NO: 96683 - protein, 7 aa, synthetic construct
VDSYEHS

SEQ ID NO: 96684 - protein, 7 aa, synthetic construct
FHKVSQN

SEQ ID NO: 96685 - protein, 7 aa, synthetic construct
IYSTDKF

SEQ ID NO: 96686 - protein, 7 aa, synthetic construct
NTDVRVK

SEQ ID NO: 96687 - protein, 7 aa, synthetic construct
LSQPKLN

SEQ ID NO: 96688 - protein, 7 aa, synthetic construct
VYPVGSH

SEQ ID NO: 96689 - protein, 7 aa, synthetic construct
HKHVSNY

SEQ ID NO: 96690 - protein, 7 aa, synthetic construct
RYGHMID

SEQ ID NO: 96691 - protein, 7 aa, synthetic construct
TGSVNMY

SEQ ID NO: 96692 - protein, 7 aa, synthetic construct
GAEIRLT

SEQ ID NO: 96693 - protein, 7 aa, synthetic construct
WDKFKGN

SEQ ID NO: 96694 - protein, 7 aa, synthetic construct
DKQDQVA

SEQ ID NO: 96695 - protein, 7 aa, synthetic construct
NRDGFSG

SEQ ID NO: 96696 - protein, 7 aa, synthetic construct
DLGKSLP

SEQ ID NO: 96697 - protein, 7 aa, synthetic construct
YSETQNF

SEQ ID NO: 96698 - protein, 7 aa, synthetic construct
SLRWEAD

SEQ ID NO: 96699 - protein, 7 aa, synthetic construct
LKLPEDH

SEQ ID NO: 96700 - protein, 7 aa, synthetic construct
TRYMMTE

SEQ ID NO: 96701 - protein, 7 aa, synthetic construct
YGKSSSP

SEQ ID NO: 96702 - protein, 7 aa, synthetic construct
AYAVDRT

SEQ ID NO: 96703 - protein, 7 aa, synthetic construct
TVYLNDR

SEQ ID NO: 96704 - protein, 7 aa, synthetic construct
TGMHQKN

SEQ ID NO: 96705 - protein, 7 aa, synthetic construct
TMTSLTG

SEQ ID NO: 96706 - protein, 7 aa, synthetic construct
LKPTRDD

SEQ ID NO: 96707 - protein, 7 aa, synthetic construct
LIQKVQT

SEQ ID NO: 96708 - protein, 7 aa, synthetic construct
TLHEVRH

SEQ ID NO: 96709 - protein, 7 aa, synthetic construct
PPQIKAL

SEQ ID NO: 96710 - protein, 7 aa, synthetic construct
QLSNANW

SEQ ID NO: 96711 - protein, 7 aa, synthetic construct
TNKGFMP

SEQ ID NO: 96712 - protein, 7 aa, synthetic construct
VLDWAHA

SEQ ID NO: 96713 - protein, 7 aa, synthetic construct
VLMNHLE

SEQ ID NO: 96714 - protein, 7 aa, synthetic construct
FSNDSMK

SEQ ID NO: 96715 - protein, 7 aa, synthetic construct
NPLHHGY

SEQ ID NO: 96716 - protein, 7 aa, synthetic construct
AFPKHGQ

SEQ ID NO: 96717 - protein, 7 aa, synthetic construct
YALQNTP

SEQ ID NO: 96718 - protein, 7 aa, synthetic construct
FKPDSKV

SEQ ID NO: 96719 - protein, 7 aa, synthetic construct
THGTVVE

SEQ ID NO: 96720 - protein, 7 aa, synthetic construct
GYGKQND

SEQ ID NO: 96721 - protein, 7 aa, synthetic construct
RTEEKFY

SEQ ID NO: 96722 - protein, 7 aa, synthetic construct
VGMLQEM

SEQ ID NO: 96723 - protein, 7 aa, synthetic construct
TLAQPHA

SEQ ID NO: 96724 - protein, 7 aa, synthetic construct
MFNRVEP

SEQ ID NO: 96725 - protein, 7 aa, synthetic construct
WHQREPE

SEQ ID NO: 96726 - protein, 7 aa, synthetic construct
AGVNNKE

SEQ ID NO: 96727 - protein, 7 aa, synthetic construct
LQREEQL

SEQ ID NO: 96728 - protein, 7 aa, synthetic construct
YQGDASP

SEQ ID NO: 96729 - protein, 7 aa, synthetic construct
SEYPTMK

SEQ ID NO: 96730 - protein, 7 aa, synthetic construct
EFKNVER

SEQ ID NO: 96731 - protein, 7 aa, synthetic construct
NMHDTDN

SEQ ID NO: 96732 - protein, 7 aa, synthetic construct
AGPPNYA

SEQ ID NO: 96733 - protein, 7 aa, synthetic construct
STGSQLR

SEQ ID NO: 96734 - protein, 7 aa, synthetic construct
QVRELHN

SEQ ID NO: 96735 - protein, 7 aa, synthetic construct
KSVSDQH

SEQ ID NO: 96736 - protein, 7 aa, synthetic construct
GAREQLW

SEQ ID NO: 96737 - protein, 7 aa, synthetic construct
QGSVMTV

SEQ ID NO: 96738 - protein, 7 aa, synthetic construct
HFPEIQR

SEQ ID NO: 96739 - protein, 7 aa, synthetic construct
VFNFQNG

SEQ ID NO: 96740 - protein, 7 aa, synthetic construct
ARDNAGY

SEQ ID NO: 96741 - protein, 7 aa, synthetic construct
VGNNIHM

SEQ ID NO: 96742 - protein, 7 aa, synthetic construct
STHDIKA

SEQ ID NO: 96743 - protein, 7 aa, synthetic construct
SVVSTHH

SEQ ID NO: 96744 - protein, 7 aa, synthetic construct
FVEVAKK

SEQ ID NO: 96745 - protein, 7 aa, synthetic construct
YVNKLMS

SEQ ID NO: 96746 - protein, 7 aa, synthetic construct
MPHIMAA

SEQ ID NO: 96747 - protein, 7 aa, synthetic construct
YAHTTRQ

SEQ ID NO: 96748 - protein, 7 aa, synthetic construct
IWEGSIA

SEQ ID NO: 96749 - protein, 7 aa, synthetic construct
KQDSMHT

SEQ ID NO: 96750 - protein, 7 aa, synthetic construct
SQGLVHE

SEQ ID NO: 96751 - protein, 7 aa, synthetic construct
KSPVSGS

SEQ ID NO: 96752 - protein, 7 aa, synthetic construct
KGQADEP

SEQ ID NO: 96753 - protein, 7 aa, synthetic construct
RQEHKYL

SEQ ID NO: 96754 - protein, 7 aa, synthetic construct
ERQEKQQ

SEQ ID NO: 96755 - protein, 7 aa, synthetic construct
HLHVENE

SEQ ID NO: 96756 - protein, 7 aa, synthetic construct
STTARKE

SEQ ID NO: 96757 - protein, 7 aa, synthetic construct
LLSKNPN

SEQ ID NO: 96758 - protein, 7 aa, synthetic construct
SNSGGVF

SEQ ID NO: 96759 - protein, 7 aa, synthetic construct
GDGVHHG

SEQ ID NO: 96760 - protein, 7 aa, synthetic construct
AVRDTVQ

SEQ ID NO: 96761 - protein, 7 aa, synthetic construct
QGISQQA

SEQ ID NO: 96762 - protein, 7 aa, synthetic construct
NIKSDRD

SEQ ID NO: 96763 - protein, 7 aa, synthetic construct
VQQDRVA

SEQ ID NO: 96764 - protein, 7 aa, synthetic construct
MPSNAPQ

SEQ ID NO: 96765 - protein, 7 aa, synthetic construct
RFTAEKT

SEQ ID NO: 96766 - protein, 7 aa, synthetic construct
GKPEKGA

SEQ ID NO: 96767 - protein, 7 aa, synthetic construct
KFASDKN

SEQ ID NO: 96768 - protein, 7 aa, synthetic construct
RVGIFKD

SEQ ID NO: 96769 - protein, 7 aa, synthetic construct
TGESREG

SEQ ID NO: 96770 - protein, 7 aa, synthetic construct
GGHWVED

SEQ ID NO: 96771 - protein, 7 aa, synthetic construct
TPPIPIE

SEQ ID NO: 96772 - protein, 7 aa, synthetic construct
YNNQREY

SEQ ID NO: 96773 - protein, 7 aa, synthetic construct
KPSGTGP

SEQ ID NO: 96774 - protein, 7 aa, synthetic construct
SVHVYPE

SEQ ID NO: 96775 - protein, 7 aa, synthetic construct
MTKFVME

SEQ ID NO: 96776 - protein, 7 aa, synthetic construct
TPMGAMQ

SEQ ID NO: 96777 - protein, 7 aa, synthetic construct
SNNSPST

SEQ ID NO: 96778 - protein, 7 aa, synthetic construct
YANGTHD

SEQ ID NO: 96779 - protein, 7 aa, synthetic construct
IDRQFDR

SEQ ID NO: 96780 - protein, 7 aa, synthetic construct
KYKWEAE

SEQ ID NO: 96781 - protein, 7 aa, synthetic construct
HQKFAQP

SEQ ID NO: 96782 - protein, 7 aa, synthetic construct
RQVEKHA

SEQ ID NO: 96783 - protein, 7 aa, synthetic construct
VIDVRGR

SEQ ID NO: 96784 - protein, 7 aa, synthetic construct
KNHGTSL

SEQ ID NO: 96785 - protein, 7 aa, synthetic construct
QSQKSHM

SEQ ID NO: 96786 - protein, 7 aa, synthetic construct
MGKPQTV

SEQ ID NO: 96787 - protein, 7 aa, synthetic construct
GMEKYAI

SEQ ID NO: 96788 - protein, 7 aa, synthetic construct
GRAKDAT

SEQ ID NO: 96789 - protein, 7 aa, synthetic construct
ERVIALS

SEQ ID NO: 96790 - protein, 7 aa, synthetic construct
EGHQLRV

SEQ ID NO: 96791 - protein, 7 aa, synthetic construct
NKQPSAM

SEQ ID NO: 96792 - protein, 7 aa, synthetic construct
LHDMKNE

SEQ ID NO: 96793 - protein, 7 aa, synthetic construct
AVAGQTF

SEQ ID NO: 96794 - protein, 7 aa, synthetic construct
FLSQHRS

SEQ ID NO: 96795 - protein, 7 aa, synthetic construct
NRSSAGM

SEQ ID NO: 96796 - protein, 7 aa, synthetic construct
YSEVQPF

SEQ ID NO: 96797 - protein, 7 aa, synthetic construct
KHDTSGA

SEQ ID NO: 96798 - protein, 7 aa, synthetic construct
ADPAGNK

SEQ ID NO: 96799 - protein, 7 aa, synthetic construct
MTRSPVV

SEQ ID NO: 96800 - protein, 7 aa, synthetic construct
GKNSMQF

SEQ ID NO: 96801 - protein, 7 aa, synthetic construct
VVEGKTM

SEQ ID NO: 96802 - protein, 7 aa, synthetic construct
SKMMQAH

SEQ ID NO: 96803 - protein, 7 aa, synthetic construct
VHNNQSL

SEQ ID NO: 96804 - protein, 7 aa, synthetic construct
PTHQQET

SEQ ID NO: 96805 - protein, 7 aa, synthetic construct
DTFIQKV

SEQ ID NO: 96806 - protein, 7 aa, synthetic construct
STDGKIM

SEQ ID NO: 96807 - protein, 7 aa, synthetic construct
VLNVLSN

SEQ ID NO: 96808 - protein, 7 aa, synthetic construct
GQMRGIV

SEQ ID NO: 96809 - protein, 7 aa, synthetic construct
AKHAVHQ

SEQ ID NO: 96810 - protein, 7 aa, synthetic construct
PSPPYKM

SEQ ID NO: 96811 - protein, 7 aa, synthetic construct
WASRGVT

SEQ ID NO: 96812 - protein, 7 aa, synthetic construct
NPPPANR

SEQ ID NO: 96813 - protein, 7 aa, synthetic construct
ERDRAQQ

SEQ ID NO: 96814 - protein, 7 aa, synthetic construct
QKRLMEG

SEQ ID NO: 96815 - protein, 7 aa, synthetic construct
QFMNGRP

SEQ ID NO: 96816 - protein, 7 aa, synthetic construct
VRPIQEF

SEQ ID NO: 96817 - protein, 7 aa, synthetic construct
IGRHMSP

SEQ ID NO: 96818 - protein, 7 aa, synthetic construct
RQSNISA

SEQ ID NO: 96819 - protein, 7 aa, synthetic construct
IIALQRP

SEQ ID NO: 96820 - protein, 7 aa, synthetic construct
LDRKSLD

SEQ ID NO: 96821 - protein, 7 aa, synthetic construct
TLTAVGM

SEQ ID NO: 96822 - protein, 7 aa, synthetic construct
QSPMPTP

SEQ ID NO: 96823 - protein, 7 aa, synthetic construct
VWSDQKV

SEQ ID NO: 96824 - protein, 7 aa, synthetic construct
TRPDIET

SEQ ID NO: 96825 - protein, 7 aa, synthetic construct
HHAEVKR

SEQ ID NO: 96826 - protein, 7 aa, synthetic construct
DKRHLTV

SEQ ID NO: 96827 - protein, 7 aa, synthetic construct
TIRDTHQ

SEQ ID NO: 96828 - protein, 7 aa, synthetic construct
FPKHKME

SEQ ID NO: 96829 - protein, 7 aa, synthetic construct
HEVKNQT

SEQ ID NO: 96830 - protein, 7 aa, synthetic construct
PVPLKVS

SEQ ID NO: 96831 - protein, 7 aa, synthetic construct
YPAKMGS

SEQ ID NO: 96832 - protein, 7 aa, synthetic construct
MIGSKSD

SEQ ID NO: 96833 - protein, 7 aa, synthetic construct
WEGSSSE

SEQ ID NO: 96834 - protein, 7 aa, synthetic construct
NTTRMDW

SEQ ID NO: 96835 - protein, 7 aa, synthetic construct
NMKMLAS

SEQ ID NO: 96836 - protein, 7 aa, synthetic construct
MNSVRFM

SEQ ID NO: 96837 - protein, 7 aa, synthetic construct
QDYMGRG

SEQ ID NO: 96838 - protein, 7 aa, synthetic construct
FKMHITN

SEQ ID NO: 96839 - protein, 7 aa, synthetic construct
HAIGGIE

SEQ ID NO: 96840 - protein, 7 aa, synthetic construct
LGSAVAM

SEQ ID NO: 96841 - protein, 7 aa, synthetic construct
TIKDNRD

SEQ ID NO: 96842 - protein, 7 aa, synthetic construct
SYPKEFG

SEQ ID NO: 96843 - protein, 7 aa, synthetic construct
MNPTKGG

SEQ ID NO: 96844 - protein, 7 aa, synthetic construct
GSLSPTP

SEQ ID NO: 96845 - protein, 7 aa, synthetic construct
FTGKSQA

SEQ ID NO: 96846 - protein, 7 aa, synthetic construct
KMDPRLD

SEQ ID NO: 96847 - protein, 7 aa, synthetic construct
VNQHGRH

SEQ ID NO: 96848 - protein, 7 aa, synthetic construct
HLKVIAH

SEQ ID NO: 96849 - protein, 7 aa, synthetic construct
VLQTTNN

SEQ ID NO: 96850 - protein, 7 aa, synthetic construct
QTHLASY

SEQ ID NO: 96851 - protein, 7 aa, synthetic construct
VSVMTGE

SEQ ID NO: 96852 - protein, 7 aa, synthetic construct
TDEGRRS

SEQ ID NO: 96853 - protein, 7 aa, synthetic construct
NRDHKER

SEQ ID NO: 96854 - protein, 7 aa, synthetic construct
HALSVPV

SEQ ID NO: 96855 - protein, 7 aa, synthetic construct
QPEHSYQ

SEQ ID NO: 96856 - protein, 7 aa, synthetic construct
TVNQRNF

SEQ ID NO: 96857 - protein, 7 aa, synthetic construct
EIYSRAG

SEQ ID NO: 96858 - protein, 7 aa, synthetic construct
TELIKRA

SEQ ID NO: 96859 - protein, 7 aa, synthetic construct
PDIRMNV

SEQ ID NO: 96860 - protein, 7 aa, synthetic construct
IKDKGHS

SEQ ID NO: 96861 - protein, 7 aa, synthetic construct
MGRTEHW

SEQ ID NO: 96862 - protein, 7 aa, synthetic construct
NSMNGNF

SEQ ID NO: 96863 - protein, 7 aa, synthetic construct
GVSYLAD

SEQ ID NO: 96864 - protein, 7 aa, synthetic construct
DKKPPWT

SEQ ID NO: 96865 - protein, 7 aa, synthetic construct
HRFPQME

SEQ ID NO: 96866 - protein, 7 aa, synthetic construct
FVNERRT

SEQ ID NO: 96867 - protein, 7 aa, synthetic construct
FQPALAD

SEQ ID NO: 96868 - protein, 7 aa, synthetic construct
YAKEEER

SEQ ID NO: 96869 - protein, 7 aa, synthetic construct
PMYKEIT

SEQ ID NO: 96870 - protein, 7 aa, synthetic construct
KWDQASI

SEQ ID NO: 96871 - protein, 7 aa, synthetic construct
RDQALGF

SEQ ID NO: 96872 - protein, 7 aa, synthetic construct
RIEHANE

SEQ ID NO: 96873 - protein, 7 aa, synthetic construct
PHSTMSM

SEQ ID NO: 96874 - protein, 7 aa, synthetic construct
MAHKDFL

SEQ ID NO: 96875 - protein, 7 aa, synthetic construct
VGIVISK

SEQ ID NO: 96876 - protein, 7 aa, synthetic construct
HARTVYE

SEQ ID NO: 96877 - protein, 7 aa, synthetic construct
KFHDPQP

SEQ ID NO: 96878 - protein, 7 aa, synthetic construct
NNLHEAI

SEQ ID NO: 96879 - protein, 7 aa, synthetic construct
YTLLAHE

SEQ ID NO: 96880 - protein, 7 aa, synthetic construct
YGRINNL

SEQ ID NO: 96881 - protein, 7 aa, synthetic construct
NSADPIK

SEQ ID NO: 96882 - protein, 7 aa, synthetic construct
EMEYRKV

SEQ ID NO: 96883 - protein, 7 aa, synthetic construct
IQAPSAH

SEQ ID NO: 96884 - protein, 7 aa, synthetic construct
LPLRHHG

SEQ ID NO: 96885 - protein, 7 aa, synthetic construct
ISPGVSK

SEQ ID NO: 96886 - protein, 7 aa, synthetic construct
LLYKEKH

SEQ ID NO: 96887 - protein, 7 aa, synthetic construct
NRMPTGD

SEQ ID NO: 96888 - protein, 7 aa, synthetic construct
NSDFKHH

SEQ ID NO: 96889 - protein, 7 aa, synthetic construct
VHRIDMT

SEQ ID NO: 96890 - protein, 7 aa, synthetic construct
KNEVNAY

SEQ ID NO: 96891 - protein, 7 aa, synthetic construct
QDRLTFE

SEQ ID NO: 96892 - protein, 7 aa, synthetic construct
ASGNFPI

SEQ ID NO: 96893 - protein, 7 aa, synthetic construct
PEPRFQV

SEQ ID NO: 96894 - protein, 7 aa, synthetic construct
YKRDQFQ

SEQ ID NO: 96895 - protein, 7 aa, synthetic construct
SRQDHMF

SEQ ID NO: 96896 - protein, 7 aa, synthetic construct
MKAQERT

SEQ ID NO: 96897 - protein, 7 aa, synthetic construct
IGSPSII

SEQ ID NO: 96898 - protein, 7 aa, synthetic construct
QKATGAP

SEQ ID NO: 96899 - protein, 7 aa, synthetic construct
VFTHQNP

SEQ ID NO: 96900 - protein, 7 aa, synthetic construct
GREYMHS

SEQ ID NO: 96901 - protein, 7 aa, synthetic construct
QHNIKEH

SEQ ID NO: 96902 - protein, 7 aa, synthetic construct
FGIGAAG

SEQ ID NO: 96903 - protein, 7 aa, synthetic construct
GLVGHDM

SEQ ID NO: 96904 - protein, 7 aa, synthetic construct
LHNVNSE

SEQ ID NO: 96905 - protein, 7 aa, synthetic construct
HPQSASK

SEQ ID NO: 96906 - protein, 7 aa, synthetic construct
GSNAQQR

SEQ ID NO: 96907 - protein, 7 aa, synthetic construct
MSHDAPR

SEQ ID NO: 96908 - protein, 7 aa, synthetic construct
RMDQSIL

SEQ ID NO: 96909 - protein, 7 aa, synthetic construct
YIASDMP

SEQ ID NO: 96910 - protein, 7 aa, synthetic construct
MPQTQND

SEQ ID NO: 96911 - protein, 7 aa, synthetic construct
LAVKHDS

SEQ ID NO: 96912 - protein, 7 aa, synthetic construct
GNTIETG

SEQ ID NO: 96913 - protein, 7 aa, synthetic construct
AISDRPM

SEQ ID NO: 96914 - protein, 7 aa, synthetic construct
KPEYTAT

SEQ ID NO: 96915 - protein, 7 aa, synthetic construct
EPSQKMF

SEQ ID NO: 96916 - protein, 7 aa, synthetic construct
GKGEKFF

SEQ ID NO: 96917 - protein, 7 aa, synthetic construct
YSQDMMR

SEQ ID NO: 96918 - protein, 7 aa, synthetic construct
NIGGIPS

SEQ ID NO: 96919 - protein, 7 aa, synthetic construct
MRSLIPD

SEQ ID NO: 96920 - protein, 7 aa, synthetic construct
FPYVQSN

SEQ ID NO: 96921 - protein, 7 aa, synthetic construct
RDYRNTG

SEQ ID NO: 96922 - protein, 7 aa, synthetic construct
FKVEPFH

SEQ ID NO: 96923 - protein, 7 aa, synthetic construct
DAQRKTE

SEQ ID NO: 96924 - protein, 7 aa, synthetic construct
TQRPIQQ

SEQ ID NO: 96925 - protein, 7 aa, synthetic construct
GTFHSGD

SEQ ID NO: 96926 - protein, 7 aa, synthetic construct
HLQRGDF

SEQ ID NO: 96927 - protein, 7 aa, synthetic construct
EVYGKTK

SEQ ID NO: 96928 - protein, 7 aa, synthetic construct
KQVKTSG

SEQ ID NO: 96929 - protein, 7 aa, synthetic construct
TSFPAAI

SEQ ID NO: 96930 - protein, 7 aa, synthetic construct
GQQFKGD

SEQ ID NO: 96931 - protein, 7 aa, synthetic construct
QGSPLQA

SEQ ID NO: 96932 - protein, 7 aa, synthetic construct
IKDHSTE

SEQ ID NO: 96933 - protein, 7 aa, synthetic construct
GTHPPNL

SEQ ID NO: 96934 - protein, 7 aa, synthetic construct
QYTGMVK

SEQ ID NO: 96935 - protein, 7 aa, synthetic construct
YAPHSDI

SEQ ID NO: 96936 - protein, 7 aa, synthetic construct
QNGAVTR

SEQ ID NO: 96937 - protein, 7 aa, synthetic construct
GRNNTAG

SEQ ID NO: 96938 - protein, 7 aa, synthetic construct
ENFLPKQ

SEQ ID NO: 96939 - protein, 7 aa, synthetic construct
QTKPADC

SEQ ID NO: 96940 - protein, 7 aa, synthetic construct
TKEGPVQ

SEQ ID NO: 96941 - protein, 7 aa, synthetic construct
AATANLF

SEQ ID NO: 96942 - protein, 7 aa, synthetic construct
RPLQEKA

SEQ ID NO: 96943 - protein, 7 aa, synthetic construct
YEIGPNT

SEQ ID NO: 96944 - protein, 7 aa, synthetic construct
ATDQIRY

SEQ ID NO: 96945 - protein, 7 aa, synthetic construct
KETHRYE

SEQ ID NO: 96946 - protein, 7 aa, synthetic construct
QHEKTPH

SEQ ID NO: 96947 - protein, 7 aa, synthetic construct
KKHNIDA

SEQ ID NO: 96948 - protein, 7 aa, synthetic construct
MQSTRSA

SEQ ID NO: 96949 - protein, 7 aa, synthetic construct
SLNMYQG

SEQ ID NO: 96950 - protein, 7 aa, synthetic construct
HDRAATN

SEQ ID NO: 96951 - protein, 7 aa, synthetic construct
QDEKMHL

SEQ ID NO: 96952 - protein, 7 aa, synthetic construct
CKQTCMM

SEQ ID NO: 96953 - protein, 7 aa, synthetic construct
QNNHVMV

SEQ ID NO: 96954 - protein, 7 aa, synthetic construct
MRTAVLG

SEQ ID NO: 96955 - protein, 7 aa, synthetic construct
GNEIEVR

SEQ ID NO: 96956 - protein, 7 aa, synthetic construct
NMYKVDQ

SEQ ID NO: 96957 - protein, 7 aa, synthetic construct
RLKMPIE

SEQ ID NO: 96958 - protein, 7 aa, synthetic construct
VPQLQMQ

SEQ ID NO: 96959 - protein, 7 aa, synthetic construct
REIMKGE

SEQ ID NO: 96960 - protein, 7 aa, synthetic construct
PRATAQH

SEQ ID NO: 96961 - protein, 7 aa, synthetic construct
MADMKII

SEQ ID NO: 96962 - protein, 7 aa, synthetic construct
WKMLMTD

SEQ ID NO: 96963 - protein, 7 aa, synthetic construct
VDYRGIK

SEQ ID NO: 96964 - protein, 7 aa, synthetic construct
LRPDAML

SEQ ID NO: 96965 - protein, 7 aa, synthetic construct
IQGVQLQ

SEQ ID NO: 96966 - protein, 7 aa, synthetic construct
KMPVGQV

SEQ ID NO: 96967 - protein, 7 aa, synthetic construct
SAVHGQY

SEQ ID NO: 96968 - protein, 7 aa, synthetic construct
PARFDEY

SEQ ID NO: 96969 - protein, 7 aa, synthetic construct
VKSQEQQ

SEQ ID NO: 96970 - protein, 7 aa, synthetic construct
EVTHVKQ

SEQ ID NO: 96971 - protein, 7 aa, synthetic construct
EAKGWAV

SEQ ID NO: 96972 - protein, 7 aa, synthetic construct
ALNRVDT

SEQ ID NO: 96973 - protein, 7 aa, synthetic construct
AGIGSDI

SEQ ID NO: 96974 - protein, 7 aa, synthetic construct
WSNQPHA

SEQ ID NO: 96975 - protein, 7 aa, synthetic construct
TEKLVYK

SEQ ID NO: 96976 - protein, 7 aa, synthetic construct
FFNKRSD

SEQ ID NO: 96977 - protein, 7 aa, synthetic construct
WGDEKNT

SEQ ID NO: 96978 - protein, 7 aa, synthetic construct
VYKTAGF

SEQ ID NO: 96979 - protein, 7 aa, synthetic construct
KFKEFTM

SEQ ID NO: 96980 - protein, 7 aa, synthetic construct
TRVDKEV

SEQ ID NO: 96981 - protein, 7 aa, synthetic construct
NNPVNSA

SEQ ID NO: 96982 - protein, 7 aa, synthetic construct
MKVITTA

SEQ ID NO: 96983 - protein, 7 aa, synthetic construct
HSANPQQ

SEQ ID NO: 96984 - protein, 7 aa, synthetic construct
QLVNQDT

SEQ ID NO: 96985 - protein, 7 aa, synthetic construct
AHQTIQG

SEQ ID NO: 96986 - protein, 7 aa, synthetic construct
YNKAEGQ

SEQ ID NO: 96987 - protein, 7 aa, synthetic construct
KTHQTPS

SEQ ID NO: 96988 - protein, 7 aa, synthetic construct
NNQMQLS

SEQ ID NO: 96989 - protein, 7 aa, synthetic construct
NQDRLHI

SEQ ID NO: 96990 - protein, 7 aa, synthetic construct
DLHPHVI

SEQ ID NO: 96991 - protein, 7 aa, synthetic construct
IGHNIQL

SEQ ID NO: 96992 - protein, 7 aa, synthetic construct
NALHASR

SEQ ID NO: 96993 - protein, 7 aa, synthetic construct
KTVQSKD

SEQ ID NO: 96994 - protein, 7 aa, synthetic construct
HSPLETV

SEQ ID NO: 96995 - protein, 7 aa, synthetic construct
IHDYVST

SEQ ID NO: 96996 - protein, 7 aa, synthetic construct
NKYNVHM

SEQ ID NO: 96997 - protein, 7 aa, synthetic construct
CQGLSCD

SEQ ID NO: 96998 - protein, 7 aa, synthetic construct
MRMDIVG

SEQ ID NO: 96999 - protein, 7 aa, synthetic construct
TQAINVA

SEQ ID NO: 97000 - protein, 7 aa, synthetic construct
KEGFPNM

SEQ ID NO: 97001 - protein, 7 aa, synthetic construct
HTTHKEF

SEQ ID NO: 97002 - protein, 7 aa, synthetic construct
SRVKDGW

SEQ ID NO: 97003 - protein, 7 aa, synthetic construct
QMYPKER

SEQ ID NO: 97004 - protein, 7 aa, synthetic construct
AINENKV

SEQ ID NO: 97005 - protein, 7 aa, synthetic construct
HYHAHDM

SEQ ID NO: 97006 - protein, 7 aa, synthetic construct
KTPGGGT

SEQ ID NO: 97007 - protein, 7 aa, synthetic construct
VAERYQM

SEQ ID NO: 97008 - protein, 7 aa, synthetic construct
APTKEAM

SEQ ID NO: 97009 - protein, 7 aa, synthetic construct
TQDRRDA

SEQ ID NO: 97010 - protein, 7 aa, synthetic construct
WVANNKS

SEQ ID NO: 97011 - protein, 7 aa, synthetic construct
ALIPRQE

SEQ ID NO: 97012 - protein, 7 aa, synthetic construct
VTKDLNK

SEQ ID NO: 97013 - protein, 7 aa, synthetic construct
LTPTASV

SEQ ID NO: 97014 - protein, 7 aa, synthetic construct
DMQHFTG

SEQ ID NO: 97015 - protein, 7 aa, synthetic construct
RPIYEQG

SEQ ID NO: 97016 - protein, 7 aa, synthetic construct
MKDLSYL

SEQ ID NO: 97017 - protein, 7 aa, synthetic construct
ITEWQNV

SEQ ID NO: 97018 - protein, 7 aa, synthetic construct
NRPTGNA

SEQ ID NO: 97019 - protein, 7 aa, synthetic construct
LGFGRQQ

SEQ ID NO: 97020 - protein, 7 aa, synthetic construct
FDRNSPK

SEQ ID NO: 97021 - protein, 7 aa, synthetic construct
YVHGIKH

SEQ ID NO: 97022 - protein, 7 aa, synthetic construct
YAKGTQG

SEQ ID NO: 97023 - protein, 7 aa, synthetic construct
DGQKFFK

SEQ ID NO: 97024 - protein, 7 aa, synthetic construct
DGNNLKE

SEQ ID NO: 97025 - protein, 7 aa, synthetic construct
KLQLQDS

SEQ ID NO: 97026 - protein, 7 aa, synthetic construct
DPLKPYK

SEQ ID NO: 97027 - protein, 7 aa, synthetic construct
NVKQGLP

SEQ ID NO: 97028 - protein, 7 aa, synthetic construct
SPRNMHY

SEQ ID NO: 97029 - protein, 7 aa, synthetic construct
GFHPGVV

SEQ ID NO: 97030 - protein, 7 aa, synthetic construct
EILAIAG

SEQ ID NO: 97031 - protein, 7 aa, synthetic construct
YMGITKM

SEQ ID NO: 97032 - protein, 7 aa, synthetic construct
YIDVVMA

SEQ ID NO: 97033 - protein, 7 aa, synthetic construct
AGAQRLM

SEQ ID NO: 97034 - protein, 7 aa, synthetic construct
IDHQLGA

SEQ ID NO: 97035 - protein, 7 aa, synthetic construct
RAEYKDA

SEQ ID NO: 97036 - protein, 7 aa, synthetic construct
WNQGVFN

SEQ ID NO: 97037 - protein, 7 aa, synthetic construct
NTNIHIN

SEQ ID NO: 97038 - protein, 7 aa, synthetic construct
FTHHQNK

SEQ ID NO: 97039 - protein, 7 aa, synthetic construct
VVQKVQN

SEQ ID NO: 97040 - protein, 7 aa, synthetic construct
HRVDNTL

SEQ ID NO: 97041 - protein, 7 aa, synthetic construct
QMQGYPN

SEQ ID NO: 97042 - protein, 7 aa, synthetic construct
VQKNMKE

SEQ ID NO: 97043 - protein, 7 aa, synthetic construct
LDPGVGV

SEQ ID NO: 97044 - protein, 7 aa, synthetic construct
RFETKTL

SEQ ID NO: 97045 - protein, 7 aa, synthetic construct
HYVPADR

SEQ ID NO: 97046 - protein, 7 aa, synthetic construct
KEPHNQA

SEQ ID NO: 97047 - protein, 7 aa, synthetic construct
TQGQNMP

SEQ ID NO: 97048 - protein, 7 aa, synthetic construct
IMGRNVA

SEQ ID NO: 97049 - protein, 7 aa, synthetic construct
TEHGGKW

SEQ ID NO: 97050 - protein, 7 aa, synthetic construct
KKSDIMT

SEQ ID NO: 97051 - protein, 7 aa, synthetic construct
HGHIQVD

SEQ ID NO: 97052 - protein, 7 aa, synthetic construct
DMRIPHQ

SEQ ID NO: 97053 - protein, 7 aa, synthetic construct
SGSNAIY

SEQ ID NO: 97054 - protein, 7 aa, synthetic construct
AAQPHSS

SEQ ID NO: 97055 - protein, 7 aa, synthetic construct
DNEPYKF

SEQ ID NO: 97056 - protein, 7 aa, synthetic construct
SYALEPP

SEQ ID NO: 97057 - protein, 7 aa, synthetic construct
AGTPSTT

SEQ ID NO: 97058 - protein, 7 aa, synthetic construct
INIAFEG

SEQ ID NO: 97059 - protein, 7 aa, synthetic construct
YRVGQYN

SEQ ID NO: 97060 - protein, 7 aa, synthetic construct
VTDGFIR

SEQ ID NO: 97061 - protein, 7 aa, synthetic construct
LDHQGMH

SEQ ID NO: 97062 - protein, 7 aa, synthetic construct
MPQQSAY

SEQ ID NO: 97063 - protein, 7 aa, synthetic construct
YSVRDEV

SEQ ID NO: 97064 - protein, 7 aa, synthetic construct
MAKGVSD

SEQ ID NO: 97065 - protein, 7 aa, synthetic construct
LKNVFDS

SEQ ID NO: 97066 - protein, 7 aa, synthetic construct
KTDTRQW

SEQ ID NO: 97067 - protein, 7 aa, synthetic construct
YTGSMPH

SEQ ID NO: 97068 - protein, 7 aa, synthetic construct
RNSTVNA

SEQ ID NO: 97069 - protein, 7 aa, synthetic construct
THMPVMG

SEQ ID NO: 97070 - protein, 7 aa, synthetic construct
QGTPSVT

SEQ ID NO: 97071 - protein, 7 aa, synthetic construct
NGPNGKP

SEQ ID NO: 97072 - protein, 7 aa, synthetic construct
RELQPAD

SEQ ID NO: 97073 - protein, 7 aa, synthetic construct
FHIVDNK

SEQ ID NO: 97074 - protein, 7 aa, synthetic construct
TRQDEQM

SEQ ID NO: 97075 - protein, 7 aa, synthetic construct
SPRGPMA

SEQ ID NO: 97076 - protein, 7 aa, synthetic construct
MKAGQSA

SEQ ID NO: 97077 - protein, 7 aa, synthetic construct
SQVKELH

SEQ ID NO: 97078 - protein, 7 aa, synthetic construct
QVEAGRK

SEQ ID NO: 97079 - protein, 7 aa, synthetic construct
NKTVKSE

SEQ ID NO: 97080 - protein, 7 aa, synthetic construct
TPKTSSG

SEQ ID NO: 97081 - protein, 7 aa, synthetic construct
NSVEGFG

SEQ ID NO: 97082 - protein, 7 aa, synthetic construct
KGTTAQF

SEQ ID NO: 97083 - protein, 7 aa, synthetic construct
LSSPAGY

SEQ ID NO: 97084 - protein, 7 aa, synthetic construct
YAKEWAN

SEQ ID NO: 97085 - protein, 7 aa, synthetic construct
FPRVHGN

SEQ ID NO: 97086 - protein, 7 aa, synthetic construct
AKSDVKF

SEQ ID NO: 97087 - protein, 7 aa, synthetic construct
IKEWPGP

SEQ ID NO: 97088 - protein, 7 aa, synthetic construct
LVDLRNA

SEQ ID NO: 97089 - protein, 7 aa, synthetic construct
YAASSHM

SEQ ID NO: 97090 - protein, 7 aa, synthetic construct
TYPTALI

SEQ ID NO: 97091 - protein, 7 aa, synthetic construct
LETVKIS

SEQ ID NO: 97092 - protein, 7 aa, synthetic construct
PHQVDTG

SEQ ID NO: 97093 - protein, 7 aa, synthetic construct
MVHKIAE

SEQ ID NO: 97094 - protein, 7 aa, synthetic construct
QGNQPTS

SEQ ID NO: 97095 - protein, 7 aa, synthetic construct
EANAIPP

SEQ ID NO: 97096 - protein, 7 aa, synthetic construct
YQYLKEA

SEQ ID NO: 97097 - protein, 7 aa, synthetic construct
VSPASRM

SEQ ID NO: 97098 - protein, 7 aa, synthetic construct
RSMQPHL

SEQ ID NO: 97099 - protein, 7 aa, synthetic construct
TQRDPVM

SEQ ID NO: 97100 - protein, 7 aa, synthetic construct
DWQQPKQ

SEQ ID NO: 97101 - protein, 7 aa, synthetic construct
RDQSMLV

SEQ ID NO: 97102 - protein, 7 aa, synthetic construct
MQMQEGA

SEQ ID NO: 97103 - protein, 7 aa, synthetic construct
VQRSAGV

SEQ ID NO: 97104 - protein, 7 aa, synthetic construct
LYTQKPG

SEQ ID NO: 97105 - protein, 7 aa, synthetic construct
QKVEYPD

SEQ ID NO: 97106 - protein, 7 aa, synthetic construct
EMGQPNA

SEQ ID NO: 97107 - protein, 7 aa, synthetic construct
NYGTSGD

SEQ ID NO: 97108 - protein, 7 aa, synthetic construct
AMSPLTV

SEQ ID NO: 97109 - protein, 7 aa, synthetic construct
MDQFKPE

SEQ ID NO: 97110 - protein, 7 aa, synthetic construct
PKTSPQA

SEQ ID NO: 97111 - protein, 7 aa, synthetic construct
GGPLTNM

SEQ ID NO: 97112 - protein, 7 aa, synthetic construct
DPMEKRY

SEQ ID NO: 97113 - protein, 7 aa, synthetic construct
KGPGSQQ

SEQ ID NO: 97114 - protein, 7 aa, synthetic construct
WNAAPVK

SEQ ID NO: 97115 - protein, 7 aa, synthetic construct
HIQQKMA

SEQ ID NO: 97116 - protein, 7 aa, synthetic construct
HQQSPFT

SEQ ID NO: 97117 - protein, 7 aa, synthetic construct
TTMFTQP

SEQ ID NO: 97118 - protein, 7 aa, synthetic construct
PPRPAGN

SEQ ID NO: 97119 - protein, 7 aa, synthetic construct
TKDVTAN

SEQ ID NO: 97120 - protein, 7 aa, synthetic construct
SVVALTA

SEQ ID NO: 97121 - protein, 7 aa, synthetic construct
LGVVERS

SEQ ID NO: 97122 - protein, 7 aa, synthetic construct
REIAEAG

SEQ ID NO: 97123 - protein, 7 aa, synthetic construct
PAFEVRN

SEQ ID NO: 97124 - protein, 7 aa, synthetic construct
MVNSNTK

SEQ ID NO: 97125 - protein, 7 aa, synthetic construct
FPPTDLA

SEQ ID NO: 97126 - protein, 7 aa, synthetic construct
NVHFGVA

SEQ ID NO: 97127 - protein, 7 aa, synthetic construct
VHSPNQH

SEQ ID NO: 97128 - protein, 7 aa, synthetic construct
QGKNNHM

SEQ ID NO: 97129 - protein, 7 aa, synthetic construct
YHDSGAG

SEQ ID NO: 97130 - protein, 7 aa, synthetic construct
IPGQYTP

SEQ ID NO: 97131 - protein, 7 aa, synthetic construct
QGLKYHG

SEQ ID NO: 97132 - protein, 7 aa, synthetic construct
KQQNMNL

SEQ ID NO: 97133 - protein, 7 aa, synthetic construct
WNRDTPS

SEQ ID NO: 97134 - protein, 7 aa, synthetic construct
PQTAPGR

SEQ ID NO: 97135 - protein, 7 aa, synthetic construct
VHANVME

SEQ ID NO: 97136 - protein, 7 aa, synthetic construct
QEPQAMI

SEQ ID NO: 97137 - protein, 7 aa, synthetic construct
SSYSPLS

SEQ ID NO: 97138 - protein, 7 aa, synthetic construct
IAAVKDT

SEQ ID NO: 97139 - protein, 7 aa, synthetic construct
IFDIIKP

SEQ ID NO: 97140 - protein, 7 aa, synthetic construct
KARIESH

SEQ ID NO: 97141 - protein, 7 aa, synthetic construct
FHSNSEV

SEQ ID NO: 97142 - protein, 7 aa, synthetic construct
QPVALRV

SEQ ID NO: 97143 - protein, 7 aa, synthetic construct
KNGIVVD

SEQ ID NO: 97144 - protein, 7 aa, synthetic construct
PYRESTV

SEQ ID NO: 97145 - protein, 7 aa, synthetic construct
DGYTGHP

SEQ ID NO: 97146 - protein, 7 aa, synthetic construct
WQSVKSQ

SEQ ID NO: 97147 - protein, 7 aa, synthetic construct
HTNFQPQ

SEQ ID NO: 97148 - protein, 7 aa, synthetic construct
RVGDHMP

SEQ ID NO: 97149 - protein, 7 aa, synthetic construct
SDHKTHY

SEQ ID NO: 97150 - protein, 7 aa, synthetic construct
VQQPITT

SEQ ID NO: 97151 - protein, 7 aa, synthetic construct
LAPSNQP

SEQ ID NO: 97152 - protein, 7 aa, synthetic construct
RGDYAHE

SEQ ID NO: 97153 - protein, 7 aa, synthetic construct
HGNANIS

SEQ ID NO: 97154 - protein, 7 aa, synthetic construct
NLKYDHS

SEQ ID NO: 97155 - protein, 7 aa, synthetic construct
FLSNIPQ

SEQ ID NO: 97156 - protein, 7 aa, synthetic construct
TDSSKPK

SEQ ID NO: 97157 - protein, 7 aa, synthetic construct
AFTKNIE

SEQ ID NO: 97158 - protein, 7 aa, synthetic construct
TMPVTIM

SEQ ID NO: 97159 - protein, 7 aa, synthetic construct
YLGPTGV

SEQ ID NO: 97160 - protein, 7 aa, synthetic construct
HKAGNPE

SEQ ID NO: 97161 - protein, 7 aa, synthetic construct
MGSNYAM

SEQ ID NO: 97162 - protein, 7 aa, synthetic construct
LHTYEAR

SEQ ID NO: 97163 - protein, 7 aa, synthetic construct
LFPSQPE

SEQ ID NO: 97164 - protein, 7 aa, synthetic construct
ITMRYDS

SEQ ID NO: 97165 - protein, 7 aa, synthetic construct
DLSKGNS

SEQ ID NO: 97166 - protein, 7 aa, synthetic construct
GVPQNDR

SEQ ID NO: 97167 - protein, 7 aa, synthetic construct
DPGAHPV

SEQ ID NO: 97168 - protein, 7 aa, synthetic construct
TWIGTEK

SEQ ID NO: 97169 - protein, 7 aa, synthetic construct
FREPPDL

SEQ ID NO: 97170 - protein, 7 aa, synthetic construct
IVERHTV

SEQ ID NO: 97171 - protein, 7 aa, synthetic construct
QPIQEYS

SEQ ID NO: 97172 - protein, 7 aa, synthetic construct
FDSFPKP

SEQ ID NO: 97173 - protein, 7 aa, synthetic construct
KTTFHLE

SEQ ID NO: 97174 - protein, 7 aa, synthetic construct
APERGMI

SEQ ID NO: 97175 - protein, 7 aa, synthetic construct
KSQGSGA

SEQ ID NO: 97176 - protein, 7 aa, synthetic construct
DNHAKVH

SEQ ID NO: 97177 - protein, 7 aa, synthetic construct
SFRGSMV

SEQ ID NO: 97178 - protein, 7 aa, synthetic construct
VIPPVRP

SEQ ID NO: 97179 - protein, 7 aa, synthetic construct
VVHADYK

SEQ ID NO: 97180 - protein, 7 aa, synthetic construct
YAKTIAI

SEQ ID NO: 97181 - protein, 7 aa, synthetic construct
GVQAKQG

SEQ ID NO: 97182 - protein, 7 aa, synthetic construct
PPTNAEY

SEQ ID NO: 97183 - protein, 7 aa, synthetic construct
EASKILA

SEQ ID NO: 97184 - protein, 7 aa, synthetic construct
PGKAEMW

SEQ ID NO: 97185 - protein, 7 aa, synthetic construct
GRHFEEI

SEQ ID NO: 97186 - protein, 7 aa, synthetic construct
SRIRHEG

SEQ ID NO: 97187 - protein, 7 aa, synthetic construct
NHYPNGY

SEQ ID NO: 97188 - protein, 7 aa, synthetic construct
HYSSEQL

SEQ ID NO: 97189 - protein, 7 aa, synthetic construct
DVAAMIH

SEQ ID NO: 97190 - protein, 7 aa, synthetic construct
SSWSPVD

SEQ ID NO: 97191 - protein, 7 aa, synthetic construct
KMTPAIA

SEQ ID NO: 97192 - protein, 7 aa, synthetic construct
MSGFEAK

SEQ ID NO: 97193 - protein, 7 aa, synthetic construct
HMANINF

SEQ ID NO: 97194 - protein, 7 aa, synthetic construct
KNNQGSL

SEQ ID NO: 97195 - protein, 7 aa, synthetic construct
SKQTVAQ

SEQ ID NO: 97196 - protein, 7 aa, synthetic construct
QVIGPGE

SEQ ID NO: 97197 - protein, 7 aa, synthetic construct
YAHKTTQ

SEQ ID NO: 97198 - protein, 7 aa, synthetic construct
NYQKDIA

SEQ ID NO: 97199 - protein, 7 aa, synthetic construct
KDHAMQM

SEQ ID NO: 97200 - protein, 7 aa, synthetic construct
DHMALAK

SEQ ID NO: 97201 - protein, 7 aa, synthetic construct
RPNQERW

SEQ ID NO: 97202 - protein, 7 aa, synthetic construct
ASSAHVK

SEQ ID NO: 97203 - protein, 7 aa, synthetic construct
LSPSLQQ

SEQ ID NO: 97204 - protein, 7 aa, synthetic construct
AQHTKHI

SEQ ID NO: 97205 - protein, 7 aa, synthetic construct
FSNPGGP

SEQ ID NO: 97206 - protein, 7 aa, synthetic construct
FPFKGSI

SEQ ID NO: 97207 - protein, 7 aa, synthetic construct
LYNNSEF

SEQ ID NO: 97208 - protein, 7 aa, synthetic construct
RDGTTPV

SEQ ID NO: 97209 - protein, 7 aa, synthetic construct
MQMRMQS

SEQ ID NO: 97210 - protein, 7 aa, synthetic construct
AFRGLDF

SEQ ID NO: 97211 - protein, 7 aa, synthetic construct
MVPNSSF

SEQ ID NO: 97212 - protein, 7 aa, synthetic construct
IYHLRET

SEQ ID NO: 97213 - protein, 7 aa, synthetic construct
SAYGIET

SEQ ID NO: 97214 - protein, 7 aa, synthetic construct
YSAKTAG

SEQ ID NO: 97215 - protein, 7 aa, synthetic construct
NLKQGNM

SEQ ID NO: 97216 - protein, 7 aa, synthetic construct
WTQDSVQ

SEQ ID NO: 97217 - protein, 7 aa, synthetic construct
GQKLENY

SEQ ID NO: 97218 - protein, 7 aa, synthetic construct
NMLKAVT

SEQ ID NO: 97219 - protein, 7 aa, synthetic construct
SLPAQNE

SEQ ID NO: 97220 - protein, 7 aa, synthetic construct
FMQGDQR

SEQ ID NO: 97221 - protein, 7 aa, synthetic construct
NLELNRR

SEQ ID NO: 97222 - protein, 7 aa, synthetic construct
VSQRYNH

SEQ ID NO: 97223 - protein, 7 aa, synthetic construct
PKDKFSG

SEQ ID NO: 97224 - protein, 7 aa, synthetic construct
STQQMVH

SEQ ID NO: 97225 - protein, 7 aa, synthetic construct
KRQDAAV

SEQ ID NO: 97226 - protein, 7 aa, synthetic construct
DSRPAQA

SEQ ID NO: 97227 - protein, 7 aa, synthetic construct
KMNTAGN

SEQ ID NO: 97228 - protein, 7 aa, synthetic construct
NSHANKE

SEQ ID NO: 97229 - protein, 7 aa, synthetic construct
KFKDPVD

SEQ ID NO: 97230 - protein, 7 aa, synthetic construct
GIPKGHI

SEQ ID NO: 97231 - protein, 7 aa, synthetic construct
NNAAYAV

SEQ ID NO: 97232 - protein, 7 aa, synthetic construct
RGPEGEW

SEQ ID NO: 97233 - protein, 7 aa, synthetic construct
MLINKNY

SEQ ID NO: 97234 - protein, 7 aa, synthetic construct
VSQSQMT

SEQ ID NO: 97235 - protein, 7 aa, synthetic construct
SDRNFPG

SEQ ID NO: 97236 - protein, 7 aa, synthetic construct
FNANHEK

SEQ ID NO: 97237 - protein, 7 aa, synthetic construct
RDPQQEV

SEQ ID NO: 97238 - protein, 7 aa, synthetic construct
KELTLEY

SEQ ID NO: 97239 - protein, 7 aa, synthetic construct
PARGEVI

SEQ ID NO: 97240 - protein, 7 aa, synthetic construct
AFPKVGV

SEQ ID NO: 97241 - protein, 7 aa, synthetic construct
RLKMTYD

SEQ ID NO: 97242 - protein, 7 aa, synthetic construct
RILGHEM

SEQ ID NO: 97243 - protein, 7 aa, synthetic construct
PEGIRMG

SEQ ID NO: 97244 - protein, 7 aa, synthetic construct
TTISASH

SEQ ID NO: 97245 - protein, 7 aa, synthetic construct
IKQDGNR

SEQ ID NO: 97246 - protein, 7 aa, synthetic construct
GAINKFD

SEQ ID NO: 97247 - protein, 7 aa, synthetic construct
ERDKAVM

SEQ ID NO: 97248 - protein, 7 aa, synthetic construct
HHHYPVA

SEQ ID NO: 97249 - protein, 7 aa, synthetic construct
GHLSPNH

SEQ ID NO: 97250 - protein, 7 aa, synthetic construct
EGHLIHR

SEQ ID NO: 97251 - protein, 7 aa, synthetic construct
VRDNKQT

SEQ ID NO: 97252 - protein, 7 aa, synthetic construct
TTTQPGQ

SEQ ID NO: 97253 - protein, 7 aa, synthetic construct
ILRNIQA

SEQ ID NO: 97254 - protein, 7 aa, synthetic construct
LYDNVKI

SEQ ID NO: 97255 - protein, 7 aa, synthetic construct
VYNRYVE

SEQ ID NO: 97256 - protein, 7 aa, synthetic construct
LALSQSA

SEQ ID NO: 97257 - protein, 7 aa, synthetic construct
RLPLMMD

SEQ ID NO: 97258 - protein, 7 aa, synthetic construct
DFRGNYI

SEQ ID NO: 97259 - protein, 7 aa, synthetic construct
YERAIKY

SEQ ID NO: 97260 - protein, 7 aa, synthetic construct
SAAHVFE

SEQ ID NO: 97261 - protein, 7 aa, synthetic construct
SHKQIFQ

SEQ ID NO: 97262 - protein, 7 aa, synthetic construct
RMAKDAY

SEQ ID NO: 97263 - protein, 7 aa, synthetic construct
ARTPIGV

SEQ ID NO: 97264 - protein, 7 aa, synthetic construct
PKDFVTP

SEQ ID NO: 97265 - protein, 7 aa, synthetic construct
VQKQNGT

SEQ ID NO: 97266 - protein, 7 aa, synthetic construct
QPGYESQ

SEQ ID NO: 97267 - protein, 7 aa, synthetic construct
DYSSSKN

SEQ ID NO: 97268 - protein, 7 aa, synthetic construct
MHKGQMM

SEQ ID NO: 97269 - protein, 7 aa, synthetic construct
LDGPNPR

SEQ ID NO: 97270 - protein, 7 aa, synthetic construct
NVRGVTL

SEQ ID NO: 97271 - protein, 7 aa, synthetic construct
MNTGEMA

SEQ ID NO: 97272 - protein, 7 aa, synthetic construct
RSASQAW

SEQ ID NO: 97273 - protein, 7 aa, synthetic construct
LSSMNQS

SEQ ID NO: 97274 - protein, 7 aa, synthetic construct
STVYVDK

SEQ ID NO: 97275 - protein, 7 aa, synthetic construct
LANEPAS

SEQ ID NO: 97276 - protein, 7 aa, synthetic construct
ATYSETA

SEQ ID NO: 97277 - protein, 7 aa, synthetic construct
MEKIMAP

SEQ ID NO: 97278 - protein, 7 aa, synthetic construct
TQVTRHM

SEQ ID NO: 97279 - protein, 7 aa, synthetic construct
ASVPNSN

SEQ ID NO: 97280 - protein, 7 aa, synthetic construct
KQSVGIG

SEQ ID NO: 97281 - protein, 7 aa, synthetic construct
GNHHGNG

SEQ ID NO: 97282 - protein, 7 aa, synthetic construct
PPKPQQW

SEQ ID NO: 97283 - protein, 7 aa, synthetic construct
GQMFEKS

SEQ ID NO: 97284 - protein, 7 aa, synthetic construct
REQAHVY

SEQ ID NO: 97285 - protein, 7 aa, synthetic construct
PEHKAGT

SEQ ID NO: 97286 - protein, 7 aa, synthetic construct
VELRTVV

SEQ ID NO: 97287 - protein, 7 aa, synthetic construct
DHSVNKI

SEQ ID NO: 97288 - protein, 7 aa, synthetic construct
AERIPIA

SEQ ID NO: 97289 - protein, 7 aa, synthetic construct
WGHFAAE

SEQ ID NO: 97290 - protein, 7 aa, synthetic construct
PQSHRQV

SEQ ID NO: 97291 - protein, 7 aa, synthetic construct
FDQHSKD

SEQ ID NO: 97292 - protein, 7 aa, synthetic construct
QNERVNN

SEQ ID NO: 97293 - protein, 7 aa, synthetic construct
AAQFSGG

SEQ ID NO: 97294 - protein, 7 aa, synthetic construct
RAEHLRS

SEQ ID NO: 97295 - protein, 7 aa, synthetic construct
QPQVSAR

SEQ ID NO: 97296 - protein, 7 aa, synthetic construct
RPSLIIE

SEQ ID NO: 97297 - protein, 7 aa, synthetic construct
ATTVLLS

SEQ ID NO: 97298 - protein, 7 aa, synthetic construct
EPPWAEE

SEQ ID NO: 97299 - protein, 7 aa, synthetic construct
LNATSQP

SEQ ID NO: 97300 - protein, 7 aa, synthetic construct
YRASLPL

SEQ ID NO: 97301 - protein, 7 aa, synthetic construct
HMDGSKR

SEQ ID NO: 97302 - protein, 7 aa, synthetic construct
ADAHWHA

SEQ ID NO: 97303 - protein, 7 aa, synthetic construct
GWSENNG

SEQ ID NO: 97304 - protein, 7 aa, synthetic construct
PSPQTLK

SEQ ID NO: 97305 - protein, 7 aa, synthetic construct
VASTGFT

SEQ ID NO: 97306 - protein, 7 aa, synthetic construct
RHNSAPE

SEQ ID NO: 97307 - protein, 7 aa, synthetic construct
NLSRINS

SEQ ID NO: 97308 - protein, 7 aa, synthetic construct
DTNTLSF

SEQ ID NO: 97309 - protein, 7 aa, synthetic construct
LGMMQQK

SEQ ID NO: 97310 - protein, 7 aa, synthetic construct
YHRLDAM

SEQ ID NO: 97311 - protein, 7 aa, synthetic construct
GGQPLIP

SEQ ID NO: 97312 - protein, 7 aa, synthetic construct
NNRGEQE

SEQ ID NO: 97313 - protein, 7 aa, synthetic construct
NNGYDRY

SEQ ID NO: 97314 - protein, 7 aa, synthetic construct
GFGATNH

SEQ ID NO: 97315 - protein, 7 aa, synthetic construct
TGTTRQA

SEQ ID NO: 97316 - protein, 7 aa, synthetic construct
ALKDDKH

SEQ ID NO: 97317 - protein, 7 aa, synthetic construct
MTAEGVS

SEQ ID NO: 97318 - protein, 7 aa, synthetic construct
TQVHNLV

SEQ ID NO: 97319 - protein, 7 aa, synthetic construct
GPFLVES

SEQ ID NO: 97320 - protein, 7 aa, synthetic construct
GKDYEAN

SEQ ID NO: 97321 - protein, 7 aa, synthetic construct
TNERRSA

SEQ ID NO: 97322 - protein, 7 aa, synthetic construct
KDQPKLA

SEQ ID NO: 97323 - protein, 7 aa, synthetic construct
HGQWKYE

SEQ ID NO: 97324 - protein, 7 aa, synthetic construct
LGGKFVQ

SEQ ID NO: 97325 - protein, 7 aa, synthetic construct
LWNGKGE

SEQ ID NO: 97326 - protein, 7 aa, synthetic construct
REAMTNW

SEQ ID NO: 97327 - protein, 7 aa, synthetic construct
QNSPQAA

SEQ ID NO: 97328 - protein, 7 aa, synthetic construct
HGHNQLA

SEQ ID NO: 97329 - protein, 7 aa, synthetic construct
MKGAESA

SEQ ID NO: 97330 - protein, 7 aa, synthetic construct
ERSTKPQ

SEQ ID NO: 97331 - protein, 7 aa, synthetic construct
SLTVVAD

SEQ ID NO: 97332 - protein, 7 aa, synthetic construct
WPRERPA

SEQ ID NO: 97333 - protein, 7 aa, synthetic construct
SNRNPQE

SEQ ID NO: 97334 - protein, 7 aa, synthetic construct
HPNPRQL

SEQ ID NO: 97335 - protein, 7 aa, synthetic construct
SWDQGQR

SEQ ID NO: 97336 - protein, 7 aa, synthetic construct
DEGSNKN

SEQ ID NO: 97337 - protein, 7 aa, synthetic construct
YTPESTY

SEQ ID NO: 97338 - protein, 7 aa, synthetic construct
TAPTIRI

SEQ ID NO: 97339 - protein, 7 aa, synthetic construct
MTGSLAL

SEQ ID NO: 97340 - protein, 7 aa, synthetic construct
EQQTHSA

SEQ ID NO: 97341 - protein, 7 aa, synthetic construct
TFVNQPR

SEQ ID NO: 97342 - protein, 7 aa, synthetic construct
GRQSDMT

SEQ ID NO: 97343 - protein, 7 aa, synthetic construct
IPLVTAT

SEQ ID NO: 97344 - protein, 7 aa, synthetic construct
PAKTMET

SEQ ID NO: 97345 - protein, 7 aa, synthetic construct
NMFKNNP

SEQ ID NO: 97346 - protein, 7 aa, synthetic construct
GYGGAQQ

SEQ ID NO: 97347 - protein, 7 aa, synthetic construct
GRQVADH

SEQ ID NO: 97348 - protein, 7 aa, synthetic construct
KMRPEMN

SEQ ID NO: 97349 - protein, 7 aa, synthetic construct
SKVTQVI

SEQ ID NO: 97350 - protein, 7 aa, synthetic construct
RERINTP

SEQ ID NO: 97351 - protein, 7 aa, synthetic construct
NHNNRME

SEQ ID NO: 97352 - protein, 7 aa, synthetic construct
WNIITPD

SEQ ID NO: 97353 - protein, 7 aa, synthetic construct
SNIPVAA

SEQ ID NO: 97354 - protein, 7 aa, synthetic construct
RLNEKVM

SEQ ID NO: 97355 - protein, 7 aa, synthetic construct
SIRSDVF

SEQ ID NO: 97356 - protein, 7 aa, synthetic construct
AAHKFSN

SEQ ID NO: 97357 - protein, 7 aa, synthetic construct
TPKQAYN

SEQ ID NO: 97358 - protein, 7 aa, synthetic construct
YQHMKHV

SEQ ID NO: 97359 - protein, 7 aa, synthetic construct
ALDVQKN

SEQ ID NO: 97360 - protein, 7 aa, synthetic construct
SMGMSAH

SEQ ID NO: 97361 - protein, 7 aa, synthetic construct
VDREHKW

SEQ ID NO: 97362 - protein, 7 aa, synthetic construct
IRKFEAA

SEQ ID NO: 97363 - protein, 7 aa, synthetic construct
TGINHRI

SEQ ID NO: 97364 - protein, 7 aa, synthetic construct
LASNQEM

SEQ ID NO: 97365 - protein, 7 aa, synthetic construct
WNGLAAA

SEQ ID NO: 97366 - protein, 7 aa, synthetic construct
PQTNDRK

SEQ ID NO: 97367 - protein, 7 aa, synthetic construct
PHRGAGN

SEQ ID NO: 97368 - protein, 7 aa, synthetic construct
PQQQNQM

SEQ ID NO: 97369 - protein, 7 aa, synthetic construct
PHPQQPF

SEQ ID NO: 97370 - protein, 7 aa, synthetic construct
QANFNTK

SEQ ID NO: 97371 - protein, 7 aa, synthetic construct
QAPIGID

SEQ ID NO: 97372 - protein, 7 aa, synthetic construct
GIDYVNS

SEQ ID NO: 97373 - protein, 7 aa, synthetic construct
TDRFPNR

SEQ ID NO: 97374 - protein, 7 aa, synthetic construct
LRIHASP

SEQ ID NO: 97375 - protein, 7 aa, synthetic construct
ADFGEQK

SEQ ID NO: 97376 - protein, 7 aa, synthetic construct
EIESRNK

SEQ ID NO: 97377 - protein, 7 aa, synthetic construct
PKNEMNM

SEQ ID NO: 97378 - protein, 7 aa, synthetic construct
ITKPGNQ

SEQ ID NO: 97379 - protein, 7 aa, synthetic construct
ARFQEHT

SEQ ID NO: 97380 - protein, 7 aa, synthetic construct
FVSQYGG

SEQ ID NO: 97381 - protein, 7 aa, synthetic construct
LSDQSTK

SEQ ID NO: 97382 - protein, 7 aa, synthetic construct
YAGTSVT

SEQ ID NO: 97383 - protein, 7 aa, synthetic construct
SNIQMAK

SEQ ID NO: 97384 - protein, 7 aa, synthetic construct
HMGQMGT

SEQ ID NO: 97385 - protein, 7 aa, synthetic construct
LPLAQVA

SEQ ID NO: 97386 - protein, 7 aa, synthetic construct
RIASDNN

SEQ ID NO: 97387 - protein, 7 aa, synthetic construct
NADTRSM

SEQ ID NO: 97388 - protein, 7 aa, synthetic construct
GLQEPNS

SEQ ID NO: 97389 - protein, 7 aa, synthetic construct
LTKMHPV

SEQ ID NO: 97390 - protein, 7 aa, synthetic construct
DGIVNRE

SEQ ID NO: 97391 - protein, 7 aa, synthetic construct
YNQGGEM

SEQ ID NO: 97392 - protein, 7 aa, synthetic construct
YIYKHPE

SEQ ID NO: 97393 - protein, 7 aa, synthetic construct
PFPGTPV

SEQ ID NO: 97394 - protein, 7 aa, synthetic construct
FKDFIGD

SEQ ID NO: 97395 - protein, 7 aa, synthetic construct
TFIPMES

SEQ ID NO: 97396 - protein, 7 aa, synthetic construct
YIETLHP

SEQ ID NO: 97397 - protein, 7 aa, synthetic construct
TRLDYAK

SEQ ID NO: 97398 - protein, 7 aa, synthetic construct
TTNRSHY

SEQ ID NO: 97399 - protein, 7 aa, synthetic construct
KEDNWKA

SEQ ID NO: 97400 - protein, 7 aa, synthetic construct
GVDVTRF

SEQ ID NO: 97401 - protein, 7 aa, synthetic construct
KFQAEQL

SEQ ID NO: 97402 - protein, 7 aa, synthetic construct
HPGEGIR

SEQ ID NO: 97403 - protein, 7 aa, synthetic construct
FEKIKFD

SEQ ID NO: 97404 - protein, 7 aa, synthetic construct
SFGDGGL

SEQ ID NO: 97405 - protein, 7 aa, synthetic construct
THVGMLM

SEQ ID NO: 97406 - protein, 7 aa, synthetic construct
AQSSQWS

SEQ ID NO: 97407 - protein, 7 aa, synthetic construct
KQNVAID

SEQ ID NO: 97408 - protein, 7 aa, synthetic construct
IFPVIEP

SEQ ID NO: 97409 - protein, 7 aa, synthetic construct
DARFHAM

SEQ ID NO: 97410 - protein, 7 aa, synthetic construct
RPPVEMD

SEQ ID NO: 97411 - protein, 7 aa, synthetic construct
KHHFNEE

SEQ ID NO: 97412 - protein, 7 aa, synthetic construct
ERQVVSI

SEQ ID NO: 97413 - protein, 7 aa, synthetic construct
KMNTLIK

SEQ ID NO: 97414 - protein, 7 aa, synthetic construct
SKQAYSV

SEQ ID NO: 97415 - protein, 7 aa, synthetic construct
SPSQHAN

SEQ ID NO: 97416 - protein, 7 aa, synthetic construct
HTMTVGP

SEQ ID NO: 97417 - protein, 7 aa, synthetic construct
VMERVND

SEQ ID NO: 97418 - protein, 7 aa, synthetic construct
GLEGKNL

SEQ ID NO: 97419 - protein, 7 aa, synthetic construct
KLQFVEK

SEQ ID NO: 97420 - protein, 7 aa, synthetic construct
PGVGPTP

SEQ ID NO: 97421 - protein, 7 aa, synthetic construct
DRTTIVH

SEQ ID NO: 97422 - protein, 7 aa, synthetic construct
RDDIKYQ

SEQ ID NO: 97423 - protein, 7 aa, synthetic construct
DHTRTMF

SEQ ID NO: 97424 - protein, 7 aa, synthetic construct
GKASQTV

SEQ ID NO: 97425 - protein, 7 aa, synthetic construct
PEMRHMH

SEQ ID NO: 97426 - protein, 7 aa, synthetic construct
PHMHTGL

SEQ ID NO: 97427 - protein, 7 aa, synthetic construct
VKTEQLV

SEQ ID NO: 97428 - protein, 7 aa, synthetic construct
QLSDGMN

SEQ ID NO: 97429 - protein, 7 aa, synthetic construct
NSGKLTP

SEQ ID NO: 97430 - protein, 7 aa, synthetic construct
RLSGYDI

SEQ ID NO: 97431 - protein, 7 aa, synthetic construct
TMAAITA

SEQ ID NO: 97432 - protein, 7 aa, synthetic construct
EITHLRA

SEQ ID NO: 97433 - protein, 7 aa, synthetic construct
SPKDGMW

SEQ ID NO: 97434 - protein, 7 aa, synthetic construct
KNTQSPA

SEQ ID NO: 97435 - protein, 7 aa, synthetic construct
RITGPVT

SEQ ID NO: 97436 - protein, 7 aa, synthetic construct
TYPQALH

SEQ ID NO: 97437 - protein, 7 aa, synthetic construct
YNRINME

SEQ ID NO: 97438 - protein, 7 aa, synthetic construct
LSYEAHI

SEQ ID NO: 97439 - protein, 7 aa, synthetic construct
VKMGFLE

SEQ ID NO: 97440 - protein, 7 aa, synthetic construct
GKQNGAE

SEQ ID NO: 97441 - protein, 7 aa, synthetic construct
PDKQINA

SEQ ID NO: 97442 - protein, 7 aa, synthetic construct
YGLNNNY

SEQ ID NO: 97443 - protein, 7 aa, synthetic construct
WVTSVHA

SEQ ID NO: 97444 - protein, 7 aa, synthetic construct
INYDQKN

SEQ ID NO: 97445 - protein, 7 aa, synthetic construct
NQEALPF

SEQ ID NO: 97446 - protein, 7 aa, synthetic construct
AGFQSHD

SEQ ID NO: 97447 - protein, 7 aa, synthetic construct
ANSDNHV

SEQ ID NO: 97448 - protein, 7 aa, synthetic construct
VQGMAVV

SEQ ID NO: 97449 - protein, 7 aa, synthetic construct
SNPQRFI

SEQ ID NO: 97450 - protein, 7 aa, synthetic construct
AFDIVAA

SEQ ID NO: 97451 - protein, 7 aa, synthetic construct
GPYIGHD

SEQ ID NO: 97452 - protein, 7 aa, synthetic construct
AQAKLIT

SEQ ID NO: 97453 - protein, 7 aa, synthetic construct
RPTPNGT

SEQ ID NO: 97454 - protein, 7 aa, synthetic construct
NMQVGPM

SEQ ID NO: 97455 - protein, 7 aa, synthetic construct
IILGKSG

SEQ ID NO: 97456 - protein, 7 aa, synthetic construct
IVKATVF

SEQ ID NO: 97457 - protein, 7 aa, synthetic construct
MYGGQNT

SEQ ID NO: 97458 - protein, 7 aa, synthetic construct
DMFHKYP

SEQ ID NO: 97459 - protein, 7 aa, synthetic construct
PREMPNI

SEQ ID NO: 97460 - protein, 7 aa, synthetic construct
YVGLKHN

SEQ ID NO: 97461 - protein, 7 aa, synthetic construct
TNATTDP

SEQ ID NO: 97462 - protein, 7 aa, synthetic construct
KIASAQL

SEQ ID NO: 97463 - protein, 7 aa, synthetic construct
SIPHQIL

SEQ ID NO: 97464 - protein, 7 aa, synthetic construct
FMNKGNP

SEQ ID NO: 97465 - protein, 7 aa, synthetic construct
HIEVQTP

SEQ ID NO: 97466 - protein, 7 aa, synthetic construct
KASVNFP

SEQ ID NO: 97467 - protein, 7 aa, synthetic construct
MAIDSDR

SEQ ID NO: 97468 - protein, 7 aa, synthetic construct
SQKYTQD

SEQ ID NO: 97469 - protein, 7 aa, synthetic construct
WMKPEHM

SEQ ID NO: 97470 - protein, 7 aa, synthetic construct
GKQTPGG

SEQ ID NO: 97471 - protein, 7 aa, synthetic construct
NYAMSLG

SEQ ID NO: 97472 - protein, 7 aa, synthetic construct
EVHLTAG

SEQ ID NO: 97473 - protein, 7 aa, synthetic construct
MHKHLSI

SEQ ID NO: 97474 - protein, 7 aa, synthetic construct
TGQGQPV

SEQ ID NO: 97475 - protein, 7 aa, synthetic construct
SQNIPEF

SEQ ID NO: 97476 - protein, 7 aa, synthetic construct
YQDQVGH

SEQ ID NO: 97477 - protein, 7 aa, synthetic construct
SNDSAKG

SEQ ID NO: 97478 - protein, 7 aa, synthetic construct
VVPNQDV

SEQ ID NO: 97479 - protein, 7 aa, synthetic construct
VLANGPK

SEQ ID NO: 97480 - protein, 7 aa, synthetic construct
IIADLSH

SEQ ID NO: 97481 - protein, 7 aa, synthetic construct
HTPVKSM

SEQ ID NO: 97482 - protein, 7 aa, synthetic construct
WHHSNTS

SEQ ID NO: 97483 - protein, 7 aa, synthetic construct
AMNPVSM

SEQ ID NO: 97484 - protein, 7 aa, synthetic construct
LHREWEA

SEQ ID NO: 97485 - protein, 7 aa, synthetic construct
SIQSTLN

SEQ ID NO: 97486 - protein, 7 aa, synthetic construct
GVMPTNG

SEQ ID NO: 97487 - protein, 7 aa, synthetic construct
VNHMVIP

SEQ ID NO: 97488 - protein, 7 aa, synthetic construct
WSSRPQG

SEQ ID NO: 97489 - protein, 7 aa, synthetic construct
YQNHSYP

SEQ ID NO: 97490 - protein, 7 aa, synthetic construct
YHSTSIV

SEQ ID NO: 97491 - protein, 7 aa, synthetic construct
FGTDNVH

SEQ ID NO: 97492 - protein, 7 aa, synthetic construct
KMGNVTA

SEQ ID NO: 97493 - protein, 7 aa, synthetic construct
QGGYRPD

SEQ ID NO: 97494 - protein, 7 aa, synthetic construct
IATHFGD

SEQ ID NO: 97495 - protein, 7 aa, synthetic construct
QTNGTEN

SEQ ID NO: 97496 - protein, 7 aa, synthetic construct
DVTATKT

SEQ ID NO: 97497 - protein, 7 aa, synthetic construct
AGVQDMR

SEQ ID NO: 97498 - protein, 7 aa, synthetic construct
TKDVNVS

SEQ ID NO: 97499 - protein, 7 aa, synthetic construct
NSSQPMP

SEQ ID NO: 97500 - protein, 7 aa, synthetic construct
WGVHERV

SEQ ID NO: 97501 - protein, 7 aa, synthetic construct
NNYTVKC

SEQ ID NO: 97502 - protein, 7 aa, synthetic construct
SIGIMTV

SEQ ID NO: 97503 - protein, 7 aa, synthetic construct
YGTQIHQ

SEQ ID NO: 97504 - protein, 7 aa, synthetic construct
SSELSKG

SEQ ID NO: 97505 - protein, 7 aa, synthetic construct
FPLRYPD

SEQ ID NO: 97506 - protein, 7 aa, synthetic construct
WKDTMKD

SEQ ID NO: 97507 - protein, 7 aa, synthetic construct
MHNMMRG

SEQ ID NO: 97508 - protein, 7 aa, synthetic construct
KQHEVML

SEQ ID NO: 97509 - protein, 7 aa, synthetic construct
SMTHSQQ

SEQ ID NO: 97510 - protein, 7 aa, synthetic construct
NIHGWDP

SEQ ID NO: 97511 - protein, 7 aa, synthetic construct
GKQLKPQ

SEQ ID NO: 97512 - protein, 7 aa, synthetic construct
VSGKHGH

SEQ ID NO: 97513 - protein, 7 aa, synthetic construct
PQPPSRY

SEQ ID NO: 97514 - protein, 7 aa, synthetic construct
PAQHAND

SEQ ID NO: 97515 - protein, 7 aa, synthetic construct
RSPMTKD

SEQ ID NO: 97516 - protein, 7 aa, synthetic construct
IQQYGPK

SEQ ID NO: 97517 - protein, 7 aa, synthetic construct
RSNLVHP

SEQ ID NO: 97518 - protein, 7 aa, synthetic construct
KMKADDK

SEQ ID NO: 97519 - protein, 7 aa, synthetic construct
AGEYLKG

SEQ ID NO: 97520 - protein, 7 aa, synthetic construct
WNGTKAE

SEQ ID NO: 97521 - protein, 7 aa, synthetic construct
YKSTVGV

SEQ ID NO: 97522 - protein, 7 aa, synthetic construct
KVAGPER

SEQ ID NO: 97523 - protein, 7 aa, synthetic construct
KKQFEAD

SEQ ID NO: 97524 - protein, 7 aa, synthetic construct
SMASEIP

SEQ ID NO: 97525 - protein, 7 aa, synthetic construct
TYSQGAM

SEQ ID NO: 97526 - protein, 7 aa, synthetic construct
FQQSSQK

SEQ ID NO: 97527 - protein, 7 aa, synthetic construct
NEKQMTP

SEQ ID NO: 97528 - protein, 7 aa, synthetic construct
WMTLQRE

SEQ ID NO: 97529 - protein, 7 aa, synthetic construct
VEKNEKI

SEQ ID NO: 97530 - protein, 7 aa, synthetic construct
PIVTKSL

SEQ ID NO: 97531 - protein, 7 aa, synthetic construct
EPTRPSE

SEQ ID NO: 97532 - protein, 7 aa, synthetic construct
GEAGQHP

SEQ ID NO: 97533 - protein, 7 aa, synthetic construct
LDAHQKT

SEQ ID NO: 97534 - protein, 7 aa, synthetic construct
PTVARSD

SEQ ID NO: 97535 - protein, 7 aa, synthetic construct
LQLQSAA

SEQ ID NO: 97536 - protein, 7 aa, synthetic construct
PKVMTLD

SEQ ID NO: 97537 - protein, 7 aa, synthetic construct
RRSTDSG

SEQ ID NO: 97538 - protein, 7 aa, synthetic construct
GLLHVHP

SEQ ID NO: 97539 - protein, 7 aa, synthetic construct
LRAPLMA

SEQ ID NO: 97540 - protein, 7 aa, synthetic construct
VGASQHH

SEQ ID NO: 97541 - protein, 7 aa, synthetic construct
APRMTMQ

SEQ ID NO: 97542 - protein, 7 aa, synthetic construct
HITQMEH

SEQ ID NO: 97543 - protein, 7 aa, synthetic construct
ISQHGGS

SEQ ID NO: 97544 - protein, 7 aa, synthetic construct
SNGQLYH

SEQ ID NO: 97545 - protein, 7 aa, synthetic construct
TEYINLP

SEQ ID NO: 97546 - protein, 7 aa, synthetic construct
GRNLVPL

SEQ ID NO: 97547 - protein, 7 aa, synthetic construct
LQRATQM

SEQ ID NO: 97548 - protein, 7 aa, synthetic construct
VWDTAQP

SEQ ID NO: 97549 - protein, 7 aa, synthetic construct
HHYAPER

SEQ ID NO: 97550 - protein, 7 aa, synthetic construct
RRLVPIE

SEQ ID NO: 97551 - protein, 7 aa, synthetic construct
YTHNKNV

SEQ ID NO: 97552 - protein, 7 aa, synthetic construct
ASSIQSY

SEQ ID NO: 97553 - protein, 7 aa, synthetic construct
ADTSHLA

SEQ ID NO: 97554 - protein, 7 aa, synthetic construct
MTQNRGA

SEQ ID NO: 97555 - protein, 7 aa, synthetic construct
KEPNGTM

SEQ ID NO: 97556 - protein, 7 aa, synthetic construct
ENGLGKL

SEQ ID NO: 97557 - protein, 7 aa, synthetic construct
HAFQKPM

SEQ ID NO: 97558 - protein, 7 aa, synthetic construct
TPQKMKD

SEQ ID NO: 97559 - protein, 7 aa, synthetic construct
FWHKADE

SEQ ID NO: 97560 - protein, 7 aa, synthetic construct
SFPVGLE

SEQ ID NO: 97561 - protein, 7 aa, synthetic construct
YSAYEID

SEQ ID NO: 97562 - protein, 7 aa, synthetic construct
KDKDKVA

SEQ ID NO: 97563 - protein, 7 aa, synthetic construct
NTSYGGP

SEQ ID NO: 97564 - protein, 7 aa, synthetic construct
DFYNKVH

SEQ ID NO: 97565 - protein, 7 aa, synthetic construct
WESWKIA

SEQ ID NO: 97566 - protein, 7 aa, synthetic construct
SSDVQTR

SEQ ID NO: 97567 - protein, 7 aa, synthetic construct
MPQWEGA

SEQ ID NO: 97568 - protein, 7 aa, synthetic construct
NQDGYSV

SEQ ID NO: 97569 - protein, 7 aa, synthetic construct
MNAHDYR

SEQ ID NO: 97570 - protein, 7 aa, synthetic construct
REHHHMP

SEQ ID NO: 97571 - protein, 7 aa, synthetic construct
MQYAGTS

SEQ ID NO: 97572 - protein, 7 aa, synthetic construct
PINGTNW

SEQ ID NO: 97573 - protein, 7 aa, synthetic construct
VFIANQA

SEQ ID NO: 97574 - protein, 7 aa, synthetic construct
KQAFNDY

SEQ ID NO: 97575 - protein, 7 aa, synthetic construct
ERWPEQV

SEQ ID NO: 97576 - protein, 7 aa, synthetic construct
LMSPGTP

SEQ ID NO: 97577 - protein, 7 aa, synthetic construct
MTPVPTG

SEQ ID NO: 97578 - protein, 7 aa, synthetic construct
MPPINVI

SEQ ID NO: 97579 - protein, 7 aa, synthetic construct
MQLDKGH

SEQ ID NO: 97580 - protein, 7 aa, synthetic construct
GMQVQIP

SEQ ID NO: 97581 - protein, 7 aa, synthetic construct
EHNAGIS

SEQ ID NO: 97582 - protein, 7 aa, synthetic construct
FADGGSM

SEQ ID NO: 97583 - protein, 7 aa, synthetic construct
GKSLKQP

SEQ ID NO: 97584 - protein, 7 aa, synthetic construct
FGSHMLH

SEQ ID NO: 97585 - protein, 7 aa, synthetic construct
QRKLIPD

SEQ ID NO: 97586 - protein, 7 aa, synthetic construct
PRTSGSP

SEQ ID NO: 97587 - protein, 7 aa, synthetic construct
NAMDFRS

SEQ ID NO: 97588 - protein, 7 aa, synthetic construct
HADPKVQ

SEQ ID NO: 97589 - protein, 7 aa, synthetic construct
TAHMNNI

SEQ ID NO: 97590 - protein, 7 aa, synthetic construct
WKTSDDH

SEQ ID NO: 97591 - protein, 7 aa, synthetic construct
TNNGEPR

SEQ ID NO: 97592 - protein, 7 aa, synthetic construct
INYPTPH

SEQ ID NO: 97593 - protein, 7 aa, synthetic construct
EQHLKPM

SEQ ID NO: 97594 - protein, 7 aa, synthetic construct
HATREQS

SEQ ID NO: 97595 - protein, 7 aa, synthetic construct
REIVGYS

SEQ ID NO: 97596 - protein, 7 aa, synthetic construct
ASAHAMH

SEQ ID NO: 97597 - protein, 7 aa, synthetic construct
EIFGHKN

SEQ ID NO: 97598 - protein, 7 aa, synthetic construct
VHDYNGR

SEQ ID NO: 97599 - protein, 7 aa, synthetic construct
KPTGATM

SEQ ID NO: 97600 - protein, 7 aa, synthetic construct
FVLNASS

SEQ ID NO: 97601 - protein, 7 aa, synthetic construct
TLHHQSL

SEQ ID NO: 97602 - protein, 7 aa, synthetic construct
KGLGMDF

SEQ ID NO: 97603 - protein, 7 aa, synthetic construct
EQAKNNC

SEQ ID NO: 97604 - protein, 7 aa, synthetic construct
PYHAVSG

SEQ ID NO: 97605 - protein, 7 aa, synthetic construct
EGEKQFV

SEQ ID NO: 97606 - protein, 7 aa, synthetic construct
SSAMEHR

SEQ ID NO: 97607 - protein, 7 aa, synthetic construct
VSKFYDP

SEQ ID NO: 97608 - protein, 7 aa, synthetic construct
RHSGPER

SEQ ID NO: 97609 - protein, 7 aa, synthetic construct
YQKTNSP

SEQ ID NO: 97610 - protein, 7 aa, synthetic construct
WKTALSE

SEQ ID NO: 97611 - protein, 7 aa, synthetic construct
HDARMQS

SEQ ID NO: 97612 - protein, 7 aa, synthetic construct
SHPVNHL

SEQ ID NO: 97613 - protein, 7 aa, synthetic construct
VHAGNHF

SEQ ID NO: 97614 - protein, 7 aa, synthetic construct
WLETRHS

SEQ ID NO: 97615 - protein, 7 aa, synthetic construct
KEQKQQE

SEQ ID NO: 97616 - protein, 7 aa, synthetic construct
ISGSAKY

SEQ ID NO: 97617 - protein, 7 aa, synthetic construct
GEHYDKN

SEQ ID NO: 97618 - protein, 7 aa, synthetic construct
IAHVAMH

SEQ ID NO: 97619 - protein, 7 aa, synthetic construct
AQTDHRK

SEQ ID NO: 97620 - protein, 7 aa, synthetic construct
SVPHVFD

SEQ ID NO: 97621 - protein, 7 aa, synthetic construct
KGFASPE

SEQ ID NO: 97622 - protein, 7 aa, synthetic construct
SDMPNSV

SEQ ID NO: 97623 - protein, 7 aa, synthetic construct
YDATSKF

SEQ ID NO: 97624 - protein, 7 aa, synthetic construct
KKNDSAP

SEQ ID NO: 97625 - protein, 7 aa, synthetic construct
LRDQLVN

SEQ ID NO: 97626 - protein, 7 aa, synthetic construct
GYTTDIA

SEQ ID NO: 97627 - protein, 7 aa, synthetic construct
IHMQNIN

SEQ ID NO: 97628 - protein, 7 aa, synthetic construct
KQKWADG

SEQ ID NO: 97629 - protein, 7 aa, synthetic construct
NNKSSNP

SEQ ID NO: 97630 - protein, 7 aa, synthetic construct
WDPVLQS

SEQ ID NO: 97631 - protein, 7 aa, synthetic construct
VDIKSAH

SEQ ID NO: 97632 - protein, 7 aa, synthetic construct
VNNRYVT

SEQ ID NO: 97633 - protein, 7 aa, synthetic construct
QDQKAPF

SEQ ID NO: 97634 - protein, 7 aa, synthetic construct
SGQQNHK

SEQ ID NO: 97635 - protein, 7 aa, synthetic construct
WARSAME

SEQ ID NO: 97636 - protein, 7 aa, synthetic construct
HNRDKMQ

SEQ ID NO: 97637 - protein, 7 aa, synthetic construct
NPRNNGM

SEQ ID NO: 97638 - protein, 7 aa, synthetic construct
SSKNHPQ

SEQ ID NO: 97639 - protein, 7 aa, synthetic construct
NPHERIP

SEQ ID NO: 97640 - protein, 7 aa, synthetic construct
NYGVNMP

SEQ ID NO: 97641 - protein, 7 aa, synthetic construct
INSFRKD

SEQ ID NO: 97642 - protein, 7 aa, synthetic construct
FYPRAQS

SEQ ID NO: 97643 - protein, 7 aa, synthetic construct
VDKLPPS

SEQ ID NO: 97644 - protein, 7 aa, synthetic construct
STISLPA

SEQ ID NO: 97645 - protein, 7 aa, synthetic construct
ARQATQF

SEQ ID NO: 97646 - protein, 7 aa, synthetic construct
IAMRKGE

SEQ ID NO: 97647 - protein, 7 aa, synthetic construct
ASRAQDA

SEQ ID NO: 97648 - protein, 7 aa, synthetic construct
GTGHEMG

SEQ ID NO: 97649 - protein, 7 aa, synthetic construct
GQQQYQT

SEQ ID NO: 97650 - protein, 7 aa, synthetic construct
MGSHMGE

SEQ ID NO: 97651 - protein, 7 aa, synthetic construct
SDKNTIV

SEQ ID NO: 97652 - protein, 7 aa, synthetic construct
WEQGPKS

SEQ ID NO: 97653 - protein, 7 aa, synthetic construct
FNQLVAA

SEQ ID NO: 97654 - protein, 7 aa, synthetic construct
SGPTSQD

SEQ ID NO: 97655 - protein, 7 aa, synthetic construct
NVHTHHH

SEQ ID NO: 97656 - protein, 7 aa, synthetic construct
YLHDNPH

SEQ ID NO: 97657 - protein, 7 aa, synthetic construct
MHNLTKF

SEQ ID NO: 97658 - protein, 7 aa, synthetic construct
GEYMPIK

SEQ ID NO: 97659 - protein, 7 aa, synthetic construct
ERSKSNE

SEQ ID NO: 97660 - protein, 7 aa, synthetic construct
TEHRVQD

SEQ ID NO: 97661 - protein, 7 aa, synthetic construct
FMDAMKV

SEQ ID NO: 97662 - protein, 7 aa, synthetic construct
MLMANEG

SEQ ID NO: 97663 - protein, 7 aa, synthetic construct
IPNPHFA

SEQ ID NO: 97664 - protein, 7 aa, synthetic construct
MDNFIQR

SEQ ID NO: 97665 - protein, 7 aa, synthetic construct
MTSKSTG

SEQ ID NO: 97666 - protein, 7 aa, synthetic construct
KPPEDKA

SEQ ID NO: 97667 - protein, 7 aa, synthetic construct
RPPQYGD

SEQ ID NO: 97668 - protein, 7 aa, synthetic construct
AMEVRRS

SEQ ID NO: 97669 - protein, 7 aa, synthetic construct
TDRKIYS

SEQ ID NO: 97670 - protein, 7 aa, synthetic construct
HFPKGTT

SEQ ID NO: 97671 - protein, 7 aa, synthetic construct
QTFKEAE

SEQ ID NO: 97672 - protein, 7 aa, synthetic construct
GTEHFSG

SEQ ID NO: 97673 - protein, 7 aa, synthetic construct
SANHHMH

SEQ ID NO: 97674 - protein, 7 aa, synthetic construct
MEAWKID

SEQ ID NO: 97675 - protein, 7 aa, synthetic construct
KVQSEAK

SEQ ID NO: 97676 - protein, 7 aa, synthetic construct
SLETMTK

SEQ ID NO: 97677 - protein, 7 aa, synthetic construct
QKSMDSF

SEQ ID NO: 97678 - protein, 7 aa, synthetic construct
AIPKACC

SEQ ID NO: 97679 - protein, 7 aa, synthetic construct
WFKENMT

SEQ ID NO: 97680 - protein, 7 aa, synthetic construct
PTPTKGG

SEQ ID NO: 97681 - protein, 7 aa, synthetic construct
GVFNRFD

SEQ ID NO: 97682 - protein, 7 aa, synthetic construct
TAGFVRQ

SEQ ID NO: 97683 - protein, 7 aa, synthetic construct
IPPSINP

SEQ ID NO: 97684 - protein, 7 aa, synthetic construct
YAHNNHN

SEQ ID NO: 97685 - protein, 7 aa, synthetic construct
EVNNFVA

SEQ ID NO: 97686 - protein, 7 aa, synthetic construct
VAMTNKA

SEQ ID NO: 97687 - protein, 7 aa, synthetic construct
TIQAHDM

SEQ ID NO: 97688 - protein, 7 aa, synthetic construct
QPYHKDS

SEQ ID NO: 97689 - protein, 7 aa, synthetic construct
LGQYLIS

SEQ ID NO: 97690 - protein, 7 aa, synthetic construct
ASQWEDK

SEQ ID NO: 97691 - protein, 7 aa, synthetic construct
IPSFIQA

SEQ ID NO: 97692 - protein, 7 aa, synthetic construct
NHAQHAK

SEQ ID NO: 97693 - protein, 7 aa, synthetic construct
SLTQREE

SEQ ID NO: 97694 - protein, 7 aa, synthetic construct
VHETMLS

SEQ ID NO: 97695 - protein, 7 aa, synthetic construct
GHRDLVS

SEQ ID NO: 97696 - protein, 7 aa, synthetic construct
DFRARPT

SEQ ID NO: 97697 - protein, 7 aa, synthetic construct
LSRDNLI

SEQ ID NO: 97698 - protein, 7 aa, synthetic construct
WNHGTHV

SEQ ID NO: 97699 - protein, 7 aa, synthetic construct
LKMVQQP

SEQ ID NO: 97700 - protein, 7 aa, synthetic construct
QPLLKVD

SEQ ID NO: 97701 - protein, 7 aa, synthetic construct
SSDTKQY

SEQ ID NO: 97702 - protein, 7 aa, synthetic construct
APSETGH

SEQ ID NO: 97703 - protein, 7 aa, synthetic construct
DAWHHDD

SEQ ID NO: 97704 - protein, 7 aa, synthetic construct
VHKPASA

SEQ ID NO: 97705 - protein, 7 aa, synthetic construct
HMPKPLA

SEQ ID NO: 97706 - protein, 7 aa, synthetic construct
GNNAMPH

SEQ ID NO: 97707 - protein, 7 aa, synthetic construct
DLTRLDK

SEQ ID NO: 97708 - protein, 7 aa, synthetic construct
VVKQELA

SEQ ID NO: 97709 - protein, 7 aa, synthetic construct
SLHVTSY

SEQ ID NO: 97710 - protein, 7 aa, synthetic construct
NKMDDTM

SEQ ID NO: 97711 - protein, 7 aa, synthetic construct
VQMQGLA

SEQ ID NO: 97712 - protein, 7 aa, synthetic construct
QAPNSSK

SEQ ID NO: 97713 - protein, 7 aa, synthetic construct
RHYEVSS

SEQ ID NO: 97714 - protein, 7 aa, synthetic construct
HRIDQQH

SEQ ID NO: 97715 - protein, 7 aa, synthetic construct
TVHGQPK

SEQ ID NO: 97716 - protein, 7 aa, synthetic construct
KPTQGSM

SEQ ID NO: 97717 - protein, 7 aa, synthetic construct
EERNLMR

SEQ ID NO: 97718 - protein, 7 aa, synthetic construct
VIPPYGK

SEQ ID NO: 97719 - protein, 7 aa, synthetic construct
SVTVRQT

SEQ ID NO: 97720 - protein, 7 aa, synthetic construct
NSAATTN

SEQ ID NO: 97721 - protein, 7 aa, synthetic construct
MANSNLK

SEQ ID NO: 97722 - protein, 7 aa, synthetic construct
VTTREQI

SEQ ID NO: 97723 - protein, 7 aa, synthetic construct
KSMGKDQ

SEQ ID NO: 97724 - protein, 7 aa, synthetic construct
VELKRTN

SEQ ID NO: 97725 - protein, 7 aa, synthetic construct
ITMGNPH

SEQ ID NO: 97726 - protein, 7 aa, synthetic construct
FGHEGWK

SEQ ID NO: 97727 - protein, 7 aa, synthetic construct
IKLDSQT

SEQ ID NO: 97728 - protein, 7 aa, synthetic construct
GTNAAKT

SEQ ID NO: 97729 - protein, 7 aa, synthetic construct
NGTRHHG

SEQ ID NO: 97730 - protein, 7 aa, synthetic construct
KSPEPIG

SEQ ID NO: 97731 - protein, 7 aa, synthetic construct
HIKQDAG

SEQ ID NO: 97732 - protein, 7 aa, synthetic construct
GSAGSNR

SEQ ID NO: 97733 - protein, 7 aa, synthetic construct
PGAAVAM

SEQ ID NO: 97734 - protein, 7 aa, synthetic construct
RNDTAST

SEQ ID NO: 97735 - protein, 7 aa, synthetic construct
FNITNKS

SEQ ID NO: 97736 - protein, 7 aa, synthetic construct
AGFVQRD

SEQ ID NO: 97737 - protein, 7 aa, synthetic construct
TMHPSTS

SEQ ID NO: 97738 - protein, 7 aa, synthetic construct
FASYNSQ

SEQ ID NO: 97739 - protein, 7 aa, synthetic construct
VNKMDWD

SEQ ID NO: 97740 - protein, 7 aa, synthetic construct
IRNATGD

SEQ ID NO: 97741 - protein, 7 aa, synthetic construct
GRTVPEP

SEQ ID NO: 97742 - protein, 7 aa, synthetic construct
GFFHPEE

SEQ ID NO: 97743 - protein, 7 aa, synthetic construct
DNGKHDK

SEQ ID NO: 97744 - protein, 7 aa, synthetic construct
SNLGKVL

SEQ ID NO: 97745 - protein, 7 aa, synthetic construct
ATQTAVM

SEQ ID NO: 97746 - protein, 7 aa, synthetic construct
SPYQHIE

SEQ ID NO: 97747 - protein, 7 aa, synthetic construct
IVTPGDH

SEQ ID NO: 97748 - protein, 7 aa, synthetic construct
VQYGNQE

SEQ ID NO: 97749 - protein, 7 aa, synthetic construct
NTRQNTW

SEQ ID NO: 97750 - protein, 7 aa, synthetic construct
MDPRYAE

SEQ ID NO: 97751 - protein, 7 aa, synthetic construct
SEFNQAT

SEQ ID NO: 97752 - protein, 7 aa, synthetic construct
GKYPGVS

SEQ ID NO: 97753 - protein, 7 aa, synthetic construct
LGPNSKG

SEQ ID NO: 97754 - protein, 7 aa, synthetic construct
HGNGELS

SEQ ID NO: 97755 - protein, 7 aa, synthetic construct
PHGHSQF

SEQ ID NO: 97756 - protein, 7 aa, synthetic construct
SLHFPQP

SEQ ID NO: 97757 - protein, 7 aa, synthetic construct
AKDNSHF

SEQ ID NO: 97758 - protein, 7 aa, synthetic construct
GATFELR

SEQ ID NO: 97759 - protein, 7 aa, synthetic construct
PFSHQQI

SEQ ID NO: 97760 - protein, 7 aa, synthetic construct
TSQPRGM

SEQ ID NO: 97761 - protein, 7 aa, synthetic construct
GKSVSYN

SEQ ID NO: 97762 - protein, 7 aa, synthetic construct
AAHVPGI

SEQ ID NO: 97763 - protein, 7 aa, synthetic construct
KKDMRMD

SEQ ID NO: 97764 - protein, 7 aa, synthetic construct
VMLQHAS

SEQ ID NO: 97765 - protein, 7 aa, synthetic construct
MTEVIKT

SEQ ID NO: 97766 - protein, 7 aa, synthetic construct
QTKSIEV

SEQ ID NO: 97767 - protein, 7 aa, synthetic construct
SHENAPS

SEQ ID NO: 97768 - protein, 7 aa, synthetic construct
TQAVKAM

SEQ ID NO: 97769 - protein, 7 aa, synthetic construct
FLNATHS

SEQ ID NO: 97770 - protein, 7 aa, synthetic construct
KHGHEII

SEQ ID NO: 97771 - protein, 7 aa, synthetic construct
FPSYVEG

SEQ ID NO: 97772 - protein, 7 aa, synthetic construct
MPPAITM

SEQ ID NO: 97773 - protein, 7 aa, synthetic construct
WMMEMRD

SEQ ID NO: 97774 - protein, 7 aa, synthetic construct
AYNVEKP

SEQ ID NO: 97775 - protein, 7 aa, synthetic construct
DFGSKIV

SEQ ID NO: 97776 - protein, 7 aa, synthetic construct
VSSRIPL

SEQ ID NO: 97777 - protein, 7 aa, synthetic construct
ERIGLNS

SEQ ID NO: 97778 - protein, 7 aa, synthetic construct
YHQLIEN

SEQ ID NO: 97779 - protein, 7 aa, synthetic construct
KLESNAN

SEQ ID NO: 97780 - protein, 7 aa, synthetic construct
MGQLQGI

SEQ ID NO: 97781 - protein, 7 aa, synthetic construct
WANAEGG

SEQ ID NO: 97782 - protein, 7 aa, synthetic construct
EWTQTKT

SEQ ID NO: 97783 - protein, 7 aa, synthetic construct
VKEVAWT

SEQ ID NO: 97784 - protein, 7 aa, synthetic construct
FLGPTDL

SEQ ID NO: 97785 - protein, 7 aa, synthetic construct
DQKSLTP

SEQ ID NO: 97786 - protein, 7 aa, synthetic construct
QNLEIQR

SEQ ID NO: 97787 - protein, 7 aa, synthetic construct
HGFLNME

SEQ ID NO: 97788 - protein, 7 aa, synthetic construct
GGKADDF

SEQ ID NO: 97789 - protein, 7 aa, synthetic construct
NKGPPVN

SEQ ID NO: 97790 - protein, 7 aa, synthetic construct
DAQQNNK

SEQ ID NO: 97791 - protein, 7 aa, synthetic construct
VSNDFSR

SEQ ID NO: 97792 - protein, 7 aa, synthetic construct
HVLTNQH

SEQ ID NO: 97793 - protein, 7 aa, synthetic construct
GKTMGAA

SEQ ID NO: 97794 - protein, 7 aa, synthetic construct
AHSMIKQ

SEQ ID NO: 97795 - protein, 7 aa, synthetic construct
WNQSIIK

SEQ ID NO: 97796 - protein, 7 aa, synthetic construct
TFPSDRR

SEQ ID NO: 97797 - protein, 7 aa, synthetic construct
NNDMRIT

SEQ ID NO: 97798 - protein, 7 aa, synthetic construct
LKADNIY

SEQ ID NO: 97799 - protein, 7 aa, synthetic construct
DYNRQQP

SEQ ID NO: 97800 - protein, 7 aa, synthetic construct
RMRDQSY

SEQ ID NO: 97801 - protein, 7 aa, synthetic construct
QVPMRQT

SEQ ID NO: 97802 - protein, 7 aa, synthetic construct
NKIVSVK

SEQ ID NO: 97803 - protein, 7 aa, synthetic construct
ISHMMTE

SEQ ID NO: 97804 - protein, 7 aa, synthetic construct
SKAWDNT

SEQ ID NO: 97805 - protein, 7 aa, synthetic construct
VNSFERG

SEQ ID NO: 97806 - protein, 7 aa, synthetic construct
KFRTDAE

SEQ ID NO: 97807 - protein, 7 aa, synthetic construct
WVTTAAN

SEQ ID NO: 97808 - protein, 7 aa, synthetic construct
VPKWIEK

SEQ ID NO: 97809 - protein, 7 aa, synthetic construct
HAQHMDA

SEQ ID NO: 97810 - protein, 7 aa, synthetic construct
LLSSTTV

SEQ ID NO: 97811 - protein, 7 aa, synthetic construct
ESSINRY

SEQ ID NO: 97812 - protein, 7 aa, synthetic construct
QHMIPRA

SEQ ID NO: 97813 - protein, 7 aa, synthetic construct
GNHGTTM

SEQ ID NO: 97814 - protein, 7 aa, synthetic construct
QRQVDDV

SEQ ID NO: 97815 - protein, 7 aa, synthetic construct
NIQGWGD

SEQ ID NO: 97816 - protein, 7 aa, synthetic construct
PKPPYDA

SEQ ID NO: 97817 - protein, 7 aa, synthetic construct
GSEKQMN

SEQ ID NO: 97818 - protein, 7 aa, synthetic construct
PKHAGHS

SEQ ID NO: 97819 - protein, 7 aa, synthetic construct
RATTPFH

SEQ ID NO: 97820 - protein, 7 aa, synthetic construct
ATMGTMR

SEQ ID NO: 97821 - protein, 7 aa, synthetic construct
TPKMAPA

SEQ ID NO: 97822 - protein, 7 aa, synthetic construct
KNPLNVP

SEQ ID NO: 97823 - protein, 7 aa, synthetic construct
MLTEPTK

SEQ ID NO: 97824 - protein, 7 aa, synthetic construct
DTWTKNH

SEQ ID NO: 97825 - protein, 7 aa, synthetic construct
KTEAHQF

SEQ ID NO: 97826 - protein, 7 aa, synthetic construct
RQNYREG

SEQ ID NO: 97827 - protein, 7 aa, synthetic construct
GHMGKPL

SEQ ID NO: 97828 - protein, 7 aa, synthetic construct
WPAIVEG

SEQ ID NO: 97829 - protein, 7 aa, synthetic construct
DVRIDMR

SEQ ID NO: 97830 - protein, 7 aa, synthetic construct
KDEGSRN

SEQ ID NO: 97831 - protein, 7 aa, synthetic construct
AIMSTHP

SEQ ID NO: 97832 - protein, 7 aa, synthetic construct
FVDRSQI

SEQ ID NO: 97833 - protein, 7 aa, synthetic construct
FMAEPQG

SEQ ID NO: 97834 - protein, 7 aa, synthetic construct
QLQGMMN

SEQ ID NO: 97835 - protein, 7 aa, synthetic construct
NVDMRMI

SEQ ID NO: 97836 - protein, 7 aa, synthetic construct
AQPGIQV

SEQ ID NO: 97837 - protein, 7 aa, synthetic construct
IGSTLRF

SEQ ID NO: 97838 - protein, 7 aa, synthetic construct
PDPTTRS

SEQ ID NO: 97839 - protein, 7 aa, synthetic construct
APQFPDR

SEQ ID NO: 97840 - protein, 7 aa, synthetic construct
QEHLPKF

SEQ ID NO: 97841 - protein, 7 aa, synthetic construct
QPQAGSR

SEQ ID NO: 97842 - protein, 7 aa, synthetic construct
QPNHDFG

SEQ ID NO: 97843 - protein, 7 aa, synthetic construct
SQNQGEH

SEQ ID NO: 97844 - protein, 7 aa, synthetic construct
KSPTAMS

SEQ ID NO: 97845 - protein, 7 aa, synthetic construct
SHSFTPH

SEQ ID NO: 97846 - protein, 7 aa, synthetic construct
TAVWHEP

SEQ ID NO: 97847 - protein, 7 aa, synthetic construct
YMDEHKL

SEQ ID NO: 97848 - protein, 7 aa, synthetic construct
GKPSNHS

SEQ ID NO: 97849 - protein, 7 aa, synthetic construct
TMQPAIA

SEQ ID NO: 97850 - protein, 7 aa, synthetic construct
GPKLHVI

SEQ ID NO: 97851 - protein, 7 aa, synthetic construct
RDAIKLV

SEQ ID NO: 97852 - protein, 7 aa, synthetic construct
IDKIHQF

SEQ ID NO: 97853 - protein, 7 aa, synthetic construct
FNAASMS

SEQ ID NO: 97854 - protein, 7 aa, synthetic construct
QVQHQQG

SEQ ID NO: 97855 - protein, 7 aa, synthetic construct
RVEKFKD

SEQ ID NO: 97856 - protein, 7 aa, synthetic construct
VHSHSTP

SEQ ID NO: 97857 - protein, 7 aa, synthetic construct
KAVSMVQ

SEQ ID NO: 97858 - protein, 7 aa, synthetic construct
QHNKVYQ

SEQ ID NO: 97859 - protein, 7 aa, synthetic construct
KPSISGV

SEQ ID NO: 97860 - protein, 7 aa, synthetic construct
AHMESPM

SEQ ID NO: 97861 - protein, 7 aa, synthetic construct
PAAHMIL

SEQ ID NO: 97862 - protein, 7 aa, synthetic construct
EPMSRLL

SEQ ID NO: 97863 - protein, 7 aa, synthetic construct
GQSYIVA

SEQ ID NO: 97864 - protein, 7 aa, synthetic construct
YHSRNLA

SEQ ID NO: 97865 - protein, 7 aa, synthetic construct
QATVDTK

SEQ ID NO: 97866 - protein, 7 aa, synthetic construct
PRISSQY

SEQ ID NO: 97867 - protein, 7 aa, synthetic construct
GFHRQTG

SEQ ID NO: 97868 - protein, 7 aa, synthetic construct
RTKPHDA

SEQ ID NO: 97869 - protein, 7 aa, synthetic construct
SGNDGRN

SEQ ID NO: 97870 - protein, 7 aa, synthetic construct
HRNDWEL

SEQ ID NO: 97871 - protein, 7 aa, synthetic construct
MGKDKEP

SEQ ID NO: 97872 - protein, 7 aa, synthetic construct
DTPRAFI

SEQ ID NO: 97873 - protein, 7 aa, synthetic construct
YTTTKPP

SEQ ID NO: 97874 - protein, 7 aa, synthetic construct
AGQVGFP

SEQ ID NO: 97875 - protein, 7 aa, synthetic construct
HASAPQS

SEQ ID NO: 97876 - protein, 7 aa, synthetic construct
CREIKCD

SEQ ID NO: 97877 - protein, 7 aa, synthetic construct
FFDRGHG

SEQ ID NO: 97878 - protein, 7 aa, synthetic construct
SPLKGGT

SEQ ID NO: 97879 - protein, 7 aa, synthetic construct
GDHGFVP

SEQ ID NO: 97880 - protein, 7 aa, synthetic construct
QYPPDGL

SEQ ID NO: 97881 - protein, 7 aa, synthetic construct
VITNVSE

SEQ ID NO: 97882 - protein, 7 aa, synthetic construct
IKQEPLA

SEQ ID NO: 97883 - protein, 7 aa, synthetic construct
GTMNRLD

SEQ ID NO: 97884 - protein, 7 aa, synthetic construct
PGGTTKA

SEQ ID NO: 97885 - protein, 7 aa, synthetic construct
VQATGQR

SEQ ID NO: 97886 - protein, 7 aa, synthetic construct
MMSREIG

SEQ ID NO: 97887 - protein, 7 aa, synthetic construct
RNQMDER

SEQ ID NO: 97888 - protein, 7 aa, synthetic construct
HQNDRHD

SEQ ID NO: 97889 - protein, 7 aa, synthetic construct
PDHQSMG

SEQ ID NO: 97890 - protein, 7 aa, synthetic construct
INGRYEH

SEQ ID NO: 97891 - protein, 7 aa, synthetic construct
LRFGDQM

SEQ ID NO: 97892 - protein, 7 aa, synthetic construct
TDKSVSA

SEQ ID NO: 97893 - protein, 7 aa, synthetic construct
SSNGKKD

SEQ ID NO: 97894 - protein, 7 aa, synthetic construct
FALQKDA

SEQ ID NO: 97895 - protein, 7 aa, synthetic construct
QKGWSVS

SEQ ID NO: 97896 - protein, 7 aa, synthetic construct
NHGNPKY

SEQ ID NO: 97897 - protein, 7 aa, synthetic construct
FKKEIKD

SEQ ID NO: 97898 - protein, 7 aa, synthetic construct
LRDYQSR

SEQ ID NO: 97899 - protein, 7 aa, synthetic construct
GQHVTRM

SEQ ID NO: 97900 - protein, 7 aa, synthetic construct
GPYVHME

SEQ ID NO: 97901 - protein, 7 aa, synthetic construct
SSSNNNE

SEQ ID NO: 97902 - protein, 7 aa, synthetic construct
LFKTTVN

SEQ ID NO: 97903 - protein, 7 aa, synthetic construct
EHRTTVW

SEQ ID NO: 97904 - protein, 7 aa, synthetic construct
HAMDHEM

SEQ ID NO: 97905 - protein, 7 aa, synthetic construct
GEQSGKT

SEQ ID NO: 97906 - protein, 7 aa, synthetic construct
KGPPIVL

SEQ ID NO: 97907 - protein, 7 aa, synthetic construct
TQTGGTF

SEQ ID NO: 97908 - protein, 7 aa, synthetic construct
ERNAMVI

SEQ ID NO: 97909 - protein, 7 aa, synthetic construct
GTNQRDI

SEQ ID NO: 97910 - protein, 7 aa, synthetic construct
GKTMESM

SEQ ID NO: 97911 - protein, 7 aa, synthetic construct
PRGEIPM

SEQ ID NO: 97912 - protein, 7 aa, synthetic construct
VHFSMKD

SEQ ID NO: 97913 - protein, 7 aa, synthetic construct
QGDQRSA

SEQ ID NO: 97914 - protein, 7 aa, synthetic construct
ANTNGIL

SEQ ID NO: 97915 - protein, 7 aa, synthetic construct
KAKDNQW

SEQ ID NO: 97916 - protein, 7 aa, synthetic construct
IDNQHRE

SEQ ID NO: 97917 - protein, 7 aa, synthetic construct
SVRDARV

SEQ ID NO: 97918 - protein, 7 aa, synthetic construct
SSWQPGA

SEQ ID NO: 97919 - protein, 7 aa, synthetic construct
HAMIEQK

SEQ ID NO: 97920 - protein, 7 aa, synthetic construct
NPQVKHL

SEQ ID NO: 97921 - protein, 7 aa, synthetic construct
FVHSGNN

SEQ ID NO: 97922 - protein, 7 aa, synthetic construct
SSNMKEA

SEQ ID NO: 97923 - protein, 7 aa, synthetic construct
MTNQDQY

SEQ ID NO: 97924 - protein, 7 aa, synthetic construct
RSQMDRT

SEQ ID NO: 97925 - protein, 7 aa, synthetic construct
SIGYNDA

SEQ ID NO: 97926 - protein, 7 aa, synthetic construct
HRSDQDT

SEQ ID NO: 97927 - protein, 7 aa, synthetic construct
KSMQLVG

SEQ ID NO: 97928 - protein, 7 aa, synthetic construct
PMMHMEL

SEQ ID NO: 97929 - protein, 7 aa, synthetic construct
HIIPTIG

SEQ ID NO: 97930 - protein, 7 aa, synthetic construct
SMEYITA

SEQ ID NO: 97931 - protein, 7 aa, synthetic construct
TRQLIAP

SEQ ID NO: 97932 - protein, 7 aa, synthetic construct
MNVYVPS

SEQ ID NO: 97933 - protein, 7 aa, synthetic construct
MMNPGHL

SEQ ID NO: 97934 - protein, 7 aa, synthetic construct
NRMFDHE

SEQ ID NO: 97935 - protein, 7 aa, synthetic construct
PSQKANA

SEQ ID NO: 97936 - protein, 7 aa, synthetic construct
MKALNEY

SEQ ID NO: 97937 - protein, 7 aa, synthetic construct
KKHDARE

SEQ ID NO: 97938 - protein, 7 aa, synthetic construct
NPHFADR

SEQ ID NO: 97939 - protein, 7 aa, synthetic construct
GNTDVTT

SEQ ID NO: 97940 - protein, 7 aa, synthetic construct
GIRMLDK

SEQ ID NO: 97941 - protein, 7 aa, synthetic construct
WMAENDS

SEQ ID NO: 97942 - protein, 7 aa, synthetic construct
PVLASAS

SEQ ID NO: 97943 - protein, 7 aa, synthetic construct
PHMKVSE

SEQ ID NO: 97944 - protein, 7 aa, synthetic construct
YTHNEQF

SEQ ID NO: 97945 - protein, 7 aa, synthetic construct
WDKNRGV

SEQ ID NO: 97946 - protein, 7 aa, synthetic construct
FEGSRNH

SEQ ID NO: 97947 - protein, 7 aa, synthetic construct
FRAEQAY

SEQ ID NO: 97948 - protein, 7 aa, synthetic construct
ALKEHQT

SEQ ID NO: 97949 - protein, 7 aa, synthetic construct
SMLKSHM

SEQ ID NO: 97950 - protein, 7 aa, synthetic construct
FKTSTDA

SEQ ID NO: 97951 - protein, 7 aa, synthetic construct
VYSHSSV

SEQ ID NO: 97952 - protein, 7 aa, synthetic construct
TMQNQII

SEQ ID NO: 97953 - protein, 7 aa, synthetic construct
ATMKNQE

SEQ ID NO: 97954 - protein, 7 aa, synthetic construct
FPIAGPT

SEQ ID NO: 97955 - protein, 7 aa, synthetic construct
LVRETDW

SEQ ID NO: 97956 - protein, 7 aa, synthetic construct
SDKEFKA

SEQ ID NO: 97957 - protein, 7 aa, synthetic construct
NRVDHEH

SEQ ID NO: 97958 - protein, 7 aa, synthetic construct
VRYENEM

SEQ ID NO: 97959 - protein, 7 aa, synthetic construct
QNPPMKA

SEQ ID NO: 97960 - protein, 7 aa, synthetic construct
GREMPTI

SEQ ID NO: 97961 - protein, 7 aa, synthetic construct
KYTPQFN

SEQ ID NO: 97962 - protein, 7 aa, synthetic construct
SHNHANG

SEQ ID NO: 97963 - protein, 7 aa, synthetic construct
AGTIRGH

SEQ ID NO: 97964 - protein, 7 aa, synthetic construct
WMDAKPH

SEQ ID NO: 97965 - protein, 7 aa, synthetic construct
PSGEYRM

SEQ ID NO: 97966 - protein, 7 aa, synthetic construct
ASMHYKD

SEQ ID NO: 97967 - protein, 7 aa, synthetic construct
MTGSVQT

SEQ ID NO: 97968 - protein, 7 aa, synthetic construct
LKINYDR

SEQ ID NO: 97969 - protein, 7 aa, synthetic construct
DRGWEIE

SEQ ID NO: 97970 - protein, 7 aa, synthetic construct
TTPSIVR

SEQ ID NO: 97971 - protein, 7 aa, synthetic construct
TTNKSFA

SEQ ID NO: 97972 - protein, 7 aa, synthetic construct
WQADVQH

SEQ ID NO: 97973 - protein, 7 aa, synthetic construct
GVGPHYS

SEQ ID NO: 97974 - protein, 7 aa, synthetic construct
RQNTSNH

SEQ ID NO: 97975 - protein, 7 aa, synthetic construct
PTMKMQH

SEQ ID NO: 97976 - protein, 7 aa, synthetic construct
KYHDEQI

SEQ ID NO: 97977 - protein, 7 aa, synthetic construct
QDHFSNK

SEQ ID NO: 97978 - protein, 7 aa, synthetic construct
LNINTVV

SEQ ID NO: 97979 - protein, 7 aa, synthetic construct
APKLSTD

SEQ ID NO: 97980 - protein, 7 aa, synthetic construct
PSAADWK

SEQ ID NO: 97981 - protein, 7 aa, synthetic construct
PTHPSTF

SEQ ID NO: 97982 - protein, 7 aa, synthetic construct
RTADNSV

SEQ ID NO: 97983 - protein, 7 aa, synthetic construct
KLTGISI

SEQ ID NO: 97984 - protein, 7 aa, synthetic construct
YQGNTHW

SEQ ID NO: 97985 - protein, 7 aa, synthetic construct
HVKAEPL

SEQ ID NO: 97986 - protein, 7 aa, synthetic construct
QFMTVEA

SEQ ID NO: 97987 - protein, 7 aa, synthetic construct
PMANHRD

SEQ ID NO: 97988 - protein, 7 aa, synthetic construct
SPMPMMK

SEQ ID NO: 97989 - protein, 7 aa, synthetic construct
KHNIEAT

SEQ ID NO: 97990 - protein, 7 aa, synthetic construct
WGVHKQI

SEQ ID NO: 97991 - protein, 7 aa, synthetic construct
YKPEARQ

SEQ ID NO: 97992 - protein, 7 aa, synthetic construct
TQGQKAG

SEQ ID NO: 97993 - protein, 7 aa, synthetic construct
QVYEGRI

SEQ ID NO: 97994 - protein, 7 aa, synthetic construct
KAIEGGW

SEQ ID NO: 97995 - protein, 7 aa, synthetic construct
MSKDYRQ

SEQ ID NO: 97996 - protein, 7 aa, synthetic construct
HNTQDTR

SEQ ID NO: 97997 - protein, 7 aa, synthetic construct
ISKAFLN

SEQ ID NO: 97998 - protein, 7 aa, synthetic construct
NPSQKYG

SEQ ID NO: 97999 - protein, 7 aa, synthetic construct
HGNGKMN

SEQ ID NO: 98000 - protein, 7 aa, synthetic construct
ADAVKLQ

SEQ ID NO: 98001 - protein, 7 aa, synthetic construct
IMDLAKV

SEQ ID NO: 98002 - protein, 7 aa, synthetic construct
TSEYRIV

SEQ ID NO: 98003 - protein, 7 aa, synthetic construct
NMVSGVV

SEQ ID NO: 98004 - protein, 7 aa, synthetic construct
VASKTAY

SEQ ID NO: 98005 - protein, 7 aa, synthetic construct
TDHKHSN

SEQ ID NO: 98006 - protein, 7 aa, synthetic construct
KENNVFK

SEQ ID NO: 98007 - protein, 7 aa, synthetic construct
RVDLVNE

SEQ ID NO: 98008 - protein, 7 aa, synthetic construct
TPAMQVD

SEQ ID NO: 98009 - protein, 7 aa, synthetic construct
YEKKFNS

SEQ ID NO: 98010 - protein, 7 aa, synthetic construct
ADRKGTQ

SEQ ID NO: 98011 - protein, 7 aa, synthetic construct
PEKIKDA

SEQ ID NO: 98012 - protein, 7 aa, synthetic construct
DLWHMEP

SEQ ID NO: 98013 - protein, 7 aa, synthetic construct
HASEQHY

SEQ ID NO: 98014 - protein, 7 aa, synthetic construct
IENHVFK

SEQ ID NO: 98015 - protein, 7 aa, synthetic construct
AHMVLAS

SEQ ID NO: 98016 - protein, 7 aa, synthetic construct
RAIPDYK

SEQ ID NO: 98017 - protein, 7 aa, synthetic construct
RLSYQEH

SEQ ID NO: 98018 - protein, 7 aa, synthetic construct
YQKHETP

SEQ ID NO: 98019 - protein, 7 aa, synthetic construct
TLYNAAG

SEQ ID NO: 98020 - protein, 7 aa, synthetic construct
FAADTTN

SEQ ID NO: 98021 - protein, 7 aa, synthetic construct
TGGRKIE

SEQ ID NO: 98022 - protein, 7 aa, synthetic construct
DILERMG

SEQ ID NO: 98023 - protein, 7 aa, synthetic construct
RMQNGNA

SEQ ID NO: 98024 - protein, 7 aa, synthetic construct
LKAQNLL

SEQ ID NO: 98025 - protein, 7 aa, synthetic construct
RTQTDNT

SEQ ID NO: 98026 - protein, 7 aa, synthetic construct
KDDKVPS

SEQ ID NO: 98027 - protein, 7 aa, synthetic construct
NMAKSGI

SEQ ID NO: 98028 - protein, 7 aa, synthetic construct
SVPNMMY

SEQ ID NO: 98029 - protein, 7 aa, synthetic construct
NHRGAAY

SEQ ID NO: 98030 - protein, 7 aa, synthetic construct
MSAHKVF

SEQ ID NO: 98031 - protein, 7 aa, synthetic construct
GQMIGHS

SEQ ID NO: 98032 - protein, 7 aa, synthetic construct
LERRYEN

SEQ ID NO: 98033 - protein, 7 aa, synthetic construct
MATTVNF

SEQ ID NO: 98034 - protein, 7 aa, synthetic construct
ISHSSVM

SEQ ID NO: 98035 - protein, 7 aa, synthetic construct
ANDFTVM

SEQ ID NO: 98036 - protein, 7 aa, synthetic construct
SPPQLER

SEQ ID NO: 98037 - protein, 7 aa, synthetic construct
LNMVIGS

SEQ ID NO: 98038 - protein, 7 aa, synthetic construct
LGFNRAT

SEQ ID NO: 98039 - protein, 7 aa, synthetic construct
TVGMMNE

SEQ ID NO: 98040 - protein, 7 aa, synthetic construct
AQKPGMW

SEQ ID NO: 98041 - protein, 7 aa, synthetic construct
LGDMKTA

SEQ ID NO: 98042 - protein, 7 aa, synthetic construct
RIHYGEP

SEQ ID NO: 98043 - protein, 7 aa, synthetic construct
PMMDQRS

SEQ ID NO: 98044 - protein, 7 aa, synthetic construct
NSSHILT

SEQ ID NO: 98045 - protein, 7 aa, synthetic construct
NGSKNSA

SEQ ID NO: 98046 - protein, 7 aa, synthetic construct
DVELSRM

SEQ ID NO: 98047 - protein, 7 aa, synthetic construct
FQGIPLG

SEQ ID NO: 98048 - protein, 7 aa, synthetic construct
GIAQLKE

SEQ ID NO: 98049 - protein, 7 aa, synthetic construct
KDQNSQK

SEQ ID NO: 98050 - protein, 7 aa, synthetic construct
QQKYDDD

SEQ ID NO: 98051 - protein, 7 aa, synthetic construct
TTHNGRL

SEQ ID NO: 98052 - protein, 7 aa, synthetic construct
GHTVDQI

SEQ ID NO: 98053 - protein, 7 aa, synthetic construct
QHPASRF

SEQ ID NO: 98054 - protein, 7 aa, synthetic construct
VHTHAVL

SEQ ID NO: 98055 - protein, 7 aa, synthetic construct
FVTKFSA

SEQ ID NO: 98056 - protein, 7 aa, synthetic construct
WSQEATR

SEQ ID NO: 98057 - protein, 7 aa, synthetic construct
TIPFIRD

SEQ ID NO: 98058 - protein, 7 aa, synthetic construct
FKKETKD

SEQ ID NO: 98059 - protein, 7 aa, synthetic construct
FSDLIHP

SEQ ID NO: 98060 - protein, 7 aa, synthetic construct
PRHAQAL

SEQ ID NO: 98061 - protein, 7 aa, synthetic construct
YLAGNVN

SEQ ID NO: 98062 - protein, 7 aa, synthetic construct
SKTEGPK

SEQ ID NO: 98063 - protein, 7 aa, synthetic construct
SIVIPAD

SEQ ID NO: 98064 - protein, 7 aa, synthetic construct
INKKSEE

SEQ ID NO: 98065 - protein, 7 aa, synthetic construct
TMVTPKC

SEQ ID NO: 98066 - protein, 7 aa, synthetic construct
DKTIHIK

SEQ ID NO: 98067 - protein, 7 aa, synthetic construct
SVNAPTG

SEQ ID NO: 98068 - protein, 7 aa, synthetic construct
VSATHAI

SEQ ID NO: 98069 - protein, 7 aa, synthetic construct
GIFFTED

SEQ ID NO: 98070 - protein, 7 aa, synthetic construct
IGPEWRT

SEQ ID NO: 98071 - protein, 7 aa, synthetic construct
HEGYAIV

SEQ ID NO: 98072 - protein, 7 aa, synthetic construct
WPRQTER

SEQ ID NO: 98073 - protein, 7 aa, synthetic construct
FGNPDHR

SEQ ID NO: 98074 - protein, 7 aa, synthetic construct
LAYIATP

SEQ ID NO: 98075 - protein, 7 aa, synthetic construct
VQQERPY

SEQ ID NO: 98076 - protein, 7 aa, synthetic construct
LNHDMHR

SEQ ID NO: 98077 - protein, 7 aa, synthetic construct
PQATHSE

SEQ ID NO: 98078 - protein, 7 aa, synthetic construct
GNHVPLQ

SEQ ID NO: 98079 - protein, 7 aa, synthetic construct
TIHNMQI

SEQ ID NO: 98080 - protein, 7 aa, synthetic construct
QNGKNVE

SEQ ID NO: 98081 - protein, 7 aa, synthetic construct
VHNVVVK

SEQ ID NO: 98082 - protein, 7 aa, synthetic construct
GVYDPAR

SEQ ID NO: 98083 - protein, 7 aa, synthetic construct
HFSRTPV

SEQ ID NO: 98084 - protein, 7 aa, synthetic construct
NRSPERL

SEQ ID NO: 98085 - protein, 7 aa, synthetic construct
IKPEMTT

SEQ ID NO: 98086 - protein, 7 aa, synthetic construct
DLDVKAH

SEQ ID NO: 98087 - protein, 7 aa, synthetic construct
MKAHQLY

SEQ ID NO: 98088 - protein, 7 aa, synthetic construct
TDISRGL

SEQ ID NO: 98089 - protein, 7 aa, synthetic construct
QYGSSGP

SEQ ID NO: 98090 - protein, 7 aa, synthetic construct
NYYVKDP

SEQ ID NO: 98091 - protein, 7 aa, synthetic construct
HVFGSME

SEQ ID NO: 98092 - protein, 7 aa, synthetic construct
ESRLAFK

SEQ ID NO: 98093 - protein, 7 aa, synthetic construct
KTSQNQN

SEQ ID NO: 98094 - protein, 7 aa, synthetic construct
PTPTHSF

SEQ ID NO: 98095 - protein, 7 aa, synthetic construct
PKHGENE

SEQ ID NO: 98096 - protein, 7 aa, synthetic construct
RTDLQDL

SEQ ID NO: 98097 - protein, 7 aa, synthetic construct
RPQSNTV

SEQ ID NO: 98098 - protein, 7 aa, synthetic construct
NKETQAH

SEQ ID NO: 98099 - protein, 7 aa, synthetic construct
EKNLANL

SEQ ID NO: 98100 - protein, 7 aa, synthetic construct
YASTYHE

SEQ ID NO: 98101 - protein, 7 aa, synthetic construct
KWEKTGL

SEQ ID NO: 98102 - protein, 7 aa, synthetic construct
WVTNKIT

SEQ ID NO: 98103 - protein, 7 aa, synthetic construct
MITTPNR

SEQ ID NO: 98104 - protein, 7 aa, synthetic construct
VDPRWQD

SEQ ID NO: 98105 - protein, 7 aa, synthetic construct
SIAAVKY

SEQ ID NO: 98106 - protein, 7 aa, synthetic construct
WHKTDPL

SEQ ID NO: 98107 - protein, 7 aa, synthetic construct
MNTGNNP

SEQ ID NO: 98108 - protein, 7 aa, synthetic construct
TAIDHVR

SEQ ID NO: 98109 - protein, 7 aa, synthetic construct
KTALPEP

SEQ ID NO: 98110 - protein, 7 aa, synthetic construct
HSSRTDF

SEQ ID NO: 98111 - protein, 7 aa, synthetic construct
FKHDWER

SEQ ID NO: 98112 - protein, 7 aa, synthetic construct
TMASTKG

SEQ ID NO: 98113 - protein, 7 aa, synthetic construct
QKEHQFN

SEQ ID NO: 98114 - protein, 7 aa, synthetic construct
FQGLSTL

SEQ ID NO: 98115 - protein, 7 aa, synthetic construct
HDGYKEK

SEQ ID NO: 98116 - protein, 7 aa, synthetic construct
PNNPADH

SEQ ID NO: 98117 - protein, 7 aa, synthetic construct
TQAAVSP

SEQ ID NO: 98118 - protein, 7 aa, synthetic construct
YQPMPKN

SEQ ID NO: 98119 - protein, 7 aa, synthetic construct
LENSKIG

SEQ ID NO: 98120 - protein, 7 aa, synthetic construct
MNTNVPT

SEQ ID NO: 98121 - protein, 7 aa, synthetic construct
SVAREAK

SEQ ID NO: 98122 - protein, 7 aa, synthetic construct
GKPITMY

SEQ ID NO: 98123 - protein, 7 aa, synthetic construct
LAPGQTL

SEQ ID NO: 98124 - protein, 7 aa, synthetic construct
IWNKMEI

SEQ ID NO: 98125 - protein, 7 aa, synthetic construct
KTMTGTA

SEQ ID NO: 98126 - protein, 7 aa, synthetic construct
TPRPTEN

SEQ ID NO: 98127 - protein, 7 aa, synthetic construct
YVEHTPR

SEQ ID NO: 98128 - protein, 7 aa, synthetic construct
EYSNISR

SEQ ID NO: 98129 - protein, 7 aa, synthetic construct
GNSDFPT

SEQ ID NO: 98130 - protein, 7 aa, synthetic construct
MNINVHR

SEQ ID NO: 98131 - protein, 7 aa, synthetic construct
KFGHGDR

SEQ ID NO: 98132 - protein, 7 aa, synthetic construct
GHALGPM

SEQ ID NO: 98133 - protein, 7 aa, synthetic construct
IGLSQNS

SEQ ID NO: 98134 - protein, 7 aa, synthetic construct
SYNEDKY

SEQ ID NO: 98135 - protein, 7 aa, synthetic construct
PGGHRFE

SEQ ID NO: 98136 - protein, 7 aa, synthetic construct
KKDSYAA

SEQ ID NO: 98137 - protein, 7 aa, synthetic construct
PVVPAKA

SEQ ID NO: 98138 - protein, 7 aa, synthetic construct
DRKFDPS

SEQ ID NO: 98139 - protein, 7 aa, synthetic construct
MGDREKP

SEQ ID NO: 98140 - protein, 7 aa, synthetic construct
YHGQFNI

SEQ ID NO: 98141 - protein, 7 aa, synthetic construct
GEYAGVR

SEQ ID NO: 98142 - protein, 7 aa, synthetic construct
HKLPEDP

SEQ ID NO: 98143 - protein, 7 aa, synthetic construct
QITLNSL

SEQ ID NO: 98144 - protein, 7 aa, synthetic construct
PGANARA

SEQ ID NO: 98145 - protein, 7 aa, synthetic construct
YSHRVEA

SEQ ID NO: 98146 - protein, 7 aa, synthetic construct
QKAMRET

SEQ ID NO: 98147 - protein, 7 aa, synthetic construct
FNENRHI

SEQ ID NO: 98148 - protein, 7 aa, synthetic construct
NNKVFTT

SEQ ID NO: 98149 - protein, 7 aa, synthetic construct
DSRIVEL

SEQ ID NO: 98150 - protein, 7 aa, synthetic construct
YTSGYSV

SEQ ID NO: 98151 - protein, 7 aa, synthetic construct
MNNKSTG

SEQ ID NO: 98152 - protein, 7 aa, synthetic construct
AGYLGKG

SEQ ID NO: 98153 - protein, 7 aa, synthetic construct
WSTQTPF

SEQ ID NO: 98154 - protein, 7 aa, synthetic construct
QWKTVTD

SEQ ID NO: 98155 - protein, 7 aa, synthetic construct
QPAPMKI

SEQ ID NO: 98156 - protein, 7 aa, synthetic construct
QHNMPKH

SEQ ID NO: 98157 - protein, 7 aa, synthetic construct
MLKMHMP

SEQ ID NO: 98158 - protein, 7 aa, synthetic construct
RGQVVAD

SEQ ID NO: 98159 - protein, 7 aa, synthetic construct
PVHMVEK

SEQ ID NO: 98160 - protein, 7 aa, synthetic construct
FTNQVKY

SEQ ID NO: 98161 - protein, 7 aa, synthetic construct
GHVQNPK

SEQ ID NO: 98162 - protein, 7 aa, synthetic construct
SREHFIE

SEQ ID NO: 98163 - protein, 7 aa, synthetic construct
DRSSDNI

SEQ ID NO: 98164 - protein, 7 aa, synthetic construct
QPGLQFT

SEQ ID NO: 98165 - protein, 7 aa, synthetic construct
KQYTQDE

SEQ ID NO: 98166 - protein, 7 aa, synthetic construct
MPPQLAD

SEQ ID NO: 98167 - protein, 7 aa, synthetic construct
SGEKNMK

SEQ ID NO: 98168 - protein, 7 aa, synthetic construct
GVFGEGF

SEQ ID NO: 98169 - protein, 7 aa, synthetic construct
KASLINP

SEQ ID NO: 98170 - protein, 7 aa, synthetic construct
ALATNQR

SEQ ID NO: 98171 - protein, 7 aa, synthetic construct
GHSTYPQ

SEQ ID NO: 98172 - protein, 7 aa, synthetic construct
NHKNHNV

SEQ ID NO: 98173 - protein, 7 aa, synthetic construct
IASQHFS

SEQ ID NO: 98174 - protein, 7 aa, synthetic construct
PITDRKV

SEQ ID NO: 98175 - protein, 7 aa, synthetic construct
QRKDMGP

SEQ ID NO: 98176 - protein, 7 aa, synthetic construct
AFGHGGK

SEQ ID NO: 98177 - protein, 7 aa, synthetic construct
DKQQRNS

SEQ ID NO: 98178 - protein, 7 aa, synthetic construct
HSRAPTI

SEQ ID NO: 98179 - protein, 7 aa, synthetic construct
SPGMDQV

SEQ ID NO: 98180 - protein, 7 aa, synthetic construct
GPNQNDF

SEQ ID NO: 98181 - protein, 7 aa, synthetic construct
MNAVPKN

SEQ ID NO: 98182 - protein, 7 aa, synthetic construct
IVMHTVP

SEQ ID NO: 98183 - protein, 7 aa, synthetic construct
DPEKIVG

SEQ ID NO: 98184 - protein, 7 aa, synthetic construct
LTQSHVS

SEQ ID NO: 98185 - protein, 7 aa, synthetic construct
RGPTEGW

SEQ ID NO: 98186 - protein, 7 aa, synthetic construct
WQRDKPQ

SEQ ID NO: 98187 - protein, 7 aa, synthetic construct
RPVQMDG

SEQ ID NO: 98188 - protein, 7 aa, synthetic construct
YNYKFEE

SEQ ID NO: 98189 - protein, 7 aa, synthetic construct
HQREAGT

SEQ ID NO: 98190 - protein, 7 aa, synthetic construct
STFQHER

SEQ ID NO: 98191 - protein, 7 aa, synthetic construct
WTNKRDY

SEQ ID NO: 98192 - protein, 7 aa, synthetic construct
EIGVKNK

SEQ ID NO: 98193 - protein, 7 aa, synthetic construct
DLSHPGG

SEQ ID NO: 98194 - protein, 7 aa, synthetic construct
MPSHIIG

SEQ ID NO: 98195 - protein, 7 aa, synthetic construct
YSPTDFG

SEQ ID NO: 98196 - protein, 7 aa, synthetic construct
NLLNPYK

SEQ ID NO: 98197 - protein, 7 aa, synthetic construct
GERRDAI

SEQ ID NO: 98198 - protein, 7 aa, synthetic construct
DHKTAWS

SEQ ID NO: 98199 - protein, 7 aa, synthetic construct
GYTQVET

SEQ ID NO: 98200 - protein, 7 aa, synthetic construct
VGKSMKE

SEQ ID NO: 98201 - protein, 7 aa, synthetic construct
YVNVPLG

SEQ ID NO: 98202 - protein, 7 aa, synthetic construct
TADHVNH

SEQ ID NO: 98203 - protein, 7 aa, synthetic construct
VRDYIHD

SEQ ID NO: 98204 - protein, 7 aa, synthetic construct
HPNNGGK

SEQ ID NO: 98205 - protein, 7 aa, synthetic construct
SFTHSED

SEQ ID NO: 98206 - protein, 7 aa, synthetic construct
PRLSSDE

SEQ ID NO: 98207 - protein, 7 aa, synthetic construct
KDTDHFR

SEQ ID NO: 98208 - protein, 7 aa, synthetic construct
RFDIHEP

SEQ ID NO: 98209 - protein, 7 aa, synthetic construct
RDYAKAP

SEQ ID NO: 98210 - protein, 7 aa, synthetic construct
KEHRPPY

SEQ ID NO: 98211 - protein, 7 aa, synthetic construct
EHFKTHE

SEQ ID NO: 98212 - protein, 7 aa, synthetic construct
PTGSVAF

SEQ ID NO: 98213 - protein, 7 aa, synthetic construct
KNRDGME

SEQ ID NO: 98214 - protein, 7 aa, synthetic construct
RAYDTGH

SEQ ID NO: 98215 - protein, 7 aa, synthetic construct
VPPDFRI

SEQ ID NO: 98216 - protein, 7 aa, synthetic construct
RTEKIQQ

SEQ ID NO: 98217 - protein, 7 aa, synthetic construct
EYRKGEA

SEQ ID NO: 98218 - protein, 7 aa, synthetic construct
NLTASGS

SEQ ID NO: 98219 - protein, 7 aa, synthetic construct
IGELTSQ

SEQ ID NO: 98220 - protein, 7 aa, synthetic construct
TRVEENK

SEQ ID NO: 98221 - protein, 7 aa, synthetic construct
SAYEIKP

SEQ ID NO: 98222 - protein, 7 aa, synthetic construct
WSGEGYA

SEQ ID NO: 98223 - protein, 7 aa, synthetic construct
QVIQEHA

SEQ ID NO: 98224 - protein, 7 aa, synthetic construct
HTHHQME

SEQ ID NO: 98225 - protein, 7 aa, synthetic construct
DHHVAAA

SEQ ID NO: 98226 - protein, 7 aa, synthetic construct
SAVLGQN

SEQ ID NO: 98227 - protein, 7 aa, synthetic construct
SLNKFYE

SEQ ID NO: 98228 - protein, 7 aa, synthetic construct
DGHLREA

SEQ ID NO: 98229 - protein, 7 aa, synthetic construct
MHLNEAV

SEQ ID NO: 98230 - protein, 7 aa, synthetic construct
PMAHRDK

SEQ ID NO: 98231 - protein, 7 aa, synthetic construct
YEHKHQM

SEQ ID NO: 98232 - protein, 7 aa, synthetic construct
PLGDQKV

SEQ ID NO: 98233 - protein, 7 aa, synthetic construct
YLHHIPT

SEQ ID NO: 98234 - protein, 7 aa, synthetic construct
SSDTRHT

SEQ ID NO: 98235 - protein, 7 aa, synthetic construct
SLMKAMV

SEQ ID NO: 98236 - protein, 7 aa, synthetic construct
MSKMTLT

SEQ ID NO: 98237 - protein, 7 aa, synthetic construct
DYSNARN

SEQ ID NO: 98238 - protein, 7 aa, synthetic construct
HFTDMNP

SEQ ID NO: 98239 - protein, 7 aa, synthetic construct
NRNEWQD

SEQ ID NO: 98240 - protein, 7 aa, synthetic construct
MFDHDSG

SEQ ID NO: 98241 - protein, 7 aa, synthetic construct
DVLRDKY

SEQ ID NO: 98242 - protein, 7 aa, synthetic construct
PVQEEKR

SEQ ID NO: 98243 - protein, 7 aa, synthetic construct
SIFPDKI

SEQ ID NO: 98244 - protein, 7 aa, synthetic construct
VGMSGAV

SEQ ID NO: 98245 - protein, 7 aa, synthetic construct
HTGHGQW

SEQ ID NO: 98246 - protein, 7 aa, synthetic construct
SKHLFAE

SEQ ID NO: 98247 - protein, 7 aa, synthetic construct
NLMTTQK

SEQ ID NO: 98248 - protein, 7 aa, synthetic construct
TYHPTPS

SEQ ID NO: 98249 - protein, 7 aa, synthetic construct
RPPVQDI

SEQ ID NO: 98250 - protein, 7 aa, synthetic construct
DANLTSK

SEQ ID NO: 98251 - protein, 7 aa, synthetic construct
SAFMGSV

SEQ ID NO: 98252 - protein, 7 aa, synthetic construct
VHETRGL

SEQ ID NO: 98253 - protein, 7 aa, synthetic construct
LLHKYME

SEQ ID NO: 98254 - protein, 7 aa, synthetic construct
QRTAESG

SEQ ID NO: 98255 - protein, 7 aa, synthetic construct
LMEKKMF

SEQ ID NO: 98256 - protein, 7 aa, synthetic construct
QRIAVVA

SEQ ID NO: 98257 - protein, 7 aa, synthetic construct
GKFVDLV

SEQ ID NO: 98258 - protein, 7 aa, synthetic construct
FYNETID

SEQ ID NO: 98259 - protein, 7 aa, synthetic construct
QDPHSKF

SEQ ID NO: 98260 - protein, 7 aa, synthetic construct
SELDRGF

SEQ ID NO: 98261 - protein, 7 aa, synthetic construct
NFGTPSH

SEQ ID NO: 98262 - protein, 7 aa, synthetic construct
ASPIIQS

SEQ ID NO: 98263 - protein, 7 aa, synthetic construct
IHLHEKN

SEQ ID NO: 98264 - protein, 7 aa, synthetic construct
PRSLVAS

SEQ ID NO: 98265 - protein, 7 aa, synthetic construct
FPFPEMD

SEQ ID NO: 98266 - protein, 7 aa, synthetic construct
GVQKSIA

SEQ ID NO: 98267 - protein, 7 aa, synthetic construct
ADNRQAE

SEQ ID NO: 98268 - protein, 7 aa, synthetic construct
QQATQVK

SEQ ID NO: 98269 - protein, 7 aa, synthetic construct
ATNEQNH

SEQ ID NO: 98270 - protein, 7 aa, synthetic construct
ILKKTSP

SEQ ID NO: 98271 - protein, 7 aa, synthetic construct
RSREEEI

SEQ ID NO: 98272 - protein, 7 aa, synthetic construct
NTEPAKP

SEQ ID NO: 98273 - protein, 7 aa, synthetic construct
DYRAMPK

SEQ ID NO: 98274 - protein, 7 aa, synthetic construct
HSPRNEV

SEQ ID NO: 98275 - protein, 7 aa, synthetic construct
SQSVKLE

SEQ ID NO: 98276 - protein, 7 aa, synthetic construct
VTGREIQ

SEQ ID NO: 98277 - protein, 7 aa, synthetic construct
VLAHRIG

SEQ ID NO: 98278 - protein, 7 aa, synthetic construct
GSHHYQE

SEQ ID NO: 98279 - protein, 7 aa, synthetic construct
GPRVSAV

SEQ ID NO: 98280 - protein, 7 aa, synthetic construct
IPSGTRP

SEQ ID NO: 98281 - protein, 7 aa, synthetic construct
DMPKFKE

SEQ ID NO: 98282 - protein, 7 aa, synthetic construct
MQNHQDK

SEQ ID NO: 98283 - protein, 7 aa, synthetic construct
DHPGKRA

SEQ ID NO: 98284 - protein, 7 aa, synthetic construct
MSLGMLG

SEQ ID NO: 98285 - protein, 7 aa, synthetic construct
TEHGASW

SEQ ID NO: 98286 - protein, 7 aa, synthetic construct
QADHSIM

SEQ ID NO: 98287 - protein, 7 aa, synthetic construct
YLTNPMV

SEQ ID NO: 98288 - protein, 7 aa, synthetic construct
NNVLIVD

SEQ ID NO: 98289 - protein, 7 aa, synthetic construct
QLDMGTR

SEQ ID NO: 98290 - protein, 7 aa, synthetic construct
VYGQNTP

SEQ ID NO: 98291 - protein, 7 aa, synthetic construct
WISMPDS

SEQ ID NO: 98292 - protein, 7 aa, synthetic construct
NRTNDQG

SEQ ID NO: 98293 - protein, 7 aa, synthetic construct
PQNVVEK

SEQ ID NO: 98294 - protein, 7 aa, synthetic construct
LGDTIRA

SEQ ID NO: 98295 - protein, 7 aa, synthetic construct
MVKEGDR

SEQ ID NO: 98296 - protein, 7 aa, synthetic construct
TPLMEMR

SEQ ID NO: 98297 - protein, 7 aa, synthetic construct
RMNNTQG

SEQ ID NO: 98298 - protein, 7 aa, synthetic construct
MTEKRSF

SEQ ID NO: 98299 - protein, 7 aa, synthetic construct
EMVNTTH

SEQ ID NO: 98300 - protein, 7 aa, synthetic construct
YPIAGNQ

SEQ ID NO: 98301 - protein, 7 aa, synthetic construct
YTSREMH

SEQ ID NO: 98302 - protein, 7 aa, synthetic construct
KQTYQQV

SEQ ID NO: 98303 - protein, 7 aa, synthetic construct
TLSREIK

SEQ ID NO: 98304 - protein, 7 aa, synthetic construct
GAKPSAW

SEQ ID NO: 98305 - protein, 7 aa, synthetic construct
HPIGLVK

SEQ ID NO: 98306 - protein, 7 aa, synthetic construct
VEGHSSW

SEQ ID NO: 98307 - protein, 7 aa, synthetic construct
FNQMITK

SEQ ID NO: 98308 - protein, 7 aa, synthetic construct
SIQNRAE

SEQ ID NO: 98309 - protein, 7 aa, synthetic construct
HPDLQHR

SEQ ID NO: 98310 - protein, 7 aa, synthetic construct
PTFNKGH

SEQ ID NO: 98311 - protein, 7 aa, synthetic construct
AMDSRNA

SEQ ID NO: 98312 - protein, 7 aa, synthetic construct
DVQSNVK

SEQ ID NO: 98313 - protein, 7 aa, synthetic construct
ERHTKLP

SEQ ID NO: 98314 - protein, 7 aa, synthetic construct
ANNGRSW

SEQ ID NO: 98315 - protein, 7 aa, synthetic construct
MYTKERH

SEQ ID NO: 98316 - protein, 7 aa, synthetic construct
GLLRTQH

SEQ ID NO: 98317 - protein, 7 aa, synthetic construct
FQGIVLP

SEQ ID NO: 98318 - protein, 7 aa, synthetic construct
PISIRTN

SEQ ID NO: 98319 - protein, 7 aa, synthetic construct
TKLTFPS

SEQ ID NO: 98320 - protein, 7 aa, synthetic construct
SSPVTFE

SEQ ID NO: 98321 - protein, 7 aa, synthetic construct
FYGNMAK

SEQ ID NO: 98322 - protein, 7 aa, synthetic construct
KPNGGIS

SEQ ID NO: 98323 - protein, 7 aa, synthetic construct
RDRNNQE

SEQ ID NO: 98324 - protein, 7 aa, synthetic construct
LGQGSDF

SEQ ID NO: 98325 - protein, 7 aa, synthetic construct
QAAGNNT

SEQ ID NO: 98326 - protein, 7 aa, synthetic construct
NLMQAKS

SEQ ID NO: 98327 - protein, 7 aa, synthetic construct
FDRLHVQ

SEQ ID NO: 98328 - protein, 7 aa, synthetic construct
YTDFTQL

SEQ ID NO: 98329 - protein, 7 aa, synthetic construct
KNMNGAH

SEQ ID NO: 98330 - protein, 7 aa, synthetic construct
MNMQHQI

SEQ ID NO: 98331 - protein, 7 aa, synthetic construct
YTDFGHG

SEQ ID NO: 98332 - protein, 7 aa, synthetic construct
SPPNAKA

SEQ ID NO: 98333 - protein, 7 aa, synthetic construct
TGQGYGD

SEQ ID NO: 98334 - protein, 7 aa, synthetic construct
RNQTQMY

SEQ ID NO: 98335 - protein, 7 aa, synthetic construct
KASPLYS

SEQ ID NO: 98336 - protein, 7 aa, synthetic construct
NVSLKTG

SEQ ID NO: 98337 - protein, 7 aa, synthetic construct
YVPGSMR

SEQ ID NO: 98338 - protein, 7 aa, synthetic construct
HPMPDPQ

SEQ ID NO: 98339 - protein, 7 aa, synthetic construct
YGQPGEA

SEQ ID NO: 98340 - protein, 7 aa, synthetic construct
THNRGFP

SEQ ID NO: 98341 - protein, 7 aa, synthetic construct
VMQNMTI

SEQ ID NO: 98342 - protein, 7 aa, synthetic construct
AGDKKIW

SEQ ID NO: 98343 - protein, 7 aa, synthetic construct
YVRMDTM

SEQ ID NO: 98344 - protein, 7 aa, synthetic construct
YRIDPEV

SEQ ID NO: 98345 - protein, 7 aa, synthetic construct
NTGYGEH

SEQ ID NO: 98346 - protein, 7 aa, synthetic construct
SMISTQS

SEQ ID NO: 98347 - protein, 7 aa, synthetic construct
NNIDGSL

SEQ ID NO: 98348 - protein, 7 aa, synthetic construct
QPHQNFY

SEQ ID NO: 98349 - protein, 7 aa, synthetic construct
AKPQNHS

SEQ ID NO: 98350 - protein, 7 aa, synthetic construct
AVGPKNW

SEQ ID NO: 98351 - protein, 7 aa, synthetic construct
VYYNTGP

SEQ ID NO: 98352 - protein, 7 aa, synthetic construct
AIGPPMA

SEQ ID NO: 98353 - protein, 7 aa, synthetic construct
EGVFVNK

SEQ ID NO: 98354 - protein, 7 aa, synthetic construct
GLSHVIA

SEQ ID NO: 98355 - protein, 7 aa, synthetic construct
MFDHQAP

SEQ ID NO: 98356 - protein, 7 aa, synthetic construct
IGGHYNA

SEQ ID NO: 98357 - protein, 7 aa, synthetic construct
HNQISGK

SEQ ID NO: 98358 - protein, 7 aa, synthetic construct
RKELYHA

SEQ ID NO: 98359 - protein, 7 aa, synthetic construct
KKDQPQM

SEQ ID NO: 98360 - protein, 7 aa, synthetic construct
PHRDDGS

SEQ ID NO: 98361 - protein, 7 aa, synthetic construct
PMTQKGI

SEQ ID NO: 98362 - protein, 7 aa, synthetic construct
PISVSHA

SEQ ID NO: 98363 - protein, 7 aa, synthetic construct
LGPELRQ

SEQ ID NO: 98364 - protein, 7 aa, synthetic construct
WNIRTSA

SEQ ID NO: 98365 - protein, 7 aa, synthetic construct
NTRSNSP

SEQ ID NO: 98366 - protein, 7 aa, synthetic construct
KKEPDHP

SEQ ID NO: 98367 - protein, 7 aa, synthetic construct
LEPSYQG

SEQ ID NO: 98368 - protein, 7 aa, synthetic construct
ALTGPHQ

SEQ ID NO: 98369 - protein, 7 aa, synthetic construct
SAPGVLV

SEQ ID NO: 98370 - protein, 7 aa, synthetic construct
EGYRKES

SEQ ID NO: 98371 - protein, 7 aa, synthetic construct
REKLVSS

SEQ ID NO: 98372 - protein, 7 aa, synthetic construct
AIPQDNP

SEQ ID NO: 98373 - protein, 7 aa, synthetic construct
DQRPAAA

SEQ ID NO: 98374 - protein, 7 aa, synthetic construct
HQMDRGI

SEQ ID NO: 98375 - protein, 7 aa, synthetic construct
VNKQGQI

SEQ ID NO: 98376 - protein, 7 aa, synthetic construct
HLPHNAA

SEQ ID NO: 98377 - protein, 7 aa, synthetic construct
FGKQVAD

SEQ ID NO: 98378 - protein, 7 aa, synthetic construct
LGHEWPR

SEQ ID NO: 98379 - protein, 7 aa, synthetic construct
KSSSMKE

SEQ ID NO: 98380 - protein, 7 aa, synthetic construct
DNSAHTP

SEQ ID NO: 98381 - protein, 7 aa, synthetic construct
WAEFGQD

SEQ ID NO: 98382 - protein, 7 aa, synthetic construct
KVYHGMP

SEQ ID NO: 98383 - protein, 7 aa, synthetic construct
NRSQHFT

SEQ ID NO: 98384 - protein, 7 aa, synthetic construct
TIIPIND

SEQ ID NO: 98385 - protein, 7 aa, synthetic construct
VGKVYSE

SEQ ID NO: 98386 - protein, 7 aa, synthetic construct
HMNMSVV

SEQ ID NO: 98387 - protein, 7 aa, synthetic construct
GQSHETR

SEQ ID NO: 98388 - protein, 7 aa, synthetic construct
ANIRAIQ

SEQ ID NO: 98389 - protein, 7 aa, synthetic construct
SYKTFEK

SEQ ID NO: 98390 - protein, 7 aa, synthetic construct
QAYGASD

SEQ ID NO: 98391 - protein, 7 aa, synthetic construct
DRISNDM

SEQ ID NO: 98392 - protein, 7 aa, synthetic construct
TRMAALV

SEQ ID NO: 98393 - protein, 7 aa, synthetic construct
NFKDPHM

SEQ ID NO: 98394 - protein, 7 aa, synthetic construct
PDQGQTS

SEQ ID NO: 98395 - protein, 7 aa, synthetic construct
SNDVFHP

SEQ ID NO: 98396 - protein, 7 aa, synthetic construct
RLGVGLM

SEQ ID NO: 98397 - protein, 7 aa, synthetic construct
VLDRQKH

SEQ ID NO: 98398 - protein, 7 aa, synthetic construct
DKYLQVS

SEQ ID NO: 98399 - protein, 7 aa, synthetic construct
AFKGDIN

SEQ ID NO: 98400 - protein, 7 aa, synthetic construct
VQVSTDK

SEQ ID NO: 98401 - protein, 7 aa, synthetic construct
IDRQVGF

SEQ ID NO: 98402 - protein, 7 aa, synthetic construct
NQGRSTV

SEQ ID NO: 98403 - protein, 7 aa, synthetic construct
HSNGVPL

SEQ ID NO: 98404 - protein, 7 aa, synthetic construct
KKEMRSE

SEQ ID NO: 98405 - protein, 7 aa, synthetic construct
QSLAKPY

SEQ ID NO: 98406 - protein, 7 aa, synthetic construct
SAWNGNP

SEQ ID NO: 98407 - protein, 7 aa, synthetic construct
PKMQDVI

SEQ ID NO: 98408 - protein, 7 aa, synthetic construct
EKQFGFA

SEQ ID NO: 98409 - protein, 7 aa, synthetic construct
PGVVKGI

SEQ ID NO: 98410 - protein, 7 aa, synthetic construct
VDNQKAR

SEQ ID NO: 98411 - protein, 7 aa, synthetic construct
PSARQAE

SEQ ID NO: 98412 - protein, 7 aa, synthetic construct
PYRMDVG

SEQ ID NO: 98413 - protein, 7 aa, synthetic construct
MLAQLPK

SEQ ID NO: 98414 - protein, 7 aa, synthetic construct
SITDPIT

SEQ ID NO: 98415 - protein, 7 aa, synthetic construct
KVIGVEK

SEQ ID NO: 98416 - protein, 7 aa, synthetic construct
TAMDRLT

SEQ ID NO: 98417 - protein, 7 aa, synthetic construct
MQDYNNV

SEQ ID NO: 98418 - protein, 7 aa, synthetic construct
SDKIMSR

SEQ ID NO: 98419 - protein, 7 aa, synthetic construct
IPMVTVS

SEQ ID NO: 98420 - protein, 7 aa, synthetic construct
KSDRTIT

SEQ ID NO: 98421 - protein, 7 aa, synthetic construct
MASVHQT

SEQ ID NO: 98422 - protein, 7 aa, synthetic construct
KDMNLGT

SEQ ID NO: 98423 - protein, 7 aa, synthetic construct
PKNTQSP

SEQ ID NO: 98424 - protein, 7 aa, synthetic construct
VSDLRGN

SEQ ID NO: 98425 - protein, 7 aa, synthetic construct
GEFNMIP

SEQ ID NO: 98426 - protein, 7 aa, synthetic construct
KPQDMGM

SEQ ID NO: 98427 - protein, 7 aa, synthetic construct
VGRPGQP

SEQ ID NO: 98428 - protein, 7 aa, synthetic construct
LIGTSEF

SEQ ID NO: 98429 - protein, 7 aa, synthetic construct
GGQMVTI

SEQ ID NO: 98430 - protein, 7 aa, synthetic construct
HASIMKV

SEQ ID NO: 98431 - protein, 7 aa, synthetic construct
MRDKEYM

SEQ ID NO: 98432 - protein, 7 aa, synthetic construct
GQNGYNR

SEQ ID NO: 98433 - protein, 7 aa, synthetic construct
IHHFATA

SEQ ID NO: 98434 - protein, 7 aa, synthetic construct
PISGSNR

SEQ ID NO: 98435 - protein, 7 aa, synthetic construct
NNGAIPM

SEQ ID NO: 98436 - protein, 7 aa, synthetic construct
GHSWKDE

SEQ ID NO: 98437 - protein, 7 aa, synthetic construct
STSGVLV

SEQ ID NO: 98438 - protein, 7 aa, synthetic construct
KEKTDYM

SEQ ID NO: 98439 - protein, 7 aa, synthetic construct
HRASVDN

SEQ ID NO: 98440 - protein, 7 aa, synthetic construct
GKTNGAS

SEQ ID NO: 98441 - protein, 7 aa, synthetic construct
WAHKMPI

SEQ ID NO: 98442 - protein, 7 aa, synthetic construct
NHGENKP

SEQ ID NO: 98443 - protein, 7 aa, synthetic construct
NDSILGR

SEQ ID NO: 98444 - protein, 7 aa, synthetic construct
RMQQERD

SEQ ID NO: 98445 - protein, 7 aa, synthetic construct
SNPGTEI

SEQ ID NO: 98446 - protein, 7 aa, synthetic construct
GSQVRPV

SEQ ID NO: 98447 - protein, 7 aa, synthetic construct
HWNPDKL

SEQ ID NO: 98448 - protein, 7 aa, synthetic construct
KVQEFGP

SEQ ID NO: 98449 - protein, 7 aa, synthetic construct
DNMASSR

SEQ ID NO: 98450 - protein, 7 aa, synthetic construct
FNKPNYA

SEQ ID NO: 98451 - protein, 7 aa, synthetic construct
QIVMASP

SEQ ID NO: 98452 - protein, 7 aa, synthetic construct
KMQSPPF

SEQ ID NO: 98453 - protein, 7 aa, synthetic construct
PVEKETI

SEQ ID NO: 98454 - protein, 7 aa, synthetic construct
FQKETRF

SEQ ID NO: 98455 - protein, 7 aa, synthetic construct
TFHREMV

SEQ ID NO: 98456 - protein, 7 aa, synthetic construct
PKSPSFA

SEQ ID NO: 98457 - protein, 7 aa, synthetic construct
IVSKRHE

SEQ ID NO: 98458 - protein, 7 aa, synthetic construct
MITLETP

SEQ ID NO: 98459 - protein, 7 aa, synthetic construct
QWNNINS

SEQ ID NO: 98460 - protein, 7 aa, synthetic construct
QDFSSAV

SEQ ID NO: 98461 - protein, 7 aa, synthetic construct
LSQYMTH

SEQ ID NO: 98462 - protein, 7 aa, synthetic construct
INPAVHR

SEQ ID NO: 98463 - protein, 7 aa, synthetic construct
ERGKFGF

SEQ ID NO: 98464 - protein, 7 aa, synthetic construct
KQDAGNL

SEQ ID NO: 98465 - protein, 7 aa, synthetic construct
GPLVKQV

SEQ ID NO: 98466 - protein, 7 aa, synthetic construct
PRHTNAE

SEQ ID NO: 98467 - protein, 7 aa, synthetic construct
HDAPTHG

SEQ ID NO: 98468 - protein, 7 aa, synthetic construct
ISSMQTS

SEQ ID NO: 98469 - protein, 7 aa, synthetic construct
YAVLHAD

SEQ ID NO: 98470 - protein, 7 aa, synthetic construct
DHGKLTV

SEQ ID NO: 98471 - protein, 7 aa, synthetic construct
NSMNHQG

SEQ ID NO: 98472 - protein, 7 aa, synthetic construct
NDRSMQV

SEQ ID NO: 98473 - protein, 7 aa, synthetic construct
NNHKNLV

SEQ ID NO: 98474 - protein, 7 aa, synthetic construct
RIEDPYN

SEQ ID NO: 98475 - protein, 7 aa, synthetic construct
HMPKMHM

SEQ ID NO: 98476 - protein, 7 aa, synthetic construct
NYESNNM

SEQ ID NO: 98477 - protein, 7 aa, synthetic construct
ARMGVMA

SEQ ID NO: 98478 - protein, 7 aa, synthetic construct
NIPLAVV

SEQ ID NO: 98479 - protein, 7 aa, synthetic construct
HRNNTLF

SEQ ID NO: 98480 - protein, 7 aa, synthetic construct
ITSPMGA

SEQ ID NO: 98481 - protein, 7 aa, synthetic construct
TPGPMNQ

SEQ ID NO: 98482 - protein, 7 aa, synthetic construct
GGLDSDF

SEQ ID NO: 98483 - protein, 7 aa, synthetic construct
NEKSIEL

SEQ ID NO: 98484 - protein, 7 aa, synthetic construct
NKLLQIA

SEQ ID NO: 98485 - protein, 7 aa, synthetic construct
SMSRPNY

SEQ ID NO: 98486 - protein, 7 aa, synthetic construct
GGLPHGR

SEQ ID NO: 98487 - protein, 7 aa, synthetic construct
WGGPRDT

SEQ ID NO: 98488 - protein, 7 aa, synthetic construct
GNRMEFL

SEQ ID NO: 98489 - protein, 7 aa, synthetic construct
VEEKREK

SEQ ID NO: 98490 - protein, 7 aa, synthetic construct
KVARELA

SEQ ID NO: 98491 - protein, 7 aa, synthetic construct
TAAFHGP

SEQ ID NO: 98492 - protein, 7 aa, synthetic construct
KAYDTIF

SEQ ID NO: 98493 - protein, 7 aa, synthetic construct
YVKSHQH

SEQ ID NO: 98494 - protein, 7 aa, synthetic construct
IENYGSP

SEQ ID NO: 98495 - protein, 7 aa, synthetic construct
PYGSSMR

SEQ ID NO: 98496 - protein, 7 aa, synthetic construct
MHDQGHM

SEQ ID NO: 98497 - protein, 7 aa, synthetic construct
AELKQEG

SEQ ID NO: 98498 - protein, 7 aa, synthetic construct
IDQVSKV

SEQ ID NO: 98499 - protein, 7 aa, synthetic construct
IGNVTAW

SEQ ID NO: 98500 - protein, 7 aa, synthetic construct
AEYKMPD

SEQ ID NO: 98501 - protein, 7 aa, synthetic construct
LPIKDHS

SEQ ID NO: 98502 - protein, 7 aa, synthetic construct
HMAGGGA

SEQ ID NO: 98503 - protein, 7 aa, synthetic construct
MHHDSGT

SEQ ID NO: 98504 - protein, 7 aa, synthetic construct
LGREYNE

SEQ ID NO: 98505 - protein, 7 aa, synthetic construct
WVATTTE

SEQ ID NO: 98506 - protein, 7 aa, synthetic construct
EPISYGR

SEQ ID NO: 98507 - protein, 7 aa, synthetic construct
YQGVTIV

SEQ ID NO: 98508 - protein, 7 aa, synthetic construct
IRQTEQE

SEQ ID NO: 98509 - protein, 7 aa, synthetic construct
VSDKIGA

SEQ ID NO: 98510 - protein, 7 aa, synthetic construct
QKGEPAW

SEQ ID NO: 98511 - protein, 7 aa, synthetic construct
NSIQKAI

SEQ ID NO: 98512 - protein, 7 aa, synthetic construct
PGKSFDA

SEQ ID NO: 98513 - protein, 7 aa, synthetic construct
GQHQMYP

SEQ ID NO: 98514 - protein, 7 aa, synthetic construct
QPHAQHF

SEQ ID NO: 98515 - protein, 7 aa, synthetic construct
YIPKMTQ

SEQ ID NO: 98516 - protein, 7 aa, synthetic construct
GTWAKID

SEQ ID NO: 98517 - protein, 7 aa, synthetic construct
VPKSVNG

SEQ ID NO: 98518 - protein, 7 aa, synthetic construct
FTITGQT

SEQ ID NO: 98519 - protein, 7 aa, synthetic construct
TSGYAAK

SEQ ID NO: 98520 - protein, 7 aa, synthetic construct
VKDQQNP

SEQ ID NO: 98521 - protein, 7 aa, synthetic construct
MQHNHVE

SEQ ID NO: 98522 - protein, 7 aa, synthetic construct
PSDNKVT

SEQ ID NO: 98523 - protein, 7 aa, synthetic construct
EQVKHGT

SEQ ID NO: 98524 - protein, 7 aa, synthetic construct
MGQHAAP

SEQ ID NO: 98525 - protein, 7 aa, synthetic construct
TAQAINV

SEQ ID NO: 98526 - protein, 7 aa, synthetic construct
RTNLMMA

SEQ ID NO: 98527 - protein, 7 aa, synthetic construct
YKPMDTH

SEQ ID NO: 98528 - protein, 7 aa, synthetic construct
PKDLHRE

SEQ ID NO: 98529 - protein, 7 aa, synthetic construct
HSIPQNL

SEQ ID NO: 98530 - protein, 7 aa, synthetic construct
AKTEHKA

SEQ ID NO: 98531 - protein, 7 aa, synthetic construct
TMTSHIN

SEQ ID NO: 98532 - protein, 7 aa, synthetic construct
YLAADTR

SEQ ID NO: 98533 - protein, 7 aa, synthetic construct
YAAGTMG

SEQ ID NO: 98534 - protein, 7 aa, synthetic construct
IMTPLSN

SEQ ID NO: 98535 - protein, 7 aa, synthetic construct
QPSTYDR

SEQ ID NO: 98536 - protein, 7 aa, synthetic construct
FEKINLH

SEQ ID NO: 98537 - protein, 7 aa, synthetic construct
SHTRRDP

SEQ ID NO: 98538 - protein, 7 aa, synthetic construct
QEGFKYH

SEQ ID NO: 98539 - protein, 7 aa, synthetic construct
DGEGRFG

SEQ ID NO: 98540 - protein, 7 aa, synthetic construct
APSVSFK

SEQ ID NO: 98541 - protein, 7 aa, synthetic construct
KPNFDTY

SEQ ID NO: 98542 - protein, 7 aa, synthetic construct
EFNRGIM

SEQ ID NO: 98543 - protein, 7 aa, synthetic construct
HGPAGMP

SEQ ID NO: 98544 - protein, 7 aa, synthetic construct
NGAGRSI

SEQ ID NO: 98545 - protein, 7 aa, synthetic construct
FQHGESN

SEQ ID NO: 98546 - protein, 7 aa, synthetic construct
MKTNLMV

SEQ ID NO: 98547 - protein, 7 aa, synthetic construct
NSKTAQA

SEQ ID NO: 98548 - protein, 7 aa, synthetic construct
HNNVQAM

SEQ ID NO: 98549 - protein, 7 aa, synthetic construct
VPYHRVD

SEQ ID NO: 98550 - protein, 7 aa, synthetic construct
GPARFEF

SEQ ID NO: 98551 - protein, 7 aa, synthetic construct
VEGPRTH

SEQ ID NO: 98552 - protein, 7 aa, synthetic construct
YVAKLES

SEQ ID NO: 98553 - protein, 7 aa, synthetic construct
HIPAMAM

SEQ ID NO: 98554 - protein, 7 aa, synthetic construct
TKAFAFE

SEQ ID NO: 98555 - protein, 7 aa, synthetic construct
PDTGRRD

SEQ ID NO: 98556 - protein, 7 aa, synthetic construct
AAEHART

SEQ ID NO: 98557 - protein, 7 aa, synthetic construct
TMHDPTI

SEQ ID NO: 98558 - protein, 7 aa, synthetic construct
RYTGDHQ

SEQ ID NO: 98559 - protein, 7 aa, synthetic construct
QLHAILG

SEQ ID NO: 98560 - protein, 7 aa, synthetic construct
MKTSTAS

SEQ ID NO: 98561 - protein, 7 aa, synthetic construct
KKEDDHI

SEQ ID NO: 98562 - protein, 7 aa, synthetic construct
MVQTNEF

SEQ ID NO: 98563 - protein, 7 aa, synthetic construct
LHPKEIS

SEQ ID NO: 98564 - protein, 7 aa, synthetic construct
TKMHYNH

SEQ ID NO: 98565 - protein, 7 aa, synthetic construct
VWNGVPQ

SEQ ID NO: 98566 - protein, 7 aa, synthetic construct
HSSKDQV

SEQ ID NO: 98567 - protein, 7 aa, synthetic construct
TYTINPG

SEQ ID NO: 98568 - protein, 7 aa, synthetic construct
EVPFAHV

SEQ ID NO: 98569 - protein, 7 aa, synthetic construct
GDPVYSY

SEQ ID NO: 98570 - protein, 7 aa, synthetic construct
YNVNIAP

SEQ ID NO: 98571 - protein, 7 aa, synthetic construct
FEDRNVP

SEQ ID NO: 98572 - protein, 7 aa, synthetic construct
EQPHFQV

SEQ ID NO: 98573 - protein, 7 aa, synthetic construct
QYPTNNG

SEQ ID NO: 98574 - protein, 7 aa, synthetic construct
NAKMQAM

SEQ ID NO: 98575 - protein, 7 aa, synthetic construct
DKFVGKF

SEQ ID NO: 98576 - protein, 7 aa, synthetic construct
INGMQSF

SEQ ID NO: 98577 - protein, 7 aa, synthetic construct
RHDNNHQ

SEQ ID NO: 98578 - protein, 7 aa, synthetic construct
FRNGLFE

SEQ ID NO: 98579 - protein, 7 aa, synthetic construct
SNHKLVF

SEQ ID NO: 98580 - protein, 7 aa, synthetic construct
TKEHINA

SEQ ID NO: 98581 - protein, 7 aa, synthetic construct
SVKYELA

SEQ ID NO: 98582 - protein, 7 aa, synthetic construct
KMAAPDM

SEQ ID NO: 98583 - protein, 7 aa, synthetic construct
RPFTTAP

SEQ ID NO: 98584 - protein, 7 aa, synthetic construct
MIRHHHD

SEQ ID NO: 98585 - protein, 7 aa, synthetic construct
IKIDFGT

SEQ ID NO: 98586 - protein, 7 aa, synthetic construct
MSDRVTL

SEQ ID NO: 98587 - protein, 7 aa, synthetic construct
SNLLPRP

SEQ ID NO: 98588 - protein, 7 aa, synthetic construct
TMTVSLP

SEQ ID NO: 98589 - protein, 7 aa, synthetic construct
DGSGERK

SEQ ID NO: 98590 - protein, 7 aa, synthetic construct
FNHPEVH

SEQ ID NO: 98591 - protein, 7 aa, synthetic construct
MDYSKIV

SEQ ID NO: 98592 - protein, 7 aa, synthetic construct
HSTTFQL

SEQ ID NO: 98593 - protein, 7 aa, synthetic construct
CKPNVCF

SEQ ID NO: 98594 - protein, 7 aa, synthetic construct
GYNTILH

SEQ ID NO: 98595 - protein, 7 aa, synthetic construct
IDHTNKT

SEQ ID NO: 98596 - protein, 7 aa, synthetic construct
SYQGMVM

SEQ ID NO: 98597 - protein, 7 aa, synthetic construct
NVMYMRE

SEQ ID NO: 98598 - protein, 7 aa, synthetic construct
PTGNATH

SEQ ID NO: 98599 - protein, 7 aa, synthetic construct
FQEHHGK

SEQ ID NO: 98600 - protein, 7 aa, synthetic construct
EASVSFR

SEQ ID NO: 98601 - protein, 7 aa, synthetic construct
IWKTDTT

SEQ ID NO: 98602 - protein, 7 aa, synthetic construct
DSLSEHR

SEQ ID NO: 98603 - protein, 7 aa, synthetic construct
GQQMAAV

SEQ ID NO: 98604 - protein, 7 aa, synthetic construct
PMNASFA

SEQ ID NO: 98605 - protein, 7 aa, synthetic construct
STGRTNL

SEQ ID NO: 98606 - protein, 7 aa, synthetic construct
GVPVPLE

SEQ ID NO: 98607 - protein, 7 aa, synthetic construct
QQIQEKA

SEQ ID NO: 98608 - protein, 7 aa, synthetic construct
GKNPTAG

SEQ ID NO: 98609 - protein, 7 aa, synthetic construct
SLIKPSL

SEQ ID NO: 98610 - protein, 7 aa, synthetic construct
NKAMQKE

SEQ ID NO: 98611 - protein, 7 aa, synthetic construct
RPLDMGN

SEQ ID NO: 98612 - protein, 7 aa, synthetic construct
RMVEVGA

SEQ ID NO: 98613 - protein, 7 aa, synthetic construct
HDNIMRD

SEQ ID NO: 98614 - protein, 7 aa, synthetic construct
RLEPKAM

SEQ ID NO: 98615 - protein, 7 aa, synthetic construct
GHKKPDD

SEQ ID NO: 98616 - protein, 7 aa, synthetic construct
DQKGEGA

SEQ ID NO: 98617 - protein, 7 aa, synthetic construct
MDRFTGQ

SEQ ID NO: 98618 - protein, 7 aa, synthetic construct
GTMQQAN

SEQ ID NO: 98619 - protein, 7 aa, synthetic construct
HFGVLNE

SEQ ID NO: 98620 - protein, 7 aa, synthetic construct
TKTKEMQ

SEQ ID NO: 98621 - protein, 7 aa, synthetic construct
VHDIVLG

SEQ ID NO: 98622 - protein, 7 aa, synthetic construct
PLGNYLE

SEQ ID NO: 98623 - protein, 7 aa, synthetic construct
PFALGID

SEQ ID NO: 98624 - protein, 7 aa, synthetic construct
MYSVENR

SEQ ID NO: 98625 - protein, 7 aa, synthetic construct
RESSEQH

SEQ ID NO: 98626 - protein, 7 aa, synthetic construct
LETIRGE

SEQ ID NO: 98627 - protein, 7 aa, synthetic construct
VRQPDYD

SEQ ID NO: 98628 - protein, 7 aa, synthetic construct
RSEAWKS

SEQ ID NO: 98629 - protein, 7 aa, synthetic construct
VNGTWNK

SEQ ID NO: 98630 - protein, 7 aa, synthetic construct
IGSMNEP

SEQ ID NO: 98631 - protein, 7 aa, synthetic construct
YSREYPV

SEQ ID NO: 98632 - protein, 7 aa, synthetic construct
AKYSTPD

SEQ ID NO: 98633 - protein, 7 aa, synthetic construct
KRLNSPE

SEQ ID NO: 98634 - protein, 7 aa, synthetic construct
RAIPENT

SEQ ID NO: 98635 - protein, 7 aa, synthetic construct
PYLGVHE

SEQ ID NO: 98636 - protein, 7 aa, synthetic construct
NLITPIA

SEQ ID NO: 98637 - protein, 7 aa, synthetic construct
HMDKGDT

SEQ ID NO: 98638 - protein, 7 aa, synthetic construct
MNSMKHN

SEQ ID NO: 98639 - protein, 7 aa, synthetic construct
PNHDNNR

SEQ ID NO: 98640 - protein, 7 aa, synthetic construct
HNAGVWE

SEQ ID NO: 98641 - protein, 7 aa, synthetic construct
QQEWVPK

SEQ ID NO: 98642 - protein, 7 aa, synthetic construct
ESPREMM

SEQ ID NO: 98643 - protein, 7 aa, synthetic construct
GHMKDQI

SEQ ID NO: 98644 - protein, 7 aa, synthetic construct
TQHKHSY

SEQ ID NO: 98645 - protein, 7 aa, synthetic construct
FDQPNRQ

SEQ ID NO: 98646 - protein, 7 aa, synthetic construct
KETVKGF

SEQ ID NO: 98647 - protein, 7 aa, synthetic construct
RFSTDRI

SEQ ID NO: 98648 - protein, 7 aa, synthetic construct
ERQSEIP

SEQ ID NO: 98649 - protein, 7 aa, synthetic construct
LIPRPNS

SEQ ID NO: 98650 - protein, 7 aa, synthetic construct
TVMGLVP

SEQ ID NO: 98651 - protein, 7 aa, synthetic construct
FKMASSA

SEQ ID NO: 98652 - protein, 7 aa, synthetic construct
FIQANEA

SEQ ID NO: 98653 - protein, 7 aa, synthetic construct
LSHDAFK

SEQ ID NO: 98654 - protein, 7 aa, synthetic construct
TQWGDHD

SEQ ID NO: 98655 - protein, 7 aa, synthetic construct
NMDHATY

SEQ ID NO: 98656 - protein, 7 aa, synthetic construct
LRDISMI

SEQ ID NO: 98657 - protein, 7 aa, synthetic construct
GNEFTKL

SEQ ID NO: 98658 - protein, 7 aa, synthetic construct
ITPIFQD

SEQ ID NO: 98659 - protein, 7 aa, synthetic construct
TTTDTQR

SEQ ID NO: 98660 - protein, 7 aa, synthetic construct
SVAAFQP

SEQ ID NO: 98661 - protein, 7 aa, synthetic construct
ASTMPVH

SEQ ID NO: 98662 - protein, 7 aa, synthetic construct
TMRKAED

SEQ ID NO: 98663 - protein, 7 aa, synthetic construct
WVQAPTG

SEQ ID NO: 98664 - protein, 7 aa, synthetic construct
VRRDPIV

SEQ ID NO: 98665 - protein, 7 aa, synthetic construct
NTNSDKK

SEQ ID NO: 98666 - protein, 7 aa, synthetic construct
GWNHSVN

SEQ ID NO: 98667 - protein, 7 aa, synthetic construct
YREQGHA

SEQ ID NO: 98668 - protein, 7 aa, synthetic construct
YQALRHN

SEQ ID NO: 98669 - protein, 7 aa, synthetic construct
IQVHKMV

SEQ ID NO: 98670 - protein, 7 aa, synthetic construct
MINNMMG

SEQ ID NO: 98671 - protein, 7 aa, synthetic construct
RHNSAGH

SEQ ID NO: 98672 - protein, 7 aa, synthetic construct
PHSMVQE

SEQ ID NO: 98673 - protein, 7 aa, synthetic construct
LVDPKVG

SEQ ID NO: 98674 - protein, 7 aa, synthetic construct
VRDKPYP

SEQ ID NO: 98675 - protein, 7 aa, synthetic construct
TTLEYKV

SEQ ID NO: 98676 - protein, 7 aa, synthetic construct
MKERMID

SEQ ID NO: 98677 - protein, 7 aa, synthetic construct
HKVMLGN

SEQ ID NO: 98678 - protein, 7 aa, synthetic construct
AKRGVDP

SEQ ID NO: 98679 - protein, 7 aa, synthetic construct
SHNLTTH

SEQ ID NO: 98680 - protein, 7 aa, synthetic construct
YARDMGT

SEQ ID NO: 98681 - protein, 7 aa, synthetic construct
IWKSVQT

SEQ ID NO: 98682 - protein, 7 aa, synthetic construct
NKSMASS

SEQ ID NO: 98683 - protein, 7 aa, synthetic construct
MKAPMKG

SEQ ID NO: 98684 - protein, 7 aa, synthetic construct
FVHNDKF

SEQ ID NO: 98685 - protein, 7 aa, synthetic construct
VMAQMLG

SEQ ID NO: 98686 - protein, 7 aa, synthetic construct
VGVHAIA

SEQ ID NO: 98687 - protein, 7 aa, synthetic construct
KEVPSLM

SEQ ID NO: 98688 - protein, 7 aa, synthetic construct
QSTGRTP

SEQ ID NO: 98689 - protein, 7 aa, synthetic construct
SLQMIKP

SEQ ID NO: 98690 - protein, 7 aa, synthetic construct
IRHDVQI

SEQ ID NO: 98691 - protein, 7 aa, synthetic construct
MTVKAME

SEQ ID NO: 98692 - protein, 7 aa, synthetic construct
FFSGLDA

SEQ ID NO: 98693 - protein, 7 aa, synthetic construct
GIDKHWV

SEQ ID NO: 98694 - protein, 7 aa, synthetic construct
AVHDSKW

SEQ ID NO: 98695 - protein, 7 aa, synthetic construct
QKTPSMG

SEQ ID NO: 98696 - protein, 7 aa, synthetic construct
DNTLTRY

SEQ ID NO: 98697 - protein, 7 aa, synthetic construct
TSAFMNE

SEQ ID NO: 98698 - protein, 7 aa, synthetic construct
MQSSNQK

SEQ ID NO: 98699 - protein, 7 aa, synthetic construct
HAPMYID

SEQ ID NO: 98700 - protein, 7 aa, synthetic construct
KVMQLDS

SEQ ID NO: 98701 - protein, 7 aa, synthetic construct
TRRPDGP

SEQ ID NO: 98702 - protein, 7 aa, synthetic construct
VAIDKTK

SEQ ID NO: 98703 - protein, 7 aa, synthetic construct
RGQQTEI

SEQ ID NO: 98704 - protein, 7 aa, synthetic construct
NPDKTSV

SEQ ID NO: 98705 - protein, 7 aa, synthetic construct
HKNAPHN

SEQ ID NO: 98706 - protein, 7 aa, synthetic construct
SPKENKL

SEQ ID NO: 98707 - protein, 7 aa, synthetic construct
VQAHGHP

SEQ ID NO: 98708 - protein, 7 aa, synthetic construct
NKTPGGN

SEQ ID NO: 98709 - protein, 7 aa, synthetic construct
IRDTEVS

SEQ ID NO: 98710 - protein, 7 aa, synthetic construct
QMTHVSA

SEQ ID NO: 98711 - protein, 7 aa, synthetic construct
RDAVHLF

SEQ ID NO: 98712 - protein, 7 aa, synthetic construct
HFNTDTG

SEQ ID NO: 98713 - protein, 7 aa, synthetic construct
SGHMAQH

SEQ ID NO: 98714 - protein, 7 aa, synthetic construct
HTQDTYR

SEQ ID NO: 98715 - protein, 7 aa, synthetic construct
NHAQTMS

SEQ ID NO: 98716 - protein, 7 aa, synthetic construct
WGTTFTS

SEQ ID NO: 98717 - protein, 7 aa, synthetic construct
KVSQNIY

SEQ ID NO: 98718 - protein, 7 aa, synthetic construct
FSINEEK

SEQ ID NO: 98719 - protein, 7 aa, synthetic construct
VHKSNNA

SEQ ID NO: 98720 - protein, 7 aa, synthetic construct
VANNLNR

SEQ ID NO: 98721 - protein, 7 aa, synthetic construct
TGNHPRY

SEQ ID NO: 98722 - protein, 7 aa, synthetic construct
QPPYQEK

SEQ ID NO: 98723 - protein, 7 aa, synthetic construct
FTVKLAP

SEQ ID NO: 98724 - protein, 7 aa, synthetic construct
MYNEQAK

SEQ ID NO: 98725 - protein, 7 aa, synthetic construct
SMAVMHA

SEQ ID NO: 98726 - protein, 7 aa, synthetic construct
PTNRLHM

SEQ ID NO: 98727 - protein, 7 aa, synthetic construct
NEERKSD

SEQ ID NO: 98728 - protein, 7 aa, synthetic construct
QFDSRMG

SEQ ID NO: 98729 - protein, 7 aa, synthetic construct
MVISKMP

SEQ ID NO: 98730 - protein, 7 aa, synthetic construct
PGKTTTS

SEQ ID NO: 98731 - protein, 7 aa, synthetic construct
FVPVEKN

SEQ ID NO: 98732 - protein, 7 aa, synthetic construct
VGGYSEE

SEQ ID NO: 98733 - protein, 7 aa, synthetic construct
NYGERIR

SEQ ID NO: 98734 - protein, 7 aa, synthetic construct
KAKVDMV

SEQ ID NO: 98735 - protein, 7 aa, synthetic construct
IPLTAVG

SEQ ID NO: 98736 - protein, 7 aa, synthetic construct
EMKIPLN

SEQ ID NO: 98737 - protein, 7 aa, synthetic construct
NARDWNS

SEQ ID NO: 98738 - protein, 7 aa, synthetic construct
MKMRESV

SEQ ID NO: 98739 - protein, 7 aa, synthetic construct
HGMSNAK

SEQ ID NO: 98740 - protein, 7 aa, synthetic construct
VAKAKGD

SEQ ID NO: 98741 - protein, 7 aa, synthetic construct
TQMMQKI

SEQ ID NO: 98742 - protein, 7 aa, synthetic construct
IPSPYHD

SEQ ID NO: 98743 - protein, 7 aa, synthetic construct
HTMTRLP

SEQ ID NO: 98744 - protein, 7 aa, synthetic construct
KHDDTFQ

SEQ ID NO: 98745 - protein, 7 aa, synthetic construct
TQQGDGS

SEQ ID NO: 98746 - protein, 7 aa, synthetic construct
VKLEIPR

SEQ ID NO: 98747 - protein, 7 aa, synthetic construct
NTNYQKI

SEQ ID NO: 98748 - protein, 7 aa, synthetic construct
NGSASKM

SEQ ID NO: 98749 - protein, 7 aa, synthetic construct
VDRESPT

SEQ ID NO: 98750 - protein, 7 aa, synthetic construct
HPVQKYH

SEQ ID NO: 98751 - protein, 7 aa, synthetic construct
WNRQSSQ

SEQ ID NO: 98752 - protein, 7 aa, synthetic construct
VKREQEV

SEQ ID NO: 98753 - protein, 7 aa, synthetic construct
GVVSDGA

SEQ ID NO: 98754 - protein, 7 aa, synthetic construct
WPQKTET

SEQ ID NO: 98755 - protein, 7 aa, synthetic construct
GTHGHYI

SEQ ID NO: 98756 - protein, 7 aa, synthetic construct
IGNMTLN

SEQ ID NO: 98757 - protein, 7 aa, synthetic construct
VVHPNHT

SEQ ID NO: 98758 - protein, 7 aa, synthetic construct
HKMNDEN

SEQ ID NO: 98759 - protein, 7 aa, synthetic construct
PNIRNMN

SEQ ID NO: 98760 - protein, 7 aa, synthetic construct
YVKNAED

SEQ ID NO: 98761 - protein, 7 aa, synthetic construct
HNSQDKM

SEQ ID NO: 98762 - protein, 7 aa, synthetic construct
AKTNVST

SEQ ID NO: 98763 - protein, 7 aa, synthetic construct
RYQEFAP

SEQ ID NO: 98764 - protein, 7 aa, synthetic construct
NFKIGDE

SEQ ID NO: 98765 - protein, 7 aa, synthetic construct
NKAQYSE

SEQ ID NO: 98766 - protein, 7 aa, synthetic construct
VQHAHPT

SEQ ID NO: 98767 - protein, 7 aa, synthetic construct
PLAQTKI

SEQ ID NO: 98768 - protein, 7 aa, synthetic construct
ERARSPG

SEQ ID NO: 98769 - protein, 7 aa, synthetic construct
MGSYMNH

SEQ ID NO: 98770 - protein, 7 aa, synthetic construct
MVDRFDM

SEQ ID NO: 98771 - protein, 7 aa, synthetic construct
HHQQRFD

SEQ ID NO: 98772 - protein, 7 aa, synthetic construct
QIKRNAD

SEQ ID NO: 98773 - protein, 7 aa, synthetic construct
QYLQQSK

SEQ ID NO: 98774 - protein, 7 aa, synthetic construct
PIHAKNP

SEQ ID NO: 98775 - protein, 7 aa, synthetic construct
HKTEQWG

SEQ ID NO: 98776 - protein, 7 aa, synthetic construct
QPAFGEA

SEQ ID NO: 98777 - protein, 7 aa, synthetic construct
QNQNHLL

SEQ ID NO: 98778 - protein, 7 aa, synthetic construct
RQDSTRH

SEQ ID NO: 98779 - protein, 7 aa, synthetic construct
SQDKSDW

SEQ ID NO: 98780 - protein, 7 aa, synthetic construct
AMNFASS

SEQ ID NO: 98781 - protein, 7 aa, synthetic construct
RFSGISN

SEQ ID NO: 98782 - protein, 7 aa, synthetic construct
HHAIVQV

SEQ ID NO: 98783 - protein, 7 aa, synthetic construct
YAGKVIA

SEQ ID NO: 98784 - protein, 7 aa, synthetic construct
MTSPQNT

SEQ ID NO: 98785 - protein, 7 aa, synthetic construct
ILSEGSH

SEQ ID NO: 98786 - protein, 7 aa, synthetic construct
HTYLAVE

SEQ ID NO: 98787 - protein, 7 aa, synthetic construct
MSNDKVP

SEQ ID NO: 98788 - protein, 7 aa, synthetic construct
LDTALGY

SEQ ID NO: 98789 - protein, 7 aa, synthetic construct
QGKQSTM

SEQ ID NO: 98790 - protein, 7 aa, synthetic construct
LDQTMTR

SEQ ID NO: 98791 - protein, 7 aa, synthetic construct
PFPVGDP

SEQ ID NO: 98792 - protein, 7 aa, synthetic construct
SQSKSSE

SEQ ID NO: 98793 - protein, 7 aa, synthetic construct
QSVNHIV

SEQ ID NO: 98794 - protein, 7 aa, synthetic construct
KIYDHGS

SEQ ID NO: 98795 - protein, 7 aa, synthetic construct
QVDGSNW

SEQ ID NO: 98796 - protein, 7 aa, synthetic construct
YKDSYPE

SEQ ID NO: 98797 - protein, 7 aa, synthetic construct
HHFPGDE

SEQ ID NO: 98798 - protein, 7 aa, synthetic construct
IDRSFGK

SEQ ID NO: 98799 - protein, 7 aa, synthetic construct
RQADTQY

SEQ ID NO: 98800 - protein, 7 aa, synthetic construct
RGPESIQ

SEQ ID NO: 98801 - protein, 7 aa, synthetic construct
TMAPAIG

SEQ ID NO: 98802 - protein, 7 aa, synthetic construct
WHNHPKE

SEQ ID NO: 98803 - protein, 7 aa, synthetic construct
VVMHSEV

SEQ ID NO: 98804 - protein, 7 aa, synthetic construct
IMSHFDK

SEQ ID NO: 98805 - protein, 7 aa, synthetic construct
SVHAIKG

SEQ ID NO: 98806 - protein, 7 aa, synthetic construct
DQKPFSK

SEQ ID NO: 98807 - protein, 7 aa, synthetic construct
VLGTPAR

SEQ ID NO: 98808 - protein, 7 aa, synthetic construct
NELKLGD

SEQ ID NO: 98809 - protein, 7 aa, synthetic construct
KKDTVQQ

SEQ ID NO: 98810 - protein, 7 aa, synthetic construct
PRMSPVD

SEQ ID NO: 98811 - protein, 7 aa, synthetic construct
SHTGRAI

SEQ ID NO: 98812 - protein, 7 aa, synthetic construct
HQQPAQV

SEQ ID NO: 98813 - protein, 7 aa, synthetic construct
TDGSAIG

SEQ ID NO: 98814 - protein, 7 aa, synthetic construct
LISSQRV

SEQ ID NO: 98815 - protein, 7 aa, synthetic construct
HEGSREF

SEQ ID NO: 98816 - protein, 7 aa, synthetic construct
QESQHHM

SEQ ID NO: 98817 - protein, 7 aa, synthetic construct
FFQGTGE

SEQ ID NO: 98818 - protein, 7 aa, synthetic construct
MRNQQAP

SEQ ID NO: 98819 - protein, 7 aa, synthetic construct
KIVGPTH

SEQ ID NO: 98820 - protein, 7 aa, synthetic construct
LDDRLHV

SEQ ID NO: 98821 - protein, 7 aa, synthetic construct
NEMPALA

SEQ ID NO: 98822 - protein, 7 aa, synthetic construct
IYGLTTD

SEQ ID NO: 98823 - protein, 7 aa, synthetic construct
IRPAPHH

SEQ ID NO: 98824 - protein, 7 aa, synthetic construct
LMHPEKY

SEQ ID NO: 98825 - protein, 7 aa, synthetic construct
FPQMSPN

SEQ ID NO: 98826 - protein, 7 aa, synthetic construct
NAVVVSE

SEQ ID NO: 98827 - protein, 7 aa, synthetic construct
TKDMYHV

SEQ ID NO: 98828 - protein, 7 aa, synthetic construct
TSPLTYV

SEQ ID NO: 98829 - protein, 7 aa, synthetic construct
KVRANYE

SEQ ID NO: 98830 - protein, 7 aa, synthetic construct
SMGVHRN

SEQ ID NO: 98831 - protein, 7 aa, synthetic construct
GVNHYKQ

SEQ ID NO: 98832 - protein, 7 aa, synthetic construct
HTFNGHT

SEQ ID NO: 98833 - protein, 7 aa, synthetic construct
QMRNGHH

SEQ ID NO: 98834 - protein, 7 aa, synthetic construct
NSNRQEE

SEQ ID NO: 98835 - protein, 7 aa, synthetic construct
YGHNTLS

SEQ ID NO: 98836 - protein, 7 aa, synthetic construct
WALKQPM

SEQ ID NO: 98837 - protein, 7 aa, synthetic construct
KVVSHLA

SEQ ID NO: 98838 - protein, 7 aa, synthetic construct
SASEYKT

SEQ ID NO: 98839 - protein, 7 aa, synthetic construct
SHDEKQM

SEQ ID NO: 98840 - protein, 7 aa, synthetic construct
QQIQYKP

SEQ ID NO: 98841 - protein, 7 aa, synthetic construct
MNSIGEP

SEQ ID NO: 98842 - protein, 7 aa, synthetic construct
QHQADVP

SEQ ID NO: 98843 - protein, 7 aa, synthetic construct
SMAQPDK

SEQ ID NO: 98844 - protein, 7 aa, synthetic construct
SNEQGRK

SEQ ID NO: 98845 - protein, 7 aa, synthetic construct
KKTETRD

SEQ ID NO: 98846 - protein, 7 aa, synthetic construct
IIRKPNE

SEQ ID NO: 98847 - protein, 7 aa, synthetic construct
LLDTQAW

SEQ ID NO: 98848 - protein, 7 aa, synthetic construct
TLANQEG

SEQ ID NO: 98849 - protein, 7 aa, synthetic construct
DHPLLPH

SEQ ID NO: 98850 - protein, 7 aa, synthetic construct
NPGTMAA

SEQ ID NO: 98851 - protein, 7 aa, synthetic construct
MGHAHAL

SEQ ID NO: 98852 - protein, 7 aa, synthetic construct
VGHPIGE

SEQ ID NO: 98853 - protein, 7 aa, synthetic construct
KQRHDSV

SEQ ID NO: 98854 - protein, 7 aa, synthetic construct
EKWMQDG

SEQ ID NO: 98855 - protein, 7 aa, synthetic construct
NYENHRN

SEQ ID NO: 98856 - protein, 7 aa, synthetic construct
REGYHTY

SEQ ID NO: 98857 - protein, 7 aa, synthetic construct
WMPDRHA

SEQ ID NO: 98858 - protein, 7 aa, synthetic construct
MITARIS

SEQ ID NO: 98859 - protein, 7 aa, synthetic construct
TMDTRNT

SEQ ID NO: 98860 - protein, 7 aa, synthetic construct
GSGNKDN

SEQ ID NO: 98861 - protein, 7 aa, synthetic construct
MMKEMAA

SEQ ID NO: 98862 - protein, 7 aa, synthetic construct
SGNAKNP

SEQ ID NO: 98863 - protein, 7 aa, synthetic construct
RFVELTG

SEQ ID NO: 98864 - protein, 7 aa, synthetic construct
SLETLKL

SEQ ID NO: 98865 - protein, 7 aa, synthetic construct
GQNVSPI

SEQ ID NO: 98866 - protein, 7 aa, synthetic construct
VWTPAKE

SEQ ID NO: 98867 - protein, 7 aa, synthetic construct
HPYGSLQ

SEQ ID NO: 98868 - protein, 7 aa, synthetic construct
QAIHHQI

SEQ ID NO: 98869 - protein, 7 aa, synthetic construct
LPKQDIH

SEQ ID NO: 98870 - protein, 7 aa, synthetic construct
STGFHGL

SEQ ID NO: 98871 - protein, 7 aa, synthetic construct
PYARSGE

SEQ ID NO: 98872 - protein, 7 aa, synthetic construct
NRSNPYG

SEQ ID NO: 98873 - protein, 7 aa, synthetic construct
YRMASTA

SEQ ID NO: 98874 - protein, 7 aa, synthetic construct
PTKTNAG

SEQ ID NO: 98875 - protein, 7 aa, synthetic construct
GTEHGKT

SEQ ID NO: 98876 - protein, 7 aa, synthetic construct
ASLSYQE

SEQ ID NO: 98877 - protein, 7 aa, synthetic construct
NSQTPKS

SEQ ID NO: 98878 - protein, 7 aa, synthetic construct
THGDFPM

SEQ ID NO: 98879 - protein, 7 aa, synthetic construct
TMKDFSP

SEQ ID NO: 98880 - protein, 7 aa, synthetic construct
RTVENQK

SEQ ID NO: 98881 - protein, 7 aa, synthetic construct
FMDIERR

SEQ ID NO: 98882 - protein, 7 aa, synthetic construct
QSKQKVE

SEQ ID NO: 98883 - protein, 7 aa, synthetic construct
MQKVLGE

SEQ ID NO: 98884 - protein, 7 aa, synthetic construct
AHENFNK

SEQ ID NO: 98885 - protein, 7 aa, synthetic construct
ILKIPAD

SEQ ID NO: 98886 - protein, 7 aa, synthetic construct
ISKELLH

SEQ ID NO: 98887 - protein, 7 aa, synthetic construct
HERNGSF

SEQ ID NO: 98888 - protein, 7 aa, synthetic construct
TPHFKMV

SEQ ID NO: 98889 - protein, 7 aa, synthetic construct
RKDTPNG

SEQ ID NO: 98890 - protein, 7 aa, synthetic construct
VQYPHVE

SEQ ID NO: 98891 - protein, 7 aa, synthetic construct
FGKMSQV

SEQ ID NO: 98892 - protein, 7 aa, synthetic construct
NKLGMQF

SEQ ID NO: 98893 - protein, 7 aa, synthetic construct
NRNTNQA

SEQ ID NO: 98894 - protein, 7 aa, synthetic construct
STDRNVD

SEQ ID NO: 98895 - protein, 7 aa, synthetic construct
LEKDTTM

SEQ ID NO: 98896 - protein, 7 aa, synthetic construct
PGSRPNH

SEQ ID NO: 98897 - protein, 7 aa, synthetic construct
SGMSMMD

SEQ ID NO: 98898 - protein, 7 aa, synthetic construct
NDPIPKW

SEQ ID NO: 98899 - protein, 7 aa, synthetic construct
WVAKQVA

SEQ ID NO: 98900 - protein, 7 aa, synthetic construct
NAQRYPV

SEQ ID NO: 98901 - protein, 7 aa, synthetic construct
NSLKIHI

SEQ ID NO: 98902 - protein, 7 aa, synthetic construct
KTHNHDM

SEQ ID NO: 98903 - protein, 7 aa, synthetic construct
NQAQRSA

SEQ ID NO: 98904 - protein, 7 aa, synthetic construct
TKYPSQS

SEQ ID NO: 98905 - protein, 7 aa, synthetic construct
GEYTGIR

SEQ ID NO: 98906 - protein, 7 aa, synthetic construct
RIDTVAM

SEQ ID NO: 98907 - protein, 7 aa, synthetic construct
GHEIAKI

SEQ ID NO: 98908 - protein, 7 aa, synthetic construct
SMEKKAV

SEQ ID NO: 98909 - protein, 7 aa, synthetic construct
IGNLMST

SEQ ID NO: 98910 - protein, 7 aa, synthetic construct
TVAQYRQ

SEQ ID NO: 98911 - protein, 7 aa, synthetic construct
TQQMNTG

SEQ ID NO: 98912 - protein, 7 aa, synthetic construct
DKPGMKS

SEQ ID NO: 98913 - protein, 7 aa, synthetic construct
NIGARMG

SEQ ID NO: 98914 - protein, 7 aa, synthetic construct
GKVEMRS

SEQ ID NO: 98915 - protein, 7 aa, synthetic construct
EIKVQVG

SEQ ID NO: 98916 - protein, 7 aa, synthetic construct
YDKQQTF

SEQ ID NO: 98917 - protein, 7 aa, synthetic construct
LPHTNDK

SEQ ID NO: 98918 - protein, 7 aa, synthetic construct
FGQMKME

SEQ ID NO: 98919 - protein, 7 aa, synthetic construct
YMTANMV

SEQ ID NO: 98920 - protein, 7 aa, synthetic construct
DPRKDVS

SEQ ID NO: 98921 - protein, 7 aa, synthetic construct
EDERWKG

SEQ ID NO: 98922 - protein, 7 aa, synthetic construct
MPTGAHD

SEQ ID NO: 98923 - protein, 7 aa, synthetic construct
TNNTWEF

SEQ ID NO: 98924 - protein, 7 aa, synthetic construct
NREGAVL

SEQ ID NO: 98925 - protein, 7 aa, synthetic construct
TNMPFPV

SEQ ID NO: 98926 - protein, 7 aa, synthetic construct
PDPAGTR

SEQ ID NO: 98927 - protein, 7 aa, synthetic construct
VPGMSTY

SEQ ID NO: 98928 - protein, 7 aa, synthetic construct
FHKDMSQ

SEQ ID NO: 98929 - protein, 7 aa, synthetic construct
SPTQHST

SEQ ID NO: 98930 - protein, 7 aa, synthetic construct
DPSRMGH

SEQ ID NO: 98931 - protein, 7 aa, synthetic construct
TMGSLAG

SEQ ID NO: 98932 - protein, 7 aa, synthetic construct
YKTSQKE

SEQ ID NO: 98933 - protein, 7 aa, synthetic construct
QVNPLKE

SEQ ID NO: 98934 - protein, 7 aa, synthetic construct
DMNIVQS

SEQ ID NO: 98935 - protein, 7 aa, synthetic construct
SSNAMKS

SEQ ID NO: 98936 - protein, 7 aa, synthetic construct
AKVDQRS

SEQ ID NO: 98937 - protein, 7 aa, synthetic construct
FKTNQAS

SEQ ID NO: 98938 - protein, 7 aa, synthetic construct
VTHPPDS

SEQ ID NO: 98939 - protein, 7 aa, synthetic construct
WLEKGYP

SEQ ID NO: 98940 - protein, 7 aa, synthetic construct
RGSEVGQ

SEQ ID NO: 98941 - protein, 7 aa, synthetic construct
LRANVDW

SEQ ID NO: 98942 - protein, 7 aa, synthetic construct
PMHINNS

SEQ ID NO: 98943 - protein, 7 aa, synthetic construct
IHKRDYE

SEQ ID NO: 98944 - protein, 7 aa, synthetic construct
ANADTKS

SEQ ID NO: 98945 - protein, 7 aa, synthetic construct
TIHSRYE

SEQ ID NO: 98946 - protein, 7 aa, synthetic construct
TGDTRAW

SEQ ID NO: 98947 - protein, 7 aa, synthetic construct
KEVHRAL

SEQ ID NO: 98948 - protein, 7 aa, synthetic construct
TRSQAVH

SEQ ID NO: 98949 - protein, 7 aa, synthetic construct
YGHYTGH

SEQ ID NO: 98950 - protein, 7 aa, synthetic construct
YETTVFP

SEQ ID NO: 98951 - protein, 7 aa, synthetic construct
PNIRMQQ

SEQ ID NO: 98952 - protein, 7 aa, synthetic construct
ITKMSQV

SEQ ID NO: 98953 - protein, 7 aa, synthetic construct
MQLPIAH

SEQ ID NO: 98954 - protein, 7 aa, synthetic construct
DNERPKS

SEQ ID NO: 98955 - protein, 7 aa, synthetic construct
TTNKGFM

SEQ ID NO: 98956 - protein, 7 aa, synthetic construct
TFPQEGP

SEQ ID NO: 98957 - protein, 7 aa, synthetic construct
IRDMNTL

SEQ ID NO: 98958 - protein, 7 aa, synthetic construct
LDKFLQV

SEQ ID NO: 98959 - protein, 7 aa, synthetic construct
QFSNMYA

SEQ ID NO: 98960 - protein, 7 aa, synthetic construct
PLTLDGR

SEQ ID NO: 98961 - protein, 7 aa, synthetic construct
RGETIAP

SEQ ID NO: 98962 - protein, 7 aa, synthetic construct
SFNSAEI

SEQ ID NO: 98963 - protein, 7 aa, synthetic construct
PLNAHRA

SEQ ID NO: 98964 - protein, 7 aa, synthetic construct
THNYGAA

SEQ ID NO: 98965 - protein, 7 aa, synthetic construct
RGEKLAF

SEQ ID NO: 98966 - protein, 7 aa, synthetic construct
NGEHAHE

SEQ ID NO: 98967 - protein, 7 aa, synthetic construct
KNIDSER

SEQ ID NO: 98968 - protein, 7 aa, synthetic construct
IQVKTFG

SEQ ID NO: 98969 - protein, 7 aa, synthetic construct
SWSDKAR

SEQ ID NO: 98970 - protein, 7 aa, synthetic construct
TSQNRAG

SEQ ID NO: 98971 - protein, 7 aa, synthetic construct
IKEKLLK

SEQ ID NO: 98972 - protein, 7 aa, synthetic construct
PGTPMAH

SEQ ID NO: 98973 - protein, 7 aa, synthetic construct
YNPAIGN

SEQ ID NO: 98974 - protein, 7 aa, synthetic construct
IDIKPMR

SEQ ID NO: 98975 - protein, 7 aa, synthetic construct
KPNADMH

SEQ ID NO: 98976 - protein, 7 aa, synthetic construct
PDKKQHA

SEQ ID NO: 98977 - protein, 7 aa, synthetic construct
PMGRMTD

SEQ ID NO: 98978 - protein, 7 aa, synthetic construct
PWNNMDS

SEQ ID NO: 98979 - protein, 7 aa, synthetic construct
FDGRQHN

SEQ ID NO: 98980 - protein, 7 aa, synthetic construct
KKDSAQN

SEQ ID NO: 98981 - protein, 7 aa, synthetic construct
TLSVQHA

SEQ ID NO: 98982 - protein, 7 aa, synthetic construct
HWNNKEM

SEQ ID NO: 98983 - protein, 7 aa, synthetic construct
HTFGDAG

SEQ ID NO: 98984 - protein, 7 aa, synthetic construct
DKHPKLF

SEQ ID NO: 98985 - protein, 7 aa, synthetic construct
MAPTFRQ

SEQ ID NO: 98986 - protein, 7 aa, synthetic construct
FTATRSA

SEQ ID NO: 98987 - protein, 7 aa, synthetic construct
PKMSMPS

SEQ ID NO: 98988 - protein, 7 aa, synthetic construct
GGRQAEP

SEQ ID NO: 98989 - protein, 7 aa, synthetic construct
GSSALMD

SEQ ID NO: 98990 - protein, 7 aa, synthetic construct
KEFFTNE

SEQ ID NO: 98991 - protein, 7 aa, synthetic construct
EGLGKPY

SEQ ID NO: 98992 - protein, 7 aa, synthetic construct
MTTSGQW

SEQ ID NO: 98993 - protein, 7 aa, synthetic construct
HKGQDKM

SEQ ID NO: 98994 - protein, 7 aa, synthetic construct
MNVQKHP

SEQ ID NO: 98995 - protein, 7 aa, synthetic construct
HNAMPGH

SEQ ID NO: 98996 - protein, 7 aa, synthetic construct
GYIPAND

SEQ ID NO: 98997 - protein, 7 aa, synthetic construct
HYDTAKV

SEQ ID NO: 98998 - protein, 7 aa, synthetic construct
IKAAIDM

SEQ ID NO: 98999 - protein, 7 aa, synthetic construct
GTQGKMG

SEQ ID NO: 99000 - protein, 7 aa, synthetic construct
EPAVHAV

SEQ ID NO: 99001 - protein, 7 aa, synthetic construct
KYVEADT

SEQ ID NO: 99002 - protein, 7 aa, synthetic construct
WKDLPDH

SEQ ID NO: 99003 - protein, 7 aa, synthetic construct
LPMPKED

SEQ ID NO: 99004 - protein, 7 aa, synthetic construct
RNGDEKI

SEQ ID NO: 99005 - protein, 7 aa, synthetic construct
SLHDTYM

SEQ ID NO: 99006 - protein, 7 aa, synthetic construct
NDPWRSE

SEQ ID NO: 99007 - protein, 7 aa, synthetic construct
MVKNKDT

SEQ ID NO: 99008 - protein, 7 aa, synthetic construct
SRSPAVE

SEQ ID NO: 99009 - protein, 7 aa, synthetic construct
AIGHMAE

SEQ ID NO: 99010 - protein, 7 aa, synthetic construct
GIVKMGS

SEQ ID NO: 99011 - protein, 7 aa, synthetic construct
NPIPTTG

SEQ ID NO: 99012 - protein, 7 aa, synthetic construct
SLGYKEL

SEQ ID NO: 99013 - protein, 7 aa, synthetic construct
FFKDLER

SEQ ID NO: 99014 - protein, 7 aa, synthetic construct
VKFSISN

SEQ ID NO: 99015 - protein, 7 aa, synthetic construct
IFENVRP

SEQ ID NO: 99016 - protein, 7 aa, synthetic construct
FQVHNAK

SEQ ID NO: 99017 - protein, 7 aa, synthetic construct
GTNQILA

SEQ ID NO: 99018 - protein, 7 aa, synthetic construct
HHKYAIG

SEQ ID NO: 99019 - protein, 7 aa, synthetic construct
DFPGTGA

SEQ ID NO: 99020 - protein, 7 aa, synthetic construct
WAADKGH

SEQ ID NO: 99021 - protein, 7 aa, synthetic construct
IKANDEQ

SEQ ID NO: 99022 - protein, 7 aa, synthetic construct
RDPHINE

SEQ ID NO: 99023 - protein, 7 aa, synthetic construct
GNIDKAS

SEQ ID NO: 99024 - protein, 7 aa, synthetic construct
NQTGPDA

SEQ ID NO: 99025 - protein, 7 aa, synthetic construct
RQYVNTA

SEQ ID NO: 99026 - protein, 7 aa, synthetic construct
FEVKRVQ

SEQ ID NO: 99027 - protein, 7 aa, synthetic construct
ATKPGMA

SEQ ID NO: 99028 - protein, 7 aa, synthetic construct
REHHMGV

SEQ ID NO: 99029 - protein, 7 aa, synthetic construct
TNISGNW

SEQ ID NO: 99030 - protein, 7 aa, synthetic construct
RIAEPGW

SEQ ID NO: 99031 - protein, 7 aa, synthetic construct
THIPPNP

SEQ ID NO: 99032 - protein, 7 aa, synthetic construct
MHDALRM

SEQ ID NO: 99033 - protein, 7 aa, synthetic construct
SDAGPPR

SEQ ID NO: 99034 - protein, 7 aa, synthetic construct
DVYQAKG

SEQ ID NO: 99035 - protein, 7 aa, synthetic construct
QEKWLDK

SEQ ID NO: 99036 - protein, 7 aa, synthetic construct
NSMPNPK

SEQ ID NO: 99037 - protein, 7 aa, synthetic construct
RLGDPQM

SEQ ID NO: 99038 - protein, 7 aa, synthetic construct
LAHGYVP

SEQ ID NO: 99039 - protein, 7 aa, synthetic construct
FDRESLQ

SEQ ID NO: 99040 - protein, 7 aa, synthetic construct
TVTQPHK

SEQ ID NO: 99041 - protein, 7 aa, synthetic construct
FNNNSGG

SEQ ID NO: 99042 - protein, 7 aa, synthetic construct
IFMNVDS

SEQ ID NO: 99043 - protein, 7 aa, synthetic construct
QVHIPEM

SEQ ID NO: 99044 - protein, 7 aa, synthetic construct
SDTQRSK

SEQ ID NO: 99045 - protein, 7 aa, synthetic construct
VEKIIRQ

SEQ ID NO: 99046 - protein, 7 aa, synthetic construct
DKQGDIS

SEQ ID NO: 99047 - protein, 7 aa, synthetic construct
KLQWGEG

SEQ ID NO: 99048 - protein, 7 aa, synthetic construct
NKNTGSP

SEQ ID NO: 99049 - protein, 7 aa, synthetic construct
AGDGKTY

SEQ ID NO: 99050 - protein, 7 aa, synthetic construct
KPMVMTT

SEQ ID NO: 99051 - protein, 7 aa, synthetic construct
GAMPLPS

SEQ ID NO: 99052 - protein, 7 aa, synthetic construct
KQTDSAS

SEQ ID NO: 99053 - protein, 7 aa, synthetic construct
FGNGPQD

SEQ ID NO: 99054 - protein, 7 aa, synthetic construct
TTKGNID

SEQ ID NO: 99055 - protein, 7 aa, synthetic construct
PTNRGDK

SEQ ID NO: 99056 - protein, 7 aa, synthetic construct
NPPNIIS

SEQ ID NO: 99057 - protein, 7 aa, synthetic construct
HNQNKFQ

SEQ ID NO: 99058 - protein, 7 aa, synthetic construct
VTENRDK

SEQ ID NO: 99059 - protein, 7 aa, synthetic construct
EGFQHKQ

SEQ ID NO: 99060 - protein, 7 aa, synthetic construct
FSMKELE

SEQ ID NO: 99061 - protein, 7 aa, synthetic construct
LLLGQKS

SEQ ID NO: 99062 - protein, 7 aa, synthetic construct
INPQRGQ

SEQ ID NO: 99063 - protein, 7 aa, synthetic construct
TQTGTPY

SEQ ID NO: 99064 - protein, 7 aa, synthetic construct
FDIKHNI

SEQ ID NO: 99065 - protein, 7 aa, synthetic construct
MKMGYDR

SEQ ID NO: 99066 - protein, 7 aa, synthetic construct
VGIVGNL

SEQ ID NO: 99067 - protein, 7 aa, synthetic construct
DVQNFAG

SEQ ID NO: 99068 - protein, 7 aa, synthetic construct
AASYQYA

SEQ ID NO: 99069 - protein, 7 aa, synthetic construct
MGTRHSL

SEQ ID NO: 99070 - protein, 7 aa, synthetic construct
TNLEQTV

SEQ ID NO: 99071 - protein, 7 aa, synthetic construct
KDTSRID

SEQ ID NO: 99072 - protein, 7 aa, synthetic construct
KYQTQDN

SEQ ID NO: 99073 - protein, 7 aa, synthetic construct
RNESALM

SEQ ID NO: 99074 - protein, 7 aa, synthetic construct
TLGPVIG

SEQ ID NO: 99075 - protein, 7 aa, synthetic construct
DNSHTQH

SEQ ID NO: 99076 - protein, 7 aa, synthetic construct
RWENKSN

SEQ ID NO: 99077 - protein, 7 aa, synthetic construct
NSPNWQS

SEQ ID NO: 99078 - protein, 7 aa, synthetic construct
NFNRESM

SEQ ID NO: 99079 - protein, 7 aa, synthetic construct
APMLGVN

SEQ ID NO: 99080 - protein, 7 aa, synthetic construct
YKDKKGD

SEQ ID NO: 99081 - protein, 7 aa, synthetic construct
SRRMDSP

SEQ ID NO: 99082 - protein, 7 aa, synthetic construct
NKEVHQQ

SEQ ID NO: 99083 - protein, 7 aa, synthetic construct
VPRGNQN

SEQ ID NO: 99084 - protein, 7 aa, synthetic construct
GIHMSGE

SEQ ID NO: 99085 - protein, 7 aa, synthetic construct
WSSNINR

SEQ ID NO: 99086 - protein, 7 aa, synthetic construct
MTQVFKE

SEQ ID NO: 99087 - protein, 7 aa, synthetic construct
VIKTPLG

SEQ ID NO: 99088 - protein, 7 aa, synthetic construct
NNSYPSA

SEQ ID NO: 99089 - protein, 7 aa, synthetic construct
EINPRKQ

SEQ ID NO: 99090 - protein, 7 aa, synthetic construct
SQKNGIH

SEQ ID NO: 99091 - protein, 7 aa, synthetic construct
YPHKGHV

SEQ ID NO: 99092 - protein, 7 aa, synthetic construct
IGPGQPM

SEQ ID NO: 99093 - protein, 7 aa, synthetic construct
PKYGNQA

SEQ ID NO: 99094 - protein, 7 aa, synthetic construct
LRTGEQG

SEQ ID NO: 99095 - protein, 7 aa, synthetic construct
DWSNRAH

SEQ ID NO: 99096 - protein, 7 aa, synthetic construct
NPNLLVG

SEQ ID NO: 99097 - protein, 7 aa, synthetic construct
LDKKLAD

SEQ ID NO: 99098 - protein, 7 aa, synthetic construct
TEGKYKH

SEQ ID NO: 99099 - protein, 7 aa, synthetic construct
VQGSVMT

SEQ ID NO: 99100 - protein, 7 aa, synthetic construct
AFDRKAH

SEQ ID NO: 99101 - protein, 7 aa, synthetic construct
GMYPNSG

SEQ ID NO: 99102 - protein, 7 aa, synthetic construct
PPVQMNL

SEQ ID NO: 99103 - protein, 7 aa, synthetic construct
FPKHYDE

SEQ ID NO: 99104 - protein, 7 aa, synthetic construct
PVIHNRD

SEQ ID NO: 99105 - protein, 7 aa, synthetic construct
KSTPEHI

SEQ ID NO: 99106 - protein, 7 aa, synthetic construct
HYAHKYD

SEQ ID NO: 99107 - protein, 7 aa, synthetic construct
EANIKRF

SEQ ID NO: 99108 - protein, 7 aa, synthetic construct
TEWGPKV

SEQ ID NO: 99109 - protein, 7 aa, synthetic construct
DYMTRLP

SEQ ID NO: 99110 - protein, 7 aa, synthetic construct
KEASAGA

SEQ ID NO: 99111 - protein, 7 aa, synthetic construct
AQGPHVE

SEQ ID NO: 99112 - protein, 7 aa, synthetic construct
TYHLASP

SEQ ID NO: 99113 - protein, 7 aa, synthetic construct
HQSHTSV

SEQ ID NO: 99114 - protein, 7 aa, synthetic construct
FLHEMGS

SEQ ID NO: 99115 - protein, 7 aa, synthetic construct
QGALSGY

SEQ ID NO: 99116 - protein, 7 aa, synthetic construct
AAPIKQT

SEQ ID NO: 99117 - protein, 7 aa, synthetic construct
AAMAQSH

SEQ ID NO: 99118 - protein, 7 aa, synthetic construct
NLGHDHL

SEQ ID NO: 99119 - protein, 7 aa, synthetic construct
GHSNRVY

SEQ ID NO: 99120 - protein, 7 aa, synthetic construct
PSAQPLM

SEQ ID NO: 99121 - protein, 7 aa, synthetic construct
KPTGAMH

SEQ ID NO: 99122 - protein, 7 aa, synthetic construct
SNNTITV

SEQ ID NO: 99123 - protein, 7 aa, synthetic construct
EKLPIKQ

SEQ ID NO: 99124 - protein, 7 aa, synthetic construct
INDGETR

SEQ ID NO: 99125 - protein, 7 aa, synthetic construct
DYQNGKA

SEQ ID NO: 99126 - protein, 7 aa, synthetic construct
GKNSVII

SEQ ID NO: 99127 - protein, 7 aa, synthetic construct
VRQLPAM

SEQ ID NO: 99128 - protein, 7 aa, synthetic construct
GSQKFTV

SEQ ID NO: 99129 - protein, 7 aa, synthetic construct
PGYKVDE

SEQ ID NO: 99130 - protein, 7 aa, synthetic construct
TMHKVYV

SEQ ID NO: 99131 - protein, 7 aa, synthetic construct
YFGVDNH

SEQ ID NO: 99132 - protein, 7 aa, synthetic construct
TGAQMTH

SEQ ID NO: 99133 - protein, 7 aa, synthetic construct
APDRHVS

SEQ ID NO: 99134 - protein, 7 aa, synthetic construct
GPTQIAI

SEQ ID NO: 99135 - protein, 7 aa, synthetic construct
HSQKEPP

SEQ ID NO: 99136 - protein, 7 aa, synthetic construct
TAGINMK

SEQ ID NO: 99137 - protein, 7 aa, synthetic construct
NAWGHHE

SEQ ID NO: 99138 - protein, 7 aa, synthetic construct
GEKMPAH

SEQ ID NO: 99139 - protein, 7 aa, synthetic construct
RYNMHQA

SEQ ID NO: 99140 - protein, 7 aa, synthetic construct
QMKQNGA

SEQ ID NO: 99141 - protein, 7 aa, synthetic construct
LQHTLNH

SEQ ID NO: 99142 - protein, 7 aa, synthetic construct
GWQQEVG

SEQ ID NO: 99143 - protein, 7 aa, synthetic construct
TKSNTKE

SEQ ID NO: 99144 - protein, 7 aa, synthetic construct
PVAYRDD

SEQ ID NO: 99145 - protein, 7 aa, synthetic construct
LEVGNPR

SEQ ID NO: 99146 - protein, 7 aa, synthetic construct
YDSWHSD

SEQ ID NO: 99147 - protein, 7 aa, synthetic construct
QISRPVL

SEQ ID NO: 99148 - protein, 7 aa, synthetic construct
ESHSMHS

SEQ ID NO: 99149 - protein, 7 aa, synthetic construct
KSIEVIE

SEQ ID NO: 99150 - protein, 7 aa, synthetic construct
MNIAQTL

SEQ ID NO: 99151 - protein, 7 aa, synthetic construct
APDFTRH

SEQ ID NO: 99152 - protein, 7 aa, synthetic construct
PATQNFM

SEQ ID NO: 99153 - protein, 7 aa, synthetic construct
TVKENGN

SEQ ID NO: 99154 - protein, 7 aa, synthetic construct
HQQSEHG

SEQ ID NO: 99155 - protein, 7 aa, synthetic construct
KTATHND

SEQ ID NO: 99156 - protein, 7 aa, synthetic construct
LNFKGHA

SEQ ID NO: 99157 - protein, 7 aa, synthetic construct
LVNVPTI

SEQ ID NO: 99158 - protein, 7 aa, synthetic construct
IKATAKD

SEQ ID NO: 99159 - protein, 7 aa, synthetic construct
FAGFDLE

SEQ ID NO: 99160 - protein, 7 aa, synthetic construct
RVNLEEW

SEQ ID NO: 99161 - protein, 7 aa, synthetic construct
HKYPEIP

SEQ ID NO: 99162 - protein, 7 aa, synthetic construct
VQKLIDV

SEQ ID NO: 99163 - protein, 7 aa, synthetic construct
VFKQMVH

SEQ ID NO: 99164 - protein, 7 aa, synthetic construct
IFNQSKN

SEQ ID NO: 99165 - protein, 7 aa, synthetic construct
SGETIRY

SEQ ID NO: 99166 - protein, 7 aa, synthetic construct
MMPEYPG

SEQ ID NO: 99167 - protein, 7 aa, synthetic construct
IGEMKPF

SEQ ID NO: 99168 - protein, 7 aa, synthetic construct
EDNPRTA

SEQ ID NO: 99169 - protein, 7 aa, synthetic construct
YSQIGMN

SEQ ID NO: 99170 - protein, 7 aa, synthetic construct
PPYQAQT

SEQ ID NO: 99171 - protein, 7 aa, synthetic construct
VDHRPDK

SEQ ID NO: 99172 - protein, 7 aa, synthetic construct
LKISQEG

SEQ ID NO: 99173 - protein, 7 aa, synthetic construct
NSSTHTW

SEQ ID NO: 99174 - protein, 7 aa, synthetic construct
KGNNLQD

SEQ ID NO: 99175 - protein, 7 aa, synthetic construct
FFEGGKM

SEQ ID NO: 99176 - protein, 7 aa, synthetic construct
GKQEWVG

SEQ ID NO: 99177 - protein, 7 aa, synthetic construct
IVNGIDG

SEQ ID NO: 99178 - protein, 7 aa, synthetic construct
EGNRDNK

SEQ ID NO: 99179 - protein, 7 aa, synthetic construct
QNKDMNM

SEQ ID NO: 99180 - protein, 7 aa, synthetic construct
LLGEQRV

SEQ ID NO: 99181 - protein, 7 aa, synthetic construct
KIIHQDH

SEQ ID NO: 99182 - protein, 7 aa, synthetic construct
TEVFNNV

SEQ ID NO: 99183 - protein, 7 aa, synthetic construct
RMTQAGQ

SEQ ID NO: 99184 - protein, 7 aa, synthetic construct
NQHFKGF

SEQ ID NO: 99185 - protein, 7 aa, synthetic construct
SNSVYMK

SEQ ID NO: 99186 - protein, 7 aa, synthetic construct
TLRSEQE

SEQ ID NO: 99187 - protein, 7 aa, synthetic construct
EVGTARN

SEQ ID NO: 99188 - protein, 7 aa, synthetic construct
SGGTELH

SEQ ID NO: 99189 - protein, 7 aa, synthetic construct
TSQGFRD

SEQ ID NO: 99190 - protein, 7 aa, synthetic construct
PMNPTIY

SEQ ID NO: 99191 - protein, 7 aa, synthetic construct
WKLSSHD

SEQ ID NO: 99192 - protein, 7 aa, synthetic construct
DGFDSKR

SEQ ID NO: 99193 - protein, 7 aa, synthetic construct
IFLGKID

SEQ ID NO: 99194 - protein, 7 aa, synthetic construct
VKQGYEW

SEQ ID NO: 99195 - protein, 7 aa, synthetic construct
WEGSKQY

SEQ ID NO: 99196 - protein, 7 aa, synthetic construct
TTPVYVE

SEQ ID NO: 99197 - protein, 7 aa, synthetic construct
FGEKMHV

SEQ ID NO: 99198 - protein, 7 aa, synthetic construct
LGREKGH

SEQ ID NO: 99199 - protein, 7 aa, synthetic construct
VPPFGPM

SEQ ID NO: 99200 - protein, 7 aa, synthetic construct
FNQVNGP

SEQ ID NO: 99201 - protein, 7 aa, synthetic construct
LHARVLN

SEQ ID NO: 99202 - protein, 7 aa, synthetic construct
FNATLEH

SEQ ID NO: 99203 - protein, 7 aa, synthetic construct
TTAVNNK

SEQ ID NO: 99204 - protein, 7 aa, synthetic construct
AQKDVMK

SEQ ID NO: 99205 - protein, 7 aa, synthetic construct
FREHMMA

SEQ ID NO: 99206 - protein, 7 aa, synthetic construct
NTSSLPS

SEQ ID NO: 99207 - protein, 7 aa, synthetic construct
ISPAIGD

SEQ ID NO: 99208 - protein, 7 aa, synthetic construct
PTQHMVE

SEQ ID NO: 99209 - protein, 7 aa, synthetic construct
YGQVYSK

SEQ ID NO: 99210 - protein, 7 aa, synthetic construct
QQTHPPP

SEQ ID NO: 99211 - protein, 7 aa, synthetic construct
GFHTHAH

SEQ ID NO: 99212 - protein, 7 aa, synthetic construct
EMRHEPF

SEQ ID NO: 99213 - protein, 7 aa, synthetic construct
ELNTQNV

SEQ ID NO: 99214 - protein, 7 aa, synthetic construct
PASTAMS

SEQ ID NO: 99215 - protein, 7 aa, synthetic construct
VEQHFQK

SEQ ID NO: 99216 - protein, 7 aa, synthetic construct
GAFTNAI

SEQ ID NO: 99217 - protein, 7 aa, synthetic construct
NAPNVSV

SEQ ID NO: 99218 - protein, 7 aa, synthetic construct
SHVASHI

SEQ ID NO: 99219 - protein, 7 aa, synthetic construct
AYNLKSA

SEQ ID NO: 99220 - protein, 7 aa, synthetic construct
QHINGSH

SEQ ID NO: 99221 - protein, 7 aa, synthetic construct
DLKPQVV

SEQ ID NO: 99222 - protein, 7 aa, synthetic construct
NLKPSYE

SEQ ID NO: 99223 - protein, 7 aa, synthetic construct
DHGSVPT

SEQ ID NO: 99224 - protein, 7 aa, synthetic construct
VEMKGAY

SEQ ID NO: 99225 - protein, 7 aa, synthetic construct
QLQQHQP

SEQ ID NO: 99226 - protein, 7 aa, synthetic construct
PSKTTMG

SEQ ID NO: 99227 - protein, 7 aa, synthetic construct
IPEAHNN

SEQ ID NO: 99228 - protein, 7 aa, synthetic construct
AADKTRP

SEQ ID NO: 99229 - protein, 7 aa, synthetic construct
AGRIPFS

SEQ ID NO: 99230 - protein, 7 aa, synthetic construct
AENGNVK

SEQ ID NO: 99231 - protein, 7 aa, synthetic construct
VKERQMF

SEQ ID NO: 99232 - protein, 7 aa, synthetic construct
GLQDAAR

SEQ ID NO: 99233 - protein, 7 aa, synthetic construct
AGGKKEG

SEQ ID NO: 99234 - protein, 7 aa, synthetic construct
PHNESKG

SEQ ID NO: 99235 - protein, 7 aa, synthetic construct
QGDKPIM

SEQ ID NO: 99236 - protein, 7 aa, synthetic construct
PQASSEA

SEQ ID NO: 99237 - protein, 7 aa, synthetic construct
KLLAEWP

SEQ ID NO: 99238 - protein, 7 aa, synthetic construct
AYKVEKL

SEQ ID NO: 99239 - protein, 7 aa, synthetic construct
AQAKPDQ

SEQ ID NO: 99240 - protein, 7 aa, synthetic construct
SQPRGVH

SEQ ID NO: 99241 - protein, 7 aa, synthetic construct
YLEQISG

SEQ ID NO: 99242 - protein, 7 aa, synthetic construct
SPQQKLL

SEQ ID NO: 99243 - protein, 7 aa, synthetic construct
EVAKREL

SEQ ID NO: 99244 - protein, 7 aa, synthetic construct
SPHHMPF

SEQ ID NO: 99245 - protein, 7 aa, synthetic construct
QSDKSNI

SEQ ID NO: 99246 - protein, 7 aa, synthetic construct
EVTRDHY

SEQ ID NO: 99247 - protein, 7 aa, synthetic construct
RGVGPFT

SEQ ID NO: 99248 - protein, 7 aa, synthetic construct
WANKYSA

SEQ ID NO: 99249 - protein, 7 aa, synthetic construct
EMGPLRI

SEQ ID NO: 99250 - protein, 7 aa, synthetic construct
HSEKLKW

SEQ ID NO: 99251 - protein, 7 aa, synthetic construct
EWMKVAP

SEQ ID NO: 99252 - protein, 7 aa, synthetic construct
QRPSMQP

SEQ ID NO: 99253 - protein, 7 aa, synthetic construct
LAQQDRM

SEQ ID NO: 99254 - protein, 7 aa, synthetic construct
FAQGVVA

SEQ ID NO: 99255 - protein, 7 aa, synthetic construct
ERGANIV

SEQ ID NO: 99256 - protein, 7 aa, synthetic construct
YNQKSPA

SEQ ID NO: 99257 - protein, 7 aa, synthetic construct
NVQKNSP

SEQ ID NO: 99258 - protein, 7 aa, synthetic construct
FNFKEAK

SEQ ID NO: 99259 - protein, 7 aa, synthetic construct
SSIPDHV

SEQ ID NO: 99260 - protein, 7 aa, synthetic construct
STARHVN

SEQ ID NO: 99261 - protein, 7 aa, synthetic construct
HIPIDNP

SEQ ID NO: 99262 - protein, 7 aa, synthetic construct
SYSSLDA

SEQ ID NO: 99263 - protein, 7 aa, synthetic construct
IPPYNIP

SEQ ID NO: 99264 - protein, 7 aa, synthetic construct
WPRDGPQ

SEQ ID NO: 99265 - protein, 7 aa, synthetic construct
GVLAVTS

SEQ ID NO: 99266 - protein, 7 aa, synthetic construct
YPSESAS

SEQ ID NO: 99267 - protein, 7 aa, synthetic construct
GHPRQDN

SEQ ID NO: 99268 - protein, 7 aa, synthetic construct
VLAQNSY

SEQ ID NO: 99269 - protein, 7 aa, synthetic construct
KFALYEG

SEQ ID NO: 99270 - protein, 7 aa, synthetic construct
LNQRYPI

SEQ ID NO: 99271 - protein, 7 aa, synthetic construct
NMKENVL

SEQ ID NO: 99272 - protein, 7 aa, synthetic construct
VNPTFVK

SEQ ID NO: 99273 - protein, 7 aa, synthetic construct
DHRNKDC

SEQ ID NO: 99274 - protein, 7 aa, synthetic construct
QTGHASM

SEQ ID NO: 99275 - protein, 7 aa, synthetic construct
RRDPAES

SEQ ID NO: 99276 - protein, 7 aa, synthetic construct
MHKNNIS

SEQ ID NO: 99277 - protein, 7 aa, synthetic construct
TFRSDLT

SEQ ID NO: 99278 - protein, 7 aa, synthetic construct
KTPSTPT

SEQ ID NO: 99279 - protein, 7 aa, synthetic construct
TQGRSSL

SEQ ID NO: 99280 - protein, 7 aa, synthetic construct
KEPFSIA

SEQ ID NO: 99281 - protein, 7 aa, synthetic construct
WTMGSSG

SEQ ID NO: 99282 - protein, 7 aa, synthetic construct
YKLDVKF

SEQ ID NO: 99283 - protein, 7 aa, synthetic construct
YYHVTNA

SEQ ID NO: 99284 - protein, 7 aa, synthetic construct
RNVVMLD

SEQ ID NO: 99285 - protein, 7 aa, synthetic construct
QTEANYK

SEQ ID NO: 99286 - protein, 7 aa, synthetic construct
HAREGKL

SEQ ID NO: 99287 - protein, 7 aa, synthetic construct
NVKAPGT

SEQ ID NO: 99288 - protein, 7 aa, synthetic construct
TWSTSDP

SEQ ID NO: 99289 - protein, 7 aa, synthetic construct
TKAREHP

SEQ ID NO: 99290 - protein, 7 aa, synthetic construct
KDSHSSI

SEQ ID NO: 99291 - protein, 7 aa, synthetic construct
NHPIDHP

SEQ ID NO: 99292 - protein, 7 aa, synthetic construct
KGHRLEV

SEQ ID NO: 99293 - protein, 7 aa, synthetic construct
FNSNMPP

SEQ ID NO: 99294 - protein, 7 aa, synthetic construct
EPHGLGH

SEQ ID NO: 99295 - protein, 7 aa, synthetic construct
PNMGGRV

SEQ ID NO: 99296 - protein, 7 aa, synthetic construct
MVVGIKE

SEQ ID NO: 99297 - protein, 7 aa, synthetic construct
KSLHISM

SEQ ID NO: 99298 - protein, 7 aa, synthetic construct
QYQGIIK

SEQ ID NO: 99299 - protein, 7 aa, synthetic construct
KNSDLMN

SEQ ID NO: 99300 - protein, 7 aa, synthetic construct
CSKPPAC

SEQ ID NO: 99301 - protein, 7 aa, synthetic construct
KQTSEGG

SEQ ID NO: 99302 - protein, 7 aa, synthetic construct
KPIVPGK

SEQ ID NO: 99303 - protein, 7 aa, synthetic construct
SPTQYPT

SEQ ID NO: 99304 - protein, 7 aa, synthetic construct
NKDFHET

SEQ ID NO: 99305 - protein, 7 aa, synthetic construct
TGRVQDE

SEQ ID NO: 99306 - protein, 7 aa, synthetic construct
RVYNEHA

SEQ ID NO: 99307 - protein, 7 aa, synthetic construct
YPPQRGL

SEQ ID NO: 99308 - protein, 7 aa, synthetic construct
MGPRVPF

SEQ ID NO: 99309 - protein, 7 aa, synthetic construct
LHNSGVK

SEQ ID NO: 99310 - protein, 7 aa, synthetic construct
LQQSLNS

SEQ ID NO: 99311 - protein, 7 aa, synthetic construct
PGFDGTG

SEQ ID NO: 99312 - protein, 7 aa, synthetic construct
PANPHII

SEQ ID NO: 99313 - protein, 7 aa, synthetic construct
GMSQQLE

SEQ ID NO: 99314 - protein, 7 aa, synthetic construct
HQIQGDA

SEQ ID NO: 99315 - protein, 7 aa, synthetic construct
HVASPPL

SEQ ID NO: 99316 - protein, 7 aa, synthetic construct
GREIAER

SEQ ID NO: 99317 - protein, 7 aa, synthetic construct
EFHPHGV

SEQ ID NO: 99318 - protein, 7 aa, synthetic construct
IIHERDA

SEQ ID NO: 99319 - protein, 7 aa, synthetic construct
TVSLDRV

SEQ ID NO: 99320 - protein, 7 aa, synthetic construct
AHMESQR

SEQ ID NO: 99321 - protein, 7 aa, synthetic construct
TSPLKYE

SEQ ID NO: 99322 - protein, 7 aa, synthetic construct
WSTQTEM

SEQ ID NO: 99323 - protein, 7 aa, synthetic construct
NTLGNYT

SEQ ID NO: 99324 - protein, 7 aa, synthetic construct
HENGFVK

SEQ ID NO: 99325 - protein, 7 aa, synthetic construct
KNIGTAT

SEQ ID NO: 99326 - protein, 7 aa, synthetic construct
VLTHTGM

SEQ ID NO: 99327 - protein, 7 aa, synthetic construct
NQGLWPD

SEQ ID NO: 99328 - protein, 7 aa, synthetic construct
NSNQKVF

SEQ ID NO: 99329 - protein, 7 aa, synthetic construct
ALPAFST

SEQ ID NO: 99330 - protein, 7 aa, synthetic construct
DTTHFTI

SEQ ID NO: 99331 - protein, 7 aa, synthetic construct
DLVGNQF

SEQ ID NO: 99332 - protein, 7 aa, synthetic construct
NIKTLYA

SEQ ID NO: 99333 - protein, 7 aa, synthetic construct
LQIQSVS

SEQ ID NO: 99334 - protein, 7 aa, synthetic construct
ATHLTEM

SEQ ID NO: 99335 - protein, 7 aa, synthetic construct
RHVQMIG

SEQ ID NO: 99336 - protein, 7 aa, synthetic construct
VPANSER

SEQ ID NO: 99337 - protein, 7 aa, synthetic construct
TSAREIN

SEQ ID NO: 99338 - protein, 7 aa, synthetic construct
GATQTDF

SEQ ID NO: 99339 - protein, 7 aa, synthetic construct
QDPAANS

SEQ ID NO: 99340 - protein, 7 aa, synthetic construct
PMATAKS

SEQ ID NO: 99341 - protein, 7 aa, synthetic construct
AHGAGGQ

SEQ ID NO: 99342 - protein, 7 aa, synthetic construct
MHPGHFE

SEQ ID NO: 99343 - protein, 7 aa, synthetic construct
RMERIAD

SEQ ID NO: 99344 - protein, 7 aa, synthetic construct
NLEKAEI

SEQ ID NO: 99345 - protein, 7 aa, synthetic construct
NVKDKTL

SEQ ID NO: 99346 - protein, 7 aa, synthetic construct
KNTQAAP

SEQ ID NO: 99347 - protein, 7 aa, synthetic construct
GPKDGRP

SEQ ID NO: 99348 - protein, 7 aa, synthetic construct
LAYGRNQ

SEQ ID NO: 99349 - protein, 7 aa, synthetic construct
INHRMNL

SEQ ID NO: 99350 - protein, 7 aa, synthetic construct
HSMKLMT

SEQ ID NO: 99351 - protein, 7 aa, synthetic construct
NKDMLAH

SEQ ID NO: 99352 - protein, 7 aa, synthetic construct
SLTDANI

SEQ ID NO: 99353 - protein, 7 aa, synthetic construct
TRVAEQP

SEQ ID NO: 99354 - protein, 7 aa, synthetic construct
CRPIDCA

SEQ ID NO: 99355 - protein, 7 aa, synthetic construct
IQDRLSK

SEQ ID NO: 99356 - protein, 7 aa, synthetic construct
HGPSLTY

SEQ ID NO: 99357 - protein, 7 aa, synthetic construct
GSGVSYV

SEQ ID NO: 99358 - protein, 7 aa, synthetic construct
PEPVGNA

SEQ ID NO: 99359 - protein, 7 aa, synthetic construct
KKSEGFG

SEQ ID NO: 99360 - protein, 7 aa, synthetic construct
TGVANTI

SEQ ID NO: 99361 - protein, 7 aa, synthetic construct
NSDKVRA

SEQ ID NO: 99362 - protein, 7 aa, synthetic construct
TPYRDGS

SEQ ID NO: 99363 - protein, 7 aa, synthetic construct
QKETKEK

SEQ ID NO: 99364 - protein, 7 aa, synthetic construct
SIRPQMP

SEQ ID NO: 99365 - protein, 7 aa, synthetic construct
THRTQFT

SEQ ID NO: 99366 - protein, 7 aa, synthetic construct
HFHRAED

SEQ ID NO: 99367 - protein, 7 aa, synthetic construct
NPPKGAS

SEQ ID NO: 99368 - protein, 7 aa, synthetic construct
LHKHAPY

SEQ ID NO: 99369 - protein, 7 aa, synthetic construct
YTMGHMD

SEQ ID NO: 99370 - protein, 7 aa, synthetic construct
AHHHIAD

SEQ ID NO: 99371 - protein, 7 aa, synthetic construct
LLTMQDV

SEQ ID NO: 99372 - protein, 7 aa, synthetic construct
QFTLTVE

SEQ ID NO: 99373 - protein, 7 aa, synthetic construct
NRSGPLE

SEQ ID NO: 99374 - protein, 7 aa, synthetic construct
NTSFVAE

SEQ ID NO: 99375 - protein, 7 aa, synthetic construct
EHGELKY

SEQ ID NO: 99376 - protein, 7 aa, synthetic construct
LYRGNNI

SEQ ID NO: 99377 - protein, 7 aa, synthetic construct
TIMGVLD

SEQ ID NO: 99378 - protein, 7 aa, synthetic construct
WASYTTH

SEQ ID NO: 99379 - protein, 7 aa, synthetic construct
NAITKQC

SEQ ID NO: 99380 - protein, 7 aa, synthetic construct
ENRAQLE

SEQ ID NO: 99381 - protein, 7 aa, synthetic construct
SNKAIGM

SEQ ID NO: 99382 - protein, 7 aa, synthetic construct
TERKYEG

SEQ ID NO: 99383 - protein, 7 aa, synthetic construct
MVGTQPH

SEQ ID NO: 99384 - protein, 7 aa, synthetic construct
WARDSPE

SEQ ID NO: 99385 - protein, 7 aa, synthetic construct
QSREHLI

SEQ ID NO: 99386 - protein, 7 aa, synthetic construct
SVYVGNH

SEQ ID NO: 99387 - protein, 7 aa, synthetic construct
TRDLSFN

SEQ ID NO: 99388 - protein, 7 aa, synthetic construct
TRVSLGT

SEQ ID NO: 99389 - protein, 7 aa, synthetic construct
DIYTAVD

SEQ ID NO: 99390 - protein, 7 aa, synthetic construct
IHASIVK

SEQ ID NO: 99391 - protein, 7 aa, synthetic construct
TSVPIIQ

SEQ ID NO: 99392 - protein, 7 aa, synthetic construct
SSETKMD

SEQ ID NO: 99393 - protein, 7 aa, synthetic construct
VYKAAYS

SEQ ID NO: 99394 - protein, 7 aa, synthetic construct
WSDGLMM

SEQ ID NO: 99395 - protein, 7 aa, synthetic construct
NFKHADH

SEQ ID NO: 99396 - protein, 7 aa, synthetic construct
MSGLQHK

SEQ ID NO: 99397 - protein, 7 aa, synthetic construct
IQIAAQQ

SEQ ID NO: 99398 - protein, 7 aa, synthetic construct
HKPNLYH

SEQ ID NO: 99399 - protein, 7 aa, synthetic construct
HMGKHNN

SEQ ID NO: 99400 - protein, 7 aa, synthetic construct
RAHEVGQ

SEQ ID NO: 99401 - protein, 7 aa, synthetic construct
PLLSTVS

SEQ ID NO: 99402 - protein, 7 aa, synthetic construct
DGHQRNL

SEQ ID NO: 99403 - protein, 7 aa, synthetic construct
NPNSQSY

SEQ ID NO: 99404 - protein, 7 aa, synthetic construct
YENHTYF

SEQ ID NO: 99405 - protein, 7 aa, synthetic construct
SQMRASD

SEQ ID NO: 99406 - protein, 7 aa, synthetic construct
EMKKIYL

SEQ ID NO: 99407 - protein, 7 aa, synthetic construct
NFAIEKA

SEQ ID NO: 99408 - protein, 7 aa, synthetic construct
ANMNAVG

SEQ ID NO: 99409 - protein, 7 aa, synthetic construct
KHFDIEL

SEQ ID NO: 99410 - protein, 7 aa, synthetic construct
NNGKNQA

SEQ ID NO: 99411 - protein, 7 aa, synthetic construct
SNRGEQH

SEQ ID NO: 99412 - protein, 7 aa, synthetic construct
NTNHQEA

SEQ ID NO: 99413 - protein, 7 aa, synthetic construct
YVTASNL

SEQ ID NO: 99414 - protein, 7 aa, synthetic construct
DYKQKDG

SEQ ID NO: 99415 - protein, 7 aa, synthetic construct
ALQNHPV

SEQ ID NO: 99416 - protein, 7 aa, synthetic construct
RDHQESK

SEQ ID NO: 99417 - protein, 7 aa, synthetic construct
RDNWVSQ

SEQ ID NO: 99418 - protein, 7 aa, synthetic construct
RRTHIEG

SEQ ID NO: 99419 - protein, 7 aa, synthetic construct
PMHDAYK

SEQ ID NO: 99420 - protein, 7 aa, synthetic construct
GSQRVEF

SEQ ID NO: 99421 - protein, 7 aa, synthetic construct
DAHPNQA

SEQ ID NO: 99422 - protein, 7 aa, synthetic construct
LRNMMEE

SEQ ID NO: 99423 - protein, 7 aa, synthetic construct
KSSTIEC

SEQ ID NO: 99424 - protein, 7 aa, synthetic construct
MTHNDAA

SEQ ID NO: 99425 - protein, 7 aa, synthetic construct
YHLSRDL

SEQ ID NO: 99426 - protein, 7 aa, synthetic construct
MAGHKNL

SEQ ID NO: 99427 - protein, 7 aa, synthetic construct
VNQPERQ

SEQ ID NO: 99428 - protein, 7 aa, synthetic construct
RYQQGLV

SEQ ID NO: 99429 - protein, 7 aa, synthetic construct
KIAMTNI

SEQ ID NO: 99430 - protein, 7 aa, synthetic construct
RHTPMTS

SEQ ID NO: 99431 - protein, 7 aa, synthetic construct
LQLKLGE

SEQ ID NO: 99432 - protein, 7 aa, synthetic construct
LNTEAQT

SEQ ID NO: 99433 - protein, 7 aa, synthetic construct
FVRNNIE

SEQ ID NO: 99434 - protein, 7 aa, synthetic construct
VGNVGNW

SEQ ID NO: 99435 - protein, 7 aa, synthetic construct
LNGERQI

SEQ ID NO: 99436 - protein, 7 aa, synthetic construct
NPGQKPM

SEQ ID NO: 99437 - protein, 7 aa, synthetic construct
ATAGPLP

SEQ ID NO: 99438 - protein, 7 aa, synthetic construct
WDQYSTK

SEQ ID NO: 99439 - protein, 7 aa, synthetic construct
HRNDMHE

SEQ ID NO: 99440 - protein, 7 aa, synthetic construct
AGAPITA

SEQ ID NO: 99441 - protein, 7 aa, synthetic construct
DARTTDS

SEQ ID NO: 99442 - protein, 7 aa, synthetic construct
MNMHPAG

SEQ ID NO: 99443 - protein, 7 aa, synthetic construct
VEIKMET

SEQ ID NO: 99444 - protein, 7 aa, synthetic construct
HQVNGQV

SEQ ID NO: 99445 - protein, 7 aa, synthetic construct
ERQMYAG

SEQ ID NO: 99446 - protein, 7 aa, synthetic construct
INGHTYV

SEQ ID NO: 99447 - protein, 7 aa, synthetic construct
DRMPDTW

SEQ ID NO: 99448 - protein, 7 aa, synthetic construct
QHRHLTS

SEQ ID NO: 99449 - protein, 7 aa, synthetic construct
MQAQQSR

SEQ ID NO: 99450 - protein, 7 aa, synthetic construct
AANIKDL

SEQ ID NO: 99451 - protein, 7 aa, synthetic construct
VDNAERF

SEQ ID NO: 99452 - protein, 7 aa, synthetic construct
AQQHTAN

SEQ ID NO: 99453 - protein, 7 aa, synthetic construct
SYIKMGE

SEQ ID NO: 99454 - protein, 7 aa, synthetic construct
VSHLNEA

SEQ ID NO: 99455 - protein, 7 aa, synthetic construct
LSTNHPD

SEQ ID NO: 99456 - protein, 7 aa, synthetic construct
STHIEGV

SEQ ID NO: 99457 - protein, 7 aa, synthetic construct
NPSKLDV

SEQ ID NO: 99458 - protein, 7 aa, synthetic construct
MRLHTHD

SEQ ID NO: 99459 - protein, 7 aa, synthetic construct
QAQTGKM

SEQ ID NO: 99460 - protein, 7 aa, synthetic construct
YQLYPTA

SEQ ID NO: 99461 - protein, 7 aa, synthetic construct
NASMYKI

SEQ ID NO: 99462 - protein, 7 aa, synthetic construct
IKNPDHV

SEQ ID NO: 99463 - protein, 7 aa, synthetic construct
VPGTQIV

SEQ ID NO: 99464 - protein, 7 aa, synthetic construct
VEYNGTH

SEQ ID NO: 99465 - protein, 7 aa, synthetic construct
GFAHHNL

SEQ ID NO: 99466 - protein, 7 aa, synthetic construct
VWNSHKE

SEQ ID NO: 99467 - protein, 7 aa, synthetic construct
YSPVPIN

SEQ ID NO: 99468 - protein, 7 aa, synthetic construct
QISHAEV

SEQ ID NO: 99469 - protein, 7 aa, synthetic construct
YILNIPS

SEQ ID NO: 99470 - protein, 7 aa, synthetic construct
AKQEVFH

SEQ ID NO: 99471 - protein, 7 aa, synthetic construct
HQVHVKQ

SEQ ID NO: 99472 - protein, 7 aa, synthetic construct
HHMRMMD

SEQ ID NO: 99473 - protein, 7 aa, synthetic construct
FHERGVN

SEQ ID NO: 99474 - protein, 7 aa, synthetic construct
KLTREND

SEQ ID NO: 99475 - protein, 7 aa, synthetic construct
ANNGVNM

SEQ ID NO: 99476 - protein, 7 aa, synthetic construct
WSPITMN

SEQ ID NO: 99477 - protein, 7 aa, synthetic construct
MNRPLPF

SEQ ID NO: 99478 - protein, 7 aa, synthetic construct
WEGRGLE

SEQ ID NO: 99479 - protein, 7 aa, synthetic construct
HQEHPGV

SEQ ID NO: 99480 - protein, 7 aa, synthetic construct
QMVPNHP

SEQ ID NO: 99481 - protein, 7 aa, synthetic construct
QGTQALM

SEQ ID NO: 99482 - protein, 7 aa, synthetic construct
WEGNSIM

SEQ ID NO: 99483 - protein, 7 aa, synthetic construct
MEAHNMK

SEQ ID NO: 99484 - protein, 7 aa, synthetic construct
VNAKPTN

SEQ ID NO: 99485 - protein, 7 aa, synthetic construct
VEIKGTP

SEQ ID NO: 99486 - protein, 7 aa, synthetic construct
TRTEWSM

SEQ ID NO: 99487 - protein, 7 aa, synthetic construct
YSAPKST

SEQ ID NO: 99488 - protein, 7 aa, synthetic construct
SQTAAIT

SEQ ID NO: 99489 - protein, 7 aa, synthetic construct
MLTRAEE

SEQ ID NO: 99490 - protein, 7 aa, synthetic construct
QNHLNTD

SEQ ID NO: 99491 - protein, 7 aa, synthetic construct
LQSPEIR

SEQ ID NO: 99492 - protein, 7 aa, synthetic construct
TNGKMEN

SEQ ID NO: 99493 - protein, 7 aa, synthetic construct
ETLPGRN

SEQ ID NO: 99494 - protein, 7 aa, synthetic construct
IQAGYNK

SEQ ID NO: 99495 - protein, 7 aa, synthetic construct
PSNGPNL

SEQ ID NO: 99496 - protein, 7 aa, synthetic construct
NKGYEFG

SEQ ID NO: 99497 - protein, 7 aa, synthetic construct
HQDNYLP

SEQ ID NO: 99498 - protein, 7 aa, synthetic construct
PDNMGQV

SEQ ID NO: 99499 - protein, 7 aa, synthetic construct
AHREDGK

SEQ ID NO: 99500 - protein, 7 aa, synthetic construct
WRDQVVA

SEQ ID NO: 99501 - protein, 7 aa, synthetic construct
NNAMKKE

SEQ ID NO: 99502 - protein, 7 aa, synthetic construct
SSMNSNK

SEQ ID NO: 99503 - protein, 7 aa, synthetic construct
QSWKENH

SEQ ID NO: 99504 - protein, 7 aa, synthetic construct
AAKRDFV

SEQ ID NO: 99505 - protein, 7 aa, synthetic construct
THQYRVP

SEQ ID NO: 99506 - protein, 7 aa, synthetic construct
TAQTHME

SEQ ID NO: 99507 - protein, 7 aa, synthetic construct
IPSTFTG

SEQ ID NO: 99508 - protein, 7 aa, synthetic construct
INQVPNQ

SEQ ID NO: 99509 - protein, 7 aa, synthetic construct
CYQNGCE

SEQ ID NO: 99510 - protein, 7 aa, synthetic construct
HILPNEI

SEQ ID NO: 99511 - protein, 7 aa, synthetic construct
TRVSENH

SEQ ID NO: 99512 - protein, 7 aa, synthetic construct
YPTMKMD

SEQ ID NO: 99513 - protein, 7 aa, synthetic construct
LLTSSNM

SEQ ID NO: 99514 - protein, 7 aa, synthetic construct
GETQRQL

SEQ ID NO: 99515 - protein, 7 aa, synthetic construct
EEKIITG

SEQ ID NO: 99516 - protein, 7 aa, synthetic construct
VKGWEQA

SEQ ID NO: 99517 - protein, 7 aa, synthetic construct
SPHHSPV

SEQ ID NO: 99518 - protein, 7 aa, synthetic construct
TNYTGKI

SEQ ID NO: 99519 - protein, 7 aa, synthetic construct
PNREEHK

SEQ ID NO: 99520 - protein, 7 aa, synthetic construct
ATQDWTR

SEQ ID NO: 99521 - protein, 7 aa, synthetic construct
IDRAKNF

SEQ ID NO: 99522 - protein, 7 aa, synthetic construct
PIVHGPA

SEQ ID NO: 99523 - protein, 7 aa, synthetic construct
SMRTNQP

SEQ ID NO: 99524 - protein, 7 aa, synthetic construct
DSHGREL

SEQ ID NO: 99525 - protein, 7 aa, synthetic construct
MNIQMQQ

SEQ ID NO: 99526 - protein, 7 aa, synthetic construct
GNHFVEI

SEQ ID NO: 99527 - protein, 7 aa, synthetic construct
NPHKHYI

SEQ ID NO: 99528 - protein, 7 aa, synthetic construct
GQSQEVR

SEQ ID NO: 99529 - protein, 7 aa, synthetic construct
RGADDMA

SEQ ID NO: 99530 - protein, 7 aa, synthetic construct
GRIGQLP

SEQ ID NO: 99531 - protein, 7 aa, synthetic construct
ENMRTEH

SEQ ID NO: 99532 - protein, 7 aa, synthetic construct
IIHGISQ

SEQ ID NO: 99533 - protein, 7 aa, synthetic construct
TYANALS

SEQ ID NO: 99534 - protein, 7 aa, synthetic construct
ADRENVA

SEQ ID NO: 99535 - protein, 7 aa, synthetic construct
VTGVINF

SEQ ID NO: 99536 - protein, 7 aa, synthetic construct
ARLENTQ

SEQ ID NO: 99537 - protein, 7 aa, synthetic construct
PHGDMPS

SEQ ID NO: 99538 - protein, 7 aa, synthetic construct
PSVAGSK

SEQ ID NO: 99539 - protein, 7 aa, synthetic construct
PLQVRNS

SEQ ID NO: 99540 - protein, 7 aa, synthetic construct
TRTTGMF

SEQ ID NO: 99541 - protein, 7 aa, synthetic construct
VERPPAF

SEQ ID NO: 99542 - protein, 7 aa, synthetic construct
NYVPNAS

SEQ ID NO: 99543 - protein, 7 aa, synthetic construct
EAKAVSE

SEQ ID NO: 99544 - protein, 7 aa, synthetic construct
SKIDAKQ

SEQ ID NO: 99545 - protein, 7 aa, synthetic construct
PKDIIHS

SEQ ID NO: 99546 - protein, 7 aa, synthetic construct
QAYPHIQ

SEQ ID NO: 99547 - protein, 7 aa, synthetic construct
LSTDTIR

SEQ ID NO: 99548 - protein, 7 aa, synthetic construct
NDPGRLG

SEQ ID NO: 99549 - protein, 7 aa, synthetic construct
DFTPKPL

SEQ ID NO: 99550 - protein, 7 aa, synthetic construct
LRYVEGH

SEQ ID NO: 99551 - protein, 7 aa, synthetic construct
MAETRKI

SEQ ID NO: 99552 - protein, 7 aa, synthetic construct
ISLTVGP

SEQ ID NO: 99553 - protein, 7 aa, synthetic construct
EYAKGLL

SEQ ID NO: 99554 - protein, 7 aa, synthetic construct
IKVSDSM

SEQ ID NO: 99555 - protein, 7 aa, synthetic construct
SIQDMKI

SEQ ID NO: 99556 - protein, 7 aa, synthetic construct
NFATSRV

SEQ ID NO: 99557 - protein, 7 aa, synthetic construct
AGARPSH

SEQ ID NO: 99558 - protein, 7 aa, synthetic construct
FRTDTKD

SEQ ID NO: 99559 - protein, 7 aa, synthetic construct
AIKPTNC

SEQ ID NO: 99560 - protein, 7 aa, synthetic construct
GSNHWTE

SEQ ID NO: 99561 - protein, 7 aa, synthetic construct
WAKDDYA

SEQ ID NO: 99562 - protein, 7 aa, synthetic construct
KKDSHYA

SEQ ID NO: 99563 - protein, 7 aa, synthetic construct
AATHKFY

SEQ ID NO: 99564 - protein, 7 aa, synthetic construct
EQKNSPC

SEQ ID NO: 99565 - protein, 7 aa, synthetic construct
DQAITPL

SEQ ID NO: 99566 - protein, 7 aa, synthetic construct
VPYLKEI

SEQ ID NO: 99567 - protein, 7 aa, synthetic construct
ERQQSMQ

SEQ ID NO: 99568 - protein, 7 aa, synthetic construct
PHNMRPQ

SEQ ID NO: 99569 - protein, 7 aa, synthetic construct
QAAFPNR

SEQ ID NO: 99570 - protein, 7 aa, synthetic construct
VAQNHKD

SEQ ID NO: 99571 - protein, 7 aa, synthetic construct
VEQMKGK

SEQ ID NO: 99572 - protein, 7 aa, synthetic construct
AVAFSNA

SEQ ID NO: 99573 - protein, 7 aa, synthetic construct
LRDLSEH

SEQ ID NO: 99574 - protein, 7 aa, synthetic construct
FQKPANG

SEQ ID NO: 99575 - protein, 7 aa, synthetic construct
VLDGMKY

SEQ ID NO: 99576 - protein, 7 aa, synthetic construct
NRTPTQW

SEQ ID NO: 99577 - protein, 7 aa, synthetic construct
VILGSTN

SEQ ID NO: 99578 - protein, 7 aa, synthetic construct
YHKHPLP

SEQ ID NO: 99579 - protein, 7 aa, synthetic construct
GVHKIEM

SEQ ID NO: 99580 - protein, 7 aa, synthetic construct
LQHDAAR

SEQ ID NO: 99581 - protein, 7 aa, synthetic construct
HTPRGVI

SEQ ID NO: 99582 - protein, 7 aa, synthetic construct
YQFHDGK

SEQ ID NO: 99583 - protein, 7 aa, synthetic construct
IHKINYN

SEQ ID NO: 99584 - protein, 7 aa, synthetic construct
MTSGSSK

SEQ ID NO: 99585 - protein, 7 aa, synthetic construct
FMRDQTH

SEQ ID NO: 99586 - protein, 7 aa, synthetic construct
YGIGKDQ

SEQ ID NO: 99587 - protein, 7 aa, synthetic construct
FERAPQQ

SEQ ID NO: 99588 - protein, 7 aa, synthetic construct
KIPGFQY

SEQ ID NO: 99589 - protein, 7 aa, synthetic construct
KMHAPRD

SEQ ID NO: 99590 - protein, 7 aa, synthetic construct
SGVSEIG

SEQ ID NO: 99591 - protein, 7 aa, synthetic construct
LNNKLMM

SEQ ID NO: 99592 - protein, 7 aa, synthetic construct
GRLMEVS

SEQ ID NO: 99593 - protein, 7 aa, synthetic construct
YNLARLE

SEQ ID NO: 99594 - protein, 7 aa, synthetic construct
TQTEGNK

SEQ ID NO: 99595 - protein, 7 aa, synthetic construct
LSKYTMG

SEQ ID NO: 99596 - protein, 7 aa, synthetic construct
DRRDGAK

SEQ ID NO: 99597 - protein, 7 aa, synthetic construct
HPPRNEH

SEQ ID NO: 99598 - protein, 7 aa, synthetic construct
TAKWEVH

SEQ ID NO: 99599 - protein, 7 aa, synthetic construct
MHSHLKG

SEQ ID NO: 99600 - protein, 7 aa, synthetic construct
RNINLGS

SEQ ID NO: 99601 - protein, 7 aa, synthetic construct
MKKSHEQ

SEQ ID NO: 99602 - protein, 7 aa, synthetic construct
TQLEHSM

SEQ ID NO: 99603 - protein, 7 aa, synthetic construct
MKNTEKP

SEQ ID NO: 99604 - protein, 7 aa, synthetic construct
ITEAKMI

SEQ ID NO: 99605 - protein, 7 aa, synthetic construct
LIIQTKE

SEQ ID NO: 99606 - protein, 7 aa, synthetic construct
KVPHYTV

SEQ ID NO: 99607 - protein, 7 aa, synthetic construct
HTTDREM

SEQ ID NO: 99608 - protein, 7 aa, synthetic construct
EKAHFAD

SEQ ID NO: 99609 - protein, 7 aa, synthetic construct
GIMRETP

SEQ ID NO: 99610 - protein, 7 aa, synthetic construct
FSKIAAV

SEQ ID NO: 99611 - protein, 7 aa, synthetic construct
KKDEYEL

SEQ ID NO: 99612 - protein, 7 aa, synthetic construct
QHGSNDG

SEQ ID NO: 99613 - protein, 7 aa, synthetic construct
YMNSGDK

SEQ ID NO: 99614 - protein, 7 aa, synthetic construct
FAFKYQE

SEQ ID NO: 99615 - protein, 7 aa, synthetic construct
MSERRQD

SEQ ID NO: 99616 - protein, 7 aa, synthetic construct
MVMDSAP

SEQ ID NO: 99617 - protein, 7 aa, synthetic construct
RQDPAFR

SEQ ID NO: 99618 - protein, 7 aa, synthetic construct
TLDAHPV

SEQ ID NO: 99619 - protein, 7 aa, synthetic construct
IHQARQM

SEQ ID NO: 99620 - protein, 7 aa, synthetic construct
RIQMHAE

SEQ ID NO: 99621 - protein, 7 aa, synthetic construct
HDASQHI

SEQ ID NO: 99622 - protein, 7 aa, synthetic construct
SSPRIHM

SEQ ID NO: 99623 - protein, 7 aa, synthetic construct
ATNMHAM

SEQ ID NO: 99624 - protein, 7 aa, synthetic construct
QSPHTPL

SEQ ID NO: 99625 - protein, 7 aa, synthetic construct
TKMIEDT

SEQ ID NO: 99626 - protein, 7 aa, synthetic construct
EKRQMQG

SEQ ID NO: 99627 - protein, 7 aa, synthetic construct
ANADYLM

SEQ ID NO: 99628 - protein, 7 aa, synthetic construct
DWKELTM

SEQ ID NO: 99629 - protein, 7 aa, synthetic construct
DPHIAFV

SEQ ID NO: 99630 - protein, 7 aa, synthetic construct
GNHKDIH

SEQ ID NO: 99631 - protein, 7 aa, synthetic construct
TMQNVHD

SEQ ID NO: 99632 - protein, 7 aa, synthetic construct
AWGGANT

SEQ ID NO: 99633 - protein, 7 aa, synthetic construct
TTNRATG

SEQ ID NO: 99634 - protein, 7 aa, synthetic construct
RPQTSPA

SEQ ID NO: 99635 - protein, 7 aa, synthetic construct
SDPHHTE

SEQ ID NO: 99636 - protein, 7 aa, synthetic construct
SQEHGHL

SEQ ID NO: 99637 - protein, 7 aa, synthetic construct
DPPRIDR

SEQ ID NO: 99638 - protein, 7 aa, synthetic construct
AKPEQMN

SEQ ID NO: 99639 - protein, 7 aa, synthetic construct
RDHPIHL

SEQ ID NO: 99640 - protein, 7 aa, synthetic construct
PKPNDFH

SEQ ID NO: 99641 - protein, 7 aa, synthetic construct
VLEFIPS

SEQ ID NO: 99642 - protein, 7 aa, synthetic construct
DQARNDV

SEQ ID NO: 99643 - protein, 7 aa, synthetic construct
YSAIKNV

SEQ ID NO: 99644 - protein, 7 aa, synthetic construct
HGVFMLE

SEQ ID NO: 99645 - protein, 7 aa, synthetic construct
PPSHRNT

SEQ ID NO: 99646 - protein, 7 aa, synthetic construct
DTQIRRQ

SEQ ID NO: 99647 - protein, 7 aa, synthetic construct
MNLKDVA

SEQ ID NO: 99648 - protein, 7 aa, synthetic construct
HARSHYE

SEQ ID NO: 99649 - protein, 7 aa, synthetic construct
HQSMGEA

SEQ ID NO: 99650 - protein, 7 aa, synthetic construct
KQAGSVG

SEQ ID NO: 99651 - protein, 7 aa, synthetic construct
VGDQARD

SEQ ID NO: 99652 - protein, 7 aa, synthetic construct
QFQAFRE

SEQ ID NO: 99653 - protein, 7 aa, synthetic construct
DEQTDRR

SEQ ID NO: 99654 - protein, 7 aa, synthetic construct
NTKLLEG

SEQ ID NO: 99655 - protein, 7 aa, synthetic construct
DEITKNR

SEQ ID NO: 99656 - protein, 7 aa, synthetic construct
LFGDQGM

SEQ ID NO: 99657 - protein, 7 aa, synthetic construct
PRAQAEP

SEQ ID NO: 99658 - protein, 7 aa, synthetic construct
AATPQQL

SEQ ID NO: 99659 - protein, 7 aa, synthetic construct
QPQTYSN

SEQ ID NO: 99660 - protein, 7 aa, synthetic construct
EKQVNMW

SEQ ID NO: 99661 - protein, 7 aa, synthetic construct
ENGNTNA

SEQ ID NO: 99662 - protein, 7 aa, synthetic construct
HKINMIP

SEQ ID NO: 99663 - protein, 7 aa, synthetic construct
RVDSIMG

SEQ ID NO: 99664 - protein, 7 aa, synthetic construct
IRNYNDE

SEQ ID NO: 99665 - protein, 7 aa, synthetic construct
QILKIPS

SEQ ID NO: 99666 - protein, 7 aa, synthetic construct
SRNMPIQ

SEQ ID NO: 99667 - protein, 7 aa, synthetic construct
VWEKLGD

SEQ ID NO: 99668 - protein, 7 aa, synthetic construct
FEGKGQQ

SEQ ID NO: 99669 - protein, 7 aa, synthetic construct
TVTARID

SEQ ID NO: 99670 - protein, 7 aa, synthetic construct
NHHIVSG

SEQ ID NO: 99671 - protein, 7 aa, synthetic construct
WQLSDKK

SEQ ID NO: 99672 - protein, 7 aa, synthetic construct
QINRDMP

SEQ ID NO: 99673 - protein, 7 aa, synthetic construct
FPPDKSH

SEQ ID NO: 99674 - protein, 7 aa, synthetic construct
MAMGKSD

SEQ ID NO: 99675 - protein, 7 aa, synthetic construct
TTNHVQN

SEQ ID NO: 99676 - protein, 7 aa, synthetic construct
LRDPMIK

SEQ ID NO: 99677 - protein, 7 aa, synthetic construct
TKQMTLN

SEQ ID NO: 99678 - protein, 7 aa, synthetic construct
AMKSQEH

SEQ ID NO: 99679 - protein, 7 aa, synthetic construct
LNESHVG

SEQ ID NO: 99680 - protein, 7 aa, synthetic construct
ILGHEIH

SEQ ID NO: 99681 - protein, 7 aa, synthetic construct
SKQGTQS

SEQ ID NO: 99682 - protein, 7 aa, synthetic construct
LAQQAHA

SEQ ID NO: 99683 - protein, 7 aa, synthetic construct
MVRPPQV

SEQ ID NO: 99684 - protein, 7 aa, synthetic construct
YGALISG

SEQ ID NO: 99685 - protein, 7 aa, synthetic construct
DLRLRVD

SEQ ID NO: 99686 - protein, 7 aa, synthetic construct
NKGDQSV

SEQ ID NO: 99687 - protein, 7 aa, synthetic construct
VPAHEIA

SEQ ID NO: 99688 - protein, 7 aa, synthetic construct
SNISGTA

SEQ ID NO: 99689 - protein, 7 aa, synthetic construct
QLGVGVH

SEQ ID NO: 99690 - protein, 7 aa, synthetic construct
QKNSSQL

SEQ ID NO: 99691 - protein, 7 aa, synthetic construct
DPGNSSK

SEQ ID NO: 99692 - protein, 7 aa, synthetic construct
HHNEQEM

SEQ ID NO: 99693 - protein, 7 aa, synthetic construct
VKHEMAF

SEQ ID NO: 99694 - protein, 7 aa, synthetic construct
GKNQTMS

SEQ ID NO: 99695 - protein, 7 aa, synthetic construct
TQANMEH

SEQ ID NO: 99696 - protein, 7 aa, synthetic construct
QGRMFQQ

SEQ ID NO: 99697 - protein, 7 aa, synthetic construct
TTPPKGW

SEQ ID NO: 99698 - protein, 7 aa, synthetic construct
QKNVDFR

SEQ ID NO: 99699 - protein, 7 aa, synthetic construct
PGYNAKS

SEQ ID NO: 99700 - protein, 7 aa, synthetic construct
MFPTPVN

SEQ ID NO: 99701 - protein, 7 aa, synthetic construct
SEGYHNK

SEQ ID NO: 99702 - protein, 7 aa, synthetic construct
NTHSDFR

SEQ ID NO: 99703 - protein, 7 aa, synthetic construct
MRGLMMG

SEQ ID NO: 99704 - protein, 7 aa, synthetic construct
KAGTLQF

SEQ ID NO: 99705 - protein, 7 aa, synthetic construct
MVRDGVV

SEQ ID NO: 99706 - protein, 7 aa, synthetic construct
SINDRAY

SEQ ID NO: 99707 - protein, 7 aa, synthetic construct
VSHTYTM

SEQ ID NO: 99708 - protein, 7 aa, synthetic construct
NARVLVN

SEQ ID NO: 99709 - protein, 7 aa, synthetic construct
NKTNQAA

SEQ ID NO: 99710 - protein, 7 aa, synthetic construct
QGLKYHV

SEQ ID NO: 99711 - protein, 7 aa, synthetic construct
TPDWKPS

SEQ ID NO: 99712 - protein, 7 aa, synthetic construct
WPKVDSD

SEQ ID NO: 99713 - protein, 7 aa, synthetic construct
VEKPERP

SEQ ID NO: 99714 - protein, 7 aa, synthetic construct
QMKPTIE

SEQ ID NO: 99715 - protein, 7 aa, synthetic construct
YLRTGEH

SEQ ID NO: 99716 - protein, 7 aa, synthetic construct
HQAYAKI

SEQ ID NO: 99717 - protein, 7 aa, synthetic construct
MDRHYPL

SEQ ID NO: 99718 - protein, 7 aa, synthetic construct
YPGMQVY

SEQ ID NO: 99719 - protein, 7 aa, synthetic construct
YQTAQSV

SEQ ID NO: 99720 - protein, 7 aa, synthetic construct
KGPTQLV

SEQ ID NO: 99721 - protein, 7 aa, synthetic construct
TSVPDKR

SEQ ID NO: 99722 - protein, 7 aa, synthetic construct
QKNASDH

SEQ ID NO: 99723 - protein, 7 aa, synthetic construct
MASAYDG

SEQ ID NO: 99724 - protein, 7 aa, synthetic construct
PHSPNLR

SEQ ID NO: 99725 - protein, 7 aa, synthetic construct
MVHEVST

SEQ ID NO: 99726 - protein, 7 aa, synthetic construct
KTQMTGG

SEQ ID NO: 99727 - protein, 7 aa, synthetic construct
GQDKLVS

SEQ ID NO: 99728 - protein, 7 aa, synthetic construct
FHISMDS

SEQ ID NO: 99729 - protein, 7 aa, synthetic construct
LTEPKFF

SEQ ID NO: 99730 - protein, 7 aa, synthetic construct
HFSNEFK

SEQ ID NO: 99731 - protein, 7 aa, synthetic construct
PLQVNQM

SEQ ID NO: 99732 - protein, 7 aa, synthetic construct
SSQHTTQ

SEQ ID NO: 99733 - protein, 7 aa, synthetic construct
NTHKEML

SEQ ID NO: 99734 - protein, 7 aa, synthetic construct
FNEKLKE

SEQ ID NO: 99735 - protein, 7 aa, synthetic construct
RHSPHVQ

SEQ ID NO: 99736 - protein, 7 aa, synthetic construct
PHQSEPR

SEQ ID NO: 99737 - protein, 7 aa, synthetic construct
QSGQHMP

SEQ ID NO: 99738 - protein, 7 aa, synthetic construct
NFLAVSP

SEQ ID NO: 99739 - protein, 7 aa, synthetic construct
AVAPKFG

SEQ ID NO: 99740 - protein, 7 aa, synthetic construct
RFIGQEP

SEQ ID NO: 99741 - protein, 7 aa, synthetic construct
MAIPGTE

SEQ ID NO: 99742 - protein, 7 aa, synthetic construct
HQPNFPT

SEQ ID NO: 99743 - protein, 7 aa, synthetic construct
QFDRQNN

SEQ ID NO: 99744 - protein, 7 aa, synthetic construct
KQLNFTT

SEQ ID NO: 99745 - protein, 7 aa, synthetic construct
GMHNEIS

SEQ ID NO: 99746 - protein, 7 aa, synthetic construct
EMNSGQK

SEQ ID NO: 99747 - protein, 7 aa, synthetic construct
WNNKMDP

SEQ ID NO: 99748 - protein, 7 aa, synthetic construct
PSLEPQR

SEQ ID NO: 99749 - protein, 7 aa, synthetic construct
YVYSKDI

SEQ ID NO: 99750 - protein, 7 aa, synthetic construct
LHLSQGH

SEQ ID NO: 99751 - protein, 7 aa, synthetic construct
IASMKVL

SEQ ID NO: 99752 - protein, 7 aa, synthetic construct
YGDKPPW

SEQ ID NO: 99753 - protein, 7 aa, synthetic construct
AASASNR

SEQ ID NO: 99754 - protein, 7 aa, synthetic construct
KNYLIDE

SEQ ID NO: 99755 - protein, 7 aa, synthetic construct
TKSANYL

SEQ ID NO: 99756 - protein, 7 aa, synthetic construct
WDKSGKI

SEQ ID NO: 99757 - protein, 7 aa, synthetic construct
TAVPKRD

SEQ ID NO: 99758 - protein, 7 aa, synthetic construct
GGAVIPR

SEQ ID NO: 99759 - protein, 7 aa, synthetic construct
MDYINRS

SEQ ID NO: 99760 - protein, 7 aa, synthetic construct
YQAKAVY

SEQ ID NO: 99761 - protein, 7 aa, synthetic construct
ISTLASE

SEQ ID NO: 99762 - protein, 7 aa, synthetic construct
RERVMDV

SEQ ID NO: 99763 - protein, 7 aa, synthetic construct
HEKLGLV

SEQ ID NO: 99764 - protein, 7 aa, synthetic construct
KGYEPHN

SEQ ID NO: 99765 - protein, 7 aa, synthetic construct
HDKAADK

SEQ ID NO: 99766 - protein, 7 aa, synthetic construct
VYNTKYP

SEQ ID NO: 99767 - protein, 7 aa, synthetic construct
RPSTTAP

SEQ ID NO: 99768 - protein, 7 aa, synthetic construct
FAHKQDS

SEQ ID NO: 99769 - protein, 7 aa, synthetic construct
AHVSNTK

SEQ ID NO: 99770 - protein, 7 aa, synthetic construct
NMSNKSD

SEQ ID NO: 99771 - protein, 7 aa, synthetic construct
ALVAVGH

SEQ ID NO: 99772 - protein, 7 aa, synthetic construct
MMVPDVM

SEQ ID NO: 99773 - protein, 7 aa, synthetic construct
VPTLANY

SEQ ID NO: 99774 - protein, 7 aa, synthetic construct
INPYPIQ

SEQ ID NO: 99775 - protein, 7 aa, synthetic construct
LKHGWDG

SEQ ID NO: 99776 - protein, 7 aa, synthetic construct
KTGQDRP

SEQ ID NO: 99777 - protein, 7 aa, synthetic construct
DKTLHIA

SEQ ID NO: 99778 - protein, 7 aa, synthetic construct
SNHLQSK

SEQ ID NO: 99779 - protein, 7 aa, synthetic construct
ITHDAFI

SEQ ID NO: 99780 - protein, 7 aa, synthetic construct
NEHKNST

SEQ ID NO: 99781 - protein, 7 aa, synthetic construct
EGERDGR

SEQ ID NO: 99782 - protein, 7 aa, synthetic construct
DHRGFKD

SEQ ID NO: 99783 - protein, 7 aa, synthetic construct
MVVRQQD

SEQ ID NO: 99784 - protein, 7 aa, synthetic construct
MTTGWHE

SEQ ID NO: 99785 - protein, 7 aa, synthetic construct
FLTFTTD

SEQ ID NO: 99786 - protein, 7 aa, synthetic construct
QTPPTNP

SEQ ID NO: 99787 - protein, 7 aa, synthetic construct
VGTKYND

SEQ ID NO: 99788 - protein, 7 aa, synthetic construct
QKAFNET

SEQ ID NO: 99789 - protein, 7 aa, synthetic construct
HEHFVQQ

SEQ ID NO: 99790 - protein, 7 aa, synthetic construct
DHRTVTK

SEQ ID NO: 99791 - protein, 7 aa, synthetic construct
FADQSSR

SEQ ID NO: 99792 - protein, 7 aa, synthetic construct
FPAASRM

SEQ ID NO: 99793 - protein, 7 aa, synthetic construct
VQALYSP

SEQ ID NO: 99794 - protein, 7 aa, synthetic construct
LHNASLK

SEQ ID NO: 99795 - protein, 7 aa, synthetic construct
RDGMGSS

SEQ ID NO: 99796 - protein, 7 aa, synthetic construct
WGSMAFA

SEQ ID NO: 99797 - protein, 7 aa, synthetic construct
NTFLTGD

SEQ ID NO: 99798 - protein, 7 aa, synthetic construct
RIEHTGM

SEQ ID NO: 99799 - protein, 7 aa, synthetic construct
WREGLMG

SEQ ID NO: 99800 - protein, 7 aa, synthetic construct
RYQDIKL

SEQ ID NO: 99801 - protein, 7 aa, synthetic construct
KGEYMYT

SEQ ID NO: 99802 - protein, 7 aa, synthetic construct
RIINRAD

SEQ ID NO: 99803 - protein, 7 aa, synthetic construct
KFRTIDQ

SEQ ID NO: 99804 - protein, 7 aa, synthetic construct
HVGFPTS

SEQ ID NO: 99805 - protein, 7 aa, synthetic construct
KLMEPMA

SEQ ID NO: 99806 - protein, 7 aa, synthetic construct
DRFGVAK

SEQ ID NO: 99807 - protein, 7 aa, synthetic construct
FVKSWKE

SEQ ID NO: 99808 - protein, 7 aa, synthetic construct
QDMRTPN

SEQ ID NO: 99809 - protein, 7 aa, synthetic construct
LPPYMVA

SEQ ID NO: 99810 - protein, 7 aa, synthetic construct
KSNAMNV

SEQ ID NO: 99811 - protein, 7 aa, synthetic construct
HVSRDKF

SEQ ID NO: 99812 - protein, 7 aa, synthetic construct
HNNYARP

SEQ ID NO: 99813 - protein, 7 aa, synthetic construct
DEVHAIA

SEQ ID NO: 99814 - protein, 7 aa, synthetic construct
EKAQKVN

SEQ ID NO: 99815 - protein, 7 aa, synthetic construct
PHSKQNH

SEQ ID NO: 99816 - protein, 7 aa, synthetic construct
FAQTHVD

SEQ ID NO: 99817 - protein, 7 aa, synthetic construct
TDHHPTE

SEQ ID NO: 99818 - protein, 7 aa, synthetic construct
KSQQGKD

SEQ ID NO: 99819 - protein, 7 aa, synthetic construct
KTPEEMM

SEQ ID NO: 99820 - protein, 7 aa, synthetic construct
IMNDGDA

SEQ ID NO: 99821 - protein, 7 aa, synthetic construct
WIAQTNT

SEQ ID NO: 99822 - protein, 7 aa, synthetic construct
KETSQEP

SEQ ID NO: 99823 - protein, 7 aa, synthetic construct
NTQHNRY

SEQ ID NO: 99824 - protein, 7 aa, synthetic construct
NGSGAPF

SEQ ID NO: 99825 - protein, 7 aa, synthetic construct
IQQLGVA

SEQ ID NO: 99826 - protein, 7 aa, synthetic construct
EHPRSAV

SEQ ID NO: 99827 - protein, 7 aa, synthetic construct
NQSMQKI

SEQ ID NO: 99828 - protein, 7 aa, synthetic construct
VQSARMM

SEQ ID NO: 99829 - protein, 7 aa, synthetic construct
THLAHKI

SEQ ID NO: 99830 - protein, 7 aa, synthetic construct
QSRFDTA

SEQ ID NO: 99831 - protein, 7 aa, synthetic construct
TRDHTYL

SEQ ID NO: 99832 - protein, 7 aa, synthetic construct
DRVTITM

SEQ ID NO: 99833 - protein, 7 aa, synthetic construct
KMKLNVV

SEQ ID NO: 99834 - protein, 7 aa, synthetic construct
NTPQHTD

SEQ ID NO: 99835 - protein, 7 aa, synthetic construct
WTNTHGE

SEQ ID NO: 99836 - protein, 7 aa, synthetic construct
HATKGMI

SEQ ID NO: 99837 - protein, 7 aa, synthetic construct
MMSGKQM

SEQ ID NO: 99838 - protein, 7 aa, synthetic construct
PMIPGIS

SEQ ID NO: 99839 - protein, 7 aa, synthetic construct
IHTVSIT

SEQ ID NO: 99840 - protein, 7 aa, synthetic construct
GLIRYPA

SEQ ID NO: 99841 - protein, 7 aa, synthetic construct
IETSKMH

SEQ ID NO: 99842 - protein, 7 aa, synthetic construct
EKLNAQP

SEQ ID NO: 99843 - protein, 7 aa, synthetic construct
RTNGAGW

SEQ ID NO: 99844 - protein, 7 aa, synthetic construct
PQDFRDL

SEQ ID NO: 99845 - protein, 7 aa, synthetic construct
QTRQFES

SEQ ID NO: 99846 - protein, 7 aa, synthetic construct
VYEKVKD

SEQ ID NO: 99847 - protein, 7 aa, synthetic construct
FASGGDI

SEQ ID NO: 99848 - protein, 7 aa, synthetic construct
SFVHGQT

SEQ ID NO: 99849 - protein, 7 aa, synthetic construct
WDPKVNR

SEQ ID NO: 99850 - protein, 7 aa, synthetic construct
KASNAGA

SEQ ID NO: 99851 - protein, 7 aa, synthetic construct
NHEYKQI

SEQ ID NO: 99852 - protein, 7 aa, synthetic construct
KGKQEES

SEQ ID NO: 99853 - protein, 7 aa, synthetic construct
DAVQVPS

SEQ ID NO: 99854 - protein, 7 aa, synthetic construct
EIKVFGS

SEQ ID NO: 99855 - protein, 7 aa, synthetic construct
KNTTSAV

SEQ ID NO: 99856 - protein, 7 aa, synthetic construct
NRYEPTK

SEQ ID NO: 99857 - protein, 7 aa, synthetic construct
KTNEINI

SEQ ID NO: 99858 - protein, 7 aa, synthetic construct
PHPNTKL

SEQ ID NO: 99859 - protein, 7 aa, synthetic construct
QPKMPYI

SEQ ID NO: 99860 - protein, 7 aa, synthetic construct
GYPYLTA

SEQ ID NO: 99861 - protein, 7 aa, synthetic construct
QNHHQKG

SEQ ID NO: 99862 - protein, 7 aa, synthetic construct
SAGKPDF

SEQ ID NO: 99863 - protein, 7 aa, synthetic construct
WYRDGEI

SEQ ID NO: 99864 - protein, 7 aa, synthetic construct
KQGNAMA

SEQ ID NO: 99865 - protein, 7 aa, synthetic construct
NISGRSP

SEQ ID NO: 99866 - protein, 7 aa, synthetic construct
HSVSKAP

SEQ ID NO: 99867 - protein, 7 aa, synthetic construct
ALGAKEQ

SEQ ID NO: 99868 - protein, 7 aa, synthetic construct
TEGKVNR

SEQ ID NO: 99869 - protein, 7 aa, synthetic construct
GGPAGLM

SEQ ID NO: 99870 - protein, 7 aa, synthetic construct
LENIYGP

SEQ ID NO: 99871 - protein, 7 aa, synthetic construct
WMKANDR

SEQ ID NO: 99872 - protein, 7 aa, synthetic construct
QGKIERE

SEQ ID NO: 99873 - protein, 7 aa, synthetic construct
IVGANIY

SEQ ID NO: 99874 - protein, 7 aa, synthetic construct
NRNANTA

SEQ ID NO: 99875 - protein, 7 aa, synthetic construct
RDMARDN

SEQ ID NO: 99876 - protein, 7 aa, synthetic construct
VYASGMG

SEQ ID NO: 99877 - protein, 7 aa, synthetic construct
VNHVVIN

SEQ ID NO: 99878 - protein, 7 aa, synthetic construct
WQPNSHL

SEQ ID NO: 99879 - protein, 7 aa, synthetic construct
VKHLSLI

SEQ ID NO: 99880 - protein, 7 aa, synthetic construct
QTKGTTG

SEQ ID NO: 99881 - protein, 7 aa, synthetic construct
MNKLNIE

SEQ ID NO: 99882 - protein, 7 aa, synthetic construct
FLEPRMD

SEQ ID NO: 99883 - protein, 7 aa, synthetic construct
GMRTKPD

SEQ ID NO: 99884 - protein, 7 aa, synthetic construct
IVNTTPP

SEQ ID NO: 99885 - protein, 7 aa, synthetic construct
LWNNTPP

SEQ ID NO: 99886 - protein, 7 aa, synthetic construct
MAHHMSE

SEQ ID NO: 99887 - protein, 7 aa, synthetic construct
HSKHFNP

SEQ ID NO: 99888 - protein, 7 aa, synthetic construct
GQGIYKI

SEQ ID NO: 99889 - protein, 7 aa, synthetic construct
LPPKEQG

SEQ ID NO: 99890 - protein, 7 aa, synthetic construct
GTSRYQT

SEQ ID NO: 99891 - protein, 7 aa, synthetic construct
YDVGFQN

SEQ ID NO: 99892 - protein, 7 aa, synthetic construct
KNAQQVW

SEQ ID NO: 99893 - protein, 7 aa, synthetic construct
PFRETGM

SEQ ID NO: 99894 - protein, 7 aa, synthetic construct
PRVTQNI

SEQ ID NO: 99895 - protein, 7 aa, synthetic construct
KKEWSLG

SEQ ID NO: 99896 - protein, 7 aa, synthetic construct
NRDYLIQ

SEQ ID NO: 99897 - protein, 7 aa, synthetic construct
IVREENS

SEQ ID NO: 99898 - protein, 7 aa, synthetic construct
IPKFNSN

SEQ ID NO: 99899 - protein, 7 aa, synthetic construct
HSQQIQQ

SEQ ID NO: 99900 - protein, 7 aa, synthetic construct
DFTSGNK

SEQ ID NO: 99901 - protein, 7 aa, synthetic construct
KFNLTNM

SEQ ID NO: 99902 - protein, 7 aa, synthetic construct
LVQAPLQ

SEQ ID NO: 99903 - protein, 7 aa, synthetic construct
QLGTSTL

SEQ ID NO: 99904 - protein, 7 aa, synthetic construct
RLQGELT

SEQ ID NO: 99905 - protein, 7 aa, synthetic construct
PTLRGYE

SEQ ID NO: 99906 - protein, 7 aa, synthetic construct
RPTNSMS

SEQ ID NO: 99907 - protein, 7 aa, synthetic construct
DNMKQQY

SEQ ID NO: 99908 - protein, 7 aa, synthetic construct
VFNMAIP

SEQ ID NO: 99909 - protein, 7 aa, synthetic construct
STGPLHT

SEQ ID NO: 99910 - protein, 7 aa, synthetic construct
PFKTVSI

SEQ ID NO: 99911 - protein, 7 aa, synthetic construct
EYNISIP

SEQ ID NO: 99912 - protein, 7 aa, synthetic construct
EKSTGTT

SEQ ID NO: 99913 - protein, 7 aa, synthetic construct
SYGKFGE

SEQ ID NO: 99914 - protein, 7 aa, synthetic construct
YMEGIHP

SEQ ID NO: 99915 - protein, 7 aa, synthetic construct
RIEGGQE

SEQ ID NO: 99916 - protein, 7 aa, synthetic construct
DMSLKFT

SEQ ID NO: 99917 - protein, 7 aa, synthetic construct
VNSAYSS

SEQ ID NO: 99918 - protein, 7 aa, synthetic construct
GWHGPAA

SEQ ID NO: 99919 - protein, 7 aa, synthetic construct
DPTGANG

SEQ ID NO: 99920 - protein, 7 aa, synthetic construct
KSPQTSL

SEQ ID NO: 99921 - protein, 7 aa, synthetic construct
LIGNNLG

SEQ ID NO: 99922 - protein, 7 aa, synthetic construct
PHFVGPS

SEQ ID NO: 99923 - protein, 7 aa, synthetic construct
TKSAGYY

SEQ ID NO: 99924 - protein, 7 aa, synthetic construct
SNQYTHD

SEQ ID NO: 99925 - protein, 7 aa, synthetic construct
PQMRGNL

SEQ ID NO: 99926 - protein, 7 aa, synthetic construct
TAHQNHF

SEQ ID NO: 99927 - protein, 7 aa, synthetic construct
DAGKSII

SEQ ID NO: 99928 - protein, 7 aa, synthetic construct
VMPGNLQ

SEQ ID NO: 99929 - protein, 7 aa, synthetic construct
FNNSNKG

SEQ ID NO: 99930 - protein, 7 aa, synthetic construct
HKMEVHV

SEQ ID NO: 99931 - protein, 7 aa, synthetic construct
YQLRDIG

SEQ ID NO: 99932 - protein, 7 aa, synthetic construct
GPMAHNH

SEQ ID NO: 99933 - protein, 7 aa, synthetic construct
ANVYKSD

SEQ ID NO: 99934 - protein, 7 aa, synthetic construct
TRGFDDN

SEQ ID NO: 99935 - protein, 7 aa, synthetic construct
LFTESPQ

SEQ ID NO: 99936 - protein, 7 aa, synthetic construct
MKIHSMN

SEQ ID NO: 99937 - protein, 7 aa, synthetic construct
FGKAEQD

SEQ ID NO: 99938 - protein, 7 aa, synthetic construct
FKEKEYV

SEQ ID NO: 99939 - protein, 7 aa, synthetic construct
RQDQGPY

SEQ ID NO: 99940 - protein, 7 aa, synthetic construct
SHDGLKF

SEQ ID NO: 99941 - protein, 7 aa, synthetic construct
FQKLEHG

SEQ ID NO: 99942 - protein, 7 aa, synthetic construct
ANLPVEL

SEQ ID NO: 99943 - protein, 7 aa, synthetic construct
HALDYDK

SEQ ID NO: 99944 - protein, 7 aa, synthetic construct
NPEWNLA

SEQ ID NO: 99945 - protein, 7 aa, synthetic construct
MYQDNQA

SEQ ID NO: 99946 - protein, 7 aa, synthetic construct
AGERWQT

SEQ ID NO: 99947 - protein, 7 aa, synthetic construct
WEAKNHL

SEQ ID NO: 99948 - protein, 7 aa, synthetic construct
WDALQRD

SEQ ID NO: 99949 - protein, 7 aa, synthetic construct
SFTNSKL

SEQ ID NO: 99950 - protein, 7 aa, synthetic construct
STKTPAA

SEQ ID NO: 99951 - protein, 7 aa, synthetic construct
QDHKWTT

SEQ ID NO: 99952 - protein, 7 aa, synthetic construct
ATTHRAF

SEQ ID NO: 99953 - protein, 7 aa, synthetic construct
YFKPDAR

SEQ ID NO: 99954 - protein, 7 aa, synthetic construct
RPDLRGY

SEQ ID NO: 99955 - protein, 7 aa, synthetic construct
FQSYSSG

SEQ ID NO: 99956 - protein, 7 aa, synthetic construct
TKEDQVL

SEQ ID NO: 99957 - protein, 7 aa, synthetic construct
NKLTQHM

SEQ ID NO: 99958 - protein, 7 aa, synthetic construct
DRAAFNP

SEQ ID NO: 99959 - protein, 7 aa, synthetic construct
RSDQPNE

SEQ ID NO: 99960 - protein, 7 aa, synthetic construct
RLLLGAE

SEQ ID NO: 99961 - protein, 7 aa, synthetic construct
SHKISNE

SEQ ID NO: 99962 - protein, 7 aa, synthetic construct
SAASKWN

SEQ ID NO: 99963 - protein, 7 aa, synthetic construct
TLDSGLN

SEQ ID NO: 99964 - protein, 7 aa, synthetic construct
YYVQGEG

SEQ ID NO: 99965 - protein, 7 aa, synthetic construct
YHMKIDV

SEQ ID NO: 99966 - protein, 7 aa, synthetic construct
VDKIMKT

SEQ ID NO: 99967 - protein, 7 aa, synthetic construct
SGVPGSS

SEQ ID NO: 99968 - protein, 7 aa, synthetic construct
ASPQPMS

SEQ ID NO: 99969 - protein, 7 aa, synthetic construct
CTKSCEE

SEQ ID NO: 99970 - protein, 7 aa, synthetic construct
GDNGIQF

SEQ ID NO: 99971 - protein, 7 aa, synthetic construct
IREQKGS

SEQ ID NO: 99972 - protein, 7 aa, synthetic construct
HKNKSEL

SEQ ID NO: 99973 - protein, 7 aa, synthetic construct
TQPTMII

SEQ ID NO: 99974 - protein, 7 aa, synthetic construct
GVPLGTR

SEQ ID NO: 99975 - protein, 7 aa, synthetic construct
SKANMME

SEQ ID NO: 99976 - protein, 7 aa, synthetic construct
KKSDTTS

SEQ ID NO: 99977 - protein, 7 aa, synthetic construct
EAGVDSR

SEQ ID NO: 99978 - protein, 7 aa, synthetic construct
SAVPNSS

SEQ ID NO: 99979 - protein, 7 aa, synthetic construct
GQQEKPR

SEQ ID NO: 99980 - protein, 7 aa, synthetic construct
RMSDQET

SEQ ID NO: 99981 - protein, 7 aa, synthetic construct
SSARIEK

SEQ ID NO: 99982 - protein, 7 aa, synthetic construct
GRIDPKD

SEQ ID NO: 99983 - protein, 7 aa, synthetic construct
EPRPGNT

SEQ ID NO: 99984 - protein, 7 aa, synthetic construct
YDTGHNL

SEQ ID NO: 99985 - protein, 7 aa, synthetic construct
MASKVPW

SEQ ID NO: 99986 - protein, 7 aa, synthetic construct
RAADNPY

SEQ ID NO: 99987 - protein, 7 aa, synthetic construct
HDGEPKP

SEQ ID NO: 99988 - protein, 7 aa, synthetic construct
SAKEFTM

SEQ ID NO: 99989 - protein, 7 aa, synthetic construct
PFRQEMR

SEQ ID NO: 99990 - protein, 7 aa, synthetic construct
WRAAEHM

SEQ ID NO: 99991 - protein, 7 aa, synthetic construct
HFDPKGH

SEQ ID NO: 99992 - protein, 7 aa, synthetic construct
VYATAMP

SEQ ID NO: 99993 - protein, 7 aa, synthetic construct
KETTIDR

SEQ ID NO: 99994 - protein, 7 aa, synthetic construct
SGQKIVL

SEQ ID NO: 99995 - protein, 7 aa, synthetic construct
AQPNKMQ

SEQ ID NO: 99996 - protein, 7 aa, synthetic construct
WNKVMDE

SEQ ID NO: 99997 - protein, 7 aa, synthetic construct
NNMLPHV

SEQ ID NO: 99998 - protein, 7 aa, synthetic construct
EGHNGYS

SEQ ID NO: 99999 - protein, 7 aa, synthetic construct
VKSSSQN

SEQ ID NO: 100000 - protein, 7 aa, synthetic construct
LRITQDS

SEQ ID NO: 100001 - protein, 7 aa, synthetic construct
PLSIKVS

SEQ ID NO: 100002 - protein, 7 aa, synthetic construct
AAPVPHI

SEQ ID NO: 100003 - protein, 7 aa, synthetic construct
GWERDQI

SEQ ID NO: 100004 - protein, 7 aa, synthetic construct
VDRMARI

SEQ ID NO: 100005 - protein, 7 aa, synthetic construct
NVMHNKH

SEQ ID NO: 100006 - protein, 7 aa, synthetic construct
SQRPRDQ

SEQ ID NO: 100007 - protein, 7 aa, synthetic construct
IMRHAAS

SEQ ID NO: 100008 - protein, 7 aa, synthetic construct
QHFKDQY

SEQ ID NO: 100009 - protein, 7 aa, synthetic construct
NDIVRLG

SEQ ID NO: 100010 - protein, 7 aa, synthetic construct
QMNMSMG

SEQ ID NO: 100011 - protein, 7 aa, synthetic construct
MLIKDTE

SEQ ID NO: 100012 - protein, 7 aa, synthetic construct
KQKEIKE

SEQ ID NO: 100013 - protein, 7 aa, synthetic construct
PARGSRE

SEQ ID NO: 100014 - protein, 7 aa, synthetic construct
QEGKMAN

SEQ ID NO: 100015 - protein, 7 aa, synthetic construct
NKPPTNA

SEQ ID NO: 100016 - protein, 7 aa, synthetic construct
SDISKAD

SEQ ID NO: 100017 - protein, 7 aa, synthetic construct
ISGRTEP

SEQ ID NO: 100018 - protein, 7 aa, synthetic construct
HSKNAAE

SEQ ID NO: 100019 - protein, 7 aa, synthetic construct
KMPADGA

SEQ ID NO: 100020 - protein, 7 aa, synthetic construct
SQAALEP

SEQ ID NO: 100021 - protein, 7 aa, synthetic construct
TLVRFQD

SEQ ID NO: 100022 - protein, 7 aa, synthetic construct
LYSSGGV

SEQ ID NO: 100023 - protein, 7 aa, synthetic construct
TMHNSTF

SEQ ID NO: 100024 - protein, 7 aa, synthetic construct
ETATMKL

SEQ ID NO: 100025 - protein, 7 aa, synthetic construct
GLLGQRF

SEQ ID NO: 100026 - protein, 7 aa, synthetic construct
VEQGYNA

SEQ ID NO: 100027 - protein, 7 aa, synthetic construct
QAEFIAP

SEQ ID NO: 100028 - protein, 7 aa, synthetic construct
RRSPMNE

SEQ ID NO: 100029 - protein, 7 aa, synthetic construct
SPHSTSS

SEQ ID NO: 100030 - protein, 7 aa, synthetic construct
LFSEQNM

SEQ ID NO: 100031 - protein, 7 aa, synthetic construct
QQYISDS

SEQ ID NO: 100032 - protein, 7 aa, synthetic construct
YGLKAGF

SEQ ID NO: 100033 - protein, 7 aa, synthetic construct
IPRTNDL

SEQ ID NO: 100034 - protein, 7 aa, synthetic construct
AADKNNE

SEQ ID NO: 100035 - protein, 7 aa, synthetic construct
MGAPRSI

SEQ ID NO: 100036 - protein, 7 aa, synthetic construct
VQYKDTI

SEQ ID NO: 100037 - protein, 7 aa, synthetic construct
YSQSSAA

SEQ ID NO: 100038 - protein, 7 aa, synthetic construct
SGHGRFA

SEQ ID NO: 100039 - protein, 7 aa, synthetic construct
SMTHVIT

SEQ ID NO: 100040 - protein, 7 aa, synthetic construct
SPGSQVA

SEQ ID NO: 100041 - protein, 7 aa, synthetic construct
MTNLING

SEQ ID NO: 100042 - protein, 7 aa, synthetic construct
KWDKHEL

SEQ ID NO: 100043 - protein, 7 aa, synthetic construct
PLPASPH

SEQ ID NO: 100044 - protein, 7 aa, synthetic construct
EKQMDKA

SEQ ID NO: 100045 - protein, 7 aa, synthetic construct
EAAPRAW

SEQ ID NO: 100046 - protein, 7 aa, synthetic construct
QRIEKFQ

SEQ ID NO: 100047 - protein, 7 aa, synthetic construct
KKGGDEG

SEQ ID NO: 100048 - protein, 7 aa, synthetic construct
GVYPQLH

SEQ ID NO: 100049 - protein, 7 aa, synthetic construct
LIEPKSM

SEQ ID NO: 100050 - protein, 7 aa, synthetic construct
SAQHPME

SEQ ID NO: 100051 - protein, 7 aa, synthetic construct
AANDFMK

SEQ ID NO: 100052 - protein, 7 aa, synthetic construct
PVQRDKP

SEQ ID NO: 100053 - protein, 7 aa, synthetic construct
DYKKSGQ

SEQ ID NO: 100054 - protein, 7 aa, synthetic construct
HYMVKHD

SEQ ID NO: 100055 - protein, 7 aa, synthetic construct
HDNAYQA

SEQ ID NO: 100056 - protein, 7 aa, synthetic construct
GLQNSTV

SEQ ID NO: 100057 - protein, 7 aa, synthetic construct
DMTAQIM

SEQ ID NO: 100058 - protein, 7 aa, synthetic construct
VRHPALD

SEQ ID NO: 100059 - protein, 7 aa, synthetic construct
LNGFNAP

SEQ ID NO: 100060 - protein, 7 aa, synthetic construct
PRNNGAV

SEQ ID NO: 100061 - protein, 7 aa, synthetic construct
THDMDIE

SEQ ID NO: 100062 - protein, 7 aa, synthetic construct
GPVNKET

SEQ ID NO: 100063 - protein, 7 aa, synthetic construct
ADKGAKY

SEQ ID NO: 100064 - protein, 7 aa, synthetic construct
YAASFDP

SEQ ID NO: 100065 - protein, 7 aa, synthetic construct
PITTMNP

SEQ ID NO: 100066 - protein, 7 aa, synthetic construct
TEHMLYA

SEQ ID NO: 100067 - protein, 7 aa, synthetic construct
MSAPKGN

SEQ ID NO: 100068 - protein, 7 aa, synthetic construct
TVNKDWT

SEQ ID NO: 100069 - protein, 7 aa, synthetic construct
QYQPNSP

SEQ ID NO: 100070 - protein, 7 aa, synthetic construct
QVNHIIG

SEQ ID NO: 100071 - protein, 7 aa, synthetic construct
AHQFVEE

SEQ ID NO: 100072 - protein, 7 aa, synthetic construct
HDTMPVP

SEQ ID NO: 100073 - protein, 7 aa, synthetic construct
WNRQLGG

SEQ ID NO: 100074 - protein, 7 aa, synthetic construct
SKLENRQ

SEQ ID NO: 100075 - protein, 7 aa, synthetic construct
SQTHLTV

SEQ ID NO: 100076 - protein, 7 aa, synthetic construct
VEHNYGG

SEQ ID NO: 100077 - protein, 7 aa, synthetic construct
KQDRSQD

SEQ ID NO: 100078 - protein, 7 aa, synthetic construct
SKYTGQA

SEQ ID NO: 100079 - protein, 7 aa, synthetic construct
NRDEAPV

SEQ ID NO: 100080 - protein, 7 aa, synthetic construct
MRSQSNH

SEQ ID NO: 100081 - protein, 7 aa, synthetic construct
MRNPGNA

SEQ ID NO: 100082 - protein, 7 aa, synthetic construct
KEFPEKI

SEQ ID NO: 100083 - protein, 7 aa, synthetic construct
FGSGYVE

SEQ ID NO: 100084 - protein, 7 aa, synthetic construct
PVFGKME

SEQ ID NO: 100085 - protein, 7 aa, synthetic construct
SDFVPAP

SEQ ID NO: 100086 - protein, 7 aa, synthetic construct
YVHQLNK

SEQ ID NO: 100087 - protein, 7 aa, synthetic construct
INPVKNW

SEQ ID NO: 100088 - protein, 7 aa, synthetic construct
EHKNGTE

SEQ ID NO: 100089 - protein, 7 aa, synthetic construct
VKTYDLM

SEQ ID NO: 100090 - protein, 7 aa, synthetic construct
TVHMEIP

SEQ ID NO: 100091 - protein, 7 aa, synthetic construct
QHTESSW

SEQ ID NO: 100092 - protein, 7 aa, synthetic construct
VRHDNPM

SEQ ID NO: 100093 - protein, 7 aa, synthetic construct
NNFRERT

SEQ ID NO: 100094 - protein, 7 aa, synthetic construct
NSSNFIE

SEQ ID NO: 100095 - protein, 7 aa, synthetic construct
GVNVHII

SEQ ID NO: 100096 - protein, 7 aa, synthetic construct
NDREKQQ

SEQ ID NO: 100097 - protein, 7 aa, synthetic construct
PQTLHKG

SEQ ID NO: 100098 - protein, 7 aa, synthetic construct
FLTSQDK

SEQ ID NO: 100099 - protein, 7 aa, synthetic construct
PMMRQNL

SEQ ID NO: 100100 - protein, 7 aa, synthetic construct
WSNMGLE

SEQ ID NO: 100101 - protein, 7 aa, synthetic construct
STLAGLE

SEQ ID NO: 100102 - protein, 7 aa, synthetic construct
PPSTPMG

SEQ ID NO: 100103 - protein, 7 aa, synthetic construct
AAFSSAH

SEQ ID NO: 100104 - protein, 7 aa, synthetic construct
PDILDRK

SEQ ID NO: 100105 - protein, 7 aa, synthetic construct
VFTKGTQ

SEQ ID NO: 100106 - protein, 7 aa, synthetic construct
HNTSLVT

SEQ ID NO: 100107 - protein, 7 aa, synthetic construct
SERAPDY

SEQ ID NO: 100108 - protein, 7 aa, synthetic construct
WQREKTH

SEQ ID NO: 100109 - protein, 7 aa, synthetic construct
GLITRQA

SEQ ID NO: 100110 - protein, 7 aa, synthetic construct
QGASHME

SEQ ID NO: 100111 - protein, 7 aa, synthetic construct
DHQTAHL

SEQ ID NO: 100112 - protein, 7 aa, synthetic construct
LNHVTGW

SEQ ID NO: 100113 - protein, 7 aa, synthetic construct
AKDKGTG

SEQ ID NO: 100114 - protein, 7 aa, synthetic construct
NHISMPH

SEQ ID NO: 100115 - protein, 7 aa, synthetic construct
CKNKMDS

SEQ ID NO: 100116 - protein, 7 aa, synthetic construct
VMAKQAV

SEQ ID NO: 100117 - protein, 7 aa, synthetic construct
PDFPTSP

SEQ ID NO: 100118 - protein, 7 aa, synthetic construct
TDGSQHG

SEQ ID NO: 100119 - protein, 7 aa, synthetic construct
LHPIYNS

SEQ ID NO: 100120 - protein, 7 aa, synthetic construct
APERAGG

SEQ ID NO: 100121 - protein, 7 aa, synthetic construct
GQPKSVA

SEQ ID NO: 100122 - protein, 7 aa, synthetic construct
LKAACPA

SEQ ID NO: 100123 - protein, 7 aa, synthetic construct
DLRLNGM

SEQ ID NO: 100124 - protein, 7 aa, synthetic construct
FTKPNVN

SEQ ID NO: 100125 - protein, 7 aa, synthetic construct
PRNHAMN

SEQ ID NO: 100126 - protein, 7 aa, synthetic construct
SRNVSFA

SEQ ID NO: 100127 - protein, 7 aa, synthetic construct
TMYAQKH

SEQ ID NO: 100128 - protein, 7 aa, synthetic construct
VKAQIQS

SEQ ID NO: 100129 - protein, 7 aa, synthetic construct
QQFNNPD

SEQ ID NO: 100130 - protein, 7 aa, synthetic construct
NGREKIF

SEQ ID NO: 100131 - protein, 7 aa, synthetic construct
RDQHAPA

SEQ ID NO: 100132 - protein, 7 aa, synthetic construct
PQRQVGQ

SEQ ID NO: 100133 - protein, 7 aa, synthetic construct
RDFTNNN

SEQ ID NO: 100134 - protein, 7 aa, synthetic construct
QVSLGIM

SEQ ID NO: 100135 - protein, 7 aa, synthetic construct
NQERRSI

SEQ ID NO: 100136 - protein, 7 aa, synthetic construct
LHAGFRD

SEQ ID NO: 100137 - protein, 7 aa, synthetic construct
RDQIAMA

SEQ ID NO: 100138 - protein, 7 aa, synthetic construct
NSRSHAS

SEQ ID NO: 100139 - protein, 7 aa, synthetic construct
LVRSAYD

SEQ ID NO: 100140 - protein, 7 aa, synthetic construct
DMVKIGM

SEQ ID NO: 100141 - protein, 7 aa, synthetic construct
SRAGWAG

SEQ ID NO: 100142 - protein, 7 aa, synthetic construct
DLKNADL

SEQ ID NO: 100143 - protein, 7 aa, synthetic construct
PIGIEHV

SEQ ID NO: 100144 - protein, 7 aa, synthetic construct
RGVSDDP

SEQ ID NO: 100145 - protein, 7 aa, synthetic construct
AKVEKDM

SEQ ID NO: 100146 - protein, 7 aa, synthetic construct
TFKMSAL

SEQ ID NO: 100147 - protein, 7 aa, synthetic construct
WMHKAET

SEQ ID NO: 100148 - protein, 7 aa, synthetic construct
NNQFVKY

SEQ ID NO: 100149 - protein, 7 aa, synthetic construct
HHTAMIA

SEQ ID NO: 100150 - protein, 7 aa, synthetic construct
GASEKKI

SEQ ID NO: 100151 - protein, 7 aa, synthetic construct
QGITNKM

SEQ ID NO: 100152 - protein, 7 aa, synthetic construct
GKPMYER

SEQ ID NO: 100153 - protein, 7 aa, synthetic construct
GNNNIQM

SEQ ID NO: 100154 - protein, 7 aa, synthetic construct
VLAVGFS

SEQ ID NO: 100155 - protein, 7 aa, synthetic construct
LLYGRDH

SEQ ID NO: 100156 - protein, 7 aa, synthetic construct
ALDRTDW

SEQ ID NO: 100157 - protein, 7 aa, synthetic construct
MQHYQQA

SEQ ID NO: 100158 - protein, 7 aa, synthetic construct
KTKQTGE

SEQ ID NO: 100159 - protein, 7 aa, synthetic construct
TEKQHSL

SEQ ID NO: 100160 - protein, 7 aa, synthetic construct
FSAGIQA

SEQ ID NO: 100161 - protein, 7 aa, synthetic construct
LKEQKFL

SEQ ID NO: 100162 - protein, 7 aa, synthetic construct
HLLPTLE

SEQ ID NO: 100163 - protein, 7 aa, synthetic construct
QAPVTWD

SEQ ID NO: 100164 - protein, 7 aa, synthetic construct
WHQLSSS

SEQ ID NO: 100165 - protein, 7 aa, synthetic construct
YQKQVHH

SEQ ID NO: 100166 - protein, 7 aa, synthetic construct
GDSSKAR

SEQ ID NO: 100167 - protein, 7 aa, synthetic construct
AETQSKW

SEQ ID NO: 100168 - protein, 7 aa, synthetic construct
NEVKNGY

SEQ ID NO: 100169 - protein, 7 aa, synthetic construct
KESQIFN

SEQ ID NO: 100170 - protein, 7 aa, synthetic construct
CKQQSQN

SEQ ID NO: 100171 - protein, 7 aa, synthetic construct
SIEKGQT

SEQ ID NO: 100172 - protein, 7 aa, synthetic construct
QYSNGHM

SEQ ID NO: 100173 - protein, 7 aa, synthetic construct
PSNPKPP

SEQ ID NO: 100174 - protein, 7 aa, synthetic construct
YAPLITM

SEQ ID NO: 100175 - protein, 7 aa, synthetic construct
DVIKSHK

SEQ ID NO: 100176 - protein, 7 aa, synthetic construct
YRERDQK

SEQ ID NO: 100177 - protein, 7 aa, synthetic construct
MTVDGSK

SEQ ID NO: 100178 - protein, 7 aa, synthetic construct
MHAARHG

SEQ ID NO: 100179 - protein, 7 aa, synthetic construct
FAEGYPR

SEQ ID NO: 100180 - protein, 7 aa, synthetic construct
LVPDTVR

SEQ ID NO: 100181 - protein, 7 aa, synthetic construct
NNNVGRL

SEQ ID NO: 100182 - protein, 7 aa, synthetic construct
YTNQYMG

SEQ ID NO: 100183 - protein, 7 aa, synthetic construct
QETSHRF

SEQ ID NO: 100184 - protein, 7 aa, synthetic construct
YFPSQQD

SEQ ID NO: 100185 - protein, 7 aa, synthetic construct
SMKAATM

SEQ ID NO: 100186 - protein, 7 aa, synthetic construct
THLKMHV

SEQ ID NO: 100187 - protein, 7 aa, synthetic construct
RLPQIPL

SEQ ID NO: 100188 - protein, 7 aa, synthetic construct
MLMRQNP

SEQ ID NO: 100189 - protein, 7 aa, synthetic construct
KNISFQS

SEQ ID NO: 100190 - protein, 7 aa, synthetic construct
YHPGVNE

SEQ ID NO: 100191 - protein, 7 aa, synthetic construct
NPNMGAP

SEQ ID NO: 100192 - protein, 7 aa, synthetic construct
FHPKEPK

SEQ ID NO: 100193 - protein, 7 aa, synthetic construct
KNNAMQA

SEQ ID NO: 100194 - protein, 7 aa, synthetic construct
FGDRRGL

SEQ ID NO: 100195 - protein, 7 aa, synthetic construct
QHSHTSA

SEQ ID NO: 100196 - protein, 7 aa, synthetic construct
NVRAGHH

SEQ ID NO: 100197 - protein, 7 aa, synthetic construct
ANKGSVA

SEQ ID NO: 100198 - protein, 7 aa, synthetic construct
TPSANKY

SEQ ID NO: 100199 - protein, 7 aa, synthetic construct
TDFQKKV

SEQ ID NO: 100200 - protein, 7 aa, synthetic construct
DNHERQK

SEQ ID NO: 100201 - protein, 7 aa, synthetic construct
EHNHYKH

SEQ ID NO: 100202 - protein, 7 aa, synthetic construct
VPIGNHH

SEQ ID NO: 100203 - protein, 7 aa, synthetic construct
KTVTAQA

SEQ ID NO: 100204 - protein, 7 aa, synthetic construct
HRTTHAE

SEQ ID NO: 100205 - protein, 7 aa, synthetic construct
HVMHSNG

SEQ ID NO: 100206 - protein, 7 aa, synthetic construct
VSHIIHE

SEQ ID NO: 100207 - protein, 7 aa, synthetic construct
LEKMPYG

SEQ ID NO: 100208 - protein, 7 aa, synthetic construct
YVGAPTV

SEQ ID NO: 100209 - protein, 7 aa, synthetic construct
MPTADYP

SEQ ID NO: 100210 - protein, 7 aa, synthetic construct
ERHTYKP

SEQ ID NO: 100211 - protein, 7 aa, synthetic construct
EVRKMNM

SEQ ID NO: 100212 - protein, 7 aa, synthetic construct
PATASNN

SEQ ID NO: 100213 - protein, 7 aa, synthetic construct
QQIAYPS

SEQ ID NO: 100214 - protein, 7 aa, synthetic construct
DRIDLQR

SEQ ID NO: 100215 - protein, 7 aa, synthetic construct
LFEKGRM

SEQ ID NO: 100216 - protein, 7 aa, synthetic construct
YTPGMQV

SEQ ID NO: 100217 - protein, 7 aa, synthetic construct
LAMADHA

SEQ ID NO: 100218 - protein, 7 aa, synthetic construct
RYPMSVD

SEQ ID NO: 100219 - protein, 7 aa, synthetic construct
IHDGYAR

SEQ ID NO: 100220 - protein, 7 aa, synthetic construct
IIGVGIK

SEQ ID NO: 100221 - protein, 7 aa, synthetic construct
EDNWQLK

SEQ ID NO: 100222 - protein, 7 aa, synthetic construct
NGHVHEK

SEQ ID NO: 100223 - protein, 7 aa, synthetic construct
LMHLPTD

SEQ ID NO: 100224 - protein, 7 aa, synthetic construct
AGPQKDF

SEQ ID NO: 100225 - protein, 7 aa, synthetic construct
NKNFQLM

SEQ ID NO: 100226 - protein, 7 aa, synthetic construct
DQKFDYH

SEQ ID NO: 100227 - protein, 7 aa, synthetic construct
RYSVVVD

SEQ ID NO: 100228 - protein, 7 aa, synthetic construct
WNMIKQG

SEQ ID NO: 100229 - protein, 7 aa, synthetic construct
LHKFVVQ

SEQ ID NO: 100230 - protein, 7 aa, synthetic construct
QKIEHNR

SEQ ID NO: 100231 - protein, 7 aa, synthetic construct
RESQMGE

SEQ ID NO: 100232 - protein, 7 aa, synthetic construct
TATNYDV

SEQ ID NO: 100233 - protein, 7 aa, synthetic construct
TINDKPV

SEQ ID NO: 100234 - protein, 7 aa, synthetic construct
YEHKRAG

SEQ ID NO: 100235 - protein, 7 aa, synthetic construct
RIPEGAL

SEQ ID NO: 100236 - protein, 7 aa, synthetic construct
IGQTIGK

SEQ ID NO: 100237 - protein, 7 aa, synthetic construct
DINILHG

SEQ ID NO: 100238 - protein, 7 aa, synthetic construct
SVYMSGS

SEQ ID NO: 100239 - protein, 7 aa, synthetic construct
FAGVEDR

SEQ ID NO: 100240 - protein, 7 aa, synthetic construct
VIMNRAP

SEQ ID NO: 100241 - protein, 7 aa, synthetic construct
NSAKDGT

SEQ ID NO: 100242 - protein, 7 aa, synthetic construct
KGDQFQQ

SEQ ID NO: 100243 - protein, 7 aa, synthetic construct
IHVLTNA

SEQ ID NO: 100244 - protein, 7 aa, synthetic construct
RHDKNGS

SEQ ID NO: 100245 - protein, 7 aa, synthetic construct
EPASRNM

SEQ ID NO: 100246 - protein, 7 aa, synthetic construct
VYADMMK

SEQ ID NO: 100247 - protein, 7 aa, synthetic construct
IFASMPV

SEQ ID NO: 100248 - protein, 7 aa, synthetic construct
DQTPMPR

SEQ ID NO: 100249 - protein, 7 aa, synthetic construct
QYERTHG

SEQ ID NO: 100250 - protein, 7 aa, synthetic construct
SKKIEYI

SEQ ID NO: 100251 - protein, 7 aa, synthetic construct
NRMLEYD

SEQ ID NO: 100252 - protein, 7 aa, synthetic construct
QTGNKPQ

SEQ ID NO: 100253 - protein, 7 aa, synthetic construct
HQQAKVA

SEQ ID NO: 100254 - protein, 7 aa, synthetic construct
IEPSFRL

SEQ ID NO: 100255 - protein, 7 aa, synthetic construct
PSKTMGG

SEQ ID NO: 100256 - protein, 7 aa, synthetic construct
SVQTRGG

SEQ ID NO: 100257 - protein, 7 aa, synthetic construct
RNTSNNP

SEQ ID NO: 100258 - protein, 7 aa, synthetic construct
APHKPYE

SEQ ID NO: 100259 - protein, 7 aa, synthetic construct
PRSQSGM

SEQ ID NO: 100260 - protein, 7 aa, synthetic construct
WGAKFDP

SEQ ID NO: 100261 - protein, 7 aa, synthetic construct
DMSFMGK

SEQ ID NO: 100262 - protein, 7 aa, synthetic construct
KLVGIMS

SEQ ID NO: 100263 - protein, 7 aa, synthetic construct
LVNQQML

SEQ ID NO: 100264 - protein, 7 aa, synthetic construct
LNLKVKD

SEQ ID NO: 100265 - protein, 7 aa, synthetic construct
NQTPYGG

SEQ ID NO: 100266 - protein, 7 aa, synthetic construct
MMDPRFE

SEQ ID NO: 100267 - protein, 7 aa, synthetic construct
YQKDQAH

SEQ ID NO: 100268 - protein, 7 aa, synthetic construct
VGHKLPE

SEQ ID NO: 100269 - protein, 7 aa, synthetic construct
SHVQGFI

SEQ ID NO: 100270 - protein, 7 aa, synthetic construct
RDHGFQH

SEQ ID NO: 100271 - protein, 7 aa, synthetic construct
NQQKDAM

SEQ ID NO: 100272 - protein, 7 aa, synthetic construct
QALVKVH

SEQ ID NO: 100273 - protein, 7 aa, synthetic construct
NDPGHAD

SEQ ID NO: 100274 - protein, 7 aa, synthetic construct
NDHGSLG

SEQ ID NO: 100275 - protein, 7 aa, synthetic construct
EHAKTMM

SEQ ID NO: 100276 - protein, 7 aa, synthetic construct
FKEDPSM

SEQ ID NO: 100277 - protein, 7 aa, synthetic construct
NQGHNMM

SEQ ID NO: 100278 - protein, 7 aa, synthetic construct
DGTITKP

SEQ ID NO: 100279 - protein, 7 aa, synthetic construct
HHHKLQI

SEQ ID NO: 100280 - protein, 7 aa, synthetic construct
SPMDKNE

SEQ ID NO: 100281 - protein, 7 aa, synthetic construct
FVPGPTR

SEQ ID NO: 100282 - protein, 7 aa, synthetic construct
FELAGPL

SEQ ID NO: 100283 - protein, 7 aa, synthetic construct
YLPTADK

SEQ ID NO: 100284 - protein, 7 aa, synthetic construct
FNTQFAV

SEQ ID NO: 100285 - protein, 7 aa, synthetic construct
PFQATDG

SEQ ID NO: 100286 - protein, 7 aa, synthetic construct
PAQKLDS

SEQ ID NO: 100287 - protein, 7 aa, synthetic construct
REIADDR

SEQ ID NO: 100288 - protein, 7 aa, synthetic construct
MQKAQNT

SEQ ID NO: 100289 - protein, 7 aa, synthetic construct
AERGQHF

SEQ ID NO: 100290 - protein, 7 aa, synthetic construct
YDQLTQE

SEQ ID NO: 100291 - protein, 7 aa, synthetic construct
NLRETSV

SEQ ID NO: 100292 - protein, 7 aa, synthetic construct
RVYNQTV

SEQ ID NO: 100293 - protein, 7 aa, synthetic construct
ILTVQDN

SEQ ID NO: 100294 - protein, 7 aa, synthetic construct
RPMTQNG

SEQ ID NO: 100295 - protein, 7 aa, synthetic construct
HGTIRYN

SEQ ID NO: 100296 - protein, 7 aa, synthetic construct
KLTHLAM

SEQ ID NO: 100297 - protein, 7 aa, synthetic construct
IGARSDI

SEQ ID NO: 100298 - protein, 7 aa, synthetic construct
LQSAFLD

SEQ ID NO: 100299 - protein, 7 aa, synthetic construct
DARDRIR

SEQ ID NO: 100300 - protein, 7 aa, synthetic construct
NNVPSKP

SEQ ID NO: 100301 - protein, 7 aa, synthetic construct
EMHKGRA

SEQ ID NO: 100302 - protein, 7 aa, synthetic construct
WIGQNQH

SEQ ID NO: 100303 - protein, 7 aa, synthetic construct
WKKDNYD

SEQ ID NO: 100304 - protein, 7 aa, synthetic construct
SSNLDQA

SEQ ID NO: 100305 - protein, 7 aa, synthetic construct
VSIQWPA

SEQ ID NO: 100306 - protein, 7 aa, synthetic construct
TGEYKNG

SEQ ID NO: 100307 - protein, 7 aa, synthetic construct
LPSTSKY

SEQ ID NO: 100308 - protein, 7 aa, synthetic construct
AVDKSHV

SEQ ID NO: 100309 - protein, 7 aa, synthetic construct
GADWMTA

SEQ ID NO: 100310 - protein, 7 aa, synthetic construct
TVQRMND

SEQ ID NO: 100311 - protein, 7 aa, synthetic construct
FKLVGMG

SEQ ID NO: 100312 - protein, 7 aa, synthetic construct
TVPHAME

SEQ ID NO: 100313 - protein, 7 aa, synthetic construct
HSNMTER

SEQ ID NO: 100314 - protein, 7 aa, synthetic construct
DKRIDFS

SEQ ID NO: 100315 - protein, 7 aa, synthetic construct
GESNVLR

SEQ ID NO: 100316 - protein, 7 aa, synthetic construct
GTEKMHS

SEQ ID NO: 100317 - protein, 7 aa, synthetic construct
LWEGSNQ

SEQ ID NO: 100318 - protein, 7 aa, synthetic construct
PNRADYP

SEQ ID NO: 100319 - protein, 7 aa, synthetic construct
HGIQVDS

SEQ ID NO: 100320 - protein, 7 aa, synthetic construct
HWGGHEV

SEQ ID NO: 100321 - protein, 7 aa, synthetic construct
QSQKDVH

SEQ ID NO: 100322 - protein, 7 aa, synthetic construct
EPGNLVS

SEQ ID NO: 100323 - protein, 7 aa, synthetic construct
KVPPTIL

SEQ ID NO: 100324 - protein, 7 aa, synthetic construct
TVPHIHK

SEQ ID NO: 100325 - protein, 7 aa, synthetic construct
KDYPTPY

SEQ ID NO: 100326 - protein, 7 aa, synthetic construct
AKLVLKP

SEQ ID NO: 100327 - protein, 7 aa, synthetic construct
MARVTHH

SEQ ID NO: 100328 - protein, 7 aa, synthetic construct
IPLYVKP

SEQ ID NO: 100329 - protein, 7 aa, synthetic construct
KQTSGAM

SEQ ID NO: 100330 - protein, 7 aa, synthetic construct
VTRQEWS

SEQ ID NO: 100331 - protein, 7 aa, synthetic construct
ELREVAG

SEQ ID NO: 100332 - protein, 7 aa, synthetic construct
GGSGHGA

SEQ ID NO: 100333 - protein, 7 aa, synthetic construct
TVGSPSA

SEQ ID NO: 100334 - protein, 7 aa, synthetic construct
PSKPTPW

SEQ ID NO: 100335 - protein, 7 aa, synthetic construct
GIVFTPE

SEQ ID NO: 100336 - protein, 7 aa, synthetic construct
YDAARAD

SEQ ID NO: 100337 - protein, 7 aa, synthetic construct
DKHNHAF

SEQ ID NO: 100338 - protein, 7 aa, synthetic construct
MKSGVEE

SEQ ID NO: 100339 - protein, 7 aa, synthetic construct
SLGLTEA

SEQ ID NO: 100340 - protein, 7 aa, synthetic construct
QMQGSMH

SEQ ID NO: 100341 - protein, 7 aa, synthetic construct
SLHLAQS

SEQ ID NO: 100342 - protein, 7 aa, synthetic construct
KQNNVSS

SEQ ID NO: 100343 - protein, 7 aa, synthetic construct
TISHFRD

SEQ ID NO: 100344 - protein, 7 aa, synthetic construct
INNTNSN

SEQ ID NO: 100345 - protein, 7 aa, synthetic construct
SKKDNTS

SEQ ID NO: 100346 - protein, 7 aa, synthetic construct
FLKHDME

SEQ ID NO: 100347 - protein, 7 aa, synthetic construct
QVPNHDA

SEQ ID NO: 100348 - protein, 7 aa, synthetic construct
LNTGEVA

SEQ ID NO: 100349 - protein, 7 aa, synthetic construct
MHFKMAS

SEQ ID NO: 100350 - protein, 7 aa, synthetic construct
WLSDGAH

SEQ ID NO: 100351 - protein, 7 aa, synthetic construct
YHDAVMG

SEQ ID NO: 100352 - protein, 7 aa, synthetic construct
MYIKANI

SEQ ID NO: 100353 - protein, 7 aa, synthetic construct
YKTDYGI

SEQ ID NO: 100354 - protein, 7 aa, synthetic construct
DQLKTMF

SEQ ID NO: 100355 - protein, 7 aa, synthetic construct
SLIAAEG

SEQ ID NO: 100356 - protein, 7 aa, synthetic construct
HHGDATA

SEQ ID NO: 100357 - protein, 7 aa, synthetic construct
MVQNYKE

SEQ ID NO: 100358 - protein, 7 aa, synthetic construct
HYNNMQM

SEQ ID NO: 100359 - protein, 7 aa, synthetic construct
GTFAYEA

SEQ ID NO: 100360 - protein, 7 aa, synthetic construct
ERNSHSA

SEQ ID NO: 100361 - protein, 7 aa, synthetic construct
GHHQAIN

SEQ ID NO: 100362 - protein, 7 aa, synthetic construct
QFLKQQQ

SEQ ID NO: 100363 - protein, 7 aa, synthetic construct
STEIRNN

SEQ ID NO: 100364 - protein, 7 aa, synthetic construct
RPATQHH

SEQ ID NO: 100365 - protein, 7 aa, synthetic construct
VKNFKPP

SEQ ID NO: 100366 - protein, 7 aa, synthetic construct
DSKQPFY

SEQ ID NO: 100367 - protein, 7 aa, synthetic construct
PAVNQYR

SEQ ID NO: 100368 - protein, 7 aa, synthetic construct
MQQQYER

SEQ ID NO: 100369 - protein, 7 aa, synthetic construct
ATIAYHP

SEQ ID NO: 100370 - protein, 7 aa, synthetic construct
GMSQPQQ

SEQ ID NO: 100371 - protein, 7 aa, synthetic construct
HAAMETK

SEQ ID NO: 100372 - protein, 7 aa, synthetic construct
DTPHQSP

SEQ ID NO: 100373 - protein, 7 aa, synthetic construct
VFKNEPN

SEQ ID NO: 100374 - protein, 7 aa, synthetic construct
TGSPNKF

SEQ ID NO: 100375 - protein, 7 aa, synthetic construct
QRENAGT

SEQ ID NO: 100376 - protein, 7 aa, synthetic construct
HKEAGLY

SEQ ID NO: 100377 - protein, 7 aa, synthetic construct
GRNDSGI

SEQ ID NO: 100378 - protein, 7 aa, synthetic construct
MGYNNQS

SEQ ID NO: 100379 - protein, 7 aa, synthetic construct
EKIHVPF

SEQ ID NO: 100380 - protein, 7 aa, synthetic construct
AFTQFQE

SEQ ID NO: 100381 - protein, 7 aa, synthetic construct
DKSKGNN

SEQ ID NO: 100382 - protein, 7 aa, synthetic construct
HKERYSD

SEQ ID NO: 100383 - protein, 7 aa, synthetic construct
EKDVHNM

SEQ ID NO: 100384 - protein, 7 aa, synthetic construct
VPQIAHR

SEQ ID NO: 100385 - protein, 7 aa, synthetic construct
ILHDRTV

SEQ ID NO: 100386 - protein, 7 aa, synthetic construct
NLRGEMQ

SEQ ID NO: 100387 - protein, 7 aa, synthetic construct
HLIGINA

SEQ ID NO: 100388 - protein, 7 aa, synthetic construct
SMMNRGP

SEQ ID NO: 100389 - protein, 7 aa, synthetic construct
MNASENS

SEQ ID NO: 100390 - protein, 7 aa, synthetic construct
MEPPKYP

SEQ ID NO: 100391 - protein, 7 aa, synthetic construct
SPTGVVT

SEQ ID NO: 100392 - protein, 7 aa, synthetic construct
CKIPLCE

SEQ ID NO: 100393 - protein, 7 aa, synthetic construct
TLKRLES

SEQ ID NO: 100394 - protein, 7 aa, synthetic construct
NRKDDSH

SEQ ID NO: 100395 - protein, 7 aa, synthetic construct
QNLQYEK

SEQ ID NO: 100396 - protein, 7 aa, synthetic construct
SKSYENQ

SEQ ID NO: 100397 - protein, 7 aa, synthetic construct
EQQNNGL

SEQ ID NO: 100398 - protein, 7 aa, synthetic construct
KNYQNVT

SEQ ID NO: 100399 - protein, 7 aa, synthetic construct
IHNWSPE

SEQ ID NO: 100400 - protein, 7 aa, synthetic construct
HELYKDI

SEQ ID NO: 100401 - protein, 7 aa, synthetic construct
HLRLQDL

SEQ ID NO: 100402 - protein, 7 aa, synthetic construct
QIHNEES

SEQ ID NO: 100403 - protein, 7 aa, synthetic construct
WAIASSP

SEQ ID NO: 100404 - protein, 7 aa, synthetic construct
FQGTIGH

SEQ ID NO: 100405 - protein, 7 aa, synthetic construct
INIHVGS

SEQ ID NO: 100406 - protein, 7 aa, synthetic construct
HRAFDPD

SEQ ID NO: 100407 - protein, 7 aa, synthetic construct
ASAGMTI

SEQ ID NO: 100408 - protein, 7 aa, synthetic construct
RMQQNEK

SEQ ID NO: 100409 - protein, 7 aa, synthetic construct
VIASEST

SEQ ID NO: 100410 - protein, 7 aa, synthetic construct
MTHQQAP

SEQ ID NO: 100411 - protein, 7 aa, synthetic construct
QFQAIME

SEQ ID NO: 100412 - protein, 7 aa, synthetic construct
ASKNMQI

SEQ ID NO: 100413 - protein, 7 aa, synthetic construct
WQHVVAG

SEQ ID NO: 100414 - protein, 7 aa, synthetic construct
AMEKHHW

SEQ ID NO: 100415 - protein, 7 aa, synthetic construct
KKEMRMP

SEQ ID NO: 100416 - protein, 7 aa, synthetic construct
YNGVQVA

SEQ ID NO: 100417 - protein, 7 aa, synthetic construct
GHNSAMH

SEQ ID NO: 100418 - protein, 7 aa, synthetic construct
VAHYSVP

SEQ ID NO: 100419 - protein, 7 aa, synthetic construct
GRIQDMM

SEQ ID NO: 100420 - protein, 7 aa, synthetic construct
WNRLTGN

SEQ ID NO: 100421 - protein, 7 aa, synthetic construct
RETYGSM

SEQ ID NO: 100422 - protein, 7 aa, synthetic construct
PSNLVHG

SEQ ID NO: 100423 - protein, 7 aa, synthetic construct
MRKGQEP

SEQ ID NO: 100424 - protein, 7 aa, synthetic construct
DAVHHPG

SEQ ID NO: 100425 - protein, 7 aa, synthetic construct
TNSPPHL

SEQ ID NO: 100426 - protein, 7 aa, synthetic construct
YVGVQEQ

SEQ ID NO: 100427 - protein, 7 aa, synthetic construct
VGRILHV

SEQ ID NO: 100428 - protein, 7 aa, synthetic construct
NESYGLA

SEQ ID NO: 100429 - protein, 7 aa, synthetic construct
NRARLPE

SEQ ID NO: 100430 - protein, 7 aa, synthetic construct
FEPQIHK

SEQ ID NO: 100431 - protein, 7 aa, synthetic construct
QTGADYR

SEQ ID NO: 100432 - protein, 7 aa, synthetic construct
IGSVSHY

SEQ ID NO: 100433 - protein, 7 aa, synthetic construct
SDKSGKF

SEQ ID NO: 100434 - protein, 7 aa, synthetic construct
VMAFMGE

SEQ ID NO: 100435 - protein, 7 aa, synthetic construct
QGSAMLM

SEQ ID NO: 100436 - protein, 7 aa, synthetic construct
GARKDDG

SEQ ID NO: 100437 - protein, 7 aa, synthetic construct
HVHKHIE

SEQ ID NO: 100438 - protein, 7 aa, synthetic construct
GSKPAGA

SEQ ID NO: 100439 - protein, 7 aa, synthetic construct
HRHQLKE

SEQ ID NO: 100440 - protein, 7 aa, synthetic construct
QKTTGAY

SEQ ID NO: 100441 - protein, 7 aa, synthetic construct
KDQGERT

SEQ ID NO: 100442 - protein, 7 aa, synthetic construct
NAWSPGP

SEQ ID NO: 100443 - protein, 7 aa, synthetic construct
AGFGGNK

SEQ ID NO: 100444 - protein, 7 aa, synthetic construct
ITSPSER

SEQ ID NO: 100445 - protein, 7 aa, synthetic construct
PHPAHAN

SEQ ID NO: 100446 - protein, 7 aa, synthetic construct
DKHEKNP

SEQ ID NO: 100447 - protein, 7 aa, synthetic construct
DMDKPNH

SEQ ID NO: 100448 - protein, 7 aa, synthetic construct
TLGWVSE

SEQ ID NO: 100449 - protein, 7 aa, synthetic construct
FSGFVAS

SEQ ID NO: 100450 - protein, 7 aa, synthetic construct
PVKSNQA

SEQ ID NO: 100451 - protein, 7 aa, synthetic construct
NQNEVSH

SEQ ID NO: 100452 - protein, 7 aa, synthetic construct
DRASDVM

SEQ ID NO: 100453 - protein, 7 aa, synthetic construct
QRSEPAM

SEQ ID NO: 100454 - protein, 7 aa, synthetic construct
VGQKNGG

SEQ ID NO: 100455 - protein, 7 aa, synthetic construct
MVNRDIS

SEQ ID NO: 100456 - protein, 7 aa, synthetic construct
KENDQKY

SEQ ID NO: 100457 - protein, 7 aa, synthetic construct
GGPHIHK

SEQ ID NO: 100458 - protein, 7 aa, synthetic construct
MKDMHPM

SEQ ID NO: 100459 - protein, 7 aa, synthetic construct
GDLGLRH

SEQ ID NO: 100460 - protein, 7 aa, synthetic construct
SQLRIQS

SEQ ID NO: 100461 - protein, 7 aa, synthetic construct
QNVKPDY

SEQ ID NO: 100462 - protein, 7 aa, synthetic construct
EAFASKD

SEQ ID NO: 100463 - protein, 7 aa, synthetic construct
GASADHP

SEQ ID NO: 100464 - protein, 7 aa, synthetic construct
RNAGNGF

SEQ ID NO: 100465 - protein, 7 aa, synthetic construct
NGKSING

SEQ ID NO: 100466 - protein, 7 aa, synthetic construct
MITRHGN

SEQ ID NO: 100467 - protein, 7 aa, synthetic construct
PKHHPDP

SEQ ID NO: 100468 - protein, 7 aa, synthetic construct
AMAKMID

SEQ ID NO: 100469 - protein, 7 aa, synthetic construct
QVNTLQV

SEQ ID NO: 100470 - protein, 7 aa, synthetic construct
NHTNTAR

SEQ ID NO: 100471 - protein, 7 aa, synthetic construct
GKTDSNQ

SEQ ID NO: 100472 - protein, 7 aa, synthetic construct
QRLNSPG

SEQ ID NO: 100473 - protein, 7 aa, synthetic construct
RQFPDNR

SEQ ID NO: 100474 - protein, 7 aa, synthetic construct
MGGFPTG

SEQ ID NO: 100475 - protein, 7 aa, synthetic construct
CMRTQKE

SEQ ID NO: 100476 - protein, 7 aa, synthetic construct
HQSTSND

SEQ ID NO: 100477 - protein, 7 aa, synthetic construct
RSEVTKL

SEQ ID NO: 100478 - protein, 7 aa, synthetic construct
VNVHMGV

SEQ ID NO: 100479 - protein, 7 aa, synthetic construct
GGPGFYP

SEQ ID NO: 100480 - protein, 7 aa, synthetic construct
ANADYRK

SEQ ID NO: 100481 - protein, 7 aa, synthetic construct
MGIPKDT

SEQ ID NO: 100482 - protein, 7 aa, synthetic construct
ERPNHER

SEQ ID NO: 100483 - protein, 7 aa, synthetic construct
LDIAKVA

SEQ ID NO: 100484 - protein, 7 aa, synthetic construct
IDRQMPQ

SEQ ID NO: 100485 - protein, 7 aa, synthetic construct
LHRVDGY

SEQ ID NO: 100486 - protein, 7 aa, synthetic construct
NFQGHDA

SEQ ID NO: 100487 - protein, 7 aa, synthetic construct
LVANVPF

SEQ ID NO: 100488 - protein, 7 aa, synthetic construct
RAETHGN

SEQ ID NO: 100489 - protein, 7 aa, synthetic construct
GEMISMA

SEQ ID NO: 100490 - protein, 7 aa, synthetic construct
KSTNWQS

SEQ ID NO: 100491 - protein, 7 aa, synthetic construct
QFPVSTH

SEQ ID NO: 100492 - protein, 7 aa, synthetic construct
SVSPRMD

SEQ ID NO: 100493 - protein, 7 aa, synthetic construct
DRNRDYH

SEQ ID NO: 100494 - protein, 7 aa, synthetic construct
GRIEPVA

SEQ ID NO: 100495 - protein, 7 aa, synthetic construct
TYHTIGE

SEQ ID NO: 100496 - protein, 7 aa, synthetic construct
HAINHMG

SEQ ID NO: 100497 - protein, 7 aa, synthetic construct
VPDNRNW

SEQ ID NO: 100498 - protein, 7 aa, synthetic construct
LKENKDV

SEQ ID NO: 100499 - protein, 7 aa, synthetic construct
GPASITP

SEQ ID NO: 100500 - protein, 7 aa, synthetic construct
IITSAPA

SEQ ID NO: 100501 - protein, 7 aa, synthetic construct
ITSTMGN

SEQ ID NO: 100502 - protein, 7 aa, synthetic construct
QQQRTSP

SEQ ID NO: 100503 - protein, 7 aa, synthetic construct
ANADRGV

SEQ ID NO: 100504 - protein, 7 aa, synthetic construct
GVSNQII

SEQ ID NO: 100505 - protein, 7 aa, synthetic construct
LGDFLVK

SEQ ID NO: 100506 - protein, 7 aa, synthetic construct
GLGNVIN

SEQ ID NO: 100507 - protein, 7 aa, synthetic construct
YEMTPKS

SEQ ID NO: 100508 - protein, 7 aa, synthetic construct
VRGPITQ

SEQ ID NO: 100509 - protein, 7 aa, synthetic construct
YNNTVTN

SEQ ID NO: 100510 - protein, 7 aa, synthetic construct
MDNHSRP

SEQ ID NO: 100511 - protein, 7 aa, synthetic construct
IGIDQHG

SEQ ID NO: 100512 - protein, 7 aa, synthetic construct
HSQGPSE

SEQ ID NO: 100513 - protein, 7 aa, synthetic construct
AAGDIIR

SEQ ID NO: 100514 - protein, 7 aa, synthetic construct
MHMQFRE

SEQ ID NO: 100515 - protein, 7 aa, synthetic construct
VVPLHEH

SEQ ID NO: 100516 - protein, 7 aa, synthetic construct
ETQTPRP

SEQ ID NO: 100517 - protein, 7 aa, synthetic construct
EIHKMEV

SEQ ID NO: 100518 - protein, 7 aa, synthetic construct
QAFPSHE

SEQ ID NO: 100519 - protein, 7 aa, synthetic construct
MHYKDSL

SEQ ID NO: 100520 - protein, 7 aa, synthetic construct
HIGGEPK

SEQ ID NO: 100521 - protein, 7 aa, synthetic construct
QKPSVNP

SEQ ID NO: 100522 - protein, 7 aa, synthetic construct
THDHERS

SEQ ID NO: 100523 - protein, 7 aa, synthetic construct
TEQSQGH

SEQ ID NO: 100524 - protein, 7 aa, synthetic construct
WQVKLDK

SEQ ID NO: 100525 - protein, 7 aa, synthetic construct
KDNLFLE

SEQ ID NO: 100526 - protein, 7 aa, synthetic construct
WTSARPN

SEQ ID NO: 100527 - protein, 7 aa, synthetic construct
GANEIKD

SEQ ID NO: 100528 - protein, 7 aa, synthetic construct
DMKNVNR

SEQ ID NO: 100529 - protein, 7 aa, synthetic construct
RTTMTHH

SEQ ID NO: 100530 - protein, 7 aa, synthetic construct
LTTGAQM

SEQ ID NO: 100531 - protein, 7 aa, synthetic construct
RQPAAGS

SEQ ID NO: 100532 - protein, 7 aa, synthetic construct
QHSQKQI

SEQ ID NO: 100533 - protein, 7 aa, synthetic construct
QALGHGP

SEQ ID NO: 100534 - protein, 7 aa, synthetic construct
AGTYVYE

SEQ ID NO: 100535 - protein, 7 aa, synthetic construct
ILKVEHT

SEQ ID NO: 100536 - protein, 7 aa, synthetic construct
DETTKRC

SEQ ID NO: 100537 - protein, 7 aa, synthetic construct
DYRAIPI

SEQ ID NO: 100538 - protein, 7 aa, synthetic construct
MHGEVGP

SEQ ID NO: 100539 - protein, 7 aa, synthetic construct
EETTRKP

SEQ ID NO: 100540 - protein, 7 aa, synthetic construct
QPTVTVT

SEQ ID NO: 100541 - protein, 7 aa, synthetic construct
PIALTTM

SEQ ID NO: 100542 - protein, 7 aa, synthetic construct
YAGGSDF

SEQ ID NO: 100543 - protein, 7 aa, synthetic construct
SHNFEGV

SEQ ID NO: 100544 - protein, 7 aa, synthetic construct
GETQYKW

SEQ ID NO: 100545 - protein, 7 aa, synthetic construct
QQHHGQR

SEQ ID NO: 100546 - protein, 7 aa, synthetic construct
RKALIDV

SEQ ID NO: 100547 - protein, 7 aa, synthetic construct
QSSGHQQ

SEQ ID NO: 100548 - protein, 7 aa, synthetic construct
SIKIIPS

SEQ ID NO: 100549 - protein, 7 aa, synthetic construct
WLDTDHQ

SEQ ID NO: 100550 - protein, 7 aa, synthetic construct
PSYKLGP

SEQ ID NO: 100551 - protein, 7 aa, synthetic construct
KQFTTEF

SEQ ID NO: 100552 - protein, 7 aa, synthetic construct
DHIPNAI

SEQ ID NO: 100553 - protein, 7 aa, synthetic construct
FERKELS

SEQ ID NO: 100554 - protein, 7 aa, synthetic construct
GEKYDGL

SEQ ID NO: 100555 - protein, 7 aa, synthetic construct
YGTTISE

SEQ ID NO: 100556 - protein, 7 aa, synthetic construct
WIHQARE

SEQ ID NO: 100557 - protein, 7 aa, synthetic construct
FNESMRR

SEQ ID NO: 100558 - protein, 7 aa, synthetic construct
TVANPDF

SEQ ID NO: 100559 - protein, 7 aa, synthetic construct
YPNERGL

SEQ ID NO: 100560 - protein, 7 aa, synthetic construct
KGFTDNP

SEQ ID NO: 100561 - protein, 7 aa, synthetic construct
KDLIDGP

SEQ ID NO: 100562 - protein, 7 aa, synthetic construct
RPSEVAV

SEQ ID NO: 100563 - protein, 7 aa, synthetic construct
GPHIFSE

SEQ ID NO: 100564 - protein, 7 aa, synthetic construct
INQPNQM

SEQ ID NO: 100565 - protein, 7 aa, synthetic construct
DAKPNYP

SEQ ID NO: 100566 - protein, 7 aa, synthetic construct
PVEVRTG

SEQ ID NO: 100567 - protein, 7 aa, synthetic construct
VVNGIKV

SEQ ID NO: 100568 - protein, 7 aa, synthetic construct
TFSVHDH

SEQ ID NO: 100569 - protein, 7 aa, synthetic construct
EKLMPKG

SEQ ID NO: 100570 - protein, 7 aa, synthetic construct
HKNDFHM

SEQ ID NO: 100571 - protein, 7 aa, synthetic construct
KTVVNNN

SEQ ID NO: 100572 - protein, 7 aa, synthetic construct
KPIQHGI

SEQ ID NO: 100573 - protein, 7 aa, synthetic construct
RTASYRE

SEQ ID NO: 100574 - protein, 7 aa, synthetic construct
VHTSDKQ

SEQ ID NO: 100575 - protein, 7 aa, synthetic construct
DINQIHF

SEQ ID NO: 100576 - protein, 7 aa, synthetic construct
DNADPHR

SEQ ID NO: 100577 - protein, 7 aa, synthetic construct
MNSSFDP

SEQ ID NO: 100578 - protein, 7 aa, synthetic construct
EKWSELV

SEQ ID NO: 100579 - protein, 7 aa, synthetic construct
VPLQMKP

SEQ ID NO: 100580 - protein, 7 aa, synthetic construct
AGMNPYG

SEQ ID NO: 100581 - protein, 7 aa, synthetic construct
SFVAGGA

SEQ ID NO: 100582 - protein, 7 aa, synthetic construct
SGVMSKD

SEQ ID NO: 100583 - protein, 7 aa, synthetic construct
GYGDGPM

SEQ ID NO: 100584 - protein, 7 aa, synthetic construct
TNTYHLE

SEQ ID NO: 100585 - protein, 7 aa, synthetic construct
MSGSNYT

SEQ ID NO: 100586 - protein, 7 aa, synthetic construct
LPHPQML

SEQ ID NO: 100587 - protein, 7 aa, synthetic construct
DSVSQRK

SEQ ID NO: 100588 - protein, 7 aa, synthetic construct
QLDYKGI

SEQ ID NO: 100589 - protein, 7 aa, synthetic construct
FNQTVGA

SEQ ID NO: 100590 - protein, 7 aa, synthetic construct
SREFANE

SEQ ID NO: 100591 - protein, 7 aa, synthetic construct
AIFAGEF

SEQ ID NO: 100592 - protein, 7 aa, synthetic construct
TSKPTGS

SEQ ID NO: 100593 - protein, 7 aa, synthetic construct
GQTTPFA

SEQ ID NO: 100594 - protein, 7 aa, synthetic construct
PGPMGIR

SEQ ID NO: 100595 - protein, 7 aa, synthetic construct
YGKSNPG

SEQ ID NO: 100596 - protein, 7 aa, synthetic construct
TNNGHYK

SEQ ID NO: 100597 - protein, 7 aa, synthetic construct
DHIGKDA

SEQ ID NO: 100598 - protein, 7 aa, synthetic construct
VMKQDIF

SEQ ID NO: 100599 - protein, 7 aa, synthetic construct
HILKPNE

SEQ ID NO: 100600 - protein, 7 aa, synthetic construct
THKQAHT

SEQ ID NO: 100601 - protein, 7 aa, synthetic construct
HNNISNE

SEQ ID NO: 100602 - protein, 7 aa, synthetic construct
GMGEGQL

SEQ ID NO: 100603 - protein, 7 aa, synthetic construct
NSESPKW

SEQ ID NO: 100604 - protein, 7 aa, synthetic construct
ISPAHAM

SEQ ID NO: 100605 - protein, 7 aa, synthetic construct
KFQGIGL

SEQ ID NO: 100606 - protein, 7 aa, synthetic construct
SYYKHME

SEQ ID NO: 100607 - protein, 7 aa, synthetic construct
LEFGKRM

SEQ ID NO: 100608 - protein, 7 aa, synthetic construct
EAEKPHI

SEQ ID NO: 100609 - protein, 7 aa, synthetic construct
ELSYNAK

SEQ ID NO: 100610 - protein, 7 aa, synthetic construct
HTSTNPE

SEQ ID NO: 100611 - protein, 7 aa, synthetic construct
RIPSDDW

SEQ ID NO: 100612 - protein, 7 aa, synthetic construct
YDRGDRT

SEQ ID NO: 100613 - protein, 7 aa, synthetic construct
KPATNMS

SEQ ID NO: 100614 - protein, 7 aa, synthetic construct
TTGPGKG

SEQ ID NO: 100615 - protein, 7 aa, synthetic construct
STAKIQA

SEQ ID NO: 100616 - protein, 7 aa, synthetic construct
IAMQFKA

SEQ ID NO: 100617 - protein, 7 aa, synthetic construct
KVNWQDN

SEQ ID NO: 100618 - protein, 7 aa, synthetic construct
TFNQVAI

SEQ ID NO: 100619 - protein, 7 aa, synthetic construct
GYDKQYV

SEQ ID NO: 100620 - protein, 7 aa, synthetic construct
ITTVHLG

SEQ ID NO: 100621 - protein, 7 aa, synthetic construct
LIAKDAS

SEQ ID NO: 100622 - protein, 7 aa, synthetic construct
NHSITGF

SEQ ID NO: 100623 - protein, 7 aa, synthetic construct
GMFRHAD

SEQ ID NO: 100624 - protein, 7 aa, synthetic construct
GLRGLYD

SEQ ID NO: 100625 - protein, 7 aa, synthetic construct
NPQNGLR

SEQ ID NO: 100626 - protein, 7 aa, synthetic construct
ASHTTRF

SEQ ID NO: 100627 - protein, 7 aa, synthetic construct
QMRMQPP

SEQ ID NO: 100628 - protein, 7 aa, synthetic construct
MILDTLG

SEQ ID NO: 100629 - protein, 7 aa, synthetic construct
PFHTTLD

SEQ ID NO: 100630 - protein, 7 aa, synthetic construct
RKQIEPY

SEQ ID NO: 100631 - protein, 7 aa, synthetic construct
HINQSPA

SEQ ID NO: 100632 - protein, 7 aa, synthetic construct
GQDDTHA

SEQ ID NO: 100633 - protein, 7 aa, synthetic construct
SHQQVEV

SEQ ID NO: 100634 - protein, 7 aa, synthetic construct
DLDPRFA

SEQ ID NO: 100635 - protein, 7 aa, synthetic construct
PKNETHF

SEQ ID NO: 100636 - protein, 7 aa, synthetic construct
QTGTHNP

SEQ ID NO: 100637 - protein, 7 aa, synthetic construct
QQQGEKV

SEQ ID NO: 100638 - protein, 7 aa, synthetic construct
DRRPEHF

SEQ ID NO: 100639 - protein, 7 aa, synthetic construct
HVPGEFK

SEQ ID NO: 100640 - protein, 7 aa, synthetic construct
MLGLTGD

SEQ ID NO: 100641 - protein, 7 aa, synthetic construct
MAHVTDA

SEQ ID NO: 100642 - protein, 7 aa, synthetic construct
NKSDPKF

SEQ ID NO: 100643 - protein, 7 aa, synthetic construct
WVGDKVL

SEQ ID NO: 100644 - protein, 7 aa, synthetic construct
TNFSKPL

SEQ ID NO: 100645 - protein, 7 aa, synthetic construct
SQLEVTS

SEQ ID NO: 100646 - protein, 7 aa, synthetic construct
GNNRGSA

SEQ ID NO: 100647 - protein, 7 aa, synthetic construct
KVHKDMH

SEQ ID NO: 100648 - protein, 7 aa, synthetic construct
QHKTHDD

SEQ ID NO: 100649 - protein, 7 aa, synthetic construct
AQGLVDK

SEQ ID NO: 100650 - protein, 7 aa, synthetic construct
ILGYTER

SEQ ID NO: 100651 - protein, 7 aa, synthetic construct
TGQHMQF

SEQ ID NO: 100652 - protein, 7 aa, synthetic construct
RHVGMAI

SEQ ID NO: 100653 - protein, 7 aa, synthetic construct
PFSTQQY

SEQ ID NO: 100654 - protein, 7 aa, synthetic construct
TKLSPTY

SEQ ID NO: 100655 - protein, 7 aa, synthetic construct
SKFVESR

SEQ ID NO: 100656 - protein, 7 aa, synthetic construct
LTHHTPR

SEQ ID NO: 100657 - protein, 7 aa, synthetic construct
EPIRMAR

SEQ ID NO: 100658 - protein, 7 aa, synthetic construct
RATAYDH

SEQ ID NO: 100659 - protein, 7 aa, synthetic construct
SSIAMMA

SEQ ID NO: 100660 - protein, 7 aa, synthetic construct
NTGETGW

SEQ ID NO: 100661 - protein, 7 aa, synthetic construct
QRGSMAD

SEQ ID NO: 100662 - protein, 7 aa, synthetic construct
FDKKYDN

SEQ ID NO: 100663 - protein, 7 aa, synthetic construct
LMQTKHF

SEQ ID NO: 100664 - protein, 7 aa, synthetic construct
RERGDSY

SEQ ID NO: 100665 - protein, 7 aa, synthetic construct
ASSSAKM

SEQ ID NO: 100666 - protein, 7 aa, synthetic construct
HYQNVVV

SEQ ID NO: 100667 - protein, 7 aa, synthetic construct
HDHRLQP

SEQ ID NO: 100668 - protein, 7 aa, synthetic construct
VSRAQLI

SEQ ID NO: 100669 - protein, 7 aa, synthetic construct
EQDPKKC

SEQ ID NO: 100670 - protein, 7 aa, synthetic construct
HPDYNAM

SEQ ID NO: 100671 - protein, 7 aa, synthetic construct
HDKWDMP

SEQ ID NO: 100672 - protein, 7 aa, synthetic construct
RNQNSGA

SEQ ID NO: 100673 - protein, 7 aa, synthetic construct
PTAQKNG

SEQ ID NO: 100674 - protein, 7 aa, synthetic construct
GHDSLHL

SEQ ID NO: 100675 - protein, 7 aa, synthetic construct
MIAPARG

SEQ ID NO: 100676 - protein, 7 aa, synthetic construct
STKLDWA

SEQ ID NO: 100677 - protein, 7 aa, synthetic construct
GFTAGGF

SEQ ID NO: 100678 - protein, 7 aa, synthetic construct
IIKTHER

SEQ ID NO: 100679 - protein, 7 aa, synthetic construct
HDKPMDL

SEQ ID NO: 100680 - protein, 7 aa, synthetic construct
QNFVKIS

SEQ ID NO: 100681 - protein, 7 aa, synthetic construct
CSDKKCE

SEQ ID NO: 100682 - protein, 7 aa, synthetic construct
EHKALIM

SEQ ID NO: 100683 - protein, 7 aa, synthetic construct
KFIVDEV

SEQ ID NO: 100684 - protein, 7 aa, synthetic construct
TGKHGSI

SEQ ID NO: 100685 - protein, 7 aa, synthetic construct
VSTVTQP

SEQ ID NO: 100686 - protein, 7 aa, synthetic construct
SVKGLEA

SEQ ID NO: 100687 - protein, 7 aa, synthetic construct
HHNHAQD

SEQ ID NO: 100688 - protein, 7 aa, synthetic construct
TGHDGPS

SEQ ID NO: 100689 - protein, 7 aa, synthetic construct
IDAHAKF

SEQ ID NO: 100690 - protein, 7 aa, synthetic construct
KEWSQNM

SEQ ID NO: 100691 - protein, 7 aa, synthetic construct
HVASSHD

SEQ ID NO: 100692 - protein, 7 aa, synthetic construct
ARQQGAY

SEQ ID NO: 100693 - protein, 7 aa, synthetic construct
PAHIGGE

SEQ ID NO: 100694 - protein, 7 aa, synthetic construct
WVTSHND

SEQ ID NO: 100695 - protein, 7 aa, synthetic construct
PQFNIKD

SEQ ID NO: 100696 - protein, 7 aa, synthetic construct
RKDTDAG

SEQ ID NO: 100697 - protein, 7 aa, synthetic construct
NPNDQRT

SEQ ID NO: 100698 - protein, 7 aa, synthetic construct
HYKHPLN

SEQ ID NO: 100699 - protein, 7 aa, synthetic construct
RPMMYPD

SEQ ID NO: 100700 - protein, 7 aa, synthetic construct
IGDPQKN

SEQ ID NO: 100701 - protein, 7 aa, synthetic construct
VRIQPGL

SEQ ID NO: 100702 - protein, 7 aa, synthetic construct
AARAVQI

SEQ ID NO: 100703 - protein, 7 aa, synthetic construct
HGSEVKW

SEQ ID NO: 100704 - protein, 7 aa, synthetic construct
NRDQANN

SEQ ID NO: 100705 - protein, 7 aa, synthetic construct
ERLQGVK

SEQ ID NO: 100706 - protein, 7 aa, synthetic construct
DQGIPLK

SEQ ID NO: 100707 - protein, 7 aa, synthetic construct
PAAPKQW

SEQ ID NO: 100708 - protein, 7 aa, synthetic construct
LGAGMDM

SEQ ID NO: 100709 - protein, 7 aa, synthetic construct
MTGQHFI

SEQ ID NO: 100710 - protein, 7 aa, synthetic construct
VLTKQPH

SEQ ID NO: 100711 - protein, 7 aa, synthetic construct
HDSLDPI

SEQ ID NO: 100712 - protein, 7 aa, synthetic construct
PQTLGVS

SEQ ID NO: 100713 - protein, 7 aa, synthetic construct
WEDHRKD

SEQ ID NO: 100714 - protein, 7 aa, synthetic construct
DQNAQKA

SEQ ID NO: 100715 - protein, 7 aa, synthetic construct
THYEHNV

SEQ ID NO: 100716 - protein, 7 aa, synthetic construct
HTNAKHY

SEQ ID NO: 100717 - protein, 7 aa, synthetic construct
QDTRASL

SEQ ID NO: 100718 - protein, 7 aa, synthetic construct
RPSGNQI

SEQ ID NO: 100719 - protein, 7 aa, synthetic construct
SHKPPTH

SEQ ID NO: 100720 - protein, 7 aa, synthetic construct
FGKQMIS

SEQ ID NO: 100721 - protein, 7 aa, synthetic construct
HQMQSNR

SEQ ID NO: 100722 - protein, 7 aa, synthetic construct
RSASALE

SEQ ID NO: 100723 - protein, 7 aa, synthetic construct
KGGDYRD

SEQ ID NO: 100724 - protein, 7 aa, synthetic construct
GHFTMAE

SEQ ID NO: 100725 - protein, 7 aa, synthetic construct
FKQGASN

SEQ ID NO: 100726 - protein, 7 aa, synthetic construct
KYPNVSG

SEQ ID NO: 100727 - protein, 7 aa, synthetic construct
VEIVRHG

SEQ ID NO: 100728 - protein, 7 aa, synthetic construct
SPVGAMV

SEQ ID NO: 100729 - protein, 7 aa, synthetic construct
MDIKRTP

SEQ ID NO: 100730 - protein, 7 aa, synthetic construct
SKDNGRW

SEQ ID NO: 100731 - protein, 7 aa, synthetic construct
PGEKPSP

SEQ ID NO: 100732 - protein, 7 aa, synthetic construct
MDGRAPY

SEQ ID NO: 100733 - protein, 7 aa, synthetic construct
DIARTAV

SEQ ID NO: 100734 - protein, 7 aa, synthetic construct
QIQPVTK

SEQ ID NO: 100735 - protein, 7 aa, synthetic construct
LYMGSKN

SEQ ID NO: 100736 - protein, 7 aa, synthetic construct
WASTDGP

SEQ ID NO: 100737 - protein, 7 aa, synthetic construct
HWEETKN

SEQ ID NO: 100738 - protein, 7 aa, synthetic construct
GFTKEEP

SEQ ID NO: 100739 - protein, 7 aa, synthetic construct
GTTQHVK

SEQ ID NO: 100740 - protein, 7 aa, synthetic construct
MTDKWSK

SEQ ID NO: 100741 - protein, 7 aa, synthetic construct
NFTSTGD

SEQ ID NO: 100742 - protein, 7 aa, synthetic construct
MMNTKWD

SEQ ID NO: 100743 - protein, 7 aa, synthetic construct
PKYDTTF

SEQ ID NO: 100744 - protein, 7 aa, synthetic construct
RPMAYTG

SEQ ID NO: 100745 - protein, 7 aa, synthetic construct
TSIPQQQ

SEQ ID NO: 100746 - protein, 7 aa, synthetic construct
YQVEPQH

SEQ ID NO: 100747 - protein, 7 aa, synthetic construct
RKPMMDP

SEQ ID NO: 100748 - protein, 7 aa, synthetic construct
KPLELPQ

SEQ ID NO: 100749 - protein, 7 aa, synthetic construct
MNGKTEG

SEQ ID NO: 100750 - protein, 7 aa, synthetic construct
PAGMIRG

SEQ ID NO: 100751 - protein, 7 aa, synthetic construct
ILDYRVG

SEQ ID NO: 100752 - protein, 7 aa, synthetic construct
QPRRVPE

SEQ ID NO: 100753 - protein, 7 aa, synthetic construct
GVVTTPY

SEQ ID NO: 100754 - protein, 7 aa, synthetic construct
GEPFPVQ

SEQ ID NO: 100755 - protein, 7 aa, synthetic construct
QVGVSVI

SEQ ID NO: 100756 - protein, 7 aa, synthetic construct
TPRAYVP

SEQ ID NO: 100757 - protein, 7 aa, synthetic construct
HPARLMD

SEQ ID NO: 100758 - protein, 7 aa, synthetic construct
QRDMPAK

SEQ ID NO: 100759 - protein, 7 aa, synthetic construct
GKEHSKW

SEQ ID NO: 100760 - protein, 7 aa, synthetic construct
ESKAWDR

SEQ ID NO: 100761 - protein, 7 aa, synthetic construct
KANFEGY

SEQ ID NO: 100762 - protein, 7 aa, synthetic construct
WIPNQDA

SEQ ID NO: 100763 - protein, 7 aa, synthetic construct
NNKNTAG

SEQ ID NO: 100764 - protein, 7 aa, synthetic construct
SQSKSDT

SEQ ID NO: 100765 - protein, 7 aa, synthetic construct
DPLPTAW

SEQ ID NO: 100766 - protein, 7 aa, synthetic construct
ANSMSES

SEQ ID NO: 100767 - protein, 7 aa, synthetic construct
LHNHPAQ

SEQ ID NO: 100768 - protein, 7 aa, synthetic construct
PGNKQMI

SEQ ID NO: 100769 - protein, 7 aa, synthetic construct
KDGHYAF

SEQ ID NO: 100770 - protein, 7 aa, synthetic construct
PGSNIQP

SEQ ID NO: 100771 - protein, 7 aa, synthetic construct
EHKHLKI

SEQ ID NO: 100772 - protein, 7 aa, synthetic construct
TSVPYIH

SEQ ID NO: 100773 - protein, 7 aa, synthetic construct
RQHIDRS

SEQ ID NO: 100774 - protein, 7 aa, synthetic construct
NLPTSHI

SEQ ID NO: 100775 - protein, 7 aa, synthetic construct
GLPTIHV

SEQ ID NO: 100776 - protein, 7 aa, synthetic construct
KVEFPEK

SEQ ID NO: 100777 - protein, 7 aa, synthetic construct
IKATYDQ

SEQ ID NO: 100778 - protein, 7 aa, synthetic construct
LTQPEGP

SEQ ID NO: 100779 - protein, 7 aa, synthetic construct
EHAHHQR

SEQ ID NO: 100780 - protein, 7 aa, synthetic construct
PRLQDVS

SEQ ID NO: 100781 - protein, 7 aa, synthetic construct
RFQPEHY

SEQ ID NO: 100782 - protein, 7 aa, synthetic construct
AAPHASK

SEQ ID NO: 100783 - protein, 7 aa, synthetic construct
RPTDERG

SEQ ID NO: 100784 - protein, 7 aa, synthetic construct
TGAGNWD

SEQ ID NO: 100785 - protein, 7 aa, synthetic construct
YNHSRNL

SEQ ID NO: 100786 - protein, 7 aa, synthetic construct
YKDQDGA

SEQ ID NO: 100787 - protein, 7 aa, synthetic construct
QIEHNTF

SEQ ID NO: 100788 - protein, 7 aa, synthetic construct
MTASMKD

SEQ ID NO: 100789 - protein, 7 aa, synthetic construct
DKRMSDW

SEQ ID NO: 100790 - protein, 7 aa, synthetic construct
QRYGDEE

SEQ ID NO: 100791 - protein, 7 aa, synthetic construct
KQAQEFQ

SEQ ID NO: 100792 - protein, 7 aa, synthetic construct
VEQPQKA

SEQ ID NO: 100793 - protein, 7 aa, synthetic construct
RDAQSMW

SEQ ID NO: 100794 - protein, 7 aa, synthetic construct
KPAGRID

SEQ ID NO: 100795 - protein, 7 aa, synthetic construct
QTSGHGG

SEQ ID NO: 100796 - protein, 7 aa, synthetic construct
WISTHQS

SEQ ID NO: 100797 - protein, 7 aa, synthetic construct
PRMQHSN

SEQ ID NO: 100798 - protein, 7 aa, synthetic construct
PQGEFRE

SEQ ID NO: 100799 - protein, 7 aa, synthetic construct
FVDQSKM

SEQ ID NO: 100800 - protein, 7 aa, synthetic construct
FPRLDKH

SEQ ID NO: 100801 - protein, 7 aa, synthetic construct
DRGSMMA

SEQ ID NO: 100802 - protein, 7 aa, synthetic construct
ATQSPMI

SEQ ID NO: 100803 - protein, 7 aa, synthetic construct
YQPSLPH

SEQ ID NO: 100804 - protein, 7 aa, synthetic construct
MLSHKIM

SEQ ID NO: 100805 - protein, 7 aa, synthetic construct
ISHHYLA

SEQ ID NO: 100806 - protein, 7 aa, synthetic construct
HGKMKGE

SEQ ID NO: 100807 - protein, 7 aa, synthetic construct
RPPEGWQ

SEQ ID NO: 100808 - protein, 7 aa, synthetic construct
VHDVAKT

SEQ ID NO: 100809 - protein, 7 aa, synthetic construct
WQKDSIR

SEQ ID NO: 100810 - protein, 7 aa, synthetic construct
SGQIAHD

SEQ ID NO: 100811 - protein, 7 aa, synthetic construct
YSTQSPK

SEQ ID NO: 100812 - protein, 7 aa, synthetic construct
KDGHFHQ

SEQ ID NO: 100813 - protein, 7 aa, synthetic construct
LVDRPTR

SEQ ID NO: 100814 - protein, 7 aa, synthetic construct
EAKHEPG

SEQ ID NO: 100815 - protein, 7 aa, synthetic construct
YVIAPGV

SEQ ID NO: 100816 - protein, 7 aa, synthetic construct
KPADMNL

SEQ ID NO: 100817 - protein, 7 aa, synthetic construct
QLDRQMF

SEQ ID NO: 100818 - protein, 7 aa, synthetic construct
DEKYNQG

SEQ ID NO: 100819 - protein, 7 aa, synthetic construct
HEPPHKD

SEQ ID NO: 100820 - protein, 7 aa, synthetic construct
INSTNLS

SEQ ID NO: 100821 - protein, 7 aa, synthetic construct
NESFRET

SEQ ID NO: 100822 - protein, 7 aa, synthetic construct
DRTNHVE

SEQ ID NO: 100823 - protein, 7 aa, synthetic construct
MHIHQGK

SEQ ID NO: 100824 - protein, 7 aa, synthetic construct
AGPLLPQ

SEQ ID NO: 100825 - protein, 7 aa, synthetic construct
EAKDKFE

SEQ ID NO: 100826 - protein, 7 aa, synthetic construct
YNGAVLE

SEQ ID NO: 100827 - protein, 7 aa, synthetic construct
GERNIPR

SEQ ID NO: 100828 - protein, 7 aa, synthetic construct
QTWAPQP

SEQ ID NO: 100829 - protein, 7 aa, synthetic construct
GETTGKI

SEQ ID NO: 100830 - protein, 7 aa, synthetic construct
IFEGNAN

SEQ ID NO: 100831 - protein, 7 aa, synthetic construct
GQQSPPR

SEQ ID NO: 100832 - protein, 7 aa, synthetic construct
AHTNEKP

SEQ ID NO: 100833 - protein, 7 aa, synthetic construct
HTDTHIM

SEQ ID NO: 100834 - protein, 7 aa, synthetic construct
TQHPGKP

SEQ ID NO: 100835 - protein, 7 aa, synthetic construct
LFTTNPM

SEQ ID NO: 100836 - protein, 7 aa, synthetic construct
NPAPVKY

SEQ ID NO: 100837 - protein, 7 aa, synthetic construct
KAKVERD

SEQ ID NO: 100838 - protein, 7 aa, synthetic construct
RHLENGD

SEQ ID NO: 100839 - protein, 7 aa, synthetic construct
FSIVKDP

SEQ ID NO: 100840 - protein, 7 aa, synthetic construct
DRPEGHV

SEQ ID NO: 100841 - protein, 7 aa, synthetic construct
GSRADLW

SEQ ID NO: 100842 - protein, 7 aa, synthetic construct
TEGPYAK

SEQ ID NO: 100843 - protein, 7 aa, synthetic construct
RANTGIV

SEQ ID NO: 100844 - protein, 7 aa, synthetic construct
QLTGNVI

SEQ ID NO: 100845 - protein, 7 aa, synthetic construct
KKNLAET

SEQ ID NO: 100846 - protein, 7 aa, synthetic construct
STGSAAD

SEQ ID NO: 100847 - protein, 7 aa, synthetic construct
RQQEVKG

SEQ ID NO: 100848 - protein, 7 aa, synthetic construct
FAGDKTG

SEQ ID NO: 100849 - protein, 7 aa, synthetic construct
VLRSDLV

SEQ ID NO: 100850 - protein, 7 aa, synthetic construct
KAAQQGM

SEQ ID NO: 100851 - protein, 7 aa, synthetic construct
YSSTRGD

SEQ ID NO: 100852 - protein, 7 aa, synthetic construct
SSKESVA

SEQ ID NO: 100853 - protein, 7 aa, synthetic construct
HFTGPTT

SEQ ID NO: 100854 - protein, 7 aa, synthetic construct
SDKSGLG

SEQ ID NO: 100855 - protein, 7 aa, synthetic construct
FERGHHM

SEQ ID NO: 100856 - protein, 7 aa, synthetic construct
TKTYHEY

SEQ ID NO: 100857 - protein, 7 aa, synthetic construct
YHDLNPK

SEQ ID NO: 100858 - protein, 7 aa, synthetic construct
DRPLPHL

SEQ ID NO: 100859 - protein, 7 aa, synthetic construct
KQSMNNE

SEQ ID NO: 100860 - protein, 7 aa, synthetic construct
YLTGQMK

SEQ ID NO: 100861 - protein, 7 aa, synthetic construct
TNPNQQG

SEQ ID NO: 100862 - protein, 7 aa, synthetic construct
VGAHGFD

SEQ ID NO: 100863 - protein, 7 aa, synthetic construct
SHGQVFV

SEQ ID NO: 100864 - protein, 7 aa, synthetic construct
QMPQHKW

SEQ ID NO: 100865 - protein, 7 aa, synthetic construct
GRADSKS

SEQ ID NO: 100866 - protein, 7 aa, synthetic construct
TDNQRTE

SEQ ID NO: 100867 - protein, 7 aa, synthetic construct
FYNVGSG

SEQ ID NO: 100868 - protein, 7 aa, synthetic construct
VKYTGEG

SEQ ID NO: 100869 - protein, 7 aa, synthetic construct
IQKSEHR

SEQ ID NO: 100870 - protein, 7 aa, synthetic construct
RIGHVSV

SEQ ID NO: 100871 - protein, 7 aa, synthetic construct
KMDLTQT

SEQ ID NO: 100872 - protein, 7 aa, synthetic construct
HWSASRE

SEQ ID NO: 100873 - protein, 7 aa, synthetic construct
GGQDPHK

SEQ ID NO: 100874 - protein, 7 aa, synthetic construct
QQYKAEN

SEQ ID NO: 100875 - protein, 7 aa, synthetic construct
RDGIMND

SEQ ID NO: 100876 - protein, 7 aa, synthetic construct
RHESQEA

SEQ ID NO: 100877 - protein, 7 aa, synthetic construct
YADSRRY

SEQ ID NO: 100878 - protein, 7 aa, synthetic construct
KNRTEDN

SEQ ID NO: 100879 - protein, 7 aa, synthetic construct
MTQVAQN

SEQ ID NO: 100880 - protein, 7 aa, synthetic construct
IAGNVKL

SEQ ID NO: 100881 - protein, 7 aa, synthetic construct
VPEPGNL

SEQ ID NO: 100882 - protein, 7 aa, synthetic construct
AIRYQET

SEQ ID NO: 100883 - protein, 7 aa, synthetic construct
GIIDKSN

SEQ ID NO: 100884 - protein, 7 aa, synthetic construct
WNRLKPD

SEQ ID NO: 100885 - protein, 7 aa, synthetic construct
VGKNSTP

SEQ ID NO: 100886 - protein, 7 aa, synthetic construct
DSAYKKM

SEQ ID NO: 100887 - protein, 7 aa, synthetic construct
GQKSQNP

SEQ ID NO: 100888 - protein, 7 aa, synthetic construct
GKTVTQS

SEQ ID NO: 100889 - protein, 7 aa, synthetic construct
NSKSTGP

SEQ ID NO: 100890 - protein, 7 aa, synthetic construct
HHEGRIG

SEQ ID NO: 100891 - protein, 7 aa, synthetic construct
IKTMAIK

SEQ ID NO: 100892 - protein, 7 aa, synthetic construct
TMVKNEV

SEQ ID NO: 100893 - protein, 7 aa, synthetic construct
AKMLLQD

SEQ ID NO: 100894 - protein, 7 aa, synthetic construct
LSGAYNM

SEQ ID NO: 100895 - protein, 7 aa, synthetic construct
VDFPNSP

SEQ ID NO: 100896 - protein, 7 aa, synthetic construct
GSGFGQD

SEQ ID NO: 100897 - protein, 7 aa, synthetic construct
ADQHMAG

SEQ ID NO: 100898 - protein, 7 aa, synthetic construct
VRASHLL

SEQ ID NO: 100899 - protein, 7 aa, synthetic construct
KHQLKPD

SEQ ID NO: 100900 - protein, 7 aa, synthetic construct
HFLTREE

SEQ ID NO: 100901 - protein, 7 aa, synthetic construct
MSSATKF

SEQ ID NO: 100902 - protein, 7 aa, synthetic construct
RMKSDQF

SEQ ID NO: 100903 - protein, 7 aa, synthetic construct
FGMVGMG

SEQ ID NO: 100904 - protein, 7 aa, synthetic construct
QPIRVDR

SEQ ID NO: 100905 - protein, 7 aa, synthetic construct
RHHVQLP

SEQ ID NO: 100906 - protein, 7 aa, synthetic construct
NEDTFHG

SEQ ID NO: 100907 - protein, 7 aa, synthetic construct
KEGKVTS

SEQ ID NO: 100908 - protein, 7 aa, synthetic construct
GTSVPIL

SEQ ID NO: 100909 - protein, 7 aa, synthetic construct
YKELHDA

SEQ ID NO: 100910 - protein, 7 aa, synthetic construct
LSLNHLM

SEQ ID NO: 100911 - protein, 7 aa, synthetic construct
YNQRSEL

SEQ ID NO: 100912 - protein, 7 aa, synthetic construct
AVGTFES

SEQ ID NO: 100913 - protein, 7 aa, synthetic construct
PMKEAVH

SEQ ID NO: 100914 - protein, 7 aa, synthetic construct
PAWNNGH

SEQ ID NO: 100915 - protein, 7 aa, synthetic construct
HMVRPEP

SEQ ID NO: 100916 - protein, 7 aa, synthetic construct
TQDIKGA

SEQ ID NO: 100917 - protein, 7 aa, synthetic construct
TEYKDRH

SEQ ID NO: 100918 - protein, 7 aa, synthetic construct
TPVDTQF

SEQ ID NO: 100919 - protein, 7 aa, synthetic construct
YQSGKPM

SEQ ID NO: 100920 - protein, 7 aa, synthetic construct
MKQPLED

SEQ ID NO: 100921 - protein, 7 aa, synthetic construct
WQMKLDA

SEQ ID NO: 100922 - protein, 7 aa, synthetic construct
NMLDNKW

SEQ ID NO: 100923 - protein, 7 aa, synthetic construct
SNAMLIG

SEQ ID NO: 100924 - protein, 7 aa, synthetic construct
PHEVKTA

SEQ ID NO: 100925 - protein, 7 aa, synthetic construct
WQNHDSG

SEQ ID NO: 100926 - protein, 7 aa, synthetic construct
HGGNVIN

SEQ ID NO: 100927 - protein, 7 aa, synthetic construct
FREPNQY

SEQ ID NO: 100928 - protein, 7 aa, synthetic construct
QANLTVS

SEQ ID NO: 100929 - protein, 7 aa, synthetic construct
SSHRIVD

SEQ ID NO: 100930 - protein, 7 aa, synthetic construct
VPNPRKD

SEQ ID NO: 100931 - protein, 7 aa, synthetic construct
VNQLSIL

SEQ ID NO: 100932 - protein, 7 aa, synthetic construct
SQEKGQE

SEQ ID NO: 100933 - protein, 7 aa, synthetic construct
WPEHAGK

SEQ ID NO: 100934 - protein, 7 aa, synthetic construct
DNKIVRG

SEQ ID NO: 100935 - protein, 7 aa, synthetic construct
SIPNRWE

SEQ ID NO: 100936 - protein, 7 aa, synthetic construct
QIGQQGT

SEQ ID NO: 100937 - protein, 7 aa, synthetic construct
GPPSKGM

SEQ ID NO: 100938 - protein, 7 aa, synthetic construct
IHGSFKT

SEQ ID NO: 100939 - protein, 7 aa, synthetic construct
FNAIAVK

SEQ ID NO: 100940 - protein, 7 aa, synthetic construct
FGQPAKE

SEQ ID NO: 100941 - protein, 7 aa, synthetic construct
EVPTQSG

SEQ ID NO: 100942 - protein, 7 aa, synthetic construct
SGNILKF

SEQ ID NO: 100943 - protein, 7 aa, synthetic construct
QNATVTP

SEQ ID NO: 100944 - protein, 7 aa, synthetic construct
QSKSNTP

SEQ ID NO: 100945 - protein, 7 aa, synthetic construct
SFIPMGA

SEQ ID NO: 100946 - protein, 7 aa, synthetic construct
PNQIQLE

SEQ ID NO: 100947 - protein, 7 aa, synthetic construct
AMPDSYR

SEQ ID NO: 100948 - protein, 7 aa, synthetic construct
MQNEKKE

SEQ ID NO: 100949 - protein, 7 aa, synthetic construct
HRLVKEF

SEQ ID NO: 100950 - protein, 7 aa, synthetic construct
SYAQVRQ

SEQ ID NO: 100951 - protein, 7 aa, synthetic construct
LAQQNIS

SEQ ID NO: 100952 - protein, 7 aa, synthetic construct
VHGHDMA

SEQ ID NO: 100953 - protein, 7 aa, synthetic construct
TISSSNR

SEQ ID NO: 100954 - protein, 7 aa, synthetic construct
SATISLP

SEQ ID NO: 100955 - protein, 7 aa, synthetic construct
MLDINTV

SEQ ID NO: 100956 - protein, 7 aa, synthetic construct
SGFPERE

SEQ ID NO: 100957 - protein, 7 aa, synthetic construct
VFQDQDK

SEQ ID NO: 100958 - protein, 7 aa, synthetic construct
GRAHQHG

SEQ ID NO: 100959 - protein, 7 aa, synthetic construct
PATQIDS

SEQ ID NO: 100960 - protein, 7 aa, synthetic construct
SHSQNPE

SEQ ID NO: 100961 - protein, 7 aa, synthetic construct
PARKLID

SEQ ID NO: 100962 - protein, 7 aa, synthetic construct
LGVHPDP

SEQ ID NO: 100963 - protein, 7 aa, synthetic construct
KITTHEE

SEQ ID NO: 100964 - protein, 7 aa, synthetic construct
MYPATTV

SEQ ID NO: 100965 - protein, 7 aa, synthetic construct
YTKQDNK

SEQ ID NO: 100966 - protein, 7 aa, synthetic construct
FALTYRD

SEQ ID NO: 100967 - protein, 7 aa, synthetic construct
VRSLANT

SEQ ID NO: 100968 - protein, 7 aa, synthetic construct
HIPTFRG

SEQ ID NO: 100969 - protein, 7 aa, synthetic construct
GPHLVVE

SEQ ID NO: 100970 - protein, 7 aa, synthetic construct
KNRSADP

SEQ ID NO: 100971 - protein, 7 aa, synthetic construct
MQSATTP

SEQ ID NO: 100972 - protein, 7 aa, synthetic construct
SEGKTLF

SEQ ID NO: 100973 - protein, 7 aa, synthetic construct
GSYVNQH

SEQ ID NO: 100974 - protein, 7 aa, synthetic construct
EAQFGSG

SEQ ID NO: 100975 - protein, 7 aa, synthetic construct
YDGKFPI

SEQ ID NO: 100976 - protein, 7 aa, synthetic construct
KTPQQRE

SEQ ID NO: 100977 - protein, 7 aa, synthetic construct
IRGPIPI

SEQ ID NO: 100978 - protein, 7 aa, synthetic construct
SHAPMQS

SEQ ID NO: 100979 - protein, 7 aa, synthetic construct
ILAHDPA

SEQ ID NO: 100980 - protein, 7 aa, synthetic construct
LFSESRT

SEQ ID NO: 100981 - protein, 7 aa, synthetic construct
DHKKQML

SEQ ID NO: 100982 - protein, 7 aa, synthetic construct
RARAPTD

SEQ ID NO: 100983 - protein, 7 aa, synthetic construct
ATKATQP

SEQ ID NO: 100984 - protein, 7 aa, synthetic construct
VKPTAAW

SEQ ID NO: 100985 - protein, 7 aa, synthetic construct
YGQTRTA

SEQ ID NO: 100986 - protein, 7 aa, synthetic construct
SDNWPKQ

SEQ ID NO: 100987 - protein, 7 aa, synthetic construct
QKMDNDK

SEQ ID NO: 100988 - protein, 7 aa, synthetic construct
FSKWVNS

SEQ ID NO: 100989 - protein, 7 aa, synthetic construct
YLKDEYR

SEQ ID NO: 100990 - protein, 7 aa, synthetic construct
VPNQTLM

SEQ ID NO: 100991 - protein, 7 aa, synthetic construct
VTSIDSY

SEQ ID NO: 100992 - protein, 7 aa, synthetic construct
NDPGRAA

SEQ ID NO: 100993 - protein, 7 aa, synthetic construct
EPINQAV

SEQ ID NO: 100994 - protein, 7 aa, synthetic construct
HIRDEKM

SEQ ID NO: 100995 - protein, 7 aa, synthetic construct
AKSSMLA

SEQ ID NO: 100996 - protein, 7 aa, synthetic construct
EYKMGIE

SEQ ID NO: 100997 - protein, 7 aa, synthetic construct
PAKPMKE

SEQ ID NO: 100998 - protein, 7 aa, synthetic construct
LSTYQQV

SEQ ID NO: 100999 - protein, 7 aa, synthetic construct
YMVPVRE

SEQ ID NO: 101000 - protein, 7 aa, synthetic construct
QNISRPA

SEQ ID NO: 101001 - protein, 7 aa, synthetic construct
RYTHEDG

SEQ ID NO: 101002 - protein, 7 aa, synthetic construct
QAHFDHD

SEQ ID NO: 101003 - protein, 7 aa, synthetic construct
DKDAVGK

SEQ ID NO: 101004 - protein, 7 aa, synthetic construct
NVRTSQP

SEQ ID NO: 101005 - protein, 7 aa, synthetic construct
IFESVRN

SEQ ID NO: 101006 - protein, 7 aa, synthetic construct
KDRENKP

SEQ ID NO: 101007 - protein, 7 aa, synthetic construct
HRDDNHT

SEQ ID NO: 101008 - protein, 7 aa, synthetic construct
KMGWEDI

SEQ ID NO: 101009 - protein, 7 aa, synthetic construct
LNQILHT

SEQ ID NO: 101010 - protein, 7 aa, synthetic construct
NTVISVP

SEQ ID NO: 101011 - protein, 7 aa, synthetic construct
LSHNVPD

SEQ ID NO: 101012 - protein, 7 aa, synthetic construct
KQDTSFS

SEQ ID NO: 101013 - protein, 7 aa, synthetic construct
YGLVQRA

SEQ ID NO: 101014 - protein, 7 aa, synthetic construct
ISHRTNH

SEQ ID NO: 101015 - protein, 7 aa, synthetic construct
HHTARIS

SEQ ID NO: 101016 - protein, 7 aa, synthetic construct
NQSFNGE

SEQ ID NO: 101017 - protein, 7 aa, synthetic construct
THETVKH

SEQ ID NO: 101018 - protein, 7 aa, synthetic construct
RASPDAR

SEQ ID NO: 101019 - protein, 7 aa, synthetic construct
RFEIMPG

SEQ ID NO: 101020 - protein, 7 aa, synthetic construct
WHSPNLG

SEQ ID NO: 101021 - protein, 7 aa, synthetic construct
MYQVQGH

SEQ ID NO: 101022 - protein, 7 aa, synthetic construct
MEPHERS

SEQ ID NO: 101023 - protein, 7 aa, synthetic construct
HDHMIIE

SEQ ID NO: 101024 - protein, 7 aa, synthetic construct
WNKNEVL

SEQ ID NO: 101025 - protein, 7 aa, synthetic construct
YYGAPEG

SEQ ID NO: 101026 - protein, 7 aa, synthetic construct
HAAVMLD

SEQ ID NO: 101027 - protein, 7 aa, synthetic construct
LGKTENT

SEQ ID NO: 101028 - protein, 7 aa, synthetic construct
MRNRIED

SEQ ID NO: 101029 - protein, 7 aa, synthetic construct
FMKATGV

SEQ ID NO: 101030 - protein, 7 aa, synthetic construct
DSVATSG

SEQ ID NO: 101031 - protein, 7 aa, synthetic construct
KEMRPGT

SEQ ID NO: 101032 - protein, 7 aa, synthetic construct
VVRATYE

SEQ ID NO: 101033 - protein, 7 aa, synthetic construct
LTKVLMG

SEQ ID NO: 101034 - protein, 7 aa, synthetic construct
LTARPTY

SEQ ID NO: 101035 - protein, 7 aa, synthetic construct
ERTHSPK

SEQ ID NO: 101036 - protein, 7 aa, synthetic construct
NAITMPA

SEQ ID NO: 101037 - protein, 7 aa, synthetic construct
INHHNET

SEQ ID NO: 101038 - protein, 7 aa, synthetic construct
MYQAGPM

SEQ ID NO: 101039 - protein, 7 aa, synthetic construct
AGAGTYE

SEQ ID NO: 101040 - protein, 7 aa, synthetic construct
TFGFAEG

SEQ ID NO: 101041 - protein, 7 aa, synthetic construct
TTSAFLK

SEQ ID NO: 101042 - protein, 7 aa, synthetic construct
YEKAEQG

SEQ ID NO: 101043 - protein, 7 aa, synthetic construct
HTYNLHS

SEQ ID NO: 101044 - protein, 7 aa, synthetic construct
GNDGHLV

SEQ ID NO: 101045 - protein, 7 aa, synthetic construct
FKLAGVS

SEQ ID NO: 101046 - protein, 7 aa, synthetic construct
LHMHGIV

SEQ ID NO: 101047 - protein, 7 aa, synthetic construct
DISGNIG

SEQ ID NO: 101048 - protein, 7 aa, synthetic construct
GRSTNGP

SEQ ID NO: 101049 - protein, 7 aa, synthetic construct
VLDKDRR

SEQ ID NO: 101050 - protein, 7 aa, synthetic construct
AKQDVQF

SEQ ID NO: 101051 - protein, 7 aa, synthetic construct
QMTQRHF

SEQ ID NO: 101052 - protein, 7 aa, synthetic construct
KYNHMLE

SEQ ID NO: 101053 - protein, 7 aa, synthetic construct
PEPQSIR

SEQ ID NO: 101054 - protein, 7 aa, synthetic construct
NFKATAF

SEQ ID NO: 101055 - protein, 7 aa, synthetic construct
SQVMGDK

SEQ ID NO: 101056 - protein, 7 aa, synthetic construct
IRNSTNG

SEQ ID NO: 101057 - protein, 7 aa, synthetic construct
AKSARHD

SEQ ID NO: 101058 - protein, 7 aa, synthetic construct
DGHISKV

SEQ ID NO: 101059 - protein, 7 aa, synthetic construct
QMDHGVP

SEQ ID NO: 101060 - protein, 7 aa, synthetic construct
SASSRQW

SEQ ID NO: 101061 - protein, 7 aa, synthetic construct
QVGIQGQ

SEQ ID NO: 101062 - protein, 7 aa, synthetic construct
IQDNSLR

SEQ ID NO: 101063 - protein, 7 aa, synthetic construct
LIPGSLM

SEQ ID NO: 101064 - protein, 7 aa, synthetic construct
HPHIGAM

SEQ ID NO: 101065 - protein, 7 aa, synthetic construct
GKTPPGA

SEQ ID NO: 101066 - protein, 7 aa, synthetic construct
NQVFTPE

SEQ ID NO: 101067 - protein, 7 aa, synthetic construct
WTNVVTK

SEQ ID NO: 101068 - protein, 7 aa, synthetic construct
QHQQTEG

SEQ ID NO: 101069 - protein, 7 aa, synthetic construct
NASGDRF

SEQ ID NO: 101070 - protein, 7 aa, synthetic construct
TTQFMPS

SEQ ID NO: 101071 - protein, 7 aa, synthetic construct
NKPQTSV

SEQ ID NO: 101072 - protein, 7 aa, synthetic construct
PSDQGRW

SEQ ID NO: 101073 - protein, 7 aa, synthetic construct
KDSGQST

SEQ ID NO: 101074 - protein, 7 aa, synthetic construct
LYKPEYP

SEQ ID NO: 101075 - protein, 7 aa, synthetic construct
QVHVHSH

SEQ ID NO: 101076 - protein, 7 aa, synthetic construct
GTPAMQI

SEQ ID NO: 101077 - protein, 7 aa, synthetic construct
RDPVMFG

SEQ ID NO: 101078 - protein, 7 aa, synthetic construct
NVNLESH

SEQ ID NO: 101079 - protein, 7 aa, synthetic construct
MPMFQEA

SEQ ID NO: 101080 - protein, 7 aa, synthetic construct
TPQERTP

SEQ ID NO: 101081 - protein, 7 aa, synthetic construct
IHGVEIT

SEQ ID NO: 101082 - protein, 7 aa, synthetic construct
VGAFMSQ

SEQ ID NO: 101083 - protein, 7 aa, synthetic construct
YTKGEVE

SEQ ID NO: 101084 - protein, 7 aa, synthetic construct
NTAHEPG

SEQ ID NO: 101085 - protein, 7 aa, synthetic construct
NFGESAR

SEQ ID NO: 101086 - protein, 7 aa, synthetic construct
QSAHRPV

SEQ ID NO: 101087 - protein, 7 aa, synthetic construct
YEFDRIG

SEQ ID NO: 101088 - protein, 7 aa, synthetic construct
TLDLVER

SEQ ID NO: 101089 - protein, 7 aa, synthetic construct
GQLRSSD

SEQ ID NO: 101090 - protein, 7 aa, synthetic construct
NGNKMTG

SEQ ID NO: 101091 - protein, 7 aa, synthetic construct
WRMEALG

SEQ ID NO: 101092 - protein, 7 aa, synthetic construct
NPFNESI

SEQ ID NO: 101093 - protein, 7 aa, synthetic construct
IHDIGVQ

SEQ ID NO: 101094 - protein, 7 aa, synthetic construct
QSMSKGM

SEQ ID NO: 101095 - protein, 7 aa, synthetic construct
EQRQTAN

SEQ ID NO: 101096 - protein, 7 aa, synthetic construct
VTIRSEE

SEQ ID NO: 101097 - protein, 7 aa, synthetic construct
SDHSSYV

SEQ ID NO: 101098 - protein, 7 aa, synthetic construct
QASSHQR

SEQ ID NO: 101099 - protein, 7 aa, synthetic construct
TKNESTN

SEQ ID NO: 101100 - protein, 7 aa, synthetic construct
LPQKEWK

SEQ ID NO: 101101 - protein, 7 aa, synthetic construct
IVMNKRD

SEQ ID NO: 101102 - protein, 7 aa, synthetic construct
WADDGGG

SEQ ID NO: 101103 - protein, 7 aa, synthetic construct
MSGDTQA

SEQ ID NO: 101104 - protein, 7 aa, synthetic construct
DPPKGMT

SEQ ID NO: 101105 - protein, 7 aa, synthetic construct
VKKEMKD

SEQ ID NO: 101106 - protein, 7 aa, synthetic construct
RLLQHAS

SEQ ID NO: 101107 - protein, 7 aa, synthetic construct
KSMDKTV

SEQ ID NO: 101108 - protein, 7 aa, synthetic construct
RQSNEDN

SEQ ID NO: 101109 - protein, 7 aa, synthetic construct
NNRMMVH

SEQ ID NO: 101110 - protein, 7 aa, synthetic construct
DPYSTRD

SEQ ID NO: 101111 - protein, 7 aa, synthetic construct
KEVNKYI

SEQ ID NO: 101112 - protein, 7 aa, synthetic construct
HTGQIIV

SEQ ID NO: 101113 - protein, 7 aa, synthetic construct
SELNSVV

SEQ ID NO: 101114 - protein, 7 aa, synthetic construct
DTFKMQR

SEQ ID NO: 101115 - protein, 7 aa, synthetic construct
MQGMRHL

SEQ ID NO: 101116 - protein, 7 aa, synthetic construct
LHAGKQF

SEQ ID NO: 101117 - protein, 7 aa, synthetic construct
NAGRDVL

SEQ ID NO: 101118 - protein, 7 aa, synthetic construct
GPMIRIP

SEQ ID NO: 101119 - protein, 7 aa, synthetic construct
LIMQKPQ

SEQ ID NO: 101120 - protein, 7 aa, synthetic construct
MPQMQEK

SEQ ID NO: 101121 - protein, 7 aa, synthetic construct
FTDTMTA

SEQ ID NO: 101122 - protein, 7 aa, synthetic construct
FPANQNF

SEQ ID NO: 101123 - protein, 7 aa, synthetic construct
MGGAGQP

SEQ ID NO: 101124 - protein, 7 aa, synthetic construct
MNASRQA

SEQ ID NO: 101125 - protein, 7 aa, synthetic construct
RRKEEYP

SEQ ID NO: 101126 - protein, 7 aa, synthetic construct
HRMPSNL

SEQ ID NO: 101127 - protein, 7 aa, synthetic construct
VNLSKGV

SEQ ID NO: 101128 - protein, 7 aa, synthetic construct
SKDSPFQ

SEQ ID NO: 101129 - protein, 7 aa, synthetic construct
EIHSRLE

SEQ ID NO: 101130 - protein, 7 aa, synthetic construct
ILEYSHG

SEQ ID NO: 101131 - protein, 7 aa, synthetic construct
PYTNADA

SEQ ID NO: 101132 - protein, 7 aa, synthetic construct
ISDGLRN

SEQ ID NO: 101133 - protein, 7 aa, synthetic construct
IYGRPDD

SEQ ID NO: 101134 - protein, 7 aa, synthetic construct
NTGKDSG

SEQ ID NO: 101135 - protein, 7 aa, synthetic construct
WGVRQVG

SEQ ID NO: 101136 - protein, 7 aa, synthetic construct
DHSFMSA

SEQ ID NO: 101137 - protein, 7 aa, synthetic construct
APTHSLK

SEQ ID NO: 101138 - protein, 7 aa, synthetic construct
KVHQNGW

SEQ ID NO: 101139 - protein, 7 aa, synthetic construct
VGNESKE

SEQ ID NO: 101140 - protein, 7 aa, synthetic construct
TMKTEVD

SEQ ID NO: 101141 - protein, 7 aa, synthetic construct
KDVGIQR

SEQ ID NO: 101142 - protein, 7 aa, synthetic construct
GPYAMNV

SEQ ID NO: 101143 - protein, 7 aa, synthetic construct
PMHASGV

SEQ ID NO: 101144 - protein, 7 aa, synthetic construct
YHNPERD

SEQ ID NO: 101145 - protein, 7 aa, synthetic construct
KAVGPIH

SEQ ID NO: 101146 - protein, 7 aa, synthetic construct
NRHGSGY

SEQ ID NO: 101147 - protein, 7 aa, synthetic construct
PSSHNQM

SEQ ID NO: 101148 - protein, 7 aa, synthetic construct
HSTHIIE

SEQ ID NO: 101149 - protein, 7 aa, synthetic construct
IFSNKEN

SEQ ID NO: 101150 - protein, 7 aa, synthetic construct
KKTDLTP

SEQ ID NO: 101151 - protein, 7 aa, synthetic construct
ETQINKQ

SEQ ID NO: 101152 - protein, 7 aa, synthetic construct
SWQQSGA

SEQ ID NO: 101153 - protein, 7 aa, synthetic construct
EYHATPR

SEQ ID NO: 101154 - protein, 7 aa, synthetic construct
QKGVESL

SEQ ID NO: 101155 - protein, 7 aa, synthetic construct
FVGTSFD

SEQ ID NO: 101156 - protein, 7 aa, synthetic construct
DFMPEPK

SEQ ID NO: 101157 - protein, 7 aa, synthetic construct
IDNQQRV

SEQ ID NO: 101158 - protein, 7 aa, synthetic construct
VPHTWEK

SEQ ID NO: 101159 - protein, 7 aa, synthetic construct
QHGAKNG

SEQ ID NO: 101160 - protein, 7 aa, synthetic construct
KGRPNEA

SEQ ID NO: 101161 - protein, 7 aa, synthetic construct
PTQSVIT

SEQ ID NO: 101162 - protein, 7 aa, synthetic construct
LIGTIAV

SEQ ID NO: 101163 - protein, 7 aa, synthetic construct
MINFAMD

SEQ ID NO: 101164 - protein, 7 aa, synthetic construct
NVKDMGK

SEQ ID NO: 101165 - protein, 7 aa, synthetic construct
IKHGMDM

SEQ ID NO: 101166 - protein, 7 aa, synthetic construct
VPNHGSF

SEQ ID NO: 101167 - protein, 7 aa, synthetic construct
WFKEHVG

SEQ ID NO: 101168 - protein, 7 aa, synthetic construct
HTDQAFH

SEQ ID NO: 101169 - protein, 7 aa, synthetic construct
DHYHYKV

SEQ ID NO: 101170 - protein, 7 aa, synthetic construct
PAKHMSS

SEQ ID NO: 101171 - protein, 7 aa, synthetic construct
AHGKHIS

SEQ ID NO: 101172 - protein, 7 aa, synthetic construct
VQAHNRQ

SEQ ID NO: 101173 - protein, 7 aa, synthetic construct
FEHHTQG

SEQ ID NO: 101174 - protein, 7 aa, synthetic construct
YGYGIAQ

SEQ ID NO: 101175 - protein, 7 aa, synthetic construct
LATTNDW

SEQ ID NO: 101176 - protein, 7 aa, synthetic construct
GVTSITG

SEQ ID NO: 101177 - protein, 7 aa, synthetic construct
MTAQNHE

SEQ ID NO: 101178 - protein, 7 aa, synthetic construct
ITTIKPE

SEQ ID NO: 101179 - protein, 7 aa, synthetic construct
QVMGVIH

SEQ ID NO: 101180 - protein, 7 aa, synthetic construct
LNRHLGH

SEQ ID NO: 101181 - protein, 7 aa, synthetic construct
EKLHIMN

SEQ ID NO: 101182 - protein, 7 aa, synthetic construct
SMRTVHS

SEQ ID NO: 101183 - protein, 7 aa, synthetic construct
IITDMKP

SEQ ID NO: 101184 - protein, 7 aa, synthetic construct
NMVNKGM

SEQ ID NO: 101185 - protein, 7 aa, synthetic construct
YTGITVM

SEQ ID NO: 101186 - protein, 7 aa, synthetic construct
GQIRVAY

SEQ ID NO: 101187 - protein, 7 aa, synthetic construct
HGDNMNP

SEQ ID NO: 101188 - protein, 7 aa, synthetic construct
VQAHIQS

SEQ ID NO: 101189 - protein, 7 aa, synthetic construct
NAGNNAH

SEQ ID NO: 101190 - protein, 7 aa, synthetic construct
IFVSQDV

SEQ ID NO: 101191 - protein, 7 aa, synthetic construct
TEMIKSM

SEQ ID NO: 101192 - protein, 7 aa, synthetic construct
QMKQISS

SEQ ID NO: 101193 - protein, 7 aa, synthetic construct
NVREEQH

SEQ ID NO: 101194 - protein, 7 aa, synthetic construct
KMKMLTA

SEQ ID NO: 101195 - protein, 7 aa, synthetic construct
MSSNVPY

SEQ ID NO: 101196 - protein, 7 aa, synthetic construct
DYQIRND

SEQ ID NO: 101197 - protein, 7 aa, synthetic construct
HKYRDDA

SEQ ID NO: 101198 - protein, 7 aa, synthetic construct
TTTNNDH

SEQ ID NO: 101199 - protein, 7 aa, synthetic construct
ISQLQGR

SEQ ID NO: 101200 - protein, 7 aa, synthetic construct
GMHVAHF

SEQ ID NO: 101201 - protein, 7 aa, synthetic construct
SRYDMHP

SEQ ID NO: 101202 - protein, 7 aa, synthetic construct
RSNSMSP

SEQ ID NO: 101203 - protein, 7 aa, synthetic construct
HFHGLGS

SEQ ID NO: 101204 - protein, 7 aa, synthetic construct
NKDLGKN

SEQ ID NO: 101205 - protein, 7 aa, synthetic construct
VGKSWPE

SEQ ID NO: 101206 - protein, 7 aa, synthetic construct
KAQDHHI

SEQ ID NO: 101207 - protein, 7 aa, synthetic construct
MEPTRTQ

SEQ ID NO: 101208 - protein, 7 aa, synthetic construct
QGPNNQT

SEQ ID NO: 101209 - protein, 7 aa, synthetic construct
PAMPPVG

SEQ ID NO: 101210 - protein, 7 aa, synthetic construct
AYSGESY

SEQ ID NO: 101211 - protein, 7 aa, synthetic construct
SKGAEHY

SEQ ID NO: 101212 - protein, 7 aa, synthetic construct
GRVGHMH

SEQ ID NO: 101213 - protein, 7 aa, synthetic construct
TIGFREE

SEQ ID NO: 101214 - protein, 7 aa, synthetic construct
KWGAEQI

SEQ ID NO: 101215 - protein, 7 aa, synthetic construct
EVQHVIR

SEQ ID NO: 101216 - protein, 7 aa, synthetic construct
EPFNIGP

SEQ ID NO: 101217 - protein, 7 aa, synthetic construct
HGPVHND

SEQ ID NO: 101218 - protein, 7 aa, synthetic construct
KVSDLYS

SEQ ID NO: 101219 - protein, 7 aa, synthetic construct
RIHMYAE

SEQ ID NO: 101220 - protein, 7 aa, synthetic construct
LGLIPVH

SEQ ID NO: 101221 - protein, 7 aa, synthetic construct
FMTGGLI

SEQ ID NO: 101222 - protein, 7 aa, synthetic construct
GVHKDEG

SEQ ID NO: 101223 - protein, 7 aa, synthetic construct
NRTYEVK

SEQ ID NO: 101224 - protein, 7 aa, synthetic construct
FKTMEEA

SEQ ID NO: 101225 - protein, 7 aa, synthetic construct
MNPSTAD

SEQ ID NO: 101226 - protein, 7 aa, synthetic construct
REGSGIG

SEQ ID NO: 101227 - protein, 7 aa, synthetic construct
YDQGKPG

SEQ ID NO: 101228 - protein, 7 aa, synthetic construct
THLSSMM

SEQ ID NO: 101229 - protein, 7 aa, synthetic construct
SLKQNQS

SEQ ID NO: 101230 - protein, 7 aa, synthetic construct
KQSIDQR

SEQ ID NO: 101231 - protein, 7 aa, synthetic construct
YAHGQFN

SEQ ID NO: 101232 - protein, 7 aa, synthetic construct
NTGMIRT

SEQ ID NO: 101233 - protein, 7 aa, synthetic construct
NHSKNNH

SEQ ID NO: 101234 - protein, 7 aa, synthetic construct
SYELKFG

SEQ ID NO: 101235 - protein, 7 aa, synthetic construct
KPNSMQM

SEQ ID NO: 101236 - protein, 7 aa, synthetic construct
FETIRPT

SEQ ID NO: 101237 - protein, 7 aa, synthetic construct
RVRLDAS

SEQ ID NO: 101238 - protein, 7 aa, synthetic construct
FKNGSSV

SEQ ID NO: 101239 - protein, 7 aa, synthetic construct
PANHGEL

SEQ ID NO: 101240 - protein, 7 aa, synthetic construct
ITSHDPS

SEQ ID NO: 101241 - protein, 7 aa, synthetic construct
RSKEGGV

SEQ ID NO: 101242 - protein, 7 aa, synthetic construct
GAIGYDG

SEQ ID NO: 101243 - protein, 7 aa, synthetic construct
YNEAKYG

SEQ ID NO: 101244 - protein, 7 aa, synthetic construct
IQVTGSD

SEQ ID NO: 101245 - protein, 7 aa, synthetic construct
WTTRLEA

SEQ ID NO: 101246 - protein, 7 aa, synthetic construct
KQIDKVP

SEQ ID NO: 101247 - protein, 7 aa, synthetic construct
IADGSIQ

SEQ ID NO: 101248 - protein, 7 aa, synthetic construct
KSRVLEE

SEQ ID NO: 101249 - protein, 7 aa, synthetic construct
HHIKHPE

SEQ ID NO: 101250 - protein, 7 aa, synthetic construct
FQARTGH

SEQ ID NO: 101251 - protein, 7 aa, synthetic construct
FNKQSSA

SEQ ID NO: 101252 - protein, 7 aa, synthetic construct
SAKDAVR

SEQ ID NO: 101253 - protein, 7 aa, synthetic construct
ETKLSNA

SEQ ID NO: 101254 - protein, 7 aa, synthetic construct
IINQHVE

SEQ ID NO: 101255 - protein, 7 aa, synthetic construct
IRAEHEE

SEQ ID NO: 101256 - protein, 7 aa, synthetic construct
LSIDQHG

SEQ ID NO: 101257 - protein, 7 aa, synthetic construct
ANANWHA

SEQ ID NO: 101258 - protein, 7 aa, synthetic construct
EVTRFAG

SEQ ID NO: 101259 - protein, 7 aa, synthetic construct
IGSLPHP

SEQ ID NO: 101260 - protein, 7 aa, synthetic construct
TTAVYKE

SEQ ID NO: 101261 - protein, 7 aa, synthetic construct
GHHTIGM

SEQ ID NO: 101262 - protein, 7 aa, synthetic construct
ISADVSY

SEQ ID NO: 101263 - protein, 7 aa, synthetic construct
AKHIVPQ

SEQ ID NO: 101264 - protein, 7 aa, synthetic construct
DDAYIKH

SEQ ID NO: 101265 - protein, 7 aa, synthetic construct
FVLSKPN

SEQ ID NO: 101266 - protein, 7 aa, synthetic construct
NTAVGMG

SEQ ID NO: 101267 - protein, 7 aa, synthetic construct
HISIPRP

SEQ ID NO: 101268 - protein, 7 aa, synthetic construct
GLGDGKP

SEQ ID NO: 101269 - protein, 7 aa, synthetic construct
WPSVLAN

SEQ ID NO: 101270 - protein, 7 aa, synthetic construct
KHERIYD

SEQ ID NO: 101271 - protein, 7 aa, synthetic construct
RDNAARD

SEQ ID NO: 101272 - protein, 7 aa, synthetic construct
SRVMLRE

SEQ ID NO: 101273 - protein, 7 aa, synthetic construct
YMGQQSM

SEQ ID NO: 101274 - protein, 7 aa, synthetic construct
DAQGNWH

SEQ ID NO: 101275 - protein, 7 aa, synthetic construct
YRYKTPE

SEQ ID NO: 101276 - protein, 7 aa, synthetic construct
EYDGKHI

SEQ ID NO: 101277 - protein, 7 aa, synthetic construct
THYNEAY

SEQ ID NO: 101278 - protein, 7 aa, synthetic construct
GENPRSQ

SEQ ID NO: 101279 - protein, 7 aa, synthetic construct
NFINKNS

SEQ ID NO: 101280 - protein, 7 aa, synthetic construct
QAGYATD

SEQ ID NO: 101281 - protein, 7 aa, synthetic construct
HQTADPR

SEQ ID NO: 101282 - protein, 7 aa, synthetic construct
QAQVIDA

SEQ ID NO: 101283 - protein, 7 aa, synthetic construct
ATMGNQA

SEQ ID NO: 101284 - protein, 7 aa, synthetic construct
VAGSQAD

SEQ ID NO: 101285 - protein, 7 aa, synthetic construct
KSGEHKA

SEQ ID NO: 101286 - protein, 7 aa, synthetic construct
QDRAFTV

SEQ ID NO: 101287 - protein, 7 aa, synthetic construct
FFNGKHE

SEQ ID NO: 101288 - protein, 7 aa, synthetic construct
HPMYEKH

SEQ ID NO: 101289 - protein, 7 aa, synthetic construct
FAKLNVL

SEQ ID NO: 101290 - protein, 7 aa, synthetic construct
PEYRSDH

SEQ ID NO: 101291 - protein, 7 aa, synthetic construct
DLTNGRI

SEQ ID NO: 101292 - protein, 7 aa, synthetic construct
RMNAEFP

SEQ ID NO: 101293 - protein, 7 aa, synthetic construct
RQMIIQP

SEQ ID NO: 101294 - protein, 7 aa, synthetic construct
KVGVELF

SEQ ID NO: 101295 - protein, 7 aa, synthetic construct
GSMKVYV

SEQ ID NO: 101296 - protein, 7 aa, synthetic construct
NFTRGDP

SEQ ID NO: 101297 - protein, 7 aa, synthetic construct
KFNTTAG

SEQ ID NO: 101298 - protein, 7 aa, synthetic construct
KTQVVQS

SEQ ID NO: 101299 - protein, 7 aa, synthetic construct
VEPNRGV

SEQ ID NO: 101300 - protein, 7 aa, synthetic construct
QVPQQVI

SEQ ID NO: 101301 - protein, 7 aa, synthetic construct
SRGLAFS

SEQ ID NO: 101302 - protein, 7 aa, synthetic construct
MRGMVLS

SEQ ID NO: 101303 - protein, 7 aa, synthetic construct
RKEYSGP

SEQ ID NO: 101304 - protein, 7 aa, synthetic construct
HETMKAE

SEQ ID NO: 101305 - protein, 7 aa, synthetic construct
SRININV

SEQ ID NO: 101306 - protein, 7 aa, synthetic construct
PNPHTLH

SEQ ID NO: 101307 - protein, 7 aa, synthetic construct
YKNLHVS

SEQ ID NO: 101308 - protein, 7 aa, synthetic construct
SPMPDQA

SEQ ID NO: 101309 - protein, 7 aa, synthetic construct
REFTRAA

SEQ ID NO: 101310 - protein, 7 aa, synthetic construct
PRDPKVS

SEQ ID NO: 101311 - protein, 7 aa, synthetic construct
IPGTQPE

SEQ ID NO: 101312 - protein, 7 aa, synthetic construct
NQVKPQS

SEQ ID NO: 101313 - protein, 7 aa, synthetic construct
PKTQSGA

SEQ ID NO: 101314 - protein, 7 aa, synthetic construct
MEPAIRI

SEQ ID NO: 101315 - protein, 7 aa, synthetic construct
WGDDLKA

SEQ ID NO: 101316 - protein, 7 aa, synthetic construct
NNMTNAI

SEQ ID NO: 101317 - protein, 7 aa, synthetic construct
RPVEPKD

SEQ ID NO: 101318 - protein, 7 aa, synthetic construct
MDKGEVR

SEQ ID NO: 101319 - protein, 7 aa, synthetic construct
RQNLKDF

SEQ ID NO: 101320 - protein, 7 aa, synthetic construct
LVRNSMN

SEQ ID NO: 101321 - protein, 7 aa, synthetic construct
FTQDRQV

SEQ ID NO: 101322 - protein, 7 aa, synthetic construct
RYAVANA

SEQ ID NO: 101323 - protein, 7 aa, synthetic construct
ASVKEAW

SEQ ID NO: 101324 - protein, 7 aa, synthetic construct
QNVKYPQ

SEQ ID NO: 101325 - protein, 7 aa, synthetic construct
AQTGSRA

SEQ ID NO: 101326 - protein, 7 aa, synthetic construct
VQQLSAI

SEQ ID NO: 101327 - protein, 7 aa, synthetic construct
EKLPHQY

SEQ ID NO: 101328 - protein, 7 aa, synthetic construct
LADPKII

SEQ ID NO: 101329 - protein, 7 aa, synthetic construct
QSPVIYP

SEQ ID NO: 101330 - protein, 7 aa, synthetic construct
QMKKDDM

SEQ ID NO: 101331 - protein, 7 aa, synthetic construct
RVEVHQH

SEQ ID NO: 101332 - protein, 7 aa, synthetic construct
FKGIQAQ

SEQ ID NO: 101333 - protein, 7 aa, synthetic construct
WVDQRIA

SEQ ID NO: 101334 - protein, 7 aa, synthetic construct
NHEPNRP

SEQ ID NO: 101335 - protein, 7 aa, synthetic construct
LINNTHV

SEQ ID NO: 101336 - protein, 7 aa, synthetic construct
HDAPIRQ

SEQ ID NO: 101337 - protein, 7 aa, synthetic construct
MIVDRRE

SEQ ID NO: 101338 - protein, 7 aa, synthetic construct
AHAVFVE

SEQ ID NO: 101339 - protein, 7 aa, synthetic construct
NDKVVTW

SEQ ID NO: 101340 - protein, 7 aa, synthetic construct
QHPDLVM

SEQ ID NO: 101341 - protein, 7 aa, synthetic construct
ALQTGMS

SEQ ID NO: 101342 - protein, 7 aa, synthetic construct
LESAQFA

SEQ ID NO: 101343 - protein, 7 aa, synthetic construct
DNREKTN

SEQ ID NO: 101344 - protein, 7 aa, synthetic construct
APKMYDE

SEQ ID NO: 101345 - protein, 7 aa, synthetic construct
SPHIRHV

SEQ ID NO: 101346 - protein, 7 aa, synthetic construct
WYTKDMG

SEQ ID NO: 101347 - protein, 7 aa, synthetic construct
RSNPKHE

SEQ ID NO: 101348 - protein, 7 aa, synthetic construct
KISYVEM

SEQ ID NO: 101349 - protein, 7 aa, synthetic construct
SMNSRDD

SEQ ID NO: 101350 - protein, 7 aa, synthetic construct
PGRNESN

SEQ ID NO: 101351 - protein, 7 aa, synthetic construct
MAVVMPH

SEQ ID NO: 101352 - protein, 7 aa, synthetic construct
TQQRPYM

SEQ ID NO: 101353 - protein, 7 aa, synthetic construct
PRDKAVS

SEQ ID NO: 101354 - protein, 7 aa, synthetic construct
EMYGKDK

SEQ ID NO: 101355 - protein, 7 aa, synthetic construct
RPSATMP

SEQ ID NO: 101356 - protein, 7 aa, synthetic construct
TPVKMDS

SEQ ID NO: 101357 - protein, 7 aa, synthetic construct
SLDMYAK

SEQ ID NO: 101358 - protein, 7 aa, synthetic construct
YEQHFIG

SEQ ID NO: 101359 - protein, 7 aa, synthetic construct
GSIPPLQ

SEQ ID NO: 101360 - protein, 7 aa, synthetic construct
TFQHQAR

SEQ ID NO: 101361 - protein, 7 aa, synthetic construct
VDALMPV

SEQ ID NO: 101362 - protein, 7 aa, synthetic construct
QWDDRRT

SEQ ID NO: 101363 - protein, 7 aa, synthetic construct
YGQRLNI

SEQ ID NO: 101364 - protein, 7 aa, synthetic construct
LPNAIQF

SEQ ID NO: 101365 - protein, 7 aa, synthetic construct
KHSVPNY

SEQ ID NO: 101366 - protein, 7 aa, synthetic construct
TFKHAMG

SEQ ID NO: 101367 - protein, 7 aa, synthetic construct
NKDTRSA

SEQ ID NO: 101368 - protein, 7 aa, synthetic construct
KMLHQDD

SEQ ID NO: 101369 - protein, 7 aa, synthetic construct
LSHKHDK

SEQ ID NO: 101370 - protein, 7 aa, synthetic construct
IPHRPLP

SEQ ID NO: 101371 - protein, 7 aa, synthetic construct
PMHVSPH

SEQ ID NO: 101372 - protein, 7 aa, synthetic construct
DEKYKDK

SEQ ID NO: 101373 - protein, 7 aa, synthetic construct
YQMKEGF

SEQ ID NO: 101374 - protein, 7 aa, synthetic construct
NSNTARI

SEQ ID NO: 101375 - protein, 7 aa, synthetic construct
VHRGGYD

SEQ ID NO: 101376 - protein, 7 aa, synthetic construct
AQKGNME

SEQ ID NO: 101377 - protein, 7 aa, synthetic construct
PTWGEKV

SEQ ID NO: 101378 - protein, 7 aa, synthetic construct
KSVESSF

SEQ ID NO: 101379 - protein, 7 aa, synthetic construct
VWNKSGA

SEQ ID NO: 101380 - protein, 7 aa, synthetic construct
SKAHTEK

SEQ ID NO: 101381 - protein, 7 aa, synthetic construct
YNAQQPN

SEQ ID NO: 101382 - protein, 7 aa, synthetic construct
HETARKV

SEQ ID NO: 101383 - protein, 7 aa, synthetic construct
VQMIQHS

SEQ ID NO: 101384 - protein, 7 aa, synthetic construct
IPQNHQV

SEQ ID NO: 101385 - protein, 7 aa, synthetic construct
QNYTMEK

SEQ ID NO: 101386 - protein, 7 aa, synthetic construct
LDPPGMR

SEQ ID NO: 101387 - protein, 7 aa, synthetic construct
DAHAINN

SEQ ID NO: 101388 - protein, 7 aa, synthetic construct
TFTMPTS

SEQ ID NO: 101389 - protein, 7 aa, synthetic construct
KNTNGTM

SEQ ID NO: 101390 - protein, 7 aa, synthetic construct
YDKQMQK

SEQ ID NO: 101391 - protein, 7 aa, synthetic construct
AKVYGMA

SEQ ID NO: 101392 - protein, 7 aa, synthetic construct
QPSVYTE

SEQ ID NO: 101393 - protein, 7 aa, synthetic construct
PKTQVSA

SEQ ID NO: 101394 - protein, 7 aa, synthetic construct
QKDVSYN

SEQ ID NO: 101395 - protein, 7 aa, synthetic construct
DFTEMKG

SEQ ID NO: 101396 - protein, 7 aa, synthetic construct
QNMHNIA

SEQ ID NO: 101397 - protein, 7 aa, synthetic construct
KGTESYM

SEQ ID NO: 101398 - protein, 7 aa, synthetic construct
RGGGFDA

SEQ ID NO: 101399 - protein, 7 aa, synthetic construct
EQRQGIE

SEQ ID NO: 101400 - protein, 7 aa, synthetic construct
PSALVDK

SEQ ID NO: 101401 - protein, 7 aa, synthetic construct
HFDWGQE

SEQ ID NO: 101402 - protein, 7 aa, synthetic construct
NIQAQLG

SEQ ID NO: 101403 - protein, 7 aa, synthetic construct
LNAYQAR

SEQ ID NO: 101404 - protein, 7 aa, synthetic construct
TSYVTGT

SEQ ID NO: 101405 - protein, 7 aa, synthetic construct
RTSFPEK

SEQ ID NO: 101406 - protein, 7 aa, synthetic construct
NGNLPTD

SEQ ID NO: 101407 - protein, 7 aa, synthetic construct
RNPHTEF

SEQ ID NO: 101408 - protein, 7 aa, synthetic construct
ELPFGHI

SEQ ID NO: 101409 - protein, 7 aa, synthetic construct
FNQKPDG

SEQ ID NO: 101410 - protein, 7 aa, synthetic construct
LMQQNEG

SEQ ID NO: 101411 - protein, 7 aa, synthetic construct
ATTTSIL

SEQ ID NO: 101412 - protein, 7 aa, synthetic construct
NTYKVHA

SEQ ID NO: 101413 - protein, 7 aa, synthetic construct
ARVERQA

SEQ ID NO: 101414 - protein, 7 aa, synthetic construct
MAREDLR

SEQ ID NO: 101415 - protein, 7 aa, synthetic construct
NVNVKPL

SEQ ID NO: 101416 - protein, 7 aa, synthetic construct
EPLFSEP

SEQ ID NO: 101417 - protein, 7 aa, synthetic construct
GDHAYQR

SEQ ID NO: 101418 - protein, 7 aa, synthetic construct
RLFPNEQ

SEQ ID NO: 101419 - protein, 7 aa, synthetic construct
NMLEPTA

SEQ ID NO: 101420 - protein, 7 aa, synthetic construct
KTQANDK

SEQ ID NO: 101421 - protein, 7 aa, synthetic construct
YKPHNTF

SEQ ID NO: 101422 - protein, 7 aa, synthetic construct
RIGITGI

SEQ ID NO: 101423 - protein, 7 aa, synthetic construct
NIHAGAH

SEQ ID NO: 101424 - protein, 7 aa, synthetic construct
TPLNVQP

SEQ ID NO: 101425 - protein, 7 aa, synthetic construct
QNKNNTG

SEQ ID NO: 101426 - protein, 7 aa, synthetic construct
DLHTGLM

SEQ ID NO: 101427 - protein, 7 aa, synthetic construct
VSTVLGP

SEQ ID NO: 101428 - protein, 7 aa, synthetic construct
NPRSQQS

SEQ ID NO: 101429 - protein, 7 aa, synthetic construct
KQLLQNP

SEQ ID NO: 101430 - protein, 7 aa, synthetic construct
PRTQQSP

SEQ ID NO: 101431 - protein, 7 aa, synthetic construct
QIIHREM

SEQ ID NO: 101432 - protein, 7 aa, synthetic construct
QTTNTAL

SEQ ID NO: 101433 - protein, 7 aa, synthetic construct
LLQHPHI

SEQ ID NO: 101434 - protein, 7 aa, synthetic construct
TAVFHEG

SEQ ID NO: 101435 - protein, 7 aa, synthetic construct
LDGGMHF

SEQ ID NO: 101436 - protein, 7 aa, synthetic construct
MPHPDHK

SEQ ID NO: 101437 - protein, 7 aa, synthetic construct
FIDQVYS

SEQ ID NO: 101438 - protein, 7 aa, synthetic construct
APLIAER

SEQ ID NO: 101439 - protein, 7 aa, synthetic construct
PIGFNKI

SEQ ID NO: 101440 - protein, 7 aa, synthetic construct
SWGGVQA

SEQ ID NO: 101441 - protein, 7 aa, synthetic construct
RVEMYPG

SEQ ID NO: 101442 - protein, 7 aa, synthetic construct
LTGLINQ

SEQ ID NO: 101443 - protein, 7 aa, synthetic construct
QLRQDKV

SEQ ID NO: 101444 - protein, 7 aa, synthetic construct
YLTHGLQ

SEQ ID NO: 101445 - protein, 7 aa, synthetic construct
SHTMATG

SEQ ID NO: 101446 - protein, 7 aa, synthetic construct
QQFGSVD

SEQ ID NO: 101447 - protein, 7 aa, synthetic construct
TRDQAVS

SEQ ID NO: 101448 - protein, 7 aa, synthetic construct
YDRGYIQ

SEQ ID NO: 101449 - protein, 7 aa, synthetic construct
AQGSPFK

SEQ ID NO: 101450 - protein, 7 aa, synthetic construct
PDMRTNR

SEQ ID NO: 101451 - protein, 7 aa, synthetic construct
GMQSKVG

SEQ ID NO: 101452 - protein, 7 aa, synthetic construct
TGATITI

SEQ ID NO: 101453 - protein, 7 aa, synthetic construct
SYIKGIH

SEQ ID NO: 101454 - protein, 7 aa, synthetic construct
VESWQMS

SEQ ID NO: 101455 - protein, 7 aa, synthetic construct
VYLNQNH

SEQ ID NO: 101456 - protein, 7 aa, synthetic construct
AIKIAKE

SEQ ID NO: 101457 - protein, 7 aa, synthetic construct
SHMEPAR

SEQ ID NO: 101458 - protein, 7 aa, synthetic construct
NRNMEVN

SEQ ID NO: 101459 - protein, 7 aa, synthetic construct
DAGKIMG

SEQ ID NO: 101460 - protein, 7 aa, synthetic construct
GEFMGGV

SEQ ID NO: 101461 - protein, 7 aa, synthetic construct
TFKTQNE

SEQ ID NO: 101462 - protein, 7 aa, synthetic construct
NPKPAMS

SEQ ID NO: 101463 - protein, 7 aa, synthetic construct
ANFSPTI

SEQ ID NO: 101464 - protein, 7 aa, synthetic construct
VSPVNAK

SEQ ID NO: 101465 - protein, 7 aa, synthetic construct
RENWQSN

SEQ ID NO: 101466 - protein, 7 aa, synthetic construct
CIKTAVG

SEQ ID NO: 101467 - protein, 7 aa, synthetic construct
YPSLVKQ

SEQ ID NO: 101468 - protein, 7 aa, synthetic construct
NPYHNVE

SEQ ID NO: 101469 - protein, 7 aa, synthetic construct
THTALER

SEQ ID NO: 101470 - protein, 7 aa, synthetic construct
DMYGGKK

SEQ ID NO: 101471 - protein, 7 aa, synthetic construct
FNRMNED

SEQ ID NO: 101472 - protein, 7 aa, synthetic construct
QKQRLEN

SEQ ID NO: 101473 - protein, 7 aa, synthetic construct
FEGTHHV

SEQ ID NO: 101474 - protein, 7 aa, synthetic construct
QMVKEPF

SEQ ID NO: 101475 - protein, 7 aa, synthetic construct
RNNADVR

SEQ ID NO: 101476 - protein, 7 aa, synthetic construct
MKQPEIT

SEQ ID NO: 101477 - protein, 7 aa, synthetic construct
YILSKMN

SEQ ID NO: 101478 - protein, 7 aa, synthetic construct
PRAGNGN

SEQ ID NO: 101479 - protein, 7 aa, synthetic construct
MKNPMFA

SEQ ID NO: 101480 - protein, 7 aa, synthetic construct
GMEIKDR

SEQ ID NO: 101481 - protein, 7 aa, synthetic construct
DGSQPTK

SEQ ID NO: 101482 - protein, 7 aa, synthetic construct
TYKTERM

SEQ ID NO: 101483 - protein, 7 aa, synthetic construct
MYDKGVD

SEQ ID NO: 101484 - protein, 7 aa, synthetic construct
QEYKIVS

SEQ ID NO: 101485 - protein, 7 aa, synthetic construct
KKFMEHS

SEQ ID NO: 101486 - protein, 7 aa, synthetic construct
KSTTRDE

SEQ ID NO: 101487 - protein, 7 aa, synthetic construct
MHENNNQ

SEQ ID NO: 101488 - protein, 7 aa, synthetic construct
IGMVDDF

SEQ ID NO: 101489 - protein, 7 aa, synthetic construct
TAHGNPD

SEQ ID NO: 101490 - protein, 7 aa, synthetic construct
YELHGMK

SEQ ID NO: 101491 - protein, 7 aa, synthetic construct
GTPHLGP

SEQ ID NO: 101492 - protein, 7 aa, synthetic construct
SHIDRGH

SEQ ID NO: 101493 - protein, 7 aa, synthetic construct
WERKDIY

SEQ ID NO: 101494 - protein, 7 aa, synthetic construct
IQAVFGP

SEQ ID NO: 101495 - protein, 7 aa, synthetic construct
RPNEQIY

SEQ ID NO: 101496 - protein, 7 aa, synthetic construct
LQAVEKQ

SEQ ID NO: 101497 - protein, 7 aa, synthetic construct
DKHEMIN

SEQ ID NO: 101498 - protein, 7 aa, synthetic construct
SVNTPDH

SEQ ID NO: 101499 - protein, 7 aa, synthetic construct
EPLTHAR

SEQ ID NO: 101500 - protein, 7 aa, synthetic construct
HMPYRSA

SEQ ID NO: 101501 - protein, 7 aa, synthetic construct
EHRLAPE

SEQ ID NO: 101502 - protein, 7 aa, synthetic construct
QHDAHTN

SEQ ID NO: 101503 - protein, 7 aa, synthetic construct
VSHIRHG

SEQ ID NO: 101504 - protein, 7 aa, synthetic construct
VYYNGGI

SEQ ID NO: 101505 - protein, 7 aa, synthetic construct
HFTQPEK

SEQ ID NO: 101506 - protein, 7 aa, synthetic construct
LARPDKY

SEQ ID NO: 101507 - protein, 7 aa, synthetic construct
DWDQRNK

SEQ ID NO: 101508 - protein, 7 aa, synthetic construct
ITNKIGE

SEQ ID NO: 101509 - protein, 7 aa, synthetic construct
VKTNNSP

SEQ ID NO: 101510 - protein, 7 aa, synthetic construct
DFRIMDR

SEQ ID NO: 101511 - protein, 7 aa, synthetic construct
VMTPAHV

SEQ ID NO: 101512 - protein, 7 aa, synthetic construct
GAWSVAA

SEQ ID NO: 101513 - protein, 7 aa, synthetic construct
SGQPINV

SEQ ID NO: 101514 - protein, 7 aa, synthetic construct
FQILAEG

SEQ ID NO: 101515 - protein, 7 aa, synthetic construct
QKFQTHV

SEQ ID NO: 101516 - protein, 7 aa, synthetic construct
DFHEVTR

SEQ ID NO: 101517 - protein, 7 aa, synthetic construct
VNGNERA

SEQ ID NO: 101518 - protein, 7 aa, synthetic construct
QTAMNGG

SEQ ID NO: 101519 - protein, 7 aa, synthetic construct
NKVTDFA

SEQ ID NO: 101520 - protein, 7 aa, synthetic construct
AGLRHVG

SEQ ID NO: 101521 - protein, 7 aa, synthetic construct
YDRGMNA

SEQ ID NO: 101522 - protein, 7 aa, synthetic construct
PGGNQGW

SEQ ID NO: 101523 - protein, 7 aa, synthetic construct
GNKPMHS

SEQ ID NO: 101524 - protein, 7 aa, synthetic construct
RNHQVSD

SEQ ID NO: 101525 - protein, 7 aa, synthetic construct
QVKTAFD

SEQ ID NO: 101526 - protein, 7 aa, synthetic construct
GQANRTV

SEQ ID NO: 101527 - protein, 7 aa, synthetic construct
GDQPFTK

SEQ ID NO: 101528 - protein, 7 aa, synthetic construct
DYKSRDD

SEQ ID NO: 101529 - protein, 7 aa, synthetic construct
NHSIQAF

SEQ ID NO: 101530 - protein, 7 aa, synthetic construct
SFNDRNE

SEQ ID NO: 101531 - protein, 7 aa, synthetic construct
QQYTHHP

SEQ ID NO: 101532 - protein, 7 aa, synthetic construct
NPTQGSF

SEQ ID NO: 101533 - protein, 7 aa, synthetic construct
GAYGGQF

SEQ ID NO: 101534 - protein, 7 aa, synthetic construct
GKWDGAQ

SEQ ID NO: 101535 - protein, 7 aa, synthetic construct
IQLPRAE

SEQ ID NO: 101536 - protein, 7 aa, synthetic construct
PSTTDTF

SEQ ID NO: 101537 - protein, 7 aa, synthetic construct
VGDHIHA

SEQ ID NO: 101538 - protein, 7 aa, synthetic construct
AQDQFRP

SEQ ID NO: 101539 - protein, 7 aa, synthetic construct
RQPSVEL

SEQ ID NO: 101540 - protein, 7 aa, synthetic construct
SPKVIPN

SEQ ID NO: 101541 - protein, 7 aa, synthetic construct
SANYATL

SEQ ID NO: 101542 - protein, 7 aa, synthetic construct
WRELSNS

SEQ ID NO: 101543 - protein, 7 aa, synthetic construct
PDQLLAR

SEQ ID NO: 101544 - protein, 7 aa, synthetic construct
WNRSQDH

SEQ ID NO: 101545 - protein, 7 aa, synthetic construct
RIGNAFP

SEQ ID NO: 101546 - protein, 7 aa, synthetic construct
SRNMHLN

SEQ ID NO: 101547 - protein, 7 aa, synthetic construct
GKLPDMR

SEQ ID NO: 101548 - protein, 7 aa, synthetic construct
NQSSHFK

SEQ ID NO: 101549 - protein, 7 aa, synthetic construct
KKLDGYA

SEQ ID NO: 101550 - protein, 7 aa, synthetic construct
GPTKMQL

SEQ ID NO: 101551 - protein, 7 aa, synthetic construct
YGTIHIH

SEQ ID NO: 101552 - protein, 7 aa, synthetic construct
SAQRIDV

SEQ ID NO: 101553 - protein, 7 aa, synthetic construct
SPDRQVI

SEQ ID NO: 101554 - protein, 7 aa, synthetic construct
NKEKDNG

SEQ ID NO: 101555 - protein, 7 aa, synthetic construct
NGIMTLP

SEQ ID NO: 101556 - protein, 7 aa, synthetic construct
MPQHINM

SEQ ID NO: 101557 - protein, 7 aa, synthetic construct
QEQSFPS

SEQ ID NO: 101558 - protein, 7 aa, synthetic construct
NGLGYQL

SEQ ID NO: 101559 - protein, 7 aa, synthetic construct
VGHMPYI

SEQ ID NO: 101560 - protein, 7 aa, synthetic construct
ENNGIPR

SEQ ID NO: 101561 - protein, 7 aa, synthetic construct
ISGMDKQ

SEQ ID NO: 101562 - protein, 7 aa, synthetic construct
TNEHWAA

SEQ ID NO: 101563 - protein, 7 aa, synthetic construct
QDKHKIP

SEQ ID NO: 101564 - protein, 7 aa, synthetic construct
HVNTADM

SEQ ID NO: 101565 - protein, 7 aa, synthetic construct
HKLEPMT

SEQ ID NO: 101566 - protein, 7 aa, synthetic construct
VPEVVVG

SEQ ID NO: 101567 - protein, 7 aa, synthetic construct
NQRINHY

SEQ ID NO: 101568 - protein, 7 aa, synthetic construct
MRQDSSA

SEQ ID NO: 101569 - protein, 7 aa, synthetic construct
KIMSNWE

SEQ ID NO: 101570 - protein, 7 aa, synthetic construct
RFPNDGI

SEQ ID NO: 101571 - protein, 7 aa, synthetic construct
MPETMTS

SEQ ID NO: 101572 - protein, 7 aa, synthetic construct
WTQEVKK

SEQ ID NO: 101573 - protein, 7 aa, synthetic construct
FYEMKKS

SEQ ID NO: 101574 - protein, 7 aa, synthetic construct
FKHIALN

SEQ ID NO: 101575 - protein, 7 aa, synthetic construct
KKDAIPV

SEQ ID NO: 101576 - protein, 7 aa, synthetic construct
RLPQADD

SEQ ID NO: 101577 - protein, 7 aa, synthetic construct
HANGQFD

SEQ ID NO: 101578 - protein, 7 aa, synthetic construct
TKAREWG

SEQ ID NO: 101579 - protein, 7 aa, synthetic construct
YNQYHIP

SEQ ID NO: 101580 - protein, 7 aa, synthetic construct
WRTDNNR

SEQ ID NO: 101581 - protein, 7 aa, synthetic construct
CEGRHTC

SEQ ID NO: 101582 - protein, 7 aa, synthetic construct
VNNIEAM

SEQ ID NO: 101583 - protein, 7 aa, synthetic construct
AQVEGRQ

SEQ ID NO: 101584 - protein, 7 aa, synthetic construct
ARRDNEK

SEQ ID NO: 101585 - protein, 7 aa, synthetic construct
SAEATNL

SEQ ID NO: 101586 - protein, 7 aa, synthetic construct
EKEKQNH

SEQ ID NO: 101587 - protein, 7 aa, synthetic construct
ELPGHEM

SEQ ID NO: 101588 - protein, 7 aa, synthetic construct
DWQNMPK

SEQ ID NO: 101589 - protein, 7 aa, synthetic construct
SHRGSDE

SEQ ID NO: 101590 - protein, 7 aa, synthetic construct
GKPMNAG

SEQ ID NO: 101591 - protein, 7 aa, synthetic construct
LHKVPQL

SEQ ID NO: 101592 - protein, 7 aa, synthetic construct
MLHQDRD

SEQ ID NO: 101593 - protein, 7 aa, synthetic construct
HDDRVRK

SEQ ID NO: 101594 - protein, 7 aa, synthetic construct
EERKQKE

SEQ ID NO: 101595 - protein, 7 aa, synthetic construct
KLPDSDY

SEQ ID NO: 101596 - protein, 7 aa, synthetic construct
AARQGGT

SEQ ID NO: 101597 - protein, 7 aa, synthetic construct
SPYVKAI

SEQ ID NO: 101598 - protein, 7 aa, synthetic construct
YTLGTRV

SEQ ID NO: 101599 - protein, 7 aa, synthetic construct
QIHVLEP

SEQ ID NO: 101600 - protein, 7 aa, synthetic construct
WKPPEFE

SEQ ID NO: 101601 - protein, 7 aa, synthetic construct
NNQHFEM

SEQ ID NO: 101602 - protein, 7 aa, synthetic construct
GYERNAI

SEQ ID NO: 101603 - protein, 7 aa, synthetic construct
LITSPGY

SEQ ID NO: 101604 - protein, 7 aa, synthetic construct
MSRNENA

SEQ ID NO: 101605 - protein, 7 aa, synthetic construct
TMPTVMS

SEQ ID NO: 101606 - protein, 7 aa, synthetic construct
SWKELHV

SEQ ID NO: 101607 - protein, 7 aa, synthetic construct
MPKQAQI

SEQ ID NO: 101608 - protein, 7 aa, synthetic construct
GRNILNG

SEQ ID NO: 101609 - protein, 7 aa, synthetic construct
KNIGKGD

SEQ ID NO: 101610 - protein, 7 aa, synthetic construct
PGHPTVL

SEQ ID NO: 101611 - protein, 7 aa, synthetic construct
KSKDRFD

SEQ ID NO: 101612 - protein, 7 aa, synthetic construct
FLPKVDI

SEQ ID NO: 101613 - protein, 7 aa, synthetic construct
GPAQFIA

SEQ ID NO: 101614 - protein, 7 aa, synthetic construct
SALTKEP

SEQ ID NO: 101615 - protein, 7 aa, synthetic construct
RVDRKEI

SEQ ID NO: 101616 - protein, 7 aa, synthetic construct
PAKSHTD

SEQ ID NO: 101617 - protein, 7 aa, synthetic construct
RHDQQDT

SEQ ID NO: 101618 - protein, 7 aa, synthetic construct
NTEMRGL

SEQ ID NO: 101619 - protein, 7 aa, synthetic construct
RNSTTIA

SEQ ID NO: 101620 - protein, 7 aa, synthetic construct
MVKSYQT

SEQ ID NO: 101621 - protein, 7 aa, synthetic construct
KIDPRWE

SEQ ID NO: 101622 - protein, 7 aa, synthetic construct
DFRHNED

SEQ ID NO: 101623 - protein, 7 aa, synthetic construct
IKNGDLV

SEQ ID NO: 101624 - protein, 7 aa, synthetic construct
TKQEPPT

SEQ ID NO: 101625 - protein, 7 aa, synthetic construct
KAQVKQA

SEQ ID NO: 101626 - protein, 7 aa, synthetic construct
INVHMKI

SEQ ID NO: 101627 - protein, 7 aa, synthetic construct
KWDGNFT

SEQ ID NO: 101628 - protein, 7 aa, synthetic construct
FGAVATI

SEQ ID NO: 101629 - protein, 7 aa, synthetic construct
LASYNAR

SEQ ID NO: 101630 - protein, 7 aa, synthetic construct
NQKNNVA

SEQ ID NO: 101631 - protein, 7 aa, synthetic construct
DDKGHVW

SEQ ID NO: 101632 - protein, 7 aa, synthetic construct
GEGQWAS

SEQ ID NO: 101633 - protein, 7 aa, synthetic construct
MNSIETM

SEQ ID NO: 101634 - protein, 7 aa, synthetic construct
HGAVTGL

SEQ ID NO: 101635 - protein, 7 aa, synthetic construct
IASLEQY

SEQ ID NO: 101636 - protein, 7 aa, synthetic construct
KYQVDTR

SEQ ID NO: 101637 - protein, 7 aa, synthetic construct
PYSKMPF

SEQ ID NO: 101638 - protein, 7 aa, synthetic construct
KWTTEAI

SEQ ID NO: 101639 - protein, 7 aa, synthetic construct
HSGVHFG

SEQ ID NO: 101640 - protein, 7 aa, synthetic construct
KVQTNTH

SEQ ID NO: 101641 - protein, 7 aa, synthetic construct
NLKKDHE

SEQ ID NO: 101642 - protein, 7 aa, synthetic construct
KKVQNQE

SEQ ID NO: 101643 - protein, 7 aa, synthetic construct
HHDVAAY

SEQ ID NO: 101644 - protein, 7 aa, synthetic construct
ASMAQGE

SEQ ID NO: 101645 - protein, 7 aa, synthetic construct
YTPATPH

SEQ ID NO: 101646 - protein, 7 aa, synthetic construct
IGVFGSD

SEQ ID NO: 101647 - protein, 7 aa, synthetic construct
HDKYVMT

SEQ ID NO: 101648 - protein, 7 aa, synthetic construct
LYGLHSA

SEQ ID NO: 101649 - protein, 7 aa, synthetic construct
MMPLKHH

SEQ ID NO: 101650 - protein, 7 aa, synthetic construct
VADVNHA

SEQ ID NO: 101651 - protein, 7 aa, synthetic construct
STGRIPF

SEQ ID NO: 101652 - protein, 7 aa, synthetic construct
PRRAEDR

SEQ ID NO: 101653 - protein, 7 aa, synthetic construct
SVQDQMG

SEQ ID NO: 101654 - protein, 7 aa, synthetic construct
RGVPLSD

SEQ ID NO: 101655 - protein, 7 aa, synthetic construct
SSNHVVK

SEQ ID NO: 101656 - protein, 7 aa, synthetic construct
VAVNMPT

SEQ ID NO: 101657 - protein, 7 aa, synthetic construct
VSQFVAM

SEQ ID NO: 101658 - protein, 7 aa, synthetic construct
SAAAGPV

SEQ ID NO: 101659 - protein, 7 aa, synthetic construct
APFGRIA

SEQ ID NO: 101660 - protein, 7 aa, synthetic construct
RMGAEIV

SEQ ID NO: 101661 - protein, 7 aa, synthetic construct
VNDRSFF

SEQ ID NO: 101662 - protein, 7 aa, synthetic construct
KMKPQEP

SEQ ID NO: 101663 - protein, 7 aa, synthetic construct
NRNADGR

SEQ ID NO: 101664 - protein, 7 aa, synthetic construct
ARHQEYM

SEQ ID NO: 101665 - protein, 7 aa, synthetic construct
INVQNQH

SEQ ID NO: 101666 - protein, 7 aa, synthetic construct
HESIKWE

SEQ ID NO: 101667 - protein, 7 aa, synthetic construct
NHSDRSM

SEQ ID NO: 101668 - protein, 7 aa, synthetic construct
VAEHFAG

SEQ ID NO: 101669 - protein, 7 aa, synthetic construct
KNSPVEE

SEQ ID NO: 101670 - protein, 7 aa, synthetic construct
PDGMSRA

SEQ ID NO: 101671 - protein, 7 aa, synthetic construct
GTHSEPA

SEQ ID NO: 101672 - protein, 7 aa, synthetic construct
PAHGFPS

SEQ ID NO: 101673 - protein, 7 aa, synthetic construct
VGSHPSD

SEQ ID NO: 101674 - protein, 7 aa, synthetic construct
KKDSANS

SEQ ID NO: 101675 - protein, 7 aa, synthetic construct
WKVDNQH

SEQ ID NO: 101676 - protein, 7 aa, synthetic construct
LSYSKVS

SEQ ID NO: 101677 - protein, 7 aa, synthetic construct
LIAEMTG

SEQ ID NO: 101678 - protein, 7 aa, synthetic construct
KQQFSND

SEQ ID NO: 101679 - protein, 7 aa, synthetic construct
SVESVKH

SEQ ID NO: 101680 - protein, 7 aa, synthetic construct
KDIGPDR

SEQ ID NO: 101681 - protein, 7 aa, synthetic construct
RFQTDLS

SEQ ID NO: 101682 - protein, 7 aa, synthetic construct
WGKDNNS

SEQ ID NO: 101683 - protein, 7 aa, synthetic construct
NIHNEAK

SEQ ID NO: 101684 - protein, 7 aa, synthetic construct
WKIGGHP

SEQ ID NO: 101685 - protein, 7 aa, synthetic construct
RTSSEMM

SEQ ID NO: 101686 - protein, 7 aa, synthetic construct
YQKQDQP

SEQ ID NO: 101687 - protein, 7 aa, synthetic construct
HQAYKLG

SEQ ID NO: 101688 - protein, 7 aa, synthetic construct
LMKINEG

SEQ ID NO: 101689 - protein, 7 aa, synthetic construct
ALNKPEN

SEQ ID NO: 101690 - protein, 7 aa, synthetic construct
HIKEVKT

SEQ ID NO: 101691 - protein, 7 aa, synthetic construct
IQHRDQF

SEQ ID NO: 101692 - protein, 7 aa, synthetic construct
TKQGGKD

SEQ ID NO: 101693 - protein, 7 aa, synthetic construct
KQAHGWE

SEQ ID NO: 101694 - protein, 7 aa, synthetic construct
AVKHPIS

SEQ ID NO: 101695 - protein, 7 aa, synthetic construct
TGPSMTQ

SEQ ID NO: 101696 - protein, 7 aa, synthetic construct
AQPTHPS

SEQ ID NO: 101697 - protein, 7 aa, synthetic construct
HNYDQKD

SEQ ID NO: 101698 - protein, 7 aa, synthetic construct
GQHDVPI

SEQ ID NO: 101699 - protein, 7 aa, synthetic construct
KQDPFGE

SEQ ID NO: 101700 - protein, 7 aa, synthetic construct
PIKSSHA

SEQ ID NO: 101701 - protein, 7 aa, synthetic construct
MFAPGRV

SEQ ID NO: 101702 - protein, 7 aa, synthetic construct
HMRVPQV

SEQ ID NO: 101703 - protein, 7 aa, synthetic construct
PVTASNG

SEQ ID NO: 101704 - protein, 7 aa, synthetic construct
KTNSVGS

SEQ ID NO: 101705 - protein, 7 aa, synthetic construct
FYSEAGP

SEQ ID NO: 101706 - protein, 7 aa, synthetic construct
NSSISAM

SEQ ID NO: 101707 - protein, 7 aa, synthetic construct
KEYDNMR

SEQ ID NO: 101708 - protein, 7 aa, synthetic construct
KTMSFEE

SEQ ID NO: 101709 - protein, 7 aa, synthetic construct
PQANWPI

SEQ ID NO: 101710 - protein, 7 aa, synthetic construct
VQGAVGT

SEQ ID NO: 101711 - protein, 7 aa, synthetic construct
GKSMGTA

SEQ ID NO: 101712 - protein, 7 aa, synthetic construct
SMHYIGE

SEQ ID NO: 101713 - protein, 7 aa, synthetic construct
NGTPPVV

SEQ ID NO: 101714 - protein, 7 aa, synthetic construct
PHIRHGP

SEQ ID NO: 101715 - protein, 7 aa, synthetic construct
NARDSAL

SEQ ID NO: 101716 - protein, 7 aa, synthetic construct
LGERLKT

SEQ ID NO: 101717 - protein, 7 aa, synthetic construct
EFKAVTN

SEQ ID NO: 101718 - protein, 7 aa, synthetic construct
VPGPNKI

SEQ ID NO: 101719 - protein, 7 aa, synthetic construct
DAGTNKR

SEQ ID NO: 101720 - protein, 7 aa, synthetic construct
KMQHNMA

SEQ ID NO: 101721 - protein, 7 aa, synthetic construct
QIADAGT

SEQ ID NO: 101722 - protein, 7 aa, synthetic construct
MGTRQTV

SEQ ID NO: 101723 - protein, 7 aa, synthetic construct
PDYRTPK

SEQ ID NO: 101724 - protein, 7 aa, synthetic construct
SNKGFAH

SEQ ID NO: 101725 - protein, 7 aa, synthetic construct
KMNSHVM

SEQ ID NO: 101726 - protein, 7 aa, synthetic construct
RSESRPT

SEQ ID NO: 101727 - protein, 7 aa, synthetic construct
GTMQIRT

SEQ ID NO: 101728 - protein, 7 aa, synthetic construct
APTIADV

SEQ ID NO: 101729 - protein, 7 aa, synthetic construct
EDRSRGG

SEQ ID NO: 101730 - protein, 7 aa, synthetic construct
VSLTHQA

SEQ ID NO: 101731 - protein, 7 aa, synthetic construct
RQTDERL

SEQ ID NO: 101732 - protein, 7 aa, synthetic construct
TATKYNY

SEQ ID NO: 101733 - protein, 7 aa, synthetic construct
IGPIESV

SEQ ID NO: 101734 - protein, 7 aa, synthetic construct
AREQLMT

SEQ ID NO: 101735 - protein, 7 aa, synthetic construct
IPFENVS

SEQ ID NO: 101736 - protein, 7 aa, synthetic construct
PNRKQAE

SEQ ID NO: 101737 - protein, 7 aa, synthetic construct
TSPAWKS

SEQ ID NO: 101738 - protein, 7 aa, synthetic construct
SRSGPIM

SEQ ID NO: 101739 - protein, 7 aa, synthetic construct
GYYAGTP

SEQ ID NO: 101740 - protein, 7 aa, synthetic construct
ESGNVIS

SEQ ID NO: 101741 - protein, 7 aa, synthetic construct
NPWSKVD

SEQ ID NO: 101742 - protein, 7 aa, synthetic construct
YLQSAQD

SEQ ID NO: 101743 - protein, 7 aa, synthetic construct
NAKDSKL

SEQ ID NO: 101744 - protein, 7 aa, synthetic construct
QGRQYEI

SEQ ID NO: 101745 - protein, 7 aa, synthetic construct
DDHFRTV

SEQ ID NO: 101746 - protein, 7 aa, synthetic construct
MNITKMQ

SEQ ID NO: 101747 - protein, 7 aa, synthetic construct
AQNPNGW

SEQ ID NO: 101748 - protein, 7 aa, synthetic construct
VQKIPPT

SEQ ID NO: 101749 - protein, 7 aa, synthetic construct
PILSKLG

SEQ ID NO: 101750 - protein, 7 aa, synthetic construct
QAHANKA

SEQ ID NO: 101751 - protein, 7 aa, synthetic construct
QEATMLR

SEQ ID NO: 101752 - protein, 7 aa, synthetic construct
RKGDMMN

SEQ ID NO: 101753 - protein, 7 aa, synthetic construct
ANYEAPK

SEQ ID NO: 101754 - protein, 7 aa, synthetic construct
ITKMEHY

SEQ ID NO: 101755 - protein, 7 aa, synthetic construct
ERAQQTR

SEQ ID NO: 101756 - protein, 7 aa, synthetic construct
ISSGTEG

SEQ ID NO: 101757 - protein, 7 aa, synthetic construct
VVKQMHI

SEQ ID NO: 101758 - protein, 7 aa, synthetic construct
EGTHWPA

SEQ ID NO: 101759 - protein, 7 aa, synthetic construct
LVGAPPT

SEQ ID NO: 101760 - protein, 7 aa, synthetic construct
EARNFTP

SEQ ID NO: 101761 - protein, 7 aa, synthetic construct
IMMKSQA

SEQ ID NO: 101762 - protein, 7 aa, synthetic construct
LGNIQSL

SEQ ID NO: 101763 - protein, 7 aa, synthetic construct
MHGHNND

SEQ ID NO: 101764 - protein, 7 aa, synthetic construct
MESFHEA

SEQ ID NO: 101765 - protein, 7 aa, synthetic construct
FGDSLSM

SEQ ID NO: 101766 - protein, 7 aa, synthetic construct
WVQNAER

SEQ ID NO: 101767 - protein, 7 aa, synthetic construct
HTRAVSF

SEQ ID NO: 101768 - protein, 7 aa, synthetic construct
HHNMNQS

SEQ ID NO: 101769 - protein, 7 aa, synthetic construct
NDSSKHV

SEQ ID NO: 101770 - protein, 7 aa, synthetic construct
EFTAGKA

SEQ ID NO: 101771 - protein, 7 aa, synthetic construct
HSKEMAS

SEQ ID NO: 101772 - protein, 7 aa, synthetic construct
YEHVPRT

SEQ ID NO: 101773 - protein, 7 aa, synthetic construct
KQHELQM

SEQ ID NO: 101774 - protein, 7 aa, synthetic construct
MTGNEHS

SEQ ID NO: 101775 - protein, 7 aa, synthetic construct
EPAIGRD

SEQ ID NO: 101776 - protein, 7 aa, synthetic construct
YPNHTFL

SEQ ID NO: 101777 - protein, 7 aa, synthetic construct
SVNKDWV

SEQ ID NO: 101778 - protein, 7 aa, synthetic construct
LDLVQLK

SEQ ID NO: 101779 - protein, 7 aa, synthetic construct
FDGFFPE

SEQ ID NO: 101780 - protein, 7 aa, synthetic construct
MNSHMND

SEQ ID NO: 101781 - protein, 7 aa, synthetic construct
SQWVHME

SEQ ID NO: 101782 - protein, 7 aa, synthetic construct
LKTKEWN

SEQ ID NO: 101783 - protein, 7 aa, synthetic construct
LGQRTQG

SEQ ID NO: 101784 - protein, 7 aa, synthetic construct
TEQNSRP

SEQ ID NO: 101785 - protein, 7 aa, synthetic construct
QGKNANH

SEQ ID NO: 101786 - protein, 7 aa, synthetic construct
FRSEVQR

SEQ ID NO: 101787 - protein, 7 aa, synthetic construct
GQVKMEW

SEQ ID NO: 101788 - protein, 7 aa, synthetic construct
ADQQRMP

SEQ ID NO: 101789 - protein, 7 aa, synthetic construct
HPNVNAR

SEQ ID NO: 101790 - protein, 7 aa, synthetic construct
KIGMEYV

SEQ ID NO: 101791 - protein, 7 aa, synthetic construct
TIVTQPA

SEQ ID NO: 101792 - protein, 7 aa, synthetic construct
HSNKQGN

SEQ ID NO: 101793 - protein, 7 aa, synthetic construct
KQLNFAG

SEQ ID NO: 101794 - protein, 7 aa, synthetic construct
GPYAQMI

SEQ ID NO: 101795 - protein, 7 aa, synthetic construct
NINDKKI

SEQ ID NO: 101796 - protein, 7 aa, synthetic construct
YGDTYKQ

SEQ ID NO: 101797 - protein, 7 aa, synthetic construct
YTHTGDK

SEQ ID NO: 101798 - protein, 7 aa, synthetic construct
RSESMIQ

SEQ ID NO: 101799 - protein, 7 aa, synthetic construct
DEYHKPH

SEQ ID NO: 101800 - protein, 7 aa, synthetic construct
FTGFAER

SEQ ID NO: 101801 - protein, 7 aa, synthetic construct
LINNGKG

SEQ ID NO: 101802 - protein, 7 aa, synthetic construct
TPHISAH

SEQ ID NO: 101803 - protein, 7 aa, synthetic construct
YNMTITT

SEQ ID NO: 101804 - protein, 7 aa, synthetic construct
FAHPEGT

SEQ ID NO: 101805 - protein, 7 aa, synthetic construct
GNQAPNN

SEQ ID NO: 101806 - protein, 7 aa, synthetic construct
MPFSDPH

SEQ ID NO: 101807 - protein, 7 aa, synthetic construct
RGKEESQ

SEQ ID NO: 101808 - protein, 7 aa, synthetic construct
AQDGKWG

SEQ ID NO: 101809 - protein, 7 aa, synthetic construct
EFRNMLA

SEQ ID NO: 101810 - protein, 7 aa, synthetic construct
DQFVKKY

SEQ ID NO: 101811 - protein, 7 aa, synthetic construct
KMSAQSA

SEQ ID NO: 101812 - protein, 7 aa, synthetic construct
DLHNAQQ

SEQ ID NO: 101813 - protein, 7 aa, synthetic construct
VPHTDRL

SEQ ID NO: 101814 - protein, 7 aa, synthetic construct
CFDARSC

SEQ ID NO: 101815 - protein, 7 aa, synthetic construct
PFNNEIP

SEQ ID NO: 101816 - protein, 7 aa, synthetic construct
YISTVPE

SEQ ID NO: 101817 - protein, 7 aa, synthetic construct
KTMGTNI

SEQ ID NO: 101818 - protein, 7 aa, synthetic construct
WQKIPEE

SEQ ID NO: 101819 - protein, 7 aa, synthetic construct
VTTKHYN

SEQ ID NO: 101820 - protein, 7 aa, synthetic construct
ADQFRER

SEQ ID NO: 101821 - protein, 7 aa, synthetic construct
EDNPGGF

SEQ ID NO: 101822 - protein, 7 aa, synthetic construct
PFSAQLS

SEQ ID NO: 101823 - protein, 7 aa, synthetic construct
NYSVQHL

SEQ ID NO: 101824 - protein, 7 aa, synthetic construct
GGGLIRN

SEQ ID NO: 101825 - protein, 7 aa, synthetic construct
EIKRVNF

SEQ ID NO: 101826 - protein, 7 aa, synthetic construct
HDHPNSH

SEQ ID NO: 101827 - protein, 7 aa, synthetic construct
IYERAKI

SEQ ID NO: 101828 - protein, 7 aa, synthetic construct
LKSPHAM

SEQ ID NO: 101829 - protein, 7 aa, synthetic construct
QQPQQET

SEQ ID NO: 101830 - protein, 7 aa, synthetic construct
PSRQVVA

SEQ ID NO: 101831 - protein, 7 aa, synthetic construct
YKRDLSQ

SEQ ID NO: 101832 - protein, 7 aa, synthetic construct
FAKGDRD

SEQ ID NO: 101833 - protein, 7 aa, synthetic construct
VGQNADW

SEQ ID NO: 101834 - protein, 7 aa, synthetic construct
RPGIPLI

SEQ ID NO: 101835 - protein, 7 aa, synthetic construct
ISYPADP

SEQ ID NO: 101836 - protein, 7 aa, synthetic construct
RVDNEPN

SEQ ID NO: 101837 - protein, 7 aa, synthetic construct
VWKVGSP

SEQ ID NO: 101838 - protein, 7 aa, synthetic construct
WAHSQPV

SEQ ID NO: 101839 - protein, 7 aa, synthetic construct
MPRYMLE

SEQ ID NO: 101840 - protein, 7 aa, synthetic construct
TPFGNGQ

SEQ ID NO: 101841 - protein, 7 aa, synthetic construct
WSNIHNE

SEQ ID NO: 101842 - protein, 7 aa, synthetic construct
GQLMGII

SEQ ID NO: 101843 - protein, 7 aa, synthetic construct
TSSGSAQ

SEQ ID NO: 101844 - protein, 7 aa, synthetic construct
PIPHNPV

SEQ ID NO: 101845 - protein, 7 aa, synthetic construct
FIKNLQA

SEQ ID NO: 101846 - protein, 7 aa, synthetic construct
KIQPDMK

SEQ ID NO: 101847 - protein, 7 aa, synthetic construct
TLPVKFT

SEQ ID NO: 101848 - protein, 7 aa, synthetic construct
TLKITGI

SEQ ID NO: 101849 - protein, 7 aa, synthetic construct
VLEAASA

SEQ ID NO: 101850 - protein, 7 aa, synthetic construct
HHPILAM

SEQ ID NO: 101851 - protein, 7 aa, synthetic construct
VKPNGDN

SEQ ID NO: 101852 - protein, 7 aa, synthetic construct
FNINNMV

SEQ ID NO: 101853 - protein, 7 aa, synthetic construct
FSNTNRH

SEQ ID NO: 101854 - protein, 7 aa, synthetic construct
HIDLKVI

SEQ ID NO: 101855 - protein, 7 aa, synthetic construct
EFHNNQG

SEQ ID NO: 101856 - protein, 7 aa, synthetic construct
FKPQIMS

SEQ ID NO: 101857 - protein, 7 aa, synthetic construct
VKPAEPN

SEQ ID NO: 101858 - protein, 7 aa, synthetic construct
NGRAIHF

SEQ ID NO: 101859 - protein, 7 aa, synthetic construct
NILLGEG

SEQ ID NO: 101860 - protein, 7 aa, synthetic construct
DPPPGKK

SEQ ID NO: 101861 - protein, 7 aa, synthetic construct
TAFASRQ

SEQ ID NO: 101862 - protein, 7 aa, synthetic construct
GQPYSET

SEQ ID NO: 101863 - protein, 7 aa, synthetic construct
IDNHSMP

SEQ ID NO: 101864 - protein, 7 aa, synthetic construct
NKITSST

SEQ ID NO: 101865 - protein, 7 aa, synthetic construct
RNSPAMA

SEQ ID NO: 101866 - protein, 7 aa, synthetic construct
TPETHLG

SEQ ID NO: 101867 - protein, 7 aa, synthetic construct
DGFKANN

SEQ ID NO: 101868 - protein, 7 aa, synthetic construct
LQREPRH

SEQ ID NO: 101869 - protein, 7 aa, synthetic construct
RQGLLMA

SEQ ID NO: 101870 - protein, 7 aa, synthetic construct
AAPEITQ

SEQ ID NO: 101871 - protein, 7 aa, synthetic construct
KNQDDFG

SEQ ID NO: 101872 - protein, 7 aa, synthetic construct
SEWTPGK

SEQ ID NO: 101873 - protein, 7 aa, synthetic construct
SPSAGMV

SEQ ID NO: 101874 - protein, 7 aa, synthetic construct
SPRNHAY

SEQ ID NO: 101875 - protein, 7 aa, synthetic construct
TQWTIVE

SEQ ID NO: 101876 - protein, 7 aa, synthetic construct
KGMDEAR

SEQ ID NO: 101877 - protein, 7 aa, synthetic construct
HQQRHDK

SEQ ID NO: 101878 - protein, 7 aa, synthetic construct
GTNKQPA

SEQ ID NO: 101879 - protein, 7 aa, synthetic construct
GLPDWSS

SEQ ID NO: 101880 - protein, 7 aa, synthetic construct
HSDPTRP

SEQ ID NO: 101881 - protein, 7 aa, synthetic construct
AFADGFR

SEQ ID NO: 101882 - protein, 7 aa, synthetic construct
PAQLHLD

SEQ ID NO: 101883 - protein, 7 aa, synthetic construct
YRSNETA

SEQ ID NO: 101884 - protein, 7 aa, synthetic construct
SHQHISM

SEQ ID NO: 101885 - protein, 7 aa, synthetic construct
TTQTMIL

SEQ ID NO: 101886 - protein, 7 aa, synthetic construct
KSANMKD

SEQ ID NO: 101887 - protein, 7 aa, synthetic construct
MGEVNVR

SEQ ID NO: 101888 - protein, 7 aa, synthetic construct
ILNQHLR

SEQ ID NO: 101889 - protein, 7 aa, synthetic construct
QHNGSSH

SEQ ID NO: 101890 - protein, 7 aa, synthetic construct
PNYHGDM

SEQ ID NO: 101891 - protein, 7 aa, synthetic construct
NPRMDGG

SEQ ID NO: 101892 - protein, 7 aa, synthetic construct
AHHTNAL

SEQ ID NO: 101893 - protein, 7 aa, synthetic construct
PDGIKKG

SEQ ID NO: 101894 - protein, 7 aa, synthetic construct
EEKWTES

SEQ ID NO: 101895 - protein, 7 aa, synthetic construct
LYNSNVT

SEQ ID NO: 101896 - protein, 7 aa, synthetic construct
QSMTKII

SEQ ID NO: 101897 - protein, 7 aa, synthetic construct
HKLRDDY

SEQ ID NO: 101898 - protein, 7 aa, synthetic construct
WADNRAI

SEQ ID NO: 101899 - protein, 7 aa, synthetic construct
ITQAQDI

SEQ ID NO: 101900 - protein, 7 aa, synthetic construct
TNMTIMP

SEQ ID NO: 101901 - protein, 7 aa, synthetic construct
TRSNVGP

SEQ ID NO: 101902 - protein, 7 aa, synthetic construct
SVMVQGH

SEQ ID NO: 101903 - protein, 7 aa, synthetic construct
LATMSPH

SEQ ID NO: 101904 - protein, 7 aa, synthetic construct
LVGAWEP

SEQ ID NO: 101905 - protein, 7 aa, synthetic construct
LYQDAIK

SEQ ID NO: 101906 - protein, 7 aa, synthetic construct
WDKNTIP

SEQ ID NO: 101907 - protein, 7 aa, synthetic construct
TLANWEM

SEQ ID NO: 101908 - protein, 7 aa, synthetic construct
FGEYMKR

SEQ ID NO: 101909 - protein, 7 aa, synthetic construct
KDQTAQL

SEQ ID NO: 101910 - protein, 7 aa, synthetic construct
FRNASVL

SEQ ID NO: 101911 - protein, 7 aa, synthetic construct
TYGHVPD

SEQ ID NO: 101912 - protein, 7 aa, synthetic construct
MWNNIDE

SEQ ID NO: 101913 - protein, 7 aa, synthetic construct
FNQHKIE

SEQ ID NO: 101914 - protein, 7 aa, synthetic construct
THLDEVR

SEQ ID NO: 101915 - protein, 7 aa, synthetic construct
GDWKIPT

SEQ ID NO: 101916 - protein, 7 aa, synthetic construct
TVKQIQD

SEQ ID NO: 101917 - protein, 7 aa, synthetic construct
VLRTLNV

SEQ ID NO: 101918 - protein, 7 aa, synthetic construct
LQESIKQ

SEQ ID NO: 101919 - protein, 7 aa, synthetic construct
KNDSLLK

SEQ ID NO: 101920 - protein, 7 aa, synthetic construct
LQGLQHK

SEQ ID NO: 101921 - protein, 7 aa, synthetic construct
LPIVPEQ

SEQ ID NO: 101922 - protein, 7 aa, synthetic construct
GQAKVPN

SEQ ID NO: 101923 - protein, 7 aa, synthetic construct
WVNLAKN

SEQ ID NO: 101924 - protein, 7 aa, synthetic construct
MNHMILS

SEQ ID NO: 101925 - protein, 7 aa, synthetic construct
KHHIVGV

SEQ ID NO: 101926 - protein, 7 aa, synthetic construct
MIDVTRN

SEQ ID NO: 101927 - protein, 7 aa, synthetic construct
HVLHLDH

SEQ ID NO: 101928 - protein, 7 aa, synthetic construct
SLDGNPA

SEQ ID NO: 101929 - protein, 7 aa, synthetic construct
GHRMEDM

SEQ ID NO: 101930 - protein, 7 aa, synthetic construct
HPNTNVE

SEQ ID NO: 101931 - protein, 7 aa, synthetic construct
NDAGFRD

SEQ ID NO: 101932 - protein, 7 aa, synthetic construct
RSDWTPD

SEQ ID NO: 101933 - protein, 7 aa, synthetic construct
PSEAFKS

SEQ ID NO: 101934 - protein, 7 aa, synthetic construct
HLITKNF

SEQ ID NO: 101935 - protein, 7 aa, synthetic construct
QILMHGA

SEQ ID NO: 101936 - protein, 7 aa, synthetic construct
HPYPMGE

SEQ ID NO: 101937 - protein, 7 aa, synthetic construct
FRGQQSD

SEQ ID NO: 101938 - protein, 7 aa, synthetic construct
KPFQQAT

SEQ ID NO: 101939 - protein, 7 aa, synthetic construct
AAPRSVI

SEQ ID NO: 101940 - protein, 7 aa, synthetic construct
RNGTNMA

SEQ ID NO: 101941 - protein, 7 aa, synthetic construct
AKNQSQD

SEQ ID NO: 101942 - protein, 7 aa, synthetic construct
ILNGAGT

SEQ ID NO: 101943 - protein, 7 aa, synthetic construct
TRHPGEW

SEQ ID NO: 101944 - protein, 7 aa, synthetic construct
FHEMDMD

SEQ ID NO: 101945 - protein, 7 aa, synthetic construct
ILEQRKM

SEQ ID NO: 101946 - protein, 7 aa, synthetic construct
PQPVKVF

SEQ ID NO: 101947 - protein, 7 aa, synthetic construct
IQIREMN

SEQ ID NO: 101948 - protein, 7 aa, synthetic construct
KTEKYQS

SEQ ID NO: 101949 - protein, 7 aa, synthetic construct
RDKRNFD

SEQ ID NO: 101950 - protein, 7 aa, synthetic construct
HKTGIEH

SEQ ID NO: 101951 - protein, 7 aa, synthetic construct
GMGMTNM

SEQ ID NO: 101952 - protein, 7 aa, synthetic construct
GGQQPMH

SEQ ID NO: 101953 - protein, 7 aa, synthetic construct
TREPYLL

SEQ ID NO: 101954 - protein, 7 aa, synthetic construct
SRDPSLG

SEQ ID NO: 101955 - protein, 7 aa, synthetic construct
WTPQAIK

SEQ ID NO: 101956 - protein, 7 aa, synthetic construct
KYKDNTH

SEQ ID NO: 101957 - protein, 7 aa, synthetic construct
IQMIHNP

SEQ ID NO: 101958 - protein, 7 aa, synthetic construct
TIGLETG

SEQ ID NO: 101959 - protein, 7 aa, synthetic construct
KAQPPKD

SEQ ID NO: 101960 - protein, 7 aa, synthetic construct
ENYPKTE

SEQ ID NO: 101961 - protein, 7 aa, synthetic construct
PPRDGFD

SEQ ID NO: 101962 - protein, 7 aa, synthetic construct
HMVIPVE

SEQ ID NO: 101963 - protein, 7 aa, synthetic construct
NHITGGH

SEQ ID NO: 101964 - protein, 7 aa, synthetic construct
KQFYTQE

SEQ ID NO: 101965 - protein, 7 aa, synthetic construct
VMDGHVH

SEQ ID NO: 101966 - protein, 7 aa, synthetic construct
WERHHPQ

SEQ ID NO: 101967 - protein, 7 aa, synthetic construct
RPKASDA

SEQ ID NO: 101968 - protein, 7 aa, synthetic construct
HAHKAEM

SEQ ID NO: 101969 - protein, 7 aa, synthetic construct
TASLMAS

SEQ ID NO: 101970 - protein, 7 aa, synthetic construct
AQYRSLV

SEQ ID NO: 101971 - protein, 7 aa, synthetic construct
VAASKPV

SEQ ID NO: 101972 - protein, 7 aa, synthetic construct
MDHHPPM

SEQ ID NO: 101973 - protein, 7 aa, synthetic construct
KHNERVF

SEQ ID NO: 101974 - protein, 7 aa, synthetic construct
SENGREG

SEQ ID NO: 101975 - protein, 7 aa, synthetic construct
AGPDPSG

SEQ ID NO: 101976 - protein, 7 aa, synthetic construct
MVDFQIK

SEQ ID NO: 101977 - protein, 7 aa, synthetic construct
SLHNSIY

SEQ ID NO: 101978 - protein, 7 aa, synthetic construct
DKSMANA

SEQ ID NO: 101979 - protein, 7 aa, synthetic construct
CAKKDEF

SEQ ID NO: 101980 - protein, 7 aa, synthetic construct
GYTFKTP

SEQ ID NO: 101981 - protein, 7 aa, synthetic construct
NSDPMHP

SEQ ID NO: 101982 - protein, 7 aa, synthetic construct
AMPTLSS

SEQ ID NO: 101983 - protein, 7 aa, synthetic construct
DNAYMDK

SEQ ID NO: 101984 - protein, 7 aa, synthetic construct
DKRDQQQ

SEQ ID NO: 101985 - protein, 7 aa, synthetic construct
EKGSAGG

SEQ ID NO: 101986 - protein, 7 aa, synthetic construct
IPSFQQP

SEQ ID NO: 101987 - protein, 7 aa, synthetic construct
HLHNAVQ

SEQ ID NO: 101988 - protein, 7 aa, synthetic construct
PRSEAFN

SEQ ID NO: 101989 - protein, 7 aa, synthetic construct
RVRMEFG

SEQ ID NO: 101990 - protein, 7 aa, synthetic construct
GIQHHVL

SEQ ID NO: 101991 - protein, 7 aa, synthetic construct
YHTDVSM

SEQ ID NO: 101992 - protein, 7 aa, synthetic construct
YHGEPMH

SEQ ID NO: 101993 - protein, 7 aa, synthetic construct
IFRVETD

SEQ ID NO: 101994 - protein, 7 aa, synthetic construct
KHMTATI

SEQ ID NO: 101995 - protein, 7 aa, synthetic construct
QPRSAQY

SEQ ID NO: 101996 - protein, 7 aa, synthetic construct
KHFVGGN

SEQ ID NO: 101997 - protein, 7 aa, synthetic construct
VNVGASN

SEQ ID NO: 101998 - protein, 7 aa, synthetic construct
HRMMEAS

SEQ ID NO: 101999 - protein, 7 aa, synthetic construct
TSNDNRS

SEQ ID NO: 102000 - protein, 7 aa, synthetic construct
NVSVRGI

SEQ ID NO: 102001 - protein, 7 aa, synthetic construct
TLTNALR

SEQ ID NO: 102002 - protein, 7 aa, synthetic construct
LPIQGYT

SEQ ID NO: 102003 - protein, 7 aa, synthetic construct
FQMQHIS

SEQ ID NO: 102004 - protein, 7 aa, synthetic construct
IFEQKFK

SEQ ID NO: 102005 - protein, 7 aa, synthetic construct
IMKTYDV

SEQ ID NO: 102006 - protein, 7 aa, synthetic construct
SYSGSKV

SEQ ID NO: 102007 - protein, 7 aa, synthetic construct
LNQVPEG

SEQ ID NO: 102008 - protein, 7 aa, synthetic construct
YGDHKEW

SEQ ID NO: 102009 - protein, 7 aa, synthetic construct
CKGLECI

SEQ ID NO: 102010 - protein, 7 aa, synthetic construct
PVDRAVV

SEQ ID NO: 102011 - protein, 7 aa, synthetic construct
TKANEKF

SEQ ID NO: 102012 - protein, 7 aa, synthetic construct
GAHNERG

SEQ ID NO: 102013 - protein, 7 aa, synthetic construct
KSMSDSD

SEQ ID NO: 102014 - protein, 7 aa, synthetic construct
RDYATDT

SEQ ID NO: 102015 - protein, 7 aa, synthetic construct
MVGTGHE

SEQ ID NO: 102016 - protein, 7 aa, synthetic construct
EVGKIEF

SEQ ID NO: 102017 - protein, 7 aa, synthetic construct
ESGYKNH

SEQ ID NO: 102018 - protein, 7 aa, synthetic construct
NIHVGLE

SEQ ID NO: 102019 - protein, 7 aa, synthetic construct
ELHNASP

SEQ ID NO: 102020 - protein, 7 aa, synthetic construct
PKPVQMT

SEQ ID NO: 102021 - protein, 7 aa, synthetic construct
TLNRPTN

SEQ ID NO: 102022 - protein, 7 aa, synthetic construct
TQPLYPK

SEQ ID NO: 102023 - protein, 7 aa, synthetic construct
YRIQQAT

SEQ ID NO: 102024 - protein, 7 aa, synthetic construct
ARHVDEE

SEQ ID NO: 102025 - protein, 7 aa, synthetic construct
REQLSNQ

SEQ ID NO: 102026 - protein, 7 aa, synthetic construct
IAAEKVP

SEQ ID NO: 102027 - protein, 7 aa, synthetic construct
SIPDNTR

SEQ ID NO: 102028 - protein, 7 aa, synthetic construct
KNTQNTS

SEQ ID NO: 102029 - protein, 7 aa, synthetic construct
IQHGHSW

SEQ ID NO: 102030 - protein, 7 aa, synthetic construct
NGQPGGR

SEQ ID NO: 102031 - protein, 7 aa, synthetic construct
VMKAANQ

SEQ ID NO: 102032 - protein, 7 aa, synthetic construct
ERVANQA

SEQ ID NO: 102033 - protein, 7 aa, synthetic construct
PAQPSYY

SEQ ID NO: 102034 - protein, 7 aa, synthetic construct
PSQRKDY

SEQ ID NO: 102035 - protein, 7 aa, synthetic construct
LPVIPKE

SEQ ID NO: 102036 - protein, 7 aa, synthetic construct
RLAMTPS

SEQ ID NO: 102037 - protein, 7 aa, synthetic construct
VYHANDI

SEQ ID NO: 102038 - protein, 7 aa, synthetic construct
HPTGKAI

SEQ ID NO: 102039 - protein, 7 aa, synthetic construct
VSSHEHH

SEQ ID NO: 102040 - protein, 7 aa, synthetic construct
AASAHLR

SEQ ID NO: 102041 - protein, 7 aa, synthetic construct
GEHDKNP

SEQ ID NO: 102042 - protein, 7 aa, synthetic construct
MVRSEVK

SEQ ID NO: 102043 - protein, 7 aa, synthetic construct
IAKMQLE

SEQ ID NO: 102044 - protein, 7 aa, synthetic construct
YAGDRSP

SEQ ID NO: 102045 - protein, 7 aa, synthetic construct
TFKMTPV

SEQ ID NO: 102046 - protein, 7 aa, synthetic construct
PKPHQTT

SEQ ID NO: 102047 - protein, 7 aa, synthetic construct
WNMTPDS

SEQ ID NO: 102048 - protein, 7 aa, synthetic construct
KASLPQT

SEQ ID NO: 102049 - protein, 7 aa, synthetic construct
TVTEKEA

SEQ ID NO: 102050 - protein, 7 aa, synthetic construct
PARKTEH

SEQ ID NO: 102051 - protein, 7 aa, synthetic construct
IGHVGAP

SEQ ID NO: 102052 - protein, 7 aa, synthetic construct
WTQVIQG

SEQ ID NO: 102053 - protein, 7 aa, synthetic construct
SGGLHRS

SEQ ID NO: 102054 - protein, 7 aa, synthetic construct
GLQESLG

SEQ ID NO: 102055 - protein, 7 aa, synthetic construct
ARPGEDL

SEQ ID NO: 102056 - protein, 7 aa, synthetic construct
KQFANIA

SEQ ID NO: 102057 - protein, 7 aa, synthetic construct
NPSGRYS

SEQ ID NO: 102058 - protein, 7 aa, synthetic construct
MGAAEVL

SEQ ID NO: 102059 - protein, 7 aa, synthetic construct
NVYMSES

SEQ ID NO: 102060 - protein, 7 aa, synthetic construct
LLAGMTM

SEQ ID NO: 102061 - protein, 7 aa, synthetic construct
SQDQRVQ

SEQ ID NO: 102062 - protein, 7 aa, synthetic construct
RNPHQDK

SEQ ID NO: 102063 - protein, 7 aa, synthetic construct
PDRVMDP

SEQ ID NO: 102064 - protein, 7 aa, synthetic construct
PQVTDPS

SEQ ID NO: 102065 - protein, 7 aa, synthetic construct
AYQNMQD

SEQ ID NO: 102066 - protein, 7 aa, synthetic construct
KYIPAPG

SEQ ID NO: 102067 - protein, 7 aa, synthetic construct
FMKVITP

SEQ ID NO: 102068 - protein, 7 aa, synthetic construct
PIQSEAW

SEQ ID NO: 102069 - protein, 7 aa, synthetic construct
SRQGWME

SEQ ID NO: 102070 - protein, 7 aa, synthetic construct
KHSHSEN

SEQ ID NO: 102071 - protein, 7 aa, synthetic construct
REVHNAY

SEQ ID NO: 102072 - protein, 7 aa, synthetic construct
RHVENEG

SEQ ID NO: 102073 - protein, 7 aa, synthetic construct
ASYHAGA

SEQ ID NO: 102074 - protein, 7 aa, synthetic construct
GPHFSNN

SEQ ID NO: 102075 - protein, 7 aa, synthetic construct
HERGKMQ

SEQ ID NO: 102076 - protein, 7 aa, synthetic construct
TKERGFG

SEQ ID NO: 102077 - protein, 7 aa, synthetic construct
TEMSGYK

SEQ ID NO: 102078 - protein, 7 aa, synthetic construct
QPSEKTL

SEQ ID NO: 102079 - protein, 7 aa, synthetic construct
QLNYEQL

SEQ ID NO: 102080 - protein, 7 aa, synthetic construct
NPNASMM

SEQ ID NO: 102081 - protein, 7 aa, synthetic construct
NFQAEAF

SEQ ID NO: 102082 - protein, 7 aa, synthetic construct
IKEEAQF

SEQ ID NO: 102083 - protein, 7 aa, synthetic construct
QFSGGND

SEQ ID NO: 102084 - protein, 7 aa, synthetic construct
KHEMPVN

SEQ ID NO: 102085 - protein, 7 aa, synthetic construct
IPVKEAG

SEQ ID NO: 102086 - protein, 7 aa, synthetic construct
FTKAHIT

SEQ ID NO: 102087 - protein, 7 aa, synthetic construct
NHTDTGM

SEQ ID NO: 102088 - protein, 7 aa, synthetic construct
RAAIGNV

SEQ ID NO: 102089 - protein, 7 aa, synthetic construct
MINGNPG

SEQ ID NO: 102090 - protein, 7 aa, synthetic construct
MALQNGY

SEQ ID NO: 102091 - protein, 7 aa, synthetic construct
YSQHEPH

SEQ ID NO: 102092 - protein, 7 aa, synthetic construct
NYPAVSE

SEQ ID NO: 102093 - protein, 7 aa, synthetic construct
FRKVQYD

SEQ ID NO: 102094 - protein, 7 aa, synthetic construct
HALSYSV

SEQ ID NO: 102095 - protein, 7 aa, synthetic construct
PVPHKGF

SEQ ID NO: 102096 - protein, 7 aa, synthetic construct
LKESILV

SEQ ID NO: 102097 - protein, 7 aa, synthetic construct
GVKSKDA

SEQ ID NO: 102098 - protein, 7 aa, synthetic construct
FLERPNG

SEQ ID NO: 102099 - protein, 7 aa, synthetic construct
MNVDRTT

SEQ ID NO: 102100 - protein, 7 aa, synthetic construct
NMSHINN

SEQ ID NO: 102101 - protein, 7 aa, synthetic construct
LIVQAEN

SEQ ID NO: 102102 - protein, 7 aa, synthetic construct
GEFHPAM

SEQ ID NO: 102103 - protein, 7 aa, synthetic construct
IKIHEMT

SEQ ID NO: 102104 - protein, 7 aa, synthetic construct
DKEYHSS

SEQ ID NO: 102105 - protein, 7 aa, synthetic construct
FGQSPTK

SEQ ID NO: 102106 - protein, 7 aa, synthetic construct
LAQPGLV

SEQ ID NO: 102107 - protein, 7 aa, synthetic construct
DLNHVGM

SEQ ID NO: 102108 - protein, 7 aa, synthetic construct
QEERTYR

SEQ ID NO: 102109 - protein, 7 aa, synthetic construct
GIGQLKF

SEQ ID NO: 102110 - protein, 7 aa, synthetic construct
EKQYLLE

SEQ ID NO: 102111 - protein, 7 aa, synthetic construct
WYNEVNG

SEQ ID NO: 102112 - protein, 7 aa, synthetic construct
VHKNDDD

SEQ ID NO: 102113 - protein, 7 aa, synthetic construct
QAKANSE

SEQ ID NO: 102114 - protein, 7 aa, synthetic construct
QSYGPDR

SEQ ID NO: 102115 - protein, 7 aa, synthetic construct
PGHPQAL

SEQ ID NO: 102116 - protein, 7 aa, synthetic construct
DHHIGHI

SEQ ID NO: 102117 - protein, 7 aa, synthetic construct
LMTHRTT

SEQ ID NO: 102118 - protein, 7 aa, synthetic construct
IQGNQQI

SEQ ID NO: 102119 - protein, 7 aa, synthetic construct
YRLNAAE

SEQ ID NO: 102120 - protein, 7 aa, synthetic construct
YPFPTEA

SEQ ID NO: 102121 - protein, 7 aa, synthetic construct
IHGRVSY

SEQ ID NO: 102122 - protein, 7 aa, synthetic construct
SGRSFNS

SEQ ID NO: 102123 - protein, 7 aa, synthetic construct
TMTPKAS

SEQ ID NO: 102124 - protein, 7 aa, synthetic construct
TKNDSGR

SEQ ID NO: 102125 - protein, 7 aa, synthetic construct
RSNATVA

SEQ ID NO: 102126 - protein, 7 aa, synthetic construct
PQPLDKS

SEQ ID NO: 102127 - protein, 7 aa, synthetic construct
YEATVFQ

SEQ ID NO: 102128 - protein, 7 aa, synthetic construct
YMGIQVN

SEQ ID NO: 102129 - protein, 7 aa, synthetic construct
LGNSYNI

SEQ ID NO: 102130 - protein, 7 aa, synthetic construct
LQIKMGM

SEQ ID NO: 102131 - protein, 7 aa, synthetic construct
TVLAKHD

SEQ ID NO: 102132 - protein, 7 aa, synthetic construct
TTMTGVV

SEQ ID NO: 102133 - protein, 7 aa, synthetic construct
FARSELE

SEQ ID NO: 102134 - protein, 7 aa, synthetic construct
IGPADRD

SEQ ID NO: 102135 - protein, 7 aa, synthetic construct
TKIAEAH

SEQ ID NO: 102136 - protein, 7 aa, synthetic construct
KQPMSLT

SEQ ID NO: 102137 - protein, 7 aa, synthetic construct
TRDATQR

SEQ ID NO: 102138 - protein, 7 aa, synthetic construct
CKSGAQG

SEQ ID NO: 102139 - protein, 7 aa, synthetic construct
YPKDSFI

SEQ ID NO: 102140 - protein, 7 aa, synthetic construct
NLAPHLT

SEQ ID NO: 102141 - protein, 7 aa, synthetic construct
RHMAVGV

SEQ ID NO: 102142 - protein, 7 aa, synthetic construct
YDSLYKE

SEQ ID NO: 102143 - protein, 7 aa, synthetic construct
LENNRFQ

SEQ ID NO: 102144 - protein, 7 aa, synthetic construct
QQGDHVM

SEQ ID NO: 102145 - protein, 7 aa, synthetic construct
VKSQALA

SEQ ID NO: 102146 - protein, 7 aa, synthetic construct
YGSHETF

SEQ ID NO: 102147 - protein, 7 aa, synthetic construct
ITPRYEV

SEQ ID NO: 102148 - protein, 7 aa, synthetic construct
TSSTAET

SEQ ID NO: 102149 - protein, 7 aa, synthetic construct
TGANKSA

SEQ ID NO: 102150 - protein, 7 aa, synthetic construct
QIHQPDP

SEQ ID NO: 102151 - protein, 7 aa, synthetic construct
DHATRDM

SEQ ID NO: 102152 - protein, 7 aa, synthetic construct
TNQQKNA

SEQ ID NO: 102153 - protein, 7 aa, synthetic construct
KDPAVKD

SEQ ID NO: 102154 - protein, 7 aa, synthetic construct
FQHNRTL

SEQ ID NO: 102155 - protein, 7 aa, synthetic construct
MVHSNML

SEQ ID NO: 102156 - protein, 7 aa, synthetic construct
IPDPGSF

SEQ ID NO: 102157 - protein, 7 aa, synthetic construct
QNNRHNS

SEQ ID NO: 102158 - protein, 7 aa, synthetic construct
IHNVIGA

SEQ ID NO: 102159 - protein, 7 aa, synthetic construct
RYAAGPI

SEQ ID NO: 102160 - protein, 7 aa, synthetic construct
MSPKPAM

SEQ ID NO: 102161 - protein, 7 aa, synthetic construct
NKGVDSD

SEQ ID NO: 102162 - protein, 7 aa, synthetic construct
NPGDNPH

SEQ ID NO: 102163 - protein, 7 aa, synthetic construct
QPINKTW

SEQ ID NO: 102164 - protein, 7 aa, synthetic construct
YATYSNT

SEQ ID NO: 102165 - protein, 7 aa, synthetic construct
LGRVNFV

SEQ ID NO: 102166 - protein, 7 aa, synthetic construct
GGPKIPF

SEQ ID NO: 102167 - protein, 7 aa, synthetic construct
KTQAEKY

SEQ ID NO: 102168 - protein, 7 aa, synthetic construct
HEAALRP

SEQ ID NO: 102169 - protein, 7 aa, synthetic construct
YAYNAER

SEQ ID NO: 102170 - protein, 7 aa, synthetic construct
FLGTHHH

SEQ ID NO: 102171 - protein, 7 aa, synthetic construct
QGSAVRD

SEQ ID NO: 102172 - protein, 7 aa, synthetic construct
AMDSTQY

SEQ ID NO: 102173 - protein, 7 aa, synthetic construct
NDQHVRI

SEQ ID NO: 102174 - protein, 7 aa, synthetic construct
LEMGWHG

SEQ ID NO: 102175 - protein, 7 aa, synthetic construct
STVDRSY

SEQ ID NO: 102176 - protein, 7 aa, synthetic construct
SMHKVMM

SEQ ID NO: 102177 - protein, 7 aa, synthetic construct
KKEGKMD

SEQ ID NO: 102178 - protein, 7 aa, synthetic construct
YKIMTHN

SEQ ID NO: 102179 - protein, 7 aa, synthetic construct
GITNMPF

SEQ ID NO: 102180 - protein, 7 aa, synthetic construct
ANVGHIA

SEQ ID NO: 102181 - protein, 7 aa, synthetic construct
GLAINNV

SEQ ID NO: 102182 - protein, 7 aa, synthetic construct
PKQQGEH

SEQ ID NO: 102183 - protein, 7 aa, synthetic construct
VPLNPAL

SEQ ID NO: 102184 - protein, 7 aa, synthetic construct
SSHHNVL

SEQ ID NO: 102185 - protein, 7 aa, synthetic construct
WRDVPPA

SEQ ID NO: 102186 - protein, 7 aa, synthetic construct
LYPQQKY

SEQ ID NO: 102187 - protein, 7 aa, synthetic construct
PKTFIQE

SEQ ID NO: 102188 - protein, 7 aa, synthetic construct
EGNDKKK

SEQ ID NO: 102189 - protein, 7 aa, synthetic construct
RILTMTE

SEQ ID NO: 102190 - protein, 7 aa, synthetic construct
RAHEERR

SEQ ID NO: 102191 - protein, 7 aa, synthetic construct
MAQISGY

SEQ ID NO: 102192 - protein, 7 aa, synthetic construct
TNEVAQL

SEQ ID NO: 102193 - protein, 7 aa, synthetic construct
TEIQTFG

SEQ ID NO: 102194 - protein, 7 aa, synthetic construct
IHSFEGL

SEQ ID NO: 102195 - protein, 7 aa, synthetic construct
PRWKDVD

SEQ ID NO: 102196 - protein, 7 aa, synthetic construct
HLALKNA

SEQ ID NO: 102197 - protein, 7 aa, synthetic construct
GPEFRHH

SEQ ID NO: 102198 - protein, 7 aa, synthetic construct
TISGFKT

SEQ ID NO: 102199 - protein, 7 aa, synthetic construct
VHGIAFH

SEQ ID NO: 102200 - protein, 7 aa, synthetic construct
PTHKSDD

SEQ ID NO: 102201 - protein, 7 aa, synthetic construct
YPSSGTQ

SEQ ID NO: 102202 - protein, 7 aa, synthetic construct
IGINGIS

SEQ ID NO: 102203 - protein, 7 aa, synthetic construct
NHHPDMG

SEQ ID NO: 102204 - protein, 7 aa, synthetic construct
TVDSHFR

SEQ ID NO: 102205 - protein, 7 aa, synthetic construct
MNQPKDS

SEQ ID NO: 102206 - protein, 7 aa, synthetic construct
KQPSTQA

SEQ ID NO: 102207 - protein, 7 aa, synthetic construct
FVKNQMH

SEQ ID NO: 102208 - protein, 7 aa, synthetic construct
NAAALMD

SEQ ID NO: 102209 - protein, 7 aa, synthetic construct
ISTYNHE

SEQ ID NO: 102210 - protein, 7 aa, synthetic construct
IGDYQNP

SEQ ID NO: 102211 - protein, 7 aa, synthetic construct
SRTNYPH

SEQ ID NO: 102212 - protein, 7 aa, synthetic construct
HDLREIH

SEQ ID NO: 102213 - protein, 7 aa, synthetic construct
ADARHSA

SEQ ID NO: 102214 - protein, 7 aa, synthetic construct
ISKDYAA

SEQ ID NO: 102215 - protein, 7 aa, synthetic construct
HADRKNM

SEQ ID NO: 102216 - protein, 7 aa, synthetic construct
SLAHHYG

SEQ ID NO: 102217 - protein, 7 aa, synthetic construct
RNHGNFS

SEQ ID NO: 102218 - protein, 7 aa, synthetic construct
NSNVGDP

SEQ ID NO: 102219 - protein, 7 aa, synthetic construct
GHIEQKL

SEQ ID NO: 102220 - protein, 7 aa, synthetic construct
SMSGRAM

SEQ ID NO: 102221 - protein, 7 aa, synthetic construct
KIPDTYV

SEQ ID NO: 102222 - protein, 7 aa, synthetic construct
AEKSTSK

SEQ ID NO: 102223 - protein, 7 aa, synthetic construct
YKYTENV

SEQ ID NO: 102224 - protein, 7 aa, synthetic construct
IKIGDHL

SEQ ID NO: 102225 - protein, 7 aa, synthetic construct
QLVHPMK

SEQ ID NO: 102226 - protein, 7 aa, synthetic construct
HGQLTHD

SEQ ID NO: 102227 - protein, 7 aa, synthetic construct
PEFPTRS

SEQ ID NO: 102228 - protein, 7 aa, synthetic construct
GPARELW

SEQ ID NO: 102229 - protein, 7 aa, synthetic construct
NVKSPTH

SEQ ID NO: 102230 - protein, 7 aa, synthetic construct
MDNTPKM

SEQ ID NO: 102231 - protein, 7 aa, synthetic construct
DQWKTDL

SEQ ID NO: 102232 - protein, 7 aa, synthetic construct
PWKTTPP

SEQ ID NO: 102233 - protein, 7 aa, synthetic construct
ESLYHKP

SEQ ID NO: 102234 - protein, 7 aa, synthetic construct
GQANQTW

SEQ ID NO: 102235 - protein, 7 aa, synthetic construct
TFKVVMN

SEQ ID NO: 102236 - protein, 7 aa, synthetic construct
HHVQLQD

SEQ ID NO: 102237 - protein, 7 aa, synthetic construct
RADQGEF

SEQ ID NO: 102238 - protein, 7 aa, synthetic construct
MQAQGRH

SEQ ID NO: 102239 - protein, 7 aa, synthetic construct
WPGPKSL

SEQ ID NO: 102240 - protein, 7 aa, synthetic construct
TNHIYQT

SEQ ID NO: 102241 - protein, 7 aa, synthetic construct
TVKYSQF

SEQ ID NO: 102242 - protein, 7 aa, synthetic construct
EGVIQYK

SEQ ID NO: 102243 - protein, 7 aa, synthetic construct
SEYSRHL

SEQ ID NO: 102244 - protein, 7 aa, synthetic construct
RPDKQME

SEQ ID NO: 102245 - protein, 7 aa, synthetic construct
EAGKFRT

SEQ ID NO: 102246 - protein, 7 aa, synthetic construct
HDNLAQL

SEQ ID NO: 102247 - protein, 7 aa, synthetic construct
VVRIEQM

SEQ ID NO: 102248 - protein, 7 aa, synthetic construct
VAKHWDA

SEQ ID NO: 102249 - protein, 7 aa, synthetic construct
LIAHRAP

SEQ ID NO: 102250 - protein, 7 aa, synthetic construct
GNASAQM

SEQ ID NO: 102251 - protein, 7 aa, synthetic construct
VSREFNV

SEQ ID NO: 102252 - protein, 7 aa, synthetic construct
HVFPKEI

SEQ ID NO: 102253 - protein, 7 aa, synthetic construct
DIKPVLM

SEQ ID NO: 102254 - protein, 7 aa, synthetic construct
KLTDITW

SEQ ID NO: 102255 - protein, 7 aa, synthetic construct
PLKMMEN

SEQ ID NO: 102256 - protein, 7 aa, synthetic construct
EVKRSDD

SEQ ID NO: 102257 - protein, 7 aa, synthetic construct
GAYISGV

SEQ ID NO: 102258 - protein, 7 aa, synthetic construct
YHSEPIS

SEQ ID NO: 102259 - protein, 7 aa, synthetic construct
AQTRLQY

SEQ ID NO: 102260 - protein, 7 aa, synthetic construct
HQKVMPL

SEQ ID NO: 102261 - protein, 7 aa, synthetic construct
VERMENS

SEQ ID NO: 102262 - protein, 7 aa, synthetic construct
KSNQSDW

SEQ ID NO: 102263 - protein, 7 aa, synthetic construct
KHHIVEP

SEQ ID NO: 102264 - protein, 7 aa, synthetic construct
HNLGFQA

SEQ ID NO: 102265 - protein, 7 aa, synthetic construct
YAKIFQD

SEQ ID NO: 102266 - protein, 7 aa, synthetic construct
KVSNMEW

SEQ ID NO: 102267 - protein, 7 aa, synthetic construct
NDKRISL

SEQ ID NO: 102268 - protein, 7 aa, synthetic construct
VSQMARP

SEQ ID NO: 102269 - protein, 7 aa, synthetic construct
LSNGQNK

SEQ ID NO: 102270 - protein, 7 aa, synthetic construct
TEFDMVG

SEQ ID NO: 102271 - protein, 7 aa, synthetic construct
IKNDSEI

SEQ ID NO: 102272 - protein, 7 aa, synthetic construct
NVGEGSG

SEQ ID NO: 102273 - protein, 7 aa, synthetic construct
RRMMDVG

SEQ ID NO: 102274 - protein, 7 aa, synthetic construct
TDTNARE

SEQ ID NO: 102275 - protein, 7 aa, synthetic construct
RLIPQLG

SEQ ID NO: 102276 - protein, 7 aa, synthetic construct
YMKPEVQ

SEQ ID NO: 102277 - protein, 7 aa, synthetic construct
VQQHRKD

SEQ ID NO: 102278 - protein, 7 aa, synthetic construct
YIASEHA

SEQ ID NO: 102279 - protein, 7 aa, synthetic construct
RSSNTTP

SEQ ID NO: 102280 - protein, 7 aa, synthetic construct
RQKTDDY

SEQ ID NO: 102281 - protein, 7 aa, synthetic construct
WVDFSHE

SEQ ID NO: 102282 - protein, 7 aa, synthetic construct
APIRNTY

SEQ ID NO: 102283 - protein, 7 aa, synthetic construct
EIREHFA

SEQ ID NO: 102284 - protein, 7 aa, synthetic construct
WSNTDQV

SEQ ID NO: 102285 - protein, 7 aa, synthetic construct
IGTMMGI

SEQ ID NO: 102286 - protein, 7 aa, synthetic construct
FMQHHDP

SEQ ID NO: 102287 - protein, 7 aa, synthetic construct
HSVKNDR

SEQ ID NO: 102288 - protein, 7 aa, synthetic construct
VLNSITS

SEQ ID NO: 102289 - protein, 7 aa, synthetic construct
RMDQHPA

SEQ ID NO: 102290 - protein, 7 aa, synthetic construct
IEMRRTI

SEQ ID NO: 102291 - protein, 7 aa, synthetic construct
NKNIGSG

SEQ ID NO: 102292 - protein, 7 aa, synthetic construct
SEHKFQE

SEQ ID NO: 102293 - protein, 7 aa, synthetic construct
EPPKAQV

SEQ ID NO: 102294 - protein, 7 aa, synthetic construct
EVPNVRH

SEQ ID NO: 102295 - protein, 7 aa, synthetic construct
GAGNQMQ

SEQ ID NO: 102296 - protein, 7 aa, synthetic construct
PSHVFPD

SEQ ID NO: 102297 - protein, 7 aa, synthetic construct
WQHTKDG

SEQ ID NO: 102298 - protein, 7 aa, synthetic construct
FNPVAHI

SEQ ID NO: 102299 - protein, 7 aa, synthetic construct
LVVAQKG

SEQ ID NO: 102300 - protein, 7 aa, synthetic construct
GPNMVVA

SEQ ID NO: 102301 - protein, 7 aa, synthetic construct
NQSGTTV

SEQ ID NO: 102302 - protein, 7 aa, synthetic construct
DHGSRQI

SEQ ID NO: 102303 - protein, 7 aa, synthetic construct
YYAKSEI

SEQ ID NO: 102304 - protein, 7 aa, synthetic construct
MAVDRGD

SEQ ID NO: 102305 - protein, 7 aa, synthetic construct
VVGPNVN

SEQ ID NO: 102306 - protein, 7 aa, synthetic construct
GGLTSMD

SEQ ID NO: 102307 - protein, 7 aa, synthetic construct
FTKYESD

SEQ ID NO: 102308 - protein, 7 aa, synthetic construct
SLALLQN

SEQ ID NO: 102309 - protein, 7 aa, synthetic construct
AQDQRSS

SEQ ID NO: 102310 - protein, 7 aa, synthetic construct
VKGGTQT

SEQ ID NO: 102311 - protein, 7 aa, synthetic construct
SVTSDGS

SEQ ID NO: 102312 - protein, 7 aa, synthetic construct
ADRSSMK

SEQ ID NO: 102313 - protein, 7 aa, synthetic construct
ANVEGKF

SEQ ID NO: 102314 - protein, 7 aa, synthetic construct
TDAQLKK

SEQ ID NO: 102315 - protein, 7 aa, synthetic construct
KGMDWTI

SEQ ID NO: 102316 - protein, 7 aa, synthetic construct
LEHGYNG

SEQ ID NO: 102317 - protein, 7 aa, synthetic construct
QQKAPQC

SEQ ID NO: 102318 - protein, 7 aa, synthetic construct
AKMEHFG

SEQ ID NO: 102319 - protein, 7 aa, synthetic construct
VKNMITD

SEQ ID NO: 102320 - protein, 7 aa, synthetic construct
YNGNNMY

SEQ ID NO: 102321 - protein, 7 aa, synthetic construct
YNAGLNR

SEQ ID NO: 102322 - protein, 7 aa, synthetic construct
NFTRQGY

SEQ ID NO: 102323 - protein, 7 aa, synthetic construct
QSGSGEY

SEQ ID NO: 102324 - protein, 7 aa, synthetic construct
ANGGGRG

SEQ ID NO: 102325 - protein, 7 aa, synthetic construct
NMRSEDW

SEQ ID NO: 102326 - protein, 7 aa, synthetic construct
FTYSRGE

SEQ ID NO: 102327 - protein, 7 aa, synthetic construct
KDFTMAT

SEQ ID NO: 102328 - protein, 7 aa, synthetic construct
TGGYEKS

SEQ ID NO: 102329 - protein, 7 aa, synthetic construct
DALPRHS

SEQ ID NO: 102330 - protein, 7 aa, synthetic construct
FNSSAFG

SEQ ID NO: 102331 - protein, 7 aa, synthetic construct
NLNRKND

SEQ ID NO: 102332 - protein, 7 aa, synthetic construct
YVGRNAY

SEQ ID NO: 102333 - protein, 7 aa, synthetic construct
HQHRLYE

SEQ ID NO: 102334 - protein, 7 aa, synthetic construct
QLPGNNR

SEQ ID NO: 102335 - protein, 7 aa, synthetic construct
TQQQVPA

SEQ ID NO: 102336 - protein, 7 aa, synthetic construct
GLHTIEM

SEQ ID NO: 102337 - protein, 7 aa, synthetic construct
SGTSAGV

SEQ ID NO: 102338 - protein, 7 aa, synthetic construct
HHMPYPA

SEQ ID NO: 102339 - protein, 7 aa, synthetic construct
IPMSSAY

SEQ ID NO: 102340 - protein, 7 aa, synthetic construct
YFQKSEL

SEQ ID NO: 102341 - protein, 7 aa, synthetic construct
GNYAAQD

SEQ ID NO: 102342 - protein, 7 aa, synthetic construct
IDNVGKS

SEQ ID NO: 102343 - protein, 7 aa, synthetic construct
GTKEEAK

SEQ ID NO: 102344 - protein, 7 aa, synthetic construct
KGDHRQE

SEQ ID NO: 102345 - protein, 7 aa, synthetic construct
SDHGLSL

SEQ ID NO: 102346 - protein, 7 aa, synthetic construct
AVGMERA

SEQ ID NO: 102347 - protein, 7 aa, synthetic construct
VIAKPIT

SEQ ID NO: 102348 - protein, 7 aa, synthetic construct
QTPYIMS

SEQ ID NO: 102349 - protein, 7 aa, synthetic construct
HNAQRTN

SEQ ID NO: 102350 - protein, 7 aa, synthetic construct
ANAKSAP

SEQ ID NO: 102351 - protein, 7 aa, synthetic construct
DQGKHNM

SEQ ID NO: 102352 - protein, 7 aa, synthetic construct
EVTMKHT

SEQ ID NO: 102353 - protein, 7 aa, synthetic construct
KAIGNPP

SEQ ID NO: 102354 - protein, 7 aa, synthetic construct
SMREYNK

SEQ ID NO: 102355 - protein, 7 aa, synthetic construct
GNNMEMV

SEQ ID NO: 102356 - protein, 7 aa, synthetic construct
DMWEKNG

SEQ ID NO: 102357 - protein, 7 aa, synthetic construct
IRVGMSH

SEQ ID NO: 102358 - protein, 7 aa, synthetic construct
RAIAPHQ

SEQ ID NO: 102359 - protein, 7 aa, synthetic construct
MDDARRM

SEQ ID NO: 102360 - protein, 7 aa, synthetic construct
SQQVFID

SEQ ID NO: 102361 - protein, 7 aa, synthetic construct
IPGVAGY

SEQ ID NO: 102362 - protein, 7 aa, synthetic construct
MSQMYQA

SEQ ID NO: 102363 - protein, 7 aa, synthetic construct
ASPVRHL

SEQ ID NO: 102364 - protein, 7 aa, synthetic construct
NSSVRDL

SEQ ID NO: 102365 - protein, 7 aa, synthetic construct
EMRNQHP

SEQ ID NO: 102366 - protein, 7 aa, synthetic construct
NKQTNVA

SEQ ID NO: 102367 - protein, 7 aa, synthetic construct
TISPVSV

SEQ ID NO: 102368 - protein, 7 aa, synthetic construct
PNHMPGL

SEQ ID NO: 102369 - protein, 7 aa, synthetic construct
LFHTKAQ

SEQ ID NO: 102370 - protein, 7 aa, synthetic construct
RTNHPDE

SEQ ID NO: 102371 - protein, 7 aa, synthetic construct
QSAKWGI

SEQ ID NO: 102372 - protein, 7 aa, synthetic construct
LSEHFNA

SEQ ID NO: 102373 - protein, 7 aa, synthetic construct
QFGDMVR

SEQ ID NO: 102374 - protein, 7 aa, synthetic construct
LDRFRAG

SEQ ID NO: 102375 - protein, 7 aa, synthetic construct
VSIQHPM

SEQ ID NO: 102376 - protein, 7 aa, synthetic construct
DIPHVRH

SEQ ID NO: 102377 - protein, 7 aa, synthetic construct
FQSPGQS

SEQ ID NO: 102378 - protein, 7 aa, synthetic construct
RLNGFSD

SEQ ID NO: 102379 - protein, 7 aa, synthetic construct
MRTETSV

SEQ ID NO: 102380 - protein, 7 aa, synthetic construct
PLLHNQE

SEQ ID NO: 102381 - protein, 7 aa, synthetic construct
MPELNYH

SEQ ID NO: 102382 - protein, 7 aa, synthetic construct
NGPAPAA

SEQ ID NO: 102383 - protein, 7 aa, synthetic construct
PDTSPRK

SEQ ID NO: 102384 - protein, 7 aa, synthetic construct
RKSQDSE

SEQ ID NO: 102385 - protein, 7 aa, synthetic construct
RNFAREG

SEQ ID NO: 102386 - protein, 7 aa, synthetic construct
HFDRPSS

SEQ ID NO: 102387 - protein, 7 aa, synthetic construct
HNGIFTA

SEQ ID NO: 102388 - protein, 7 aa, synthetic construct
SMLAHPV

SEQ ID NO: 102389 - protein, 7 aa, synthetic construct
GRDRYLG

SEQ ID NO: 102390 - protein, 7 aa, synthetic construct
FRESDMH

SEQ ID NO: 102391 - protein, 7 aa, synthetic construct
TTKMIQI

SEQ ID NO: 102392 - protein, 7 aa, synthetic construct
NDQQHKM

SEQ ID NO: 102393 - protein, 7 aa, synthetic construct
QGKSDRE

SEQ ID NO: 102394 - protein, 7 aa, synthetic construct
SNGINDA

SEQ ID NO: 102395 - protein, 7 aa, synthetic construct
MAQKYGL

SEQ ID NO: 102396 - protein, 7 aa, synthetic construct
AKRDNGG

SEQ ID NO: 102397 - protein, 7 aa, synthetic construct
HELERRE

SEQ ID NO: 102398 - protein, 7 aa, synthetic construct
HHIEHNR

SEQ ID NO: 102399 - protein, 7 aa, synthetic construct
PQQTVNM

SEQ ID NO: 102400 - protein, 7 aa, synthetic construct
INFDKTL

SEQ ID NO: 102401 - protein, 7 aa, synthetic construct
NRRGDDS

SEQ ID NO: 102402 - protein, 7 aa, synthetic construct
MKDLEHR

SEQ ID NO: 102403 - protein, 7 aa, synthetic construct
QAQHIHR

SEQ ID NO: 102404 - protein, 7 aa, synthetic construct
LKSNGTH

SEQ ID NO: 102405 - protein, 7 aa, synthetic construct
RPETYIG

SEQ ID NO: 102406 - protein, 7 aa, synthetic construct
HGKDMRE

SEQ ID NO: 102407 - protein, 7 aa, synthetic construct
MPVKNAG

SEQ ID NO: 102408 - protein, 7 aa, synthetic construct
KEQTLIT

SEQ ID NO: 102409 - protein, 7 aa, synthetic construct
QGHIEKA

SEQ ID NO: 102410 - protein, 7 aa, synthetic construct
PTLKVGH

SEQ ID NO: 102411 - protein, 7 aa, synthetic construct
HRSSQPP

SEQ ID NO: 102412 - protein, 7 aa, synthetic construct
YKQDANH

SEQ ID NO: 102413 - protein, 7 aa, synthetic construct
IDQTKRE

SEQ ID NO: 102414 - protein, 7 aa, synthetic construct
PKNAGSA

SEQ ID NO: 102415 - protein, 7 aa, synthetic construct
QHVQVSV

SEQ ID NO: 102416 - protein, 7 aa, synthetic construct
HYLDGKY

SEQ ID NO: 102417 - protein, 7 aa, synthetic construct
SGIKGIV

SEQ ID NO: 102418 - protein, 7 aa, synthetic construct
QYSKFVP

SEQ ID NO: 102419 - protein, 7 aa, synthetic construct
VLGKLPV

SEQ ID NO: 102420 - protein, 7 aa, synthetic construct
FHLHKAA

SEQ ID NO: 102421 - protein, 7 aa, synthetic construct
AQKSALM

SEQ ID NO: 102422 - protein, 7 aa, synthetic construct
HKMPEYS

SEQ ID NO: 102423 - protein, 7 aa, synthetic construct
YMRAASA

SEQ ID NO: 102424 - protein, 7 aa, synthetic construct
QGDIVRL

SEQ ID NO: 102425 - protein, 7 aa, synthetic construct
TSLAALG

SEQ ID NO: 102426 - protein, 7 aa, synthetic construct
KFDHQIV

SEQ ID NO: 102427 - protein, 7 aa, synthetic construct
YNVDNKF

SEQ ID NO: 102428 - protein, 7 aa, synthetic construct
VANGVGQ

SEQ ID NO: 102429 - protein, 7 aa, synthetic construct
ETVGRKD

SEQ ID NO: 102430 - protein, 7 aa, synthetic construct
VHQNGLH

SEQ ID NO: 102431 - protein, 7 aa, synthetic construct
SNIHLRP

SEQ ID NO: 102432 - protein, 7 aa, synthetic construct
TNGKGMY

SEQ ID NO: 102433 - protein, 7 aa, synthetic construct
ITTQWER

SEQ ID NO: 102434 - protein, 7 aa, synthetic construct
PSLAYKT

SEQ ID NO: 102435 - protein, 7 aa, synthetic construct
YYAGVDR

SEQ ID NO: 102436 - protein, 7 aa, synthetic construct
PGPSPST

SEQ ID NO: 102437 - protein, 7 aa, synthetic construct
PYKLDES

SEQ ID NO: 102438 - protein, 7 aa, synthetic construct
IYPQYKP

SEQ ID NO: 102439 - protein, 7 aa, synthetic construct
RFAEANK

SEQ ID NO: 102440 - protein, 7 aa, synthetic construct
LHNHMNF

SEQ ID NO: 102441 - protein, 7 aa, synthetic construct
VWSDRKD

SEQ ID NO: 102442 - protein, 7 aa, synthetic construct
FTTGSAM

SEQ ID NO: 102443 - protein, 7 aa, synthetic construct
WKVMTGD

SEQ ID NO: 102444 - protein, 7 aa, synthetic construct
HVGGPSS

SEQ ID NO: 102445 - protein, 7 aa, synthetic construct
AHQITPK

SEQ ID NO: 102446 - protein, 7 aa, synthetic construct
TFLVTKA

SEQ ID NO: 102447 - protein, 7 aa, synthetic construct
QVTSASA

SEQ ID NO: 102448 - protein, 7 aa, synthetic construct
YANVHLD

SEQ ID NO: 102449 - protein, 7 aa, synthetic construct
MVTDNTI

SEQ ID NO: 102450 - protein, 7 aa, synthetic construct
KEGHANG

SEQ ID NO: 102451 - protein, 7 aa, synthetic construct
SSDHKNF

SEQ ID NO: 102452 - protein, 7 aa, synthetic construct
SGKVSFL

SEQ ID NO: 102453 - protein, 7 aa, synthetic construct
AAENRYL

SEQ ID NO: 102454 - protein, 7 aa, synthetic construct
QANEHVF

SEQ ID NO: 102455 - protein, 7 aa, synthetic construct
RMPGTGA

SEQ ID NO: 102456 - protein, 7 aa, synthetic construct
NLTFDQH

SEQ ID NO: 102457 - protein, 7 aa, synthetic construct
PPRDLTM

SEQ ID NO: 102458 - protein, 7 aa, synthetic construct
FTQHPEQ

SEQ ID NO: 102459 - protein, 7 aa, synthetic construct
GENQLKS

SEQ ID NO: 102460 - protein, 7 aa, synthetic construct
QNRIAIP

SEQ ID NO: 102461 - protein, 7 aa, synthetic construct
KLHQFGG

SEQ ID NO: 102462 - protein, 7 aa, synthetic construct
GLYVNKQ

SEQ ID NO: 102463 - protein, 7 aa, synthetic construct
SRFKLDN

SEQ ID NO: 102464 - protein, 7 aa, synthetic construct
IDGSRAV

SEQ ID NO: 102465 - protein, 7 aa, synthetic construct
TTPPRDF

SEQ ID NO: 102466 - protein, 7 aa, synthetic construct
FLTNVRN

SEQ ID NO: 102467 - protein, 7 aa, synthetic construct
KPVQSGA

SEQ ID NO: 102468 - protein, 7 aa, synthetic construct
VKQDWNK

SEQ ID NO: 102469 - protein, 7 aa, synthetic construct
HGNTNFY

SEQ ID NO: 102470 - protein, 7 aa, synthetic construct
DSHHIVK

SEQ ID NO: 102471 - protein, 7 aa, synthetic construct
SPVGSTY

SEQ ID NO: 102472 - protein, 7 aa, synthetic construct
HTFTGDG

SEQ ID NO: 102473 - protein, 7 aa, synthetic construct
HITGVMM

SEQ ID NO: 102474 - protein, 7 aa, synthetic construct
KPSQAGS

SEQ ID NO: 102475 - protein, 7 aa, synthetic construct
GEIRFEH

SEQ ID NO: 102476 - protein, 7 aa, synthetic construct
MFRSAHP

SEQ ID NO: 102477 - protein, 7 aa, synthetic construct
FNRDVMK

SEQ ID NO: 102478 - protein, 7 aa, synthetic construct
LIRYPNE

SEQ ID NO: 102479 - protein, 7 aa, synthetic construct
VRQDIAI

SEQ ID NO: 102480 - protein, 7 aa, synthetic construct
RHHNATS

SEQ ID NO: 102481 - protein, 7 aa, synthetic construct
KQTTNFV

SEQ ID NO: 102482 - protein, 7 aa, synthetic construct
IHKMIED

SEQ ID NO: 102483 - protein, 7 aa, synthetic construct
PMRDMIR

SEQ ID NO: 102484 - protein, 7 aa, synthetic construct
NKQPQMI

SEQ ID NO: 102485 - protein, 7 aa, synthetic construct
KMKADLT

SEQ ID NO: 102486 - protein, 7 aa, synthetic construct
QFQRVED

SEQ ID NO: 102487 - protein, 7 aa, synthetic construct
VMHQYER

SEQ ID NO: 102488 - protein, 7 aa, synthetic construct
SKDARMI

SEQ ID NO: 102489 - protein, 7 aa, synthetic construct
SHSHADI

SEQ ID NO: 102490 - protein, 7 aa, synthetic construct
LQRTEDV

SEQ ID NO: 102491 - protein, 7 aa, synthetic construct
LFTKETA

SEQ ID NO: 102492 - protein, 7 aa, synthetic construct
SHAQPGF

SEQ ID NO: 102493 - protein, 7 aa, synthetic construct
IIRPAAQ

SEQ ID NO: 102494 - protein, 7 aa, synthetic construct
SHIIIHE

SEQ ID NO: 102495 - protein, 7 aa, synthetic construct
HFNDTAS

SEQ ID NO: 102496 - protein, 7 aa, synthetic construct
VAVKEHW

SEQ ID NO: 102497 - protein, 7 aa, synthetic construct
DQRENVL

SEQ ID NO: 102498 - protein, 7 aa, synthetic construct
FINALSA

SEQ ID NO: 102499 - protein, 7 aa, synthetic construct
MQHHTQY

SEQ ID NO: 102500 - protein, 7 aa, synthetic construct
WSSINQK

SEQ ID NO: 102501 - protein, 7 aa, synthetic construct
RDREVPY

SEQ ID NO: 102502 - protein, 7 aa, synthetic construct
DINRHKT

SEQ ID NO: 102503 - protein, 7 aa, synthetic construct
KDERLVF

SEQ ID NO: 102504 - protein, 7 aa, synthetic construct
VVMPNGV

SEQ ID NO: 102505 - protein, 7 aa, synthetic construct
YPLYSEA

SEQ ID NO: 102506 - protein, 7 aa, synthetic construct
WDQKSSV

SEQ ID NO: 102507 - protein, 7 aa, synthetic construct
SMDFSKQ

SEQ ID NO: 102508 - protein, 7 aa, synthetic construct
PMPKAFA

SEQ ID NO: 102509 - protein, 7 aa, synthetic construct
QTQAMDL

SEQ ID NO: 102510 - protein, 7 aa, synthetic construct
AFNKMHD

SEQ ID NO: 102511 - protein, 7 aa, synthetic construct
NHAQGVQ

SEQ ID NO: 102512 - protein, 7 aa, synthetic construct
YAPMMPI

SEQ ID NO: 102513 - protein, 7 aa, synthetic construct
IVSEPFK

SEQ ID NO: 102514 - protein, 7 aa, synthetic construct
PHPMAKS

SEQ ID NO: 102515 - protein, 7 aa, synthetic construct
TLGWHGE

SEQ ID NO: 102516 - protein, 7 aa, synthetic construct
DVHIKGF

SEQ ID NO: 102517 - protein, 7 aa, synthetic construct
SMAQVVS

SEQ ID NO: 102518 - protein, 7 aa, synthetic construct
GVMEYRD

SEQ ID NO: 102519 - protein, 7 aa, synthetic construct
WNDNRVR

SEQ ID NO: 102520 - protein, 7 aa, synthetic construct
GTFSHNM

SEQ ID NO: 102521 - protein, 7 aa, synthetic construct
TVQKFVT

SEQ ID NO: 102522 - protein, 7 aa, synthetic construct
GRERDTA

SEQ ID NO: 102523 - protein, 7 aa, synthetic construct
SLPVHGL

SEQ ID NO: 102524 - protein, 7 aa, synthetic construct
IQYNPMG

SEQ ID NO: 102525 - protein, 7 aa, synthetic construct
SHNPIQM

SEQ ID NO: 102526 - protein, 7 aa, synthetic construct
VSTQITM

SEQ ID NO: 102527 - protein, 7 aa, synthetic construct
KREAVDN

SEQ ID NO: 102528 - protein, 7 aa, synthetic construct
AKMTQTS

SEQ ID NO: 102529 - protein, 7 aa, synthetic construct
PDKEGPL

SEQ ID NO: 102530 - protein, 7 aa, synthetic construct
HNNDPIK

SEQ ID NO: 102531 - protein, 7 aa, synthetic construct
VANTQKN

SEQ ID NO: 102532 - protein, 7 aa, synthetic construct
HSMLQAG

SEQ ID NO: 102533 - protein, 7 aa, synthetic construct
SFQTKST

SEQ ID NO: 102534 - protein, 7 aa, synthetic construct
VYGRFVE

SEQ ID NO: 102535 - protein, 7 aa, synthetic construct
RSVTGHS

SEQ ID NO: 102536 - protein, 7 aa, synthetic construct
RANDKAI

SEQ ID NO: 102537 - protein, 7 aa, synthetic construct
DKKSIQE

SEQ ID NO: 102538 - protein, 7 aa, synthetic construct
IIGTAQD

SEQ ID NO: 102539 - protein, 7 aa, synthetic construct
HQREGMQ

SEQ ID NO: 102540 - protein, 7 aa, synthetic construct
YHRISAN

SEQ ID NO: 102541 - protein, 7 aa, synthetic construct
AHEVQFA

SEQ ID NO: 102542 - protein, 7 aa, synthetic construct
ILHRNGP

SEQ ID NO: 102543 - protein, 7 aa, synthetic construct
QADMRRY

SEQ ID NO: 102544 - protein, 7 aa, synthetic construct
AGIQPMM

SEQ ID NO: 102545 - protein, 7 aa, synthetic construct
YLGDHHG

SEQ ID NO: 102546 - protein, 7 aa, synthetic construct
FDDIRTH

SEQ ID NO: 102547 - protein, 7 aa, synthetic construct
AKHRVDS

SEQ ID NO: 102548 - protein, 7 aa, synthetic construct
STTGANH

SEQ ID NO: 102549 - protein, 7 aa, synthetic construct
YSANLES

SEQ ID NO: 102550 - protein, 7 aa, synthetic construct
NEVSRNR

SEQ ID NO: 102551 - protein, 7 aa, synthetic construct
ERTNMNP

SEQ ID NO: 102552 - protein, 7 aa, synthetic construct
NPMDHLA

SEQ ID NO: 102553 - protein, 7 aa, synthetic construct
GPAAMMV

SEQ ID NO: 102554 - protein, 7 aa, synthetic construct
QHEPWPT

SEQ ID NO: 102555 - protein, 7 aa, synthetic construct
HSYLKEE

SEQ ID NO: 102556 - protein, 7 aa, synthetic construct
FIDHGSH

SEQ ID NO: 102557 - protein, 7 aa, synthetic construct
MGFTGLA

SEQ ID NO: 102558 - protein, 7 aa, synthetic construct
AGLATER

SEQ ID NO: 102559 - protein, 7 aa, synthetic construct
VDAYARG

SEQ ID NO: 102560 - protein, 7 aa, synthetic construct
EDGFRTV

SEQ ID NO: 102561 - protein, 7 aa, synthetic construct
GRQTVQI

SEQ ID NO: 102562 - protein, 7 aa, synthetic construct
DHNHPFP

SEQ ID NO: 102563 - protein, 7 aa, synthetic construct
GSFNAHD

SEQ ID NO: 102564 - protein, 7 aa, synthetic construct
LMTTNVK

SEQ ID NO: 102565 - protein, 7 aa, synthetic construct
TRIYKIE

SEQ ID NO: 102566 - protein, 7 aa, synthetic construct
HPKLEDS

SEQ ID NO: 102567 - protein, 7 aa, synthetic construct
LASSHST

SEQ ID NO: 102568 - protein, 7 aa, synthetic construct
ILRRDND

SEQ ID NO: 102569 - protein, 7 aa, synthetic construct
TTLHTGT

SEQ ID NO: 102570 - protein, 7 aa, synthetic construct
NADNLDF

SEQ ID NO: 102571 - protein, 7 aa, synthetic construct
STNPNKS

SEQ ID NO: 102572 - protein, 7 aa, synthetic construct
GHQFFES

SEQ ID NO: 102573 - protein, 7 aa, synthetic construct
HPDVRNH

SEQ ID NO: 102574 - protein, 7 aa, synthetic construct
MINILHD

SEQ ID NO: 102575 - protein, 7 aa, synthetic construct
LAGNHRT

SEQ ID NO: 102576 - protein, 7 aa, synthetic construct
QTEFHAS

SEQ ID NO: 102577 - protein, 7 aa, synthetic construct
HLPSHQT

SEQ ID NO: 102578 - protein, 7 aa, synthetic construct
GAHGMNT

SEQ ID NO: 102579 - protein, 7 aa, synthetic construct
HSDVFTG

SEQ ID NO: 102580 - protein, 7 aa, synthetic construct
MYNPGEL

SEQ ID NO: 102581 - protein, 7 aa, synthetic construct
DFKQGKE

SEQ ID NO: 102582 - protein, 7 aa, synthetic construct
EENHIFK

SEQ ID NO: 102583 - protein, 7 aa, synthetic construct
ADMAPRG

SEQ ID NO: 102584 - protein, 7 aa, synthetic construct
HQEYHEP

SEQ ID NO: 102585 - protein, 7 aa, synthetic construct
PTRSGMA

SEQ ID NO: 102586 - protein, 7 aa, synthetic construct
YPHTVQK

SEQ ID NO: 102587 - protein, 7 aa, synthetic construct
FPQVNLH

SEQ ID NO: 102588 - protein, 7 aa, synthetic construct
LEHDGRS

SEQ ID NO: 102589 - protein, 7 aa, synthetic construct
FKALAHD

SEQ ID NO: 102590 - protein, 7 aa, synthetic construct
CHQQTLC

SEQ ID NO: 102591 - protein, 7 aa, synthetic construct
DLGYMPR

SEQ ID NO: 102592 - protein, 7 aa, synthetic construct
MDFANYE

SEQ ID NO: 102593 - protein, 7 aa, synthetic construct
SYQVERD

SEQ ID NO: 102594 - protein, 7 aa, synthetic construct
QATPHLN

SEQ ID NO: 102595 - protein, 7 aa, synthetic construct
QIVNKNE

SEQ ID NO: 102596 - protein, 7 aa, synthetic construct
RQTSNMP

SEQ ID NO: 102597 - protein, 7 aa, synthetic construct
ERNPTAE

SEQ ID NO: 102598 - protein, 7 aa, synthetic construct
LKLGVEP

SEQ ID NO: 102599 - protein, 7 aa, synthetic construct
IGKVFTE

SEQ ID NO: 102600 - protein, 7 aa, synthetic construct
IQARLQV

SEQ ID NO: 102601 - protein, 7 aa, synthetic construct
FEQRMPS

SEQ ID NO: 102602 - protein, 7 aa, synthetic construct
VATDSFK

SEQ ID NO: 102603 - protein, 7 aa, synthetic construct
IQPRNAV

SEQ ID NO: 102604 - protein, 7 aa, synthetic construct
AKVIQIP

SEQ ID NO: 102605 - protein, 7 aa, synthetic construct
KADSQRI

SEQ ID NO: 102606 - protein, 7 aa, synthetic construct
MSAQLTK

SEQ ID NO: 102607 - protein, 7 aa, synthetic construct
NSDDRNM

SEQ ID NO: 102608 - protein, 7 aa, synthetic construct
SEQGHNG

SEQ ID NO: 102609 - protein, 7 aa, synthetic construct
PTQYMDK

SEQ ID NO: 102610 - protein, 7 aa, synthetic construct
YQSNGAE

SEQ ID NO: 102611 - protein, 7 aa, synthetic construct
EQLAAPR

SEQ ID NO: 102612 - protein, 7 aa, synthetic construct
SKNNGGS

SEQ ID NO: 102613 - protein, 7 aa, synthetic construct
SGRDQKD

SEQ ID NO: 102614 - protein, 7 aa, synthetic construct
PQTSQRE

SEQ ID NO: 102615 - protein, 7 aa, synthetic construct
FPQPANV

SEQ ID NO: 102616 - protein, 7 aa, synthetic construct
PHDIGNA

SEQ ID NO: 102617 - protein, 7 aa, synthetic construct
GIPQYEP

SEQ ID NO: 102618 - protein, 7 aa, synthetic construct
AADPNGI

SEQ ID NO: 102619 - protein, 7 aa, synthetic construct
WFEMGSE

SEQ ID NO: 102620 - protein, 7 aa, synthetic construct
VNHSTDK

SEQ ID NO: 102621 - protein, 7 aa, synthetic construct
AQNFTPD

SEQ ID NO: 102622 - protein, 7 aa, synthetic construct
NVPFGSK

SEQ ID NO: 102623 - protein, 7 aa, synthetic construct
IIAQTRH

SEQ ID NO: 102624 - protein, 7 aa, synthetic construct
RQFLDAD

SEQ ID NO: 102625 - protein, 7 aa, synthetic construct
IGSRWIE

SEQ ID NO: 102626 - protein, 7 aa, synthetic construct
AHRLSSV

SEQ ID NO: 102627 - protein, 7 aa, synthetic construct
KQPLYHN

SEQ ID NO: 102628 - protein, 7 aa, synthetic construct
WVSGQLG

SEQ ID NO: 102629 - protein, 7 aa, synthetic construct
TEKGHRD

SEQ ID NO: 102630 - protein, 7 aa, synthetic construct
ANGIDRS

SEQ ID NO: 102631 - protein, 7 aa, synthetic construct
RSEKAMS

SEQ ID NO: 102632 - protein, 7 aa, synthetic construct
QYATGRI

SEQ ID NO: 102633 - protein, 7 aa, synthetic construct
YRDNRDY

SEQ ID NO: 102634 - protein, 7 aa, synthetic construct
SGPERGA

SEQ ID NO: 102635 - protein, 7 aa, synthetic construct
YDQEAKP

SEQ ID NO: 102636 - protein, 7 aa, synthetic construct
DHFHQLK

SEQ ID NO: 102637 - protein, 7 aa, synthetic construct
DFSVNVA

SEQ ID NO: 102638 - protein, 7 aa, synthetic construct
LEGHFSN

SEQ ID NO: 102639 - protein, 7 aa, synthetic construct
KATGTNA

SEQ ID NO: 102640 - protein, 7 aa, synthetic construct
HHEIAVA

SEQ ID NO: 102641 - protein, 7 aa, synthetic construct
SHYPNRS

SEQ ID NO: 102642 - protein, 7 aa, synthetic construct
YVGYTSM

SEQ ID NO: 102643 - protein, 7 aa, synthetic construct
LNTMLQD

SEQ ID NO: 102644 - protein, 7 aa, synthetic construct
TFMKITE

SEQ ID NO: 102645 - protein, 7 aa, synthetic construct
AKGTTGG

SEQ ID NO: 102646 - protein, 7 aa, synthetic construct
NTPQFPL

SEQ ID NO: 102647 - protein, 7 aa, synthetic construct
MNPLADN

SEQ ID NO: 102648 - protein, 7 aa, synthetic construct
IPLVVTE

SEQ ID NO: 102649 - protein, 7 aa, synthetic construct
TQHGSNN

SEQ ID NO: 102650 - protein, 7 aa, synthetic construct
GPTQLVA

SEQ ID NO: 102651 - protein, 7 aa, synthetic construct
AKPTGLS

SEQ ID NO: 102652 - protein, 7 aa, synthetic construct
DHMTSKI

SEQ ID NO: 102653 - protein, 7 aa, synthetic construct
DKTYPMM

SEQ ID NO: 102654 - protein, 7 aa, synthetic construct
YASAEPR

SEQ ID NO: 102655 - protein, 7 aa, synthetic construct
VMSVAVD

SEQ ID NO: 102656 - protein, 7 aa, synthetic construct
MSSLRLP

SEQ ID NO: 102657 - protein, 7 aa, synthetic construct
MTHHDVS

SEQ ID NO: 102658 - protein, 7 aa, synthetic construct
DDRLTQK

SEQ ID NO: 102659 - protein, 7 aa, synthetic construct
IKPDSHL

SEQ ID NO: 102660 - protein, 7 aa, synthetic construct
TQRHGFN

SEQ ID NO: 102661 - protein, 7 aa, synthetic construct
GILNSGL

SEQ ID NO: 102662 - protein, 7 aa, synthetic construct
KGDGGKL

SEQ ID NO: 102663 - protein, 7 aa, synthetic construct
KEDWKYE

SEQ ID NO: 102664 - protein, 7 aa, synthetic construct
YANASKG

SEQ ID NO: 102665 - protein, 7 aa, synthetic construct
GREVPAS

SEQ ID NO: 102666 - protein, 7 aa, synthetic construct
PPQLHIP

SEQ ID NO: 102667 - protein, 7 aa, synthetic construct
LADYSSH

SEQ ID NO: 102668 - protein, 7 aa, synthetic construct
IMEVVAG

SEQ ID NO: 102669 - protein, 7 aa, synthetic construct
EEKGQWH

SEQ ID NO: 102670 - protein, 7 aa, synthetic construct
YRFMEAE

SEQ ID NO: 102671 - protein, 7 aa, synthetic construct
FPPPVLG

SEQ ID NO: 102672 - protein, 7 aa, synthetic construct
NINLEFK

SEQ ID NO: 102673 - protein, 7 aa, synthetic construct
TKTYGVE

SEQ ID NO: 102674 - protein, 7 aa, synthetic construct
PGAHIMI

SEQ ID NO: 102675 - protein, 7 aa, synthetic construct
AQLNRDM

SEQ ID NO: 102676 - protein, 7 aa, synthetic construct
RSETPAF

SEQ ID NO: 102677 - protein, 7 aa, synthetic construct
NTNVMAV

SEQ ID NO: 102678 - protein, 7 aa, synthetic construct
APRMSMI

SEQ ID NO: 102679 - protein, 7 aa, synthetic construct
DHEFYVK

SEQ ID NO: 102680 - protein, 7 aa, synthetic construct
DAVSLRS

SEQ ID NO: 102681 - protein, 7 aa, synthetic construct
HNDHMAF

SEQ ID NO: 102682 - protein, 7 aa, synthetic construct
NTKNQNA

SEQ ID NO: 102683 - protein, 7 aa, synthetic construct
NKGSPMA

SEQ ID NO: 102684 - protein, 7 aa, synthetic construct
QRNDGNK

SEQ ID NO: 102685 - protein, 7 aa, synthetic construct
PNKPREA

SEQ ID NO: 102686 - protein, 7 aa, synthetic construct
NVPHENW

SEQ ID NO: 102687 - protein, 7 aa, synthetic construct
GVRTSAP

SEQ ID NO: 102688 - protein, 7 aa, synthetic construct
MPNSNLW

SEQ ID NO: 102689 - protein, 7 aa, synthetic construct
TLVHQES

SEQ ID NO: 102690 - protein, 7 aa, synthetic construct
QRQYAAV

SEQ ID NO: 102691 - protein, 7 aa, synthetic construct
DQYRPAA

SEQ ID NO: 102692 - protein, 7 aa, synthetic construct
PVQKSII

SEQ ID NO: 102693 - protein, 7 aa, synthetic construct
EGRDSIG

SEQ ID NO: 102694 - protein, 7 aa, synthetic construct
VRMQHFE

SEQ ID NO: 102695 - protein, 7 aa, synthetic construct
TPNHMYV

SEQ ID NO: 102696 - protein, 7 aa, synthetic construct
STGLIQL

SEQ ID NO: 102697 - protein, 7 aa, synthetic construct
FAGPKFS

SEQ ID NO: 102698 - protein, 7 aa, synthetic construct
RGEPDRS

SEQ ID NO: 102699 - protein, 7 aa, synthetic construct
NFRELTE

SEQ ID NO: 102700 - protein, 7 aa, synthetic construct
PSRHVTE

SEQ ID NO: 102701 - protein, 7 aa, synthetic construct
NREMVRD

SEQ ID NO: 102702 - protein, 7 aa, synthetic construct
QEGMRVD

SEQ ID NO: 102703 - protein, 7 aa, synthetic construct
ESQRGEG

SEQ ID NO: 102704 - protein, 7 aa, synthetic construct
TKGSYLD

SEQ ID NO: 102705 - protein, 7 aa, synthetic construct
QAYPVGG

SEQ ID NO: 102706 - protein, 7 aa, synthetic construct
GHPIHLK

SEQ ID NO: 102707 - protein, 7 aa, synthetic construct
GPIDFRP

SEQ ID NO: 102708 - protein, 7 aa, synthetic construct
GTAPMGV

SEQ ID NO: 102709 - protein, 7 aa, synthetic construct
QPKIPNT

SEQ ID NO: 102710 - protein, 7 aa, synthetic construct
IPSNVGG

SEQ ID NO: 102711 - protein, 7 aa, synthetic construct
HQHSPYT

SEQ ID NO: 102712 - protein, 7 aa, synthetic construct
NMHPKMI

SEQ ID NO: 102713 - protein, 7 aa, synthetic construct
YRTLEHQ

SEQ ID NO: 102714 - protein, 7 aa, synthetic construct
WTANAGQ

SEQ ID NO: 102715 - protein, 7 aa, synthetic construct
DRAHSQG

SEQ ID NO: 102716 - protein, 7 aa, synthetic construct
DIPNPKL

SEQ ID NO: 102717 - protein, 7 aa, synthetic construct
HHMGVLD

SEQ ID NO: 102718 - protein, 7 aa, synthetic construct
LGFKPEH

SEQ ID NO: 102719 - protein, 7 aa, synthetic construct
MRGGANT

SEQ ID NO: 102720 - protein, 7 aa, synthetic construct
TNVIEKM

SEQ ID NO: 102721 - protein, 7 aa, synthetic construct
MKNSAGA

SEQ ID NO: 102722 - protein, 7 aa, synthetic construct
SIEKSNI

SEQ ID NO: 102723 - protein, 7 aa, synthetic construct
IQRTAFV

SEQ ID NO: 102724 - protein, 7 aa, synthetic construct
NKTVVEV

SEQ ID NO: 102725 - protein, 7 aa, synthetic construct
HPNNEPA

SEQ ID NO: 102726 - protein, 7 aa, synthetic construct
TPHTLDT

SEQ ID NO: 102727 - protein, 7 aa, synthetic construct
VHAGPNK

SEQ ID NO: 102728 - protein, 7 aa, synthetic construct
EDKKRLD

SEQ ID NO: 102729 - protein, 7 aa, synthetic construct
LDRSATD

SEQ ID NO: 102730 - protein, 7 aa, synthetic construct
TSAGMTI

SEQ ID NO: 102731 - protein, 7 aa, synthetic construct
VKPPPFD

SEQ ID NO: 102732 - protein, 7 aa, synthetic construct
KIEHPFN

SEQ ID NO: 102733 - protein, 7 aa, synthetic construct
DARSGVM

SEQ ID NO: 102734 - protein, 7 aa, synthetic construct
YGTLRFS

SEQ ID NO: 102735 - protein, 7 aa, synthetic construct
VGRPSMD

SEQ ID NO: 102736 - protein, 7 aa, synthetic construct
IRSEHSD

SEQ ID NO: 102737 - protein, 7 aa, synthetic construct
QVRTEFN

SEQ ID NO: 102738 - protein, 7 aa, synthetic construct
MERQNPM

SEQ ID NO: 102739 - protein, 7 aa, synthetic construct
SRSMPTI

SEQ ID NO: 102740 - protein, 7 aa, synthetic construct
GMHNAYP

SEQ ID NO: 102741 - protein, 7 aa, synthetic construct
AFDVIAG

SEQ ID NO: 102742 - protein, 7 aa, synthetic construct
SNKENEK

SEQ ID NO: 102743 - protein, 7 aa, synthetic construct
KMRDHYM

SEQ ID NO: 102744 - protein, 7 aa, synthetic construct
TLIGSPV

SEQ ID NO: 102745 - protein, 7 aa, synthetic construct
TKQMGYP

SEQ ID NO: 102746 - protein, 7 aa, synthetic construct
TATSHIT

SEQ ID NO: 102747 - protein, 7 aa, synthetic construct
QQPNIPK

SEQ ID NO: 102748 - protein, 7 aa, synthetic construct
AVKTTAS

SEQ ID NO: 102749 - protein, 7 aa, synthetic construct
IHIGLSP

SEQ ID NO: 102750 - protein, 7 aa, synthetic construct
IAIRMND

SEQ ID NO: 102751 - protein, 7 aa, synthetic construct
SSPHQDM

SEQ ID NO: 102752 - protein, 7 aa, synthetic construct
QHEGHTH

SEQ ID NO: 102753 - protein, 7 aa, synthetic construct
YAINTGG

SEQ ID NO: 102754 - protein, 7 aa, synthetic construct
QIPEHGY

SEQ ID NO: 102755 - protein, 7 aa, synthetic construct
MLQTAPT

SEQ ID NO: 102756 - protein, 7 aa, synthetic construct
NMAKNVT

SEQ ID NO: 102757 - protein, 7 aa, synthetic construct
HEYRAIT

SEQ ID NO: 102758 - protein, 7 aa, synthetic construct
ENTWKQP

SEQ ID NO: 102759 - protein, 7 aa, synthetic construct
WSVALQG

SEQ ID NO: 102760 - protein, 7 aa, synthetic construct
AMYKENT

SEQ ID NO: 102761 - protein, 7 aa, synthetic construct
PYKIDMI

SEQ ID NO: 102762 - protein, 7 aa, synthetic construct
ITQMPHR

SEQ ID NO: 102763 - protein, 7 aa, synthetic construct
WSHKHQM

SEQ ID NO: 102764 - protein, 7 aa, synthetic construct
AEGKDWI

SEQ ID NO: 102765 - protein, 7 aa, synthetic construct
YILKSND

SEQ ID NO: 102766 - protein, 7 aa, synthetic construct
KIMPHPN

SEQ ID NO: 102767 - protein, 7 aa, synthetic construct
KLSLSHL

SEQ ID NO: 102768 - protein, 7 aa, synthetic construct
GAHMIQD

SEQ ID NO: 102769 - protein, 7 aa, synthetic construct
PPANTDR

SEQ ID NO: 102770 - protein, 7 aa, synthetic construct
TKEQDWT

SEQ ID NO: 102771 - protein, 7 aa, synthetic construct
DSSKMPL

SEQ ID NO: 102772 - protein, 7 aa, synthetic construct
GTRGFNT

SEQ ID NO: 102773 - protein, 7 aa, synthetic construct
AQNTAKD

SEQ ID NO: 102774 - protein, 7 aa, synthetic construct
LVNHHAN

SEQ ID NO: 102775 - protein, 7 aa, synthetic construct
LPSGNVV

SEQ ID NO: 102776 - protein, 7 aa, synthetic construct
IQMAHRD

SEQ ID NO: 102777 - protein, 7 aa, synthetic construct
PNVVLNK

SEQ ID NO: 102778 - protein, 7 aa, synthetic construct
LKIDHHS

SEQ ID NO: 102779 - protein, 7 aa, synthetic construct
DLSGMHV

SEQ ID NO: 102780 - protein, 7 aa, synthetic construct
MMDKTQL

SEQ ID NO: 102781 - protein, 7 aa, synthetic construct
TGAQHHR

SEQ ID NO: 102782 - protein, 7 aa, synthetic construct
KDFNGDV

SEQ ID NO: 102783 - protein, 7 aa, synthetic construct
MLGVMGD

SEQ ID NO: 102784 - protein, 7 aa, synthetic construct
DAYNASK

SEQ ID NO: 102785 - protein, 7 aa, synthetic construct
GMKNSMA

SEQ ID NO: 102786 - protein, 7 aa, synthetic construct
NDAISKK

SEQ ID NO: 102787 - protein, 7 aa, synthetic construct
WITKTQH

SEQ ID NO: 102788 - protein, 7 aa, synthetic construct
FADKLLA

SEQ ID NO: 102789 - protein, 7 aa, synthetic construct
PVAIRTP

SEQ ID NO: 102790 - protein, 7 aa, synthetic construct
LLPPIQA

SEQ ID NO: 102791 - protein, 7 aa, synthetic construct
NFEKPRP

SEQ ID NO: 102792 - protein, 7 aa, synthetic construct
LQKMQDM

SEQ ID NO: 102793 - protein, 7 aa, synthetic construct
WNATHSI

SEQ ID NO: 102794 - protein, 7 aa, synthetic construct
PEGPIGK

SEQ ID NO: 102795 - protein, 7 aa, synthetic construct
IGNAKTG

SEQ ID NO: 102796 - protein, 7 aa, synthetic construct
TKAFSKE

SEQ ID NO: 102797 - protein, 7 aa, synthetic construct
RAVTSDQ

SEQ ID NO: 102798 - protein, 7 aa, synthetic construct
LGGGQGN

SEQ ID NO: 102799 - protein, 7 aa, synthetic construct
WNAANPR

SEQ ID NO: 102800 - protein, 7 aa, synthetic construct
PIGKNDL

SEQ ID NO: 102801 - protein, 7 aa, synthetic construct
RFQSDAL

SEQ ID NO: 102802 - protein, 7 aa, synthetic construct
HFSSTAL

SEQ ID NO: 102803 - protein, 7 aa, synthetic construct
FYDKNRH

SEQ ID NO: 102804 - protein, 7 aa, synthetic construct
GTMKHDA

SEQ ID NO: 102805 - protein, 7 aa, synthetic construct
HWEKVDH

SEQ ID NO: 102806 - protein, 7 aa, synthetic construct
PHPPYGV

SEQ ID NO: 102807 - protein, 7 aa, synthetic construct
FKIQDPS

SEQ ID NO: 102808 - protein, 7 aa, synthetic construct
IHRSVAE

SEQ ID NO: 102809 - protein, 7 aa, synthetic construct
SIPVHGR

SEQ ID NO: 102810 - protein, 7 aa, synthetic construct
VLETHLP

SEQ ID NO: 102811 - protein, 7 aa, synthetic construct
MQNAIEG

SEQ ID NO: 102812 - protein, 7 aa, synthetic construct
FDIKGLN

SEQ ID NO: 102813 - protein, 7 aa, synthetic construct
RTLNIPN

SEQ ID NO: 102814 - protein, 7 aa, synthetic construct
SEFHALS

SEQ ID NO: 102815 - protein, 7 aa, synthetic construct
AANKMMS

SEQ ID NO: 102816 - protein, 7 aa, synthetic construct
PIVKLNT

SEQ ID NO: 102817 - protein, 7 aa, synthetic construct
SGPVGPY

SEQ ID NO: 102818 - protein, 7 aa, synthetic construct
PAYTKMI

SEQ ID NO: 102819 - protein, 7 aa, synthetic construct
GDYIQQV

SEQ ID NO: 102820 - protein, 7 aa, synthetic construct
NKDVQLS

SEQ ID NO: 102821 - protein, 7 aa, synthetic construct
KIEHIGQ

SEQ ID NO: 102822 - protein, 7 aa, synthetic construct
MQHQNGH

SEQ ID NO: 102823 - protein, 7 aa, synthetic construct
TSHRMKE

SEQ ID NO: 102824 - protein, 7 aa, synthetic construct
QHHIPNK

SEQ ID NO: 102825 - protein, 7 aa, synthetic construct
TGDLWKE

SEQ ID NO: 102826 - protein, 7 aa, synthetic construct
KNNEGKT

SEQ ID NO: 102827 - protein, 7 aa, synthetic construct
TFMNAKG

SEQ ID NO: 102828 - protein, 7 aa, synthetic construct
RMRDVST

SEQ ID NO: 102829 - protein, 7 aa, synthetic construct
SVPPKAS

SEQ ID NO: 102830 - protein, 7 aa, synthetic construct
HLMSEKP

SEQ ID NO: 102831 - protein, 7 aa, synthetic construct
HADPASH

SEQ ID NO: 102832 - protein, 7 aa, synthetic construct
MARAHFE

SEQ ID NO: 102833 - protein, 7 aa, synthetic construct
FLHTSNV

SEQ ID NO: 102834 - protein, 7 aa, synthetic construct
PMRLNSP

SEQ ID NO: 102835 - protein, 7 aa, synthetic construct
YESGHGL

SEQ ID NO: 102836 - protein, 7 aa, synthetic construct
KYNETIW

SEQ ID NO: 102837 - protein, 7 aa, synthetic construct
MGTHLID

SEQ ID NO: 102838 - protein, 7 aa, synthetic construct
RDMHRAM

SEQ ID NO: 102839 - protein, 7 aa, synthetic construct
QQHARLL

SEQ ID NO: 102840 - protein, 7 aa, synthetic construct
PQAPARQ

SEQ ID NO: 102841 - protein, 7 aa, synthetic construct
FHSNVDA

SEQ ID NO: 102842 - protein, 7 aa, synthetic construct
SATHPQL

SEQ ID NO: 102843 - protein, 7 aa, synthetic construct
KEGAAGN

SEQ ID NO: 102844 - protein, 7 aa, synthetic construct
IFKQVGQ

SEQ ID NO: 102845 - protein, 7 aa, synthetic construct
KDIQEQA

SEQ ID NO: 102846 - protein, 7 aa, synthetic construct
KTEWMPN

SEQ ID NO: 102847 - protein, 7 aa, synthetic construct
IMASEHM

SEQ ID NO: 102848 - protein, 7 aa, synthetic construct
QVKLALN

SEQ ID NO: 102849 - protein, 7 aa, synthetic construct
QTNKTQV

SEQ ID NO: 102850 - protein, 7 aa, synthetic construct
RQFEEGT

SEQ ID NO: 102851 - protein, 7 aa, synthetic construct
RDLAGVE

SEQ ID NO: 102852 - protein, 7 aa, synthetic construct
TPSFFKD

SEQ ID NO: 102853 - protein, 7 aa, synthetic construct
NFIGPQM

SEQ ID NO: 102854 - protein, 7 aa, synthetic construct
HSDKVNH

SEQ ID NO: 102855 - protein, 7 aa, synthetic construct
YLQDLKQ

SEQ ID NO: 102856 - protein, 7 aa, synthetic construct
NGLSDKS

SEQ ID NO: 102857 - protein, 7 aa, synthetic construct
INKPEWS

SEQ ID NO: 102858 - protein, 7 aa, synthetic construct
AIRFNDA

SEQ ID NO: 102859 - protein, 7 aa, synthetic construct
VAVQALK

SEQ ID NO: 102860 - protein, 7 aa, synthetic construct
HQMSDVA

SEQ ID NO: 102861 - protein, 7 aa, synthetic construct
GIRVPPH

SEQ ID NO: 102862 - protein, 7 aa, synthetic construct
LMEIHAG

SEQ ID NO: 102863 - protein, 7 aa, synthetic construct
ARDTARG

SEQ ID NO: 102864 - protein, 7 aa, synthetic construct
ELKMPSR

SEQ ID NO: 102865 - protein, 7 aa, synthetic construct
LQRMVHS

SEQ ID NO: 102866 - protein, 7 aa, synthetic construct
RYNSMED

SEQ ID NO: 102867 - protein, 7 aa, synthetic construct
HIHMAHM

SEQ ID NO: 102868 - protein, 7 aa, synthetic construct
EGVYHNP

SEQ ID NO: 102869 - protein, 7 aa, synthetic construct
LTDYRHS

SEQ ID NO: 102870 - protein, 7 aa, synthetic construct
HGVMFAA

SEQ ID NO: 102871 - protein, 7 aa, synthetic construct
HSLIFHE

SEQ ID NO: 102872 - protein, 7 aa, synthetic construct
VPMPKIS

SEQ ID NO: 102873 - protein, 7 aa, synthetic construct
GKDGFEG

SEQ ID NO: 102874 - protein, 7 aa, synthetic construct
NRSMLHS

SEQ ID NO: 102875 - protein, 7 aa, synthetic construct
FYNDHKQ

SEQ ID NO: 102876 - protein, 7 aa, synthetic construct
HMVPSTQ

SEQ ID NO: 102877 - protein, 7 aa, synthetic construct
ALMGRPH

SEQ ID NO: 102878 - protein, 7 aa, synthetic construct
FVPKVNH

SEQ ID NO: 102879 - protein, 7 aa, synthetic construct
EPRPRGF

SEQ ID NO: 102880 - protein, 7 aa, synthetic construct
WTNNEAV

SEQ ID NO: 102881 - protein, 7 aa, synthetic construct
QHRPTYP

SEQ ID NO: 102882 - protein, 7 aa, synthetic construct
GLELTRD

SEQ ID NO: 102883 - protein, 7 aa, synthetic construct
MEKKIMP

SEQ ID NO: 102884 - protein, 7 aa, synthetic construct
GLSKAPY

SEQ ID NO: 102885 - protein, 7 aa, synthetic construct
GWGPHIE

SEQ ID NO: 102886 - protein, 7 aa, synthetic construct
SNTTAIH

SEQ ID NO: 102887 - protein, 7 aa, synthetic construct
GNADKRM

SEQ ID NO: 102888 - protein, 7 aa, synthetic construct
LGLANER

SEQ ID NO: 102889 - protein, 7 aa, synthetic construct
TKHTDHP

SEQ ID NO: 102890 - protein, 7 aa, synthetic construct
MEELTRG

SEQ ID NO: 102891 - protein, 7 aa, synthetic construct
TIHYEGN

SEQ ID NO: 102892 - protein, 7 aa, synthetic construct
TDFPNDP

SEQ ID NO: 102893 - protein, 7 aa, synthetic construct
IKNGGMC

SEQ ID NO: 102894 - protein, 7 aa, synthetic construct
AWQSTDI

SEQ ID NO: 102895 - protein, 7 aa, synthetic construct
YESLQGH

SEQ ID NO: 102896 - protein, 7 aa, synthetic construct
NYASDFK

SEQ ID NO: 102897 - protein, 7 aa, synthetic construct
PPKGTLY

SEQ ID NO: 102898 - protein, 7 aa, synthetic construct
LDAGKNQ

SEQ ID NO: 102899 - protein, 7 aa, synthetic construct
SRSDKYF

SEQ ID NO: 102900 - protein, 7 aa, synthetic construct
VVKERQM

SEQ ID NO: 102901 - protein, 7 aa, synthetic construct
VVQTSTY

SEQ ID NO: 102902 - protein, 7 aa, synthetic construct
ISVIGHV

SEQ ID NO: 102903 - protein, 7 aa, synthetic construct
LKDFGII

SEQ ID NO: 102904 - protein, 7 aa, synthetic construct
VLTKMNP

SEQ ID NO: 102905 - protein, 7 aa, synthetic construct
AAHGVVK

SEQ ID NO: 102906 - protein, 7 aa, synthetic construct
VRNMHAQ

SEQ ID NO: 102907 - protein, 7 aa, synthetic construct
MQPPEHK

SEQ ID NO: 102908 - protein, 7 aa, synthetic construct
RPLPEAN

SEQ ID NO: 102909 - protein, 7 aa, synthetic construct
QKQTTNA

SEQ ID NO: 102910 - protein, 7 aa, synthetic construct
PTGYQRV

SEQ ID NO: 102911 - protein, 7 aa, synthetic construct
MKMFEKD

SEQ ID NO: 102912 - protein, 7 aa, synthetic construct
KAINPDF

SEQ ID NO: 102913 - protein, 7 aa, synthetic construct
HSKKFLD

SEQ ID NO: 102914 - protein, 7 aa, synthetic construct
WINARDD

SEQ ID NO: 102915 - protein, 7 aa, synthetic construct
RKKDADG

SEQ ID NO: 102916 - protein, 7 aa, synthetic construct
RQNSHFI

SEQ ID NO: 102917 - protein, 7 aa, synthetic construct
PEHRNFA

SEQ ID NO: 102918 - protein, 7 aa, synthetic construct
SDSHYKN

SEQ ID NO: 102919 - protein, 7 aa, synthetic construct
RSHSYES

SEQ ID NO: 102920 - protein, 7 aa, synthetic construct
GNVPKSY

SEQ ID NO: 102921 - protein, 7 aa, synthetic construct
GFLHRQD

SEQ ID NO: 102922 - protein, 7 aa, synthetic construct
AHSRPQS

SEQ ID NO: 102923 - protein, 7 aa, synthetic construct
LQGPKGL

SEQ ID NO: 102924 - protein, 7 aa, synthetic construct
NVKMQAP

SEQ ID NO: 102925 - protein, 7 aa, synthetic construct
FDVLKLP

SEQ ID NO: 102926 - protein, 7 aa, synthetic construct
PRRTMES

SEQ ID NO: 102927 - protein, 7 aa, synthetic construct
TDKSRNG

SEQ ID NO: 102928 - protein, 7 aa, synthetic construct
ANPIRFE

SEQ ID NO: 102929 - protein, 7 aa, synthetic construct
AQKGTFV

SEQ ID NO: 102930 - protein, 7 aa, synthetic construct
DFNVSIG

SEQ ID NO: 102931 - protein, 7 aa, synthetic construct
RHENYQY

SEQ ID NO: 102932 - protein, 7 aa, synthetic construct
HNLNADQ

SEQ ID NO: 102933 - protein, 7 aa, synthetic construct
QGTSLGL

SEQ ID NO: 102934 - protein, 7 aa, synthetic construct
LTDQLRP

SEQ ID NO: 102935 - protein, 7 aa, synthetic construct
KFDVSIA

SEQ ID NO: 102936 - protein, 7 aa, synthetic construct
VNGGKFM

SEQ ID NO: 102937 - protein, 7 aa, synthetic construct
RNHQGPT

SEQ ID NO: 102938 - protein, 7 aa, synthetic construct
QNAPAGF

SEQ ID NO: 102939 - protein, 7 aa, synthetic construct
NPTHQEM

SEQ ID NO: 102940 - protein, 7 aa, synthetic construct
QDRRMEN

SEQ ID NO: 102941 - protein, 7 aa, synthetic construct
FQEHRNL

SEQ ID NO: 102942 - protein, 7 aa, synthetic construct
PQNPART

SEQ ID NO: 102943 - protein, 7 aa, synthetic construct
TQDNANF

SEQ ID NO: 102944 - protein, 7 aa, synthetic construct
GHRMSTL

SEQ ID NO: 102945 - protein, 7 aa, synthetic construct
FSRTTMD

SEQ ID NO: 102946 - protein, 7 aa, synthetic construct
PFDKPIH

SEQ ID NO: 102947 - protein, 7 aa, synthetic construct
RPHLHEQ

SEQ ID NO: 102948 - protein, 7 aa, synthetic construct
DKAKGPI

SEQ ID NO: 102949 - protein, 7 aa, synthetic construct
NMFQNSP

SEQ ID NO: 102950 - protein, 7 aa, synthetic construct
SAPHFHT

SEQ ID NO: 102951 - protein, 7 aa, synthetic construct
TLGDHNK

SEQ ID NO: 102952 - protein, 7 aa, synthetic construct
AGIPKPQ

SEQ ID NO: 102953 - protein, 7 aa, synthetic construct
KNGYGFE

SEQ ID NO: 102954 - protein, 7 aa, synthetic construct
YEKFPDK

SEQ ID NO: 102955 - protein, 7 aa, synthetic construct
NLVMTHG

SEQ ID NO: 102956 - protein, 7 aa, synthetic construct
MGYDGSK

SEQ ID NO: 102957 - protein, 7 aa, synthetic construct
QSMQHTS

SEQ ID NO: 102958 - protein, 7 aa, synthetic construct
QTLTRDN

SEQ ID NO: 102959 - protein, 7 aa, synthetic construct
GHLNMGL

SEQ ID NO: 102960 - protein, 7 aa, synthetic construct
QDNLLAA

SEQ ID NO: 102961 - protein, 7 aa, synthetic construct
SRNSNIT

SEQ ID NO: 102962 - protein, 7 aa, synthetic construct
WQGSSIE

SEQ ID NO: 102963 - protein, 7 aa, synthetic construct
HQSMNSH

SEQ ID NO: 102964 - protein, 7 aa, synthetic construct
KMAGIHI

SEQ ID NO: 102965 - protein, 7 aa, synthetic construct
SMYKNPH

SEQ ID NO: 102966 - protein, 7 aa, synthetic construct
EQHPQQY

SEQ ID NO: 102967 - protein, 7 aa, synthetic construct
PSRNSNP

SEQ ID NO: 102968 - protein, 7 aa, synthetic construct
LKQAWHG

SEQ ID NO: 102969 - protein, 7 aa, synthetic construct
NFTANND

SEQ ID NO: 102970 - protein, 7 aa, synthetic construct
GQRFRDD

SEQ ID NO: 102971 - protein, 7 aa, synthetic construct
TESVKAN

SEQ ID NO: 102972 - protein, 7 aa, synthetic construct
HGASMAH

SEQ ID NO: 102973 - protein, 7 aa, synthetic construct
YMVKVTP

SEQ ID NO: 102974 - protein, 7 aa, synthetic construct
WTHTQGG

SEQ ID NO: 102975 - protein, 7 aa, synthetic construct
PNVHDMT

SEQ ID NO: 102976 - protein, 7 aa, synthetic construct
SRLNADP

SEQ ID NO: 102977 - protein, 7 aa, synthetic construct
AGDSRLE

SEQ ID NO: 102978 - protein, 7 aa, synthetic construct
NISMQKV

SEQ ID NO: 102979 - protein, 7 aa, synthetic construct
KQMNIHM

SEQ ID NO: 102980 - protein, 7 aa, synthetic construct
DMTKRTW

SEQ ID NO: 102981 - protein, 7 aa, synthetic construct
SPEMRGL

SEQ ID NO: 102982 - protein, 7 aa, synthetic construct
PLKMHMP

SEQ ID NO: 102983 - protein, 7 aa, synthetic construct
WAKPIEV

SEQ ID NO: 102984 - protein, 7 aa, synthetic construct
MAQKEVI

SEQ ID NO: 102985 - protein, 7 aa, synthetic construct
PDISRNR

SEQ ID NO: 102986 - protein, 7 aa, synthetic construct
VEGKFDL

SEQ ID NO: 102987 - protein, 7 aa, synthetic construct
PGTPPNY

SEQ ID NO: 102988 - protein, 7 aa, synthetic construct
DRTMEGA

SEQ ID NO: 102989 - protein, 7 aa, synthetic construct
NYKYESS

SEQ ID NO: 102990 - protein, 7 aa, synthetic construct
ARVMDVK

SEQ ID NO: 102991 - protein, 7 aa, synthetic construct
RIEAYTT

SEQ ID NO: 102992 - protein, 7 aa, synthetic construct
NQHNHAE

SEQ ID NO: 102993 - protein, 7 aa, synthetic construct
DNRMLLG

SEQ ID NO: 102994 - protein, 7 aa, synthetic construct
SGNHAKY

SEQ ID NO: 102995 - protein, 7 aa, synthetic construct
LGVQQAD

SEQ ID NO: 102996 - protein, 7 aa, synthetic construct
WMKDPVD

SEQ ID NO: 102997 - protein, 7 aa, synthetic construct
RNHFDPT

SEQ ID NO: 102998 - protein, 7 aa, synthetic construct
HQRKTLE

SEQ ID NO: 102999 - protein, 7 aa, synthetic construct
MHRVNAM

SEQ ID NO: 103000 - protein, 7 aa, synthetic construct
FVNPENN

SEQ ID NO: 103001 - protein, 7 aa, synthetic construct
GKPLESM

SEQ ID NO: 103002 - protein, 7 aa, synthetic construct
KEEYKEG

SEQ ID NO: 103003 - protein, 7 aa, synthetic construct
QNNQPFR

SEQ ID NO: 103004 - protein, 7 aa, synthetic construct
SNNVSVW

SEQ ID NO: 103005 - protein, 7 aa, synthetic construct
PITYEGS

SEQ ID NO: 103006 - protein, 7 aa, synthetic construct
YANGDNG

SEQ ID NO: 103007 - protein, 7 aa, synthetic construct
SLETKYM

SEQ ID NO: 103008 - protein, 7 aa, synthetic construct
KDKSTRD

SEQ ID NO: 103009 - protein, 7 aa, synthetic construct
YSVHFSS

SEQ ID NO: 103010 - protein, 7 aa, synthetic construct
YHGENEH

SEQ ID NO: 103011 - protein, 7 aa, synthetic construct
RSNGLMI

SEQ ID NO: 103012 - protein, 7 aa, synthetic construct
GHDSVKD

SEQ ID NO: 103013 - protein, 7 aa, synthetic construct
EQSRIPP

SEQ ID NO: 103014 - protein, 7 aa, synthetic construct
NFRDRVD

SEQ ID NO: 103015 - protein, 7 aa, synthetic construct
PTQTIIG

SEQ ID NO: 103016 - protein, 7 aa, synthetic construct
PEQHFRG

SEQ ID NO: 103017 - protein, 7 aa, synthetic construct
KTANPSG

SEQ ID NO: 103018 - protein, 7 aa, synthetic construct
HTSQQPA

SEQ ID NO: 103019 - protein, 7 aa, synthetic construct
KLSMNFA

SEQ ID NO: 103020 - protein, 7 aa, synthetic construct
WGAVMHA

SEQ ID NO: 103021 - protein, 7 aa, synthetic construct
TLNSPEV

SEQ ID NO: 103022 - protein, 7 aa, synthetic construct
HQKPMQL

SEQ ID NO: 103023 - protein, 7 aa, synthetic construct
PMAVGGE

SEQ ID NO: 103024 - protein, 7 aa, synthetic construct
MAHPNGE

SEQ ID NO: 103025 - protein, 7 aa, synthetic construct
SAMYTEI

SEQ ID NO: 103026 - protein, 7 aa, synthetic construct
RNPERPD

SEQ ID NO: 103027 - protein, 7 aa, synthetic construct
SKATGLQ

SEQ ID NO: 103028 - protein, 7 aa, synthetic construct
DPRDVTP

SEQ ID NO: 103029 - protein, 7 aa, synthetic construct
IAEKDSP

SEQ ID NO: 103030 - protein, 7 aa, synthetic construct
FKTRNEH

SEQ ID NO: 103031 - protein, 7 aa, synthetic construct
QEFAQMS

SEQ ID NO: 103032 - protein, 7 aa, synthetic construct
FIDRTEM

SEQ ID NO: 103033 - protein, 7 aa, synthetic construct
AETFSAV

SEQ ID NO: 103034 - protein, 7 aa, synthetic construct
QSVKLIT

SEQ ID NO: 103035 - protein, 7 aa, synthetic construct
AQSVLHE

SEQ ID NO: 103036 - protein, 7 aa, synthetic construct
YKPKYIE

SEQ ID NO: 103037 - protein, 7 aa, synthetic construct
SQKWDDT

SEQ ID NO: 103038 - protein, 7 aa, synthetic construct
YIGNSTE

SEQ ID NO: 103039 - protein, 7 aa, synthetic construct
MYHDKNR

SEQ ID NO: 103040 - protein, 7 aa, synthetic construct
VNGSLGI

SEQ ID NO: 103041 - protein, 7 aa, synthetic construct
KVAVLNH

SEQ ID NO: 103042 - protein, 7 aa, synthetic construct
KVTEYES

SEQ ID NO: 103043 - protein, 7 aa, synthetic construct
VNTFMLD

SEQ ID NO: 103044 - protein, 7 aa, synthetic construct
PTRQGTA

SEQ ID NO: 103045 - protein, 7 aa, synthetic construct
EKFSGAL

SEQ ID NO: 103046 - protein, 7 aa, synthetic construct
AQIKPQE

SEQ ID NO: 103047 - protein, 7 aa, synthetic construct
KFPVVDP

SEQ ID NO: 103048 - protein, 7 aa, synthetic construct
SKQDNKF

SEQ ID NO: 103049 - protein, 7 aa, synthetic construct
PKDSIKP

SEQ ID NO: 103050 - protein, 7 aa, synthetic construct
RVLDDRY

SEQ ID NO: 103051 - protein, 7 aa, synthetic construct
HVHTMKD

SEQ ID NO: 103052 - protein, 7 aa, synthetic construct
LERHDWV

SEQ ID NO: 103053 - protein, 7 aa, synthetic construct
GFEGVSS

SEQ ID NO: 103054 - protein, 7 aa, synthetic construct
SLVNNMM

SEQ ID NO: 103055 - protein, 7 aa, synthetic construct
TPAAPLI

SEQ ID NO: 103056 - protein, 7 aa, synthetic construct
GLQMMMS

SEQ ID NO: 103057 - protein, 7 aa, synthetic construct
PPGAKFP

SEQ ID NO: 103058 - protein, 7 aa, synthetic construct
YQPRGHL

SEQ ID NO: 103059 - protein, 7 aa, synthetic construct
TTNDRSK

SEQ ID NO: 103060 - protein, 7 aa, synthetic construct
RDNQPAW

SEQ ID NO: 103061 - protein, 7 aa, synthetic construct
NKTKDFY

SEQ ID NO: 103062 - protein, 7 aa, synthetic construct
VFEFEQG

SEQ ID NO: 103063 - protein, 7 aa, synthetic construct
KPNNAMP

SEQ ID NO: 103064 - protein, 7 aa, synthetic construct
AEKKTLG

SEQ ID NO: 103065 - protein, 7 aa, synthetic construct
LDHFHVK

SEQ ID NO: 103066 - protein, 7 aa, synthetic construct
KFNDIEK

SEQ ID NO: 103067 - protein, 7 aa, synthetic construct
HGFMQVE

SEQ ID NO: 103068 - protein, 7 aa, synthetic construct
DGKITQY

SEQ ID NO: 103069 - protein, 7 aa, synthetic construct
LMDHDRV

SEQ ID NO: 103070 - protein, 7 aa, synthetic construct
QYSHNMK

SEQ ID NO: 103071 - protein, 7 aa, synthetic construct
IVIDRQT

SEQ ID NO: 103072 - protein, 7 aa, synthetic construct
DHYNNMR

SEQ ID NO: 103073 - protein, 7 aa, synthetic construct
THGQQEM

SEQ ID NO: 103074 - protein, 7 aa, synthetic construct
PKSNAGY

SEQ ID NO: 103075 - protein, 7 aa, synthetic construct
YLAKPTA

SEQ ID NO: 103076 - protein, 7 aa, synthetic construct
VHNHYPN

SEQ ID NO: 103077 - protein, 7 aa, synthetic construct
TNAMIAR

SEQ ID NO: 103078 - protein, 7 aa, synthetic construct
KHDGVHS

SEQ ID NO: 103079 - protein, 7 aa, synthetic construct
SATQHQY

SEQ ID NO: 103080 - protein, 7 aa, synthetic construct
VHGGMFK

SEQ ID NO: 103081 - protein, 7 aa, synthetic construct
KTTPENK

SEQ ID NO: 103082 - protein, 7 aa, synthetic construct
AAKEHPW

SEQ ID NO: 103083 - protein, 7 aa, synthetic construct
NPTIAGL

SEQ ID NO: 103084 - protein, 7 aa, synthetic construct
PHGGTES

SEQ ID NO: 103085 - protein, 7 aa, synthetic construct
SSTMAHP

SEQ ID NO: 103086 - protein, 7 aa, synthetic construct
VGKDGQA

SEQ ID NO: 103087 - protein, 7 aa, synthetic construct
FEKPIIS

SEQ ID NO: 103088 - protein, 7 aa, synthetic construct
YHNNDAM

SEQ ID NO: 103089 - protein, 7 aa, synthetic construct
NKELSTI

SEQ ID NO: 103090 - protein, 7 aa, synthetic construct
LRPEIEF

SEQ ID NO: 103091 - protein, 7 aa, synthetic construct
KQHHSLN

SEQ ID NO: 103092 - protein, 7 aa, synthetic construct
QKQTAGA

SEQ ID NO: 103093 - protein, 7 aa, synthetic construct
DVFPQKD

SEQ ID NO: 103094 - protein, 7 aa, synthetic construct
AGPHIET

SEQ ID NO: 103095 - protein, 7 aa, synthetic construct
YKQAAKN

SEQ ID NO: 103096 - protein, 7 aa, synthetic construct
HTKRADM

SEQ ID NO: 103097 - protein, 7 aa, synthetic construct
NRSSEAW

SEQ ID NO: 103098 - protein, 7 aa, synthetic construct
QEMSFRA

SEQ ID NO: 103099 - protein, 7 aa, synthetic construct
KDVRDMH

SEQ ID NO: 103100 - protein, 7 aa, synthetic construct
YLKAYNS

SEQ ID NO: 103101 - protein, 7 aa, synthetic construct
AAHNSDT

SEQ ID NO: 103102 - protein, 7 aa, synthetic construct
VAPMAVR

SEQ ID NO: 103103 - protein, 7 aa, synthetic construct
TPGFGQA

SEQ ID NO: 103104 - protein, 7 aa, synthetic construct
DLLSTKM

SEQ ID NO: 103105 - protein, 7 aa, synthetic construct
KVQRDHI

SEQ ID NO: 103106 - protein, 7 aa, synthetic construct
TVPMGYA

SEQ ID NO: 103107 - protein, 7 aa, synthetic construct
AGHTSMI

SEQ ID NO: 103108 - protein, 7 aa, synthetic construct
DGTPKKF

SEQ ID NO: 103109 - protein, 7 aa, synthetic construct
MFPQGNA

SEQ ID NO: 103110 - protein, 7 aa, synthetic construct
MQINNVS

SEQ ID NO: 103111 - protein, 7 aa, synthetic construct
KTTFDPQ

SEQ ID NO: 103112 - protein, 7 aa, synthetic construct
DFYRAEK

SEQ ID NO: 103113 - protein, 7 aa, synthetic construct
PAKGQVQ

SEQ ID NO: 103114 - protein, 7 aa, synthetic construct
SSIKPDD

SEQ ID NO: 103115 - protein, 7 aa, synthetic construct
GELAIPR

SEQ ID NO: 103116 - protein, 7 aa, synthetic construct
KMGDATF

SEQ ID NO: 103117 - protein, 7 aa, synthetic construct
PYMDAKR

SEQ ID NO: 103118 - protein, 7 aa, synthetic construct
YSADNSK

SEQ ID NO: 103119 - protein, 7 aa, synthetic construct
SVKTMFA

SEQ ID NO: 103120 - protein, 7 aa, synthetic construct
VLTAEAL

SEQ ID NO: 103121 - protein, 7 aa, synthetic construct
RNYDQVS

SEQ ID NO: 103122 - protein, 7 aa, synthetic construct
QVLVARA

SEQ ID NO: 103123 - protein, 7 aa, synthetic construct
ADKKPAG

SEQ ID NO: 103124 - protein, 7 aa, synthetic construct
HGDIVAS

SEQ ID NO: 103125 - protein, 7 aa, synthetic construct
VDFKQYP

SEQ ID NO: 103126 - protein, 7 aa, synthetic construct
WGMRTNQ

SEQ ID NO: 103127 - protein, 7 aa, synthetic construct
DPIRYKT

SEQ ID NO: 103128 - protein, 7 aa, synthetic construct
LLGLTIN

SEQ ID NO: 103129 - protein, 7 aa, synthetic construct
WKVEGRL

SEQ ID NO: 103130 - protein, 7 aa, synthetic construct
HLAANMV

SEQ ID NO: 103131 - protein, 7 aa, synthetic construct
QMGVPVL

SEQ ID NO: 103132 - protein, 7 aa, synthetic construct
FGHIEYS

SEQ ID NO: 103133 - protein, 7 aa, synthetic construct
AAFKGDE

SEQ ID NO: 103134 - protein, 7 aa, synthetic construct
AHSSQSR

SEQ ID NO: 103135 - protein, 7 aa, synthetic construct
IADRTDS

SEQ ID NO: 103136 - protein, 7 aa, synthetic construct
FQTSYNG

SEQ ID NO: 103137 - protein, 7 aa, synthetic construct
DKLREPE

SEQ ID NO: 103138 - protein, 7 aa, synthetic construct
NTYGHLT

SEQ ID NO: 103139 - protein, 7 aa, synthetic construct
YLHDSHS

SEQ ID NO: 103140 - protein, 7 aa, synthetic construct
ITRPGGH

SEQ ID NO: 103141 - protein, 7 aa, synthetic construct
LFDKTHN

SEQ ID NO: 103142 - protein, 7 aa, synthetic construct
HIQQIGP

SEQ ID NO: 103143 - protein, 7 aa, synthetic construct
HNDYTTF

SEQ ID NO: 103144 - protein, 7 aa, synthetic construct
HNSEKMI

SEQ ID NO: 103145 - protein, 7 aa, synthetic construct
DSADNRY

SEQ ID NO: 103146 - protein, 7 aa, synthetic construct
PKSHMGY

SEQ ID NO: 103147 - protein, 7 aa, synthetic construct
YPNPVEK

SEQ ID NO: 103148 - protein, 7 aa, synthetic construct
DIRQTTA

SEQ ID NO: 103149 - protein, 7 aa, synthetic construct
PRASTGP

SEQ ID NO: 103150 - protein, 7 aa, synthetic construct
IRRDMAL

SEQ ID NO: 103151 - protein, 7 aa, synthetic construct
VEATHRE

SEQ ID NO: 103152 - protein, 7 aa, synthetic construct
YVTPHHD

SEQ ID NO: 103153 - protein, 7 aa, synthetic construct
TIDSPQI

SEQ ID NO: 103154 - protein, 7 aa, synthetic construct
KHQLINV

SEQ ID NO: 103155 - protein, 7 aa, synthetic construct
MRKFENL

SEQ ID NO: 103156 - protein, 7 aa, synthetic construct
IPHGQEM

SEQ ID NO: 103157 - protein, 7 aa, synthetic construct
DKLKMNP

SEQ ID NO: 103158 - protein, 7 aa, synthetic construct
YMETLVQ

SEQ ID NO: 103159 - protein, 7 aa, synthetic construct
ATKGEVA

SEQ ID NO: 103160 - protein, 7 aa, synthetic construct
TKTQNMG

SEQ ID NO: 103161 - protein, 7 aa, synthetic construct
ITVHHKQ

SEQ ID NO: 103162 - protein, 7 aa, synthetic construct
LSQQPVH

SEQ ID NO: 103163 - protein, 7 aa, synthetic construct
ILNTNDM

SEQ ID NO: 103164 - protein, 7 aa, synthetic construct
EDPRGIS

SEQ ID NO: 103165 - protein, 7 aa, synthetic construct
VGSRPWD

SEQ ID NO: 103166 - protein, 7 aa, synthetic construct
SPHHVRT

SEQ ID NO: 103167 - protein, 7 aa, synthetic construct
DALNRRT

SEQ ID NO: 103168 - protein, 7 aa, synthetic construct
YSSMKNG

SEQ ID NO: 103169 - protein, 7 aa, synthetic construct
TDAKITM

SEQ ID NO: 103170 - protein, 7 aa, synthetic construct
GYKSVEY

SEQ ID NO: 103171 - protein, 7 aa, synthetic construct
IVLGVHS

SEQ ID NO: 103172 - protein, 7 aa, synthetic construct
SVGIPIE

SEQ ID NO: 103173 - protein, 7 aa, synthetic construct
LIEHKHG

SEQ ID NO: 103174 - protein, 7 aa, synthetic construct
GAQTITS

SEQ ID NO: 103175 - protein, 7 aa, synthetic construct
SGGVQTT

SEQ ID NO: 103176 - protein, 7 aa, synthetic construct
GWGLGKD

SEQ ID NO: 103177 - protein, 7 aa, synthetic construct
ALGHEFR

SEQ ID NO: 103178 - protein, 7 aa, synthetic construct
THDTARR

SEQ ID NO: 103179 - protein, 7 aa, synthetic construct
WVKRQEM

SEQ ID NO: 103180 - protein, 7 aa, synthetic construct
GAAHVRD

SEQ ID NO: 103181 - protein, 7 aa, synthetic construct
RRDTVME

SEQ ID NO: 103182 - protein, 7 aa, synthetic construct
MASQNTS

SEQ ID NO: 103183 - protein, 7 aa, synthetic construct
SITGNNF

SEQ ID NO: 103184 - protein, 7 aa, synthetic construct
ITNPTGE

SEQ ID NO: 103185 - protein, 7 aa, synthetic construct
QGVKVNC

SEQ ID NO: 103186 - protein, 7 aa, synthetic construct
LGPEKVT

SEQ ID NO: 103187 - protein, 7 aa, synthetic construct
TFKHDID

SEQ ID NO: 103188 - protein, 7 aa, synthetic construct
ENKPLES

SEQ ID NO: 103189 - protein, 7 aa, synthetic construct
TKPEPNA

SEQ ID NO: 103190 - protein, 7 aa, synthetic construct
HPKTEKF

SEQ ID NO: 103191 - protein, 7 aa, synthetic construct
NLYDSPT

SEQ ID NO: 103192 - protein, 7 aa, synthetic construct
QYAPEHR

SEQ ID NO: 103193 - protein, 7 aa, synthetic construct
QDTPGRK

SEQ ID NO: 103194 - protein, 7 aa, synthetic construct
WMHAMGE

SEQ ID NO: 103195 - protein, 7 aa, synthetic construct
TYRGVIS

SEQ ID NO: 103196 - protein, 7 aa, synthetic construct
VSLRGQM

SEQ ID NO: 103197 - protein, 7 aa, synthetic construct
ILNFEQE

SEQ ID NO: 103198 - protein, 7 aa, synthetic construct
GNDVKDI

SEQ ID NO: 103199 - protein, 7 aa, synthetic construct
NPGHKTM

SEQ ID NO: 103200 - protein, 7 aa, synthetic construct
VPDPKYH

SEQ ID NO: 103201 - protein, 7 aa, synthetic construct
NTVHFAH

SEQ ID NO: 103202 - protein, 7 aa, synthetic construct
SGVKGGT

SEQ ID NO: 103203 - protein, 7 aa, synthetic construct
KRQIEAE

SEQ ID NO: 103204 - protein, 7 aa, synthetic construct
VPLDDRR

SEQ ID NO: 103205 - protein, 7 aa, synthetic construct
IMHDHNH

SEQ ID NO: 103206 - protein, 7 aa, synthetic construct
TYNKIFE

SEQ ID NO: 103207 - protein, 7 aa, synthetic construct
GITTVAH

SEQ ID NO: 103208 - protein, 7 aa, synthetic construct
NKVDFNG

SEQ ID NO: 103209 - protein, 7 aa, synthetic construct
FTNDGRH

SEQ ID NO: 103210 - protein, 7 aa, synthetic construct
TMGIMAE

SEQ ID NO: 103211 - protein, 7 aa, synthetic construct
YDHRNTT

SEQ ID NO: 103212 - protein, 7 aa, synthetic construct
HVNNTDV

SEQ ID NO: 103213 - protein, 7 aa, synthetic construct
GPKTNGN

SEQ ID NO: 103214 - protein, 7 aa, synthetic construct
AWKPNLI

SEQ ID NO: 103215 - protein, 7 aa, synthetic construct
ERQSVLR

SEQ ID NO: 103216 - protein, 7 aa, synthetic construct
GEWSIMA

SEQ ID NO: 103217 - protein, 7 aa, synthetic construct
VNSPTDV

SEQ ID NO: 103218 - protein, 7 aa, synthetic construct
NYIQGQV

SEQ ID NO: 103219 - protein, 7 aa, synthetic construct
IDNNWVK

SEQ ID NO: 103220 - protein, 7 aa, synthetic construct
SSIPKSM

SEQ ID NO: 103221 - protein, 7 aa, synthetic construct
SQHNEKW

SEQ ID NO: 103222 - protein, 7 aa, synthetic construct
LNAVEKV

SEQ ID NO: 103223 - protein, 7 aa, synthetic construct
KVVVQNE

SEQ ID NO: 103224 - protein, 7 aa, synthetic construct
EVYNTRA

SEQ ID NO: 103225 - protein, 7 aa, synthetic construct
QMGINTE

SEQ ID NO: 103226 - protein, 7 aa, synthetic construct
NMPQNQW

SEQ ID NO: 103227 - protein, 7 aa, synthetic construct
VSLPEKG

SEQ ID NO: 103228 - protein, 7 aa, synthetic construct
NSFINME

SEQ ID NO: 103229 - protein, 7 aa, synthetic construct
CRGSAAC

SEQ ID NO: 103230 - protein, 7 aa, synthetic construct
KMIAFPE

SEQ ID NO: 103231 - protein, 7 aa, synthetic construct
SLTMGRM

SEQ ID NO: 103232 - protein, 7 aa, synthetic construct
SQTEAMY

SEQ ID NO: 103233 - protein, 7 aa, synthetic construct
HLEPGAG

SEQ ID NO: 103234 - protein, 7 aa, synthetic construct
RKDQNDN

SEQ ID NO: 103235 - protein, 7 aa, synthetic construct
VLQYHDG

SEQ ID NO: 103236 - protein, 7 aa, synthetic construct
NTTVAFH

SEQ ID NO: 103237 - protein, 7 aa, synthetic construct
EANNLKP

SEQ ID NO: 103238 - protein, 7 aa, synthetic construct
RASGLVS

SEQ ID NO: 103239 - protein, 7 aa, synthetic construct
GVVNPES

SEQ ID NO: 103240 - protein, 7 aa, synthetic construct
HNNANPR

SEQ ID NO: 103241 - protein, 7 aa, synthetic construct
TKMAIIE

SEQ ID NO: 103242 - protein, 7 aa, synthetic construct
FIPLHKS

SEQ ID NO: 103243 - protein, 7 aa, synthetic construct
ETHMLGR

SEQ ID NO: 103244 - protein, 7 aa, synthetic construct
GNPTKHW

SEQ ID NO: 103245 - protein, 7 aa, synthetic construct
DTSHLRL

SEQ ID NO: 103246 - protein, 7 aa, synthetic construct
AFGTSQQ

SEQ ID NO: 103247 - protein, 7 aa, synthetic construct
FPNAVTL

SEQ ID NO: 103248 - protein, 7 aa, synthetic construct
ENPLDLF

SEQ ID NO: 103249 - protein, 7 aa, synthetic construct
GEMHASI

SEQ ID NO: 103250 - protein, 7 aa, synthetic construct
WSAHILS

SEQ ID NO: 103251 - protein, 7 aa, synthetic construct
VDNHGRT

SEQ ID NO: 103252 - protein, 7 aa, synthetic construct
IHATDMK

SEQ ID NO: 103253 - protein, 7 aa, synthetic construct
TVPKDLK

SEQ ID NO: 103254 - protein, 7 aa, synthetic construct
MDPSFVR

SEQ ID NO: 103255 - protein, 7 aa, synthetic construct
DREAANH

SEQ ID NO: 103256 - protein, 7 aa, synthetic construct
HSGGATM

SEQ ID NO: 103257 - protein, 7 aa, synthetic construct
SGNVAKN

SEQ ID NO: 103258 - protein, 7 aa, synthetic construct
ERSAWAD

SEQ ID NO: 103259 - protein, 7 aa, synthetic construct
INKMYTT

SEQ ID NO: 103260 - protein, 7 aa, synthetic construct
KENIGPD

SEQ ID NO: 103261 - protein, 7 aa, synthetic construct
LRDDLRA

SEQ ID NO: 103262 - protein, 7 aa, synthetic construct
EMHRVMI

SEQ ID NO: 103263 - protein, 7 aa, synthetic construct
KQENYHT

SEQ ID NO: 103264 - protein, 7 aa, synthetic construct
SGQHIMS

SEQ ID NO: 103265 - protein, 7 aa, synthetic construct
LIDNEKW

SEQ ID NO: 103266 - protein, 7 aa, synthetic construct
WKPRPLE

SEQ ID NO: 103267 - protein, 7 aa, synthetic construct
IAAPSPK

SEQ ID NO: 103268 - protein, 7 aa, synthetic construct
AGPHQNR

SEQ ID NO: 103269 - protein, 7 aa, synthetic construct
SMPAQDH

SEQ ID NO: 103270 - protein, 7 aa, synthetic construct
RPQMAIV

SEQ ID NO: 103271 - protein, 7 aa, synthetic construct
YNVQKPL

SEQ ID NO: 103272 - protein, 7 aa, synthetic construct
HYTNGLM

SEQ ID NO: 103273 - protein, 7 aa, synthetic construct
SNTMPMV

SEQ ID NO: 103274 - protein, 7 aa, synthetic construct
RMEQTGM

SEQ ID NO: 103275 - protein, 7 aa, synthetic construct
TPKAPKP

SEQ ID NO: 103276 - protein, 7 aa, synthetic construct
NITKHVT

SEQ ID NO: 103277 - protein, 7 aa, synthetic construct
ELSSGHL

SEQ ID NO: 103278 - protein, 7 aa, synthetic construct
QGMPGKD

SEQ ID NO: 103279 - protein, 7 aa, synthetic construct
KMSSNSV

SEQ ID NO: 103280 - protein, 7 aa, synthetic construct
LQASMIP

SEQ ID NO: 103281 - protein, 7 aa, synthetic construct
MHSQKYT

SEQ ID NO: 103282 - protein, 7 aa, synthetic construct
SPGKTNA

SEQ ID NO: 103283 - protein, 7 aa, synthetic construct
ESMPQSA

SEQ ID NO: 103284 - protein, 7 aa, synthetic construct
DKYFHVP

SEQ ID NO: 103285 - protein, 7 aa, synthetic construct
TFRNDPM

SEQ ID NO: 103286 - protein, 7 aa, synthetic construct
KQAHNTP

SEQ ID NO: 103287 - protein, 7 aa, synthetic construct
HNHEMLV

SEQ ID NO: 103288 - protein, 7 aa, synthetic construct
KPEQKEP

SEQ ID NO: 103289 - protein, 7 aa, synthetic construct
SHWSQNG

SEQ ID NO: 103290 - protein, 7 aa, synthetic construct
LFMDEHG

SEQ ID NO: 103291 - protein, 7 aa, synthetic construct
AMAVSVT

SEQ ID NO: 103292 - protein, 7 aa, synthetic construct
AEHAHDM

SEQ ID NO: 103293 - protein, 7 aa, synthetic construct
NMKSVSA

SEQ ID NO: 103294 - protein, 7 aa, synthetic construct
GGPMRES

SEQ ID NO: 103295 - protein, 7 aa, synthetic construct
DSRHTKA

SEQ ID NO: 103296 - protein, 7 aa, synthetic construct
MNRANSP

SEQ ID NO: 103297 - protein, 7 aa, synthetic construct
KLANTEV

SEQ ID NO: 103298 - protein, 7 aa, synthetic construct
TIEAAAA

SEQ ID NO: 103299 - protein, 7 aa, synthetic construct
IFTKHDR

SEQ ID NO: 103300 - protein, 7 aa, synthetic construct
PIEDRRS

SEQ ID NO: 103301 - protein, 7 aa, synthetic construct
TTGQKDK

SEQ ID NO: 103302 - protein, 7 aa, synthetic construct
YKQQVTI

SEQ ID NO: 103303 - protein, 7 aa, synthetic construct
YDGAVSS

SEQ ID NO: 103304 - protein, 7 aa, synthetic construct
ERFIVEK

SEQ ID NO: 103305 - protein, 7 aa, synthetic construct
DGKVANQ

SEQ ID NO: 103306 - protein, 7 aa, synthetic construct
KGPEAGQ

SEQ ID NO: 103307 - protein, 7 aa, synthetic construct
NFPHSSF

SEQ ID NO: 103308 - protein, 7 aa, synthetic construct
YSNEARH

SEQ ID NO: 103309 - protein, 7 aa, synthetic construct
QQAFEHP

SEQ ID NO: 103310 - protein, 7 aa, synthetic construct
WYNVKQD

SEQ ID NO: 103311 - protein, 7 aa, synthetic construct
TQHEPHK

SEQ ID NO: 103312 - protein, 7 aa, synthetic construct
KDPQKQY

SEQ ID NO: 103313 - protein, 7 aa, synthetic construct
PEIKLYP

SEQ ID NO: 103314 - protein, 7 aa, synthetic construct
DSGMQNA

SEQ ID NO: 103315 - protein, 7 aa, synthetic construct
MKDMKDG

SEQ ID NO: 103316 - protein, 7 aa, synthetic construct
QRIAHVT

SEQ ID NO: 103317 - protein, 7 aa, synthetic construct
EPMKKFY

SEQ ID NO: 103318 - protein, 7 aa, synthetic construct
DVEWKKQ

SEQ ID NO: 103319 - protein, 7 aa, synthetic construct
KNYPQVI

SEQ ID NO: 103320 - protein, 7 aa, synthetic construct
PKTQDTD

SEQ ID NO: 103321 - protein, 7 aa, synthetic construct
YIQPQIG

SEQ ID NO: 103322 - protein, 7 aa, synthetic construct
NGAKMVI

SEQ ID NO: 103323 - protein, 7 aa, synthetic construct
VQFQMRE

SEQ ID NO: 103324 - protein, 7 aa, synthetic construct
AWKLDGS

SEQ ID NO: 103325 - protein, 7 aa, synthetic construct
MASQMTK

SEQ ID NO: 103326 - protein, 7 aa, synthetic construct
AIWTDKG

SEQ ID NO: 103327 - protein, 7 aa, synthetic construct
RPDLDAK

SEQ ID NO: 103328 - protein, 7 aa, synthetic construct
QMLQNVH

SEQ ID NO: 103329 - protein, 7 aa, synthetic construct
YMGHIHV

SEQ ID NO: 103330 - protein, 7 aa, synthetic construct
TKQSNFG

SEQ ID NO: 103331 - protein, 7 aa, synthetic construct
MKNHDTS

SEQ ID NO: 103332 - protein, 7 aa, synthetic construct
IGDVRVF

SEQ ID NO: 103333 - protein, 7 aa, synthetic construct
EDAQRMV

SEQ ID NO: 103334 - protein, 7 aa, synthetic construct
HAKVENK

SEQ ID NO: 103335 - protein, 7 aa, synthetic construct
PWAKTEG

SEQ ID NO: 103336 - protein, 7 aa, synthetic construct
KSEYKDD

SEQ ID NO: 103337 - protein, 7 aa, synthetic construct
TNGHIGR

SEQ ID NO: 103338 - protein, 7 aa, synthetic construct
HYTEHGG

SEQ ID NO: 103339 - protein, 7 aa, synthetic construct
VSPMQIK

SEQ ID NO: 103340 - protein, 7 aa, synthetic construct
DSNNKML

SEQ ID NO: 103341 - protein, 7 aa, synthetic construct
GSGGVQE

SEQ ID NO: 103342 - protein, 7 aa, synthetic construct
QEHQQFR

SEQ ID NO: 103343 - protein, 7 aa, synthetic construct
ASGQQIA

SEQ ID NO: 103344 - protein, 7 aa, synthetic construct
HAQPMEL

SEQ ID NO: 103345 - protein, 7 aa, synthetic construct
PQLSQGE

SEQ ID NO: 103346 - protein, 7 aa, synthetic construct
EINRMND

SEQ ID NO: 103347 - protein, 7 aa, synthetic construct
EGSHMKP

SEQ ID NO: 103348 - protein, 7 aa, synthetic construct
YSNDTHY

SEQ ID NO: 103349 - protein, 7 aa, synthetic construct
FANPNGR

SEQ ID NO: 103350 - protein, 7 aa, synthetic construct
RIPTMHE

SEQ ID NO: 103351 - protein, 7 aa, synthetic construct
FHNNIVN

SEQ ID NO: 103352 - protein, 7 aa, synthetic construct
LMEFHPQ

SEQ ID NO: 103353 - protein, 7 aa, synthetic construct
MSPDGVV

SEQ ID NO: 103354 - protein, 7 aa, synthetic construct
QEYVAHK

SEQ ID NO: 103355 - protein, 7 aa, synthetic construct
YEKEVTR

SEQ ID NO: 103356 - protein, 7 aa, synthetic construct
MISHKDF

SEQ ID NO: 103357 - protein, 7 aa, synthetic construct
RAINHED

SEQ ID NO: 103358 - protein, 7 aa, synthetic construct
RIHQDQH

SEQ ID NO: 103359 - protein, 7 aa, synthetic construct
KIGLEDG

SEQ ID NO: 103360 - protein, 7 aa, synthetic construct
NGGGYAH

SEQ ID NO: 103361 - protein, 7 aa, synthetic construct
QDRAEKY

SEQ ID NO: 103362 - protein, 7 aa, synthetic construct
KVMQGEF

SEQ ID NO: 103363 - protein, 7 aa, synthetic construct
NEFLNNK

SEQ ID NO: 103364 - protein, 7 aa, synthetic construct
EGMQGQP

SEQ ID NO: 103365 - protein, 7 aa, synthetic construct
HQKHADQ

SEQ ID NO: 103366 - protein, 7 aa, synthetic construct
PPQQSAH

SEQ ID NO: 103367 - protein, 7 aa, synthetic construct
LYISGKG

SEQ ID NO: 103368 - protein, 7 aa, synthetic construct
MEHSLMR

SEQ ID NO: 103369 - protein, 7 aa, synthetic construct
KQTTFGQ

SEQ ID NO: 103370 - protein, 7 aa, synthetic construct
KGYEHLE

SEQ ID NO: 103371 - protein, 7 aa, synthetic construct
TPVLNAN

SEQ ID NO: 103372 - protein, 7 aa, synthetic construct
HFAMSGA

SEQ ID NO: 103373 - protein, 7 aa, synthetic construct
FRVEVAG

SEQ ID NO: 103374 - protein, 7 aa, synthetic construct
HVNVDYM

SEQ ID NO: 103375 - protein, 7 aa, synthetic construct
SQSMTAS

SEQ ID NO: 103376 - protein, 7 aa, synthetic construct
RSDHKEL

SEQ ID NO: 103377 - protein, 7 aa, synthetic construct
TVRTPLE

SEQ ID NO: 103378 - protein, 7 aa, synthetic construct
CIKQLSG

SEQ ID NO: 103379 - protein, 7 aa, synthetic construct
IFSPNER

SEQ ID NO: 103380 - protein, 7 aa, synthetic construct
LHSMGAQ

SEQ ID NO: 103381 - protein, 7 aa, synthetic construct
YLQQNRM

SEQ ID NO: 103382 - protein, 7 aa, synthetic construct
FTTGKAY

SEQ ID NO: 103383 - protein, 7 aa, synthetic construct
NEHQMPP

SEQ ID NO: 103384 - protein, 7 aa, synthetic construct
CDKLKNA

SEQ ID NO: 103385 - protein, 7 aa, synthetic construct
VNGGGDK

SEQ ID NO: 103386 - protein, 7 aa, synthetic construct
PPARQDM

SEQ ID NO: 103387 - protein, 7 aa, synthetic construct
FQRHPSD

SEQ ID NO: 103388 - protein, 7 aa, synthetic construct
YVQHEER

SEQ ID NO: 103389 - protein, 7 aa, synthetic construct
SNSARDT

SEQ ID NO: 103390 - protein, 7 aa, synthetic construct
FDIKHEI

SEQ ID NO: 103391 - protein, 7 aa, synthetic construct
DGYHTHM

SEQ ID NO: 103392 - protein, 7 aa, synthetic construct
YKVTAQS

SEQ ID NO: 103393 - protein, 7 aa, synthetic construct
DHKSFEM

SEQ ID NO: 103394 - protein, 7 aa, synthetic construct
TVSDKIM

SEQ ID NO: 103395 - protein, 7 aa, synthetic construct
VPTHVVD

SEQ ID NO: 103396 - protein, 7 aa, synthetic construct
DPDRNKR

SEQ ID NO: 103397 - protein, 7 aa, synthetic construct
LLKVVAT

SEQ ID NO: 103398 - protein, 7 aa, synthetic construct
MKATLRP

SEQ ID NO: 103399 - protein, 7 aa, synthetic construct
DYDHTLS

SEQ ID NO: 103400 - protein, 7 aa, synthetic construct
FLGGGAI

SEQ ID NO: 103401 - protein, 7 aa, synthetic construct
SNEKPSP

SEQ ID NO: 103402 - protein, 7 aa, synthetic construct
YGRAYVG

SEQ ID NO: 103403 - protein, 7 aa, synthetic construct
KNMGNIV

SEQ ID NO: 103404 - protein, 7 aa, synthetic construct
MRYPTAV

SEQ ID NO: 103405 - protein, 7 aa, synthetic construct
THRNLTT

SEQ ID NO: 103406 - protein, 7 aa, synthetic construct
VNGVIQH

SEQ ID NO: 103407 - protein, 7 aa, synthetic construct
MKAKSDH

SEQ ID NO: 103408 - protein, 7 aa, synthetic construct
VEHFTEK

SEQ ID NO: 103409 - protein, 7 aa, synthetic construct
TFGIGDH

SEQ ID NO: 103410 - protein, 7 aa, synthetic construct
PRYMHEG

SEQ ID NO: 103411 - protein, 7 aa, synthetic construct
IVQHTKM

SEQ ID NO: 103412 - protein, 7 aa, synthetic construct
YSHDMAK

SEQ ID NO: 103413 - protein, 7 aa, synthetic construct
AKDSIRA

SEQ ID NO: 103414 - protein, 7 aa, synthetic construct
ATDMVGS

SEQ ID NO: 103415 - protein, 7 aa, synthetic construct
LHDAHNL

SEQ ID NO: 103416 - protein, 7 aa, synthetic construct
HGHPIAV

SEQ ID NO: 103417 - protein, 7 aa, synthetic construct
MFHASPN

SEQ ID NO: 103418 - protein, 7 aa, synthetic construct
AHLPIMG

SEQ ID NO: 103419 - protein, 7 aa, synthetic construct
NIIRAVA

SEQ ID NO: 103420 - protein, 7 aa, synthetic construct
IPMHAPL

SEQ ID NO: 103421 - protein, 7 aa, synthetic construct
IKQTLQS

SEQ ID NO: 103422 - protein, 7 aa, synthetic construct
MIENPPR

SEQ ID NO: 103423 - protein, 7 aa, synthetic construct
ESSHNMS

SEQ ID NO: 103424 - protein, 7 aa, synthetic construct
AKDIYLV

SEQ ID NO: 103425 - protein, 7 aa, synthetic construct
NEPFAQP

SEQ ID NO: 103426 - protein, 7 aa, synthetic construct
AEQLRKP

SEQ ID NO: 103427 - protein, 7 aa, synthetic construct
FQEKIKI

SEQ ID NO: 103428 - protein, 7 aa, synthetic construct
DGQEVRG

SEQ ID NO: 103429 - protein, 7 aa, synthetic construct
SANAHPR

SEQ ID NO: 103430 - protein, 7 aa, synthetic construct
SMGPKEQ

SEQ ID NO: 103431 - protein, 7 aa, synthetic construct
WADSGNL

SEQ ID NO: 103432 - protein, 7 aa, synthetic construct
KDLNLNR

SEQ ID NO: 103433 - protein, 7 aa, synthetic construct
NHQKVFS

SEQ ID NO: 103434 - protein, 7 aa, synthetic construct
DQWKPST

SEQ ID NO: 103435 - protein, 7 aa, synthetic construct
KTGIFSD

SEQ ID NO: 103436 - protein, 7 aa, synthetic construct
PMRSDGG

SEQ ID NO: 103437 - protein, 7 aa, synthetic construct
SAAYKTH

SEQ ID NO: 103438 - protein, 7 aa, synthetic construct
PKDQVRE

SEQ ID NO: 103439 - protein, 7 aa, synthetic construct
KEVNTMN

SEQ ID NO: 103440 - protein, 7 aa, synthetic construct
IHEGGGL

SEQ ID NO: 103441 - protein, 7 aa, synthetic construct
LSRERGP

SEQ ID NO: 103442 - protein, 7 aa, synthetic construct
YLHHRQS

SEQ ID NO: 103443 - protein, 7 aa, synthetic construct
HPFDSDR

SEQ ID NO: 103444 - protein, 7 aa, synthetic construct
TQEVSKY

SEQ ID NO: 103445 - protein, 7 aa, synthetic construct
NGHNQLA

SEQ ID NO: 103446 - protein, 7 aa, synthetic construct
NPKSIMI

SEQ ID NO: 103447 - protein, 7 aa, synthetic construct
QRDTEAR

SEQ ID NO: 103448 - protein, 7 aa, synthetic construct
GRDKMAI

SEQ ID NO: 103449 - protein, 7 aa, synthetic construct
QYEVAKK

SEQ ID NO: 103450 - protein, 7 aa, synthetic construct
KEAATST

SEQ ID NO: 103451 - protein, 7 aa, synthetic construct
KPPGTGD

SEQ ID NO: 103452 - protein, 7 aa, synthetic construct
DFTVTGR

SEQ ID NO: 103453 - protein, 7 aa, synthetic construct
HIEGAVT

SEQ ID NO: 103454 - protein, 7 aa, synthetic construct
NTPAMQQ

SEQ ID NO: 103455 - protein, 7 aa, synthetic construct
IPEALRT

SEQ ID NO: 103456 - protein, 7 aa, synthetic construct
NVMHYGP

SEQ ID NO: 103457 - protein, 7 aa, synthetic construct
TGERIPF

SEQ ID NO: 103458 - protein, 7 aa, synthetic construct
ILTMEHS

SEQ ID NO: 103459 - protein, 7 aa, synthetic construct
YADVKKL

SEQ ID NO: 103460 - protein, 7 aa, synthetic construct
EGPYGVQ

SEQ ID NO: 103461 - protein, 7 aa, synthetic construct
GKPTSGF

SEQ ID NO: 103462 - protein, 7 aa, synthetic construct
LGITFAN

SEQ ID NO: 103463 - protein, 7 aa, synthetic construct
DKEITRN

SEQ ID NO: 103464 - protein, 7 aa, synthetic construct
YATKKEV

SEQ ID NO: 103465 - protein, 7 aa, synthetic construct
TLPQGHI

SEQ ID NO: 103466 - protein, 7 aa, synthetic construct
FDAKTKS

SEQ ID NO: 103467 - protein, 7 aa, synthetic construct
RPVQPLE

SEQ ID NO: 103468 - protein, 7 aa, synthetic construct
VPQPKLN

SEQ ID NO: 103469 - protein, 7 aa, synthetic construct
HEHPKKV

SEQ ID NO: 103470 - protein, 7 aa, synthetic construct
VYALTPA

SEQ ID NO: 103471 - protein, 7 aa, synthetic construct
HKTDFFG

SEQ ID NO: 103472 - protein, 7 aa, synthetic construct
KTPSNIE

SEQ ID NO: 103473 - protein, 7 aa, synthetic construct
AKQVTAA

SEQ ID NO: 103474 - protein, 7 aa, synthetic construct
DIGFKDT

SEQ ID NO: 103475 - protein, 7 aa, synthetic construct
YIGPGQE

SEQ ID NO: 103476 - protein, 7 aa, synthetic construct
AADVPKH

SEQ ID NO: 103477 - protein, 7 aa, synthetic construct
IQGGFGM

SEQ ID NO: 103478 - protein, 7 aa, synthetic construct
YAEVNHR

SEQ ID NO: 103479 - protein, 7 aa, synthetic construct
REMTDRV

SEQ ID NO: 103480 - protein, 7 aa, synthetic construct
GHRIEFD

SEQ ID NO: 103481 - protein, 7 aa, synthetic construct
WHVITPE

SEQ ID NO: 103482 - protein, 7 aa, synthetic construct
RENTLSP

SEQ ID NO: 103483 - protein, 7 aa, synthetic construct
YMEKQNS

SEQ ID NO: 103484 - protein, 7 aa, synthetic construct
TGNSRSG

SEQ ID NO: 103485 - protein, 7 aa, synthetic construct
CRALGCE

SEQ ID NO: 103486 - protein, 7 aa, synthetic construct
PAHYDAL

SEQ ID NO: 103487 - protein, 7 aa, synthetic construct
MNKLTDM

SEQ ID NO: 103488 - protein, 7 aa, synthetic construct
GNFEKPR

SEQ ID NO: 103489 - protein, 7 aa, synthetic construct
TQATLLT

SEQ ID NO: 103490 - protein, 7 aa, synthetic construct
KTGTLNF

SEQ ID NO: 103491 - protein, 7 aa, synthetic construct
MNVPAHG

SEQ ID NO: 103492 - protein, 7 aa, synthetic construct
KHSQVHI

SEQ ID NO: 103493 - protein, 7 aa, synthetic construct
RYQHEER

SEQ ID NO: 103494 - protein, 7 aa, synthetic construct
IIQKPER

SEQ ID NO: 103495 - protein, 7 aa, synthetic construct
AMREYKA

SEQ ID NO: 103496 - protein, 7 aa, synthetic construct
FGQNKGG

SEQ ID NO: 103497 - protein, 7 aa, synthetic construct
PGTQAYR

SEQ ID NO: 103498 - protein, 7 aa, synthetic construct
SVKEFSS

SEQ ID NO: 103499 - protein, 7 aa, synthetic construct
PHGVTNI

SEQ ID NO: 103500 - protein, 7 aa, synthetic construct
VSQYHMP

SEQ ID NO: 103501 - protein, 7 aa, synthetic construct
DYKTDTS

SEQ ID NO: 103502 - protein, 7 aa, synthetic construct
YATAHAK

SEQ ID NO: 103503 - protein, 7 aa, synthetic construct
LQGWVHD

SEQ ID NO: 103504 - protein, 7 aa, synthetic construct
QIGHLNL

SEQ ID NO: 103505 - protein, 7 aa, synthetic construct
QGTHPDQ

SEQ ID NO: 103506 - protein, 7 aa, synthetic construct
AIKGMHM

SEQ ID NO: 103507 - protein, 7 aa, synthetic construct
VQQTSGM

SEQ ID NO: 103508 - protein, 7 aa, synthetic construct
KHKDNGH

SEQ ID NO: 103509 - protein, 7 aa, synthetic construct
DRDLGGK

SEQ ID NO: 103510 - protein, 7 aa, synthetic construct
RPNEQES

SEQ ID NO: 103511 - protein, 7 aa, synthetic construct
LYAGMSM

SEQ ID NO: 103512 - protein, 7 aa, synthetic construct
IVKHTDF

SEQ ID NO: 103513 - protein, 7 aa, synthetic construct
YEMHAEK

SEQ ID NO: 103514 - protein, 7 aa, synthetic construct
LKWDAGE

SEQ ID NO: 103515 - protein, 7 aa, synthetic construct
SVEYSDR

SEQ ID NO: 103516 - protein, 7 aa, synthetic construct
GETMMKP

SEQ ID NO: 103517 - protein, 7 aa, synthetic construct
PKNHAKD

SEQ ID NO: 103518 - protein, 7 aa, synthetic construct
DTPKIRA

SEQ ID NO: 103519 - protein, 7 aa, synthetic construct
KQSNSMP

SEQ ID NO: 103520 - protein, 7 aa, synthetic construct
FDTAPKI

SEQ ID NO: 103521 - protein, 7 aa, synthetic construct
LYGSHPS

SEQ ID NO: 103522 - protein, 7 aa, synthetic construct
RPSESQE

SEQ ID NO: 103523 - protein, 7 aa, synthetic construct
TQISKNW

SEQ ID NO: 103524 - protein, 7 aa, synthetic construct
AGNRGSQ

SEQ ID NO: 103525 - protein, 7 aa, synthetic construct
KTSGQPL

SEQ ID NO: 103526 - protein, 7 aa, synthetic construct
SVMHETP

SEQ ID NO: 103527 - protein, 7 aa, synthetic construct
VAPALGI

SEQ ID NO: 103528 - protein, 7 aa, synthetic construct
TPTGAIQ

SEQ ID NO: 103529 - protein, 7 aa, synthetic construct
CYSQDCP

SEQ ID NO: 103530 - protein, 7 aa, synthetic construct
VIDLNKF

SEQ ID NO: 103531 - protein, 7 aa, synthetic construct
MSHDSQL

SEQ ID NO: 103532 - protein, 7 aa, synthetic construct
SIRGQYV

SEQ ID NO: 103533 - protein, 7 aa, synthetic construct
HFDKTHS

SEQ ID NO: 103534 - protein, 7 aa, synthetic construct
IFVPTQA

SEQ ID NO: 103535 - protein, 7 aa, synthetic construct
SFHDASE

SEQ ID NO: 103536 - protein, 7 aa, synthetic construct
SNTSNKF

SEQ ID NO: 103537 - protein, 7 aa, synthetic construct
NNFAAGT

SEQ ID NO: 103538 - protein, 7 aa, synthetic construct
RYVDGGT

SEQ ID NO: 103539 - protein, 7 aa, synthetic construct
GQNNYKM

SEQ ID NO: 103540 - protein, 7 aa, synthetic construct
PAHKHPT

SEQ ID NO: 103541 - protein, 7 aa, synthetic construct
FPNQNSQ

SEQ ID NO: 103542 - protein, 7 aa, synthetic construct
DRGAMNV

SEQ ID NO: 103543 - protein, 7 aa, synthetic construct
PFLRETH

SEQ ID NO: 103544 - protein, 7 aa, synthetic construct
KPSRTEF

SEQ ID NO: 103545 - protein, 7 aa, synthetic construct
GQDVIKH

SEQ ID NO: 103546 - protein, 7 aa, synthetic construct
TASPARH

SEQ ID NO: 103547 - protein, 7 aa, synthetic construct
AYARIQT

SEQ ID NO: 103548 - protein, 7 aa, synthetic construct
MKTDAMQ

SEQ ID NO: 103549 - protein, 7 aa, synthetic construct
GKIGAHF

SEQ ID NO: 103550 - protein, 7 aa, synthetic construct
DPLKQNH

SEQ ID NO: 103551 - protein, 7 aa, synthetic construct
NEKLDAT

SEQ ID NO: 103552 - protein, 7 aa, synthetic construct
RPPSGGP

SEQ ID NO: 103553 - protein, 7 aa, synthetic construct
VLHKDPN

SEQ ID NO: 103554 - protein, 7 aa, synthetic construct
EMDRRLL

SEQ ID NO: 103555 - protein, 7 aa, synthetic construct
PHAYGDV

SEQ ID NO: 103556 - protein, 7 aa, synthetic construct
QHTLLPV

SEQ ID NO: 103557 - protein, 7 aa, synthetic construct
YDRSKMY

SEQ ID NO: 103558 - protein, 7 aa, synthetic construct
QYDSKFV

SEQ ID NO: 103559 - protein, 7 aa, synthetic construct
IVMEWKD

SEQ ID NO: 103560 - protein, 7 aa, synthetic construct
LGVHKAL

SEQ ID NO: 103561 - protein, 7 aa, synthetic construct
NYSIKDK

SEQ ID NO: 103562 - protein, 7 aa, synthetic construct
AVLTGGY

SEQ ID NO: 103563 - protein, 7 aa, synthetic construct
AMTMLNP

SEQ ID NO: 103564 - protein, 7 aa, synthetic construct
WYSGQPD

SEQ ID NO: 103565 - protein, 7 aa, synthetic construct
HAGPYQH

SEQ ID NO: 103566 - protein, 7 aa, synthetic construct
WANRRVE

SEQ ID NO: 103567 - protein, 7 aa, synthetic construct
AVRNIEL

SEQ ID NO: 103568 - protein, 7 aa, synthetic construct
MHIQHNK

SEQ ID NO: 103569 - protein, 7 aa, synthetic construct
SKWVMEP

SEQ ID NO: 103570 - protein, 7 aa, synthetic construct
TGRDKNF

SEQ ID NO: 103571 - protein, 7 aa, synthetic construct
WERPDNS

SEQ ID NO: 103572 - protein, 7 aa, synthetic construct
PAKGAAY

SEQ ID NO: 103573 - protein, 7 aa, synthetic construct
LVPAAAD

SEQ ID NO: 103574 - protein, 7 aa, synthetic construct
EAFGNQH

SEQ ID NO: 103575 - protein, 7 aa, synthetic construct
TPSGAQR

SEQ ID NO: 103576 - protein, 7 aa, synthetic construct
YQLNKIV

SEQ ID NO: 103577 - protein, 7 aa, synthetic construct
LHDKSNK

SEQ ID NO: 103578 - protein, 7 aa, synthetic construct
VTGAYPM

SEQ ID NO: 103579 - protein, 7 aa, synthetic construct
WPIAHQA

SEQ ID NO: 103580 - protein, 7 aa, synthetic construct
FINSRPM

SEQ ID NO: 103581 - protein, 7 aa, synthetic construct
GNAHRMD

SEQ ID NO: 103582 - protein, 7 aa, synthetic construct
QISKSHY

SEQ ID NO: 103583 - protein, 7 aa, synthetic construct
GQAFEPA

SEQ ID NO: 103584 - protein, 7 aa, synthetic construct
PAERPNL

SEQ ID NO: 103585 - protein, 7 aa, synthetic construct
VTGFTPY

SEQ ID NO: 103586 - protein, 7 aa, synthetic construct
WEHHQNP

SEQ ID NO: 103587 - protein, 7 aa, synthetic construct
AKEISPG

SEQ ID NO: 103588 - protein, 7 aa, synthetic construct
KMREEIK

SEQ ID NO: 103589 - protein, 7 aa, synthetic construct
MMVAPAQ

SEQ ID NO: 103590 - protein, 7 aa, synthetic construct
NALARSI

SEQ ID NO: 103591 - protein, 7 aa, synthetic construct
SALMQQK

SEQ ID NO: 103592 - protein, 7 aa, synthetic construct
TPRQVNV

SEQ ID NO: 103593 - protein, 7 aa, synthetic construct
VNDMRQS

SEQ ID NO: 103594 - protein, 7 aa, synthetic construct
VHDGRGE

SEQ ID NO: 103595 - protein, 7 aa, synthetic construct
ERGVVGD

SEQ ID NO: 103596 - protein, 7 aa, synthetic construct
RGSDRQI

SEQ ID NO: 103597 - protein, 7 aa, synthetic construct
DIYHHMP

SEQ ID NO: 103598 - protein, 7 aa, synthetic construct
HQWGAEH

SEQ ID NO: 103599 - protein, 7 aa, synthetic construct
IAHPHLV

SEQ ID NO: 103600 - protein, 7 aa, synthetic construct
GGPPPHV

SEQ ID NO: 103601 - protein, 7 aa, synthetic construct
HLQKDFK

SEQ ID NO: 103602 - protein, 7 aa, synthetic construct
EIMKQGL

SEQ ID NO: 103603 - protein, 7 aa, synthetic construct
WPSIQIN

SEQ ID NO: 103604 - protein, 7 aa, synthetic construct
MVPNMLA

SEQ ID NO: 103605 - protein, 7 aa, synthetic construct
NVIGEVP

SEQ ID NO: 103606 - protein, 7 aa, synthetic construct
IEAPPKG

SEQ ID NO: 103607 - protein, 7 aa, synthetic construct
IPLMAHG

SEQ ID NO: 103608 - protein, 7 aa, synthetic construct
LDPNHKP

SEQ ID NO: 103609 - protein, 7 aa, synthetic construct
PTFDQTM

SEQ ID NO: 103610 - protein, 7 aa, synthetic construct
KEPMLMD

SEQ ID NO: 103611 - protein, 7 aa, synthetic construct
HDIGMMV

SEQ ID NO: 103612 - protein, 7 aa, synthetic construct
RNATGTA

SEQ ID NO: 103613 - protein, 7 aa, synthetic construct
KIQTSGS

SEQ ID NO: 103614 - protein, 7 aa, synthetic construct
GQLMQIG

SEQ ID NO: 103615 - protein, 7 aa, synthetic construct
MDKPRQP

SEQ ID NO: 103616 - protein, 7 aa, synthetic construct
EKKESIS

SEQ ID NO: 103617 - protein, 7 aa, synthetic construct
WVTGEYG

SEQ ID NO: 103618 - protein, 7 aa, synthetic construct
MPKQSGS

SEQ ID NO: 103619 - protein, 7 aa, synthetic construct
FTIDQSK

SEQ ID NO: 103620 - protein, 7 aa, synthetic construct
YNKNSSS

SEQ ID NO: 103621 - protein, 7 aa, synthetic construct
TPEIRAF

SEQ ID NO: 103622 - protein, 7 aa, synthetic construct
RVYDGTE

SEQ ID NO: 103623 - protein, 7 aa, synthetic construct
EPSKIRV

SEQ ID NO: 103624 - protein, 7 aa, synthetic construct
YHLEMGE

SEQ ID NO: 103625 - protein, 7 aa, synthetic construct
VPRITIT

SEQ ID NO: 103626 - protein, 7 aa, synthetic construct
VSRSANA

SEQ ID NO: 103627 - protein, 7 aa, synthetic construct
GYTNNTE

SEQ ID NO: 103628 - protein, 7 aa, synthetic construct
TSFKNAE

SEQ ID NO: 103629 - protein, 7 aa, synthetic construct
VSHLPLV

SEQ ID NO: 103630 - protein, 7 aa, synthetic construct
PTETKNM

SEQ ID NO: 103631 - protein, 7 aa, synthetic construct
TSVPNFV

SEQ ID NO: 103632 - protein, 7 aa, synthetic construct
RDGALSG

SEQ ID NO: 103633 - protein, 7 aa, synthetic construct
FVPAQQN

SEQ ID NO: 103634 - protein, 7 aa, synthetic construct
IGVSTAD

SEQ ID NO: 103635 - protein, 7 aa, synthetic construct
VVPSAEN

SEQ ID NO: 103636 - protein, 7 aa, synthetic construct
DTFHKPP

SEQ ID NO: 103637 - protein, 7 aa, synthetic construct
YTETNGL

SEQ ID NO: 103638 - protein, 7 aa, synthetic construct
RHDFENK

SEQ ID NO: 103639 - protein, 7 aa, synthetic construct
GIKDKFM

SEQ ID NO: 103640 - protein, 7 aa, synthetic construct
RSGEVFY

SEQ ID NO: 103641 - protein, 7 aa, synthetic construct
DSKVGIY

SEQ ID NO: 103642 - protein, 7 aa, synthetic construct
TGPIYPL

SEQ ID NO: 103643 - protein, 7 aa, synthetic construct
AVVQGVL

SEQ ID NO: 103644 - protein, 7 aa, synthetic construct
KDSVMII

SEQ ID NO: 103645 - protein, 7 aa, synthetic construct
KSTSLKD

SEQ ID NO: 103646 - protein, 7 aa, synthetic construct
HAKFANF

SEQ ID NO: 103647 - protein, 7 aa, synthetic construct
GIQKAER

SEQ ID NO: 103648 - protein, 7 aa, synthetic construct
DGHSPST

SEQ ID NO: 103649 - protein, 7 aa, synthetic construct
GKQVTQG

SEQ ID NO: 103650 - protein, 7 aa, synthetic construct
REGHLWE

SEQ ID NO: 103651 - protein, 7 aa, synthetic construct
NMLKSMG

SEQ ID NO: 103652 - protein, 7 aa, synthetic construct
GKPNGTG

SEQ ID NO: 103653 - protein, 7 aa, synthetic construct
IGGDFGH

SEQ ID NO: 103654 - protein, 7 aa, synthetic construct
AADHKAC

SEQ ID NO: 103655 - protein, 7 aa, synthetic construct
DGLHPGS

SEQ ID NO: 103656 - protein, 7 aa, synthetic construct
GATEKVI

SEQ ID NO: 103657 - protein, 7 aa, synthetic construct
NARTSNG

SEQ ID NO: 103658 - protein, 7 aa, synthetic construct
SGLGMGV

SEQ ID NO: 103659 - protein, 7 aa, synthetic construct
NVFGTNN

SEQ ID NO: 103660 - protein, 7 aa, synthetic construct
QQIIEKG

SEQ ID NO: 103661 - protein, 7 aa, synthetic construct
PEGRGIY

SEQ ID NO: 103662 - protein, 7 aa, synthetic construct
YKNGTPA

SEQ ID NO: 103663 - protein, 7 aa, synthetic construct
AREQIVT

SEQ ID NO: 103664 - protein, 7 aa, synthetic construct
HDLKTGL

SEQ ID NO: 103665 - protein, 7 aa, synthetic construct
TNLQNNH

SEQ ID NO: 103666 - protein, 7 aa, synthetic construct
IEKVGMH

SEQ ID NO: 103667 - protein, 7 aa, synthetic construct
NRSNLDI

SEQ ID NO: 103668 - protein, 7 aa, synthetic construct
VVLQQVP

SEQ ID NO: 103669 - protein, 7 aa, synthetic construct
GGKDTVG

SEQ ID NO: 103670 - protein, 7 aa, synthetic construct
RPRDLRE

SEQ ID NO: 103671 - protein, 7 aa, synthetic construct
RYSVPGG

SEQ ID NO: 103672 - protein, 7 aa, synthetic construct
YTHQPGL

SEQ ID NO: 103673 - protein, 7 aa, synthetic construct
KTPVEAK

SEQ ID NO: 103674 - protein, 7 aa, synthetic construct
VIDMNKI

SEQ ID NO: 103675 - protein, 7 aa, synthetic construct
PPSKIPQ

SEQ ID NO: 103676 - protein, 7 aa, synthetic construct
STREKEQ

SEQ ID NO: 103677 - protein, 7 aa, synthetic construct
YHHLQDN

SEQ ID NO: 103678 - protein, 7 aa, synthetic construct
QQDMKNI

SEQ ID NO: 103679 - protein, 7 aa, synthetic construct
EANKTNG

SEQ ID NO: 103680 - protein, 7 aa, synthetic construct
QMPGLKD

SEQ ID NO: 103681 - protein, 7 aa, synthetic construct
WMAKAGE

SEQ ID NO: 103682 - protein, 7 aa, synthetic construct
NDPAKLE

SEQ ID NO: 103683 - protein, 7 aa, synthetic construct
SSQMAKL

SEQ ID NO: 103684 - protein, 7 aa, synthetic construct
CPGGMAC

SEQ ID NO: 103685 - protein, 7 aa, synthetic construct
RQVQGLP

SEQ ID NO: 103686 - protein, 7 aa, synthetic construct
AFVVSAS

SEQ ID NO: 103687 - protein, 7 aa, synthetic construct
FQHVHEH

SEQ ID NO: 103688 - protein, 7 aa, synthetic construct
SAVINHP

SEQ ID NO: 103689 - protein, 7 aa, synthetic construct
PMPGLSL

SEQ ID NO: 103690 - protein, 7 aa, synthetic construct
MFAMATP

SEQ ID NO: 103691 - protein, 7 aa, synthetic construct
QYHPKTE

SEQ ID NO: 103692 - protein, 7 aa, synthetic construct
EAHNHTS

SEQ ID NO: 103693 - protein, 7 aa, synthetic construct
AAQMHNT

SEQ ID NO: 103694 - protein, 7 aa, synthetic construct
IYPDTNK

SEQ ID NO: 103695 - protein, 7 aa, synthetic construct
YMGPSQH

SEQ ID NO: 103696 - protein, 7 aa, synthetic construct
TRHLVDV

SEQ ID NO: 103697 - protein, 7 aa, synthetic construct
DHTHGSL

SEQ ID NO: 103698 - protein, 7 aa, synthetic construct
GVVGNET

SEQ ID NO: 103699 - protein, 7 aa, synthetic construct
IGHSGPK

SEQ ID NO: 103700 - protein, 7 aa, synthetic construct
QGNQDNK

SEQ ID NO: 103701 - protein, 7 aa, synthetic construct
PKFHDRA

SEQ ID NO: 103702 - protein, 7 aa, synthetic construct
GDQYPRG

SEQ ID NO: 103703 - protein, 7 aa, synthetic construct
RNNIQIP

SEQ ID NO: 103704 - protein, 7 aa, synthetic construct
QHHGEGH

SEQ ID NO: 103705 - protein, 7 aa, synthetic construct
ERSEIKP

SEQ ID NO: 103706 - protein, 7 aa, synthetic construct
YNASNVV

SEQ ID NO: 103707 - protein, 7 aa, synthetic construct
RVGLMEI

SEQ ID NO: 103708 - protein, 7 aa, synthetic construct
WGPDMPG

SEQ ID NO: 103709 - protein, 7 aa, synthetic construct
ADKIVRN

SEQ ID NO: 103710 - protein, 7 aa, synthetic construct
YSEKGRL

SEQ ID NO: 103711 - protein, 7 aa, synthetic construct
YVEKAAL

SEQ ID NO: 103712 - protein, 7 aa, synthetic construct
YKFSNAQ

SEQ ID NO: 103713 - protein, 7 aa, synthetic construct
PANPSQG

SEQ ID NO: 103714 - protein, 7 aa, synthetic construct
ALYISDK

SEQ ID NO: 103715 - protein, 7 aa, synthetic construct
TVTVVRQ

SEQ ID NO: 103716 - protein, 7 aa, synthetic construct
RGAPGYH

SEQ ID NO: 103717 - protein, 7 aa, synthetic construct
GMRTNIM

SEQ ID NO: 103718 - protein, 7 aa, synthetic construct
DPDGKVI

SEQ ID NO: 103719 - protein, 7 aa, synthetic construct
APDLSQG

SEQ ID NO: 103720 - protein, 7 aa, synthetic construct
IQIKDPV

SEQ ID NO: 103721 - protein, 7 aa, synthetic construct
NLHVTQP

SEQ ID NO: 103722 - protein, 7 aa, synthetic construct
MKPTLHM

SEQ ID NO: 103723 - protein, 7 aa, synthetic construct
YNSHNHP

SEQ ID NO: 103724 - protein, 7 aa, synthetic construct
MYTAESR

SEQ ID NO: 103725 - protein, 7 aa, synthetic construct
HPDQHHP

SEQ ID NO: 103726 - protein, 7 aa, synthetic construct
LRNQYNP

SEQ ID NO: 103727 - protein, 7 aa, synthetic construct
QMGARTF

SEQ ID NO: 103728 - protein, 7 aa, synthetic construct
DEKAKRI

SEQ ID NO: 103729 - protein, 7 aa, synthetic construct
IATIHHP

SEQ ID NO: 103730 - protein, 7 aa, synthetic construct
FQEVKMK

SEQ ID NO: 103731 - protein, 7 aa, synthetic construct
HSDKDTH

SEQ ID NO: 103732 - protein, 7 aa, synthetic construct
YVTTADP

SEQ ID NO: 103733 - protein, 7 aa, synthetic construct
LPQAKVM

SEQ ID NO: 103734 - protein, 7 aa, synthetic construct
HWDKGPY

SEQ ID NO: 103735 - protein, 7 aa, synthetic construct
SYPAYEP

SEQ ID NO: 103736 - protein, 7 aa, synthetic construct
EQKQPMF

SEQ ID NO: 103737 - protein, 7 aa, synthetic construct
NQDTRPS

SEQ ID NO: 103738 - protein, 7 aa, synthetic construct
LVKPDIN

SEQ ID NO: 103739 - protein, 7 aa, synthetic construct
DLAMIQA

SEQ ID NO: 103740 - protein, 7 aa, synthetic construct
YHAGILK

SEQ ID NO: 103741 - protein, 7 aa, synthetic construct
PEYSKGG

SEQ ID NO: 103742 - protein, 7 aa, synthetic construct
TIRTSVL

SEQ ID NO: 103743 - protein, 7 aa, synthetic construct
PTHGRVL

SEQ ID NO: 103744 - protein, 7 aa, synthetic construct
VMKVQQF

SEQ ID NO: 103745 - protein, 7 aa, synthetic construct
RPNSGGA

SEQ ID NO: 103746 - protein, 7 aa, synthetic construct
PQIRTLA

SEQ ID NO: 103747 - protein, 7 aa, synthetic construct
KADYVPT

SEQ ID NO: 103748 - protein, 7 aa, synthetic construct
AISSQML

SEQ ID NO: 103749 - protein, 7 aa, synthetic construct
FDGRGDV

SEQ ID NO: 103750 - protein, 7 aa, synthetic construct
NFALNKM

SEQ ID NO: 103751 - protein, 7 aa, synthetic construct
IQFNART

SEQ ID NO: 103752 - protein, 7 aa, synthetic construct
GQGKLHY

SEQ ID NO: 103753 - protein, 7 aa, synthetic construct
TVYHVDH

SEQ ID NO: 103754 - protein, 7 aa, synthetic construct
EEWKTAV

SEQ ID NO: 103755 - protein, 7 aa, synthetic construct
NTAFMAG

SEQ ID NO: 103756 - protein, 7 aa, synthetic construct
DVKTMNI

SEQ ID NO: 103757 - protein, 7 aa, synthetic construct
VNLKYIG

SEQ ID NO: 103758 - protein, 7 aa, synthetic construct
GGHVNNV

SEQ ID NO: 103759 - protein, 7 aa, synthetic construct
MTYRNDH

SEQ ID NO: 103760 - protein, 7 aa, synthetic construct
NAKTSSG

SEQ ID NO: 103761 - protein, 7 aa, synthetic construct
QNVGGSW

SEQ ID NO: 103762 - protein, 7 aa, synthetic construct
LIEKKWE

SEQ ID NO: 103763 - protein, 7 aa, synthetic construct
AQNAMSD

SEQ ID NO: 103764 - protein, 7 aa, synthetic construct
QMGGGLR

SEQ ID NO: 103765 - protein, 7 aa, synthetic construct
AGAMKAY

SEQ ID NO: 103766 - protein, 7 aa, synthetic construct
PQKGTNS

SEQ ID NO: 103767 - protein, 7 aa, synthetic construct
DQKREEH

SEQ ID NO: 103768 - protein, 7 aa, synthetic construct
RHTHYNE

SEQ ID NO: 103769 - protein, 7 aa, synthetic construct
PSRMLET

SEQ ID NO: 103770 - protein, 7 aa, synthetic construct
SESRAQE

SEQ ID NO: 103771 - protein, 7 aa, synthetic construct
NAEYAHR

SEQ ID NO: 103772 - protein, 7 aa, synthetic construct
VMNNAEW

SEQ ID NO: 103773 - protein, 7 aa, synthetic construct
KLQVGGT

SEQ ID NO: 103774 - protein, 7 aa, synthetic construct
GSGVMVS

SEQ ID NO: 103775 - protein, 7 aa, synthetic construct
MRPDAKQ

SEQ ID NO: 103776 - protein, 7 aa, synthetic construct
GIFGNIH

SEQ ID NO: 103777 - protein, 7 aa, synthetic construct
KITVNHH

SEQ ID NO: 103778 - protein, 7 aa, synthetic construct
DQTYLKN

SEQ ID NO: 103779 - protein, 7 aa, synthetic construct
DAIKQGP

SEQ ID NO: 103780 - protein, 7 aa, synthetic construct
DQPLNQG

SEQ ID NO: 103781 - protein, 7 aa, synthetic construct
QWQKPGT

SEQ ID NO: 103782 - protein, 7 aa, synthetic construct
TASADRP

SEQ ID NO: 103783 - protein, 7 aa, synthetic construct
TETPGNK

SEQ ID NO: 103784 - protein, 7 aa, synthetic construct
MSDLVAA

SEQ ID NO: 103785 - protein, 7 aa, synthetic construct
PITGPLD

SEQ ID NO: 103786 - protein, 7 aa, synthetic construct
LHHDLSL

SEQ ID NO: 103787 - protein, 7 aa, synthetic construct
QHEHTMG

SEQ ID NO: 103788 - protein, 7 aa, synthetic construct
QEEPRKD

SEQ ID NO: 103789 - protein, 7 aa, synthetic construct
MPVMDAG

SEQ ID NO: 103790 - protein, 7 aa, synthetic construct
SIFNKQE

SEQ ID NO: 103791 - protein, 7 aa, synthetic construct
GNGTALP

SEQ ID NO: 103792 - protein, 7 aa, synthetic construct
SHNSRMQ

SEQ ID NO: 103793 - protein, 7 aa, synthetic construct
FADRDTQ

SEQ ID NO: 103794 - protein, 7 aa, synthetic construct
QRNPHIT

SEQ ID NO: 103795 - protein, 7 aa, synthetic construct
SAQPIAS

SEQ ID NO: 103796 - protein, 7 aa, synthetic construct
MNLHNKH

SEQ ID NO: 103797 - protein, 7 aa, synthetic construct
FASDRIA

SEQ ID NO: 103798 - protein, 7 aa, synthetic construct
PALHGKM

SEQ ID NO: 103799 - protein, 7 aa, synthetic construct
PHPDSFA

SEQ ID NO: 103800 - protein, 7 aa, synthetic construct
WHGFPNE

SEQ ID NO: 103801 - protein, 7 aa, synthetic construct
PMGKGIV

SEQ ID NO: 103802 - protein, 7 aa, synthetic construct
WKHMVDD

SEQ ID NO: 103803 - protein, 7 aa, synthetic construct
DIYPKGS

SEQ ID NO: 103804 - protein, 7 aa, synthetic construct
SYPGVGR

SEQ ID NO: 103805 - protein, 7 aa, synthetic construct
SEAVKLY

SEQ ID NO: 103806 - protein, 7 aa, synthetic construct
GMHMTNV

SEQ ID NO: 103807 - protein, 7 aa, synthetic construct
ATPNPLL

SEQ ID NO: 103808 - protein, 7 aa, synthetic construct
MKGGQIT

SEQ ID NO: 103809 - protein, 7 aa, synthetic construct
DEKIWNK

SEQ ID NO: 103810 - protein, 7 aa, synthetic construct
QREPQIF

SEQ ID NO: 103811 - protein, 7 aa, synthetic construct
NSNNMNM

SEQ ID NO: 103812 - protein, 7 aa, synthetic construct
VERNDRK

SEQ ID NO: 103813 - protein, 7 aa, synthetic construct
KEYAAAV

SEQ ID NO: 103814 - protein, 7 aa, synthetic construct
IINKYME

SEQ ID NO: 103815 - protein, 7 aa, synthetic construct
IENAQKG

SEQ ID NO: 103816 - protein, 7 aa, synthetic construct
IPEMKGD

SEQ ID NO: 103817 - protein, 7 aa, synthetic construct
VTQTGVT

SEQ ID NO: 103818 - protein, 7 aa, synthetic construct
YNDRQMV

SEQ ID NO: 103819 - protein, 7 aa, synthetic construct
AQNVGLD

SEQ ID NO: 103820 - protein, 7 aa, synthetic construct
YQEVDRN

SEQ ID NO: 103821 - protein, 7 aa, synthetic construct
VGSPEAI

SEQ ID NO: 103822 - protein, 7 aa, synthetic construct
YHESSHK

SEQ ID NO: 103823 - protein, 7 aa, synthetic construct
FDMRSDK

SEQ ID NO: 103824 - protein, 7 aa, synthetic construct
LSSAKIW

SEQ ID NO: 103825 - protein, 7 aa, synthetic construct
QPADRRY

SEQ ID NO: 103826 - protein, 7 aa, synthetic construct
IIKQMND

SEQ ID NO: 103827 - protein, 7 aa, synthetic construct
NTKDPDQ

SEQ ID NO: 103828 - protein, 7 aa, synthetic construct
AKRADWD

SEQ ID NO: 103829 - protein, 7 aa, synthetic construct
PDFNRQK

SEQ ID NO: 103830 - protein, 7 aa, synthetic construct
LNSAPKL

SEQ ID NO: 103831 - protein, 7 aa, synthetic construct
NKDYILA

SEQ ID NO: 103832 - protein, 7 aa, synthetic construct
WASTVPL

SEQ ID NO: 103833 - protein, 7 aa, synthetic construct
IKEAPMA

SEQ ID NO: 103834 - protein, 7 aa, synthetic construct
LPNLPVV

SEQ ID NO: 103835 - protein, 7 aa, synthetic construct
SQVFNHP

SEQ ID NO: 103836 - protein, 7 aa, synthetic construct
HSSGLHI

SEQ ID NO: 103837 - protein, 7 aa, synthetic construct
ASHSKNL

SEQ ID NO: 103838 - protein, 7 aa, synthetic construct
KPNNSIA

SEQ ID NO: 103839 - protein, 7 aa, synthetic construct
HIEMSFG

SEQ ID NO: 103840 - protein, 7 aa, synthetic construct
MFRGPTT

SEQ ID NO: 103841 - protein, 7 aa, synthetic construct
IDVKGSS

SEQ ID NO: 103842 - protein, 7 aa, synthetic construct
MKPVNAN

SEQ ID NO: 103843 - protein, 7 aa, synthetic construct
TPTYDKF

SEQ ID NO: 103844 - protein, 7 aa, synthetic construct
PGQGHRS

SEQ ID NO: 103845 - protein, 7 aa, synthetic construct
NKDFFVE

SEQ ID NO: 103846 - protein, 7 aa, synthetic construct
KQSNNAI

SEQ ID NO: 103847 - protein, 7 aa, synthetic construct
IAKIQGY

SEQ ID NO: 103848 - protein, 7 aa, synthetic construct
KVGNADI

SEQ ID NO: 103849 - protein, 7 aa, synthetic construct
SQKTQLE

SEQ ID NO: 103850 - protein, 7 aa, synthetic construct
PRELHAI

SEQ ID NO: 103851 - protein, 7 aa, synthetic construct
IKTSTIS

SEQ ID NO: 103852 - protein, 7 aa, synthetic construct
FQPLNKG

SEQ ID NO: 103853 - protein, 7 aa, synthetic construct
QILSPPT

SEQ ID NO: 103854 - protein, 7 aa, synthetic construct
KVHINLP

SEQ ID NO: 103855 - protein, 7 aa, synthetic construct
PKVSTMA

SEQ ID NO: 103856 - protein, 7 aa, synthetic construct
MFKNMEV

SEQ ID NO: 103857 - protein, 7 aa, synthetic construct
YNKHYAM

SEQ ID NO: 103858 - protein, 7 aa, synthetic construct
GATGPKT

SEQ ID NO: 103859 - protein, 7 aa, synthetic construct
NSSVNTM

SEQ ID NO: 103860 - protein, 7 aa, synthetic construct
EWNHVPP

SEQ ID NO: 103861 - protein, 7 aa, synthetic construct
TVNSSPF

SEQ ID NO: 103862 - protein, 7 aa, synthetic construct
SVFHPHD

SEQ ID NO: 103863 - protein, 7 aa, synthetic construct
TNESRGE

SEQ ID NO: 103864 - protein, 7 aa, synthetic construct
TQTNYLK

SEQ ID NO: 103865 - protein, 7 aa, synthetic construct
RKEVVVD

SEQ ID NO: 103866 - protein, 7 aa, synthetic construct
NLDMVTR

SEQ ID NO: 103867 - protein, 7 aa, synthetic construct
IVHMMRD

SEQ ID NO: 103868 - protein, 7 aa, synthetic construct
MGVESRH

SEQ ID NO: 103869 - protein, 7 aa, synthetic construct
HMAQQQI

SEQ ID NO: 103870 - protein, 7 aa, synthetic construct
THNRAVY

SEQ ID NO: 103871 - protein, 7 aa, synthetic construct
HDGKPHH

SEQ ID NO: 103872 - protein, 7 aa, synthetic construct
FMKHGEQ

SEQ ID NO: 103873 - protein, 7 aa, synthetic construct
DIGSMMR

SEQ ID NO: 103874 - protein, 7 aa, synthetic construct
TRLNDTP

SEQ ID NO: 103875 - protein, 7 aa, synthetic construct
TDVTLKT

SEQ ID NO: 103876 - protein, 7 aa, synthetic construct
DHNEYRR

SEQ ID NO: 103877 - protein, 7 aa, synthetic construct
AKLKEGD

SEQ ID NO: 103878 - protein, 7 aa, synthetic construct
NGNGDYS

SEQ ID NO: 103879 - protein, 7 aa, synthetic construct
LSKEARW

SEQ ID NO: 103880 - protein, 7 aa, synthetic construct
NQTQSVF

SEQ ID NO: 103881 - protein, 7 aa, synthetic construct
ILSVRMG

SEQ ID NO: 103882 - protein, 7 aa, synthetic construct
HPGQLNR

SEQ ID NO: 103883 - protein, 7 aa, synthetic construct
SATANFI

SEQ ID NO: 103884 - protein, 7 aa, synthetic construct
RIDQRSM

SEQ ID NO: 103885 - protein, 7 aa, synthetic construct
HVATVEI

SEQ ID NO: 103886 - protein, 7 aa, synthetic construct
APRMVIN

SEQ ID NO: 103887 - protein, 7 aa, synthetic construct
GVGNGER

SEQ ID NO: 103888 - protein, 7 aa, synthetic construct
TYHENIR

SEQ ID NO: 103889 - protein, 7 aa, synthetic construct
QGQKQSP

SEQ ID NO: 103890 - protein, 7 aa, synthetic construct
VRANEEF

SEQ ID NO: 103891 - protein, 7 aa, synthetic construct
TDATYTS

SEQ ID NO: 103892 - protein, 7 aa, synthetic construct
PFDISTK

SEQ ID NO: 103893 - protein, 7 aa, synthetic construct
GMNTTHV

SEQ ID NO: 103894 - protein, 7 aa, synthetic construct
DTRMRID

SEQ ID NO: 103895 - protein, 7 aa, synthetic construct
TKPYVPH

SEQ ID NO: 103896 - protein, 7 aa, synthetic construct
MGHSNLY

SEQ ID NO: 103897 - protein, 7 aa, synthetic construct
RNEYQGR

SEQ ID NO: 103898 - protein, 7 aa, synthetic construct
HKHGHLV

SEQ ID NO: 103899 - protein, 7 aa, synthetic construct
PPLDRPY

SEQ ID NO: 103900 - protein, 7 aa, synthetic construct
TSHQNIQ

SEQ ID NO: 103901 - protein, 7 aa, synthetic construct
IKEFREP

SEQ ID NO: 103902 - protein, 7 aa, synthetic construct
TLFKERV

SEQ ID NO: 103903 - protein, 7 aa, synthetic construct
WKPHGTS

SEQ ID NO: 103904 - protein, 7 aa, synthetic construct
QPSQTTH

SEQ ID NO: 103905 - protein, 7 aa, synthetic construct
NHPPQVM

SEQ ID NO: 103906 - protein, 7 aa, synthetic construct
QQQAGYL

SEQ ID NO: 103907 - protein, 7 aa, synthetic construct
ISGQGAR

SEQ ID NO: 103908 - protein, 7 aa, synthetic construct
SMKSSTG

SEQ ID NO: 103909 - protein, 7 aa, synthetic construct
EGIGMAV

SEQ ID NO: 103910 - protein, 7 aa, synthetic construct
PDAPRMQ

SEQ ID NO: 103911 - protein, 7 aa, synthetic construct
FQKMGAT

SEQ ID NO: 103912 - protein, 7 aa, synthetic construct
EQPFRLA

SEQ ID NO: 103913 - protein, 7 aa, synthetic construct
AHAERQT

SEQ ID NO: 103914 - protein, 7 aa, synthetic construct
AKNYNEV

SEQ ID NO: 103915 - protein, 7 aa, synthetic construct
SRNSSQP

SEQ ID NO: 103916 - protein, 7 aa, synthetic construct
KFLHSQD

SEQ ID NO: 103917 - protein, 7 aa, synthetic construct
IVPPNNV

SEQ ID NO: 103918 - protein, 7 aa, synthetic construct
KEKMVRE

SEQ ID NO: 103919 - protein, 7 aa, synthetic construct
RLQADVS

SEQ ID NO: 103920 - protein, 7 aa, synthetic construct
RQFAAAI

SEQ ID NO: 103921 - protein, 7 aa, synthetic construct
FPHNSVL

SEQ ID NO: 103922 - protein, 7 aa, synthetic construct
APYDRKS

SEQ ID NO: 103923 - protein, 7 aa, synthetic construct
RHHPFQE

SEQ ID NO: 103924 - protein, 7 aa, synthetic construct
ANSQVTF

SEQ ID NO: 103925 - protein, 7 aa, synthetic construct
QYLSSAH

SEQ ID NO: 103926 - protein, 7 aa, synthetic construct
LERKWDM

SEQ ID NO: 103927 - protein, 7 aa, synthetic construct
DHIHLPP

SEQ ID NO: 103928 - protein, 7 aa, synthetic construct
MIVNQTH

SEQ ID NO: 103929 - protein, 7 aa, synthetic construct
VTSFINA

SEQ ID NO: 103930 - protein, 7 aa, synthetic construct
FPPGTNK

SEQ ID NO: 103931 - protein, 7 aa, synthetic construct
AKTELGM

SEQ ID NO: 103932 - protein, 7 aa, synthetic construct
RLREQHL

SEQ ID NO: 103933 - protein, 7 aa, synthetic construct
GKEVVRA

SEQ ID NO: 103934 - protein, 7 aa, synthetic construct
DHHLMKD

SEQ ID NO: 103935 - protein, 7 aa, synthetic construct
TDRMILG

SEQ ID NO: 103936 - protein, 7 aa, synthetic construct
TLNVKDF

SEQ ID NO: 103937 - protein, 7 aa, synthetic construct
RVTPGDT

SEQ ID NO: 103938 - protein, 7 aa, synthetic construct
GVINSDK

SEQ ID NO: 103939 - protein, 7 aa, synthetic construct
YFRSMAD

SEQ ID NO: 103940 - protein, 7 aa, synthetic construct
ADPQHGP

SEQ ID NO: 103941 - protein, 7 aa, synthetic construct
MRFDLKP

SEQ ID NO: 103942 - protein, 7 aa, synthetic construct
PNPTSAK

SEQ ID NO: 103943 - protein, 7 aa, synthetic construct
DSLSKVI

SEQ ID NO: 103944 - protein, 7 aa, synthetic construct
SSFEGND

SEQ ID NO: 103945 - protein, 7 aa, synthetic construct
DPNNHLN

SEQ ID NO: 103946 - protein, 7 aa, synthetic construct
WKVGDLH

SEQ ID NO: 103947 - protein, 7 aa, synthetic construct
KLENTHN

SEQ ID NO: 103948 - protein, 7 aa, synthetic construct
NSTTGGS

SEQ ID NO: 103949 - protein, 7 aa, synthetic construct
APHYSED

SEQ ID NO: 103950 - protein, 7 aa, synthetic construct
RETRLDP

SEQ ID NO: 103951 - protein, 7 aa, synthetic construct
KQHPLAE

SEQ ID NO: 103952 - protein, 7 aa, synthetic construct
HHSLRDI

SEQ ID NO: 103953 - protein, 7 aa, synthetic construct
HKTEVFH

SEQ ID NO: 103954 - protein, 7 aa, synthetic construct
ETLRGEK

SEQ ID NO: 103955 - protein, 7 aa, synthetic construct
LEDMPRN

SEQ ID NO: 103956 - protein, 7 aa, synthetic construct
TKMTGYH

SEQ ID NO: 103957 - protein, 7 aa, synthetic construct
YEVFKAE

SEQ ID NO: 103958 - protein, 7 aa, synthetic construct
FKMDDTG

SEQ ID NO: 103959 - protein, 7 aa, synthetic construct
NYPRDIS

SEQ ID NO: 103960 - protein, 7 aa, synthetic construct
ARDALAY

SEQ ID NO: 103961 - protein, 7 aa, synthetic construct
GNGKNYP

SEQ ID NO: 103962 - protein, 7 aa, synthetic construct
FKSGFDM

SEQ ID NO: 103963 - protein, 7 aa, synthetic construct
GEPVLKF

SEQ ID NO: 103964 - protein, 7 aa, synthetic construct
TYDTKAE

SEQ ID NO: 103965 - protein, 7 aa, synthetic construct
IHVDKPW

SEQ ID NO: 103966 - protein, 7 aa, synthetic construct
HAERTMI

SEQ ID NO: 103967 - protein, 7 aa, synthetic construct
ELAYSRV

SEQ ID NO: 103968 - protein, 7 aa, synthetic construct
QMHKMAP

SEQ ID NO: 103969 - protein, 7 aa, synthetic construct
QMRHLPH

SEQ ID NO: 103970 - protein, 7 aa, synthetic construct
PLLQRIA

SEQ ID NO: 103971 - protein, 7 aa, synthetic construct
SEKTDRE

SEQ ID NO: 103972 - protein, 7 aa, synthetic construct
PGNRMQP

SEQ ID NO: 103973 - protein, 7 aa, synthetic construct
IQRTGTI

SEQ ID NO: 103974 - protein, 7 aa, synthetic construct
WFGSEQP

SEQ ID NO: 103975 - protein, 7 aa, synthetic construct
PPTYTVA

SEQ ID NO: 103976 - protein, 7 aa, synthetic construct
LHPNAPA

SEQ ID NO: 103977 - protein, 7 aa, synthetic construct
PQKLQMN

SEQ ID NO: 103978 - protein, 7 aa, synthetic construct
FQVNNYP

SEQ ID NO: 103979 - protein, 7 aa, synthetic construct
SKKYENT

SEQ ID NO: 103980 - protein, 7 aa, synthetic construct
NNGHRTY

SEQ ID NO: 103981 - protein, 7 aa, synthetic construct
RDTLSQL

SEQ ID NO: 103982 - protein, 7 aa, synthetic construct
TAPDAPH

SEQ ID NO: 103983 - protein, 7 aa, synthetic construct
YANNATI

SEQ ID NO: 103984 - protein, 7 aa, synthetic construct
SLEKKMP

SEQ ID NO: 103985 - protein, 7 aa, synthetic construct
QIHQPQY

SEQ ID NO: 103986 - protein, 7 aa, synthetic construct
TEALAPR

SEQ ID NO: 103987 - protein, 7 aa, synthetic construct
SMVVSKM

SEQ ID NO: 103988 - protein, 7 aa, synthetic construct
GISSGQG

SEQ ID NO: 103989 - protein, 7 aa, synthetic construct
QESIFPP

SEQ ID NO: 103990 - protein, 7 aa, synthetic construct
QEMSPII

SEQ ID NO: 103991 - protein, 7 aa, synthetic construct
AQESSRD

SEQ ID NO: 103992 - protein, 7 aa, synthetic construct
EPVARSW

SEQ ID NO: 103993 - protein, 7 aa, synthetic construct
FGNADVS

SEQ ID NO: 103994 - protein, 7 aa, synthetic construct
GYPHSLA

SEQ ID NO: 103995 - protein, 7 aa, synthetic construct
TNSNEYF

SEQ ID NO: 103996 - protein, 7 aa, synthetic construct
KPISAPE

SEQ ID NO: 103997 - protein, 7 aa, synthetic construct
KEGSSHG

SEQ ID NO: 103998 - protein, 7 aa, synthetic construct
TPDFKIS

SEQ ID NO: 103999 - protein, 7 aa, synthetic construct
TNEKQIK

SEQ ID NO: 104000 - protein, 7 aa, synthetic construct
FSPDGPF

SEQ ID NO: 104001 - protein, 7 aa, synthetic construct
TMNTAQG

SEQ ID NO: 104002 - protein, 7 aa, synthetic construct
HSQGNPH

SEQ ID NO: 104003 - protein, 7 aa, synthetic construct
SPKTSMA

SEQ ID NO: 104004 - protein, 7 aa, synthetic construct
ENGYTGP

SEQ ID NO: 104005 - protein, 7 aa, synthetic construct
IDRGKVP

SEQ ID NO: 104006 - protein, 7 aa, synthetic construct
TGTNKQA

SEQ ID NO: 104007 - protein, 7 aa, synthetic construct
GASPPSL

SEQ ID NO: 104008 - protein, 7 aa, synthetic construct
VMPQEQA

SEQ ID NO: 104009 - protein, 7 aa, synthetic construct
PAVDGKG

SEQ ID NO: 104010 - protein, 7 aa, synthetic construct
VQAVVNR

SEQ ID NO: 104011 - protein, 7 aa, synthetic construct
PQGGDRR

SEQ ID NO: 104012 - protein, 7 aa, synthetic construct
TFHLVHD

SEQ ID NO: 104013 - protein, 7 aa, synthetic construct
AEQIDGR

SEQ ID NO: 104014 - protein, 7 aa, synthetic construct
PNSGIQR

SEQ ID NO: 104015 - protein, 7 aa, synthetic construct
HNAIEPY

SEQ ID NO: 104016 - protein, 7 aa, synthetic construct
DQNLKSH

SEQ ID NO: 104017 - protein, 7 aa, synthetic construct
AYAPNSI

SEQ ID NO: 104018 - protein, 7 aa, synthetic construct
SYGNGNP

SEQ ID NO: 104019 - protein, 7 aa, synthetic construct
WPPSVPP

SEQ ID NO: 104020 - protein, 7 aa, synthetic construct
RKDITHV

SEQ ID NO: 104021 - protein, 7 aa, synthetic construct
YMVNNRT

SEQ ID NO: 104022 - protein, 7 aa, synthetic construct
KIHDGYK

SEQ ID NO: 104023 - protein, 7 aa, synthetic construct
MAINQHL

SEQ ID NO: 104024 - protein, 7 aa, synthetic construct
IFQNPVP

SEQ ID NO: 104025 - protein, 7 aa, synthetic construct
MQGMEVK

SEQ ID NO: 104026 - protein, 7 aa, synthetic construct
VFPDGQN

SEQ ID NO: 104027 - protein, 7 aa, synthetic construct
EKMIHQD

SEQ ID NO: 104028 - protein, 7 aa, synthetic construct
LYMKLGN

SEQ ID NO: 104029 - protein, 7 aa, synthetic construct
NDYEGRT

SEQ ID NO: 104030 - protein, 7 aa, synthetic construct
GSNDPVH

SEQ ID NO: 104031 - protein, 7 aa, synthetic construct
IPATALH

SEQ ID NO: 104032 - protein, 7 aa, synthetic construct
NSASIGL

SEQ ID NO: 104033 - protein, 7 aa, synthetic construct
EPSKDGR

SEQ ID NO: 104034 - protein, 7 aa, synthetic construct
LEGRHGP

SEQ ID NO: 104035 - protein, 7 aa, synthetic construct
KPQFDGT

SEQ ID NO: 104036 - protein, 7 aa, synthetic construct
EYQRSIE

SEQ ID NO: 104037 - protein, 7 aa, synthetic construct
TTSEHVL

SEQ ID NO: 104038 - protein, 7 aa, synthetic construct
NDQSRHH

SEQ ID NO: 104039 - protein, 7 aa, synthetic construct
KQEKGMS

SEQ ID NO: 104040 - protein, 7 aa, synthetic construct
LARYQEK

SEQ ID NO: 104041 - protein, 7 aa, synthetic construct
VRPPVGV

SEQ ID NO: 104042 - protein, 7 aa, synthetic construct
DNQRKSP

SEQ ID NO: 104043 - protein, 7 aa, synthetic construct
YSTSHGH

SEQ ID NO: 104044 - protein, 7 aa, synthetic construct
GRENQLT

SEQ ID NO: 104045 - protein, 7 aa, synthetic construct
TRNLFVE

SEQ ID NO: 104046 - protein, 7 aa, synthetic construct
DWHNEKR

SEQ ID NO: 104047 - protein, 7 aa, synthetic construct
WYTAEKE

SEQ ID NO: 104048 - protein, 7 aa, synthetic construct
PHQLKYN

SEQ ID NO: 104049 - protein, 7 aa, synthetic construct
LKQHQFQ

SEQ ID NO: 104050 - protein, 7 aa, synthetic construct
FASENTP

SEQ ID NO: 104051 - protein, 7 aa, synthetic construct
IFELGHH

SEQ ID NO: 104052 - protein, 7 aa, synthetic construct
TDNWNTP

SEQ ID NO: 104053 - protein, 7 aa, synthetic construct
MHHRGMA

SEQ ID NO: 104054 - protein, 7 aa, synthetic construct
NLVDKDR

SEQ ID NO: 104055 - protein, 7 aa, synthetic construct
NAMQMVV

SEQ ID NO: 104056 - protein, 7 aa, synthetic construct
AQDKPHQ

SEQ ID NO: 104057 - protein, 7 aa, synthetic construct
RSTVSLA

SEQ ID NO: 104058 - protein, 7 aa, synthetic construct
RTGDAQH

SEQ ID NO: 104059 - protein, 7 aa, synthetic construct
IVHAPHP

SEQ ID NO: 104060 - protein, 7 aa, synthetic construct
RGVIEEF

SEQ ID NO: 104061 - protein, 7 aa, synthetic construct
MLEPWKG

SEQ ID NO: 104062 - protein, 7 aa, synthetic construct
AKSDDVA

SEQ ID NO: 104063 - protein, 7 aa, synthetic construct
VRMDMGA

SEQ ID NO: 104064 - protein, 7 aa, synthetic construct
NGLMSHI

SEQ ID NO: 104065 - protein, 7 aa, synthetic construct
EPAMMLA

SEQ ID NO: 104066 - protein, 7 aa, synthetic construct
KQMPIKE

SEQ ID NO: 104067 - protein, 7 aa, synthetic construct
FYGENLS

SEQ ID NO: 104068 - protein, 7 aa, synthetic construct
ALRERPY

SEQ ID NO: 104069 - protein, 7 aa, synthetic construct
WEATWKD

SEQ ID NO: 104070 - protein, 7 aa, synthetic construct
AMVRPNH

SEQ ID NO: 104071 - protein, 7 aa, synthetic construct
DFVNPGA

SEQ ID NO: 104072 - protein, 7 aa, synthetic construct
SIGHTEL

SEQ ID NO: 104073 - protein, 7 aa, synthetic construct
DQFEIQS

SEQ ID NO: 104074 - protein, 7 aa, synthetic construct
PIADYLP

SEQ ID NO: 104075 - protein, 7 aa, synthetic construct
TKMELKH

SEQ ID NO: 104076 - protein, 7 aa, synthetic construct
LMSLKGN

SEQ ID NO: 104077 - protein, 7 aa, synthetic construct
IHKTFDQ

SEQ ID NO: 104078 - protein, 7 aa, synthetic construct
TDGMVRM

SEQ ID NO: 104079 - protein, 7 aa, synthetic construct
PGPISNA

SEQ ID NO: 104080 - protein, 7 aa, synthetic construct
GTFDVRN

SEQ ID NO: 104081 - protein, 7 aa, synthetic construct
NRFTVMD

SEQ ID NO: 104082 - protein, 7 aa, synthetic construct
AMTHNEI

SEQ ID NO: 104083 - protein, 7 aa, synthetic construct
SRNNFAM

SEQ ID NO: 104084 - protein, 7 aa, synthetic construct
RNVIAPQ

SEQ ID NO: 104085 - protein, 7 aa, synthetic construct
SAAPFGH

SEQ ID NO: 104086 - protein, 7 aa, synthetic construct
GNIDAQG

SEQ ID NO: 104087 - protein, 7 aa, synthetic construct
RDHSHYH

SEQ ID NO: 104088 - protein, 7 aa, synthetic construct
GIKMNFN

SEQ ID NO: 104089 - protein, 7 aa, synthetic construct
LTGWNDA

SEQ ID NO: 104090 - protein, 7 aa, synthetic construct
DSRASFS

SEQ ID NO: 104091 - protein, 7 aa, synthetic construct
QLLGKLS

SEQ ID NO: 104092 - protein, 7 aa, synthetic construct
KRTNEDV

SEQ ID NO: 104093 - protein, 7 aa, synthetic construct
MIRKGEH

SEQ ID NO: 104094 - protein, 7 aa, synthetic construct
FLHVATA

SEQ ID NO: 104095 - protein, 7 aa, synthetic construct
MMSAIPS

SEQ ID NO: 104096 - protein, 7 aa, synthetic construct
PPEKGHH

SEQ ID NO: 104097 - protein, 7 aa, synthetic construct
WRDNNDI

SEQ ID NO: 104098 - protein, 7 aa, synthetic construct
FSIKKSE

SEQ ID NO: 104099 - protein, 7 aa, synthetic construct
KYYDATS

SEQ ID NO: 104100 - protein, 7 aa, synthetic construct
HIAKNYL

SEQ ID NO: 104101 - protein, 7 aa, synthetic construct
RGASESE

SEQ ID NO: 104102 - protein, 7 aa, synthetic construct
QYHSMGG

SEQ ID NO: 104103 - protein, 7 aa, synthetic construct
SRIRMDD

SEQ ID NO: 104104 - protein, 7 aa, synthetic construct
MPASTPR

SEQ ID NO: 104105 - protein, 7 aa, synthetic construct
FEAVKSA

SEQ ID NO: 104106 - protein, 7 aa, synthetic construct
QPHFKPL

SEQ ID NO: 104107 - protein, 7 aa, synthetic construct
WIPKKDH

SEQ ID NO: 104108 - protein, 7 aa, synthetic construct
AKGDVIA

SEQ ID NO: 104109 - protein, 7 aa, synthetic construct
RVGNVLQ

SEQ ID NO: 104110 - protein, 7 aa, synthetic construct
AGSRMDD

SEQ ID NO: 104111 - protein, 7 aa, synthetic construct
KMQMEQL

SEQ ID NO: 104112 - protein, 7 aa, synthetic construct
IKDSPGN

SEQ ID NO: 104113 - protein, 7 aa, synthetic construct
TVNGVKQ

SEQ ID NO: 104114 - protein, 7 aa, synthetic construct
MQAIGDS

SEQ ID NO: 104115 - protein, 7 aa, synthetic construct
NNWQLSG

SEQ ID NO: 104116 - protein, 7 aa, synthetic construct
DMERATY

SEQ ID NO: 104117 - protein, 7 aa, synthetic construct
IKDQGVI

SEQ ID NO: 104118 - protein, 7 aa, synthetic construct
PATIADS

SEQ ID NO: 104119 - protein, 7 aa, synthetic construct
KKLDDMT

SEQ ID NO: 104120 - protein, 7 aa, synthetic construct
FGQTHRH

SEQ ID NO: 104121 - protein, 7 aa, synthetic construct
QQFENSA

SEQ ID NO: 104122 - protein, 7 aa, synthetic construct
LGGSPIA

SEQ ID NO: 104123 - protein, 7 aa, synthetic construct
SFPNSTS

SEQ ID NO: 104124 - protein, 7 aa, synthetic construct
GGMHPAT

SEQ ID NO: 104125 - protein, 7 aa, synthetic construct
VLDTSAV

SEQ ID NO: 104126 - protein, 7 aa, synthetic construct
DHRFPPV

SEQ ID NO: 104127 - protein, 7 aa, synthetic construct
MKTGEAI

SEQ ID NO: 104128 - protein, 7 aa, synthetic construct
QKYVVGV

SEQ ID NO: 104129 - protein, 7 aa, synthetic construct
NQDLNGK

SEQ ID NO: 104130 - protein, 7 aa, synthetic construct
KGQSTNP

SEQ ID NO: 104131 - protein, 7 aa, synthetic construct
RVEGNAA

SEQ ID NO: 104132 - protein, 7 aa, synthetic construct
PGNKAMG

SEQ ID NO: 104133 - protein, 7 aa, synthetic construct
QFVQIKP

SEQ ID NO: 104134 - protein, 7 aa, synthetic construct
VVHNAPN

SEQ ID NO: 104135 - protein, 7 aa, synthetic construct
AKMTGTG

SEQ ID NO: 104136 - protein, 7 aa, synthetic construct
RSAPDKI

SEQ ID NO: 104137 - protein, 7 aa, synthetic construct
VATNGEH

SEQ ID NO: 104138 - protein, 7 aa, synthetic construct
KDYLSAV

SEQ ID NO: 104139 - protein, 7 aa, synthetic construct
DNGGVNI

SEQ ID NO: 104140 - protein, 7 aa, synthetic construct
VAIEKGW

SEQ ID NO: 104141 - protein, 7 aa, synthetic construct
HHARNEA

SEQ ID NO: 104142 - protein, 7 aa, synthetic construct
QRSGMEC

SEQ ID NO: 104143 - protein, 7 aa, synthetic construct
KLSAGDW

SEQ ID NO: 104144 - protein, 7 aa, synthetic construct
LKNVWEP

SEQ ID NO: 104145 - protein, 7 aa, synthetic construct
IQRGHSY

SEQ ID NO: 104146 - protein, 7 aa, synthetic construct
NVNHYTL

SEQ ID NO: 104147 - protein, 7 aa, synthetic construct
IAGGADF

SEQ ID NO: 104148 - protein, 7 aa, synthetic construct
YPITVAS

SEQ ID NO: 104149 - protein, 7 aa, synthetic construct
EPIRLGR

SEQ ID NO: 104150 - protein, 7 aa, synthetic construct
MPQDPSV

SEQ ID NO: 104151 - protein, 7 aa, synthetic construct
RQLETVN

SEQ ID NO: 104152 - protein, 7 aa, synthetic construct
MPMEENK

SEQ ID NO: 104153 - protein, 7 aa, synthetic construct
LQKYNEE

SEQ ID NO: 104154 - protein, 7 aa, synthetic construct
GKGAIQL

SEQ ID NO: 104155 - protein, 7 aa, synthetic construct
YAEQNGY

SEQ ID NO: 104156 - protein, 7 aa, synthetic construct
KHVDIAG

SEQ ID NO: 104157 - protein, 7 aa, synthetic construct
RSQPHIN

SEQ ID NO: 104158 - protein, 7 aa, synthetic construct
QNFEAHP

SEQ ID NO: 104159 - protein, 7 aa, synthetic construct
PTVSPGR

SEQ ID NO: 104160 - protein, 7 aa, synthetic construct
FPSGFPM

SEQ ID NO: 104161 - protein, 7 aa, synthetic construct
LQFAVNG

SEQ ID NO: 104162 - protein, 7 aa, synthetic construct
KTTQPAG

SEQ ID NO: 104163 - protein, 7 aa, synthetic construct
QMSHNPI

SEQ ID NO: 104164 - protein, 7 aa, synthetic construct
PSDHNQL

SEQ ID NO: 104165 - protein, 7 aa, synthetic construct
NKSSHYN

SEQ ID NO: 104166 - protein, 7 aa, synthetic construct
LITADHR

SEQ ID NO: 104167 - protein, 7 aa, synthetic construct
HINWNAD

SEQ ID NO: 104168 - protein, 7 aa, synthetic construct
EHAAMTV

SEQ ID NO: 104169 - protein, 7 aa, synthetic construct
APLIINS

SEQ ID NO: 104170 - protein, 7 aa, synthetic construct
TNRNPYI

SEQ ID NO: 104171 - protein, 7 aa, synthetic construct
SLSKHQW

SEQ ID NO: 104172 - protein, 7 aa, synthetic construct
TMVPNNM

SEQ ID NO: 104173 - protein, 7 aa, synthetic construct
WQSGENV

SEQ ID NO: 104174 - protein, 7 aa, synthetic construct
TFARDIA

SEQ ID NO: 104175 - protein, 7 aa, synthetic construct
PLTGDHY

SEQ ID NO: 104176 - protein, 7 aa, synthetic construct
REGSEMS

SEQ ID NO: 104177 - protein, 7 aa, synthetic construct
QVDPHSR

SEQ ID NO: 104178 - protein, 7 aa, synthetic construct
GNIDRNY

SEQ ID NO: 104179 - protein, 7 aa, synthetic construct
QGHTPTS

SEQ ID NO: 104180 - protein, 7 aa, synthetic construct
IVVKDLV

SEQ ID NO: 104181 - protein, 7 aa, synthetic construct
YNMVLNP

SEQ ID NO: 104182 - protein, 7 aa, synthetic construct
HHGHPQT

SEQ ID NO: 104183 - protein, 7 aa, synthetic construct
LHSQIVE

SEQ ID NO: 104184 - protein, 7 aa, synthetic construct
VKGIVHN

SEQ ID NO: 104185 - protein, 7 aa, synthetic construct
MDHWHPE

SEQ ID NO: 104186 - protein, 7 aa, synthetic construct
IVEGRNN

SEQ ID NO: 104187 - protein, 7 aa, synthetic construct
HQLATVD

SEQ ID NO: 104188 - protein, 7 aa, synthetic construct
IKFGDEY

SEQ ID NO: 104189 - protein, 7 aa, synthetic construct
IDLEKRA

SEQ ID NO: 104190 - protein, 7 aa, synthetic construct
AGNSSVW

SEQ ID NO: 104191 - protein, 7 aa, synthetic construct
TPIIQIA

SEQ ID NO: 104192 - protein, 7 aa, synthetic construct
SVKYGQP

SEQ ID NO: 104193 - protein, 7 aa, synthetic construct
TREPELR

SEQ ID NO: 104194 - protein, 7 aa, synthetic construct
YKEYRQD

SEQ ID NO: 104195 - protein, 7 aa, synthetic construct
DLMTKQP

SEQ ID NO: 104196 - protein, 7 aa, synthetic construct
PKTGNAE

SEQ ID NO: 104197 - protein, 7 aa, synthetic construct
MHASTHS

SEQ ID NO: 104198 - protein, 7 aa, synthetic construct
AGHKPHL

SEQ ID NO: 104199 - protein, 7 aa, synthetic construct
FREHNAT

SEQ ID NO: 104200 - protein, 7 aa, synthetic construct
DSMQKHL

SEQ ID NO: 104201 - protein, 7 aa, synthetic construct
TSERLET

SEQ ID NO: 104202 - protein, 7 aa, synthetic construct
HNDAPYG

SEQ ID NO: 104203 - protein, 7 aa, synthetic construct
KQFAIDE

SEQ ID NO: 104204 - protein, 7 aa, synthetic construct
LNWEAKT

SEQ ID NO: 104205 - protein, 7 aa, synthetic construct
QLQYQKI

SEQ ID NO: 104206 - protein, 7 aa, synthetic construct
GNYGEVL

SEQ ID NO: 104207 - protein, 7 aa, synthetic construct
VKQDGTK

SEQ ID NO: 104208 - protein, 7 aa, synthetic construct
NHPYNVA

SEQ ID NO: 104209 - protein, 7 aa, synthetic construct
GWAGIDG

SEQ ID NO: 104210 - protein, 7 aa, synthetic construct
LKVDYRS

SEQ ID NO: 104211 - protein, 7 aa, synthetic construct
KDLTASQ

SEQ ID NO: 104212 - protein, 7 aa, synthetic construct
IAGVMIP

SEQ ID NO: 104213 - protein, 7 aa, synthetic construct
HPRGVII

SEQ ID NO: 104214 - protein, 7 aa, synthetic construct
MTKGVYH

SEQ ID NO: 104215 - protein, 7 aa, synthetic construct
LMHGHLS

SEQ ID NO: 104216 - protein, 7 aa, synthetic construct
VTVSMQD

SEQ ID NO: 104217 - protein, 7 aa, synthetic construct
SVFEGRG

SEQ ID NO: 104218 - protein, 7 aa, synthetic construct
KISETKY

SEQ ID NO: 104219 - protein, 7 aa, synthetic construct
YTEWKGP

SEQ ID NO: 104220 - protein, 7 aa, synthetic construct
KSMKDQP

SEQ ID NO: 104221 - protein, 7 aa, synthetic construct
DRGDSVS

SEQ ID NO: 104222 - protein, 7 aa, synthetic construct
SHGMIPM

SEQ ID NO: 104223 - protein, 7 aa, synthetic construct
SHSPQGL

SEQ ID NO: 104224 - protein, 7 aa, synthetic construct
VDAYADK

SEQ ID NO: 104225 - protein, 7 aa, synthetic construct
NQQKIPY

SEQ ID NO: 104226 - protein, 7 aa, synthetic construct
MILQAQP

SEQ ID NO: 104227 - protein, 7 aa, synthetic construct
PRQRNEL

SEQ ID NO: 104228 - protein, 7 aa, synthetic construct
AGRFGQT

SEQ ID NO: 104229 - protein, 7 aa, synthetic construct
QNAGNVW

SEQ ID NO: 104230 - protein, 7 aa, synthetic construct
FHEGYQP

SEQ ID NO: 104231 - protein, 7 aa, synthetic construct
FVVRAAD

SEQ ID NO: 104232 - protein, 7 aa, synthetic construct
GSVPEPM

SEQ ID NO: 104233 - protein, 7 aa, synthetic construct
INAEGDT

SEQ ID NO: 104234 - protein, 7 aa, synthetic construct
LQMTSAH

SEQ ID NO: 104235 - protein, 7 aa, synthetic construct
NKVHTTW

SEQ ID NO: 104236 - protein, 7 aa, synthetic construct
VDYPPQK

SEQ ID NO: 104237 - protein, 7 aa, synthetic construct
ETTHTHL

SEQ ID NO: 104238 - protein, 7 aa, synthetic construct
GMMAQMA

SEQ ID NO: 104239 - protein, 7 aa, synthetic construct
QPAWNQD

SEQ ID NO: 104240 - protein, 7 aa, synthetic construct
KGQAHEE

SEQ ID NO: 104241 - protein, 7 aa, synthetic construct
DYSRISH

SEQ ID NO: 104242 - protein, 7 aa, synthetic construct
IENRPIM

SEQ ID NO: 104243 - protein, 7 aa, synthetic construct
TPTHVID

SEQ ID NO: 104244 - protein, 7 aa, synthetic construct
TSGEYAH

SEQ ID NO: 104245 - protein, 7 aa, synthetic construct
PNPTRTN

SEQ ID NO: 104246 - protein, 7 aa, synthetic construct
MTRGEKA

SEQ ID NO: 104247 - protein, 7 aa, synthetic construct
KDTEHYI

SEQ ID NO: 104248 - protein, 7 aa, synthetic construct
YNLHANY

SEQ ID NO: 104249 - protein, 7 aa, synthetic construct
HPKATSE

SEQ ID NO: 104250 - protein, 7 aa, synthetic construct
RDRAGLV

SEQ ID NO: 104251 - protein, 7 aa, synthetic construct
SGGQIKW

SEQ ID NO: 104252 - protein, 7 aa, synthetic construct
KRSAIMD

SEQ ID NO: 104253 - protein, 7 aa, synthetic construct
EYRMGTT

SEQ ID NO: 104254 - protein, 7 aa, synthetic construct
AQMPGLM

SEQ ID NO: 104255 - protein, 7 aa, synthetic construct
KDNAIYY

SEQ ID NO: 104256 - protein, 7 aa, synthetic construct
HQPRINE

SEQ ID NO: 104257 - protein, 7 aa, synthetic construct
ATYKAIQ

SEQ ID NO: 104258 - protein, 7 aa, synthetic construct
PELKETG

SEQ ID NO: 104259 - protein, 7 aa, synthetic construct
VEPKNDR

SEQ ID NO: 104260 - protein, 7 aa, synthetic construct
MNVSKGL

SEQ ID NO: 104261 - protein, 7 aa, synthetic construct
GPMNPST

SEQ ID NO: 104262 - protein, 7 aa, synthetic construct
SGAAQDP

SEQ ID NO: 104263 - protein, 7 aa, synthetic construct
YFSGIQS

SEQ ID NO: 104264 - protein, 7 aa, synthetic construct
PGYTVMA

SEQ ID NO: 104265 - protein, 7 aa, synthetic construct
GVDPPKV

SEQ ID NO: 104266 - protein, 7 aa, synthetic construct
GTGSEAK

SEQ ID NO: 104267 - protein, 7 aa, synthetic construct
LVDKVVS

SEQ ID NO: 104268 - protein, 7 aa, synthetic construct
NSQLKPS

SEQ ID NO: 104269 - protein, 7 aa, synthetic construct
MVAPVSS

SEQ ID NO: 104270 - protein, 7 aa, synthetic construct
CMKASCE

SEQ ID NO: 104271 - protein, 7 aa, synthetic construct
KHEHKPT

SEQ ID NO: 104272 - protein, 7 aa, synthetic construct
WGKQFQM

SEQ ID NO: 104273 - protein, 7 aa, synthetic construct
VFAQDVK

SEQ ID NO: 104274 - protein, 7 aa, synthetic construct
WKPGGQV

SEQ ID NO: 104275 - protein, 7 aa, synthetic construct
DALDRIP

SEQ ID NO: 104276 - protein, 7 aa, synthetic construct
MIDRRFD

SEQ ID NO: 104277 - protein, 7 aa, synthetic construct
KSDDQVS

SEQ ID NO: 104278 - protein, 7 aa, synthetic construct
YRDPTHE

SEQ ID NO: 104279 - protein, 7 aa, synthetic construct
MPLAGEK

SEQ ID NO: 104280 - protein, 7 aa, synthetic construct
RTKDSSL

SEQ ID NO: 104281 - protein, 7 aa, synthetic construct
MTANNDE

SEQ ID NO: 104282 - protein, 7 aa, synthetic construct
CNQKCAA

SEQ ID NO: 104283 - protein, 7 aa, synthetic construct
RPSVGGA

SEQ ID NO: 104284 - protein, 7 aa, synthetic construct
QVRDDSL

SEQ ID NO: 104285 - protein, 7 aa, synthetic construct
IVIPGEH

SEQ ID NO: 104286 - protein, 7 aa, synthetic construct
VVQTDYV

SEQ ID NO: 104287 - protein, 7 aa, synthetic construct
RVKIADQ

SEQ ID NO: 104288 - protein, 7 aa, synthetic construct
LNSAKWE

SEQ ID NO: 104289 - protein, 7 aa, synthetic construct
KAPGVNC

SEQ ID NO: 104290 - protein, 7 aa, synthetic construct
DIATRIT

SEQ ID NO: 104291 - protein, 7 aa, synthetic construct
AEQVMRA

SEQ ID NO: 104292 - protein, 7 aa, synthetic construct
VQATHDL

SEQ ID NO: 104293 - protein, 7 aa, synthetic construct
YPIPTKE

SEQ ID NO: 104294 - protein, 7 aa, synthetic construct
WRNGSFE

SEQ ID NO: 104295 - protein, 7 aa, synthetic construct
HYIKSDK

SEQ ID NO: 104296 - protein, 7 aa, synthetic construct
HTNNVML

SEQ ID NO: 104297 - protein, 7 aa, synthetic construct
LGNPPYG

SEQ ID NO: 104298 - protein, 7 aa, synthetic construct
GMYGPHL

SEQ ID NO: 104299 - protein, 7 aa, synthetic construct
DKKSAMA

SEQ ID NO: 104300 - protein, 7 aa, synthetic construct
MNNSKNG

SEQ ID NO: 104301 - protein, 7 aa, synthetic construct
NYEGPPT

SEQ ID NO: 104302 - protein, 7 aa, synthetic construct
NMKEAWL

SEQ ID NO: 104303 - protein, 7 aa, synthetic construct
DETNKGA

SEQ ID NO: 104304 - protein, 7 aa, synthetic construct
MLGTPSS

SEQ ID NO: 104305 - protein, 7 aa, synthetic construct
APATRAH

SEQ ID NO: 104306 - protein, 7 aa, synthetic construct
MKRGNFD

SEQ ID NO: 104307 - protein, 7 aa, synthetic construct
RAHDFTV

SEQ ID NO: 104308 - protein, 7 aa, synthetic construct
YSQVAGR

SEQ ID NO: 104309 - protein, 7 aa, synthetic construct
LTSNEFS

SEQ ID NO: 104310 - protein, 7 aa, synthetic construct
TEDQKVM

SEQ ID NO: 104311 - protein, 7 aa, synthetic construct
LVEKVPQ

SEQ ID NO: 104312 - protein, 7 aa, synthetic construct
QGEVANN

SEQ ID NO: 104313 - protein, 7 aa, synthetic construct
KIWDGHE

SEQ ID NO: 104314 - protein, 7 aa, synthetic construct
GRPNTAV

SEQ ID NO: 104315 - protein, 7 aa, synthetic construct
VDQLHTK

SEQ ID NO: 104316 - protein, 7 aa, synthetic construct
VRHEVPE

SEQ ID NO: 104317 - protein, 7 aa, synthetic construct
HFVARNG

SEQ ID NO: 104318 - protein, 7 aa, synthetic construct
ESRPNQS

SEQ ID NO: 104319 - protein, 7 aa, synthetic construct
EFQTKHM

SEQ ID NO: 104320 - protein, 7 aa, synthetic construct
YAQRYQN

SEQ ID NO: 104321 - protein, 7 aa, synthetic construct
TPLWSPE

SEQ ID NO: 104322 - protein, 7 aa, synthetic construct
SYGPADR

SEQ ID NO: 104323 - protein, 7 aa, synthetic construct
AKIDRNY

SEQ ID NO: 104324 - protein, 7 aa, synthetic construct
GNIWTEK

SEQ ID NO: 104325 - protein, 7 aa, synthetic construct
MIPHGQI

SEQ ID NO: 104326 - protein, 7 aa, synthetic construct
PKSLDYS

SEQ ID NO: 104327 - protein, 7 aa, synthetic construct
DQARLPE

SEQ ID NO: 104328 - protein, 7 aa, synthetic construct
QQKSKHD

SEQ ID NO: 104329 - protein, 7 aa, synthetic construct
NMLPQIA

SEQ ID NO: 104330 - protein, 7 aa, synthetic construct
LDGSTIF

SEQ ID NO: 104331 - protein, 7 aa, synthetic construct
QHGAPRN

SEQ ID NO: 104332 - protein, 7 aa, synthetic construct
WTGGLGV

SEQ ID NO: 104333 - protein, 7 aa, synthetic construct
QLRSEII

SEQ ID NO: 104334 - protein, 7 aa, synthetic construct
IDKGGVN

SEQ ID NO: 104335 - protein, 7 aa, synthetic construct
KISGTVE

SEQ ID NO: 104336 - protein, 7 aa, synthetic construct
LRNLEQF

SEQ ID NO: 104337 - protein, 7 aa, synthetic construct
TSTGSPR

SEQ ID NO: 104338 - protein, 7 aa, synthetic construct
WDKADYA

SEQ ID NO: 104339 - protein, 7 aa, synthetic construct
HTGIAFG

SEQ ID NO: 104340 - protein, 7 aa, synthetic construct
TGQQALI

SEQ ID NO: 104341 - protein, 7 aa, synthetic construct
KPQTGNA

SEQ ID NO: 104342 - protein, 7 aa, synthetic construct
FNDHTYP

SEQ ID NO: 104343 - protein, 7 aa, synthetic construct
PRERVVM

SEQ ID NO: 104344 - protein, 7 aa, synthetic construct
ARASAIM

SEQ ID NO: 104345 - protein, 7 aa, synthetic construct
RGVYSAQ

SEQ ID NO: 104346 - protein, 7 aa, synthetic construct
LKDQKIH

SEQ ID NO: 104347 - protein, 7 aa, synthetic construct
GGSAKTA

SEQ ID NO: 104348 - protein, 7 aa, synthetic construct
FGAHTNR

SEQ ID NO: 104349 - protein, 7 aa, synthetic construct
TDRAFPK

SEQ ID NO: 104350 - protein, 7 aa, synthetic construct
LVPGIGP

SEQ ID NO: 104351 - protein, 7 aa, synthetic construct
DPMRGIQ

SEQ ID NO: 104352 - protein, 7 aa, synthetic construct
ERPFEPM

SEQ ID NO: 104353 - protein, 7 aa, synthetic construct
ADRLDIR

SEQ ID NO: 104354 - protein, 7 aa, synthetic construct
YQHSSPA

SEQ ID NO: 104355 - protein, 7 aa, synthetic construct
TMTINEA

SEQ ID NO: 104356 - protein, 7 aa, synthetic construct
MTSVIIG

SEQ ID NO: 104357 - protein, 7 aa, synthetic construct
LMHHLNN

SEQ ID NO: 104358 - protein, 7 aa, synthetic construct
HPYNSGE

SEQ ID NO: 104359 - protein, 7 aa, synthetic construct
DHGHMTL

SEQ ID NO: 104360 - protein, 7 aa, synthetic construct
NINAQKH

SEQ ID NO: 104361 - protein, 7 aa, synthetic construct
GQMHPKT

SEQ ID NO: 104362 - protein, 7 aa, synthetic construct
DFEKLGI

SEQ ID NO: 104363 - protein, 7 aa, synthetic construct
SRTPNQW

SEQ ID NO: 104364 - protein, 7 aa, synthetic construct
HQTFQKI

SEQ ID NO: 104365 - protein, 7 aa, synthetic construct
ANVRNEH

SEQ ID NO: 104366 - protein, 7 aa, synthetic construct
REEKDKS

SEQ ID NO: 104367 - protein, 7 aa, synthetic construct
TTSVFGG

SEQ ID NO: 104368 - protein, 7 aa, synthetic construct
RAELMVA

SEQ ID NO: 104369 - protein, 7 aa, synthetic construct
VQKAFGH

SEQ ID NO: 104370 - protein, 7 aa, synthetic construct
FKTITYS

SEQ ID NO: 104371 - protein, 7 aa, synthetic construct
AAGTFKS

SEQ ID NO: 104372 - protein, 7 aa, synthetic construct
GMMKNEN

SEQ ID NO: 104373 - protein, 7 aa, synthetic construct
QRDDHTK

SEQ ID NO: 104374 - protein, 7 aa, synthetic construct
FESIHKP

SEQ ID NO: 104375 - protein, 7 aa, synthetic construct
HTPYHTS

SEQ ID NO: 104376 - protein, 7 aa, synthetic construct
PEVFQKG

SEQ ID NO: 104377 - protein, 7 aa, synthetic construct
FINEGNL

SEQ ID NO: 104378 - protein, 7 aa, synthetic construct
KMTPSKD

SEQ ID NO: 104379 - protein, 7 aa, synthetic construct
YKHIQPP

SEQ ID NO: 104380 - protein, 7 aa, synthetic construct
YFEASLP

SEQ ID NO: 104381 - protein, 7 aa, synthetic construct
HHIQGFP

SEQ ID NO: 104382 - protein, 7 aa, synthetic construct
PGPEWMK

SEQ ID NO: 104383 - protein, 7 aa, synthetic construct
NAAAAKD

SEQ ID NO: 104384 - protein, 7 aa, synthetic construct
YALYMED

SEQ ID NO: 104385 - protein, 7 aa, synthetic construct
EMKVYEP

SEQ ID NO: 104386 - protein, 7 aa, synthetic construct
GPTYQSM

SEQ ID NO: 104387 - protein, 7 aa, synthetic construct
TPDHMKM

SEQ ID NO: 104388 - protein, 7 aa, synthetic construct
SDTASYH

SEQ ID NO: 104389 - protein, 7 aa, synthetic construct
HKSDNSR

SEQ ID NO: 104390 - protein, 7 aa, synthetic construct
GPQRDHP

SEQ ID NO: 104391 - protein, 7 aa, synthetic construct
QVEKQLH

SEQ ID NO: 104392 - protein, 7 aa, synthetic construct
SHQSMDA

SEQ ID NO: 104393 - protein, 7 aa, synthetic construct
IARPMQS

SEQ ID NO: 104394 - protein, 7 aa, synthetic construct
SKRIPEP

SEQ ID NO: 104395 - protein, 7 aa, synthetic construct
IHIPQDN

SEQ ID NO: 104396 - protein, 7 aa, synthetic construct
LTHIQKY

SEQ ID NO: 104397 - protein, 7 aa, synthetic construct
LMDGAIF

SEQ ID NO: 104398 - protein, 7 aa, synthetic construct
LFHAEIG

SEQ ID NO: 104399 - protein, 7 aa, synthetic construct
NFEQKYT

SEQ ID NO: 104400 - protein, 7 aa, synthetic construct
FSHPTTV

SEQ ID NO: 104401 - protein, 7 aa, synthetic construct
LPAEQTI

SEQ ID NO: 104402 - protein, 7 aa, synthetic construct
YGSSDVV

SEQ ID NO: 104403 - protein, 7 aa, synthetic construct
LLHQRVT

SEQ ID NO: 104404 - protein, 7 aa, synthetic construct
ERPVSEP

SEQ ID NO: 104405 - protein, 7 aa, synthetic construct
HHKVEED

SEQ ID NO: 104406 - protein, 7 aa, synthetic construct
QNRNYQP

SEQ ID NO: 104407 - protein, 7 aa, synthetic construct
RYQDENA

SEQ ID NO: 104408 - protein, 7 aa, synthetic construct
SGNSSVM

SEQ ID NO: 104409 - protein, 7 aa, synthetic construct
VMGGGTW

SEQ ID NO: 104410 - protein, 7 aa, synthetic construct
HTDTHQH

SEQ ID NO: 104411 - protein, 7 aa, synthetic construct
SPLELSR

SEQ ID NO: 104412 - protein, 7 aa, synthetic construct
MEPQGAS

SEQ ID NO: 104413 - protein, 7 aa, synthetic construct
HMHVHMS

SEQ ID NO: 104414 - protein, 7 aa, synthetic construct
SKHHSQN

SEQ ID NO: 104415 - protein, 7 aa, synthetic construct
QNQGHNI

SEQ ID NO: 104416 - protein, 7 aa, synthetic construct
SDKDFAA

SEQ ID NO: 104417 - protein, 7 aa, synthetic construct
LRKEMLT

SEQ ID NO: 104418 - protein, 7 aa, synthetic construct
PNRHPIS

SEQ ID NO: 104419 - protein, 7 aa, synthetic construct
SDGFLAH

SEQ ID NO: 104420 - protein, 7 aa, synthetic construct
IYERMHD

SEQ ID NO: 104421 - protein, 7 aa, synthetic construct
LPIMQDK

SEQ ID NO: 104422 - protein, 7 aa, synthetic construct
VEFPSKS

SEQ ID NO: 104423 - protein, 7 aa, synthetic construct
HLHADRP

SEQ ID NO: 104424 - protein, 7 aa, synthetic construct
EGYRQNE

SEQ ID NO: 104425 - protein, 7 aa, synthetic construct
MAQMAQA

SEQ ID NO: 104426 - protein, 7 aa, synthetic construct
KQGVMMP

SEQ ID NO: 104427 - protein, 7 aa, synthetic construct
EIRGSGE

SEQ ID NO: 104428 - protein, 7 aa, synthetic construct
NLRFQHA

SEQ ID NO: 104429 - protein, 7 aa, synthetic construct
VQSEGWR

SEQ ID NO: 104430 - protein, 7 aa, synthetic construct
RDFSEHG

SEQ ID NO: 104431 - protein, 7 aa, synthetic construct
HVTQNHK

SEQ ID NO: 104432 - protein, 7 aa, synthetic construct
PPTENPF

SEQ ID NO: 104433 - protein, 7 aa, synthetic construct
VLTFGDD

SEQ ID NO: 104434 - protein, 7 aa, synthetic construct
FGNGDKF

SEQ ID NO: 104435 - protein, 7 aa, synthetic construct
RIEAKNV

SEQ ID NO: 104436 - protein, 7 aa, synthetic construct
WSTHARV

SEQ ID NO: 104437 - protein, 7 aa, synthetic construct
SSFEMRN

SEQ ID NO: 104438 - protein, 7 aa, synthetic construct
HQIQEAA

SEQ ID NO: 104439 - protein, 7 aa, synthetic construct
KSGGPYH

SEQ ID NO: 104440 - protein, 7 aa, synthetic construct
QKLTTEG

SEQ ID NO: 104441 - protein, 7 aa, synthetic construct
GRNMEQT

SEQ ID NO: 104442 - protein, 7 aa, synthetic construct
QKLLDQE

SEQ ID NO: 104443 - protein, 7 aa, synthetic construct
DPRMLKE

SEQ ID NO: 104444 - protein, 7 aa, synthetic construct
RIHEDKG

SEQ ID NO: 104445 - protein, 7 aa, synthetic construct
MQASSIT

SEQ ID NO: 104446 - protein, 7 aa, synthetic construct
DPFPLRG

SEQ ID NO: 104447 - protein, 7 aa, synthetic construct
LPFKHSP

SEQ ID NO: 104448 - protein, 7 aa, synthetic construct
AGQITVP

SEQ ID NO: 104449 - protein, 7 aa, synthetic construct
SNFVMQD

SEQ ID NO: 104450 - protein, 7 aa, synthetic construct
AVMDHGK

SEQ ID NO: 104451 - protein, 7 aa, synthetic construct
IGNAHLI

SEQ ID NO: 104452 - protein, 7 aa, synthetic construct
THDAGHK

SEQ ID NO: 104453 - protein, 7 aa, synthetic construct
ELGVKMQ

SEQ ID NO: 104454 - protein, 7 aa, synthetic construct
EYANTEH

SEQ ID NO: 104455 - protein, 7 aa, synthetic construct
GVPKAYY

SEQ ID NO: 104456 - protein, 7 aa, synthetic construct
DRPKMPA

SEQ ID NO: 104457 - protein, 7 aa, synthetic construct
NGDVMAR

SEQ ID NO: 104458 - protein, 7 aa, synthetic construct
YKANASG

SEQ ID NO: 104459 - protein, 7 aa, synthetic construct
REQDVHT

SEQ ID NO: 104460 - protein, 7 aa, synthetic construct
HQTHYTE

SEQ ID NO: 104461 - protein, 7 aa, synthetic construct
PSKEELH

SEQ ID NO: 104462 - protein, 7 aa, synthetic construct
GGAPHAG

SEQ ID NO: 104463 - protein, 7 aa, synthetic construct
LSTQPIY

SEQ ID NO: 104464 - protein, 7 aa, synthetic construct
GRVQMVA

SEQ ID NO: 104465 - protein, 7 aa, synthetic construct
GATPVGW

SEQ ID NO: 104466 - protein, 7 aa, synthetic construct
EATGWTG

SEQ ID NO: 104467 - protein, 7 aa, synthetic construct
RKGSDHL

SEQ ID NO: 104468 - protein, 7 aa, synthetic construct
NMHGIRI

SEQ ID NO: 104469 - protein, 7 aa, synthetic construct
GVDHQVK

SEQ ID NO: 104470 - protein, 7 aa, synthetic construct
MGMTALV

SEQ ID NO: 104471 - protein, 7 aa, synthetic construct
RPIPGWD

SEQ ID NO: 104472 - protein, 7 aa, synthetic construct
VYNGGSS

SEQ ID NO: 104473 - protein, 7 aa, synthetic construct
DMKHAVF

SEQ ID NO: 104474 - protein, 7 aa, synthetic construct
FSNNGMH

SEQ ID NO: 104475 - protein, 7 aa, synthetic construct
EPMVGNH

SEQ ID NO: 104476 - protein, 7 aa, synthetic construct
YADRSEH

SEQ ID NO: 104477 - protein, 7 aa, synthetic construct
TSLEPHG

SEQ ID NO: 104478 - protein, 7 aa, synthetic construct
GSKNNNP

SEQ ID NO: 104479 - protein, 7 aa, synthetic construct
KSDWAQH

SEQ ID NO: 104480 - protein, 7 aa, synthetic construct
TEKSPGA

SEQ ID NO: 104481 - protein, 7 aa, synthetic construct
TTTYVRQ

SEQ ID NO: 104482 - protein, 7 aa, synthetic construct
QTHQHIP

SEQ ID NO: 104483 - protein, 7 aa, synthetic construct
LGPAWAM

SEQ ID NO: 104484 - protein, 7 aa, synthetic construct
GDYHKLE

SEQ ID NO: 104485 - protein, 7 aa, synthetic construct
GGQGPTT

SEQ ID NO: 104486 - protein, 7 aa, synthetic construct
AQFAPQT

SEQ ID NO: 104487 - protein, 7 aa, synthetic construct
AVNHNQR

SEQ ID NO: 104488 - protein, 7 aa, synthetic construct
NEQSKTM

SEQ ID NO: 104489 - protein, 7 aa, synthetic construct
QSLHIPP

SEQ ID NO: 104490 - protein, 7 aa, synthetic construct
RTPSSAV

SEQ ID NO: 104491 - protein, 7 aa, synthetic construct
TIDPPKR

SEQ ID NO: 104492 - protein, 7 aa, synthetic construct
VMSRMQD

SEQ ID NO: 104493 - protein, 7 aa, synthetic construct
PEDYKVK

SEQ ID NO: 104494 - protein, 7 aa, synthetic construct
KEQLPNH

SEQ ID NO: 104495 - protein, 7 aa, synthetic construct
TTHLSGK

SEQ ID NO: 104496 - protein, 7 aa, synthetic construct
KTKVLTE

SEQ ID NO: 104497 - protein, 7 aa, synthetic construct
PTVQRTY

SEQ ID NO: 104498 - protein, 7 aa, synthetic construct
HVARTNV

SEQ ID NO: 104499 - protein, 7 aa, synthetic construct
PKDTLAF

SEQ ID NO: 104500 - protein, 7 aa, synthetic construct
IDTRTTS

SEQ ID NO: 104501 - protein, 7 aa, synthetic construct
AAHHASK

SEQ ID NO: 104502 - protein, 7 aa, synthetic construct
MVYNGMN

SEQ ID NO: 104503 - protein, 7 aa, synthetic construct
FRIGVMA

SEQ ID NO: 104504 - protein, 7 aa, synthetic construct
GHREGRP

SEQ ID NO: 104505 - protein, 7 aa, synthetic construct
YKTPTGP

SEQ ID NO: 104506 - protein, 7 aa, synthetic construct
SKKSMAD

SEQ ID NO: 104507 - protein, 7 aa, synthetic construct
DRSERFL

SEQ ID NO: 104508 - protein, 7 aa, synthetic construct
FPEGFRP

SEQ ID NO: 104509 - protein, 7 aa, synthetic construct
PDHRDSL

SEQ ID NO: 104510 - protein, 7 aa, synthetic construct
WNPRTNQ

SEQ ID NO: 104511 - protein, 7 aa, synthetic construct
DMPSHRT

SEQ ID NO: 104512 - protein, 7 aa, synthetic construct
DGSKNAS

SEQ ID NO: 104513 - protein, 7 aa, synthetic construct
VFAHTSQ

SEQ ID NO: 104514 - protein, 7 aa, synthetic construct
TALANIT

SEQ ID NO: 104515 - protein, 7 aa, synthetic construct
RDELYSK

SEQ ID NO: 104516 - protein, 7 aa, synthetic construct
MQKHANV

SEQ ID NO: 104517 - protein, 7 aa, synthetic construct
IMTKHAM

SEQ ID NO: 104518 - protein, 7 aa, synthetic construct
RTQTTSA

SEQ ID NO: 104519 - protein, 7 aa, synthetic construct
NKAPTIQ

SEQ ID NO: 104520 - protein, 7 aa, synthetic construct
GASGRFQ

SEQ ID NO: 104521 - protein, 7 aa, synthetic construct
HHYQGEA

SEQ ID NO: 104522 - protein, 7 aa, synthetic construct
YDSRYAD

SEQ ID NO: 104523 - protein, 7 aa, synthetic construct
SITNIEY

SEQ ID NO: 104524 - protein, 7 aa, synthetic construct
VVGHPEQ

SEQ ID NO: 104525 - protein, 7 aa, synthetic construct
YNNNDNG

SEQ ID NO: 104526 - protein, 7 aa, synthetic construct
FNGPSPR

SEQ ID NO: 104527 - protein, 7 aa, synthetic construct
NETVHDR

SEQ ID NO: 104528 - protein, 7 aa, synthetic construct
MSVVTLE

SEQ ID NO: 104529 - protein, 7 aa, synthetic construct
TIRHQFE

SEQ ID NO: 104530 - protein, 7 aa, synthetic construct
WDQNLTR

SEQ ID NO: 104531 - protein, 7 aa, synthetic construct
LVPREYK

SEQ ID NO: 104532 - protein, 7 aa, synthetic construct
NNEQPHQ

SEQ ID NO: 104533 - protein, 7 aa, synthetic construct
YLDGSER

SEQ ID NO: 104534 - protein, 7 aa, synthetic construct
TTQQHKP

SEQ ID NO: 104535 - protein, 7 aa, synthetic construct
NVVRAGP

SEQ ID NO: 104536 - protein, 7 aa, synthetic construct
LSSGDSF

SEQ ID NO: 104537 - protein, 7 aa, synthetic construct
GPMDLAS

SEQ ID NO: 104538 - protein, 7 aa, synthetic construct
MKVSSAC

SEQ ID NO: 104539 - protein, 7 aa, synthetic construct
GSFMIPE

SEQ ID NO: 104540 - protein, 7 aa, synthetic construct
VNDRQLY

SEQ ID NO: 104541 - protein, 7 aa, synthetic construct
PTTRDQM

SEQ ID NO: 104542 - protein, 7 aa, synthetic construct
EGQYSTK

SEQ ID NO: 104543 - protein, 7 aa, synthetic construct
TADWREP

SEQ ID NO: 104544 - protein, 7 aa, synthetic construct
GQGATGI

SEQ ID NO: 104545 - protein, 7 aa, synthetic construct
ANEKRMP

SEQ ID NO: 104546 - protein, 7 aa, synthetic construct
EPGYLLK

SEQ ID NO: 104547 - protein, 7 aa, synthetic construct
SMQQIGH

SEQ ID NO: 104548 - protein, 7 aa, synthetic construct
IGPPQPM

SEQ ID NO: 104549 - protein, 7 aa, synthetic construct
AVPQRMS

SEQ ID NO: 104550 - protein, 7 aa, synthetic construct
MSDVHGA

SEQ ID NO: 104551 - protein, 7 aa, synthetic construct
KPKIMSG

SEQ ID NO: 104552 - protein, 7 aa, synthetic construct
NHKVADL

SEQ ID NO: 104553 - protein, 7 aa, synthetic construct
RIGQDDV

SEQ ID NO: 104554 - protein, 7 aa, synthetic construct
NTPITSA

SEQ ID NO: 104555 - protein, 7 aa, synthetic construct
MKTFYAE

SEQ ID NO: 104556 - protein, 7 aa, synthetic construct
PLNSMDV

SEQ ID NO: 104557 - protein, 7 aa, synthetic construct
EAKGLFE

SEQ ID NO: 104558 - protein, 7 aa, synthetic construct
HTHKPDG

SEQ ID NO: 104559 - protein, 7 aa, synthetic construct
NMQQPNR

SEQ ID NO: 104560 - protein, 7 aa, synthetic construct
TPVYAKI

SEQ ID NO: 104561 - protein, 7 aa, synthetic construct
QFAGQKD

SEQ ID NO: 104562 - protein, 7 aa, synthetic construct
KHGWQVE

SEQ ID NO: 104563 - protein, 7 aa, synthetic construct
LPHVIAE

SEQ ID NO: 104564 - protein, 7 aa, synthetic construct
IKHRVEL

SEQ ID NO: 104565 - protein, 7 aa, synthetic construct
GDRAGIL

SEQ ID NO: 104566 - protein, 7 aa, synthetic construct
EKGTPHK

SEQ ID NO: 104567 - protein, 7 aa, synthetic construct
MISQKTY

SEQ ID NO: 104568 - protein, 7 aa, synthetic construct
NVNVKTN

SEQ ID NO: 104569 - protein, 7 aa, synthetic construct
MSPHIDR

SEQ ID NO: 104570 - protein, 7 aa, synthetic construct
MNEPNVI

SEQ ID NO: 104571 - protein, 7 aa, synthetic construct
SGTDAGH

SEQ ID NO: 104572 - protein, 7 aa, synthetic construct
NPNIVSH

SEQ ID NO: 104573 - protein, 7 aa, synthetic construct
PGISMMP

SEQ ID NO: 104574 - protein, 7 aa, synthetic construct
LKPDRLA

SEQ ID NO: 104575 - protein, 7 aa, synthetic construct
DSIAAAS

SEQ ID NO: 104576 - protein, 7 aa, synthetic construct
SYAQMDG

SEQ ID NO: 104577 - protein, 7 aa, synthetic construct
NKIVFVD

SEQ ID NO: 104578 - protein, 7 aa, synthetic construct
YGPFEVS

SEQ ID NO: 104579 - protein, 7 aa, synthetic construct
PGTDGRT

SEQ ID NO: 104580 - protein, 7 aa, synthetic construct
PTQRQQT

SEQ ID NO: 104581 - protein, 7 aa, synthetic construct
YIHVANQ

SEQ ID NO: 104582 - protein, 7 aa, synthetic construct
AAVDRSD

SEQ ID NO: 104583 - protein, 7 aa, synthetic construct
QKTYAHS

SEQ ID NO: 104584 - protein, 7 aa, synthetic construct
EKTDKEN

SEQ ID NO: 104585 - protein, 7 aa, synthetic construct
SVDNPRW

SEQ ID NO: 104586 - protein, 7 aa, synthetic construct
AGDAYNV

SEQ ID NO: 104587 - protein, 7 aa, synthetic construct
FLPMIGQ

SEQ ID NO: 104588 - protein, 7 aa, synthetic construct
KMQVTRP

SEQ ID NO: 104589 - protein, 7 aa, synthetic construct
TRHQKED

SEQ ID NO: 104590 - protein, 7 aa, synthetic construct
MTPDWRE

SEQ ID NO: 104591 - protein, 7 aa, synthetic construct
NDAPSAG

SEQ ID NO: 104592 - protein, 7 aa, synthetic construct
LTFKTHV

SEQ ID NO: 104593 - protein, 7 aa, synthetic construct
LLSHPGG

SEQ ID NO: 104594 - protein, 7 aa, synthetic construct
KNERLYL

SEQ ID NO: 104595 - protein, 7 aa, synthetic construct
RYGTFSP

SEQ ID NO: 104596 - protein, 7 aa, synthetic construct
VVQGVAI

SEQ ID NO: 104597 - protein, 7 aa, synthetic construct
GQPSVVA

SEQ ID NO: 104598 - protein, 7 aa, synthetic construct
NMMRHDG

SEQ ID NO: 104599 - protein, 7 aa, synthetic construct
ASFEPTA

SEQ ID NO: 104600 - protein, 7 aa, synthetic construct
INPVGNI

SEQ ID NO: 104601 - protein, 7 aa, synthetic construct
VENYQDS

SEQ ID NO: 104602 - protein, 7 aa, synthetic construct
VMGTHDS

SEQ ID NO: 104603 - protein, 7 aa, synthetic construct
EKNYINS

SEQ ID NO: 104604 - protein, 7 aa, synthetic construct
PFKVLDV

SEQ ID NO: 104605 - protein, 7 aa, synthetic construct
NKSGSTF

SEQ ID NO: 104606 - protein, 7 aa, synthetic construct
DKTGMYK

SEQ ID NO: 104607 - protein, 7 aa, synthetic construct
QSTQGPL

SEQ ID NO: 104608 - protein, 7 aa, synthetic construct
TQYEPEM

SEQ ID NO: 104609 - protein, 7 aa, synthetic construct
FTVGGGK

SEQ ID NO: 104610 - protein, 7 aa, synthetic construct
TAHTEYY

SEQ ID NO: 104611 - protein, 7 aa, synthetic construct
VPQEKMQ

SEQ ID NO: 104612 - protein, 7 aa, synthetic construct
ATGVRMP

SEQ ID NO: 104613 - protein, 7 aa, synthetic construct
YDMTGTS

SEQ ID NO: 104614 - protein, 7 aa, synthetic construct
TQITKQC

SEQ ID NO: 104615 - protein, 7 aa, synthetic construct
NGGYDSK

SEQ ID NO: 104616 - protein, 7 aa, synthetic construct
SWPKGMA

SEQ ID NO: 104617 - protein, 7 aa, synthetic construct
PPKNSVP

SEQ ID NO: 104618 - protein, 7 aa, synthetic construct
RQTPSMG

SEQ ID NO: 104619 - protein, 7 aa, synthetic construct
VTLGALR

SEQ ID NO: 104620 - protein, 7 aa, synthetic construct
PPQVYQK

SEQ ID NO: 104621 - protein, 7 aa, synthetic construct
FEQRTHK

SEQ ID NO: 104622 - protein, 7 aa, synthetic construct
GRDYNLH

SEQ ID NO: 104623 - protein, 7 aa, synthetic construct
YDVNAKH

SEQ ID NO: 104624 - protein, 7 aa, synthetic construct
DKFADVS

SEQ ID NO: 104625 - protein, 7 aa, synthetic construct
FHQNVTN

SEQ ID NO: 104626 - protein, 7 aa, synthetic construct
NLHSIKE

SEQ ID NO: 104627 - protein, 7 aa, synthetic construct
KYMVPTN

SEQ ID NO: 104628 - protein, 7 aa, synthetic construct
MHAAVID

SEQ ID NO: 104629 - protein, 7 aa, synthetic construct
PKSEMHL

SEQ ID NO: 104630 - protein, 7 aa, synthetic construct
RVKANDL

SEQ ID NO: 104631 - protein, 7 aa, synthetic construct
ILNQVPF

SEQ ID NO: 104632 - protein, 7 aa, synthetic construct
ETIKDRR

SEQ ID NO: 104633 - protein, 7 aa, synthetic construct
GGETYHS

SEQ ID NO: 104634 - protein, 7 aa, synthetic construct
DFQPMNA

SEQ ID NO: 104635 - protein, 7 aa, synthetic construct
GSGQSDM

SEQ ID NO: 104636 - protein, 7 aa, synthetic construct
VEIPSIK

SEQ ID NO: 104637 - protein, 7 aa, synthetic construct
NDSSRYH

SEQ ID NO: 104638 - protein, 7 aa, synthetic construct
VDQSRMR

SEQ ID NO: 104639 - protein, 7 aa, synthetic construct
LVGAHDS

SEQ ID NO: 104640 - protein, 7 aa, synthetic construct
MTLQDRI

SEQ ID NO: 104641 - protein, 7 aa, synthetic construct
SIQEQRM

SEQ ID NO: 104642 - protein, 7 aa, synthetic construct
HHATSPM

SEQ ID NO: 104643 - protein, 7 aa, synthetic construct
DQPVTAP

SEQ ID NO: 104644 - protein, 7 aa, synthetic construct
VHGPQSW

SEQ ID NO: 104645 - protein, 7 aa, synthetic construct
FKSNSSF

SEQ ID NO: 104646 - protein, 7 aa, synthetic construct
KISINYE

SEQ ID NO: 104647 - protein, 7 aa, synthetic construct
DPKTPMR

SEQ ID NO: 104648 - protein, 7 aa, synthetic construct
PAAIGIK

SEQ ID NO: 104649 - protein, 7 aa, synthetic construct
SHPITNK

SEQ ID NO: 104650 - protein, 7 aa, synthetic construct
FVDTLKI

SEQ ID NO: 104651 - protein, 7 aa, synthetic construct
LGTGPRY

SEQ ID NO: 104652 - protein, 7 aa, synthetic construct
RSSIIIG

SEQ ID NO: 104653 - protein, 7 aa, synthetic construct
GKEVNKN

SEQ ID NO: 104654 - protein, 7 aa, synthetic construct
VANNQKL

SEQ ID NO: 104655 - protein, 7 aa, synthetic construct
KNSTDVR

SEQ ID NO: 104656 - protein, 7 aa, synthetic construct
LTIPQRQ

SEQ ID NO: 104657 - protein, 7 aa, synthetic construct
GATATHV

SEQ ID NO: 104658 - protein, 7 aa, synthetic construct
PRHTDHL

SEQ ID NO: 104659 - protein, 7 aa, synthetic construct
SQKSNML

SEQ ID NO: 104660 - protein, 7 aa, synthetic construct
GVSFPEH

SEQ ID NO: 104661 - protein, 7 aa, synthetic construct
VTPRTIT

SEQ ID NO: 104662 - protein, 7 aa, synthetic construct
QETRYAM

SEQ ID NO: 104663 - protein, 7 aa, synthetic construct
SQPAMHS

SEQ ID NO: 104664 - protein, 7 aa, synthetic construct
VGAMQVA

SEQ ID NO: 104665 - protein, 7 aa, synthetic construct
DHDVKVR

SEQ ID NO: 104666 - protein, 7 aa, synthetic construct
SVRDAFE

SEQ ID NO: 104667 - protein, 7 aa, synthetic construct
KMEHYQP

SEQ ID NO: 104668 - protein, 7 aa, synthetic construct
KDPAKPE

SEQ ID NO: 104669 - protein, 7 aa, synthetic construct
WTTVIAA

SEQ ID NO: 104670 - protein, 7 aa, synthetic construct
KILKIQP

SEQ ID NO: 104671 - protein, 7 aa, synthetic construct
DSHREYS

SEQ ID NO: 104672 - protein, 7 aa, synthetic construct
SMKEGGD

SEQ ID NO: 104673 - protein, 7 aa, synthetic construct
HLDQARF

SEQ ID NO: 104674 - protein, 7 aa, synthetic construct
YSYKEEE

SEQ ID NO: 104675 - protein, 7 aa, synthetic construct
HGGGPLW

SEQ ID NO: 104676 - protein, 7 aa, synthetic construct
SMTYSTP

SEQ ID NO: 104677 - protein, 7 aa, synthetic construct
LDDFYRH

SEQ ID NO: 104678 - protein, 7 aa, synthetic construct
HINNTEW

SEQ ID NO: 104679 - protein, 7 aa, synthetic construct
YHFKGSG

SEQ ID NO: 104680 - protein, 7 aa, synthetic construct
MAKTMAT

SEQ ID NO: 104681 - protein, 7 aa, synthetic construct
FHGGLGM

SEQ ID NO: 104682 - protein, 7 aa, synthetic construct
HFSKQLI

SEQ ID NO: 104683 - protein, 7 aa, synthetic construct
VSTLSVM

SEQ ID NO: 104684 - protein, 7 aa, synthetic construct
MDDGGRS

SEQ ID NO: 104685 - protein, 7 aa, synthetic construct
SQSQASR

SEQ ID NO: 104686 - protein, 7 aa, synthetic construct
IGYIKNP

SEQ ID NO: 104687 - protein, 7 aa, synthetic construct
LEQPMSR

SEQ ID NO: 104688 - protein, 7 aa, synthetic construct
TPGDFQA

SEQ ID NO: 104689 - protein, 7 aa, synthetic construct
TPMTIGP

SEQ ID NO: 104690 - protein, 7 aa, synthetic construct
LNDQGKQ

SEQ ID NO: 104691 - protein, 7 aa, synthetic construct
EHYRELK

SEQ ID NO: 104692 - protein, 7 aa, synthetic construct
GAERATH

SEQ ID NO: 104693 - protein, 7 aa, synthetic construct
SNSVQLE

SEQ ID NO: 104694 - protein, 7 aa, synthetic construct
NKGAPMG

SEQ ID NO: 104695 - protein, 7 aa, synthetic construct
MVSNTFE

SEQ ID NO: 104696 - protein, 7 aa, synthetic construct
QEHAMKA

SEQ ID NO: 104697 - protein, 7 aa, synthetic construct
ALVGHLH

SEQ ID NO: 104698 - protein, 7 aa, synthetic construct
SAHANLK

SEQ ID NO: 104699 - protein, 7 aa, synthetic construct
MGNHMDE

SEQ ID NO: 104700 - protein, 7 aa, synthetic construct
AKDNIMY

SEQ ID NO: 104701 - protein, 7 aa, synthetic construct
KFVSVVN

SEQ ID NO: 104702 - protein, 7 aa, synthetic construct
NSIAQKP

SEQ ID NO: 104703 - protein, 7 aa, synthetic construct
SEHVAHS

SEQ ID NO: 104704 - protein, 7 aa, synthetic construct
CKSDHCD

SEQ ID NO: 104705 - protein, 7 aa, synthetic construct
NLTLHNL

SEQ ID NO: 104706 - protein, 7 aa, synthetic construct
TRDNQPF

SEQ ID NO: 104707 - protein, 7 aa, synthetic construct
SRASVMM

SEQ ID NO: 104708 - protein, 7 aa, synthetic construct
HTMSGQN

SEQ ID NO: 104709 - protein, 7 aa, synthetic construct
MLQKNQN

SEQ ID NO: 104710 - protein, 7 aa, synthetic construct
HNDFKIQ

SEQ ID NO: 104711 - protein, 7 aa, synthetic construct
YPSRTEP

SEQ ID NO: 104712 - protein, 7 aa, synthetic construct
RNMSPSD

SEQ ID NO: 104713 - protein, 7 aa, synthetic construct
SSGQDQM

SEQ ID NO: 104714 - protein, 7 aa, synthetic construct
ENSTTKG

SEQ ID NO: 104715 - protein, 7 aa, synthetic construct
GKNNDVT

SEQ ID NO: 104716 - protein, 7 aa, synthetic construct
QYNQNNG

SEQ ID NO: 104717 - protein, 7 aa, synthetic construct
QRNGVQS

SEQ ID NO: 104718 - protein, 7 aa, synthetic construct
AYSRNLS

SEQ ID NO: 104719 - protein, 7 aa, synthetic construct
DRQEAKG

SEQ ID NO: 104720 - protein, 7 aa, synthetic construct
TGLVRLA

SEQ ID NO: 104721 - protein, 7 aa, synthetic construct
HFNSRSQ

SEQ ID NO: 104722 - protein, 7 aa, synthetic construct
KSKANSD

SEQ ID NO: 104723 - protein, 7 aa, synthetic construct
PADFIKK

SEQ ID NO: 104724 - protein, 7 aa, synthetic construct
YSSHEPM

SEQ ID NO: 104725 - protein, 7 aa, synthetic construct
GKFEVTA

SEQ ID NO: 104726 - protein, 7 aa, synthetic construct
IDGFNAV

SEQ ID NO: 104727 - protein, 7 aa, synthetic construct
VHYEGNK

SEQ ID NO: 104728 - protein, 7 aa, synthetic construct
TKNQLQP

SEQ ID NO: 104729 - protein, 7 aa, synthetic construct
IWNDHSG

SEQ ID NO: 104730 - protein, 7 aa, synthetic construct
EMQQIVA

SEQ ID NO: 104731 - protein, 7 aa, synthetic construct
HQPGTDP

SEQ ID NO: 104732 - protein, 7 aa, synthetic construct
PMFTDKM

SEQ ID NO: 104733 - protein, 7 aa, synthetic construct
VTNIVSV

SEQ ID NO: 104734 - protein, 7 aa, synthetic construct
NTATKTE

SEQ ID NO: 104735 - protein, 7 aa, synthetic construct
SRDHLDY

SEQ ID NO: 104736 - protein, 7 aa, synthetic construct
RTLVDVV

SEQ ID NO: 104737 - protein, 7 aa, synthetic construct
LRTRMLE

SEQ ID NO: 104738 - protein, 7 aa, synthetic construct
WLSQQKQ

SEQ ID NO: 104739 - protein, 7 aa, synthetic construct
NAAPDLI

SEQ ID NO: 104740 - protein, 7 aa, synthetic construct
DGDMMRR

SEQ ID NO: 104741 - protein, 7 aa, synthetic construct
DSSKTRD

SEQ ID NO: 104742 - protein, 7 aa, synthetic construct
MPASDIS

SEQ ID NO: 104743 - protein, 7 aa, synthetic construct
WMVGTIP

SEQ ID NO: 104744 - protein, 7 aa, synthetic construct
NIAGNHD

SEQ ID NO: 104745 - protein, 7 aa, synthetic construct
NSHSFID

SEQ ID NO: 104746 - protein, 7 aa, synthetic construct
TKLVSFN

SEQ ID NO: 104747 - protein, 7 aa, synthetic construct
HSNIPNR

SEQ ID NO: 104748 - protein, 7 aa, synthetic construct
PHNDSGF

SEQ ID NO: 104749 - protein, 7 aa, synthetic construct
GVDWTAS

SEQ ID NO: 104750 - protein, 7 aa, synthetic construct
EIRFHKE

SEQ ID NO: 104751 - protein, 7 aa, synthetic construct
FHTPNTQ

SEQ ID NO: 104752 - protein, 7 aa, synthetic construct
YAKEYNR

SEQ ID NO: 104753 - protein, 7 aa, synthetic construct
KQQYGEQ

SEQ ID NO: 104754 - protein, 7 aa, synthetic construct
NLAVTKG

SEQ ID NO: 104755 - protein, 7 aa, synthetic construct
TIRQLQV

SEQ ID NO: 104756 - protein, 7 aa, synthetic construct
GPQPSLK

SEQ ID NO: 104757 - protein, 7 aa, synthetic construct
PHRQNNM

SEQ ID NO: 104758 - protein, 7 aa, synthetic construct
TYTSVLA

SEQ ID NO: 104759 - protein, 7 aa, synthetic construct
LAQPGEY

SEQ ID NO: 104760 - protein, 7 aa, synthetic construct
MMGPPKH

SEQ ID NO: 104761 - protein, 7 aa, synthetic construct
GHVPFTP

SEQ ID NO: 104762 - protein, 7 aa, synthetic construct
ESRQDTH

SEQ ID NO: 104763 - protein, 7 aa, synthetic construct
IFHHDGL

SEQ ID NO: 104764 - protein, 7 aa, synthetic construct
LNVGNHH

SEQ ID NO: 104765 - protein, 7 aa, synthetic construct
DQVATGH

SEQ ID NO: 104766 - protein, 7 aa, synthetic construct
PRNQDQN

SEQ ID NO: 104767 - protein, 7 aa, synthetic construct
DEHRIVG

SEQ ID NO: 104768 - protein, 7 aa, synthetic construct
WGPFTDA

SEQ ID NO: 104769 - protein, 7 aa, synthetic construct
TDRTMTQ

SEQ ID NO: 104770 - protein, 7 aa, synthetic construct
TPEGNAS

SEQ ID NO: 104771 - protein, 7 aa, synthetic construct
QRHNSAS

SEQ ID NO: 104772 - protein, 7 aa, synthetic construct
HVPHMNR

SEQ ID NO: 104773 - protein, 7 aa, synthetic construct
RGEIPRA

SEQ ID NO: 104774 - protein, 7 aa, synthetic construct
SDGRPSE

SEQ ID NO: 104775 - protein, 7 aa, synthetic construct
AMPTIVH

SEQ ID NO: 104776 - protein, 7 aa, synthetic construct
SMNGIYI

SEQ ID NO: 104777 - protein, 7 aa, synthetic construct
PWAGGIP

SEQ ID NO: 104778 - protein, 7 aa, synthetic construct
QGPKDEN

SEQ ID NO: 104779 - protein, 7 aa, synthetic construct
AERNAQW

SEQ ID NO: 104780 - protein, 7 aa, synthetic construct
MNAYSGQ

SEQ ID NO: 104781 - protein, 7 aa, synthetic construct
GMSERSY

SEQ ID NO: 104782 - protein, 7 aa, synthetic construct
SANSKWP

SEQ ID NO: 104783 - protein, 7 aa, synthetic construct
LDTDGMR

SEQ ID NO: 104784 - protein, 7 aa, synthetic construct
GGQQPPR

SEQ ID NO: 104785 - protein, 7 aa, synthetic construct
FDTDKPR

SEQ ID NO: 104786 - protein, 7 aa, synthetic construct
DLVQSPH

SEQ ID NO: 104787 - protein, 7 aa, synthetic construct
PLIAHVA

SEQ ID NO: 104788 - protein, 7 aa, synthetic construct
MSAQSTL

SEQ ID NO: 104789 - protein, 7 aa, synthetic construct
NKPQVYQ

SEQ ID NO: 104790 - protein, 7 aa, synthetic construct
VLAPMEM

SEQ ID NO: 104791 - protein, 7 aa, synthetic construct
HATHTPI

SEQ ID NO: 104792 - protein, 7 aa, synthetic construct
PDKNKTP

SEQ ID NO: 104793 - protein, 7 aa, synthetic construct
RIDSTAQ

SEQ ID NO: 104794 - protein, 7 aa, synthetic construct
LSPKMAT

SEQ ID NO: 104795 - protein, 7 aa, synthetic construct
RPADERM

SEQ ID NO: 104796 - protein, 7 aa, synthetic construct
AKTNTLE

SEQ ID NO: 104797 - protein, 7 aa, synthetic construct
IPAGGHK

SEQ ID NO: 104798 - protein, 7 aa, synthetic construct
QFNEKNY

SEQ ID NO: 104799 - protein, 7 aa, synthetic construct
INTVRDF

SEQ ID NO: 104800 - protein, 7 aa, synthetic construct
MNHGTYV

SEQ ID NO: 104801 - protein, 7 aa, synthetic construct
IKIDQLL

SEQ ID NO: 104802 - protein, 7 aa, synthetic construct
QDVAGGK

SEQ ID NO: 104803 - protein, 7 aa, synthetic construct
ENIIHGS

SEQ ID NO: 104804 - protein, 7 aa, synthetic construct
TSRGTDN

SEQ ID NO: 104805 - protein, 7 aa, synthetic construct
LGSSTNL

SEQ ID NO: 104806 - protein, 7 aa, synthetic construct
TKEKPAN

SEQ ID NO: 104807 - protein, 7 aa, synthetic construct
ASQETRR

SEQ ID NO: 104808 - protein, 7 aa, synthetic construct
KQGYLPQ

SEQ ID NO: 104809 - protein, 7 aa, synthetic construct
APRSHDH

SEQ ID NO: 104810 - protein, 7 aa, synthetic construct
GVREQDL

SEQ ID NO: 104811 - protein, 7 aa, synthetic construct
TNEQKVW

SEQ ID NO: 104812 - protein, 7 aa, synthetic construct
THNVNHE

SEQ ID NO: 104813 - protein, 7 aa, synthetic construct
QGRHEFN

SEQ ID NO: 104814 - protein, 7 aa, synthetic construct
GNPPPVP

SEQ ID NO: 104815 - protein, 7 aa, synthetic construct
NVVQAAV

SEQ ID NO: 104816 - protein, 7 aa, synthetic construct
YPTTTDA

SEQ ID NO: 104817 - protein, 7 aa, synthetic construct
EVRRDLF

SEQ ID NO: 104818 - protein, 7 aa, synthetic construct
KTQDHNV

SEQ ID NO: 104819 - protein, 7 aa, synthetic construct
THGEQSV

SEQ ID NO: 104820 - protein, 7 aa, synthetic construct
NTHAGHK

SEQ ID NO: 104821 - protein, 7 aa, synthetic construct
DQFHLGM

SEQ ID NO: 104822 - protein, 7 aa, synthetic construct
TDSPVLK

SEQ ID NO: 104823 - protein, 7 aa, synthetic construct
VRGNPVQ

SEQ ID NO: 104824 - protein, 7 aa, synthetic construct
PAHQNKY

SEQ ID NO: 104825 - protein, 7 aa, synthetic construct
MPVPGQF

SEQ ID NO: 104826 - protein, 7 aa, synthetic construct
MLPGLEP

SEQ ID NO: 104827 - protein, 7 aa, synthetic construct
WKLSAER

SEQ ID NO: 104828 - protein, 7 aa, synthetic construct
RVTPVSP

SEQ ID NO: 104829 - protein, 7 aa, synthetic construct
EGRTLHE

SEQ ID NO: 104830 - protein, 7 aa, synthetic construct
NYEYPEQ

SEQ ID NO: 104831 - protein, 7 aa, synthetic construct
QQIPNKY

SEQ ID NO: 104832 - protein, 7 aa, synthetic construct
WKVDKAV

SEQ ID NO: 104833 - protein, 7 aa, synthetic construct
AKPERQI

SEQ ID NO: 104834 - protein, 7 aa, synthetic construct
TERLVTQ

SEQ ID NO: 104835 - protein, 7 aa, synthetic construct
LDSYIEP

SEQ ID NO: 104836 - protein, 7 aa, synthetic construct
NATATVA

SEQ ID NO: 104837 - protein, 7 aa, synthetic construct
NMDVMSG

SEQ ID NO: 104838 - protein, 7 aa, synthetic construct
HKFDEHE

SEQ ID NO: 104839 - protein, 7 aa, synthetic construct
TRFVDSM

SEQ ID NO: 104840 - protein, 7 aa, synthetic construct
MTHAGSW

SEQ ID NO: 104841 - protein, 7 aa, synthetic construct
FKHPSEE

SEQ ID NO: 104842 - protein, 7 aa, synthetic construct
VYSVSQR

SEQ ID NO: 104843 - protein, 7 aa, synthetic construct
FHDANDK

SEQ ID NO: 104844 - protein, 7 aa, synthetic construct
MPHITMN

SEQ ID NO: 104845 - protein, 7 aa, synthetic construct
TSNQQFV

SEQ ID NO: 104846 - protein, 7 aa, synthetic construct
MSADVMK

SEQ ID NO: 104847 - protein, 7 aa, synthetic construct
RYPLVDA

SEQ ID NO: 104848 - protein, 7 aa, synthetic construct
MGPESGM

SEQ ID NO: 104849 - protein, 7 aa, synthetic construct
HANNNKP

SEQ ID NO: 104850 - protein, 7 aa, synthetic construct
QTSRAIF

SEQ ID NO: 104851 - protein, 7 aa, synthetic construct
WSSLITP

SEQ ID NO: 104852 - protein, 7 aa, synthetic construct
GAIVNQL

SEQ ID NO: 104853 - protein, 7 aa, synthetic construct
REQKAIQ

SEQ ID NO: 104854 - protein, 7 aa, synthetic construct
QMDYTAA

SEQ ID NO: 104855 - protein, 7 aa, synthetic construct
AARDIQV

SEQ ID NO: 104856 - protein, 7 aa, synthetic construct
LETKNGD

SEQ ID NO: 104857 - protein, 7 aa, synthetic construct
HDGTQTP

SEQ ID NO: 104858 - protein, 7 aa, synthetic construct
MHNRDMN

SEQ ID NO: 104859 - protein, 7 aa, synthetic construct
QKANLAL

SEQ ID NO: 104860 - protein, 7 aa, synthetic construct
HPPKAFA

SEQ ID NO: 104861 - protein, 7 aa, synthetic construct
SRVNHPT

SEQ ID NO: 104862 - protein, 7 aa, synthetic construct
AYYTSDS

SEQ ID NO: 104863 - protein, 7 aa, synthetic construct
LQDNKLT

SEQ ID NO: 104864 - protein, 7 aa, synthetic construct
IMTAEHS

SEQ ID NO: 104865 - protein, 7 aa, synthetic construct
HAPQINV

SEQ ID NO: 104866 - protein, 7 aa, synthetic construct
RAAAYGI

SEQ ID NO: 104867 - protein, 7 aa, synthetic construct
TRGSGEP

SEQ ID NO: 104868 - protein, 7 aa, synthetic construct
NPNFGSS

SEQ ID NO: 104869 - protein, 7 aa, synthetic construct
RKDLMSV

SEQ ID NO: 104870 - protein, 7 aa, synthetic construct
SPLSVQG

SEQ ID NO: 104871 - protein, 7 aa, synthetic construct
STTHEGV

SEQ ID NO: 104872 - protein, 7 aa, synthetic construct
QKPGERT

SEQ ID NO: 104873 - protein, 7 aa, synthetic construct
TMHERET

SEQ ID NO: 104874 - protein, 7 aa, synthetic construct
ELKLVNL

SEQ ID NO: 104875 - protein, 7 aa, synthetic construct
SIPRDEV

SEQ ID NO: 104876 - protein, 7 aa, synthetic construct
GEATVIG

SEQ ID NO: 104877 - protein, 7 aa, synthetic construct
HDKRGSI

SEQ ID NO: 104878 - protein, 7 aa, synthetic construct
EHKAILH

SEQ ID NO: 104879 - protein, 7 aa, synthetic construct
ARHHDED

SEQ ID NO: 104880 - protein, 7 aa, synthetic construct
RRHIEPD

SEQ ID NO: 104881 - protein, 7 aa, synthetic construct
SPRPPHQ

SEQ ID NO: 104882 - protein, 7 aa, synthetic construct
PAQPNGR

SEQ ID NO: 104883 - protein, 7 aa, synthetic construct
EMHMAKA

SEQ ID NO: 104884 - protein, 7 aa, synthetic construct
YISRIQA

SEQ ID NO: 104885 - protein, 7 aa, synthetic construct
SLDQHHD

SEQ ID NO: 104886 - protein, 7 aa, synthetic construct
KTGTPAA

SEQ ID NO: 104887 - protein, 7 aa, synthetic construct
AVITANA

SEQ ID NO: 104888 - protein, 7 aa, synthetic construct
SAGAETM

SEQ ID NO: 104889 - protein, 7 aa, synthetic construct
QTQQANT

SEQ ID NO: 104890 - protein, 7 aa, synthetic construct
KRDNNSP

SEQ ID NO: 104891 - protein, 7 aa, synthetic construct
TTTRYLD

SEQ ID NO: 104892 - protein, 7 aa, synthetic construct
KAMLSVV

SEQ ID NO: 104893 - protein, 7 aa, synthetic construct
KPYLQVA

SEQ ID NO: 104894 - protein, 7 aa, synthetic construct
DMSGYQR

SEQ ID NO: 104895 - protein, 7 aa, synthetic construct
AAFTNNL

SEQ ID NO: 104896 - protein, 7 aa, synthetic construct
LPGVMQT

SEQ ID NO: 104897 - protein, 7 aa, synthetic construct
VNPVQGE

SEQ ID NO: 104898 - protein, 7 aa, synthetic construct
STGIAIT

SEQ ID NO: 104899 - protein, 7 aa, synthetic construct
VQQHHHD

SEQ ID NO: 104900 - protein, 7 aa, synthetic construct
NYEHEMR

SEQ ID NO: 104901 - protein, 7 aa, synthetic construct
VPSLHQK

SEQ ID NO: 104902 - protein, 7 aa, synthetic construct
PAIVHQS

SEQ ID NO: 104903 - protein, 7 aa, synthetic construct
ATRMSEE

SEQ ID NO: 104904 - protein, 7 aa, synthetic construct
LRIGLAP

SEQ ID NO: 104905 - protein, 7 aa, synthetic construct
MEKNQGD

SEQ ID NO: 104906 - protein, 7 aa, synthetic construct
RSSTNES

SEQ ID NO: 104907 - protein, 7 aa, synthetic construct
MKPVAHY

SEQ ID NO: 104908 - protein, 7 aa, synthetic construct
KNSETDA

SEQ ID NO: 104909 - protein, 7 aa, synthetic construct
HQVQAQM

SEQ ID NO: 104910 - protein, 7 aa, synthetic construct
AFLANIP

SEQ ID NO: 104911 - protein, 7 aa, synthetic construct
GRDERKI

SEQ ID NO: 104912 - protein, 7 aa, synthetic construct
LHAMPKI

SEQ ID NO: 104913 - protein, 7 aa, synthetic construct
HELHAMI

SEQ ID NO: 104914 - protein, 7 aa, synthetic construct
KINWNEA

SEQ ID NO: 104915 - protein, 7 aa, synthetic construct
SSQHELL

SEQ ID NO: 104916 - protein, 7 aa, synthetic construct
DPAWNEA

SEQ ID NO: 104917 - protein, 7 aa, synthetic construct
WADSIHS

SEQ ID NO: 104918 - protein, 7 aa, synthetic construct
SPHTKPV

SEQ ID NO: 104919 - protein, 7 aa, synthetic construct
TLVTKDA

SEQ ID NO: 104920 - protein, 7 aa, synthetic construct
QANKGYI

SEQ ID NO: 104921 - protein, 7 aa, synthetic construct
HVDRQQK

SEQ ID NO: 104922 - protein, 7 aa, synthetic construct
AGDVVFR

SEQ ID NO: 104923 - protein, 7 aa, synthetic construct
HTNGEAI

SEQ ID NO: 104924 - protein, 7 aa, synthetic construct
DKTVSFI

SEQ ID NO: 104925 - protein, 7 aa, synthetic construct
PPHIQTD

SEQ ID NO: 104926 - protein, 7 aa, synthetic construct
NFNVPEA

SEQ ID NO: 104927 - protein, 7 aa, synthetic construct
PVDQHKF

SEQ ID NO: 104928 - protein, 7 aa, synthetic construct
ELYHRVG

SEQ ID NO: 104929 - protein, 7 aa, synthetic construct
GQGFIER

SEQ ID NO: 104930 - protein, 7 aa, synthetic construct
WESRHIS

SEQ ID NO: 104931 - protein, 7 aa, synthetic construct
NHPAGNI

SEQ ID NO: 104932 - protein, 7 aa, synthetic construct
YRQPPAS

SEQ ID NO: 104933 - protein, 7 aa, synthetic construct
WEAFQRD

SEQ ID NO: 104934 - protein, 7 aa, synthetic construct
LVVTRVN

SEQ ID NO: 104935 - protein, 7 aa, synthetic construct
QQTIGEM

SEQ ID NO: 104936 - protein, 7 aa, synthetic construct
TQWIEKE

SEQ ID NO: 104937 - protein, 7 aa, synthetic construct
IMDKLVN

SEQ ID NO: 104938 - protein, 7 aa, synthetic construct
LGMNIPM

SEQ ID NO: 104939 - protein, 7 aa, synthetic construct
KEKHVDV

SEQ ID NO: 104940 - protein, 7 aa, synthetic construct
DQPGGKK

SEQ ID NO: 104941 - protein, 7 aa, synthetic construct
VAPIIST

SEQ ID NO: 104942 - protein, 7 aa, synthetic construct
FEPYHRV

SEQ ID NO: 104943 - protein, 7 aa, synthetic construct
LANFGQP

SEQ ID NO: 104944 - protein, 7 aa, synthetic construct
TPSWPSA

SEQ ID NO: 104945 - protein, 7 aa, synthetic construct
NGATWIA

SEQ ID NO: 104946 - protein, 7 aa, synthetic construct
QPQPQMF

SEQ ID NO: 104947 - protein, 7 aa, synthetic construct
DQRKYQL

SEQ ID NO: 104948 - protein, 7 aa, synthetic construct
PLGLHEK

SEQ ID NO: 104949 - protein, 7 aa, synthetic construct
FKHGEPI

SEQ ID NO: 104950 - protein, 7 aa, synthetic construct
LVYADQA

SEQ ID NO: 104951 - protein, 7 aa, synthetic construct
GSVSNDL

SEQ ID NO: 104952 - protein, 7 aa, synthetic construct
ASLAYGV

SEQ ID NO: 104953 - protein, 7 aa, synthetic construct
AKVGNPV

SEQ ID NO: 104954 - protein, 7 aa, synthetic construct
KPTTSMP

SEQ ID NO: 104955 - protein, 7 aa, synthetic construct
YQNNIGK

SEQ ID NO: 104956 - protein, 7 aa, synthetic construct
SSHSAQG

SEQ ID NO: 104957 - protein, 7 aa, synthetic construct
LVQAHLS

SEQ ID NO: 104958 - protein, 7 aa, synthetic construct
SPSSPNQ

SEQ ID NO: 104959 - protein, 7 aa, synthetic construct
QRLDLGP

SEQ ID NO: 104960 - protein, 7 aa, synthetic construct
TAWVAET

SEQ ID NO: 104961 - protein, 7 aa, synthetic construct
PGASNVI

SEQ ID NO: 104962 - protein, 7 aa, synthetic construct
HNYVHTG

SEQ ID NO: 104963 - protein, 7 aa, synthetic construct
PLNYNEL

SEQ ID NO: 104964 - protein, 7 aa, synthetic construct
MIDLTKV

SEQ ID NO: 104965 - protein, 7 aa, synthetic construct
IENHRVQ

SEQ ID NO: 104966 - protein, 7 aa, synthetic construct
TRQADSS

SEQ ID NO: 104967 - protein, 7 aa, synthetic construct
NGNLYQE

SEQ ID NO: 104968 - protein, 7 aa, synthetic construct
EKNPSVL

SEQ ID NO: 104969 - protein, 7 aa, synthetic construct
RKQENSI

SEQ ID NO: 104970 - protein, 7 aa, synthetic construct
NNHDSMT

SEQ ID NO: 104971 - protein, 7 aa, synthetic construct
QHPGVDG

SEQ ID NO: 104972 - protein, 7 aa, synthetic construct
LSNDPMD

SEQ ID NO: 104973 - protein, 7 aa, synthetic construct
MKNSEPF

SEQ ID NO: 104974 - protein, 7 aa, synthetic construct
GNKIGPD

SEQ ID NO: 104975 - protein, 7 aa, synthetic construct
FQGVMPV

SEQ ID NO: 104976 - protein, 7 aa, synthetic construct
YPEPQAT

SEQ ID NO: 104977 - protein, 7 aa, synthetic construct
ASVRIID

SEQ ID NO: 104978 - protein, 7 aa, synthetic construct
IDMHIPH

SEQ ID NO: 104979 - protein, 7 aa, synthetic construct
FNNPHPV

SEQ ID NO: 104980 - protein, 7 aa, synthetic construct
WHNPAEH

SEQ ID NO: 104981 - protein, 7 aa, synthetic construct
NHYPPTE

SEQ ID NO: 104982 - protein, 7 aa, synthetic construct
MPHLIHG

SEQ ID NO: 104983 - protein, 7 aa, synthetic construct
AATIMLE

SEQ ID NO: 104984 - protein, 7 aa, synthetic construct
NGTTGPT

SEQ ID NO: 104985 - protein, 7 aa, synthetic construct
EVRSDMY

SEQ ID NO: 104986 - protein, 7 aa, synthetic construct
IKYATVN

SEQ ID NO: 104987 - protein, 7 aa, synthetic construct
GAKPETN

SEQ ID NO: 104988 - protein, 7 aa, synthetic construct
PMDQDRR

SEQ ID NO: 104989 - protein, 7 aa, synthetic construct
LADKHWH

SEQ ID NO: 104990 - protein, 7 aa, synthetic construct
HHQHGDS

SEQ ID NO: 104991 - protein, 7 aa, synthetic construct
MHHGTMT

SEQ ID NO: 104992 - protein, 7 aa, synthetic construct
NHDSQRG

SEQ ID NO: 104993 - protein, 7 aa, synthetic construct
AKMAAAD

SEQ ID NO: 104994 - protein, 7 aa, synthetic construct
PLRMNMD

SEQ ID NO: 104995 - protein, 7 aa, synthetic construct
FHNPQLE

SEQ ID NO: 104996 - protein, 7 aa, synthetic construct
QDHKVEH

SEQ ID NO: 104997 - protein, 7 aa, synthetic construct
QGDAKNE

SEQ ID NO: 104998 - protein, 7 aa, synthetic construct
IVLGRNN

SEQ ID NO: 104999 - protein, 7 aa, synthetic construct
MKMQMLD

SEQ ID NO: 105000 - protein, 7 aa, synthetic construct
GLSGSNE

SEQ ID NO: 105001 - protein, 7 aa, synthetic construct
FGSYANT

SEQ ID NO: 105002 - protein, 7 aa, synthetic construct
WENKQLE

SEQ ID NO: 105003 - protein, 7 aa, synthetic construct
MIGIKEA

SEQ ID NO: 105004 - protein, 7 aa, synthetic construct
ETAKGKD

SEQ ID NO: 105005 - protein, 7 aa, synthetic construct
GLGSVKA

SEQ ID NO: 105006 - protein, 7 aa, synthetic construct
KQRTFDA

SEQ ID NO: 105007 - protein, 7 aa, synthetic construct
STQQVSV

SEQ ID NO: 105008 - protein, 7 aa, synthetic construct
ESAHHDH

SEQ ID NO: 105009 - protein, 7 aa, synthetic construct
NTSKNGP

SEQ ID NO: 105010 - protein, 7 aa, synthetic construct
TSPSKNA

SEQ ID NO: 105011 - protein, 7 aa, synthetic construct
TQGAASW

SEQ ID NO: 105012 - protein, 7 aa, synthetic construct
NAPIHKE

SEQ ID NO: 105013 - protein, 7 aa, synthetic construct
DMRATMQ

SEQ ID NO: 105014 - protein, 7 aa, synthetic construct
PSRKLEY

SEQ ID NO: 105015 - protein, 7 aa, synthetic construct
AIFRAES

SEQ ID NO: 105016 - protein, 7 aa, synthetic construct
GMERAGH

SEQ ID NO: 105017 - protein, 7 aa, synthetic construct
IPEKMRP

SEQ ID NO: 105018 - protein, 7 aa, synthetic construct
KNRYGTD

SEQ ID NO: 105019 - protein, 7 aa, synthetic construct
SSEERVA

SEQ ID NO: 105020 - protein, 7 aa, synthetic construct
RAFDPGP

SEQ ID NO: 105021 - protein, 7 aa, synthetic construct
VNIAGPY

SEQ ID NO: 105022 - protein, 7 aa, synthetic construct
SEPFVQH

SEQ ID NO: 105023 - protein, 7 aa, synthetic construct
SQQDKDG

SEQ ID NO: 105024 - protein, 7 aa, synthetic construct
EGHNVQQ

SEQ ID NO: 105025 - protein, 7 aa, synthetic construct
PTISGVV

SEQ ID NO: 105026 - protein, 7 aa, synthetic construct
RHVNSMM

SEQ ID NO: 105027 - protein, 7 aa, synthetic construct
YVSQKHM

SEQ ID NO: 105028 - protein, 7 aa, synthetic construct
TMSKGTL

SEQ ID NO: 105029 - protein, 7 aa, synthetic construct
DGQHHIK

SEQ ID NO: 105030 - protein, 7 aa, synthetic construct
PKPVDQD

SEQ ID NO: 105031 - protein, 7 aa, synthetic construct
APKAESD

SEQ ID NO: 105032 - protein, 7 aa, synthetic construct
DGFSTNR

SEQ ID NO: 105033 - protein, 7 aa, synthetic construct
HDGKDMP

SEQ ID NO: 105034 - protein, 7 aa, synthetic construct
VVNMLTN

SEQ ID NO: 105035 - protein, 7 aa, synthetic construct
GVGIVSS

SEQ ID NO: 105036 - protein, 7 aa, synthetic construct
MYGKETD

SEQ ID NO: 105037 - protein, 7 aa, synthetic construct
SIKLMSM

SEQ ID NO: 105038 - protein, 7 aa, synthetic construct
SKQNSGE

SEQ ID NO: 105039 - protein, 7 aa, synthetic construct
HTSTWQS

SEQ ID NO: 105040 - protein, 7 aa, synthetic construct
FPGKLLH

SEQ ID NO: 105041 - protein, 7 aa, synthetic construct
MANHVGQ

SEQ ID NO: 105042 - protein, 7 aa, synthetic construct
LSRTDVL

SEQ ID NO: 105043 - protein, 7 aa, synthetic construct
SHKLTEI

SEQ ID NO: 105044 - protein, 7 aa, synthetic construct
IDANHVH

SEQ ID NO: 105045 - protein, 7 aa, synthetic construct
GSGEHVK

SEQ ID NO: 105046 - protein, 7 aa, synthetic construct
TVQGVFK

SEQ ID NO: 105047 - protein, 7 aa, synthetic construct
NQHINNY

SEQ ID NO: 105048 - protein, 7 aa, synthetic construct
EKRMDAG

SEQ ID NO: 105049 - protein, 7 aa, synthetic construct
HQARHEH

SEQ ID NO: 105050 - protein, 7 aa, synthetic construct
RGLNLNL

SEQ ID NO: 105051 - protein, 7 aa, synthetic construct
RSSGYAH

SEQ ID NO: 105052 - protein, 7 aa, synthetic construct
DLTNLRT

SEQ ID NO: 105053 - protein, 7 aa, synthetic construct
HDLKEFQ

SEQ ID NO: 105054 - protein, 7 aa, synthetic construct
TPRMQIN

SEQ ID NO: 105055 - protein, 7 aa, synthetic construct
MKDSIIY

SEQ ID NO: 105056 - protein, 7 aa, synthetic construct
QEAAYLG

SEQ ID NO: 105057 - protein, 7 aa, synthetic construct
DKYNGKF

SEQ ID NO: 105058 - protein, 7 aa, synthetic construct
WAASSMS

SEQ ID NO: 105059 - protein, 7 aa, synthetic construct
FANHPSQ

SEQ ID NO: 105060 - protein, 7 aa, synthetic construct
AVDTSHL

SEQ ID NO: 105061 - protein, 7 aa, synthetic construct
AAGSVVR

SEQ ID NO: 105062 - protein, 7 aa, synthetic construct
GGNISMH

SEQ ID NO: 105063 - protein, 7 aa, synthetic construct
ANKEAHQ

SEQ ID NO: 105064 - protein, 7 aa, synthetic construct
NPTVRGV

SEQ ID NO: 105065 - protein, 7 aa, synthetic construct
THAQQAI

SEQ ID NO: 105066 - protein, 7 aa, synthetic construct
LQPYGDH

SEQ ID NO: 105067 - protein, 7 aa, synthetic construct
PYMHGAG

SEQ ID NO: 105068 - protein, 7 aa, synthetic construct
LRSEHGE

SEQ ID NO: 105069 - protein, 7 aa, synthetic construct
KDHIQMI

SEQ ID NO: 105070 - protein, 7 aa, synthetic construct
PPPGKVA

SEQ ID NO: 105071 - protein, 7 aa, synthetic construct
DHAQTRW

SEQ ID NO: 105072 - protein, 7 aa, synthetic construct
VATQGYV

SEQ ID NO: 105073 - protein, 7 aa, synthetic construct
SQKVGAG

SEQ ID NO: 105074 - protein, 7 aa, synthetic construct
ASSGQVA

SEQ ID NO: 105075 - protein, 7 aa, synthetic construct
KAEPNKP

SEQ ID NO: 105076 - protein, 7 aa, synthetic construct
KSHHGAG

SEQ ID NO: 105077 - protein, 7 aa, synthetic construct
RWKDNFG

SEQ ID NO: 105078 - protein, 7 aa, synthetic construct
GSFGELQ

SEQ ID NO: 105079 - protein, 7 aa, synthetic construct
LGMNKGW

SEQ ID NO: 105080 - protein, 7 aa, synthetic construct
ISGIEIG

SEQ ID NO: 105081 - protein, 7 aa, synthetic construct
QMRTWPD

SEQ ID NO: 105082 - protein, 7 aa, synthetic construct
MQKQHDM

SEQ ID NO: 105083 - protein, 7 aa, synthetic construct
GPREEYP

SEQ ID NO: 105084 - protein, 7 aa, synthetic construct
QSTRIQA

SEQ ID NO: 105085 - protein, 7 aa, synthetic construct
YQHDHRT

SEQ ID NO: 105086 - protein, 7 aa, synthetic construct
NKASNFP

SEQ ID NO: 105087 - protein, 7 aa, synthetic construct
PKVVFHE

SEQ ID NO: 105088 - protein, 7 aa, synthetic construct
NMNQLTH

SEQ ID NO: 105089 - protein, 7 aa, synthetic construct
QEPKTQE

SEQ ID NO: 105090 - protein, 7 aa, synthetic construct
RWQELQG

SEQ ID NO: 105091 - protein, 7 aa, synthetic construct
HMVSNGI

SEQ ID NO: 105092 - protein, 7 aa, synthetic construct
DPHSMNS

SEQ ID NO: 105093 - protein, 7 aa, synthetic construct
PRDERNL

SEQ ID NO: 105094 - protein, 7 aa, synthetic construct
ANTAGLS

SEQ ID NO: 105095 - protein, 7 aa, synthetic construct
RKEGPTF

SEQ ID NO: 105096 - protein, 7 aa, synthetic construct
GHEAIRT

SEQ ID NO: 105097 - protein, 7 aa, synthetic construct
VKHAEQG

SEQ ID NO: 105098 - protein, 7 aa, synthetic construct
AQYMGVP

SEQ ID NO: 105099 - protein, 7 aa, synthetic construct
KDDRLSN

SEQ ID NO: 105100 - protein, 7 aa, synthetic construct
NVISVKT

SEQ ID NO: 105101 - protein, 7 aa, synthetic construct
WMATTVS

SEQ ID NO: 105102 - protein, 7 aa, synthetic construct
KQEREHD

SEQ ID NO: 105103 - protein, 7 aa, synthetic construct
WGTNTVF

SEQ ID NO: 105104 - protein, 7 aa, synthetic construct
YREGDRY

SEQ ID NO: 105105 - protein, 7 aa, synthetic construct
RLMEHAM

SEQ ID NO: 105106 - protein, 7 aa, synthetic construct
LRQNLHT

SEQ ID NO: 105107 - protein, 7 aa, synthetic construct
APMVHEA

SEQ ID NO: 105108 - protein, 7 aa, synthetic construct
VHVSHEL

SEQ ID NO: 105109 - protein, 7 aa, synthetic construct
IQHMEDR

SEQ ID NO: 105110 - protein, 7 aa, synthetic construct
YAKVEMH

SEQ ID NO: 105111 - protein, 7 aa, synthetic construct
LLRHEKN

SEQ ID NO: 105112 - protein, 7 aa, synthetic construct
KHVHPPS

SEQ ID NO: 105113 - protein, 7 aa, synthetic construct
QVHDIKI

SEQ ID NO: 105114 - protein, 7 aa, synthetic construct
KFTKFGE

SEQ ID NO: 105115 - protein, 7 aa, synthetic construct
DYLRDNP

SEQ ID NO: 105116 - protein, 7 aa, synthetic construct
PTRDTMI

SEQ ID NO: 105117 - protein, 7 aa, synthetic construct
EKVTPDT

SEQ ID NO: 105118 - protein, 7 aa, synthetic construct
LITHMQS

SEQ ID NO: 105119 - protein, 7 aa, synthetic construct
FQEKMKN

SEQ ID NO: 105120 - protein, 7 aa, synthetic construct
VEPRKIM

SEQ ID NO: 105121 - protein, 7 aa, synthetic construct
WVPTMSE

SEQ ID NO: 105122 - protein, 7 aa, synthetic construct
GERPALY

SEQ ID NO: 105123 - protein, 7 aa, synthetic construct
GFEGKQN

SEQ ID NO: 105124 - protein, 7 aa, synthetic construct
IKQFDGP

SEQ ID NO: 105125 - protein, 7 aa, synthetic construct
RPVPQPS

SEQ ID NO: 105126 - protein, 7 aa, synthetic construct
RQMHLHD

SEQ ID NO: 105127 - protein, 7 aa, synthetic construct
KTTATNG

SEQ ID NO: 105128 - protein, 7 aa, synthetic construct
EHNLGVS

SEQ ID NO: 105129 - protein, 7 aa, synthetic construct
KGFIVEA

SEQ ID NO: 105130 - protein, 7 aa, synthetic construct
YPNEGPM

SEQ ID NO: 105131 - protein, 7 aa, synthetic construct
VQKESHI

SEQ ID NO: 105132 - protein, 7 aa, synthetic construct
KPYAENF

SEQ ID NO: 105133 - protein, 7 aa, synthetic construct
AEKATPE

SEQ ID NO: 105134 - protein, 7 aa, synthetic construct
QYMPGRQ

SEQ ID NO: 105135 - protein, 7 aa, synthetic construct
LEATGAK

SEQ ID NO: 105136 - protein, 7 aa, synthetic construct
RIKEHIN

SEQ ID NO: 105137 - protein, 7 aa, synthetic construct
SHHSNDI

SEQ ID NO: 105138 - protein, 7 aa, synthetic construct
WDLNKMS

SEQ ID NO: 105139 - protein, 7 aa, synthetic construct
AEYRPKV

SEQ ID NO: 105140 - protein, 7 aa, synthetic construct
SWDSVPA

SEQ ID NO: 105141 - protein, 7 aa, synthetic construct
GADKDQV

SEQ ID NO: 105142 - protein, 7 aa, synthetic construct
NLTTGAT

SEQ ID NO: 105143 - protein, 7 aa, synthetic construct
HTGARYS

SEQ ID NO: 105144 - protein, 7 aa, synthetic construct
NSTPTHI

SEQ ID NO: 105145 - protein, 7 aa, synthetic construct
LTKDIRA

SEQ ID NO: 105146 - protein, 7 aa, synthetic construct
YDALIRT

SEQ ID NO: 105147 - protein, 7 aa, synthetic construct
EILKNQP

SEQ ID NO: 105148 - protein, 7 aa, synthetic construct
KPGQAGF

SEQ ID NO: 105149 - protein, 7 aa, synthetic construct
HWAKDTL

SEQ ID NO: 105150 - protein, 7 aa, synthetic construct
KVHQISY

SEQ ID NO: 105151 - protein, 7 aa, synthetic construct
HRDNHNH

SEQ ID NO: 105152 - protein, 7 aa, synthetic construct
GLFAAQE

SEQ ID NO: 105153 - protein, 7 aa, synthetic construct
YGTEKQP

SEQ ID NO: 105154 - protein, 7 aa, synthetic construct
QHQTLHV

SEQ ID NO: 105155 - protein, 7 aa, synthetic construct
EVFRDHV

SEQ ID NO: 105156 - protein, 7 aa, synthetic construct
WHNAMSK

SEQ ID NO: 105157 - protein, 7 aa, synthetic construct
FIMHSSA

SEQ ID NO: 105158 - protein, 7 aa, synthetic construct
AFQAQLK

SEQ ID NO: 105159 - protein, 7 aa, synthetic construct
TAPMNGM

SEQ ID NO: 105160 - protein, 7 aa, synthetic construct
HKDTLDS

SEQ ID NO: 105161 - protein, 7 aa, synthetic construct
HSHVMVS

SEQ ID NO: 105162 - protein, 7 aa, synthetic construct
FNKMNSE

SEQ ID NO: 105163 - protein, 7 aa, synthetic construct
WPTADRD

SEQ ID NO: 105164 - protein, 7 aa, synthetic construct
DANHATL

SEQ ID NO: 105165 - protein, 7 aa, synthetic construct
SNVPHVA

SEQ ID NO: 105166 - protein, 7 aa, synthetic construct
DKVTNHE

SEQ ID NO: 105167 - protein, 7 aa, synthetic construct
QTFAASI

SEQ ID NO: 105168 - protein, 7 aa, synthetic construct
VVGEHGV

SEQ ID NO: 105169 - protein, 7 aa, synthetic construct
QYAQTGH

SEQ ID NO: 105170 - protein, 7 aa, synthetic construct
MDKVRII

SEQ ID NO: 105171 - protein, 7 aa, synthetic construct
NHGMNST

SEQ ID NO: 105172 - protein, 7 aa, synthetic construct
QKVDKIL

SEQ ID NO: 105173 - protein, 7 aa, synthetic construct
RMGQFEL

SEQ ID NO: 105174 - protein, 7 aa, synthetic construct
NTGVATR

SEQ ID NO: 105175 - protein, 7 aa, synthetic construct
MVGILPK

SEQ ID NO: 105176 - protein, 7 aa, synthetic construct
SQTYGAH

SEQ ID NO: 105177 - protein, 7 aa, synthetic construct
WGVHNGT

SEQ ID NO: 105178 - protein, 7 aa, synthetic construct
ARAAERL

SEQ ID NO: 105179 - protein, 7 aa, synthetic construct
YKRQQNE

SEQ ID NO: 105180 - protein, 7 aa, synthetic construct
MDNMRSF

SEQ ID NO: 105181 - protein, 7 aa, synthetic construct
WNHHPQG

SEQ ID NO: 105182 - protein, 7 aa, synthetic construct
FQQGQFQ

SEQ ID NO: 105183 - protein, 7 aa, synthetic construct
RPDLRYD

SEQ ID NO: 105184 - protein, 7 aa, synthetic construct
GDHIGSR

SEQ ID NO: 105185 - protein, 7 aa, synthetic construct
DYGLHNR

SEQ ID NO: 105186 - protein, 7 aa, synthetic construct
TVYVPDR

SEQ ID NO: 105187 - protein, 7 aa, synthetic construct
DINIHKA

SEQ ID NO: 105188 - protein, 7 aa, synthetic construct
NVEFKPV

SEQ ID NO: 105189 - protein, 7 aa, synthetic construct
DVQILRK

SEQ ID NO: 105190 - protein, 7 aa, synthetic construct
YTVAKGE

SEQ ID NO: 105191 - protein, 7 aa, synthetic construct
NRAMGPN

SEQ ID NO: 105192 - protein, 7 aa, synthetic construct
TITMPHL

SEQ ID NO: 105193 - protein, 7 aa, synthetic construct
PQNTTDY

SEQ ID NO: 105194 - protein, 7 aa, synthetic construct
HRVVSEK

SEQ ID NO: 105195 - protein, 7 aa, synthetic construct
ETHINVR

SEQ ID NO: 105196 - protein, 7 aa, synthetic construct
AGLNINA

SEQ ID NO: 105197 - protein, 7 aa, synthetic construct
NNKRLDP

SEQ ID NO: 105198 - protein, 7 aa, synthetic construct
HLDMSNR

SEQ ID NO: 105199 - protein, 7 aa, synthetic construct
SAFNNVE

SEQ ID NO: 105200 - protein, 7 aa, synthetic construct
PKVQNSP

SEQ ID NO: 105201 - protein, 7 aa, synthetic construct
HGNLMQF

SEQ ID NO: 105202 - protein, 7 aa, synthetic construct
SGRNSLE

SEQ ID NO: 105203 - protein, 7 aa, synthetic construct
IMVGTNN

SEQ ID NO: 105204 - protein, 7 aa, synthetic construct
TQHVDPS

SEQ ID NO: 105205 - protein, 7 aa, synthetic construct
RSNANLP

SEQ ID NO: 105206 - protein, 7 aa, synthetic construct
AYQSKPD

SEQ ID NO: 105207 - protein, 7 aa, synthetic construct
NLGNSQG

SEQ ID NO: 105208 - protein, 7 aa, synthetic construct
IAPHPLD

SEQ ID NO: 105209 - protein, 7 aa, synthetic construct
SIGTEHP

SEQ ID NO: 105210 - protein, 7 aa, synthetic construct
YQMAYES

SEQ ID NO: 105211 - protein, 7 aa, synthetic construct
EGGMNAA

SEQ ID NO: 105212 - protein, 7 aa, synthetic construct
QHAELRE

SEQ ID NO: 105213 - protein, 7 aa, synthetic construct
FEALPGD

SEQ ID NO: 105214 - protein, 7 aa, synthetic construct
YMKVYAQ

SEQ ID NO: 105215 - protein, 7 aa, synthetic construct
DHRFPSE

SEQ ID NO: 105216 - protein, 7 aa, synthetic construct
GYDQNKM

SEQ ID NO: 105217 - protein, 7 aa, synthetic construct
STGQDQR

SEQ ID NO: 105218 - protein, 7 aa, synthetic construct
VEPHNSF

SEQ ID NO: 105219 - protein, 7 aa, synthetic construct
KDREIQV

SEQ ID NO: 105220 - protein, 7 aa, synthetic construct
PFVSVKG

SEQ ID NO: 105221 - protein, 7 aa, synthetic construct
QRHDASL

SEQ ID NO: 105222 - protein, 7 aa, synthetic construct
MHGTEHT

SEQ ID NO: 105223 - protein, 7 aa, synthetic construct
TSHHQTS

SEQ ID NO: 105224 - protein, 7 aa, synthetic construct
DHGAMGV

SEQ ID NO: 105225 - protein, 7 aa, synthetic construct
YVAAYNS

SEQ ID NO: 105226 - protein, 7 aa, synthetic construct
NHTTEQS

SEQ ID NO: 105227 - protein, 7 aa, synthetic construct
ARDFQAY

SEQ ID NO: 105228 - protein, 7 aa, synthetic construct
HNPFGQD

SEQ ID NO: 105229 - protein, 7 aa, synthetic construct
QPQTTHF

SEQ ID NO: 105230 - protein, 7 aa, synthetic construct
WGLKDLP

SEQ ID NO: 105231 - protein, 7 aa, synthetic construct
STGGHQH

SEQ ID NO: 105232 - protein, 7 aa, synthetic construct
TSRLMQD

SEQ ID NO: 105233 - protein, 7 aa, synthetic construct
WAEALKK

SEQ ID NO: 105234 - protein, 7 aa, synthetic construct
SRNHELL

SEQ ID NO: 105235 - protein, 7 aa, synthetic construct
RNNGREH

SEQ ID NO: 105236 - protein, 7 aa, synthetic construct
QTGFSNE

SEQ ID NO: 105237 - protein, 7 aa, synthetic construct
WKPGATD

SEQ ID NO: 105238 - protein, 7 aa, synthetic construct
PTTKETA

SEQ ID NO: 105239 - protein, 7 aa, synthetic construct
GHILGVP

SEQ ID NO: 105240 - protein, 7 aa, synthetic construct
FQQDTRF

SEQ ID NO: 105241 - protein, 7 aa, synthetic construct
HAHDSQV

SEQ ID NO: 105242 - protein, 7 aa, synthetic construct
PYRDEHS

SEQ ID NO: 105243 - protein, 7 aa, synthetic construct
LHQKFQM

SEQ ID NO: 105244 - protein, 7 aa, synthetic construct
TFVRAPA

SEQ ID NO: 105245 - protein, 7 aa, synthetic construct
NQRSGFA

SEQ ID NO: 105246 - protein, 7 aa, synthetic construct
HVADKFE

SEQ ID NO: 105247 - protein, 7 aa, synthetic construct
FISNQSH

SEQ ID NO: 105248 - protein, 7 aa, synthetic construct
YRLSNTV

SEQ ID NO: 105249 - protein, 7 aa, synthetic construct
HVLKTIA

SEQ ID NO: 105250 - protein, 7 aa, synthetic construct
NYHVDHE

SEQ ID NO: 105251 - protein, 7 aa, synthetic construct
AFMAPLE

SEQ ID NO: 105252 - protein, 7 aa, synthetic construct
PHYNEHS

SEQ ID NO: 105253 - protein, 7 aa, synthetic construct
RNFHEHQ

SEQ ID NO: 105254 - protein, 7 aa, synthetic construct
SYRAQEQ

SEQ ID NO: 105255 - protein, 7 aa, synthetic construct
NPVRERL

SEQ ID NO: 105256 - protein, 7 aa, synthetic construct
VDQIQKK

SEQ ID NO: 105257 - protein, 7 aa, synthetic construct
ELFTNQG

SEQ ID NO: 105258 - protein, 7 aa, synthetic construct
AHLGFMD

SEQ ID NO: 105259 - protein, 7 aa, synthetic construct
SKLHEKH

SEQ ID NO: 105260 - protein, 7 aa, synthetic construct
DMFEQKN

SEQ ID NO: 105261 - protein, 7 aa, synthetic construct
MHQNTYA

SEQ ID NO: 105262 - protein, 7 aa, synthetic construct
HHRAQDN

SEQ ID NO: 105263 - protein, 7 aa, synthetic construct
RGFEAIH

SEQ ID NO: 105264 - protein, 7 aa, synthetic construct
RPMDISM

SEQ ID NO: 105265 - protein, 7 aa, synthetic construct
GIEYAGP

SEQ ID NO: 105266 - protein, 7 aa, synthetic construct
GTESTMV

SEQ ID NO: 105267 - protein, 7 aa, synthetic construct
TISLGKF

SEQ ID NO: 105268 - protein, 7 aa, synthetic construct
HDHIRFG

SEQ ID NO: 105269 - protein, 7 aa, synthetic construct
TTKWGPM

SEQ ID NO: 105270 - protein, 7 aa, synthetic construct
RNNMLHN

SEQ ID NO: 105271 - protein, 7 aa, synthetic construct
METSSLI

SEQ ID NO: 105272 - protein, 7 aa, synthetic construct
NFAGQTE

SEQ ID NO: 105273 - protein, 7 aa, synthetic construct
WPQDTAY

SEQ ID NO: 105274 - protein, 7 aa, synthetic construct
YHSPLPT

SEQ ID NO: 105275 - protein, 7 aa, synthetic construct
NIGRYPD

SEQ ID NO: 105276 - protein, 7 aa, synthetic construct
WSDHQTR

SEQ ID NO: 105277 - protein, 7 aa, synthetic construct
PVVQAMS

SEQ ID NO: 105278 - protein, 7 aa, synthetic construct
TTFGNSQ

SEQ ID NO: 105279 - protein, 7 aa, synthetic construct
TAQNNVK

SEQ ID NO: 105280 - protein, 7 aa, synthetic construct
VQHQTIS

SEQ ID NO: 105281 - protein, 7 aa, synthetic construct
AKQDSIV

SEQ ID NO: 105282 - protein, 7 aa, synthetic construct
FGDHTDG

SEQ ID NO: 105283 - protein, 7 aa, synthetic construct
FERFNEA

SEQ ID NO: 105284 - protein, 7 aa, synthetic construct
GPNAHNY

SEQ ID NO: 105285 - protein, 7 aa, synthetic construct
TIRTPDF

SEQ ID NO: 105286 - protein, 7 aa, synthetic construct
LWKIEDV

SEQ ID NO: 105287 - protein, 7 aa, synthetic construct
VEYAGSV

SEQ ID NO: 105288 - protein, 7 aa, synthetic construct
GPFVISP

SEQ ID NO: 105289 - protein, 7 aa, synthetic construct
YDDTIRG

SEQ ID NO: 105290 - protein, 7 aa, synthetic construct
LNQVTGM

SEQ ID NO: 105291 - protein, 7 aa, synthetic construct
CKDNVCI

SEQ ID NO: 105292 - protein, 7 aa, synthetic construct
HQQEGSR

SEQ ID NO: 105293 - protein, 7 aa, synthetic construct
AHMNTPE

SEQ ID NO: 105294 - protein, 7 aa, synthetic construct
VTVKDIY

SEQ ID NO: 105295 - protein, 7 aa, synthetic construct
APFPDRF

SEQ ID NO: 105296 - protein, 7 aa, synthetic construct
ANSNEKN

SEQ ID NO: 105297 - protein, 7 aa, synthetic construct
RAIHTEQ

SEQ ID NO: 105298 - protein, 7 aa, synthetic construct
YDQRMQR

SEQ ID NO: 105299 - protein, 7 aa, synthetic construct
IVAYDRD

SEQ ID NO: 105300 - protein, 7 aa, synthetic construct
TGINGYS

SEQ ID NO: 105301 - protein, 7 aa, synthetic construct
FDARWSE

SEQ ID NO: 105302 - protein, 7 aa, synthetic construct
FDDSVRP

SEQ ID NO: 105303 - protein, 7 aa, synthetic construct
VQRLKQD

SEQ ID NO: 105304 - protein, 7 aa, synthetic construct
CHSDSAC

SEQ ID NO: 105305 - protein, 7 aa, synthetic construct
PPKYHST

SEQ ID NO: 105306 - protein, 7 aa, synthetic construct
GTLHIRP

SEQ ID NO: 105307 - protein, 7 aa, synthetic construct
MNAGNTI

SEQ ID NO: 105308 - protein, 7 aa, synthetic construct
MLGYTPH

SEQ ID NO: 105309 - protein, 7 aa, synthetic construct
VDNISRL

SEQ ID NO: 105310 - protein, 7 aa, synthetic construct
ELFRSNT

SEQ ID NO: 105311 - protein, 7 aa, synthetic construct
STGQEKT

SEQ ID NO: 105312 - protein, 7 aa, synthetic construct
TGHNDHW

SEQ ID NO: 105313 - protein, 7 aa, synthetic construct
ITPQGER

SEQ ID NO: 105314 - protein, 7 aa, synthetic construct
IQRFQAG

SEQ ID NO: 105315 - protein, 7 aa, synthetic construct
EHSRPFS

SEQ ID NO: 105316 - protein, 7 aa, synthetic construct
DLMGQSM

SEQ ID NO: 105317 - protein, 7 aa, synthetic construct
SLHLADS

SEQ ID NO: 105318 - protein, 7 aa, synthetic construct
VAKQESR

SEQ ID NO: 105319 - protein, 7 aa, synthetic construct
MPHMAFP

SEQ ID NO: 105320 - protein, 7 aa, synthetic construct
SKPYNQP

SEQ ID NO: 105321 - protein, 7 aa, synthetic construct
TLDIAVY

SEQ ID NO: 105322 - protein, 7 aa, synthetic construct
IGGERSI

SEQ ID NO: 105323 - protein, 7 aa, synthetic construct
NSRETFA

SEQ ID NO: 105324 - protein, 7 aa, synthetic construct
VAQTYQR

SEQ ID NO: 105325 - protein, 7 aa, synthetic construct
KTETMFQ

SEQ ID NO: 105326 - protein, 7 aa, synthetic construct
RIEHHST

SEQ ID NO: 105327 - protein, 7 aa, synthetic construct
GHDTGPA

SEQ ID NO: 105328 - protein, 7 aa, synthetic construct
SHTKQST

SEQ ID NO: 105329 - protein, 7 aa, synthetic construct
VFRVDAL

SEQ ID NO: 105330 - protein, 7 aa, synthetic construct
FVVNKPN

SEQ ID NO: 105331 - protein, 7 aa, synthetic construct
FMGSQKD

SEQ ID NO: 105332 - protein, 7 aa, synthetic construct
PKMHSAH

SEQ ID NO: 105333 - protein, 7 aa, synthetic construct
VEQRRGD

SEQ ID NO: 105334 - protein, 7 aa, synthetic construct
GVKDASN

SEQ ID NO: 105335 - protein, 7 aa, synthetic construct
PQMNLSA

SEQ ID NO: 105336 - protein, 7 aa, synthetic construct
PSHQINV

SEQ ID NO: 105337 - protein, 7 aa, synthetic construct
MNANVAI

SEQ ID NO: 105338 - protein, 7 aa, synthetic construct
ALAGDQG

SEQ ID NO: 105339 - protein, 7 aa, synthetic construct
RLVTVSP

SEQ ID NO: 105340 - protein, 7 aa, synthetic construct
TDVPRMK

SEQ ID NO: 105341 - protein, 7 aa, synthetic construct
WTNDHDG

SEQ ID NO: 105342 - protein, 7 aa, synthetic construct
ASLHNQP

SEQ ID NO: 105343 - protein, 7 aa, synthetic construct
GSHHIAT

SEQ ID NO: 105344 - protein, 7 aa, synthetic construct
NGNAMII

SEQ ID NO: 105345 - protein, 7 aa, synthetic construct
KKEMWNA

SEQ ID NO: 105346 - protein, 7 aa, synthetic construct
QAQTQTR

SEQ ID NO: 105347 - protein, 7 aa, synthetic construct
AITINSH

SEQ ID NO: 105348 - protein, 7 aa, synthetic construct
STPHDSS

SEQ ID NO: 105349 - protein, 7 aa, synthetic construct
HGSGINI

SEQ ID NO: 105350 - protein, 7 aa, synthetic construct
GMKTAGL

SEQ ID NO: 105351 - protein, 7 aa, synthetic construct
MGLRHGI

SEQ ID NO: 105352 - protein, 7 aa, synthetic construct
EQIPNDR

SEQ ID NO: 105353 - protein, 7 aa, synthetic construct
PHYVSGI

SEQ ID NO: 105354 - protein, 7 aa, synthetic construct
QPRQAGS

SEQ ID NO: 105355 - protein, 7 aa, synthetic construct
ERMQLAP

SEQ ID NO: 105356 - protein, 7 aa, synthetic construct
RLLAPLN

SEQ ID NO: 105357 - protein, 7 aa, synthetic construct
NVGRDTL

SEQ ID NO: 105358 - protein, 7 aa, synthetic construct
ASMTQVP

SEQ ID NO: 105359 - protein, 7 aa, synthetic construct
PQQSGGF

SEQ ID NO: 105360 - protein, 7 aa, synthetic construct
GSTQEHS

SEQ ID NO: 105361 - protein, 7 aa, synthetic construct
IPRAFGP

SEQ ID NO: 105362 - protein, 7 aa, synthetic construct
IHNPSAE

SEQ ID NO: 105363 - protein, 7 aa, synthetic construct
SEHQNMK

SEQ ID NO: 105364 - protein, 7 aa, synthetic construct
THTERHY

SEQ ID NO: 105365 - protein, 7 aa, synthetic construct
MIIKEMS

SEQ ID NO: 105366 - protein, 7 aa, synthetic construct
INQNFSK

SEQ ID NO: 105367 - protein, 7 aa, synthetic construct
DMLRADI

SEQ ID NO: 105368 - protein, 7 aa, synthetic construct
YTDKYAY

SEQ ID NO: 105369 - protein, 7 aa, synthetic construct
STTDSFS

SEQ ID NO: 105370 - protein, 7 aa, synthetic construct
SKNQPLE

SEQ ID NO: 105371 - protein, 7 aa, synthetic construct
NPQYRDH

SEQ ID NO: 105372 - protein, 7 aa, synthetic construct
KGEVHAG

SEQ ID NO: 105373 - protein, 7 aa, synthetic construct
GNSTEVI

SEQ ID NO: 105374 - protein, 7 aa, synthetic construct
IKNAHLY

SEQ ID NO: 105375 - protein, 7 aa, synthetic construct
MSDARLV

SEQ ID NO: 105376 - protein, 7 aa, synthetic construct
NSHGHQD

SEQ ID NO: 105377 - protein, 7 aa, synthetic construct
PNSHAAP

SEQ ID NO: 105378 - protein, 7 aa, synthetic construct
QVLMKGI

SEQ ID NO: 105379 - protein, 7 aa, synthetic construct
TTPHNAW

SEQ ID NO: 105380 - protein, 7 aa, synthetic construct
GIDNDKN

SEQ ID NO: 105381 - protein, 7 aa, synthetic construct
YVDIKSN

SEQ ID NO: 105382 - protein, 7 aa, synthetic construct
TGGQKSP

SEQ ID NO: 105383 - protein, 7 aa, synthetic construct
YEGKQAK

SEQ ID NO: 105384 - protein, 7 aa, synthetic construct
SITGPQE

SEQ ID NO: 105385 - protein, 7 aa, synthetic construct
LRKDAHI

SEQ ID NO: 105386 - protein, 7 aa, synthetic construct
RNYQLTE

SEQ ID NO: 105387 - protein, 7 aa, synthetic construct
QAPPSNM

SEQ ID NO: 105388 - protein, 7 aa, synthetic construct
SAQITYM

SEQ ID NO: 105389 - protein, 7 aa, synthetic construct
AAKSMNG

SEQ ID NO: 105390 - protein, 7 aa, synthetic construct
QAPKATP

SEQ ID NO: 105391 - protein, 7 aa, synthetic construct
IETHMYE

SEQ ID NO: 105392 - protein, 7 aa, synthetic construct
AMQYHGS

SEQ ID NO: 105393 - protein, 7 aa, synthetic construct
MLQNHRT

SEQ ID NO: 105394 - protein, 7 aa, synthetic construct
SVAPLAF

SEQ ID NO: 105395 - protein, 7 aa, synthetic construct
SLRDVNT

SEQ ID NO: 105396 - protein, 7 aa, synthetic construct
WSSVPQT

SEQ ID NO: 105397 - protein, 7 aa, synthetic construct
EDNHNSG

SEQ ID NO: 105398 - protein, 7 aa, synthetic construct
PGMKAMQ

SEQ ID NO: 105399 - protein, 7 aa, synthetic construct
FVHTHKV

SEQ ID NO: 105400 - protein, 7 aa, synthetic construct
GKQKQTD

SEQ ID NO: 105401 - protein, 7 aa, synthetic construct
QQYDTAA

SEQ ID NO: 105402 - protein, 7 aa, synthetic construct
MKISVDF

SEQ ID NO: 105403 - protein, 7 aa, synthetic construct
RHNNSLT

SEQ ID NO: 105404 - protein, 7 aa, synthetic construct
MRDTILH

SEQ ID NO: 105405 - protein, 7 aa, synthetic construct
CAPGVDC

SEQ ID NO: 105406 - protein, 7 aa, synthetic construct
IHHYNPA

SEQ ID NO: 105407 - protein, 7 aa, synthetic construct
GVHHFEP

SEQ ID NO: 105408 - protein, 7 aa, synthetic construct
DMIKPST

SEQ ID NO: 105409 - protein, 7 aa, synthetic construct
GHVLRSD

SEQ ID NO: 105410 - protein, 7 aa, synthetic construct
PHREPLK

SEQ ID NO: 105411 - protein, 7 aa, synthetic construct
AQKLLVE

SEQ ID NO: 105412 - protein, 7 aa, synthetic construct
EGNAFKT

SEQ ID NO: 105413 - protein, 7 aa, synthetic construct
MAMRDKT

SEQ ID NO: 105414 - protein, 7 aa, synthetic construct
SPHHISY

SEQ ID NO: 105415 - protein, 7 aa, synthetic construct
IHDVPKD

SEQ ID NO: 105416 - protein, 7 aa, synthetic construct
DRDQHKE

SEQ ID NO: 105417 - protein, 7 aa, synthetic construct
QEGMGSG

SEQ ID NO: 105418 - protein, 7 aa, synthetic construct
SQGKSSP

SEQ ID NO: 105419 - protein, 7 aa, synthetic construct
WKNPKEI

SEQ ID NO: 105420 - protein, 7 aa, synthetic construct
YVTENRH

SEQ ID NO: 105421 - protein, 7 aa, synthetic construct
AWERHAA

SEQ ID NO: 105422 - protein, 7 aa, synthetic construct
MQPFKMV

SEQ ID NO: 105423 - protein, 7 aa, synthetic construct
QPPTHGF

SEQ ID NO: 105424 - protein, 7 aa, synthetic construct
KPITPVY

SEQ ID NO: 105425 - protein, 7 aa, synthetic construct
IAVAVGH

SEQ ID NO: 105426 - protein, 7 aa, synthetic construct
DIIDPGN

SEQ ID NO: 105427 - protein, 7 aa, synthetic construct
EMMGTHR

SEQ ID NO: 105428 - protein, 7 aa, synthetic construct
GKQYENT

SEQ ID NO: 105429 - protein, 7 aa, synthetic construct
EVAIVAG

SEQ ID NO: 105430 - protein, 7 aa, synthetic construct
DNYHVIE

SEQ ID NO: 105431 - protein, 7 aa, synthetic construct
RPDWAMD

SEQ ID NO: 105432 - protein, 7 aa, synthetic construct
HGTTLSD

SEQ ID NO: 105433 - protein, 7 aa, synthetic construct
GMQYMAE

SEQ ID NO: 105434 - protein, 7 aa, synthetic construct
QEPLKKQ

SEQ ID NO: 105435 - protein, 7 aa, synthetic construct
TKAVMDE

SEQ ID NO: 105436 - protein, 7 aa, synthetic construct
TQIQNNM

SEQ ID NO: 105437 - protein, 7 aa, synthetic construct
RPTFEPT

SEQ ID NO: 105438 - protein, 7 aa, synthetic construct
ETNFRQH

SEQ ID NO: 105439 - protein, 7 aa, synthetic construct
AVGVHNE

SEQ ID NO: 105440 - protein, 7 aa, synthetic construct
PDYAPSR

SEQ ID NO: 105441 - protein, 7 aa, synthetic construct
CAGLPCS

SEQ ID NO: 105442 - protein, 7 aa, synthetic construct
WYSGNVA

SEQ ID NO: 105443 - protein, 7 aa, synthetic construct
ESKPIQV

SEQ ID NO: 105444 - protein, 7 aa, synthetic construct
GLTWKSE

SEQ ID NO: 105445 - protein, 7 aa, synthetic construct
QAVHTDD

SEQ ID NO: 105446 - protein, 7 aa, synthetic construct
KQSGSVA

SEQ ID NO: 105447 - protein, 7 aa, synthetic construct
PTGRDIN

SEQ ID NO: 105448 - protein, 7 aa, synthetic construct
TNNSPSF

SEQ ID NO: 105449 - protein, 7 aa, synthetic construct
AERVGGY

SEQ ID NO: 105450 - protein, 7 aa, synthetic construct
HYGQSAY

SEQ ID NO: 105451 - protein, 7 aa, synthetic construct
QMIKANE

SEQ ID NO: 105452 - protein, 7 aa, synthetic construct
QPVSQDH

SEQ ID NO: 105453 - protein, 7 aa, synthetic construct
NREPSPQ

SEQ ID NO: 105454 - protein, 7 aa, synthetic construct
HIYTNAG

SEQ ID NO: 105455 - protein, 7 aa, synthetic construct
YKVSSVA

SEQ ID NO: 105456 - protein, 7 aa, synthetic construct
KQTETFQ

SEQ ID NO: 105457 - protein, 7 aa, synthetic construct
LMREVHL

SEQ ID NO: 105458 - protein, 7 aa, synthetic construct
FPPRVIP

SEQ ID NO: 105459 - protein, 7 aa, synthetic construct
FGVYHDE

SEQ ID NO: 105460 - protein, 7 aa, synthetic construct
NKSDKQA

SEQ ID NO: 105461 - protein, 7 aa, synthetic construct
EDKKQDP

SEQ ID NO: 105462 - protein, 7 aa, synthetic construct
MVSSLNE

SEQ ID NO: 105463 - protein, 7 aa, synthetic construct
YTAQMHA

SEQ ID NO: 105464 - protein, 7 aa, synthetic construct
ANIVKLQ

SEQ ID NO: 105465 - protein, 7 aa, synthetic construct
QTNMPPQ

SEQ ID NO: 105466 - protein, 7 aa, synthetic construct
IKVGSSV

SEQ ID NO: 105467 - protein, 7 aa, synthetic construct
TGLSQEL

SEQ ID NO: 105468 - protein, 7 aa, synthetic construct
EKHIMYE

SEQ ID NO: 105469 - protein, 7 aa, synthetic construct
VYPDVGH

SEQ ID NO: 105470 - protein, 7 aa, synthetic construct
PVFDTQR

SEQ ID NO: 105471 - protein, 7 aa, synthetic construct
PEKLKEG

SEQ ID NO: 105472 - protein, 7 aa, synthetic construct
GSHTQHL

SEQ ID NO: 105473 - protein, 7 aa, synthetic construct
KHQRQDI

SEQ ID NO: 105474 - protein, 7 aa, synthetic construct
RDSSPQH

SEQ ID NO: 105475 - protein, 7 aa, synthetic construct
IMRAIQP

SEQ ID NO: 105476 - protein, 7 aa, synthetic construct
QQQDKYT

SEQ ID NO: 105477 - protein, 7 aa, synthetic construct
PKGITYP

SEQ ID NO: 105478 - protein, 7 aa, synthetic construct
EIGKIIT

SEQ ID NO: 105479 - protein, 7 aa, synthetic construct
EYHREAG

SEQ ID NO: 105480 - protein, 7 aa, synthetic construct
TDEQWKA

SEQ ID NO: 105481 - protein, 7 aa, synthetic construct
SKPDAMC

SEQ ID NO: 105482 - protein, 7 aa, synthetic construct
FKEDKTI

SEQ ID NO: 105483 - protein, 7 aa, synthetic construct
QREADLK

SEQ ID NO: 105484 - protein, 7 aa, synthetic construct
SGEALAG

SEQ ID NO: 105485 - protein, 7 aa, synthetic construct
DHITIRV

SEQ ID NO: 105486 - protein, 7 aa, synthetic construct
YTGDAQH

SEQ ID NO: 105487 - protein, 7 aa, synthetic construct
KEIPISG

SEQ ID NO: 105488 - protein, 7 aa, synthetic construct
HGHTGYT

SEQ ID NO: 105489 - protein, 7 aa, synthetic construct
TNGAAAT

SEQ ID NO: 105490 - protein, 7 aa, synthetic construct
AKQYNTN

SEQ ID NO: 105491 - protein, 7 aa, synthetic construct
HTVRENR

SEQ ID NO: 105492 - protein, 7 aa, synthetic construct
VTADRIQ

SEQ ID NO: 105493 - protein, 7 aa, synthetic construct
EYTTHQS

SEQ ID NO: 105494 - protein, 7 aa, synthetic construct
DGRSRET

SEQ ID NO: 105495 - protein, 7 aa, synthetic construct
FAEHPKN

SEQ ID NO: 105496 - protein, 7 aa, synthetic construct
VKLVTDD

SEQ ID NO: 105497 - protein, 7 aa, synthetic construct
HSTQVQI

SEQ ID NO: 105498 - protein, 7 aa, synthetic construct
ITTGTVQ

SEQ ID NO: 105499 - protein, 7 aa, synthetic construct
NGVTSVF

SEQ ID NO: 105500 - protein, 7 aa, synthetic construct
GQAQPEH

SEQ ID NO: 105501 - protein, 7 aa, synthetic construct
ATFADVG

SEQ ID NO: 105502 - protein, 7 aa, synthetic construct
PGNMMSM

SEQ ID NO: 105503 - protein, 7 aa, synthetic construct
REFVQHT

SEQ ID NO: 105504 - protein, 7 aa, synthetic construct
QLIRQPN

SEQ ID NO: 105505 - protein, 7 aa, synthetic construct
SLNHQFV

SEQ ID NO: 105506 - protein, 7 aa, synthetic construct
GPYSDKT

SEQ ID NO: 105507 - protein, 7 aa, synthetic construct
QANYAST

SEQ ID NO: 105508 - protein, 7 aa, synthetic construct
KKINTTD

SEQ ID NO: 105509 - protein, 7 aa, synthetic construct
YTTMVGN

SEQ ID NO: 105510 - protein, 7 aa, synthetic construct
HSQMHQM

SEQ ID NO: 105511 - protein, 7 aa, synthetic construct
HSKTETI

SEQ ID NO: 105512 - protein, 7 aa, synthetic construct
VGEIKWN

SEQ ID NO: 105513 - protein, 7 aa, synthetic construct
SQAHIGH

SEQ ID NO: 105514 - protein, 7 aa, synthetic construct
QGLHPMK

SEQ ID NO: 105515 - protein, 7 aa, synthetic construct
KSQVEFA

SEQ ID NO: 105516 - protein, 7 aa, synthetic construct
AGPGHPV

SEQ ID NO: 105517 - protein, 7 aa, synthetic construct
NNQILYS

SEQ ID NO: 105518 - protein, 7 aa, synthetic construct
EWAQEKN

SEQ ID NO: 105519 - protein, 7 aa, synthetic construct
GTQHPGY

SEQ ID NO: 105520 - protein, 7 aa, synthetic construct
MPKHDEK

SEQ ID NO: 105521 - protein, 7 aa, synthetic construct
NHATMLN

SEQ ID NO: 105522 - protein, 7 aa, synthetic construct
KNESVNA

SEQ ID NO: 105523 - protein, 7 aa, synthetic construct
PILAKDN

SEQ ID NO: 105524 - protein, 7 aa, synthetic construct
HGGQVRH

SEQ ID NO: 105525 - protein, 7 aa, synthetic construct
PNISGPS

SEQ ID NO: 105526 - protein, 7 aa, synthetic construct
AFSGHTK

SEQ ID NO: 105527 - protein, 7 aa, synthetic construct
VGGEKYI

SEQ ID NO: 105528 - protein, 7 aa, synthetic construct
KLMHATV

SEQ ID NO: 105529 - protein, 7 aa, synthetic construct
GKEFTTG

SEQ ID NO: 105530 - protein, 7 aa, synthetic construct
PQQGPIA

SEQ ID NO: 105531 - protein, 7 aa, synthetic construct
EVRTVSL

SEQ ID NO: 105532 - protein, 7 aa, synthetic construct
IVTHQGE

SEQ ID NO: 105533 - protein, 7 aa, synthetic construct
YIAQVST

SEQ ID NO: 105534 - protein, 7 aa, synthetic construct
EYHDRHR

SEQ ID NO: 105535 - protein, 7 aa, synthetic construct
EKLRKET

SEQ ID NO: 105536 - protein, 7 aa, synthetic construct
KYLNQPA

SEQ ID NO: 105537 - protein, 7 aa, synthetic construct
DMFGEPG

SEQ ID NO: 105538 - protein, 7 aa, synthetic construct
ASKNTSG

SEQ ID NO: 105539 - protein, 7 aa, synthetic construct
KMPMKLT

SEQ ID NO: 105540 - protein, 7 aa, synthetic construct
YQAVTEL

SEQ ID NO: 105541 - protein, 7 aa, synthetic construct
TTKNTKP

SEQ ID NO: 105542 - protein, 7 aa, synthetic construct
YFEVAPN

SEQ ID NO: 105543 - protein, 7 aa, synthetic construct
KEINHGQ

SEQ ID NO: 105544 - protein, 7 aa, synthetic construct
ESNTVFL

SEQ ID NO: 105545 - protein, 7 aa, synthetic construct
KLSDSER

SEQ ID NO: 105546 - protein, 7 aa, synthetic construct
GPREVDG

SEQ ID NO: 105547 - protein, 7 aa, synthetic construct
QKFDDFS

SEQ ID NO: 105548 - protein, 7 aa, synthetic construct
APMLAQS

SEQ ID NO: 105549 - protein, 7 aa, synthetic construct
GALNEMK

SEQ ID NO: 105550 - protein, 7 aa, synthetic construct
YIDSAHN

SEQ ID NO: 105551 - protein, 7 aa, synthetic construct
HPHTETI

SEQ ID NO: 105552 - protein, 7 aa, synthetic construct
PAMRNQD

SEQ ID NO: 105553 - protein, 7 aa, synthetic construct
QPAQMGI

SEQ ID NO: 105554 - protein, 7 aa, synthetic construct
AMEYRGH

SEQ ID NO: 105555 - protein, 7 aa, synthetic construct
KENININ

SEQ ID NO: 105556 - protein, 7 aa, synthetic construct
RQAGGQL

SEQ ID NO: 105557 - protein, 7 aa, synthetic construct
APEYKKM

SEQ ID NO: 105558 - protein, 7 aa, synthetic construct
GEFQPNN

SEQ ID NO: 105559 - protein, 7 aa, synthetic construct
EMHGKKS

SEQ ID NO: 105560 - protein, 7 aa, synthetic construct
NNAAVDL

SEQ ID NO: 105561 - protein, 7 aa, synthetic construct
EGHKHLH

SEQ ID NO: 105562 - protein, 7 aa, synthetic construct
VPHDKKT

SEQ ID NO: 105563 - protein, 7 aa, synthetic construct
HLNIPEG

SEQ ID NO: 105564 - protein, 7 aa, synthetic construct
LKTSPNW

SEQ ID NO: 105565 - protein, 7 aa, synthetic construct
DHPSPDS

SEQ ID NO: 105566 - protein, 7 aa, synthetic construct
NFNFPNA

SEQ ID NO: 105567 - protein, 7 aa, synthetic construct
NTPTQQV

SEQ ID NO: 105568 - protein, 7 aa, synthetic construct
IWPENRT

SEQ ID NO: 105569 - protein, 7 aa, synthetic construct
IGPVAEH

SEQ ID NO: 105570 - protein, 7 aa, synthetic construct
RDKPIAN

SEQ ID NO: 105571 - protein, 7 aa, synthetic construct
PLHAATE

SEQ ID NO: 105572 - protein, 7 aa, synthetic construct
DLGVART

SEQ ID NO: 105573 - protein, 7 aa, synthetic construct
ALKEWSA

SEQ ID NO: 105574 - protein, 7 aa, synthetic construct
AYSIHNT

SEQ ID NO: 105575 - protein, 7 aa, synthetic construct
QVDVNGK

SEQ ID NO: 105576 - protein, 7 aa, synthetic construct
VTLVKLE

SEQ ID NO: 105577 - protein, 7 aa, synthetic construct
QKRTAEV

SEQ ID NO: 105578 - protein, 7 aa, synthetic construct
IYQQSQP

SEQ ID NO: 105579 - protein, 7 aa, synthetic construct
PFGTHFG

SEQ ID NO: 105580 - protein, 7 aa, synthetic construct
FIGEVPA

SEQ ID NO: 105581 - protein, 7 aa, synthetic construct
NSIPKNN

SEQ ID NO: 105582 - protein, 7 aa, synthetic construct
KIPVSHM

SEQ ID NO: 105583 - protein, 7 aa, synthetic construct
RMNSDKV

SEQ ID NO: 105584 - protein, 7 aa, synthetic construct
TTEFSVV

SEQ ID NO: 105585 - protein, 7 aa, synthetic construct
LDLQTPN

SEQ ID NO: 105586 - protein, 7 aa, synthetic construct
PMGVRNN

SEQ ID NO: 105587 - protein, 7 aa, synthetic construct
VSHSQVP

SEQ ID NO: 105588 - protein, 7 aa, synthetic construct
LEAYISG

SEQ ID NO: 105589 - protein, 7 aa, synthetic construct
KGEIRHI

SEQ ID NO: 105590 - protein, 7 aa, synthetic construct
HFPDTAK

SEQ ID NO: 105591 - protein, 7 aa, synthetic construct
AAKALIG

SEQ ID NO: 105592 - protein, 7 aa, synthetic construct
KTGGPFM

SEQ ID NO: 105593 - protein, 7 aa, synthetic construct
DHPELAA

SEQ ID NO: 105594 - protein, 7 aa, synthetic construct
IHGDGFF

SEQ ID NO: 105595 - protein, 7 aa, synthetic construct
RSGNEDM

SEQ ID NO: 105596 - protein, 7 aa, synthetic construct
DHRSGAA

SEQ ID NO: 105597 - protein, 7 aa, synthetic construct
KFFGGQE

SEQ ID NO: 105598 - protein, 7 aa, synthetic construct
FEKMDNE

SEQ ID NO: 105599 - protein, 7 aa, synthetic construct
VKVEQEL

SEQ ID NO: 105600 - protein, 7 aa, synthetic construct
NASGVGM

SEQ ID NO: 105601 - protein, 7 aa, synthetic construct
DMTARKH

SEQ ID NO: 105602 - protein, 7 aa, synthetic construct
EFDKNTG

SEQ ID NO: 105603 - protein, 7 aa, synthetic construct
WKTMGEH

SEQ ID NO: 105604 - protein, 7 aa, synthetic construct
GKINDNM

SEQ ID NO: 105605 - protein, 7 aa, synthetic construct
GIYVARE

SEQ ID NO: 105606 - protein, 7 aa, synthetic construct
WALKSHD

SEQ ID NO: 105607 - protein, 7 aa, synthetic construct
ENQGAAP

SEQ ID NO: 105608 - protein, 7 aa, synthetic construct
QRKEFGL

SEQ ID NO: 105609 - protein, 7 aa, synthetic construct
RYQDVNK

SEQ ID NO: 105610 - protein, 7 aa, synthetic construct
NQMKMQI

SEQ ID NO: 105611 - protein, 7 aa, synthetic construct
VRVYGEL

SEQ ID NO: 105612 - protein, 7 aa, synthetic construct
QNDLISR

SEQ ID NO: 105613 - protein, 7 aa, synthetic construct
FHAKALL

SEQ ID NO: 105614 - protein, 7 aa, synthetic construct
LNPERVS

SEQ ID NO: 105615 - protein, 7 aa, synthetic construct
EPKAIQQ

SEQ ID NO: 105616 - protein, 7 aa, synthetic construct
RQQPNDV

SEQ ID NO: 105617 - protein, 7 aa, synthetic construct
GEHNSFH

SEQ ID NO: 105618 - protein, 7 aa, synthetic construct
GTPIQKT

SEQ ID NO: 105619 - protein, 7 aa, synthetic construct
NLVGMPA

SEQ ID NO: 105620 - protein, 7 aa, synthetic construct
WTTPNEM

SEQ ID NO: 105621 - protein, 7 aa, synthetic construct
GPRPMML

SEQ ID NO: 105622 - protein, 7 aa, synthetic construct
QTASMLM

SEQ ID NO: 105623 - protein, 7 aa, synthetic construct
DHFDTHP

SEQ ID NO: 105624 - protein, 7 aa, synthetic construct
AIPRHLP

SEQ ID NO: 105625 - protein, 7 aa, synthetic construct
MESRPME

SEQ ID NO: 105626 - protein, 7 aa, synthetic construct
HSITEHK

SEQ ID NO: 105627 - protein, 7 aa, synthetic construct
LWDQNNG

SEQ ID NO: 105628 - protein, 7 aa, synthetic construct
MHHVVET

SEQ ID NO: 105629 - protein, 7 aa, synthetic construct
DGINLSS

SEQ ID NO: 105630 - protein, 7 aa, synthetic construct
EKQPDWR

SEQ ID NO: 105631 - protein, 7 aa, synthetic construct
TDMVHAL

SEQ ID NO: 105632 - protein, 7 aa, synthetic construct
NTNATQQ

SEQ ID NO: 105633 - protein, 7 aa, synthetic construct
YTNKHSQ

SEQ ID NO: 105634 - protein, 7 aa, synthetic construct
KPVFDRP

SEQ ID NO: 105635 - protein, 7 aa, synthetic construct
ARIDQAL

SEQ ID NO: 105636 - protein, 7 aa, synthetic construct
TETKHPK

SEQ ID NO: 105637 - protein, 7 aa, synthetic construct
TREEWHK

SEQ ID NO: 105638 - protein, 7 aa, synthetic construct
GAYPTGA

SEQ ID NO: 105639 - protein, 7 aa, synthetic construct
GRDERGD

SEQ ID NO: 105640 - protein, 7 aa, synthetic construct
NSNMDVG

SEQ ID NO: 105641 - protein, 7 aa, synthetic construct
MQRDPDG

SEQ ID NO: 105642 - protein, 7 aa, synthetic construct
FAPEIKW

SEQ ID NO: 105643 - protein, 7 aa, synthetic construct
SKDQDVK

SEQ ID NO: 105644 - protein, 7 aa, synthetic construct
QPQNRNN

SEQ ID NO: 105645 - protein, 7 aa, synthetic construct
IQPALKM

SEQ ID NO: 105646 - protein, 7 aa, synthetic construct
EVASGSW

SEQ ID NO: 105647 - protein, 7 aa, synthetic construct
WGFTTVE

SEQ ID NO: 105648 - protein, 7 aa, synthetic construct
SIPHPNL

SEQ ID NO: 105649 - protein, 7 aa, synthetic construct
KVIQPVP

SEQ ID NO: 105650 - protein, 7 aa, synthetic construct
ESTITHG

SEQ ID NO: 105651 - protein, 7 aa, synthetic construct
NIKGAGW

SEQ ID NO: 105652 - protein, 7 aa, synthetic construct
SLNNSVH

SEQ ID NO: 105653 - protein, 7 aa, synthetic construct
KLMITTS

SEQ ID NO: 105654 - protein, 7 aa, synthetic construct
EPKPAEW

SEQ ID NO: 105655 - protein, 7 aa, synthetic construct
NKFDYQD

SEQ ID NO: 105656 - protein, 7 aa, synthetic construct
YAPVEGV

SEQ ID NO: 105657 - protein, 7 aa, synthetic construct
FNHIGRG

SEQ ID NO: 105658 - protein, 7 aa, synthetic construct
HRDHQYA

SEQ ID NO: 105659 - protein, 7 aa, synthetic construct
DMHTTKY

SEQ ID NO: 105660 - protein, 7 aa, synthetic construct
FNIHAQM

SEQ ID NO: 105661 - protein, 7 aa, synthetic construct
TANVKTP

SEQ ID NO: 105662 - protein, 7 aa, synthetic construct
EHFQPRV

SEQ ID NO: 105663 - protein, 7 aa, synthetic construct
NDMVKLK

SEQ ID NO: 105664 - protein, 7 aa, synthetic construct
GMPNAQS

SEQ ID NO: 105665 - protein, 7 aa, synthetic construct
IRNEENY

SEQ ID NO: 105666 - protein, 7 aa, synthetic construct
FTASFPM

SEQ ID NO: 105667 - protein, 7 aa, synthetic construct
DMKQKDE

SEQ ID NO: 105668 - protein, 7 aa, synthetic construct
YWPKDED

SEQ ID NO: 105669 - protein, 7 aa, synthetic construct
SFSDKSH

SEQ ID NO: 105670 - protein, 7 aa, synthetic construct
DRADFMM

SEQ ID NO: 105671 - protein, 7 aa, synthetic construct
DAQLPGK

SEQ ID NO: 105672 - protein, 7 aa, synthetic construct
YMSADNA

SEQ ID NO: 105673 - protein, 7 aa, synthetic construct
RDKTMAY

SEQ ID NO: 105674 - protein, 7 aa, synthetic construct
AATEMKA

SEQ ID NO: 105675 - protein, 7 aa, synthetic construct
TYDFRDK

SEQ ID NO: 105676 - protein, 7 aa, synthetic construct
DSMSKQM

SEQ ID NO: 105677 - protein, 7 aa, synthetic construct
HQPQLNQ

SEQ ID NO: 105678 - protein, 7 aa, synthetic construct
DHNMQRV

SEQ ID NO: 105679 - protein, 7 aa, synthetic construct
HLHQGDK

SEQ ID NO: 105680 - protein, 7 aa, synthetic construct
GPTAAQI

SEQ ID NO: 105681 - protein, 7 aa, synthetic construct
NGGKVTH

SEQ ID NO: 105682 - protein, 7 aa, synthetic construct
IPKFETI

SEQ ID NO: 105683 - protein, 7 aa, synthetic construct
LSAHLTI

SEQ ID NO: 105684 - protein, 7 aa, synthetic construct
ANEYKDR

SEQ ID NO: 105685 - protein, 7 aa, synthetic construct
VRAIDFN

SEQ ID NO: 105686 - protein, 7 aa, synthetic construct
EKRTMSQ

SEQ ID NO: 105687 - protein, 7 aa, synthetic construct
LMKFDVK

SEQ ID NO: 105688 - protein, 7 aa, synthetic construct
PAAVSVT

SEQ ID NO: 105689 - protein, 7 aa, synthetic construct
SEQHRNI

SEQ ID NO: 105690 - protein, 7 aa, synthetic construct
ATKQDYV

SEQ ID NO: 105691 - protein, 7 aa, synthetic construct
LETKMHT

SEQ ID NO: 105692 - protein, 7 aa, synthetic construct
PLTGAQW

SEQ ID NO: 105693 - protein, 7 aa, synthetic construct
MKPTNVF

SEQ ID NO: 105694 - protein, 7 aa, synthetic construct
EREIVTF

SEQ ID NO: 105695 - protein, 7 aa, synthetic construct
AMRNLPV

SEQ ID NO: 105696 - protein, 7 aa, synthetic construct
LIFDQKM

SEQ ID NO: 105697 - protein, 7 aa, synthetic construct
ALSAVHE

SEQ ID NO: 105698 - protein, 7 aa, synthetic construct
YDISTQY

SEQ ID NO: 105699 - protein, 7 aa, synthetic construct
HQRDSVG

SEQ ID NO: 105700 - protein, 7 aa, synthetic construct
AFVLAKP

SEQ ID NO: 105701 - protein, 7 aa, synthetic construct
WVNSGPD

SEQ ID NO: 105702 - protein, 7 aa, synthetic construct
KADTLRY

SEQ ID NO: 105703 - protein, 7 aa, synthetic construct
YEGQQST

SEQ ID NO: 105704 - protein, 7 aa, synthetic construct
RVQPHTE

SEQ ID NO: 105705 - protein, 7 aa, synthetic construct
GTRDHTD

SEQ ID NO: 105706 - protein, 7 aa, synthetic construct
WTTEERG

SEQ ID NO: 105707 - protein, 7 aa, synthetic construct
HIHNPTK

SEQ ID NO: 105708 - protein, 7 aa, synthetic construct
QVEKSAG

SEQ ID NO: 105709 - protein, 7 aa, synthetic construct
ASKIEQE

SEQ ID NO: 105710 - protein, 7 aa, synthetic construct
FKSYQRD

SEQ ID NO: 105711 - protein, 7 aa, synthetic construct
AANDNWK

SEQ ID NO: 105712 - protein, 7 aa, synthetic construct
IVASMND

SEQ ID NO: 105713 - protein, 7 aa, synthetic construct
TSQKIFN

SEQ ID NO: 105714 - protein, 7 aa, synthetic construct
SDMVHGA

SEQ ID NO: 105715 - protein, 7 aa, synthetic construct
APSGNGK

SEQ ID NO: 105716 - protein, 7 aa, synthetic construct
GVEPVRI

SEQ ID NO: 105717 - protein, 7 aa, synthetic construct
NHHGQFM

SEQ ID NO: 105718 - protein, 7 aa, synthetic construct
THEVKFD

SEQ ID NO: 105719 - protein, 7 aa, synthetic construct
YLSEKHF

SEQ ID NO: 105720 - protein, 7 aa, synthetic construct
STMDKDV

SEQ ID NO: 105721 - protein, 7 aa, synthetic construct
TTRATSG

SEQ ID NO: 105722 - protein, 7 aa, synthetic construct
RTNVSAA

SEQ ID NO: 105723 - protein, 7 aa, synthetic construct
QNATQFM

SEQ ID NO: 105724 - protein, 7 aa, synthetic construct
LVHKSQW

SEQ ID NO: 105725 - protein, 7 aa, synthetic construct
VMPQHDS

SEQ ID NO: 105726 - protein, 7 aa, synthetic construct
VSRDSLG

SEQ ID NO: 105727 - protein, 7 aa, synthetic construct
YAHGVMS

SEQ ID NO: 105728 - protein, 7 aa, synthetic construct
IDHGGYH

SEQ ID NO: 105729 - protein, 7 aa, synthetic construct
TLATKHL

SEQ ID NO: 105730 - protein, 7 aa, synthetic construct
RSHSVIN

SEQ ID NO: 105731 - protein, 7 aa, synthetic construct
GFQGGNV

SEQ ID NO: 105732 - protein, 7 aa, synthetic construct
HINLNGP

SEQ ID NO: 105733 - protein, 7 aa, synthetic construct
PGIERTS

SEQ ID NO: 105734 - protein, 7 aa, synthetic construct
SGYNVKP

SEQ ID NO: 105735 - protein, 7 aa, synthetic construct
SVTPVIN

SEQ ID NO: 105736 - protein, 7 aa, synthetic construct
DTAKQHG

SEQ ID NO: 105737 - protein, 7 aa, synthetic construct
NGKDYAV

SEQ ID NO: 105738 - protein, 7 aa, synthetic construct
DKNMAIV

SEQ ID NO: 105739 - protein, 7 aa, synthetic construct
HQVVGYV

SEQ ID NO: 105740 - protein, 7 aa, synthetic construct
QSNRYLE

SEQ ID NO: 105741 - protein, 7 aa, synthetic construct
GHVVVAH

SEQ ID NO: 105742 - protein, 7 aa, synthetic construct
TEILTAP

SEQ ID NO: 105743 - protein, 7 aa, synthetic construct
YPPVPHV

SEQ ID NO: 105744 - protein, 7 aa, synthetic construct
YQHKPYG

SEQ ID NO: 105745 - protein, 7 aa, synthetic construct
NHFSEQI

SEQ ID NO: 105746 - protein, 7 aa, synthetic construct
FSIKTQA

SEQ ID NO: 105747 - protein, 7 aa, synthetic construct
HPRDDHG

SEQ ID NO: 105748 - protein, 7 aa, synthetic construct
KFTRNEQ

SEQ ID NO: 105749 - protein, 7 aa, synthetic construct
QLDMSNH

SEQ ID NO: 105750 - protein, 7 aa, synthetic construct
EKPPTIW

SEQ ID NO: 105751 - protein, 7 aa, synthetic construct
QESVQRQ

SEQ ID NO: 105752 - protein, 7 aa, synthetic construct
MVPSTRM

SEQ ID NO: 105753 - protein, 7 aa, synthetic construct
IMSIEKR

SEQ ID NO: 105754 - protein, 7 aa, synthetic construct
TPNRRDD

SEQ ID NO: 105755 - protein, 7 aa, synthetic construct
AQNVKIN

SEQ ID NO: 105756 - protein, 7 aa, synthetic construct
MVHERHH

SEQ ID NO: 105757 - protein, 7 aa, synthetic construct
NGYNLVE

SEQ ID NO: 105758 - protein, 7 aa, synthetic construct
GSVRVGS

SEQ ID NO: 105759 - protein, 7 aa, synthetic construct
GAVKVAW

SEQ ID NO: 105760 - protein, 7 aa, synthetic construct
FMHMAES

SEQ ID NO: 105761 - protein, 7 aa, synthetic construct
GPGRELK

SEQ ID NO: 105762 - protein, 7 aa, synthetic construct
NNKDKHW

SEQ ID NO: 105763 - protein, 7 aa, synthetic construct
TKAAMSP

SEQ ID NO: 105764 - protein, 7 aa, synthetic construct
REAKTQE

SEQ ID NO: 105765 - protein, 7 aa, synthetic construct
ISLDRIS

SEQ ID NO: 105766 - protein, 7 aa, synthetic construct
VYPQGIL

SEQ ID NO: 105767 - protein, 7 aa, synthetic construct
MLRTTVM

SEQ ID NO: 105768 - protein, 7 aa, synthetic construct
TEGHFMA

SEQ ID NO: 105769 - protein, 7 aa, synthetic construct
KIIAQHT

SEQ ID NO: 105770 - protein, 7 aa, synthetic construct
RYDITEY

SEQ ID NO: 105771 - protein, 7 aa, synthetic construct
MNEGMTV

SEQ ID NO: 105772 - protein, 7 aa, synthetic construct
YVQVKNE

SEQ ID NO: 105773 - protein, 7 aa, synthetic construct
KDFPGEG

SEQ ID NO: 105774 - protein, 7 aa, synthetic construct
WKQYISP

SEQ ID NO: 105775 - protein, 7 aa, synthetic construct
LYKEKYL

SEQ ID NO: 105776 - protein, 7 aa, synthetic construct
WNNTSLT

SEQ ID NO: 105777 - protein, 7 aa, synthetic construct
WNKQIPG

SEQ ID NO: 105778 - protein, 7 aa, synthetic construct
TANSRPT

SEQ ID NO: 105779 - protein, 7 aa, synthetic construct
KAMHPQQ

SEQ ID NO: 105780 - protein, 7 aa, synthetic construct
IYVAGAN

SEQ ID NO: 105781 - protein, 7 aa, synthetic construct
KGNIEFG

SEQ ID NO: 105782 - protein, 7 aa, synthetic construct
HTHLPAM

SEQ ID NO: 105783 - protein, 7 aa, synthetic construct
FAGLQTH

SEQ ID NO: 105784 - protein, 7 aa, synthetic construct
GLQKITL

SEQ ID NO: 105785 - protein, 7 aa, synthetic construct
KTDTTVM

SEQ ID NO: 105786 - protein, 7 aa, synthetic construct
QQGKNSA

SEQ ID NO: 105787 - protein, 7 aa, synthetic construct
KADIQGM

SEQ ID NO: 105788 - protein, 7 aa, synthetic construct
IKDESYG

SEQ ID NO: 105789 - protein, 7 aa, synthetic construct
NVQYKAG

SEQ ID NO: 105790 - protein, 7 aa, synthetic construct
AIQKGDT

SEQ ID NO: 105791 - protein, 7 aa, synthetic construct
TREPEYT

SEQ ID NO: 105792 - protein, 7 aa, synthetic construct
GKMSHAH

SEQ ID NO: 105793 - protein, 7 aa, synthetic construct
FAHDHDG

SEQ ID NO: 105794 - protein, 7 aa, synthetic construct
DFREITV

SEQ ID NO: 105795 - protein, 7 aa, synthetic construct
KPVLPEM

SEQ ID NO: 105796 - protein, 7 aa, synthetic construct
SNKGPNQ

SEQ ID NO: 105797 - protein, 7 aa, synthetic construct
RLIDVTV

SEQ ID NO: 105798 - protein, 7 aa, synthetic construct
PHMSGHD

SEQ ID NO: 105799 - protein, 7 aa, synthetic construct
LYAPGKV

SEQ ID NO: 105800 - protein, 7 aa, synthetic construct
ATPQNKD

SEQ ID NO: 105801 - protein, 7 aa, synthetic construct
RRMGFEG

SEQ ID NO: 105802 - protein, 7 aa, synthetic construct
EWSGLSG

SEQ ID NO: 105803 - protein, 7 aa, synthetic construct
NGDVIHF

SEQ ID NO: 105804 - protein, 7 aa, synthetic construct
CKDVQVC

SEQ ID NO: 105805 - protein, 7 aa, synthetic construct
HFQGTYA

SEQ ID NO: 105806 - protein, 7 aa, synthetic construct
MRVDIVD

SEQ ID NO: 105807 - protein, 7 aa, synthetic construct
RSNNATP

SEQ ID NO: 105808 - protein, 7 aa, synthetic construct
KIPAHTI

SEQ ID NO: 105809 - protein, 7 aa, synthetic construct
GRPAPLQ

SEQ ID NO: 105810 - protein, 7 aa, synthetic construct
GVEMRAS

SEQ ID NO: 105811 - protein, 7 aa, synthetic construct
IKDTSLF

SEQ ID NO: 105812 - protein, 7 aa, synthetic construct
RVQKGDV

SEQ ID NO: 105813 - protein, 7 aa, synthetic construct
RNESDTV

SEQ ID NO: 105814 - protein, 7 aa, synthetic construct
MRHEDFK

SEQ ID NO: 105815 - protein, 7 aa, synthetic construct
AKITLIA

SEQ ID NO: 105816 - protein, 7 aa, synthetic construct
VSKSVPV

SEQ ID NO: 105817 - protein, 7 aa, synthetic construct
GVHGIQQ

SEQ ID NO: 105818 - protein, 7 aa, synthetic construct
IRDMSKQ

SEQ ID NO: 105819 - protein, 7 aa, synthetic construct
VFRTKDE

SEQ ID NO: 105820 - protein, 7 aa, synthetic construct
DNGLGNK

SEQ ID NO: 105821 - protein, 7 aa, synthetic construct
PGPHGHR

SEQ ID NO: 105822 - protein, 7 aa, synthetic construct
HFDTTTF

SEQ ID NO: 105823 - protein, 7 aa, synthetic construct
EATRMNE

SEQ ID NO: 105824 - protein, 7 aa, synthetic construct
TYSTTGH

SEQ ID NO: 105825 - protein, 7 aa, synthetic construct
WSVVSQP

SEQ ID NO: 105826 - protein, 7 aa, synthetic construct
AQAESPH

SEQ ID NO: 105827 - protein, 7 aa, synthetic construct
ILETNGR

SEQ ID NO: 105828 - protein, 7 aa, synthetic construct
NPGQMYT

SEQ ID NO: 105829 - protein, 7 aa, synthetic construct
HRSNTIF

SEQ ID NO: 105830 - protein, 7 aa, synthetic construct
QGMRQHT

SEQ ID NO: 105831 - protein, 7 aa, synthetic construct
KTSILKA

SEQ ID NO: 105832 - protein, 7 aa, synthetic construct
SNNGMHG

SEQ ID NO: 105833 - protein, 7 aa, synthetic construct
HLAPPIT

SEQ ID NO: 105834 - protein, 7 aa, synthetic construct
VQHAKDV

SEQ ID NO: 105835 - protein, 7 aa, synthetic construct
MEREKNF

SEQ ID NO: 105836 - protein, 7 aa, synthetic construct
DMPTKMM

SEQ ID NO: 105837 - protein, 7 aa, synthetic construct
MIGYTLD

SEQ ID NO: 105838 - protein, 7 aa, synthetic construct
EMSSRNP

SEQ ID NO: 105839 - protein, 7 aa, synthetic construct
RTEPWGP

SEQ ID NO: 105840 - protein, 7 aa, synthetic construct
KQGTEPE

SEQ ID NO: 105841 - protein, 7 aa, synthetic construct
ISQRYEI

SEQ ID NO: 105842 - protein, 7 aa, synthetic construct
VPLLQTD

SEQ ID NO: 105843 - protein, 7 aa, synthetic construct
LYSKHVH

SEQ ID NO: 105844 - protein, 7 aa, synthetic construct
GKIGTNG

SEQ ID NO: 105845 - protein, 7 aa, synthetic construct
STTFDSR

SEQ ID NO: 105846 - protein, 7 aa, synthetic construct
SLNGFPR

SEQ ID NO: 105847 - protein, 7 aa, synthetic construct
SGFPGNV

SEQ ID NO: 105848 - protein, 7 aa, synthetic construct
AQTNKFH

SEQ ID NO: 105849 - protein, 7 aa, synthetic construct
SDFRGRT

SEQ ID NO: 105850 - protein, 7 aa, synthetic construct
SGEYVSG

SEQ ID NO: 105851 - protein, 7 aa, synthetic construct
PPEVVKK

SEQ ID NO: 105852 - protein, 7 aa, synthetic construct
VEPAQNR

SEQ ID NO: 105853 - protein, 7 aa, synthetic construct
TTMHQST

SEQ ID NO: 105854 - protein, 7 aa, synthetic construct
GANIHEA

SEQ ID NO: 105855 - protein, 7 aa, synthetic construct
EKHGMWV

SEQ ID NO: 105856 - protein, 7 aa, synthetic construct
YQAEHRD

SEQ ID NO: 105857 - protein, 7 aa, synthetic construct
SEKKMSW

SEQ ID NO: 105858 - protein, 7 aa, synthetic construct
ESPRDQL

SEQ ID NO: 105859 - protein, 7 aa, synthetic construct
IRIVSDE

SEQ ID NO: 105860 - protein, 7 aa, synthetic construct
IAMNFGD

SEQ ID NO: 105861 - protein, 7 aa, synthetic construct
MNLNHDI

SEQ ID NO: 105862 - protein, 7 aa, synthetic construct
TNAPKGA

SEQ ID NO: 105863 - protein, 7 aa, synthetic construct
VSPGIGG

SEQ ID NO: 105864 - protein, 7 aa, synthetic construct
NYAPRQE

SEQ ID NO: 105865 - protein, 7 aa, synthetic construct
YIHERIA

SEQ ID NO: 105866 - protein, 7 aa, synthetic construct
TAVSSLD

SEQ ID NO: 105867 - protein, 7 aa, synthetic construct
WDNRYEG

SEQ ID NO: 105868 - protein, 7 aa, synthetic construct
LWKAEHD

SEQ ID NO: 105869 - protein, 7 aa, synthetic construct
TDREDRP

SEQ ID NO: 105870 - protein, 7 aa, synthetic construct
NSYKPAL

SEQ ID NO: 105871 - protein, 7 aa, synthetic construct
VEVNKLK

SEQ ID NO: 105872 - protein, 7 aa, synthetic construct
VESKMIW

SEQ ID NO: 105873 - protein, 7 aa, synthetic construct
GAKYDHI

SEQ ID NO: 105874 - protein, 7 aa, synthetic construct
REMDREF

SEQ ID NO: 105875 - protein, 7 aa, synthetic construct
QVRPSGI

SEQ ID NO: 105876 - protein, 7 aa, synthetic construct
GVDSKFT

SEQ ID NO: 105877 - protein, 7 aa, synthetic construct
HVPEVKL

SEQ ID NO: 105878 - protein, 7 aa, synthetic construct
RNNTPSI

SEQ ID NO: 105879 - protein, 7 aa, synthetic construct
HREPFPH

SEQ ID NO: 105880 - protein, 7 aa, synthetic construct
LAKRTEY

SEQ ID NO: 105881 - protein, 7 aa, synthetic construct
METNHFA

SEQ ID NO: 105882 - protein, 7 aa, synthetic construct
RPPGTWD

SEQ ID NO: 105883 - protein, 7 aa, synthetic construct
MDIKLQL

SEQ ID NO: 105884 - protein, 7 aa, synthetic construct
PDAHGDR

SEQ ID NO: 105885 - protein, 7 aa, synthetic construct
DRFGQEM

SEQ ID NO: 105886 - protein, 7 aa, synthetic construct
HNGVESG

SEQ ID NO: 105887 - protein, 7 aa, synthetic construct
NHSGSTL

SEQ ID NO: 105888 - protein, 7 aa, synthetic construct
GRDFQQE

SEQ ID NO: 105889 - protein, 7 aa, synthetic construct
AGHHDAV

SEQ ID NO: 105890 - protein, 7 aa, synthetic construct
YNVETQR

SEQ ID NO: 105891 - protein, 7 aa, synthetic construct
QTGGLLG

SEQ ID NO: 105892 - protein, 7 aa, synthetic construct
KPSAQGH

SEQ ID NO: 105893 - protein, 7 aa, synthetic construct
AAGFVKH

SEQ ID NO: 105894 - protein, 7 aa, synthetic construct
YKYSEKF

SEQ ID NO: 105895 - protein, 7 aa, synthetic construct
DSFKRTL

SEQ ID NO: 105896 - protein, 7 aa, synthetic construct
AKVWEGV

SEQ ID NO: 105897 - protein, 7 aa, synthetic construct
TYTKFET

SEQ ID NO: 105898 - protein, 7 aa, synthetic construct
DAPNRHY

SEQ ID NO: 105899 - protein, 7 aa, synthetic construct
RFMQSPE

SEQ ID NO: 105900 - protein, 7 aa, synthetic construct
DGQHIAR

SEQ ID NO: 105901 - protein, 7 aa, synthetic construct
LTEVHNS

SEQ ID NO: 105902 - protein, 7 aa, synthetic construct
DFNTAIR

SEQ ID NO: 105903 - protein, 7 aa, synthetic construct
NKIVPGN

SEQ ID NO: 105904 - protein, 7 aa, synthetic construct
DFKGEGY

SEQ ID NO: 105905 - protein, 7 aa, synthetic construct
FISDLHA

SEQ ID NO: 105906 - protein, 7 aa, synthetic construct
DEKNVLF

SEQ ID NO: 105907 - protein, 7 aa, synthetic construct
NASTMRP

SEQ ID NO: 105908 - protein, 7 aa, synthetic construct
QAKDVLQ

SEQ ID NO: 105909 - protein, 7 aa, synthetic construct
DIDKMRD

SEQ ID NO: 105910 - protein, 7 aa, synthetic construct
MHRMAGP

SEQ ID NO: 105911 - protein, 7 aa, synthetic construct
VVRHDRV

SEQ ID NO: 105912 - protein, 7 aa, synthetic construct
IDHKGDN

SEQ ID NO: 105913 - protein, 7 aa, synthetic construct
NQDFNPH

SEQ ID NO: 105914 - protein, 7 aa, synthetic construct
LMPLLHG

SEQ ID NO: 105915 - protein, 7 aa, synthetic construct
LDNHLMP

SEQ ID NO: 105916 - protein, 7 aa, synthetic construct
TTPNTWH

SEQ ID NO: 105917 - protein, 7 aa, synthetic construct
VFVTQKQ

SEQ ID NO: 105918 - protein, 7 aa, synthetic construct
SNNKFIH

SEQ ID NO: 105919 - protein, 7 aa, synthetic construct
VKSIGMM

SEQ ID NO: 105920 - protein, 7 aa, synthetic construct
LKAAAAA

SEQ ID NO: 105921 - protein, 7 aa, synthetic construct
SEGTGVF

SEQ ID NO: 105922 - protein, 7 aa, synthetic construct
FHTDHNA

SEQ ID NO: 105923 - protein, 7 aa, synthetic construct
AYGRPAM

SEQ ID NO: 105924 - protein, 7 aa, synthetic construct
VLPQGDH

SEQ ID NO: 105925 - protein, 7 aa, synthetic construct
LSNQAQP

SEQ ID NO: 105926 - protein, 7 aa, synthetic construct
QWASSSM

SEQ ID NO: 105927 - protein, 7 aa, synthetic construct
EHSAKFI

SEQ ID NO: 105928 - protein, 7 aa, synthetic construct
SHASVTD

SEQ ID NO: 105929 - protein, 7 aa, synthetic construct
MMDQRNV

SEQ ID NO: 105930 - protein, 7 aa, synthetic construct
VKQSAAT

SEQ ID NO: 105931 - protein, 7 aa, synthetic construct
PQKSHTN

SEQ ID NO: 105932 - protein, 7 aa, synthetic construct
RDPQSDS

SEQ ID NO: 105933 - protein, 7 aa, synthetic construct
RMGDDTV

SEQ ID NO: 105934 - protein, 7 aa, synthetic construct
LLDMKGE

SEQ ID NO: 105935 - protein, 7 aa, synthetic construct
HLQISKI

SEQ ID NO: 105936 - protein, 7 aa, synthetic construct
LDNVKHK

SEQ ID NO: 105937 - protein, 7 aa, synthetic construct
IKQQTME

SEQ ID NO: 105938 - protein, 7 aa, synthetic construct
SSTFGRG

SEQ ID NO: 105939 - protein, 7 aa, synthetic construct
KQGEDKN

SEQ ID NO: 105940 - protein, 7 aa, synthetic construct
HTPRMGQ

SEQ ID NO: 105941 - protein, 7 aa, synthetic construct
WKTFMTE

SEQ ID NO: 105942 - protein, 7 aa, synthetic construct
PKVDQRN

SEQ ID NO: 105943 - protein, 7 aa, synthetic construct
PNPLMSP

SEQ ID NO: 105944 - protein, 7 aa, synthetic construct
GHRPMNT

SEQ ID NO: 105945 - protein, 7 aa, synthetic construct
GIFTNSV

SEQ ID NO: 105946 - protein, 7 aa, synthetic construct
NLVKDEL

SEQ ID NO: 105947 - protein, 7 aa, synthetic construct
FHLKNHN

SEQ ID NO: 105948 - protein, 7 aa, synthetic construct
EKMPKYL

SEQ ID NO: 105949 - protein, 7 aa, synthetic construct
LNERGGW

SEQ ID NO: 105950 - protein, 7 aa, synthetic construct
RPQEQDF

SEQ ID NO: 105951 - protein, 7 aa, synthetic construct
LATAEKP

SEQ ID NO: 105952 - protein, 7 aa, synthetic construct
LLHQNTT

SEQ ID NO: 105953 - protein, 7 aa, synthetic construct
ATFHENR

SEQ ID NO: 105954 - protein, 7 aa, synthetic construct
QAVHSFP

SEQ ID NO: 105955 - protein, 7 aa, synthetic construct
GIEHAQH

SEQ ID NO: 105956 - protein, 7 aa, synthetic construct
KSINPVP

SEQ ID NO: 105957 - protein, 7 aa, synthetic construct
KKQDSSS

SEQ ID NO: 105958 - protein, 7 aa, synthetic construct
KDYSGGH

SEQ ID NO: 105959 - protein, 7 aa, synthetic construct
NAHSVEL

SEQ ID NO: 105960 - protein, 7 aa, synthetic construct
FPNGFAV

SEQ ID NO: 105961 - protein, 7 aa, synthetic construct
IWGVGSE

SEQ ID NO: 105962 - protein, 7 aa, synthetic construct
YEATQKH

SEQ ID NO: 105963 - protein, 7 aa, synthetic construct
MSVHTSE

SEQ ID NO: 105964 - protein, 7 aa, synthetic construct
WNKRIDE

SEQ ID NO: 105965 - protein, 7 aa, synthetic construct
ADFGNSH

SEQ ID NO: 105966 - protein, 7 aa, synthetic construct
LNVTQMG

SEQ ID NO: 105967 - protein, 7 aa, synthetic construct
GKLADVG

SEQ ID NO: 105968 - protein, 7 aa, synthetic construct
IDSRFAP

SEQ ID NO: 105969 - protein, 7 aa, synthetic construct
AFVDVVP

SEQ ID NO: 105970 - protein, 7 aa, synthetic construct
NHDPKSK

SEQ ID NO: 105971 - protein, 7 aa, synthetic construct
WTKVKQE

SEQ ID NO: 105972 - protein, 7 aa, synthetic construct
SHADPHL

SEQ ID NO: 105973 - protein, 7 aa, synthetic construct
QVFNLES

SEQ ID NO: 105974 - protein, 7 aa, synthetic construct
MMTQNLV

SEQ ID NO: 105975 - protein, 7 aa, synthetic construct
RGPDKGG

SEQ ID NO: 105976 - protein, 7 aa, synthetic construct
GHNGERE

SEQ ID NO: 105977 - protein, 7 aa, synthetic construct
YTHLETR

SEQ ID NO: 105978 - protein, 7 aa, synthetic construct
GPDFQER

SEQ ID NO: 105979 - protein, 7 aa, synthetic construct
KNHTEGV

SEQ ID NO: 105980 - protein, 7 aa, synthetic construct
NDKHPLP

SEQ ID NO: 105981 - protein, 7 aa, synthetic construct
EFRIKQS

SEQ ID NO: 105982 - protein, 7 aa, synthetic construct
SRLTAST

SEQ ID NO: 105983 - protein, 7 aa, synthetic construct
KTDNAFA

SEQ ID NO: 105984 - protein, 7 aa, synthetic construct
GLDMIGS

SEQ ID NO: 105985 - protein, 7 aa, synthetic construct
GTTHNPE

SEQ ID NO: 105986 - protein, 7 aa, synthetic construct
TSAQMTE

SEQ ID NO: 105987 - protein, 7 aa, synthetic construct
SHVHHEL

SEQ ID NO: 105988 - protein, 7 aa, synthetic construct
EGQGFHI

SEQ ID NO: 105989 - protein, 7 aa, synthetic construct
KGNMLSL

SEQ ID NO: 105990 - protein, 7 aa, synthetic construct
DAENVRG

SEQ ID NO: 105991 - protein, 7 aa, synthetic construct
DSARGES

SEQ ID NO: 105992 - protein, 7 aa, synthetic construct
DPSVPLP

SEQ ID NO: 105993 - protein, 7 aa, synthetic construct
KHQNGTI

SEQ ID NO: 105994 - protein, 7 aa, synthetic construct
HGPHAND

SEQ ID NO: 105995 - protein, 7 aa, synthetic construct
HSHLPTQ

SEQ ID NO: 105996 - protein, 7 aa, synthetic construct
SMQPPGP

SEQ ID NO: 105997 - protein, 7 aa, synthetic construct
REDLMAA

SEQ ID NO: 105998 - protein, 7 aa, synthetic construct
INNERMR

SEQ ID NO: 105999 - protein, 7 aa, synthetic construct
MPAVMIN

SEQ ID NO: 106000 - protein, 7 aa, synthetic construct
GGIAQDG

SEQ ID NO: 106001 - protein, 7 aa, synthetic construct
VGILRPD

SEQ ID NO: 106002 - protein, 7 aa, synthetic construct
DLFQESR

SEQ ID NO: 106003 - protein, 7 aa, synthetic construct
KTPHLEF

SEQ ID NO: 106004 - protein, 7 aa, synthetic construct
FKTAFNN

SEQ ID NO: 106005 - protein, 7 aa, synthetic construct
TPKASFG

SEQ ID NO: 106006 - protein, 7 aa, synthetic construct
EFRETNV

SEQ ID NO: 106007 - protein, 7 aa, synthetic construct
PETVDKR

SEQ ID NO: 106008 - protein, 7 aa, synthetic construct
ASHPMNR

SEQ ID NO: 106009 - protein, 7 aa, synthetic construct
LIANNVA

SEQ ID NO: 106010 - protein, 7 aa, synthetic construct
VTIHSAK

SEQ ID NO: 106011 - protein, 7 aa, synthetic construct
HLLGTGF

SEQ ID NO: 106012 - protein, 7 aa, synthetic construct
FKDWNNS

SEQ ID NO: 106013 - protein, 7 aa, synthetic construct
ATDLLSP

SEQ ID NO: 106014 - protein, 7 aa, synthetic construct
LGDRFGR

SEQ ID NO: 106015 - protein, 7 aa, synthetic construct
FDIKYPP

SEQ ID NO: 106016 - protein, 7 aa, synthetic construct
IHPELSM

SEQ ID NO: 106017 - protein, 7 aa, synthetic construct
QTHPGSV

SEQ ID NO: 106018 - protein, 7 aa, synthetic construct
AYGSYSI

SEQ ID NO: 106019 - protein, 7 aa, synthetic construct
KADTMYR

SEQ ID NO: 106020 - protein, 7 aa, synthetic construct
DRVGLKM

SEQ ID NO: 106021 - protein, 7 aa, synthetic construct
YPQKSTN

SEQ ID NO: 106022 - protein, 7 aa, synthetic construct
INHNASW

SEQ ID NO: 106023 - protein, 7 aa, synthetic construct
VAHTTEG

SEQ ID NO: 106024 - protein, 7 aa, synthetic construct
PQADSMR

SEQ ID NO: 106025 - protein, 7 aa, synthetic construct
PMVAPKP

SEQ ID NO: 106026 - protein, 7 aa, synthetic construct
GRSLKEL

SEQ ID NO: 106027 - protein, 7 aa, synthetic construct
WMMSQEA

SEQ ID NO: 106028 - protein, 7 aa, synthetic construct
NSNVLRA

SEQ ID NO: 106029 - protein, 7 aa, synthetic construct
VNPDHYK

SEQ ID NO: 106030 - protein, 7 aa, synthetic construct
WVREKNI

SEQ ID NO: 106031 - protein, 7 aa, synthetic construct
HPRTLSQ

SEQ ID NO: 106032 - protein, 7 aa, synthetic construct
NFADGMH

SEQ ID NO: 106033 - protein, 7 aa, synthetic construct
KEYQQGL

SEQ ID NO: 106034 - protein, 7 aa, synthetic construct
NWQMKQS

SEQ ID NO: 106035 - protein, 7 aa, synthetic construct
AQLNTMM

SEQ ID NO: 106036 - protein, 7 aa, synthetic construct
TYSDARF

SEQ ID NO: 106037 - protein, 7 aa, synthetic construct
QPDRAPH

SEQ ID NO: 106038 - protein, 7 aa, synthetic construct
HYIKKEQ

SEQ ID NO: 106039 - protein, 7 aa, synthetic construct
QSQPIIH

SEQ ID NO: 106040 - protein, 7 aa, synthetic construct
NHTMIMA

SEQ ID NO: 106041 - protein, 7 aa, synthetic construct
TAYPRPM

SEQ ID NO: 106042 - protein, 7 aa, synthetic construct
SYIKELG

SEQ ID NO: 106043 - protein, 7 aa, synthetic construct
WVHPENH

SEQ ID NO: 106044 - protein, 7 aa, synthetic construct
SLWADKP

SEQ ID NO: 106045 - protein, 7 aa, synthetic construct
RDVVTAM

SEQ ID NO: 106046 - protein, 7 aa, synthetic construct
QTPKDTY

SEQ ID NO: 106047 - protein, 7 aa, synthetic construct
DGQSTHA

SEQ ID NO: 106048 - protein, 7 aa, synthetic construct
QQKGYES

SEQ ID NO: 106049 - protein, 7 aa, synthetic construct
NKDGMFE

SEQ ID NO: 106050 - protein, 7 aa, synthetic construct
QSRTAGP

SEQ ID NO: 106051 - protein, 7 aa, synthetic construct
EPKQMER

SEQ ID NO: 106052 - protein, 7 aa, synthetic construct
MGYKEVN

SEQ ID NO: 106053 - protein, 7 aa, synthetic construct
KTIEAMH

SEQ ID NO: 106054 - protein, 7 aa, synthetic construct
TTQETPY

SEQ ID NO: 106055 - protein, 7 aa, synthetic construct
TIDIKVQ

SEQ ID NO: 106056 - protein, 7 aa, synthetic construct
VMGLKIT

SEQ ID NO: 106057 - protein, 7 aa, synthetic construct
APVIDHS

SEQ ID NO: 106058 - protein, 7 aa, synthetic construct
TGTQHGM

SEQ ID NO: 106059 - protein, 7 aa, synthetic construct
RNDAYKP

SEQ ID NO: 106060 - protein, 7 aa, synthetic construct
TNVPMET

SEQ ID NO: 106061 - protein, 7 aa, synthetic construct
FVKLQID

SEQ ID NO: 106062 - protein, 7 aa, synthetic construct
GTHQQLE

SEQ ID NO: 106063 - protein, 7 aa, synthetic construct
HSVTGPI

SEQ ID NO: 106064 - protein, 7 aa, synthetic construct
NADVHSK

SEQ ID NO: 106065 - protein, 7 aa, synthetic construct
DKRGVDI

SEQ ID NO: 106066 - protein, 7 aa, synthetic construct
SRETTDE

SEQ ID NO: 106067 - protein, 7 aa, synthetic construct
QGGYRGD

SEQ ID NO: 106068 - protein, 7 aa, synthetic construct
RVMSQDV

SEQ ID NO: 106069 - protein, 7 aa, synthetic construct
KPHNKFE

SEQ ID NO: 106070 - protein, 7 aa, synthetic construct
DKGGTTV

SEQ ID NO: 106071 - protein, 7 aa, synthetic construct
HYNDISS

SEQ ID NO: 106072 - protein, 7 aa, synthetic construct
ISGDHNI

SEQ ID NO: 106073 - protein, 7 aa, synthetic construct
IHHGHIN

SEQ ID NO: 106074 - protein, 7 aa, synthetic construct
AKEAMIR

SEQ ID NO: 106075 - protein, 7 aa, synthetic construct
RAFVVQD

SEQ ID NO: 106076 - protein, 7 aa, synthetic construct
DQRPIDG

SEQ ID NO: 106077 - protein, 7 aa, synthetic construct
DQQNDFG

SEQ ID NO: 106078 - protein, 7 aa, synthetic construct
LHEENRY

SEQ ID NO: 106079 - protein, 7 aa, synthetic construct
YVGGSIE

SEQ ID NO: 106080 - protein, 7 aa, synthetic construct
GKTESHE

SEQ ID NO: 106081 - protein, 7 aa, synthetic construct
PLGKMMY

SEQ ID NO: 106082 - protein, 7 aa, synthetic construct
MHSYAGK

SEQ ID NO: 106083 - protein, 7 aa, synthetic construct
KKDGIAI

SEQ ID NO: 106084 - protein, 7 aa, synthetic construct
LMEYKKG

SEQ ID NO: 106085 - protein, 7 aa, synthetic construct
IIHYMED

SEQ ID NO: 106086 - protein, 7 aa, synthetic construct
QFDYSPA

SEQ ID NO: 106087 - protein, 7 aa, synthetic construct
AWHDLKP

SEQ ID NO: 106088 - protein, 7 aa, synthetic construct
HHKMLLH

SEQ ID NO: 106089 - protein, 7 aa, synthetic construct
DQTYRQE

SEQ ID NO: 106090 - protein, 7 aa, synthetic construct
QQTHLPV

SEQ ID NO: 106091 - protein, 7 aa, synthetic construct
SGIAIGI

SEQ ID NO: 106092 - protein, 7 aa, synthetic construct
HEHLGPL

SEQ ID NO: 106093 - protein, 7 aa, synthetic construct
RDNVSYD

SEQ ID NO: 106094 - protein, 7 aa, synthetic construct
EHLGANK

SEQ ID NO: 106095 - protein, 7 aa, synthetic construct
KPNYTGA

SEQ ID NO: 106096 - protein, 7 aa, synthetic construct
RDHQQMQ

SEQ ID NO: 106097 - protein, 7 aa, synthetic construct
CGRDCAP

SEQ ID NO: 106098 - protein, 7 aa, synthetic construct
ISHDFVN

SEQ ID NO: 106099 - protein, 7 aa, synthetic construct
VMKGTLN

SEQ ID NO: 106100 - protein, 7 aa, synthetic construct
AGYKMEE

SEQ ID NO: 106101 - protein, 7 aa, synthetic construct
QQPTNDW

SEQ ID NO: 106102 - protein, 7 aa, synthetic construct
GQIRDYS

SEQ ID NO: 106103 - protein, 7 aa, synthetic construct
ASLEFRA

SEQ ID NO: 106104 - protein, 7 aa, synthetic construct
GMGHNIK

SEQ ID NO: 106105 - protein, 7 aa, synthetic construct
PDKSGTK

SEQ ID NO: 106106 - protein, 7 aa, synthetic construct
NEREWQK

SEQ ID NO: 106107 - protein, 7 aa, synthetic construct
EQGHTKH

SEQ ID NO: 106108 - protein, 7 aa, synthetic construct
GFHLENK

SEQ ID NO: 106109 - protein, 7 aa, synthetic construct
TEHVNKS

SEQ ID NO: 106110 - protein, 7 aa, synthetic construct
RDMQVNI

SEQ ID NO: 106111 - protein, 7 aa, synthetic construct
YRETERL

SEQ ID NO: 106112 - protein, 7 aa, synthetic construct
HGVRMVH

SEQ ID NO: 106113 - protein, 7 aa, synthetic construct
DKDWPIT

SEQ ID NO: 106114 - protein, 7 aa, synthetic construct
HSKRETD

SEQ ID NO: 106115 - protein, 7 aa, synthetic construct
PDLARPH

SEQ ID NO: 106116 - protein, 7 aa, synthetic construct
LIVTKME

SEQ ID NO: 106117 - protein, 7 aa, synthetic construct
ANGMNVL

SEQ ID NO: 106118 - protein, 7 aa, synthetic construct
FISDSPT

SEQ ID NO: 106119 - protein, 7 aa, synthetic construct
ARPDVTK

SEQ ID NO: 106120 - protein, 7 aa, synthetic construct
RSLSEKT

SEQ ID NO: 106121 - protein, 7 aa, synthetic construct
ERSETNG

SEQ ID NO: 106122 - protein, 7 aa, synthetic construct
PAGPQTF

SEQ ID NO: 106123 - protein, 7 aa, synthetic construct
TWTQEKV

SEQ ID NO: 106124 - protein, 7 aa, synthetic construct
TNQHNEA

SEQ ID NO: 106125 - protein, 7 aa, synthetic construct
AKRLTMD

SEQ ID NO: 106126 - protein, 7 aa, synthetic construct
TLEQART

SEQ ID NO: 106127 - protein, 7 aa, synthetic construct
MKNMIRE

SEQ ID NO: 106128 - protein, 7 aa, synthetic construct
KLRDDIA

SEQ ID NO: 106129 - protein, 7 aa, synthetic construct
YDPEHRI

SEQ ID NO: 106130 - protein, 7 aa, synthetic construct
SRAANGW

SEQ ID NO: 106131 - protein, 7 aa, synthetic construct
NVHADVH

SEQ ID NO: 106132 - protein, 7 aa, synthetic construct
QRVMGEF

SEQ ID NO: 106133 - protein, 7 aa, synthetic construct
KIQPHPY

SEQ ID NO: 106134 - protein, 7 aa, synthetic construct
IQHHAAK

SEQ ID NO: 106135 - protein, 7 aa, synthetic construct
APHTLRT

SEQ ID NO: 106136 - protein, 7 aa, synthetic construct
SNDIAFI

SEQ ID NO: 106137 - protein, 7 aa, synthetic construct
HHTEPSP

SEQ ID NO: 106138 - protein, 7 aa, synthetic construct
GHIAIGS

SEQ ID NO: 106139 - protein, 7 aa, synthetic construct
MARPTNY

SEQ ID NO: 106140 - protein, 7 aa, synthetic construct
PVQREGD

SEQ ID NO: 106141 - protein, 7 aa, synthetic construct
AKGSFNL

SEQ ID NO: 106142 - protein, 7 aa, synthetic construct
HTANAKA

SEQ ID NO: 106143 - protein, 7 aa, synthetic construct
TSTSLVE

SEQ ID NO: 106144 - protein, 7 aa, synthetic construct
AVLTNNI

SEQ ID NO: 106145 - protein, 7 aa, synthetic construct
SSHHVTY

SEQ ID NO: 106146 - protein, 7 aa, synthetic construct
EWQQQDP

SEQ ID NO: 106147 - protein, 7 aa, synthetic construct
QGISPDS

SEQ ID NO: 106148 - protein, 7 aa, synthetic construct
GQKGSQG

SEQ ID NO: 106149 - protein, 7 aa, synthetic construct
KHPDPVH

SEQ ID NO: 106150 - protein, 7 aa, synthetic construct
NIVIKQT

SEQ ID NO: 106151 - protein, 7 aa, synthetic construct
MNSSIPY

SEQ ID NO: 106152 - protein, 7 aa, synthetic construct
HDIIEKA

SEQ ID NO: 106153 - protein, 7 aa, synthetic construct
SFDTGTA

SEQ ID NO: 106154 - protein, 7 aa, synthetic construct
ASDNMLK

SEQ ID NO: 106155 - protein, 7 aa, synthetic construct
FMQRQAP

SEQ ID NO: 106156 - protein, 7 aa, synthetic construct
KADISIP

SEQ ID NO: 106157 - protein, 7 aa, synthetic construct
GDHHQVM

SEQ ID NO: 106158 - protein, 7 aa, synthetic construct
SGTEKRV

SEQ ID NO: 106159 - protein, 7 aa, synthetic construct
KQPPVMM

SEQ ID NO: 106160 - protein, 7 aa, synthetic construct
QSNPSSP

SEQ ID NO: 106161 - protein, 7 aa, synthetic construct
IHQEQMR

SEQ ID NO: 106162 - protein, 7 aa, synthetic construct
NLYKIST

SEQ ID NO: 106163 - protein, 7 aa, synthetic construct
GNERNEN

SEQ ID NO: 106164 - protein, 7 aa, synthetic construct
GEHQHYE

SEQ ID NO: 106165 - protein, 7 aa, synthetic construct
SFKHEIL

SEQ ID NO: 106166 - protein, 7 aa, synthetic construct
TVPAGMD

SEQ ID NO: 106167 - protein, 7 aa, synthetic construct
GKNIMPL

SEQ ID NO: 106168 - protein, 7 aa, synthetic construct
YSQISFG

SEQ ID NO: 106169 - protein, 7 aa, synthetic construct
KMVGAVI

SEQ ID NO: 106170 - protein, 7 aa, synthetic construct
LKPANQT

SEQ ID NO: 106171 - protein, 7 aa, synthetic construct
DVHVLAG

SEQ ID NO: 106172 - protein, 7 aa, synthetic construct
FELSMPA

SEQ ID NO: 106173 - protein, 7 aa, synthetic construct
THGGLIS

SEQ ID NO: 106174 - protein, 7 aa, synthetic construct
QAQSRIL

SEQ ID NO: 106175 - protein, 7 aa, synthetic construct
KTENGRW

SEQ ID NO: 106176 - protein, 7 aa, synthetic construct
NKATEVP

SEQ ID NO: 106177 - protein, 7 aa, synthetic construct
ITPLSRL

SEQ ID NO: 106178 - protein, 7 aa, synthetic construct
PGREPEG

SEQ ID NO: 106179 - protein, 7 aa, synthetic construct
TNTFQNQ

SEQ ID NO: 106180 - protein, 7 aa, synthetic construct
SMFNARD

SEQ ID NO: 106181 - protein, 7 aa, synthetic construct
APMHNLH

SEQ ID NO: 106182 - protein, 7 aa, synthetic construct
SATLAQP

SEQ ID NO: 106183 - protein, 7 aa, synthetic construct
ATREEKS

SEQ ID NO: 106184 - protein, 7 aa, synthetic construct
APVGRQD

SEQ ID NO: 106185 - protein, 7 aa, synthetic construct
YNTSEGP

SEQ ID NO: 106186 - protein, 7 aa, synthetic construct
PNPNHAA

SEQ ID NO: 106187 - protein, 7 aa, synthetic construct
HDPDMKR

SEQ ID NO: 106188 - protein, 7 aa, synthetic construct
VIMHRDP

SEQ ID NO: 106189 - protein, 7 aa, synthetic construct
MYADSNL

SEQ ID NO: 106190 - protein, 7 aa, synthetic construct
SDVFTSV

SEQ ID NO: 106191 - protein, 7 aa, synthetic construct
GQQSTFI

SEQ ID NO: 106192 - protein, 7 aa, synthetic construct
ELYMTKP

SEQ ID NO: 106193 - protein, 7 aa, synthetic construct
KTIPMPN

SEQ ID NO: 106194 - protein, 7 aa, synthetic construct
TSMNGAA

SEQ ID NO: 106195 - protein, 7 aa, synthetic construct
SNMKQYQ

SEQ ID NO: 106196 - protein, 7 aa, synthetic construct
YSLEDKM

SEQ ID NO: 106197 - protein, 7 aa, synthetic construct
HQSQTSN

SEQ ID NO: 106198 - protein, 7 aa, synthetic construct
HHAKEDA

SEQ ID NO: 106199 - protein, 7 aa, synthetic construct
IHMDNRK

SEQ ID NO: 106200 - protein, 7 aa, synthetic construct
RVIVPGA

SEQ ID NO: 106201 - protein, 7 aa, synthetic construct
YGINQMK

SEQ ID NO: 106202 - protein, 7 aa, synthetic construct
YQNNAKG

SEQ ID NO: 106203 - protein, 7 aa, synthetic construct
DLFHAIE

SEQ ID NO: 106204 - protein, 7 aa, synthetic construct
AHMDKGD

SEQ ID NO: 106205 - protein, 7 aa, synthetic construct
WHNEREV

SEQ ID NO: 106206 - protein, 7 aa, synthetic construct
KNDMIKG

SEQ ID NO: 106207 - protein, 7 aa, synthetic construct
PQQGGIL

SEQ ID NO: 106208 - protein, 7 aa, synthetic construct
HTQGIVK

SEQ ID NO: 106209 - protein, 7 aa, synthetic construct
PEQRETM

SEQ ID NO: 106210 - protein, 7 aa, synthetic construct
IMPHNIM

SEQ ID NO: 106211 - protein, 7 aa, synthetic construct
WNNQKPY

SEQ ID NO: 106212 - protein, 7 aa, synthetic construct
WAHDDMP

SEQ ID NO: 106213 - protein, 7 aa, synthetic construct
NFIGDAK

SEQ ID NO: 106214 - protein, 7 aa, synthetic construct
KHETTNT

SEQ ID NO: 106215 - protein, 7 aa, synthetic construct
NVHFVDH

SEQ ID NO: 106216 - protein, 7 aa, synthetic construct
LNEANSS

SEQ ID NO: 106217 - protein, 7 aa, synthetic construct
VRPENGK

SEQ ID NO: 106218 - protein, 7 aa, synthetic construct
GLQLPQA

SEQ ID NO: 106219 - protein, 7 aa, synthetic construct
LPQLRVV

SEQ ID NO: 106220 - protein, 7 aa, synthetic construct
SRVAVAI

SEQ ID NO: 106221 - protein, 7 aa, synthetic construct
FYQAHER

SEQ ID NO: 106222 - protein, 7 aa, synthetic construct
GKTTQAY

SEQ ID NO: 106223 - protein, 7 aa, synthetic construct
TTREIGG

SEQ ID NO: 106224 - protein, 7 aa, synthetic construct
GSFAAAR

SEQ ID NO: 106225 - protein, 7 aa, synthetic construct
HHESRVM

SEQ ID NO: 106226 - protein, 7 aa, synthetic construct
MAAVHRS

SEQ ID NO: 106227 - protein, 7 aa, synthetic construct
MHRSEQE

SEQ ID NO: 106228 - protein, 7 aa, synthetic construct
LSSYSDR

SEQ ID NO: 106229 - protein, 7 aa, synthetic construct
LMRDYNG

SEQ ID NO: 106230 - protein, 7 aa, synthetic construct
NDPHIRK

SEQ ID NO: 106231 - protein, 7 aa, synthetic construct
QMKEEAV

SEQ ID NO: 106232 - protein, 7 aa, synthetic construct
YAGTTPI

SEQ ID NO: 106233 - protein, 7 aa, synthetic construct
HGPVIPM

SEQ ID NO: 106234 - protein, 7 aa, synthetic construct
QQQIKEI

SEQ ID NO: 106235 - protein, 7 aa, synthetic construct
PTIIKER

SEQ ID NO: 106236 - protein, 7 aa, synthetic construct
GGTKTNA

SEQ ID NO: 106237 - protein, 7 aa, synthetic construct
SLSWSPE

SEQ ID NO: 106238 - protein, 7 aa, synthetic construct
WDKQPLN

SEQ ID NO: 106239 - protein, 7 aa, synthetic construct
NKFDMII

SEQ ID NO: 106240 - protein, 7 aa, synthetic construct
DLINLVS

SEQ ID NO: 106241 - protein, 7 aa, synthetic construct
LARNYVG

SEQ ID NO: 106242 - protein, 7 aa, synthetic construct
RPGDFGP

SEQ ID NO: 106243 - protein, 7 aa, synthetic construct
SSITIRP

SEQ ID NO: 106244 - protein, 7 aa, synthetic construct
QPQHLRQ

SEQ ID NO: 106245 - protein, 7 aa, synthetic construct
DRRDSHH

SEQ ID NO: 106246 - protein, 7 aa, synthetic construct
IYGSLSP

SEQ ID NO: 106247 - protein, 7 aa, synthetic construct
IEKWIDE

SEQ ID NO: 106248 - protein, 7 aa, synthetic construct
SEFNIRN

SEQ ID NO: 106249 - protein, 7 aa, synthetic construct
GVFMGGD

SEQ ID NO: 106250 - protein, 7 aa, synthetic construct
NRVLQSS

SEQ ID NO: 106251 - protein, 7 aa, synthetic construct
SLASDRN

SEQ ID NO: 106252 - protein, 7 aa, synthetic construct
YELKQTQ

SEQ ID NO: 106253 - protein, 7 aa, synthetic construct
MKSDSVA

SEQ ID NO: 106254 - protein, 7 aa, synthetic construct
QKVTPSE

SEQ ID NO: 106255 - protein, 7 aa, synthetic construct
GHTSPNM

SEQ ID NO: 106256 - protein, 7 aa, synthetic construct
PMGLNLE

SEQ ID NO: 106257 - protein, 7 aa, synthetic construct
LKAQNEV

SEQ ID NO: 106258 - protein, 7 aa, synthetic construct
YVNAHKV

SEQ ID NO: 106259 - protein, 7 aa, synthetic construct
QDPRSLV

SEQ ID NO: 106260 - protein, 7 aa, synthetic construct
SLHAHLI

SEQ ID NO: 106261 - protein, 7 aa, synthetic construct
FEQSGVK

SEQ ID NO: 106262 - protein, 7 aa, synthetic construct
VFSVQKE

SEQ ID NO: 106263 - protein, 7 aa, synthetic construct
ENSTYKY

SEQ ID NO: 106264 - protein, 7 aa, synthetic construct
KPPADLP

SEQ ID NO: 106265 - protein, 7 aa, synthetic construct
VTVNHYS

SEQ ID NO: 106266 - protein, 7 aa, synthetic construct
VGGMTDR

SEQ ID NO: 106267 - protein, 7 aa, synthetic construct
WLNGKNQ

SEQ ID NO: 106268 - protein, 7 aa, synthetic construct
MMHEIPT

SEQ ID NO: 106269 - protein, 7 aa, synthetic construct
FIKDIPY

SEQ ID NO: 106270 - protein, 7 aa, synthetic construct
NYRHEHI

SEQ ID NO: 106271 - protein, 7 aa, synthetic construct
HMGDMPM

SEQ ID NO: 106272 - protein, 7 aa, synthetic construct
ARAGLHV

SEQ ID NO: 106273 - protein, 7 aa, synthetic construct
FLRNAVG

SEQ ID NO: 106274 - protein, 7 aa, synthetic construct
WHHHMVE

SEQ ID NO: 106275 - protein, 7 aa, synthetic construct
VNRFNPA

SEQ ID NO: 106276 - protein, 7 aa, synthetic construct
TGENRLY

SEQ ID NO: 106277 - protein, 7 aa, synthetic construct
MFALEAP

SEQ ID NO: 106278 - protein, 7 aa, synthetic construct
FAMGGMD

SEQ ID NO: 106279 - protein, 7 aa, synthetic construct
RIEGPKI

SEQ ID NO: 106280 - protein, 7 aa, synthetic construct
MPSSPVF

SEQ ID NO: 106281 - protein, 7 aa, synthetic construct
VKAVPDG

SEQ ID NO: 106282 - protein, 7 aa, synthetic construct
NGVVLHM

SEQ ID NO: 106283 - protein, 7 aa, synthetic construct
QAVHSSP

SEQ ID NO: 106284 - protein, 7 aa, synthetic construct
RITHGSN

SEQ ID NO: 106285 - protein, 7 aa, synthetic construct
QKKEGHI

SEQ ID NO: 106286 - protein, 7 aa, synthetic construct
QFPEMGP

SEQ ID NO: 106287 - protein, 7 aa, synthetic construct
HAGTVAE

SEQ ID NO: 106288 - protein, 7 aa, synthetic construct
RIYHDND

SEQ ID NO: 106289 - protein, 7 aa, synthetic construct
AEGASYR

SEQ ID NO: 106290 - protein, 7 aa, synthetic construct
GPFVGRE

SEQ ID NO: 106291 - protein, 7 aa, synthetic construct
IAPMVPH

SEQ ID NO: 106292 - protein, 7 aa, synthetic construct
EKWAGEM

SEQ ID NO: 106293 - protein, 7 aa, synthetic construct
WAGKYPT

SEQ ID NO: 106294 - protein, 7 aa, synthetic construct
NMNFPES

SEQ ID NO: 106295 - protein, 7 aa, synthetic construct
RTRDSGS

SEQ ID NO: 106296 - protein, 7 aa, synthetic construct
QGHIEMP

SEQ ID NO: 106297 - protein, 7 aa, synthetic construct
DMQTTMM

SEQ ID NO: 106298 - protein, 7 aa, synthetic construct
QPARNTP

SEQ ID NO: 106299 - protein, 7 aa, synthetic construct
AGQTIIM

SEQ ID NO: 106300 - protein, 7 aa, synthetic construct
REHFNPD

SEQ ID NO: 106301 - protein, 7 aa, synthetic construct
KSEPIQT

SEQ ID NO: 106302 - protein, 7 aa, synthetic construct
HKNSSDD

SEQ ID NO: 106303 - protein, 7 aa, synthetic construct
MDHIGTS

SEQ ID NO: 106304 - protein, 7 aa, synthetic construct
KLDRFAI

SEQ ID NO: 106305 - protein, 7 aa, synthetic construct
GQKPIPT

SEQ ID NO: 106306 - protein, 7 aa, synthetic construct
TFGLSGH

SEQ ID NO: 106307 - protein, 7 aa, synthetic construct
VRKEDFE

SEQ ID NO: 106308 - protein, 7 aa, synthetic construct
EQASAMA

SEQ ID NO: 106309 - protein, 7 aa, synthetic construct
WGNDRPQ

SEQ ID NO: 106310 - protein, 7 aa, synthetic construct
ELKVSTP

SEQ ID NO: 106311 - protein, 7 aa, synthetic construct
GAFNDKV

SEQ ID NO: 106312 - protein, 7 aa, synthetic construct
NIAQVAM

SEQ ID NO: 106313 - protein, 7 aa, synthetic construct
PQNREHI

SEQ ID NO: 106314 - protein, 7 aa, synthetic construct
QHTINTT

SEQ ID NO: 106315 - protein, 7 aa, synthetic construct
WPVTGQT

SEQ ID NO: 106316 - protein, 7 aa, synthetic construct
GMIPNRG

SEQ ID NO: 106317 - protein, 7 aa, synthetic construct
IASDRTM

SEQ ID NO: 106318 - protein, 7 aa, synthetic construct
YGKQLVV

SEQ ID NO: 106319 - protein, 7 aa, synthetic construct
YVGMQNK

SEQ ID NO: 106320 - protein, 7 aa, synthetic construct
RPNEYGP

SEQ ID NO: 106321 - protein, 7 aa, synthetic construct
WPPNGTD

SEQ ID NO: 106322 - protein, 7 aa, synthetic construct
ANKSVMM

SEQ ID NO: 106323 - protein, 7 aa, synthetic construct
QAQATQL

SEQ ID NO: 106324 - protein, 7 aa, synthetic construct
DVAIKWE

SEQ ID NO: 106325 - protein, 7 aa, synthetic construct
SKSIRVD

SEQ ID NO: 106326 - protein, 7 aa, synthetic construct
DNFNRIK

SEQ ID NO: 106327 - protein, 7 aa, synthetic construct
HQSHRNI

SEQ ID NO: 106328 - protein, 7 aa, synthetic construct
DAFQRGT

SEQ ID NO: 106329 - protein, 7 aa, synthetic construct
IAQGYAR

SEQ ID NO: 106330 - protein, 7 aa, synthetic construct
MGNRGNQ

SEQ ID NO: 106331 - protein, 7 aa, synthetic construct
PLQRHNT

SEQ ID NO: 106332 - protein, 7 aa, synthetic construct
NNPEGQS

SEQ ID NO: 106333 - protein, 7 aa, synthetic construct
FGSTIQD

SEQ ID NO: 106334 - protein, 7 aa, synthetic construct
WRTTDQN

SEQ ID NO: 106335 - protein, 7 aa, synthetic construct
LDGYYKN

SEQ ID NO: 106336 - protein, 7 aa, synthetic construct
HEFNSYK

SEQ ID NO: 106337 - protein, 7 aa, synthetic construct
KNKATDE

SEQ ID NO: 106338 - protein, 7 aa, synthetic construct
MRPEGYD

SEQ ID NO: 106339 - protein, 7 aa, synthetic construct
STYAPRM

SEQ ID NO: 106340 - protein, 7 aa, synthetic construct
FQLKNMP

SEQ ID NO: 106341 - protein, 7 aa, synthetic construct
EVPQHRL

SEQ ID NO: 106342 - protein, 7 aa, synthetic construct
ERWNPNA

SEQ ID NO: 106343 - protein, 7 aa, synthetic construct
TALHINA

SEQ ID NO: 106344 - protein, 7 aa, synthetic construct
PHFTDNR

SEQ ID NO: 106345 - protein, 7 aa, synthetic construct
KDNMRSG

SEQ ID NO: 106346 - protein, 7 aa, synthetic construct
RSKEGFV

SEQ ID NO: 106347 - protein, 7 aa, synthetic construct
MDPLLTK

SEQ ID NO: 106348 - protein, 7 aa, synthetic construct
LRMPIGD

SEQ ID NO: 106349 - protein, 7 aa, synthetic construct
YTTGVDV

SEQ ID NO: 106350 - protein, 7 aa, synthetic construct
SKILDED

SEQ ID NO: 106351 - protein, 7 aa, synthetic construct
MGMQQFP

SEQ ID NO: 106352 - protein, 7 aa, synthetic construct
IGHMDHM

SEQ ID NO: 106353 - protein, 7 aa, synthetic construct
IQQHENT

SEQ ID NO: 106354 - protein, 7 aa, synthetic construct
GYVQQSK

SEQ ID NO: 106355 - protein, 7 aa, synthetic construct
AVYTGGM

SEQ ID NO: 106356 - protein, 7 aa, synthetic construct
MNQRGAP

SEQ ID NO: 106357 - protein, 7 aa, synthetic construct
TITMPGN

SEQ ID NO: 106358 - protein, 7 aa, synthetic construct
IEAHKTY

SEQ ID NO: 106359 - protein, 7 aa, synthetic construct
TPKAAQM

SEQ ID NO: 106360 - protein, 7 aa, synthetic construct
KMATEYI

SEQ ID NO: 106361 - protein, 7 aa, synthetic construct
QGFMNNS

SEQ ID NO: 106362 - protein, 7 aa, synthetic construct
KITPEQT

SEQ ID NO: 106363 - protein, 7 aa, synthetic construct
TRTWQDP

SEQ ID NO: 106364 - protein, 7 aa, synthetic construct
FTVNNER

SEQ ID NO: 106365 - protein, 7 aa, synthetic construct
QHTNFTL

SEQ ID NO: 106366 - protein, 7 aa, synthetic construct
KDNMVRI

SEQ ID NO: 106367 - protein, 7 aa, synthetic construct
RDREFQW

SEQ ID NO: 106368 - protein, 7 aa, synthetic construct
DGHHRHE

SEQ ID NO: 106369 - protein, 7 aa, synthetic construct
SQPVQAF

SEQ ID NO: 106370 - protein, 7 aa, synthetic construct
NAMREPD

SEQ ID NO: 106371 - protein, 7 aa, synthetic construct
IKYLEVG

SEQ ID NO: 106372 - protein, 7 aa, synthetic construct
DPLHNGS

SEQ ID NO: 106373 - protein, 7 aa, synthetic construct
YEQTNMA

SEQ ID NO: 106374 - protein, 7 aa, synthetic construct
QGQVGHY

SEQ ID NO: 106375 - protein, 7 aa, synthetic construct
VGDFSSP

SEQ ID NO: 106376 - protein, 7 aa, synthetic construct
TVKNEHQ

SEQ ID NO: 106377 - protein, 7 aa, synthetic construct
WHPATVM

SEQ ID NO: 106378 - protein, 7 aa, synthetic construct
KTVQNDW

SEQ ID NO: 106379 - protein, 7 aa, synthetic construct
FQHQVSK

SEQ ID NO: 106380 - protein, 7 aa, synthetic construct
ITALTME

SEQ ID NO: 106381 - protein, 7 aa, synthetic construct
TNFHRVG

SEQ ID NO: 106382 - protein, 7 aa, synthetic construct
TDRITIE

SEQ ID NO: 106383 - protein, 7 aa, synthetic construct
DHMKVGH

SEQ ID NO: 106384 - protein, 7 aa, synthetic construct
YHTNAYQ

SEQ ID NO: 106385 - protein, 7 aa, synthetic construct
TNNQANV

SEQ ID NO: 106386 - protein, 7 aa, synthetic construct
IRDETIR

SEQ ID NO: 106387 - protein, 7 aa, synthetic construct
RKVEYGD

SEQ ID NO: 106388 - protein, 7 aa, synthetic construct
SMQFSGM

SEQ ID NO: 106389 - protein, 7 aa, synthetic construct
RISDEPL

SEQ ID NO: 106390 - protein, 7 aa, synthetic construct
TFHGIHN

SEQ ID NO: 106391 - protein, 7 aa, synthetic construct
LMKSADD

SEQ ID NO: 106392 - protein, 7 aa, synthetic construct
REGEAPN

SEQ ID NO: 106393 - protein, 7 aa, synthetic construct
WKGEKDV

SEQ ID NO: 106394 - protein, 7 aa, synthetic construct
DYIRPMA

SEQ ID NO: 106395 - protein, 7 aa, synthetic construct
WMIDGDS

SEQ ID NO: 106396 - protein, 7 aa, synthetic construct
KMSMCKE

SEQ ID NO: 106397 - protein, 7 aa, synthetic construct
FSTRAVM

SEQ ID NO: 106398 - protein, 7 aa, synthetic construct
NVGKNEK

SEQ ID NO: 106399 - protein, 7 aa, synthetic construct
SGETKFR

SEQ ID NO: 106400 - protein, 7 aa, synthetic construct
TPYEGRN

SEQ ID NO: 106401 - protein, 7 aa, synthetic construct
PTHGMSF

SEQ ID NO: 106402 - protein, 7 aa, synthetic construct
KHPLTPY

SEQ ID NO: 106403 - protein, 7 aa, synthetic construct
HFGQPED

SEQ ID NO: 106404 - protein, 7 aa, synthetic construct
VAVYNEV

SEQ ID NO: 106405 - protein, 7 aa, synthetic construct
KNINETE

SEQ ID NO: 106406 - protein, 7 aa, synthetic construct
IGTTQQM

SEQ ID NO: 106407 - protein, 7 aa, synthetic construct
LNPGTLV

SEQ ID NO: 106408 - protein, 7 aa, synthetic construct
PMMHRSG

SEQ ID NO: 106409 - protein, 7 aa, synthetic construct
VAYPEEK

SEQ ID NO: 106410 - protein, 7 aa, synthetic construct
TKDGERP

SEQ ID NO: 106411 - protein, 7 aa, synthetic construct
MAEMTKS

SEQ ID NO: 106412 - protein, 7 aa, synthetic construct
IETKQHP

SEQ ID NO: 106413 - protein, 7 aa, synthetic construct
GSQHRGD

SEQ ID NO: 106414 - protein, 7 aa, synthetic construct
DMDKKVR

SEQ ID NO: 106415 - protein, 7 aa, synthetic construct
PNKGTYG

SEQ ID NO: 106416 - protein, 7 aa, synthetic construct
INIQDDG

SEQ ID NO: 106417 - protein, 7 aa, synthetic construct
VKAGMYM

SEQ ID NO: 106418 - protein, 7 aa, synthetic construct
TTKPVKD

SEQ ID NO: 106419 - protein, 7 aa, synthetic construct
MGMTEDR

SEQ ID NO: 106420 - protein, 7 aa, synthetic construct
TEFKYAA

SEQ ID NO: 106421 - protein, 7 aa, synthetic construct
QFTKTVY

SEQ ID NO: 106422 - protein, 7 aa, synthetic construct
NHANNDP

SEQ ID NO: 106423 - protein, 7 aa, synthetic construct
DQKYIAD

SEQ ID NO: 106424 - protein, 7 aa, synthetic construct
EAQVMQS

SEQ ID NO: 106425 - protein, 7 aa, synthetic construct
GAKQNPT

SEQ ID NO: 106426 - protein, 7 aa, synthetic construct
NILTSSS

SEQ ID NO: 106427 - protein, 7 aa, synthetic construct
IKYEQIP

SEQ ID NO: 106428 - protein, 7 aa, synthetic construct
RKQGEYM

SEQ ID NO: 106429 - protein, 7 aa, synthetic construct
FENAQSR

SEQ ID NO: 106430 - protein, 7 aa, synthetic construct
EDKRMEM

SEQ ID NO: 106431 - protein, 7 aa, synthetic construct
KDSFPRM

SEQ ID NO: 106432 - protein, 7 aa, synthetic construct
RQAEIAE

SEQ ID NO: 106433 - protein, 7 aa, synthetic construct
MKHRDGD

SEQ ID NO: 106434 - protein, 7 aa, synthetic construct
WTEQMPS

SEQ ID NO: 106435 - protein, 7 aa, synthetic construct
GNKMNVA

SEQ ID NO: 106436 - protein, 7 aa, synthetic construct
KQVDNKL

SEQ ID NO: 106437 - protein, 7 aa, synthetic construct
WDRHIIN

SEQ ID NO: 106438 - protein, 7 aa, synthetic construct
SSQIGGE

SEQ ID NO: 106439 - protein, 7 aa, synthetic construct
RDGTSER

SEQ ID NO: 106440 - protein, 7 aa, synthetic construct
DAMLKNL

SEQ ID NO: 106441 - protein, 7 aa, synthetic construct
TASKTAG

SEQ ID NO: 106442 - protein, 7 aa, synthetic construct
NLIHNVR

SEQ ID NO: 106443 - protein, 7 aa, synthetic construct
PSSEKTW

SEQ ID NO: 106444 - protein, 7 aa, synthetic construct
AHPILGS

SEQ ID NO: 106445 - protein, 7 aa, synthetic construct
RHDISFE

SEQ ID NO: 106446 - protein, 7 aa, synthetic construct
ERMSTLP

SEQ ID NO: 106447 - protein, 7 aa, synthetic construct
IHESNRI

SEQ ID NO: 106448 - protein, 7 aa, synthetic construct
AQSWMHE

SEQ ID NO: 106449 - protein, 7 aa, synthetic construct
MQSAERA

SEQ ID NO: 106450 - protein, 7 aa, synthetic construct
RQQYRDE

SEQ ID NO: 106451 - protein, 7 aa, synthetic construct
GEQRINK

SEQ ID NO: 106452 - protein, 7 aa, synthetic construct
YKATTFD

SEQ ID NO: 106453 - protein, 7 aa, synthetic construct
VPSEVRV

SEQ ID NO: 106454 - protein, 7 aa, synthetic construct
ESPVMMR

SEQ ID NO: 106455 - protein, 7 aa, synthetic construct
TQKMFVA

SEQ ID NO: 106456 - protein, 7 aa, synthetic construct
HQQHVIK

SEQ ID NO: 106457 - protein, 7 aa, synthetic construct
TKSHIEE

SEQ ID NO: 106458 - protein, 7 aa, synthetic construct
HKATESR

SEQ ID NO: 106459 - protein, 7 aa, synthetic construct
NRNGQLS

SEQ ID NO: 106460 - protein, 7 aa, synthetic construct
DKQMIQT

SEQ ID NO: 106461 - protein, 7 aa, synthetic construct
SLRVELK

SEQ ID NO: 106462 - protein, 7 aa, synthetic construct
QMHAAKY

SEQ ID NO: 106463 - protein, 7 aa, synthetic construct
FMQYTQD

SEQ ID NO: 106464 - protein, 7 aa, synthetic construct
GQSGTLN

SEQ ID NO: 106465 - protein, 7 aa, synthetic construct
EPPPNLK

SEQ ID NO: 106466 - protein, 7 aa, synthetic construct
NSTHNTF

SEQ ID NO: 106467 - protein, 7 aa, synthetic construct
SREPNLY

SEQ ID NO: 106468 - protein, 7 aa, synthetic construct
LNYPAEK

SEQ ID NO: 106469 - protein, 7 aa, synthetic construct
AKGASTI

SEQ ID NO: 106470 - protein, 7 aa, synthetic construct
EFTAMPH

SEQ ID NO: 106471 - protein, 7 aa, synthetic construct
KNATSEE

SEQ ID NO: 106472 - protein, 7 aa, synthetic construct
TQGLDKS

SEQ ID NO: 106473 - protein, 7 aa, synthetic construct
SMNVTGI

SEQ ID NO: 106474 - protein, 7 aa, synthetic construct
RANDKIN

SEQ ID NO: 106475 - protein, 7 aa, synthetic construct
FSSEGPS

SEQ ID NO: 106476 - protein, 7 aa, synthetic construct
RAERAIL

SEQ ID NO: 106477 - protein, 7 aa, synthetic construct
FEDHNMK

SEQ ID NO: 106478 - protein, 7 aa, synthetic construct
HYPKREV

SEQ ID NO: 106479 - protein, 7 aa, synthetic construct
GKEEPHA

SEQ ID NO: 106480 - protein, 7 aa, synthetic construct
ADSQHVL

SEQ ID NO: 106481 - protein, 7 aa, synthetic construct
VAGQREQ

SEQ ID NO: 106482 - protein, 7 aa, synthetic construct
RIDHIMA

SEQ ID NO: 106483 - protein, 7 aa, synthetic construct
GDGVRRV

SEQ ID NO: 106484 - protein, 7 aa, synthetic construct
MQAMGGE

SEQ ID NO: 106485 - protein, 7 aa, synthetic construct
LHDFKHH

SEQ ID NO: 106486 - protein, 7 aa, synthetic construct
SNEGFRG

SEQ ID NO: 106487 - protein, 7 aa, synthetic construct
YNAGDFA

SEQ ID NO: 106488 - protein, 7 aa, synthetic construct
PYDHHVV

SEQ ID NO: 106489 - protein, 7 aa, synthetic construct
AIIHQSA

SEQ ID NO: 106490 - protein, 7 aa, synthetic construct
GMAAHRN

SEQ ID NO: 106491 - protein, 7 aa, synthetic construct
YHIDSVQ

SEQ ID NO: 106492 - protein, 7 aa, synthetic construct
RPNNGFD

SEQ ID NO: 106493 - protein, 7 aa, synthetic construct
QEKGNDV

SEQ ID NO: 106494 - protein, 7 aa, synthetic construct
DITVGQR

SEQ ID NO: 106495 - protein, 7 aa, synthetic construct
QPRYLSG

SEQ ID NO: 106496 - protein, 7 aa, synthetic construct
TKTEFEK

SEQ ID NO: 106497 - protein, 7 aa, synthetic construct
EAHVTGL

SEQ ID NO: 106498 - protein, 7 aa, synthetic construct
ISNSWRD

SEQ ID NO: 106499 - protein, 7 aa, synthetic construct
KQTQVGA

SEQ ID NO: 106500 - protein, 7 aa, synthetic construct
SKYPIYE

SEQ ID NO: 106501 - protein, 7 aa, synthetic construct
TVWESTK

SEQ ID NO: 106502 - protein, 7 aa, synthetic construct
LQDHGLK

SEQ ID NO: 106503 - protein, 7 aa, synthetic construct
GPPHMMT

SEQ ID NO: 106504 - protein, 7 aa, synthetic construct
ENATHHG

SEQ ID NO: 106505 - protein, 7 aa, synthetic construct
NVSAGRL

SEQ ID NO: 106506 - protein, 7 aa, synthetic construct
SIGPAQA

SEQ ID NO: 106507 - protein, 7 aa, synthetic construct
MPLHING

SEQ ID NO: 106508 - protein, 7 aa, synthetic construct
ARDHQYI

SEQ ID NO: 106509 - protein, 7 aa, synthetic construct
FQMKSGI

SEQ ID NO: 106510 - protein, 7 aa, synthetic construct
GPTKMTN

SEQ ID NO: 106511 - protein, 7 aa, synthetic construct
KPILEHI

SEQ ID NO: 106512 - protein, 7 aa, synthetic construct
NEADKVG

SEQ ID NO: 106513 - protein, 7 aa, synthetic construct
QVYAVQS

SEQ ID NO: 106514 - protein, 7 aa, synthetic construct
HEQNMHR

SEQ ID NO: 106515 - protein, 7 aa, synthetic construct
PRKEEEF

SEQ ID NO: 106516 - protein, 7 aa, synthetic construct
VFGPHKQ

SEQ ID NO: 106517 - protein, 7 aa, synthetic construct
HIQSVVV

SEQ ID NO: 106518 - protein, 7 aa, synthetic construct
GMSTLDH

SEQ ID NO: 106519 - protein, 7 aa, synthetic construct
IRSGTFL

SEQ ID NO: 106520 - protein, 7 aa, synthetic construct
KAPSKGA

SEQ ID NO: 106521 - protein, 7 aa, synthetic construct
GARSSFH

SEQ ID NO: 106522 - protein, 7 aa, synthetic construct
FYTSKNQ

SEQ ID NO: 106523 - protein, 7 aa, synthetic construct
HKPMVEY

SEQ ID NO: 106524 - protein, 7 aa, synthetic construct
MNISEGP

SEQ ID NO: 106525 - protein, 7 aa, synthetic construct
NKMSPNG

SEQ ID NO: 106526 - protein, 7 aa, synthetic construct
IPMASKY

SEQ ID NO: 106527 - protein, 7 aa, synthetic construct
WPEEKNV

SEQ ID NO: 106528 - protein, 7 aa, synthetic construct
HVNQPLN

SEQ ID NO: 106529 - protein, 7 aa, synthetic construct
YQTKPEQ

SEQ ID NO: 106530 - protein, 7 aa, synthetic construct
NAKQWVD

SEQ ID NO: 106531 - protein, 7 aa, synthetic construct
WESHFDS

SEQ ID NO: 106532 - protein, 7 aa, synthetic construct
SKQWSTD

SEQ ID NO: 106533 - protein, 7 aa, synthetic construct
LQMPKPL

SEQ ID NO: 106534 - protein, 7 aa, synthetic construct
GVKFLRD

SEQ ID NO: 106535 - protein, 7 aa, synthetic construct
MFGTPNK

SEQ ID NO: 106536 - protein, 7 aa, synthetic construct
QYTDLLM

SEQ ID NO: 106537 - protein, 7 aa, synthetic construct
QMAEAAH

SEQ ID NO: 106538 - protein, 7 aa, synthetic construct
EHQITEY

SEQ ID NO: 106539 - protein, 7 aa, synthetic construct
SNEYAAP

SEQ ID NO: 106540 - protein, 7 aa, synthetic construct
QGTPHTF

SEQ ID NO: 106541 - protein, 7 aa, synthetic construct
QILTERA

SEQ ID NO: 106542 - protein, 7 aa, synthetic construct
PPPMNNN

SEQ ID NO: 106543 - protein, 7 aa, synthetic construct
MITGVLA

SEQ ID NO: 106544 - protein, 7 aa, synthetic construct
TMVPGMN

SEQ ID NO: 106545 - protein, 7 aa, synthetic construct
EEHTRSR

SEQ ID NO: 106546 - protein, 7 aa, synthetic construct
GNELRRY

SEQ ID NO: 106547 - protein, 7 aa, synthetic construct
LMKREPF

SEQ ID NO: 106548 - protein, 7 aa, synthetic construct
NQFNNNA

SEQ ID NO: 106549 - protein, 7 aa, synthetic construct
AELTQHG

SEQ ID NO: 106550 - protein, 7 aa, synthetic construct
PLVQMSR

SEQ ID NO: 106551 - protein, 7 aa, synthetic construct
ILMNAGV

SEQ ID NO: 106552 - protein, 7 aa, synthetic construct
IKHSFSN

SEQ ID NO: 106553 - protein, 7 aa, synthetic construct
ERNKAMH

SEQ ID NO: 106554 - protein, 7 aa, synthetic construct
RQHPQNH

SEQ ID NO: 106555 - protein, 7 aa, synthetic construct
AEPHSMP

SEQ ID NO: 106556 - protein, 7 aa, synthetic construct
NMHRMVS

SEQ ID NO: 106557 - protein, 7 aa, synthetic construct
NQSGWAV

SEQ ID NO: 106558 - protein, 7 aa, synthetic construct
DQKWMER

SEQ ID NO: 106559 - protein, 7 aa, synthetic construct
FGQGNTW

SEQ ID NO: 106560 - protein, 7 aa, synthetic construct
AKWSTDK

SEQ ID NO: 106561 - protein, 7 aa, synthetic construct
KSDNGYP

SEQ ID NO: 106562 - protein, 7 aa, synthetic construct
MPQPTVG

SEQ ID NO: 106563 - protein, 7 aa, synthetic construct
RAHNEFY

SEQ ID NO: 106564 - protein, 7 aa, synthetic construct
AAQLSSM

SEQ ID NO: 106565 - protein, 7 aa, synthetic construct
SEPGMSQ

SEQ ID NO: 106566 - protein, 7 aa, synthetic construct
NVYDKFA

SEQ ID NO: 106567 - protein, 7 aa, synthetic construct
SSQFFHE

SEQ ID NO: 106568 - protein, 7 aa, synthetic construct
NAETIKW

SEQ ID NO: 106569 - protein, 7 aa, synthetic construct
RTYPMDQ

SEQ ID NO: 106570 - protein, 7 aa, synthetic construct
EDRSNKQ

SEQ ID NO: 106571 - protein, 7 aa, synthetic construct
LNANFAS

SEQ ID NO: 106572 - protein, 7 aa, synthetic construct
LLQDLTK

SEQ ID NO: 106573 - protein, 7 aa, synthetic construct
KMMPGDW

SEQ ID NO: 106574 - protein, 7 aa, synthetic construct
YKDVTYT

SEQ ID NO: 106575 - protein, 7 aa, synthetic construct
LQHPVTK

SEQ ID NO: 106576 - protein, 7 aa, synthetic construct
NPLHNQL

SEQ ID NO: 106577 - protein, 7 aa, synthetic construct
FKDVYQD

SEQ ID NO: 106578 - protein, 7 aa, synthetic construct
MGMHQPS

SEQ ID NO: 106579 - protein, 7 aa, synthetic construct
TTSKVQA

SEQ ID NO: 106580 - protein, 7 aa, synthetic construct
TPKHSAG

SEQ ID NO: 106581 - protein, 7 aa, synthetic construct
QDRDPFR

SEQ ID NO: 106582 - protein, 7 aa, synthetic construct
AFPPNHS

SEQ ID NO: 106583 - protein, 7 aa, synthetic construct
KNPDKGA

SEQ ID NO: 106584 - protein, 7 aa, synthetic construct
KIQKETY

SEQ ID NO: 106585 - protein, 7 aa, synthetic construct
RIPTQPM

SEQ ID NO: 106586 - protein, 7 aa, synthetic construct
RDRGSMF

SEQ ID NO: 106587 - protein, 7 aa, synthetic construct
VKMIDYD

SEQ ID NO: 106588 - protein, 7 aa, synthetic construct
SEKMADS

SEQ ID NO: 106589 - protein, 7 aa, synthetic construct
AKEERRD

SEQ ID NO: 106590 - protein, 7 aa, synthetic construct
VFKIMEA

SEQ ID NO: 106591 - protein, 7 aa, synthetic construct
KSSQGLA

SEQ ID NO: 106592 - protein, 7 aa, synthetic construct
SAPKDSK

SEQ ID NO: 106593 - protein, 7 aa, synthetic construct
PMERSQV

SEQ ID NO: 106594 - protein, 7 aa, synthetic construct
MASMANF

SEQ ID NO: 106595 - protein, 7 aa, synthetic construct
WSQDVGQ

SEQ ID NO: 106596 - protein, 7 aa, synthetic construct
DKAQQLM

SEQ ID NO: 106597 - protein, 7 aa, synthetic construct
SGHKMHT

SEQ ID NO: 106598 - protein, 7 aa, synthetic construct
IAGQMRF

SEQ ID NO: 106599 - protein, 7 aa, synthetic construct
WNAALVS

SEQ ID NO: 106600 - protein, 7 aa, synthetic construct
KTDVILS

SEQ ID NO: 106601 - protein, 7 aa, synthetic construct
WHDVHHA

SEQ ID NO: 106602 - protein, 7 aa, synthetic construct
MSQRTQP

SEQ ID NO: 106603 - protein, 7 aa, synthetic construct
FGADFKN

SEQ ID NO: 106604 - protein, 7 aa, synthetic construct
SNSQGYI

SEQ ID NO: 106605 - protein, 7 aa, synthetic construct
YDKPVQA

SEQ ID NO: 106606 - protein, 7 aa, synthetic construct
YMRDNLH

SEQ ID NO: 106607 - protein, 7 aa, synthetic construct
TINHHAK

SEQ ID NO: 106608 - protein, 7 aa, synthetic construct
YEKNKFS

SEQ ID NO: 106609 - protein, 7 aa, synthetic construct
ASQEAKV

SEQ ID NO: 106610 - protein, 7 aa, synthetic construct
LATPRYP

SEQ ID NO: 106611 - protein, 7 aa, synthetic construct
SNAIQYV

SEQ ID NO: 106612 - protein, 7 aa, synthetic construct
TAQSNAE

SEQ ID NO: 106613 - protein, 7 aa, synthetic construct
STTGQLL

SEQ ID NO: 106614 - protein, 7 aa, synthetic construct
VDIVKNI

SEQ ID NO: 106615 - protein, 7 aa, synthetic construct
VTDTRGN

SEQ ID NO: 106616 - protein, 7 aa, synthetic construct
MPNKVTF

SEQ ID NO: 106617 - protein, 7 aa, synthetic construct
EKPVESK

SEQ ID NO: 106618 - protein, 7 aa, synthetic construct
NMLSSTM

SEQ ID NO: 106619 - protein, 7 aa, synthetic construct
AGEYQVK

SEQ ID NO: 106620 - protein, 7 aa, synthetic construct
LPGFHAI

SEQ ID NO: 106621 - protein, 7 aa, synthetic construct
SRVSTFG

SEQ ID NO: 106622 - protein, 7 aa, synthetic construct
AGGFLTS

SEQ ID NO: 106623 - protein, 7 aa, synthetic construct
KKEHDTM

SEQ ID NO: 106624 - protein, 7 aa, synthetic construct
TYHKWPE

SEQ ID NO: 106625 - protein, 7 aa, synthetic construct
FKFTMDG

SEQ ID NO: 106626 - protein, 7 aa, synthetic construct
ATGNHLD

SEQ ID NO: 106627 - protein, 7 aa, synthetic construct
NGLQNAD

SEQ ID NO: 106628 - protein, 7 aa, synthetic construct
GYATKTG

SEQ ID NO: 106629 - protein, 7 aa, synthetic construct
GRNNGLL

SEQ ID NO: 106630 - protein, 7 aa, synthetic construct
IPTSPMK

SEQ ID NO: 106631 - protein, 7 aa, synthetic construct
TKDMVLH

SEQ ID NO: 106632 - protein, 7 aa, synthetic construct
SSGFIGA

SEQ ID NO: 106633 - protein, 7 aa, synthetic construct
WNSIDTM

SEQ ID NO: 106634 - protein, 7 aa, synthetic construct
ERMKAPG

SEQ ID NO: 106635 - protein, 7 aa, synthetic construct
LLSHMQE

SEQ ID NO: 106636 - protein, 7 aa, synthetic construct
QKILEKM

SEQ ID NO: 106637 - protein, 7 aa, synthetic construct
HLPAEKW

SEQ ID NO: 106638 - protein, 7 aa, synthetic construct
LKDKEGW

SEQ ID NO: 106639 - protein, 7 aa, synthetic construct
HGDRDIN

SEQ ID NO: 106640 - protein, 7 aa, synthetic construct
RPLFNEG

SEQ ID NO: 106641 - protein, 7 aa, synthetic construct
RPISEGE

SEQ ID NO: 106642 - protein, 7 aa, synthetic construct
LLTMHEV

SEQ ID NO: 106643 - protein, 7 aa, synthetic construct
HTAQQEY

SEQ ID NO: 106644 - protein, 7 aa, synthetic construct
KRDVPMV

SEQ ID NO: 106645 - protein, 7 aa, synthetic construct
GHRDEGR

SEQ ID NO: 106646 - protein, 7 aa, synthetic construct
GFLLKPA

SEQ ID NO: 106647 - protein, 7 aa, synthetic construct
ANKPGEG

SEQ ID NO: 106648 - protein, 7 aa, synthetic construct
LTPDRQD

SEQ ID NO: 106649 - protein, 7 aa, synthetic construct
NAESSRT

SEQ ID NO: 106650 - protein, 7 aa, synthetic construct
PDKSSRQ

SEQ ID NO: 106651 - protein, 7 aa, synthetic construct
MASPITV

SEQ ID NO: 106652 - protein, 7 aa, synthetic construct
IPAGDPY

SEQ ID NO: 106653 - protein, 7 aa, synthetic construct
ATKSIQG

SEQ ID NO: 106654 - protein, 7 aa, synthetic construct
SDGRFNK

SEQ ID NO: 106655 - protein, 7 aa, synthetic construct
VPQDSQS

SEQ ID NO: 106656 - protein, 7 aa, synthetic construct
MEPFKAD

SEQ ID NO: 106657 - protein, 7 aa, synthetic construct
SQPGKNA

SEQ ID NO: 106658 - protein, 7 aa, synthetic construct
TKVESKA

SEQ ID NO: 106659 - protein, 7 aa, synthetic construct
SQSIGDS

SEQ ID NO: 106660 - protein, 7 aa, synthetic construct
GDSSMKY

SEQ ID NO: 106661 - protein, 7 aa, synthetic construct
PPIQMRQ

SEQ ID NO: 106662 - protein, 7 aa, synthetic construct
RTPTQNA

SEQ ID NO: 106663 - protein, 7 aa, synthetic construct
VMHKGTL

SEQ ID NO: 106664 - protein, 7 aa, synthetic construct
GNMETKY

SEQ ID NO: 106665 - protein, 7 aa, synthetic construct
MSTILED

SEQ ID NO: 106666 - protein, 7 aa, synthetic construct
PIDIRKG

SEQ ID NO: 106667 - protein, 7 aa, synthetic construct
LNMHTID

SEQ ID NO: 106668 - protein, 7 aa, synthetic construct
PTYTQMG

SEQ ID NO: 106669 - protein, 7 aa, synthetic construct
VGNWKTS

SEQ ID NO: 106670 - protein, 7 aa, synthetic construct
NTTAQKA

SEQ ID NO: 106671 - protein, 7 aa, synthetic construct
DKWGPQA

SEQ ID NO: 106672 - protein, 7 aa, synthetic construct
FRVIPSE

SEQ ID NO: 106673 - protein, 7 aa, synthetic construct
NIQAQAH

SEQ ID NO: 106674 - protein, 7 aa, synthetic construct
NMTNFDE

SEQ ID NO: 106675 - protein, 7 aa, synthetic construct
FNPRISP

SEQ ID NO: 106676 - protein, 7 aa, synthetic construct
VGFMGDG

SEQ ID NO: 106677 - protein, 7 aa, synthetic construct
GMKHPGA

SEQ ID NO: 106678 - protein, 7 aa, synthetic construct
TNGAKFP

SEQ ID NO: 106679 - protein, 7 aa, synthetic construct
LQFSPEK

SEQ ID NO: 106680 - protein, 7 aa, synthetic construct
IARGDDD

SEQ ID NO: 106681 - protein, 7 aa, synthetic construct
RNPVQMI

SEQ ID NO: 106682 - protein, 7 aa, synthetic construct
QVKTSAV

SEQ ID NO: 106683 - protein, 7 aa, synthetic construct
YYDRKHP

SEQ ID NO: 106684 - protein, 7 aa, synthetic construct
PLKQTDR

SEQ ID NO: 106685 - protein, 7 aa, synthetic construct
MTERPAA

SEQ ID NO: 106686 - protein, 7 aa, synthetic construct
YQSMAKF

SEQ ID NO: 106687 - protein, 7 aa, synthetic construct
QPEYTHR

SEQ ID NO: 106688 - protein, 7 aa, synthetic construct
HQTLHQE

SEQ ID NO: 106689 - protein, 7 aa, synthetic construct
SPTRADQ

SEQ ID NO: 106690 - protein, 7 aa, synthetic construct
HNQSLMV

SEQ ID NO: 106691 - protein, 7 aa, synthetic construct
GHEKIVA

SEQ ID NO: 106692 - protein, 7 aa, synthetic construct
SKTNSGM

SEQ ID NO: 106693 - protein, 7 aa, synthetic construct
QTYHLGG

SEQ ID NO: 106694 - protein, 7 aa, synthetic construct
ISKSLGQ

SEQ ID NO: 106695 - protein, 7 aa, synthetic construct
LGYNQPA

SEQ ID NO: 106696 - protein, 7 aa, synthetic construct
KTHMEPE

SEQ ID NO: 106697 - protein, 7 aa, synthetic construct
IYKPNTA

SEQ ID NO: 106698 - protein, 7 aa, synthetic construct
DPVHKTT

SEQ ID NO: 106699 - protein, 7 aa, synthetic construct
FSRTHTH

SEQ ID NO: 106700 - protein, 7 aa, synthetic construct
VSDHKFH

SEQ ID NO: 106701 - protein, 7 aa, synthetic construct
TSLGVFA

SEQ ID NO: 106702 - protein, 7 aa, synthetic construct
LNHVSIH

SEQ ID NO: 106703 - protein, 7 aa, synthetic construct
WGGFAND

SEQ ID NO: 106704 - protein, 7 aa, synthetic construct
TLHRAQN

SEQ ID NO: 106705 - protein, 7 aa, synthetic construct
KSYELHM

SEQ ID NO: 106706 - protein, 7 aa, synthetic construct
RDMRALI

SEQ ID NO: 106707 - protein, 7 aa, synthetic construct
ATKSFSD

SEQ ID NO: 106708 - protein, 7 aa, synthetic construct
LKYPSNI

SEQ ID NO: 106709 - protein, 7 aa, synthetic construct
AWNANDG

SEQ ID NO: 106710 - protein, 7 aa, synthetic construct
TTVHQGT

SEQ ID NO: 106711 - protein, 7 aa, synthetic construct
GTSTTMD

SEQ ID NO: 106712 - protein, 7 aa, synthetic construct
NVVVSKM

SEQ ID NO: 106713 - protein, 7 aa, synthetic construct
ITEFNAA

SEQ ID NO: 106714 - protein, 7 aa, synthetic construct
RNAATWE

SEQ ID NO: 106715 - protein, 7 aa, synthetic construct
QGLVMVK

SEQ ID NO: 106716 - protein, 7 aa, synthetic construct
QNIGILQ

SEQ ID NO: 106717 - protein, 7 aa, synthetic construct
DAGVHTV

SEQ ID NO: 106718 - protein, 7 aa, synthetic construct
NSADGKQ

SEQ ID NO: 106719 - protein, 7 aa, synthetic construct
NRKDIQS

SEQ ID NO: 106720 - protein, 7 aa, synthetic construct
ITTQGMP

SEQ ID NO: 106721 - protein, 7 aa, synthetic construct
AFEHKST

SEQ ID NO: 106722 - protein, 7 aa, synthetic construct
FGTVHAL

SEQ ID NO: 106723 - protein, 7 aa, synthetic construct
THVHAQI

SEQ ID NO: 106724 - protein, 7 aa, synthetic construct
WQVKAPD

SEQ ID NO: 106725 - protein, 7 aa, synthetic construct
FTKVEHF

SEQ ID NO: 106726 - protein, 7 aa, synthetic construct
VDQKPGF

SEQ ID NO: 106727 - protein, 7 aa, synthetic construct
KDKTGGA

SEQ ID NO: 106728 - protein, 7 aa, synthetic construct
VHGQKLE

SEQ ID NO: 106729 - protein, 7 aa, synthetic construct
PKEHSGN

SEQ ID NO: 106730 - protein, 7 aa, synthetic construct
TQNSNVK

SEQ ID NO: 106731 - protein, 7 aa, synthetic construct
IDHHNVF

SEQ ID NO: 106732 - protein, 7 aa, synthetic construct
KYERDLM

SEQ ID NO: 106733 - protein, 7 aa, synthetic construct
RISNNQM

SEQ ID NO: 106734 - protein, 7 aa, synthetic construct
TWKLTHE

SEQ ID NO: 106735 - protein, 7 aa, synthetic construct
QSHLPQI

SEQ ID NO: 106736 - protein, 7 aa, synthetic construct
MFPQDHR

SEQ ID NO: 106737 - protein, 7 aa, synthetic construct
TQIHGIE

SEQ ID NO: 106738 - protein, 7 aa, synthetic construct
KDKTIII

SEQ ID NO: 106739 - protein, 7 aa, synthetic construct
INNYLLP

SEQ ID NO: 106740 - protein, 7 aa, synthetic construct
YATFKLD

SEQ ID NO: 106741 - protein, 7 aa, synthetic construct
KAGNYIP

SEQ ID NO: 106742 - protein, 7 aa, synthetic construct
MAHGRPV

SEQ ID NO: 106743 - protein, 7 aa, synthetic construct
FYENKAF

SEQ ID NO: 106744 - protein, 7 aa, synthetic construct
HRNFKDS

SEQ ID NO: 106745 - protein, 7 aa, synthetic construct
KPSSNPA

SEQ ID NO: 106746 - protein, 7 aa, synthetic construct
GVRANHF

SEQ ID NO: 106747 - protein, 7 aa, synthetic construct
KIQHYPV

SEQ ID NO: 106748 - protein, 7 aa, synthetic construct
DKPVGWD

SEQ ID NO: 106749 - protein, 7 aa, synthetic construct
PKYTNGN

SEQ ID NO: 106750 - protein, 7 aa, synthetic construct
YGENSKW

SEQ ID NO: 106751 - protein, 7 aa, synthetic construct
KEEGLRN

SEQ ID NO: 106752 - protein, 7 aa, synthetic construct
VRDGWEK

SEQ ID NO: 106753 - protein, 7 aa, synthetic construct
DRKLLTY

SEQ ID NO: 106754 - protein, 7 aa, synthetic construct
GEQLVHA

SEQ ID NO: 106755 - protein, 7 aa, synthetic construct
MPQAPRY

SEQ ID NO: 106756 - protein, 7 aa, synthetic construct
SGYKESQ

SEQ ID NO: 106757 - protein, 7 aa, synthetic construct
IAMPESS

SEQ ID NO: 106758 - protein, 7 aa, synthetic construct
EKVMYVK

SEQ ID NO: 106759 - protein, 7 aa, synthetic construct
LAHIYSA

SEQ ID NO: 106760 - protein, 7 aa, synthetic construct
NGQPASM

SEQ ID NO: 106761 - protein, 7 aa, synthetic construct
AISIPEK

SEQ ID NO: 106762 - protein, 7 aa, synthetic construct
DHTHMIH

SEQ ID NO: 106763 - protein, 7 aa, synthetic construct
DPVKTQT

SEQ ID NO: 106764 - protein, 7 aa, synthetic construct
QGPTGNN

SEQ ID NO: 106765 - protein, 7 aa, synthetic construct
KPVGDLH

SEQ ID NO: 106766 - protein, 7 aa, synthetic construct
ETHMQHA

SEQ ID NO: 106767 - protein, 7 aa, synthetic construct
FADKSNV

SEQ ID NO: 106768 - protein, 7 aa, synthetic construct
RTNNNMY

SEQ ID NO: 106769 - protein, 7 aa, synthetic construct
SFGPMHA

SEQ ID NO: 106770 - protein, 7 aa, synthetic construct
DVPMGKT

SEQ ID NO: 106771 - protein, 7 aa, synthetic construct
AAKEDLD

SEQ ID NO: 106772 - protein, 7 aa, synthetic construct
FMTFEHA

SEQ ID NO: 106773 - protein, 7 aa, synthetic construct
HRPMHPM

SEQ ID NO: 106774 - protein, 7 aa, synthetic construct
IESWNHA

SEQ ID NO: 106775 - protein, 7 aa, synthetic construct
TKGQNTE

SEQ ID NO: 106776 - protein, 7 aa, synthetic construct
KERVHDQ

SEQ ID NO: 106777 - protein, 7 aa, synthetic construct
FKFEHDK

SEQ ID NO: 106778 - protein, 7 aa, synthetic construct
APGRAIH

SEQ ID NO: 106779 - protein, 7 aa, synthetic construct
PPEKFSS

SEQ ID NO: 106780 - protein, 7 aa, synthetic construct
QMTDKYP

SEQ ID NO: 106781 - protein, 7 aa, synthetic construct
TLMFAKG

SEQ ID NO: 106782 - protein, 7 aa, synthetic construct
VNRQAQG

SEQ ID NO: 106783 - protein, 7 aa, synthetic construct
VSHGSGK

SEQ ID NO: 106784 - protein, 7 aa, synthetic construct
EKGERGQ

SEQ ID NO: 106785 - protein, 7 aa, synthetic construct
GANLKDK

SEQ ID NO: 106786 - protein, 7 aa, synthetic construct
HSSSMGY

SEQ ID NO: 106787 - protein, 7 aa, synthetic construct
QDHKQFP

SEQ ID NO: 106788 - protein, 7 aa, synthetic construct
IHNRDLE

SEQ ID NO: 106789 - protein, 7 aa, synthetic construct
DSTKKGA

SEQ ID NO: 106790 - protein, 7 aa, synthetic construct
FLVKQDR

SEQ ID NO: 106791 - protein, 7 aa, synthetic construct
TNKDQYA

SEQ ID NO: 106792 - protein, 7 aa, synthetic construct
DYAVKGN

SEQ ID NO: 106793 - protein, 7 aa, synthetic construct
KIDPHTT

SEQ ID NO: 106794 - protein, 7 aa, synthetic construct
WSKVALD

SEQ ID NO: 106795 - protein, 7 aa, synthetic construct
MKNMTQT

SEQ ID NO: 106796 - protein, 7 aa, synthetic construct
PQQFSHE

SEQ ID NO: 106797 - protein, 7 aa, synthetic construct
DSSPYHH

SEQ ID NO: 106798 - protein, 7 aa, synthetic construct
ESPLHVR

SEQ ID NO: 106799 - protein, 7 aa, synthetic construct
PTHHDAR

SEQ ID NO: 106800 - protein, 7 aa, synthetic construct
PRADIPY

SEQ ID NO: 106801 - protein, 7 aa, synthetic construct
RTKDSAD

SEQ ID NO: 106802 - protein, 7 aa, synthetic construct
AIRTEQY

SEQ ID NO: 106803 - protein, 7 aa, synthetic construct
TENPHPP

SEQ ID NO: 106804 - protein, 7 aa, synthetic construct
NRGNVMQ

SEQ ID NO: 106805 - protein, 7 aa, synthetic construct
PAFDNNR

SEQ ID NO: 106806 - protein, 7 aa, synthetic construct
GPLPPRE

SEQ ID NO: 106807 - protein, 7 aa, synthetic construct
WSSGLPK

SEQ ID NO: 106808 - protein, 7 aa, synthetic construct
GAVQSHT

SEQ ID NO: 106809 - protein, 7 aa, synthetic construct
WQSHNHV

SEQ ID NO: 106810 - protein, 7 aa, synthetic construct
KQIHMHD

SEQ ID NO: 106811 - protein, 7 aa, synthetic construct
LQTPSYV

SEQ ID NO: 106812 - protein, 7 aa, synthetic construct
VEAHHVL

SEQ ID NO: 106813 - protein, 7 aa, synthetic construct
GRLDLKP

SEQ ID NO: 106814 - protein, 7 aa, synthetic construct
FRTTTQS

SEQ ID NO: 106815 - protein, 7 aa, synthetic construct
DPPGSFP

SEQ ID NO: 106816 - protein, 7 aa, synthetic construct
PWADIGA

SEQ ID NO: 106817 - protein, 7 aa, synthetic construct
TGLSENS

SEQ ID NO: 106818 - protein, 7 aa, synthetic construct
VARFDVG

SEQ ID NO: 106819 - protein, 7 aa, synthetic construct
HFVQGMP

SEQ ID NO: 106820 - protein, 7 aa, synthetic construct
ALQKQMY

SEQ ID NO: 106821 - protein, 7 aa, synthetic construct
PAKEMPS

SEQ ID NO: 106822 - protein, 7 aa, synthetic construct
WHVEGVA

SEQ ID NO: 106823 - protein, 7 aa, synthetic construct
SMDGTYL

SEQ ID NO: 106824 - protein, 7 aa, synthetic construct
TKYKEDL

SEQ ID NO: 106825 - protein, 7 aa, synthetic construct
TFPDRTK

SEQ ID NO: 106826 - protein, 7 aa, synthetic construct
ETNKLNL

SEQ ID NO: 106827 - protein, 7 aa, synthetic construct
YRIVKDD

SEQ ID NO: 106828 - protein, 7 aa, synthetic construct
HMAHIEM

SEQ ID NO: 106829 - protein, 7 aa, synthetic construct
NENDRKC

SEQ ID NO: 106830 - protein, 7 aa, synthetic construct
NRETEFK

SEQ ID NO: 106831 - protein, 7 aa, synthetic construct
INGMQQT

SEQ ID NO: 106832 - protein, 7 aa, synthetic construct
VVLRDIG

SEQ ID NO: 106833 - protein, 7 aa, synthetic construct
KYLDKYG

SEQ ID NO: 106834 - protein, 7 aa, synthetic construct
LFNSTSN

SEQ ID NO: 106835 - protein, 7 aa, synthetic construct
DYVKSMK

SEQ ID NO: 106836 - protein, 7 aa, synthetic construct
DFQQVEK

SEQ ID NO: 106837 - protein, 7 aa, synthetic construct
EDARWHS

SEQ ID NO: 106838 - protein, 7 aa, synthetic construct
VKSMTNY

SEQ ID NO: 106839 - protein, 7 aa, synthetic construct
GKQDRPP

SEQ ID NO: 106840 - protein, 7 aa, synthetic construct
WSPSDPH

SEQ ID NO: 106841 - protein, 7 aa, synthetic construct
VLPGGQL

SEQ ID NO: 106842 - protein, 7 aa, synthetic construct
HLGFPHD

SEQ ID NO: 106843 - protein, 7 aa, synthetic construct
SMNHATR

SEQ ID NO: 106844 - protein, 7 aa, synthetic construct
HSMQAAM

SEQ ID NO: 106845 - protein, 7 aa, synthetic construct
MMYHKLD

SEQ ID NO: 106846 - protein, 7 aa, synthetic construct
HRQMPIA

SEQ ID NO: 106847 - protein, 7 aa, synthetic construct
LGILPSH

SEQ ID NO: 106848 - protein, 7 aa, synthetic construct
NPHLRHE

SEQ ID NO: 106849 - protein, 7 aa, synthetic construct
MAGNNER

SEQ ID NO: 106850 - protein, 7 aa, synthetic construct
MLQNNNK

SEQ ID NO: 106851 - protein, 7 aa, synthetic construct
DQHGAPV

SEQ ID NO: 106852 - protein, 7 aa, synthetic construct
WGHLRVD

SEQ ID NO: 106853 - protein, 7 aa, synthetic construct
TFGKGEV

SEQ ID NO: 106854 - protein, 7 aa, synthetic construct
NMFGIAG

SEQ ID NO: 106855 - protein, 7 aa, synthetic construct
KVQQVMT

SEQ ID NO: 106856 - protein, 7 aa, synthetic construct
TTKNQGA

SEQ ID NO: 106857 - protein, 7 aa, synthetic construct
GRALPYS

SEQ ID NO: 106858 - protein, 7 aa, synthetic construct
YQDKNDG

SEQ ID NO: 106859 - protein, 7 aa, synthetic construct
YHKMRDA

SEQ ID NO: 106860 - protein, 7 aa, synthetic construct
YSNTYGA

SEQ ID NO: 106861 - protein, 7 aa, synthetic construct
QNLKQGP

SEQ ID NO: 106862 - protein, 7 aa, synthetic construct
SKSAILY

SEQ ID NO: 106863 - protein, 7 aa, synthetic construct
WRSDMGK

SEQ ID NO: 106864 - protein, 7 aa, synthetic construct
TNGTTMR

SEQ ID NO: 106865 - protein, 7 aa, synthetic construct
ERGHSQV

SEQ ID NO: 106866 - protein, 7 aa, synthetic construct
NTYHKIQ

SEQ ID NO: 106867 - protein, 7 aa, synthetic construct
NNWANTG

SEQ ID NO: 106868 - protein, 7 aa, synthetic construct
GAIGQMS

SEQ ID NO: 106869 - protein, 7 aa, synthetic construct
KNGVHKD

SEQ ID NO: 106870 - protein, 7 aa, synthetic construct
SKLEKQH

SEQ ID NO: 106871 - protein, 7 aa, synthetic construct
NPHKTLV

SEQ ID NO: 106872 - protein, 7 aa, synthetic construct
MADQGQR

SEQ ID NO: 106873 - protein, 7 aa, synthetic construct
QVEKKQS

SEQ ID NO: 106874 - protein, 7 aa, synthetic construct
IRESYEP

SEQ ID NO: 106875 - protein, 7 aa, synthetic construct
DHFTSMV

SEQ ID NO: 106876 - protein, 7 aa, synthetic construct
VVHKIPH

SEQ ID NO: 106877 - protein, 7 aa, synthetic construct
FDFKEIG

SEQ ID NO: 106878 - protein, 7 aa, synthetic construct
VKSVALI

SEQ ID NO: 106879 - protein, 7 aa, synthetic construct
LQTNVEK

SEQ ID NO: 106880 - protein, 7 aa, synthetic construct
EVKLEYS

SEQ ID NO: 106881 - protein, 7 aa, synthetic construct
ISRVYAG

SEQ ID NO: 106882 - protein, 7 aa, synthetic construct
NKREPLW

SEQ ID NO: 106883 - protein, 7 aa, synthetic construct
YDNQQMR

SEQ ID NO: 106884 - protein, 7 aa, synthetic construct
HQTGQYF

SEQ ID NO: 106885 - protein, 7 aa, synthetic construct
RAVVDHR

SEQ ID NO: 106886 - protein, 7 aa, synthetic construct
DQNQTAS

SEQ ID NO: 106887 - protein, 7 aa, synthetic construct
NQYAPHN

SEQ ID NO: 106888 - protein, 7 aa, synthetic construct
MVNIPRQ

SEQ ID NO: 106889 - protein, 7 aa, synthetic construct
FVHRREP

SEQ ID NO: 106890 - protein, 7 aa, synthetic construct
DAKGNKD

SEQ ID NO: 106891 - protein, 7 aa, synthetic construct
WDPAPNA

SEQ ID NO: 106892 - protein, 7 aa, synthetic construct
LNSDVRT

SEQ ID NO: 106893 - protein, 7 aa, synthetic construct
THHDNSG

SEQ ID NO: 106894 - protein, 7 aa, synthetic construct
VPQQIGV

SEQ ID NO: 106895 - protein, 7 aa, synthetic construct
KSPTMTA

SEQ ID NO: 106896 - protein, 7 aa, synthetic construct
AEFKFVE

SEQ ID NO: 106897 - protein, 7 aa, synthetic construct
PVANLSD

SEQ ID NO: 106898 - protein, 7 aa, synthetic construct
SLKESQP

SEQ ID NO: 106899 - protein, 7 aa, synthetic construct
PGNYENA

SEQ ID NO: 106900 - protein, 7 aa, synthetic construct
GRIEPFM

SEQ ID NO: 106901 - protein, 7 aa, synthetic construct
ERLDSIL

SEQ ID NO: 106902 - protein, 7 aa, synthetic construct
TWNDRAP

SEQ ID NO: 106903 - protein, 7 aa, synthetic construct
VPLRPVV

SEQ ID NO: 106904 - protein, 7 aa, synthetic construct
TMGPSEY

SEQ ID NO: 106905 - protein, 7 aa, synthetic construct
HEMPTKG

SEQ ID NO: 106906 - protein, 7 aa, synthetic construct
LQKPQNP

SEQ ID NO: 106907 - protein, 7 aa, synthetic construct
VNQNHSQ

SEQ ID NO: 106908 - protein, 7 aa, synthetic construct
QETKGPI

SEQ ID NO: 106909 - protein, 7 aa, synthetic construct
DNDGKLG

SEQ ID NO: 106910 - protein, 7 aa, synthetic construct
KKDTLRS

SEQ ID NO: 106911 - protein, 7 aa, synthetic construct
YPGYVVT

SEQ ID NO: 106912 - protein, 7 aa, synthetic construct
VLHGAHQ

SEQ ID NO: 106913 - protein, 7 aa, synthetic construct
TTMGARI

SEQ ID NO: 106914 - protein, 7 aa, synthetic construct
CKSTAKC

SEQ ID NO: 106915 - protein, 7 aa, synthetic construct
LENTVYK

SEQ ID NO: 106916 - protein, 7 aa, synthetic construct
GMHQMVE

SEQ ID NO: 106917 - protein, 7 aa, synthetic construct
SMRHHAP

SEQ ID NO: 106918 - protein, 7 aa, synthetic construct
AGFAVVE

SEQ ID NO: 106919 - protein, 7 aa, synthetic construct
QQTESRL

SEQ ID NO: 106920 - protein, 7 aa, synthetic construct
KAYRADS

SEQ ID NO: 106921 - protein, 7 aa, synthetic construct
HKMKQEQ

SEQ ID NO: 106922 - protein, 7 aa, synthetic construct
ASHTEIS

SEQ ID NO: 106923 - protein, 7 aa, synthetic construct
PGRSETR

SEQ ID NO: 106924 - protein, 7 aa, synthetic construct
RPSDHPI

SEQ ID NO: 106925 - protein, 7 aa, synthetic construct
RKTLAQE

SEQ ID NO: 106926 - protein, 7 aa, synthetic construct
SGHNQSE

SEQ ID NO: 106927 - protein, 7 aa, synthetic construct
MVANRAF

SEQ ID NO: 106928 - protein, 7 aa, synthetic construct
AEHVSHS

SEQ ID NO: 106929 - protein, 7 aa, synthetic construct
NERDVLF

SEQ ID NO: 106930 - protein, 7 aa, synthetic construct
TYKTHSY

SEQ ID NO: 106931 - protein, 7 aa, synthetic construct
AHDQVRV

SEQ ID NO: 106932 - protein, 7 aa, synthetic construct
KAEPWEG

SEQ ID NO: 106933 - protein, 7 aa, synthetic construct
RGDYDPA

SEQ ID NO: 106934 - protein, 7 aa, synthetic construct
NQHRQAL

SEQ ID NO: 106935 - protein, 7 aa, synthetic construct
HHTGMNA

SEQ ID NO: 106936 - protein, 7 aa, synthetic construct
GPHKFHT

SEQ ID NO: 106937 - protein, 7 aa, synthetic construct
GMQATSQ

SEQ ID NO: 106938 - protein, 7 aa, synthetic construct
EMKRNIP

SEQ ID NO: 106939 - protein, 7 aa, synthetic construct
QHSTEYM

SEQ ID NO: 106940 - protein, 7 aa, synthetic construct
DVGTAKK

SEQ ID NO: 106941 - protein, 7 aa, synthetic construct
TSLGLMD

SEQ ID NO: 106942 - protein, 7 aa, synthetic construct
ADFGARF

SEQ ID NO: 106943 - protein, 7 aa, synthetic construct
GKLGHEV

SEQ ID NO: 106944 - protein, 7 aa, synthetic construct
KQAFYGE

SEQ ID NO: 106945 - protein, 7 aa, synthetic construct
QMQDKAL

SEQ ID NO: 106946 - protein, 7 aa, synthetic construct
EAGKSQG

SEQ ID NO: 106947 - protein, 7 aa, synthetic construct
NPIQPDG

SEQ ID NO: 106948 - protein, 7 aa, synthetic construct
HKPLPPL

SEQ ID NO: 106949 - protein, 7 aa, synthetic construct
HKAVAAP

SEQ ID NO: 106950 - protein, 7 aa, synthetic construct
TAQPKVP

SEQ ID NO: 106951 - protein, 7 aa, synthetic construct
AINHQGN

SEQ ID NO: 106952 - protein, 7 aa, synthetic construct
HGDTHKT

SEQ ID NO: 106953 - protein, 7 aa, synthetic construct
FTYDKSD

SEQ ID NO: 106954 - protein, 7 aa, synthetic construct
LSEGKYY

SEQ ID NO: 106955 - protein, 7 aa, synthetic construct
YSLGINK

SEQ ID NO: 106956 - protein, 7 aa, synthetic construct
IMKDRNE

SEQ ID NO: 106957 - protein, 7 aa, synthetic construct
NSQMGKP

SEQ ID NO: 106958 - protein, 7 aa, synthetic construct
RTELIHN

SEQ ID NO: 106959 - protein, 7 aa, synthetic construct
HNSIGGE

SEQ ID NO: 106960 - protein, 7 aa, synthetic construct
NDQTRVP

SEQ ID NO: 106961 - protein, 7 aa, synthetic construct
FKSATMD

SEQ ID NO: 106962 - protein, 7 aa, synthetic construct
KVQDVFG

SEQ ID NO: 106963 - protein, 7 aa, synthetic construct
QNTYTKS

SEQ ID NO: 106964 - protein, 7 aa, synthetic construct
YLKNNYH

SEQ ID NO: 106965 - protein, 7 aa, synthetic construct
IEQKHQT

SEQ ID NO: 106966 - protein, 7 aa, synthetic construct
QQREWEA

SEQ ID NO: 106967 - protein, 7 aa, synthetic construct
ITHSKVH

SEQ ID NO: 106968 - protein, 7 aa, synthetic construct
IHIGTTD

SEQ ID NO: 106969 - protein, 7 aa, synthetic construct
IFISNSD

SEQ ID NO: 106970 - protein, 7 aa, synthetic construct
KAKLDAW

SEQ ID NO: 106971 - protein, 7 aa, synthetic construct
EKHQPFP

SEQ ID NO: 106972 - protein, 7 aa, synthetic construct
LKDGRVE

SEQ ID NO: 106973 - protein, 7 aa, synthetic construct
LDNAHNI

SEQ ID NO: 106974 - protein, 7 aa, synthetic construct
HLDHLKL

SEQ ID NO: 106975 - protein, 7 aa, synthetic construct
VKTNNVH

SEQ ID NO: 106976 - protein, 7 aa, synthetic construct
KREGTFM

SEQ ID NO: 106977 - protein, 7 aa, synthetic construct
WHTQMHP

SEQ ID NO: 106978 - protein, 7 aa, synthetic construct
GYPPVPT

SEQ ID NO: 106979 - protein, 7 aa, synthetic construct
PYTQEAH

SEQ ID NO: 106980 - protein, 7 aa, synthetic construct
VDQISRM

SEQ ID NO: 106981 - protein, 7 aa, synthetic construct
DPKFTYS

SEQ ID NO: 106982 - protein, 7 aa, synthetic construct
CKEMKMA

SEQ ID NO: 106983 - protein, 7 aa, synthetic construct
NSHHVKS

SEQ ID NO: 106984 - protein, 7 aa, synthetic construct
CKLSCVD

SEQ ID NO: 106985 - protein, 7 aa, synthetic construct
TTFMQQV

SEQ ID NO: 106986 - protein, 7 aa, synthetic construct
WLQGSDH

SEQ ID NO: 106987 - protein, 7 aa, synthetic construct
GPVGHEK

SEQ ID NO: 106988 - protein, 7 aa, synthetic construct
TMIQSSE

SEQ ID NO: 106989 - protein, 7 aa, synthetic construct
VPPTDGR

SEQ ID NO: 106990 - protein, 7 aa, synthetic construct
KQLNGDS

SEQ ID NO: 106991 - protein, 7 aa, synthetic construct
FDNKGLF

SEQ ID NO: 106992 - protein, 7 aa, synthetic construct
GWISSNE

SEQ ID NO: 106993 - protein, 7 aa, synthetic construct
VTQVEES

SEQ ID NO: 106994 - protein, 7 aa, synthetic construct
KPANSMQ

SEQ ID NO: 106995 - protein, 7 aa, synthetic construct
VNLNDMK

SEQ ID NO: 106996 - protein, 7 aa, synthetic construct
HESRQDK

SEQ ID NO: 106997 - protein, 7 aa, synthetic construct
DGYVAID

SEQ ID NO: 106998 - protein, 7 aa, synthetic construct
PIQHGRE

SEQ ID NO: 106999 - protein, 7 aa, synthetic construct
GLTIPIS

SEQ ID NO: 107000 - protein, 7 aa, synthetic construct
FTDQKPQ

SEQ ID NO: 107001 - protein, 7 aa, synthetic construct
QGDFVNM

SEQ ID NO: 107002 - protein, 7 aa, synthetic construct
VIQTMSM

SEQ ID NO: 107003 - protein, 7 aa, synthetic construct
LQEYHQH

SEQ ID NO: 107004 - protein, 7 aa, synthetic construct
KEHQDSD

SEQ ID NO: 107005 - protein, 7 aa, synthetic construct
KITLKVE

SEQ ID NO: 107006 - protein, 7 aa, synthetic construct
PYVGERK

SEQ ID NO: 107007 - protein, 7 aa, synthetic construct
TPGPLHK

SEQ ID NO: 107008 - protein, 7 aa, synthetic construct
IAHAWAE

SEQ ID NO: 107009 - protein, 7 aa, synthetic construct
KSMQAVG

SEQ ID NO: 107010 - protein, 7 aa, synthetic construct
GGNSQMH

SEQ ID NO: 107011 - protein, 7 aa, synthetic construct
DGSYNDR

SEQ ID NO: 107012 - protein, 7 aa, synthetic construct
IHANVEH

SEQ ID NO: 107013 - protein, 7 aa, synthetic construct
SAGAIAG

SEQ ID NO: 107014 - protein, 7 aa, synthetic construct
YLHEQGE

SEQ ID NO: 107015 - protein, 7 aa, synthetic construct
SGEYLHS

SEQ ID NO: 107016 - protein, 7 aa, synthetic construct
GMQMPNS

SEQ ID NO: 107017 - protein, 7 aa, synthetic construct
GLQRNTH

SEQ ID NO: 107018 - protein, 7 aa, synthetic construct
AVATHEV

SEQ ID NO: 107019 - protein, 7 aa, synthetic construct
PQHESRP

SEQ ID NO: 107020 - protein, 7 aa, synthetic construct
GVRLSED

SEQ ID NO: 107021 - protein, 7 aa, synthetic construct
DSESKYW

SEQ ID NO: 107022 - protein, 7 aa, synthetic construct
PDAKKYQ

SEQ ID NO: 107023 - protein, 7 aa, synthetic construct
WSGHLIA

SEQ ID NO: 107024 - protein, 7 aa, synthetic construct
KYADKMS

SEQ ID NO: 107025 - protein, 7 aa, synthetic construct
QSQINYV

SEQ ID NO: 107026 - protein, 7 aa, synthetic construct
QDTGYKK

SEQ ID NO: 107027 - protein, 7 aa, synthetic construct
KSPQTGA

SEQ ID NO: 107028 - protein, 7 aa, synthetic construct
TYNQKNA

SEQ ID NO: 107029 - protein, 7 aa, synthetic construct
KMQVWED

SEQ ID NO: 107030 - protein, 7 aa, synthetic construct
DKMPMSE

SEQ ID NO: 107031 - protein, 7 aa, synthetic construct
QSSLNSS

SEQ ID NO: 107032 - protein, 7 aa, synthetic construct
DRGKNES

SEQ ID NO: 107033 - protein, 7 aa, synthetic construct
FANTKLH

SEQ ID NO: 107034 - protein, 7 aa, synthetic construct
VTHYHHE

SEQ ID NO: 107035 - protein, 7 aa, synthetic construct
DITPVRY

SEQ ID NO: 107036 - protein, 7 aa, synthetic construct
ISERTYM

SEQ ID NO: 107037 - protein, 7 aa, synthetic construct
MIGLGAN

SEQ ID NO: 107038 - protein, 7 aa, synthetic construct
TAYQDRD

SEQ ID NO: 107039 - protein, 7 aa, synthetic construct
VHMIGVD

SEQ ID NO: 107040 - protein, 7 aa, synthetic construct
ETHSSAD

SEQ ID NO: 107041 - protein, 7 aa, synthetic construct
QMHALEK

SEQ ID NO: 107042 - protein, 7 aa, synthetic construct
LGNVSSD

SEQ ID NO: 107043 - protein, 7 aa, synthetic construct
LNEKHQL

SEQ ID NO: 107044 - protein, 7 aa, synthetic construct
GTHMMLK

SEQ ID NO: 107045 - protein, 7 aa, synthetic construct
YCNDGVC

SEQ ID NO: 107046 - protein, 7 aa, synthetic construct
RDGHMSK

SEQ ID NO: 107047 - protein, 7 aa, synthetic construct
ATERRTP

SEQ ID NO: 107048 - protein, 7 aa, synthetic construct
SPIDQGM

SEQ ID NO: 107049 - protein, 7 aa, synthetic construct
NSSYHAA

SEQ ID NO: 107050 - protein, 7 aa, synthetic construct
MADIFPP

SEQ ID NO: 107051 - protein, 7 aa, synthetic construct
QLAPIQD

SEQ ID NO: 107052 - protein, 7 aa, synthetic construct
GDHFAVM

SEQ ID NO: 107053 - protein, 7 aa, synthetic construct
KMVYPKD

SEQ ID NO: 107054 - protein, 7 aa, synthetic construct
APVNSQE

SEQ ID NO: 107055 - protein, 7 aa, synthetic construct
TMARFPQ

SEQ ID NO: 107056 - protein, 7 aa, synthetic construct
YRQHIQI

SEQ ID NO: 107057 - protein, 7 aa, synthetic construct
SQTGKSG

SEQ ID NO: 107058 - protein, 7 aa, synthetic construct
MLMKPNQ

SEQ ID NO: 107059 - protein, 7 aa, synthetic construct
NTSNAFS

SEQ ID NO: 107060 - protein, 7 aa, synthetic construct
MKMKSPP

SEQ ID NO: 107061 - protein, 7 aa, synthetic construct
ASHADPL

SEQ ID NO: 107062 - protein, 7 aa, synthetic construct
TAVVTNI

SEQ ID NO: 107063 - protein, 7 aa, synthetic construct
ANDRSHD

SEQ ID NO: 107064 - protein, 7 aa, synthetic construct
LDGHSRE

SEQ ID NO: 107065 - protein, 7 aa, synthetic construct
VLNNLRH

SEQ ID NO: 107066 - protein, 7 aa, synthetic construct
PPMVRVG

SEQ ID NO: 107067 - protein, 7 aa, synthetic construct
YHSLQEV

SEQ ID NO: 107068 - protein, 7 aa, synthetic construct
TQDPAKM

SEQ ID NO: 107069 - protein, 7 aa, synthetic construct
HKDSLHR

SEQ ID NO: 107070 - protein, 7 aa, synthetic construct
ALVTNPR

SEQ ID NO: 107071 - protein, 7 aa, synthetic construct
HRKDTEE

SEQ ID NO: 107072 - protein, 7 aa, synthetic construct
MWVKEKD

SEQ ID NO: 107073 - protein, 7 aa, synthetic construct
HPAGEMK

SEQ ID NO: 107074 - protein, 7 aa, synthetic construct
NKTAQRE

SEQ ID NO: 107075 - protein, 7 aa, synthetic construct
GGKAENT

SEQ ID NO: 107076 - protein, 7 aa, synthetic construct
GRMLSGS

SEQ ID NO: 107077 - protein, 7 aa, synthetic construct
AIGHRVI

SEQ ID NO: 107078 - protein, 7 aa, synthetic construct
WTKMEIN

SEQ ID NO: 107079 - protein, 7 aa, synthetic construct
PLDRSQK

SEQ ID NO: 107080 - protein, 7 aa, synthetic construct
VKTHAFT

SEQ ID NO: 107081 - protein, 7 aa, synthetic construct
QPSRDVK

SEQ ID NO: 107082 - protein, 7 aa, synthetic construct
GQDLQAR

SEQ ID NO: 107083 - protein, 7 aa, synthetic construct
HWGGAID

SEQ ID NO: 107084 - protein, 7 aa, synthetic construct
PHRDIKY

SEQ ID NO: 107085 - protein, 7 aa, synthetic construct
VRMSNSH

SEQ ID NO: 107086 - protein, 7 aa, synthetic construct
LYNRDDP

SEQ ID NO: 107087 - protein, 7 aa, synthetic construct
NVGERYR

SEQ ID NO: 107088 - protein, 7 aa, synthetic construct
QDKTNGE

SEQ ID NO: 107089 - protein, 7 aa, synthetic construct
NVAEMSL

SEQ ID NO: 107090 - protein, 7 aa, synthetic construct
KTASQVG

SEQ ID NO: 107091 - protein, 7 aa, synthetic construct
HAFPVHG

SEQ ID NO: 107092 - protein, 7 aa, synthetic construct
PVGPIVP

SEQ ID NO: 107093 - protein, 7 aa, synthetic construct
RDPELAE

SEQ ID NO: 107094 - protein, 7 aa, synthetic construct
KGGHVDA

SEQ ID NO: 107095 - protein, 7 aa, synthetic construct
GYRDKMN

SEQ ID NO: 107096 - protein, 7 aa, synthetic construct
AQEGGKN

SEQ ID NO: 107097 - protein, 7 aa, synthetic construct
QSVHGII

SEQ ID NO: 107098 - protein, 7 aa, synthetic construct
TDHGGYF

SEQ ID NO: 107099 - protein, 7 aa, synthetic construct
EPYMRVP

SEQ ID NO: 107100 - protein, 7 aa, synthetic construct
EYLAEHP

SEQ ID NO: 107101 - protein, 7 aa, synthetic construct
PKNTQVP

SEQ ID NO: 107102 - protein, 7 aa, synthetic construct
FGTQDAV

SEQ ID NO: 107103 - protein, 7 aa, synthetic construct
TSSDPHS

SEQ ID NO: 107104 - protein, 7 aa, synthetic construct
THHLVDD

SEQ ID NO: 107105 - protein, 7 aa, synthetic construct
IDTLRHM

SEQ ID NO: 107106 - protein, 7 aa, synthetic construct
GPNAPPY

SEQ ID NO: 107107 - protein, 7 aa, synthetic construct
VQNRLED

SEQ ID NO: 107108 - protein, 7 aa, synthetic construct
EPQARKN

SEQ ID NO: 107109 - protein, 7 aa, synthetic construct
PEKPVKN

SEQ ID NO: 107110 - protein, 7 aa, synthetic construct
FSVSFNG

SEQ ID NO: 107111 - protein, 7 aa, synthetic construct
DLHATAS

SEQ ID NO: 107112 - protein, 7 aa, synthetic construct
DKLAAYL

SEQ ID NO: 107113 - protein, 7 aa, synthetic construct
TEFNPAN

SEQ ID NO: 107114 - protein, 7 aa, synthetic construct
LITEGRV

SEQ ID NO: 107115 - protein, 7 aa, synthetic construct
RDFSVEI

SEQ ID NO: 107116 - protein, 7 aa, synthetic construct
DGNPQHI

SEQ ID NO: 107117 - protein, 7 aa, synthetic construct
WAKNLIG

SEQ ID NO: 107118 - protein, 7 aa, synthetic construct
AHASMND

SEQ ID NO: 107119 - protein, 7 aa, synthetic construct
LKIGVSG

SEQ ID NO: 107120 - protein, 7 aa, synthetic construct
PSTTPIF

SEQ ID NO: 107121 - protein, 7 aa, synthetic construct
HSNANPT

SEQ ID NO: 107122 - protein, 7 aa, synthetic construct
VQRPIDM

SEQ ID NO: 107123 - protein, 7 aa, synthetic construct
GELRHET

SEQ ID NO: 107124 - protein, 7 aa, synthetic construct
KGHFVQV

SEQ ID NO: 107125 - protein, 7 aa, synthetic construct
FLVTHEH

SEQ ID NO: 107126 - protein, 7 aa, synthetic construct
DLKGHND

SEQ ID NO: 107127 - protein, 7 aa, synthetic construct
LPARHTI

SEQ ID NO: 107128 - protein, 7 aa, synthetic construct
HGYMTVS

SEQ ID NO: 107129 - protein, 7 aa, synthetic construct
LPHGHVL

SEQ ID NO: 107130 - protein, 7 aa, synthetic construct
DIRQVHT

SEQ ID NO: 107131 - protein, 7 aa, synthetic construct
GINRHDL

SEQ ID NO: 107132 - protein, 7 aa, synthetic construct
LKLQHQT

SEQ ID NO: 107133 - protein, 7 aa, synthetic construct
LKMSDPR

SEQ ID NO: 107134 - protein, 7 aa, synthetic construct
GVTTKWS

SEQ ID NO: 107135 - protein, 7 aa, synthetic construct
VKDQLRP

SEQ ID NO: 107136 - protein, 7 aa, synthetic construct
THMAHAL

SEQ ID NO: 107137 - protein, 7 aa, synthetic construct
KGESAHM

SEQ ID NO: 107138 - protein, 7 aa, synthetic construct
LMGERNK

SEQ ID NO: 107139 - protein, 7 aa, synthetic construct
GQAVDTR

SEQ ID NO: 107140 - protein, 7 aa, synthetic construct
LIAKTNA

SEQ ID NO: 107141 - protein, 7 aa, synthetic construct
GPTGMTE

SEQ ID NO: 107142 - protein, 7 aa, synthetic construct
PTHRTIM

SEQ ID NO: 107143 - protein, 7 aa, synthetic construct
AYIAPDS

SEQ ID NO: 107144 - protein, 7 aa, synthetic construct
GHAVIQH

SEQ ID NO: 107145 - protein, 7 aa, synthetic construct
LTTMSPP

SEQ ID NO: 107146 - protein, 7 aa, synthetic construct
QTDRVRN

SEQ ID NO: 107147 - protein, 7 aa, synthetic construct
ITYSTSV

SEQ ID NO: 107148 - protein, 7 aa, synthetic construct
QRMNDNV

SEQ ID NO: 107149 - protein, 7 aa, synthetic construct
WSSHQAI

SEQ ID NO: 107150 - protein, 7 aa, synthetic construct
DTRANYL

SEQ ID NO: 107151 - protein, 7 aa, synthetic construct
NQKNQDG

SEQ ID NO: 107152 - protein, 7 aa, synthetic construct
EHSKQQG

SEQ ID NO: 107153 - protein, 7 aa, synthetic construct
KASFNHV

SEQ ID NO: 107154 - protein, 7 aa, synthetic construct
TDFAHIR

SEQ ID NO: 107155 - protein, 7 aa, synthetic construct
HIASNME

SEQ ID NO: 107156 - protein, 7 aa, synthetic construct
PKNHKEN

SEQ ID NO: 107157 - protein, 7 aa, synthetic construct
FPTKVDF

SEQ ID NO: 107158 - protein, 7 aa, synthetic construct
KVDNLNF

SEQ ID NO: 107159 - protein, 7 aa, synthetic construct
QGTSQAE

SEQ ID NO: 107160 - protein, 7 aa, synthetic construct
LGFDDKN

SEQ ID NO: 107161 - protein, 7 aa, synthetic construct
IEPHVGG

SEQ ID NO: 107162 - protein, 7 aa, synthetic construct
SNISMQN

SEQ ID NO: 107163 - protein, 7 aa, synthetic construct
HPIPRNT

SEQ ID NO: 107164 - protein, 7 aa, synthetic construct
DMQKKQQ

SEQ ID NO: 107165 - protein, 7 aa, synthetic construct
WQNNLNH

SEQ ID NO: 107166 - protein, 7 aa, synthetic construct
LFSMTSG

SEQ ID NO: 107167 - protein, 7 aa, synthetic construct
ENQSNMA

SEQ ID NO: 107168 - protein, 7 aa, synthetic construct
SILDQRV

SEQ ID NO: 107169 - protein, 7 aa, synthetic construct
RPEWSSA

SEQ ID NO: 107170 - protein, 7 aa, synthetic construct
RYAPTAH

SEQ ID NO: 107171 - protein, 7 aa, synthetic construct
ANIKPFI

SEQ ID NO: 107172 - protein, 7 aa, synthetic construct
KETLRDE

SEQ ID NO: 107173 - protein, 7 aa, synthetic construct
YIDHHHK

SEQ ID NO: 107174 - protein, 7 aa, synthetic construct
KPKDGGL

SEQ ID NO: 107175 - protein, 7 aa, synthetic construct
DLNWPKG

SEQ ID NO: 107176 - protein, 7 aa, synthetic construct
YDLGKMS

SEQ ID NO: 107177 - protein, 7 aa, synthetic construct
SKFNLLP

SEQ ID NO: 107178 - protein, 7 aa, synthetic construct
ETRGIIF

SEQ ID NO: 107179 - protein, 7 aa, synthetic construct
VFNEKTR

SEQ ID NO: 107180 - protein, 7 aa, synthetic construct
IGFPKPE

SEQ ID NO: 107181 - protein, 7 aa, synthetic construct
LMENMRS

SEQ ID NO: 107182 - protein, 7 aa, synthetic construct
IDGHLLK

SEQ ID NO: 107183 - protein, 7 aa, synthetic construct
HRGGIQS

SEQ ID NO: 107184 - protein, 7 aa, synthetic construct
NFKSDQC

SEQ ID NO: 107185 - protein, 7 aa, synthetic construct
SISYNKY

SEQ ID NO: 107186 - protein, 7 aa, synthetic construct
VGNEAQA

SEQ ID NO: 107187 - protein, 7 aa, synthetic construct
HARVIST

SEQ ID NO: 107188 - protein, 7 aa, synthetic construct
PKNTAVS

SEQ ID NO: 107189 - protein, 7 aa, synthetic construct
TEVHPFK

SEQ ID NO: 107190 - protein, 7 aa, synthetic construct
GNIAKTN

SEQ ID NO: 107191 - protein, 7 aa, synthetic construct
YTDGAVS

SEQ ID NO: 107192 - protein, 7 aa, synthetic construct
WQEKANY

SEQ ID NO: 107193 - protein, 7 aa, synthetic construct
HHISDNR

SEQ ID NO: 107194 - protein, 7 aa, synthetic construct
KIELRAF

SEQ ID NO: 107195 - protein, 7 aa, synthetic construct
RPMISYE

SEQ ID NO: 107196 - protein, 7 aa, synthetic construct
GMGFEPV

SEQ ID NO: 107197 - protein, 7 aa, synthetic construct
DWKYGDG

SEQ ID NO: 107198 - protein, 7 aa, synthetic construct
PRDIIHS

SEQ ID NO: 107199 - protein, 7 aa, synthetic construct
PMTLENR

SEQ ID NO: 107200 - protein, 7 aa, synthetic construct
KKDVQSH

SEQ ID NO: 107201 - protein, 7 aa, synthetic construct
QNLSTYP

SEQ ID NO: 107202 - protein, 7 aa, synthetic construct
NSTHIND

SEQ ID NO: 107203 - protein, 7 aa, synthetic construct
FTNSHER

SEQ ID NO: 107204 - protein, 7 aa, synthetic construct
GPHHLVQ

SEQ ID NO: 107205 - protein, 7 aa, synthetic construct
PNTEKRM

SEQ ID NO: 107206 - protein, 7 aa, synthetic construct
RDHIQFS

SEQ ID NO: 107207 - protein, 7 aa, synthetic construct
MMIKMRE

SEQ ID NO: 107208 - protein, 7 aa, synthetic construct
STAVLSG

SEQ ID NO: 107209 - protein, 7 aa, synthetic construct
MNGIDKT

SEQ ID NO: 107210 - protein, 7 aa, synthetic construct
GYAGVNK

SEQ ID NO: 107211 - protein, 7 aa, synthetic construct
HPMVKHQ

SEQ ID NO: 107212 - protein, 7 aa, synthetic construct
PHNNGGT

SEQ ID NO: 107213 - protein, 7 aa, synthetic construct
KEKVMKD

SEQ ID NO: 107214 - protein, 7 aa, synthetic construct
ATGFNEA

SEQ ID NO: 107215 - protein, 7 aa, synthetic construct
NENTNQR

SEQ ID NO: 107216 - protein, 7 aa, synthetic construct
NEATRQV

SEQ ID NO: 107217 - protein, 7 aa, synthetic construct
AENKNMD

SEQ ID NO: 107218 - protein, 7 aa, synthetic construct
PRSQGVA

SEQ ID NO: 107219 - protein, 7 aa, synthetic construct
THNFSVE

SEQ ID NO: 107220 - protein, 7 aa, synthetic construct
THNEGIG

SEQ ID NO: 107221 - protein, 7 aa, synthetic construct
SLLHDGR

SEQ ID NO: 107222 - protein, 7 aa, synthetic construct
GEKWEPP

SEQ ID NO: 107223 - protein, 7 aa, synthetic construct
PMPQNAG

SEQ ID NO: 107224 - protein, 7 aa, synthetic construct
FDRNAED

SEQ ID NO: 107225 - protein, 7 aa, synthetic construct
IVSRFVD

SEQ ID NO: 107226 - protein, 7 aa, synthetic construct
LRNHILA

SEQ ID NO: 107227 - protein, 7 aa, synthetic construct
QMKEIYG

SEQ ID NO: 107228 - protein, 7 aa, synthetic construct
KNFGEPR

SEQ ID NO: 107229 - protein, 7 aa, synthetic construct
KDPVFGK

SEQ ID NO: 107230 - protein, 7 aa, synthetic construct
LEEHYHS

SEQ ID NO: 107231 - protein, 7 aa, synthetic construct
IHGGQEY

SEQ ID NO: 107232 - protein, 7 aa, synthetic construct
FIKEAWS

SEQ ID NO: 107233 - protein, 7 aa, synthetic construct
LTMPVNE

SEQ ID NO: 107234 - protein, 7 aa, synthetic construct
VIPQSND

SEQ ID NO: 107235 - protein, 7 aa, synthetic construct
ITDRAEW

SEQ ID NO: 107236 - protein, 7 aa, synthetic construct
TLIDVNA

SEQ ID NO: 107237 - protein, 7 aa, synthetic construct
ADRYELR

SEQ ID NO: 107238 - protein, 7 aa, synthetic construct
PKKHMES

SEQ ID NO: 107239 - protein, 7 aa, synthetic construct
SYHQDRV

SEQ ID NO: 107240 - protein, 7 aa, synthetic construct
FIGVQTD

SEQ ID NO: 107241 - protein, 7 aa, synthetic construct
TPAYNNV

SEQ ID NO: 107242 - protein, 7 aa, synthetic construct
FGSQNYS

SEQ ID NO: 107243 - protein, 7 aa, synthetic construct
ADSNAPG

SEQ ID NO: 107244 - protein, 7 aa, synthetic construct
SSGAMPY

SEQ ID NO: 107245 - protein, 7 aa, synthetic construct
SIEIPRD

SEQ ID NO: 107246 - protein, 7 aa, synthetic construct
SAGHKWD

SEQ ID NO: 107247 - protein, 7 aa, synthetic construct
IVQAHPD

SEQ ID NO: 107248 - protein, 7 aa, synthetic construct
TRLINLP

SEQ ID NO: 107249 - protein, 7 aa, synthetic construct
IASRTVI

SEQ ID NO: 107250 - protein, 7 aa, synthetic construct
NSSATHG

SEQ ID NO: 107251 - protein, 7 aa, synthetic construct
KVHTHIP

SEQ ID NO: 107252 - protein, 7 aa, synthetic construct
ATPRNTT

SEQ ID NO: 107253 - protein, 7 aa, synthetic construct
GMKSQPG

SEQ ID NO: 107254 - protein, 7 aa, synthetic construct
FQTRPEV

SEQ ID NO: 107255 - protein, 7 aa, synthetic construct
PYDGLAG

SEQ ID NO: 107256 - protein, 7 aa, synthetic construct
WGTLTER

SEQ ID NO: 107257 - protein, 7 aa, synthetic construct
VETQQPR

SEQ ID NO: 107258 - protein, 7 aa, synthetic construct
IGPNHDH

SEQ ID NO: 107259 - protein, 7 aa, synthetic construct
NFPGTMH

SEQ ID NO: 107260 - protein, 7 aa, synthetic construct
HRVTTMI

SEQ ID NO: 107261 - protein, 7 aa, synthetic construct
PDHMHIR

SEQ ID NO: 107262 - protein, 7 aa, synthetic construct
SHLKLFD

SEQ ID NO: 107263 - protein, 7 aa, synthetic construct
NPPQQNW

SEQ ID NO: 107264 - protein, 7 aa, synthetic construct
TKSSPTG

SEQ ID NO: 107265 - protein, 7 aa, synthetic construct
NFNRMGA

SEQ ID NO: 107266 - protein, 7 aa, synthetic construct
LHGYTKM

SEQ ID NO: 107267 - protein, 7 aa, synthetic construct
MYQQPHK

SEQ ID NO: 107268 - protein, 7 aa, synthetic construct
TQEARNN

SEQ ID NO: 107269 - protein, 7 aa, synthetic construct
VWDHQDR

SEQ ID NO: 107270 - protein, 7 aa, synthetic construct
ETHSFKY

SEQ ID NO: 107271 - protein, 7 aa, synthetic construct
NGAAYQL

SEQ ID NO: 107272 - protein, 7 aa, synthetic construct
NPVVGFE

SEQ ID NO: 107273 - protein, 7 aa, synthetic construct
DREANAG

SEQ ID NO: 107274 - protein, 7 aa, synthetic construct
ELGTRAI

SEQ ID NO: 107275 - protein, 7 aa, synthetic construct
QRHGLMQ

SEQ ID NO: 107276 - protein, 7 aa, synthetic construct
VYQKEVL

SEQ ID NO: 107277 - protein, 7 aa, synthetic construct
MGPMLTD

SEQ ID NO: 107278 - protein, 7 aa, synthetic construct
RMQDYDH

SEQ ID NO: 107279 - protein, 7 aa, synthetic construct
RIHNGTT

SEQ ID NO: 107280 - protein, 7 aa, synthetic construct
DQVERQP

SEQ ID NO: 107281 - protein, 7 aa, synthetic construct
KMYMQEA

SEQ ID NO: 107282 - protein, 7 aa, synthetic construct
YHIQPNN

SEQ ID NO: 107283 - protein, 7 aa, synthetic construct
NNNIDSP

SEQ ID NO: 107284 - protein, 7 aa, synthetic construct
KMSEMGP

SEQ ID NO: 107285 - protein, 7 aa, synthetic construct
FKTTENS

SEQ ID NO: 107286 - protein, 7 aa, synthetic construct
SFRLQQG

SEQ ID NO: 107287 - protein, 7 aa, synthetic construct
ISAKDQI

SEQ ID NO: 107288 - protein, 7 aa, synthetic construct
FIPKGFE

SEQ ID NO: 107289 - protein, 7 aa, synthetic construct
QTSVKQH

SEQ ID NO: 107290 - protein, 7 aa, synthetic construct
WLETTGM

SEQ ID NO: 107291 - protein, 7 aa, synthetic construct
TAQNDVS

SEQ ID NO: 107292 - protein, 7 aa, synthetic construct
SAREAGV

SEQ ID NO: 107293 - protein, 7 aa, synthetic construct
VSPSNSY

SEQ ID NO: 107294 - protein, 7 aa, synthetic construct
QNPTEAT

SEQ ID NO: 107295 - protein, 7 aa, synthetic construct
IVDQSVA

SEQ ID NO: 107296 - protein, 7 aa, synthetic construct
MHASQMV

SEQ ID NO: 107297 - protein, 7 aa, synthetic construct
HKDHLQM

SEQ ID NO: 107298 - protein, 7 aa, synthetic construct
WRKHEMG

SEQ ID NO: 107299 - protein, 7 aa, synthetic construct
FNNNAHI

SEQ ID NO: 107300 - protein, 7 aa, synthetic construct
NLAHAMI

SEQ ID NO: 107301 - protein, 7 aa, synthetic construct
EFAHAAK

SEQ ID NO: 107302 - protein, 7 aa, synthetic construct
KMVETSQ

SEQ ID NO: 107303 - protein, 7 aa, synthetic construct
TDGTGIH

SEQ ID NO: 107304 - protein, 7 aa, synthetic construct
EMTAVSY

SEQ ID NO: 107305 - protein, 7 aa, synthetic construct
TINTFVG

SEQ ID NO: 107306 - protein, 7 aa, synthetic construct
IKPSIAL

SEQ ID NO: 107307 - protein, 7 aa, synthetic construct
WEVKHEN

SEQ ID NO: 107308 - protein, 7 aa, synthetic construct
NQPDNVQ

SEQ ID NO: 107309 - protein, 7 aa, synthetic construct
APKPAST

SEQ ID NO: 107310 - protein, 7 aa, synthetic construct
LVEPQQK

SEQ ID NO: 107311 - protein, 7 aa, synthetic construct
IPGPSEP

SEQ ID NO: 107312 - protein, 7 aa, synthetic construct
NQPFSNY

SEQ ID NO: 107313 - protein, 7 aa, synthetic construct
LKDGHWS

SEQ ID NO: 107314 - protein, 7 aa, synthetic construct
PEPQVRL

SEQ ID NO: 107315 - protein, 7 aa, synthetic construct
AARDWPK

SEQ ID NO: 107316 - protein, 7 aa, synthetic construct
SRVKEDI

SEQ ID NO: 107317 - protein, 7 aa, synthetic construct
GGMGPRH

SEQ ID NO: 107318 - protein, 7 aa, synthetic construct
LVHGDTP

SEQ ID NO: 107319 - protein, 7 aa, synthetic construct
YGPMPSE

SEQ ID NO: 107320 - protein, 7 aa, synthetic construct
MGTSHGF

SEQ ID NO: 107321 - protein, 7 aa, synthetic construct
RMTTVID

SEQ ID NO: 107322 - protein, 7 aa, synthetic construct
YNQMGHT

SEQ ID NO: 107323 - protein, 7 aa, synthetic construct
DWDNPKH

SEQ ID NO: 107324 - protein, 7 aa, synthetic construct
APKIDRY

SEQ ID NO: 107325 - protein, 7 aa, synthetic construct
NMHYTNP

SEQ ID NO: 107326 - protein, 7 aa, synthetic construct
KYQDNVP

SEQ ID NO: 107327 - protein, 7 aa, synthetic construct
RIKEESE

SEQ ID NO: 107328 - protein, 7 aa, synthetic construct
SRAPSGA

SEQ ID NO: 107329 - protein, 7 aa, synthetic construct
KNTSTPA

SEQ ID NO: 107330 - protein, 7 aa, synthetic construct
TFDMKNY

SEQ ID NO: 107331 - protein, 7 aa, synthetic construct
ATHATQD

SEQ ID NO: 107332 - protein, 7 aa, synthetic construct
GYGKDSR

SEQ ID NO: 107333 - protein, 7 aa, synthetic construct
WKMNEEQ

SEQ ID NO: 107334 - protein, 7 aa, synthetic construct
QPIQQMS

SEQ ID NO: 107335 - protein, 7 aa, synthetic construct
NFSTDGL

SEQ ID NO: 107336 - protein, 7 aa, synthetic construct
MPMGLKI

SEQ ID NO: 107337 - protein, 7 aa, synthetic construct
SGNKRET

SEQ ID NO: 107338 - protein, 7 aa, synthetic construct
MNPYFKG

SEQ ID NO: 107339 - protein, 7 aa, synthetic construct
SAQHIQT

SEQ ID NO: 107340 - protein, 7 aa, synthetic construct
TGDKTYP

SEQ ID NO: 107341 - protein, 7 aa, synthetic construct
SKIHQNY

SEQ ID NO: 107342 - protein, 7 aa, synthetic construct
KHVADAK

SEQ ID NO: 107343 - protein, 7 aa, synthetic construct
KDSHVDA

SEQ ID NO: 107344 - protein, 7 aa, synthetic construct
TFDTHVL

SEQ ID NO: 107345 - protein, 7 aa, synthetic construct
TVERAMM

SEQ ID NO: 107346 - protein, 7 aa, synthetic construct
LPVLVQD

SEQ ID NO: 107347 - protein, 7 aa, synthetic construct
GGNGTFY

SEQ ID NO: 107348 - protein, 7 aa, synthetic construct
KAETESH

SEQ ID NO: 107349 - protein, 7 aa, synthetic construct
RVNHHFE

SEQ ID NO: 107350 - protein, 7 aa, synthetic construct
LNQPPQG

SEQ ID NO: 107351 - protein, 7 aa, synthetic construct
IHSIADV

SEQ ID NO: 107352 - protein, 7 aa, synthetic construct
WAGGDGT

SEQ ID NO: 107353 - protein, 7 aa, synthetic construct
IESFLKS

SEQ ID NO: 107354 - protein, 7 aa, synthetic construct
PNNHTIL

SEQ ID NO: 107355 - protein, 7 aa, synthetic construct
IGHPMDV

SEQ ID NO: 107356 - protein, 7 aa, synthetic construct
MDKYPKH

SEQ ID NO: 107357 - protein, 7 aa, synthetic construct
PVKTSAS

SEQ ID NO: 107358 - protein, 7 aa, synthetic construct
PGMKMEE

SEQ ID NO: 107359 - protein, 7 aa, synthetic construct
FKASANS

SEQ ID NO: 107360 - protein, 7 aa, synthetic construct
VNQLQRH

SEQ ID NO: 107361 - protein, 7 aa, synthetic construct
QSNPHHW

SEQ ID NO: 107362 - protein, 7 aa, synthetic construct
KKDTVAS

SEQ ID NO: 107363 - protein, 7 aa, synthetic construct
ERLMTGS

SEQ ID NO: 107364 - protein, 7 aa, synthetic construct
IASVVTM

SEQ ID NO: 107365 - protein, 7 aa, synthetic construct
HVVGNHR

SEQ ID NO: 107366 - protein, 7 aa, synthetic construct
SELWKND

SEQ ID NO: 107367 - protein, 7 aa, synthetic construct
KVDSSSK

SEQ ID NO: 107368 - protein, 7 aa, synthetic construct
CSKREGG

SEQ ID NO: 107369 - protein, 7 aa, synthetic construct
QKEFPAV

SEQ ID NO: 107370 - protein, 7 aa, synthetic construct
HTTTFTS

SEQ ID NO: 107371 - protein, 7 aa, synthetic construct
YDQARSD

SEQ ID NO: 107372 - protein, 7 aa, synthetic construct
PTKAFLG

SEQ ID NO: 107373 - protein, 7 aa, synthetic construct
QHGEGAN

SEQ ID NO: 107374 - protein, 7 aa, synthetic construct
VQQKDVR

SEQ ID NO: 107375 - protein, 7 aa, synthetic construct
WNREHLA

SEQ ID NO: 107376 - protein, 7 aa, synthetic construct
NWNTVSS

SEQ ID NO: 107377 - protein, 7 aa, synthetic construct
VLVQSQL

SEQ ID NO: 107378 - protein, 7 aa, synthetic construct
PDRTFPH

SEQ ID NO: 107379 - protein, 7 aa, synthetic construct
LARNDGD

SEQ ID NO: 107380 - protein, 7 aa, synthetic construct
THSAANI

SEQ ID NO: 107381 - protein, 7 aa, synthetic construct
YKVGPLM

SEQ ID NO: 107382 - protein, 7 aa, synthetic construct
PVERQDM

SEQ ID NO: 107383 - protein, 7 aa, synthetic construct
PITHNPV

SEQ ID NO: 107384 - protein, 7 aa, synthetic construct
FGLPADK

SEQ ID NO: 107385 - protein, 7 aa, synthetic construct
GPKNMQA

SEQ ID NO: 107386 - protein, 7 aa, synthetic construct
EYKVGAK

SEQ ID NO: 107387 - protein, 7 aa, synthetic construct
RMHVNER

SEQ ID NO: 107388 - protein, 7 aa, synthetic construct
SMVDPAP

SEQ ID NO: 107389 - protein, 7 aa, synthetic construct
TTFNVGT

SEQ ID NO: 107390 - protein, 7 aa, synthetic construct
DIINHKE

SEQ ID NO: 107391 - protein, 7 aa, synthetic construct
GHVENLY

SEQ ID NO: 107392 - protein, 7 aa, synthetic construct
WGPKMAQ

SEQ ID NO: 107393 - protein, 7 aa, synthetic construct
LEPKPPE

SEQ ID NO: 107394 - protein, 7 aa, synthetic construct
HQPHMIP

SEQ ID NO: 107395 - protein, 7 aa, synthetic construct
NDTHSTV

SEQ ID NO: 107396 - protein, 7 aa, synthetic construct
GAQVDFS

SEQ ID NO: 107397 - protein, 7 aa, synthetic construct
TGVDGQR

SEQ ID NO: 107398 - protein, 7 aa, synthetic construct
WTSSNDR

SEQ ID NO: 107399 - protein, 7 aa, synthetic construct
PSKQSNP

SEQ ID NO: 107400 - protein, 7 aa, synthetic construct
QLSDMEV

SEQ ID NO: 107401 - protein, 7 aa, synthetic construct
SKEEAKQ

SEQ ID NO: 107402 - protein, 7 aa, synthetic construct
WLRDIEG

SEQ ID NO: 107403 - protein, 7 aa, synthetic construct
FSHDAEY

SEQ ID NO: 107404 - protein, 7 aa, synthetic construct
IDNAHMH

SEQ ID NO: 107405 - protein, 7 aa, synthetic construct
WPTASET

SEQ ID NO: 107406 - protein, 7 aa, synthetic construct
LGEKNFK

SEQ ID NO: 107407 - protein, 7 aa, synthetic construct
GKANQGH

SEQ ID NO: 107408 - protein, 7 aa, synthetic construct
SDMSPIS

SEQ ID NO: 107409 - protein, 7 aa, synthetic construct
MGSGTYV

SEQ ID NO: 107410 - protein, 7 aa, synthetic construct
MDGFQMM

SEQ ID NO: 107411 - protein, 7 aa, synthetic construct
VDHPGRQ

SEQ ID NO: 107412 - protein, 7 aa, synthetic construct
LGPMKVL

SEQ ID NO: 107413 - protein, 7 aa, synthetic construct
NHNKLHT

SEQ ID NO: 107414 - protein, 7 aa, synthetic construct
GGRIELT

SEQ ID NO: 107415 - protein, 7 aa, synthetic construct
CDPKKPG

SEQ ID NO: 107416 - protein, 7 aa, synthetic construct
HHNSTYY

SEQ ID NO: 107417 - protein, 7 aa, synthetic construct
DAGRYDA

SEQ ID NO: 107418 - protein, 7 aa, synthetic construct
QLQSQQW

SEQ ID NO: 107419 - protein, 7 aa, synthetic construct
QHRHNDP

SEQ ID NO: 107420 - protein, 7 aa, synthetic construct
YYREQKQ

SEQ ID NO: 107421 - protein, 7 aa, synthetic construct
KSDRHDD

SEQ ID NO: 107422 - protein, 7 aa, synthetic construct
NPHPEAG

SEQ ID NO: 107423 - protein, 7 aa, synthetic construct
ASHNSTY

SEQ ID NO: 107424 - protein, 7 aa, synthetic construct
VIHGNYE

SEQ ID NO: 107425 - protein, 7 aa, synthetic construct
VGQQIHR

SEQ ID NO: 107426 - protein, 7 aa, synthetic construct
GSPQDMP

SEQ ID NO: 107427 - protein, 7 aa, synthetic construct
MREMPPS

SEQ ID NO: 107428 - protein, 7 aa, synthetic construct
KQQAPTM

SEQ ID NO: 107429 - protein, 7 aa, synthetic construct
SGFTDKD

SEQ ID NO: 107430 - protein, 7 aa, synthetic construct
FVNIHDS

SEQ ID NO: 107431 - protein, 7 aa, synthetic construct
AQSSFHP

SEQ ID NO: 107432 - protein, 7 aa, synthetic construct
MDQKHDI

SEQ ID NO: 107433 - protein, 7 aa, synthetic construct
EQYTQRG

SEQ ID NO: 107434 - protein, 7 aa, synthetic construct
DIRSVHK

SEQ ID NO: 107435 - protein, 7 aa, synthetic construct
TESENFV

SEQ ID NO: 107436 - protein, 7 aa, synthetic construct
SKSSSNS

SEQ ID NO: 107437 - protein, 7 aa, synthetic construct
DHPQMGS

SEQ ID NO: 107438 - protein, 7 aa, synthetic construct
RGRPFEE

SEQ ID NO: 107439 - protein, 7 aa, synthetic construct
KETALVR

SEQ ID NO: 107440 - protein, 7 aa, synthetic construct
NEPRFYP

SEQ ID NO: 107441 - protein, 7 aa, synthetic construct
YNQLQTR

SEQ ID NO: 107442 - protein, 7 aa, synthetic construct
GAGEGRA

SEQ ID NO: 107443 - protein, 7 aa, synthetic construct
TAEPKRH

SEQ ID NO: 107444 - protein, 7 aa, synthetic construct
AVLNHHV

SEQ ID NO: 107445 - protein, 7 aa, synthetic construct
HMVAGAT

SEQ ID NO: 107446 - protein, 7 aa, synthetic construct
KTGDTSL

SEQ ID NO: 107447 - protein, 7 aa, synthetic construct
QSGFSKH

SEQ ID NO: 107448 - protein, 7 aa, synthetic construct
YVNHFPD

SEQ ID NO: 107449 - protein, 7 aa, synthetic construct
NGQRVEN

SEQ ID NO: 107450 - protein, 7 aa, synthetic construct
NTQAIVR

SEQ ID NO: 107451 - protein, 7 aa, synthetic construct
KMKADMS

SEQ ID NO: 107452 - protein, 7 aa, synthetic construct
IAAYPAQ

SEQ ID NO: 107453 - protein, 7 aa, synthetic construct
LHKDPVT

SEQ ID NO: 107454 - protein, 7 aa, synthetic construct
VTKSNTA

SEQ ID NO: 107455 - protein, 7 aa, synthetic construct
HINQYIG

SEQ ID NO: 107456 - protein, 7 aa, synthetic construct
SAAGKQW

SEQ ID NO: 107457 - protein, 7 aa, synthetic construct
PQDHRSP

SEQ ID NO: 107458 - protein, 7 aa, synthetic construct
MFQEHKH

SEQ ID NO: 107459 - protein, 7 aa, synthetic construct
GANIEGR

SEQ ID NO: 107460 - protein, 7 aa, synthetic construct
WAQNVPT

SEQ ID NO: 107461 - protein, 7 aa, synthetic construct
EERPKPK

SEQ ID NO: 107462 - protein, 7 aa, synthetic construct
SSQNVYS

SEQ ID NO: 107463 - protein, 7 aa, synthetic construct
DQHITLV

SEQ ID NO: 107464 - protein, 7 aa, synthetic construct
TVPSLHV

SEQ ID NO: 107465 - protein, 7 aa, synthetic construct
ELPMISA

SEQ ID NO: 107466 - protein, 7 aa, synthetic construct
IRDTTQG

SEQ ID NO: 107467 - protein, 7 aa, synthetic construct
TKEPAKT

SEQ ID NO: 107468 - protein, 7 aa, synthetic construct
IKPIGQG

SEQ ID NO: 107469 - protein, 7 aa, synthetic construct
KSKGQEP

SEQ ID NO: 107470 - protein, 7 aa, synthetic construct
HDKKADV

SEQ ID NO: 107471 - protein, 7 aa, synthetic construct
HFKEAGT

SEQ ID NO: 107472 - protein, 7 aa, synthetic construct
PSIHTNH

SEQ ID NO: 107473 - protein, 7 aa, synthetic construct
PYTGHPE

SEQ ID NO: 107474 - protein, 7 aa, synthetic construct
RTLHENK

SEQ ID NO: 107475 - protein, 7 aa, synthetic construct
GVTGSIG

SEQ ID NO: 107476 - protein, 7 aa, synthetic construct
LRYKTSE

SEQ ID NO: 107477 - protein, 7 aa, synthetic construct
RIGQVVQ

SEQ ID NO: 107478 - protein, 7 aa, synthetic construct
NAEVKRL

SEQ ID NO: 107479 - protein, 7 aa, synthetic construct
DKSQNIH

SEQ ID NO: 107480 - protein, 7 aa, synthetic construct
SEVMSQP

SEQ ID NO: 107481 - protein, 7 aa, synthetic construct
AFSEQFH

SEQ ID NO: 107482 - protein, 7 aa, synthetic construct
GVKMQAP

SEQ ID NO: 107483 - protein, 7 aa, synthetic construct
NLISSFA

SEQ ID NO: 107484 - protein, 7 aa, synthetic construct
ASQIAAE

SEQ ID NO: 107485 - protein, 7 aa, synthetic construct
TQSFVVG

SEQ ID NO: 107486 - protein, 7 aa, synthetic construct
EGLGLEV

SEQ ID NO: 107487 - protein, 7 aa, synthetic construct
IVKNILG

SEQ ID NO: 107488 - protein, 7 aa, synthetic construct
IDMRMIG

SEQ ID NO: 107489 - protein, 7 aa, synthetic construct
SIKEYEK

SEQ ID NO: 107490 - protein, 7 aa, synthetic construct
NFVVKAP

SEQ ID NO: 107491 - protein, 7 aa, synthetic construct
KYATVND

SEQ ID NO: 107492 - protein, 7 aa, synthetic construct
KLMLENR

SEQ ID NO: 107493 - protein, 7 aa, synthetic construct
SPPSDKN

SEQ ID NO: 107494 - protein, 7 aa, synthetic construct
IAKYSEI

SEQ ID NO: 107495 - protein, 7 aa, synthetic construct
HGSGVMP

SEQ ID NO: 107496 - protein, 7 aa, synthetic construct
YGSNNLK

SEQ ID NO: 107497 - protein, 7 aa, synthetic construct
IDNYHMR

SEQ ID NO: 107498 - protein, 7 aa, synthetic construct
RMTSTDI

SEQ ID NO: 107499 - protein, 7 aa, synthetic construct
TLGNWPP

SEQ ID NO: 107500 - protein, 7 aa, synthetic construct
LLPRMTM

SEQ ID NO: 107501 - protein, 7 aa, synthetic construct
NNKPMGA

SEQ ID NO: 107502 - protein, 7 aa, synthetic construct
NAHIANR

SEQ ID NO: 107503 - protein, 7 aa, synthetic construct
SGSTQTD

SEQ ID NO: 107504 - protein, 7 aa, synthetic construct
YINNETH

SEQ ID NO: 107505 - protein, 7 aa, synthetic construct
IKMTSGQ

SEQ ID NO: 107506 - protein, 7 aa, synthetic construct
GTSHEHT

SEQ ID NO: 107507 - protein, 7 aa, synthetic construct
KWPKTQD

SEQ ID NO: 107508 - protein, 7 aa, synthetic construct
DNAAWSK

SEQ ID NO: 107509 - protein, 7 aa, synthetic construct
NAEKGTL

SEQ ID NO: 107510 - protein, 7 aa, synthetic construct
AQSNRGP

SEQ ID NO: 107511 - protein, 7 aa, synthetic construct
SSGIHQT

SEQ ID NO: 107512 - protein, 7 aa, synthetic construct
ERYSIPA

SEQ ID NO: 107513 - protein, 7 aa, synthetic construct
SKVPEVE

SEQ ID NO: 107514 - protein, 7 aa, synthetic construct
GMVKNGQ

SEQ ID NO: 107515 - protein, 7 aa, synthetic construct
SLIKIDS

SEQ ID NO: 107516 - protein, 7 aa, synthetic construct
THTAFAH

SEQ ID NO: 107517 - protein, 7 aa, synthetic construct
FSIVDGK

SEQ ID NO: 107518 - protein, 7 aa, synthetic construct
VDYKESD

SEQ ID NO: 107519 - protein, 7 aa, synthetic construct
ASHELSA

SEQ ID NO: 107520 - protein, 7 aa, synthetic construct
HIRNQVY

SEQ ID NO: 107521 - protein, 7 aa, synthetic construct
DVPVGGR

SEQ ID NO: 107522 - protein, 7 aa, synthetic construct
TAGDADK

SEQ ID NO: 107523 - protein, 7 aa, synthetic construct
SKVLSQE

SEQ ID NO: 107524 - protein, 7 aa, synthetic construct
QDRQLID

SEQ ID NO: 107525 - protein, 7 aa, synthetic construct
TAQKPQM

SEQ ID NO: 107526 - protein, 7 aa, synthetic construct
NGTERMW

SEQ ID NO: 107527 - protein, 7 aa, synthetic construct
QHLEPHR

SEQ ID NO: 107528 - protein, 7 aa, synthetic construct
PDAVAKL

SEQ ID NO: 107529 - protein, 7 aa, synthetic construct
NNELNNK

SEQ ID NO: 107530 - protein, 7 aa, synthetic construct
PAINKQS

SEQ ID NO: 107531 - protein, 7 aa, synthetic construct
VKEVATF

SEQ ID NO: 107532 - protein, 7 aa, synthetic construct
DHKIIGF

SEQ ID NO: 107533 - protein, 7 aa, synthetic construct
PFMETKV

SEQ ID NO: 107534 - protein, 7 aa, synthetic construct
ETKTNQP

SEQ ID NO: 107535 - protein, 7 aa, synthetic construct
NKDYPYG

SEQ ID NO: 107536 - protein, 7 aa, synthetic construct
TFVSAEV

SEQ ID NO: 107537 - protein, 7 aa, synthetic construct
TEHRLPD

SEQ ID NO: 107538 - protein, 7 aa, synthetic construct
NMRDDLN

SEQ ID NO: 107539 - protein, 7 aa, synthetic construct
WLGLPEG

SEQ ID NO: 107540 - protein, 7 aa, synthetic construct
PIGAPQI

SEQ ID NO: 107541 - protein, 7 aa, synthetic construct
FPNPENQ

SEQ ID NO: 107542 - protein, 7 aa, synthetic construct
MKMSQMM

SEQ ID NO: 107543 - protein, 7 aa, synthetic construct
ESHRMPF

SEQ ID NO: 107544 - protein, 7 aa, synthetic construct
MTDRGQA

SEQ ID NO: 107545 - protein, 7 aa, synthetic construct
LGKHLMV

SEQ ID NO: 107546 - protein, 7 aa, synthetic construct
TVEHMHK

SEQ ID NO: 107547 - protein, 7 aa, synthetic construct
WIAGKDL

SEQ ID NO: 107548 - protein, 7 aa, synthetic construct
LETDMKR

SEQ ID NO: 107549 - protein, 7 aa, synthetic construct
HADQGLF

SEQ ID NO: 107550 - protein, 7 aa, synthetic construct
ATYNRTI

SEQ ID NO: 107551 - protein, 7 aa, synthetic construct
EPHMQIS

SEQ ID NO: 107552 - protein, 7 aa, synthetic construct
FAGDPSG

SEQ ID NO: 107553 - protein, 7 aa, synthetic construct
QRYDKSQ

SEQ ID NO: 107554 - protein, 7 aa, synthetic construct
DLYMTSP

SEQ ID NO: 107555 - protein, 7 aa, synthetic construct
AENINMR

SEQ ID NO: 107556 - protein, 7 aa, synthetic construct
KPGMTTI

SEQ ID NO: 107557 - protein, 7 aa, synthetic construct
TKPMTVS

SEQ ID NO: 107558 - protein, 7 aa, synthetic construct
LTERTHA

SEQ ID NO: 107559 - protein, 7 aa, synthetic construct
QVYVSQN

SEQ ID NO: 107560 - protein, 7 aa, synthetic construct
PVPEMSG

SEQ ID NO: 107561 - protein, 7 aa, synthetic construct
KTNHTVW

SEQ ID NO: 107562 - protein, 7 aa, synthetic construct
KFDRLDD

SEQ ID NO: 107563 - protein, 7 aa, synthetic construct
PIQGGSR

SEQ ID NO: 107564 - protein, 7 aa, synthetic construct
QWKMVEK

SEQ ID NO: 107565 - protein, 7 aa, synthetic construct
GTGKGQP

SEQ ID NO: 107566 - protein, 7 aa, synthetic construct
ARTDQHV

SEQ ID NO: 107567 - protein, 7 aa, synthetic construct
FREYTDA

SEQ ID NO: 107568 - protein, 7 aa, synthetic construct
FELVNEK

SEQ ID NO: 107569 - protein, 7 aa, synthetic construct
VDKQYAW

SEQ ID NO: 107570 - protein, 7 aa, synthetic construct
TPHASPN

SEQ ID NO: 107571 - protein, 7 aa, synthetic construct
RPTSPVT

SEQ ID NO: 107572 - protein, 7 aa, synthetic construct
WNRSQQL

SEQ ID NO: 107573 - protein, 7 aa, synthetic construct
EHNHIHE

SEQ ID NO: 107574 - protein, 7 aa, synthetic construct
LKPGTYA

SEQ ID NO: 107575 - protein, 7 aa, synthetic construct
PVGTFPI

SEQ ID NO: 107576 - protein, 7 aa, synthetic construct
KGSEVTY

SEQ ID NO: 107577 - protein, 7 aa, synthetic construct
WDKPARP

SEQ ID NO: 107578 - protein, 7 aa, synthetic construct
TDKQIRT

SEQ ID NO: 107579 - protein, 7 aa, synthetic construct
RKDNHMD

SEQ ID NO: 107580 - protein, 7 aa, synthetic construct
VNVTSVH

SEQ ID NO: 107581 - protein, 7 aa, synthetic construct
TDKVDIT

SEQ ID NO: 107582 - protein, 7 aa, synthetic construct
GMEFPRH

SEQ ID NO: 107583 - protein, 7 aa, synthetic construct
SPSQVYK

SEQ ID NO: 107584 - protein, 7 aa, synthetic construct
WLEGVKG

SEQ ID NO: 107585 - protein, 7 aa, synthetic construct
VLAHAKE

SEQ ID NO: 107586 - protein, 7 aa, synthetic construct
KGPQMMP

SEQ ID NO: 107587 - protein, 7 aa, synthetic construct
KEVHEPQ

SEQ ID NO: 107588 - protein, 7 aa, synthetic construct
WTAQIGM

SEQ ID NO: 107589 - protein, 7 aa, synthetic construct
LKREELK

SEQ ID NO: 107590 - protein, 7 aa, synthetic construct
ALPLLNQ

SEQ ID NO: 107591 - protein, 7 aa, synthetic construct
FQQKIYS

SEQ ID NO: 107592 - protein, 7 aa, synthetic construct
RAVDSPP

SEQ ID NO: 107593 - protein, 7 aa, synthetic construct
ASIPQDA

SEQ ID NO: 107594 - protein, 7 aa, synthetic construct
STYSQQT

SEQ ID NO: 107595 - protein, 7 aa, synthetic construct
GWKDPPE

SEQ ID NO: 107596 - protein, 7 aa, synthetic construct
IPMTTEH

SEQ ID NO: 107597 - protein, 7 aa, synthetic construct
SQASKFA

SEQ ID NO: 107598 - protein, 7 aa, synthetic construct
TQALQGV

SEQ ID NO: 107599 - protein, 7 aa, synthetic construct
PDNQLPM

SEQ ID NO: 107600 - protein, 7 aa, synthetic construct
KFTERHN

SEQ ID NO: 107601 - protein, 7 aa, synthetic construct
YAENKPY

SEQ ID NO: 107602 - protein, 7 aa, synthetic construct
EKNSQTI

SEQ ID NO: 107603 - protein, 7 aa, synthetic construct
INSWTDD

SEQ ID NO: 107604 - protein, 7 aa, synthetic construct
GRFKEPS

SEQ ID NO: 107605 - protein, 7 aa, synthetic construct
MEVMTTP

SEQ ID NO: 107606 - protein, 7 aa, synthetic construct
DANHVPS

SEQ ID NO: 107607 - protein, 7 aa, synthetic construct
RKDHNLE

SEQ ID NO: 107608 - protein, 7 aa, synthetic construct
EQSKGLS

SEQ ID NO: 107609 - protein, 7 aa, synthetic construct
GIGISFP

SEQ ID NO: 107610 - protein, 7 aa, synthetic construct
THMAPHG

SEQ ID NO: 107611 - protein, 7 aa, synthetic construct
GEKFSHN

SEQ ID NO: 107612 - protein, 7 aa, synthetic construct
AEQKPHQ

SEQ ID NO: 107613 - protein, 7 aa, synthetic construct
QNHGPEA

SEQ ID NO: 107614 - protein, 7 aa, synthetic construct
TLQGGTT

SEQ ID NO: 107615 - protein, 7 aa, synthetic construct
HITEMKQ

SEQ ID NO: 107616 - protein, 7 aa, synthetic construct
PKTPTGE

SEQ ID NO: 107617 - protein, 7 aa, synthetic construct
VTVNNRH

SEQ ID NO: 107618 - protein, 7 aa, synthetic construct
NRHRTED

SEQ ID NO: 107619 - protein, 7 aa, synthetic construct
PKVKEEN

SEQ ID NO: 107620 - protein, 7 aa, synthetic construct
KNQERFS

SEQ ID NO: 107621 - protein, 7 aa, synthetic construct
VYEGISR

SEQ ID NO: 107622 - protein, 7 aa, synthetic construct
DNGIGLH

SEQ ID NO: 107623 - protein, 7 aa, synthetic construct
AEIHHHG

SEQ ID NO: 107624 - protein, 7 aa, synthetic construct
HGTSMIE

SEQ ID NO: 107625 - protein, 7 aa, synthetic construct
NDHAASP

SEQ ID NO: 107626 - protein, 7 aa, synthetic construct
NSQQQQH

SEQ ID NO: 107627 - protein, 7 aa, synthetic construct
NMPDHRR

SEQ ID NO: 107628 - protein, 7 aa, synthetic construct
GMFDAKF

SEQ ID NO: 107629 - protein, 7 aa, synthetic construct
SGKSNPV

SEQ ID NO: 107630 - protein, 7 aa, synthetic construct
SNAPRMA

SEQ ID NO: 107631 - protein, 7 aa, synthetic construct
RASNGIV

SEQ ID NO: 107632 - protein, 7 aa, synthetic construct
WATPQSP

SEQ ID NO: 107633 - protein, 7 aa, synthetic construct
NERYALD

SEQ ID NO: 107634 - protein, 7 aa, synthetic construct
KNSSANF

SEQ ID NO: 107635 - protein, 7 aa, synthetic construct
LLTNDPI

SEQ ID NO: 107636 - protein, 7 aa, synthetic construct
DQSKNGM

SEQ ID NO: 107637 - protein, 7 aa, synthetic construct
WKTTMIP

SEQ ID NO: 107638 - protein, 7 aa, synthetic construct
AKTSAQD

SEQ ID NO: 107639 - protein, 7 aa, synthetic construct
AINGISL

SEQ ID NO: 107640 - protein, 7 aa, synthetic construct
RVHKDVP

SEQ ID NO: 107641 - protein, 7 aa, synthetic construct
VEMHKQV

SEQ ID NO: 107642 - protein, 7 aa, synthetic construct
SSEHVKA

SEQ ID NO: 107643 - protein, 7 aa, synthetic construct
HSMHFAP

SEQ ID NO: 107644 - protein, 7 aa, synthetic construct
TDDMKAR

SEQ ID NO: 107645 - protein, 7 aa, synthetic construct
RFESMRA

SEQ ID NO: 107646 - protein, 7 aa, synthetic construct
YDPLTHI

SEQ ID NO: 107647 - protein, 7 aa, synthetic construct
AETKNAP

SEQ ID NO: 107648 - protein, 7 aa, synthetic construct
RVEPGVI

SEQ ID NO: 107649 - protein, 7 aa, synthetic construct
SGSFVGI

SEQ ID NO: 107650 - protein, 7 aa, synthetic construct
KAISPHN

SEQ ID NO: 107651 - protein, 7 aa, synthetic construct
HSSIALS

SEQ ID NO: 107652 - protein, 7 aa, synthetic construct
FTVDMSV

SEQ ID NO: 107653 - protein, 7 aa, synthetic construct
HKAAAVH

SEQ ID NO: 107654 - protein, 7 aa, synthetic construct
RNSTVAP

SEQ ID NO: 107655 - protein, 7 aa, synthetic construct
TFTAQMA

SEQ ID NO: 107656 - protein, 7 aa, synthetic construct
GIREIER

SEQ ID NO: 107657 - protein, 7 aa, synthetic construct
KMNPHFP

SEQ ID NO: 107658 - protein, 7 aa, synthetic construct
VINNVNN

SEQ ID NO: 107659 - protein, 7 aa, synthetic construct
EAHYPSL

SEQ ID NO: 107660 - protein, 7 aa, synthetic construct
WGLSATM

SEQ ID NO: 107661 - protein, 7 aa, synthetic construct
RGYADVT

SEQ ID NO: 107662 - protein, 7 aa, synthetic construct
GESQHIM

SEQ ID NO: 107663 - protein, 7 aa, synthetic construct
PWREQQM

SEQ ID NO: 107664 - protein, 7 aa, synthetic construct
IFNMTAN

SEQ ID NO: 107665 - protein, 7 aa, synthetic construct
INIVNPK

SEQ ID NO: 107666 - protein, 7 aa, synthetic construct
SNDMARR

SEQ ID NO: 107667 - protein, 7 aa, synthetic construct
VTGHTQQ

SEQ ID NO: 107668 - protein, 7 aa, synthetic construct
VSGAIHE

SEQ ID NO: 107669 - protein, 7 aa, synthetic construct
FHQDNGF

SEQ ID NO: 107670 - protein, 7 aa, synthetic construct
GASKSGQ

SEQ ID NO: 107671 - protein, 7 aa, synthetic construct
ISTGVEL

SEQ ID NO: 107672 - protein, 7 aa, synthetic construct
NVGNKSD

SEQ ID NO: 107673 - protein, 7 aa, synthetic construct
HQNTMIE

SEQ ID NO: 107674 - protein, 7 aa, synthetic construct
LTSSKEW

SEQ ID NO: 107675 - protein, 7 aa, synthetic construct
HVDVVGS

SEQ ID NO: 107676 - protein, 7 aa, synthetic construct
TKLIYTE

SEQ ID NO: 107677 - protein, 7 aa, synthetic construct
EQTKIIV

SEQ ID NO: 107678 - protein, 7 aa, synthetic construct
KVDAREM

SEQ ID NO: 107679 - protein, 7 aa, synthetic construct
YPHAQPF

SEQ ID NO: 107680 - protein, 7 aa, synthetic construct
IDQFAGV

SEQ ID NO: 107681 - protein, 7 aa, synthetic construct
QLQANRV

SEQ ID NO: 107682 - protein, 7 aa, synthetic construct
RYSDKPQ

SEQ ID NO: 107683 - protein, 7 aa, synthetic construct
SDQVYHH

SEQ ID NO: 107684 - protein, 7 aa, synthetic construct
DRSMEHT

SEQ ID NO: 107685 - protein, 7 aa, synthetic construct
FHNNSAL

SEQ ID NO: 107686 - protein, 7 aa, synthetic construct
STNYADS

SEQ ID NO: 107687 - protein, 7 aa, synthetic construct
YQSGQNK

SEQ ID NO: 107688 - protein, 7 aa, synthetic construct
NGPRAMA

SEQ ID NO: 107689 - protein, 7 aa, synthetic construct
AIMTQKT

SEQ ID NO: 107690 - protein, 7 aa, synthetic construct
LQLNHEG

SEQ ID NO: 107691 - protein, 7 aa, synthetic construct
KQIPHKE

SEQ ID NO: 107692 - protein, 7 aa, synthetic construct
PKANNND

SEQ ID NO: 107693 - protein, 7 aa, synthetic construct
GVFPQQV

SEQ ID NO: 107694 - protein, 7 aa, synthetic construct
YTRTDFL

SEQ ID NO: 107695 - protein, 7 aa, synthetic construct
SNTPRYI

SEQ ID NO: 107696 - protein, 7 aa, synthetic construct
KDMAQPI

SEQ ID NO: 107697 - protein, 7 aa, synthetic construct
HAKPVNL

SEQ ID NO: 107698 - protein, 7 aa, synthetic construct
EMKGPVP

SEQ ID NO: 107699 - protein, 7 aa, synthetic construct
ARQEEFS

SEQ ID NO: 107700 - protein, 7 aa, synthetic construct
QPIKKEW

SEQ ID NO: 107701 - protein, 7 aa, synthetic construct
MGQTPMA

SEQ ID NO: 107702 - protein, 7 aa, synthetic construct
TNAIITL

SEQ ID NO: 107703 - protein, 7 aa, synthetic construct
HMQPHPL

SEQ ID NO: 107704 - protein, 7 aa, synthetic construct
ANANTSM

SEQ ID NO: 107705 - protein, 7 aa, synthetic construct
KAWGNEQ

SEQ ID NO: 107706 - protein, 7 aa, synthetic construct
HDPFKKV

SEQ ID NO: 107707 - protein, 7 aa, synthetic construct
HSEKPMP

SEQ ID NO: 107708 - protein, 7 aa, synthetic construct
GRPTSIL

SEQ ID NO: 107709 - protein, 7 aa, synthetic construct
TGYGFKA

SEQ ID NO: 107710 - protein, 7 aa, synthetic construct
KPQHNDH

SEQ ID NO: 107711 - protein, 7 aa, synthetic construct
AVKHWDS

SEQ ID NO: 107712 - protein, 7 aa, synthetic construct
EIMKNSY

SEQ ID NO: 107713 - protein, 7 aa, synthetic construct
AFARGHT

SEQ ID NO: 107714 - protein, 7 aa, synthetic construct
GNNNVSW

SEQ ID NO: 107715 - protein, 7 aa, synthetic construct
HTQNYSV

SEQ ID NO: 107716 - protein, 7 aa, synthetic construct
QNGIEAA

SEQ ID NO: 107717 - protein, 7 aa, synthetic construct
TQQKQNV

SEQ ID NO: 107718 - protein, 7 aa, synthetic construct
MFEAQGY

SEQ ID NO: 107719 - protein, 7 aa, synthetic construct
VQAFQKL

SEQ ID NO: 107720 - protein, 7 aa, synthetic construct
HIPDPSI

SEQ ID NO: 107721 - protein, 7 aa, synthetic construct
HHNDSTV

SEQ ID NO: 107722 - protein, 7 aa, synthetic construct
KMPAENR

SEQ ID NO: 107723 - protein, 7 aa, synthetic construct
PVTERFK

SEQ ID NO: 107724 - protein, 7 aa, synthetic construct
PELGRHV

SEQ ID NO: 107725 - protein, 7 aa, synthetic construct
QAVPNAV

SEQ ID NO: 107726 - protein, 7 aa, synthetic construct
IHGPLGK

SEQ ID NO: 107727 - protein, 7 aa, synthetic construct
AVHPHEA

SEQ ID NO: 107728 - protein, 7 aa, synthetic construct
SPRPVNP

SEQ ID NO: 107729 - protein, 7 aa, synthetic construct
NKPATNS

SEQ ID NO: 107730 - protein, 7 aa, synthetic construct
TIMTSMG

SEQ ID NO: 107731 - protein, 7 aa, synthetic construct
TYGKIQG

SEQ ID NO: 107732 - protein, 7 aa, synthetic construct
FGPNEYA

SEQ ID NO: 107733 - protein, 7 aa, synthetic construct
RPYKDTA

SEQ ID NO: 107734 - protein, 7 aa, synthetic construct
RELSLRP

SEQ ID NO: 107735 - protein, 7 aa, synthetic construct
QMRELMP

SEQ ID NO: 107736 - protein, 7 aa, synthetic construct
SVYSPHK

SEQ ID NO: 107737 - protein, 7 aa, synthetic construct
SAITTLD

SEQ ID NO: 107738 - protein, 7 aa, synthetic construct
VQNFHDV

SEQ ID NO: 107739 - protein, 7 aa, synthetic construct
RNDPDRH

SEQ ID NO: 107740 - protein, 7 aa, synthetic construct
NRIKSDL

SEQ ID NO: 107741 - protein, 7 aa, synthetic construct
YLGPTTR

SEQ ID NO: 107742 - protein, 7 aa, synthetic construct
ARKNDYP

SEQ ID NO: 107743 - protein, 7 aa, synthetic construct
TIFNDTK

SEQ ID NO: 107744 - protein, 7 aa, synthetic construct
ATGATPH

SEQ ID NO: 107745 - protein, 7 aa, synthetic construct
DQESRNT

SEQ ID NO: 107746 - protein, 7 aa, synthetic construct
KEITEKY

SEQ ID NO: 107747 - protein, 7 aa, synthetic construct
KTQPNVF

SEQ ID NO: 107748 - protein, 7 aa, synthetic construct
NNNHVVL

SEQ ID NO: 107749 - protein, 7 aa, synthetic construct
MTSQEEI

SEQ ID NO: 107750 - protein, 7 aa, synthetic construct
MRLSTEH

SEQ ID NO: 107751 - protein, 7 aa, synthetic construct
SKMYGPM

SEQ ID NO: 107752 - protein, 7 aa, synthetic construct
DIKVVSY

SEQ ID NO: 107753 - protein, 7 aa, synthetic construct
GKREVNY

SEQ ID NO: 107754 - protein, 7 aa, synthetic construct
DHKHNDA

SEQ ID NO: 107755 - protein, 7 aa, synthetic construct
NPAPAFN

SEQ ID NO: 107756 - protein, 7 aa, synthetic construct
DLDRQYV

SEQ ID NO: 107757 - protein, 7 aa, synthetic construct
NAVAEPP

SEQ ID NO: 107758 - protein, 7 aa, synthetic construct
QYPATQV

SEQ ID NO: 107759 - protein, 7 aa, synthetic construct
THSAQVP

SEQ ID NO: 107760 - protein, 7 aa, synthetic construct
WHAEAGN

SEQ ID NO: 107761 - protein, 7 aa, synthetic construct
TRNGHKD

SEQ ID NO: 107762 - protein, 7 aa, synthetic construct
GPNRVEP

SEQ ID NO: 107763 - protein, 7 aa, synthetic construct
QDFASHE

SEQ ID NO: 107764 - protein, 7 aa, synthetic construct
THMDQIG

SEQ ID NO: 107765 - protein, 7 aa, synthetic construct
MNDKSMS

SEQ ID NO: 107766 - protein, 7 aa, synthetic construct
SAVAAIT

SEQ ID NO: 107767 - protein, 7 aa, synthetic construct
AGAIKNH

SEQ ID NO: 107768 - protein, 7 aa, synthetic construct
FLEQNPL

SEQ ID NO: 107769 - protein, 7 aa, synthetic construct
QQAHTAM

SEQ ID NO: 107770 - protein, 7 aa, synthetic construct
RDMMYER

SEQ ID NO: 107771 - protein, 7 aa, synthetic construct
GVMILEG

SEQ ID NO: 107772 - protein, 7 aa, synthetic construct
PHIRQTD

SEQ ID NO: 107773 - protein, 7 aa, synthetic construct
GNGNLQP

SEQ ID NO: 107774 - protein, 7 aa, synthetic construct
SLTNMQY

SEQ ID NO: 107775 - protein, 7 aa, synthetic construct
YNTNFIQ

SEQ ID NO: 107776 - protein, 7 aa, synthetic construct
YVGAPGY

SEQ ID NO: 107777 - protein, 7 aa, synthetic construct
PETIQFS

SEQ ID NO: 107778 - protein, 7 aa, synthetic construct
NNQRRQE

SEQ ID NO: 107779 - protein, 7 aa, synthetic construct
QRPENIH

SEQ ID NO: 107780 - protein, 7 aa, synthetic construct
RASDLFT

SEQ ID NO: 107781 - protein, 7 aa, synthetic construct
KMEGHIH

SEQ ID NO: 107782 - protein, 7 aa, synthetic construct
EFAKTKP

SEQ ID NO: 107783 - protein, 7 aa, synthetic construct
GPTVAKG

SEQ ID NO: 107784 - protein, 7 aa, synthetic construct
EARGVQF

SEQ ID NO: 107785 - protein, 7 aa, synthetic construct
SQVSSLQ

SEQ ID NO: 107786 - protein, 7 aa, synthetic construct
TNGQYSR

SEQ ID NO: 107787 - protein, 7 aa, synthetic construct
NVIKMNM

SEQ ID NO: 107788 - protein, 7 aa, synthetic construct
EQRVEVH

SEQ ID NO: 107789 - protein, 7 aa, synthetic construct
GPLEIHP

SEQ ID NO: 107790 - protein, 7 aa, synthetic construct
SKSGTAG

SEQ ID NO: 107791 - protein, 7 aa, synthetic construct
WLVKTSG

SEQ ID NO: 107792 - protein, 7 aa, synthetic construct
MLGKADA

SEQ ID NO: 107793 - protein, 7 aa, synthetic construct
ILNAGMM

SEQ ID NO: 107794 - protein, 7 aa, synthetic construct
EQHTRMF

SEQ ID NO: 107795 - protein, 7 aa, synthetic construct
YVTSETI

SEQ ID NO: 107796 - protein, 7 aa, synthetic construct
MIPQVYG

SEQ ID NO: 107797 - protein, 7 aa, synthetic construct
LAIKYAA

SEQ ID NO: 107798 - protein, 7 aa, synthetic construct
WDHLTGK

SEQ ID NO: 107799 - protein, 7 aa, synthetic construct
NARPMGY

SEQ ID NO: 107800 - protein, 7 aa, synthetic construct
METLYRG

SEQ ID NO: 107801 - protein, 7 aa, synthetic construct
MDQKHPF

SEQ ID NO: 107802 - protein, 7 aa, synthetic construct
WPEGMGG

SEQ ID NO: 107803 - protein, 7 aa, synthetic construct
SHHLTHL

SEQ ID NO: 107804 - protein, 7 aa, synthetic construct
ETARMIT

SEQ ID NO: 107805 - protein, 7 aa, synthetic construct
FGFVNSE

SEQ ID NO: 107806 - protein, 7 aa, synthetic construct
KRFGFED

SEQ ID NO: 107807 - protein, 7 aa, synthetic construct
IHVRANI

SEQ ID NO: 107808 - protein, 7 aa, synthetic construct
KQNEQKE

SEQ ID NO: 107809 - protein, 7 aa, synthetic construct
LTMEITK

SEQ ID NO: 107810 - protein, 7 aa, synthetic construct
WGVHEID

SEQ ID NO: 107811 - protein, 7 aa, synthetic construct
FTPAPEM

SEQ ID NO: 107812 - protein, 7 aa, synthetic construct
VLRMDGY

SEQ ID NO: 107813 - protein, 7 aa, synthetic construct
VGKNYQL

SEQ ID NO: 107814 - protein, 7 aa, synthetic construct
VMKVVTT

SEQ ID NO: 107815 - protein, 7 aa, synthetic construct
IMQQNKF

SEQ ID NO: 107816 - protein, 7 aa, synthetic construct
ARVNARE

SEQ ID NO: 107817 - protein, 7 aa, synthetic construct
SVTQILE

SEQ ID NO: 107818 - protein, 7 aa, synthetic construct
NQGVNPL

SEQ ID NO: 107819 - protein, 7 aa, synthetic construct
KAQDRLA

SEQ ID NO: 107820 - protein, 7 aa, synthetic construct
YPDFNLS

SEQ ID NO: 107821 - protein, 7 aa, synthetic construct
KNQTSQG

SEQ ID NO: 107822 - protein, 7 aa, synthetic construct
HIEDKKV

SEQ ID NO: 107823 - protein, 7 aa, synthetic construct
WTGKGYV

SEQ ID NO: 107824 - protein, 7 aa, synthetic construct
DFAAQNM

SEQ ID NO: 107825 - protein, 7 aa, synthetic construct
HTMSKEH

SEQ ID NO: 107826 - protein, 7 aa, synthetic construct
HAKDVEK

SEQ ID NO: 107827 - protein, 7 aa, synthetic construct
GYAQIED

SEQ ID NO: 107828 - protein, 7 aa, synthetic construct
TQAMVGG

SEQ ID NO: 107829 - protein, 7 aa, synthetic construct
RINYQQN

SEQ ID NO: 107830 - protein, 7 aa, synthetic construct
GTHNHTT

SEQ ID NO: 107831 - protein, 7 aa, synthetic construct
PRNDDGP

SEQ ID NO: 107832 - protein, 7 aa, synthetic construct
LDIIRNQ

SEQ ID NO: 107833 - protein, 7 aa, synthetic construct
KEIQHTS

SEQ ID NO: 107834 - protein, 7 aa, synthetic construct
EPGVTNK

SEQ ID NO: 107835 - protein, 7 aa, synthetic construct
GQKQEGD

SEQ ID NO: 107836 - protein, 7 aa, synthetic construct
MPVGQMN

SEQ ID NO: 107837 - protein, 7 aa, synthetic construct
NVYPPTE

SEQ ID NO: 107838 - protein, 7 aa, synthetic construct
KMQGSID

SEQ ID NO: 107839 - protein, 7 aa, synthetic construct
NNHKQIS

SEQ ID NO: 107840 - protein, 7 aa, synthetic construct
RTYDAKP

SEQ ID NO: 107841 - protein, 7 aa, synthetic construct
IDRELNA

SEQ ID NO: 107842 - protein, 7 aa, synthetic construct
LGKYGIM

SEQ ID NO: 107843 - protein, 7 aa, synthetic construct
GPGGKTG

SEQ ID NO: 107844 - protein, 7 aa, synthetic construct
NMNTTDI

SEQ ID NO: 107845 - protein, 7 aa, synthetic construct
AMAHLMG

SEQ ID NO: 107846 - protein, 7 aa, synthetic construct
RGQDEFV

SEQ ID NO: 107847 - protein, 7 aa, synthetic construct
WRQSVEH

SEQ ID NO: 107848 - protein, 7 aa, synthetic construct
RNAEQAT

SEQ ID NO: 107849 - protein, 7 aa, synthetic construct
NVMVVQS

SEQ ID NO: 107850 - protein, 7 aa, synthetic construct
SEMPQKT

SEQ ID NO: 107851 - protein, 7 aa, synthetic construct
PESAIYK

SEQ ID NO: 107852 - protein, 7 aa, synthetic construct
TPHKDFA

SEQ ID NO: 107853 - protein, 7 aa, synthetic construct
QQREIMQ

SEQ ID NO: 107854 - protein, 7 aa, synthetic construct
VNADYIR

SEQ ID NO: 107855 - protein, 7 aa, synthetic construct
VHVMVQS

SEQ ID NO: 107856 - protein, 7 aa, synthetic construct
NARVIGY

SEQ ID NO: 107857 - protein, 7 aa, synthetic construct
NGQPMKE

SEQ ID NO: 107858 - protein, 7 aa, synthetic construct
KNTLDDR

SEQ ID NO: 107859 - protein, 7 aa, synthetic construct
QGFDKHF

SEQ ID NO: 107860 - protein, 7 aa, synthetic construct
EINGAIK

SEQ ID NO: 107861 - protein, 7 aa, synthetic construct
MPRHGFT

SEQ ID NO: 107862 - protein, 7 aa, synthetic construct
HVGLDAK

SEQ ID NO: 107863 - protein, 7 aa, synthetic construct
PFTSKYP

SEQ ID NO: 107864 - protein, 7 aa, synthetic construct
WANWIKE

SEQ ID NO: 107865 - protein, 7 aa, synthetic construct
ANDYLMA

SEQ ID NO: 107866 - protein, 7 aa, synthetic construct
RNNEPSF

SEQ ID NO: 107867 - protein, 7 aa, synthetic construct
PHGSSNY

SEQ ID NO: 107868 - protein, 7 aa, synthetic construct
VTSGPHR

SEQ ID NO: 107869 - protein, 7 aa, synthetic construct
NLMDRTP

SEQ ID NO: 107870 - protein, 7 aa, synthetic construct
SAHTIPN

SEQ ID NO: 107871 - protein, 7 aa, synthetic construct
YWQTAGD

SEQ ID NO: 107872 - protein, 7 aa, synthetic construct
TQSHNGH

SEQ ID NO: 107873 - protein, 7 aa, synthetic construct
VQNGASY

SEQ ID NO: 107874 - protein, 7 aa, synthetic construct
LASKIQF

SEQ ID NO: 107875 - protein, 7 aa, synthetic construct
VIMREDP

SEQ ID NO: 107876 - protein, 7 aa, synthetic construct
EQTKLYR

SEQ ID NO: 107877 - protein, 7 aa, synthetic construct
MPLMRAA

SEQ ID NO: 107878 - protein, 7 aa, synthetic construct
FDYSVHE

SEQ ID NO: 107879 - protein, 7 aa, synthetic construct
GHFQEAP

SEQ ID NO: 107880 - protein, 7 aa, synthetic construct
EPTVQAI

SEQ ID NO: 107881 - protein, 7 aa, synthetic construct
KKMPATE

SEQ ID NO: 107882 - protein, 7 aa, synthetic construct
YTQMAVQ

SEQ ID NO: 107883 - protein, 7 aa, synthetic construct
PQQGQGW

SEQ ID NO: 107884 - protein, 7 aa, synthetic construct
DMHAIAD

SEQ ID NO: 107885 - protein, 7 aa, synthetic construct
AAHHMDD

SEQ ID NO: 107886 - protein, 7 aa, synthetic construct
TSYGAEE

SEQ ID NO: 107887 - protein, 7 aa, synthetic construct
MLKQNTT

SEQ ID NO: 107888 - protein, 7 aa, synthetic construct
ISNTLLD

SEQ ID NO: 107889 - protein, 7 aa, synthetic construct
TPTTIMV

SEQ ID NO: 107890 - protein, 7 aa, synthetic construct
FRDMQDL

SEQ ID NO: 107891 - protein, 7 aa, synthetic construct
QPLLHGE

SEQ ID NO: 107892 - protein, 7 aa, synthetic construct
KLPAPIT

SEQ ID NO: 107893 - protein, 7 aa, synthetic construct
DGGGKTN

SEQ ID NO: 107894 - protein, 7 aa, synthetic construct
IGGGYQI

SEQ ID NO: 107895 - protein, 7 aa, synthetic construct
GSPVVSH

SEQ ID NO: 107896 - protein, 7 aa, synthetic construct
VQLGQRQ

SEQ ID NO: 107897 - protein, 7 aa, synthetic construct
KSFDAAW

SEQ ID NO: 107898 - protein, 7 aa, synthetic construct
EGPHVPL

SEQ ID NO: 107899 - protein, 7 aa, synthetic construct
FNISHND

SEQ ID NO: 107900 - protein, 7 aa, synthetic construct
TPDKFQY

SEQ ID NO: 107901 - protein, 7 aa, synthetic construct
AKWTDND

SEQ ID NO: 107902 - protein, 7 aa, synthetic construct
ANKFAGI

SEQ ID NO: 107903 - protein, 7 aa, synthetic construct
VRMEHIP

SEQ ID NO: 107904 - protein, 7 aa, synthetic construct
TEGATNH

SEQ ID NO: 107905 - protein, 7 aa, synthetic construct
VIMQKVS

SEQ ID NO: 107906 - protein, 7 aa, synthetic construct
IDTKSEG

SEQ ID NO: 107907 - protein, 7 aa, synthetic construct
LGVDERR

SEQ ID NO: 107908 - protein, 7 aa, synthetic construct
WTNHPDQ

SEQ ID NO: 107909 - protein, 7 aa, synthetic construct
WAHQLEV

SEQ ID NO: 107910 - protein, 7 aa, synthetic construct
FKETAIQ

SEQ ID NO: 107911 - protein, 7 aa, synthetic construct
YGKPMHM

SEQ ID NO: 107912 - protein, 7 aa, synthetic construct
NSSGDMG

SEQ ID NO: 107913 - protein, 7 aa, synthetic construct
MSIQRAQ

SEQ ID NO: 107914 - protein, 7 aa, synthetic construct
RMPATPG

SEQ ID NO: 107915 - protein, 7 aa, synthetic construct
MNEHVGT

SEQ ID NO: 107916 - protein, 7 aa, synthetic construct
ILRKMDS

SEQ ID NO: 107917 - protein, 7 aa, synthetic construct
NTQLVAR

SEQ ID NO: 107918 - protein, 7 aa, synthetic construct
RYGVMQQ

SEQ ID NO: 107919 - protein, 7 aa, synthetic construct
SAHKSVW

SEQ ID NO: 107920 - protein, 7 aa, synthetic construct
IIDNRPR

SEQ ID NO: 107921 - protein, 7 aa, synthetic construct
GKEGSRV

SEQ ID NO: 107922 - protein, 7 aa, synthetic construct
VKQNQGN

SEQ ID NO: 107923 - protein, 7 aa, synthetic construct
PPPPNTK

SEQ ID NO: 107924 - protein, 7 aa, synthetic construct
MKWEMSE

SEQ ID NO: 107925 - protein, 7 aa, synthetic construct
QHYNDDK

SEQ ID NO: 107926 - protein, 7 aa, synthetic construct
HTSHQNR

SEQ ID NO: 107927 - protein, 7 aa, synthetic construct
HGNHPTR

SEQ ID NO: 107928 - protein, 7 aa, synthetic construct
NHPVETP

SEQ ID NO: 107929 - protein, 7 aa, synthetic construct
HVERRTL

SEQ ID NO: 107930 - protein, 7 aa, synthetic construct
FVVPDGN

SEQ ID NO: 107931 - protein, 7 aa, synthetic construct
MTIQQLP

SEQ ID NO: 107932 - protein, 7 aa, synthetic construct
GFVNNQL

SEQ ID NO: 107933 - protein, 7 aa, synthetic construct
NNRHDQA

SEQ ID NO: 107934 - protein, 7 aa, synthetic construct
GPTEVKH

SEQ ID NO: 107935 - protein, 7 aa, synthetic construct
VGQTIYM

SEQ ID NO: 107936 - protein, 7 aa, synthetic construct
YKGDDEL

SEQ ID NO: 107937 - protein, 7 aa, synthetic construct
EIHELIG

SEQ ID NO: 107938 - protein, 7 aa, synthetic construct
HRSQSYG

SEQ ID NO: 107939 - protein, 7 aa, synthetic construct
ISGNDMH

SEQ ID NO: 107940 - protein, 7 aa, synthetic construct
REKPSSM

SEQ ID NO: 107941 - protein, 7 aa, synthetic construct
NAMQMAL

SEQ ID NO: 107942 - protein, 7 aa, synthetic construct
KSDQSQV

SEQ ID NO: 107943 - protein, 7 aa, synthetic construct
NAMESKA

SEQ ID NO: 107944 - protein, 7 aa, synthetic construct
EPDNFTL

SEQ ID NO: 107945 - protein, 7 aa, synthetic construct
ILLQKAD

SEQ ID NO: 107946 - protein, 7 aa, synthetic construct
PKPQADH

SEQ ID NO: 107947 - protein, 7 aa, synthetic construct
IDNGRIF

SEQ ID NO: 107948 - protein, 7 aa, synthetic construct
NVGNTMR

SEQ ID NO: 107949 - protein, 7 aa, synthetic construct
MPAENMG

SEQ ID NO: 107950 - protein, 7 aa, synthetic construct
KDYPTEF

SEQ ID NO: 107951 - protein, 7 aa, synthetic construct
VRQPIDE

SEQ ID NO: 107952 - protein, 7 aa, synthetic construct
MMVEGVR

SEQ ID NO: 107953 - protein, 7 aa, synthetic construct
LLTPHYD

SEQ ID NO: 107954 - protein, 7 aa, synthetic construct
HHGVFPS

SEQ ID NO: 107955 - protein, 7 aa, synthetic construct
YRIHEEN

SEQ ID NO: 107956 - protein, 7 aa, synthetic construct
GKETHHL

SEQ ID NO: 107957 - protein, 7 aa, synthetic construct
WSDGHAI

SEQ ID NO: 107958 - protein, 7 aa, synthetic construct
IPILGNP

SEQ ID NO: 107959 - protein, 7 aa, synthetic construct
DPRFKEG

SEQ ID NO: 107960 - protein, 7 aa, synthetic construct
GMSPPVF

SEQ ID NO: 107961 - protein, 7 aa, synthetic construct
PPKVAYT

SEQ ID NO: 107962 - protein, 7 aa, synthetic construct
QFRPGPT

SEQ ID NO: 107963 - protein, 7 aa, synthetic construct
FHRTLDK

SEQ ID NO: 107964 - protein, 7 aa, synthetic construct
ETNHRVD

SEQ ID NO: 107965 - protein, 7 aa, synthetic construct
KMTSASG

SEQ ID NO: 107966 - protein, 7 aa, synthetic construct
SIYVEHG

SEQ ID NO: 107967 - protein, 7 aa, synthetic construct
PTNPSVD

SEQ ID NO: 107968 - protein, 7 aa, synthetic construct
NLNNEQW

SEQ ID NO: 107969 - protein, 7 aa, synthetic construct
KVFEAGK

SEQ ID NO: 107970 - protein, 7 aa, synthetic construct
IPANVQP

SEQ ID NO: 107971 - protein, 7 aa, synthetic construct
SFGEKVI

SEQ ID NO: 107972 - protein, 7 aa, synthetic construct
SSFHNAT

SEQ ID NO: 107973 - protein, 7 aa, synthetic construct
YTSVYDK

SEQ ID NO: 107974 - protein, 7 aa, synthetic construct
RGAAYNH

SEQ ID NO: 107975 - protein, 7 aa, synthetic construct
NDKPSEP

SEQ ID NO: 107976 - protein, 7 aa, synthetic construct
TPFAPSE

SEQ ID NO: 107977 - protein, 7 aa, synthetic construct
LMKEMIG

SEQ ID NO: 107978 - protein, 7 aa, synthetic construct
QFKESLT

SEQ ID NO: 107979 - protein, 7 aa, synthetic construct
FQEWTAE

SEQ ID NO: 107980 - protein, 7 aa, synthetic construct
ELQFSQR

SEQ ID NO: 107981 - protein, 7 aa, synthetic construct
LWHKEHE

SEQ ID NO: 107982 - protein, 7 aa, synthetic construct
FNPVSEV

SEQ ID NO: 107983 - protein, 7 aa, synthetic construct
KLAHDDW

SEQ ID NO: 107984 - protein, 7 aa, synthetic construct
PNPGKGT

SEQ ID NO: 107985 - protein, 7 aa, synthetic construct
PTHITPG

SEQ ID NO: 107986 - protein, 7 aa, synthetic construct
RQIQLNT

SEQ ID NO: 107987 - protein, 7 aa, synthetic construct
NEMHVDH

SEQ ID NO: 107988 - protein, 7 aa, synthetic construct
FESLSVP

SEQ ID NO: 107989 - protein, 7 aa, synthetic construct
YGTQHYD

SEQ ID NO: 107990 - protein, 7 aa, synthetic construct
MQPPDTI

SEQ ID NO: 107991 - protein, 7 aa, synthetic construct
LKSGQMM

SEQ ID NO: 107992 - protein, 7 aa, synthetic construct
YSTGFHD

SEQ ID NO: 107993 - protein, 7 aa, synthetic construct
NDQMMRP

SEQ ID NO: 107994 - protein, 7 aa, synthetic construct
PTPDINK

SEQ ID NO: 107995 - protein, 7 aa, synthetic construct
LGPLVAH

SEQ ID NO: 107996 - protein, 7 aa, synthetic construct
QSQMHLT

SEQ ID NO: 107997 - protein, 7 aa, synthetic construct
VQEKMSR

SEQ ID NO: 107998 - protein, 7 aa, synthetic construct
WRDKREH

SEQ ID NO: 107999 - protein, 7 aa, synthetic construct
ERPPHSE

SEQ ID NO: 108000 - protein, 7 aa, synthetic construct
KRILPDQ

SEQ ID NO: 108001 - protein, 7 aa, synthetic construct
PKLDATP

SEQ ID NO: 108002 - protein, 7 aa, synthetic construct
PRAGADF

SEQ ID NO: 108003 - protein, 7 aa, synthetic construct
KQQNFTV

SEQ ID NO: 108004 - protein, 7 aa, synthetic construct
ALGMDTP

SEQ ID NO: 108005 - protein, 7 aa, synthetic construct
KIFGEEL

SEQ ID NO: 108006 - protein, 7 aa, synthetic construct
LEAAYVK

SEQ ID NO: 108007 - protein, 7 aa, synthetic construct
AMPGNMA

SEQ ID NO: 108008 - protein, 7 aa, synthetic construct
PEAAGSY

SEQ ID NO: 108009 - protein, 7 aa, synthetic construct
ALHGLMN

SEQ ID NO: 108010 - protein, 7 aa, synthetic construct
SNMDLKS

SEQ ID NO: 108011 - protein, 7 aa, synthetic construct
NVEPNFR

SEQ ID NO: 108012 - protein, 7 aa, synthetic construct
SAMKTGV

SEQ ID NO: 108013 - protein, 7 aa, synthetic construct
QIQGFTN

SEQ ID NO: 108014 - protein, 7 aa, synthetic construct
GVGLRGF

SEQ ID NO: 108015 - protein, 7 aa, synthetic construct
KATSGGP

SEQ ID NO: 108016 - protein, 7 aa, synthetic construct
QAAVHGP

SEQ ID NO: 108017 - protein, 7 aa, synthetic construct
MTAPERV

SEQ ID NO: 108018 - protein, 7 aa, synthetic construct
RQERDML

SEQ ID NO: 108019 - protein, 7 aa, synthetic construct
TYTPDNM

SEQ ID NO: 108020 - protein, 7 aa, synthetic construct
HRQGEAV

SEQ ID NO: 108021 - protein, 7 aa, synthetic construct
IPHFHPS

SEQ ID NO: 108022 - protein, 7 aa, synthetic construct
INGFKLG

SEQ ID NO: 108023 - protein, 7 aa, synthetic construct
YIKDALT

SEQ ID NO: 108024 - protein, 7 aa, synthetic construct
VWGDGIP

SEQ ID NO: 108025 - protein, 7 aa, synthetic construct
IALEKQQ

SEQ ID NO: 108026 - protein, 7 aa, synthetic construct
FKVEAEK

SEQ ID NO: 108027 - protein, 7 aa, synthetic construct
ETRIGAT

SEQ ID NO: 108028 - protein, 7 aa, synthetic construct
NPISDLG

SEQ ID NO: 108029 - protein, 7 aa, synthetic construct
NHLTSGP

SEQ ID NO: 108030 - protein, 7 aa, synthetic construct
DLSHALG

SEQ ID NO: 108031 - protein, 7 aa, synthetic construct
GEWAVRP

SEQ ID NO: 108032 - protein, 7 aa, synthetic construct
RDTHPGQ

SEQ ID NO: 108033 - protein, 7 aa, synthetic construct
VESNGTR

SEQ ID NO: 108034 - protein, 7 aa, synthetic construct
YDSPNIV

SEQ ID NO: 108035 - protein, 7 aa, synthetic construct
YGKHDTE

SEQ ID NO: 108036 - protein, 7 aa, synthetic construct
WQFKNEM

SEQ ID NO: 108037 - protein, 7 aa, synthetic construct
YFQEAQD

SEQ ID NO: 108038 - protein, 7 aa, synthetic construct
DQHPNAV

SEQ ID NO: 108039 - protein, 7 aa, synthetic construct
FQRDHEQ

SEQ ID NO: 108040 - protein, 7 aa, synthetic construct
LGPRGND

SEQ ID NO: 108041 - protein, 7 aa, synthetic construct
RVDKLQW

SEQ ID NO: 108042 - protein, 7 aa, synthetic construct
KQDKSQA

SEQ ID NO: 108043 - protein, 7 aa, synthetic construct
YYDRVPE

SEQ ID NO: 108044 - protein, 7 aa, synthetic construct
PRQMPQP

SEQ ID NO: 108045 - protein, 7 aa, synthetic construct
KQHITQI

SEQ ID NO: 108046 - protein, 7 aa, synthetic construct
PPITTVM

SEQ ID NO: 108047 - protein, 7 aa, synthetic construct
GEYKIYA

SEQ ID NO: 108048 - protein, 7 aa, synthetic construct
DKWAGHH

SEQ ID NO: 108049 - protein, 7 aa, synthetic construct
LPRRHEP

SEQ ID NO: 108050 - protein, 7 aa, synthetic construct
SNLKYST

SEQ ID NO: 108051 - protein, 7 aa, synthetic construct
QEGTNGW

SEQ ID NO: 108052 - protein, 7 aa, synthetic construct
KPSTNVF

SEQ ID NO: 108053 - protein, 7 aa, synthetic construct
SKFEQHK

SEQ ID NO: 108054 - protein, 7 aa, synthetic construct
GESKQYK

SEQ ID NO: 108055 - protein, 7 aa, synthetic construct
PSSASIY

SEQ ID NO: 108056 - protein, 7 aa, synthetic construct
PPHESHF

SEQ ID NO: 108057 - protein, 7 aa, synthetic construct
AAYPEIS

SEQ ID NO: 108058 - protein, 7 aa, synthetic construct
VKTFPLT

SEQ ID NO: 108059 - protein, 7 aa, synthetic construct
PHNTIPF

SEQ ID NO: 108060 - protein, 7 aa, synthetic construct
TKHDKLQ

SEQ ID NO: 108061 - protein, 7 aa, synthetic construct
MENHNKM

SEQ ID NO: 108062 - protein, 7 aa, synthetic construct
ENSGRGY

SEQ ID NO: 108063 - protein, 7 aa, synthetic construct
DMHPPMK

SEQ ID NO: 108064 - protein, 7 aa, synthetic construct
TAHFTSH

SEQ ID NO: 108065 - protein, 7 aa, synthetic construct
HFGADKK

SEQ ID NO: 108066 - protein, 7 aa, synthetic construct
NRNPEHW

SEQ ID NO: 108067 - protein, 7 aa, synthetic construct
PKPTNAN

SEQ ID NO: 108068 - protein, 7 aa, synthetic construct
EKSAKHF

SEQ ID NO: 108069 - protein, 7 aa, synthetic construct
AMPTLES

SEQ ID NO: 108070 - protein, 7 aa, synthetic construct
THMPAAP

SEQ ID NO: 108071 - protein, 7 aa, synthetic construct
EYAAHER

SEQ ID NO: 108072 - protein, 7 aa, synthetic construct
REDFVNK

SEQ ID NO: 108073 - protein, 7 aa, synthetic construct
KTNTKDP

SEQ ID NO: 108074 - protein, 7 aa, synthetic construct
FNKTVPA

SEQ ID NO: 108075 - protein, 7 aa, synthetic construct
TALQMAG

SEQ ID NO: 108076 - protein, 7 aa, synthetic construct
MNGHDNV

SEQ ID NO: 108077 - protein, 7 aa, synthetic construct
GQIMEHP

SEQ ID NO: 108078 - protein, 7 aa, synthetic construct
HGDNNRV

SEQ ID NO: 108079 - protein, 7 aa, synthetic construct
TEMTTYV

SEQ ID NO: 108080 - protein, 7 aa, synthetic construct
GENRFGK

SEQ ID NO: 108081 - protein, 7 aa, synthetic construct
EWPPQKT

SEQ ID NO: 108082 - protein, 7 aa, synthetic construct
GKEQQLM

SEQ ID NO: 108083 - protein, 7 aa, synthetic construct
LVVKNSN

SEQ ID NO: 108084 - protein, 7 aa, synthetic construct
PGRVPNH

SEQ ID NO: 108085 - protein, 7 aa, synthetic construct
GVSVGVT

SEQ ID NO: 108086 - protein, 7 aa, synthetic construct
FDRSPLN

SEQ ID NO: 108087 - protein, 7 aa, synthetic construct
AHDIAHN

SEQ ID NO: 108088 - protein, 7 aa, synthetic construct
EKALNVN

SEQ ID NO: 108089 - protein, 7 aa, synthetic construct
SNKSDFD

SEQ ID NO: 108090 - protein, 7 aa, synthetic construct
PDASLRI

SEQ ID NO: 108091 - protein, 7 aa, synthetic construct
PKFLVGE

SEQ ID NO: 108092 - protein, 7 aa, synthetic construct
WPKGPLM

SEQ ID NO: 108093 - protein, 7 aa, synthetic construct
SKLLAGA

SEQ ID NO: 108094 - protein, 7 aa, synthetic construct
RYIPDGA

SEQ ID NO: 108095 - protein, 7 aa, synthetic construct
KTSQTKD

SEQ ID NO: 108096 - protein, 7 aa, synthetic construct
YERNRFV

SEQ ID NO: 108097 - protein, 7 aa, synthetic construct
RAEAEKG

SEQ ID NO: 108098 - protein, 7 aa, synthetic construct
LVKSSTM

SEQ ID NO: 108099 - protein, 7 aa, synthetic construct
NRSSGGA

SEQ ID NO: 108100 - protein, 7 aa, synthetic construct
GGQMARI

SEQ ID NO: 108101 - protein, 7 aa, synthetic construct
SPLSIQT

SEQ ID NO: 108102 - protein, 7 aa, synthetic construct
EKENRPD

SEQ ID NO: 108103 - protein, 7 aa, synthetic construct
INKMMQD

SEQ ID NO: 108104 - protein, 7 aa, synthetic construct
QYHGHQQ

SEQ ID NO: 108105 - protein, 7 aa, synthetic construct
YMSDRQI

SEQ ID NO: 108106 - protein, 7 aa, synthetic construct
QNREGYA

SEQ ID NO: 108107 - protein, 7 aa, synthetic construct
LVHEHTG

SEQ ID NO: 108108 - protein, 7 aa, synthetic construct
YHKKDTI

SEQ ID NO: 108109 - protein, 7 aa, synthetic construct
LSLNKIH

SEQ ID NO: 108110 - protein, 7 aa, synthetic construct
YLGLRTG

SEQ ID NO: 108111 - protein, 7 aa, synthetic construct
NNGNHST

SEQ ID NO: 108112 - protein, 7 aa, synthetic construct
QHLPHDT

SEQ ID NO: 108113 - protein, 7 aa, synthetic construct
IEGPHKW

SEQ ID NO: 108114 - protein, 7 aa, synthetic construct
KSKDGFS

SEQ ID NO: 108115 - protein, 7 aa, synthetic construct
ILLRKQE

SEQ ID NO: 108116 - protein, 7 aa, synthetic construct
SSLEGPA

SEQ ID NO: 108117 - protein, 7 aa, synthetic construct
SAVAQLI

SEQ ID NO: 108118 - protein, 7 aa, synthetic construct
ASESMHR

SEQ ID NO: 108119 - protein, 7 aa, synthetic construct
QAGQALQ

SEQ ID NO: 108120 - protein, 7 aa, synthetic construct
AVKAPQV

SEQ ID NO: 108121 - protein, 7 aa, synthetic construct
GGLSKIH

SEQ ID NO: 108122 - protein, 7 aa, synthetic construct
VFKVISE

SEQ ID NO: 108123 - protein, 7 aa, synthetic construct
IQAKFHS

SEQ ID NO: 108124 - protein, 7 aa, synthetic construct
TPRVNST

SEQ ID NO: 108125 - protein, 7 aa, synthetic construct
IQGEKGF

SEQ ID NO: 108126 - protein, 7 aa, synthetic construct
KTDPVAA

SEQ ID NO: 108127 - protein, 7 aa, synthetic construct
LITHSLK

SEQ ID NO: 108128 - protein, 7 aa, synthetic construct
SPKAQQA

SEQ ID NO: 108129 - protein, 7 aa, synthetic construct
PNQVTGP

SEQ ID NO: 108130 - protein, 7 aa, synthetic construct
WGPTPEK

SEQ ID NO: 108131 - protein, 7 aa, synthetic construct
SQIFSSE

SEQ ID NO: 108132 - protein, 7 aa, synthetic construct
QNHTHTM

SEQ ID NO: 108133 - protein, 7 aa, synthetic construct
GDPKLTK

SEQ ID NO: 108134 - protein, 7 aa, synthetic construct
MNSYVKH

SEQ ID NO: 108135 - protein, 7 aa, synthetic construct
SVPKDMY

SEQ ID NO: 108136 - protein, 7 aa, synthetic construct
GFDKSIL

SEQ ID NO: 108137 - protein, 7 aa, synthetic construct
YTNTMGM

SEQ ID NO: 108138 - protein, 7 aa, synthetic construct
TGGSTNN

SEQ ID NO: 108139 - protein, 7 aa, synthetic construct
YGAPVDA

SEQ ID NO: 108140 - protein, 7 aa, synthetic construct
KLGADHF

SEQ ID NO: 108141 - protein, 7 aa, synthetic construct
VHIPLTD

SEQ ID NO: 108142 - protein, 7 aa, synthetic construct
TPQMAYK

SEQ ID NO: 108143 - protein, 7 aa, synthetic construct
GMKKEGN

SEQ ID NO: 108144 - protein, 7 aa, synthetic construct
LQPATIE

SEQ ID NO: 108145 - protein, 7 aa, synthetic construct
HASPLFE

SEQ ID NO: 108146 - protein, 7 aa, synthetic construct
HGGIPGL

SEQ ID NO: 108147 - protein, 7 aa, synthetic construct
MKLNEIM

SEQ ID NO: 108148 - protein, 7 aa, synthetic construct
KGQTQGF

SEQ ID NO: 108149 - protein, 7 aa, synthetic construct
DVEHHSF

SEQ ID NO: 108150 - protein, 7 aa, synthetic construct
FVMHHAD

SEQ ID NO: 108151 - protein, 7 aa, synthetic construct
GLPPNAF

SEQ ID NO: 108152 - protein, 7 aa, synthetic construct
RERMPML

SEQ ID NO: 108153 - protein, 7 aa, synthetic construct
SKGQIDI

SEQ ID NO: 108154 - protein, 7 aa, synthetic construct
MTHENNH

SEQ ID NO: 108155 - protein, 7 aa, synthetic construct
AANENRI

SEQ ID NO: 108156 - protein, 7 aa, synthetic construct
GVIDAPL

SEQ ID NO: 108157 - protein, 7 aa, synthetic construct
PPFDAAK

SEQ ID NO: 108158 - protein, 7 aa, synthetic construct
NITPHVH

SEQ ID NO: 108159 - protein, 7 aa, synthetic construct
AISTIKD

SEQ ID NO: 108160 - protein, 7 aa, synthetic construct
QSKNGWA

SEQ ID NO: 108161 - protein, 7 aa, synthetic construct
PTPPYVA

SEQ ID NO: 108162 - protein, 7 aa, synthetic construct
GYSTLPV

SEQ ID NO: 108163 - protein, 7 aa, synthetic construct
KDTSKSE

SEQ ID NO: 108164 - protein, 7 aa, synthetic construct
NEGSHHF

SEQ ID NO: 108165 - protein, 7 aa, synthetic construct
EPAGHSL

SEQ ID NO: 108166 - protein, 7 aa, synthetic construct
RIIGVQH

SEQ ID NO: 108167 - protein, 7 aa, synthetic construct
QNVATMV

SEQ ID NO: 108168 - protein, 7 aa, synthetic construct
SVMQADS

SEQ ID NO: 108169 - protein, 7 aa, synthetic construct
QLIKPTE

SEQ ID NO: 108170 - protein, 7 aa, synthetic construct
NAQYLTV

SEQ ID NO: 108171 - protein, 7 aa, synthetic construct
YVMTVSN

SEQ ID NO: 108172 - protein, 7 aa, synthetic construct
ENPHFRL

SEQ ID NO: 108173 - protein, 7 aa, synthetic construct
HTTVHLV

SEQ ID NO: 108174 - protein, 7 aa, synthetic construct
HTTMHQP

SEQ ID NO: 108175 - protein, 7 aa, synthetic construct
NYKMEIQ

SEQ ID NO: 108176 - protein, 7 aa, synthetic construct
IPNSITG

SEQ ID NO: 108177 - protein, 7 aa, synthetic construct
MVPNYHQ

SEQ ID NO: 108178 - protein, 7 aa, synthetic construct
KFERMIA

SEQ ID NO: 108179 - protein, 7 aa, synthetic construct
ASDNNAR

SEQ ID NO: 108180 - protein, 7 aa, synthetic construct
SSGVNHG

SEQ ID NO: 108181 - protein, 7 aa, synthetic construct
QHSFEQS

SEQ ID NO: 108182 - protein, 7 aa, synthetic construct
VNQNGSK

SEQ ID NO: 108183 - protein, 7 aa, synthetic construct
HREEKSP

SEQ ID NO: 108184 - protein, 7 aa, synthetic construct
MYHERTE

SEQ ID NO: 108185 - protein, 7 aa, synthetic construct
FRESLIQ

SEQ ID NO: 108186 - protein, 7 aa, synthetic construct
HQQVKIY

SEQ ID NO: 108187 - protein, 7 aa, synthetic construct
TSIGLYG

SEQ ID NO: 108188 - protein, 7 aa, synthetic construct
PANLREM

SEQ ID NO: 108189 - protein, 7 aa, synthetic construct
MMGRNII

SEQ ID NO: 108190 - protein, 7 aa, synthetic construct
MQIQNDM

SEQ ID NO: 108191 - protein, 7 aa, synthetic construct
RVGPQRD

SEQ ID NO: 108192 - protein, 7 aa, synthetic construct
EKRADND

SEQ ID NO: 108193 - protein, 7 aa, synthetic construct
RNRDGDE

SEQ ID NO: 108194 - protein, 7 aa, synthetic construct
RNDYPEK

SEQ ID NO: 108195 - protein, 7 aa, synthetic construct
YMTNPQP

SEQ ID NO: 108196 - protein, 7 aa, synthetic construct
YNTQLQL

SEQ ID NO: 108197 - protein, 7 aa, synthetic construct
IPIKIIE

SEQ ID NO: 108198 - protein, 7 aa, synthetic construct
YQRPMVD

SEQ ID NO: 108199 - protein, 7 aa, synthetic construct
YQKWEGT

SEQ ID NO: 108200 - protein, 7 aa, synthetic construct
SKADQSM

SEQ ID NO: 108201 - protein, 7 aa, synthetic construct
PVKNDWP

SEQ ID NO: 108202 - protein, 7 aa, synthetic construct
KDTYPAI

SEQ ID NO: 108203 - protein, 7 aa, synthetic construct
RAHVAPY

SEQ ID NO: 108204 - protein, 7 aa, synthetic construct
LGIHIQD

SEQ ID NO: 108205 - protein, 7 aa, synthetic construct
THAQHSR

SEQ ID NO: 108206 - protein, 7 aa, synthetic construct
ILNVDSR

SEQ ID NO: 108207 - protein, 7 aa, synthetic construct
GTAHGSI

SEQ ID NO: 108208 - protein, 7 aa, synthetic construct
RQNFVGV

SEQ ID NO: 108209 - protein, 7 aa, synthetic construct
KQQSMGS

SEQ ID NO: 108210 - protein, 7 aa, synthetic construct
RHQDYHP

SEQ ID NO: 108211 - protein, 7 aa, synthetic construct
AIGALSQ

SEQ ID NO: 108212 - protein, 7 aa, synthetic construct
INAWVKD

SEQ ID NO: 108213 - protein, 7 aa, synthetic construct
PKGAMQI

SEQ ID NO: 108214 - protein, 7 aa, synthetic construct
VLQHLKH

SEQ ID NO: 108215 - protein, 7 aa, synthetic construct
KNATANV

SEQ ID NO: 108216 - protein, 7 aa, synthetic construct
HQHPTEQ

SEQ ID NO: 108217 - protein, 7 aa, synthetic construct
GISATHT

SEQ ID NO: 108218 - protein, 7 aa, synthetic construct
DSSLVVR

SEQ ID NO: 108219 - protein, 7 aa, synthetic construct
VKTSGQA

SEQ ID NO: 108220 - protein, 7 aa, synthetic construct
GGYNLPA

SEQ ID NO: 108221 - protein, 7 aa, synthetic construct
NWAQNDM

SEQ ID NO: 108222 - protein, 7 aa, synthetic construct
FGYNPEA

SEQ ID NO: 108223 - protein, 7 aa, synthetic construct
QVSVDQV

SEQ ID NO: 108224 - protein, 7 aa, synthetic construct
GINSGDV

SEQ ID NO: 108225 - protein, 7 aa, synthetic construct
SHANFGV

SEQ ID NO: 108226 - protein, 7 aa, synthetic construct
EALAKNM

SEQ ID NO: 108227 - protein, 7 aa, synthetic construct
FNNHAYT

SEQ ID NO: 108228 - protein, 7 aa, synthetic construct
TMISLQK

SEQ ID NO: 108229 - protein, 7 aa, synthetic construct
IDKKFEV

SEQ ID NO: 108230 - protein, 7 aa, synthetic construct
SNDVGSW

SEQ ID NO: 108231 - protein, 7 aa, synthetic construct
KHHDKHP

SEQ ID NO: 108232 - protein, 7 aa, synthetic construct
SYIATPA

SEQ ID NO: 108233 - protein, 7 aa, synthetic construct
GTAKYND

SEQ ID NO: 108234 - protein, 7 aa, synthetic construct
IKEWMVN

SEQ ID NO: 108235 - protein, 7 aa, synthetic construct
QTNHHDL

SEQ ID NO: 108236 - protein, 7 aa, synthetic construct
TRYEANM

SEQ ID NO: 108237 - protein, 7 aa, synthetic construct
RDFHQKP

SEQ ID NO: 108238 - protein, 7 aa, synthetic construct
THKEPFK

SEQ ID NO: 108239 - protein, 7 aa, synthetic construct
EIHAIPD

SEQ ID NO: 108240 - protein, 7 aa, synthetic construct
SLHNEKG

SEQ ID NO: 108241 - protein, 7 aa, synthetic construct
RHDAINF

SEQ ID NO: 108242 - protein, 7 aa, synthetic construct
ALGQLSR

SEQ ID NO: 108243 - protein, 7 aa, synthetic construct
WSNNKPF

SEQ ID NO: 108244 - protein, 7 aa, synthetic construct
VLSSAKH

SEQ ID NO: 108245 - protein, 7 aa, synthetic construct
WPAQAAN

SEQ ID NO: 108246 - protein, 7 aa, synthetic construct
TGDAWRP

SEQ ID NO: 108247 - protein, 7 aa, synthetic construct
FRERNEM

SEQ ID NO: 108248 - protein, 7 aa, synthetic construct
ASRMEQE

SEQ ID NO: 108249 - protein, 7 aa, synthetic construct
VFGRPVD

SEQ ID NO: 108250 - protein, 7 aa, synthetic construct
NSDTPGS

SEQ ID NO: 108251 - protein, 7 aa, synthetic construct
GAQMYVP

SEQ ID NO: 108252 - protein, 7 aa, synthetic construct
YKSSVTG

SEQ ID NO: 108253 - protein, 7 aa, synthetic construct
NAYSAVV

SEQ ID NO: 108254 - protein, 7 aa, synthetic construct
RYKDHTT

SEQ ID NO: 108255 - protein, 7 aa, synthetic construct
PMAGVTR

SEQ ID NO: 108256 - protein, 7 aa, synthetic construct
DNGNNVA

SEQ ID NO: 108257 - protein, 7 aa, synthetic construct
ITRGMHA

SEQ ID NO: 108258 - protein, 7 aa, synthetic construct
YRNHVMQ

SEQ ID NO: 108259 - protein, 7 aa, synthetic construct
LKMNNAG

SEQ ID NO: 108260 - protein, 7 aa, synthetic construct
KFATENG

SEQ ID NO: 108261 - protein, 7 aa, synthetic construct
QGKMFDR

SEQ ID NO: 108262 - protein, 7 aa, synthetic construct
QATANND

SEQ ID NO: 108263 - protein, 7 aa, synthetic construct
RAHTVTN

SEQ ID NO: 108264 - protein, 7 aa, synthetic construct
ETPKYPK

SEQ ID NO: 108265 - protein, 7 aa, synthetic construct
AIISNSP

SEQ ID NO: 108266 - protein, 7 aa, synthetic construct
KTKGDMW

SEQ ID NO: 108267 - protein, 7 aa, synthetic construct
SILGPGI

SEQ ID NO: 108268 - protein, 7 aa, synthetic construct
VFQSSGH

SEQ ID NO: 108269 - protein, 7 aa, synthetic construct
WEGKQNG

SEQ ID NO: 108270 - protein, 7 aa, synthetic construct
PAQALTM

SEQ ID NO: 108271 - protein, 7 aa, synthetic construct
AIQMRDI

SEQ ID NO: 108272 - protein, 7 aa, synthetic construct
SHQDNQY

SEQ ID NO: 108273 - protein, 7 aa, synthetic construct
LKQYDMN

SEQ ID NO: 108274 - protein, 7 aa, synthetic construct
MEPKYPS

SEQ ID NO: 108275 - protein, 7 aa, synthetic construct
PAIHASD

SEQ ID NO: 108276 - protein, 7 aa, synthetic construct
MATLNTA

SEQ ID NO: 108277 - protein, 7 aa, synthetic construct
AAVNAIE

SEQ ID NO: 108278 - protein, 7 aa, synthetic construct
YKRLEDS

SEQ ID NO: 108279 - protein, 7 aa, synthetic construct
TDLKRGW

SEQ ID NO: 108280 - protein, 7 aa, synthetic construct
QTQDRAD

SEQ ID NO: 108281 - protein, 7 aa, synthetic construct
DERKDNP

SEQ ID NO: 108282 - protein, 7 aa, synthetic construct
NPLNAVV

SEQ ID NO: 108283 - protein, 7 aa, synthetic construct
HPTLIEA

SEQ ID NO: 108284 - protein, 7 aa, synthetic construct
RDHMDKK

SEQ ID NO: 108285 - protein, 7 aa, synthetic construct
TTDRFEP

SEQ ID NO: 108286 - protein, 7 aa, synthetic construct
TKVSAEQ

SEQ ID NO: 108287 - protein, 7 aa, synthetic construct
VIGWRDE

SEQ ID NO: 108288 - protein, 7 aa, synthetic construct
EPKYQQM

SEQ ID NO: 108289 - protein, 7 aa, synthetic construct
VEGMRLI

SEQ ID NO: 108290 - protein, 7 aa, synthetic construct
AYNIKDR

SEQ ID NO: 108291 - protein, 7 aa, synthetic construct
RIMAESH

SEQ ID NO: 108292 - protein, 7 aa, synthetic construct
AIDNKID

SEQ ID NO: 108293 - protein, 7 aa, synthetic construct
RPQMSDH

SEQ ID NO: 108294 - protein, 7 aa, synthetic construct
NREYITN

SEQ ID NO: 108295 - protein, 7 aa, synthetic construct
QIAPPRT

SEQ ID NO: 108296 - protein, 7 aa, synthetic construct
NFPDNEI

SEQ ID NO: 108297 - protein, 7 aa, synthetic construct
RTAVHIS

SEQ ID NO: 108298 - protein, 7 aa, synthetic construct
SVEGQVS

SEQ ID NO: 108299 - protein, 7 aa, synthetic construct
VQFPREY

SEQ ID NO: 108300 - protein, 7 aa, synthetic construct
AYPHESV

SEQ ID NO: 108301 - protein, 7 aa, synthetic construct
PGYIGQA

SEQ ID NO: 108302 - protein, 7 aa, synthetic construct
ANQMKPV

SEQ ID NO: 108303 - protein, 7 aa, synthetic construct
FETELQR

SEQ ID NO: 108304 - protein, 7 aa, synthetic construct
FKHMDDT

SEQ ID NO: 108305 - protein, 7 aa, synthetic construct
KDPQEEG

SEQ ID NO: 108306 - protein, 7 aa, synthetic construct
AQGAREM

SEQ ID NO: 108307 - protein, 7 aa, synthetic construct
DDTPQAG

SEQ ID NO: 108308 - protein, 7 aa, synthetic construct
HVRGAQY

SEQ ID NO: 108309 - protein, 7 aa, synthetic construct
ANQIAPP

SEQ ID NO: 108310 - protein, 7 aa, synthetic construct
KTPDGTD

SEQ ID NO: 108311 - protein, 7 aa, synthetic construct
VVTQVAP

SEQ ID NO: 108312 - protein, 7 aa, synthetic construct
SHFEGLK

SEQ ID NO: 108313 - protein, 7 aa, synthetic construct
SRTDQSP

SEQ ID NO: 108314 - protein, 7 aa, synthetic construct
SWADAAL

SEQ ID NO: 108315 - protein, 7 aa, synthetic construct
RNQPSAA

SEQ ID NO: 108316 - protein, 7 aa, synthetic construct
ELKTWQD

SEQ ID NO: 108317 - protein, 7 aa, synthetic construct
IEYSKTW

SEQ ID NO: 108318 - protein, 7 aa, synthetic construct
TMAAEYS

SEQ ID NO: 108319 - protein, 7 aa, synthetic construct
QGPLNLD

SEQ ID NO: 108320 - protein, 7 aa, synthetic construct
THHEYPT

SEQ ID NO: 108321 - protein, 7 aa, synthetic construct
GVHETFM

SEQ ID NO: 108322 - protein, 7 aa, synthetic construct
MASNDFV

SEQ ID NO: 108323 - protein, 7 aa, synthetic construct
WTAGHMT

SEQ ID NO: 108324 - protein, 7 aa, synthetic construct
HKIDKIP

SEQ ID NO: 108325 - protein, 7 aa, synthetic construct
HIHIKTD

SEQ ID NO: 108326 - protein, 7 aa, synthetic construct
EMVQRGH

SEQ ID NO: 108327 - protein, 7 aa, synthetic construct
PAIPPYG

SEQ ID NO: 108328 - protein, 7 aa, synthetic construct
KVQDRPT

SEQ ID NO: 108329 - protein, 7 aa, synthetic construct
SIDQHTF

SEQ ID NO: 108330 - protein, 7 aa, synthetic construct
VHAITSE

SEQ ID NO: 108331 - protein, 7 aa, synthetic construct
AMHDAKF

SEQ ID NO: 108332 - protein, 7 aa, synthetic construct
THEADAP

SEQ ID NO: 108333 - protein, 7 aa, synthetic construct
RMHSAYD

SEQ ID NO: 108334 - protein, 7 aa, synthetic construct
HMHGGVF

SEQ ID NO: 108335 - protein, 7 aa, synthetic construct
THDEYRH

SEQ ID NO: 108336 - protein, 7 aa, synthetic construct
MGDKAWN

SEQ ID NO: 108337 - protein, 7 aa, synthetic construct
YSLVKSE

SEQ ID NO: 108338 - protein, 7 aa, synthetic construct
LQKIKQE

SEQ ID NO: 108339 - protein, 7 aa, synthetic construct
IIERYSK

SEQ ID NO: 108340 - protein, 7 aa, synthetic construct
RTDPGEK

SEQ ID NO: 108341 - protein, 7 aa, synthetic construct
VSVLIGE

SEQ ID NO: 108342 - protein, 7 aa, synthetic construct
MWKLGEG

SEQ ID NO: 108343 - protein, 7 aa, synthetic construct
KIEGENI

SEQ ID NO: 108344 - protein, 7 aa, synthetic construct
SHYPDQR

SEQ ID NO: 108345 - protein, 7 aa, synthetic construct
HPEVLKQ

SEQ ID NO: 108346 - protein, 7 aa, synthetic construct
YAQVGVM

SEQ ID NO: 108347 - protein, 7 aa, synthetic construct
DVSEKRW

SEQ ID NO: 108348 - protein, 7 aa, synthetic construct
LILGAEL

SEQ ID NO: 108349 - protein, 7 aa, synthetic construct
FGPPGLK

SEQ ID NO: 108350 - protein, 7 aa, synthetic construct
VFHDKSI

SEQ ID NO: 108351 - protein, 7 aa, synthetic construct
HMGLNGV

SEQ ID NO: 108352 - protein, 7 aa, synthetic construct
FVGDVMG

SEQ ID NO: 108353 - protein, 7 aa, synthetic construct
KVNANKE

SEQ ID NO: 108354 - protein, 7 aa, synthetic construct
AYVASDG

SEQ ID NO: 108355 - protein, 7 aa, synthetic construct
WELRGAV

SEQ ID NO: 108356 - protein, 7 aa, synthetic construct
GNQGVFE

SEQ ID NO: 108357 - protein, 7 aa, synthetic construct
AYQNNAS

SEQ ID NO: 108358 - protein, 7 aa, synthetic construct
WPQQSTM

SEQ ID NO: 108359 - protein, 7 aa, synthetic construct
KEMGTAC

SEQ ID NO: 108360 - protein, 7 aa, synthetic construct
FRRDLVT

SEQ ID NO: 108361 - protein, 7 aa, synthetic construct
KDHHHDR

SEQ ID NO: 108362 - protein, 7 aa, synthetic construct
MANLLGP

SEQ ID NO: 108363 - protein, 7 aa, synthetic construct
GTHSGLS

SEQ ID NO: 108364 - protein, 7 aa, synthetic construct
RDDAHER

SEQ ID NO: 108365 - protein, 7 aa, synthetic construct
KDMIDKW

SEQ ID NO: 108366 - protein, 7 aa, synthetic construct
VKMGDYH

SEQ ID NO: 108367 - protein, 7 aa, synthetic construct
EWAPKAV

SEQ ID NO: 108368 - protein, 7 aa, synthetic construct
KRQDPNN

SEQ ID NO: 108369 - protein, 7 aa, synthetic construct
PAADTAF

SEQ ID NO: 108370 - protein, 7 aa, synthetic construct
KNAATME

SEQ ID NO: 108371 - protein, 7 aa, synthetic construct
PNNHNKE

SEQ ID NO: 108372 - protein, 7 aa, synthetic construct
PAKEYSL

SEQ ID NO: 108373 - protein, 7 aa, synthetic construct
EVKNFLS

SEQ ID NO: 108374 - protein, 7 aa, synthetic construct
IKQMEAE

SEQ ID NO: 108375 - protein, 7 aa, synthetic construct
EREGTKG

SEQ ID NO: 108376 - protein, 7 aa, synthetic construct
RTEHAEY

SEQ ID NO: 108377 - protein, 7 aa, synthetic construct
IPGHFKH

SEQ ID NO: 108378 - protein, 7 aa, synthetic construct
AVHYNPA

SEQ ID NO: 108379 - protein, 7 aa, synthetic construct
GKQKMLD

SEQ ID NO: 108380 - protein, 7 aa, synthetic construct
FDHVGLR

SEQ ID NO: 108381 - protein, 7 aa, synthetic construct
THFEANH

SEQ ID NO: 108382 - protein, 7 aa, synthetic construct
KIANGIF

SEQ ID NO: 108383 - protein, 7 aa, synthetic construct
MNAFGQD

SEQ ID NO: 108384 - protein, 7 aa, synthetic construct
HVINQGM

SEQ ID NO: 108385 - protein, 7 aa, synthetic construct
YKHHIPI

SEQ ID NO: 108386 - protein, 7 aa, synthetic construct
PDIAIQK

SEQ ID NO: 108387 - protein, 7 aa, synthetic construct
LIKANGP

SEQ ID NO: 108388 - protein, 7 aa, synthetic construct
SEIVMLP

SEQ ID NO: 108389 - protein, 7 aa, synthetic construct
DGYHNRN

SEQ ID NO: 108390 - protein, 7 aa, synthetic construct
VMSAKDH

SEQ ID NO: 108391 - protein, 7 aa, synthetic construct
PEHNKNR

SEQ ID NO: 108392 - protein, 7 aa, synthetic construct
AGSWLNE

SEQ ID NO: 108393 - protein, 7 aa, synthetic construct
SPDLSMK

SEQ ID NO: 108394 - protein, 7 aa, synthetic construct
SQAVQAS

SEQ ID NO: 108395 - protein, 7 aa, synthetic construct
MEMMHKA

SEQ ID NO: 108396 - protein, 7 aa, synthetic construct
LFTVDHD

SEQ ID NO: 108397 - protein, 7 aa, synthetic construct
FIHQAEG

SEQ ID NO: 108398 - protein, 7 aa, synthetic construct
IHTSDAM

SEQ ID NO: 108399 - protein, 7 aa, synthetic construct
TKLTAWD

SEQ ID NO: 108400 - protein, 7 aa, synthetic construct
NTAMEHS

SEQ ID NO: 108401 - protein, 7 aa, synthetic construct
FGERQHQ

SEQ ID NO: 108402 - protein, 7 aa, synthetic construct
SYVGILE

SEQ ID NO: 108403 - protein, 7 aa, synthetic construct
VYSVHVG

SEQ ID NO: 108404 - protein, 7 aa, synthetic construct
WVKSLQN

SEQ ID NO: 108405 - protein, 7 aa, synthetic construct
ESPRWAD

SEQ ID NO: 108406 - protein, 7 aa, synthetic construct
QPIHVEK

SEQ ID NO: 108407 - protein, 7 aa, synthetic construct
LTMISNV

SEQ ID NO: 108408 - protein, 7 aa, synthetic construct
ELDMRRR

SEQ ID NO: 108409 - protein, 7 aa, synthetic construct
QGVKSSS

SEQ ID NO: 108410 - protein, 7 aa, synthetic construct
THSHNYH

SEQ ID NO: 108411 - protein, 7 aa, synthetic construct
KDAEKME

SEQ ID NO: 108412 - protein, 7 aa, synthetic construct
HQQILDA

SEQ ID NO: 108413 - protein, 7 aa, synthetic construct
VKMNNQG

SEQ ID NO: 108414 - protein, 7 aa, synthetic construct
DIGPSSS

SEQ ID NO: 108415 - protein, 7 aa, synthetic construct
MPHTIGI

SEQ ID NO: 108416 - protein, 7 aa, synthetic construct
NDINRSY

SEQ ID NO: 108417 - protein, 7 aa, synthetic construct
NGLRAET

SEQ ID NO: 108418 - protein, 7 aa, synthetic construct
FERPERF

SEQ ID NO: 108419 - protein, 7 aa, synthetic construct
ILGGHFP

SEQ ID NO: 108420 - protein, 7 aa, synthetic construct
KKDMGGN

SEQ ID NO: 108421 - protein, 7 aa, synthetic construct
SKMDAEH

SEQ ID NO: 108422 - protein, 7 aa, synthetic construct
FQRGDNQ

SEQ ID NO: 108423 - protein, 7 aa, synthetic construct
NKNSGLA

SEQ ID NO: 108424 - protein, 7 aa, synthetic construct
YGAVEMR

SEQ ID NO: 108425 - protein, 7 aa, synthetic construct
KSVENVY

SEQ ID NO: 108426 - protein, 7 aa, synthetic construct
IVTHSSY

SEQ ID NO: 108427 - protein, 7 aa, synthetic construct
LQQIHSG

SEQ ID NO: 108428 - protein, 7 aa, synthetic construct
RVESPQV

SEQ ID NO: 108429 - protein, 7 aa, synthetic construct
MRPSAEC

SEQ ID NO: 108430 - protein, 7 aa, synthetic construct
TTELKAG

SEQ ID NO: 108431 - protein, 7 aa, synthetic construct
FPPQEST

SEQ ID NO: 108432 - protein, 7 aa, synthetic construct
AFLNKDL

SEQ ID NO: 108433 - protein, 7 aa, synthetic construct
LSPTPTL

SEQ ID NO: 108434 - protein, 7 aa, synthetic construct
IPSDLRD

SEQ ID NO: 108435 - protein, 7 aa, synthetic construct
PQRHNDK

SEQ ID NO: 108436 - protein, 7 aa, synthetic construct
PNHQEFP

SEQ ID NO: 108437 - protein, 7 aa, synthetic construct
MPLQANI

SEQ ID NO: 108438 - protein, 7 aa, synthetic construct
NKSHHAP

SEQ ID NO: 108439 - protein, 7 aa, synthetic construct
FAATPNE

SEQ ID NO: 108440 - protein, 7 aa, synthetic construct
DDKRVYF

SEQ ID NO: 108441 - protein, 7 aa, synthetic construct
SLKIDPD

SEQ ID NO: 108442 - protein, 7 aa, synthetic construct
VVHDKEL

SEQ ID NO: 108443 - protein, 7 aa, synthetic construct
PMPRGFE

SEQ ID NO: 108444 - protein, 7 aa, synthetic construct
AIRPETN

SEQ ID NO: 108445 - protein, 7 aa, synthetic construct
WRNMDHG

SEQ ID NO: 108446 - protein, 7 aa, synthetic construct
PHHAASK

SEQ ID NO: 108447 - protein, 7 aa, synthetic construct
FVGDHST

SEQ ID NO: 108448 - protein, 7 aa, synthetic construct
DPIQLRK

SEQ ID NO: 108449 - protein, 7 aa, synthetic construct
EFGVHKD

SEQ ID NO: 108450 - protein, 7 aa, synthetic construct
NVGVEKI

SEQ ID NO: 108451 - protein, 7 aa, synthetic construct
GDGTPKY

SEQ ID NO: 108452 - protein, 7 aa, synthetic construct
TRSPTSM

SEQ ID NO: 108453 - protein, 7 aa, synthetic construct
KTVSNSP

SEQ ID NO: 108454 - protein, 7 aa, synthetic construct
SQLKIGY

SEQ ID NO: 108455 - protein, 7 aa, synthetic construct
KTGWDQD

SEQ ID NO: 108456 - protein, 7 aa, synthetic construct
EYLNKID

SEQ ID NO: 108457 - protein, 7 aa, synthetic construct
VDNNWTP

SEQ ID NO: 108458 - protein, 7 aa, synthetic construct
HVRDHRV

SEQ ID NO: 108459 - protein, 7 aa, synthetic construct
EKDTLPM

SEQ ID NO: 108460 - protein, 7 aa, synthetic construct
TMSKTGP

SEQ ID NO: 108461 - protein, 7 aa, synthetic construct
MMGKNFE

SEQ ID NO: 108462 - protein, 7 aa, synthetic construct
WQHKTVL

SEQ ID NO: 108463 - protein, 7 aa, synthetic construct
LVHRPVG

SEQ ID NO: 108464 - protein, 7 aa, synthetic construct
RDTLHEG

SEQ ID NO: 108465 - protein, 7 aa, synthetic construct
NHSRLQF

SEQ ID NO: 108466 - protein, 7 aa, synthetic construct
YHEKVTA

SEQ ID NO: 108467 - protein, 7 aa, synthetic construct
NGGKDYD

SEQ ID NO: 108468 - protein, 7 aa, synthetic construct
ISSEWHI

SEQ ID NO: 108469 - protein, 7 aa, synthetic construct
AGSNPHL

SEQ ID NO: 108470 - protein, 7 aa, synthetic construct
TMPPALV

SEQ ID NO: 108471 - protein, 7 aa, synthetic construct
SQSEFNH

SEQ ID NO: 108472 - protein, 7 aa, synthetic construct
NNVQHAI

SEQ ID NO: 108473 - protein, 7 aa, synthetic construct
LTEMHPI

SEQ ID NO: 108474 - protein, 7 aa, synthetic construct
GQVGGEP

SEQ ID NO: 108475 - protein, 7 aa, synthetic construct
HQVQGTN

SEQ ID NO: 108476 - protein, 7 aa, synthetic construct
DDFNPTK

SEQ ID NO: 108477 - protein, 7 aa, synthetic construct
IDAHSFP

SEQ ID NO: 108478 - protein, 7 aa, synthetic construct
DPYKENQ

SEQ ID NO: 108479 - protein, 7 aa, synthetic construct
WDDLKSL

SEQ ID NO: 108480 - protein, 7 aa, synthetic construct
MAHINYP

SEQ ID NO: 108481 - protein, 7 aa, synthetic construct
REGFNHT

SEQ ID NO: 108482 - protein, 7 aa, synthetic construct
YVKVDDL

SEQ ID NO: 108483 - protein, 7 aa, synthetic construct
LRHGYKE

SEQ ID NO: 108484 - protein, 7 aa, synthetic construct
AHGKREA

SEQ ID NO: 108485 - protein, 7 aa, synthetic construct
VNHERLS

SEQ ID NO: 108486 - protein, 7 aa, synthetic construct
FGNKFPE

SEQ ID NO: 108487 - protein, 7 aa, synthetic construct
GNIAHLI

SEQ ID NO: 108488 - protein, 7 aa, synthetic construct
SDSTIHM

SEQ ID NO: 108489 - protein, 7 aa, synthetic construct
QNQTPDH

SEQ ID NO: 108490 - protein, 7 aa, synthetic construct
MAAFPKN

SEQ ID NO: 108491 - protein, 7 aa, synthetic construct
AHRIIMD

SEQ ID NO: 108492 - protein, 7 aa, synthetic construct
TNNQLTH

SEQ ID NO: 108493 - protein, 7 aa, synthetic construct
SEPTGFH

SEQ ID NO: 108494 - protein, 7 aa, synthetic construct
VQRSSEC

SEQ ID NO: 108495 - protein, 7 aa, synthetic construct
EPDKNHN

SEQ ID NO: 108496 - protein, 7 aa, synthetic construct
SIDGYKV

SEQ ID NO: 108497 - protein, 7 aa, synthetic construct
TGFVDVK

SEQ ID NO: 108498 - protein, 7 aa, synthetic construct
EEKHYEH

SEQ ID NO: 108499 - protein, 7 aa, synthetic construct
TYSAELK

SEQ ID NO: 108500 - protein, 7 aa, synthetic construct
KSAQFLV

SEQ ID NO: 108501 - protein, 7 aa, synthetic construct
NNQIGAK

SEQ ID NO: 108502 - protein, 7 aa, synthetic construct
MRADPQT

SEQ ID NO: 108503 - protein, 7 aa, synthetic construct
EGKIANW

SEQ ID NO: 108504 - protein, 7 aa, synthetic construct
MKSNNGF

SEQ ID NO: 108505 - protein, 7 aa, synthetic construct
QVQRPMF

SEQ ID NO: 108506 - protein, 7 aa, synthetic construct
ANHSTNG

SEQ ID NO: 108507 - protein, 7 aa, synthetic construct
DYQQGHK

SEQ ID NO: 108508 - protein, 7 aa, synthetic construct
FKDRFMQ

SEQ ID NO: 108509 - protein, 7 aa, synthetic construct
MASGELY

SEQ ID NO: 108510 - protein, 7 aa, synthetic construct
NIQIKVH

SEQ ID NO: 108511 - protein, 7 aa, synthetic construct
ATPTNKW

SEQ ID NO: 108512 - protein, 7 aa, synthetic construct
ILHDSQF

SEQ ID NO: 108513 - protein, 7 aa, synthetic construct
IKTGIAI

SEQ ID NO: 108514 - protein, 7 aa, synthetic construct
NTAEFSK

SEQ ID NO: 108515 - protein, 7 aa, synthetic construct
FVGDYMK

SEQ ID NO: 108516 - protein, 7 aa, synthetic construct
QAWQKAS

SEQ ID NO: 108517 - protein, 7 aa, synthetic construct
GYREIKT

SEQ ID NO: 108518 - protein, 7 aa, synthetic construct
QNARFMD

SEQ ID NO: 108519 - protein, 7 aa, synthetic construct
NMKNEAW

SEQ ID NO: 108520 - protein, 7 aa, synthetic construct
WLPIARD

SEQ ID NO: 108521 - protein, 7 aa, synthetic construct
YAGHPLI

SEQ ID NO: 108522 - protein, 7 aa, synthetic construct
HANERFT

SEQ ID NO: 108523 - protein, 7 aa, synthetic construct
EYGFAVE

SEQ ID NO: 108524 - protein, 7 aa, synthetic construct
LDNPSHK

SEQ ID NO: 108525 - protein, 7 aa, synthetic construct
DVQRLPA

SEQ ID NO: 108526 - protein, 7 aa, synthetic construct
EEPKREV

SEQ ID NO: 108527 - protein, 7 aa, synthetic construct
NERDFTF

SEQ ID NO: 108528 - protein, 7 aa, synthetic construct
YELRVAP

SEQ ID NO: 108529 - protein, 7 aa, synthetic construct
LPIIKER

SEQ ID NO: 108530 - protein, 7 aa, synthetic construct
QDPATGF

SEQ ID NO: 108531 - protein, 7 aa, synthetic construct
SLISQID

SEQ ID NO: 108532 - protein, 7 aa, synthetic construct
WVHQHED

SEQ ID NO: 108533 - protein, 7 aa, synthetic construct
GQKANTA

SEQ ID NO: 108534 - protein, 7 aa, synthetic construct
NESGRQW

SEQ ID NO: 108535 - protein, 7 aa, synthetic construct
WQLYKVE

SEQ ID NO: 108536 - protein, 7 aa, synthetic construct
IPFNTAE

SEQ ID NO: 108537 - protein, 7 aa, synthetic construct
PHATDNP

SEQ ID NO: 108538 - protein, 7 aa, synthetic construct
HFDNADI

SEQ ID NO: 108539 - protein, 7 aa, synthetic construct
NKVDGTS

SEQ ID NO: 108540 - protein, 7 aa, synthetic construct
QMKLNDD

SEQ ID NO: 108541 - protein, 7 aa, synthetic construct
TVTPNWS

SEQ ID NO: 108542 - protein, 7 aa, synthetic construct
ETKILTT

SEQ ID NO: 108543 - protein, 7 aa, synthetic construct
QMPNTSY

SEQ ID NO: 108544 - protein, 7 aa, synthetic construct
DWHSKQV

SEQ ID NO: 108545 - protein, 7 aa, synthetic construct
VPLQRMA

SEQ ID NO: 108546 - protein, 7 aa, synthetic construct
YLQTQHD

SEQ ID NO: 108547 - protein, 7 aa, synthetic construct
PHTQQYA

SEQ ID NO: 108548 - protein, 7 aa, synthetic construct
IDPSARD

SEQ ID NO: 108549 - protein, 7 aa, synthetic construct
FMAEVQK

SEQ ID NO: 108550 - protein, 7 aa, synthetic construct
LADFEKM

SEQ ID NO: 108551 - protein, 7 aa, synthetic construct
MGTHINF

SEQ ID NO: 108552 - protein, 7 aa, synthetic construct
GKPEWDM

SEQ ID NO: 108553 - protein, 7 aa, synthetic construct
SVNMGIA

SEQ ID NO: 108554 - protein, 7 aa, synthetic construct
MDLHFKS

SEQ ID NO: 108555 - protein, 7 aa, synthetic construct
KQATMRD

SEQ ID NO: 108556 - protein, 7 aa, synthetic construct
THGDTKD

SEQ ID NO: 108557 - protein, 7 aa, synthetic construct
LGHQQEM

SEQ ID NO: 108558 - protein, 7 aa, synthetic construct
HALDTRA

SEQ ID NO: 108559 - protein, 7 aa, synthetic construct
SPVHPDH

SEQ ID NO: 108560 - protein, 7 aa, synthetic construct
GALVATR

SEQ ID NO: 108561 - protein, 7 aa, synthetic construct
HMNGMQI

SEQ ID NO: 108562 - protein, 7 aa, synthetic construct
HGGENRL

SEQ ID NO: 108563 - protein, 7 aa, synthetic construct
HMDNRSS

SEQ ID NO: 108564 - protein, 7 aa, synthetic construct
RDEAFKY

SEQ ID NO: 108565 - protein, 7 aa, synthetic construct
MHAEHAM

SEQ ID NO: 108566 - protein, 7 aa, synthetic construct
VIHGLSG

SEQ ID NO: 108567 - protein, 7 aa, synthetic construct
SYQQEVR

SEQ ID NO: 108568 - protein, 7 aa, synthetic construct
SPPEFVY

SEQ ID NO: 108569 - protein, 7 aa, synthetic construct
GHVPKST

SEQ ID NO: 108570 - protein, 7 aa, synthetic construct
KNNDLPL

SEQ ID NO: 108571 - protein, 7 aa, synthetic construct
HEHPRES

SEQ ID NO: 108572 - protein, 7 aa, synthetic construct
HQHMITA

SEQ ID NO: 108573 - protein, 7 aa, synthetic construct
MTMVGQL

SEQ ID NO: 108574 - protein, 7 aa, synthetic construct
HHRPPSQ

SEQ ID NO: 108575 - protein, 7 aa, synthetic construct
NVAGFQT

SEQ ID NO: 108576 - protein, 7 aa, synthetic construct
NSRASRD

SEQ ID NO: 108577 - protein, 7 aa, synthetic construct
ALAAYSA

SEQ ID NO: 108578 - protein, 7 aa, synthetic construct
YMGYHMD

SEQ ID NO: 108579 - protein, 7 aa, synthetic construct
EKDRNEI

SEQ ID NO: 108580 - protein, 7 aa, synthetic construct
ENAHIHR

SEQ ID NO: 108581 - protein, 7 aa, synthetic construct
IRQTSPF

SEQ ID NO: 108582 - protein, 7 aa, synthetic construct
RAIHNTT

SEQ ID NO: 108583 - protein, 7 aa, synthetic construct
AQNHESL

SEQ ID NO: 108584 - protein, 7 aa, synthetic construct
NLSRNNN

SEQ ID NO: 108585 - protein, 7 aa, synthetic construct
NYQNALV

SEQ ID NO: 108586 - protein, 7 aa, synthetic construct
SSGRIIG

SEQ ID NO: 108587 - protein, 7 aa, synthetic construct
IYTSDNG

SEQ ID NO: 108588 - protein, 7 aa, synthetic construct
MAQSYHT

SEQ ID NO: 108589 - protein, 7 aa, synthetic construct
VPNAIAR

SEQ ID NO: 108590 - protein, 7 aa, synthetic construct
PRFDQGV

SEQ ID NO: 108591 - protein, 7 aa, synthetic construct
LFGATYS

SEQ ID NO: 108592 - protein, 7 aa, synthetic construct
KWTRMED

SEQ ID NO: 108593 - protein, 7 aa, synthetic construct
SLPVEQK

SEQ ID NO: 108594 - protein, 7 aa, synthetic construct
REDTTRL

SEQ ID NO: 108595 - protein, 7 aa, synthetic construct
QDEHVKP

SEQ ID NO: 108596 - protein, 7 aa, synthetic construct
MSQIISE

SEQ ID NO: 108597 - protein, 7 aa, synthetic construct
QKANNGF

SEQ ID NO: 108598 - protein, 7 aa, synthetic construct
QQFAKHV

SEQ ID NO: 108599 - protein, 7 aa, synthetic construct
LGDVHVL

SEQ ID NO: 108600 - protein, 7 aa, synthetic construct
IAMGGGF

SEQ ID NO: 108601 - protein, 7 aa, synthetic construct
TTSGHII

SEQ ID NO: 108602 - protein, 7 aa, synthetic construct
FKDANQK

SEQ ID NO: 108603 - protein, 7 aa, synthetic construct
QNIIHGG

SEQ ID NO: 108604 - protein, 7 aa, synthetic construct
HNLMPNI

SEQ ID NO: 108605 - protein, 7 aa, synthetic construct
PGHHKVL

SEQ ID NO: 108606 - protein, 7 aa, synthetic construct
ITERGGR

SEQ ID NO: 108607 - protein, 7 aa, synthetic construct
GTPQFFE

SEQ ID NO: 108608 - protein, 7 aa, synthetic construct
LSVGGMH

SEQ ID NO: 108609 - protein, 7 aa, synthetic construct
SVQDHKR

SEQ ID NO: 108610 - protein, 7 aa, synthetic construct
DRYDVQI

SEQ ID NO: 108611 - protein, 7 aa, synthetic construct
VFADVRN

SEQ ID NO: 108612 - protein, 7 aa, synthetic construct
KNIAPNH

SEQ ID NO: 108613 - protein, 7 aa, synthetic construct
QIDFKQY

SEQ ID NO: 108614 - protein, 7 aa, synthetic construct
DRFQLIA

SEQ ID NO: 108615 - protein, 7 aa, synthetic construct
ILDIRMS

SEQ ID NO: 108616 - protein, 7 aa, synthetic construct
TSKHNIP

SEQ ID NO: 108617 - protein, 7 aa, synthetic construct
SYKIRDS

SEQ ID NO: 108618 - protein, 7 aa, synthetic construct
TVLPKDR

SEQ ID NO: 108619 - protein, 7 aa, synthetic construct
GPGINFS

SEQ ID NO: 108620 - protein, 7 aa, synthetic construct
SKALAMM

SEQ ID NO: 108621 - protein, 7 aa, synthetic construct
GWKDSEG

SEQ ID NO: 108622 - protein, 7 aa, synthetic construct
ETVGVSR

SEQ ID NO: 108623 - protein, 7 aa, synthetic construct
VHNNKAD

SEQ ID NO: 108624 - protein, 7 aa, synthetic construct
GVKTRQE

SEQ ID NO: 108625 - protein, 7 aa, synthetic construct
FNAPLSE

SEQ ID NO: 108626 - protein, 7 aa, synthetic construct
ESSQAKE

SEQ ID NO: 108627 - protein, 7 aa, synthetic construct
TMTDIQR

SEQ ID NO: 108628 - protein, 7 aa, synthetic construct
YINNNIQ

SEQ ID NO: 108629 - protein, 7 aa, synthetic construct
PAVEDRN

SEQ ID NO: 108630 - protein, 7 aa, synthetic construct
LRPNESD

SEQ ID NO: 108631 - protein, 7 aa, synthetic construct
HSPRFEM

SEQ ID NO: 108632 - protein, 7 aa, synthetic construct
SQFVDFA

SEQ ID NO: 108633 - protein, 7 aa, synthetic construct
TPMYIRG

SEQ ID NO: 108634 - protein, 7 aa, synthetic construct
EAAKPDG

SEQ ID NO: 108635 - protein, 7 aa, synthetic construct
SFADPTL

SEQ ID NO: 108636 - protein, 7 aa, synthetic construct
ADVRGMV

SEQ ID NO: 108637 - protein, 7 aa, synthetic construct
MAKWQTP

SEQ ID NO: 108638 - protein, 7 aa, synthetic construct
IGVAMNR

SEQ ID NO: 108639 - protein, 7 aa, synthetic construct
APNFPQY

SEQ ID NO: 108640 - protein, 7 aa, synthetic construct
YPKTAGQ

SEQ ID NO: 108641 - protein, 7 aa, synthetic construct
QPVRFSG

SEQ ID NO: 108642 - protein, 7 aa, synthetic construct
YKIQDIT

SEQ ID NO: 108643 - protein, 7 aa, synthetic construct
DASQGKN

SEQ ID NO: 108644 - protein, 7 aa, synthetic construct
HFRGMPP

SEQ ID NO: 108645 - protein, 7 aa, synthetic construct
TITTSLQ

SEQ ID NO: 108646 - protein, 7 aa, synthetic construct
YTRAIVD

SEQ ID NO: 108647 - protein, 7 aa, synthetic construct
ATTNYAM

SEQ ID NO: 108648 - protein, 7 aa, synthetic construct
HALNGNG

SEQ ID NO: 108649 - protein, 7 aa, synthetic construct
HYVTKFE

SEQ ID NO: 108650 - protein, 7 aa, synthetic construct
YNEAHRE

SEQ ID NO: 108651 - protein, 7 aa, synthetic construct
LDAHVIQ

SEQ ID NO: 108652 - protein, 7 aa, synthetic construct
QDRGHYL

SEQ ID NO: 108653 - protein, 7 aa, synthetic construct
DKHHDQD

SEQ ID NO: 108654 - protein, 7 aa, synthetic construct
HHIDGEP

SEQ ID NO: 108655 - protein, 7 aa, synthetic construct
PPGRHEW

SEQ ID NO: 108656 - protein, 7 aa, synthetic construct
KPIDSLQ

SEQ ID NO: 108657 - protein, 7 aa, synthetic construct
FKTFSGQ

SEQ ID NO: 108658 - protein, 7 aa, synthetic construct
NYDLGHA

SEQ ID NO: 108659 - protein, 7 aa, synthetic construct
PWAAADE

SEQ ID NO: 108660 - protein, 7 aa, synthetic construct
QVDSKTA

SEQ ID NO: 108661 - protein, 7 aa, synthetic construct
LEDWVTA

SEQ ID NO: 108662 - protein, 7 aa, synthetic construct
LMAQNDI

SEQ ID NO: 108663 - protein, 7 aa, synthetic construct
PSQPDHF

SEQ ID NO: 108664 - protein, 7 aa, synthetic construct
KITQSEL

SEQ ID NO: 108665 - protein, 7 aa, synthetic construct
LADVIKH

SEQ ID NO: 108666 - protein, 7 aa, synthetic construct
WESHAIA

SEQ ID NO: 108667 - protein, 7 aa, synthetic construct
KMEPYTL

SEQ ID NO: 108668 - protein, 7 aa, synthetic construct
GADQQRF

SEQ ID NO: 108669 - protein, 7 aa, synthetic construct
HMNVHMT

SEQ ID NO: 108670 - protein, 7 aa, synthetic construct
FNSNVVK

SEQ ID NO: 108671 - protein, 7 aa, synthetic construct
ALNSSYP

SEQ ID NO: 108672 - protein, 7 aa, synthetic construct
NMPNNDL

SEQ ID NO: 108673 - protein, 7 aa, synthetic construct
MHLEIKN

SEQ ID NO: 108674 - protein, 7 aa, synthetic construct
KYEEHQG

SEQ ID NO: 108675 - protein, 7 aa, synthetic construct
MSPGDIR

SEQ ID NO: 108676 - protein, 7 aa, synthetic construct
EKQNNAV

SEQ ID NO: 108677 - protein, 7 aa, synthetic construct
PPLHPNP

SEQ ID NO: 108678 - protein, 7 aa, synthetic construct
TSQQEQS

SEQ ID NO: 108679 - protein, 7 aa, synthetic construct
IMVQPRD

SEQ ID NO: 108680 - protein, 7 aa, synthetic construct
GAKDNVH

SEQ ID NO: 108681 - protein, 7 aa, synthetic construct
NQRSNDA

SEQ ID NO: 108682 - protein, 7 aa, synthetic construct
IKEHVDK

SEQ ID NO: 108683 - protein, 7 aa, synthetic construct
GDQKVLR

SEQ ID NO: 108684 - protein, 7 aa, synthetic construct
SFKNNIN

SEQ ID NO: 108685 - protein, 7 aa, synthetic construct
LSHDTGL

SEQ ID NO: 108686 - protein, 7 aa, synthetic construct
MFGEIPN

SEQ ID NO: 108687 - protein, 7 aa, synthetic construct
MFGIHDE

SEQ ID NO: 108688 - protein, 7 aa, synthetic construct
DTWRNTP

SEQ ID NO: 108689 - protein, 7 aa, synthetic construct
HFDQNAM

SEQ ID NO: 108690 - protein, 7 aa, synthetic construct
AQQTRNF

SEQ ID NO: 108691 - protein, 7 aa, synthetic construct
SQVHSLE

SEQ ID NO: 108692 - protein, 7 aa, synthetic construct
MNPTASI

SEQ ID NO: 108693 - protein, 7 aa, synthetic construct
GKPGAMW

SEQ ID NO: 108694 - protein, 7 aa, synthetic construct
ITEKREW

SEQ ID NO: 108695 - protein, 7 aa, synthetic construct
KGKEPTP

SEQ ID NO: 108696 - protein, 7 aa, synthetic construct
HMEMMTK

SEQ ID NO: 108697 - protein, 7 aa, synthetic construct
DRASRYP

SEQ ID NO: 108698 - protein, 7 aa, synthetic construct
WGVDGRN

SEQ ID NO: 108699 - protein, 7 aa, synthetic construct
LALHHER

SEQ ID NO: 108700 - protein, 7 aa, synthetic construct
NRQYQHS

SEQ ID NO: 108701 - protein, 7 aa, synthetic construct
ALNQRGM

SEQ ID NO: 108702 - protein, 7 aa, synthetic construct
CQKNSDC

SEQ ID NO: 108703 - protein, 7 aa, synthetic construct
GFAVQGT

SEQ ID NO: 108704 - protein, 7 aa, synthetic construct
LNIKNMY

SEQ ID NO: 108705 - protein, 7 aa, synthetic construct
ELPVTHP

SEQ ID NO: 108706 - protein, 7 aa, synthetic construct
NEALRTT

SEQ ID NO: 108707 - protein, 7 aa, synthetic construct
PVEKTEH

SEQ ID NO: 108708 - protein, 7 aa, synthetic construct
THPPYVI

SEQ ID NO: 108709 - protein, 7 aa, synthetic construct
QGSNNSM

SEQ ID NO: 108710 - protein, 7 aa, synthetic construct
ESHPGTG

SEQ ID NO: 108711 - protein, 7 aa, synthetic construct
FQLNIND

SEQ ID NO: 108712 - protein, 7 aa, synthetic construct
EAQRREW

SEQ ID NO: 108713 - protein, 7 aa, synthetic construct
YIKEKHY

SEQ ID NO: 108714 - protein, 7 aa, synthetic construct
QRIQQIA

SEQ ID NO: 108715 - protein, 7 aa, synthetic construct
AQLGYTV

SEQ ID NO: 108716 - protein, 7 aa, synthetic construct
SWGKMVG

SEQ ID NO: 108717 - protein, 7 aa, synthetic construct
TPDGPQS

SEQ ID NO: 108718 - protein, 7 aa, synthetic construct
WNINEPG

SEQ ID NO: 108719 - protein, 7 aa, synthetic construct
NYGNKAP

SEQ ID NO: 108720 - protein, 7 aa, synthetic construct
RPKVEGH

SEQ ID NO: 108721 - protein, 7 aa, synthetic construct
IVHGRQM

SEQ ID NO: 108722 - protein, 7 aa, synthetic construct
MKNGNIP

SEQ ID NO: 108723 - protein, 7 aa, synthetic construct
KSAQKDD

SEQ ID NO: 108724 - protein, 7 aa, synthetic construct
MMQAQQP

SEQ ID NO: 108725 - protein, 7 aa, synthetic construct
QPVAQYV

SEQ ID NO: 108726 - protein, 7 aa, synthetic construct
FPAAKPM

SEQ ID NO: 108727 - protein, 7 aa, synthetic construct
QDDVRPT

SEQ ID NO: 108728 - protein, 7 aa, synthetic construct
ERDRVTL

SEQ ID NO: 108729 - protein, 7 aa, synthetic construct
PFAHGIN

SEQ ID NO: 108730 - protein, 7 aa, synthetic construct
HGHRENS

SEQ ID NO: 108731 - protein, 7 aa, synthetic construct
HGKNFES

SEQ ID NO: 108732 - protein, 7 aa, synthetic construct
PHDSGNS

SEQ ID NO: 108733 - protein, 7 aa, synthetic construct
KLSLSHM

SEQ ID NO: 108734 - protein, 7 aa, synthetic construct
LSESFKF

SEQ ID NO: 108735 - protein, 7 aa, synthetic construct
AVTSPQF

SEQ ID NO: 108736 - protein, 7 aa, synthetic construct
KDNNKGP

SEQ ID NO: 108737 - protein, 7 aa, synthetic construct
NSQDKHH

SEQ ID NO: 108738 - protein, 7 aa, synthetic construct
LSVLQEL

SEQ ID NO: 108739 - protein, 7 aa, synthetic construct
MWEGANE

SEQ ID NO: 108740 - protein, 7 aa, synthetic construct
LARNPHF

SEQ ID NO: 108741 - protein, 7 aa, synthetic construct
VKAQVQD

SEQ ID NO: 108742 - protein, 7 aa, synthetic construct
EDHINDV

SEQ ID NO: 108743 - protein, 7 aa, synthetic construct
AMVIPKA

SEQ ID NO: 108744 - protein, 7 aa, synthetic construct
MVTNHNK

SEQ ID NO: 108745 - protein, 7 aa, synthetic construct
KMTNVPW

SEQ ID NO: 108746 - protein, 7 aa, synthetic construct
VVSKNHN

SEQ ID NO: 108747 - protein, 7 aa, synthetic construct
SDKPKQM

SEQ ID NO: 108748 - protein, 7 aa, synthetic construct
QNMPKGS

SEQ ID NO: 108749 - protein, 7 aa, synthetic construct
EPKGGMP

SEQ ID NO: 108750 - protein, 7 aa, synthetic construct
TAQHVQP

SEQ ID NO: 108751 - protein, 7 aa, synthetic construct
NANQVQV

SEQ ID NO: 108752 - protein, 7 aa, synthetic construct
LRKEHNL

SEQ ID NO: 108753 - protein, 7 aa, synthetic construct
HIVIRAD

SEQ ID NO: 108754 - protein, 7 aa, synthetic construct
GRKYGME

SEQ ID NO: 108755 - protein, 7 aa, synthetic construct
GAQQIHK

SEQ ID NO: 108756 - protein, 7 aa, synthetic construct
YVKYQYD

SEQ ID NO: 108757 - protein, 7 aa, synthetic construct
NIRDFPQ

SEQ ID NO: 108758 - protein, 7 aa, synthetic construct
VWNVPDD

SEQ ID NO: 108759 - protein, 7 aa, synthetic construct
RETAARQ

SEQ ID NO: 108760 - protein, 7 aa, synthetic construct
VAMGLAI

SEQ ID NO: 108761 - protein, 7 aa, synthetic construct
PSTNFDR

SEQ ID NO: 108762 - protein, 7 aa, synthetic construct
NHGEVNV

SEQ ID NO: 108763 - protein, 7 aa, synthetic construct
VSSSKSM

SEQ ID NO: 108764 - protein, 7 aa, synthetic construct
KALTLNP

SEQ ID NO: 108765 - protein, 7 aa, synthetic construct
AKKTIDT

SEQ ID NO: 108766 - protein, 7 aa, synthetic construct
LETHRGM

SEQ ID NO: 108767 - protein, 7 aa, synthetic construct
QSEAFNR

SEQ ID NO: 108768 - protein, 7 aa, synthetic construct
DARTLDA

SEQ ID NO: 108769 - protein, 7 aa, synthetic construct
HIINRPD

SEQ ID NO: 108770 - protein, 7 aa, synthetic construct
YIKKHES

SEQ ID NO: 108771 - protein, 7 aa, synthetic construct
PRNSPQM

SEQ ID NO: 108772 - protein, 7 aa, synthetic construct
GGYHGKE

SEQ ID NO: 108773 - protein, 7 aa, synthetic construct
AKNVGVV

SEQ ID NO: 108774 - protein, 7 aa, synthetic construct
PADASHE

SEQ ID NO: 108775 - protein, 7 aa, synthetic construct
FGLATSI

SEQ ID NO: 108776 - protein, 7 aa, synthetic construct
NPRQMAT

SEQ ID NO: 108777 - protein, 7 aa, synthetic construct
RWNADKT

SEQ ID NO: 108778 - protein, 7 aa, synthetic construct
YYTRQGE

SEQ ID NO: 108779 - protein, 7 aa, synthetic construct
ISNDAHY

SEQ ID NO: 108780 - protein, 7 aa, synthetic construct
TPHNTGM

SEQ ID NO: 108781 - protein, 7 aa, synthetic construct
EYNPRLP

SEQ ID NO: 108782 - protein, 7 aa, synthetic construct
WQNKHIS

SEQ ID NO: 108783 - protein, 7 aa, synthetic construct
HSFKKGE

SEQ ID NO: 108784 - protein, 7 aa, synthetic construct
MPAHRTI

SEQ ID NO: 108785 - protein, 7 aa, synthetic construct
WRHGQDL

SEQ ID NO: 108786 - protein, 7 aa, synthetic construct
HQYVMKP

SEQ ID NO: 108787 - protein, 7 aa, synthetic construct
YADKDIN

SEQ ID NO: 108788 - protein, 7 aa, synthetic construct
TWEVKVE

SEQ ID NO: 108789 - protein, 7 aa, synthetic construct
DTQHMKM

SEQ ID NO: 108790 - protein, 7 aa, synthetic construct
FGGDRPK

SEQ ID NO: 108791 - protein, 7 aa, synthetic construct
VHKTRQE

SEQ ID NO: 108792 - protein, 7 aa, synthetic construct
QDKSTTC

SEQ ID NO: 108793 - protein, 7 aa, synthetic construct
RTNMIDT

SEQ ID NO: 108794 - protein, 7 aa, synthetic construct
DPYRPDK

SEQ ID NO: 108795 - protein, 7 aa, synthetic construct
MIPTPRT

SEQ ID NO: 108796 - protein, 7 aa, synthetic construct
IKVEASW

SEQ ID NO: 108797 - protein, 7 aa, synthetic construct
MKAEEEF

SEQ ID NO: 108798 - protein, 7 aa, synthetic construct
QAAYVHG

SEQ ID NO: 108799 - protein, 7 aa, synthetic construct
PQHDNAP

SEQ ID NO: 108800 - protein, 7 aa, synthetic construct
HSVSQRN

SEQ ID NO: 108801 - protein, 7 aa, synthetic construct
KSNSGQF

SEQ ID NO: 108802 - protein, 7 aa, synthetic construct
MANKNIS

SEQ ID NO: 108803 - protein, 7 aa, synthetic construct
IGATPSV

SEQ ID NO: 108804 - protein, 7 aa, synthetic construct
YTNSDRP

SEQ ID NO: 108805 - protein, 7 aa, synthetic construct
HLNAENF

SEQ ID NO: 108806 - protein, 7 aa, synthetic construct
NQHNTVL

SEQ ID NO: 108807 - protein, 7 aa, synthetic construct
IKHESYT

SEQ ID NO: 108808 - protein, 7 aa, synthetic construct
FKDKDVM

SEQ ID NO: 108809 - protein, 7 aa, synthetic construct
GTIPATV

SEQ ID NO: 108810 - protein, 7 aa, synthetic construct
FQNHPST

SEQ ID NO: 108811 - protein, 7 aa, synthetic construct
YEHHYIG

SEQ ID NO: 108812 - protein, 7 aa, synthetic construct
HPNIPGK

SEQ ID NO: 108813 - protein, 7 aa, synthetic construct
YLQGAHF

SEQ ID NO: 108814 - protein, 7 aa, synthetic construct
HLAYQES

SEQ ID NO: 108815 - protein, 7 aa, synthetic construct
WEHPDKY

SEQ ID NO: 108816 - protein, 7 aa, synthetic construct
IAVPALP

SEQ ID NO: 108817 - protein, 7 aa, synthetic construct
EYKFMQD

SEQ ID NO: 108818 - protein, 7 aa, synthetic construct
LEHGGHF

SEQ ID NO: 108819 - protein, 7 aa, synthetic construct
IALPMAE

SEQ ID NO: 108820 - protein, 7 aa, synthetic construct
AEHLSAM

SEQ ID NO: 108821 - protein, 7 aa, synthetic construct
NLNGPGT

SEQ ID NO: 108822 - protein, 7 aa, synthetic construct
MPKEQNG

SEQ ID NO: 108823 - protein, 7 aa, synthetic construct
QTNLRPG

SEQ ID NO: 108824 - protein, 7 aa, synthetic construct
GNPGRSD

SEQ ID NO: 108825 - protein, 7 aa, synthetic construct
LANTGNW

SEQ ID NO: 108826 - protein, 7 aa, synthetic construct
YSGKDVY

SEQ ID NO: 108827 - protein, 7 aa, synthetic construct
TMVQSTH

SEQ ID NO: 108828 - protein, 7 aa, synthetic construct
DPEKRQY

SEQ ID NO: 108829 - protein, 7 aa, synthetic construct
AYGRNYE

SEQ ID NO: 108830 - protein, 7 aa, synthetic construct
GLFGHTH

SEQ ID NO: 108831 - protein, 7 aa, synthetic construct
PHGPTQA

SEQ ID NO: 108832 - protein, 7 aa, synthetic construct
PKTISGG

SEQ ID NO: 108833 - protein, 7 aa, synthetic construct
NHPQRMN

SEQ ID NO: 108834 - protein, 7 aa, synthetic construct
GKITSTG

SEQ ID NO: 108835 - protein, 7 aa, synthetic construct
KRMADHS

SEQ ID NO: 108836 - protein, 7 aa, synthetic construct
KEQNSQC

SEQ ID NO: 108837 - protein, 7 aa, synthetic construct
ERINKGN

SEQ ID NO: 108838 - protein, 7 aa, synthetic construct
RQMSKVD

SEQ ID NO: 108839 - protein, 7 aa, synthetic construct
SNQYQAR

SEQ ID NO: 108840 - protein, 7 aa, synthetic construct
GFTGHHT

SEQ ID NO: 108841 - protein, 7 aa, synthetic construct
KHSGVSF

SEQ ID NO: 108842 - protein, 7 aa, synthetic construct
RHHPTMT

SEQ ID NO: 108843 - protein, 7 aa, synthetic construct
AHFQESL

SEQ ID NO: 108844 - protein, 7 aa, synthetic construct
ARMLDEL

SEQ ID NO: 108845 - protein, 7 aa, synthetic construct
VRNPLTT

SEQ ID NO: 108846 - protein, 7 aa, synthetic construct
KGDSIHQ

SEQ ID NO: 108847 - protein, 7 aa, synthetic construct
AQGPSIP

SEQ ID NO: 108848 - protein, 7 aa, synthetic construct
LSANLLT

SEQ ID NO: 108849 - protein, 7 aa, synthetic construct
HEMTHRI

SEQ ID NO: 108850 - protein, 7 aa, synthetic construct
LKDDSMA

SEQ ID NO: 108851 - protein, 7 aa, synthetic construct
DTGTTQR

SEQ ID NO: 108852 - protein, 7 aa, synthetic construct
QLVQEKH

SEQ ID NO: 108853 - protein, 7 aa, synthetic construct
TSAITNI

SEQ ID NO: 108854 - protein, 7 aa, synthetic construct
NYNHQKE

SEQ ID NO: 108855 - protein, 7 aa, synthetic construct
MRTPLSP

SEQ ID NO: 108856 - protein, 7 aa, synthetic construct
FRESHMD

SEQ ID NO: 108857 - protein, 7 aa, synthetic construct
TIMKRYD

SEQ ID NO: 108858 - protein, 7 aa, synthetic construct
VPRLTNY

SEQ ID NO: 108859 - protein, 7 aa, synthetic construct
NRLDEHY

SEQ ID NO: 108860 - protein, 7 aa, synthetic construct
QYGNTPT

SEQ ID NO: 108861 - protein, 7 aa, synthetic construct
YREVNEH

SEQ ID NO: 108862 - protein, 7 aa, synthetic construct
LQDFHPH

SEQ ID NO: 108863 - protein, 7 aa, synthetic construct
PLTNARM

SEQ ID NO: 108864 - protein, 7 aa, synthetic construct
GNHPREE

SEQ ID NO: 108865 - protein, 7 aa, synthetic construct
FGNQVLQ

SEQ ID NO: 108866 - protein, 7 aa, synthetic construct
QQPIRPY

SEQ ID NO: 108867 - protein, 7 aa, synthetic construct
GNPVIVA

SEQ ID NO: 108868 - protein, 7 aa, synthetic construct
TGLFARE

SEQ ID NO: 108869 - protein, 7 aa, synthetic construct
KNALVEN

SEQ ID NO: 108870 - protein, 7 aa, synthetic construct
IIAQTSR

SEQ ID NO: 108871 - protein, 7 aa, synthetic construct
THQPLMA

SEQ ID NO: 108872 - protein, 7 aa, synthetic construct
GAQGYSD

SEQ ID NO: 108873 - protein, 7 aa, synthetic construct
QGGRVLM

SEQ ID NO: 108874 - protein, 7 aa, synthetic construct
QLVTRQQ

SEQ ID NO: 108875 - protein, 7 aa, synthetic construct
FVHVEKV

SEQ ID NO: 108876 - protein, 7 aa, synthetic construct
PKSNVGN

SEQ ID NO: 108877 - protein, 7 aa, synthetic construct
TQGMMAE

SEQ ID NO: 108878 - protein, 7 aa, synthetic construct
VGTNKPI

SEQ ID NO: 108879 - protein, 7 aa, synthetic construct
RDAMEHK

SEQ ID NO: 108880 - protein, 7 aa, synthetic construct
QHTNHHT

SEQ ID NO: 108881 - protein, 7 aa, synthetic construct
FKVHGQE

SEQ ID NO: 108882 - protein, 7 aa, synthetic construct
ADKATQW

SEQ ID NO: 108883 - protein, 7 aa, synthetic construct
RSDMYMA

SEQ ID NO: 108884 - protein, 7 aa, synthetic construct
DRSSMSM

SEQ ID NO: 108885 - protein, 7 aa, synthetic construct
INGSDPY

SEQ ID NO: 108886 - protein, 7 aa, synthetic construct
QINSQMA

SEQ ID NO: 108887 - protein, 7 aa, synthetic construct
AYLHMEG

SEQ ID NO: 108888 - protein, 7 aa, synthetic construct
SNKGSQS

SEQ ID NO: 108889 - protein, 7 aa, synthetic construct
PKQIKEE

SEQ ID NO: 108890 - protein, 7 aa, synthetic construct
LVGLATL

SEQ ID NO: 108891 - protein, 7 aa, synthetic construct
RAGLGLI

SEQ ID NO: 108892 - protein, 7 aa, synthetic construct
FKDQVSS

SEQ ID NO: 108893 - protein, 7 aa, synthetic construct
LSLPMNS

SEQ ID NO: 108894 - protein, 7 aa, synthetic construct
FDQSSIN

SEQ ID NO: 108895 - protein, 7 aa, synthetic construct
LTAPPLP

SEQ ID NO: 108896 - protein, 7 aa, synthetic construct
IAVEGKD

SEQ ID NO: 108897 - protein, 7 aa, synthetic construct
GIDRMSD

SEQ ID NO: 108898 - protein, 7 aa, synthetic construct
DVAFGRP

SEQ ID NO: 108899 - protein, 7 aa, synthetic construct
DLNYMRG

SEQ ID NO: 108900 - protein, 7 aa, synthetic construct
AQLPNII

SEQ ID NO: 108901 - protein, 7 aa, synthetic construct
NASNFSN

SEQ ID NO: 108902 - protein, 7 aa, synthetic construct
GTGRESP

SEQ ID NO: 108903 - protein, 7 aa, synthetic construct
PQKHPTD

SEQ ID NO: 108904 - protein, 7 aa, synthetic construct
MMDRHLE

SEQ ID NO: 108905 - protein, 7 aa, synthetic construct
KGYPLVG

SEQ ID NO: 108906 - protein, 7 aa, synthetic construct
VIVHQID

SEQ ID NO: 108907 - protein, 7 aa, synthetic construct
NLRIGNI

SEQ ID NO: 108908 - protein, 7 aa, synthetic construct
YRHPIEH

SEQ ID NO: 108909 - protein, 7 aa, synthetic construct
SPQGDKP

SEQ ID NO: 108910 - protein, 7 aa, synthetic construct
IYGGTDV

SEQ ID NO: 108911 - protein, 7 aa, synthetic construct
AFKDQHK

SEQ ID NO: 108912 - protein, 7 aa, synthetic construct
GFEPKTA

SEQ ID NO: 108913 - protein, 7 aa, synthetic construct
NTQQAHV

SEQ ID NO: 108914 - protein, 7 aa, synthetic construct
NQVSSKA

SEQ ID NO: 108915 - protein, 7 aa, synthetic construct
MAQQTWA

SEQ ID NO: 108916 - protein, 7 aa, synthetic construct
WNGTDLS

SEQ ID NO: 108917 - protein, 7 aa, synthetic construct
SSMGTDK

SEQ ID NO: 108918 - protein, 7 aa, synthetic construct
DAHYVMA

SEQ ID NO: 108919 - protein, 7 aa, synthetic construct
WNTQESP

SEQ ID NO: 108920 - protein, 7 aa, synthetic construct
YREAQEM

SEQ ID NO: 108921 - protein, 7 aa, synthetic construct
FPRGYVA

SEQ ID NO: 108922 - protein, 7 aa, synthetic construct
NGKQTSP

SEQ ID NO: 108923 - protein, 7 aa, synthetic construct
HDTPVKE

SEQ ID NO: 108924 - protein, 7 aa, synthetic construct
NMQNSQV

SEQ ID NO: 108925 - protein, 7 aa, synthetic construct
QHARTER

SEQ ID NO: 108926 - protein, 7 aa, synthetic construct
KHVQGLD

SEQ ID NO: 108927 - protein, 7 aa, synthetic construct
LLEAGQF

SEQ ID NO: 108928 - protein, 7 aa, synthetic construct
DANSGRS

SEQ ID NO: 108929 - protein, 7 aa, synthetic construct
SSYNRDP

SEQ ID NO: 108930 - protein, 7 aa, synthetic construct
SPRKDSD

SEQ ID NO: 108931 - protein, 7 aa, synthetic construct
VQKSHQM

SEQ ID NO: 108932 - protein, 7 aa, synthetic construct
TDVGVHN

SEQ ID NO: 108933 - protein, 7 aa, synthetic construct
GALQRER

SEQ ID NO: 108934 - protein, 7 aa, synthetic construct
ALVPMHN

SEQ ID NO: 108935 - protein, 7 aa, synthetic construct
GIYSSHH

SEQ ID NO: 108936 - protein, 7 aa, synthetic construct
GRVQEEG

SEQ ID NO: 108937 - protein, 7 aa, synthetic construct
YMSSPTR

SEQ ID NO: 108938 - protein, 7 aa, synthetic construct
RAHNEDM

SEQ ID NO: 108939 - protein, 7 aa, synthetic construct
AKSHVIM

SEQ ID NO: 108940 - protein, 7 aa, synthetic construct
IMNGPLG

SEQ ID NO: 108941 - protein, 7 aa, synthetic construct
LKNPNQA

SEQ ID NO: 108942 - protein, 7 aa, synthetic construct
HYSVEAP

SEQ ID NO: 108943 - protein, 7 aa, synthetic construct
NNVDGSS

SEQ ID NO: 108944 - protein, 7 aa, synthetic construct
KNGTNVV

SEQ ID NO: 108945 - protein, 7 aa, synthetic construct
FGGPLGP

SEQ ID NO: 108946 - protein, 7 aa, synthetic construct
DRNAQIG

SEQ ID NO: 108947 - protein, 7 aa, synthetic construct
HGAGDLR

SEQ ID NO: 108948 - protein, 7 aa, synthetic construct
QRDYIGN

SEQ ID NO: 108949 - protein, 7 aa, synthetic construct
QVKPVTA

SEQ ID NO: 108950 - protein, 7 aa, synthetic construct
QIENQRQ

SEQ ID NO: 108951 - protein, 7 aa, synthetic construct
GTMRQYA

SEQ ID NO: 108952 - protein, 7 aa, synthetic construct
VAVKVPI

SEQ ID NO: 108953 - protein, 7 aa, synthetic construct
KANSTVA

SEQ ID NO: 108954 - protein, 7 aa, synthetic construct
ELIGVVR

SEQ ID NO: 108955 - protein, 7 aa, synthetic construct
PKTAQYY

SEQ ID NO: 108956 - protein, 7 aa, synthetic construct
DKALPQT

SEQ ID NO: 108957 - protein, 7 aa, synthetic construct
KDGLMTS

SEQ ID NO: 108958 - protein, 7 aa, synthetic construct
GKTVSMA

SEQ ID NO: 108959 - protein, 7 aa, synthetic construct
IEIRDRT

SEQ ID NO: 108960 - protein, 7 aa, synthetic construct
KKEEFGG

SEQ ID NO: 108961 - protein, 7 aa, synthetic construct
KHKQVDL

SEQ ID NO: 108962 - protein, 7 aa, synthetic construct
NRYREEH

SEQ ID NO: 108963 - protein, 7 aa, synthetic construct
LGSLIFE

SEQ ID NO: 108964 - protein, 7 aa, synthetic construct
GILSTQI

SEQ ID NO: 108965 - protein, 7 aa, synthetic construct
WMNIAQP

SEQ ID NO: 108966 - protein, 7 aa, synthetic construct
VEWSKVG

SEQ ID NO: 108967 - protein, 7 aa, synthetic construct
PQSGVHY

SEQ ID NO: 108968 - protein, 7 aa, synthetic construct
NKPYCSA

SEQ ID NO: 108969 - protein, 7 aa, synthetic construct
YGSASPL

SEQ ID NO: 108970 - protein, 7 aa, synthetic construct
TARDITE

SEQ ID NO: 108971 - protein, 7 aa, synthetic construct
PLDYQHA

SEQ ID NO: 108972 - protein, 7 aa, synthetic construct
FHGVEHI

SEQ ID NO: 108973 - protein, 7 aa, synthetic construct
RSKDTNQ

SEQ ID NO: 108974 - protein, 7 aa, synthetic construct
EGNKAVQ

SEQ ID NO: 108975 - protein, 7 aa, synthetic construct
SVLHTMH

SEQ ID NO: 108976 - protein, 7 aa, synthetic construct
MAGSTLI

SEQ ID NO: 108977 - protein, 7 aa, synthetic construct
MPVAPPH

SEQ ID NO: 108978 - protein, 7 aa, synthetic construct
AASLIHE

SEQ ID NO: 108979 - protein, 7 aa, synthetic construct
NPTDSQF

SEQ ID NO: 108980 - protein, 7 aa, synthetic construct
WPDSPKF

SEQ ID NO: 108981 - protein, 7 aa, synthetic construct
QYGHHQL

SEQ ID NO: 108982 - protein, 7 aa, synthetic construct
KSYVQEY

SEQ ID NO: 108983 - protein, 7 aa, synthetic construct
LIRAMDE

SEQ ID NO: 108984 - protein, 7 aa, synthetic construct
EKPEKFR

SEQ ID NO: 108985 - protein, 7 aa, synthetic construct
KNMGGVI

SEQ ID NO: 108986 - protein, 7 aa, synthetic construct
ARFSSVA

SEQ ID NO: 108987 - protein, 7 aa, synthetic construct
SAGVMKQ

SEQ ID NO: 108988 - protein, 7 aa, synthetic construct
HLEAGFG

SEQ ID NO: 108989 - protein, 7 aa, synthetic construct
RLMQQSM

SEQ ID NO: 108990 - protein, 7 aa, synthetic construct
KQHASQV

SEQ ID NO: 108991 - protein, 7 aa, synthetic construct
VRAGSNH

SEQ ID NO: 108992 - protein, 7 aa, synthetic construct
NETQKFM

SEQ ID NO: 108993 - protein, 7 aa, synthetic construct
MEMVNVE

SEQ ID NO: 108994 - protein, 7 aa, synthetic construct
NFGSADP

SEQ ID NO: 108995 - protein, 7 aa, synthetic construct
EGHIILG

SEQ ID NO: 108996 - protein, 7 aa, synthetic construct
VRPNMSG

SEQ ID NO: 108997 - protein, 7 aa, synthetic construct
IGNQYVE

SEQ ID NO: 108998 - protein, 7 aa, synthetic construct
LPWDMAG

SEQ ID NO: 108999 - protein, 7 aa, synthetic construct
KEAPANR

SEQ ID NO: 109000 - protein, 7 aa, synthetic construct
VFSNQKV

SEQ ID NO: 109001 - protein, 7 aa, synthetic construct
PVIATNA

SEQ ID NO: 109002 - protein, 7 aa, synthetic construct
IVGQEKE

SEQ ID NO: 109003 - protein, 7 aa, synthetic construct
KTRTLEF

SEQ ID NO: 109004 - protein, 7 aa, synthetic construct
SIRDKKE

SEQ ID NO: 109005 - protein, 7 aa, synthetic construct
FNKIAFQ

SEQ ID NO: 109006 - protein, 7 aa, synthetic construct
YSNLNGE

SEQ ID NO: 109007 - protein, 7 aa, synthetic construct
YVLSPAN

SEQ ID NO: 109008 - protein, 7 aa, synthetic construct
YFHSQTN

SEQ ID NO: 109009 - protein, 7 aa, synthetic construct
THIVRDL

SEQ ID NO: 109010 - protein, 7 aa, synthetic construct
NVSRITM

SEQ ID NO: 109011 - protein, 7 aa, synthetic construct
GGEAVAM

SEQ ID NO: 109012 - protein, 7 aa, synthetic construct
VQAAPGR

SEQ ID NO: 109013 - protein, 7 aa, synthetic construct
ERKSMGF

SEQ ID NO: 109014 - protein, 7 aa, synthetic construct
HQTNAEY

SEQ ID NO: 109015 - protein, 7 aa, synthetic construct
DMQRMTM

SEQ ID NO: 109016 - protein, 7 aa, synthetic construct
TQGHDKS

SEQ ID NO: 109017 - protein, 7 aa, synthetic construct
PYHAMER

SEQ ID NO: 109018 - protein, 7 aa, synthetic construct
GRNEVAV

SEQ ID NO: 109019 - protein, 7 aa, synthetic construct
VGPLGTS

SEQ ID NO: 109020 - protein, 7 aa, synthetic construct
RSESIGA

SEQ ID NO: 109021 - protein, 7 aa, synthetic construct
NHQEGVG

SEQ ID NO: 109022 - protein, 7 aa, synthetic construct
LTNQMTL

SEQ ID NO: 109023 - protein, 7 aa, synthetic construct
HDYTKEA

SEQ ID NO: 109024 - protein, 7 aa, synthetic construct
TNADQHH

SEQ ID NO: 109025 - protein, 7 aa, synthetic construct
ALYEATS

SEQ ID NO: 109026 - protein, 7 aa, synthetic construct
DKPIAWH

SEQ ID NO: 109027 - protein, 7 aa, synthetic construct
HTVKNMF

SEQ ID NO: 109028 - protein, 7 aa, synthetic construct
GQTLHQM

SEQ ID NO: 109029 - protein, 7 aa, synthetic construct
SKAVQAG

SEQ ID NO: 109030 - protein, 7 aa, synthetic construct
FPVGQQT

SEQ ID NO: 109031 - protein, 7 aa, synthetic construct
MMRLNQT

SEQ ID NO: 109032 - protein, 7 aa, synthetic construct
GLFSAPL

SEQ ID NO: 109033 - protein, 7 aa, synthetic construct
DVPYKKA

SEQ ID NO: 109034 - protein, 7 aa, synthetic construct
MVASGVK

SEQ ID NO: 109035 - protein, 7 aa, synthetic construct
AATTMHE

SEQ ID NO: 109036 - protein, 7 aa, synthetic construct
RHVTNMT

SEQ ID NO: 109037 - protein, 7 aa, synthetic construct
ADQPPYF

SEQ ID NO: 109038 - protein, 7 aa, synthetic construct
YRNNIEY

SEQ ID NO: 109039 - protein, 7 aa, synthetic construct
SPVHRLV

SEQ ID NO: 109040 - protein, 7 aa, synthetic construct
PKDAKTA

SEQ ID NO: 109041 - protein, 7 aa, synthetic construct
KIHTIGD

SEQ ID NO: 109042 - protein, 7 aa, synthetic construct
FIEQSSH

SEQ ID NO: 109043 - protein, 7 aa, synthetic construct
AYTQPRI

SEQ ID NO: 109044 - protein, 7 aa, synthetic construct
GKADQQI

SEQ ID NO: 109045 - protein, 7 aa, synthetic construct
QQTVQGH

SEQ ID NO: 109046 - protein, 7 aa, synthetic construct
NKTAIAN

SEQ ID NO: 109047 - protein, 7 aa, synthetic construct
NNGDFIP

SEQ ID NO: 109048 - protein, 7 aa, synthetic construct
KELIHIS

SEQ ID NO: 109049 - protein, 7 aa, synthetic construct
NIRGHDW

SEQ ID NO: 109050 - protein, 7 aa, synthetic construct
IKDLRAT

SEQ ID NO: 109051 - protein, 7 aa, synthetic construct
NYMHGKT

SEQ ID NO: 109052 - protein, 7 aa, synthetic construct
GMATLMS

SEQ ID NO: 109053 - protein, 7 aa, synthetic construct
TQPIPRT

SEQ ID NO: 109054 - protein, 7 aa, synthetic construct
PNEKSPT

SEQ ID NO: 109055 - protein, 7 aa, synthetic construct
YIRQDTP

SEQ ID NO: 109056 - protein, 7 aa, synthetic construct
RATSDTF

SEQ ID NO: 109057 - protein, 7 aa, synthetic construct
YNRFTLQ

SEQ ID NO: 109058 - protein, 7 aa, synthetic construct
AKVKDWT

SEQ ID NO: 109059 - protein, 7 aa, synthetic construct
LDKQHKE

SEQ ID NO: 109060 - protein, 7 aa, synthetic construct
SYEYKVE

SEQ ID NO: 109061 - protein, 7 aa, synthetic construct
GTNKQHD

SEQ ID NO: 109062 - protein, 7 aa, synthetic construct
WKPYEKS

SEQ ID NO: 109063 - protein, 7 aa, synthetic construct
GFVIGPA

SEQ ID NO: 109064 - protein, 7 aa, synthetic construct
TTGTHYK

SEQ ID NO: 109065 - protein, 7 aa, synthetic construct
GSAVAYV

SEQ ID NO: 109066 - protein, 7 aa, synthetic construct
RLLGESS

SEQ ID NO: 109067 - protein, 7 aa, synthetic construct
ERVTGIY

SEQ ID NO: 109068 - protein, 7 aa, synthetic construct
TQFPKFE

SEQ ID NO: 109069 - protein, 7 aa, synthetic construct
KAPYSGA

SEQ ID NO: 109070 - protein, 7 aa, synthetic construct
EAAPTTF

SEQ ID NO: 109071 - protein, 7 aa, synthetic construct
NPVHVQD

SEQ ID NO: 109072 - protein, 7 aa, synthetic construct
ADKKEVY

SEQ ID NO: 109073 - protein, 7 aa, synthetic construct
LHMEAKA

SEQ ID NO: 109074 - protein, 7 aa, synthetic construct
AIKQNVS

SEQ ID NO: 109075 - protein, 7 aa, synthetic construct
GIEWETP

SEQ ID NO: 109076 - protein, 7 aa, synthetic construct
FSDVNSI

SEQ ID NO: 109077 - protein, 7 aa, synthetic construct
SMSGNFS

SEQ ID NO: 109078 - protein, 7 aa, synthetic construct
SIHDAQA

SEQ ID NO: 109079 - protein, 7 aa, synthetic construct
WAFKAKE

SEQ ID NO: 109080 - protein, 7 aa, synthetic construct
YPHSIGT

SEQ ID NO: 109081 - protein, 7 aa, synthetic construct
GTYKTFE

SEQ ID NO: 109082 - protein, 7 aa, synthetic construct
GTMPAQV

SEQ ID NO: 109083 - protein, 7 aa, synthetic construct
WPRSQER

SEQ ID NO: 109084 - protein, 7 aa, synthetic construct
NNAVQIR

SEQ ID NO: 109085 - protein, 7 aa, synthetic construct
KKEVVDS

SEQ ID NO: 109086 - protein, 7 aa, synthetic construct
KQADENF

SEQ ID NO: 109087 - protein, 7 aa, synthetic construct
ISPAYNI

SEQ ID NO: 109088 - protein, 7 aa, synthetic construct
NQIPKAQ

SEQ ID NO: 109089 - protein, 7 aa, synthetic construct
FSQMPTL

SEQ ID NO: 109090 - protein, 7 aa, synthetic construct
LRAVQEV

SEQ ID NO: 109091 - protein, 7 aa, synthetic construct
LYASTVD

SEQ ID NO: 109092 - protein, 7 aa, synthetic construct
PEAYPTK

SEQ ID NO: 109093 - protein, 7 aa, synthetic construct
GPIGIPH

SEQ ID NO: 109094 - protein, 7 aa, synthetic construct
PQEAKDH

SEQ ID NO: 109095 - protein, 7 aa, synthetic construct
DLQNPIT

SEQ ID NO: 109096 - protein, 7 aa, synthetic construct
WDVKSTR

SEQ ID NO: 109097 - protein, 7 aa, synthetic construct
HVQHVVS

SEQ ID NO: 109098 - protein, 7 aa, synthetic construct
WINSTMK

SEQ ID NO: 109099 - protein, 7 aa, synthetic construct
INPGIIQ

SEQ ID NO: 109100 - protein, 7 aa, synthetic construct
MGLGQVY

SEQ ID NO: 109101 - protein, 7 aa, synthetic construct
NTAITGE

SEQ ID NO: 109102 - protein, 7 aa, synthetic construct
NDGFKVQ

SEQ ID NO: 109103 - protein, 7 aa, synthetic construct
QGGSPIE

SEQ ID NO: 109104 - protein, 7 aa, synthetic construct
SIHHEYG

SEQ ID NO: 109105 - protein, 7 aa, synthetic construct
SGVVLSE

SEQ ID NO: 109106 - protein, 7 aa, synthetic construct
DLKSHPA

SEQ ID NO: 109107 - protein, 7 aa, synthetic construct
ANGIPVR

SEQ ID NO: 109108 - protein, 7 aa, synthetic construct
EMIKEGM

SEQ ID NO: 109109 - protein, 7 aa, synthetic construct
APEFSSV

SEQ ID NO: 109110 - protein, 7 aa, synthetic construct
LHRPAAT

SEQ ID NO: 109111 - protein, 7 aa, synthetic construct
YSREVSL

SEQ ID NO: 109112 - protein, 7 aa, synthetic construct
VMTGERG

SEQ ID NO: 109113 - protein, 7 aa, synthetic construct
MFMEHGA

SEQ ID NO: 109114 - protein, 7 aa, synthetic construct
MRPAHDY

SEQ ID NO: 109115 - protein, 7 aa, synthetic construct
QPLTMLD

SEQ ID NO: 109116 - protein, 7 aa, synthetic construct
YAPMDKS

SEQ ID NO: 109117 - protein, 7 aa, synthetic construct
TANANHH

SEQ ID NO: 109118 - protein, 7 aa, synthetic construct
PVKHQYE

SEQ ID NO: 109119 - protein, 7 aa, synthetic construct
PFKPILA

SEQ ID NO: 109120 - protein, 7 aa, synthetic construct
VLNTSDI

SEQ ID NO: 109121 - protein, 7 aa, synthetic construct
QGTPLVS

SEQ ID NO: 109122 - protein, 7 aa, synthetic construct
HLVQDPF

SEQ ID NO: 109123 - protein, 7 aa, synthetic construct
DGTANLS

SEQ ID NO: 109124 - protein, 7 aa, synthetic construct
SDMRTDG

SEQ ID NO: 109125 - protein, 7 aa, synthetic construct
FDGRAYK

SEQ ID NO: 109126 - protein, 7 aa, synthetic construct
KVQFVQS

SEQ ID NO: 109127 - protein, 7 aa, synthetic construct
FEQQHVV

SEQ ID NO: 109128 - protein, 7 aa, synthetic construct
VGGPTYE

SEQ ID NO: 109129 - protein, 7 aa, synthetic construct
EAHGNHI

SEQ ID NO: 109130 - protein, 7 aa, synthetic construct
ASFESQK

SEQ ID NO: 109131 - protein, 7 aa, synthetic construct
KGSANML

SEQ ID NO: 109132 - protein, 7 aa, synthetic construct
RTGKEQW

SEQ ID NO: 109133 - protein, 7 aa, synthetic construct
LAKMQDQ

SEQ ID NO: 109134 - protein, 7 aa, synthetic construct
EKDQVTK

SEQ ID NO: 109135 - protein, 7 aa, synthetic construct
TGYDISR

SEQ ID NO: 109136 - protein, 7 aa, synthetic construct
PPHLEAA

SEQ ID NO: 109137 - protein, 7 aa, synthetic construct
SAHDARN

SEQ ID NO: 109138 - protein, 7 aa, synthetic construct
KNEQVLT

SEQ ID NO: 109139 - protein, 7 aa, synthetic construct
FRNSATG

SEQ ID NO: 109140 - protein, 7 aa, synthetic construct
TRDYKYS

SEQ ID NO: 109141 - protein, 7 aa, synthetic construct
QTHKSFI

SEQ ID NO: 109142 - protein, 7 aa, synthetic construct
KPGSEMR

SEQ ID NO: 109143 - protein, 7 aa, synthetic construct
SLGSKTN

SEQ ID NO: 109144 - protein, 7 aa, synthetic construct
TSHQEHD

SEQ ID NO: 109145 - protein, 7 aa, synthetic construct
DEYRTAK

SEQ ID NO: 109146 - protein, 7 aa, synthetic construct
YGQHELH

SEQ ID NO: 109147 - protein, 7 aa, synthetic construct
YGATNHI

SEQ ID NO: 109148 - protein, 7 aa, synthetic construct
MGDTGRM

SEQ ID NO: 109149 - protein, 7 aa, synthetic construct
QQMEVAR

SEQ ID NO: 109150 - protein, 7 aa, synthetic construct
PMDRPNT

SEQ ID NO: 109151 - protein, 7 aa, synthetic construct
MHNHFQP

SEQ ID NO: 109152 - protein, 7 aa, synthetic construct
IVIGRHN

SEQ ID NO: 109153 - protein, 7 aa, synthetic construct
TMAHKRD

SEQ ID NO: 109154 - protein, 7 aa, synthetic construct
ASQMSLV

SEQ ID NO: 109155 - protein, 7 aa, synthetic construct
HYQSPIK

SEQ ID NO: 109156 - protein, 7 aa, synthetic construct
VYQQTQI

SEQ ID NO: 109157 - protein, 7 aa, synthetic construct
ATKPDMG

SEQ ID NO: 109158 - protein, 7 aa, synthetic construct
YTTHSSM

SEQ ID NO: 109159 - protein, 7 aa, synthetic construct
AVGFQME

SEQ ID NO: 109160 - protein, 7 aa, synthetic construct
RADSTNA

SEQ ID NO: 109161 - protein, 7 aa, synthetic construct
CSVKCEP

SEQ ID NO: 109162 - protein, 7 aa, synthetic construct
TMADPGS

SEQ ID NO: 109163 - protein, 7 aa, synthetic construct
AIPPFSK

SEQ ID NO: 109164 - protein, 7 aa, synthetic construct
LLPASDP

SEQ ID NO: 109165 - protein, 7 aa, synthetic construct
KTHSVAL

SEQ ID NO: 109166 - protein, 7 aa, synthetic construct
TTRSVIE

SEQ ID NO: 109167 - protein, 7 aa, synthetic construct
KNNQQNP

SEQ ID NO: 109168 - protein, 7 aa, synthetic construct
TRPAQMM

SEQ ID NO: 109169 - protein, 7 aa, synthetic construct
MATEKYR

SEQ ID NO: 109170 - protein, 7 aa, synthetic construct
MMHNNLE

SEQ ID NO: 109171 - protein, 7 aa, synthetic construct
AWMDKGM

SEQ ID NO: 109172 - protein, 7 aa, synthetic construct
THHMVKQ

SEQ ID NO: 109173 - protein, 7 aa, synthetic construct
EPLRKLM

SEQ ID NO: 109174 - protein, 7 aa, synthetic construct
QKSTNMP

SEQ ID NO: 109175 - protein, 7 aa, synthetic construct
SLKAEHY

SEQ ID NO: 109176 - protein, 7 aa, synthetic construct
FNDNRSF

SEQ ID NO: 109177 - protein, 7 aa, synthetic construct
LSHPHTF

SEQ ID NO: 109178 - protein, 7 aa, synthetic construct
WKGDNPA

SEQ ID NO: 109179 - protein, 7 aa, synthetic construct
TESAQTP

SEQ ID NO: 109180 - protein, 7 aa, synthetic construct
VMPSQQF

SEQ ID NO: 109181 - protein, 7 aa, synthetic construct
KPVTQNA

SEQ ID NO: 109182 - protein, 7 aa, synthetic construct
QLHDNPD

SEQ ID NO: 109183 - protein, 7 aa, synthetic construct
NHERTTM

SEQ ID NO: 109184 - protein, 7 aa, synthetic construct
KPQSAKD

SEQ ID NO: 109185 - protein, 7 aa, synthetic construct
GNSNNDK

SEQ ID NO: 109186 - protein, 7 aa, synthetic construct
NQKVGDY

SEQ ID NO: 109187 - protein, 7 aa, synthetic construct
FEIPNTS

SEQ ID NO: 109188 - protein, 7 aa, synthetic construct
GMAPLRQ

SEQ ID NO: 109189 - protein, 7 aa, synthetic construct
PRPHMDN

SEQ ID NO: 109190 - protein, 7 aa, synthetic construct
FDLAKDH

SEQ ID NO: 109191 - protein, 7 aa, synthetic construct
HAEHGGA

SEQ ID NO: 109192 - protein, 7 aa, synthetic construct
SKYGPNT

SEQ ID NO: 109193 - protein, 7 aa, synthetic construct
PAHYGTP

SEQ ID NO: 109194 - protein, 7 aa, synthetic construct
WKAAHTL

SEQ ID NO: 109195 - protein, 7 aa, synthetic construct
EGSSQQG

SEQ ID NO: 109196 - protein, 7 aa, synthetic construct
VVHHDGV

SEQ ID NO: 109197 - protein, 7 aa, synthetic construct
EHNQPIK

SEQ ID NO: 109198 - protein, 7 aa, synthetic construct
EMKMQKN

SEQ ID NO: 109199 - protein, 7 aa, synthetic construct
QHNERDF

SEQ ID NO: 109200 - protein, 7 aa, synthetic construct
LNTGSNR

SEQ ID NO: 109201 - protein, 7 aa, synthetic construct
MMPGSLN

SEQ ID NO: 109202 - protein, 7 aa, synthetic construct
PENQRMA

SEQ ID NO: 109203 - protein, 7 aa, synthetic construct
ASSSRHL

SEQ ID NO: 109204 - protein, 7 aa, synthetic construct
SMIPMAK

SEQ ID NO: 109205 - protein, 7 aa, synthetic construct
ASVSEKW

SEQ ID NO: 109206 - protein, 7 aa, synthetic construct
GEIPHRF

SEQ ID NO: 109207 - protein, 7 aa, synthetic construct
DVGGGPQ

SEQ ID NO: 109208 - protein, 7 aa, synthetic construct
GIPRLTH

SEQ ID NO: 109209 - protein, 7 aa, synthetic construct
SMFTEQT

SEQ ID NO: 109210 - protein, 7 aa, synthetic construct
TPPIGTL

SEQ ID NO: 109211 - protein, 7 aa, synthetic construct
GHRPQVD

SEQ ID NO: 109212 - protein, 7 aa, synthetic construct
GESKHSH

SEQ ID NO: 109213 - protein, 7 aa, synthetic construct
GHDNVKE

SEQ ID NO: 109214 - protein, 7 aa, synthetic construct
IGQLTLD

SEQ ID NO: 109215 - protein, 7 aa, synthetic construct
PPVKFLE

SEQ ID NO: 109216 - protein, 7 aa, synthetic construct
KSGSQQI

SEQ ID NO: 109217 - protein, 7 aa, synthetic construct
DKHKSVE

SEQ ID NO: 109218 - protein, 7 aa, synthetic construct
HVYPRVD

SEQ ID NO: 109219 - protein, 7 aa, synthetic construct
MQKSDSK

SEQ ID NO: 109220 - protein, 7 aa, synthetic construct
LGSGGQT

SEQ ID NO: 109221 - protein, 7 aa, synthetic construct
TDYGQGS

SEQ ID NO: 109222 - protein, 7 aa, synthetic construct
QNRVENQ

SEQ ID NO: 109223 - protein, 7 aa, synthetic construct
VFNRQAL

SEQ ID NO: 109224 - protein, 7 aa, synthetic construct
LVGMYSG

SEQ ID NO: 109225 - protein, 7 aa, synthetic construct
YEKNMGD

SEQ ID NO: 109226 - protein, 7 aa, synthetic construct
NETGFIK

SEQ ID NO: 109227 - protein, 7 aa, synthetic construct
MDGLLAP

SEQ ID NO: 109228 - protein, 7 aa, synthetic construct
NIWQPEE

SEQ ID NO: 109229 - protein, 7 aa, synthetic construct
YMGDLAL

SEQ ID NO: 109230 - protein, 7 aa, synthetic construct
FVTNLAP

SEQ ID NO: 109231 - protein, 7 aa, synthetic construct
MPPRDDF

SEQ ID NO: 109232 - protein, 7 aa, synthetic construct
QIAVGEP

SEQ ID NO: 109233 - protein, 7 aa, synthetic construct
DIELVRP

SEQ ID NO: 109234 - protein, 7 aa, synthetic construct
HKGFDVL

SEQ ID NO: 109235 - protein, 7 aa, synthetic construct
HISNGTM

SEQ ID NO: 109236 - protein, 7 aa, synthetic construct
TPPQKNA

SEQ ID NO: 109237 - protein, 7 aa, synthetic construct
EKFDIRV

SEQ ID NO: 109238 - protein, 7 aa, synthetic construct
ASLKMPG

SEQ ID NO: 109239 - protein, 7 aa, synthetic construct
TPPMKSG

SEQ ID NO: 109240 - protein, 7 aa, synthetic construct
NGHVDDK

SEQ ID NO: 109241 - protein, 7 aa, synthetic construct
APPWAGP

SEQ ID NO: 109242 - protein, 7 aa, synthetic construct
IAGFVSD

SEQ ID NO: 109243 - protein, 7 aa, synthetic construct
GPQMPFV

SEQ ID NO: 109244 - protein, 7 aa, synthetic construct
MMHHPKM

SEQ ID NO: 109245 - protein, 7 aa, synthetic construct
VYDTGPI

SEQ ID NO: 109246 - protein, 7 aa, synthetic construct
GYNVHGP

SEQ ID NO: 109247 - protein, 7 aa, synthetic construct
STAPTVE

SEQ ID NO: 109248 - protein, 7 aa, synthetic construct
KNIMHQV

SEQ ID NO: 109249 - protein, 7 aa, synthetic construct
ERAIKWD

SEQ ID NO: 109250 - protein, 7 aa, synthetic construct
AMQTVHA

SEQ ID NO: 109251 - protein, 7 aa, synthetic construct
FRMQEHP

SEQ ID NO: 109252 - protein, 7 aa, synthetic construct
SGASVGD

SEQ ID NO: 109253 - protein, 7 aa, synthetic construct
KRDQTYP

SEQ ID NO: 109254 - protein, 7 aa, synthetic construct
FDRQHSV

SEQ ID NO: 109255 - protein, 7 aa, synthetic construct
NKEAVRQ

SEQ ID NO: 109256 - protein, 7 aa, synthetic construct
SEHRYVV

SEQ ID NO: 109257 - protein, 7 aa, synthetic construct
APNYKEP

SEQ ID NO: 109258 - protein, 7 aa, synthetic construct
QSMAKVF

SEQ ID NO: 109259 - protein, 7 aa, synthetic construct
VLRSETL

SEQ ID NO: 109260 - protein, 7 aa, synthetic construct
KTYEHGI

SEQ ID NO: 109261 - protein, 7 aa, synthetic construct
AVAWMTE

SEQ ID NO: 109262 - protein, 7 aa, synthetic construct
EMAGKEL

SEQ ID NO: 109263 - protein, 7 aa, synthetic construct
GAAAKLN

SEQ ID NO: 109264 - protein, 7 aa, synthetic construct
LDITIRE

SEQ ID NO: 109265 - protein, 7 aa, synthetic construct
EERTKLA

SEQ ID NO: 109266 - protein, 7 aa, synthetic construct
INRQDPV

SEQ ID NO: 109267 - protein, 7 aa, synthetic construct
VKNITNP

SEQ ID NO: 109268 - protein, 7 aa, synthetic construct
QHRQIHM

SEQ ID NO: 109269 - protein, 7 aa, synthetic construct
HAKEFSE

SEQ ID NO: 109270 - protein, 7 aa, synthetic construct
YNTSTAE

SEQ ID NO: 109271 - protein, 7 aa, synthetic construct
YTRNRME

SEQ ID NO: 109272 - protein, 7 aa, synthetic construct
NSRQANG

SEQ ID NO: 109273 - protein, 7 aa, synthetic construct
PKFENLD

SEQ ID NO: 109274 - protein, 7 aa, synthetic construct
TQRVDKH

SEQ ID NO: 109275 - protein, 7 aa, synthetic construct
EYTHRAV

SEQ ID NO: 109276 - protein, 7 aa, synthetic construct
NTSENPM

SEQ ID NO: 109277 - protein, 7 aa, synthetic construct
QLDGRNT

SEQ ID NO: 109278 - protein, 7 aa, synthetic construct
VPGTTLY

SEQ ID NO: 109279 - protein, 7 aa, synthetic construct
NLTQDAK

SEQ ID NO: 109280 - protein, 7 aa, synthetic construct
HEPFNRH

SEQ ID NO: 109281 - protein, 7 aa, synthetic construct
YTNLKVV

SEQ ID NO: 109282 - protein, 7 aa, synthetic construct
TLYGYAP

SEQ ID NO: 109283 - protein, 7 aa, synthetic construct
VKFYTAE

SEQ ID NO: 109284 - protein, 7 aa, synthetic construct
HRTTTYT

SEQ ID NO: 109285 - protein, 7 aa, synthetic construct
HSSTYSH

SEQ ID NO: 109286 - protein, 7 aa, synthetic construct
DHTSQMD

SEQ ID NO: 109287 - protein, 7 aa, synthetic construct
TNARNQY

SEQ ID NO: 109288 - protein, 7 aa, synthetic construct
IDGVVRL

SEQ ID NO: 109289 - protein, 7 aa, synthetic construct
KHQHGFT

SEQ ID NO: 109290 - protein, 7 aa, synthetic construct
AIKIKDH

SEQ ID NO: 109291 - protein, 7 aa, synthetic construct
NIIKLQS

SEQ ID NO: 109292 - protein, 7 aa, synthetic construct
TERNFSG

SEQ ID NO: 109293 - protein, 7 aa, synthetic construct
IHQHIQD

SEQ ID NO: 109294 - protein, 7 aa, synthetic construct
IPHKAAF

SEQ ID NO: 109295 - protein, 7 aa, synthetic construct
ETKWMRD

SEQ ID NO: 109296 - protein, 7 aa, synthetic construct
HLIHNSI

SEQ ID NO: 109297 - protein, 7 aa, synthetic construct
NKSTADL

SEQ ID NO: 109298 - protein, 7 aa, synthetic construct
WDHKRSV

SEQ ID NO: 109299 - protein, 7 aa, synthetic construct
RDAIVGR

SEQ ID NO: 109300 - protein, 7 aa, synthetic construct
GKTTNVF

SEQ ID NO: 109301 - protein, 7 aa, synthetic construct
IQSNNKE

SEQ ID NO: 109302 - protein, 7 aa, synthetic construct
ALLQTNM

SEQ ID NO: 109303 - protein, 7 aa, synthetic construct
NMASPRA

SEQ ID NO: 109304 - protein, 7 aa, synthetic construct
MQGEAQM

SEQ ID NO: 109305 - protein, 7 aa, synthetic construct
KDPVSDF

SEQ ID NO: 109306 - protein, 7 aa, synthetic construct
TLNHSDW

SEQ ID NO: 109307 - protein, 7 aa, synthetic construct
NSHNMMK

SEQ ID NO: 109308 - protein, 7 aa, synthetic construct
WQHNAMT

SEQ ID NO: 109309 - protein, 7 aa, synthetic construct
MPTDARM

SEQ ID NO: 109310 - protein, 7 aa, synthetic construct
HEHTRQI

SEQ ID NO: 109311 - protein, 7 aa, synthetic construct
VQFHQAP

SEQ ID NO: 109312 - protein, 7 aa, synthetic construct
TEKRIMY

SEQ ID NO: 109313 - protein, 7 aa, synthetic construct
SEPKWSE

SEQ ID NO: 109314 - protein, 7 aa, synthetic construct
KTTSGTV

SEQ ID NO: 109315 - protein, 7 aa, synthetic construct
RYIPDME

SEQ ID NO: 109316 - protein, 7 aa, synthetic construct
GQREGVM

SEQ ID NO: 109317 - protein, 7 aa, synthetic construct
GWKVLTE

SEQ ID NO: 109318 - protein, 7 aa, synthetic construct
GVKSVNG

SEQ ID NO: 109319 - protein, 7 aa, synthetic construct
GIESTKD

SEQ ID NO: 109320 - protein, 7 aa, synthetic construct
GTQNEPR

SEQ ID NO: 109321 - protein, 7 aa, synthetic construct
NKEENGM

SEQ ID NO: 109322 - protein, 7 aa, synthetic construct
IWSEHTV

SEQ ID NO: 109323 - protein, 7 aa, synthetic construct
QQHGRNY

SEQ ID NO: 109324 - protein, 7 aa, synthetic construct
TEWPNGG

SEQ ID NO: 109325 - protein, 7 aa, synthetic construct
TTQHDIP

SEQ ID NO: 109326 - protein, 7 aa, synthetic construct
MNTHNHK

SEQ ID NO: 109327 - protein, 7 aa, synthetic construct
HSGMDMP

SEQ ID NO: 109328 - protein, 7 aa, synthetic construct
EKGILMH

SEQ ID NO: 109329 - protein, 7 aa, synthetic construct
LGVHYSE

SEQ ID NO: 109330 - protein, 7 aa, synthetic construct
DPLLKNR

SEQ ID NO: 109331 - protein, 7 aa, synthetic construct
KGYNMVS

SEQ ID NO: 109332 - protein, 7 aa, synthetic construct
WERETPL

SEQ ID NO: 109333 - protein, 7 aa, synthetic construct
KEVKGGA

SEQ ID NO: 109334 - protein, 7 aa, synthetic construct
AAPNALP

SEQ ID NO: 109335 - protein, 7 aa, synthetic construct
IKVLNVG

SEQ ID NO: 109336 - protein, 7 aa, synthetic construct
QEVKSRY

SEQ ID NO: 109337 - protein, 7 aa, synthetic construct
YEDPVRH

SEQ ID NO: 109338 - protein, 7 aa, synthetic construct
AWNDSVA

SEQ ID NO: 109339 - protein, 7 aa, synthetic construct
REDWSNP

SEQ ID NO: 109340 - protein, 7 aa, synthetic construct
PSMYGES

SEQ ID NO: 109341 - protein, 7 aa, synthetic construct
HKLHAKD

SEQ ID NO: 109342 - protein, 7 aa, synthetic construct
RLGQTVY

SEQ ID NO: 109343 - protein, 7 aa, synthetic construct
LTLAQAH

SEQ ID NO: 109344 - protein, 7 aa, synthetic construct
STVQLSL

SEQ ID NO: 109345 - protein, 7 aa, synthetic construct
VQQQHTV

SEQ ID NO: 109346 - protein, 7 aa, synthetic construct
ADSTMRQ

SEQ ID NO: 109347 - protein, 7 aa, synthetic construct
AINVPAT

SEQ ID NO: 109348 - protein, 7 aa, synthetic construct
EIPVTMG

SEQ ID NO: 109349 - protein, 7 aa, synthetic construct
PVHTVIN

SEQ ID NO: 109350 - protein, 7 aa, synthetic construct
GEKSAET

SEQ ID NO: 109351 - protein, 7 aa, synthetic construct
IASSNID

SEQ ID NO: 109352 - protein, 7 aa, synthetic construct
MGTNPNG

SEQ ID NO: 109353 - protein, 7 aa, synthetic construct
DFGASYK

SEQ ID NO: 109354 - protein, 7 aa, synthetic construct
NNHQMQK

SEQ ID NO: 109355 - protein, 7 aa, synthetic construct
KITQESS

SEQ ID NO: 109356 - protein, 7 aa, synthetic construct
VEYGTPS

SEQ ID NO: 109357 - protein, 7 aa, synthetic construct
NAKTSPH

SEQ ID NO: 109358 - protein, 7 aa, synthetic construct
VPRFVGP

SEQ ID NO: 109359 - protein, 7 aa, synthetic construct
DLVVRHA

SEQ ID NO: 109360 - protein, 7 aa, synthetic construct
GEYNYKS

SEQ ID NO: 109361 - protein, 7 aa, synthetic construct
RDERPAT

SEQ ID NO: 109362 - protein, 7 aa, synthetic construct
MDYHYKE

SEQ ID NO: 109363 - protein, 7 aa, synthetic construct
VGITYLA

SEQ ID NO: 109364 - protein, 7 aa, synthetic construct
AKQVNQA

SEQ ID NO: 109365 - protein, 7 aa, synthetic construct
RGHIAEH

SEQ ID NO: 109366 - protein, 7 aa, synthetic construct
DWGKHGA

SEQ ID NO: 109367 - protein, 7 aa, synthetic construct
NQDRNAG

SEQ ID NO: 109368 - protein, 7 aa, synthetic construct
TKYDDNG

SEQ ID NO: 109369 - protein, 7 aa, synthetic construct
PRPSSII

SEQ ID NO: 109370 - protein, 7 aa, synthetic construct
AQAPQDP

SEQ ID NO: 109371 - protein, 7 aa, synthetic construct
YPSKYET

SEQ ID NO: 109372 - protein, 7 aa, synthetic construct
AYENRPN

SEQ ID NO: 109373 - protein, 7 aa, synthetic construct
RESGGYR

SEQ ID NO: 109374 - protein, 7 aa, synthetic construct
QEQLTQG

SEQ ID NO: 109375 - protein, 7 aa, synthetic construct
MVEKKNS

SEQ ID NO: 109376 - protein, 7 aa, synthetic construct
SNVNMNK

SEQ ID NO: 109377 - protein, 7 aa, synthetic construct
HKYFEGS

SEQ ID NO: 109378 - protein, 7 aa, synthetic construct
REGTKTW

SEQ ID NO: 109379 - protein, 7 aa, synthetic construct
KAERAIA

SEQ ID NO: 109380 - protein, 7 aa, synthetic construct
KNDQMDR

SEQ ID NO: 109381 - protein, 7 aa, synthetic construct
HRGEGQK

SEQ ID NO: 109382 - protein, 7 aa, synthetic construct
SMVHANM

SEQ ID NO: 109383 - protein, 7 aa, synthetic construct
ESQGMAK

SEQ ID NO: 109384 - protein, 7 aa, synthetic construct
GKDPMAV

SEQ ID NO: 109385 - protein, 7 aa, synthetic construct
VAAQHYI

SEQ ID NO: 109386 - protein, 7 aa, synthetic construct
HWQSDSH

SEQ ID NO: 109387 - protein, 7 aa, synthetic construct
MLPTHVQ

SEQ ID NO: 109388 - protein, 7 aa, synthetic construct
NEKGQQP

SEQ ID NO: 109389 - protein, 7 aa, synthetic construct
GIQFKDR

SEQ ID NO: 109390 - protein, 7 aa, synthetic construct
PHENRPN

SEQ ID NO: 109391 - protein, 7 aa, synthetic construct
IDQNVVK

SEQ ID NO: 109392 - protein, 7 aa, synthetic construct
MMQNKPD

SEQ ID NO: 109393 - protein, 7 aa, synthetic construct
FSGRPYS

SEQ ID NO: 109394 - protein, 7 aa, synthetic construct
MHTNQAK

SEQ ID NO: 109395 - protein, 7 aa, synthetic construct
PAPPVDY

SEQ ID NO: 109396 - protein, 7 aa, synthetic construct
FKYSQLE

SEQ ID NO: 109397 - protein, 7 aa, synthetic construct
AISGMGT

SEQ ID NO: 109398 - protein, 7 aa, synthetic construct
CPQNVSC

SEQ ID NO: 109399 - protein, 7 aa, synthetic construct
EFGAGIR

SEQ ID NO: 109400 - protein, 7 aa, synthetic construct
GRNTMQP

SEQ ID NO: 109401 - protein, 7 aa, synthetic construct
YGKSSIP

SEQ ID NO: 109402 - protein, 7 aa, synthetic construct
LRNAEMV

SEQ ID NO: 109403 - protein, 7 aa, synthetic construct
PPQWEGH

SEQ ID NO: 109404 - protein, 7 aa, synthetic construct
RMPIMES

SEQ ID NO: 109405 - protein, 7 aa, synthetic construct
VRSERYL

SEQ ID NO: 109406 - protein, 7 aa, synthetic construct
KPHTALH

SEQ ID NO: 109407 - protein, 7 aa, synthetic construct
FTGKVHN

SEQ ID NO: 109408 - protein, 7 aa, synthetic construct
FFTDGPR

SEQ ID NO: 109409 - protein, 7 aa, synthetic construct
GSSHNMY

SEQ ID NO: 109410 - protein, 7 aa, synthetic construct
EKDKQPW

SEQ ID NO: 109411 - protein, 7 aa, synthetic construct
RQQEGVW

SEQ ID NO: 109412 - protein, 7 aa, synthetic construct
FEFAQKP

SEQ ID NO: 109413 - protein, 7 aa, synthetic construct
FSRSHQD

SEQ ID NO: 109414 - protein, 7 aa, synthetic construct
HHGGDEF

SEQ ID NO: 109415 - protein, 7 aa, synthetic construct
QRSVDDG

SEQ ID NO: 109416 - protein, 7 aa, synthetic construct
EHSKWES

SEQ ID NO: 109417 - protein, 7 aa, synthetic construct
THYLSDG

SEQ ID NO: 109418 - protein, 7 aa, synthetic construct
NIFIPAD

SEQ ID NO: 109419 - protein, 7 aa, synthetic construct
GAKPVPT

SEQ ID NO: 109420 - protein, 7 aa, synthetic construct
QTQRESW

SEQ ID NO: 109421 - protein, 7 aa, synthetic construct
VPKDHYP

SEQ ID NO: 109422 - protein, 7 aa, synthetic construct
GKNSMHS

SEQ ID NO: 109423 - protein, 7 aa, synthetic construct
GQWIPSE

SEQ ID NO: 109424 - protein, 7 aa, synthetic construct
MMSNIHG

SEQ ID NO: 109425 - protein, 7 aa, synthetic construct
TAPQGQK

SEQ ID NO: 109426 - protein, 7 aa, synthetic construct
LGLINMD

SEQ ID NO: 109427 - protein, 7 aa, synthetic construct
SELHVAK

SEQ ID NO: 109428 - protein, 7 aa, synthetic construct
YPQYKGA

SEQ ID NO: 109429 - protein, 7 aa, synthetic construct
EINGNKV

SEQ ID NO: 109430 - protein, 7 aa, synthetic construct
VQEWPRD

SEQ ID NO: 109431 - protein, 7 aa, synthetic construct
HHKQSQQ

SEQ ID NO: 109432 - protein, 7 aa, synthetic construct
SPIRLIP

SEQ ID NO: 109433 - protein, 7 aa, synthetic construct
SLASMRM

SEQ ID NO: 109434 - protein, 7 aa, synthetic construct
SEQSHGF

SEQ ID NO: 109435 - protein, 7 aa, synthetic construct
WMSSNAM

SEQ ID NO: 109436 - protein, 7 aa, synthetic construct
KMDQAAW

SEQ ID NO: 109437 - protein, 7 aa, synthetic construct
GSYSKDF

SEQ ID NO: 109438 - protein, 7 aa, synthetic construct
RHMQQVT

SEQ ID NO: 109439 - protein, 7 aa, synthetic construct
NTTMNDG

SEQ ID NO: 109440 - protein, 7 aa, synthetic construct
TISKIDW

SEQ ID NO: 109441 - protein, 7 aa, synthetic construct
KHSETLD

SEQ ID NO: 109442 - protein, 7 aa, synthetic construct
QEWTNER

SEQ ID NO: 109443 - protein, 7 aa, synthetic construct
LVHHLHS

SEQ ID NO: 109444 - protein, 7 aa, synthetic construct
NQAESRT

SEQ ID NO: 109445 - protein, 7 aa, synthetic construct
NHSGPLV

SEQ ID NO: 109446 - protein, 7 aa, synthetic construct
SLNGTVM

SEQ ID NO: 109447 - protein, 7 aa, synthetic construct
EHTHKQE

SEQ ID NO: 109448 - protein, 7 aa, synthetic construct
FSKMSQF

SEQ ID NO: 109449 - protein, 7 aa, synthetic construct
HPMKGHY

SEQ ID NO: 109450 - protein, 7 aa, synthetic construct
MQYVTGV

SEQ ID NO: 109451 - protein, 7 aa, synthetic construct
AQAHAIA

SEQ ID NO: 109452 - protein, 7 aa, synthetic construct
KNPKDTP

SEQ ID NO: 109453 - protein, 7 aa, synthetic construct
PLIQSEL

SEQ ID NO: 109454 - protein, 7 aa, synthetic construct
TNEHSLI

SEQ ID NO: 109455 - protein, 7 aa, synthetic construct
SQFMEQV

SEQ ID NO: 109456 - protein, 7 aa, synthetic construct
HHPEMRI

SEQ ID NO: 109457 - protein, 7 aa, synthetic construct
KSEKVQY

SEQ ID NO: 109458 - protein, 7 aa, synthetic construct
HHERVSH

SEQ ID NO: 109459 - protein, 7 aa, synthetic construct
TVLRQDE

SEQ ID NO: 109460 - protein, 7 aa, synthetic construct
NSFGAEN

SEQ ID NO: 109461 - protein, 7 aa, synthetic construct
KWDQHNT

SEQ ID NO: 109462 - protein, 7 aa, synthetic construct
HHQTKII

SEQ ID NO: 109463 - protein, 7 aa, synthetic construct
ENDRVQH

SEQ ID NO: 109464 - protein, 7 aa, synthetic construct
HTAMGDG

SEQ ID NO: 109465 - protein, 7 aa, synthetic construct
NRETLKF

SEQ ID NO: 109466 - protein, 7 aa, synthetic construct
VPVKGHV

SEQ ID NO: 109467 - protein, 7 aa, synthetic construct
HYPPTKL

SEQ ID NO: 109468 - protein, 7 aa, synthetic construct
YKGGQHY

SEQ ID NO: 109469 - protein, 7 aa, synthetic construct
QEQRYNL

SEQ ID NO: 109470 - protein, 7 aa, synthetic construct
SRNNSNW

SEQ ID NO: 109471 - protein, 7 aa, synthetic construct
ALNANYI

SEQ ID NO: 109472 - protein, 7 aa, synthetic construct
NNAVNTW

SEQ ID NO: 109473 - protein, 7 aa, synthetic construct
ANTGPPS

SEQ ID NO: 109474 - protein, 7 aa, synthetic construct
HTDKDYY

SEQ ID NO: 109475 - protein, 7 aa, synthetic construct
WHLKDEK

SEQ ID NO: 109476 - protein, 7 aa, synthetic construct
AARQHSF

SEQ ID NO: 109477 - protein, 7 aa, synthetic construct
HGIHVDA

SEQ ID NO: 109478 - protein, 7 aa, synthetic construct
ERQAHWD

SEQ ID NO: 109479 - protein, 7 aa, synthetic construct
SDFNGGL

SEQ ID NO: 109480 - protein, 7 aa, synthetic construct
PQPHTVV

SEQ ID NO: 109481 - protein, 7 aa, synthetic construct
VYGLPKD

SEQ ID NO: 109482 - protein, 7 aa, synthetic construct
KAIRDII

SEQ ID NO: 109483 - protein, 7 aa, synthetic construct
ISRDMNE

SEQ ID NO: 109484 - protein, 7 aa, synthetic construct
HMPHGAY

SEQ ID NO: 109485 - protein, 7 aa, synthetic construct
VQDKSYS

SEQ ID NO: 109486 - protein, 7 aa, synthetic construct
IGQYLLN

SEQ ID NO: 109487 - protein, 7 aa, synthetic construct
QTMSIQK

SEQ ID NO: 109488 - protein, 7 aa, synthetic construct
DGLSRNF

SEQ ID NO: 109489 - protein, 7 aa, synthetic construct
YNQMSTE

SEQ ID NO: 109490 - protein, 7 aa, synthetic construct
WRDANVI

SEQ ID NO: 109491 - protein, 7 aa, synthetic construct
QYDMRGI

SEQ ID NO: 109492 - protein, 7 aa, synthetic construct
LADAVFP

SEQ ID NO: 109493 - protein, 7 aa, synthetic construct
HVKMDFL

SEQ ID NO: 109494 - protein, 7 aa, synthetic construct
NRGFFKE

SEQ ID NO: 109495 - protein, 7 aa, synthetic construct
HAMPILD

SEQ ID NO: 109496 - protein, 7 aa, synthetic construct
ETFQKRM

SEQ ID NO: 109497 - protein, 7 aa, synthetic construct
HIPEWSD

SEQ ID NO: 109498 - protein, 7 aa, synthetic construct
HAEALGI

SEQ ID NO: 109499 - protein, 7 aa, synthetic construct
GREGMSK

SEQ ID NO: 109500 - protein, 7 aa, synthetic construct
IISTHVQ

SEQ ID NO: 109501 - protein, 7 aa, synthetic construct
NAKASMV

SEQ ID NO: 109502 - protein, 7 aa, synthetic construct
KTISPFV

SEQ ID NO: 109503 - protein, 7 aa, synthetic construct
PKQRQDN

SEQ ID NO: 109504 - protein, 7 aa, synthetic construct
IPGETPH

SEQ ID NO: 109505 - protein, 7 aa, synthetic construct
AFSTEGS

SEQ ID NO: 109506 - protein, 7 aa, synthetic construct
EKLQEGE

SEQ ID NO: 109507 - protein, 7 aa, synthetic construct
RMTGVYA

SEQ ID NO: 109508 - protein, 7 aa, synthetic construct
AKKQAGD

SEQ ID NO: 109509 - protein, 7 aa, synthetic construct
HVVDAMG

SEQ ID NO: 109510 - protein, 7 aa, synthetic construct
TPTQQIE

SEQ ID NO: 109511 - protein, 7 aa, synthetic construct
QTVLDQP

SEQ ID NO: 109512 - protein, 7 aa, synthetic construct
HTAPNAN

SEQ ID NO: 109513 - protein, 7 aa, synthetic construct
WEMKLGT

SEQ ID NO: 109514 - protein, 7 aa, synthetic construct
YPAHYDM

SEQ ID NO: 109515 - protein, 7 aa, synthetic construct
LELKLEP

SEQ ID NO: 109516 - protein, 7 aa, synthetic construct
AKVIASY

SEQ ID NO: 109517 - protein, 7 aa, synthetic construct
QDLMGHP

SEQ ID NO: 109518 - protein, 7 aa, synthetic construct
KNVIIGE

SEQ ID NO: 109519 - protein, 7 aa, synthetic construct
KTEAMLH

SEQ ID NO: 109520 - protein, 7 aa, synthetic construct
MQDPKIP

SEQ ID NO: 109521 - protein, 7 aa, synthetic construct
IKSLKLS

SEQ ID NO: 109522 - protein, 7 aa, synthetic construct
DSRILLE

SEQ ID NO: 109523 - protein, 7 aa, synthetic construct
GESHKAE

SEQ ID NO: 109524 - protein, 7 aa, synthetic construct
DITHMRE

SEQ ID NO: 109525 - protein, 7 aa, synthetic construct
IPAEVNN

SEQ ID NO: 109526 - protein, 7 aa, synthetic construct
YPFLDKD

SEQ ID NO: 109527 - protein, 7 aa, synthetic construct
YARINGV

SEQ ID NO: 109528 - protein, 7 aa, synthetic construct
RYDQIPV

SEQ ID NO: 109529 - protein, 7 aa, synthetic construct
PRVDMQK

SEQ ID NO: 109530 - protein, 7 aa, synthetic construct
TEAKHNR

SEQ ID NO: 109531 - protein, 7 aa, synthetic construct
GKVHILN

SEQ ID NO: 109532 - protein, 7 aa, synthetic construct
LVPRVND

SEQ ID NO: 109533 - protein, 7 aa, synthetic construct
IHNTWEK

SEQ ID NO: 109534 - protein, 7 aa, synthetic construct
KVERNSQ

SEQ ID NO: 109535 - protein, 7 aa, synthetic construct
LMTDSLM

SEQ ID NO: 109536 - protein, 7 aa, synthetic construct
HFQATND

SEQ ID NO: 109537 - protein, 7 aa, synthetic construct
VFIQSQG

SEQ ID NO: 109538 - protein, 7 aa, synthetic construct
QSKMPNI

SEQ ID NO: 109539 - protein, 7 aa, synthetic construct
LPHQEAE

SEQ ID NO: 109540 - protein, 7 aa, synthetic construct
MQSSPIQ

SEQ ID NO: 109541 - protein, 7 aa, synthetic construct
SLEPAKN

SEQ ID NO: 109542 - protein, 7 aa, synthetic construct
YFQDRTV

SEQ ID NO: 109543 - protein, 7 aa, synthetic construct
PKAHESD

SEQ ID NO: 109544 - protein, 7 aa, synthetic construct
IVQDLPT

SEQ ID NO: 109545 - protein, 7 aa, synthetic construct
KLTPALF

SEQ ID NO: 109546 - protein, 7 aa, synthetic construct
NAKVVDP

SEQ ID NO: 109547 - protein, 7 aa, synthetic construct
GMTELHR

SEQ ID NO: 109548 - protein, 7 aa, synthetic construct
ITGLNSR

SEQ ID NO: 109549 - protein, 7 aa, synthetic construct
FFDKLFD

SEQ ID NO: 109550 - protein, 7 aa, synthetic construct
WGKHNTV

SEQ ID NO: 109551 - protein, 7 aa, synthetic construct
AYLNVNE

SEQ ID NO: 109552 - protein, 7 aa, synthetic construct
VDLNHPM

SEQ ID NO: 109553 - protein, 7 aa, synthetic construct
LEHNSLV

SEQ ID NO: 109554 - protein, 7 aa, synthetic construct
NTFDKAR

SEQ ID NO: 109555 - protein, 7 aa, synthetic construct
YNVGNLM

SEQ ID NO: 109556 - protein, 7 aa, synthetic construct
QSSVPHT

SEQ ID NO: 109557 - protein, 7 aa, synthetic construct
GMNKVEQ

SEQ ID NO: 109558 - protein, 7 aa, synthetic construct
RVFAKDV

SEQ ID NO: 109559 - protein, 7 aa, synthetic construct
QHDIRHM

SEQ ID NO: 109560 - protein, 7 aa, synthetic construct
KIMDPQH

SEQ ID NO: 109561 - protein, 7 aa, synthetic construct
EKGGSME

SEQ ID NO: 109562 - protein, 7 aa, synthetic construct
NTSPMRV

SEQ ID NO: 109563 - protein, 7 aa, synthetic construct
QDKGAPV

SEQ ID NO: 109564 - protein, 7 aa, synthetic construct
PRNQFTP

SEQ ID NO: 109565 - protein, 7 aa, synthetic construct
NPHAVGL

SEQ ID NO: 109566 - protein, 7 aa, synthetic construct
DHPSTGK

SEQ ID NO: 109567 - protein, 7 aa, synthetic construct
AEMKVMA

SEQ ID NO: 109568 - protein, 7 aa, synthetic construct
VAYDSLD

SEQ ID NO: 109569 - protein, 7 aa, synthetic construct
SDPSHYA

SEQ ID NO: 109570 - protein, 7 aa, synthetic construct
SSNSPTS

SEQ ID NO: 109571 - protein, 7 aa, synthetic construct
IMVGHQK

SEQ ID NO: 109572 - protein, 7 aa, synthetic construct
AQTKSGT

SEQ ID NO: 109573 - protein, 7 aa, synthetic construct
NRVPTPD

SEQ ID NO: 109574 - protein, 7 aa, synthetic construct
GVGYSHL

SEQ ID NO: 109575 - protein, 7 aa, synthetic construct
MGAYGVI

SEQ ID NO: 109576 - protein, 7 aa, synthetic construct
GSQPHHQ

SEQ ID NO: 109577 - protein, 7 aa, synthetic construct
PRADFDM

SEQ ID NO: 109578 - protein, 7 aa, synthetic construct
MPQWEMD

SEQ ID NO: 109579 - protein, 7 aa, synthetic construct
HDHYPGA

SEQ ID NO: 109580 - protein, 7 aa, synthetic construct
TKGADDA

SEQ ID NO: 109581 - protein, 7 aa, synthetic construct
DKESWAG

SEQ ID NO: 109582 - protein, 7 aa, synthetic construct
AMGHMHT

SEQ ID NO: 109583 - protein, 7 aa, synthetic construct
AWREKNT

SEQ ID NO: 109584 - protein, 7 aa, synthetic construct
SSTAVQP

SEQ ID NO: 109585 - protein, 7 aa, synthetic construct
AATHVTE

SEQ ID NO: 109586 - protein, 7 aa, synthetic construct
TKDAKMN

SEQ ID NO: 109587 - protein, 7 aa, synthetic construct
RYQQFDP

SEQ ID NO: 109588 - protein, 7 aa, synthetic construct
KQTVIIN

SEQ ID NO: 109589 - protein, 7 aa, synthetic construct
MMTHGAL

SEQ ID NO: 109590 - protein, 7 aa, synthetic construct
SSPTYMN

SEQ ID NO: 109591 - protein, 7 aa, synthetic construct
RQEAHNE

SEQ ID NO: 109592 - protein, 7 aa, synthetic construct
LSRLPAH

SEQ ID NO: 109593 - protein, 7 aa, synthetic construct
RTFRDDQ

SEQ ID NO: 109594 - protein, 7 aa, synthetic construct
KKEMRTD

SEQ ID NO: 109595 - protein, 7 aa, synthetic construct
QEERLMS

SEQ ID NO: 109596 - protein, 7 aa, synthetic construct
QPTSPYA

SEQ ID NO: 109597 - protein, 7 aa, synthetic construct
VAPPHVL

SEQ ID NO: 109598 - protein, 7 aa, synthetic construct
LFVNGAH

SEQ ID NO: 109599 - protein, 7 aa, synthetic construct
AEHRIMS

SEQ ID NO: 109600 - protein, 7 aa, synthetic construct
HKQHFVE

SEQ ID NO: 109601 - protein, 7 aa, synthetic construct
IPGWEAK

SEQ ID NO: 109602 - protein, 7 aa, synthetic construct
KEKMPNL

SEQ ID NO: 109603 - protein, 7 aa, synthetic construct
NQSNTYK

SEQ ID NO: 109604 - protein, 7 aa, synthetic construct
RPAVVAS

SEQ ID NO: 109605 - protein, 7 aa, synthetic construct
VGNGIAM

SEQ ID NO: 109606 - protein, 7 aa, synthetic construct
SPTQAGP

SEQ ID NO: 109607 - protein, 7 aa, synthetic construct
HSWNVDK

SEQ ID NO: 109608 - protein, 7 aa, synthetic construct
LPEREVV

SEQ ID NO: 109609 - protein, 7 aa, synthetic construct
WTTGSRH

SEQ ID NO: 109610 - protein, 7 aa, synthetic construct
YTSDTNF

SEQ ID NO: 109611 - protein, 7 aa, synthetic construct
GDTSNSA

SEQ ID NO: 109612 - protein, 7 aa, synthetic construct
KLTLNDQ

SEQ ID NO: 109613 - protein, 7 aa, synthetic construct
KQVMETK

SEQ ID NO: 109614 - protein, 7 aa, synthetic construct
YMEVAQP

SEQ ID NO: 109615 - protein, 7 aa, synthetic construct
QGTGAVN

SEQ ID NO: 109616 - protein, 7 aa, synthetic construct
GAKTLYA

SEQ ID NO: 109617 - protein, 7 aa, synthetic construct
SIHEITN

SEQ ID NO: 109618 - protein, 7 aa, synthetic construct
MAPMDRA

SEQ ID NO: 109619 - protein, 7 aa, synthetic construct
LGPQYKL

SEQ ID NO: 109620 - protein, 7 aa, synthetic construct
IQFNGQN

SEQ ID NO: 109621 - protein, 7 aa, synthetic construct
HLSTREW

SEQ ID NO: 109622 - protein, 7 aa, synthetic construct
QSRTQGI

SEQ ID NO: 109623 - protein, 7 aa, synthetic construct
SYIQNDK

SEQ ID NO: 109624 - protein, 7 aa, synthetic construct
TFTRNPT

SEQ ID NO: 109625 - protein, 7 aa, synthetic construct
NAVQKYT

SEQ ID NO: 109626 - protein, 7 aa, synthetic construct
DLIKGVH

SEQ ID NO: 109627 - protein, 7 aa, synthetic construct
LQKEFPA

SEQ ID NO: 109628 - protein, 7 aa, synthetic construct
SQRMKDV

SEQ ID NO: 109629 - protein, 7 aa, synthetic construct
YKLNTPY

SEQ ID NO: 109630 - protein, 7 aa, synthetic construct
QNRDNLR

SEQ ID NO: 109631 - protein, 7 aa, synthetic construct
AVGEKNR

SEQ ID NO: 109632 - protein, 7 aa, synthetic construct
YHDSRTE

SEQ ID NO: 109633 - protein, 7 aa, synthetic construct
HMNTVNV

SEQ ID NO: 109634 - protein, 7 aa, synthetic construct
AIGRNDD

SEQ ID NO: 109635 - protein, 7 aa, synthetic construct
FEDKPVF

SEQ ID NO: 109636 - protein, 7 aa, synthetic construct
TKSTQQS

SEQ ID NO: 109637 - protein, 7 aa, synthetic construct
KDFMGPM

SEQ ID NO: 109638 - protein, 7 aa, synthetic construct
NNSFVSP

SEQ ID NO: 109639 - protein, 7 aa, synthetic construct
RRDITSY

SEQ ID NO: 109640 - protein, 7 aa, synthetic construct
ERDNKLL

SEQ ID NO: 109641 - protein, 7 aa, synthetic construct
APSLIHN

SEQ ID NO: 109642 - protein, 7 aa, synthetic construct
MVQFTTD

SEQ ID NO: 109643 - protein, 7 aa, synthetic construct
QHEKIRV

SEQ ID NO: 109644 - protein, 7 aa, synthetic construct
PMHDQDY

SEQ ID NO: 109645 - protein, 7 aa, synthetic construct
QRMNPML

SEQ ID NO: 109646 - protein, 7 aa, synthetic construct
YDKWNSD

SEQ ID NO: 109647 - protein, 7 aa, synthetic construct
FWKDAGI

SEQ ID NO: 109648 - protein, 7 aa, synthetic construct
SAQVMDR

SEQ ID NO: 109649 - protein, 7 aa, synthetic construct
AHLSPII

SEQ ID NO: 109650 - protein, 7 aa, synthetic construct
DGQRTRF

SEQ ID NO: 109651 - protein, 7 aa, synthetic construct
NFQDRYA

SEQ ID NO: 109652 - protein, 7 aa, synthetic construct
PNSTFPY

SEQ ID NO: 109653 - protein, 7 aa, synthetic construct
KNAQDKM

SEQ ID NO: 109654 - protein, 7 aa, synthetic construct
YGRMSSD

SEQ ID NO: 109655 - protein, 7 aa, synthetic construct
GQIRPDY

SEQ ID NO: 109656 - protein, 7 aa, synthetic construct
MVHGEKE

SEQ ID NO: 109657 - protein, 7 aa, synthetic construct
QSGGAPI

SEQ ID NO: 109658 - protein, 7 aa, synthetic construct
YGVNKAD

SEQ ID NO: 109659 - protein, 7 aa, synthetic construct
SMYSHID

SEQ ID NO: 109660 - protein, 7 aa, synthetic construct
SFLQIDK

SEQ ID NO: 109661 - protein, 7 aa, synthetic construct
DKANQRD

SEQ ID NO: 109662 - protein, 7 aa, synthetic construct
YGATFEP

SEQ ID NO: 109663 - protein, 7 aa, synthetic construct
TMQYGMT

SEQ ID NO: 109664 - protein, 7 aa, synthetic construct
NLNIHAA

SEQ ID NO: 109665 - protein, 7 aa, synthetic construct
ILRDFTP

SEQ ID NO: 109666 - protein, 7 aa, synthetic construct
TKLRELT

SEQ ID NO: 109667 - protein, 7 aa, synthetic construct
QHTHKFM

SEQ ID NO: 109668 - protein, 7 aa, synthetic construct
GTMPMNA

SEQ ID NO: 109669 - protein, 7 aa, synthetic construct
QHSAFEE

SEQ ID NO: 109670 - protein, 7 aa, synthetic construct
AYKDHRM

SEQ ID NO: 109671 - protein, 7 aa, synthetic construct
LTYDRQI

SEQ ID NO: 109672 - protein, 7 aa, synthetic construct
IPQHSHE

SEQ ID NO: 109673 - protein, 7 aa, synthetic construct
FTHNHQE

SEQ ID NO: 109674 - protein, 7 aa, synthetic construct
ANAVDHV

SEQ ID NO: 109675 - protein, 7 aa, synthetic construct
VSMMYPD

SEQ ID NO: 109676 - protein, 7 aa, synthetic construct
FADHATG

SEQ ID NO: 109677 - protein, 7 aa, synthetic construct
PQISVGP

SEQ ID NO: 109678 - protein, 7 aa, synthetic construct
AAEPQAG

SEQ ID NO: 109679 - protein, 7 aa, synthetic construct
HARSANI

SEQ ID NO: 109680 - protein, 7 aa, synthetic construct
TDQMHIP

SEQ ID NO: 109681 - protein, 7 aa, synthetic construct
VQESVKV

SEQ ID NO: 109682 - protein, 7 aa, synthetic construct
KSGHVHQ

SEQ ID NO: 109683 - protein, 7 aa, synthetic construct
KPYMGHP

SEQ ID NO: 109684 - protein, 7 aa, synthetic construct
ILKDPIQ

SEQ ID NO: 109685 - protein, 7 aa, synthetic construct
AGPQSGY

SEQ ID NO: 109686 - protein, 7 aa, synthetic construct
IEPQFKD

SEQ ID NO: 109687 - protein, 7 aa, synthetic construct
QLKLIQH

SEQ ID NO: 109688 - protein, 7 aa, synthetic construct
HHASNEW

SEQ ID NO: 109689 - protein, 7 aa, synthetic construct
SYIAIEK

SEQ ID NO: 109690 - protein, 7 aa, synthetic construct
HVQSYHP

SEQ ID NO: 109691 - protein, 7 aa, synthetic construct
VLMIGQD

SEQ ID NO: 109692 - protein, 7 aa, synthetic construct
KIPPYGI

SEQ ID NO: 109693 - protein, 7 aa, synthetic construct
YKDYDRS

SEQ ID NO: 109694 - protein, 7 aa, synthetic construct
RHGTDYT

SEQ ID NO: 109695 - protein, 7 aa, synthetic construct
HISKVNG

SEQ ID NO: 109696 - protein, 7 aa, synthetic construct
RFNNGNN

SEQ ID NO: 109697 - protein, 7 aa, synthetic construct
GIVAQPF

SEQ ID NO: 109698 - protein, 7 aa, synthetic construct
KYTPLVS

SEQ ID NO: 109699 - protein, 7 aa, synthetic construct
VPGNEQK

SEQ ID NO: 109700 - protein, 7 aa, synthetic construct
TFGADDP

SEQ ID NO: 109701 - protein, 7 aa, synthetic construct
GSSHDTV

SEQ ID NO: 109702 - protein, 7 aa, synthetic construct
TRQPRDH

SEQ ID NO: 109703 - protein, 7 aa, synthetic construct
RQFRITE

SEQ ID NO: 109704 - protein, 7 aa, synthetic construct
VMHLARD

SEQ ID NO: 109705 - protein, 7 aa, synthetic construct
INAQHTG

SEQ ID NO: 109706 - protein, 7 aa, synthetic construct
TQKFAPQ

SEQ ID NO: 109707 - protein, 7 aa, synthetic construct
VESHKEW

SEQ ID NO: 109708 - protein, 7 aa, synthetic construct
DKTPSSF

SEQ ID NO: 109709 - protein, 7 aa, synthetic construct
HSQPVAA

SEQ ID NO: 109710 - protein, 7 aa, synthetic construct
NDRKSGT

SEQ ID NO: 109711 - protein, 7 aa, synthetic construct
IIAQGRN

SEQ ID NO: 109712 - protein, 7 aa, synthetic construct
TNTPKHP

SEQ ID NO: 109713 - protein, 7 aa, synthetic construct
IQPRPVV

SEQ ID NO: 109714 - protein, 7 aa, synthetic construct
SKEYIRP

SEQ ID NO: 109715 - protein, 7 aa, synthetic construct
NSSVHSL

SEQ ID NO: 109716 - protein, 7 aa, synthetic construct
IDEKYRQ

SEQ ID NO: 109717 - protein, 7 aa, synthetic construct
QNRGITG

SEQ ID NO: 109718 - protein, 7 aa, synthetic construct
TRQQNMT

SEQ ID NO: 109719 - protein, 7 aa, synthetic construct
NKMESML

SEQ ID NO: 109720 - protein, 7 aa, synthetic construct
GLAPVAG

SEQ ID NO: 109721 - protein, 7 aa, synthetic construct
ENLRMTT

SEQ ID NO: 109722 - protein, 7 aa, synthetic construct
GKPSANA

SEQ ID NO: 109723 - protein, 7 aa, synthetic construct
LAVPANM

SEQ ID NO: 109724 - protein, 7 aa, synthetic construct
YAEGHHY

SEQ ID NO: 109725 - protein, 7 aa, synthetic construct
SQRTTGC

SEQ ID NO: 109726 - protein, 7 aa, synthetic construct
EPNAVPA

SEQ ID NO: 109727 - protein, 7 aa, synthetic construct
TQSFESM

SEQ ID NO: 109728 - protein, 7 aa, synthetic construct
FVSGALT

SEQ ID NO: 109729 - protein, 7 aa, synthetic construct
IIGINYK

SEQ ID NO: 109730 - protein, 7 aa, synthetic construct
TLQDGHM

SEQ ID NO: 109731 - protein, 7 aa, synthetic construct
DRIPDMF

SEQ ID NO: 109732 - protein, 7 aa, synthetic construct
TIGTTAL

SEQ ID NO: 109733 - protein, 7 aa, synthetic construct
IHPYMNA

SEQ ID NO: 109734 - protein, 7 aa, synthetic construct
NGGEGRE

SEQ ID NO: 109735 - protein, 7 aa, synthetic construct
WGGFTIN

SEQ ID NO: 109736 - protein, 7 aa, synthetic construct
LTQHGDP

SEQ ID NO: 109737 - protein, 7 aa, synthetic construct
KIQQDWG

SEQ ID NO: 109738 - protein, 7 aa, synthetic construct
VIGPTMN

SEQ ID NO: 109739 - protein, 7 aa, synthetic construct
NAFTMKQ

SEQ ID NO: 109740 - protein, 7 aa, synthetic construct
DTNNGKD

SEQ ID NO: 109741 - protein, 7 aa, synthetic construct
NINIRAL

SEQ ID NO: 109742 - protein, 7 aa, synthetic construct
DTGPSYS

SEQ ID NO: 109743 - protein, 7 aa, synthetic construct
KDEGRGA

SEQ ID NO: 109744 - protein, 7 aa, synthetic construct
QMDHRNN

SEQ ID NO: 109745 - protein, 7 aa, synthetic construct
SQSIRVL

SEQ ID NO: 109746 - protein, 7 aa, synthetic construct
GHVVTRD

SEQ ID NO: 109747 - protein, 7 aa, synthetic construct
TAQYTES

SEQ ID NO: 109748 - protein, 7 aa, synthetic construct
SRIHTSI

SEQ ID NO: 109749 - protein, 7 aa, synthetic construct
GSNKEQR

SEQ ID NO: 109750 - protein, 7 aa, synthetic construct
NNANFRT

SEQ ID NO: 109751 - protein, 7 aa, synthetic construct
FTKFTDY

SEQ ID NO: 109752 - protein, 7 aa, synthetic construct
HSKDPRV

SEQ ID NO: 109753 - protein, 7 aa, synthetic construct
WGSRITM

SEQ ID NO: 109754 - protein, 7 aa, synthetic construct
QIMADKN

SEQ ID NO: 109755 - protein, 7 aa, synthetic construct
TNASIGV

SEQ ID NO: 109756 - protein, 7 aa, synthetic construct
QTEKLTP

SEQ ID NO: 109757 - protein, 7 aa, synthetic construct
TQIPVPG

SEQ ID NO: 109758 - protein, 7 aa, synthetic construct
AMAGYPP

SEQ ID NO: 109759 - protein, 7 aa, synthetic construct
GYLHLQP

SEQ ID NO: 109760 - protein, 7 aa, synthetic construct
LTPYVEN

SEQ ID NO: 109761 - protein, 7 aa, synthetic construct
PEANRGL

SEQ ID NO: 109762 - protein, 7 aa, synthetic construct
TSMTNSY

SEQ ID NO: 109763 - protein, 7 aa, synthetic construct
VAKQVAW

SEQ ID NO: 109764 - protein, 7 aa, synthetic construct
TVHGYVP

SEQ ID NO: 109765 - protein, 7 aa, synthetic construct
GDKDIGH

SEQ ID NO: 109766 - protein, 7 aa, synthetic construct
DHFKYNS

SEQ ID NO: 109767 - protein, 7 aa, synthetic construct
DFMQPNR

SEQ ID NO: 109768 - protein, 7 aa, synthetic construct
FMPTLVD

SEQ ID NO: 109769 - protein, 7 aa, synthetic construct
VTQFSNM

SEQ ID NO: 109770 - protein, 7 aa, synthetic construct
AFSKQIY

SEQ ID NO: 109771 - protein, 7 aa, synthetic construct
MGGHAQS

SEQ ID NO: 109772 - protein, 7 aa, synthetic construct
QMNERFV

SEQ ID NO: 109773 - protein, 7 aa, synthetic construct
MQQNIAV

SEQ ID NO: 109774 - protein, 7 aa, synthetic construct
FHDGLKM

SEQ ID NO: 109775 - protein, 7 aa, synthetic construct
VMHIVHE

SEQ ID NO: 109776 - protein, 7 aa, synthetic construct
ALPKYVH

SEQ ID NO: 109777 - protein, 7 aa, synthetic construct
FVDKKFQ

SEQ ID NO: 109778 - protein, 7 aa, synthetic construct
LFQPANA

SEQ ID NO: 109779 - protein, 7 aa, synthetic construct
QFRPEHP

SEQ ID NO: 109780 - protein, 7 aa, synthetic construct
DQRTNMH

SEQ ID NO: 109781 - protein, 7 aa, synthetic construct
PVTQSDH

SEQ ID NO: 109782 - protein, 7 aa, synthetic construct
NDLRPMY

SEQ ID NO: 109783 - protein, 7 aa, synthetic construct
TYVKIAT

SEQ ID NO: 109784 - protein, 7 aa, synthetic construct
SMTNVRL

SEQ ID NO: 109785 - protein, 7 aa, synthetic construct
APWNDNK

SEQ ID NO: 109786 - protein, 7 aa, synthetic construct
KNDGKSA

SEQ ID NO: 109787 - protein, 7 aa, synthetic construct
LEGHMFH

SEQ ID NO: 109788 - protein, 7 aa, synthetic construct
KPAMAEA

SEQ ID NO: 109789 - protein, 7 aa, synthetic construct
IQERPHT

SEQ ID NO: 109790 - protein, 7 aa, synthetic construct
KGSEHYH

SEQ ID NO: 109791 - protein, 7 aa, synthetic construct
LRDYALG

SEQ ID NO: 109792 - protein, 7 aa, synthetic construct
SINPGPE

SEQ ID NO: 109793 - protein, 7 aa, synthetic construct
MHDSVLK

SEQ ID NO: 109794 - protein, 7 aa, synthetic construct
VTMKTMM

SEQ ID NO: 109795 - protein, 7 aa, synthetic construct
SADPIVG

SEQ ID NO: 109796 - protein, 7 aa, synthetic construct
LDHTMSR

SEQ ID NO: 109797 - protein, 7 aa, synthetic construct
THKTDDN

SEQ ID NO: 109798 - protein, 7 aa, synthetic construct
APAIVEA

SEQ ID NO: 109799 - protein, 7 aa, synthetic construct
IADFIHK

SEQ ID NO: 109800 - protein, 7 aa, synthetic construct
QDARNIN

SEQ ID NO: 109801 - protein, 7 aa, synthetic construct
HDAVKKN

SEQ ID NO: 109802 - protein, 7 aa, synthetic construct
VTKSANF

SEQ ID NO: 109803 - protein, 7 aa, synthetic construct
AQHKHMM

SEQ ID NO: 109804 - protein, 7 aa, synthetic construct
FNPSGLR

SEQ ID NO: 109805 - protein, 7 aa, synthetic construct
FKEAMGW

SEQ ID NO: 109806 - protein, 7 aa, synthetic construct
NNMTMEI

SEQ ID NO: 109807 - protein, 7 aa, synthetic construct
KNVITMH

SEQ ID NO: 109808 - protein, 7 aa, synthetic construct
RDTFAHN

SEQ ID NO: 109809 - protein, 7 aa, synthetic construct
IQGEAKA

SEQ ID NO: 109810 - protein, 7 aa, synthetic construct
NHAAMLT

SEQ ID NO: 109811 - protein, 7 aa, synthetic construct
RGLDEGL

SEQ ID NO: 109812 - protein, 7 aa, synthetic construct
GTTSMTH

SEQ ID NO: 109813 - protein, 7 aa, synthetic construct
KWSGVID

SEQ ID NO: 109814 - protein, 7 aa, synthetic construct
TISERIQ

SEQ ID NO: 109815 - protein, 7 aa, synthetic construct
QIQSMDM

SEQ ID NO: 109816 - protein, 7 aa, synthetic construct
RANDQQS

SEQ ID NO: 109817 - protein, 7 aa, synthetic construct
VTQNGTH

SEQ ID NO: 109818 - protein, 7 aa, synthetic construct
WYRDESG

SEQ ID NO: 109819 - protein, 7 aa, synthetic construct
TIMPTQF

SEQ ID NO: 109820 - protein, 7 aa, synthetic construct
HTPQDEG

SEQ ID NO: 109821 - protein, 7 aa, synthetic construct
HEKGSHD

SEQ ID NO: 109822 - protein, 7 aa, synthetic construct
SYDYKLD

SEQ ID NO: 109823 - protein, 7 aa, synthetic construct
NHHDQHE

SEQ ID NO: 109824 - protein, 7 aa, synthetic construct
TVEYMSS

SEQ ID NO: 109825 - protein, 7 aa, synthetic construct
QPRLNFQ

SEQ ID NO: 109826 - protein, 7 aa, synthetic construct
LYSMEKK

SEQ ID NO: 109827 - protein, 7 aa, synthetic construct
QRAHYPA

SEQ ID NO: 109828 - protein, 7 aa, synthetic construct
REIAQMA

SEQ ID NO: 109829 - protein, 7 aa, synthetic construct
NGVGGAV

SEQ ID NO: 109830 - protein, 7 aa, synthetic construct
VVTAIGG

SEQ ID NO: 109831 - protein, 7 aa, synthetic construct
YHPGQQA

SEQ ID NO: 109832 - protein, 7 aa, synthetic construct
LNTQTYQ

SEQ ID NO: 109833 - protein, 7 aa, synthetic construct
DDLEYVN

SEQ ID NO: 109834 - protein, 7 aa, synthetic construct
YRDPRGD

SEQ ID NO: 109835 - protein, 7 aa, synthetic construct
MTPDRHD

SEQ ID NO: 109836 - protein, 7 aa, synthetic construct
DPFNIRT

SEQ ID NO: 109837 - protein, 7 aa, synthetic construct
WARQSVH

SEQ ID NO: 109838 - protein, 7 aa, synthetic construct
QPHSGSW

SEQ ID NO: 109839 - protein, 7 aa, synthetic construct
VPMILQD

SEQ ID NO: 109840 - protein, 7 aa, synthetic construct
MPTNVKN

SEQ ID NO: 109841 - protein, 7 aa, synthetic construct
RAVSEGM

SEQ ID NO: 109842 - protein, 7 aa, synthetic construct
MNTREQN

SEQ ID NO: 109843 - protein, 7 aa, synthetic construct
EQIHNSP

SEQ ID NO: 109844 - protein, 7 aa, synthetic construct
DKEGTSK

SEQ ID NO: 109845 - protein, 7 aa, synthetic construct
MWQQSDP

SEQ ID NO: 109846 - protein, 7 aa, synthetic construct
INRNIMH

SEQ ID NO: 109847 - protein, 7 aa, synthetic construct
MGNNQRS

SEQ ID NO: 109848 - protein, 7 aa, synthetic construct
ARDTEVK

SEQ ID NO: 109849 - protein, 7 aa, synthetic construct
GTERTVM

SEQ ID NO: 109850 - protein, 7 aa, synthetic construct
DHITIIS

SEQ ID NO: 109851 - protein, 7 aa, synthetic construct
KMTDSQE

SEQ ID NO: 109852 - protein, 7 aa, synthetic construct
YSRTSNT

SEQ ID NO: 109853 - protein, 7 aa, synthetic construct
DLKVRMP

SEQ ID NO: 109854 - protein, 7 aa, synthetic construct
YKGARDG

SEQ ID NO: 109855 - protein, 7 aa, synthetic construct
KTNDEKW

SEQ ID NO: 109856 - protein, 7 aa, synthetic construct
KLDFQST

SEQ ID NO: 109857 - protein, 7 aa, synthetic construct
HYSGKIL

SEQ ID NO: 109858 - protein, 7 aa, synthetic construct
AASSDKP

SEQ ID NO: 109859 - protein, 7 aa, synthetic construct
MVKEVNF

SEQ ID NO: 109860 - protein, 7 aa, synthetic construct
TPPLLSL

SEQ ID NO: 109861 - protein, 7 aa, synthetic construct
QREMTEP

SEQ ID NO: 109862 - protein, 7 aa, synthetic construct
YNDALHR

SEQ ID NO: 109863 - protein, 7 aa, synthetic construct
VWGNGEA

SEQ ID NO: 109864 - protein, 7 aa, synthetic construct
YDQAKAQ

SEQ ID NO: 109865 - protein, 7 aa, synthetic construct
LFQDAMN

SEQ ID NO: 109866 - protein, 7 aa, synthetic construct
SPSFGEP

SEQ ID NO: 109867 - protein, 7 aa, synthetic construct
GDSGRYA

SEQ ID NO: 109868 - protein, 7 aa, synthetic construct
MPGELRF

SEQ ID NO: 109869 - protein, 7 aa, synthetic construct
TIKQMYT

SEQ ID NO: 109870 - protein, 7 aa, synthetic construct
QLPHMQF

SEQ ID NO: 109871 - protein, 7 aa, synthetic construct
KSEQDVR

SEQ ID NO: 109872 - protein, 7 aa, synthetic construct
YQSLIVN

SEQ ID NO: 109873 - protein, 7 aa, synthetic construct
GWSNTGM

SEQ ID NO: 109874 - protein, 7 aa, synthetic construct
MDRGHLD

SEQ ID NO: 109875 - protein, 7 aa, synthetic construct
VGKYGLL

SEQ ID NO: 109876 - protein, 7 aa, synthetic construct
TSKEVAR

SEQ ID NO: 109877 - protein, 7 aa, synthetic construct
WKGEDLY

SEQ ID NO: 109878 - protein, 7 aa, synthetic construct
LSYHREP

SEQ ID NO: 109879 - protein, 7 aa, synthetic construct
WEVSKMT

SEQ ID NO: 109880 - protein, 7 aa, synthetic construct
APQMQEK

SEQ ID NO: 109881 - protein, 7 aa, synthetic construct
AEMATWS

SEQ ID NO: 109882 - protein, 7 aa, synthetic construct
QVGFRDT

SEQ ID NO: 109883 - protein, 7 aa, synthetic construct
SLKFDEP

SEQ ID NO: 109884 - protein, 7 aa, synthetic construct
FSMKRHE

SEQ ID NO: 109885 - protein, 7 aa, synthetic construct
GQPIGQW

SEQ ID NO: 109886 - protein, 7 aa, synthetic construct
LVSLHDG

SEQ ID NO: 109887 - protein, 7 aa, synthetic construct
EMGNIKV

SEQ ID NO: 109888 - protein, 7 aa, synthetic construct
VVATGFA

SEQ ID NO: 109889 - protein, 7 aa, synthetic construct
HESNNKK

SEQ ID NO: 109890 - protein, 7 aa, synthetic construct
YRYAEAE

SEQ ID NO: 109891 - protein, 7 aa, synthetic construct
GKSTNTP

SEQ ID NO: 109892 - protein, 7 aa, synthetic construct
QDGHMAQ

SEQ ID NO: 109893 - protein, 7 aa, synthetic construct
SDMSHGA

SEQ ID NO: 109894 - protein, 7 aa, synthetic construct
ALKSPHV

SEQ ID NO: 109895 - protein, 7 aa, synthetic construct
VNRPNGI

SEQ ID NO: 109896 - protein, 7 aa, synthetic construct
YGAKNSN

SEQ ID NO: 109897 - protein, 7 aa, synthetic construct
YQHRQDM

SEQ ID NO: 109898 - protein, 7 aa, synthetic construct
INKKSLD

SEQ ID NO: 109899 - protein, 7 aa, synthetic construct
KDDQKVF

SEQ ID NO: 109900 - protein, 7 aa, synthetic construct
GMPVGEA

SEQ ID NO: 109901 - protein, 7 aa, synthetic construct
QMEYKPI

SEQ ID NO: 109902 - protein, 7 aa, synthetic construct
PKDTKPP

SEQ ID NO: 109903 - protein, 7 aa, synthetic construct
PTAGNQF

SEQ ID NO: 109904 - protein, 7 aa, synthetic construct
PYGSSEP

SEQ ID NO: 109905 - protein, 7 aa, synthetic construct
MMDPVRV

SEQ ID NO: 109906 - protein, 7 aa, synthetic construct
RGDHLMQ

SEQ ID NO: 109907 - protein, 7 aa, synthetic construct
KNTMTYM

SEQ ID NO: 109908 - protein, 7 aa, synthetic construct
ADQSIRS

SEQ ID NO: 109909 - protein, 7 aa, synthetic construct
YARDDGV

SEQ ID NO: 109910 - protein, 7 aa, synthetic construct
TGNYNMR

SEQ ID NO: 109911 - protein, 7 aa, synthetic construct
LLEHHNH

SEQ ID NO: 109912 - protein, 7 aa, synthetic construct
WKHELRG

SEQ ID NO: 109913 - protein, 7 aa, synthetic construct
PTTVHNN

SEQ ID NO: 109914 - protein, 7 aa, synthetic construct
GHPYPVK

SEQ ID NO: 109915 - protein, 7 aa, synthetic construct
EHAKLFH

SEQ ID NO: 109916 - protein, 7 aa, synthetic construct
FQHPMHS

SEQ ID NO: 109917 - protein, 7 aa, synthetic construct
VPSIGTE

SEQ ID NO: 109918 - protein, 7 aa, synthetic construct
RHSHEHP

SEQ ID NO: 109919 - protein, 7 aa, synthetic construct
QNTLHGI

SEQ ID NO: 109920 - protein, 7 aa, synthetic construct
INMGIHS

SEQ ID NO: 109921 - protein, 7 aa, synthetic construct
QIHIPQP

SEQ ID NO: 109922 - protein, 7 aa, synthetic construct
MATVVYE

SEQ ID NO: 109923 - protein, 7 aa, synthetic construct
TNSRFQM

SEQ ID NO: 109924 - protein, 7 aa, synthetic construct
NVETHKR

SEQ ID NO: 109925 - protein, 7 aa, synthetic construct
WPDQGKK

SEQ ID NO: 109926 - protein, 7 aa, synthetic construct
ESDHHRY

SEQ ID NO: 109927 - protein, 7 aa, synthetic construct
AYRMKEA

SEQ ID NO: 109928 - protein, 7 aa, synthetic construct
KDHSVRW

SEQ ID NO: 109929 - protein, 7 aa, synthetic construct
DEKKSPQ

SEQ ID NO: 109930 - protein, 7 aa, synthetic construct
TARIDLT

SEQ ID NO: 109931 - protein, 7 aa, synthetic construct
MKGAIEW

SEQ ID NO: 109932 - protein, 7 aa, synthetic construct
DRNVHME

SEQ ID NO: 109933 - protein, 7 aa, synthetic construct
KENLQKW

SEQ ID NO: 109934 - protein, 7 aa, synthetic construct
GTIREQV

SEQ ID NO: 109935 - protein, 7 aa, synthetic construct
KQPYSLQ

SEQ ID NO: 109936 - protein, 7 aa, synthetic construct
RNPPPAD

SEQ ID NO: 109937 - protein, 7 aa, synthetic construct
YSHVQRS

SEQ ID NO: 109938 - protein, 7 aa, synthetic construct
EFRERLD

SEQ ID NO: 109939 - protein, 7 aa, synthetic construct
MRPSYQD

SEQ ID NO: 109940 - protein, 7 aa, synthetic construct
NVERGSK

SEQ ID NO: 109941 - protein, 7 aa, synthetic construct
INVMQGK

SEQ ID NO: 109942 - protein, 7 aa, synthetic construct
DTTRRVH

SEQ ID NO: 109943 - protein, 7 aa, synthetic construct
PKSTDDI

SEQ ID NO: 109944 - protein, 7 aa, synthetic construct
YNHQIGA

SEQ ID NO: 109945 - protein, 7 aa, synthetic construct
LNIKTVL

SEQ ID NO: 109946 - protein, 7 aa, synthetic construct
YLEGVYG

SEQ ID NO: 109947 - protein, 7 aa, synthetic construct
NKQHSYH

SEQ ID NO: 109948 - protein, 7 aa, synthetic construct
HTFTGES

SEQ ID NO: 109949 - protein, 7 aa, synthetic construct
AAPASGL

SEQ ID NO: 109950 - protein, 7 aa, synthetic construct
MVSQPMM

SEQ ID NO: 109951 - protein, 7 aa, synthetic construct
QGRDNKA

SEQ ID NO: 109952 - protein, 7 aa, synthetic construct
GTWTNNI

SEQ ID NO: 109953 - protein, 7 aa, synthetic construct
TPAIQGA

SEQ ID NO: 109954 - protein, 7 aa, synthetic construct
TQVVMPQ

SEQ ID NO: 109955 - protein, 7 aa, synthetic construct
WKDQSGY

SEQ ID NO: 109956 - protein, 7 aa, synthetic construct
VLNLHNA

SEQ ID NO: 109957 - protein, 7 aa, synthetic construct
EPVRWRE

SEQ ID NO: 109958 - protein, 7 aa, synthetic construct
VNSLVEY

SEQ ID NO: 109959 - protein, 7 aa, synthetic construct
YKPSMTN

SEQ ID NO: 109960 - protein, 7 aa, synthetic construct
TGALHMD

SEQ ID NO: 109961 - protein, 7 aa, synthetic construct
RFENATT

SEQ ID NO: 109962 - protein, 7 aa, synthetic construct
LEQGWQK

SEQ ID NO: 109963 - protein, 7 aa, synthetic construct
FMSQPTL

SEQ ID NO: 109964 - protein, 7 aa, synthetic construct
DKLPQYE

SEQ ID NO: 109965 - protein, 7 aa, synthetic construct
YKLGAEY

SEQ ID NO: 109966 - protein, 7 aa, synthetic construct
EAQVAQR

SEQ ID NO: 109967 - protein, 7 aa, synthetic construct
AAAETST

SEQ ID NO: 109968 - protein, 7 aa, synthetic construct
RMGMPVI

SEQ ID NO: 109969 - protein, 7 aa, synthetic construct
GIHYENL

SEQ ID NO: 109970 - protein, 7 aa, synthetic construct
PIGTSAF

SEQ ID NO: 109971 - protein, 7 aa, synthetic construct
YHEKLHA

SEQ ID NO: 109972 - protein, 7 aa, synthetic construct
VADLWKD

SEQ ID NO: 109973 - protein, 7 aa, synthetic construct
NKAGIKP

SEQ ID NO: 109974 - protein, 7 aa, synthetic construct
DKQPSQL

SEQ ID NO: 109975 - protein, 7 aa, synthetic construct
INGIDYG

SEQ ID NO: 109976 - protein, 7 aa, synthetic construct
MEPERAH

SEQ ID NO: 109977 - protein, 7 aa, synthetic construct
YEKNQAQ

SEQ ID NO: 109978 - protein, 7 aa, synthetic construct
RIHENAN

SEQ ID NO: 109979 - protein, 7 aa, synthetic construct
YLMDGSP

SEQ ID NO: 109980 - protein, 7 aa, synthetic construct
GGIIDQR

SEQ ID NO: 109981 - protein, 7 aa, synthetic construct
VFNAEHN

SEQ ID NO: 109982 - protein, 7 aa, synthetic construct
GHDHGYM

SEQ ID NO: 109983 - protein, 7 aa, synthetic construct
TTHYNIS

SEQ ID NO: 109984 - protein, 7 aa, synthetic construct
TNLRQML

SEQ ID NO: 109985 - protein, 7 aa, synthetic construct
RYDRRDD

SEQ ID NO: 109986 - protein, 7 aa, synthetic construct
WKSSLIT

SEQ ID NO: 109987 - protein, 7 aa, synthetic construct
RNHAAMQ

SEQ ID NO: 109988 - protein, 7 aa, synthetic construct
LEKIHEL

SEQ ID NO: 109989 - protein, 7 aa, synthetic construct
EAGGPIR

SEQ ID NO: 109990 - protein, 7 aa, synthetic construct
MHEGSTT

SEQ ID NO: 109991 - protein, 7 aa, synthetic construct
EIRDIAG

SEQ ID NO: 109992 - protein, 7 aa, synthetic construct
SDKPMFA

SEQ ID NO: 109993 - protein, 7 aa, synthetic construct
TMVAHQM

SEQ ID NO: 109994 - protein, 7 aa, synthetic construct
LNRDIEG

SEQ ID NO: 109995 - protein, 7 aa, synthetic construct
AWDSQQG

SEQ ID NO: 109996 - protein, 7 aa, synthetic construct
IGKLIET

SEQ ID NO: 109997 - protein, 7 aa, synthetic construct
ATGANHI

SEQ ID NO: 109998 - protein, 7 aa, synthetic construct
LTGPVMM

SEQ ID NO: 109999 - protein, 7 aa, synthetic construct
NNELSQV

SEQ ID NO: 110000 - protein, 7 aa, synthetic construct
PERNRND

SEQ ID NO: 110001 - protein, 7 aa, synthetic construct
QTRTHHS

SEQ ID NO: 110002 - protein, 7 aa, synthetic construct
AYGHMVV

SEQ ID NO: 110003 - protein, 7 aa, synthetic construct
VGDYKQK

SEQ ID NO: 110004 - protein, 7 aa, synthetic construct
KREPVLS

SEQ ID NO: 110005 - protein, 7 aa, synthetic construct
TFKQTGL

SEQ ID NO: 110006 - protein, 7 aa, synthetic construct
DMHSKVA

SEQ ID NO: 110007 - protein, 7 aa, synthetic construct
WQNSVQQ

SEQ ID NO: 110008 - protein, 7 aa, synthetic construct
TEASIKY

SEQ ID NO: 110009 - protein, 7 aa, synthetic construct
RDGTVPL

SEQ ID NO: 110010 - protein, 7 aa, synthetic construct
VTTNGAW

SEQ ID NO: 110011 - protein, 7 aa, synthetic construct
VTSHIDE

SEQ ID NO: 110012 - protein, 7 aa, synthetic construct
MRINHNH

SEQ ID NO: 110013 - protein, 7 aa, synthetic construct
WDRHDMK

SEQ ID NO: 110014 - protein, 7 aa, synthetic construct
LDHWNPA

SEQ ID NO: 110015 - protein, 7 aa, synthetic construct
HFGHMGN

SEQ ID NO: 110016 - protein, 7 aa, synthetic construct
EKSEKIY

SEQ ID NO: 110017 - protein, 7 aa, synthetic construct
EIGQFSR

SEQ ID NO: 110018 - protein, 7 aa, synthetic construct
WMPHQID

SEQ ID NO: 110019 - protein, 7 aa, synthetic construct
PEHVNHL

SEQ ID NO: 110020 - protein, 7 aa, synthetic construct
LVPSRML

SEQ ID NO: 110021 - protein, 7 aa, synthetic construct
TGKVLAT

SEQ ID NO: 110022 - protein, 7 aa, synthetic construct
RTVVDVR

SEQ ID NO: 110023 - protein, 7 aa, synthetic construct
PEKVGFA

SEQ ID NO: 110024 - protein, 7 aa, synthetic construct
MAFDPTA

SEQ ID NO: 110025 - protein, 7 aa, synthetic construct
IHAIGGL

SEQ ID NO: 110026 - protein, 7 aa, synthetic construct
TNGIHYS

SEQ ID NO: 110027 - protein, 7 aa, synthetic construct
FQTHIHN

SEQ ID NO: 110028 - protein, 7 aa, synthetic construct
EERGSRD

SEQ ID NO: 110029 - protein, 7 aa, synthetic construct
KDAPNTC

SEQ ID NO: 110030 - protein, 7 aa, synthetic construct
QNREFGA

SEQ ID NO: 110031 - protein, 7 aa, synthetic construct
GYKTLAE

SEQ ID NO: 110032 - protein, 7 aa, synthetic construct
YLGVPRS

SEQ ID NO: 110033 - protein, 7 aa, synthetic construct
GYHHFED

SEQ ID NO: 110034 - protein, 7 aa, synthetic construct
GMKEGAT

SEQ ID NO: 110035 - protein, 7 aa, synthetic construct
MADMIHG

SEQ ID NO: 110036 - protein, 7 aa, synthetic construct
LNLHNTY

SEQ ID NO: 110037 - protein, 7 aa, synthetic construct
ESQVQVG

SEQ ID NO: 110038 - protein, 7 aa, synthetic construct
DSRHLEQ

SEQ ID NO: 110039 - protein, 7 aa, synthetic construct
HPPHKVH

SEQ ID NO: 110040 - protein, 7 aa, synthetic construct
ANDMRPT

SEQ ID NO: 110041 - protein, 7 aa, synthetic construct
IRETTHD

SEQ ID NO: 110042 - protein, 7 aa, synthetic construct
KHNVHHS

SEQ ID NO: 110043 - protein, 7 aa, synthetic construct
AQPQYQT

SEQ ID NO: 110044 - protein, 7 aa, synthetic construct
HKIEMKM

SEQ ID NO: 110045 - protein, 7 aa, synthetic construct
MQDNRSH

SEQ ID NO: 110046 - protein, 7 aa, synthetic construct
MVSGPIL

SEQ ID NO: 110047 - protein, 7 aa, synthetic construct
VKFTDQI

SEQ ID NO: 110048 - protein, 7 aa, synthetic construct
VTPLSSM

SEQ ID NO: 110049 - protein, 7 aa, synthetic construct
HFKHSTT

SEQ ID NO: 110050 - protein, 7 aa, synthetic construct
QMYQPNA

SEQ ID NO: 110051 - protein, 7 aa, synthetic construct
IEAFMHG

SEQ ID NO: 110052 - protein, 7 aa, synthetic construct
RDSLLQL

SEQ ID NO: 110053 - protein, 7 aa, synthetic construct
ARSTTAP

SEQ ID NO: 110054 - protein, 7 aa, synthetic construct
SEYNDIG

SEQ ID NO: 110055 - protein, 7 aa, synthetic construct
YASEDHA

SEQ ID NO: 110056 - protein, 7 aa, synthetic construct
PEGTSKF

SEQ ID NO: 110057 - protein, 7 aa, synthetic construct
LPQKGSW

SEQ ID NO: 110058 - protein, 7 aa, synthetic construct
PFQAREF

SEQ ID NO: 110059 - protein, 7 aa, synthetic construct
MKQPFHQ

SEQ ID NO: 110060 - protein, 7 aa, synthetic construct
DNQIPVG

SEQ ID NO: 110061 - protein, 7 aa, synthetic construct
FQKAHVH

SEQ ID NO: 110062 - protein, 7 aa, synthetic construct
LVINQEA

SEQ ID NO: 110063 - protein, 7 aa, synthetic construct
QTVAPNP

SEQ ID NO: 110064 - protein, 7 aa, synthetic construct
LTLRSQI

SEQ ID NO: 110065 - protein, 7 aa, synthetic construct
ADKPKGY

SEQ ID NO: 110066 - protein, 7 aa, synthetic construct
GNHRIPI

SEQ ID NO: 110067 - protein, 7 aa, synthetic construct
KFMGDDL

SEQ ID NO: 110068 - protein, 7 aa, synthetic construct
PGKAGAD

SEQ ID NO: 110069 - protein, 7 aa, synthetic construct
KQTMIMD

SEQ ID NO: 110070 - protein, 7 aa, synthetic construct
GVGYLND

SEQ ID NO: 110071 - protein, 7 aa, synthetic construct
RDDISIK

SEQ ID NO: 110072 - protein, 7 aa, synthetic construct
YHHMVEN

SEQ ID NO: 110073 - protein, 7 aa, synthetic construct
DLHGIAY

SEQ ID NO: 110074 - protein, 7 aa, synthetic construct
QGEGIHA

SEQ ID NO: 110075 - protein, 7 aa, synthetic construct
CKNPCEP

SEQ ID NO: 110076 - protein, 7 aa, synthetic construct
LIASESM

SEQ ID NO: 110077 - protein, 7 aa, synthetic construct
GVGADQT

SEQ ID NO: 110078 - protein, 7 aa, synthetic construct
VERLSQV

SEQ ID NO: 110079 - protein, 7 aa, synthetic construct
RDEVYQK

SEQ ID NO: 110080 - protein, 7 aa, synthetic construct
QYQDGMA

SEQ ID NO: 110081 - protein, 7 aa, synthetic construct
NFQVRSS

SEQ ID NO: 110082 - protein, 7 aa, synthetic construct
AQVQTPR

SEQ ID NO: 110083 - protein, 7 aa, synthetic construct
SITSTLS

SEQ ID NO: 110084 - protein, 7 aa, synthetic construct
DFQNAST

SEQ ID NO: 110085 - protein, 7 aa, synthetic construct
PQTHLRQ

SEQ ID NO: 110086 - protein, 7 aa, synthetic construct
CAKSVPA

SEQ ID NO: 110087 - protein, 7 aa, synthetic construct
VWDQQPI

SEQ ID NO: 110088 - protein, 7 aa, synthetic construct
TSALVGY

SEQ ID NO: 110089 - protein, 7 aa, synthetic construct
HLEHRDV

SEQ ID NO: 110090 - protein, 7 aa, synthetic construct
RAINGLH

SEQ ID NO: 110091 - protein, 7 aa, synthetic construct
PSKGSGV

SEQ ID NO: 110092 - protein, 7 aa, synthetic construct
WTEERKT

SEQ ID NO: 110093 - protein, 7 aa, synthetic construct
IVNAKEG

SEQ ID NO: 110094 - protein, 7 aa, synthetic construct
PDPNLRQ

SEQ ID NO: 110095 - protein, 7 aa, synthetic construct
SSGIVAK

SEQ ID NO: 110096 - protein, 7 aa, synthetic construct
PLDGMRF

SEQ ID NO: 110097 - protein, 7 aa, synthetic construct
MIQKTQW

SEQ ID NO: 110098 - protein, 7 aa, synthetic construct
ETKVQTA

SEQ ID NO: 110099 - protein, 7 aa, synthetic construct
AVAMAVK

SEQ ID NO: 110100 - protein, 7 aa, synthetic construct
YNLRQKD

SEQ ID NO: 110101 - protein, 7 aa, synthetic construct
YQWGPTE

SEQ ID NO: 110102 - protein, 7 aa, synthetic construct
SSSPDGD

SEQ ID NO: 110103 - protein, 7 aa, synthetic construct
RTTDWPG

SEQ ID NO: 110104 - protein, 7 aa, synthetic construct
GLNNAPP

SEQ ID NO: 110105 - protein, 7 aa, synthetic construct
GKPNMGA

SEQ ID NO: 110106 - protein, 7 aa, synthetic construct
VPTPVHT

SEQ ID NO: 110107 - protein, 7 aa, synthetic construct
KLGDLMK

SEQ ID NO: 110108 - protein, 7 aa, synthetic construct
VVDKASR

SEQ ID NO: 110109 - protein, 7 aa, synthetic construct
IEDKWMG

SEQ ID NO: 110110 - protein, 7 aa, synthetic construct
AKDPARH

SEQ ID NO: 110111 - protein, 7 aa, synthetic construct
AARGPTW

SEQ ID NO: 110112 - protein, 7 aa, synthetic construct
PEVFVAS

SEQ ID NO: 110113 - protein, 7 aa, synthetic construct
TYRQQYD

SEQ ID NO: 110114 - protein, 7 aa, synthetic construct
AGPENNV

SEQ ID NO: 110115 - protein, 7 aa, synthetic construct
KREVMAH

SEQ ID NO: 110116 - protein, 7 aa, synthetic construct
GSTQPVP

SEQ ID NO: 110117 - protein, 7 aa, synthetic construct
ELKWDHG

SEQ ID NO: 110118 - protein, 7 aa, synthetic construct
DHVKFEP

SEQ ID NO: 110119 - protein, 7 aa, synthetic construct
LVAAPQA

SEQ ID NO: 110120 - protein, 7 aa, synthetic construct
AANGHGS

SEQ ID NO: 110121 - protein, 7 aa, synthetic construct
YMRNAHI

SEQ ID NO: 110122 - protein, 7 aa, synthetic construct
AINPIEW

SEQ ID NO: 110123 - protein, 7 aa, synthetic construct
VEKNALA

SEQ ID NO: 110124 - protein, 7 aa, synthetic construct
EEHHGAK

SEQ ID NO: 110125 - protein, 7 aa, synthetic construct
WQIKVHP

SEQ ID NO: 110126 - protein, 7 aa, synthetic construct
TTTARAS

SEQ ID NO: 110127 - protein, 7 aa, synthetic construct
LFLRSEE

SEQ ID NO: 110128 - protein, 7 aa, synthetic construct
NKEQNHL

SEQ ID NO: 110129 - protein, 7 aa, synthetic construct
NQMGHQA

SEQ ID NO: 110130 - protein, 7 aa, synthetic construct
VNGVWTP

SEQ ID NO: 110131 - protein, 7 aa, synthetic construct
ESSHEKH

SEQ ID NO: 110132 - protein, 7 aa, synthetic construct
DPKIIAP

SEQ ID NO: 110133 - protein, 7 aa, synthetic construct
LTMRVMA

SEQ ID NO: 110134 - protein, 7 aa, synthetic construct
ADNFMKK

SEQ ID NO: 110135 - protein, 7 aa, synthetic construct
RKVVVDA

SEQ ID NO: 110136 - protein, 7 aa, synthetic construct
FQGNAMT

SEQ ID NO: 110137 - protein, 7 aa, synthetic construct
YQMTGKM

SEQ ID NO: 110138 - protein, 7 aa, synthetic construct
YLEQWKE

SEQ ID NO: 110139 - protein, 7 aa, synthetic construct
GLKVDWG

SEQ ID NO: 110140 - protein, 7 aa, synthetic construct
NSTPAYA

SEQ ID NO: 110141 - protein, 7 aa, synthetic construct
QEKQHKD

SEQ ID NO: 110142 - protein, 7 aa, synthetic construct
FHSPTIL

SEQ ID NO: 110143 - protein, 7 aa, synthetic construct
SDESVRR

SEQ ID NO: 110144 - protein, 7 aa, synthetic construct
HNVEGKN

SEQ ID NO: 110145 - protein, 7 aa, synthetic construct
EERQLGM

SEQ ID NO: 110146 - protein, 7 aa, synthetic construct
SRTMREE

SEQ ID NO: 110147 - protein, 7 aa, synthetic construct
IEYESTK

SEQ ID NO: 110148 - protein, 7 aa, synthetic construct
TRNGANA

SEQ ID NO: 110149 - protein, 7 aa, synthetic construct
PMGGQHW

SEQ ID NO: 110150 - protein, 7 aa, synthetic construct
SQAVVKM

SEQ ID NO: 110151 - protein, 7 aa, synthetic construct
RNLQFAD

SEQ ID NO: 110152 - protein, 7 aa, synthetic construct
RDIGLPI

SEQ ID NO: 110153 - protein, 7 aa, synthetic construct
SPLHDRI

SEQ ID NO: 110154 - protein, 7 aa, synthetic construct
SGHDLGE

SEQ ID NO: 110155 - protein, 7 aa, synthetic construct
RNIHEVV

SEQ ID NO: 110156 - protein, 7 aa, synthetic construct
PPVTVHS

SEQ ID NO: 110157 - protein, 7 aa, synthetic construct
YDPKSAH

SEQ ID NO: 110158 - protein, 7 aa, synthetic construct
MQGESAA

SEQ ID NO: 110159 - protein, 7 aa, synthetic construct
DVTSIQT

SEQ ID NO: 110160 - protein, 7 aa, synthetic construct
GDNTNTR

SEQ ID NO: 110161 - protein, 7 aa, synthetic construct
DFSTFQK

SEQ ID NO: 110162 - protein, 7 aa, synthetic construct
LFTEARN

SEQ ID NO: 110163 - protein, 7 aa, synthetic construct
GRIKDSD

SEQ ID NO: 110164 - protein, 7 aa, synthetic construct
NSSDVAR

SEQ ID NO: 110165 - protein, 7 aa, synthetic construct
TPARAID

SEQ ID NO: 110166 - protein, 7 aa, synthetic construct
QKETFSK

SEQ ID NO: 110167 - protein, 7 aa, synthetic construct
KIQVLER

SEQ ID NO: 110168 - protein, 7 aa, synthetic construct
DEHLRHH

SEQ ID NO: 110169 - protein, 7 aa, synthetic construct
MLEYDRG

SEQ ID NO: 110170 - protein, 7 aa, synthetic construct
DKTIQIR

SEQ ID NO: 110171 - protein, 7 aa, synthetic construct
IQGKDQV

SEQ ID NO: 110172 - protein, 7 aa, synthetic construct
QRAMTSQ

SEQ ID NO: 110173 - protein, 7 aa, synthetic construct
GHDTIKD

SEQ ID NO: 110174 - protein, 7 aa, synthetic construct
MPNVKTV

SEQ ID NO: 110175 - protein, 7 aa, synthetic construct
AWKGGIS

SEQ ID NO: 110176 - protein, 7 aa, synthetic construct
PAQREKN

SEQ ID NO: 110177 - protein, 7 aa, synthetic construct
HLAVSSV

SEQ ID NO: 110178 - protein, 7 aa, synthetic construct
DASKHMW

SEQ ID NO: 110179 - protein, 7 aa, synthetic construct
PSYGDFP

SEQ ID NO: 110180 - protein, 7 aa, synthetic construct
VPTQAAL

SEQ ID NO: 110181 - protein, 7 aa, synthetic construct
IARVTPY

SEQ ID NO: 110182 - protein, 7 aa, synthetic construct
TRGPGQP

SEQ ID NO: 110183 - protein, 7 aa, synthetic construct
WQAEKMT

SEQ ID NO: 110184 - protein, 7 aa, synthetic construct
HGMSGQT

SEQ ID NO: 110185 - protein, 7 aa, synthetic construct
DEWKSKN

SEQ ID NO: 110186 - protein, 7 aa, synthetic construct
FGGRDLQ

SEQ ID NO: 110187 - protein, 7 aa, synthetic construct
KSGIDVH

SEQ ID NO: 110188 - protein, 7 aa, synthetic construct
HIGLDGY

SEQ ID NO: 110189 - protein, 7 aa, synthetic construct
ASSEKPV

SEQ ID NO: 110190 - protein, 7 aa, synthetic construct
NHFPQPN

SEQ ID NO: 110191 - protein, 7 aa, synthetic construct
LHNREEE

SEQ ID NO: 110192 - protein, 7 aa, synthetic construct
QINDPDR

SEQ ID NO: 110193 - protein, 7 aa, synthetic construct
EPYGPSR

SEQ ID NO: 110194 - protein, 7 aa, synthetic construct
MSPAMRE

SEQ ID NO: 110195 - protein, 7 aa, synthetic construct
SSHNVEH

SEQ ID NO: 110196 - protein, 7 aa, synthetic construct
TRTENSE

SEQ ID NO: 110197 - protein, 7 aa, synthetic construct
WGGVHVE

SEQ ID NO: 110198 - protein, 7 aa, synthetic construct
TPVQNPK

SEQ ID NO: 110199 - protein, 7 aa, synthetic construct
LEYVRNQ

SEQ ID NO: 110200 - protein, 7 aa, synthetic construct
HSSILES

SEQ ID NO: 110201 - protein, 7 aa, synthetic construct
LTVADNK

SEQ ID NO: 110202 - protein, 7 aa, synthetic construct
WDNQASR

SEQ ID NO: 110203 - protein, 7 aa, synthetic construct
TLKFDTH

SEQ ID NO: 110204 - protein, 7 aa, synthetic construct
KPLTNEN

SEQ ID NO: 110205 - protein, 7 aa, synthetic construct
VRPITEE

SEQ ID NO: 110206 - protein, 7 aa, synthetic construct
SNESWKI

SEQ ID NO: 110207 - protein, 7 aa, synthetic construct
SKREEDW

SEQ ID NO: 110208 - protein, 7 aa, synthetic construct
RIQVSAL

SEQ ID NO: 110209 - protein, 7 aa, synthetic construct
PTWQQNS

SEQ ID NO: 110210 - protein, 7 aa, synthetic construct
QVEQKGV

SEQ ID NO: 110211 - protein, 7 aa, synthetic construct
HNSDISP

SEQ ID NO: 110212 - protein, 7 aa, synthetic construct
MTMPMPH

SEQ ID NO: 110213 - protein, 7 aa, synthetic construct
GEPKREY

SEQ ID NO: 110214 - protein, 7 aa, synthetic construct
NGQGEKH

SEQ ID NO: 110215 - protein, 7 aa, synthetic construct
GLKFGMP

SEQ ID NO: 110216 - protein, 7 aa, synthetic construct
IYQANAR

SEQ ID NO: 110217 - protein, 7 aa, synthetic construct
PETVTHA

SEQ ID NO: 110218 - protein, 7 aa, synthetic construct
KIHFHEE

SEQ ID NO: 110219 - protein, 7 aa, synthetic construct
RVHAQFD

SEQ ID NO: 110220 - protein, 7 aa, synthetic construct
MNSHWME

SEQ ID NO: 110221 - protein, 7 aa, synthetic construct
TIDHYLS

SEQ ID NO: 110222 - protein, 7 aa, synthetic construct
TVAFTET

SEQ ID NO: 110223 - protein, 7 aa, synthetic construct
PSSYPSK

SEQ ID NO: 110224 - protein, 7 aa, synthetic construct
HQTTGSR

SEQ ID NO: 110225 - protein, 7 aa, synthetic construct
AAMGNIS

SEQ ID NO: 110226 - protein, 7 aa, synthetic construct
KLQIPGY

SEQ ID NO: 110227 - protein, 7 aa, synthetic construct
TKVAAIT

SEQ ID NO: 110228 - protein, 7 aa, synthetic construct
GLERRTD

SEQ ID NO: 110229 - protein, 7 aa, synthetic construct
WSGEVQG

SEQ ID NO: 110230 - protein, 7 aa, synthetic construct
VTHELQR

SEQ ID NO: 110231 - protein, 7 aa, synthetic construct
VHENQLP

SEQ ID NO: 110232 - protein, 7 aa, synthetic construct
LNTSEYT

SEQ ID NO: 110233 - protein, 7 aa, synthetic construct
DGGIRER

SEQ ID NO: 110234 - protein, 7 aa, synthetic construct
MAPGASD

SEQ ID NO: 110235 - protein, 7 aa, synthetic construct
KHSQEAR

SEQ ID NO: 110236 - protein, 7 aa, synthetic construct
PVRQHFA

SEQ ID NO: 110237 - protein, 7 aa, synthetic construct
KKDTTPS

SEQ ID NO: 110238 - protein, 7 aa, synthetic construct
LREVERT

SEQ ID NO: 110239 - protein, 7 aa, synthetic construct
GFPNGYP

SEQ ID NO: 110240 - protein, 7 aa, synthetic construct
MKEEPRA

SEQ ID NO: 110241 - protein, 7 aa, synthetic construct
RVHMNHG

SEQ ID NO: 110242 - protein, 7 aa, synthetic construct
SRMVAGL

SEQ ID NO: 110243 - protein, 7 aa, synthetic construct
FRNLAKD

SEQ ID NO: 110244 - protein, 7 aa, synthetic construct
VPSDGKQ

SEQ ID NO: 110245 - protein, 7 aa, synthetic construct
VMHKTGW

SEQ ID NO: 110246 - protein, 7 aa, synthetic construct
FGDIFKS

SEQ ID NO: 110247 - protein, 7 aa, synthetic construct
VDTTYNI

SEQ ID NO: 110248 - protein, 7 aa, synthetic construct
TKEYAGN

SEQ ID NO: 110249 - protein, 7 aa, synthetic construct
AATKGDK

SEQ ID NO: 110250 - protein, 7 aa, synthetic construct
AFPKWSE

SEQ ID NO: 110251 - protein, 7 aa, synthetic construct
DYTGISE

SEQ ID NO: 110252 - protein, 7 aa, synthetic construct
AANIRSL

SEQ ID NO: 110253 - protein, 7 aa, synthetic construct
FKDSPMH

SEQ ID NO: 110254 - protein, 7 aa, synthetic construct
QPVWPTE

SEQ ID NO: 110255 - protein, 7 aa, synthetic construct
HGAKYEG

SEQ ID NO: 110256 - protein, 7 aa, synthetic construct
LASQNDP

SEQ ID NO: 110257 - protein, 7 aa, synthetic construct
QIGFIGD

SEQ ID NO: 110258 - protein, 7 aa, synthetic construct
MYDMTQK

SEQ ID NO: 110259 - protein, 7 aa, synthetic construct
LDTSGKE

SEQ ID NO: 110260 - protein, 7 aa, synthetic construct
QISHIMT

SEQ ID NO: 110261 - protein, 7 aa, synthetic construct
TATALDY

SEQ ID NO: 110262 - protein, 7 aa, synthetic construct
GQDRNSG

SEQ ID NO: 110263 - protein, 7 aa, synthetic construct
SSAQNSY

SEQ ID NO: 110264 - protein, 7 aa, synthetic construct
FEQQWKT

SEQ ID NO: 110265 - protein, 7 aa, synthetic construct
KVPDIAT

SEQ ID NO: 110266 - protein, 7 aa, synthetic construct
ITKPGDY

SEQ ID NO: 110267 - protein, 7 aa, synthetic construct
TLSENTW

SEQ ID NO: 110268 - protein, 7 aa, synthetic construct
QMVSSMS

SEQ ID NO: 110269 - protein, 7 aa, synthetic construct
FLSDPQT

SEQ ID NO: 110270 - protein, 7 aa, synthetic construct
VLPRSHT

SEQ ID NO: 110271 - protein, 7 aa, synthetic construct
GQATVLL

SEQ ID NO: 110272 - protein, 7 aa, synthetic construct
PNTGQTG

SEQ ID NO: 110273 - protein, 7 aa, synthetic construct
RAANTMD

SEQ ID NO: 110274 - protein, 7 aa, synthetic construct
PQKESAW

SEQ ID NO: 110275 - protein, 7 aa, synthetic construct
QMYGSSS

SEQ ID NO: 110276 - protein, 7 aa, synthetic construct
NINFAKH

SEQ ID NO: 110277 - protein, 7 aa, synthetic construct
FPVTVDK

SEQ ID NO: 110278 - protein, 7 aa, synthetic construct
QQNRVNA

SEQ ID NO: 110279 - protein, 7 aa, synthetic construct
NATQRPD

SEQ ID NO: 110280 - protein, 7 aa, synthetic construct
DQRDHVR

SEQ ID NO: 110281 - protein, 7 aa, synthetic construct
IASVPRI

SEQ ID NO: 110282 - protein, 7 aa, synthetic construct
GLHVENA

SEQ ID NO: 110283 - protein, 7 aa, synthetic construct
NFHHLQD

SEQ ID NO: 110284 - protein, 7 aa, synthetic construct
VGVLSGL

SEQ ID NO: 110285 - protein, 7 aa, synthetic construct
HPHTILE

SEQ ID NO: 110286 - protein, 7 aa, synthetic construct
NAQEGFK

SEQ ID NO: 110287 - protein, 7 aa, synthetic construct
ANASSII

SEQ ID NO: 110288 - protein, 7 aa, synthetic construct
MIKSQMN

SEQ ID NO: 110289 - protein, 7 aa, synthetic construct
QPAYTET

SEQ ID NO: 110290 - protein, 7 aa, synthetic construct
PMNTIHE

SEQ ID NO: 110291 - protein, 7 aa, synthetic construct
NARETFD

SEQ ID NO: 110292 - protein, 7 aa, synthetic construct
WQDYKDG

SEQ ID NO: 110293 - protein, 7 aa, synthetic construct
MRDLVID

SEQ ID NO: 110294 - protein, 7 aa, synthetic construct
IVFTKET

SEQ ID NO: 110295 - protein, 7 aa, synthetic construct
KDHVEAV

SEQ ID NO: 110296 - protein, 7 aa, synthetic construct
QMMQIDP

SEQ ID NO: 110297 - protein, 7 aa, synthetic construct
DFSMSPK

SEQ ID NO: 110298 - protein, 7 aa, synthetic construct
VDTTMAR

SEQ ID NO: 110299 - protein, 7 aa, synthetic construct
RVRIDVT

SEQ ID NO: 110300 - protein, 7 aa, synthetic construct
DTKIGPS

SEQ ID NO: 110301 - protein, 7 aa, synthetic construct
WLMNTNP

SEQ ID NO: 110302 - protein, 7 aa, synthetic construct
GKQSPNG

SEQ ID NO: 110303 - protein, 7 aa, synthetic construct
EAAMQIK

SEQ ID NO: 110304 - protein, 7 aa, synthetic construct
KNTMPMQ

SEQ ID NO: 110305 - protein, 7 aa, synthetic construct
QRNVHAY

SEQ ID NO: 110306 - protein, 7 aa, synthetic construct
TEYHAAS

SEQ ID NO: 110307 - protein, 7 aa, synthetic construct
DDKKTQT

SEQ ID NO: 110308 - protein, 7 aa, synthetic construct
YANLAGS

SEQ ID NO: 110309 - protein, 7 aa, synthetic construct
LGEAGRE

SEQ ID NO: 110310 - protein, 7 aa, synthetic construct
QWDAGHV

SEQ ID NO: 110311 - protein, 7 aa, synthetic construct
YPQDNMG

SEQ ID NO: 110312 - protein, 7 aa, synthetic construct
LKDLPAG

SEQ ID NO: 110313 - protein, 7 aa, synthetic construct
ASDGHSP

SEQ ID NO: 110314 - protein, 7 aa, synthetic construct
RNLQFNA

SEQ ID NO: 110315 - protein, 7 aa, synthetic construct
LKTPHPI

SEQ ID NO: 110316 - protein, 7 aa, synthetic construct
RTGFMDK

SEQ ID NO: 110317 - protein, 7 aa, synthetic construct
GSMPYEG

SEQ ID NO: 110318 - protein, 7 aa, synthetic construct
HYVARTP

SEQ ID NO: 110319 - protein, 7 aa, synthetic construct
PNIPAMP

SEQ ID NO: 110320 - protein, 7 aa, synthetic construct
HFQGDMK

SEQ ID NO: 110321 - protein, 7 aa, synthetic construct
GDKYPIY

SEQ ID NO: 110322 - protein, 7 aa, synthetic construct
QRVHNAF

SEQ ID NO: 110323 - protein, 7 aa, synthetic construct
MGKQGKD

SEQ ID NO: 110324 - protein, 7 aa, synthetic construct
KNEGILK

SEQ ID NO: 110325 - protein, 7 aa, synthetic construct
SGKEDGR

SEQ ID NO: 110326 - protein, 7 aa, synthetic construct
EPVVMRE

SEQ ID NO: 110327 - protein, 7 aa, synthetic construct
DQSGPQT

SEQ ID NO: 110328 - protein, 7 aa, synthetic construct
KITTDKG

SEQ ID NO: 110329 - protein, 7 aa, synthetic construct
AHHTSYE

SEQ ID NO: 110330 - protein, 7 aa, synthetic construct
SIIGTHY

SEQ ID NO: 110331 - protein, 7 aa, synthetic construct
GPHFERH

SEQ ID NO: 110332 - protein, 7 aa, synthetic construct
MLPHKHV

SEQ ID NO: 110333 - protein, 7 aa, synthetic construct
LNGINFS

SEQ ID NO: 110334 - protein, 7 aa, synthetic construct
VADKIHL

SEQ ID NO: 110335 - protein, 7 aa, synthetic construct
RLDMQGV

SEQ ID NO: 110336 - protein, 7 aa, synthetic construct
ARFEEMR

SEQ ID NO: 110337 - protein, 7 aa, synthetic construct
VGNNSLK

SEQ ID NO: 110338 - protein, 7 aa, synthetic construct
GFGAEKD

SEQ ID NO: 110339 - protein, 7 aa, synthetic construct
TQHTLGI

SEQ ID NO: 110340 - protein, 7 aa, synthetic construct
WTLAGDA

SEQ ID NO: 110341 - protein, 7 aa, synthetic construct
NEGKWHI

SEQ ID NO: 110342 - protein, 7 aa, synthetic construct
VFMSGQG

SEQ ID NO: 110343 - protein, 7 aa, synthetic construct
FAPHEAE

SEQ ID NO: 110344 - protein, 7 aa, synthetic construct
MANGTFL

SEQ ID NO: 110345 - protein, 7 aa, synthetic construct
NNNGRNP

SEQ ID NO: 110346 - protein, 7 aa, synthetic construct
HPGFNLP

SEQ ID NO: 110347 - protein, 7 aa, synthetic construct
DSRHAQP

SEQ ID NO: 110348 - protein, 7 aa, synthetic construct
QINSAQA

SEQ ID NO: 110349 - protein, 7 aa, synthetic construct
NQSGGYP

SEQ ID NO: 110350 - protein, 7 aa, synthetic construct
NRHSNAM

SEQ ID NO: 110351 - protein, 7 aa, synthetic construct
FGQQEVF

SEQ ID NO: 110352 - protein, 7 aa, synthetic construct
KYSASAF

SEQ ID NO: 110353 - protein, 7 aa, synthetic construct
TRHGITY

SEQ ID NO: 110354 - protein, 7 aa, synthetic construct
PAQGRQH

SEQ ID NO: 110355 - protein, 7 aa, synthetic construct
YFSGTAR

SEQ ID NO: 110356 - protein, 7 aa, synthetic construct
LRDMNHI

SEQ ID NO: 110357 - protein, 7 aa, synthetic construct
VPVDPSL

SEQ ID NO: 110358 - protein, 7 aa, synthetic construct
VEHMNFS

SEQ ID NO: 110359 - protein, 7 aa, synthetic construct
PTGMAQA

SEQ ID NO: 110360 - protein, 7 aa, synthetic construct
QHRSALD

SEQ ID NO: 110361 - protein, 7 aa, synthetic construct
NLTERMK

SEQ ID NO: 110362 - protein, 7 aa, synthetic construct
RNGVYNV

SEQ ID NO: 110363 - protein, 7 aa, synthetic construct
AEVATRD

SEQ ID NO: 110364 - protein, 7 aa, synthetic construct
YNMMMEP

SEQ ID NO: 110365 - protein, 7 aa, synthetic construct
KRIYSED

SEQ ID NO: 110366 - protein, 7 aa, synthetic construct
ENYPKQM

SEQ ID NO: 110367 - protein, 7 aa, synthetic construct
TVYGETK

SEQ ID NO: 110368 - protein, 7 aa, synthetic construct
PEIGIRI

SEQ ID NO: 110369 - protein, 7 aa, synthetic construct
IKPGGKD

SEQ ID NO: 110370 - protein, 7 aa, synthetic construct
ENYVLNA

SEQ ID NO: 110371 - protein, 7 aa, synthetic construct
FFNTRQG

SEQ ID NO: 110372 - protein, 7 aa, synthetic construct
TDFSDRV

SEQ ID NO: 110373 - protein, 7 aa, synthetic construct
RPDSGAA

SEQ ID NO: 110374 - protein, 7 aa, synthetic construct
AMFPARG

SEQ ID NO: 110375 - protein, 7 aa, synthetic construct
YEPLQPK

SEQ ID NO: 110376 - protein, 7 aa, synthetic construct
QYQEDVR

SEQ ID NO: 110377 - protein, 7 aa, synthetic construct
LLPNTHT

SEQ ID NO: 110378 - protein, 7 aa, synthetic construct
QNGSVPE

SEQ ID NO: 110379 - protein, 7 aa, synthetic construct
MAGFELG

SEQ ID NO: 110380 - protein, 7 aa, synthetic construct
YQQGTGK

SEQ ID NO: 110381 - protein, 7 aa, synthetic construct
MIGGIVH

SEQ ID NO: 110382 - protein, 7 aa, synthetic construct
TRGTVLS

SEQ ID NO: 110383 - protein, 7 aa, synthetic construct
PVVVAHT

SEQ ID NO: 110384 - protein, 7 aa, synthetic construct
ITPMWPA

SEQ ID NO: 110385 - protein, 7 aa, synthetic construct
WIPEGPQ

SEQ ID NO: 110386 - protein, 7 aa, synthetic construct
DMTNTFK

SEQ ID NO: 110387 - protein, 7 aa, synthetic construct
LTQTNKD

SEQ ID NO: 110388 - protein, 7 aa, synthetic construct
IKKVLST

SEQ ID NO: 110389 - protein, 7 aa, synthetic construct
MVHRGAH

SEQ ID NO: 110390 - protein, 7 aa, synthetic construct
QAAGEAH

SEQ ID NO: 110391 - protein, 7 aa, synthetic construct
SMSAHGG

SEQ ID NO: 110392 - protein, 7 aa, synthetic construct
KAANPLW

SEQ ID NO: 110393 - protein, 7 aa, synthetic construct
QSHPVSK

SEQ ID NO: 110394 - protein, 7 aa, synthetic construct
RQPMGGN

SEQ ID NO: 110395 - protein, 7 aa, synthetic construct
NRNQNTP

SEQ ID NO: 110396 - protein, 7 aa, synthetic construct
EAKDTPA

SEQ ID NO: 110397 - protein, 7 aa, synthetic construct
VMMREPM

SEQ ID NO: 110398 - protein, 7 aa, synthetic construct
RSFENSK

SEQ ID NO: 110399 - protein, 7 aa, synthetic construct
EFKQYLG

SEQ ID NO: 110400 - protein, 7 aa, synthetic construct
HIMVLKE

SEQ ID NO: 110401 - protein, 7 aa, synthetic construct
KQKGDIP

SEQ ID NO: 110402 - protein, 7 aa, synthetic construct
WDGKGAN

SEQ ID NO: 110403 - protein, 7 aa, synthetic construct
EGVRFMA

SEQ ID NO: 110404 - protein, 7 aa, synthetic construct
IRDLNNF

SEQ ID NO: 110405 - protein, 7 aa, synthetic construct
DDNRPVS

SEQ ID NO: 110406 - protein, 7 aa, synthetic construct
TYIGRAS

SEQ ID NO: 110407 - protein, 7 aa, synthetic construct
GTETTKQ

SEQ ID NO: 110408 - protein, 7 aa, synthetic construct
AKHPEVW

SEQ ID NO: 110409 - protein, 7 aa, synthetic construct
PENHIPY

SEQ ID NO: 110410 - protein, 7 aa, synthetic construct
DAAWALE

SEQ ID NO: 110411 - protein, 7 aa, synthetic construct
TTTKSNW

SEQ ID NO: 110412 - protein, 7 aa, synthetic construct
QYTADIA

SEQ ID NO: 110413 - protein, 7 aa, synthetic construct
QDVNIPM

SEQ ID NO: 110414 - protein, 7 aa, synthetic construct
HLNTLPQ

SEQ ID NO: 110415 - protein, 7 aa, synthetic construct
MRKEVDW

SEQ ID NO: 110416 - protein, 7 aa, synthetic construct
EIGQGFP

SEQ ID NO: 110417 - protein, 7 aa, synthetic construct
PQYKHEE

SEQ ID NO: 110418 - protein, 7 aa, synthetic construct
QKSPQTS

SEQ ID NO: 110419 - protein, 7 aa, synthetic construct
PAKKEEC

SEQ ID NO: 110420 - protein, 7 aa, synthetic construct
FREAKYH

SEQ ID NO: 110421 - protein, 7 aa, synthetic construct
DTKHMNY

SEQ ID NO: 110422 - protein, 7 aa, synthetic construct
AELAYAG

SEQ ID NO: 110423 - protein, 7 aa, synthetic construct
GLYAHVV

SEQ ID NO: 110424 - protein, 7 aa, synthetic construct
VYAHTIK

SEQ ID NO: 110425 - protein, 7 aa, synthetic construct
WSTQKNS

SEQ ID NO: 110426 - protein, 7 aa, synthetic construct
AQTMPGA

SEQ ID NO: 110427 - protein, 7 aa, synthetic construct
SQTHARP

SEQ ID NO: 110428 - protein, 7 aa, synthetic construct
DRLRMPM

SEQ ID NO: 110429 - protein, 7 aa, synthetic construct
LWEFKGD

SEQ ID NO: 110430 - protein, 7 aa, synthetic construct
KDSAAAR

SEQ ID NO: 110431 - protein, 7 aa, synthetic construct
PWAGQMG

SEQ ID NO: 110432 - protein, 7 aa, synthetic construct
NAESRTF

SEQ ID NO: 110433 - protein, 7 aa, synthetic construct
LAISQLS

SEQ ID NO: 110434 - protein, 7 aa, synthetic construct
EWKRDLT

SEQ ID NO: 110435 - protein, 7 aa, synthetic construct
EDFHPTA

SEQ ID NO: 110436 - protein, 7 aa, synthetic construct
NQAHSVP

SEQ ID NO: 110437 - protein, 7 aa, synthetic construct
WLGDQDG

SEQ ID NO: 110438 - protein, 7 aa, synthetic construct
VPVIRGP

SEQ ID NO: 110439 - protein, 7 aa, synthetic construct
PKADRNI

SEQ ID NO: 110440 - protein, 7 aa, synthetic construct
YMHIQNV

SEQ ID NO: 110441 - protein, 7 aa, synthetic construct
VDQLGHK

SEQ ID NO: 110442 - protein, 7 aa, synthetic construct
LIQRGNF

SEQ ID NO: 110443 - protein, 7 aa, synthetic construct
VFAQKNA

SEQ ID NO: 110444 - protein, 7 aa, synthetic construct
NTRGDWG

SEQ ID NO: 110445 - protein, 7 aa, synthetic construct
RGIIDQL

SEQ ID NO: 110446 - protein, 7 aa, synthetic construct
VQMEISS

SEQ ID NO: 110447 - protein, 7 aa, synthetic construct
SITMSPS

SEQ ID NO: 110448 - protein, 7 aa, synthetic construct
YQDAGFV

SEQ ID NO: 110449 - protein, 7 aa, synthetic construct
IRPGAAW

SEQ ID NO: 110450 - protein, 7 aa, synthetic construct
TFQATYE

SEQ ID NO: 110451 - protein, 7 aa, synthetic construct
SNMHALR

SEQ ID NO: 110452 - protein, 7 aa, synthetic construct
PVQMTGM

SEQ ID NO: 110453 - protein, 7 aa, synthetic construct
DGVHRAW

SEQ ID NO: 110454 - protein, 7 aa, synthetic construct
QPGIDQS

SEQ ID NO: 110455 - protein, 7 aa, synthetic construct
HAILMSG

SEQ ID NO: 110456 - protein, 7 aa, synthetic construct
FVTNKTE

SEQ ID NO: 110457 - protein, 7 aa, synthetic construct
RMNNELA

SEQ ID NO: 110458 - protein, 7 aa, synthetic construct
SNLFNQE

SEQ ID NO: 110459 - protein, 7 aa, synthetic construct
SSMEHQR

SEQ ID NO: 110460 - protein, 7 aa, synthetic construct
TMPIIKS

SEQ ID NO: 110461 - protein, 7 aa, synthetic construct
DHYRDNI

SEQ ID NO: 110462 - protein, 7 aa, synthetic construct
YSYKTME

SEQ ID NO: 110463 - protein, 7 aa, synthetic construct
KNAQYIE

SEQ ID NO: 110464 - protein, 7 aa, synthetic construct
WQNADGH

SEQ ID NO: 110465 - protein, 7 aa, synthetic construct
IMDGGFG

SEQ ID NO: 110466 - protein, 7 aa, synthetic construct
LTQAEFI

SEQ ID NO: 110467 - protein, 7 aa, synthetic construct
NHHGTSE

SEQ ID NO: 110468 - protein, 7 aa, synthetic construct
TTMTNIE

SEQ ID NO: 110469 - protein, 7 aa, synthetic construct
YQMTTPV

SEQ ID NO: 110470 - protein, 7 aa, synthetic construct
DLKMSYT

SEQ ID NO: 110471 - protein, 7 aa, synthetic construct
GQVRDDN

SEQ ID NO: 110472 - protein, 7 aa, synthetic construct
PPHNGAK

SEQ ID NO: 110473 - protein, 7 aa, synthetic construct
GRGEEMY

SEQ ID NO: 110474 - protein, 7 aa, synthetic construct
SGLVDPR

SEQ ID NO: 110475 - protein, 7 aa, synthetic construct
DQQRTIR

SEQ ID NO: 110476 - protein, 7 aa, synthetic construct
VVTSNVG

SEQ ID NO: 110477 - protein, 7 aa, synthetic construct
YQGQAFA

SEQ ID NO: 110478 - protein, 7 aa, synthetic construct
FSNQFNH

SEQ ID NO: 110479 - protein, 7 aa, synthetic construct
YATGSPE

SEQ ID NO: 110480 - protein, 7 aa, synthetic construct
VAHNHTS

SEQ ID NO: 110481 - protein, 7 aa, synthetic construct
KHVDTAV

SEQ ID NO: 110482 - protein, 7 aa, synthetic construct
SSFSGVQ

SEQ ID NO: 110483 - protein, 7 aa, synthetic construct
KSQSNAP

SEQ ID NO: 110484 - protein, 7 aa, synthetic construct
GRFDHEM

SEQ ID NO: 110485 - protein, 7 aa, synthetic construct
VGAHNRY

SEQ ID NO: 110486 - protein, 7 aa, synthetic construct
QRHTSTY

SEQ ID NO: 110487 - protein, 7 aa, synthetic construct
SSEVKAP

SEQ ID NO: 110488 - protein, 7 aa, synthetic construct
WSVVTDA

SEQ ID NO: 110489 - protein, 7 aa, synthetic construct
KPSQNFA

SEQ ID NO: 110490 - protein, 7 aa, synthetic construct
FVGTHPE

SEQ ID NO: 110491 - protein, 7 aa, synthetic construct
TDRLNEY

SEQ ID NO: 110492 - protein, 7 aa, synthetic construct
VTHGNMK

SEQ ID NO: 110493 - protein, 7 aa, synthetic construct
INMAYGS

SEQ ID NO: 110494 - protein, 7 aa, synthetic construct
KDAIDYK

SEQ ID NO: 110495 - protein, 7 aa, synthetic construct
NNYHSNS

SEQ ID NO: 110496 - protein, 7 aa, synthetic construct
VISAQFP

SEQ ID NO: 110497 - protein, 7 aa, synthetic construct
GVIVKGF

SEQ ID NO: 110498 - protein, 7 aa, synthetic construct
EINKQSM

SEQ ID NO: 110499 - protein, 7 aa, synthetic construct
FQPMRGD

SEQ ID NO: 110500 - protein, 7 aa, synthetic construct
TARHDHQ

SEQ ID NO: 110501 - protein, 7 aa, synthetic construct
SDGHAHM

SEQ ID NO: 110502 - protein, 7 aa, synthetic construct
QGAAGIL

SEQ ID NO: 110503 - protein, 7 aa, synthetic construct
HESIPSR

SEQ ID NO: 110504 - protein, 7 aa, synthetic construct
VLGVYHA

SEQ ID NO: 110505 - protein, 7 aa, synthetic construct
MRLEQME

SEQ ID NO: 110506 - protein, 7 aa, synthetic construct
DDRQRSQ

SEQ ID NO: 110507 - protein, 7 aa, synthetic construct
SSNVYIH

SEQ ID NO: 110508 - protein, 7 aa, synthetic construct
SDGAKPA

SEQ ID NO: 110509 - protein, 7 aa, synthetic construct
SSVHALS

SEQ ID NO: 110510 - protein, 7 aa, synthetic construct
KVLDSPL

SEQ ID NO: 110511 - protein, 7 aa, synthetic construct
MGKNKDI

SEQ ID NO: 110512 - protein, 7 aa, synthetic construct
QSIGSLI

SEQ ID NO: 110513 - protein, 7 aa, synthetic construct
GIPTLMH

SEQ ID NO: 110514 - protein, 7 aa, synthetic construct
LYKEARQ

SEQ ID NO: 110515 - protein, 7 aa, synthetic construct
VQLPKVY

SEQ ID NO: 110516 - protein, 7 aa, synthetic construct
SPTFPEY

SEQ ID NO: 110517 - protein, 7 aa, synthetic construct
RPNATNP

SEQ ID NO: 110518 - protein, 7 aa, synthetic construct
PSTFKER

SEQ ID NO: 110519 - protein, 7 aa, synthetic construct
QMVANSM

SEQ ID NO: 110520 - protein, 7 aa, synthetic construct
FRPGILL

SEQ ID NO: 110521 - protein, 7 aa, synthetic construct
QLKDYIA

SEQ ID NO: 110522 - protein, 7 aa, synthetic construct
TMGLATG

SEQ ID NO: 110523 - protein, 7 aa, synthetic construct
KIEYTES

SEQ ID NO: 110524 - protein, 7 aa, synthetic construct
NMFHARD

SEQ ID NO: 110525 - protein, 7 aa, synthetic construct
QHERQDM

SEQ ID NO: 110526 - protein, 7 aa, synthetic construct
NMFAIPD

SEQ ID NO: 110527 - protein, 7 aa, synthetic construct
KWKDDDM

SEQ ID NO: 110528 - protein, 7 aa, synthetic construct
FTVIQSE

SEQ ID NO: 110529 - protein, 7 aa, synthetic construct
PDHPGTK

SEQ ID NO: 110530 - protein, 7 aa, synthetic construct
QKGEIPW

SEQ ID NO: 110531 - protein, 7 aa, synthetic construct
PPHQASA

SEQ ID NO: 110532 - protein, 7 aa, synthetic construct
LQSKPHL

SEQ ID NO: 110533 - protein, 7 aa, synthetic construct
QLHGISD

SEQ ID NO: 110534 - protein, 7 aa, synthetic construct
PIEMRQS

SEQ ID NO: 110535 - protein, 7 aa, synthetic construct
IGDVTVR

SEQ ID NO: 110536 - protein, 7 aa, synthetic construct
SSTRYLG

SEQ ID NO: 110537 - protein, 7 aa, synthetic construct
FKYKDDQ

SEQ ID NO: 110538 - protein, 7 aa, synthetic construct
GMVRPYS

SEQ ID NO: 110539 - protein, 7 aa, synthetic construct
SSYSPDH

SEQ ID NO: 110540 - protein, 7 aa, synthetic construct
MMSHEQL

SEQ ID NO: 110541 - protein, 7 aa, synthetic construct
VAREPLL

SEQ ID NO: 110542 - protein, 7 aa, synthetic construct
LQNVQVP

SEQ ID NO: 110543 - protein, 7 aa, synthetic construct
WSPHHQL

SEQ ID NO: 110544 - protein, 7 aa, synthetic construct
GHITSGI

SEQ ID NO: 110545 - protein, 7 aa, synthetic construct
EVLKVYG

SEQ ID NO: 110546 - protein, 7 aa, synthetic construct
HKELSHV

SEQ ID NO: 110547 - protein, 7 aa, synthetic construct
HMEAKFP

SEQ ID NO: 110548 - protein, 7 aa, synthetic construct
GQKGTTA

SEQ ID NO: 110549 - protein, 7 aa, synthetic construct
DQTQPHR

SEQ ID NO: 110550 - protein, 7 aa, synthetic construct
GKREAFV

SEQ ID NO: 110551 - protein, 7 aa, synthetic construct
AKEHPGP

SEQ ID NO: 110552 - protein, 7 aa, synthetic construct
TRSDDAM

SEQ ID NO: 110553 - protein, 7 aa, synthetic construct
DLHDKRW

SEQ ID NO: 110554 - protein, 7 aa, synthetic construct
NVLTPPP

SEQ ID NO: 110555 - protein, 7 aa, synthetic construct
QMQAGPS

SEQ ID NO: 110556 - protein, 7 aa, synthetic construct
HSSNFTK

SEQ ID NO: 110557 - protein, 7 aa, synthetic construct
TPFPHIA

SEQ ID NO: 110558 - protein, 7 aa, synthetic construct
VKMSSAH

SEQ ID NO: 110559 - protein, 7 aa, synthetic construct
IDSRIHP

SEQ ID NO: 110560 - protein, 7 aa, synthetic construct
LTVQPQT

SEQ ID NO: 110561 - protein, 7 aa, synthetic construct
GNPMPVV

SEQ ID NO: 110562 - protein, 7 aa, synthetic construct
GRSSPVY

SEQ ID NO: 110563 - protein, 7 aa, synthetic construct
HFAEVTG

SEQ ID NO: 110564 - protein, 7 aa, synthetic construct
LQERHFH

SEQ ID NO: 110565 - protein, 7 aa, synthetic construct
AIPIMER

SEQ ID NO: 110566 - protein, 7 aa, synthetic construct
SIMKSWE

SEQ ID NO: 110567 - protein, 7 aa, synthetic construct
STQIWKD

SEQ ID NO: 110568 - protein, 7 aa, synthetic construct
RQVLQQH

SEQ ID NO: 110569 - protein, 7 aa, synthetic construct
PDKLEWP

SEQ ID NO: 110570 - protein, 7 aa, synthetic construct
NHDMQIG

SEQ ID NO: 110571 - protein, 7 aa, synthetic construct
TTTDKYS

SEQ ID NO: 110572 - protein, 7 aa, synthetic construct
DFHEKNN

SEQ ID NO: 110573 - protein, 7 aa, synthetic construct
SVEHMRP

SEQ ID NO: 110574 - protein, 7 aa, synthetic construct
LFRDHID

SEQ ID NO: 110575 - protein, 7 aa, synthetic construct
YYGPEGR

SEQ ID NO: 110576 - protein, 7 aa, synthetic construct
MNSKVQH

SEQ ID NO: 110577 - protein, 7 aa, synthetic construct
TKVHDDA

SEQ ID NO: 110578 - protein, 7 aa, synthetic construct
HLTSFKQ

SEQ ID NO: 110579 - protein, 7 aa, synthetic construct
PDAITAA

SEQ ID NO: 110580 - protein, 7 aa, synthetic construct
TAKTLSI

SEQ ID NO: 110581 - protein, 7 aa, synthetic construct
PMAGQNL

SEQ ID NO: 110582 - protein, 7 aa, synthetic construct
MQKVKLD

SEQ ID NO: 110583 - protein, 7 aa, synthetic construct
TSSSGHK

SEQ ID NO: 110584 - protein, 7 aa, synthetic construct
EPHHKEY

SEQ ID NO: 110585 - protein, 7 aa, synthetic construct
SFNAGVI

SEQ ID NO: 110586 - protein, 7 aa, synthetic construct
NMTPHPQ

SEQ ID NO: 110587 - protein, 7 aa, synthetic construct
YEQTRVY

SEQ ID NO: 110588 - protein, 7 aa, synthetic construct
EGSSSPD

SEQ ID NO: 110589 - protein, 7 aa, synthetic construct
GATVREV

SEQ ID NO: 110590 - protein, 7 aa, synthetic construct
EQFGHQS

SEQ ID NO: 110591 - protein, 7 aa, synthetic construct
PRDEIHA

SEQ ID NO: 110592 - protein, 7 aa, synthetic construct
HDAWKTV

SEQ ID NO: 110593 - protein, 7 aa, synthetic construct
HLRSQLQ

SEQ ID NO: 110594 - protein, 7 aa, synthetic construct
MNRAMNF

SEQ ID NO: 110595 - protein, 7 aa, synthetic construct
WPKSIPH

SEQ ID NO: 110596 - protein, 7 aa, synthetic construct
IRDAGAY

SEQ ID NO: 110597 - protein, 7 aa, synthetic construct
AVMDQRP

SEQ ID NO: 110598 - protein, 7 aa, synthetic construct
PNAHYKH

SEQ ID NO: 110599 - protein, 7 aa, synthetic construct
YGKEGKL

SEQ ID NO: 110600 - protein, 7 aa, synthetic construct
GHPEWTP

SEQ ID NO: 110601 - protein, 7 aa, synthetic construct
ANLVPHS

SEQ ID NO: 110602 - protein, 7 aa, synthetic construct
KQEAFLH

SEQ ID NO: 110603 - protein, 7 aa, synthetic construct
FRGIIQG

SEQ ID NO: 110604 - protein, 7 aa, synthetic construct
PYGHHLP

SEQ ID NO: 110605 - protein, 7 aa, synthetic construct
DKAGAYH

SEQ ID NO: 110606 - protein, 7 aa, synthetic construct
AQSKERD

SEQ ID NO: 110607 - protein, 7 aa, synthetic construct
PYLPLES

SEQ ID NO: 110608 - protein, 7 aa, synthetic construct
IHSLHQE

SEQ ID NO: 110609 - protein, 7 aa, synthetic construct
DGPFMRV

SEQ ID NO: 110610 - protein, 7 aa, synthetic construct
GSGNSTS

SEQ ID NO: 110611 - protein, 7 aa, synthetic construct
RIIQENM

SEQ ID NO: 110612 - protein, 7 aa, synthetic construct
GNVMGDK

SEQ ID NO: 110613 - protein, 7 aa, synthetic construct
MFVQRHE

SEQ ID NO: 110614 - protein, 7 aa, synthetic construct
EVSALTY

SEQ ID NO: 110615 - protein, 7 aa, synthetic construct
QYMGKFA

SEQ ID NO: 110616 - protein, 7 aa, synthetic construct
EMSIKMM

SEQ ID NO: 110617 - protein, 7 aa, synthetic construct
EVRFDNH

SEQ ID NO: 110618 - protein, 7 aa, synthetic construct
MDRFQTI

SEQ ID NO: 110619 - protein, 7 aa, synthetic construct
TIIGLGQ

SEQ ID NO: 110620 - protein, 7 aa, synthetic construct
FGEYNSR

SEQ ID NO: 110621 - protein, 7 aa, synthetic construct
SNMIPHE

SEQ ID NO: 110622 - protein, 7 aa, synthetic construct
TRWETVD

SEQ ID NO: 110623 - protein, 7 aa, synthetic construct
KIMDFRE

SEQ ID NO: 110624 - protein, 7 aa, synthetic construct
WTAADHI

SEQ ID NO: 110625 - protein, 7 aa, synthetic construct
EVGRGNI

SEQ ID NO: 110626 - protein, 7 aa, synthetic construct
PNGQGTP

SEQ ID NO: 110627 - protein, 7 aa, synthetic construct
RLLNDDK

SEQ ID NO: 110628 - protein, 7 aa, synthetic construct
FPSGTAM

SEQ ID NO: 110629 - protein, 7 aa, synthetic construct
SLDGLRS

SEQ ID NO: 110630 - protein, 7 aa, synthetic construct
VGLRDKT

SEQ ID NO: 110631 - protein, 7 aa, synthetic construct
GWHHKVD

SEQ ID NO: 110632 - protein, 7 aa, synthetic construct
VDLAGRR

SEQ ID NO: 110633 - protein, 7 aa, synthetic construct
NKQDYSN

SEQ ID NO: 110634 - protein, 7 aa, synthetic construct
RMRSTSE

SEQ ID NO: 110635 - protein, 7 aa, synthetic construct
VWQKDRV

SEQ ID NO: 110636 - protein, 7 aa, synthetic construct
INTPITG

SEQ ID NO: 110637 - protein, 7 aa, synthetic construct
GEDRRDK

SEQ ID NO: 110638 - protein, 7 aa, synthetic construct
TDMGETR

SEQ ID NO: 110639 - protein, 7 aa, synthetic construct
PHMTQVI

SEQ ID NO: 110640 - protein, 7 aa, synthetic construct
YLTQHGK

SEQ ID NO: 110641 - protein, 7 aa, synthetic construct
PSPNGAA

SEQ ID NO: 110642 - protein, 7 aa, synthetic construct
ENFTARP

SEQ ID NO: 110643 - protein, 7 aa, synthetic construct
TPYHARQ

SEQ ID NO: 110644 - protein, 7 aa, synthetic construct
QFKQPMV

SEQ ID NO: 110645 - protein, 7 aa, synthetic construct
NAFVSSH

SEQ ID NO: 110646 - protein, 7 aa, synthetic construct
WHESMGK

SEQ ID NO: 110647 - protein, 7 aa, synthetic construct
GGRGREA

SEQ ID NO: 110648 - protein, 7 aa, synthetic construct
GNIRLTV

SEQ ID NO: 110649 - protein, 7 aa, synthetic construct
VSVKLVN

SEQ ID NO: 110650 - protein, 7 aa, synthetic construct
SMNNALD

SEQ ID NO: 110651 - protein, 7 aa, synthetic construct
DNERRSE

SEQ ID NO: 110652 - protein, 7 aa, synthetic construct
MKAWVDD

SEQ ID NO: 110653 - protein, 7 aa, synthetic construct
AVQHATP

SEQ ID NO: 110654 - protein, 7 aa, synthetic construct
AHVQADG

SEQ ID NO: 110655 - protein, 7 aa, synthetic construct
GTNTTVI

SEQ ID NO: 110656 - protein, 7 aa, synthetic construct
MHTGGIL

SEQ ID NO: 110657 - protein, 7 aa, synthetic construct
MPQIATM

SEQ ID NO: 110658 - protein, 7 aa, synthetic construct
ALNVKMF

SEQ ID NO: 110659 - protein, 7 aa, synthetic construct
MQQRPHF

SEQ ID NO: 110660 - protein, 7 aa, synthetic construct
WGMIDQP

SEQ ID NO: 110661 - protein, 7 aa, synthetic construct
LQVMVAE

SEQ ID NO: 110662 - protein, 7 aa, synthetic construct
LKVTAPG

SEQ ID NO: 110663 - protein, 7 aa, synthetic construct
LQSNHFP

SEQ ID NO: 110664 - protein, 7 aa, synthetic construct
GRMMDSR

SEQ ID NO: 110665 - protein, 7 aa, synthetic construct
AHQANTE

SEQ ID NO: 110666 - protein, 7 aa, synthetic construct
LQADHLS

SEQ ID NO: 110667 - protein, 7 aa, synthetic construct
PIPQHRM

SEQ ID NO: 110668 - protein, 7 aa, synthetic construct
GSKTTNP

SEQ ID NO: 110669 - protein, 7 aa, synthetic construct
KMNIMIG

SEQ ID NO: 110670 - protein, 7 aa, synthetic construct
YGFPGHD

SEQ ID NO: 110671 - protein, 7 aa, synthetic construct
NTQHVMD

SEQ ID NO: 110672 - protein, 7 aa, synthetic construct
CNKERPA

SEQ ID NO: 110673 - protein, 7 aa, synthetic construct
MSMPAAD

SEQ ID NO: 110674 - protein, 7 aa, synthetic construct
AAAGKGW

SEQ ID NO: 110675 - protein, 7 aa, synthetic construct
AAAHQVK

SEQ ID NO: 110676 - protein, 7 aa, synthetic construct
AAAHTSR

SEQ ID NO: 110677 - protein, 7 aa, synthetic construct
AAAHYAS

SEQ ID NO: 110678 - protein, 7 aa, synthetic construct
AAAPSLR

SEQ ID NO: 110679 - protein, 7 aa, synthetic construct
AAARMGY

SEQ ID NO: 110680 - protein, 7 aa, synthetic construct
AAARPKE

SEQ ID NO: 110681 - protein, 7 aa, synthetic construct
AADKRFY

SEQ ID NO: 110682 - protein, 7 aa, synthetic construct
AADQKKY

SEQ ID NO: 110683 - protein, 7 aa, synthetic construct
AAEKFGR

SEQ ID NO: 110684 - protein, 7 aa, synthetic construct
AAEKRMV

SEQ ID NO: 110685 - protein, 7 aa, synthetic construct
AAFKQGM

SEQ ID NO: 110686 - protein, 7 aa, synthetic construct
AAFKQHA

SEQ ID NO: 110687 - protein, 7 aa, synthetic construct
AAFTHKA

SEQ ID NO: 110688 - protein, 7 aa, synthetic construct
AAGADKR

SEQ ID NO: 110689 - protein, 7 aa, synthetic construct
AAGKAYI

SEQ ID NO: 110690 - protein, 7 aa, synthetic construct
AAGKPRD

SEQ ID NO: 110691 - protein, 7 aa, synthetic construct
AAGKYNN

SEQ ID NO: 110692 - protein, 7 aa, synthetic construct
AAGRPNN

SEQ ID NO: 110693 - protein, 7 aa, synthetic construct
AAGRQML

SEQ ID NO: 110694 - protein, 7 aa, synthetic construct
AAHAKSY

SEQ ID NO: 110695 - protein, 7 aa, synthetic construct
AAHAQAR

SEQ ID NO: 110696 - protein, 7 aa, synthetic construct
AAHGKPY

SEQ ID NO: 110697 - protein, 7 aa, synthetic construct
AAHHVSK

SEQ ID NO: 110698 - protein, 7 aa, synthetic construct
AAHKASY

SEQ ID NO: 110699 - protein, 7 aa, synthetic construct
AAHKPFV

SEQ ID NO: 110700 - protein, 7 aa, synthetic construct
AAHKVLT

SEQ ID NO: 110701 - protein, 7 aa, synthetic construct
AAHMANK

SEQ ID NO: 110702 - protein, 7 aa, synthetic construct
AAHQAIR

SEQ ID NO: 110703 - protein, 7 aa, synthetic construct
AAHQKQQ

SEQ ID NO: 110704 - protein, 7 aa, synthetic construct
AAHQQRM

SEQ ID NO: 110705 - protein, 7 aa, synthetic construct
AAHRTGG

SEQ ID NO: 110706 - protein, 7 aa, synthetic construct
AAHRVPT

SEQ ID NO: 110707 - protein, 7 aa, synthetic construct
AAHTARM

SEQ ID NO: 110708 - protein, 7 aa, synthetic construct
AAHVSNR

SEQ ID NO: 110709 - protein, 7 aa, synthetic construct
AAIHASK

SEQ ID NO: 110710 - protein, 7 aa, synthetic construct
AAINARL

SEQ ID NO: 110711 - protein, 7 aa, synthetic construct
AAINKQW

SEQ ID NO: 110712 - protein, 7 aa, synthetic construct
AAIRERI

SEQ ID NO: 110713 - protein, 7 aa, synthetic construct
AAIYTDR

SEQ ID NO: 110714 - protein, 7 aa, synthetic construct
AAKDQYR

SEQ ID NO: 110715 - protein, 7 aa, synthetic construct
AAKGQYM

SEQ ID NO: 110716 - protein, 7 aa, synthetic construct
AAKGVSY

SEQ ID NO: 110717 - protein, 7 aa, synthetic construct
AAKHMPL

SEQ ID NO: 110718 - protein, 7 aa, synthetic construct
AAKHSVY

SEQ ID NO: 110719 - protein, 7 aa, synthetic construct
AAKKFDV

SEQ ID NO: 110720 - protein, 7 aa, synthetic construct
AAKPHQL

SEQ ID NO: 110721 - protein, 7 aa, synthetic construct
AAKPMHY

SEQ ID NO: 110722 - protein, 7 aa, synthetic construct
AAKRELF

SEQ ID NO: 110723 - protein, 7 aa, synthetic construct
AAKSPFS

SEQ ID NO: 110724 - protein, 7 aa, synthetic construct
AAKSRDY

SEQ ID NO: 110725 - protein, 7 aa, synthetic construct
AAKSRSD

SEQ ID NO: 110726 - protein, 7 aa, synthetic construct
AAKTGLY

SEQ ID NO: 110727 - protein, 7 aa, synthetic construct
AAKYDGK

SEQ ID NO: 110728 - protein, 7 aa, synthetic construct
AAKYIPP

SEQ ID NO: 110729 - protein, 7 aa, synthetic construct
AAKYVNP

SEQ ID NO: 110730 - protein, 7 aa, synthetic construct
AALHSGR

SEQ ID NO: 110731 - protein, 7 aa, synthetic construct
AAMGMPR

SEQ ID NO: 110732 - protein, 7 aa, synthetic construct
AAMGPYK

SEQ ID NO: 110733 - protein, 7 aa, synthetic construct
AAMHAKQ

SEQ ID NO: 110734 - protein, 7 aa, synthetic construct
AAMKRQE

SEQ ID NO: 110735 - protein, 7 aa, synthetic construct
AANASHR

SEQ ID NO: 110736 - protein, 7 aa, synthetic construct
AANKHFS

SEQ ID NO: 110737 - protein, 7 aa, synthetic construct
AANPIRT

SEQ ID NO: 110738 - protein, 7 aa, synthetic construct
AANPRVH

SEQ ID NO: 110739 - protein, 7 aa, synthetic construct
AANREKY

SEQ ID NO: 110740 - protein, 7 aa, synthetic construct
AAPAHMR

SEQ ID NO: 110741 - protein, 7 aa, synthetic construct
AAPEKIK

SEQ ID NO: 110742 - protein, 7 aa, synthetic construct
AAPHHKS

SEQ ID NO: 110743 - protein, 7 aa, synthetic construct
AAPHINR

SEQ ID NO: 110744 - protein, 7 aa, synthetic construct
AAPKYRD

SEQ ID NO: 110745 - protein, 7 aa, synthetic construct
AAPLHSR

SEQ ID NO: 110746 - protein, 7 aa, synthetic construct
AAPPRDR

SEQ ID NO: 110747 - protein, 7 aa, synthetic construct
AAPRVIN

SEQ ID NO: 110748 - protein, 7 aa, synthetic construct
AAQAKYL

SEQ ID NO: 110749 - protein, 7 aa, synthetic construct
AAQRGVY

SEQ ID NO: 110750 - protein, 7 aa, synthetic construct
AAQRTYV

SEQ ID NO: 110751 - protein, 7 aa, synthetic construct
AAQSQYR

SEQ ID NO: 110752 - protein, 7 aa, synthetic construct
AAQYMAH

SEQ ID NO: 110753 - protein, 7 aa, synthetic construct
AARELRS

SEQ ID NO: 110754 - protein, 7 aa, synthetic construct
AARERVL

SEQ ID NO: 110755 - protein, 7 aa, synthetic construct
AARETKF

SEQ ID NO: 110756 - protein, 7 aa, synthetic construct
AARGPKE

SEQ ID NO: 110757 - protein, 7 aa, synthetic construct
AARGPYG

SEQ ID NO: 110758 - protein, 7 aa, synthetic construct
AARISNI

SEQ ID NO: 110759 - protein, 7 aa, synthetic construct
AARLKTE

SEQ ID NO: 110760 - protein, 7 aa, synthetic construct
AARMQGH

SEQ ID NO: 110761 - protein, 7 aa, synthetic construct
AARMQGQ

SEQ ID NO: 110762 - protein, 7 aa, synthetic construct
AARMSNL

SEQ ID NO: 110763 - protein, 7 aa, synthetic construct
AARNASM

SEQ ID NO: 110764 - protein, 7 aa, synthetic construct
AARPRDI

SEQ ID NO: 110765 - protein, 7 aa, synthetic construct
AARQPQM

SEQ ID NO: 110766 - protein, 7 aa, synthetic construct
AARQTGH

SEQ ID NO: 110767 - protein, 7 aa, synthetic construct
AARSNNY

SEQ ID NO: 110768 - protein, 7 aa, synthetic construct
AARVVKE

SEQ ID NO: 110769 - protein, 7 aa, synthetic construct
AASKSDK

SEQ ID NO: 110770 - protein, 7 aa, synthetic construct
AASLPRY

SEQ ID NO: 110771 - protein, 7 aa, synthetic construct
AASNYAR

SEQ ID NO: 110772 - protein, 7 aa, synthetic construct
AASRGVY

SEQ ID NO: 110773 - protein, 7 aa, synthetic construct
AATKKWD

SEQ ID NO: 110774 - protein, 7 aa, synthetic construct
AATTQRY

SEQ ID NO: 110775 - protein, 7 aa, synthetic construct
AAVKYGM

SEQ ID NO: 110776 - protein, 7 aa, synthetic construct
AAVRAHV

SEQ ID NO: 110777 - protein, 7 aa, synthetic construct
AAVRHTV

SEQ ID NO: 110778 - protein, 7 aa, synthetic construct
AAWGGPA

SEQ ID NO: 110779 - protein, 7 aa, synthetic construct
AAYAQLG

SEQ ID NO: 110780 - protein, 7 aa, synthetic construct
AAYGGNN

SEQ ID NO: 110781 - protein, 7 aa, synthetic construct
AAYGQKA

SEQ ID NO: 110782 - protein, 7 aa, synthetic construct
AAYKVPS

SEQ ID NO: 110783 - protein, 7 aa, synthetic construct
AAYNATK

SEQ ID NO: 110784 - protein, 7 aa, synthetic construct
ADAKMNR

SEQ ID NO: 110785 - protein, 7 aa, synthetic construct
ADAKPIR

SEQ ID NO: 110786 - protein, 7 aa, synthetic construct
ADALVKK

SEQ ID NO: 110787 - protein, 7 aa, synthetic construct
ADARPKY

SEQ ID NO: 110788 - protein, 7 aa, synthetic construct
ADEKIKR

SEQ ID NO: 110789 - protein, 7 aa, synthetic construct
ADGKADM

SEQ ID NO: 110790 - protein, 7 aa, synthetic construct
ADGKIRT

SEQ ID NO: 110791 - protein, 7 aa, synthetic construct
ADGKMKQ

SEQ ID NO: 110792 - protein, 7 aa, synthetic construct
ADGKPNR

SEQ ID NO: 110793 - protein, 7 aa, synthetic construct
ADHKMKF

SEQ ID NO: 110794 - protein, 7 aa, synthetic construct
ADHPKRI

SEQ ID NO: 110795 - protein, 7 aa, synthetic construct
ADIGKKY

SEQ ID NO: 110796 - protein, 7 aa, synthetic construct
ADIKQRA

SEQ ID NO: 110797 - protein, 7 aa, synthetic construct
ADIQNKR

SEQ ID NO: 110798 - protein, 7 aa, synthetic construct
ADIRIRG

SEQ ID NO: 110799 - protein, 7 aa, synthetic construct
ADKASSK

SEQ ID NO: 110800 - protein, 7 aa, synthetic construct
ADKENRR

SEQ ID NO: 110801 - protein, 7 aa, synthetic construct
ADKHPQR

SEQ ID NO: 110802 - protein, 7 aa, synthetic construct
ADKHRMG

SEQ ID NO: 110803 - protein, 7 aa, synthetic construct
ADKKPLW

SEQ ID NO: 110804 - protein, 7 aa, synthetic construct
ADKMPMK

SEQ ID NO: 110805 - protein, 7 aa, synthetic construct
ADKMRYV

SEQ ID NO: 110806 - protein, 7 aa, synthetic construct
ADKNPMR

SEQ ID NO: 110807 - protein, 7 aa, synthetic construct
ADKPFRA

SEQ ID NO: 110808 - protein, 7 aa, synthetic construct
ADKPMYR

SEQ ID NO: 110809 - protein, 7 aa, synthetic construct
ADKPRIT

SEQ ID NO: 110810 - protein, 7 aa, synthetic construct
ADKPRLG

SEQ ID NO: 110811 - protein, 7 aa, synthetic construct
ADKRINV

SEQ ID NO: 110812 - protein, 7 aa, synthetic construct
ADKRMVY

SEQ ID NO: 110813 - protein, 7 aa, synthetic construct
ADKRNVV

SEQ ID NO: 110814 - protein, 7 aa, synthetic construct
ADKRSAG

SEQ ID NO: 110815 - protein, 7 aa, synthetic construct
ADKSVRM

SEQ ID NO: 110816 - protein, 7 aa, synthetic construct
ADKVQRQ

SEQ ID NO: 110817 - protein, 7 aa, synthetic construct
ADMKIRH

SEQ ID NO: 110818 - protein, 7 aa, synthetic construct
ADMTKRF

SEQ ID NO: 110819 - protein, 7 aa, synthetic construct
ADNKGRQ

SEQ ID NO: 110820 - protein, 7 aa, synthetic construct
ADNPRKS

SEQ ID NO: 110821 - protein, 7 aa, synthetic construct
ADNRKFS

SEQ ID NO: 110822 - protein, 7 aa, synthetic construct
ADNVKRL

SEQ ID NO: 110823 - protein, 7 aa, synthetic construct
ADPIRGK

SEQ ID NO: 110824 - protein, 7 aa, synthetic construct
ADPPRMR

SEQ ID NO: 110825 - protein, 7 aa, synthetic construct
ADPSPKR

SEQ ID NO: 110826 - protein, 7 aa, synthetic construct
ADQKKFA

SEQ ID NO: 110827 - protein, 7 aa, synthetic construct
ADQKRTF

SEQ ID NO: 110828 - protein, 7 aa, synthetic construct
ADQMKLR

SEQ ID NO: 110829 - protein, 7 aa, synthetic construct
ADQNKRM

SEQ ID NO: 110830 - protein, 7 aa, synthetic construct
ADRAQNK

SEQ ID NO: 110831 - protein, 7 aa, synthetic construct
ADRGLRQ

SEQ ID NO: 110832 - protein, 7 aa, synthetic construct
ADRIRVS

SEQ ID NO: 110833 - protein, 7 aa, synthetic construct
ADRITAK

SEQ ID NO: 110834 - protein, 7 aa, synthetic construct
ADRKAPL

SEQ ID NO: 110835 - protein, 7 aa, synthetic construct
ADRKAQF

SEQ ID NO: 110836 - protein, 7 aa, synthetic construct
ADRKGYA

SEQ ID NO: 110837 - protein, 7 aa, synthetic construct
ADRKKEF

SEQ ID NO: 110838 - protein, 7 aa, synthetic construct
ADRKPER

SEQ ID NO: 110839 - protein, 7 aa, synthetic construct
ADRMAAK

SEQ ID NO: 110840 - protein, 7 aa, synthetic construct
ADRMNVK

SEQ ID NO: 110841 - protein, 7 aa, synthetic construct
ADRNQIR

SEQ ID NO: 110842 - protein, 7 aa, synthetic construct
ADRPKIL

SEQ ID NO: 110843 - protein, 7 aa, synthetic construct
ADRPQRS

SEQ ID NO: 110844 - protein, 7 aa, synthetic construct
ADRQKQY

SEQ ID NO: 110845 - protein, 7 aa, synthetic construct
ADRQRNN

SEQ ID NO: 110846 - protein, 7 aa, synthetic construct
ADRQSLK

SEQ ID NO: 110847 - protein, 7 aa, synthetic construct
ADRTKML

SEQ ID NO: 110848 - protein, 7 aa, synthetic construct
ADRVKHS

SEQ ID NO: 110849 - protein, 7 aa, synthetic construct
ADRVTLR

SEQ ID NO: 110850 - protein, 7 aa, synthetic construct
ADRWPTG

SEQ ID NO: 110851 - protein, 7 aa, synthetic construct
ADSGLKK

SEQ ID NO: 110852 - protein, 7 aa, synthetic construct
ADSMHYR

SEQ ID NO: 110853 - protein, 7 aa, synthetic construct
ADSNARK

SEQ ID NO: 110854 - protein, 7 aa, synthetic construct
ADSRPGK

SEQ ID NO: 110855 - protein, 7 aa, synthetic construct
ADSVKFK

SEQ ID NO: 110856 - protein, 7 aa, synthetic construct
ADTGKKY

SEQ ID NO: 110857 - protein, 7 aa, synthetic construct
ADTKLRN

SEQ ID NO: 110858 - protein, 7 aa, synthetic construct
ADTRGMK

SEQ ID NO: 110859 - protein, 7 aa, synthetic construct
ADTVRIK

SEQ ID NO: 110860 - protein, 7 aa, synthetic construct
ADVHYQR

SEQ ID NO: 110861 - protein, 7 aa, synthetic construct
ADVRMVK

SEQ ID NO: 110862 - protein, 7 aa, synthetic construct
ADYKIKP

SEQ ID NO: 110863 - protein, 7 aa, synthetic construct
ADYKKQG

SEQ ID NO: 110864 - protein, 7 aa, synthetic construct
ADYRLKP

SEQ ID NO: 110865 - protein, 7 aa, synthetic construct
AEAIKRA

SEQ ID NO: 110866 - protein, 7 aa, synthetic construct
AEAPKRT

SEQ ID NO: 110867 - protein, 7 aa, synthetic construct
AEARTRV

SEQ ID NO: 110868 - protein, 7 aa, synthetic construct
AEFKINK

SEQ ID NO: 110869 - protein, 7 aa, synthetic construct
AEFKQTK

SEQ ID NO: 110870 - protein, 7 aa, synthetic construct
AEHKRPM

SEQ ID NO: 110871 - protein, 7 aa, synthetic construct
AEINQKK

SEQ ID NO: 110872 - protein, 7 aa, synthetic construct
AEKAMDW

SEQ ID NO: 110873 - protein, 7 aa, synthetic construct
AEKETKR

SEQ ID NO: 110874 - protein, 7 aa, synthetic construct
AEKFTSK

SEQ ID NO: 110875 - protein, 7 aa, synthetic construct
AEKGASR

SEQ ID NO: 110876 - protein, 7 aa, synthetic construct
AEKMRNF

SEQ ID NO: 110877 - protein, 7 aa, synthetic construct
AEKQARQ

SEQ ID NO: 110878 - protein, 7 aa, synthetic construct
AEKQAYK

SEQ ID NO: 110879 - protein, 7 aa, synthetic construct
AEKQMRQ

SEQ ID NO: 110880 - protein, 7 aa, synthetic construct
AEKQPRM

SEQ ID NO: 110881 - protein, 7 aa, synthetic construct
AEKQTRA

SEQ ID NO: 110882 - protein, 7 aa, synthetic construct
AEKRAVM

SEQ ID NO: 110883 - protein, 7 aa, synthetic construct
AEKRGNP

SEQ ID NO: 110884 - protein, 7 aa, synthetic construct
AEKRMVS

SEQ ID NO: 110885 - protein, 7 aa, synthetic construct
AEKRQLA

SEQ ID NO: 110886 - protein, 7 aa, synthetic construct
AEKSPNR

SEQ ID NO: 110887 - protein, 7 aa, synthetic construct
AEKTEMG

SEQ ID NO: 110888 - protein, 7 aa, synthetic construct
AEKYIPK

SEQ ID NO: 110889 - protein, 7 aa, synthetic construct
AELRTKV

SEQ ID NO: 110890 - protein, 7 aa, synthetic construct
AEMKVAK

SEQ ID NO: 110891 - protein, 7 aa, synthetic construct
AEMNKNR

SEQ ID NO: 110892 - protein, 7 aa, synthetic construct
AENVMKR

SEQ ID NO: 110893 - protein, 7 aa, synthetic construct
AEPKART

SEQ ID NO: 110894 - protein, 7 aa, synthetic construct
AEPTIKR

SEQ ID NO: 110895 - protein, 7 aa, synthetic construct
AEQIKRN

SEQ ID NO: 110896 - protein, 7 aa, synthetic construct
AEQMKRN

SEQ ID NO: 110897 - protein, 7 aa, synthetic construct
AEQNKRT

SEQ ID NO: 110898 - protein, 7 aa, synthetic construct
AEQRARD

SEQ ID NO: 110899 - protein, 7 aa, synthetic construct
AEQRNRV

SEQ ID NO: 110900 - protein, 7 aa, synthetic construct
AEQTKFK

SEQ ID NO: 110901 - protein, 7 aa, synthetic construct
AERKNTI

SEQ ID NO: 110902 - protein, 7 aa, synthetic construct
AERKQVG

SEQ ID NO: 110903 - protein, 7 aa, synthetic construct
AERMLKQ

SEQ ID NO: 110904 - protein, 7 aa, synthetic construct
AERNKFG

SEQ ID NO: 110905 - protein, 7 aa, synthetic construct
AERNQKI

SEQ ID NO: 110906 - protein, 7 aa, synthetic construct
AERNRGA

SEQ ID NO: 110907 - protein, 7 aa, synthetic construct
AERPQKV

SEQ ID NO: 110908 - protein, 7 aa, synthetic construct
AERSLRA

SEQ ID NO: 110909 - protein, 7 aa, synthetic construct
AERVQPD

SEQ ID NO: 110910 - protein, 7 aa, synthetic construct
AERVRLS

SEQ ID NO: 110911 - protein, 7 aa, synthetic construct
AERVRPQ

SEQ ID NO: 110912 - protein, 7 aa, synthetic construct
AERVRVA

SEQ ID NO: 110913 - protein, 7 aa, synthetic construct
AETNKFR

SEQ ID NO: 110914 - protein, 7 aa, synthetic construct
AETWQSS

SEQ ID NO: 110915 - protein, 7 aa, synthetic construct
AEVKMKN

SEQ ID NO: 110916 - protein, 7 aa, synthetic construct
AEVKMSK

SEQ ID NO: 110917 - protein, 7 aa, synthetic construct
AEVMKAR

SEQ ID NO: 110918 - protein, 7 aa, synthetic construct
AEVNKRM

SEQ ID NO: 110919 - protein, 7 aa, synthetic construct
AEYKSPK

SEQ ID NO: 110920 - protein, 7 aa, synthetic construct
AFAKNAL

SEQ ID NO: 110921 - protein, 7 aa, synthetic construct
AFANGGR

SEQ ID NO: 110922 - protein, 7 aa, synthetic construct
AFAPRNA

SEQ ID NO: 110923 - protein, 7 aa, synthetic construct
AFARVNP

SEQ ID NO: 110924 - protein, 7 aa, synthetic construct
AFATKPI

SEQ ID NO: 110925 - protein, 7 aa, synthetic construct
AFDGRKA

SEQ ID NO: 110926 - protein, 7 aa, synthetic construct
AFDNKTR

SEQ ID NO: 110927 - protein, 7 aa, synthetic construct
AFEKSAR

SEQ ID NO: 110928 - protein, 7 aa, synthetic construct
AFGAKNM

SEQ ID NO: 110929 - protein, 7 aa, synthetic construct
AFGGQKG

SEQ ID NO: 110930 - protein, 7 aa, synthetic construct
AFGKSEK

SEQ ID NO: 110931 - protein, 7 aa, synthetic construct
AFGNNRA

SEQ ID NO: 110932 - protein, 7 aa, synthetic construct
AFGTHKT

SEQ ID NO: 110933 - protein, 7 aa, synthetic construct
AFGTQRG

SEQ ID NO: 110934 - protein, 7 aa, synthetic construct
AFHGMPK

SEQ ID NO: 110935 - protein, 7 aa, synthetic construct
AFHGTKN

SEQ ID NO: 110936 - protein, 7 aa, synthetic construct
AFHKAQG

SEQ ID NO: 110937 - protein, 7 aa, synthetic construct
AFHKNNV

SEQ ID NO: 110938 - protein, 7 aa, synthetic construct
AFHKSSM

SEQ ID NO: 110939 - protein, 7 aa, synthetic construct
AFHNKIP

SEQ ID NO: 110940 - protein, 7 aa, synthetic construct
AFHTSTK

SEQ ID NO: 110941 - protein, 7 aa, synthetic construct
AFIATDS

SEQ ID NO: 110942 - protein, 7 aa, synthetic construct
AFKAVSM

SEQ ID NO: 110943 - protein, 7 aa, synthetic construct
AFKEISR

SEQ ID NO: 110944 - protein, 7 aa, synthetic construct
AFKGYEK

SEQ ID NO: 110945 - protein, 7 aa, synthetic construct
AFKHSAQ

SEQ ID NO: 110946 - protein, 7 aa, synthetic construct
AFKMAPA

SEQ ID NO: 110947 - protein, 7 aa, synthetic construct
AFKNPQN

SEQ ID NO: 110948 - protein, 7 aa, synthetic construct
AFKNQVL

SEQ ID NO: 110949 - protein, 7 aa, synthetic construct
AFKPQSH

SEQ ID NO: 110950 - protein, 7 aa, synthetic construct
AFKREMI

SEQ ID NO: 110951 - protein, 7 aa, synthetic construct
AFKRQGD

SEQ ID NO: 110952 - protein, 7 aa, synthetic construct
AFKSHRE

SEQ ID NO: 110953 - protein, 7 aa, synthetic construct
AFKSPLS

SEQ ID NO: 110954 - protein, 7 aa, synthetic construct
AFKSRGE

SEQ ID NO: 110955 - protein, 7 aa, synthetic construct
AFKTYPS

SEQ ID NO: 110956 - protein, 7 aa, synthetic construct
AFKVGNM

SEQ ID NO: 110957 - protein, 7 aa, synthetic construct
AFKVRHE

SEQ ID NO: 110958 - protein, 7 aa, synthetic construct
AFNAVTR

SEQ ID NO: 110959 - protein, 7 aa, synthetic construct
AFNNLRV

SEQ ID NO: 110960 - protein, 7 aa, synthetic construct
AFNQGPR

SEQ ID NO: 110961 - protein, 7 aa, synthetic construct
AFNQKQY

SEQ ID NO: 110962 - protein, 7 aa, synthetic construct
AFNRSKE

SEQ ID NO: 110963 - protein, 7 aa, synthetic construct
AFNTNQR

SEQ ID NO: 110964 - protein, 7 aa, synthetic construct
AFPHKSI

SEQ ID NO: 110965 - protein, 7 aa, synthetic construct
AFPKSNI

SEQ ID NO: 110966 - protein, 7 aa, synthetic construct
AFPKTPT

SEQ ID NO: 110967 - protein, 7 aa, synthetic construct
AFPMRKD

SEQ ID NO: 110968 - protein, 7 aa, synthetic construct
AFPRGPS

SEQ ID NO: 110969 - protein, 7 aa, synthetic construct
AFPRSAQ

SEQ ID NO: 110970 - protein, 7 aa, synthetic construct
AFPRTDR

SEQ ID NO: 110971 - protein, 7 aa, synthetic construct
AFQGSLK

SEQ ID NO: 110972 - protein, 7 aa, synthetic construct
AFQGSTR

SEQ ID NO: 110973 - protein, 7 aa, synthetic construct
AFQHQGK

SEQ ID NO: 110974 - protein, 7 aa, synthetic construct
AFQHSKI

SEQ ID NO: 110975 - protein, 7 aa, synthetic construct
AFQKVDR

SEQ ID NO: 110976 - protein, 7 aa, synthetic construct
AFQNLKN

SEQ ID NO: 110977 - protein, 7 aa, synthetic construct
AFQSMAK

SEQ ID NO: 110978 - protein, 7 aa, synthetic construct
AFRGGNS

SEQ ID NO: 110979 - protein, 7 aa, synthetic construct
AFRGPSS

SEQ ID NO: 110980 - protein, 7 aa, synthetic construct
AFRGTSH

SEQ ID NO: 110981 - protein, 7 aa, synthetic construct
AFRIKQE

SEQ ID NO: 110982 - protein, 7 aa, synthetic construct
AFRPSKD

SEQ ID NO: 110983 - protein, 7 aa, synthetic construct
AFRQSQS

SEQ ID NO: 110984 - protein, 7 aa, synthetic construct
AFRTNEK

SEQ ID NO: 110985 - protein, 7 aa, synthetic construct
AFSARGH

SEQ ID NO: 110986 - protein, 7 aa, synthetic construct
AFSDVGS

SEQ ID NO: 110987 - protein, 7 aa, synthetic construct
AFSERGK

SEQ ID NO: 110988 - protein, 7 aa, synthetic construct
AFSGYPK

SEQ ID NO: 110989 - protein, 7 aa, synthetic construct
AFSKTQY

SEQ ID NO: 110990 - protein, 7 aa, synthetic construct
AFSNARA

SEQ ID NO: 110991 - protein, 7 aa, synthetic construct
AFSNGRL

SEQ ID NO: 110992 - protein, 7 aa, synthetic construct
AFTTQTR

SEQ ID NO: 110993 - protein, 7 aa, synthetic construct
AGAAKFL

SEQ ID NO: 110994 - protein, 7 aa, synthetic construct
AGAKSDR

SEQ ID NO: 110995 - protein, 7 aa, synthetic construct
AGARSKE

SEQ ID NO: 110996 - protein, 7 aa, synthetic construct
AGDAGKR

SEQ ID NO: 110997 - protein, 7 aa, synthetic construct
AGDGMKK

SEQ ID NO: 110998 - protein, 7 aa, synthetic construct
AGDKYRI

SEQ ID NO: 110999 - protein, 7 aa, synthetic construct
AGEFKRG

SEQ ID NO: 111000 - protein, 7 aa, synthetic construct
AGEKPRN

SEQ ID NO: 111001 - protein, 7 aa, synthetic construct
AGEYGHR

SEQ ID NO: 111002 - protein, 7 aa, synthetic construct
AGFSNKG

SEQ ID NO: 111003 - protein, 7 aa, synthetic construct
AGGASPR

SEQ ID NO: 111004 - protein, 7 aa, synthetic construct
AGGHKTT

SEQ ID NO: 111005 - protein, 7 aa, synthetic construct
AGGKDRM

SEQ ID NO: 111006 - protein, 7 aa, synthetic construct
AGGKESR

SEQ ID NO: 111007 - protein, 7 aa, synthetic construct
AGGKFVS

SEQ ID NO: 111008 - protein, 7 aa, synthetic construct
AGGKSRE

SEQ ID NO: 111009 - protein, 7 aa, synthetic construct
AGGMPNR

SEQ ID NO: 111010 - protein, 7 aa, synthetic construct
AGGNTRA

SEQ ID NO: 111011 - protein, 7 aa, synthetic construct
AGGPPMK

SEQ ID NO: 111012 - protein, 7 aa, synthetic construct
AGGPQMR

SEQ ID NO: 111013 - protein, 7 aa, synthetic construct
AGGTATR

SEQ ID NO: 111014 - protein, 7 aa, synthetic construct
AGGTKYN

SEQ ID NO: 111015 - protein, 7 aa, synthetic construct
AGGTQTR

SEQ ID NO: 111016 - protein, 7 aa, synthetic construct
AGHAVKA

SEQ ID NO: 111017 - protein, 7 aa, synthetic construct
AGHKNPL

SEQ ID NO: 111018 - protein, 7 aa, synthetic construct
AGHKVII

SEQ ID NO: 111019 - protein, 7 aa, synthetic construct
AGHKYLP

SEQ ID NO: 111020 - protein, 7 aa, synthetic construct
AGHRTSG

SEQ ID NO: 111021 - protein, 7 aa, synthetic construct
AGHTMSK

SEQ ID NO: 111022 - protein, 7 aa, synthetic construct
AGHVAGK

SEQ ID NO: 111023 - protein, 7 aa, synthetic construct
AGHWKTE

SEQ ID NO: 111024 - protein, 7 aa, synthetic construct
AGHWQKE

SEQ ID NO: 111025 - protein, 7 aa, synthetic construct
AGIRQKD

SEQ ID NO: 111026 - protein, 7 aa, synthetic construct
AGKAYTA

SEQ ID NO: 111027 - protein, 7 aa, synthetic construct
AGKDNIR

SEQ ID NO: 111028 - protein, 7 aa, synthetic construct
AGKDSRM

SEQ ID NO: 111029 - protein, 7 aa, synthetic construct
AGKFINA

SEQ ID NO: 111030 - protein, 7 aa, synthetic construct
AGKGAYA

SEQ ID NO: 111031 - protein, 7 aa, synthetic construct
AGKHLPF

SEQ ID NO: 111032 - protein, 7 aa, synthetic construct
AGKHLVI

SEQ ID NO: 111033 - protein, 7 aa, synthetic construct
AGKHVDR

SEQ ID NO: 111034 - protein, 7 aa, synthetic construct
AGKHYIP

SEQ ID NO: 111035 - protein, 7 aa, synthetic construct
AGKHYLG

SEQ ID NO: 111036 - protein, 7 aa, synthetic construct
AGKIDKY

SEQ ID NO: 111037 - protein, 7 aa, synthetic construct
AGKKYME

SEQ ID NO: 111038 - protein, 7 aa, synthetic construct
AGKLMDK

SEQ ID NO: 111039 - protein, 7 aa, synthetic construct
AGKLPII

SEQ ID NO: 111040 - protein, 7 aa, synthetic construct
AGKMNDR

SEQ ID NO: 111041 - protein, 7 aa, synthetic construct
AGKNQYA

SEQ ID NO: 111042 - protein, 7 aa, synthetic construct
AGKPNVF

SEQ ID NO: 111043 - protein, 7 aa, synthetic construct
AGKPPIF

SEQ ID NO: 111044 - protein, 7 aa, synthetic construct
AGKQYLA

SEQ ID NO: 111045 - protein, 7 aa, synthetic construct
AGKSENR

SEQ ID NO: 111046 - protein, 7 aa, synthetic construct
AGKSSYM

SEQ ID NO: 111047 - protein, 7 aa, synthetic construct
AGKTYHG

SEQ ID NO: 111048 - protein, 7 aa, synthetic construct
AGKVTYS

SEQ ID NO: 111049 - protein, 7 aa, synthetic construct
AGKYAQG

SEQ ID NO: 111050 - protein, 7 aa, synthetic construct
AGKYMNA

SEQ ID NO: 111051 - protein, 7 aa, synthetic construct
AGKYSST

SEQ ID NO: 111052 - protein, 7 aa, synthetic construct
AGLGSPR

SEQ ID NO: 111053 - protein, 7 aa, synthetic construct
AGLGVSR

SEQ ID NO: 111054 - protein, 7 aa, synthetic construct
AGLNASR

SEQ ID NO: 111055 - protein, 7 aa, synthetic construct
AGLQQQR

SEQ ID NO: 111056 - protein, 7 aa, synthetic construct
AGLSPSR

SEQ ID NO: 111057 - protein, 7 aa, synthetic construct
AGMAYQK

SEQ ID NO: 111058 - protein, 7 aa, synthetic construct
AGMGINR

SEQ ID NO: 111059 - protein, 7 aa, synthetic construct
AGMGIVR

SEQ ID NO: 111060 - protein, 7 aa, synthetic construct
AGMGMRV

SEQ ID NO: 111061 - protein, 7 aa, synthetic construct
AGMKSNF

SEQ ID NO: 111062 - protein, 7 aa, synthetic construct
AGMKVAF

SEQ ID NO: 111063 - protein, 7 aa, synthetic construct
AGMPTRI

SEQ ID NO: 111064 - protein, 7 aa, synthetic construct
AGMSLRS

SEQ ID NO: 111065 - protein, 7 aa, synthetic construct
AGMSNAK

SEQ ID NO: 111066 - protein, 7 aa, synthetic construct
AGNFMKG

SEQ ID NO: 111067 - protein, 7 aa, synthetic construct
AGNFNNK

SEQ ID NO: 111068 - protein, 7 aa, synthetic construct
AGNGSRM

SEQ ID NO: 111069 - protein, 7 aa, synthetic construct
AGNHKFY

SEQ ID NO: 111070 - protein, 7 aa, synthetic construct
AGNKREV

SEQ ID NO: 111071 - protein, 7 aa, synthetic construct
AGNLAAR

SEQ ID NO: 111072 - protein, 7 aa, synthetic construct
AGNMVMR

SEQ ID NO: 111073 - protein, 7 aa, synthetic construct
AGNNHTK

SEQ ID NO: 111074 - protein, 7 aa, synthetic construct
AGNQFPR

SEQ ID NO: 111075 - protein, 7 aa, synthetic construct
AGPHGGR

SEQ ID NO: 111076 - protein, 7 aa, synthetic construct
AGPHYKP

SEQ ID NO: 111077 - protein, 7 aa, synthetic construct
AGPIHTR

SEQ ID NO: 111078 - protein, 7 aa, synthetic construct
AGPKLMM

SEQ ID NO: 111079 - protein, 7 aa, synthetic construct
AGPKPML

SEQ ID NO: 111080 - protein, 7 aa, synthetic construct
AGPNEKR

SEQ ID NO: 111081 - protein, 7 aa, synthetic construct
AGPRANT

SEQ ID NO: 111082 - protein, 7 aa, synthetic construct
AGPRMTM

SEQ ID NO: 111083 - protein, 7 aa, synthetic construct
AGPRSQN

SEQ ID NO: 111084 - protein, 7 aa, synthetic construct
AGPYKNV

SEQ ID NO: 111085 - protein, 7 aa, synthetic construct
AGQDRKV

SEQ ID NO: 111086 - protein, 7 aa, synthetic construct
AGQMQSR

SEQ ID NO: 111087 - protein, 7 aa, synthetic construct
AGQMVSR

SEQ ID NO: 111088 - protein, 7 aa, synthetic construct
AGQPARM

SEQ ID NO: 111089 - protein, 7 aa, synthetic construct
AGQQAMR

SEQ ID NO: 111090 - protein, 7 aa, synthetic construct
AGQQHRT

SEQ ID NO: 111091 - protein, 7 aa, synthetic construct
AGQSGVR

SEQ ID NO: 111092 - protein, 7 aa, synthetic construct
AGQSHQK

SEQ ID NO: 111093 - protein, 7 aa, synthetic construct
AGQSQAR

SEQ ID NO: 111094 - protein, 7 aa, synthetic construct
AGQVNQR

SEQ ID NO: 111095 - protein, 7 aa, synthetic construct
AGQVRKE

SEQ ID NO: 111096 - protein, 7 aa, synthetic construct
AGQVSPR

SEQ ID NO: 111097 - protein, 7 aa, synthetic construct
AGRANLG

SEQ ID NO: 111098 - protein, 7 aa, synthetic construct
AGRGEKI

SEQ ID NO: 111099 - protein, 7 aa, synthetic construct
AGRGSLG

SEQ ID NO: 111100 - protein, 7 aa, synthetic construct
AGRISPN

SEQ ID NO: 111101 - protein, 7 aa, synthetic construct
AGRLVQV

SEQ ID NO: 111102 - protein, 7 aa, synthetic construct
AGRMTNI

SEQ ID NO: 111103 - protein, 7 aa, synthetic construct
AGRNIAA

SEQ ID NO: 111104 - protein, 7 aa, synthetic construct
AGRNPIN

SEQ ID NO: 111105 - protein, 7 aa, synthetic construct
AGRPVPT

SEQ ID NO: 111106 - protein, 7 aa, synthetic construct
AGRQYPP

SEQ ID NO: 111107 - protein, 7 aa, synthetic construct
AGSKFRE

SEQ ID NO: 111108 - protein, 7 aa, synthetic construct
AGSKSLF

SEQ ID NO: 111109 - protein, 7 aa, synthetic construct
AGSNGQR

SEQ ID NO: 111110 - protein, 7 aa, synthetic construct
AGSQFAR

SEQ ID NO: 111111 - protein, 7 aa, synthetic construct
AGSQREK

SEQ ID NO: 111112 - protein, 7 aa, synthetic construct
AGSTHGK

SEQ ID NO: 111113 - protein, 7 aa, synthetic construct
AGSYGLS

SEQ ID NO: 111114 - protein, 7 aa, synthetic construct
AGTGRVY

SEQ ID NO: 111115 - protein, 7 aa, synthetic construct
AGTMTAR

SEQ ID NO: 111116 - protein, 7 aa, synthetic construct
AGTTGGR

SEQ ID NO: 111117 - protein, 7 aa, synthetic construct
AGTTRSF

SEQ ID NO: 111118 - protein, 7 aa, synthetic construct
AGTYKTI

SEQ ID NO: 111119 - protein, 7 aa, synthetic construct
AGVARTV

SEQ ID NO: 111120 - protein, 7 aa, synthetic construct
AGVGYKQ

SEQ ID NO: 111121 - protein, 7 aa, synthetic construct
AGVISQR

SEQ ID NO: 111122 - protein, 7 aa, synthetic construct
AGVPKPY

SEQ ID NO: 111123 - protein, 7 aa, synthetic construct
AGVRQQT

SEQ ID NO: 111124 - protein, 7 aa, synthetic construct
AGVTMAR

SEQ ID NO: 111125 - protein, 7 aa, synthetic construct
AGYGKIQ

SEQ ID NO: 111126 - protein, 7 aa, synthetic construct
AGYKTHG

SEQ ID NO: 111127 - protein, 7 aa, synthetic construct
AGYMSKP

SEQ ID NO: 111128 - protein, 7 aa, synthetic construct
AGYPSGK

SEQ ID NO: 111129 - protein, 7 aa, synthetic construct
AGYQAKP

SEQ ID NO: 111130 - protein, 7 aa, synthetic construct
AGYSGST

SEQ ID NO: 111131 - protein, 7 aa, synthetic construct
AGYTGSL

SEQ ID NO: 111132 - protein, 7 aa, synthetic construct
AGYTNGK

SEQ ID NO: 111133 - protein, 7 aa, synthetic construct
AHAAVYK

SEQ ID NO: 111134 - protein, 7 aa, synthetic construct
AHAGAQK

SEQ ID NO: 111135 - protein, 7 aa, synthetic construct
AHAKIPM

SEQ ID NO: 111136 - protein, 7 aa, synthetic construct
AHALSKS

SEQ ID NO: 111137 - protein, 7 aa, synthetic construct
AHAMPQR

SEQ ID NO: 111138 - protein, 7 aa, synthetic construct
AHAPVIK

SEQ ID NO: 111139 - protein, 7 aa, synthetic construct
AHARNAY

SEQ ID NO: 111140 - protein, 7 aa, synthetic construct
AHARPSS

SEQ ID NO: 111141 - protein, 7 aa, synthetic construct
AHASSPK

SEQ ID NO: 111142 - protein, 7 aa, synthetic construct
AHASYKL

SEQ ID NO: 111143 - protein, 7 aa, synthetic construct
AHDKQSR

SEQ ID NO: 111144 - protein, 7 aa, synthetic construct
AHDRLKS

SEQ ID NO: 111145 - protein, 7 aa, synthetic construct
AHDVRYM

SEQ ID NO: 111146 - protein, 7 aa, synthetic construct
AHEFTRN

SEQ ID NO: 111147 - protein, 7 aa, synthetic construct
AHEKLRL

SEQ ID NO: 111148 - protein, 7 aa, synthetic construct
AHEVKRQ

SEQ ID NO: 111149 - protein, 7 aa, synthetic construct
AHFKASV

SEQ ID NO: 111150 - protein, 7 aa, synthetic construct
AHFKSSG

SEQ ID NO: 111151 - protein, 7 aa, synthetic construct
AHFTKGP

SEQ ID NO: 111152 - protein, 7 aa, synthetic construct
AHGATYK

SEQ ID NO: 111153 - protein, 7 aa, synthetic construct
AHGGAGK

SEQ ID NO: 111154 - protein, 7 aa, synthetic construct
AHGGLAK

SEQ ID NO: 111155 - protein, 7 aa, synthetic construct
AHGITKY

SEQ ID NO: 111156 - protein, 7 aa, synthetic construct
AHGKFSG

SEQ ID NO: 111157 - protein, 7 aa, synthetic construct
AHGLTKQ

SEQ ID NO: 111158 - protein, 7 aa, synthetic construct
AHGMPSK

SEQ ID NO: 111159 - protein, 7 aa, synthetic construct
AHGNRAV

SEQ ID NO: 111160 - protein, 7 aa, synthetic construct
AHGPRNP

SEQ ID NO: 111161 - protein, 7 aa, synthetic construct
AHGRVNA

SEQ ID NO: 111162 - protein, 7 aa, synthetic construct
AHGSAKL

SEQ ID NO: 111163 - protein, 7 aa, synthetic construct
AHGSPRA

SEQ ID NO: 111164 - protein, 7 aa, synthetic construct
AHGTKNL

SEQ ID NO: 111165 - protein, 7 aa, synthetic construct
AHGVKIN

SEQ ID NO: 111166 - protein, 7 aa, synthetic construct
AHGVQIR

SEQ ID NO: 111167 - protein, 7 aa, synthetic construct
AHGVYKG

SEQ ID NO: 111168 - protein, 7 aa, synthetic construct
AHGYNKV

SEQ ID NO: 111169 - protein, 7 aa, synthetic construct
AHGYNLS

SEQ ID NO: 111170 - protein, 7 aa, synthetic construct
AHHGVKI

SEQ ID NO: 111171 - protein, 7 aa, synthetic construct
AHHKLQP

SEQ ID NO: 111172 - protein, 7 aa, synthetic construct
AHHKPII

SEQ ID NO: 111173 - protein, 7 aa, synthetic construct
AHIKGGF

SEQ ID NO: 111174 - protein, 7 aa, synthetic construct
AHIKPNI

SEQ ID NO: 111175 - protein, 7 aa, synthetic construct
AHINKEK

SEQ ID NO: 111176 - protein, 7 aa, synthetic construct
AHINKFP

SEQ ID NO: 111177 - protein, 7 aa, synthetic construct
AHINKGY

SEQ ID NO: 111178 - protein, 7 aa, synthetic construct
AHINMRA

SEQ ID NO: 111179 - protein, 7 aa, synthetic construct
AHINSPK

SEQ ID NO: 111180 - protein, 7 aa, synthetic construct
AHKAQDR

SEQ ID NO: 111181 - protein, 7 aa, synthetic construct
AHKASIM

SEQ ID NO: 111182 - protein, 7 aa, synthetic construct
AHKDRFV

SEQ ID NO: 111183 - protein, 7 aa, synthetic construct
AHKGYGA

SEQ ID NO: 111184 - protein, 7 aa, synthetic construct
AHKIASM

SEQ ID NO: 111185 - protein, 7 aa, synthetic construct
AHKKGEV

SEQ ID NO: 111186 - protein, 7 aa, synthetic construct
AHKLIHA

SEQ ID NO: 111187 - protein, 7 aa, synthetic construct
AHKLPTM

SEQ ID NO: 111188 - protein, 7 aa, synthetic construct
AHKLQQN

SEQ ID NO: 111189 - protein, 7 aa, synthetic construct
AHKLTRD

SEQ ID NO: 111190 - protein, 7 aa, synthetic construct
AHKMRDA

SEQ ID NO: 111191 - protein, 7 aa, synthetic construct
AHKMTYA

SEQ ID NO: 111192 - protein, 7 aa, synthetic construct
AHKNIER

SEQ ID NO: 111193 - protein, 7 aa, synthetic construct
AHKPTLL

SEQ ID NO: 111194 - protein, 7 aa, synthetic construct
AHKPVVM

SEQ ID NO: 111195 - protein, 7 aa, synthetic construct
AHKQILS

SEQ ID NO: 111196 - protein, 7 aa, synthetic construct
AHKQPFV

SEQ ID NO: 111197 - protein, 7 aa, synthetic construct
AHKQPPS

SEQ ID NO: 111198 - protein, 7 aa, synthetic construct
AHKQVNN

SEQ ID NO: 111199 - protein, 7 aa, synthetic construct
AHKSNYP

SEQ ID NO: 111200 - protein, 7 aa, synthetic construct
AHKTIAH

SEQ ID NO: 111201 - protein, 7 aa, synthetic construct
AHKVASN

SEQ ID NO: 111202 - protein, 7 aa, synthetic construct
AHLKASL

SEQ ID NO: 111203 - protein, 7 aa, synthetic construct
AHLKPRD

SEQ ID NO: 111204 - protein, 7 aa, synthetic construct
AHLNQPK

SEQ ID NO: 111205 - protein, 7 aa, synthetic construct
AHLPAMR

SEQ ID NO: 111206 - protein, 7 aa, synthetic construct
AHMAPGK

SEQ ID NO: 111207 - protein, 7 aa, synthetic construct
AHMKGGY

SEQ ID NO: 111208 - protein, 7 aa, synthetic construct
AHMKTPQ

SEQ ID NO: 111209 - protein, 7 aa, synthetic construct
AHMRAGI

SEQ ID NO: 111210 - protein, 7 aa, synthetic construct
AHMRGTI

SEQ ID NO: 111211 - protein, 7 aa, synthetic construct
AHMSQTR

SEQ ID NO: 111212 - protein, 7 aa, synthetic construct
AHNGSMR

SEQ ID NO: 111213 - protein, 7 aa, synthetic construct
AHNGSNK

SEQ ID NO: 111214 - protein, 7 aa, synthetic construct
AHNHKFM

SEQ ID NO: 111215 - protein, 7 aa, synthetic construct
AHNNVTK

SEQ ID NO: 111216 - protein, 7 aa, synthetic construct
AHNPPKM

SEQ ID NO: 111217 - protein, 7 aa, synthetic construct
AHNQSIK

SEQ ID NO: 111218 - protein, 7 aa, synthetic construct
AHNTRQV

SEQ ID NO: 111219 - protein, 7 aa, synthetic construct
AHNTVRL

SEQ ID NO: 111220 - protein, 7 aa, synthetic construct
AHNVGNR

SEQ ID NO: 111221 - protein, 7 aa, synthetic construct
AHPKDHT

SEQ ID NO: 111222 - protein, 7 aa, synthetic construct
AHPKMNY

SEQ ID NO: 111223 - protein, 7 aa, synthetic construct
AHPNTGR

SEQ ID NO: 111224 - protein, 7 aa, synthetic construct
AHPNVTR

SEQ ID NO: 111225 - protein, 7 aa, synthetic construct
AHPQQRN

SEQ ID NO: 111226 - protein, 7 aa, synthetic construct
AHPQSQK

SEQ ID NO: 111227 - protein, 7 aa, synthetic construct
AHPRAAQ

SEQ ID NO: 111228 - protein, 7 aa, synthetic construct
AHPRALN

SEQ ID NO: 111229 - protein, 7 aa, synthetic construct
AHPRSNM

SEQ ID NO: 111230 - protein, 7 aa, synthetic construct
AHPRTLV

SEQ ID NO: 111231 - protein, 7 aa, synthetic construct
AHPSRGL

SEQ ID NO: 111232 - protein, 7 aa, synthetic construct
AHPVKLM

SEQ ID NO: 111233 - protein, 7 aa, synthetic construct
AHPVTKY

SEQ ID NO: 111234 - protein, 7 aa, synthetic construct
AHPYKSV

SEQ ID NO: 111235 - protein, 7 aa, synthetic construct
AHQGNQK

SEQ ID NO: 111236 - protein, 7 aa, synthetic construct
AHQHYTG

SEQ ID NO: 111237 - protein, 7 aa, synthetic construct
AHQKGAM

SEQ ID NO: 111238 - protein, 7 aa, synthetic construct
AHQLPNR

SEQ ID NO: 111239 - protein, 7 aa, synthetic construct
AHQQKSV

SEQ ID NO: 111240 - protein, 7 aa, synthetic construct
AHQQLLK

SEQ ID NO: 111241 - protein, 7 aa, synthetic construct
AHQQQTK

SEQ ID NO: 111242 - protein, 7 aa, synthetic construct
AHQQSVK

SEQ ID NO: 111243 - protein, 7 aa, synthetic construct
AHQSRTM

SEQ ID NO: 111244 - protein, 7 aa, synthetic construct
AHQTKNS

SEQ ID NO: 111245 - protein, 7 aa, synthetic construct
AHQTVRL

SEQ ID NO: 111246 - protein, 7 aa, synthetic construct
AHQVLDY

SEQ ID NO: 111247 - protein, 7 aa, synthetic construct
AHQVPRV

SEQ ID NO: 111248 - protein, 7 aa, synthetic construct
AHQVRLS

SEQ ID NO: 111249 - protein, 7 aa, synthetic construct
AHRESRP

SEQ ID NO: 111250 - protein, 7 aa, synthetic construct
AHRGVQN

SEQ ID NO: 111251 - protein, 7 aa, synthetic construct
AHRPTAA

SEQ ID NO: 111252 - protein, 7 aa, synthetic construct
AHRPVPN

SEQ ID NO: 111253 - protein, 7 aa, synthetic construct
AHRSPAV

SEQ ID NO: 111254 - protein, 7 aa, synthetic construct
AHRTTNP

SEQ ID NO: 111255 - protein, 7 aa, synthetic construct
AHSAGNK

SEQ ID NO: 111256 - protein, 7 aa, synthetic construct
AHSAIVR

SEQ ID NO: 111257 - protein, 7 aa, synthetic construct
AHSKIQL

SEQ ID NO: 111258 - protein, 7 aa, synthetic construct
AHSKNML

SEQ ID NO: 111259 - protein, 7 aa, synthetic construct
AHSKVYS

SEQ ID NO: 111260 - protein, 7 aa, synthetic construct
AHSLPAR

SEQ ID NO: 111261 - protein, 7 aa, synthetic construct
AHSPMRP

SEQ ID NO: 111262 - protein, 7 aa, synthetic construct
AHSQGYM

SEQ ID NO: 111263 - protein, 7 aa, synthetic construct
AHSQNVR

SEQ ID NO: 111264 - protein, 7 aa, synthetic construct
AHTIANR

SEQ ID NO: 111265 - protein, 7 aa, synthetic construct
AHTKAQM

SEQ ID NO: 111266 - protein, 7 aa, synthetic construct
AHTLGSR

SEQ ID NO: 111267 - protein, 7 aa, synthetic construct
AHTMRGP

SEQ ID NO: 111268 - protein, 7 aa, synthetic construct
AHTPVRL

SEQ ID NO: 111269 - protein, 7 aa, synthetic construct
AHTQRLV

SEQ ID NO: 111270 - protein, 7 aa, synthetic construct
AHTRASG

SEQ ID NO: 111271 - protein, 7 aa, synthetic construct
AHTSAYK

SEQ ID NO: 111272 - protein, 7 aa, synthetic construct
AHTSTSR

SEQ ID NO: 111273 - protein, 7 aa, synthetic construct
AHTTNTR

SEQ ID NO: 111274 - protein, 7 aa, synthetic construct
AHTVGSR

SEQ ID NO: 111275 - protein, 7 aa, synthetic construct
AHVAKRE

SEQ ID NO: 111276 - protein, 7 aa, synthetic construct
AHVDKNV

SEQ ID NO: 111277 - protein, 7 aa, synthetic construct
AHVKDRI

SEQ ID NO: 111278 - protein, 7 aa, synthetic construct
AHVKSQL

SEQ ID NO: 111279 - protein, 7 aa, synthetic construct
AHVKTSY

SEQ ID NO: 111280 - protein, 7 aa, synthetic construct
AHVMKNI

SEQ ID NO: 111281 - protein, 7 aa, synthetic construct
AHVRATI

SEQ ID NO: 111282 - protein, 7 aa, synthetic construct
AHVRHGT

SEQ ID NO: 111283 - protein, 7 aa, synthetic construct
AHYGATS

SEQ ID NO: 111284 - protein, 7 aa, synthetic construct
AHYGGSL

SEQ ID NO: 111285 - protein, 7 aa, synthetic construct
AHYGVAV

SEQ ID NO: 111286 - protein, 7 aa, synthetic construct
AHYKPGV

SEQ ID NO: 111287 - protein, 7 aa, synthetic construct
AHYKSQF

SEQ ID NO: 111288 - protein, 7 aa, synthetic construct
AHYNTNH

SEQ ID NO: 111289 - protein, 7 aa, synthetic construct
AHYTPKT

SEQ ID NO: 111290 - protein, 7 aa, synthetic construct
AIAKPHF

SEQ ID NO: 111291 - protein, 7 aa, synthetic construct
AIDRIAR

SEQ ID NO: 111292 - protein, 7 aa, synthetic construct
AIEKPNR

SEQ ID NO: 111293 - protein, 7 aa, synthetic construct
AIGGFKN

SEQ ID NO: 111294 - protein, 7 aa, synthetic construct
AIGHRSA

SEQ ID NO: 111295 - protein, 7 aa, synthetic construct
AIGHTRS

SEQ ID NO: 111296 - protein, 7 aa, synthetic construct
AIGNSRG

SEQ ID NO: 111297 - protein, 7 aa, synthetic construct
AIGTKYL

SEQ ID NO: 111298 - protein, 7 aa, synthetic construct
AIGTTRG

SEQ ID NO: 111299 - protein, 7 aa, synthetic construct
AIHAPPR

SEQ ID NO: 111300 - protein, 7 aa, synthetic construct
AIHKQAL

SEQ ID NO: 111301 - protein, 7 aa, synthetic construct
AIHNAPK

SEQ ID NO: 111302 - protein, 7 aa, synthetic construct
AIHNAVR

SEQ ID NO: 111303 - protein, 7 aa, synthetic construct
AIHNQKA

SEQ ID NO: 111304 - protein, 7 aa, synthetic construct
AIHVRNG

SEQ ID NO: 111305 - protein, 7 aa, synthetic construct
AIISRSP

SEQ ID NO: 111306 - protein, 7 aa, synthetic construct
AIKGPER

SEQ ID NO: 111307 - protein, 7 aa, synthetic construct
AIKHNPL

SEQ ID NO: 111308 - protein, 7 aa, synthetic construct
AIKRDQV

SEQ ID NO: 111309 - protein, 7 aa, synthetic construct
AIKRDVG

SEQ ID NO: 111310 - protein, 7 aa, synthetic construct
AIKSHSY

SEQ ID NO: 111311 - protein, 7 aa, synthetic construct
AIKYPTP

SEQ ID NO: 111312 - protein, 7 aa, synthetic construct
AIKYTKD

SEQ ID NO: 111313 - protein, 7 aa, synthetic construct
AIMERPK

SEQ ID NO: 111314 - protein, 7 aa, synthetic construct
AIMHAPK

SEQ ID NO: 111315 - protein, 7 aa, synthetic construct
AIMNPKA

SEQ ID NO: 111316 - protein, 7 aa, synthetic construct
AIMTHSK

SEQ ID NO: 111317 - protein, 7 aa, synthetic construct
AINKTHY

SEQ ID NO: 111318 - protein, 7 aa, synthetic construct
AINNHGK

SEQ ID NO: 111319 - protein, 7 aa, synthetic construct
AINSRSF

SEQ ID NO: 111320 - protein, 7 aa, synthetic construct
AIPHRQV

SEQ ID NO: 111321 - protein, 7 aa, synthetic construct
AIPQHRG

SEQ ID NO: 111322 - protein, 7 aa, synthetic construct
AIPRANI

SEQ ID NO: 111323 - protein, 7 aa, synthetic construct
AIPRATQ

SEQ ID NO: 111324 - protein, 7 aa, synthetic construct
AIPRDSR

SEQ ID NO: 111325 - protein, 7 aa, synthetic construct
AIPRERA

SEQ ID NO: 111326 - protein, 7 aa, synthetic construct
AIPRKVD

SEQ ID NO: 111327 - protein, 7 aa, synthetic construct
AIPRQHS

SEQ ID NO: 111328 - protein, 7 aa, synthetic construct
AIPRSHG

SEQ ID NO: 111329 - protein, 7 aa, synthetic construct
AIPSHRG

SEQ ID NO: 111330 - protein, 7 aa, synthetic construct
AIQGPRS

SEQ ID NO: 111331 - protein, 7 aa, synthetic construct
AIQHGSR

SEQ ID NO: 111332 - protein, 7 aa, synthetic construct
AIQHNGR

SEQ ID NO: 111333 - protein, 7 aa, synthetic construct
AIQPRNT

SEQ ID NO: 111334 - protein, 7 aa, synthetic construct
AIQRGYP

SEQ ID NO: 111335 - protein, 7 aa, synthetic construct
AIREVRG

SEQ ID NO: 111336 - protein, 7 aa, synthetic construct
AIREVRN

SEQ ID NO: 111337 - protein, 7 aa, synthetic construct
AIRHQTV

SEQ ID NO: 111338 - protein, 7 aa, synthetic construct
AIRKDQT

SEQ ID NO: 111339 - protein, 7 aa, synthetic construct
AIRKPDS

SEQ ID NO: 111340 - protein, 7 aa, synthetic construct
AIRKVPD

SEQ ID NO: 111341 - protein, 7 aa, synthetic construct
AIRNDSR

SEQ ID NO: 111342 - protein, 7 aa, synthetic construct
AIRNHGA

SEQ ID NO: 111343 - protein, 7 aa, synthetic construct
AIRPTIP

SEQ ID NO: 111344 - protein, 7 aa, synthetic construct
AIRTKPD

SEQ ID NO: 111345 - protein, 7 aa, synthetic construct
AISARGL

SEQ ID NO: 111346 - protein, 7 aa, synthetic construct
AISHNSK

SEQ ID NO: 111347 - protein, 7 aa, synthetic construct
AISHPKN

SEQ ID NO: 111348 - protein, 7 aa, synthetic construct
AISKYGV

SEQ ID NO: 111349 - protein, 7 aa, synthetic construct
AISRAKE

SEQ ID NO: 111350 - protein, 7 aa, synthetic construct
AIVRTKD

SEQ ID NO: 111351 - protein, 7 aa, synthetic construct
AIYSTSH

SEQ ID NO: 111352 - protein, 7 aa, synthetic construct
AKADLSR

SEQ ID NO: 111353 - protein, 7 aa, synthetic construct
AKADRNF

SEQ ID NO: 111354 - protein, 7 aa, synthetic construct
AKAHGPL

SEQ ID NO: 111355 - protein, 7 aa, synthetic construct
AKAHGPQ

SEQ ID NO: 111356 - protein, 7 aa, synthetic construct
AKAHHTS

SEQ ID NO: 111357 - protein, 7 aa, synthetic construct
AKAHSVY

SEQ ID NO: 111358 - protein, 7 aa, synthetic construct
AKAHYIA

SEQ ID NO: 111359 - protein, 7 aa, synthetic construct
AKAKDWI

SEQ ID NO: 111360 - protein, 7 aa, synthetic construct
AKAKPDT

SEQ ID NO: 111361 - protein, 7 aa, synthetic construct
AKAMPIV

SEQ ID NO: 111362 - protein, 7 aa, synthetic construct
AKAMPPM

SEQ ID NO: 111363 - protein, 7 aa, synthetic construct
AKAMPVM

SEQ ID NO: 111364 - protein, 7 aa, synthetic construct
AKAREYV

SEQ ID NO: 111365 - protein, 7 aa, synthetic construct
AKARGTD

SEQ ID NO: 111366 - protein, 7 aa, synthetic construct
AKARPAD

SEQ ID NO: 111367 - protein, 7 aa, synthetic construct
AKARPEF

SEQ ID NO: 111368 - protein, 7 aa, synthetic construct
AKARVDT

SEQ ID NO: 111369 - protein, 7 aa, synthetic construct
AKASDRY

SEQ ID NO: 111370 - protein, 7 aa, synthetic construct
AKAVMER

SEQ ID NO: 111371 - protein, 7 aa, synthetic construct
AKAYSTQ

SEQ ID NO: 111372 - protein, 7 aa, synthetic construct
AKDATRW

SEQ ID NO: 111373 - protein, 7 aa, synthetic construct
AKDHRPS

SEQ ID NO: 111374 - protein, 7 aa, synthetic construct
AKDHRVL

SEQ ID NO: 111375 - protein, 7 aa, synthetic construct
AKDIRSY

SEQ ID NO: 111376 - protein, 7 aa, synthetic construct
AKDKPGH

SEQ ID NO: 111377 - protein, 7 aa, synthetic construct
AKDPLHR

SEQ ID NO: 111378 - protein, 7 aa, synthetic construct
AKDREAK

SEQ ID NO: 111379 - protein, 7 aa, synthetic construct
AKDVRHI

SEQ ID NO: 111380 - protein, 7 aa, synthetic construct
AKDYARG

SEQ ID NO: 111381 - protein, 7 aa, synthetic construct
AKDYLKQ

SEQ ID NO: 111382 - protein, 7 aa, synthetic construct
AKEAKDR

SEQ ID NO: 111383 - protein, 7 aa, synthetic construct
AKEAQSR

SEQ ID NO: 111384 - protein, 7 aa, synthetic construct
AKEFKSF

SEQ ID NO: 111385 - protein, 7 aa, synthetic construct
AKEHTRV

SEQ ID NO: 111386 - protein, 7 aa, synthetic construct
AKEKSHN

SEQ ID NO: 111387 - protein, 7 aa, synthetic construct
AKENFNR

SEQ ID NO: 111388 - protein, 7 aa, synthetic construct
AKENLKW

SEQ ID NO: 111389 - protein, 7 aa, synthetic construct
AKENRQV

SEQ ID NO: 111390 - protein, 7 aa, synthetic construct
AKERHFG

SEQ ID NO: 111391 - protein, 7 aa, synthetic construct
AKESRNL

SEQ ID NO: 111392 - protein, 7 aa, synthetic construct
AKETIKW

SEQ ID NO: 111393 - protein, 7 aa, synthetic construct
AKFEANR

SEQ ID NO: 111394 - protein, 7 aa, synthetic construct
AKFGHSG

SEQ ID NO: 111395 - protein, 7 aa, synthetic construct
AKFNKDF

SEQ ID NO: 111396 - protein, 7 aa, synthetic construct
AKFQVER

SEQ ID NO: 111397 - protein, 7 aa, synthetic construct
AKFRENS

SEQ ID NO: 111398 - protein, 7 aa, synthetic construct
AKFREPM

SEQ ID NO: 111399 - protein, 7 aa, synthetic construct
AKFRGDI

SEQ ID NO: 111400 - protein, 7 aa, synthetic construct
AKFTDSR

SEQ ID NO: 111401 - protein, 7 aa, synthetic construct
AKFTSNA

SEQ ID NO: 111402 - protein, 7 aa, synthetic construct
AKGADRM

SEQ ID NO: 111403 - protein, 7 aa, synthetic construct
AKGARDL

SEQ ID NO: 111404 - protein, 7 aa, synthetic construct
AKGEAVR

SEQ ID NO: 111405 - protein, 7 aa, synthetic construct
AKGENRA

SEQ ID NO: 111406 - protein, 7 aa, synthetic construct
AKGENRF

SEQ ID NO: 111407 - protein, 7 aa, synthetic construct
AKGEWKV

SEQ ID NO: 111408 - protein, 7 aa, synthetic construct
AKGFETR

SEQ ID NO: 111409 - protein, 7 aa, synthetic construct
AKGFQTQ

SEQ ID NO: 111410 - protein, 7 aa, synthetic construct
AKGGYIN

SEQ ID NO: 111411 - protein, 7 aa, synthetic construct
AKGHPGS

SEQ ID NO: 111412 - protein, 7 aa, synthetic construct
AKGIVYH

SEQ ID NO: 111413 - protein, 7 aa, synthetic construct
AKGKVDF

SEQ ID NO: 111414 - protein, 7 aa, synthetic construct
AKGLQDR

SEQ ID NO: 111415 - protein, 7 aa, synthetic construct
AKGLQHQ

SEQ ID NO: 111416 - protein, 7 aa, synthetic construct
AKGMRDM

SEQ ID NO: 111417 - protein, 7 aa, synthetic construct
AKGMYAP

SEQ ID NO: 111418 - protein, 7 aa, synthetic construct
AKGPEQR

SEQ ID NO: 111419 - protein, 7 aa, synthetic construct
AKGPMPF

SEQ ID NO: 111420 - protein, 7 aa, synthetic construct
AKGQKWE

SEQ ID NO: 111421 - protein, 7 aa, synthetic construct
AKGRAPD

SEQ ID NO: 111422 - protein, 7 aa, synthetic construct
AKGSGDK

SEQ ID NO: 111423 - protein, 7 aa, synthetic construct
AKGSHTL

SEQ ID NO: 111424 - protein, 7 aa, synthetic construct
AKGSVDR

SEQ ID NO: 111425 - protein, 7 aa, synthetic construct
AKGYITG

SEQ ID NO: 111426 - protein, 7 aa, synthetic construct
AKGYNSA

SEQ ID NO: 111427 - protein, 7 aa, synthetic construct
AKGYVKE

SEQ ID NO: 111428 - protein, 7 aa, synthetic construct
AKHAQQQ

SEQ ID NO: 111429 - protein, 7 aa, synthetic construct
AKHASNQ

SEQ ID NO: 111430 - protein, 7 aa, synthetic construct
AKHATMY

SEQ ID NO: 111431 - protein, 7 aa, synthetic construct
AKHDKMT

SEQ ID NO: 111432 - protein, 7 aa, synthetic construct
AKHDKPW

SEQ ID NO: 111433 - protein, 7 aa, synthetic construct
AKHDQKM

SEQ ID NO: 111434 - protein, 7 aa, synthetic construct
AKHDRAF

SEQ ID NO: 111435 - protein, 7 aa, synthetic construct
AKHDRGI

SEQ ID NO: 111436 - protein, 7 aa, synthetic construct
AKHEMKV

SEQ ID NO: 111437 - protein, 7 aa, synthetic construct
AKHFPAP

SEQ ID NO: 111438 - protein, 7 aa, synthetic construct
AKHGAML

SEQ ID NO: 111439 - protein, 7 aa, synthetic construct
AKHGAMQ

SEQ ID NO: 111440 - protein, 7 aa, synthetic construct
AKHGGSV

SEQ ID NO: 111441 - protein, 7 aa, synthetic construct
AKHGNLL

SEQ ID NO: 111442 - protein, 7 aa, synthetic construct
AKHGVQL

SEQ ID NO: 111443 - protein, 7 aa, synthetic construct
AKHHSQG

SEQ ID NO: 111444 - protein, 7 aa, synthetic construct
AKHIAVI

SEQ ID NO: 111445 - protein, 7 aa, synthetic construct
AKHIMNS

SEQ ID NO: 111446 - protein, 7 aa, synthetic construct
AKHITNQ

SEQ ID NO: 111447 - protein, 7 aa, synthetic construct
AKHIVQN

SEQ ID NO: 111448 - protein, 7 aa, synthetic construct
AKHKMDV

SEQ ID NO: 111449 - protein, 7 aa, synthetic construct
AKHKPDS

SEQ ID NO: 111450 - protein, 7 aa, synthetic construct
AKHLPAL

SEQ ID NO: 111451 - protein, 7 aa, synthetic construct
AKHLQGQ

SEQ ID NO: 111452 - protein, 7 aa, synthetic construct
AKHLTSA

SEQ ID NO: 111453 - protein, 7 aa, synthetic construct
AKHMDRS

SEQ ID NO: 111454 - protein, 7 aa, synthetic construct
AKHNAII

SEQ ID NO: 111455 - protein, 7 aa, synthetic construct
AKHNPGS

SEQ ID NO: 111456 - protein, 7 aa, synthetic construct
AKHNSAI

SEQ ID NO: 111457 - protein, 7 aa, synthetic construct
AKHPVSS

SEQ ID NO: 111458 - protein, 7 aa, synthetic construct
AKHQAST

SEQ ID NO: 111459 - protein, 7 aa, synthetic construct
AKHQMVM

SEQ ID NO: 111460 - protein, 7 aa, synthetic construct
AKHQNAP

SEQ ID NO: 111461 - protein, 7 aa, synthetic construct
AKHQSLQ

SEQ ID NO: 111462 - protein, 7 aa, synthetic construct
AKHQSMT

SEQ ID NO: 111463 - protein, 7 aa, synthetic construct
AKHQTYS

SEQ ID NO: 111464 - protein, 7 aa, synthetic construct
AKHSGAY

SEQ ID NO: 111465 - protein, 7 aa, synthetic construct
AKHSSIT

SEQ ID NO: 111466 - protein, 7 aa, synthetic construct
AKHTGGF

SEQ ID NO: 111467 - protein, 7 aa, synthetic construct
AKHTNQS

SEQ ID NO: 111468 - protein, 7 aa, synthetic construct
AKHTSGL

SEQ ID NO: 111469 - protein, 7 aa, synthetic construct
AKHTSTN

SEQ ID NO: 111470 - protein, 7 aa, synthetic construct
AKHTVGH

SEQ ID NO: 111471 - protein, 7 aa, synthetic construct
AKHVDKV

SEQ ID NO: 111472 - protein, 7 aa, synthetic construct
AKHVIAQ

SEQ ID NO: 111473 - protein, 7 aa, synthetic construct
AKHVSDR

SEQ ID NO: 111474 - protein, 7 aa, synthetic construct
AKHVTSQ

SEQ ID NO: 111475 - protein, 7 aa, synthetic construct
AKHWNAD

SEQ ID NO: 111476 - protein, 7 aa, synthetic construct
AKHYPTP

SEQ ID NO: 111477 - protein, 7 aa, synthetic construct
AKHYQAG

SEQ ID NO: 111478 - protein, 7 aa, synthetic construct
AKIGGLY

SEQ ID NO: 111479 - protein, 7 aa, synthetic construct
AKIGPAI

SEQ ID NO: 111480 - protein, 7 aa, synthetic construct
AKIHTPY

SEQ ID NO: 111481 - protein, 7 aa, synthetic construct
AKIMTER

SEQ ID NO: 111482 - protein, 7 aa, synthetic construct
AKIRANE

SEQ ID NO: 111483 - protein, 7 aa, synthetic construct
AKIRQDM

SEQ ID NO: 111484 - protein, 7 aa, synthetic construct
AKKGPDT

SEQ ID NO: 111485 - protein, 7 aa, synthetic construct
AKKLDVI

SEQ ID NO: 111486 - protein, 7 aa, synthetic construct
AKKQQDY

SEQ ID NO: 111487 - protein, 7 aa, synthetic construct
AKKQTDF

SEQ ID NO: 111488 - protein, 7 aa, synthetic construct
AKKYDMV

SEQ ID NO: 111489 - protein, 7 aa, synthetic construct
AKKYETA

SEQ ID NO: 111490 - protein, 7 aa, synthetic construct
AKLMGNI

SEQ ID NO: 111491 - protein, 7 aa, synthetic construct
AKLPHLA

SEQ ID NO: 111492 - protein, 7 aa, synthetic construct
AKLPPLQ

SEQ ID NO: 111493 - protein, 7 aa, synthetic construct
AKLPRNE

SEQ ID NO: 111494 - protein, 7 aa, synthetic construct
AKLRATD

SEQ ID NO: 111495 - protein, 7 aa, synthetic construct
AKLRQPE

SEQ ID NO: 111496 - protein, 7 aa, synthetic construct
AKLVHEK

SEQ ID NO: 111497 - protein, 7 aa, synthetic construct
AKLYKGE

SEQ ID NO: 111498 - protein, 7 aa, synthetic construct
AKMAYDK

SEQ ID NO: 111499 - protein, 7 aa, synthetic construct
AKMEMRV

SEQ ID NO: 111500 - protein, 7 aa, synthetic construct
AKMGLSY

SEQ ID NO: 111501 - protein, 7 aa, synthetic construct
AKMGSSY

SEQ ID NO: 111502 - protein, 7 aa, synthetic construct
AKMHQTT

SEQ ID NO: 111503 - protein, 7 aa, synthetic construct
AKMHTSM

SEQ ID NO: 111504 - protein, 7 aa, synthetic construct
AKMNHLQ

SEQ ID NO: 111505 - protein, 7 aa, synthetic construct
AKMQRSE

SEQ ID NO: 111506 - protein, 7 aa, synthetic construct
AKMQRYE

SEQ ID NO: 111507 - protein, 7 aa, synthetic construct
AKMQSVY

SEQ ID NO: 111508 - protein, 7 aa, synthetic construct
AKMRESY

SEQ ID NO: 111509 - protein, 7 aa, synthetic construct
AKMRTDI

SEQ ID NO: 111510 - protein, 7 aa, synthetic construct
AKMVDNR

SEQ ID NO: 111511 - protein, 7 aa, synthetic construct
AKMVTSY

SEQ ID NO: 111512 - protein, 7 aa, synthetic construct
AKNDSTK

SEQ ID NO: 111513 - protein, 7 aa, synthetic construct
AKNEQVR

SEQ ID NO: 111514 - protein, 7 aa, synthetic construct
AKNHSMV

SEQ ID NO: 111515 - protein, 7 aa, synthetic construct
AKNHTPN

SEQ ID NO: 111516 - protein, 7 aa, synthetic construct
AKNIPPL

SEQ ID NO: 111517 - protein, 7 aa, synthetic construct
AKNKYGD

SEQ ID NO: 111518 - protein, 7 aa, synthetic construct
AKNMPYV

SEQ ID NO: 111519 - protein, 7 aa, synthetic construct
AKNPHAI

SEQ ID NO: 111520 - protein, 7 aa, synthetic construct
AKNPQAF

SEQ ID NO: 111521 - protein, 7 aa, synthetic construct
AKNQTYM

SEQ ID NO: 111522 - protein, 7 aa, synthetic construct
AKNRDYG

SEQ ID NO: 111523 - protein, 7 aa, synthetic construct
AKNRPMD

SEQ ID NO: 111524 - protein, 7 aa, synthetic construct
AKNSEVR

SEQ ID NO: 111525 - protein, 7 aa, synthetic construct
AKNSLHL

SEQ ID NO: 111526 - protein, 7 aa, synthetic construct
AKNTPKD

SEQ ID NO: 111527 - protein, 7 aa, synthetic construct
AKNYANP

SEQ ID NO: 111528 - protein, 7 aa, synthetic construct
AKNYNTN

SEQ ID NO: 111529 - protein, 7 aa, synthetic construct
AKNYSPG

SEQ ID NO: 111530 - protein, 7 aa, synthetic construct
AKPAMII

SEQ ID NO: 111531 - protein, 7 aa, synthetic construct
AKPASMF

SEQ ID NO: 111532 - protein, 7 aa, synthetic construct
AKPDAQR

SEQ ID NO: 111533 - protein, 7 aa, synthetic construct
AKPDVGR

SEQ ID NO: 111534 - protein, 7 aa, synthetic construct
AKPDYRN

SEQ ID NO: 111535 - protein, 7 aa, synthetic construct
AKPHGFQ

SEQ ID NO: 111536 - protein, 7 aa, synthetic construct
AKPIHNA

SEQ ID NO: 111537 - protein, 7 aa, synthetic construct
AKPIMMA

SEQ ID NO: 111538 - protein, 7 aa, synthetic construct
AKPISTL

SEQ ID NO: 111539 - protein, 7 aa, synthetic construct
AKPITPH

SEQ ID NO: 111540 - protein, 7 aa, synthetic construct
AKPITYS

SEQ ID NO: 111541 - protein, 7 aa, synthetic construct
AKPLGSF

SEQ ID NO: 111542 - protein, 7 aa, synthetic construct
AKPLMKP

SEQ ID NO: 111543 - protein, 7 aa, synthetic construct
AKPLPIN

SEQ ID NO: 111544 - protein, 7 aa, synthetic construct
AKPLQSM

SEQ ID NO: 111545 - protein, 7 aa, synthetic construct
AKPPSVF

SEQ ID NO: 111546 - protein, 7 aa, synthetic construct
AKPRFGD

SEQ ID NO: 111547 - protein, 7 aa, synthetic construct
AKPSYSS

SEQ ID NO: 111548 - protein, 7 aa, synthetic construct
AKPVTHQ

SEQ ID NO: 111549 - protein, 7 aa, synthetic construct
AKPVVDR

SEQ ID NO: 111550 - protein, 7 aa, synthetic construct
AKPWRDE

SEQ ID NO: 111551 - protein, 7 aa, synthetic construct
AKPYKDS

SEQ ID NO: 111552 - protein, 7 aa, synthetic construct
AKPYMNV

SEQ ID NO: 111553 - protein, 7 aa, synthetic construct
AKPYMRE

SEQ ID NO: 111554 - protein, 7 aa, synthetic construct
AKPYPAT

SEQ ID NO: 111555 - protein, 7 aa, synthetic construct
AKPYQIN

SEQ ID NO: 111556 - protein, 7 aa, synthetic construct
AKQDMAR

SEQ ID NO: 111557 - protein, 7 aa, synthetic construct
AKQDREK

SEQ ID NO: 111558 - protein, 7 aa, synthetic construct
AKQDRYY

SEQ ID NO: 111559 - protein, 7 aa, synthetic construct
AKQDTNR

SEQ ID NO: 111560 - protein, 7 aa, synthetic construct
AKQERTV

SEQ ID NO: 111561 - protein, 7 aa, synthetic construct
AKQERVA

SEQ ID NO: 111562 - protein, 7 aa, synthetic construct
AKQFNDR

SEQ ID NO: 111563 - protein, 7 aa, synthetic construct
AKQGMVF

SEQ ID NO: 111564 - protein, 7 aa, synthetic construct
AKQGPLL

SEQ ID NO: 111565 - protein, 7 aa, synthetic construct
AKQGQLF

SEQ ID NO: 111566 - protein, 7 aa, synthetic construct
AKQHATF

SEQ ID NO: 111567 - protein, 7 aa, synthetic construct
AKQHQPM

SEQ ID NO: 111568 - protein, 7 aa, synthetic construct
AKQHSMN

SEQ ID NO: 111569 - protein, 7 aa, synthetic construct
AKQKEIL

SEQ ID NO: 111570 - protein, 7 aa, synthetic construct
AKQLREQ

SEQ ID NO: 111571 - protein, 7 aa, synthetic construct
AKQMSEK

SEQ ID NO: 111572 - protein, 7 aa, synthetic construct
AKQPANW

SEQ ID NO: 111573 - protein, 7 aa, synthetic construct
AKQQHGF

SEQ ID NO: 111574 - protein, 7 aa, synthetic construct
AKQQMQY

SEQ ID NO: 111575 - protein, 7 aa, synthetic construct
AKQQQVF

SEQ ID NO: 111576 - protein, 7 aa, synthetic construct
AKQRQDF

SEQ ID NO: 111577 - protein, 7 aa, synthetic construct
AKQRQDS

SEQ ID NO: 111578 - protein, 7 aa, synthetic construct
AKQTAYH

SEQ ID NO: 111579 - protein, 7 aa, synthetic construct
AKQTYLA

SEQ ID NO: 111580 - protein, 7 aa, synthetic construct
AKQVLPM

SEQ ID NO: 111581 - protein, 7 aa, synthetic construct
AKQYENR

SEQ ID NO: 111582 - protein, 7 aa, synthetic construct
AKRATET

SEQ ID NO: 111583 - protein, 7 aa, synthetic construct
AKRDEAR

SEQ ID NO: 111584 - protein, 7 aa, synthetic construct
AKRDLTY

SEQ ID NO: 111585 - protein, 7 aa, synthetic construct
AKRDYVG

SEQ ID NO: 111586 - protein, 7 aa, synthetic construct
AKREDSR

SEQ ID NO: 111587 - protein, 7 aa, synthetic construct
AKRELAY

SEQ ID NO: 111588 - protein, 7 aa, synthetic construct
AKRLDQV

SEQ ID NO: 111589 - protein, 7 aa, synthetic construct
AKRMEAM

SEQ ID NO: 111590 - protein, 7 aa, synthetic construct
AKRMTGE

SEQ ID NO: 111591 - protein, 7 aa, synthetic construct
AKRPPVD

SEQ ID NO: 111592 - protein, 7 aa, synthetic construct
AKRQDLT

SEQ ID NO: 111593 - protein, 7 aa, synthetic construct
AKRQELA

SEQ ID NO: 111594 - protein, 7 aa, synthetic construct
AKRQEYG

SEQ ID NO: 111595 - protein, 7 aa, synthetic construct
AKSAPTY

SEQ ID NO: 111596 - protein, 7 aa, synthetic construct
AKSDNTR

SEQ ID NO: 111597 - protein, 7 aa, synthetic construct
AKSEMNR

SEQ ID NO: 111598 - protein, 7 aa, synthetic construct
AKSHAGT

SEQ ID NO: 111599 - protein, 7 aa, synthetic construct
AKSHLPH

SEQ ID NO: 111600 - protein, 7 aa, synthetic construct
AKSHNVM

SEQ ID NO: 111601 - protein, 7 aa, synthetic construct
AKSKDAY

SEQ ID NO: 111602 - protein, 7 aa, synthetic construct
AKSMPPF

SEQ ID NO: 111603 - protein, 7 aa, synthetic construct
AKSMVPF

SEQ ID NO: 111604 - protein, 7 aa, synthetic construct
AKSPSTF

SEQ ID NO: 111605 - protein, 7 aa, synthetic construct
AKSSPYV

SEQ ID NO: 111606 - protein, 7 aa, synthetic construct
AKSSVAF

SEQ ID NO: 111607 - protein, 7 aa, synthetic construct
AKSTHSY

SEQ ID NO: 111608 - protein, 7 aa, synthetic construct
AKSVHIV

SEQ ID NO: 111609 - protein, 7 aa, synthetic construct
AKSYQVN

SEQ ID NO: 111610 - protein, 7 aa, synthetic construct
AKSYREG

SEQ ID NO: 111611 - protein, 7 aa, synthetic construct
AKTERAQ

SEQ ID NO: 111612 - protein, 7 aa, synthetic construct
AKTESAK

SEQ ID NO: 111613 - protein, 7 aa, synthetic construct
AKTGNYL

SEQ ID NO: 111614 - protein, 7 aa, synthetic construct
AKTHLVT

SEQ ID NO: 111615 - protein, 7 aa, synthetic construct
AKTKDSF

SEQ ID NO: 111616 - protein, 7 aa, synthetic construct
AKTNQFH

SEQ ID NO: 111617 - protein, 7 aa, synthetic construct
AKTNSGW

SEQ ID NO: 111618 - protein, 7 aa, synthetic construct
AKTQHPI

SEQ ID NO: 111619 - protein, 7 aa, synthetic construct
AKTREMF

SEQ ID NO: 111620 - protein, 7 aa, synthetic construct
AKTRGDG

SEQ ID NO: 111621 - protein, 7 aa, synthetic construct
AKTTQFL

SEQ ID NO: 111622 - protein, 7 aa, synthetic construct
AKTYPEK

SEQ ID NO: 111623 - protein, 7 aa, synthetic construct
AKTYQNI

SEQ ID NO: 111624 - protein, 7 aa, synthetic construct
AKTYQNM

SEQ ID NO: 111625 - protein, 7 aa, synthetic construct
AKVAHGF

SEQ ID NO: 111626 - protein, 7 aa, synthetic construct
AKVAHSY

SEQ ID NO: 111627 - protein, 7 aa, synthetic construct
AKVGPDR

SEQ ID NO: 111628 - protein, 7 aa, synthetic construct
AKVKFID

SEQ ID NO: 111629 - protein, 7 aa, synthetic construct
AKVPIVH

SEQ ID NO: 111630 - protein, 7 aa, synthetic construct
AKVQHVT

SEQ ID NO: 111631 - protein, 7 aa, synthetic construct
AKVQTIY

SEQ ID NO: 111632 - protein, 7 aa, synthetic construct
AKVREMI

SEQ ID NO: 111633 - protein, 7 aa, synthetic construct
AKVRISE

SEQ ID NO: 111634 - protein, 7 aa, synthetic construct
AKVSHPY

SEQ ID NO: 111635 - protein, 7 aa, synthetic construct
AKVSTMF

SEQ ID NO: 111636 - protein, 7 aa, synthetic construct
AKVYNIA

SEQ ID NO: 111637 - protein, 7 aa, synthetic construct
AKWKEVP

SEQ ID NO: 111638 - protein, 7 aa, synthetic construct
AKYANSM

SEQ ID NO: 111639 - protein, 7 aa, synthetic construct
AKYARQE

SEQ ID NO: 111640 - protein, 7 aa, synthetic construct
AKYASRD

SEQ ID NO: 111641 - protein, 7 aa, synthetic construct
AKYDKLN

SEQ ID NO: 111642 - protein, 7 aa, synthetic construct
AKYDQGK

SEQ ID NO: 111643 - protein, 7 aa, synthetic construct
AKYGAGA

SEQ ID NO: 111644 - protein, 7 aa, synthetic construct
AKYGDRA

SEQ ID NO: 111645 - protein, 7 aa, synthetic construct
AKYGSSN

SEQ ID NO: 111646 - protein, 7 aa, synthetic construct
AKYITQG

SEQ ID NO: 111647 - protein, 7 aa, synthetic construct
AKYKAGD

SEQ ID NO: 111648 - protein, 7 aa, synthetic construct
AKYKTDA

SEQ ID NO: 111649 - protein, 7 aa, synthetic construct
AKYLPTA

SEQ ID NO: 111650 - protein, 7 aa, synthetic construct
AKYMVQA

SEQ ID NO: 111651 - protein, 7 aa, synthetic construct
AKYNISS

SEQ ID NO: 111652 - protein, 7 aa, synthetic construct
AKYPDIK

SEQ ID NO: 111653 - protein, 7 aa, synthetic construct
AKYPLGG

SEQ ID NO: 111654 - protein, 7 aa, synthetic construct
AKYPNDR

SEQ ID NO: 111655 - protein, 7 aa, synthetic construct
AKYPSKD

SEQ ID NO: 111656 - protein, 7 aa, synthetic construct
AKYPTTT

SEQ ID NO: 111657 - protein, 7 aa, synthetic construct
AKYQVNA

SEQ ID NO: 111658 - protein, 7 aa, synthetic construct
AKYRVEP

SEQ ID NO: 111659 - protein, 7 aa, synthetic construct
AKYSGSA

SEQ ID NO: 111660 - protein, 7 aa, synthetic construct
AKYTMEK

SEQ ID NO: 111661 - protein, 7 aa, synthetic construct
AKYTVHA

SEQ ID NO: 111662 - protein, 7 aa, synthetic construct
AKYVHSP

SEQ ID NO: 111663 - protein, 7 aa, synthetic construct
AKYVNAN

SEQ ID NO: 111664 - protein, 7 aa, synthetic construct
AKYVPGA

SEQ ID NO: 111665 - protein, 7 aa, synthetic construct
AKYVPKD

SEQ ID NO: 111666 - protein, 7 aa, synthetic construct
ALARKFE

SEQ ID NO: 111667 - protein, 7 aa, synthetic construct
ALDKPRH

SEQ ID NO: 111668 - protein, 7 aa, synthetic construct
ALDQRRP

SEQ ID NO: 111669 - protein, 7 aa, synthetic construct
ALGGPKM

SEQ ID NO: 111670 - protein, 7 aa, synthetic construct
ALGHRAS

SEQ ID NO: 111671 - protein, 7 aa, synthetic construct
ALGPRLP

SEQ ID NO: 111672 - protein, 7 aa, synthetic construct
ALGYDKK

SEQ ID NO: 111673 - protein, 7 aa, synthetic construct
ALGYSPK

SEQ ID NO: 111674 - protein, 7 aa, synthetic construct
ALGYTPK

SEQ ID NO: 111675 - protein, 7 aa, synthetic construct
ALHGRVS

SEQ ID NO: 111676 - protein, 7 aa, synthetic construct
ALHGSRT

SEQ ID NO: 111677 - protein, 7 aa, synthetic construct
ALHKGAY

SEQ ID NO: 111678 - protein, 7 aa, synthetic construct
ALHKPTS

SEQ ID NO: 111679 - protein, 7 aa, synthetic construct
ALHKYSS

SEQ ID NO: 111680 - protein, 7 aa, synthetic construct
ALHMPSR

SEQ ID NO: 111681 - protein, 7 aa, synthetic construct
ALHNKHS

SEQ ID NO: 111682 - protein, 7 aa, synthetic construct
ALHNRGG

SEQ ID NO: 111683 - protein, 7 aa, synthetic construct
ALHPKSY

SEQ ID NO: 111684 - protein, 7 aa, synthetic construct
ALHRVAS

SEQ ID NO: 111685 - protein, 7 aa, synthetic construct
ALHSQRG

SEQ ID NO: 111686 - protein, 7 aa, synthetic construct
ALKDMGR

SEQ ID NO: 111687 - protein, 7 aa, synthetic construct
ALKHRME

SEQ ID NO: 111688 - protein, 7 aa, synthetic construct
ALKREPM

SEQ ID NO: 111689 - protein, 7 aa, synthetic construct
ALKTPQF

SEQ ID NO: 111690 - protein, 7 aa, synthetic construct
ALKYPAS

SEQ ID NO: 111691 - protein, 7 aa, synthetic construct
ALKYTAG

SEQ ID NO: 111692 - protein, 7 aa, synthetic construct
ALLRVQP

SEQ ID NO: 111693 - protein, 7 aa, synthetic construct
ALMKREI

SEQ ID NO: 111694 - protein, 7 aa, synthetic construct
ALMKRME

SEQ ID NO: 111695 - protein, 7 aa, synthetic construct
ALNKYSA

SEQ ID NO: 111696 - protein, 7 aa, synthetic construct
ALNNHKY

SEQ ID NO: 111697 - protein, 7 aa, synthetic construct
ALNREGR

SEQ ID NO: 111698 - protein, 7 aa, synthetic construct
ALNRMDK

SEQ ID NO: 111699 - protein, 7 aa, synthetic construct
ALNRNRE

SEQ ID NO: 111700 - protein, 7 aa, synthetic construct
ALPIIRA

SEQ ID NO: 111701 - protein, 7 aa, synthetic construct
ALPNHQR

SEQ ID NO: 111702 - protein, 7 aa, synthetic construct
ALQGRFS

SEQ ID NO: 111703 - protein, 7 aa, synthetic construct
ALQHKIN

SEQ ID NO: 111704 - protein, 7 aa, synthetic construct
ALQHPNK

SEQ ID NO: 111705 - protein, 7 aa, synthetic construct
ALQRADK

SEQ ID NO: 111706 - protein, 7 aa, synthetic construct
ALQRHSG

SEQ ID NO: 111707 - protein, 7 aa, synthetic construct
ALREVRM

SEQ ID NO: 111708 - protein, 7 aa, synthetic construct
ALRKVDT

SEQ ID NO: 111709 - protein, 7 aa, synthetic construct
ALRPYKD

SEQ ID NO: 111710 - protein, 7 aa, synthetic construct
ALSHKFA

SEQ ID NO: 111711 - protein, 7 aa, synthetic construct
ALSNHIR

SEQ ID NO: 111712 - protein, 7 aa, synthetic construct
ALTRERE

SEQ ID NO: 111713 - protein, 7 aa, synthetic construct
ALTRMHG

SEQ ID NO: 111714 - protein, 7 aa, synthetic construct
ALTRVSH

SEQ ID NO: 111715 - protein, 7 aa, synthetic construct
ALVRNNH

SEQ ID NO: 111716 - protein, 7 aa, synthetic construct
ALYGKKD

SEQ ID NO: 111717 - protein, 7 aa, synthetic construct
ALYKPMQ

SEQ ID NO: 111718 - protein, 7 aa, synthetic construct
ALYNSKN

SEQ ID NO: 111719 - protein, 7 aa, synthetic construct
ALYNTVK

SEQ ID NO: 111720 - protein, 7 aa, synthetic construct
ALYSQGH

SEQ ID NO: 111721 - protein, 7 aa, synthetic construct
ALYSQKS

SEQ ID NO: 111722 - protein, 7 aa, synthetic construct
AMAGNHK

SEQ ID NO: 111723 - protein, 7 aa, synthetic construct
AMAHGAK

SEQ ID NO: 111724 - protein, 7 aa, synthetic construct
AMAHKFS

SEQ ID NO: 111725 - protein, 7 aa, synthetic construct
AMAHVGK

SEQ ID NO: 111726 - protein, 7 aa, synthetic construct
AMANPRG

SEQ ID NO: 111727 - protein, 7 aa, synthetic construct
AMANYGK

SEQ ID NO: 111728 - protein, 7 aa, synthetic construct
AMARIPP

SEQ ID NO: 111729 - protein, 7 aa, synthetic construct
AMARLPP

SEQ ID NO: 111730 - protein, 7 aa, synthetic construct
AMDDSGT

SEQ ID NO: 111731 - protein, 7 aa, synthetic construct
AMDGGRK

SEQ ID NO: 111732 - protein, 7 aa, synthetic construct
AMDKPNK

SEQ ID NO: 111733 - protein, 7 aa, synthetic construct
AMDKSSR

SEQ ID NO: 111734 - protein, 7 aa, synthetic construct
AMERAKG

SEQ ID NO: 111735 - protein, 7 aa, synthetic construct
AMERNRT

SEQ ID NO: 111736 - protein, 7 aa, synthetic construct
AMGGKYA

SEQ ID NO: 111737 - protein, 7 aa, synthetic construct
AMGGVKQ

SEQ ID NO: 111738 - protein, 7 aa, synthetic construct
AMGHKFG

SEQ ID NO: 111739 - protein, 7 aa, synthetic construct
AMGMLRA

SEQ ID NO: 111740 - protein, 7 aa, synthetic construct
AMGRIKD

SEQ ID NO: 111741 - protein, 7 aa, synthetic construct
AMHGAGK

SEQ ID NO: 111742 - protein, 7 aa, synthetic construct
AMHGQRA

SEQ ID NO: 111743 - protein, 7 aa, synthetic construct
AMHGRQN

SEQ ID NO: 111744 - protein, 7 aa, synthetic construct
AMHGVSK

SEQ ID NO: 111745 - protein, 7 aa, synthetic construct
AMHHRGP

SEQ ID NO: 111746 - protein, 7 aa, synthetic construct
AMHKLNV

SEQ ID NO: 111747 - protein, 7 aa, synthetic construct
AMHMGKI

SEQ ID NO: 111748 - protein, 7 aa, synthetic construct
AMHNLAK

SEQ ID NO: 111749 - protein, 7 aa, synthetic construct
AMHNPKA

SEQ ID NO: 111750 - protein, 7 aa, synthetic construct
AMHNRAG

SEQ ID NO: 111751 - protein, 7 aa, synthetic construct
AMHQVAK

SEQ ID NO: 111752 - protein, 7 aa, synthetic construct
AMHVKRE

SEQ ID NO: 111753 - protein, 7 aa, synthetic construct
AMIGYKA

SEQ ID NO: 111754 - protein, 7 aa, synthetic construct
AMIHKPP

SEQ ID NO: 111755 - protein, 7 aa, synthetic construct
AMINKGY

SEQ ID NO: 111756 - protein, 7 aa, synthetic construct
AMIRNNP

SEQ ID NO: 111757 - protein, 7 aa, synthetic construct
AMKDHTR

SEQ ID NO: 111758 - protein, 7 aa, synthetic construct
AMKFNRD

SEQ ID NO: 111759 - protein, 7 aa, synthetic construct
AMKFSTA

SEQ ID NO: 111760 - protein, 7 aa, synthetic construct
AMKGKWD

SEQ ID NO: 111761 - protein, 7 aa, synthetic construct
AMKGLHM

SEQ ID NO: 111762 - protein, 7 aa, synthetic construct
AMKGQFH

SEQ ID NO: 111763 - protein, 7 aa, synthetic construct
AMKHIHG

SEQ ID NO: 111764 - protein, 7 aa, synthetic construct
AMKHVQM

SEQ ID NO: 111765 - protein, 7 aa, synthetic construct
AMKHYSG

SEQ ID NO: 111766 - protein, 7 aa, synthetic construct
AMKMHSQ

SEQ ID NO: 111767 - protein, 7 aa, synthetic construct
AMKPMNF

SEQ ID NO: 111768 - protein, 7 aa, synthetic construct
AMKQRSD

SEQ ID NO: 111769 - protein, 7 aa, synthetic construct
AMKSDGR

SEQ ID NO: 111770 - protein, 7 aa, synthetic construct
AMKTHSY

SEQ ID NO: 111771 - protein, 7 aa, synthetic construct
AMKYEKT

SEQ ID NO: 111772 - protein, 7 aa, synthetic construct
AMKYENK

SEQ ID NO: 111773 - protein, 7 aa, synthetic construct
AMKYKEM

SEQ ID NO: 111774 - protein, 7 aa, synthetic construct
AMMGRQA

SEQ ID NO: 111775 - protein, 7 aa, synthetic construct
AMMHKRE

SEQ ID NO: 111776 - protein, 7 aa, synthetic construct
AMMRNTM

SEQ ID NO: 111777 - protein, 7 aa, synthetic construct
AMMRTKD

SEQ ID NO: 111778 - protein, 7 aa, synthetic construct
AMNAHKY

SEQ ID NO: 111779 - protein, 7 aa, synthetic construct
AMNAQRY

SEQ ID NO: 111780 - protein, 7 aa, synthetic construct
AMNNHKL

SEQ ID NO: 111781 - protein, 7 aa, synthetic construct
AMNNSGR

SEQ ID NO: 111782 - protein, 7 aa, synthetic construct
AMNRNHS

SEQ ID NO: 111783 - protein, 7 aa, synthetic construct
AMNRQGF

SEQ ID NO: 111784 - protein, 7 aa, synthetic construct
AMPAKYP

SEQ ID NO: 111785 - protein, 7 aa, synthetic construct
AMPGQRG

SEQ ID NO: 111786 - protein, 7 aa, synthetic construct
AMPHIRA

SEQ ID NO: 111787 - protein, 7 aa, synthetic construct
AMPIRGS

SEQ ID NO: 111788 - protein, 7 aa, synthetic construct
AMPNRER

SEQ ID NO: 111789 - protein, 7 aa, synthetic construct
AMPREAR

SEQ ID NO: 111790 - protein, 7 aa, synthetic construct
AMPREFK

SEQ ID NO: 111791 - protein, 7 aa, synthetic construct
AMPRLHP

SEQ ID NO: 111792 - protein, 7 aa, synthetic construct
AMQGIRQ

SEQ ID NO: 111793 - protein, 7 aa, synthetic construct
AMQHGQK

SEQ ID NO: 111794 - protein, 7 aa, synthetic construct
AMQHIRP

SEQ ID NO: 111795 - protein, 7 aa, synthetic construct
AMQKDRY

SEQ ID NO: 111796 - protein, 7 aa, synthetic construct
AMQQKQH

SEQ ID NO: 111797 - protein, 7 aa, synthetic construct
AMQRANV

SEQ ID NO: 111798 - protein, 7 aa, synthetic construct
AMQRGRD

SEQ ID NO: 111799 - protein, 7 aa, synthetic construct
AMQRMGV

SEQ ID NO: 111800 - protein, 7 aa, synthetic construct
AMRDAPR

SEQ ID NO: 111801 - protein, 7 aa, synthetic construct
AMRDIAK

SEQ ID NO: 111802 - protein, 7 aa, synthetic construct
AMRDLPK

SEQ ID NO: 111803 - protein, 7 aa, synthetic construct
AMRDQNK

SEQ ID NO: 111804 - protein, 7 aa, synthetic construct
AMRELAR

SEQ ID NO: 111805 - protein, 7 aa, synthetic construct
AMRGDNR

SEQ ID NO: 111806 - protein, 7 aa, synthetic construct
AMRKLND

SEQ ID NO: 111807 - protein, 7 aa, synthetic construct
AMRKLQE

SEQ ID NO: 111808 - protein, 7 aa, synthetic construct
AMRKMQE

SEQ ID NO: 111809 - protein, 7 aa, synthetic construct
AMRNAVL

SEQ ID NO: 111810 - protein, 7 aa, synthetic construct
AMRNGYI

SEQ ID NO: 111811 - protein, 7 aa, synthetic construct
AMRNNIM

SEQ ID NO: 111812 - protein, 7 aa, synthetic construct
AMRPIPQ

SEQ ID NO: 111813 - protein, 7 aa, synthetic construct
AMRPSPM

SEQ ID NO: 111814 - protein, 7 aa, synthetic construct
AMRPVPS

SEQ ID NO: 111815 - protein, 7 aa, synthetic construct
AMRPVTT

SEQ ID NO: 111816 - protein, 7 aa, synthetic construct
AMRTPIS

SEQ ID NO: 111817 - protein, 7 aa, synthetic construct
AMSAQHR

SEQ ID NO: 111818 - protein, 7 aa, synthetic construct
AMSDGFH

SEQ ID NO: 111819 - protein, 7 aa, synthetic construct
AMSDRTR

SEQ ID NO: 111820 - protein, 7 aa, synthetic construct
AMSGKYS

SEQ ID NO: 111821 - protein, 7 aa, synthetic construct
AMSHVSR

SEQ ID NO: 111822 - protein, 7 aa, synthetic construct
AMSKERY

SEQ ID NO: 111823 - protein, 7 aa, synthetic construct
AMSKPYT

SEQ ID NO: 111824 - protein, 7 aa, synthetic construct
AMSKYGV

SEQ ID NO: 111825 - protein, 7 aa, synthetic construct
AMSNVPR

SEQ ID NO: 111826 - protein, 7 aa, synthetic construct
AMSRHTG

SEQ ID NO: 111827 - protein, 7 aa, synthetic construct
AMSSYPR

SEQ ID NO: 111828 - protein, 7 aa, synthetic construct
AMTAPAR

SEQ ID NO: 111829 - protein, 7 aa, synthetic construct
AMTMHGK

SEQ ID NO: 111830 - protein, 7 aa, synthetic construct
AMTPRHG

SEQ ID NO: 111831 - protein, 7 aa, synthetic construct
AMTQYSK

SEQ ID NO: 111832 - protein, 7 aa, synthetic construct
AMTRPNL

SEQ ID NO: 111833 - protein, 7 aa, synthetic construct
AMTRPQM

SEQ ID NO: 111834 - protein, 7 aa, synthetic construct
AMTRRPE

SEQ ID NO: 111835 - protein, 7 aa, synthetic construct
AMTVHAR

SEQ ID NO: 111836 - protein, 7 aa, synthetic construct
AMVSKPY

SEQ ID NO: 111837 - protein, 7 aa, synthetic construct
ANAARAQ

SEQ ID NO: 111838 - protein, 7 aa, synthetic construct
ANAARQH

SEQ ID NO: 111839 - protein, 7 aa, synthetic construct
ANAFVVP

SEQ ID NO: 111840 - protein, 7 aa, synthetic construct
ANAHQKF

SEQ ID NO: 111841 - protein, 7 aa, synthetic construct
ANAHVVR

SEQ ID NO: 111842 - protein, 7 aa, synthetic construct
ANAPRGM

SEQ ID NO: 111843 - protein, 7 aa, synthetic construct
ANAQARQ

SEQ ID NO: 111844 - protein, 7 aa, synthetic construct
ANARIAH

SEQ ID NO: 111845 - protein, 7 aa, synthetic construct
ANASMRY

SEQ ID NO: 111846 - protein, 7 aa, synthetic construct
ANATAAK

SEQ ID NO: 111847 - protein, 7 aa, synthetic construct
ANATLHR

SEQ ID NO: 111848 - protein, 7 aa, synthetic construct
ANDGFKR

SEQ ID NO: 111849 - protein, 7 aa, synthetic construct
ANDGMRK

SEQ ID NO: 111850 - protein, 7 aa, synthetic construct
ANDIHYR

SEQ ID NO: 111851 - protein, 7 aa, synthetic construct
ANDIKHK

SEQ ID NO: 111852 - protein, 7 aa, synthetic construct
ANDNTRK

SEQ ID NO: 111853 - protein, 7 aa, synthetic construct
ANDRPMK

SEQ ID NO: 111854 - protein, 7 aa, synthetic construct
ANDVKRN

SEQ ID NO: 111855 - protein, 7 aa, synthetic construct
ANELRKQ

SEQ ID NO: 111856 - protein, 7 aa, synthetic construct
ANERLGR

SEQ ID NO: 111857 - protein, 7 aa, synthetic construct
ANERTLK

SEQ ID NO: 111858 - protein, 7 aa, synthetic construct
ANFAPGR

SEQ ID NO: 111859 - protein, 7 aa, synthetic construct
ANFKHET

SEQ ID NO: 111860 - protein, 7 aa, synthetic construct
ANFQPPR

SEQ ID NO: 111861 - protein, 7 aa, synthetic construct
ANGAHRT

SEQ ID NO: 111862 - protein, 7 aa, synthetic construct
ANGDRVR

SEQ ID NO: 111863 - protein, 7 aa, synthetic construct
ANGFQNR

SEQ ID NO: 111864 - protein, 7 aa, synthetic construct
ANGGPRF

SEQ ID NO: 111865 - protein, 7 aa, synthetic construct
ANGGYSK

SEQ ID NO: 111866 - protein, 7 aa, synthetic construct
ANGHNKF

SEQ ID NO: 111867 - protein, 7 aa, synthetic construct
ANGHYKI

SEQ ID NO: 111868 - protein, 7 aa, synthetic construct
ANGKPFL

SEQ ID NO: 111869 - protein, 7 aa, synthetic construct
ANGLKNW

SEQ ID NO: 111870 - protein, 7 aa, synthetic construct
ANGNSFR

SEQ ID NO: 111871 - protein, 7 aa, synthetic construct
ANGYIGK

SEQ ID NO: 111872 - protein, 7 aa, synthetic construct
ANGYKQQ

SEQ ID NO: 111873 - protein, 7 aa, synthetic construct
ANHAASK

SEQ ID NO: 111874 - protein, 7 aa, synthetic construct
ANHATRS

SEQ ID NO: 111875 - protein, 7 aa, synthetic construct
ANHFKNP

SEQ ID NO: 111876 - protein, 7 aa, synthetic construct
ANHGKQQ

SEQ ID NO: 111877 - protein, 7 aa, synthetic construct
ANHGQRL

SEQ ID NO: 111878 - protein, 7 aa, synthetic construct
ANHGTMK

SEQ ID NO: 111879 - protein, 7 aa, synthetic construct
ANHKSYY

SEQ ID NO: 111880 - protein, 7 aa, synthetic construct
ANHMKSL

SEQ ID NO: 111881 - protein, 7 aa, synthetic construct
ANHPNQR

SEQ ID NO: 111882 - protein, 7 aa, synthetic construct
ANHPVPR

SEQ ID NO: 111883 - protein, 7 aa, synthetic construct
ANHQIRV

SEQ ID NO: 111884 - protein, 7 aa, synthetic construct
ANHQKLL

SEQ ID NO: 111885 - protein, 7 aa, synthetic construct
ANHQNRE

SEQ ID NO: 111886 - protein, 7 aa, synthetic construct
ANHSPRT

SEQ ID NO: 111887 - protein, 7 aa, synthetic construct
ANHSQRM

SEQ ID NO: 111888 - protein, 7 aa, synthetic construct
ANHTNRM

SEQ ID NO: 111889 - protein, 7 aa, synthetic construct
ANHTRSV

SEQ ID NO: 111890 - protein, 7 aa, synthetic construct
ANHVRPT

SEQ ID NO: 111891 - protein, 7 aa, synthetic construct
ANIGHRG

SEQ ID NO: 111892 - protein, 7 aa, synthetic construct
ANIHTKY

SEQ ID NO: 111893 - protein, 7 aa, synthetic construct
ANIKQAY

SEQ ID NO: 111894 - protein, 7 aa, synthetic construct
ANIRANT

SEQ ID NO: 111895 - protein, 7 aa, synthetic construct
ANIRSGL

SEQ ID NO: 111896 - protein, 7 aa, synthetic construct
ANIRTNQ

SEQ ID NO: 111897 - protein, 7 aa, synthetic construct
ANITKQM

SEQ ID NO: 111898 - protein, 7 aa, synthetic construct
ANKDAMR

SEQ ID NO: 111899 - protein, 7 aa, synthetic construct
ANKERIL

SEQ ID NO: 111900 - protein, 7 aa, synthetic construct
ANKGQVW

SEQ ID NO: 111901 - protein, 7 aa, synthetic construct
ANKHALI

SEQ ID NO: 111902 - protein, 7 aa, synthetic construct
ANKHVTQ

SEQ ID NO: 111903 - protein, 7 aa, synthetic construct
ANKIYAG

SEQ ID NO: 111904 - protein, 7 aa, synthetic construct
ANKLNPL

SEQ ID NO: 111905 - protein, 7 aa, synthetic construct
ANKMQSY

SEQ ID NO: 111906 - protein, 7 aa, synthetic construct
ANKNTYL

SEQ ID NO: 111907 - protein, 7 aa, synthetic construct
ANKPEKW

SEQ ID NO: 111908 - protein, 7 aa, synthetic construct
ANKPTAF

SEQ ID NO: 111909 - protein, 7 aa, synthetic construct
ANKQAIY

SEQ ID NO: 111910 - protein, 7 aa, synthetic construct
ANKQYGH

SEQ ID NO: 111911 - protein, 7 aa, synthetic construct
ANKSDRM

SEQ ID NO: 111912 - protein, 7 aa, synthetic construct
ANKTDNR

SEQ ID NO: 111913 - protein, 7 aa, synthetic construct
ANKVAVF

SEQ ID NO: 111914 - protein, 7 aa, synthetic construct
ANKVRDL

SEQ ID NO: 111915 - protein, 7 aa, synthetic construct
ANKYSTG

SEQ ID NO: 111916 - protein, 7 aa, synthetic construct
ANLERQK

SEQ ID NO: 111917 - protein, 7 aa, synthetic construct
ANLHQTK

SEQ ID NO: 111918 - protein, 7 aa, synthetic construct
ANLNRSL

SEQ ID NO: 111919 - protein, 7 aa, synthetic construct
ANLRTMH

SEQ ID NO: 111920 - protein, 7 aa, synthetic construct
ANLSQRM

SEQ ID NO: 111921 - protein, 7 aa, synthetic construct
ANMAARQ

SEQ ID NO: 111922 - protein, 7 aa, synthetic construct
ANMAGKW

SEQ ID NO: 111923 - protein, 7 aa, synthetic construct
ANMARST

SEQ ID NO: 111924 - protein, 7 aa, synthetic construct
ANMGNGR

SEQ ID NO: 111925 - protein, 7 aa, synthetic construct
ANMGQRM

SEQ ID NO: 111926 - protein, 7 aa, synthetic construct
ANMGREK

SEQ ID NO: 111927 - protein, 7 aa, synthetic construct
ANMPIKF

SEQ ID NO: 111928 - protein, 7 aa, synthetic construct
ANMRMTT

SEQ ID NO: 111929 - protein, 7 aa, synthetic construct
ANMRQNI

SEQ ID NO: 111930 - protein, 7 aa, synthetic construct
ANMSGRM

SEQ ID NO: 111931 - protein, 7 aa, synthetic construct
ANMSHAK

SEQ ID NO: 111932 - protein, 7 aa, synthetic construct
ANMTARA

SEQ ID NO: 111933 - protein, 7 aa, synthetic construct
ANMTARN

SEQ ID NO: 111934 - protein, 7 aa, synthetic construct
ANMTKYS

SEQ ID NO: 111935 - protein, 7 aa, synthetic construct
ANMTRNH

SEQ ID NO: 111936 - protein, 7 aa, synthetic construct
ANMVRIV

SEQ ID NO: 111937 - protein, 7 aa, synthetic construct
ANNDTKR

SEQ ID NO: 111938 - protein, 7 aa, synthetic construct
ANNHYLK

SEQ ID NO: 111939 - protein, 7 aa, synthetic construct
ANNIRLH

SEQ ID NO: 111940 - protein, 7 aa, synthetic construct
ANNITKW

SEQ ID NO: 111941 - protein, 7 aa, synthetic construct
ANNMQMR

SEQ ID NO: 111942 - protein, 7 aa, synthetic construct
ANNMTRM

SEQ ID NO: 111943 - protein, 7 aa, synthetic construct
ANNNMIR

SEQ ID NO: 111944 - protein, 7 aa, synthetic construct
ANNSRQL

SEQ ID NO: 111945 - protein, 7 aa, synthetic construct
ANNTHQR

SEQ ID NO: 111946 - protein, 7 aa, synthetic construct
ANNVRAM

SEQ ID NO: 111947 - protein, 7 aa, synthetic construct
ANNYTAK

SEQ ID NO: 111948 - protein, 7 aa, synthetic construct
ANPDTRK

SEQ ID NO: 111949 - protein, 7 aa, synthetic construct
ANPEAKK

SEQ ID NO: 111950 - protein, 7 aa, synthetic construct
ANPGDRK

SEQ ID NO: 111951 - protein, 7 aa, synthetic construct
ANPQNRY

SEQ ID NO: 111952 - protein, 7 aa, synthetic construct
ANPQTAR

SEQ ID NO: 111953 - protein, 7 aa, synthetic construct
ANPRHSS

SEQ ID NO: 111954 - protein, 7 aa, synthetic construct
ANPRQVY

SEQ ID NO: 111955 - protein, 7 aa, synthetic construct
ANPTQRY

SEQ ID NO: 111956 - protein, 7 aa, synthetic construct
ANQAAVR

SEQ ID NO: 111957 - protein, 7 aa, synthetic construct
ANQAKDR

SEQ ID NO: 111958 - protein, 7 aa, synthetic construct
ANQGGMR

SEQ ID NO: 111959 - protein, 7 aa, synthetic construct
ANQGYKS

SEQ ID NO: 111960 - protein, 7 aa, synthetic construct
ANQINRQ

SEQ ID NO: 111961 - protein, 7 aa, synthetic construct
ANQIRGQ

SEQ ID NO: 111962 - protein, 7 aa, synthetic construct
ANQKPSY

SEQ ID NO: 111963 - protein, 7 aa, synthetic construct
ANQKRDS

SEQ ID NO: 111964 - protein, 7 aa, synthetic construct
ANQLRIV

SEQ ID NO: 111965 - protein, 7 aa, synthetic construct
ANQLYGK

SEQ ID NO: 111966 - protein, 7 aa, synthetic construct
ANQMRTM

SEQ ID NO: 111967 - protein, 7 aa, synthetic construct
ANQNAVR

SEQ ID NO: 111968 - protein, 7 aa, synthetic construct
ANQPQRF

SEQ ID NO: 111969 - protein, 7 aa, synthetic construct
ANQPTRM

SEQ ID NO: 111970 - protein, 7 aa, synthetic construct
ANQQYIK

SEQ ID NO: 111971 - protein, 7 aa, synthetic construct
ANQRPAW

SEQ ID NO: 111972 - protein, 7 aa, synthetic construct
ANQSAVR

SEQ ID NO: 111973 - protein, 7 aa, synthetic construct
ANQSRST

SEQ ID NO: 111974 - protein, 7 aa, synthetic construct
ANQTLRM

SEQ ID NO: 111975 - protein, 7 aa, synthetic construct
ANQTRAN

SEQ ID NO: 111976 - protein, 7 aa, synthetic construct
ANRAQFV

SEQ ID NO: 111977 - protein, 7 aa, synthetic construct
ANRGEKG

SEQ ID NO: 111978 - protein, 7 aa, synthetic construct
ANRGHYV

SEQ ID NO: 111979 - protein, 7 aa, synthetic construct
ANRHLGA

SEQ ID NO: 111980 - protein, 7 aa, synthetic construct
ANRHVGP

SEQ ID NO: 111981 - protein, 7 aa, synthetic construct
ANRINEK

SEQ ID NO: 111982 - protein, 7 aa, synthetic construct
ANRITPT

SEQ ID NO: 111983 - protein, 7 aa, synthetic construct
ANRLEGK

SEQ ID NO: 111984 - protein, 7 aa, synthetic construct
ANRLENR

SEQ ID NO: 111985 - protein, 7 aa, synthetic construct
ANRLIKD

SEQ ID NO: 111986 - protein, 7 aa, synthetic construct
ANRMKDF

SEQ ID NO: 111987 - protein, 7 aa, synthetic construct
ANRNMSH

SEQ ID NO: 111988 - protein, 7 aa, synthetic construct
ANRNVKD

SEQ ID NO: 111989 - protein, 7 aa, synthetic construct
ANRPNIH

SEQ ID NO: 111990 - protein, 7 aa, synthetic construct
ANRQQNI

SEQ ID NO: 111991 - protein, 7 aa, synthetic construct
ANRSQAH

SEQ ID NO: 111992 - protein, 7 aa, synthetic construct
ANRVKVD

SEQ ID NO: 111993 - protein, 7 aa, synthetic construct
ANRVMER

SEQ ID NO: 111994 - protein, 7 aa, synthetic construct
ANSGWDK

SEQ ID NO: 111995 - protein, 7 aa, synthetic construct
ANSKIER

SEQ ID NO: 111996 - protein, 7 aa, synthetic construct
ANSNAYK

SEQ ID NO: 111997 - protein, 7 aa, synthetic construct
ANSPARY

SEQ ID NO: 111998 - protein, 7 aa, synthetic construct
ANSPRAT

SEQ ID NO: 111999 - protein, 7 aa, synthetic construct
ANSQPRN

SEQ ID NO: 112000 - protein, 7 aa, synthetic construct
ANSQRFV

SEQ ID NO: 112001 - protein, 7 aa, synthetic construct
ANSQRNL

SEQ ID NO: 112002 - protein, 7 aa, synthetic construct
ANSTQKW

SEQ ID NO: 112003 - protein, 7 aa, synthetic construct
ANSVHPK

SEQ ID NO: 112004 - protein, 7 aa, synthetic construct
ANSVRNT

SEQ ID NO: 112005 - protein, 7 aa, synthetic construct
ANSYPKQ

SEQ ID NO: 112006 - protein, 7 aa, synthetic construct
ANTGHRV

SEQ ID NO: 112007 - protein, 7 aa, synthetic construct
ANTHPPK

SEQ ID NO: 112008 - protein, 7 aa, synthetic construct
ANTHSPK

SEQ ID NO: 112009 - protein, 7 aa, synthetic construct
ANTQHRV

SEQ ID NO: 112010 - protein, 7 aa, synthetic construct
ANTRHTA

SEQ ID NO: 112011 - protein, 7 aa, synthetic construct
ANTRPTY

SEQ ID NO: 112012 - protein, 7 aa, synthetic construct
ANTTHNR

SEQ ID NO: 112013 - protein, 7 aa, synthetic construct
ANTTRIH

SEQ ID NO: 112014 - protein, 7 aa, synthetic construct
ANVHRMA

SEQ ID NO: 112015 - protein, 7 aa, synthetic construct
ANVKYGT

SEQ ID NO: 112016 - protein, 7 aa, synthetic construct
ANVMRTT

SEQ ID NO: 112017 - protein, 7 aa, synthetic construct
ANVNKMY

SEQ ID NO: 112018 - protein, 7 aa, synthetic construct
ANVNLGR

SEQ ID NO: 112019 - protein, 7 aa, synthetic construct
ANVRASI

SEQ ID NO: 112020 - protein, 7 aa, synthetic construct
ANVREKL

SEQ ID NO: 112021 - protein, 7 aa, synthetic construct
ANVRIGH

SEQ ID NO: 112022 - protein, 7 aa, synthetic construct
ANVSNHR

SEQ ID NO: 112023 - protein, 7 aa, synthetic construct
ANVSRGV

SEQ ID NO: 112024 - protein, 7 aa, synthetic construct
ANVTRPF

SEQ ID NO: 112025 - protein, 7 aa, synthetic construct
ANVYKQT

SEQ ID NO: 112026 - protein, 7 aa, synthetic construct
ANVYNKA

SEQ ID NO: 112027 - protein, 7 aa, synthetic construct
ANYAGPK

SEQ ID NO: 112028 - protein, 7 aa, synthetic construct
ANYAKQM

SEQ ID NO: 112029 - protein, 7 aa, synthetic construct
ANYGSGM

SEQ ID NO: 112030 - protein, 7 aa, synthetic construct
ANYGVVK

SEQ ID NO: 112031 - protein, 7 aa, synthetic construct
ANYKTKD

SEQ ID NO: 112032 - protein, 7 aa, synthetic construct
ANYLPGD

SEQ ID NO: 112033 - protein, 7 aa, synthetic construct
ANYPMGH

SEQ ID NO: 112034 - protein, 7 aa, synthetic construct
ANYPVAK

SEQ ID NO: 112035 - protein, 7 aa, synthetic construct
ANYQPKD

SEQ ID NO: 112036 - protein, 7 aa, synthetic construct
ANYRGMG

SEQ ID NO: 112037 - protein, 7 aa, synthetic construct
ANYTISK

SEQ ID NO: 112038 - protein, 7 aa, synthetic construct
ANYVANK

SEQ ID NO: 112039 - protein, 7 aa, synthetic construct
ANYVKGQ

SEQ ID NO: 112040 - protein, 7 aa, synthetic construct
APAHKSM

SEQ ID NO: 112041 - protein, 7 aa, synthetic construct
APAHSRV

SEQ ID NO: 112042 - protein, 7 aa, synthetic construct
APAKHHV

SEQ ID NO: 112043 - protein, 7 aa, synthetic construct
APAQYKQ

SEQ ID NO: 112044 - protein, 7 aa, synthetic construct
APARDLR

SEQ ID NO: 112045 - protein, 7 aa, synthetic construct
APARQRE

SEQ ID NO: 112046 - protein, 7 aa, synthetic construct
APDIKRN

SEQ ID NO: 112047 - protein, 7 aa, synthetic construct
APDKKLW

SEQ ID NO: 112048 - protein, 7 aa, synthetic construct
APDRVRL

SEQ ID NO: 112049 - protein, 7 aa, synthetic construct
APDTRIR

SEQ ID NO: 112050 - protein, 7 aa, synthetic construct
APEQGRK

SEQ ID NO: 112051 - protein, 7 aa, synthetic construct
APERMPR

SEQ ID NO: 112052 - protein, 7 aa, synthetic construct
APGARKE

SEQ ID NO: 112053 - protein, 7 aa, synthetic construct
APGARLM

SEQ ID NO: 112054 - protein, 7 aa, synthetic construct
APGFTKN

SEQ ID NO: 112055 - protein, 7 aa, synthetic construct
APGGKYY

SEQ ID NO: 112056 - protein, 7 aa, synthetic construct
APGKFHG

SEQ ID NO: 112057 - protein, 7 aa, synthetic construct
APGNQGR

SEQ ID NO: 112058 - protein, 7 aa, synthetic construct
APGRKLE

SEQ ID NO: 112059 - protein, 7 aa, synthetic construct
APGRTYV

SEQ ID NO: 112060 - protein, 7 aa, synthetic construct
APGSKYV

SEQ ID NO: 112061 - protein, 7 aa, synthetic construct
APHAQFK

SEQ ID NO: 112062 - protein, 7 aa, synthetic construct
APHGNNR

SEQ ID NO: 112063 - protein, 7 aa, synthetic construct
APHGYKA

SEQ ID NO: 112064 - protein, 7 aa, synthetic construct
APHKAMM

SEQ ID NO: 112065 - protein, 7 aa, synthetic construct
APHKDQR

SEQ ID NO: 112066 - protein, 7 aa, synthetic construct
APHKIDR

SEQ ID NO: 112067 - protein, 7 aa, synthetic construct
APHKLVS

SEQ ID NO: 112068 - protein, 7 aa, synthetic construct
APHKPAV

SEQ ID NO: 112069 - protein, 7 aa, synthetic construct
APHKSFS

SEQ ID NO: 112070 - protein, 7 aa, synthetic construct
APHKTPV

SEQ ID NO: 112071 - protein, 7 aa, synthetic construct
APHKTPY

SEQ ID NO: 112072 - protein, 7 aa, synthetic construct
APHMSKM

SEQ ID NO: 112073 - protein, 7 aa, synthetic construct
APHNRTG

SEQ ID NO: 112074 - protein, 7 aa, synthetic construct
APHQAAR

SEQ ID NO: 112075 - protein, 7 aa, synthetic construct
APHRPGN

SEQ ID NO: 112076 - protein, 7 aa, synthetic construct
APHRTGV

SEQ ID NO: 112077 - protein, 7 aa, synthetic construct
APHVKNF

SEQ ID NO: 112078 - protein, 7 aa, synthetic construct
APINRAM

SEQ ID NO: 112079 - protein, 7 aa, synthetic construct
APIPRKE

SEQ ID NO: 112080 - protein, 7 aa, synthetic construct
APIQRTM

SEQ ID NO: 112081 - protein, 7 aa, synthetic construct
APKGDHK

SEQ ID NO: 112082 - protein, 7 aa, synthetic construct
APKHESR

SEQ ID NO: 112083 - protein, 7 aa, synthetic construct
APKMGYT

SEQ ID NO: 112084 - protein, 7 aa, synthetic construct
APKNYHG

SEQ ID NO: 112085 - protein, 7 aa, synthetic construct
APKPIAY

SEQ ID NO: 112086 - protein, 7 aa, synthetic construct
APKPMSM

SEQ ID NO: 112087 - protein, 7 aa, synthetic construct
APKPRLE

SEQ ID NO: 112088 - protein, 7 aa, synthetic construct
APKSFRE

SEQ ID NO: 112089 - protein, 7 aa, synthetic construct
APKTTSY

SEQ ID NO: 112090 - protein, 7 aa, synthetic construct
APKTYKD

SEQ ID NO: 112091 - protein, 7 aa, synthetic construct
APKYGTL

SEQ ID NO: 112092 - protein, 7 aa, synthetic construct
APKYIPQ

SEQ ID NO: 112093 - protein, 7 aa, synthetic construct
APKYVVG

SEQ ID NO: 112094 - protein, 7 aa, synthetic construct
APLRSGL

SEQ ID NO: 112095 - protein, 7 aa, synthetic construct
APMQKHF

SEQ ID NO: 112096 - protein, 7 aa, synthetic construct
APNGHRV

SEQ ID NO: 112097 - protein, 7 aa, synthetic construct
APNGRYV

SEQ ID NO: 112098 - protein, 7 aa, synthetic construct
APNHRGP

SEQ ID NO: 112099 - protein, 7 aa, synthetic construct
APNHSYK

SEQ ID NO: 112100 - protein, 7 aa, synthetic construct
APNKPDR

SEQ ID NO: 112101 - protein, 7 aa, synthetic construct
APNLRDR

SEQ ID NO: 112102 - protein, 7 aa, synthetic construct
APNRQTF

SEQ ID NO: 112103 - protein, 7 aa, synthetic construct
APNRTPL

SEQ ID NO: 112104 - protein, 7 aa, synthetic construct
APNYIAK

SEQ ID NO: 112105 - protein, 7 aa, synthetic construct
APPKPLP

SEQ ID NO: 112106 - protein, 7 aa, synthetic construct
APPRMTM

SEQ ID NO: 112107 - protein, 7 aa, synthetic construct
APPTRAY

SEQ ID NO: 112108 - protein, 7 aa, synthetic construct
APPVRPS

SEQ ID NO: 112109 - protein, 7 aa, synthetic construct
APPYPSR

SEQ ID NO: 112110 - protein, 7 aa, synthetic construct
APQGRMM

SEQ ID NO: 112111 - protein, 7 aa, synthetic construct
APQHKLV

SEQ ID NO: 112112 - protein, 7 aa, synthetic construct
APQKRME

SEQ ID NO: 112113 - protein, 7 aa, synthetic construct
APQMRQL

SEQ ID NO: 112114 - protein, 7 aa, synthetic construct
APQNKYG

SEQ ID NO: 112115 - protein, 7 aa, synthetic construct
APQRIGM

SEQ ID NO: 112116 - protein, 7 aa, synthetic construct
APQRLHA

SEQ ID NO: 112117 - protein, 7 aa, synthetic construct
APQRPGY

SEQ ID NO: 112118 - protein, 7 aa, synthetic construct
APQTHIR

SEQ ID NO: 112119 - protein, 7 aa, synthetic construct
APQVRDK

SEQ ID NO: 112120 - protein, 7 aa, synthetic construct
APRAAHV

SEQ ID NO: 112121 - protein, 7 aa, synthetic construct
APRDVGK

SEQ ID NO: 112122 - protein, 7 aa, synthetic construct
APREQNR

SEQ ID NO: 112123 - protein, 7 aa, synthetic construct
APRGAHN

SEQ ID NO: 112124 - protein, 7 aa, synthetic construct
APRGPIM

SEQ ID NO: 112125 - protein, 7 aa, synthetic construct
APRHISA

SEQ ID NO: 112126 - protein, 7 aa, synthetic construct
APRHSVV

SEQ ID NO: 112127 - protein, 7 aa, synthetic construct
APRHTQI

SEQ ID NO: 112128 - protein, 7 aa, synthetic construct
APRIHQA

SEQ ID NO: 112129 - protein, 7 aa, synthetic construct
APRKMMD

SEQ ID NO: 112130 - protein, 7 aa, synthetic construct
APRMAQV

SEQ ID NO: 112131 - protein, 7 aa, synthetic construct
APRNDIR

SEQ ID NO: 112132 - protein, 7 aa, synthetic construct
APRNMVM

SEQ ID NO: 112133 - protein, 7 aa, synthetic construct
APRNPVY

SEQ ID NO: 112134 - protein, 7 aa, synthetic construct
APRPMAQ

SEQ ID NO: 112135 - protein, 7 aa, synthetic construct
APRSESK

SEQ ID NO: 112136 - protein, 7 aa, synthetic construct
APRSHTV

SEQ ID NO: 112137 - protein, 7 aa, synthetic construct
APSARFG

SEQ ID NO: 112138 - protein, 7 aa, synthetic construct
APSARGF

SEQ ID NO: 112139 - protein, 7 aa, synthetic construct
APSGKFH

SEQ ID NO: 112140 - protein, 7 aa, synthetic construct
APSGRFS

SEQ ID NO: 112141 - protein, 7 aa, synthetic construct
APSKVGY

SEQ ID NO: 112142 - protein, 7 aa, synthetic construct
APSKVMH

SEQ ID NO: 112143 - protein, 7 aa, synthetic construct
APSSKFI

SEQ ID NO: 112144 - protein, 7 aa, synthetic construct
APTNPSR

SEQ ID NO: 112145 - protein, 7 aa, synthetic construct
APTRNSF

SEQ ID NO: 112146 - protein, 7 aa, synthetic construct
APTSKTW

SEQ ID NO: 112147 - protein, 7 aa, synthetic construct
APTTHQR

SEQ ID NO: 112148 - protein, 7 aa, synthetic construct
APTYSNK

SEQ ID NO: 112149 - protein, 7 aa, synthetic construct
APVKRPD

SEQ ID NO: 112150 - protein, 7 aa, synthetic construct
APVQTHR

SEQ ID NO: 112151 - protein, 7 aa, synthetic construct
APVRHGS

SEQ ID NO: 112152 - protein, 7 aa, synthetic construct
APVRPHA

SEQ ID NO: 112153 - protein, 7 aa, synthetic construct
APVRSPP

SEQ ID NO: 112154 - protein, 7 aa, synthetic construct
APYHAHS

SEQ ID NO: 112155 - protein, 7 aa, synthetic construct
APYHTKA

SEQ ID NO: 112156 - protein, 7 aa, synthetic construct
APYITKA

SEQ ID NO: 112157 - protein, 7 aa, synthetic construct
AQAANRY

SEQ ID NO: 112158 - protein, 7 aa, synthetic construct
AQAGHLR

SEQ ID NO: 112159 - protein, 7 aa, synthetic construct
AQAHAMK

SEQ ID NO: 112160 - protein, 7 aa, synthetic construct
AQAHKML

SEQ ID NO: 112161 - protein, 7 aa, synthetic construct
AQAHKMT

SEQ ID NO: 112162 - protein, 7 aa, synthetic construct
AQAHPKS

SEQ ID NO: 112163 - protein, 7 aa, synthetic construct
AQAHRDK

SEQ ID NO: 112164 - protein, 7 aa, synthetic construct
AQAKTAW

SEQ ID NO: 112165 - protein, 7 aa, synthetic construct
AQAKTHY

SEQ ID NO: 112166 - protein, 7 aa, synthetic construct
AQANRDR

SEQ ID NO: 112167 - protein, 7 aa, synthetic construct
AQAQFPR

SEQ ID NO: 112168 - protein, 7 aa, synthetic construct
AQAQNRF

SEQ ID NO: 112169 - protein, 7 aa, synthetic construct
AQARAQL

SEQ ID NO: 112170 - protein, 7 aa, synthetic construct
AQARERN

SEQ ID NO: 112171 - protein, 7 aa, synthetic construct
AQATRSY

SEQ ID NO: 112172 - protein, 7 aa, synthetic construct
AQAYGPK

SEQ ID NO: 112173 - protein, 7 aa, synthetic construct
AQAYGQM

SEQ ID NO: 112174 - protein, 7 aa, synthetic construct
AQAYSVT

SEQ ID NO: 112175 - protein, 7 aa, synthetic construct
AQDQKGR

SEQ ID NO: 112176 - protein, 7 aa, synthetic construct
AQDRQKM

SEQ ID NO: 112177 - protein, 7 aa, synthetic construct
AQDVKGR

SEQ ID NO: 112178 - protein, 7 aa, synthetic construct
AQEKAGR

SEQ ID NO: 112179 - protein, 7 aa, synthetic construct
AQEQLKR

SEQ ID NO: 112180 - protein, 7 aa, synthetic construct
AQFANRS

SEQ ID NO: 112181 - protein, 7 aa, synthetic construct
AQFATKH

SEQ ID NO: 112182 - protein, 7 aa, synthetic construct
AQFNGGR

SEQ ID NO: 112183 - protein, 7 aa, synthetic construct
AQFQNPK

SEQ ID NO: 112184 - protein, 7 aa, synthetic construct
AQGAERR

SEQ ID NO: 112185 - protein, 7 aa, synthetic construct
AQGGHKQ

SEQ ID NO: 112186 - protein, 7 aa, synthetic construct
AQGGIKW

SEQ ID NO: 112187 - protein, 7 aa, synthetic construct
AQGHQKM

SEQ ID NO: 112188 - protein, 7 aa, synthetic construct
AQGIKRD

SEQ ID NO: 112189 - protein, 7 aa, synthetic construct
AQGKHNF

SEQ ID NO: 112190 - protein, 7 aa, synthetic construct
AQGNRVM

SEQ ID NO: 112191 - protein, 7 aa, synthetic construct
AQGPRLT

SEQ ID NO: 112192 - protein, 7 aa, synthetic construct
AQGRKES

SEQ ID NO: 112193 - protein, 7 aa, synthetic construct
AQGTERK

SEQ ID NO: 112194 - protein, 7 aa, synthetic construct
AQGVHQK

SEQ ID NO: 112195 - protein, 7 aa, synthetic construct
AQHGSPK

SEQ ID NO: 112196 - protein, 7 aa, synthetic construct
AQHGVRP

SEQ ID NO: 112197 - protein, 7 aa, synthetic construct
AQHISKM

SEQ ID NO: 112198 - protein, 7 aa, synthetic construct
AQHMGIK

SEQ ID NO: 112199 - protein, 7 aa, synthetic construct
AQHQQLR

SEQ ID NO: 112200 - protein, 7 aa, synthetic construct
AQHSVMK

SEQ ID NO: 112201 - protein, 7 aa, synthetic construct
AQIHKNI

SEQ ID NO: 112202 - protein, 7 aa, synthetic construct
AQIKHTM

SEQ ID NO: 112203 - protein, 7 aa, synthetic construct
AQIKMGL

SEQ ID NO: 112204 - protein, 7 aa, synthetic construct
AQIKSMH

SEQ ID NO: 112205 - protein, 7 aa, synthetic construct
AQKDPQR

SEQ ID NO: 112206 - protein, 7 aa, synthetic construct
AQKDQTR

SEQ ID NO: 112207 - protein, 7 aa, synthetic construct
AQKDSKW

SEQ ID NO: 112208 - protein, 7 aa, synthetic construct
AQKERNN

SEQ ID NO: 112209 - protein, 7 aa, synthetic construct
AQKFEPK

SEQ ID NO: 112210 - protein, 7 aa, synthetic construct
AQKHQQV

SEQ ID NO: 112211 - protein, 7 aa, synthetic construct
AQKKMYD

SEQ ID NO: 112212 - protein, 7 aa, synthetic construct
AQKLRNE

SEQ ID NO: 112213 - protein, 7 aa, synthetic construct
AQKMNYI

SEQ ID NO: 112214 - protein, 7 aa, synthetic construct
AQKPIFN

SEQ ID NO: 112215 - protein, 7 aa, synthetic construct
AQKPLMM

SEQ ID NO: 112216 - protein, 7 aa, synthetic construct
AQKPRDI

SEQ ID NO: 112217 - protein, 7 aa, synthetic construct
AQKPREQ

SEQ ID NO: 112218 - protein, 7 aa, synthetic construct
AQKQSFV

SEQ ID NO: 112219 - protein, 7 aa, synthetic construct
AQKQWPS

SEQ ID NO: 112220 - protein, 7 aa, synthetic construct
AQKTGSW

SEQ ID NO: 112221 - protein, 7 aa, synthetic construct
AQKYASI

SEQ ID NO: 112222 - protein, 7 aa, synthetic construct
AQKYPPS

SEQ ID NO: 112223 - protein, 7 aa, synthetic construct
AQLRQQT

SEQ ID NO: 112224 - protein, 7 aa, synthetic construct
AQMGHTR

SEQ ID NO: 112225 - protein, 7 aa, synthetic construct
AQMGMKY

SEQ ID NO: 112226 - protein, 7 aa, synthetic construct
AQMKHNV

SEQ ID NO: 112227 - protein, 7 aa, synthetic construct
AQMQNRY

SEQ ID NO: 112228 - protein, 7 aa, synthetic construct
AQMRIQS

SEQ ID NO: 112229 - protein, 7 aa, synthetic construct
AQMRLQS

SEQ ID NO: 112230 - protein, 7 aa, synthetic construct
AQMRMPQ

SEQ ID NO: 112231 - protein, 7 aa, synthetic construct
AQMRSSF

SEQ ID NO: 112232 - protein, 7 aa, synthetic construct
AQNAVRY

SEQ ID NO: 112233 - protein, 7 aa, synthetic construct
AQNKFPI

SEQ ID NO: 112234 - protein, 7 aa, synthetic construct
AQNKGMW

SEQ ID NO: 112235 - protein, 7 aa, synthetic construct
AQNNAGR

SEQ ID NO: 112236 - protein, 7 aa, synthetic construct
AQNNEKR

SEQ ID NO: 112237 - protein, 7 aa, synthetic construct
AQNNYQK

SEQ ID NO: 112238 - protein, 7 aa, synthetic construct
AQNQRIH

SEQ ID NO: 112239 - protein, 7 aa, synthetic construct
AQNVRTH

SEQ ID NO: 112240 - protein, 7 aa, synthetic construct
AQPRIQL

SEQ ID NO: 112241 - protein, 7 aa, synthetic construct
AQPRNGY

SEQ ID NO: 112242 - protein, 7 aa, synthetic construct
AQPRVAL

SEQ ID NO: 112243 - protein, 7 aa, synthetic construct
AQPSLHR

SEQ ID NO: 112244 - protein, 7 aa, synthetic construct
AQPSSLR

SEQ ID NO: 112245 - protein, 7 aa, synthetic construct
AQPVKIS

SEQ ID NO: 112246 - protein, 7 aa, synthetic construct
AQQHPRV

SEQ ID NO: 112247 - protein, 7 aa, synthetic construct
AQQIRAN

SEQ ID NO: 112248 - protein, 7 aa, synthetic construct
AQQKGSW

SEQ ID NO: 112249 - protein, 7 aa, synthetic construct
AQQKMLY

SEQ ID NO: 112250 - protein, 7 aa, synthetic construct
AQQKNFH

SEQ ID NO: 112251 - protein, 7 aa, synthetic construct
AQQKTAW

SEQ ID NO: 112252 - protein, 7 aa, synthetic construct
AQQMART

SEQ ID NO: 112253 - protein, 7 aa, synthetic construct
AQQNKTW

SEQ ID NO: 112254 - protein, 7 aa, synthetic construct
AQQNRLN

SEQ ID NO: 112255 - protein, 7 aa, synthetic construct
AQQQRVL

SEQ ID NO: 112256 - protein, 7 aa, synthetic construct
AQQRNIA

SEQ ID NO: 112257 - protein, 7 aa, synthetic construct
AQQSRHM

SEQ ID NO: 112258 - protein, 7 aa, synthetic construct
AQQTRNV

SEQ ID NO: 112259 - protein, 7 aa, synthetic construct
AQRAATM

SEQ ID NO: 112260 - protein, 7 aa, synthetic construct
AQRDASK

SEQ ID NO: 112261 - protein, 7 aa, synthetic construct
AQRDTLK

SEQ ID NO: 112262 - protein, 7 aa, synthetic construct
AQRDTNR

SEQ ID NO: 112263 - protein, 7 aa, synthetic construct
AQREKLF

SEQ ID NO: 112264 - protein, 7 aa, synthetic construct
AQREKSN

SEQ ID NO: 112265 - protein, 7 aa, synthetic construct
AQRHYSD

SEQ ID NO: 112266 - protein, 7 aa, synthetic construct
AQRINNI

SEQ ID NO: 112267 - protein, 7 aa, synthetic construct
AQRLPSY

SEQ ID NO: 112268 - protein, 7 aa, synthetic construct
AQRMHPS

SEQ ID NO: 112269 - protein, 7 aa, synthetic construct
AQRMPPM

SEQ ID NO: 112270 - protein, 7 aa, synthetic construct
AQRMPQT

SEQ ID NO: 112271 - protein, 7 aa, synthetic construct
AQRMVNS

SEQ ID NO: 112272 - protein, 7 aa, synthetic construct
AQRNGPY

SEQ ID NO: 112273 - protein, 7 aa, synthetic construct
AQRNTTM

SEQ ID NO: 112274 - protein, 7 aa, synthetic construct
AQRPIGY

SEQ ID NO: 112275 - protein, 7 aa, synthetic construct
AQRPMPQ

SEQ ID NO: 112276 - protein, 7 aa, synthetic construct
AQRPYGP

SEQ ID NO: 112277 - protein, 7 aa, synthetic construct
AQRSNQH

SEQ ID NO: 112278 - protein, 7 aa, synthetic construct
AQRVQEK

SEQ ID NO: 112279 - protein, 7 aa, synthetic construct
AQSHGPK

SEQ ID NO: 112280 - protein, 7 aa, synthetic construct
AQSHKGT

SEQ ID NO: 112281 - protein, 7 aa, synthetic construct
AQSHKNL

SEQ ID NO: 112282 - protein, 7 aa, synthetic construct
AQSHMRS

SEQ ID NO: 112283 - protein, 7 aa, synthetic construct
AQSIRSL

SEQ ID NO: 112284 - protein, 7 aa, synthetic construct
AQSQMPR

SEQ ID NO: 112285 - protein, 7 aa, synthetic construct
AQSQRTN

SEQ ID NO: 112286 - protein, 7 aa, synthetic construct
AQSQYKF

SEQ ID NO: 112287 - protein, 7 aa, synthetic construct
AQSRLTI

SEQ ID NO: 112288 - protein, 7 aa, synthetic construct
AQSSGYR

SEQ ID NO: 112289 - protein, 7 aa, synthetic construct
AQSTGHR

SEQ ID NO: 112290 - protein, 7 aa, synthetic construct
AQSTYKN

SEQ ID NO: 112291 - protein, 7 aa, synthetic construct
AQTHNRV

SEQ ID NO: 112292 - protein, 7 aa, synthetic construct
AQTKPDR

SEQ ID NO: 112293 - protein, 7 aa, synthetic construct
AQTKPHF

SEQ ID NO: 112294 - protein, 7 aa, synthetic construct
AQTNGKW

SEQ ID NO: 112295 - protein, 7 aa, synthetic construct
AQTPRSG

SEQ ID NO: 112296 - protein, 7 aa, synthetic construct
AQTRALQ

SEQ ID NO: 112297 - protein, 7 aa, synthetic construct
AQTREKA

SEQ ID NO: 112298 - protein, 7 aa, synthetic construct
AQTRTFP

SEQ ID NO: 112299 - protein, 7 aa, synthetic construct
AQVARVH

SEQ ID NO: 112300 - protein, 7 aa, synthetic construct
AQVKGTW

SEQ ID NO: 112301 - protein, 7 aa, synthetic construct
AQVKYRD

SEQ ID NO: 112302 - protein, 7 aa, synthetic construct
AQVLHGR

SEQ ID NO: 112303 - protein, 7 aa, synthetic construct
AQVQQSR

SEQ ID NO: 112304 - protein, 7 aa, synthetic construct
AQVRNSN

SEQ ID NO: 112305 - protein, 7 aa, synthetic construct
AQVRNTS

SEQ ID NO: 112306 - protein, 7 aa, synthetic construct
AQVRQQS

SEQ ID NO: 112307 - protein, 7 aa, synthetic construct
AQVRTPL

SEQ ID NO: 112308 - protein, 7 aa, synthetic construct
AQVRVST

SEQ ID NO: 112309 - protein, 7 aa, synthetic construct
AQYAKPI

SEQ ID NO: 112310 - protein, 7 aa, synthetic construct
AQYGQKS

SEQ ID NO: 112311 - protein, 7 aa, synthetic construct
AQYGSKP

SEQ ID NO: 112312 - protein, 7 aa, synthetic construct
AQYHMTS

SEQ ID NO: 112313 - protein, 7 aa, synthetic construct
AQYHNLA

SEQ ID NO: 112314 - protein, 7 aa, synthetic construct
AQYKEKT

SEQ ID NO: 112315 - protein, 7 aa, synthetic construct
AQYKKDA

SEQ ID NO: 112316 - protein, 7 aa, synthetic construct
AQYKTLA

SEQ ID NO: 112317 - protein, 7 aa, synthetic construct
AQYKVRE

SEQ ID NO: 112318 - protein, 7 aa, synthetic construct
AQYNLGK

SEQ ID NO: 112319 - protein, 7 aa, synthetic construct
AQYTVGK

SEQ ID NO: 112320 - protein, 7 aa, synthetic construct
ARADLSR

SEQ ID NO: 112321 - protein, 7 aa, synthetic construct
ARADNTK

SEQ ID NO: 112322 - protein, 7 aa, synthetic construct
ARAEGTK

SEQ ID NO: 112323 - protein, 7 aa, synthetic construct
ARAELYK

SEQ ID NO: 112324 - protein, 7 aa, synthetic construct
ARAERAL

SEQ ID NO: 112325 - protein, 7 aa, synthetic construct
ARALPEK

SEQ ID NO: 112326 - protein, 7 aa, synthetic construct
ARAMSQL

SEQ ID NO: 112327 - protein, 7 aa, synthetic construct
ARANLGH

SEQ ID NO: 112328 - protein, 7 aa, synthetic construct
ARANNNM

SEQ ID NO: 112329 - protein, 7 aa, synthetic construct
ARAPVNH

SEQ ID NO: 112330 - protein, 7 aa, synthetic construct
ARAQEIR

SEQ ID NO: 112331 - protein, 7 aa, synthetic construct
ARAQIQL

SEQ ID NO: 112332 - protein, 7 aa, synthetic construct
ARARDAV

SEQ ID NO: 112333 - protein, 7 aa, synthetic construct
ARASADR

SEQ ID NO: 112334 - protein, 7 aa, synthetic construct
ARASTHL

SEQ ID NO: 112335 - protein, 7 aa, synthetic construct
ARASYSM

SEQ ID NO: 112336 - protein, 7 aa, synthetic construct
ARATKET

SEQ ID NO: 112337 - protein, 7 aa, synthetic construct
ARDDRIK

SEQ ID NO: 112338 - protein, 7 aa, synthetic construct
ARDIHKA

SEQ ID NO: 112339 - protein, 7 aa, synthetic construct
ARDKFNV

SEQ ID NO: 112340 - protein, 7 aa, synthetic construct
ARDLKYA

SEQ ID NO: 112341 - protein, 7 aa, synthetic construct
ARDMKHN

SEQ ID NO: 112342 - protein, 7 aa, synthetic construct
ARDQKHL

SEQ ID NO: 112343 - protein, 7 aa, synthetic construct
ARDQNGK

SEQ ID NO: 112344 - protein, 7 aa, synthetic construct
ARDREKV

SEQ ID NO: 112345 - protein, 7 aa, synthetic construct
ARDSQRA

SEQ ID NO: 112346 - protein, 7 aa, synthetic construct
ARDTKAY

SEQ ID NO: 112347 - protein, 7 aa, synthetic construct
ARDTYKM

SEQ ID NO: 112348 - protein, 7 aa, synthetic construct
ARDYKPN

SEQ ID NO: 112349 - protein, 7 aa, synthetic construct
AREIRQA

SEQ ID NO: 112350 - protein, 7 aa, synthetic construct
AREKAAY

SEQ ID NO: 112351 - protein, 7 aa, synthetic construct
AREKATY

SEQ ID NO: 112352 - protein, 7 aa, synthetic construct
AREKAYQ

SEQ ID NO: 112353 - protein, 7 aa, synthetic construct
AREKHIL

SEQ ID NO: 112354 - protein, 7 aa, synthetic construct
AREKPQY

SEQ ID NO: 112355 - protein, 7 aa, synthetic construct
AREKPYN

SEQ ID NO: 112356 - protein, 7 aa, synthetic construct
AREKSYS

SEQ ID NO: 112357 - protein, 7 aa, synthetic construct
AREMHKV

SEQ ID NO: 112358 - protein, 7 aa, synthetic construct
ARENKAY

SEQ ID NO: 112359 - protein, 7 aa, synthetic construct
ARENRQV

SEQ ID NO: 112360 - protein, 7 aa, synthetic construct
AREQGKY

SEQ ID NO: 112361 - protein, 7 aa, synthetic construct
AREQKAY

SEQ ID NO: 112362 - protein, 7 aa, synthetic construct
ARERASV

SEQ ID NO: 112363 - protein, 7 aa, synthetic construct
ARERINI

SEQ ID NO: 112364 - protein, 7 aa, synthetic construct
ARESMSK

SEQ ID NO: 112365 - protein, 7 aa, synthetic construct
ARESRMG

SEQ ID NO: 112366 - protein, 7 aa, synthetic construct
ARETMRY

SEQ ID NO: 112367 - protein, 7 aa, synthetic construct
AREYPPK

SEQ ID NO: 112368 - protein, 7 aa, synthetic construct
ARFKDTI

SEQ ID NO: 112369 - protein, 7 aa, synthetic construct
ARFKESN

SEQ ID NO: 112370 - protein, 7 aa, synthetic construct
ARFQPDK

SEQ ID NO: 112371 - protein, 7 aa, synthetic construct
ARGADKT

SEQ ID NO: 112372 - protein, 7 aa, synthetic construct
ARGAPKD

SEQ ID NO: 112373 - protein, 7 aa, synthetic construct
ARGAQDK

SEQ ID NO: 112374 - protein, 7 aa, synthetic construct
ARGAVSF

SEQ ID NO: 112375 - protein, 7 aa, synthetic construct
ARGDLPK

SEQ ID NO: 112376 - protein, 7 aa, synthetic construct
ARGEMKI

SEQ ID NO: 112377 - protein, 7 aa, synthetic construct
ARGERLV

SEQ ID NO: 112378 - protein, 7 aa, synthetic construct
ARGGEMK

SEQ ID NO: 112379 - protein, 7 aa, synthetic construct
ARGGMLV

SEQ ID NO: 112380 - protein, 7 aa, synthetic construct
ARGHLQN

SEQ ID NO: 112381 - protein, 7 aa, synthetic construct
ARGHVIS

SEQ ID NO: 112382 - protein, 7 aa, synthetic construct
ARGIHIA

SEQ ID NO: 112383 - protein, 7 aa, synthetic construct
ARGISHP

SEQ ID NO: 112384 - protein, 7 aa, synthetic construct
ARGLQMQ

SEQ ID NO: 112385 - protein, 7 aa, synthetic construct
ARGMDKN

SEQ ID NO: 112386 - protein, 7 aa, synthetic construct
ARGPGFN

SEQ ID NO: 112387 - protein, 7 aa, synthetic construct
ARGPNMH

SEQ ID NO: 112388 - protein, 7 aa, synthetic construct
ARGPVDR

SEQ ID NO: 112389 - protein, 7 aa, synthetic construct
ARGQKPE

SEQ ID NO: 112390 - protein, 7 aa, synthetic construct
ARGSHVV

SEQ ID NO: 112391 - protein, 7 aa, synthetic construct
ARGTPDK

SEQ ID NO: 112392 - protein, 7 aa, synthetic construct
ARGVAQT

SEQ ID NO: 112393 - protein, 7 aa, synthetic construct
ARGVQQY

SEQ ID NO: 112394 - protein, 7 aa, synthetic construct
ARGVSGT

SEQ ID NO: 112395 - protein, 7 aa, synthetic construct
ARHAADW

SEQ ID NO: 112396 - protein, 7 aa, synthetic construct
ARHALPV

SEQ ID NO: 112397 - protein, 7 aa, synthetic construct
ARHAPQV

SEQ ID NO: 112398 - protein, 7 aa, synthetic construct
ARHGATG

SEQ ID NO: 112399 - protein, 7 aa, synthetic construct
ARHIAAG

SEQ ID NO: 112400 - protein, 7 aa, synthetic construct
ARHINAA

SEQ ID NO: 112401 - protein, 7 aa, synthetic construct
ARHNGAH

SEQ ID NO: 112402 - protein, 7 aa, synthetic construct
ARHPVNN

SEQ ID NO: 112403 - protein, 7 aa, synthetic construct
ARHTVAG

SEQ ID NO: 112404 - protein, 7 aa, synthetic construct
ARHVSGG

SEQ ID NO: 112405 - protein, 7 aa, synthetic construct
ARHVTLS

SEQ ID NO: 112406 - protein, 7 aa, synthetic construct
ARIARQE

SEQ ID NO: 112407 - protein, 7 aa, synthetic construct
ARIDRVV

SEQ ID NO: 112408 - protein, 7 aa, synthetic construct
ARIEKDK

SEQ ID NO: 112409 - protein, 7 aa, synthetic construct
ARIGDNR

SEQ ID NO: 112410 - protein, 7 aa, synthetic construct
ARISELK

SEQ ID NO: 112411 - protein, 7 aa, synthetic construct
ARISVQQ

SEQ ID NO: 112412 - protein, 7 aa, synthetic construct
ARIVKLE

SEQ ID NO: 112413 - protein, 7 aa, synthetic construct
ARKDNLF

SEQ ID NO: 112414 - protein, 7 aa, synthetic construct
ARKLQDV

SEQ ID NO: 112415 - protein, 7 aa, synthetic construct
ARKLVSE

SEQ ID NO: 112416 - protein, 7 aa, synthetic construct
ARKPETF

SEQ ID NO: 112417 - protein, 7 aa, synthetic construct
ARKQENT

SEQ ID NO: 112418 - protein, 7 aa, synthetic construct
ARKTWEE

SEQ ID NO: 112419 - protein, 7 aa, synthetic construct
ARLEGAK

SEQ ID NO: 112420 - protein, 7 aa, synthetic construct
ARLEKNF

SEQ ID NO: 112421 - protein, 7 aa, synthetic construct
ARLKLVE

SEQ ID NO: 112422 - protein, 7 aa, synthetic construct
ARLNSVH

SEQ ID NO: 112423 - protein, 7 aa, synthetic construct
ARLPVER

SEQ ID NO: 112424 - protein, 7 aa, synthetic construct
ARLQSGH

SEQ ID NO: 112425 - protein, 7 aa, synthetic construct
ARLQSTY

SEQ ID NO: 112426 - protein, 7 aa, synthetic construct
ARLSTDR

SEQ ID NO: 112427 - protein, 7 aa, synthetic construct
ARMEIGK

SEQ ID NO: 112428 - protein, 7 aa, synthetic construct
ARMEKFT

SEQ ID NO: 112429 - protein, 7 aa, synthetic construct
ARMNTNV

SEQ ID NO: 112430 - protein, 7 aa, synthetic construct
ARMNTPN

SEQ ID NO: 112431 - protein, 7 aa, synthetic construct
ARMSDRI

SEQ ID NO: 112432 - protein, 7 aa, synthetic construct
ARMSIDR

SEQ ID NO: 112433 - protein, 7 aa, synthetic construct
ARMSQAN

SEQ ID NO: 112434 - protein, 7 aa, synthetic construct
ARMSQNF

SEQ ID NO: 112435 - protein, 7 aa, synthetic construct
ARMSTPQ

SEQ ID NO: 112436 - protein, 7 aa, synthetic construct
ARNAIQQ

SEQ ID NO: 112437 - protein, 7 aa, synthetic construct
ARNAQPQ

SEQ ID NO: 112438 - protein, 7 aa, synthetic construct
ARNDKML

SEQ ID NO: 112439 - protein, 7 aa, synthetic construct
ARNEKQI

SEQ ID NO: 112440 - protein, 7 aa, synthetic construct
ARNGGFN

SEQ ID NO: 112441 - protein, 7 aa, synthetic construct
ARNGQYI

SEQ ID NO: 112442 - protein, 7 aa, synthetic construct
ARNKDAT

SEQ ID NO: 112443 - protein, 7 aa, synthetic construct
ARNLERV

SEQ ID NO: 112444 - protein, 7 aa, synthetic construct
ARNLGDR

SEQ ID NO: 112445 - protein, 7 aa, synthetic construct
ARNLSMQ

SEQ ID NO: 112446 - protein, 7 aa, synthetic construct
ARNMASL

SEQ ID NO: 112447 - protein, 7 aa, synthetic construct
ARNMDMK

SEQ ID NO: 112448 - protein, 7 aa, synthetic construct
ARNMGDR

SEQ ID NO: 112449 - protein, 7 aa, synthetic construct
ARNNGMN

SEQ ID NO: 112450 - protein, 7 aa, synthetic construct
ARNNGNL

SEQ ID NO: 112451 - protein, 7 aa, synthetic construct
ARNNSSY

SEQ ID NO: 112452 - protein, 7 aa, synthetic construct
ARNPGPM

SEQ ID NO: 112453 - protein, 7 aa, synthetic construct
ARNPNPL

SEQ ID NO: 112454 - protein, 7 aa, synthetic construct
ARNQEKV

SEQ ID NO: 112455 - protein, 7 aa, synthetic construct
ARNQPQD

SEQ ID NO: 112456 - protein, 7 aa, synthetic construct
ARNQSAN

SEQ ID NO: 112457 - protein, 7 aa, synthetic construct
ARNQSNV

SEQ ID NO: 112458 - protein, 7 aa, synthetic construct
ARNSAQL

SEQ ID NO: 112459 - protein, 7 aa, synthetic construct
ARNSDKM

SEQ ID NO: 112460 - protein, 7 aa, synthetic construct
ARNTASY

SEQ ID NO: 112461 - protein, 7 aa, synthetic construct
ARNTDRI

SEQ ID NO: 112462 - protein, 7 aa, synthetic construct
ARNTGSW

SEQ ID NO: 112463 - protein, 7 aa, synthetic construct
ARNTQGN

SEQ ID NO: 112464 - protein, 7 aa, synthetic construct
ARNTQNQ

SEQ ID NO: 112465 - protein, 7 aa, synthetic construct
ARNVAHS

SEQ ID NO: 112466 - protein, 7 aa, synthetic construct
ARNVHTI

SEQ ID NO: 112467 - protein, 7 aa, synthetic construct
ARNVIQN

SEQ ID NO: 112468 - protein, 7 aa, synthetic construct
ARNVISS

SEQ ID NO: 112469 - protein, 7 aa, synthetic construct
ARNVSHG

SEQ ID NO: 112470 - protein, 7 aa, synthetic construct
ARPDLRL

SEQ ID NO: 112471 - protein, 7 aa, synthetic construct
ARPDVGK

SEQ ID NO: 112472 - protein, 7 aa, synthetic construct
ARPGFSA

SEQ ID NO: 112473 - protein, 7 aa, synthetic construct
ARPGYKD

SEQ ID NO: 112474 - protein, 7 aa, synthetic construct
ARPHLSS

SEQ ID NO: 112475 - protein, 7 aa, synthetic construct
ARPIHSS

SEQ ID NO: 112476 - protein, 7 aa, synthetic construct
ARPMRDT

SEQ ID NO: 112477 - protein, 7 aa, synthetic construct
ARPMRGE

SEQ ID NO: 112478 - protein, 7 aa, synthetic construct
ARPNPRD

SEQ ID NO: 112479 - protein, 7 aa, synthetic construct
ARPNPVI

SEQ ID NO: 112480 - protein, 7 aa, synthetic construct
ARPNSIL

SEQ ID NO: 112481 - protein, 7 aa, synthetic construct
ARPPAPV

SEQ ID NO: 112482 - protein, 7 aa, synthetic construct
ARPPILP

SEQ ID NO: 112483 - protein, 7 aa, synthetic construct
ARPPLEY

SEQ ID NO: 112484 - protein, 7 aa, synthetic construct
ARPPNHY

SEQ ID NO: 112485 - protein, 7 aa, synthetic construct
ARPPYNT

SEQ ID NO: 112486 - protein, 7 aa, synthetic construct
ARPQYPT

SEQ ID NO: 112487 - protein, 7 aa, synthetic construct
ARPRENN

SEQ ID NO: 112488 - protein, 7 aa, synthetic construct
ARPRVME

SEQ ID NO: 112489 - protein, 7 aa, synthetic construct
ARPTEIK

SEQ ID NO: 112490 - protein, 7 aa, synthetic construct
ARQASGF

SEQ ID NO: 112491 - protein, 7 aa, synthetic construct
ARQDART

SEQ ID NO: 112492 - protein, 7 aa, synthetic construct
ARQDTTK

SEQ ID NO: 112493 - protein, 7 aa, synthetic construct
ARQELRS

SEQ ID NO: 112494 - protein, 7 aa, synthetic construct
ARQEPSR

SEQ ID NO: 112495 - protein, 7 aa, synthetic construct
ARQHKEG

SEQ ID NO: 112496 - protein, 7 aa, synthetic construct
ARQKAVE

SEQ ID NO: 112497 - protein, 7 aa, synthetic construct
ARQKDTI

SEQ ID NO: 112498 - protein, 7 aa, synthetic construct
ARQKITD

SEQ ID NO: 112499 - protein, 7 aa, synthetic construct
ARQKQEV

SEQ ID NO: 112500 - protein, 7 aa, synthetic construct
ARQLSAQ

SEQ ID NO: 112501 - protein, 7 aa, synthetic construct
ARQMNIN

SEQ ID NO: 112502 - protein, 7 aa, synthetic construct
ARQNAIQ

SEQ ID NO: 112503 - protein, 7 aa, synthetic construct
ARQNTLN

SEQ ID NO: 112504 - protein, 7 aa, synthetic construct
ARQNTVM

SEQ ID NO: 112505 - protein, 7 aa, synthetic construct
ARQPTAY

SEQ ID NO: 112506 - protein, 7 aa, synthetic construct
ARQQGAN

SEQ ID NO: 112507 - protein, 7 aa, synthetic construct
ARQQGFH

SEQ ID NO: 112508 - protein, 7 aa, synthetic construct
ARQQQIA

SEQ ID NO: 112509 - protein, 7 aa, synthetic construct
ARQQSNV

SEQ ID NO: 112510 - protein, 7 aa, synthetic construct
ARQQSVL

SEQ ID NO: 112511 - protein, 7 aa, synthetic construct
ARQSEFK

SEQ ID NO: 112512 - protein, 7 aa, synthetic construct
ARQSPNY

SEQ ID NO: 112513 - protein, 7 aa, synthetic construct
ARQSPPH

SEQ ID NO: 112514 - protein, 7 aa, synthetic construct
ARQSQLM

SEQ ID NO: 112515 - protein, 7 aa, synthetic construct
ARQTAPN

SEQ ID NO: 112516 - protein, 7 aa, synthetic construct
ARQTDTR

SEQ ID NO: 112517 - protein, 7 aa, synthetic construct
ARQTGMY

SEQ ID NO: 112518 - protein, 7 aa, synthetic construct
ARQTMQS

SEQ ID NO: 112519 - protein, 7 aa, synthetic construct
ARQVKLD

SEQ ID NO: 112520 - protein, 7 aa, synthetic construct
ARQVMPQ

SEQ ID NO: 112521 - protein, 7 aa, synthetic construct
ARQVVAT

SEQ ID NO: 112522 - protein, 7 aa, synthetic construct
ARRDQAS

SEQ ID NO: 112523 - protein, 7 aa, synthetic construct
ARREIMA

SEQ ID NO: 112524 - protein, 7 aa, synthetic construct
ARRGYDE

SEQ ID NO: 112525 - protein, 7 aa, synthetic construct
ARRPVEF

SEQ ID NO: 112526 - protein, 7 aa, synthetic construct
ARSAESR

SEQ ID NO: 112527 - protein, 7 aa, synthetic construct
ARSDIAK

SEQ ID NO: 112528 - protein, 7 aa, synthetic construct
ARSEKTQ

SEQ ID NO: 112529 - protein, 7 aa, synthetic construct
ARSESQK

SEQ ID NO: 112530 - protein, 7 aa, synthetic construct
ARSESRV

SEQ ID NO: 112531 - protein, 7 aa, synthetic construct
ARSGATH

SEQ ID NO: 112532 - protein, 7 aa, synthetic construct
ARSGHPF

SEQ ID NO: 112533 - protein, 7 aa, synthetic construct
ARSHGNT

SEQ ID NO: 112534 - protein, 7 aa, synthetic construct
ARSHITN

SEQ ID NO: 112535 - protein, 7 aa, synthetic construct
ARSIAKD

SEQ ID NO: 112536 - protein, 7 aa, synthetic construct
ARSKLDV

SEQ ID NO: 112537 - protein, 7 aa, synthetic construct
ARSKMAD

SEQ ID NO: 112538 - protein, 7 aa, synthetic construct
ARSNETR

SEQ ID NO: 112539 - protein, 7 aa, synthetic construct
ARSNVQQ

SEQ ID NO: 112540 - protein, 7 aa, synthetic construct
ARSQSMN

SEQ ID NO: 112541 - protein, 7 aa, synthetic construct
ARSSKDQ

SEQ ID NO: 112542 - protein, 7 aa, synthetic construct
ARSVPSY

SEQ ID NO: 112543 - protein, 7 aa, synthetic construct
ARTAERQ

SEQ ID NO: 112544 - protein, 7 aa, synthetic construct
ARTDIYK

SEQ ID NO: 112545 - protein, 7 aa, synthetic construct
ARTHPVP

SEQ ID NO: 112546 - protein, 7 aa, synthetic construct
ARTMAEK

SEQ ID NO: 112547 - protein, 7 aa, synthetic construct
ARTNIAH

SEQ ID NO: 112548 - protein, 7 aa, synthetic construct
ARTPHAN

SEQ ID NO: 112549 - protein, 7 aa, synthetic construct
ARTQHVV

SEQ ID NO: 112550 - protein, 7 aa, synthetic construct
ARTQKSE

SEQ ID NO: 112551 - protein, 7 aa, synthetic construct
ARTQPHM

SEQ ID NO: 112552 - protein, 7 aa, synthetic construct
ARTQPLM

SEQ ID NO: 112553 - protein, 7 aa, synthetic construct
ARTQQAY

SEQ ID NO: 112554 - protein, 7 aa, synthetic construct
ARVDRPI

SEQ ID NO: 112555 - protein, 7 aa, synthetic construct
ARVDRPQ

SEQ ID NO: 112556 - protein, 7 aa, synthetic construct
ARVEKTN

SEQ ID NO: 112557 - protein, 7 aa, synthetic construct
ARVETKW

SEQ ID NO: 112558 - protein, 7 aa, synthetic construct
ARVETQR

SEQ ID NO: 112559 - protein, 7 aa, synthetic construct
ARVGETK

SEQ ID NO: 112560 - protein, 7 aa, synthetic construct
ARVHSTA

SEQ ID NO: 112561 - protein, 7 aa, synthetic construct
ARVKAAD

SEQ ID NO: 112562 - protein, 7 aa, synthetic construct
ARVNAIM

SEQ ID NO: 112563 - protein, 7 aa, synthetic construct
ARVNVQM

SEQ ID NO: 112564 - protein, 7 aa, synthetic construct
ARVQTHN

SEQ ID NO: 112565 - protein, 7 aa, synthetic construct
ARVQTNM

SEQ ID NO: 112566 - protein, 7 aa, synthetic construct
ARVSRGE

SEQ ID NO: 112567 - protein, 7 aa, synthetic construct
ARVSTNF

SEQ ID NO: 112568 - protein, 7 aa, synthetic construct
ARVSVGH

SEQ ID NO: 112569 - protein, 7 aa, synthetic construct
ARVTNAF

SEQ ID NO: 112570 - protein, 7 aa, synthetic construct
ARVTTSH

SEQ ID NO: 112571 - protein, 7 aa, synthetic construct
ARVVHGG

SEQ ID NO: 112572 - protein, 7 aa, synthetic construct
ARYDKSH

SEQ ID NO: 112573 - protein, 7 aa, synthetic construct
ARYGNTI

SEQ ID NO: 112574 - protein, 7 aa, synthetic construct
ARYGQIS

SEQ ID NO: 112575 - protein, 7 aa, synthetic construct
ASAERRA

SEQ ID NO: 112576 - protein, 7 aa, synthetic construct
ASAETRR

SEQ ID NO: 112577 - protein, 7 aa, synthetic construct
ASAGLRY

SEQ ID NO: 112578 - protein, 7 aa, synthetic construct
ASAKHVI

SEQ ID NO: 112579 - protein, 7 aa, synthetic construct
ASANERK

SEQ ID NO: 112580 - protein, 7 aa, synthetic construct
ASANSSR

SEQ ID NO: 112581 - protein, 7 aa, synthetic construct
ASARPHV

SEQ ID NO: 112582 - protein, 7 aa, synthetic construct
ASARQIM

SEQ ID NO: 112583 - protein, 7 aa, synthetic construct
ASATWSK

SEQ ID NO: 112584 - protein, 7 aa, synthetic construct
ASAYMKV

SEQ ID NO: 112585 - protein, 7 aa, synthetic construct
ASDNRKM

SEQ ID NO: 112586 - protein, 7 aa, synthetic construct
ASDRNRG

SEQ ID NO: 112587 - protein, 7 aa, synthetic construct
ASDRVLR

SEQ ID NO: 112588 - protein, 7 aa, synthetic construct
ASERYKP

SEQ ID NO: 112589 - protein, 7 aa, synthetic construct
ASFKPTT

SEQ ID NO: 112590 - protein, 7 aa, synthetic construct
ASGAVKW

SEQ ID NO: 112591 - protein, 7 aa, synthetic construct
ASGGREK

SEQ ID NO: 112592 - protein, 7 aa, synthetic construct
ASGHITR

SEQ ID NO: 112593 - protein, 7 aa, synthetic construct
ASGHKQF

SEQ ID NO: 112594 - protein, 7 aa, synthetic construct
ASGIKFS

SEQ ID NO: 112595 - protein, 7 aa, synthetic construct
ASGINWE

SEQ ID NO: 112596 - protein, 7 aa, synthetic construct
ASGKLYT

SEQ ID NO: 112597 - protein, 7 aa, synthetic construct
ASGNAMR

SEQ ID NO: 112598 - protein, 7 aa, synthetic construct
ASGNKEK

SEQ ID NO: 112599 - protein, 7 aa, synthetic construct
ASGPIRN

SEQ ID NO: 112600 - protein, 7 aa, synthetic construct
ASGPSLR

SEQ ID NO: 112601 - protein, 7 aa, synthetic construct
ASGQQFR

SEQ ID NO: 112602 - protein, 7 aa, synthetic construct
ASGSPPR

SEQ ID NO: 112603 - protein, 7 aa, synthetic construct
ASGVSSR

SEQ ID NO: 112604 - protein, 7 aa, synthetic construct
ASGYKGM

SEQ ID NO: 112605 - protein, 7 aa, synthetic construct
ASHALRG

SEQ ID NO: 112606 - protein, 7 aa, synthetic construct
ASHANRM

SEQ ID NO: 112607 - protein, 7 aa, synthetic construct
ASHEKLR

SEQ ID NO: 112608 - protein, 7 aa, synthetic construct
ASHISKS

SEQ ID NO: 112609 - protein, 7 aa, synthetic construct
ASHKPQY

SEQ ID NO: 112610 - protein, 7 aa, synthetic construct
ASHLKQI

SEQ ID NO: 112611 - protein, 7 aa, synthetic construct
ASHMKIP

SEQ ID NO: 112612 - protein, 7 aa, synthetic construct
ASHNPNK

SEQ ID NO: 112613 - protein, 7 aa, synthetic construct
ASHQILK

SEQ ID NO: 112614 - protein, 7 aa, synthetic construct
ASHQNKS

SEQ ID NO: 112615 - protein, 7 aa, synthetic construct
ASHQRPV

SEQ ID NO: 112616 - protein, 7 aa, synthetic construct
ASHRQSV

SEQ ID NO: 112617 - protein, 7 aa, synthetic construct
ASHSGPK

SEQ ID NO: 112618 - protein, 7 aa, synthetic construct
ASHTRGT

SEQ ID NO: 112619 - protein, 7 aa, synthetic construct
ASHTWPA

SEQ ID NO: 112620 - protein, 7 aa, synthetic construct
ASHVKSL

SEQ ID NO: 112621 - protein, 7 aa, synthetic construct
ASHVLRG

SEQ ID NO: 112622 - protein, 7 aa, synthetic construct
ASIKSGF

SEQ ID NO: 112623 - protein, 7 aa, synthetic construct
ASIRAQM

SEQ ID NO: 112624 - protein, 7 aa, synthetic construct
ASKADRF

SEQ ID NO: 112625 - protein, 7 aa, synthetic construct
ASKASHY

SEQ ID NO: 112626 - protein, 7 aa, synthetic construct
ASKAWPG

SEQ ID NO: 112627 - protein, 7 aa, synthetic construct
ASKFQER

SEQ ID NO: 112628 - protein, 7 aa, synthetic construct
ASKHLGQ

SEQ ID NO: 112629 - protein, 7 aa, synthetic construct
ASKHMNI

SEQ ID NO: 112630 - protein, 7 aa, synthetic construct
ASKHVNM

SEQ ID NO: 112631 - protein, 7 aa, synthetic construct
ASKMHMT

SEQ ID NO: 112632 - protein, 7 aa, synthetic construct
ASKNPDR

SEQ ID NO: 112633 - protein, 7 aa, synthetic construct
ASKNWKE

SEQ ID NO: 112634 - protein, 7 aa, synthetic construct
ASKPGYY

SEQ ID NO: 112635 - protein, 7 aa, synthetic construct
ASKQDGR

SEQ ID NO: 112636 - protein, 7 aa, synthetic construct
ASKQHYA

SEQ ID NO: 112637 - protein, 7 aa, synthetic construct
ASKRVEA

SEQ ID NO: 112638 - protein, 7 aa, synthetic construct
ASKSERY

SEQ ID NO: 112639 - protein, 7 aa, synthetic construct
ASKVHPY

SEQ ID NO: 112640 - protein, 7 aa, synthetic construct
ASKVQVY

SEQ ID NO: 112641 - protein, 7 aa, synthetic construct
ASKYPPT

SEQ ID NO: 112642 - protein, 7 aa, synthetic construct
ASMGHKA

SEQ ID NO: 112643 - protein, 7 aa, synthetic construct
ASMGNNR

SEQ ID NO: 112644 - protein, 7 aa, synthetic construct
ASMNAQR

SEQ ID NO: 112645 - protein, 7 aa, synthetic construct
ASMNIAR

SEQ ID NO: 112646 - protein, 7 aa, synthetic construct
ASMNKRE

SEQ ID NO: 112647 - protein, 7 aa, synthetic construct
ASMRVRE

SEQ ID NO: 112648 - protein, 7 aa, synthetic construct
ASMRVTV

SEQ ID NO: 112649 - protein, 7 aa, synthetic construct
ASNAVRL

SEQ ID NO: 112650 - protein, 7 aa, synthetic construct
ASNNRTM

SEQ ID NO: 112651 - protein, 7 aa, synthetic construct
ASNPKVF

SEQ ID NO: 112652 - protein, 7 aa, synthetic construct
ASNVPKH

SEQ ID NO: 112653 - protein, 7 aa, synthetic construct
ASNVRER

SEQ ID NO: 112654 - protein, 7 aa, synthetic construct
ASNVTHR

SEQ ID NO: 112655 - protein, 7 aa, synthetic construct
ASPHKYA

SEQ ID NO: 112656 - protein, 7 aa, synthetic construct
ASPHRMQ

SEQ ID NO: 112657 - protein, 7 aa, synthetic construct
ASPKSYL

SEQ ID NO: 112658 - protein, 7 aa, synthetic construct
ASQAHVR

SEQ ID NO: 112659 - protein, 7 aa, synthetic construct
ASQFSKM

SEQ ID NO: 112660 - protein, 7 aa, synthetic construct
ASQLKRD

SEQ ID NO: 112661 - protein, 7 aa, synthetic construct
ASQMQRQ

SEQ ID NO: 112662 - protein, 7 aa, synthetic construct
ASQMVTR

SEQ ID NO: 112663 - protein, 7 aa, synthetic construct
ASQNAQR

SEQ ID NO: 112664 - protein, 7 aa, synthetic construct
ASQNKTW

SEQ ID NO: 112665 - protein, 7 aa, synthetic construct
ASQPRPF

SEQ ID NO: 112666 - protein, 7 aa, synthetic construct
ASQQGRY

SEQ ID NO: 112667 - protein, 7 aa, synthetic construct
ASQQKAW

SEQ ID NO: 112668 - protein, 7 aa, synthetic construct
ASQRVSF

SEQ ID NO: 112669 - protein, 7 aa, synthetic construct
ASQWLQE

SEQ ID NO: 112670 - protein, 7 aa, synthetic construct
ASQYKAL

SEQ ID NO: 112671 - protein, 7 aa, synthetic construct
ASRAIVQ

SEQ ID NO: 112672 - protein, 7 aa, synthetic construct
ASRDPPR

SEQ ID NO: 112673 - protein, 7 aa, synthetic construct
ASREFKM

SEQ ID NO: 112674 - protein, 7 aa, synthetic construct
ASRGANY

SEQ ID NO: 112675 - protein, 7 aa, synthetic construct
ASRGNMY

SEQ ID NO: 112676 - protein, 7 aa, synthetic construct
ASRGPSN

SEQ ID NO: 112677 - protein, 7 aa, synthetic construct
ASRGSKE

SEQ ID NO: 112678 - protein, 7 aa, synthetic construct
ASRHTNV

SEQ ID NO: 112679 - protein, 7 aa, synthetic construct
ASRIHNA

SEQ ID NO: 112680 - protein, 7 aa, synthetic construct
ASRMMPS

SEQ ID NO: 112681 - protein, 7 aa, synthetic construct
ASRNGVW

SEQ ID NO: 112682 - protein, 7 aa, synthetic construct
ASRNMGL

SEQ ID NO: 112683 - protein, 7 aa, synthetic construct
ASRNTHA

SEQ ID NO: 112684 - protein, 7 aa, synthetic construct
ASRSGKD

SEQ ID NO: 112685 - protein, 7 aa, synthetic construct
ASRTVYE

SEQ ID NO: 112686 - protein, 7 aa, synthetic construct
ASRVQVM

SEQ ID NO: 112687 - protein, 7 aa, synthetic construct
ASSAYKA

SEQ ID NO: 112688 - protein, 7 aa, synthetic construct
ASSFTKS

SEQ ID NO: 112689 - protein, 7 aa, synthetic construct
ASSGPRL

SEQ ID NO: 112690 - protein, 7 aa, synthetic construct
ASSGRHV

SEQ ID NO: 112691 - protein, 7 aa, synthetic construct
ASSKERY

SEQ ID NO: 112692 - protein, 7 aa, synthetic construct
ASSVKTH

SEQ ID NO: 112693 - protein, 7 aa, synthetic construct
ASSVRGL

SEQ ID NO: 112694 - protein, 7 aa, synthetic construct
ASSYAKS

SEQ ID NO: 112695 - protein, 7 aa, synthetic construct
ASTFKER

SEQ ID NO: 112696 - protein, 7 aa, synthetic construct
ASTHAVR

SEQ ID NO: 112697 - protein, 7 aa, synthetic construct
ASTHMKY

SEQ ID NO: 112698 - protein, 7 aa, synthetic construct
ASTSRVT

SEQ ID NO: 112699 - protein, 7 aa, synthetic construct
ASTTQRY

SEQ ID NO: 112700 - protein, 7 aa, synthetic construct
ASTTYMR

SEQ ID NO: 112701 - protein, 7 aa, synthetic construct
ASTYSKP

SEQ ID NO: 112702 - protein, 7 aa, synthetic construct
ASVDRKF

SEQ ID NO: 112703 - protein, 7 aa, synthetic construct
ASVKTYG

SEQ ID NO: 112704 - protein, 7 aa, synthetic construct
ASYAKMS

SEQ ID NO: 112705 - protein, 7 aa, synthetic construct
ASYASKT

SEQ ID NO: 112706 - protein, 7 aa, synthetic construct
ASYGNKQ

SEQ ID NO: 112707 - protein, 7 aa, synthetic construct
ASYGVGH

SEQ ID NO: 112708 - protein, 7 aa, synthetic construct
ASYHTEV

SEQ ID NO: 112709 - protein, 7 aa, synthetic construct
ASYKPNI

SEQ ID NO: 112710 - protein, 7 aa, synthetic construct
ASYNVNV

SEQ ID NO: 112711 - protein, 7 aa, synthetic construct
ASYNVQD

SEQ ID NO: 112712 - protein, 7 aa, synthetic construct
ASYPKEK

SEQ ID NO: 112713 - protein, 7 aa, synthetic construct
ASYPQMK

SEQ ID NO: 112714 - protein, 7 aa, synthetic construct
ASYQLQS

SEQ ID NO: 112715 - protein, 7 aa, synthetic construct
ATAGRQY

SEQ ID NO: 112716 - protein, 7 aa, synthetic construct
ATAQYQR

SEQ ID NO: 112717 - protein, 7 aa, synthetic construct
ATARVRE

SEQ ID NO: 112718 - protein, 7 aa, synthetic construct
ATATYQR

SEQ ID NO: 112719 - protein, 7 aa, synthetic construct
ATAYGQK

SEQ ID NO: 112720 - protein, 7 aa, synthetic construct
ATAYHTH

SEQ ID NO: 112721 - protein, 7 aa, synthetic construct
ATDNSKR

SEQ ID NO: 112722 - protein, 7 aa, synthetic construct
ATDPRVR

SEQ ID NO: 112723 - protein, 7 aa, synthetic construct
ATEKRQY

SEQ ID NO: 112724 - protein, 7 aa, synthetic construct
ATEKSRN

SEQ ID NO: 112725 - protein, 7 aa, synthetic construct
ATENMRK

SEQ ID NO: 112726 - protein, 7 aa, synthetic construct
ATERKQN

SEQ ID NO: 112727 - protein, 7 aa, synthetic construct
ATERLPR

SEQ ID NO: 112728 - protein, 7 aa, synthetic construct
ATERPIK

SEQ ID NO: 112729 - protein, 7 aa, synthetic construct
ATERQRS

SEQ ID NO: 112730 - protein, 7 aa, synthetic construct
ATERSPR

SEQ ID NO: 112731 - protein, 7 aa, synthetic construct
ATESKRT

SEQ ID NO: 112732 - protein, 7 aa, synthetic construct
ATFQNSR

SEQ ID NO: 112733 - protein, 7 aa, synthetic construct
ATGDRLR

SEQ ID NO: 112734 - protein, 7 aa, synthetic construct
ATGENRR

SEQ ID NO: 112735 - protein, 7 aa, synthetic construct
ATGKGYT

SEQ ID NO: 112736 - protein, 7 aa, synthetic construct
ATGLDKR

SEQ ID NO: 112737 - protein, 7 aa, synthetic construct
ATGLHSR

SEQ ID NO: 112738 - protein, 7 aa, synthetic construct
ATGNEKR

SEQ ID NO: 112739 - protein, 7 aa, synthetic construct
ATGQSRG

SEQ ID NO: 112740 - protein, 7 aa, synthetic construct
ATGQTKW

SEQ ID NO: 112741 - protein, 7 aa, synthetic construct
ATGRQSM

SEQ ID NO: 112742 - protein, 7 aa, synthetic construct
ATGRSMT

SEQ ID NO: 112743 - protein, 7 aa, synthetic construct
ATGTKFY

SEQ ID NO: 112744 - protein, 7 aa, synthetic construct
ATGYAMK

SEQ ID NO: 112745 - protein, 7 aa, synthetic construct
ATGYKQN

SEQ ID NO: 112746 - protein, 7 aa, synthetic construct
ATGYSKQ

SEQ ID NO: 112747 - protein, 7 aa, synthetic construct
ATHAARL

SEQ ID NO: 112748 - protein, 7 aa, synthetic construct
ATHAPQR

SEQ ID NO: 112749 - protein, 7 aa, synthetic construct
ATHEKHD

SEQ ID NO: 112750 - protein, 7 aa, synthetic construct
ATHGVAR

SEQ ID NO: 112751 - protein, 7 aa, synthetic construct
ATHHQLK

SEQ ID NO: 112752 - protein, 7 aa, synthetic construct
ATHIHKA

SEQ ID NO: 112753 - protein, 7 aa, synthetic construct
ATHMHTK

SEQ ID NO: 112754 - protein, 7 aa, synthetic construct
ATHMQYK

SEQ ID NO: 112755 - protein, 7 aa, synthetic construct
ATHMSVR

SEQ ID NO: 112756 - protein, 7 aa, synthetic construct
ATHPNNR

SEQ ID NO: 112757 - protein, 7 aa, synthetic construct
ATHRQMI

SEQ ID NO: 112758 - protein, 7 aa, synthetic construct
ATHRVNI

SEQ ID NO: 112759 - protein, 7 aa, synthetic construct
ATHSARV

SEQ ID NO: 112760 - protein, 7 aa, synthetic construct
ATHVYKG

SEQ ID NO: 112761 - protein, 7 aa, synthetic construct
ATIHRNA

SEQ ID NO: 112762 - protein, 7 aa, synthetic construct
ATKFDQR

SEQ ID NO: 112763 - protein, 7 aa, synthetic construct
ATKFMPS

SEQ ID NO: 112764 - protein, 7 aa, synthetic construct
ATKFSGH

SEQ ID NO: 112765 - protein, 7 aa, synthetic construct
ATKGSYH

SEQ ID NO: 112766 - protein, 7 aa, synthetic construct
ATKHMSL

SEQ ID NO: 112767 - protein, 7 aa, synthetic construct
ATKIHTI

SEQ ID NO: 112768 - protein, 7 aa, synthetic construct
ATKKNFD

SEQ ID NO: 112769 - protein, 7 aa, synthetic construct
ATKPPFL

SEQ ID NO: 112770 - protein, 7 aa, synthetic construct
ATKPVIF

SEQ ID NO: 112771 - protein, 7 aa, synthetic construct
ATKPVMY

SEQ ID NO: 112772 - protein, 7 aa, synthetic construct
ATKQDSR

SEQ ID NO: 112773 - protein, 7 aa, synthetic construct
ATKQTYH

SEQ ID NO: 112774 - protein, 7 aa, synthetic construct
ATKRMDA

SEQ ID NO: 112775 - protein, 7 aa, synthetic construct
ATKSSAW

SEQ ID NO: 112776 - protein, 7 aa, synthetic construct
ATKTATW

SEQ ID NO: 112777 - protein, 7 aa, synthetic construct
ATKVHSF

SEQ ID NO: 112778 - protein, 7 aa, synthetic construct
ATKVHYG

SEQ ID NO: 112779 - protein, 7 aa, synthetic construct
ATKYNSG

SEQ ID NO: 112780 - protein, 7 aa, synthetic construct
ATKYQTL

SEQ ID NO: 112781 - protein, 7 aa, synthetic construct
ATKYTPA

SEQ ID NO: 112782 - protein, 7 aa, synthetic construct
ATLRKDL

SEQ ID NO: 112783 - protein, 7 aa, synthetic construct
ATLTRQA

SEQ ID NO: 112784 - protein, 7 aa, synthetic construct
ATMHQAK

SEQ ID NO: 112785 - protein, 7 aa, synthetic construct
ATMMRDR

SEQ ID NO: 112786 - protein, 7 aa, synthetic construct
ATMNSRM

SEQ ID NO: 112787 - protein, 7 aa, synthetic construct
ATMRLEK

SEQ ID NO: 112788 - protein, 7 aa, synthetic construct
ATNAKYH

SEQ ID NO: 112789 - protein, 7 aa, synthetic construct
ATNHRPL

SEQ ID NO: 112790 - protein, 7 aa, synthetic construct
ATNPRKE

SEQ ID NO: 112791 - protein, 7 aa, synthetic construct
ATNRPGY

SEQ ID NO: 112792 - protein, 7 aa, synthetic construct
ATPHNRA

SEQ ID NO: 112793 - protein, 7 aa, synthetic construct
ATPKFQV

SEQ ID NO: 112794 - protein, 7 aa, synthetic construct
ATPPKLY

SEQ ID NO: 112795 - protein, 7 aa, synthetic construct
ATPRHAS

SEQ ID NO: 112796 - protein, 7 aa, synthetic construct
ATPRHQN

SEQ ID NO: 112797 - protein, 7 aa, synthetic construct
ATQHRSG

SEQ ID NO: 112798 - protein, 7 aa, synthetic construct
ATQKARD

SEQ ID NO: 112799 - protein, 7 aa, synthetic construct
ATQKPIY

SEQ ID NO: 112800 - protein, 7 aa, synthetic construct
ATQMKRD

SEQ ID NO: 112801 - protein, 7 aa, synthetic construct
ATQNKER

SEQ ID NO: 112802 - protein, 7 aa, synthetic construct
ATQQGYR

SEQ ID NO: 112803 - protein, 7 aa, synthetic construct
ATQQSRQ

SEQ ID NO: 112804 - protein, 7 aa, synthetic construct
ATQSHKF

SEQ ID NO: 112805 - protein, 7 aa, synthetic construct
ATQYMSK

SEQ ID NO: 112806 - protein, 7 aa, synthetic construct
ATRAGGF

SEQ ID NO: 112807 - protein, 7 aa, synthetic construct
ATRDIMR

SEQ ID NO: 112808 - protein, 7 aa, synthetic construct
ATRDNNK

SEQ ID NO: 112809 - protein, 7 aa, synthetic construct
ATREIRG

SEQ ID NO: 112810 - protein, 7 aa, synthetic construct
ATREVRI

SEQ ID NO: 112811 - protein, 7 aa, synthetic construct
ATRHANI

SEQ ID NO: 112812 - protein, 7 aa, synthetic construct
ATRHIGP

SEQ ID NO: 112813 - protein, 7 aa, synthetic construct
ATRHLPV

SEQ ID NO: 112814 - protein, 7 aa, synthetic construct
ATRKEIY

SEQ ID NO: 112815 - protein, 7 aa, synthetic construct
ATRMQGH

SEQ ID NO: 112816 - protein, 7 aa, synthetic construct
ATRNAGF

SEQ ID NO: 112817 - protein, 7 aa, synthetic construct
ATRNNSL

SEQ ID NO: 112818 - protein, 7 aa, synthetic construct
ATRPPKE

SEQ ID NO: 112819 - protein, 7 aa, synthetic construct
ATSHVVR

SEQ ID NO: 112820 - protein, 7 aa, synthetic construct
ATSKQDK

SEQ ID NO: 112821 - protein, 7 aa, synthetic construct
ATSKSYA

SEQ ID NO: 112822 - protein, 7 aa, synthetic construct
ATSNYKG

SEQ ID NO: 112823 - protein, 7 aa, synthetic construct
ATSRGPY

SEQ ID NO: 112824 - protein, 7 aa, synthetic construct
ATSRMSM

SEQ ID NO: 112825 - protein, 7 aa, synthetic construct
ATSRPQW

SEQ ID NO: 112826 - protein, 7 aa, synthetic construct
ATSRTHM

SEQ ID NO: 112827 - protein, 7 aa, synthetic construct
ATSTYKG

SEQ ID NO: 112828 - protein, 7 aa, synthetic construct
ATSVRSF

SEQ ID NO: 112829 - protein, 7 aa, synthetic construct
ATTEKAR

SEQ ID NO: 112830 - protein, 7 aa, synthetic construct
ATTGRYN

SEQ ID NO: 112831 - protein, 7 aa, synthetic construct
ATTHNQR

SEQ ID NO: 112832 - protein, 7 aa, synthetic construct
ATTPRTY

SEQ ID NO: 112833 - protein, 7 aa, synthetic construct
ATTRHQV

SEQ ID NO: 112834 - protein, 7 aa, synthetic construct
ATTRVDR

SEQ ID NO: 112835 - protein, 7 aa, synthetic construct
ATVGLHR

SEQ ID NO: 112836 - protein, 7 aa, synthetic construct
ATVKRVD

SEQ ID NO: 112837 - protein, 7 aa, synthetic construct
ATYDKYK

SEQ ID NO: 112838 - protein, 7 aa, synthetic construct
ATYGSMK

SEQ ID NO: 112839 - protein, 7 aa, synthetic construct
ATYGSVK

SEQ ID NO: 112840 - protein, 7 aa, synthetic construct
ATYHANS

SEQ ID NO: 112841 - protein, 7 aa, synthetic construct
ATYHVGA

SEQ ID NO: 112842 - protein, 7 aa, synthetic construct
ATYKPER

SEQ ID NO: 112843 - protein, 7 aa, synthetic construct
ATYRNSA

SEQ ID NO: 112844 - protein, 7 aa, synthetic construct
ATYSNKS

SEQ ID NO: 112845 - protein, 7 aa, synthetic construct
ATYSQTK

SEQ ID NO: 112846 - protein, 7 aa, synthetic construct
ATYSTKT

SEQ ID NO: 112847 - protein, 7 aa, synthetic construct
ATYTNKG

SEQ ID NO: 112848 - protein, 7 aa, synthetic construct
ATYTQMS

SEQ ID NO: 112849 - protein, 7 aa, synthetic construct
AVAKEKW

SEQ ID NO: 112850 - protein, 7 aa, synthetic construct
AVARGRE

SEQ ID NO: 112851 - protein, 7 aa, synthetic construct
AVARKDV

SEQ ID NO: 112852 - protein, 7 aa, synthetic construct
AVATHGK

SEQ ID NO: 112853 - protein, 7 aa, synthetic construct
AVDFQKS

SEQ ID NO: 112854 - protein, 7 aa, synthetic construct
AVDRPKF

SEQ ID NO: 112855 - protein, 7 aa, synthetic construct
AVDRRIG

SEQ ID NO: 112856 - protein, 7 aa, synthetic construct
AVDRRMN

SEQ ID NO: 112857 - protein, 7 aa, synthetic construct
AVDSVRR

SEQ ID NO: 112858 - protein, 7 aa, synthetic construct
AVGKFTT

SEQ ID NO: 112859 - protein, 7 aa, synthetic construct
AVGQYKG

SEQ ID NO: 112860 - protein, 7 aa, synthetic construct
AVGRAHP

SEQ ID NO: 112861 - protein, 7 aa, synthetic construct
AVGRERG

SEQ ID NO: 112862 - protein, 7 aa, synthetic construct
AVGRMGI

SEQ ID NO: 112863 - protein, 7 aa, synthetic construct
AVGRMIA

SEQ ID NO: 112864 - protein, 7 aa, synthetic construct
AVGVYKG

SEQ ID NO: 112865 - protein, 7 aa, synthetic construct
AVHAVRA

SEQ ID NO: 112866 - protein, 7 aa, synthetic construct
AVHGNAR

SEQ ID NO: 112867 - protein, 7 aa, synthetic construct
AVHGVRI

SEQ ID NO: 112868 - protein, 7 aa, synthetic construct
AVHKIVN

SEQ ID NO: 112869 - protein, 7 aa, synthetic construct
AVHKPTT

SEQ ID NO: 112870 - protein, 7 aa, synthetic construct
AVHRTLG

SEQ ID NO: 112871 - protein, 7 aa, synthetic construct
AVHSIRA

SEQ ID NO: 112872 - protein, 7 aa, synthetic construct
AVHTPRP

SEQ ID NO: 112873 - protein, 7 aa, synthetic construct
AVIAKRD

SEQ ID NO: 112874 - protein, 7 aa, synthetic construct
AVIPRTA

SEQ ID NO: 112875 - protein, 7 aa, synthetic construct
AVISRGP

SEQ ID NO: 112876 - protein, 7 aa, synthetic construct
AVKDLYR

SEQ ID NO: 112877 - protein, 7 aa, synthetic construct
AVKFRDG

SEQ ID NO: 112878 - protein, 7 aa, synthetic construct
AVKRDQI

SEQ ID NO: 112879 - protein, 7 aa, synthetic construct
AVKRIEN

SEQ ID NO: 112880 - protein, 7 aa, synthetic construct
AVKSISY

SEQ ID NO: 112881 - protein, 7 aa, synthetic construct
AVKSRFD

SEQ ID NO: 112882 - protein, 7 aa, synthetic construct
AVKYANQ

SEQ ID NO: 112883 - protein, 7 aa, synthetic construct
AVKYMNA

SEQ ID NO: 112884 - protein, 7 aa, synthetic construct
AVKYSVA

SEQ ID NO: 112885 - protein, 7 aa, synthetic construct
AVKYTKD

SEQ ID NO: 112886 - protein, 7 aa, synthetic construct
AVMKHSL

SEQ ID NO: 112887 - protein, 7 aa, synthetic construct
AVMRPTV

SEQ ID NO: 112888 - protein, 7 aa, synthetic construct
AVNESKR

SEQ ID NO: 112889 - protein, 7 aa, synthetic construct
AVNGTHR

SEQ ID NO: 112890 - protein, 7 aa, synthetic construct
AVNLHRA

SEQ ID NO: 112891 - protein, 7 aa, synthetic construct
AVNMPRP

SEQ ID NO: 112892 - protein, 7 aa, synthetic construct
AVNRVRE

SEQ ID NO: 112893 - protein, 7 aa, synthetic construct
AVPAHRA

SEQ ID NO: 112894 - protein, 7 aa, synthetic construct
AVPARNM

SEQ ID NO: 112895 - protein, 7 aa, synthetic construct
AVPHIRS

SEQ ID NO: 112896 - protein, 7 aa, synthetic construct
AVPHLRG

SEQ ID NO: 112897 - protein, 7 aa, synthetic construct
AVPHRNL

SEQ ID NO: 112898 - protein, 7 aa, synthetic construct
AVPIARP

SEQ ID NO: 112899 - protein, 7 aa, synthetic construct
AVPKHAY

SEQ ID NO: 112900 - protein, 7 aa, synthetic construct
AVPNSPR

SEQ ID NO: 112901 - protein, 7 aa, synthetic construct
AVPQSNR

SEQ ID NO: 112902 - protein, 7 aa, synthetic construct
AVPRHGA

SEQ ID NO: 112903 - protein, 7 aa, synthetic construct
AVPRPHT

SEQ ID NO: 112904 - protein, 7 aa, synthetic construct
AVPRQIQ

SEQ ID NO: 112905 - protein, 7 aa, synthetic construct
AVQHAGK

SEQ ID NO: 112906 - protein, 7 aa, synthetic construct
AVQHSTR

SEQ ID NO: 112907 - protein, 7 aa, synthetic construct
AVQKMGY

SEQ ID NO: 112908 - protein, 7 aa, synthetic construct
AVQKPSN

SEQ ID NO: 112909 - protein, 7 aa, synthetic construct
AVQKTDR

SEQ ID NO: 112910 - protein, 7 aa, synthetic construct
AVQVRRD

SEQ ID NO: 112911 - protein, 7 aa, synthetic construct
AVRAERA

SEQ ID NO: 112912 - protein, 7 aa, synthetic construct
AVRDATR

SEQ ID NO: 112913 - protein, 7 aa, synthetic construct
AVRDNTR

SEQ ID NO: 112914 - protein, 7 aa, synthetic construct
AVRDVSR

SEQ ID NO: 112915 - protein, 7 aa, synthetic construct
AVREKYQ

SEQ ID NO: 112916 - protein, 7 aa, synthetic construct
AVRGIHQ

SEQ ID NO: 112917 - protein, 7 aa, synthetic construct
AVRGSHS

SEQ ID NO: 112918 - protein, 7 aa, synthetic construct
AVRGTHI

SEQ ID NO: 112919 - protein, 7 aa, synthetic construct
AVRKFQE

SEQ ID NO: 112920 - protein, 7 aa, synthetic construct
AVRMAKD

SEQ ID NO: 112921 - protein, 7 aa, synthetic construct
AVRMTKD

SEQ ID NO: 112922 - protein, 7 aa, synthetic construct
AVRNAPF

SEQ ID NO: 112923 - protein, 7 aa, synthetic construct
AVRNIHA

SEQ ID NO: 112924 - protein, 7 aa, synthetic construct
AVRNMIA

SEQ ID NO: 112925 - protein, 7 aa, synthetic construct
AVRNNTY

SEQ ID NO: 112926 - protein, 7 aa, synthetic construct
AVRPHSG

SEQ ID NO: 112927 - protein, 7 aa, synthetic construct
AVRTLHQ

SEQ ID NO: 112928 - protein, 7 aa, synthetic construct
AVRTSPH

SEQ ID NO: 112929 - protein, 7 aa, synthetic construct
AVRVHKE

SEQ ID NO: 112930 - protein, 7 aa, synthetic construct
AVRVHTS

SEQ ID NO: 112931 - protein, 7 aa, synthetic construct
AVSHQIR

SEQ ID NO: 112932 - protein, 7 aa, synthetic construct
AVSHRSG

SEQ ID NO: 112933 - protein, 7 aa, synthetic construct
AVSRVPM

SEQ ID NO: 112934 - protein, 7 aa, synthetic construct
AVTGPSR

SEQ ID NO: 112935 - protein, 7 aa, synthetic construct
AVTGSKW

SEQ ID NO: 112936 - protein, 7 aa, synthetic construct
AVTHSIR

SEQ ID NO: 112937 - protein, 7 aa, synthetic construct
AVTKAQW

SEQ ID NO: 112938 - protein, 7 aa, synthetic construct
AVTKSEK

SEQ ID NO: 112939 - protein, 7 aa, synthetic construct
AVTNSRA

SEQ ID NO: 112940 - protein, 7 aa, synthetic construct
AVTQHAK

SEQ ID NO: 112941 - protein, 7 aa, synthetic construct
AVTRLDR

SEQ ID NO: 112942 - protein, 7 aa, synthetic construct
AVTRPSS

SEQ ID NO: 112943 - protein, 7 aa, synthetic construct
AVTYKSI

SEQ ID NO: 112944 - protein, 7 aa, synthetic construct
AVVRSSS

SEQ ID NO: 112945 - protein, 7 aa, synthetic construct
AVYKNSG

SEQ ID NO: 112946 - protein, 7 aa, synthetic construct
AVYNSKM

SEQ ID NO: 112947 - protein, 7 aa, synthetic construct
AWEKMKN

SEQ ID NO: 112948 - protein, 7 aa, synthetic construct
AWKEKAQ

SEQ ID NO: 112949 - protein, 7 aa, synthetic construct
AWKKLSE

SEQ ID NO: 112950 - protein, 7 aa, synthetic construct
AWSPDGR

SEQ ID NO: 112951 - protein, 7 aa, synthetic construct
AWSQAPK

SEQ ID NO: 112952 - protein, 7 aa, synthetic construct
AWTQRED

SEQ ID NO: 112953 - protein, 7 aa, synthetic construct
AYAAPQR

SEQ ID NO: 112954 - protein, 7 aa, synthetic construct
AYAGIRS

SEQ ID NO: 112955 - protein, 7 aa, synthetic construct
AYAGTAR

SEQ ID NO: 112956 - protein, 7 aa, synthetic construct
AYAHGKS

SEQ ID NO: 112957 - protein, 7 aa, synthetic construct
AYAHTKA

SEQ ID NO: 112958 - protein, 7 aa, synthetic construct
AYASQGK

SEQ ID NO: 112959 - protein, 7 aa, synthetic construct
AYDRIKQ

SEQ ID NO: 112960 - protein, 7 aa, synthetic construct
AYEGKPR

SEQ ID NO: 112961 - protein, 7 aa, synthetic construct
AYEKPVR

SEQ ID NO: 112962 - protein, 7 aa, synthetic construct
AYEKQGR

SEQ ID NO: 112963 - protein, 7 aa, synthetic construct
AYEMKGK

SEQ ID NO: 112964 - protein, 7 aa, synthetic construct
AYGGSNK

SEQ ID NO: 112965 - protein, 7 aa, synthetic construct
AYGKKEV

SEQ ID NO: 112966 - protein, 7 aa, synthetic construct
AYGLKIP

SEQ ID NO: 112967 - protein, 7 aa, synthetic construct
AYGPKIG

SEQ ID NO: 112968 - protein, 7 aa, synthetic construct
AYGQALK

SEQ ID NO: 112969 - protein, 7 aa, synthetic construct
AYGSKHI

SEQ ID NO: 112970 - protein, 7 aa, synthetic construct
AYGSQVK

SEQ ID NO: 112971 - protein, 7 aa, synthetic construct
AYGTQLR

SEQ ID NO: 112972 - protein, 7 aa, synthetic construct
AYGVHNK

SEQ ID NO: 112973 - protein, 7 aa, synthetic construct
AYHAKNP

SEQ ID NO: 112974 - protein, 7 aa, synthetic construct
AYHAMKA

SEQ ID NO: 112975 - protein, 7 aa, synthetic construct
AYHGLKG

SEQ ID NO: 112976 - protein, 7 aa, synthetic construct
AYHKPTM

SEQ ID NO: 112977 - protein, 7 aa, synthetic construct
AYHLGGK

SEQ ID NO: 112978 - protein, 7 aa, synthetic construct
AYHTQAK

SEQ ID NO: 112979 - protein, 7 aa, synthetic construct
AYIKPSS

SEQ ID NO: 112980 - protein, 7 aa, synthetic construct
AYIQSGK

SEQ ID NO: 112981 - protein, 7 aa, synthetic construct
AYKAIHG

SEQ ID NO: 112982 - protein, 7 aa, synthetic construct
AYKEAFR

SEQ ID NO: 112983 - protein, 7 aa, synthetic construct
AYKERVI

SEQ ID NO: 112984 - protein, 7 aa, synthetic construct
AYKGHGG

SEQ ID NO: 112985 - protein, 7 aa, synthetic construct
AYKGQSL

SEQ ID NO: 112986 - protein, 7 aa, synthetic construct
AYKGRNE

SEQ ID NO: 112987 - protein, 7 aa, synthetic construct
AYKHANS

SEQ ID NO: 112988 - protein, 7 aa, synthetic construct
AYKHPNI

SEQ ID NO: 112989 - protein, 7 aa, synthetic construct
AYKINPP

SEQ ID NO: 112990 - protein, 7 aa, synthetic construct
AYKIPDK

SEQ ID NO: 112991 - protein, 7 aa, synthetic construct
AYKIQRD

SEQ ID NO: 112992 - protein, 7 aa, synthetic construct
AYKKMDI

SEQ ID NO: 112993 - protein, 7 aa, synthetic construct
AYKLSPA

SEQ ID NO: 112994 - protein, 7 aa, synthetic construct
AYKMATQ

SEQ ID NO: 112995 - protein, 7 aa, synthetic construct
AYKNIAV

SEQ ID NO: 112996 - protein, 7 aa, synthetic construct
AYKNKDT

SEQ ID NO: 112997 - protein, 7 aa, synthetic construct
AYKNMDR

SEQ ID NO: 112998 - protein, 7 aa, synthetic construct
AYKNQSN

SEQ ID NO: 112999 - protein, 7 aa, synthetic construct
AYKNSHN

SEQ ID NO: 113000 - protein, 7 aa, synthetic construct
AYKNVVS

SEQ ID NO: 113001 - protein, 7 aa, synthetic construct
AYKPLAN

SEQ ID NO: 113002 - protein, 7 aa, synthetic construct
AYKPTAG

SEQ ID NO: 113003 - protein, 7 aa, synthetic construct
AYKQAPV

SEQ ID NO: 113004 - protein, 7 aa, synthetic construct
AYKQIPA

SEQ ID NO: 113005 - protein, 7 aa, synthetic construct
AYKRISE

SEQ ID NO: 113006 - protein, 7 aa, synthetic construct
AYKSDMK

SEQ ID NO: 113007 - protein, 7 aa, synthetic construct
AYKSELK

SEQ ID NO: 113008 - protein, 7 aa, synthetic construct
AYKSMDK

SEQ ID NO: 113009 - protein, 7 aa, synthetic construct
AYKSQGG

SEQ ID NO: 113010 - protein, 7 aa, synthetic construct
AYKTDLR

SEQ ID NO: 113011 - protein, 7 aa, synthetic construct
AYLKNIT

SEQ ID NO: 113012 - protein, 7 aa, synthetic construct
AYMAQKV

SEQ ID NO: 113013 - protein, 7 aa, synthetic construct
AYMATGK

SEQ ID NO: 113014 - protein, 7 aa, synthetic construct
AYMEQPR

SEQ ID NO: 113015 - protein, 7 aa, synthetic construct
AYMKPTI

SEQ ID NO: 113016 - protein, 7 aa, synthetic construct
AYNKIPH

SEQ ID NO: 113017 - protein, 7 aa, synthetic construct
AYNKMPI

SEQ ID NO: 113018 - protein, 7 aa, synthetic construct
AYNKSHA

SEQ ID NO: 113019 - protein, 7 aa, synthetic construct
AYNTSFK

SEQ ID NO: 113020 - protein, 7 aa, synthetic construct
AYNVSAK

SEQ ID NO: 113021 - protein, 7 aa, synthetic construct
AYPIKSA

SEQ ID NO: 113022 - protein, 7 aa, synthetic construct
AYPKQER

SEQ ID NO: 113023 - protein, 7 aa, synthetic construct
AYPNKPM

SEQ ID NO: 113024 - protein, 7 aa, synthetic construct
AYPNVRG

SEQ ID NO: 113025 - protein, 7 aa, synthetic construct
AYPRGNM

SEQ ID NO: 113026 - protein, 7 aa, synthetic construct
AYPSGAK

SEQ ID NO: 113027 - protein, 7 aa, synthetic construct
AYPTAKM

SEQ ID NO: 113028 - protein, 7 aa, synthetic construct
AYQIQKQ

SEQ ID NO: 113029 - protein, 7 aa, synthetic construct
AYQKLPQ

SEQ ID NO: 113030 - protein, 7 aa, synthetic construct
AYQKMAV

SEQ ID NO: 113031 - protein, 7 aa, synthetic construct
AYQKVRD

SEQ ID NO: 113032 - protein, 7 aa, synthetic construct
AYQLKRE

SEQ ID NO: 113033 - protein, 7 aa, synthetic construct
AYQNKYH

SEQ ID NO: 113034 - protein, 7 aa, synthetic construct
AYQPGRV

SEQ ID NO: 113035 - protein, 7 aa, synthetic construct
AYQSLKS

SEQ ID NO: 113036 - protein, 7 aa, synthetic construct
AYQYTAG

SEQ ID NO: 113037 - protein, 7 aa, synthetic construct
AYRAMSA

SEQ ID NO: 113038 - protein, 7 aa, synthetic construct
AYRDIKA

SEQ ID NO: 113039 - protein, 7 aa, synthetic construct
AYRDQKQ

SEQ ID NO: 113040 - protein, 7 aa, synthetic construct
AYRQQQL

SEQ ID NO: 113041 - protein, 7 aa, synthetic construct
AYSKGGG

SEQ ID NO: 113042 - protein, 7 aa, synthetic construct
AYSKIHG

SEQ ID NO: 113043 - protein, 7 aa, synthetic construct
AYSMKGI

SEQ ID NO: 113044 - protein, 7 aa, synthetic construct
AYSTKSY

SEQ ID NO: 113045 - protein, 7 aa, synthetic construct
AYTGANR

SEQ ID NO: 113046 - protein, 7 aa, synthetic construct
AYTGGPK

SEQ ID NO: 113047 - protein, 7 aa, synthetic construct
AYTNAKN

SEQ ID NO: 113048 - protein, 7 aa, synthetic construct
AYTNGKY

SEQ ID NO: 113049 - protein, 7 aa, synthetic construct
AYTNMKG

SEQ ID NO: 113050 - protein, 7 aa, synthetic construct
AYTPQRQ

SEQ ID NO: 113051 - protein, 7 aa, synthetic construct
AYTSPKQ

SEQ ID NO: 113052 - protein, 7 aa, synthetic construct
AYVAKTL

SEQ ID NO: 113053 - protein, 7 aa, synthetic construct
AYVPKAS

SEQ ID NO: 113054 - protein, 7 aa, synthetic construct
CGKNCRE

SEQ ID NO: 113055 - protein, 7 aa, synthetic construct
CGKQHCI

SEQ ID NO: 113056 - protein, 7 aa, synthetic construct
CGKSQCH

SEQ ID NO: 113057 - protein, 7 aa, synthetic construct
CGNATRC

SEQ ID NO: 113058 - protein, 7 aa, synthetic construct
CHDKTKC

SEQ ID NO: 113059 - protein, 7 aa, synthetic construct
CRASSCT

SEQ ID NO: 113060 - protein, 7 aa, synthetic construct
CRNTDIC

SEQ ID NO: 113061 - protein, 7 aa, synthetic construct
CRPTNCN

SEQ ID NO: 113062 - protein, 7 aa, synthetic construct
CRTSTCP

SEQ ID NO: 113063 - protein, 7 aa, synthetic construct
DAAKNAR

SEQ ID NO: 113064 - protein, 7 aa, synthetic construct
DAAKQSR

SEQ ID NO: 113065 - protein, 7 aa, synthetic construct
DAAKSRF

SEQ ID NO: 113066 - protein, 7 aa, synthetic construct
DAAKVTR

SEQ ID NO: 113067 - protein, 7 aa, synthetic construct
DAARPQR

SEQ ID NO: 113068 - protein, 7 aa, synthetic construct
DAARQMK

SEQ ID NO: 113069 - protein, 7 aa, synthetic construct
DAARRVG

SEQ ID NO: 113070 - protein, 7 aa, synthetic construct
DAATKFR

SEQ ID NO: 113071 - protein, 7 aa, synthetic construct
DAGKRLF

SEQ ID NO: 113072 - protein, 7 aa, synthetic construct
DAGKRNF

SEQ ID NO: 113073 - protein, 7 aa, synthetic construct
DAGRPIK

SEQ ID NO: 113074 - protein, 7 aa, synthetic construct
DAGYTMR

SEQ ID NO: 113075 - protein, 7 aa, synthetic construct
DAHKRGA

SEQ ID NO: 113076 - protein, 7 aa, synthetic construct
DAHKRQV

SEQ ID NO: 113077 - protein, 7 aa, synthetic construct
DAHKSKS

SEQ ID NO: 113078 - protein, 7 aa, synthetic construct
DAHRIKA

SEQ ID NO: 113079 - protein, 7 aa, synthetic construct
DAIKRMN

SEQ ID NO: 113080 - protein, 7 aa, synthetic construct
DAIRPSK

SEQ ID NO: 113081 - protein, 7 aa, synthetic construct
DAKARSL

SEQ ID NO: 113082 - protein, 7 aa, synthetic construct
DAKDGRR

SEQ ID NO: 113083 - protein, 7 aa, synthetic construct
DAKDIRR

SEQ ID NO: 113084 - protein, 7 aa, synthetic construct
DAKFGSK

SEQ ID NO: 113085 - protein, 7 aa, synthetic construct
DAKFPNK

SEQ ID NO: 113086 - protein, 7 aa, synthetic construct
DAKGRHV

SEQ ID NO: 113087 - protein, 7 aa, synthetic construct
DAKIIRM

SEQ ID NO: 113088 - protein, 7 aa, synthetic construct
DAKIQRS

SEQ ID NO: 113089 - protein, 7 aa, synthetic construct
DAKLSRF

SEQ ID NO: 113090 - protein, 7 aa, synthetic construct
DAKMRNT

SEQ ID NO: 113091 - protein, 7 aa, synthetic construct
DAKNFQK

SEQ ID NO: 113092 - protein, 7 aa, synthetic construct
DAKNKTW

SEQ ID NO: 113093 - protein, 7 aa, synthetic construct
DAKRANT

SEQ ID NO: 113094 - protein, 7 aa, synthetic construct
DAKRNFI

SEQ ID NO: 113095 - protein, 7 aa, synthetic construct
DAKRQFV

SEQ ID NO: 113096 - protein, 7 aa, synthetic construct
DAKRSFA

SEQ ID NO: 113097 - protein, 7 aa, synthetic construct
DAKSRYG

SEQ ID NO: 113098 - protein, 7 aa, synthetic construct
DAKVGHR

SEQ ID NO: 113099 - protein, 7 aa, synthetic construct
DAKVHRG

SEQ ID NO: 113100 - protein, 7 aa, synthetic construct
DALKARQ

SEQ ID NO: 113101 - protein, 7 aa, synthetic construct
DALKQRS

SEQ ID NO: 113102 - protein, 7 aa, synthetic construct
DALKRGY

SEQ ID NO: 113103 - protein, 7 aa, synthetic construct
DALKTRQ

SEQ ID NO: 113104 - protein, 7 aa, synthetic construct
DALRKLG

SEQ ID NO: 113105 - protein, 7 aa, synthetic construct
DALRKQQ

SEQ ID NO: 113106 - protein, 7 aa, synthetic construct
DALSPKR

SEQ ID NO: 113107 - protein, 7 aa, synthetic construct
DAMHKRV

SEQ ID NO: 113108 - protein, 7 aa, synthetic construct
DAMKAKM

SEQ ID NO: 113109 - protein, 7 aa, synthetic construct
DAMKRNS

SEQ ID NO: 113110 - protein, 7 aa, synthetic construct
DAMKVTR

SEQ ID NO: 113111 - protein, 7 aa, synthetic construct
DAMPKLR

SEQ ID NO: 113112 - protein, 7 aa, synthetic construct
DAMRIER

SEQ ID NO: 113113 - protein, 7 aa, synthetic construct
DAMRINK

SEQ ID NO: 113114 - protein, 7 aa, synthetic construct
DANKGRT

SEQ ID NO: 113115 - protein, 7 aa, synthetic construct
DANKLRV

SEQ ID NO: 113116 - protein, 7 aa, synthetic construct
DANLKRY

SEQ ID NO: 113117 - protein, 7 aa, synthetic construct
DANMKRH

SEQ ID NO: 113118 - protein, 7 aa, synthetic construct
DANPRNK

SEQ ID NO: 113119 - protein, 7 aa, synthetic construct
DANPVRR

SEQ ID NO: 113120 - protein, 7 aa, synthetic construct
DANQKRM

SEQ ID NO: 113121 - protein, 7 aa, synthetic construct
DANQVRR

SEQ ID NO: 113122 - protein, 7 aa, synthetic construct
DANRAKG

SEQ ID NO: 113123 - protein, 7 aa, synthetic construct
DANRANK

SEQ ID NO: 113124 - protein, 7 aa, synthetic construct
DANTAKR

SEQ ID NO: 113125 - protein, 7 aa, synthetic construct
DAPAKLR

SEQ ID NO: 113126 - protein, 7 aa, synthetic construct
DAPKTRL

SEQ ID NO: 113127 - protein, 7 aa, synthetic construct
DAQAKRL

SEQ ID NO: 113128 - protein, 7 aa, synthetic construct
DAQGKFK

SEQ ID NO: 113129 - protein, 7 aa, synthetic construct
DAQKQKY

SEQ ID NO: 113130 - protein, 7 aa, synthetic construct
DAQKSAR

SEQ ID NO: 113131 - protein, 7 aa, synthetic construct
DAQMKKF

SEQ ID NO: 113132 - protein, 7 aa, synthetic construct
DAQRQKM

SEQ ID NO: 113133 - protein, 7 aa, synthetic construct
DARFIKP

SEQ ID NO: 113134 - protein, 7 aa, synthetic construct
DARGIRN

SEQ ID NO: 113135 - protein, 7 aa, synthetic construct
DARGPPR

SEQ ID NO: 113136 - protein, 7 aa, synthetic construct
DARGVTK

SEQ ID NO: 113137 - protein, 7 aa, synthetic construct
DARNNLK

SEQ ID NO: 113138 - protein, 7 aa, synthetic construct
DARNPRA

SEQ ID NO: 113139 - protein, 7 aa, synthetic construct
DARQMRV

SEQ ID NO: 113140 - protein, 7 aa, synthetic construct
DARTKFQ

SEQ ID NO: 113141 - protein, 7 aa, synthetic construct
DARTSPR

SEQ ID NO: 113142 - protein, 7 aa, synthetic construct
DARVRSS

SEQ ID NO: 113143 - protein, 7 aa, synthetic construct
DARVSKM

SEQ ID NO: 113144 - protein, 7 aa, synthetic construct
DARYKTA

SEQ ID NO: 113145 - protein, 7 aa, synthetic construct
DASKMRQ

SEQ ID NO: 113146 - protein, 7 aa, synthetic construct
DASPKRF

SEQ ID NO: 113147 - protein, 7 aa, synthetic construct
DASRNLK

SEQ ID NO: 113148 - protein, 7 aa, synthetic construct
DASTKKL

SEQ ID NO: 113149 - protein, 7 aa, synthetic construct
DASVSKR

SEQ ID NO: 113150 - protein, 7 aa, synthetic construct
DATMVKK

SEQ ID NO: 113151 - protein, 7 aa, synthetic construct
DATRSQW

SEQ ID NO: 113152 - protein, 7 aa, synthetic construct
DAVAKAR

SEQ ID NO: 113153 - protein, 7 aa, synthetic construct
DAVIKRG

SEQ ID NO: 113154 - protein, 7 aa, synthetic construct
DAVQKRS

SEQ ID NO: 113155 - protein, 7 aa, synthetic construct
DAYAHRA

SEQ ID NO: 113156 - protein, 7 aa, synthetic construct
DAYKIPK

SEQ ID NO: 113157 - protein, 7 aa, synthetic construct
DAYKKSI

SEQ ID NO: 113158 - protein, 7 aa, synthetic construct
DDEMQWM

SEQ ID NO: 113159 - protein, 7 aa, synthetic construct
DDFKMPK

SEQ ID NO: 113160 - protein, 7 aa, synthetic construct
DDGKWGH

SEQ ID NO: 113161 - protein, 7 aa, synthetic construct
DDHHKGR

SEQ ID NO: 113162 - protein, 7 aa, synthetic construct
DDHRPGR

SEQ ID NO: 113163 - protein, 7 aa, synthetic construct
DDHWDMV

SEQ ID NO: 113164 - protein, 7 aa, synthetic construct
DDIKKNK

SEQ ID NO: 113165 - protein, 7 aa, synthetic construct
DDKARKI

SEQ ID NO: 113166 - protein, 7 aa, synthetic construct
DDKGWGR

SEQ ID NO: 113167 - protein, 7 aa, synthetic construct
DDKKPLK

SEQ ID NO: 113168 - protein, 7 aa, synthetic construct
DDKKQKM

SEQ ID NO: 113169 - protein, 7 aa, synthetic construct
DDKLTKR

SEQ ID NO: 113170 - protein, 7 aa, synthetic construct
DDKQKFR

SEQ ID NO: 113171 - protein, 7 aa, synthetic construct
DDKRGKF

SEQ ID NO: 113172 - protein, 7 aa, synthetic construct
DDKRRGV

SEQ ID NO: 113173 - protein, 7 aa, synthetic construct
DDKRWQE

SEQ ID NO: 113174 - protein, 7 aa, synthetic construct
DDLPRKF

SEQ ID NO: 113175 - protein, 7 aa, synthetic construct
DDQHRRV

SEQ ID NO: 113176 - protein, 7 aa, synthetic construct
DDRIMRH

SEQ ID NO: 113177 - protein, 7 aa, synthetic construct
DDVHRMR

SEQ ID NO: 113178 - protein, 7 aa, synthetic construct
DDVRGFR

SEQ ID NO: 113179 - protein, 7 aa, synthetic construct
DDWTNRK

SEQ ID NO: 113180 - protein, 7 aa, synthetic construct
DEARKYG

SEQ ID NO: 113181 - protein, 7 aa, synthetic construct
DEIKAKK

SEQ ID NO: 113182 - protein, 7 aa, synthetic construct
DEIPRRA

SEQ ID NO: 113183 - protein, 7 aa, synthetic construct
DEKIPRK

SEQ ID NO: 113184 - protein, 7 aa, synthetic construct
DEKKANR

SEQ ID NO: 113185 - protein, 7 aa, synthetic construct
DEKKRVV

SEQ ID NO: 113186 - protein, 7 aa, synthetic construct
DEKLKAK

SEQ ID NO: 113187 - protein, 7 aa, synthetic construct
DEKQWAR

SEQ ID NO: 113188 - protein, 7 aa, synthetic construct
DEKYYRV

SEQ ID NO: 113189 - protein, 7 aa, synthetic construct
DEQHRHR

SEQ ID NO: 113190 - protein, 7 aa, synthetic construct
DERAVRK

SEQ ID NO: 113191 - protein, 7 aa, synthetic construct
DERMYKH

SEQ ID NO: 113192 - protein, 7 aa, synthetic construct
DESRFQR

SEQ ID NO: 113193 - protein, 7 aa, synthetic construct
DEYHKRY

SEQ ID NO: 113194 - protein, 7 aa, synthetic construct
DFAKGGK

SEQ ID NO: 113195 - protein, 7 aa, synthetic construct
DFAKMKA

SEQ ID NO: 113196 - protein, 7 aa, synthetic construct
DFAKPRG

SEQ ID NO: 113197 - protein, 7 aa, synthetic construct
DFANIKR

SEQ ID NO: 113198 - protein, 7 aa, synthetic construct
DFATSKR

SEQ ID NO: 113199 - protein, 7 aa, synthetic construct
DFETRKH

SEQ ID NO: 113200 - protein, 7 aa, synthetic construct
DFGKKYG

SEQ ID NO: 113201 - protein, 7 aa, synthetic construct
DFHKMKA

SEQ ID NO: 113202 - protein, 7 aa, synthetic construct
DFITKRA

SEQ ID NO: 113203 - protein, 7 aa, synthetic construct
DFKAISK

SEQ ID NO: 113204 - protein, 7 aa, synthetic construct
DFKGIRA

SEQ ID NO: 113205 - protein, 7 aa, synthetic construct
DFKGPSR

SEQ ID NO: 113206 - protein, 7 aa, synthetic construct
DFKGQNR

SEQ ID NO: 113207 - protein, 7 aa, synthetic construct
DFKKPAN

SEQ ID NO: 113208 - protein, 7 aa, synthetic construct
DFKNVRN

SEQ ID NO: 113209 - protein, 7 aa, synthetic construct
DFKPKGG

SEQ ID NO: 113210 - protein, 7 aa, synthetic construct
DFKPSRS

SEQ ID NO: 113211 - protein, 7 aa, synthetic construct
DFKQIPR

SEQ ID NO: 113212 - protein, 7 aa, synthetic construct
DFKQMQK

SEQ ID NO: 113213 - protein, 7 aa, synthetic construct
DFKQYPK

SEQ ID NO: 113214 - protein, 7 aa, synthetic construct
DFKRSMV

SEQ ID NO: 113215 - protein, 7 aa, synthetic construct
DFKRSPI

SEQ ID NO: 113216 - protein, 7 aa, synthetic construct
DFKSIGK

SEQ ID NO: 113217 - protein, 7 aa, synthetic construct
DFKSPAK

SEQ ID NO: 113218 - protein, 7 aa, synthetic construct
DFKTTPR

SEQ ID NO: 113219 - protein, 7 aa, synthetic construct
DFKVQRT

SEQ ID NO: 113220 - protein, 7 aa, synthetic construct
DFMKRAA

SEQ ID NO: 113221 - protein, 7 aa, synthetic construct
DFNKSLK

SEQ ID NO: 113222 - protein, 7 aa, synthetic construct
DFNKTQK

SEQ ID NO: 113223 - protein, 7 aa, synthetic construct
DFNNAKR

SEQ ID NO: 113224 - protein, 7 aa, synthetic construct
DFPARKI

SEQ ID NO: 113225 - protein, 7 aa, synthetic construct
DFQGRKV

SEQ ID NO: 113226 - protein, 7 aa, synthetic construct
DFRAPNK

SEQ ID NO: 113227 - protein, 7 aa, synthetic construct
DFRGTTR

SEQ ID NO: 113228 - protein, 7 aa, synthetic construct
DFRHRTD

SEQ ID NO: 113229 - protein, 7 aa, synthetic construct
DFRKALG

SEQ ID NO: 113230 - protein, 7 aa, synthetic construct
DFRKGSV

SEQ ID NO: 113231 - protein, 7 aa, synthetic construct
DFRMVKG

SEQ ID NO: 113232 - protein, 7 aa, synthetic construct
DFRNKAI

SEQ ID NO: 113233 - protein, 7 aa, synthetic construct
DFRNTKA

SEQ ID NO: 113234 - protein, 7 aa, synthetic construct
DFTKVAK

SEQ ID NO: 113235 - protein, 7 aa, synthetic construct
DFTRPKM

SEQ ID NO: 113236 - protein, 7 aa, synthetic construct
DFTVKRV

SEQ ID NO: 113237 - protein, 7 aa, synthetic construct
DFVQKRS

SEQ ID NO: 113238 - protein, 7 aa, synthetic construct
DGAFKPR

SEQ ID NO: 113239 - protein, 7 aa, synthetic construct
DGAKARN

SEQ ID NO: 113240 - protein, 7 aa, synthetic construct
DGAKGRQ

SEQ ID NO: 113241 - protein, 7 aa, synthetic construct
DGAMWQK

SEQ ID NO: 113242 - protein, 7 aa, synthetic construct
DGARPVR

SEQ ID NO: 113243 - protein, 7 aa, synthetic construct
DGARTKG

SEQ ID NO: 113244 - protein, 7 aa, synthetic construct
DGATKKT

SEQ ID NO: 113245 - protein, 7 aa, synthetic construct
DGDIKKK

SEQ ID NO: 113246 - protein, 7 aa, synthetic construct
DGDYGRK

SEQ ID NO: 113247 - protein, 7 aa, synthetic construct
DGEWGRK

SEQ ID NO: 113248 - protein, 7 aa, synthetic construct
DGFGKKQ

SEQ ID NO: 113249 - protein, 7 aa, synthetic construct
DGFKQKL

SEQ ID NO: 113250 - protein, 7 aa, synthetic construct
DGGIDRR

SEQ ID NO: 113251 - protein, 7 aa, synthetic construct
DGGIKVR

SEQ ID NO: 113252 - protein, 7 aa, synthetic construct
DGGMKRS

SEQ ID NO: 113253 - protein, 7 aa, synthetic construct
DGHSSHW

SEQ ID NO: 113254 - protein, 7 aa, synthetic construct
DGIHERR

SEQ ID NO: 113255 - protein, 7 aa, synthetic construct
DGKAFPR

SEQ ID NO: 113256 - protein, 7 aa, synthetic construct
DGKGNTR

SEQ ID NO: 113257 - protein, 7 aa, synthetic construct
DGKKFGQ

SEQ ID NO: 113258 - protein, 7 aa, synthetic construct
DGKKVTH

SEQ ID NO: 113259 - protein, 7 aa, synthetic construct
DGKLQRT

SEQ ID NO: 113260 - protein, 7 aa, synthetic construct
DGKLVRT

SEQ ID NO: 113261 - protein, 7 aa, synthetic construct
DGKMAIR

SEQ ID NO: 113262 - protein, 7 aa, synthetic construct
DGKMKMY

SEQ ID NO: 113263 - protein, 7 aa, synthetic construct
DGKMYKV

SEQ ID NO: 113264 - protein, 7 aa, synthetic construct
DGKNLNR

SEQ ID NO: 113265 - protein, 7 aa, synthetic construct
DGKQFGK

SEQ ID NO: 113266 - protein, 7 aa, synthetic construct
DGKQVRI

SEQ ID NO: 113267 - protein, 7 aa, synthetic construct
DGKRIAM

SEQ ID NO: 113268 - protein, 7 aa, synthetic construct
DGKRMAM

SEQ ID NO: 113269 - protein, 7 aa, synthetic construct
DGKRVVT

SEQ ID NO: 113270 - protein, 7 aa, synthetic construct
DGKRWQD

SEQ ID NO: 113271 - protein, 7 aa, synthetic construct
DGKVRIL

SEQ ID NO: 113272 - protein, 7 aa, synthetic construct
DGKYTKV

SEQ ID NO: 113273 - protein, 7 aa, synthetic construct
DGLLKRV

SEQ ID NO: 113274 - protein, 7 aa, synthetic construct
DGLRARP

SEQ ID NO: 113275 - protein, 7 aa, synthetic construct
DGMKANK

SEQ ID NO: 113276 - protein, 7 aa, synthetic construct
DGMKNKL

SEQ ID NO: 113277 - protein, 7 aa, synthetic construct
DGNIKRL

SEQ ID NO: 113278 - protein, 7 aa, synthetic construct
DGNKKYV

SEQ ID NO: 113279 - protein, 7 aa, synthetic construct
DGNKNRV

SEQ ID NO: 113280 - protein, 7 aa, synthetic construct
DGNTRPK

SEQ ID NO: 113281 - protein, 7 aa, synthetic construct
DGNVPRK

SEQ ID NO: 113282 - protein, 7 aa, synthetic construct
DGPRPKA

SEQ ID NO: 113283 - protein, 7 aa, synthetic construct
DGPRRVV

SEQ ID NO: 113284 - protein, 7 aa, synthetic construct
DGQIQYR

SEQ ID NO: 113285 - protein, 7 aa, synthetic construct
DGQKWHT

SEQ ID NO: 113286 - protein, 7 aa, synthetic construct
DGRKGIT

SEQ ID NO: 113287 - protein, 7 aa, synthetic construct
DGRKNVA

SEQ ID NO: 113288 - protein, 7 aa, synthetic construct
DGRKVQL

SEQ ID NO: 113289 - protein, 7 aa, synthetic construct
DGRPKIV

SEQ ID NO: 113290 - protein, 7 aa, synthetic construct
DGRVKTQ

SEQ ID NO: 113291 - protein, 7 aa, synthetic construct
DGSKIKL

SEQ ID NO: 113292 - protein, 7 aa, synthetic construct
DGSKTKL

SEQ ID NO: 113293 - protein, 7 aa, synthetic construct
DGSYGHK

SEQ ID NO: 113294 - protein, 7 aa, synthetic construct
DGTKFKM

SEQ ID NO: 113295 - protein, 7 aa, synthetic construct
DGTRPLR

SEQ ID NO: 113296 - protein, 7 aa, synthetic construct
DGTVKRV

SEQ ID NO: 113297 - protein, 7 aa, synthetic construct
DGTVPRK

SEQ ID NO: 113298 - protein, 7 aa, synthetic construct
DGTWSPK

SEQ ID NO: 113299 - protein, 7 aa, synthetic construct
DGVINKK

SEQ ID NO: 113300 - protein, 7 aa, synthetic construct
DHAKAYY

SEQ ID NO: 113301 - protein, 7 aa, synthetic construct
DHFKGKV

SEQ ID NO: 113302 - protein, 7 aa, synthetic construct
DHGKKFS

SEQ ID NO: 113303 - protein, 7 aa, synthetic construct
DHGYQMK

SEQ ID NO: 113304 - protein, 7 aa, synthetic construct
DHHSSNT

SEQ ID NO: 113305 - protein, 7 aa, synthetic construct
DHKGKYS

SEQ ID NO: 113306 - protein, 7 aa, synthetic construct
DHKGLYK

SEQ ID NO: 113307 - protein, 7 aa, synthetic construct
DHKIARI

SEQ ID NO: 113308 - protein, 7 aa, synthetic construct
DHKKPMS

SEQ ID NO: 113309 - protein, 7 aa, synthetic construct
DHKPLQR

SEQ ID NO: 113310 - protein, 7 aa, synthetic construct
DHKQNRV

SEQ ID NO: 113311 - protein, 7 aa, synthetic construct
DHKQRGL

SEQ ID NO: 113312 - protein, 7 aa, synthetic construct
DHKRIGS

SEQ ID NO: 113313 - protein, 7 aa, synthetic construct
DHKSMPR

SEQ ID NO: 113314 - protein, 7 aa, synthetic construct
DHKTQKF

SEQ ID NO: 113315 - protein, 7 aa, synthetic construct
DHKVGRM

SEQ ID NO: 113316 - protein, 7 aa, synthetic construct
DHKVNGK

SEQ ID NO: 113317 - protein, 7 aa, synthetic construct
DHKYTKV

SEQ ID NO: 113318 - protein, 7 aa, synthetic construct
DHLKARV

SEQ ID NO: 113319 - protein, 7 aa, synthetic construct
DHMSHQR

SEQ ID NO: 113320 - protein, 7 aa, synthetic construct
DHNHHRS

SEQ ID NO: 113321 - protein, 7 aa, synthetic construct
DHNKVKS

SEQ ID NO: 113322 - protein, 7 aa, synthetic construct
DHNMKKT

SEQ ID NO: 113323 - protein, 7 aa, synthetic construct
DHNVKRV

SEQ ID NO: 113324 - protein, 7 aa, synthetic construct
DHPKPVR

SEQ ID NO: 113325 - protein, 7 aa, synthetic construct
DHPKVRV

SEQ ID NO: 113326 - protein, 7 aa, synthetic construct
DHPVKTK

SEQ ID NO: 113327 - protein, 7 aa, synthetic construct
DHQKIPR

SEQ ID NO: 113328 - protein, 7 aa, synthetic construct
DHQKPHR

SEQ ID NO: 113329 - protein, 7 aa, synthetic construct
DHQKTRI

SEQ ID NO: 113330 - protein, 7 aa, synthetic construct
DHRGYST

SEQ ID NO: 113331 - protein, 7 aa, synthetic construct
DHRKVLG

SEQ ID NO: 113332 - protein, 7 aa, synthetic construct
DHRREYH

SEQ ID NO: 113333 - protein, 7 aa, synthetic construct
DHRSLKA

SEQ ID NO: 113334 - protein, 7 aa, synthetic construct
DHSRMKP

SEQ ID NO: 113335 - protein, 7 aa, synthetic construct
DHTKKMS

SEQ ID NO: 113336 - protein, 7 aa, synthetic construct
DHTKNKT

SEQ ID NO: 113337 - protein, 7 aa, synthetic construct
DHTKPKG

SEQ ID NO: 113338 - protein, 7 aa, synthetic construct
DHTPKPK

SEQ ID NO: 113339 - protein, 7 aa, synthetic construct
DHVKRLG

SEQ ID NO: 113340 - protein, 7 aa, synthetic construct
DIAHYQR

SEQ ID NO: 113341 - protein, 7 aa, synthetic construct
DIAMRSK

SEQ ID NO: 113342 - protein, 7 aa, synthetic construct
DIAPKFR

SEQ ID NO: 113343 - protein, 7 aa, synthetic construct
DIGATKK

SEQ ID NO: 113344 - protein, 7 aa, synthetic construct
DIGGRKA

SEQ ID NO: 113345 - protein, 7 aa, synthetic construct
DIGKARF

SEQ ID NO: 113346 - protein, 7 aa, synthetic construct
DIGKFAK

SEQ ID NO: 113347 - protein, 7 aa, synthetic construct
DIGKGQR

SEQ ID NO: 113348 - protein, 7 aa, synthetic construct
DIGKNKY

SEQ ID NO: 113349 - protein, 7 aa, synthetic construct
DIGKYRA

SEQ ID NO: 113350 - protein, 7 aa, synthetic construct
DIGPKKV

SEQ ID NO: 113351 - protein, 7 aa, synthetic construct
DIGRRPV

SEQ ID NO: 113352 - protein, 7 aa, synthetic construct
DIGRVNK

SEQ ID NO: 113353 - protein, 7 aa, synthetic construct
DIHKYKA

SEQ ID NO: 113354 - protein, 7 aa, synthetic construct
DIHRNYM

SEQ ID NO: 113355 - protein, 7 aa, synthetic construct
DIIGRAK

SEQ ID NO: 113356 - protein, 7 aa, synthetic construct
DIIHKQK

SEQ ID NO: 113357 - protein, 7 aa, synthetic construct
DIILKRG

SEQ ID NO: 113358 - protein, 7 aa, synthetic construct
DIINRVK

SEQ ID NO: 113359 - protein, 7 aa, synthetic construct
DIIRAGK

SEQ ID NO: 113360 - protein, 7 aa, synthetic construct
DIIRPKT

SEQ ID NO: 113361 - protein, 7 aa, synthetic construct
DIIRTKQ

SEQ ID NO: 113362 - protein, 7 aa, synthetic construct
DIKAATL

SEQ ID NO: 113363 - protein, 7 aa, synthetic construct
DIKFGNK

SEQ ID NO: 113364 - protein, 7 aa, synthetic construct
DIKFRTG

SEQ ID NO: 113365 - protein, 7 aa, synthetic construct
DIKGGRS

SEQ ID NO: 113366 - protein, 7 aa, synthetic construct
DIKGGYR

SEQ ID NO: 113367 - protein, 7 aa, synthetic construct
DIKGLKY

SEQ ID NO: 113368 - protein, 7 aa, synthetic construct
DIKIARN

SEQ ID NO: 113369 - protein, 7 aa, synthetic construct
DIKIGVK

SEQ ID NO: 113370 - protein, 7 aa, synthetic construct
DIKLAGR

SEQ ID NO: 113371 - protein, 7 aa, synthetic construct
DIKMSHK

SEQ ID NO: 113372 - protein, 7 aa, synthetic construct
DIKNHRS

SEQ ID NO: 113373 - protein, 7 aa, synthetic construct
DIKNKNW

SEQ ID NO: 113374 - protein, 7 aa, synthetic construct
DIKNYVK

SEQ ID NO: 113375 - protein, 7 aa, synthetic construct
DIKPVRI

SEQ ID NO: 113376 - protein, 7 aa, synthetic construct
DIKQMRQ

SEQ ID NO: 113377 - protein, 7 aa, synthetic construct
DIKQSRF

SEQ ID NO: 113378 - protein, 7 aa, synthetic construct
DIKSHMK

SEQ ID NO: 113379 - protein, 7 aa, synthetic construct
DIKYGRV

SEQ ID NO: 113380 - protein, 7 aa, synthetic construct
DIKYKGL

SEQ ID NO: 113381 - protein, 7 aa, synthetic construct
DIKYKGY

SEQ ID NO: 113382 - protein, 7 aa, synthetic construct
DILGKMK

SEQ ID NO: 113383 - protein, 7 aa, synthetic construct
DILNRTK

SEQ ID NO: 113384 - protein, 7 aa, synthetic construct
DIMKQRV

SEQ ID NO: 113385 - protein, 7 aa, synthetic construct
DIMRAPK

SEQ ID NO: 113386 - protein, 7 aa, synthetic construct
DIMTKRQ

SEQ ID NO: 113387 - protein, 7 aa, synthetic construct
DINAKHR

SEQ ID NO: 113388 - protein, 7 aa, synthetic construct
DINGVRK

SEQ ID NO: 113389 - protein, 7 aa, synthetic construct
DINKMRM

SEQ ID NO: 113390 - protein, 7 aa, synthetic construct
DINNIRR

SEQ ID NO: 113391 - protein, 7 aa, synthetic construct
DINRGMR

SEQ ID NO: 113392 - protein, 7 aa, synthetic construct
DINTRRS

SEQ ID NO: 113393 - protein, 7 aa, synthetic construct
DIPNFKK

SEQ ID NO: 113394 - protein, 7 aa, synthetic construct
DIPNRRV

SEQ ID NO: 113395 - protein, 7 aa, synthetic construct
DIPRIRA

SEQ ID NO: 113396 - protein, 7 aa, synthetic construct
DIPTGRK

SEQ ID NO: 113397 - protein, 7 aa, synthetic construct
DIQKNRN

SEQ ID NO: 113398 - protein, 7 aa, synthetic construct
DIQKTAR

SEQ ID NO: 113399 - protein, 7 aa, synthetic construct
DIQQVKR

SEQ ID NO: 113400 - protein, 7 aa, synthetic construct
DIQRSKS

SEQ ID NO: 113401 - protein, 7 aa, synthetic construct
DIREAKR

SEQ ID NO: 113402 - protein, 7 aa, synthetic construct
DIRGLRN

SEQ ID NO: 113403 - protein, 7 aa, synthetic construct
DIRGMSK

SEQ ID NO: 113404 - protein, 7 aa, synthetic construct
DIRGQKQ

SEQ ID NO: 113405 - protein, 7 aa, synthetic construct
DIRGTRI

SEQ ID NO: 113406 - protein, 7 aa, synthetic construct
DIRGVKM

SEQ ID NO: 113407 - protein, 7 aa, synthetic construct
DIRKDRI

SEQ ID NO: 113408 - protein, 7 aa, synthetic construct
DIRKHMG

SEQ ID NO: 113409 - protein, 7 aa, synthetic construct
DIRKIVA

SEQ ID NO: 113410 - protein, 7 aa, synthetic construct
DIRLKSV

SEQ ID NO: 113411 - protein, 7 aa, synthetic construct
DIRLNAK

SEQ ID NO: 113412 - protein, 7 aa, synthetic construct
DIRNMPK

SEQ ID NO: 113413 - protein, 7 aa, synthetic construct
DIRNRQG

SEQ ID NO: 113414 - protein, 7 aa, synthetic construct
DIRQARI

SEQ ID NO: 113415 - protein, 7 aa, synthetic construct
DIRQKLQ

SEQ ID NO: 113416 - protein, 7 aa, synthetic construct
DIRTPKM

SEQ ID NO: 113417 - protein, 7 aa, synthetic construct
DIRTQSK

SEQ ID NO: 113418 - protein, 7 aa, synthetic construct
DIRVKSM

SEQ ID NO: 113419 - protein, 7 aa, synthetic construct
DIRWKNE

SEQ ID NO: 113420 - protein, 7 aa, synthetic construct
DISGKFK

SEQ ID NO: 113421 - protein, 7 aa, synthetic construct
DISGKRG

SEQ ID NO: 113422 - protein, 7 aa, synthetic construct
DISKPRT

SEQ ID NO: 113423 - protein, 7 aa, synthetic construct
DISPIRG

SEQ ID NO: 113424 - protein, 7 aa, synthetic construct
DISVPKK

SEQ ID NO: 113425 - protein, 7 aa, synthetic construct
DISVRVK

SEQ ID NO: 113426 - protein, 7 aa, synthetic construct
DITHKKQ

SEQ ID NO: 113427 - protein, 7 aa, synthetic construct
DITKERK

SEQ ID NO: 113428 - protein, 7 aa, synthetic construct
DIVGKIR

SEQ ID NO: 113429 - protein, 7 aa, synthetic construct
DIVKAKF

SEQ ID NO: 113430 - protein, 7 aa, synthetic construct
DIVQRGR

SEQ ID NO: 113431 - protein, 7 aa, synthetic construct
DIVRNKQ

SEQ ID NO: 113432 - protein, 7 aa, synthetic construct
DIVRPKT

SEQ ID NO: 113433 - protein, 7 aa, synthetic construct
DKAAAFR

SEQ ID NO: 113434 - protein, 7 aa, synthetic construct
DKAARTV

SEQ ID NO: 113435 - protein, 7 aa, synthetic construct
DKAAVRS

SEQ ID NO: 113436 - protein, 7 aa, synthetic construct
DKADMRR

SEQ ID NO: 113437 - protein, 7 aa, synthetic construct
DKAFATK

SEQ ID NO: 113438 - protein, 7 aa, synthetic construct
DKAFPTR

SEQ ID NO: 113439 - protein, 7 aa, synthetic construct
DKAGAKW

SEQ ID NO: 113440 - protein, 7 aa, synthetic construct
DKAHFAK

SEQ ID NO: 113441 - protein, 7 aa, synthetic construct
DKAHGRV

SEQ ID NO: 113442 - protein, 7 aa, synthetic construct
DKAHNKN

SEQ ID NO: 113443 - protein, 7 aa, synthetic construct
DKAIKFQ

SEQ ID NO: 113444 - protein, 7 aa, synthetic construct
DKAKHFI

SEQ ID NO: 113445 - protein, 7 aa, synthetic construct
DKAKMNH

SEQ ID NO: 113446 - protein, 7 aa, synthetic construct
DKAKVQW

SEQ ID NO: 113447 - protein, 7 aa, synthetic construct
DKAMKYM

SEQ ID NO: 113448 - protein, 7 aa, synthetic construct
DKANKQM

SEQ ID NO: 113449 - protein, 7 aa, synthetic construct
DKANPIR

SEQ ID NO: 113450 - protein, 7 aa, synthetic construct
DKANPMK

SEQ ID NO: 113451 - protein, 7 aa, synthetic construct
DKANRTY

SEQ ID NO: 113452 - protein, 7 aa, synthetic construct
DKANYRI

SEQ ID NO: 113453 - protein, 7 aa, synthetic construct
DKAPGGK

SEQ ID NO: 113454 - protein, 7 aa, synthetic construct
DKAPILR

SEQ ID NO: 113455 - protein, 7 aa, synthetic construct
DKAQTQR

SEQ ID NO: 113456 - protein, 7 aa, synthetic construct
DKARASL

SEQ ID NO: 113457 - protein, 7 aa, synthetic construct
DKARFPV

SEQ ID NO: 113458 - protein, 7 aa, synthetic construct
DKARGSN

SEQ ID NO: 113459 - protein, 7 aa, synthetic construct
DKARQFN

SEQ ID NO: 113460 - protein, 7 aa, synthetic construct
DKASKYS

SEQ ID NO: 113461 - protein, 7 aa, synthetic construct
DKATRNL

SEQ ID NO: 113462 - protein, 7 aa, synthetic construct
DKAVKGW

SEQ ID NO: 113463 - protein, 7 aa, synthetic construct
DKAVVRS

SEQ ID NO: 113464 - protein, 7 aa, synthetic construct
DKAVYAK

SEQ ID NO: 113465 - protein, 7 aa, synthetic construct
DKAWQTV

SEQ ID NO: 113466 - protein, 7 aa, synthetic construct
DKDFKPR

SEQ ID NO: 113467 - protein, 7 aa, synthetic construct
DKDGGRR

SEQ ID NO: 113468 - protein, 7 aa, synthetic construct
DKDGRMR

SEQ ID NO: 113469 - protein, 7 aa, synthetic construct
DKDKVMR

SEQ ID NO: 113470 - protein, 7 aa, synthetic construct
DKDKVPR

SEQ ID NO: 113471 - protein, 7 aa, synthetic construct
DKDPRRS

SEQ ID NO: 113472 - protein, 7 aa, synthetic construct
DKDRQNK

SEQ ID NO: 113473 - protein, 7 aa, synthetic construct
DKEKGHR

SEQ ID NO: 113474 - protein, 7 aa, synthetic construct
DKEKKQW

SEQ ID NO: 113475 - protein, 7 aa, synthetic construct
DKELVRK

SEQ ID NO: 113476 - protein, 7 aa, synthetic construct
DKERPGK

SEQ ID NO: 113477 - protein, 7 aa, synthetic construct
DKFAGGR

SEQ ID NO: 113478 - protein, 7 aa, synthetic construct
DKFGKYN

SEQ ID NO: 113479 - protein, 7 aa, synthetic construct
DKFGTQK

SEQ ID NO: 113480 - protein, 7 aa, synthetic construct
DKFKEGR

SEQ ID NO: 113481 - protein, 7 aa, synthetic construct
DKFKYPA

SEQ ID NO: 113482 - protein, 7 aa, synthetic construct
DKFNYQK

SEQ ID NO: 113483 - protein, 7 aa, synthetic construct
DKFPTTK

SEQ ID NO: 113484 - protein, 7 aa, synthetic construct
DKFQGPK

SEQ ID NO: 113485 - protein, 7 aa, synthetic construct
DKFQLQK

SEQ ID NO: 113486 - protein, 7 aa, synthetic construct
DKFQNRT

SEQ ID NO: 113487 - protein, 7 aa, synthetic construct
DKFQQRL

SEQ ID NO: 113488 - protein, 7 aa, synthetic construct
DKFRGGN

SEQ ID NO: 113489 - protein, 7 aa, synthetic construct
DKFSQRV

SEQ ID NO: 113490 - protein, 7 aa, synthetic construct
DKFSRAQ

SEQ ID NO: 113491 - protein, 7 aa, synthetic construct
DKFSTRS

SEQ ID NO: 113492 - protein, 7 aa, synthetic construct
DKFTAQK

SEQ ID NO: 113493 - protein, 7 aa, synthetic construct
DKFVIQK

SEQ ID NO: 113494 - protein, 7 aa, synthetic construct
DKFVPRA

SEQ ID NO: 113495 - protein, 7 aa, synthetic construct
DKFVRGG

SEQ ID NO: 113496 - protein, 7 aa, synthetic construct
DKGASKF

SEQ ID NO: 113497 - protein, 7 aa, synthetic construct
DKGFQNK

SEQ ID NO: 113498 - protein, 7 aa, synthetic construct
DKGFRPS

SEQ ID NO: 113499 - protein, 7 aa, synthetic construct
DKGGALK

SEQ ID NO: 113500 - protein, 7 aa, synthetic construct
DKGHVLK

SEQ ID NO: 113501 - protein, 7 aa, synthetic construct
DKGIMRN

SEQ ID NO: 113502 - protein, 7 aa, synthetic construct
DKGINKY

SEQ ID NO: 113503 - protein, 7 aa, synthetic construct
DKGKFAN

SEQ ID NO: 113504 - protein, 7 aa, synthetic construct
DKGKFLS

SEQ ID NO: 113505 - protein, 7 aa, synthetic construct
DKGKMYM

SEQ ID NO: 113506 - protein, 7 aa, synthetic construct
DKGKNLF

SEQ ID NO: 113507 - protein, 7 aa, synthetic construct
DKGKPNY

SEQ ID NO: 113508 - protein, 7 aa, synthetic construct
DKGKYDK

SEQ ID NO: 113509 - protein, 7 aa, synthetic construct
DKGLQRG

SEQ ID NO: 113510 - protein, 7 aa, synthetic construct
DKGLYKA

SEQ ID NO: 113511 - protein, 7 aa, synthetic construct
DKGMFKP

SEQ ID NO: 113512 - protein, 7 aa, synthetic construct
DKGMKLQ

SEQ ID NO: 113513 - protein, 7 aa, synthetic construct
DKGNMAR

SEQ ID NO: 113514 - protein, 7 aa, synthetic construct
DKGPTHR

SEQ ID NO: 113515 - protein, 7 aa, synthetic construct
DKGQSKQ

SEQ ID NO: 113516 - protein, 7 aa, synthetic construct
DKGRAFQ

SEQ ID NO: 113517 - protein, 7 aa, synthetic construct
DKGRLPT

SEQ ID NO: 113518 - protein, 7 aa, synthetic construct
DKGRPTN

SEQ ID NO: 113519 - protein, 7 aa, synthetic construct
DKGRPVN

SEQ ID NO: 113520 - protein, 7 aa, synthetic construct
DKGRVTM

SEQ ID NO: 113521 - protein, 7 aa, synthetic construct
DKGSMRM

SEQ ID NO: 113522 - protein, 7 aa, synthetic construct
DKGSQLR

SEQ ID NO: 113523 - protein, 7 aa, synthetic construct
DKGSRTS

SEQ ID NO: 113524 - protein, 7 aa, synthetic construct
DKGSYKA

SEQ ID NO: 113525 - protein, 7 aa, synthetic construct
DKGTRSI

SEQ ID NO: 113526 - protein, 7 aa, synthetic construct
DKGVHKM

SEQ ID NO: 113527 - protein, 7 aa, synthetic construct
DKGVPPR

SEQ ID NO: 113528 - protein, 7 aa, synthetic construct
DKGVRLM

SEQ ID NO: 113529 - protein, 7 aa, synthetic construct
DKGYIKN

SEQ ID NO: 113530 - protein, 7 aa, synthetic construct
DKGYKAV

SEQ ID NO: 113531 - protein, 7 aa, synthetic construct
DKGYKNM

SEQ ID NO: 113532 - protein, 7 aa, synthetic construct
DKHAAGR

SEQ ID NO: 113533 - protein, 7 aa, synthetic construct
DKHATVR

SEQ ID NO: 113534 - protein, 7 aa, synthetic construct
DKHEFMV

SEQ ID NO: 113535 - protein, 7 aa, synthetic construct
DKHEKPR

SEQ ID NO: 113536 - protein, 7 aa, synthetic construct
DKHGKDK

SEQ ID NO: 113537 - protein, 7 aa, synthetic construct
DKHIQRN

SEQ ID NO: 113538 - protein, 7 aa, synthetic construct
DKHKLVV

SEQ ID NO: 113539 - protein, 7 aa, synthetic construct
DKHKPPL

SEQ ID NO: 113540 - protein, 7 aa, synthetic construct
DKHKSLY

SEQ ID NO: 113541 - protein, 7 aa, synthetic construct
DKHLKAM

SEQ ID NO: 113542 - protein, 7 aa, synthetic construct
DKHMTKF

SEQ ID NO: 113543 - protein, 7 aa, synthetic construct
DKHPAKG

SEQ ID NO: 113544 - protein, 7 aa, synthetic construct
DKHPAMR

SEQ ID NO: 113545 - protein, 7 aa, synthetic construct
DKHPPRL

SEQ ID NO: 113546 - protein, 7 aa, synthetic construct
DKHPTRS

SEQ ID NO: 113547 - protein, 7 aa, synthetic construct
DKHQLGR

SEQ ID NO: 113548 - protein, 7 aa, synthetic construct
DKHQTRV

SEQ ID NO: 113549 - protein, 7 aa, synthetic construct
DKHRGMP

SEQ ID NO: 113550 - protein, 7 aa, synthetic construct
DKHRPVM

SEQ ID NO: 113551 - protein, 7 aa, synthetic construct
DKHSGRG

SEQ ID NO: 113552 - protein, 7 aa, synthetic construct
DKHTYQK

SEQ ID NO: 113553 - protein, 7 aa, synthetic construct
DKHVGGR

SEQ ID NO: 113554 - protein, 7 aa, synthetic construct
DKHVPAR

SEQ ID NO: 113555 - protein, 7 aa, synthetic construct
DKHVPQR

SEQ ID NO: 113556 - protein, 7 aa, synthetic construct
DKHVSQR

SEQ ID NO: 113557 - protein, 7 aa, synthetic construct
DKIARNF

SEQ ID NO: 113558 - protein, 7 aa, synthetic construct
DKIASRH

SEQ ID NO: 113559 - protein, 7 aa, synthetic construct
DKIGTYR

SEQ ID NO: 113560 - protein, 7 aa, synthetic construct
DKIKDRF

SEQ ID NO: 113561 - protein, 7 aa, synthetic construct
DKIKMHT

SEQ ID NO: 113562 - protein, 7 aa, synthetic construct
DKIKMYG

SEQ ID NO: 113563 - protein, 7 aa, synthetic construct
DKIMRNQ

SEQ ID NO: 113564 - protein, 7 aa, synthetic construct
DKIPHRT

SEQ ID NO: 113565 - protein, 7 aa, synthetic construct
DKIPMHK

SEQ ID NO: 113566 - protein, 7 aa, synthetic construct
DKIPMKF

SEQ ID NO: 113567 - protein, 7 aa, synthetic construct
DKIQRHQ

SEQ ID NO: 113568 - protein, 7 aa, synthetic construct
DKIQRST

SEQ ID NO: 113569 - protein, 7 aa, synthetic construct
DKIRDRI

SEQ ID NO: 113570 - protein, 7 aa, synthetic construct
DKIRHTG

SEQ ID NO: 113571 - protein, 7 aa, synthetic construct
DKIRIGN

SEQ ID NO: 113572 - protein, 7 aa, synthetic construct
DKIRMQL

SEQ ID NO: 113573 - protein, 7 aa, synthetic construct
DKIRQHM

SEQ ID NO: 113574 - protein, 7 aa, synthetic construct
DKIRSHA

SEQ ID NO: 113575 - protein, 7 aa, synthetic construct
DKITQKW

SEQ ID NO: 113576 - protein, 7 aa, synthetic construct
DKITRGQ

SEQ ID NO: 113577 - protein, 7 aa, synthetic construct
DKIVRLS

SEQ ID NO: 113578 - protein, 7 aa, synthetic construct
DKIVRTI

SEQ ID NO: 113579 - protein, 7 aa, synthetic construct
DKIYATK

SEQ ID NO: 113580 - protein, 7 aa, synthetic construct
DKIYPRP

SEQ ID NO: 113581 - protein, 7 aa, synthetic construct
DKKAPLN

SEQ ID NO: 113582 - protein, 7 aa, synthetic construct
DKKAYLM

SEQ ID NO: 113583 - protein, 7 aa, synthetic construct
DKKFQYA

SEQ ID NO: 113584 - protein, 7 aa, synthetic construct
DKKFVHT

SEQ ID NO: 113585 - protein, 7 aa, synthetic construct
DKKHHDY

SEQ ID NO: 113586 - protein, 7 aa, synthetic construct
DKKIMQY

SEQ ID NO: 113587 - protein, 7 aa, synthetic construct
DKKIYAN

SEQ ID NO: 113588 - protein, 7 aa, synthetic construct
DKKLAMY

SEQ ID NO: 113589 - protein, 7 aa, synthetic construct
DKKLSVY

SEQ ID NO: 113590 - protein, 7 aa, synthetic construct
DKKMPLQ

SEQ ID NO: 113591 - protein, 7 aa, synthetic construct
DKKMVTI

SEQ ID NO: 113592 - protein, 7 aa, synthetic construct
DKKPDHR

SEQ ID NO: 113593 - protein, 7 aa, synthetic construct
DKKPKDI

SEQ ID NO: 113594 - protein, 7 aa, synthetic construct
DKKPYIQ

SEQ ID NO: 113595 - protein, 7 aa, synthetic construct
DKKQNNW

SEQ ID NO: 113596 - protein, 7 aa, synthetic construct
DKKQVII

SEQ ID NO: 113597 - protein, 7 aa, synthetic construct
DKKQVMM

SEQ ID NO: 113598 - protein, 7 aa, synthetic construct
DKKSTFI

SEQ ID NO: 113599 - protein, 7 aa, synthetic construct
DKKTYDR

SEQ ID NO: 113600 - protein, 7 aa, synthetic construct
DKKVAFH

SEQ ID NO: 113601 - protein, 7 aa, synthetic construct
DKKVQLS

SEQ ID NO: 113602 - protein, 7 aa, synthetic construct
DKKVTMF

SEQ ID NO: 113603 - protein, 7 aa, synthetic construct
DKKYPPM

SEQ ID NO: 113604 - protein, 7 aa, synthetic construct
DKKYTNA

SEQ ID NO: 113605 - protein, 7 aa, synthetic construct
DKLAKYS

SEQ ID NO: 113606 - protein, 7 aa, synthetic construct
DKLARMH

SEQ ID NO: 113607 - protein, 7 aa, synthetic construct
DKLGRIT

SEQ ID NO: 113608 - protein, 7 aa, synthetic construct
DKLIRGM

SEQ ID NO: 113609 - protein, 7 aa, synthetic construct
DKLMPYK

SEQ ID NO: 113610 - protein, 7 aa, synthetic construct
DKLMQRV

SEQ ID NO: 113611 - protein, 7 aa, synthetic construct
DKLNKPW

SEQ ID NO: 113612 - protein, 7 aa, synthetic construct
DKLNMRY

SEQ ID NO: 113613 - protein, 7 aa, synthetic construct
DKLQYQK

SEQ ID NO: 113614 - protein, 7 aa, synthetic construct
DKLRHNV

SEQ ID NO: 113615 - protein, 7 aa, synthetic construct
DKLRHSV

SEQ ID NO: 113616 - protein, 7 aa, synthetic construct
DKLRPIP

SEQ ID NO: 113617 - protein, 7 aa, synthetic construct
DKLSHVR

SEQ ID NO: 113618 - protein, 7 aa, synthetic construct
DKLSRIQ

SEQ ID NO: 113619 - protein, 7 aa, synthetic construct
DKLSSIR

SEQ ID NO: 113620 - protein, 7 aa, synthetic construct
DKMARAV

SEQ ID NO: 113621 - protein, 7 aa, synthetic construct
DKMARTL

SEQ ID NO: 113622 - protein, 7 aa, synthetic construct
DKMGHVP

SEQ ID NO: 113623 - protein, 7 aa, synthetic construct
DKMGLQR

SEQ ID NO: 113624 - protein, 7 aa, synthetic construct
DKMGRDR

SEQ ID NO: 113625 - protein, 7 aa, synthetic construct
DKMHAKM

SEQ ID NO: 113626 - protein, 7 aa, synthetic construct
DKMHQPK

SEQ ID NO: 113627 - protein, 7 aa, synthetic construct
DKMHRTA

SEQ ID NO: 113628 - protein, 7 aa, synthetic construct
DKMKLYG

SEQ ID NO: 113629 - protein, 7 aa, synthetic construct
DKMKNHI

SEQ ID NO: 113630 - protein, 7 aa, synthetic construct
DKMKPFI

SEQ ID NO: 113631 - protein, 7 aa, synthetic construct
DKMLQTR

SEQ ID NO: 113632 - protein, 7 aa, synthetic construct
DKMMNVR

SEQ ID NO: 113633 - protein, 7 aa, synthetic construct
DKMMRRE

SEQ ID NO: 113634 - protein, 7 aa, synthetic construct
DKMNMRQ

SEQ ID NO: 113635 - protein, 7 aa, synthetic construct
DKMPRGN

SEQ ID NO: 113636 - protein, 7 aa, synthetic construct
DKMPRQN

SEQ ID NO: 113637 - protein, 7 aa, synthetic construct
DKMRGER

SEQ ID NO: 113638 - protein, 7 aa, synthetic construct
DKMRIER

SEQ ID NO: 113639 - protein, 7 aa, synthetic construct
DKMRIMA

SEQ ID NO: 113640 - protein, 7 aa, synthetic construct
DKMSFPR

SEQ ID NO: 113641 - protein, 7 aa, synthetic construct
DKMSIVR

SEQ ID NO: 113642 - protein, 7 aa, synthetic construct
DKMTNKY

SEQ ID NO: 113643 - protein, 7 aa, synthetic construct
DKMVMGR

SEQ ID NO: 113644 - protein, 7 aa, synthetic construct
DKMVRQV

SEQ ID NO: 113645 - protein, 7 aa, synthetic construct
DKMVTRL

SEQ ID NO: 113646 - protein, 7 aa, synthetic construct
DKMYKAM

SEQ ID NO: 113647 - protein, 7 aa, synthetic construct
DKNAANR

SEQ ID NO: 113648 - protein, 7 aa, synthetic construct
DKNDRRA

SEQ ID NO: 113649 - protein, 7 aa, synthetic construct
DKNGYTR

SEQ ID NO: 113650 - protein, 7 aa, synthetic construct
DKNIIRA

SEQ ID NO: 113651 - protein, 7 aa, synthetic construct
DKNIRAN

SEQ ID NO: 113652 - protein, 7 aa, synthetic construct
DKNKSYI

SEQ ID NO: 113653 - protein, 7 aa, synthetic construct
DKNLKHY

SEQ ID NO: 113654 - protein, 7 aa, synthetic construct
DKNLSRM

SEQ ID NO: 113655 - protein, 7 aa, synthetic construct
DKNLTNR

SEQ ID NO: 113656 - protein, 7 aa, synthetic construct
DKNNFLK

SEQ ID NO: 113657 - protein, 7 aa, synthetic construct
DKNNKYN

SEQ ID NO: 113658 - protein, 7 aa, synthetic construct
DKNNRYV

SEQ ID NO: 113659 - protein, 7 aa, synthetic construct
DKNNSFK

SEQ ID NO: 113660 - protein, 7 aa, synthetic construct
DKNNYKQ

SEQ ID NO: 113661 - protein, 7 aa, synthetic construct
DKNPGYR

SEQ ID NO: 113662 - protein, 7 aa, synthetic construct
DKNPMPR

SEQ ID NO: 113663 - protein, 7 aa, synthetic construct
DKNPTFR

SEQ ID NO: 113664 - protein, 7 aa, synthetic construct
DKNQRHT

SEQ ID NO: 113665 - protein, 7 aa, synthetic construct
DKNRAAY

SEQ ID NO: 113666 - protein, 7 aa, synthetic construct
DKNRATH

SEQ ID NO: 113667 - protein, 7 aa, synthetic construct
DKNRIPY

SEQ ID NO: 113668 - protein, 7 aa, synthetic construct
DKNRPHI

SEQ ID NO: 113669 - protein, 7 aa, synthetic construct
DKNRPTI

SEQ ID NO: 113670 - protein, 7 aa, synthetic construct
DKNSRIQ

SEQ ID NO: 113671 - protein, 7 aa, synthetic construct
DKNTARS

SEQ ID NO: 113672 - protein, 7 aa, synthetic construct
DKNTRHS

SEQ ID NO: 113673 - protein, 7 aa, synthetic construct
DKNTYRV

SEQ ID NO: 113674 - protein, 7 aa, synthetic construct
DKNVHRV

SEQ ID NO: 113675 - protein, 7 aa, synthetic construct
DKNYKQS

SEQ ID NO: 113676 - protein, 7 aa, synthetic construct
DKNYQTK

SEQ ID NO: 113677 - protein, 7 aa, synthetic construct
DKPAKFN

SEQ ID NO: 113678 - protein, 7 aa, synthetic construct
DKPARLT

SEQ ID NO: 113679 - protein, 7 aa, synthetic construct
DKPFRTV

SEQ ID NO: 113680 - protein, 7 aa, synthetic construct
DKPGHRI

SEQ ID NO: 113681 - protein, 7 aa, synthetic construct
DKPGKYL

SEQ ID NO: 113682 - protein, 7 aa, synthetic construct
DKPGPGR

SEQ ID NO: 113683 - protein, 7 aa, synthetic construct
DKPHAQK

SEQ ID NO: 113684 - protein, 7 aa, synthetic construct
DKPHRTN

SEQ ID NO: 113685 - protein, 7 aa, synthetic construct
DKPHRVT

SEQ ID NO: 113686 - protein, 7 aa, synthetic construct
DKPIAVR

SEQ ID NO: 113687 - protein, 7 aa, synthetic construct
DKPIHSK

SEQ ID NO: 113688 - protein, 7 aa, synthetic construct
DKPIRII

SEQ ID NO: 113689 - protein, 7 aa, synthetic construct
DKPIRSQ

SEQ ID NO: 113690 - protein, 7 aa, synthetic construct
DKPKIIM

SEQ ID NO: 113691 - protein, 7 aa, synthetic construct
DKPKITI

SEQ ID NO: 113692 - protein, 7 aa, synthetic construct
DKPKLIM

SEQ ID NO: 113693 - protein, 7 aa, synthetic construct
DKPKPFT

SEQ ID NO: 113694 - protein, 7 aa, synthetic construct
DKPKSYT

SEQ ID NO: 113695 - protein, 7 aa, synthetic construct
DKPLHKV

SEQ ID NO: 113696 - protein, 7 aa, synthetic construct
DKPNQRA

SEQ ID NO: 113697 - protein, 7 aa, synthetic construct
DKPPKNH

SEQ ID NO: 113698 - protein, 7 aa, synthetic construct
DKPPVRA

SEQ ID NO: 113699 - protein, 7 aa, synthetic construct
DKPQIRQ

SEQ ID NO: 113700 - protein, 7 aa, synthetic construct
DKPQRSV

SEQ ID NO: 113701 - protein, 7 aa, synthetic construct
DKPRGMQ

SEQ ID NO: 113702 - protein, 7 aa, synthetic construct
DKPSFRS

SEQ ID NO: 113703 - protein, 7 aa, synthetic construct
DKPTVGK

SEQ ID NO: 113704 - protein, 7 aa, synthetic construct
DKPVNMR

SEQ ID NO: 113705 - protein, 7 aa, synthetic construct
DKPYIKP

SEQ ID NO: 113706 - protein, 7 aa, synthetic construct
DKPYKNQ

SEQ ID NO: 113707 - protein, 7 aa, synthetic construct
DKPYLTK

SEQ ID NO: 113708 - protein, 7 aa, synthetic construct
DKQAAKW

SEQ ID NO: 113709 - protein, 7 aa, synthetic construct
DKQAMSK

SEQ ID NO: 113710 - protein, 7 aa, synthetic construct
DKQANSK

SEQ ID NO: 113711 - protein, 7 aa, synthetic construct
DKQAQRN

SEQ ID NO: 113712 - protein, 7 aa, synthetic construct
DKQARDR

SEQ ID NO: 113713 - protein, 7 aa, synthetic construct
DKQARIQ

SEQ ID NO: 113714 - protein, 7 aa, synthetic construct
DKQDIRR

SEQ ID NO: 113715 - protein, 7 aa, synthetic construct
DKQFNTR

SEQ ID NO: 113716 - protein, 7 aa, synthetic construct
DKQGKYL

SEQ ID NO: 113717 - protein, 7 aa, synthetic construct
DKQIGYR

SEQ ID NO: 113718 - protein, 7 aa, synthetic construct
DKQITGR

SEQ ID NO: 113719 - protein, 7 aa, synthetic construct
DKQKAVW

SEQ ID NO: 113720 - protein, 7 aa, synthetic construct
DKQKGYH

SEQ ID NO: 113721 - protein, 7 aa, synthetic construct
DKQKRDY

SEQ ID NO: 113722 - protein, 7 aa, synthetic construct
DKQKYMN

SEQ ID NO: 113723 - protein, 7 aa, synthetic construct
DKQLRMM

SEQ ID NO: 113724 - protein, 7 aa, synthetic construct
DKQLRYS

SEQ ID NO: 113725 - protein, 7 aa, synthetic construct
DKQLTHK

SEQ ID NO: 113726 - protein, 7 aa, synthetic construct
DKQMLHK

SEQ ID NO: 113727 - protein, 7 aa, synthetic construct
DKQMMLR

SEQ ID NO: 113728 - protein, 7 aa, synthetic construct
DKQMMSR

SEQ ID NO: 113729 - protein, 7 aa, synthetic construct
DKQMPYK

SEQ ID NO: 113730 - protein, 7 aa, synthetic construct
DKQMRMQ

SEQ ID NO: 113731 - protein, 7 aa, synthetic construct
DKQMSRT

SEQ ID NO: 113732 - protein, 7 aa, synthetic construct
DKQNIMR

SEQ ID NO: 113733 - protein, 7 aa, synthetic construct
DKQNIQK

SEQ ID NO: 113734 - protein, 7 aa, synthetic construct
DKQPGNK

SEQ ID NO: 113735 - protein, 7 aa, synthetic construct
DKQPKVW

SEQ ID NO: 113736 - protein, 7 aa, synthetic construct
DKQPTQK

SEQ ID NO: 113737 - protein, 7 aa, synthetic construct
DKQQGNK

SEQ ID NO: 113738 - protein, 7 aa, synthetic construct
DKQQHMR

SEQ ID NO: 113739 - protein, 7 aa, synthetic construct
DKQQKWA

SEQ ID NO: 113740 - protein, 7 aa, synthetic construct
DKQQQRL

SEQ ID NO: 113741 - protein, 7 aa, synthetic construct
DKQQRMV

SEQ ID NO: 113742 - protein, 7 aa, synthetic construct
DKQQTYK

SEQ ID NO: 113743 - protein, 7 aa, synthetic construct
DKQRGGP

SEQ ID NO: 113744 - protein, 7 aa, synthetic construct
DKQRMMI

SEQ ID NO: 113745 - protein, 7 aa, synthetic construct
DKQSKTW

SEQ ID NO: 113746 - protein, 7 aa, synthetic construct
DKQTFGK

SEQ ID NO: 113747 - protein, 7 aa, synthetic construct
DKQTPLR

SEQ ID NO: 113748 - protein, 7 aa, synthetic construct
DKQTRNA

SEQ ID NO: 113749 - protein, 7 aa, synthetic construct
DKQTYLK

SEQ ID NO: 113750 - protein, 7 aa, synthetic construct
DKQWNSI

SEQ ID NO: 113751 - protein, 7 aa, synthetic construct
DKQYKGL

SEQ ID NO: 113752 - protein, 7 aa, synthetic construct
DKQYKMT

SEQ ID NO: 113753 - protein, 7 aa, synthetic construct
DKQYKMV

SEQ ID NO: 113754 - protein, 7 aa, synthetic construct
DKQYKVQ

SEQ ID NO: 113755 - protein, 7 aa, synthetic construct
DKRATYM

SEQ ID NO: 113756 - protein, 7 aa, synthetic construct
DKRFMYE

SEQ ID NO: 113757 - protein, 7 aa, synthetic construct
DKRGMHA

SEQ ID NO: 113758 - protein, 7 aa, synthetic construct
DKRGMTY

SEQ ID NO: 113759 - protein, 7 aa, synthetic construct
DKRGVRD

SEQ ID NO: 113760 - protein, 7 aa, synthetic construct
DKRHAVV

SEQ ID NO: 113761 - protein, 7 aa, synthetic construct
DKRIPQN

SEQ ID NO: 113762 - protein, 7 aa, synthetic construct
DKRIPTT

SEQ ID NO: 113763 - protein, 7 aa, synthetic construct
DKRISHI

SEQ ID NO: 113764 - protein, 7 aa, synthetic construct
DKRKDFG

SEQ ID NO: 113765 - protein, 7 aa, synthetic construct
DKRLAPM

SEQ ID NO: 113766 - protein, 7 aa, synthetic construct
DKRLGVM

SEQ ID NO: 113767 - protein, 7 aa, synthetic construct
DKRMSSI

SEQ ID NO: 113768 - protein, 7 aa, synthetic construct
DKRNDKA

SEQ ID NO: 113769 - protein, 7 aa, synthetic construct
DKRNGPF

SEQ ID NO: 113770 - protein, 7 aa, synthetic construct
DKRNTYA

SEQ ID NO: 113771 - protein, 7 aa, synthetic construct
DKRPIQV

SEQ ID NO: 113772 - protein, 7 aa, synthetic construct
DKRPQTY

SEQ ID NO: 113773 - protein, 7 aa, synthetic construct
DKRPTSY

SEQ ID NO: 113774 - protein, 7 aa, synthetic construct
DKRPVNF

SEQ ID NO: 113775 - protein, 7 aa, synthetic construct
DKRQDAK

SEQ ID NO: 113776 - protein, 7 aa, synthetic construct
DKRQEKN

SEQ ID NO: 113777 - protein, 7 aa, synthetic construct
DKRQMHG

SEQ ID NO: 113778 - protein, 7 aa, synthetic construct
DKRQMLT

SEQ ID NO: 113779 - protein, 7 aa, synthetic construct
DKRQYAG

SEQ ID NO: 113780 - protein, 7 aa, synthetic construct
DKRSIPL

SEQ ID NO: 113781 - protein, 7 aa, synthetic construct
DKRSTLL

SEQ ID NO: 113782 - protein, 7 aa, synthetic construct
DKRSTYT

SEQ ID NO: 113783 - protein, 7 aa, synthetic construct
DKRSVSY

SEQ ID NO: 113784 - protein, 7 aa, synthetic construct
DKRTTNY

SEQ ID NO: 113785 - protein, 7 aa, synthetic construct
DKRTTYT

SEQ ID NO: 113786 - protein, 7 aa, synthetic construct
DKRVAHV

SEQ ID NO: 113787 - protein, 7 aa, synthetic construct
DKRVAYV

SEQ ID NO: 113788 - protein, 7 aa, synthetic construct
DKRVINQ

SEQ ID NO: 113789 - protein, 7 aa, synthetic construct
DKRVISL

SEQ ID NO: 113790 - protein, 7 aa, synthetic construct
DKRVNYS

SEQ ID NO: 113791 - protein, 7 aa, synthetic construct
DKRVQYA

SEQ ID NO: 113792 - protein, 7 aa, synthetic construct
DKRVVYA

SEQ ID NO: 113793 - protein, 7 aa, synthetic construct
DKSGIPR

SEQ ID NO: 113794 - protein, 7 aa, synthetic construct
DKSGPQK

SEQ ID NO: 113795 - protein, 7 aa, synthetic construct
DKSHIRQ

SEQ ID NO: 113796 - protein, 7 aa, synthetic construct
DKSHKYV

SEQ ID NO: 113797 - protein, 7 aa, synthetic construct
DKSITGR

SEQ ID NO: 113798 - protein, 7 aa, synthetic construct
DKSKMPF

SEQ ID NO: 113799 - protein, 7 aa, synthetic construct
DKSLGMR

SEQ ID NO: 113800 - protein, 7 aa, synthetic construct
DKSMKYN

SEQ ID NO: 113801 - protein, 7 aa, synthetic construct
DKSMYKA

SEQ ID NO: 113802 - protein, 7 aa, synthetic construct
DKSNRPL

SEQ ID NO: 113803 - protein, 7 aa, synthetic construct
DKSNSFK

SEQ ID NO: 113804 - protein, 7 aa, synthetic construct
DKSPARG

SEQ ID NO: 113805 - protein, 7 aa, synthetic construct
DKSPRVA

SEQ ID NO: 113806 - protein, 7 aa, synthetic construct
DKSQFAR

SEQ ID NO: 113807 - protein, 7 aa, synthetic construct
DKSQLGR

SEQ ID NO: 113808 - protein, 7 aa, synthetic construct
DKSQYPK

SEQ ID NO: 113809 - protein, 7 aa, synthetic construct
DKSRPIT

SEQ ID NO: 113810 - protein, 7 aa, synthetic construct
DKSRPYV

SEQ ID NO: 113811 - protein, 7 aa, synthetic construct
DKSWQSV

SEQ ID NO: 113812 - protein, 7 aa, synthetic construct
DKSYPNK

SEQ ID NO: 113813 - protein, 7 aa, synthetic construct
DKSYRVA

SEQ ID NO: 113814 - protein, 7 aa, synthetic construct
DKTGYKF

SEQ ID NO: 113815 - protein, 7 aa, synthetic construct
DKTHART

SEQ ID NO: 113816 - protein, 7 aa, synthetic construct
DKTHRAI

SEQ ID NO: 113817 - protein, 7 aa, synthetic construct
DKTIRQT

SEQ ID NO: 113818 - protein, 7 aa, synthetic construct
DKTKGYF

SEQ ID NO: 113819 - protein, 7 aa, synthetic construct
DKTKNVW

SEQ ID NO: 113820 - protein, 7 aa, synthetic construct
DKTLKYQ

SEQ ID NO: 113821 - protein, 7 aa, synthetic construct
DKTLRIM

SEQ ID NO: 113822 - protein, 7 aa, synthetic construct
DKTMAAR

SEQ ID NO: 113823 - protein, 7 aa, synthetic construct
DKTMQIR

SEQ ID NO: 113824 - protein, 7 aa, synthetic construct
DKTNYPK

SEQ ID NO: 113825 - protein, 7 aa, synthetic construct
DKTRGFS

SEQ ID NO: 113826 - protein, 7 aa, synthetic construct
DKTRGGQ

SEQ ID NO: 113827 - protein, 7 aa, synthetic construct
DKTRHSI

SEQ ID NO: 113828 - protein, 7 aa, synthetic construct
DKTRILH

SEQ ID NO: 113829 - protein, 7 aa, synthetic construct
DKTRPAL

SEQ ID NO: 113830 - protein, 7 aa, synthetic construct
DKTRPIF

SEQ ID NO: 113831 - protein, 7 aa, synthetic construct
DKTRPSL

SEQ ID NO: 113832 - protein, 7 aa, synthetic construct
DKTSYKS

SEQ ID NO: 113833 - protein, 7 aa, synthetic construct
DKTYHVK

SEQ ID NO: 113834 - protein, 7 aa, synthetic construct
DKTYQTR

SEQ ID NO: 113835 - protein, 7 aa, synthetic construct
DKVANHR

SEQ ID NO: 113836 - protein, 7 aa, synthetic construct
DKVFSNK

SEQ ID NO: 113837 - protein, 7 aa, synthetic construct
DKVGRQY

SEQ ID NO: 113838 - protein, 7 aa, synthetic construct
DKVHGYM

SEQ ID NO: 113839 - protein, 7 aa, synthetic construct
DKVHIPR

SEQ ID NO: 113840 - protein, 7 aa, synthetic construct
DKVHQKF

SEQ ID NO: 113841 - protein, 7 aa, synthetic construct
DKVHRTM

SEQ ID NO: 113842 - protein, 7 aa, synthetic construct
DKVIKPY

SEQ ID NO: 113843 - protein, 7 aa, synthetic construct
DKVKFHS

SEQ ID NO: 113844 - protein, 7 aa, synthetic construct
DKVKFNV

SEQ ID NO: 113845 - protein, 7 aa, synthetic construct
DKVKHQL

SEQ ID NO: 113846 - protein, 7 aa, synthetic construct
DKVMRAV

SEQ ID NO: 113847 - protein, 7 aa, synthetic construct
DKVNAHR

SEQ ID NO: 113848 - protein, 7 aa, synthetic construct
DKVNHVK

SEQ ID NO: 113849 - protein, 7 aa, synthetic construct
DKVNLYR

SEQ ID NO: 113850 - protein, 7 aa, synthetic construct
DKVNNAR

SEQ ID NO: 113851 - protein, 7 aa, synthetic construct
DKVPKIL

SEQ ID NO: 113852 - protein, 7 aa, synthetic construct
DKVPKTY

SEQ ID NO: 113853 - protein, 7 aa, synthetic construct
DKVPQMR

SEQ ID NO: 113854 - protein, 7 aa, synthetic construct
DKVPRAL

SEQ ID NO: 113855 - protein, 7 aa, synthetic construct
DKVRGYN

SEQ ID NO: 113856 - protein, 7 aa, synthetic construct
DKVTERK

SEQ ID NO: 113857 - protein, 7 aa, synthetic construct
DKVYKQV

SEQ ID NO: 113858 - protein, 7 aa, synthetic construct
DKVYKTH

SEQ ID NO: 113859 - protein, 7 aa, synthetic construct
DKWPQGK

SEQ ID NO: 113860 - protein, 7 aa, synthetic construct
DKYAGGR

SEQ ID NO: 113861 - protein, 7 aa, synthetic construct
DKYGMKM

SEQ ID NO: 113862 - protein, 7 aa, synthetic construct
DKYHKGG

SEQ ID NO: 113863 - protein, 7 aa, synthetic construct
DKYIRSA

SEQ ID NO: 113864 - protein, 7 aa, synthetic construct
DKYKAPS

SEQ ID NO: 113865 - protein, 7 aa, synthetic construct
DKYKVAV

SEQ ID NO: 113866 - protein, 7 aa, synthetic construct
DKYLSKQ

SEQ ID NO: 113867 - protein, 7 aa, synthetic construct
DKYMKAN

SEQ ID NO: 113868 - protein, 7 aa, synthetic construct
DKYNIKV

SEQ ID NO: 113869 - protein, 7 aa, synthetic construct
DKYNSKQ

SEQ ID NO: 113870 - protein, 7 aa, synthetic construct
DKYPGHK

SEQ ID NO: 113871 - protein, 7 aa, synthetic construct
DKYPGKM

SEQ ID NO: 113872 - protein, 7 aa, synthetic construct
DKYPMQK

SEQ ID NO: 113873 - protein, 7 aa, synthetic construct
DKYPNSK

SEQ ID NO: 113874 - protein, 7 aa, synthetic construct
DKYQIKA

SEQ ID NO: 113875 - protein, 7 aa, synthetic construct
DKYSKTH

SEQ ID NO: 113876 - protein, 7 aa, synthetic construct
DKYVIKS

SEQ ID NO: 113877 - protein, 7 aa, synthetic construct
DKYVKSQ

SEQ ID NO: 113878 - protein, 7 aa, synthetic construct
DKYVMRP

SEQ ID NO: 113879 - protein, 7 aa, synthetic construct
DKYVQRS

SEQ ID NO: 113880 - protein, 7 aa, synthetic construct
DLAQNKR

SEQ ID NO: 113881 - protein, 7 aa, synthetic construct
DLARRVA

SEQ ID NO: 113882 - protein, 7 aa, synthetic construct
DLARTAR

SEQ ID NO: 113883 - protein, 7 aa, synthetic construct
DLARVRG

SEQ ID NO: 113884 - protein, 7 aa, synthetic construct
DLDHRRQ

SEQ ID NO: 113885 - protein, 7 aa, synthetic construct
DLDKARR

SEQ ID NO: 113886 - protein, 7 aa, synthetic construct
DLFDRHT

SEQ ID NO: 113887 - protein, 7 aa, synthetic construct
DLFKNRA

SEQ ID NO: 113888 - protein, 7 aa, synthetic construct
DLGKRAL

SEQ ID NO: 113889 - protein, 7 aa, synthetic construct
DLGMKAR

SEQ ID NO: 113890 - protein, 7 aa, synthetic construct
DLGNRRV

SEQ ID NO: 113891 - protein, 7 aa, synthetic construct
DLGRVKF

SEQ ID NO: 113892 - protein, 7 aa, synthetic construct
DLHKARA

SEQ ID NO: 113893 - protein, 7 aa, synthetic construct
DLHKVSK

SEQ ID NO: 113894 - protein, 7 aa, synthetic construct
DLHMKKS

SEQ ID NO: 113895 - protein, 7 aa, synthetic construct
DLHRSKP

SEQ ID NO: 113896 - protein, 7 aa, synthetic construct
DLIAKRS

SEQ ID NO: 113897 - protein, 7 aa, synthetic construct
DLIATKK

SEQ ID NO: 113898 - protein, 7 aa, synthetic construct
DLIKIRA

SEQ ID NO: 113899 - protein, 7 aa, synthetic construct
DLIKRSM

SEQ ID NO: 113900 - protein, 7 aa, synthetic construct
DLINKGR

SEQ ID NO: 113901 - protein, 7 aa, synthetic construct
DLKASRY

SEQ ID NO: 113902 - protein, 7 aa, synthetic construct
DLKAYKQ

SEQ ID NO: 113903 - protein, 7 aa, synthetic construct
DLKDRSR

SEQ ID NO: 113904 - protein, 7 aa, synthetic construct
DLKGRYV

SEQ ID NO: 113905 - protein, 7 aa, synthetic construct
DLKHMRV

SEQ ID NO: 113906 - protein, 7 aa, synthetic construct
DLKHRIN

SEQ ID NO: 113907 - protein, 7 aa, synthetic construct
DLKHRTV

SEQ ID NO: 113908 - protein, 7 aa, synthetic construct
DLKKGFH

SEQ ID NO: 113909 - protein, 7 aa, synthetic construct
DLKKLGF

SEQ ID NO: 113910 - protein, 7 aa, synthetic construct
DLKMPKT

SEQ ID NO: 113911 - protein, 7 aa, synthetic construct
DLKNSVR

SEQ ID NO: 113912 - protein, 7 aa, synthetic construct
DLKQRHA

SEQ ID NO: 113913 - protein, 7 aa, synthetic construct
DLKRDKL

SEQ ID NO: 113914 - protein, 7 aa, synthetic construct
DLKRQDR

SEQ ID NO: 113915 - protein, 7 aa, synthetic construct
DLKTRDR

SEQ ID NO: 113916 - protein, 7 aa, synthetic construct
DLKYARG

SEQ ID NO: 113917 - protein, 7 aa, synthetic construct
DLKYARP

SEQ ID NO: 113918 - protein, 7 aa, synthetic construct
DLKYSKS

SEQ ID NO: 113919 - protein, 7 aa, synthetic construct
DLLKPRA

SEQ ID NO: 113920 - protein, 7 aa, synthetic construct
DLLNRKA

SEQ ID NO: 113921 - protein, 7 aa, synthetic construct
DLMGKGR

SEQ ID NO: 113922 - protein, 7 aa, synthetic construct
DLMKPAK

SEQ ID NO: 113923 - protein, 7 aa, synthetic construct
DLMKPPK

SEQ ID NO: 113924 - protein, 7 aa, synthetic construct
DLMKYGK

SEQ ID NO: 113925 - protein, 7 aa, synthetic construct
DLMNARK

SEQ ID NO: 113926 - protein, 7 aa, synthetic construct
DLMRGNR

SEQ ID NO: 113927 - protein, 7 aa, synthetic construct
DLNAKKY

SEQ ID NO: 113928 - protein, 7 aa, synthetic construct
DLNHKKL

SEQ ID NO: 113929 - protein, 7 aa, synthetic construct
DLNKAKW

SEQ ID NO: 113930 - protein, 7 aa, synthetic construct
DLNPAKR

SEQ ID NO: 113931 - protein, 7 aa, synthetic construct
DLNVRQK

SEQ ID NO: 113932 - protein, 7 aa, synthetic construct
DLPKPAK

SEQ ID NO: 113933 - protein, 7 aa, synthetic construct
DLPRGMK

SEQ ID NO: 113934 - protein, 7 aa, synthetic construct
DLPRITK

SEQ ID NO: 113935 - protein, 7 aa, synthetic construct
DLPRTVR

SEQ ID NO: 113936 - protein, 7 aa, synthetic construct
DLPSRRP

SEQ ID NO: 113937 - protein, 7 aa, synthetic construct
DLPVIKK

SEQ ID NO: 113938 - protein, 7 aa, synthetic construct
DLQAKRI

SEQ ID NO: 113939 - protein, 7 aa, synthetic construct
DLQGSKR

SEQ ID NO: 113940 - protein, 7 aa, synthetic construct
DLQKQRA

SEQ ID NO: 113941 - protein, 7 aa, synthetic construct
DLQKSVR

SEQ ID NO: 113942 - protein, 7 aa, synthetic construct
DLQTKKY

SEQ ID NO: 113943 - protein, 7 aa, synthetic construct
DLQWNAK

SEQ ID NO: 113944 - protein, 7 aa, synthetic construct
DLQYASR

SEQ ID NO: 113945 - protein, 7 aa, synthetic construct
DLRKPMV

SEQ ID NO: 113946 - protein, 7 aa, synthetic construct
DLRNMKY

SEQ ID NO: 113947 - protein, 7 aa, synthetic construct
DLRQAKQ

SEQ ID NO: 113948 - protein, 7 aa, synthetic construct
DLRQASK

SEQ ID NO: 113949 - protein, 7 aa, synthetic construct
DLRQRQM

SEQ ID NO: 113950 - protein, 7 aa, synthetic construct
DLRTLKM

SEQ ID NO: 113951 - protein, 7 aa, synthetic construct
DLRTPKY

SEQ ID NO: 113952 - protein, 7 aa, synthetic construct
DLRVPPK

SEQ ID NO: 113953 - protein, 7 aa, synthetic construct
DLSGKRQ

SEQ ID NO: 113954 - protein, 7 aa, synthetic construct
DLSKARM

SEQ ID NO: 113955 - protein, 7 aa, synthetic construct
DLSKMYK

SEQ ID NO: 113956 - protein, 7 aa, synthetic construct
DLSKNRN

SEQ ID NO: 113957 - protein, 7 aa, synthetic construct
DLSKPRN

SEQ ID NO: 113958 - protein, 7 aa, synthetic construct
DLSKRQL

SEQ ID NO: 113959 - protein, 7 aa, synthetic construct
DLSRAKA

SEQ ID NO: 113960 - protein, 7 aa, synthetic construct
DLSRARP

SEQ ID NO: 113961 - protein, 7 aa, synthetic construct
DLSRHKV

SEQ ID NO: 113962 - protein, 7 aa, synthetic construct
DLSTNRK

SEQ ID NO: 113963 - protein, 7 aa, synthetic construct
DLTPIKR

SEQ ID NO: 113964 - protein, 7 aa, synthetic construct
DLTQRGR

SEQ ID NO: 113965 - protein, 7 aa, synthetic construct
DLTQRQR

SEQ ID NO: 113966 - protein, 7 aa, synthetic construct
DLTRMKQ

SEQ ID NO: 113967 - protein, 7 aa, synthetic construct
DLTSPKR

SEQ ID NO: 113968 - protein, 7 aa, synthetic construct
DLVGKMF

SEQ ID NO: 113969 - protein, 7 aa, synthetic construct
DLVKPRM

SEQ ID NO: 113970 - protein, 7 aa, synthetic construct
DLVKPRQ

SEQ ID NO: 113971 - protein, 7 aa, synthetic construct
DLVSKRM

SEQ ID NO: 113972 - protein, 7 aa, synthetic construct
DLVTKRL

SEQ ID NO: 113973 - protein, 7 aa, synthetic construct
DMAAKSK

SEQ ID NO: 113974 - protein, 7 aa, synthetic construct
DMAASYR

SEQ ID NO: 113975 - protein, 7 aa, synthetic construct
DMAKAMR

SEQ ID NO: 113976 - protein, 7 aa, synthetic construct
DMAKFKN

SEQ ID NO: 113977 - protein, 7 aa, synthetic construct
DMAKHKQ

SEQ ID NO: 113978 - protein, 7 aa, synthetic construct
DMAKRNF

SEQ ID NO: 113979 - protein, 7 aa, synthetic construct
DMAKRSH

SEQ ID NO: 113980 - protein, 7 aa, synthetic construct
DMAKTRM

SEQ ID NO: 113981 - protein, 7 aa, synthetic construct
DMAQRRA

SEQ ID NO: 113982 - protein, 7 aa, synthetic construct
DMARNKQ

SEQ ID NO: 113983 - protein, 7 aa, synthetic construct
DMARPMK

SEQ ID NO: 113984 - protein, 7 aa, synthetic construct
DMARQAK

SEQ ID NO: 113985 - protein, 7 aa, synthetic construct
DMATKKW

SEQ ID NO: 113986 - protein, 7 aa, synthetic construct
DMGGKAR

SEQ ID NO: 113987 - protein, 7 aa, synthetic construct
DMGIKRS

SEQ ID NO: 113988 - protein, 7 aa, synthetic construct
DMGKMRI

SEQ ID NO: 113989 - protein, 7 aa, synthetic construct
DMGRAVK

SEQ ID NO: 113990 - protein, 7 aa, synthetic construct
DMGRMAK

SEQ ID NO: 113991 - protein, 7 aa, synthetic construct
DMGRPAR

SEQ ID NO: 113992 - protein, 7 aa, synthetic construct
DMGRTDG

SEQ ID NO: 113993 - protein, 7 aa, synthetic construct
DMGTGKK

SEQ ID NO: 113994 - protein, 7 aa, synthetic construct
DMHNTNI

SEQ ID NO: 113995 - protein, 7 aa, synthetic construct
DMIKSRG

SEQ ID NO: 113996 - protein, 7 aa, synthetic construct
DMIRKVA

SEQ ID NO: 113997 - protein, 7 aa, synthetic construct
DMKAARQ

SEQ ID NO: 113998 - protein, 7 aa, synthetic construct
DMKAKYQ

SEQ ID NO: 113999 - protein, 7 aa, synthetic construct
DMKGYRP

SEQ ID NO: 114000 - protein, 7 aa, synthetic construct
DMKHKIY

SEQ ID NO: 114001 - protein, 7 aa, synthetic construct
DMKHLRV

SEQ ID NO: 114002 - protein, 7 aa, synthetic construct
DMKIPRH

SEQ ID NO: 114003 - protein, 7 aa, synthetic construct
DMKLARL

SEQ ID NO: 114004 - protein, 7 aa, synthetic construct
DMKNKFQ

SEQ ID NO: 114005 - protein, 7 aa, synthetic construct
DMKPKHN

SEQ ID NO: 114006 - protein, 7 aa, synthetic construct
DMKPRLQ

SEQ ID NO: 114007 - protein, 7 aa, synthetic construct
DMKPYTK

SEQ ID NO: 114008 - protein, 7 aa, synthetic construct
DMKREMR

SEQ ID NO: 114009 - protein, 7 aa, synthetic construct
DMKRQRE

SEQ ID NO: 114010 - protein, 7 aa, synthetic construct
DMKSAAK

SEQ ID NO: 114011 - protein, 7 aa, synthetic construct
DMKVKTW

SEQ ID NO: 114012 - protein, 7 aa, synthetic construct
DMKVRSM

SEQ ID NO: 114013 - protein, 7 aa, synthetic construct
DMKYGKY

SEQ ID NO: 114014 - protein, 7 aa, synthetic construct
DMLARKG

SEQ ID NO: 114015 - protein, 7 aa, synthetic construct
DMLPGKK

SEQ ID NO: 114016 - protein, 7 aa, synthetic construct
DMMKPKI

SEQ ID NO: 114017 - protein, 7 aa, synthetic construct
DMNFKNK

SEQ ID NO: 114018 - protein, 7 aa, synthetic construct
DMNKGHK

SEQ ID NO: 114019 - protein, 7 aa, synthetic construct
DMNKPYK

SEQ ID NO: 114020 - protein, 7 aa, synthetic construct
DMNKSAR

SEQ ID NO: 114021 - protein, 7 aa, synthetic construct
DMNRMTK

SEQ ID NO: 114022 - protein, 7 aa, synthetic construct
DMNVSKK

SEQ ID NO: 114023 - protein, 7 aa, synthetic construct
DMPIGKR

SEQ ID NO: 114024 - protein, 7 aa, synthetic construct
DMPKAAR

SEQ ID NO: 114025 - protein, 7 aa, synthetic construct
DMPNKIR

SEQ ID NO: 114026 - protein, 7 aa, synthetic construct
DMPPRQK

SEQ ID NO: 114027 - protein, 7 aa, synthetic construct
DMPQAKK

SEQ ID NO: 114028 - protein, 7 aa, synthetic construct
DMPRQRG

SEQ ID NO: 114029 - protein, 7 aa, synthetic construct
DMPVGKK

SEQ ID NO: 114030 - protein, 7 aa, synthetic construct
DMQAGRR

SEQ ID NO: 114031 - protein, 7 aa, synthetic construct
DMQKFRA

SEQ ID NO: 114032 - protein, 7 aa, synthetic construct
DMQMRKA

SEQ ID NO: 114033 - protein, 7 aa, synthetic construct
DMQQRKA

SEQ ID NO: 114034 - protein, 7 aa, synthetic construct
DMQVRPK

SEQ ID NO: 114035 - protein, 7 aa, synthetic construct
DMRHIKI

SEQ ID NO: 114036 - protein, 7 aa, synthetic construct
DMRIMAK

SEQ ID NO: 114037 - protein, 7 aa, synthetic construct
DMRIPNR

SEQ ID NO: 114038 - protein, 7 aa, synthetic construct
DMRKELR

SEQ ID NO: 114039 - protein, 7 aa, synthetic construct
DMRKMQI

SEQ ID NO: 114040 - protein, 7 aa, synthetic construct
DMRKPFV

SEQ ID NO: 114041 - protein, 7 aa, synthetic construct
DMRKSHV

SEQ ID NO: 114042 - protein, 7 aa, synthetic construct
DMRKTFA

SEQ ID NO: 114043 - protein, 7 aa, synthetic construct
DMRLTKM

SEQ ID NO: 114044 - protein, 7 aa, synthetic construct
DMRMKAN

SEQ ID NO: 114045 - protein, 7 aa, synthetic construct
DMRMMKV

SEQ ID NO: 114046 - protein, 7 aa, synthetic construct
DMRMNKV

SEQ ID NO: 114047 - protein, 7 aa, synthetic construct
DMRNIKA

SEQ ID NO: 114048 - protein, 7 aa, synthetic construct
DMRPNKG

SEQ ID NO: 114049 - protein, 7 aa, synthetic construct
DMRQLKN

SEQ ID NO: 114050 - protein, 7 aa, synthetic construct
DMRSALK

SEQ ID NO: 114051 - protein, 7 aa, synthetic construct
DMRSVPK

SEQ ID NO: 114052 - protein, 7 aa, synthetic construct
DMRTAVR

SEQ ID NO: 114053 - protein, 7 aa, synthetic construct
DMRTMKQ

SEQ ID NO: 114054 - protein, 7 aa, synthetic construct
DMRYAHS

SEQ ID NO: 114055 - protein, 7 aa, synthetic construct
DMSKPKQ

SEQ ID NO: 114056 - protein, 7 aa, synthetic construct
DMTKNRF

SEQ ID NO: 114057 - protein, 7 aa, synthetic construct
DMTQKMK

SEQ ID NO: 114058 - protein, 7 aa, synthetic construct
DMTQKRL

SEQ ID NO: 114059 - protein, 7 aa, synthetic construct
DMVNKQK

SEQ ID NO: 114060 - protein, 7 aa, synthetic construct
DMVRVKG

SEQ ID NO: 114061 - protein, 7 aa, synthetic construct
DNAAKSR

SEQ ID NO: 114062 - protein, 7 aa, synthetic construct
DNAARAK

SEQ ID NO: 114063 - protein, 7 aa, synthetic construct
DNAHKMK

SEQ ID NO: 114064 - protein, 7 aa, synthetic construct
DNATKFK

SEQ ID NO: 114065 - protein, 7 aa, synthetic construct
DNATKRH

SEQ ID NO: 114066 - protein, 7 aa, synthetic construct
DNAVTRK

SEQ ID NO: 114067 - protein, 7 aa, synthetic construct
DNEIRYK

SEQ ID NO: 114068 - protein, 7 aa, synthetic construct
DNELWTV

SEQ ID NO: 114069 - protein, 7 aa, synthetic construct
DNEVWSR

SEQ ID NO: 114070 - protein, 7 aa, synthetic construct
DNFKSKT

SEQ ID NO: 114071 - protein, 7 aa, synthetic construct
DNGRQKS

SEQ ID NO: 114072 - protein, 7 aa, synthetic construct
DNGSTYR

SEQ ID NO: 114073 - protein, 7 aa, synthetic construct
DNHADRR

SEQ ID NO: 114074 - protein, 7 aa, synthetic construct
DNHFKGK

SEQ ID NO: 114075 - protein, 7 aa, synthetic construct
DNHGRQW

SEQ ID NO: 114076 - protein, 7 aa, synthetic construct
DNHRHAY

SEQ ID NO: 114077 - protein, 7 aa, synthetic construct
DNIKAIR

SEQ ID NO: 114078 - protein, 7 aa, synthetic construct
DNIKKYV

SEQ ID NO: 114079 - protein, 7 aa, synthetic construct
DNIKRHV

SEQ ID NO: 114080 - protein, 7 aa, synthetic construct
DNIKRTH

SEQ ID NO: 114081 - protein, 7 aa, synthetic construct
DNISRKI

SEQ ID NO: 114082 - protein, 7 aa, synthetic construct
DNITRKG

SEQ ID NO: 114083 - protein, 7 aa, synthetic construct
DNIVKKN

SEQ ID NO: 114084 - protein, 7 aa, synthetic construct
DNKIRVY

SEQ ID NO: 114085 - protein, 7 aa, synthetic construct
DNKIVRA

SEQ ID NO: 114086 - protein, 7 aa, synthetic construct
DNKIYKA

SEQ ID NO: 114087 - protein, 7 aa, synthetic construct
DNKKGYN

SEQ ID NO: 114088 - protein, 7 aa, synthetic construct
DNKLIRN

SEQ ID NO: 114089 - protein, 7 aa, synthetic construct
DNKPFKA

SEQ ID NO: 114090 - protein, 7 aa, synthetic construct
DNKPGRF

SEQ ID NO: 114091 - protein, 7 aa, synthetic construct
DNKPNRA

SEQ ID NO: 114092 - protein, 7 aa, synthetic construct
DNKQHRV

SEQ ID NO: 114093 - protein, 7 aa, synthetic construct
DNKQQRS

SEQ ID NO: 114094 - protein, 7 aa, synthetic construct
DNKRAIS

SEQ ID NO: 114095 - protein, 7 aa, synthetic construct
DNKRANV

SEQ ID NO: 114096 - protein, 7 aa, synthetic construct
DNKRLLV

SEQ ID NO: 114097 - protein, 7 aa, synthetic construct
DNKRTPF

SEQ ID NO: 114098 - protein, 7 aa, synthetic construct
DNKTHKI

SEQ ID NO: 114099 - protein, 7 aa, synthetic construct
DNKTIKW

SEQ ID NO: 114100 - protein, 7 aa, synthetic construct
DNKTMYK

SEQ ID NO: 114101 - protein, 7 aa, synthetic construct
DNKVMRG

SEQ ID NO: 114102 - protein, 7 aa, synthetic construct
DNKVMSR

SEQ ID NO: 114103 - protein, 7 aa, synthetic construct
DNKYLGK

SEQ ID NO: 114104 - protein, 7 aa, synthetic construct
DNLPGKR

SEQ ID NO: 114105 - protein, 7 aa, synthetic construct
DNMKPKY

SEQ ID NO: 114106 - protein, 7 aa, synthetic construct
DNMNGTV

SEQ ID NO: 114107 - protein, 7 aa, synthetic construct
DNMPRKG

SEQ ID NO: 114108 - protein, 7 aa, synthetic construct
DNMRPNK

SEQ ID NO: 114109 - protein, 7 aa, synthetic construct
DNNITKR

SEQ ID NO: 114110 - protein, 7 aa, synthetic construct
DNNKRAL

SEQ ID NO: 114111 - protein, 7 aa, synthetic construct
DNNKRIS

SEQ ID NO: 114112 - protein, 7 aa, synthetic construct
DNNPHRY

SEQ ID NO: 114113 - protein, 7 aa, synthetic construct
DNNSKKW

SEQ ID NO: 114114 - protein, 7 aa, synthetic construct
DNPARTR

SEQ ID NO: 114115 - protein, 7 aa, synthetic construct
DNPIKVR

SEQ ID NO: 114116 - protein, 7 aa, synthetic construct
DNPKKSN

SEQ ID NO: 114117 - protein, 7 aa, synthetic construct
DNPQPKK

SEQ ID NO: 114118 - protein, 7 aa, synthetic construct
DNPRSPR

SEQ ID NO: 114119 - protein, 7 aa, synthetic construct
DNPTRRV

SEQ ID NO: 114120 - protein, 7 aa, synthetic construct
DNQGKKM

SEQ ID NO: 114121 - protein, 7 aa, synthetic construct
DNQGKKN

SEQ ID NO: 114122 - protein, 7 aa, synthetic construct
DNQIKRL

SEQ ID NO: 114123 - protein, 7 aa, synthetic construct
DNQKFRA

SEQ ID NO: 114124 - protein, 7 aa, synthetic construct
DNQKKIM

SEQ ID NO: 114125 - protein, 7 aa, synthetic construct
DNQKNTR

SEQ ID NO: 114126 - protein, 7 aa, synthetic construct
DNQSKRV

SEQ ID NO: 114127 - protein, 7 aa, synthetic construct
DNQTIRK

SEQ ID NO: 114128 - protein, 7 aa, synthetic construct
DNQTTFS

SEQ ID NO: 114129 - protein, 7 aa, synthetic construct
DNRALKL

SEQ ID NO: 114130 - protein, 7 aa, synthetic construct
DNRAQKS

SEQ ID NO: 114131 - protein, 7 aa, synthetic construct
DNRKFPV

SEQ ID NO: 114132 - protein, 7 aa, synthetic construct
DNRKITV

SEQ ID NO: 114133 - protein, 7 aa, synthetic construct
DNRKPLV

SEQ ID NO: 114134 - protein, 7 aa, synthetic construct
DNRKPTM

SEQ ID NO: 114135 - protein, 7 aa, synthetic construct
DNRKSSP

SEQ ID NO: 114136 - protein, 7 aa, synthetic construct
DNRKTYG

SEQ ID NO: 114137 - protein, 7 aa, synthetic construct
DNRKVQV

SEQ ID NO: 114138 - protein, 7 aa, synthetic construct
DNRMKAV

SEQ ID NO: 114139 - protein, 7 aa, synthetic construct
DNRMPKS

SEQ ID NO: 114140 - protein, 7 aa, synthetic construct
DNRNAAK

SEQ ID NO: 114141 - protein, 7 aa, synthetic construct
DNRNKFY

SEQ ID NO: 114142 - protein, 7 aa, synthetic construct
DNRNPPK

SEQ ID NO: 114143 - protein, 7 aa, synthetic construct
DNRPKVG

SEQ ID NO: 114144 - protein, 7 aa, synthetic construct
DNRPNKA

SEQ ID NO: 114145 - protein, 7 aa, synthetic construct
DNRPRAA

SEQ ID NO: 114146 - protein, 7 aa, synthetic construct
DNRPTMK

SEQ ID NO: 114147 - protein, 7 aa, synthetic construct
DNRQIKS

SEQ ID NO: 114148 - protein, 7 aa, synthetic construct
DNRQMPK

SEQ ID NO: 114149 - protein, 7 aa, synthetic construct
DNRTSAR

SEQ ID NO: 114150 - protein, 7 aa, synthetic construct
DNRTYKG

SEQ ID NO: 114151 - protein, 7 aa, synthetic construct
DNRVKNQ

SEQ ID NO: 114152 - protein, 7 aa, synthetic construct
DNRVKSQ

SEQ ID NO: 114153 - protein, 7 aa, synthetic construct
DNRVPRA

SEQ ID NO: 114154 - protein, 7 aa, synthetic construct
DNRYIKP

SEQ ID NO: 114155 - protein, 7 aa, synthetic construct
DNSAKRV

SEQ ID NO: 114156 - protein, 7 aa, synthetic construct
DNSHAFR

SEQ ID NO: 114157 - protein, 7 aa, synthetic construct
DNSKTKY

SEQ ID NO: 114158 - protein, 7 aa, synthetic construct
DNSNRLR

SEQ ID NO: 114159 - protein, 7 aa, synthetic construct
DNSPKRN

SEQ ID NO: 114160 - protein, 7 aa, synthetic construct
DNSVIKK

SEQ ID NO: 114161 - protein, 7 aa, synthetic construct
DNTIKIR

SEQ ID NO: 114162 - protein, 7 aa, synthetic construct
DNTIKRM

SEQ ID NO: 114163 - protein, 7 aa, synthetic construct
DNTQAKR

SEQ ID NO: 114164 - protein, 7 aa, synthetic construct
DNTRKGM

SEQ ID NO: 114165 - protein, 7 aa, synthetic construct
DNTSIRK

SEQ ID NO: 114166 - protein, 7 aa, synthetic construct
DNTSKAR

SEQ ID NO: 114167 - protein, 7 aa, synthetic construct
DNTTRQK

SEQ ID NO: 114168 - protein, 7 aa, synthetic construct
DNTVRKN

SEQ ID NO: 114169 - protein, 7 aa, synthetic construct
DNVKNAR

SEQ ID NO: 114170 - protein, 7 aa, synthetic construct
DNVKNSK

SEQ ID NO: 114171 - protein, 7 aa, synthetic construct
DNVPGKR

SEQ ID NO: 114172 - protein, 7 aa, synthetic construct
DNVRPQK

SEQ ID NO: 114173 - protein, 7 aa, synthetic construct
DNVRVKA

SEQ ID NO: 114174 - protein, 7 aa, synthetic construct
DNVTYIR

SEQ ID NO: 114175 - protein, 7 aa, synthetic construct
DNVYHLA

SEQ ID NO: 114176 - protein, 7 aa, synthetic construct
DNYKKSN

SEQ ID NO: 114177 - protein, 7 aa, synthetic construct
DNYKLKA

SEQ ID NO: 114178 - protein, 7 aa, synthetic construct
DNYKSKS

SEQ ID NO: 114179 - protein, 7 aa, synthetic construct
DNYLSHK

SEQ ID NO: 114180 - protein, 7 aa, synthetic construct
DPAAKKL

SEQ ID NO: 114181 - protein, 7 aa, synthetic construct
DPAKRTF

SEQ ID NO: 114182 - protein, 7 aa, synthetic construct
DPAKVKY

SEQ ID NO: 114183 - protein, 7 aa, synthetic construct
DPANNRR

SEQ ID NO: 114184 - protein, 7 aa, synthetic construct
DPDRQNG

SEQ ID NO: 114185 - protein, 7 aa, synthetic construct
DPEKKMR

SEQ ID NO: 114186 - protein, 7 aa, synthetic construct
DPGNARK

SEQ ID NO: 114187 - protein, 7 aa, synthetic construct
DPGQRKI

SEQ ID NO: 114188 - protein, 7 aa, synthetic construct
DPGQVKR

SEQ ID NO: 114189 - protein, 7 aa, synthetic construct
DPGRGLR

SEQ ID NO: 114190 - protein, 7 aa, synthetic construct
DPGRSKP

SEQ ID NO: 114191 - protein, 7 aa, synthetic construct
DPGRTMK

SEQ ID NO: 114192 - protein, 7 aa, synthetic construct
DPIKARA

SEQ ID NO: 114193 - protein, 7 aa, synthetic construct
DPIKFKT

SEQ ID NO: 114194 - protein, 7 aa, synthetic construct
DPISKMR

SEQ ID NO: 114195 - protein, 7 aa, synthetic construct
DPKFQRA

SEQ ID NO: 114196 - protein, 7 aa, synthetic construct
DPKIRNI

SEQ ID NO: 114197 - protein, 7 aa, synthetic construct
DPKKNFI

SEQ ID NO: 114198 - protein, 7 aa, synthetic construct
DPKNLRT

SEQ ID NO: 114199 - protein, 7 aa, synthetic construct
DPKRPYA

SEQ ID NO: 114200 - protein, 7 aa, synthetic construct
DPMRMKQ

SEQ ID NO: 114201 - protein, 7 aa, synthetic construct
DPNNRRV

SEQ ID NO: 114202 - protein, 7 aa, synthetic construct
DPNRPKP

SEQ ID NO: 114203 - protein, 7 aa, synthetic construct
DPNRTQK

SEQ ID NO: 114204 - protein, 7 aa, synthetic construct
DPNSRLR

SEQ ID NO: 114205 - protein, 7 aa, synthetic construct
DPNTRKV

SEQ ID NO: 114206 - protein, 7 aa, synthetic construct
DPPARRM

SEQ ID NO: 114207 - protein, 7 aa, synthetic construct
DPPGRKN

SEQ ID NO: 114208 - protein, 7 aa, synthetic construct
DPPIRKM

SEQ ID NO: 114209 - protein, 7 aa, synthetic construct
DPPKRFT

SEQ ID NO: 114210 - protein, 7 aa, synthetic construct
DPPRPKN

SEQ ID NO: 114211 - protein, 7 aa, synthetic construct
DPPVKRY

SEQ ID NO: 114212 - protein, 7 aa, synthetic construct
DPQKLRY

SEQ ID NO: 114213 - protein, 7 aa, synthetic construct
DPQQKKN

SEQ ID NO: 114214 - protein, 7 aa, synthetic construct
DPQQKRT

SEQ ID NO: 114215 - protein, 7 aa, synthetic construct
DPRAAKY

SEQ ID NO: 114216 - protein, 7 aa, synthetic construct
DPRKVSM

SEQ ID NO: 114217 - protein, 7 aa, synthetic construct
DPRNRMH

SEQ ID NO: 114218 - protein, 7 aa, synthetic construct
DPRQMKF

SEQ ID NO: 114219 - protein, 7 aa, synthetic construct
DPRVARM

SEQ ID NO: 114220 - protein, 7 aa, synthetic construct
DPRVPKM

SEQ ID NO: 114221 - protein, 7 aa, synthetic construct
DPSRLKY

SEQ ID NO: 114222 - protein, 7 aa, synthetic construct
DPTIRKS

SEQ ID NO: 114223 - protein, 7 aa, synthetic construct
DPTKSRN

SEQ ID NO: 114224 - protein, 7 aa, synthetic construct
DPTKVRQ

SEQ ID NO: 114225 - protein, 7 aa, synthetic construct
DPTRNRV

SEQ ID NO: 114226 - protein, 7 aa, synthetic construct
DQAFHGR

SEQ ID NO: 114227 - protein, 7 aa, synthetic construct
DQAIARK

SEQ ID NO: 114228 - protein, 7 aa, synthetic construct
DQAKGRQ

SEQ ID NO: 114229 - protein, 7 aa, synthetic construct
DQANIRW

SEQ ID NO: 114230 - protein, 7 aa, synthetic construct
DQARVRT

SEQ ID NO: 114231 - protein, 7 aa, synthetic construct
DQATKMR

SEQ ID NO: 114232 - protein, 7 aa, synthetic construct
DQDFKFH

SEQ ID NO: 114233 - protein, 7 aa, synthetic construct
DQDTRRY

SEQ ID NO: 114234 - protein, 7 aa, synthetic construct
DQEKLKR

SEQ ID NO: 114235 - protein, 7 aa, synthetic construct
DQFKARI

SEQ ID NO: 114236 - protein, 7 aa, synthetic construct
DQFKKQI

SEQ ID NO: 114237 - protein, 7 aa, synthetic construct
DQFKLRG

SEQ ID NO: 114238 - protein, 7 aa, synthetic construct
DQFKRTG

SEQ ID NO: 114239 - protein, 7 aa, synthetic construct
DQGGKKY

SEQ ID NO: 114240 - protein, 7 aa, synthetic construct
DQGKIGR

SEQ ID NO: 114241 - protein, 7 aa, synthetic construct
DQGKRMS

SEQ ID NO: 114242 - protein, 7 aa, synthetic construct
DQGKYKI

SEQ ID NO: 114243 - protein, 7 aa, synthetic construct
DQGMKRS

SEQ ID NO: 114244 - protein, 7 aa, synthetic construct
DQGPLKK

SEQ ID NO: 114245 - protein, 7 aa, synthetic construct
DQGRIKT

SEQ ID NO: 114246 - protein, 7 aa, synthetic construct
DQGRLSK

SEQ ID NO: 114247 - protein, 7 aa, synthetic construct
DQHKMKN

SEQ ID NO: 114248 - protein, 7 aa, synthetic construct
DQHNSFR

SEQ ID NO: 114249 - protein, 7 aa, synthetic construct
DQIKGRM

SEQ ID NO: 114250 - protein, 7 aa, synthetic construct
DQIQKGR

SEQ ID NO: 114251 - protein, 7 aa, synthetic construct
DQIQKKY

SEQ ID NO: 114252 - protein, 7 aa, synthetic construct
DQIQRAK

SEQ ID NO: 114253 - protein, 7 aa, synthetic construct
DQKFKFT

SEQ ID NO: 114254 - protein, 7 aa, synthetic construct
DQKFPMK

SEQ ID NO: 114255 - protein, 7 aa, synthetic construct
DQKGPLR

SEQ ID NO: 114256 - protein, 7 aa, synthetic construct
DQKIAKF

SEQ ID NO: 114257 - protein, 7 aa, synthetic construct
DQKIIAR

SEQ ID NO: 114258 - protein, 7 aa, synthetic construct
DQKKNDK

SEQ ID NO: 114259 - protein, 7 aa, synthetic construct
DQKKYTS

SEQ ID NO: 114260 - protein, 7 aa, synthetic construct
DQKNERK

SEQ ID NO: 114261 - protein, 7 aa, synthetic construct
DQKNPNR

SEQ ID NO: 114262 - protein, 7 aa, synthetic construct
DQKPRVS

SEQ ID NO: 114263 - protein, 7 aa, synthetic construct
DQKPRVT

SEQ ID NO: 114264 - protein, 7 aa, synthetic construct
DQKQMYK

SEQ ID NO: 114265 - protein, 7 aa, synthetic construct
DQKRNTF

SEQ ID NO: 114266 - protein, 7 aa, synthetic construct
DQKRSEK

SEQ ID NO: 114267 - protein, 7 aa, synthetic construct
DQKRTSN

SEQ ID NO: 114268 - protein, 7 aa, synthetic construct
DQKTIAR

SEQ ID NO: 114269 - protein, 7 aa, synthetic construct
DQKTLRQ

SEQ ID NO: 114270 - protein, 7 aa, synthetic construct
DQKVRQT

SEQ ID NO: 114271 - protein, 7 aa, synthetic construct
DQLKARA

SEQ ID NO: 114272 - protein, 7 aa, synthetic construct
DQLPARK

SEQ ID NO: 114273 - protein, 7 aa, synthetic construct
DQLRGKF

SEQ ID NO: 114274 - protein, 7 aa, synthetic construct
DQLRKIA

SEQ ID NO: 114275 - protein, 7 aa, synthetic construct
DQMASKK

SEQ ID NO: 114276 - protein, 7 aa, synthetic construct
DQMGRKT

SEQ ID NO: 114277 - protein, 7 aa, synthetic construct
DQMKAHK

SEQ ID NO: 114278 - protein, 7 aa, synthetic construct
DQMKAMR

SEQ ID NO: 114279 - protein, 7 aa, synthetic construct
DQMKGKW

SEQ ID NO: 114280 - protein, 7 aa, synthetic construct
DQMRKVT

SEQ ID NO: 114281 - protein, 7 aa, synthetic construct
DQMRQKA

SEQ ID NO: 114282 - protein, 7 aa, synthetic construct
DQMRQKL

SEQ ID NO: 114283 - protein, 7 aa, synthetic construct
DQNKARG

SEQ ID NO: 114284 - protein, 7 aa, synthetic construct
DQNKRHP

SEQ ID NO: 114285 - protein, 7 aa, synthetic construct
DQNKRIT

SEQ ID NO: 114286 - protein, 7 aa, synthetic construct
DQNKRNS

SEQ ID NO: 114287 - protein, 7 aa, synthetic construct
DQNRAKA

SEQ ID NO: 114288 - protein, 7 aa, synthetic construct
DQNRVKY

SEQ ID NO: 114289 - protein, 7 aa, synthetic construct
DQNTKQR

SEQ ID NO: 114290 - protein, 7 aa, synthetic construct
DQPIGKR

SEQ ID NO: 114291 - protein, 7 aa, synthetic construct
DQPKASK

SEQ ID NO: 114292 - protein, 7 aa, synthetic construct
DQPKKHG

SEQ ID NO: 114293 - protein, 7 aa, synthetic construct
DQPKNRY

SEQ ID NO: 114294 - protein, 7 aa, synthetic construct
DQPRGPR

SEQ ID NO: 114295 - protein, 7 aa, synthetic construct
DQPVKTR

SEQ ID NO: 114296 - protein, 7 aa, synthetic construct
DQQKANR

SEQ ID NO: 114297 - protein, 7 aa, synthetic construct
DQQKKPF

SEQ ID NO: 114298 - protein, 7 aa, synthetic construct
DQQRPGK

SEQ ID NO: 114299 - protein, 7 aa, synthetic construct
DQQTKMR

SEQ ID NO: 114300 - protein, 7 aa, synthetic construct
DQRIVRG

SEQ ID NO: 114301 - protein, 7 aa, synthetic construct
DQRKTFA

SEQ ID NO: 114302 - protein, 7 aa, synthetic construct
DQRLTRA

SEQ ID NO: 114303 - protein, 7 aa, synthetic construct
DQRPKPV

SEQ ID NO: 114304 - protein, 7 aa, synthetic construct
DQRPNVR

SEQ ID NO: 114305 - protein, 7 aa, synthetic construct
DQRPTAR

SEQ ID NO: 114306 - protein, 7 aa, synthetic construct
DQRQKII

SEQ ID NO: 114307 - protein, 7 aa, synthetic construct
DQRSMKA

SEQ ID NO: 114308 - protein, 7 aa, synthetic construct
DQRTARV

SEQ ID NO: 114309 - protein, 7 aa, synthetic construct
DQRTSMK

SEQ ID NO: 114310 - protein, 7 aa, synthetic construct
DQRVLKH

SEQ ID NO: 114311 - protein, 7 aa, synthetic construct
DQSAIRK

SEQ ID NO: 114312 - protein, 7 aa, synthetic construct
DQSKRTQ

SEQ ID NO: 114313 - protein, 7 aa, synthetic construct
DQSKTGK

SEQ ID NO: 114314 - protein, 7 aa, synthetic construct
DQSRIKM

SEQ ID NO: 114315 - protein, 7 aa, synthetic construct
DQTAHRY

SEQ ID NO: 114316 - protein, 7 aa, synthetic construct
DQTIRTK

SEQ ID NO: 114317 - protein, 7 aa, synthetic construct
DQTKPRQ

SEQ ID NO: 114318 - protein, 7 aa, synthetic construct
DQTNKRL

SEQ ID NO: 114319 - protein, 7 aa, synthetic construct
DQTNTRK

SEQ ID NO: 114320 - protein, 7 aa, synthetic construct
DQTPKKF

SEQ ID NO: 114321 - protein, 7 aa, synthetic construct
DQVIKRN

SEQ ID NO: 114322 - protein, 7 aa, synthetic construct
DQVKMRL

SEQ ID NO: 114323 - protein, 7 aa, synthetic construct
DQVKVRF

SEQ ID NO: 114324 - protein, 7 aa, synthetic construct
DQVQKKN

SEQ ID NO: 114325 - protein, 7 aa, synthetic construct
DQVRPQR

SEQ ID NO: 114326 - protein, 7 aa, synthetic construct
DQVRQKS

SEQ ID NO: 114327 - protein, 7 aa, synthetic construct
DQVRVLK

SEQ ID NO: 114328 - protein, 7 aa, synthetic construct
DQVRVMK

SEQ ID NO: 114329 - protein, 7 aa, synthetic construct
DQVVKRG

SEQ ID NO: 114330 - protein, 7 aa, synthetic construct
DQYHIKY

SEQ ID NO: 114331 - protein, 7 aa, synthetic construct
DQYHRSM

SEQ ID NO: 114332 - protein, 7 aa, synthetic construct
DRAAKQI

SEQ ID NO: 114333 - protein, 7 aa, synthetic construct
DRAALAK

SEQ ID NO: 114334 - protein, 7 aa, synthetic construct
DRAKDRS

SEQ ID NO: 114335 - protein, 7 aa, synthetic construct
DRAKEYK

SEQ ID NO: 114336 - protein, 7 aa, synthetic construct
DRAKHSV

SEQ ID NO: 114337 - protein, 7 aa, synthetic construct
DRAKIVM

SEQ ID NO: 114338 - protein, 7 aa, synthetic construct
DRAKMAF

SEQ ID NO: 114339 - protein, 7 aa, synthetic construct
DRAKNAL

SEQ ID NO: 114340 - protein, 7 aa, synthetic construct
DRAKQRE

SEQ ID NO: 114341 - protein, 7 aa, synthetic construct
DRALQAK

SEQ ID NO: 114342 - protein, 7 aa, synthetic construct
DRANPRM

SEQ ID NO: 114343 - protein, 7 aa, synthetic construct
DRANRLV

SEQ ID NO: 114344 - protein, 7 aa, synthetic construct
DRANTIK

SEQ ID NO: 114345 - protein, 7 aa, synthetic construct
DRAPHRI

SEQ ID NO: 114346 - protein, 7 aa, synthetic construct
DRAPKGI

SEQ ID NO: 114347 - protein, 7 aa, synthetic construct
DRAPMKQ

SEQ ID NO: 114348 - protein, 7 aa, synthetic construct
DRAQHKS

SEQ ID NO: 114349 - protein, 7 aa, synthetic construct
DRAQPPR

SEQ ID NO: 114350 - protein, 7 aa, synthetic construct
DRAQQAK

SEQ ID NO: 114351 - protein, 7 aa, synthetic construct
DRARATL

SEQ ID NO: 114352 - protein, 7 aa, synthetic construct
DRARNLG

SEQ ID NO: 114353 - protein, 7 aa, synthetic construct
DRARPVT

SEQ ID NO: 114354 - protein, 7 aa, synthetic construct
DRARVLG

SEQ ID NO: 114355 - protein, 7 aa, synthetic construct
DRASAFK

SEQ ID NO: 114356 - protein, 7 aa, synthetic construct
DRASQRF

SEQ ID NO: 114357 - protein, 7 aa, synthetic construct
DRATAGR

SEQ ID NO: 114358 - protein, 7 aa, synthetic construct
DRATFPR

SEQ ID NO: 114359 - protein, 7 aa, synthetic construct
DRAYKNV

SEQ ID NO: 114360 - protein, 7 aa, synthetic construct
DRDIKRV

SEQ ID NO: 114361 - protein, 7 aa, synthetic construct
DRDKPKQ

SEQ ID NO: 114362 - protein, 7 aa, synthetic construct
DRDPGKR

SEQ ID NO: 114363 - protein, 7 aa, synthetic construct
DRDSWPK

SEQ ID NO: 114364 - protein, 7 aa, synthetic construct
DREKSKQ

SEQ ID NO: 114365 - protein, 7 aa, synthetic construct
DREPKRM

SEQ ID NO: 114366 - protein, 7 aa, synthetic construct
DRESVKR

SEQ ID NO: 114367 - protein, 7 aa, synthetic construct
DRFKSAV

SEQ ID NO: 114368 - protein, 7 aa, synthetic construct
DRFKTNV

SEQ ID NO: 114369 - protein, 7 aa, synthetic construct
DRGAGLK

SEQ ID NO: 114370 - protein, 7 aa, synthetic construct
DRGANKS

SEQ ID NO: 114371 - protein, 7 aa, synthetic construct
DRGDAKR

SEQ ID NO: 114372 - protein, 7 aa, synthetic construct
DRGGKVV

SEQ ID NO: 114373 - protein, 7 aa, synthetic construct
DRGGRNV

SEQ ID NO: 114374 - protein, 7 aa, synthetic construct
DRGIAKA

SEQ ID NO: 114375 - protein, 7 aa, synthetic construct
DRGIKSY

SEQ ID NO: 114376 - protein, 7 aa, synthetic construct
DRGITKF

SEQ ID NO: 114377 - protein, 7 aa, synthetic construct
DRGKLAH

SEQ ID NO: 114378 - protein, 7 aa, synthetic construct
DRGKNSF

SEQ ID NO: 114379 - protein, 7 aa, synthetic construct
DRGKTMS

SEQ ID NO: 114380 - protein, 7 aa, synthetic construct
DRGKTSM

SEQ ID NO: 114381 - protein, 7 aa, synthetic construct
DRGKVHM

SEQ ID NO: 114382 - protein, 7 aa, synthetic construct
DRGMPKT

SEQ ID NO: 114383 - protein, 7 aa, synthetic construct
DRGNQKA

SEQ ID NO: 114384 - protein, 7 aa, synthetic construct
DRGNQKM

SEQ ID NO: 114385 - protein, 7 aa, synthetic construct
DRGNSGK

SEQ ID NO: 114386 - protein, 7 aa, synthetic construct
DRGPRGN

SEQ ID NO: 114387 - protein, 7 aa, synthetic construct
DRGPSRT

SEQ ID NO: 114388 - protein, 7 aa, synthetic construct
DRGRIGS

SEQ ID NO: 114389 - protein, 7 aa, synthetic construct
DRGRMGG

SEQ ID NO: 114390 - protein, 7 aa, synthetic construct
DRGRTQT

SEQ ID NO: 114391 - protein, 7 aa, synthetic construct
DRGSKLQ

SEQ ID NO: 114392 - protein, 7 aa, synthetic construct
DRGSVKP

SEQ ID NO: 114393 - protein, 7 aa, synthetic construct
DRGTTGR

SEQ ID NO: 114394 - protein, 7 aa, synthetic construct
DRGTYKT

SEQ ID NO: 114395 - protein, 7 aa, synthetic construct
DRGVGRL

SEQ ID NO: 114396 - protein, 7 aa, synthetic construct
DRGVGSR

SEQ ID NO: 114397 - protein, 7 aa, synthetic construct
DRGVKER

SEQ ID NO: 114398 - protein, 7 aa, synthetic construct
DRGVKNN

SEQ ID NO: 114399 - protein, 7 aa, synthetic construct
DRGVPIK

SEQ ID NO: 114400 - protein, 7 aa, synthetic construct
DRGVRQS

SEQ ID NO: 114401 - protein, 7 aa, synthetic construct
DRGYNGR

SEQ ID NO: 114402 - protein, 7 aa, synthetic construct
DRHAKTS

SEQ ID NO: 114403 - protein, 7 aa, synthetic construct
DRHIPKQ

SEQ ID NO: 114404 - protein, 7 aa, synthetic construct
DRHLKMA

SEQ ID NO: 114405 - protein, 7 aa, synthetic construct
DRHNQKA

SEQ ID NO: 114406 - protein, 7 aa, synthetic construct
DRHPKFA

SEQ ID NO: 114407 - protein, 7 aa, synthetic construct
DRHPVRA

SEQ ID NO: 114408 - protein, 7 aa, synthetic construct
DRHQKAM

SEQ ID NO: 114409 - protein, 7 aa, synthetic construct
DRHYHTG

SEQ ID NO: 114410 - protein, 7 aa, synthetic construct
DRIHVKQ

SEQ ID NO: 114411 - protein, 7 aa, synthetic construct
DRIIAKA

SEQ ID NO: 114412 - protein, 7 aa, synthetic construct
DRIKAWE

SEQ ID NO: 114413 - protein, 7 aa, synthetic construct
DRIKERS

SEQ ID NO: 114414 - protein, 7 aa, synthetic construct
DRIKGNF

SEQ ID NO: 114415 - protein, 7 aa, synthetic construct
DRIKHTT

SEQ ID NO: 114416 - protein, 7 aa, synthetic construct
DRIMSKG

SEQ ID NO: 114417 - protein, 7 aa, synthetic construct
DRINGPR

SEQ ID NO: 114418 - protein, 7 aa, synthetic construct
DRINVRQ

SEQ ID NO: 114419 - protein, 7 aa, synthetic construct
DRIPRQV

SEQ ID NO: 114420 - protein, 7 aa, synthetic construct
DRIQKQH

SEQ ID NO: 114421 - protein, 7 aa, synthetic construct
DRIQVKH

SEQ ID NO: 114422 - protein, 7 aa, synthetic construct
DRIVSMK

SEQ ID NO: 114423 - protein, 7 aa, synthetic construct
DRKAPHS

SEQ ID NO: 114424 - protein, 7 aa, synthetic construct
DRKAPSS

SEQ ID NO: 114425 - protein, 7 aa, synthetic construct
DRKAVYV

SEQ ID NO: 114426 - protein, 7 aa, synthetic construct
DRKFMTA

SEQ ID NO: 114427 - protein, 7 aa, synthetic construct
DRKFNVN

SEQ ID NO: 114428 - protein, 7 aa, synthetic construct
DRKFQQG

SEQ ID NO: 114429 - protein, 7 aa, synthetic construct
DRKGSVY

SEQ ID NO: 114430 - protein, 7 aa, synthetic construct
DRKINMV

SEQ ID NO: 114431 - protein, 7 aa, synthetic construct
DRKMTGY

SEQ ID NO: 114432 - protein, 7 aa, synthetic construct
DRKNSYS

SEQ ID NO: 114433 - protein, 7 aa, synthetic construct
DRKPDMR

SEQ ID NO: 114434 - protein, 7 aa, synthetic construct
DRKPNFT

SEQ ID NO: 114435 - protein, 7 aa, synthetic construct
DRKQTYS

SEQ ID NO: 114436 - protein, 7 aa, synthetic construct
DRKSKEI

SEQ ID NO: 114437 - protein, 7 aa, synthetic construct
DRKSQLY

SEQ ID NO: 114438 - protein, 7 aa, synthetic construct
DRKTVMY

SEQ ID NO: 114439 - protein, 7 aa, synthetic construct
DRKTYAA

SEQ ID NO: 114440 - protein, 7 aa, synthetic construct
DRKVDRF

SEQ ID NO: 114441 - protein, 7 aa, synthetic construct
DRKVSYV

SEQ ID NO: 114442 - protein, 7 aa, synthetic construct
DRKVYTG

SEQ ID NO: 114443 - protein, 7 aa, synthetic construct
DRKWNDH

SEQ ID NO: 114444 - protein, 7 aa, synthetic construct
DRKYSGA

SEQ ID NO: 114445 - protein, 7 aa, synthetic construct
DRKYVKE

SEQ ID NO: 114446 - protein, 7 aa, synthetic construct
DRLAKSL

SEQ ID NO: 114447 - protein, 7 aa, synthetic construct
DRLAMSR

SEQ ID NO: 114448 - protein, 7 aa, synthetic construct
DRLHAKG

SEQ ID NO: 114449 - protein, 7 aa, synthetic construct
DRLHKQA

SEQ ID NO: 114450 - protein, 7 aa, synthetic construct
DRLKIHV

SEQ ID NO: 114451 - protein, 7 aa, synthetic construct
DRLNVPK

SEQ ID NO: 114452 - protein, 7 aa, synthetic construct
DRLSIAK

SEQ ID NO: 114453 - protein, 7 aa, synthetic construct
DRMAPPK

SEQ ID NO: 114454 - protein, 7 aa, synthetic construct
DRMGPTF

SEQ ID NO: 114455 - protein, 7 aa, synthetic construct
DRMKAMI

SEQ ID NO: 114456 - protein, 7 aa, synthetic construct
DRMKANN

SEQ ID NO: 114457 - protein, 7 aa, synthetic construct
DRMKLQL

SEQ ID NO: 114458 - protein, 7 aa, synthetic construct
DRMKMTV

SEQ ID NO: 114459 - protein, 7 aa, synthetic construct
DRMLGRG

SEQ ID NO: 114460 - protein, 7 aa, synthetic construct
DRMLQIK

SEQ ID NO: 114461 - protein, 7 aa, synthetic construct
DRMPVRS

SEQ ID NO: 114462 - protein, 7 aa, synthetic construct
DRMRGMI

SEQ ID NO: 114463 - protein, 7 aa, synthetic construct
DRNAMKQ

SEQ ID NO: 114464 - protein, 7 aa, synthetic construct
DRNARGM

SEQ ID NO: 114465 - protein, 7 aa, synthetic construct
DRNASLK

SEQ ID NO: 114466 - protein, 7 aa, synthetic construct
DRNGMQR

SEQ ID NO: 114467 - protein, 7 aa, synthetic construct
DRNIQIK

SEQ ID NO: 114468 - protein, 7 aa, synthetic construct
DRNKHAV

SEQ ID NO: 114469 - protein, 7 aa, synthetic construct
DRNKMEK

SEQ ID NO: 114470 - protein, 7 aa, synthetic construct
DRNKMPL

SEQ ID NO: 114471 - protein, 7 aa, synthetic construct
DRNKTQI

SEQ ID NO: 114472 - protein, 7 aa, synthetic construct
DRNLKQM

SEQ ID NO: 114473 - protein, 7 aa, synthetic construct
DRNMNVK

SEQ ID NO: 114474 - protein, 7 aa, synthetic construct
DRNNLRN

SEQ ID NO: 114475 - protein, 7 aa, synthetic construct
DRNPKIS

SEQ ID NO: 114476 - protein, 7 aa, synthetic construct
DRNPKQN

SEQ ID NO: 114477 - protein, 7 aa, synthetic construct
DRNPNGR

SEQ ID NO: 114478 - protein, 7 aa, synthetic construct
DRNPVKI

SEQ ID NO: 114479 - protein, 7 aa, synthetic construct
DRNQIPK

SEQ ID NO: 114480 - protein, 7 aa, synthetic construct
DRNQKSQ

SEQ ID NO: 114481 - protein, 7 aa, synthetic construct
DRNQRDK

SEQ ID NO: 114482 - protein, 7 aa, synthetic construct
DRNREWS

SEQ ID NO: 114483 - protein, 7 aa, synthetic construct
DRNRSAI

SEQ ID NO: 114484 - protein, 7 aa, synthetic construct
DRNTSRA

SEQ ID NO: 114485 - protein, 7 aa, synthetic construct
DRNVLSR

SEQ ID NO: 114486 - protein, 7 aa, synthetic construct
DRNVMSK

SEQ ID NO: 114487 - protein, 7 aa, synthetic construct
DRNVRAS

SEQ ID NO: 114488 - protein, 7 aa, synthetic construct
DRPGQRL

SEQ ID NO: 114489 - protein, 7 aa, synthetic construct
DRPGRST

SEQ ID NO: 114490 - protein, 7 aa, synthetic construct
DRPIRLN

SEQ ID NO: 114491 - protein, 7 aa, synthetic construct
DRPKATN

SEQ ID NO: 114492 - protein, 7 aa, synthetic construct
DRPKPFA

SEQ ID NO: 114493 - protein, 7 aa, synthetic construct
DRPKPNS

SEQ ID NO: 114494 - protein, 7 aa, synthetic construct
DRPMNAR

SEQ ID NO: 114495 - protein, 7 aa, synthetic construct
DRPMRAI

SEQ ID NO: 114496 - protein, 7 aa, synthetic construct
DRPNKLM

SEQ ID NO: 114497 - protein, 7 aa, synthetic construct
DRPNPIR

SEQ ID NO: 114498 - protein, 7 aa, synthetic construct
DRPNRTQ

SEQ ID NO: 114499 - protein, 7 aa, synthetic construct
DRPNSTK

SEQ ID NO: 114500 - protein, 7 aa, synthetic construct
DRPNTSR

SEQ ID NO: 114501 - protein, 7 aa, synthetic construct
DRPNYKT

SEQ ID NO: 114502 - protein, 7 aa, synthetic construct
DRPPARQ

SEQ ID NO: 114503 - protein, 7 aa, synthetic construct
DRPPKIA

SEQ ID NO: 114504 - protein, 7 aa, synthetic construct
DRPPNRS

SEQ ID NO: 114505 - protein, 7 aa, synthetic construct
DRPPRAG

SEQ ID NO: 114506 - protein, 7 aa, synthetic construct
DRPQKFL

SEQ ID NO: 114507 - protein, 7 aa, synthetic construct
DRPRAAI

SEQ ID NO: 114508 - protein, 7 aa, synthetic construct
DRPRLIG

SEQ ID NO: 114509 - protein, 7 aa, synthetic construct
DRPRNPM

SEQ ID NO: 114510 - protein, 7 aa, synthetic construct
DRPRVPM

SEQ ID NO: 114511 - protein, 7 aa, synthetic construct
DRPSIRV

SEQ ID NO: 114512 - protein, 7 aa, synthetic construct
DRPSVKN

SEQ ID NO: 114513 - protein, 7 aa, synthetic construct
DRPVKSM

SEQ ID NO: 114514 - protein, 7 aa, synthetic construct
DRPVSRQ

SEQ ID NO: 114515 - protein, 7 aa, synthetic construct
DRQASVK

SEQ ID NO: 114516 - protein, 7 aa, synthetic construct
DRQFSKG

SEQ ID NO: 114517 - protein, 7 aa, synthetic construct
DRQGSKM

SEQ ID NO: 114518 - protein, 7 aa, synthetic construct
DRQGTKM

SEQ ID NO: 114519 - protein, 7 aa, synthetic construct
DRQGTTK

SEQ ID NO: 114520 - protein, 7 aa, synthetic construct
DRQIPNK

SEQ ID NO: 114521 - protein, 7 aa, synthetic construct
DRQKAVV

SEQ ID NO: 114522 - protein, 7 aa, synthetic construct
DRQKDWQ

SEQ ID NO: 114523 - protein, 7 aa, synthetic construct
DRQKFSA

SEQ ID NO: 114524 - protein, 7 aa, synthetic construct
DRQKITF

SEQ ID NO: 114525 - protein, 7 aa, synthetic construct
DRQKMMQ

SEQ ID NO: 114526 - protein, 7 aa, synthetic construct
DRQKNIM

SEQ ID NO: 114527 - protein, 7 aa, synthetic construct
DRQKVPV

SEQ ID NO: 114528 - protein, 7 aa, synthetic construct
DRQNPLR

SEQ ID NO: 114529 - protein, 7 aa, synthetic construct
DRQPRYG

SEQ ID NO: 114530 - protein, 7 aa, synthetic construct
DRQPVKQ

SEQ ID NO: 114531 - protein, 7 aa, synthetic construct
DRQQSRF

SEQ ID NO: 114532 - protein, 7 aa, synthetic construct
DRQVIPK

SEQ ID NO: 114533 - protein, 7 aa, synthetic construct
DRQVNMR

SEQ ID NO: 114534 - protein, 7 aa, synthetic construct
DRQVRVA

SEQ ID NO: 114535 - protein, 7 aa, synthetic construct
DRQVSRA

SEQ ID NO: 114536 - protein, 7 aa, synthetic construct
DRRAAGS

SEQ ID NO: 114537 - protein, 7 aa, synthetic construct
DRRDVKQ

SEQ ID NO: 114538 - protein, 7 aa, synthetic construct
DRRGMHI

SEQ ID NO: 114539 - protein, 7 aa, synthetic construct
DRRIMKE

SEQ ID NO: 114540 - protein, 7 aa, synthetic construct
DRRIQAA

SEQ ID NO: 114541 - protein, 7 aa, synthetic construct
DRRMGAF

SEQ ID NO: 114542 - protein, 7 aa, synthetic construct
DRRNIQG

SEQ ID NO: 114543 - protein, 7 aa, synthetic construct
DRRPTAG

SEQ ID NO: 114544 - protein, 7 aa, synthetic construct
DRRPTNT

SEQ ID NO: 114545 - protein, 7 aa, synthetic construct
DRRPVGQ

SEQ ID NO: 114546 - protein, 7 aa, synthetic construct
DRRQHSE

SEQ ID NO: 114547 - protein, 7 aa, synthetic construct
DRRQSVG

SEQ ID NO: 114548 - protein, 7 aa, synthetic construct
DRRQVGV

SEQ ID NO: 114549 - protein, 7 aa, synthetic construct
DRRVPVS

SEQ ID NO: 114550 - protein, 7 aa, synthetic construct
DRRYLHE

SEQ ID NO: 114551 - protein, 7 aa, synthetic construct
DRSALPR

SEQ ID NO: 114552 - protein, 7 aa, synthetic construct
DRSGQKQ

SEQ ID NO: 114553 - protein, 7 aa, synthetic construct
DRSGTGK

SEQ ID NO: 114554 - protein, 7 aa, synthetic construct
DRSHLKQ

SEQ ID NO: 114555 - protein, 7 aa, synthetic construct
DRSHREF

SEQ ID NO: 114556 - protein, 7 aa, synthetic construct
DRSKISY

SEQ ID NO: 114557 - protein, 7 aa, synthetic construct
DRSKLNI

SEQ ID NO: 114558 - protein, 7 aa, synthetic construct
DRSKMPQ

SEQ ID NO: 114559 - protein, 7 aa, synthetic construct
DRSKNQL

SEQ ID NO: 114560 - protein, 7 aa, synthetic construct
DRSKPTY

SEQ ID NO: 114561 - protein, 7 aa, synthetic construct
DRSMPTD

SEQ ID NO: 114562 - protein, 7 aa, synthetic construct
DRSNAYY

SEQ ID NO: 114563 - protein, 7 aa, synthetic construct
DRSNPLK

SEQ ID NO: 114564 - protein, 7 aa, synthetic construct
DRSPKQY

SEQ ID NO: 114565 - protein, 7 aa, synthetic construct
DRSREKV

SEQ ID NO: 114566 - protein, 7 aa, synthetic construct
DRSRTNI

SEQ ID NO: 114567 - protein, 7 aa, synthetic construct
DRSVRAG

SEQ ID NO: 114568 - protein, 7 aa, synthetic construct
DRTKAPL

SEQ ID NO: 114569 - protein, 7 aa, synthetic construct
DRTKNSW

SEQ ID NO: 114570 - protein, 7 aa, synthetic construct
DRTKPYA

SEQ ID NO: 114571 - protein, 7 aa, synthetic construct
DRTKQMQ

SEQ ID NO: 114572 - protein, 7 aa, synthetic construct
DRTKQPT

SEQ ID NO: 114573 - protein, 7 aa, synthetic construct
DRTKVNI

SEQ ID NO: 114574 - protein, 7 aa, synthetic construct
DRTKYQS

SEQ ID NO: 114575 - protein, 7 aa, synthetic construct
DRTLHKS

SEQ ID NO: 114576 - protein, 7 aa, synthetic construct
DRTMMPK

SEQ ID NO: 114577 - protein, 7 aa, synthetic construct
DRTMQKM

SEQ ID NO: 114578 - protein, 7 aa, synthetic construct
DRTMRGA

SEQ ID NO: 114579 - protein, 7 aa, synthetic construct
DRTMSIK

SEQ ID NO: 114580 - protein, 7 aa, synthetic construct
DRTNKGL

SEQ ID NO: 114581 - protein, 7 aa, synthetic construct
DRTNRGG

SEQ ID NO: 114582 - protein, 7 aa, synthetic construct
DRTPGWA

SEQ ID NO: 114583 - protein, 7 aa, synthetic construct
DRTPTRM

SEQ ID NO: 114584 - protein, 7 aa, synthetic construct
DRTQRTS

SEQ ID NO: 114585 - protein, 7 aa, synthetic construct
DRTVKQL

SEQ ID NO: 114586 - protein, 7 aa, synthetic construct
DRTVRAN

SEQ ID NO: 114587 - protein, 7 aa, synthetic construct
DRTVTRS

SEQ ID NO: 114588 - protein, 7 aa, synthetic construct
DRTYAKG

SEQ ID NO: 114589 - protein, 7 aa, synthetic construct
DRTYKQP

SEQ ID NO: 114590 - protein, 7 aa, synthetic construct
DRVASIK

SEQ ID NO: 114591 - protein, 7 aa, synthetic construct
DRVAVRA

SEQ ID NO: 114592 - protein, 7 aa, synthetic construct
DRVGPTR

SEQ ID NO: 114593 - protein, 7 aa, synthetic construct
DRVGTRT

SEQ ID NO: 114594 - protein, 7 aa, synthetic construct
DRVKIQY

SEQ ID NO: 114595 - protein, 7 aa, synthetic construct
DRVKMNT

SEQ ID NO: 114596 - protein, 7 aa, synthetic construct
DRVLMAK

SEQ ID NO: 114597 - protein, 7 aa, synthetic construct
DRVPGAK

SEQ ID NO: 114598 - protein, 7 aa, synthetic construct
DRVPNRQ

SEQ ID NO: 114599 - protein, 7 aa, synthetic construct
DRVQRGV

SEQ ID NO: 114600 - protein, 7 aa, synthetic construct
DRVRMGG

SEQ ID NO: 114601 - protein, 7 aa, synthetic construct
DRVRMPA

SEQ ID NO: 114602 - protein, 7 aa, synthetic construct
DRVRPTM

SEQ ID NO: 114603 - protein, 7 aa, synthetic construct
DRVRTAM

SEQ ID NO: 114604 - protein, 7 aa, synthetic construct
DRVSALR

SEQ ID NO: 114605 - protein, 7 aa, synthetic construct
DRVSMRA

SEQ ID NO: 114606 - protein, 7 aa, synthetic construct
DRVTRTG

SEQ ID NO: 114607 - protein, 7 aa, synthetic construct
DRWQPSA

SEQ ID NO: 114608 - protein, 7 aa, synthetic construct
DRYGAKG

SEQ ID NO: 114609 - protein, 7 aa, synthetic construct
DRYKPVT

SEQ ID NO: 114610 - protein, 7 aa, synthetic construct
DRYNAMK

SEQ ID NO: 114611 - protein, 7 aa, synthetic construct
DSAAKKY

SEQ ID NO: 114612 - protein, 7 aa, synthetic construct
DSAARRV

SEQ ID NO: 114613 - protein, 7 aa, synthetic construct
DSAERYI

SEQ ID NO: 114614 - protein, 7 aa, synthetic construct
DSAIQKK

SEQ ID NO: 114615 - protein, 7 aa, synthetic construct
DSAKAKT

SEQ ID NO: 114616 - protein, 7 aa, synthetic construct
DSAKSMR

SEQ ID NO: 114617 - protein, 7 aa, synthetic construct
DSAKYTK

SEQ ID NO: 114618 - protein, 7 aa, synthetic construct
DSANRRI

SEQ ID NO: 114619 - protein, 7 aa, synthetic construct
DSAPRRP

SEQ ID NO: 114620 - protein, 7 aa, synthetic construct
DSAVAKK

SEQ ID NO: 114621 - protein, 7 aa, synthetic construct
DSAVKRQ

SEQ ID NO: 114622 - protein, 7 aa, synthetic construct
DSERSRY

SEQ ID NO: 114623 - protein, 7 aa, synthetic construct
DSFKRQS

SEQ ID NO: 114624 - protein, 7 aa, synthetic construct
DSGARPK

SEQ ID NO: 114625 - protein, 7 aa, synthetic construct
DSGKGKY

SEQ ID NO: 114626 - protein, 7 aa, synthetic construct
DSGMRLK

SEQ ID NO: 114627 - protein, 7 aa, synthetic construct
DSGVKRT

SEQ ID NO: 114628 - protein, 7 aa, synthetic construct
DSHKLKA

SEQ ID NO: 114629 - protein, 7 aa, synthetic construct
DSHYGSK

SEQ ID NO: 114630 - protein, 7 aa, synthetic construct
DSIAKTR

SEQ ID NO: 114631 - protein, 7 aa, synthetic construct
DSIKEKR

SEQ ID NO: 114632 - protein, 7 aa, synthetic construct
DSIKRIT

SEQ ID NO: 114633 - protein, 7 aa, synthetic construct
DSIRARP

SEQ ID NO: 114634 - protein, 7 aa, synthetic construct
DSIRIKN

SEQ ID NO: 114635 - protein, 7 aa, synthetic construct
DSKARHA

SEQ ID NO: 114636 - protein, 7 aa, synthetic construct
DSKAVYR

SEQ ID NO: 114637 - protein, 7 aa, synthetic construct
DSKFAGR

SEQ ID NO: 114638 - protein, 7 aa, synthetic construct
DSKHPLK

SEQ ID NO: 114639 - protein, 7 aa, synthetic construct
DSKIHRP

SEQ ID NO: 114640 - protein, 7 aa, synthetic construct
DSKMPKN

SEQ ID NO: 114641 - protein, 7 aa, synthetic construct
DSKMSRV

SEQ ID NO: 114642 - protein, 7 aa, synthetic construct
DSKNARF

SEQ ID NO: 114643 - protein, 7 aa, synthetic construct
DSKNIRS

SEQ ID NO: 114644 - protein, 7 aa, synthetic construct
DSKNRII

SEQ ID NO: 114645 - protein, 7 aa, synthetic construct
DSKPPRV

SEQ ID NO: 114646 - protein, 7 aa, synthetic construct
DSKQPVR

SEQ ID NO: 114647 - protein, 7 aa, synthetic construct
DSKQVNR

SEQ ID NO: 114648 - protein, 7 aa, synthetic construct
DSKRGSL

SEQ ID NO: 114649 - protein, 7 aa, synthetic construct
DSKRPGN

SEQ ID NO: 114650 - protein, 7 aa, synthetic construct
DSKRTFG

SEQ ID NO: 114651 - protein, 7 aa, synthetic construct
DSKSVRN

SEQ ID NO: 114652 - protein, 7 aa, synthetic construct
DSKTASR

SEQ ID NO: 114653 - protein, 7 aa, synthetic construct
DSKTVYR

SEQ ID NO: 114654 - protein, 7 aa, synthetic construct
DSKVARG

SEQ ID NO: 114655 - protein, 7 aa, synthetic construct
DSKVRYG

SEQ ID NO: 114656 - protein, 7 aa, synthetic construct
DSKYLKP

SEQ ID NO: 114657 - protein, 7 aa, synthetic construct
DSKYQKP

SEQ ID NO: 114658 - protein, 7 aa, synthetic construct
DSLKSPG

SEQ ID NO: 114659 - protein, 7 aa, synthetic construct
DSMGRKA

SEQ ID NO: 114660 - protein, 7 aa, synthetic construct
DSMKFRP

SEQ ID NO: 114661 - protein, 7 aa, synthetic construct
DSMKRGF

SEQ ID NO: 114662 - protein, 7 aa, synthetic construct
DSMPQKK

SEQ ID NO: 114663 - protein, 7 aa, synthetic construct
DSNKAAK

SEQ ID NO: 114664 - protein, 7 aa, synthetic construct
DSNKPFK

SEQ ID NO: 114665 - protein, 7 aa, synthetic construct
DSNKPRL

SEQ ID NO: 114666 - protein, 7 aa, synthetic construct
DSNKRGL

SEQ ID NO: 114667 - protein, 7 aa, synthetic construct
DSNMQKR

SEQ ID NO: 114668 - protein, 7 aa, synthetic construct
DSNPKRA

SEQ ID NO: 114669 - protein, 7 aa, synthetic construct
DSNPKTR

SEQ ID NO: 114670 - protein, 7 aa, synthetic construct
DSPNGKR

SEQ ID NO: 114671 - protein, 7 aa, synthetic construct
DSPQRRI

SEQ ID NO: 114672 - protein, 7 aa, synthetic construct
DSQKARY

SEQ ID NO: 114673 - protein, 7 aa, synthetic construct
DSQKLRG

SEQ ID NO: 114674 - protein, 7 aa, synthetic construct
DSQKNRM

SEQ ID NO: 114675 - protein, 7 aa, synthetic construct
DSQKPRP

SEQ ID NO: 114676 - protein, 7 aa, synthetic construct
DSQKSSR

SEQ ID NO: 114677 - protein, 7 aa, synthetic construct
DSQRLKN

SEQ ID NO: 114678 - protein, 7 aa, synthetic construct
DSRATNK

SEQ ID NO: 114679 - protein, 7 aa, synthetic construct
DSRGKAS

SEQ ID NO: 114680 - protein, 7 aa, synthetic construct
DSRHYHT

SEQ ID NO: 114681 - protein, 7 aa, synthetic construct
DSRKGIL

SEQ ID NO: 114682 - protein, 7 aa, synthetic construct
DSRKIEF

SEQ ID NO: 114683 - protein, 7 aa, synthetic construct
DSRKLAN

SEQ ID NO: 114684 - protein, 7 aa, synthetic construct
DSRKSTA

SEQ ID NO: 114685 - protein, 7 aa, synthetic construct
DSRLNKV

SEQ ID NO: 114686 - protein, 7 aa, synthetic construct
DSRMLSK

SEQ ID NO: 114687 - protein, 7 aa, synthetic construct
DSRNMRV

SEQ ID NO: 114688 - protein, 7 aa, synthetic construct
DSRNVRA

SEQ ID NO: 114689 - protein, 7 aa, synthetic construct
DSRPKQV

SEQ ID NO: 114690 - protein, 7 aa, synthetic construct
DSRPMAR

SEQ ID NO: 114691 - protein, 7 aa, synthetic construct
DSRPMKQ

SEQ ID NO: 114692 - protein, 7 aa, synthetic construct
DSRQNGR

SEQ ID NO: 114693 - protein, 7 aa, synthetic construct
DSRQSKV

SEQ ID NO: 114694 - protein, 7 aa, synthetic construct
DSRQVNR

SEQ ID NO: 114695 - protein, 7 aa, synthetic construct
DSRRVVA

SEQ ID NO: 114696 - protein, 7 aa, synthetic construct
DSRSMAK

SEQ ID NO: 114697 - protein, 7 aa, synthetic construct
DSRSWPA

SEQ ID NO: 114698 - protein, 7 aa, synthetic construct
DSRTKAL

SEQ ID NO: 114699 - protein, 7 aa, synthetic construct
DSRTLRT

SEQ ID NO: 114700 - protein, 7 aa, synthetic construct
DSRTNAR

SEQ ID NO: 114701 - protein, 7 aa, synthetic construct
DSRTQAK

SEQ ID NO: 114702 - protein, 7 aa, synthetic construct
DSRVNRT

SEQ ID NO: 114703 - protein, 7 aa, synthetic construct
DSRVVKI

SEQ ID NO: 114704 - protein, 7 aa, synthetic construct
DSSGKKF

SEQ ID NO: 114705 - protein, 7 aa, synthetic construct
DSSKTRI

SEQ ID NO: 114706 - protein, 7 aa, synthetic construct
DSSPYKM

SEQ ID NO: 114707 - protein, 7 aa, synthetic construct
DSSQKVR

SEQ ID NO: 114708 - protein, 7 aa, synthetic construct
DSSRPRP

SEQ ID NO: 114709 - protein, 7 aa, synthetic construct
DSTGKKW

SEQ ID NO: 114710 - protein, 7 aa, synthetic construct
DSTKARL

SEQ ID NO: 114711 - protein, 7 aa, synthetic construct
DSTKARV

SEQ ID NO: 114712 - protein, 7 aa, synthetic construct
DSTKFRS

SEQ ID NO: 114713 - protein, 7 aa, synthetic construct
DSTKQRI

SEQ ID NO: 114714 - protein, 7 aa, synthetic construct
DSTKRTV

SEQ ID NO: 114715 - protein, 7 aa, synthetic construct
DSTKSRA

SEQ ID NO: 114716 - protein, 7 aa, synthetic construct
DSTLRRA

SEQ ID NO: 114717 - protein, 7 aa, synthetic construct
DSVGAKK

SEQ ID NO: 114718 - protein, 7 aa, synthetic construct
DSVNKRV

SEQ ID NO: 114719 - protein, 7 aa, synthetic construct
DSVPNKK

SEQ ID NO: 114720 - protein, 7 aa, synthetic construct
DSYHRNQ

SEQ ID NO: 114721 - protein, 7 aa, synthetic construct
DSYHRTQ

SEQ ID NO: 114722 - protein, 7 aa, synthetic construct
DTAHNSI

SEQ ID NO: 114723 - protein, 7 aa, synthetic construct
DTAPARR

SEQ ID NO: 114724 - protein, 7 aa, synthetic construct
DTARKAF

SEQ ID NO: 114725 - protein, 7 aa, synthetic construct
DTARKTM

SEQ ID NO: 114726 - protein, 7 aa, synthetic construct
DTASRGI

SEQ ID NO: 114727 - protein, 7 aa, synthetic construct
DTAWTAK

SEQ ID NO: 114728 - protein, 7 aa, synthetic construct
DTFREYH

SEQ ID NO: 114729 - protein, 7 aa, synthetic construct
DTGKLKQ

SEQ ID NO: 114730 - protein, 7 aa, synthetic construct
DTGMKPR

SEQ ID NO: 114731 - protein, 7 aa, synthetic construct
DTGQKKV

SEQ ID NO: 114732 - protein, 7 aa, synthetic construct
DTIGKRF

SEQ ID NO: 114733 - protein, 7 aa, synthetic construct
DTIIKRA

SEQ ID NO: 114734 - protein, 7 aa, synthetic construct
DTIKPMK

SEQ ID NO: 114735 - protein, 7 aa, synthetic construct
DTIKRNM

SEQ ID NO: 114736 - protein, 7 aa, synthetic construct
DTISRKV

SEQ ID NO: 114737 - protein, 7 aa, synthetic construct
DTKFMGK

SEQ ID NO: 114738 - protein, 7 aa, synthetic construct
DTKFNTR

SEQ ID NO: 114739 - protein, 7 aa, synthetic construct
DTKGARL

SEQ ID NO: 114740 - protein, 7 aa, synthetic construct
DTKGISR

SEQ ID NO: 114741 - protein, 7 aa, synthetic construct
DTKHRMG

SEQ ID NO: 114742 - protein, 7 aa, synthetic construct
DTKNTRS

SEQ ID NO: 114743 - protein, 7 aa, synthetic construct
DTKPKHP

SEQ ID NO: 114744 - protein, 7 aa, synthetic construct
DTKPTRQ

SEQ ID NO: 114745 - protein, 7 aa, synthetic construct
DTKQAYR

SEQ ID NO: 114746 - protein, 7 aa, synthetic construct
DTKYNVK

SEQ ID NO: 114747 - protein, 7 aa, synthetic construct
DTKYPRT

SEQ ID NO: 114748 - protein, 7 aa, synthetic construct
DTKYRAA

SEQ ID NO: 114749 - protein, 7 aa, synthetic construct
DTKYSAR

SEQ ID NO: 114750 - protein, 7 aa, synthetic construct
DTLRHKP

SEQ ID NO: 114751 - protein, 7 aa, synthetic construct
DTLRIKN

SEQ ID NO: 114752 - protein, 7 aa, synthetic construct
DTMKRER

SEQ ID NO: 114753 - protein, 7 aa, synthetic construct
DTMRARS

SEQ ID NO: 114754 - protein, 7 aa, synthetic construct
DTMRGRG

SEQ ID NO: 114755 - protein, 7 aa, synthetic construct
DTNKIGR

SEQ ID NO: 114756 - protein, 7 aa, synthetic construct
DTNKKYS

SEQ ID NO: 114757 - protein, 7 aa, synthetic construct
DTNLRAK

SEQ ID NO: 114758 - protein, 7 aa, synthetic construct
DTNNPRK

SEQ ID NO: 114759 - protein, 7 aa, synthetic construct
DTNPSRR

SEQ ID NO: 114760 - protein, 7 aa, synthetic construct
DTNRAKS

SEQ ID NO: 114761 - protein, 7 aa, synthetic construct
DTNRTIK

SEQ ID NO: 114762 - protein, 7 aa, synthetic construct
DTPKRGI

SEQ ID NO: 114763 - protein, 7 aa, synthetic construct
DTPNYHR

SEQ ID NO: 114764 - protein, 7 aa, synthetic construct
DTPRPQR

SEQ ID NO: 114765 - protein, 7 aa, synthetic construct
DTPRTQR

SEQ ID NO: 114766 - protein, 7 aa, synthetic construct
DTPTRRS

SEQ ID NO: 114767 - protein, 7 aa, synthetic construct
DTQAQRK

SEQ ID NO: 114768 - protein, 7 aa, synthetic construct
DTQKVKL

SEQ ID NO: 114769 - protein, 7 aa, synthetic construct
DTQLSKK

SEQ ID NO: 114770 - protein, 7 aa, synthetic construct
DTQQKKY

SEQ ID NO: 114771 - protein, 7 aa, synthetic construct
DTQRPSH

SEQ ID NO: 114772 - protein, 7 aa, synthetic construct
DTQWSAK

SEQ ID NO: 114773 - protein, 7 aa, synthetic construct
DTQWTTR

SEQ ID NO: 114774 - protein, 7 aa, synthetic construct
DTRFNAQ

SEQ ID NO: 114775 - protein, 7 aa, synthetic construct
DTRGGAK

SEQ ID NO: 114776 - protein, 7 aa, synthetic construct
DTRGVRT

SEQ ID NO: 114777 - protein, 7 aa, synthetic construct
DTRIKMQ

SEQ ID NO: 114778 - protein, 7 aa, synthetic construct
DTRLTVR

SEQ ID NO: 114779 - protein, 7 aa, synthetic construct
DTRNVSK

SEQ ID NO: 114780 - protein, 7 aa, synthetic construct
DTRPAPR

SEQ ID NO: 114781 - protein, 7 aa, synthetic construct
DTRPILK

SEQ ID NO: 114782 - protein, 7 aa, synthetic construct
DTRPNRT

SEQ ID NO: 114783 - protein, 7 aa, synthetic construct
DTRTNRG

SEQ ID NO: 114784 - protein, 7 aa, synthetic construct
DTSKVRY

SEQ ID NO: 114785 - protein, 7 aa, synthetic construct
DTSNQKR

SEQ ID NO: 114786 - protein, 7 aa, synthetic construct
DTSPMRK

SEQ ID NO: 114787 - protein, 7 aa, synthetic construct
DTSQRKQ

SEQ ID NO: 114788 - protein, 7 aa, synthetic construct
DTTARKV

SEQ ID NO: 114789 - protein, 7 aa, synthetic construct
DTTKVRI

SEQ ID NO: 114790 - protein, 7 aa, synthetic construct
DTTQKIR

SEQ ID NO: 114791 - protein, 7 aa, synthetic construct
DTTRTMR

SEQ ID NO: 114792 - protein, 7 aa, synthetic construct
DTVKAKH

SEQ ID NO: 114793 - protein, 7 aa, synthetic construct
DTVRVRV

SEQ ID NO: 114794 - protein, 7 aa, synthetic construct
DTVYTRM

SEQ ID NO: 114795 - protein, 7 aa, synthetic construct
DTYKIKQ

SEQ ID NO: 114796 - protein, 7 aa, synthetic construct
DTYTRGL

SEQ ID NO: 114797 - protein, 7 aa, synthetic construct
DVAIKRY

SEQ ID NO: 114798 - protein, 7 aa, synthetic construct
DVAKKYQ

SEQ ID NO: 114799 - protein, 7 aa, synthetic construct
DVAKQGR

SEQ ID NO: 114800 - protein, 7 aa, synthetic construct
DVAKRTQ

SEQ ID NO: 114801 - protein, 7 aa, synthetic construct
DVARKQQ

SEQ ID NO: 114802 - protein, 7 aa, synthetic construct
DVARNAR

SEQ ID NO: 114803 - protein, 7 aa, synthetic construct
DVGKFKS

SEQ ID NO: 114804 - protein, 7 aa, synthetic construct
DVGKMRG

SEQ ID NO: 114805 - protein, 7 aa, synthetic construct
DVGKRIA

SEQ ID NO: 114806 - protein, 7 aa, synthetic construct
DVGNLKR

SEQ ID NO: 114807 - protein, 7 aa, synthetic construct
DVGQKQK

SEQ ID NO: 114808 - protein, 7 aa, synthetic construct
DVHGDGK

SEQ ID NO: 114809 - protein, 7 aa, synthetic construct
DVHKIGK

SEQ ID NO: 114810 - protein, 7 aa, synthetic construct
DVITRRP

SEQ ID NO: 114811 - protein, 7 aa, synthetic construct
DVKAARS

SEQ ID NO: 114812 - protein, 7 aa, synthetic construct
DVKARFA

SEQ ID NO: 114813 - protein, 7 aa, synthetic construct
DVKARFP

SEQ ID NO: 114814 - protein, 7 aa, synthetic construct
DVKFRSV

SEQ ID NO: 114815 - protein, 7 aa, synthetic construct
DVKGFRT

SEQ ID NO: 114816 - protein, 7 aa, synthetic construct
DVKGYKA

SEQ ID NO: 114817 - protein, 7 aa, synthetic construct
DVKHIRN

SEQ ID NO: 114818 - protein, 7 aa, synthetic construct
DVKIHAK

SEQ ID NO: 114819 - protein, 7 aa, synthetic construct
DVKLRST

SEQ ID NO: 114820 - protein, 7 aa, synthetic construct
DVKLTAR

SEQ ID NO: 114821 - protein, 7 aa, synthetic construct
DVKMPRM

SEQ ID NO: 114822 - protein, 7 aa, synthetic construct
DVKNPGR

SEQ ID NO: 114823 - protein, 7 aa, synthetic construct
DVKNYTR

SEQ ID NO: 114824 - protein, 7 aa, synthetic construct
DVKPNIR

SEQ ID NO: 114825 - protein, 7 aa, synthetic construct
DVKPSKY

SEQ ID NO: 114826 - protein, 7 aa, synthetic construct
DVKRKDF

SEQ ID NO: 114827 - protein, 7 aa, synthetic construct
DVKRMHA

SEQ ID NO: 114828 - protein, 7 aa, synthetic construct
DVKSSRQ

SEQ ID NO: 114829 - protein, 7 aa, synthetic construct
DVKYMTK

SEQ ID NO: 114830 - protein, 7 aa, synthetic construct
DVLKHRG

SEQ ID NO: 114831 - protein, 7 aa, synthetic construct
DVMGRKM

SEQ ID NO: 114832 - protein, 7 aa, synthetic construct
DVNIKRT

SEQ ID NO: 114833 - protein, 7 aa, synthetic construct
DVNKGGR

SEQ ID NO: 114834 - protein, 7 aa, synthetic construct
DVNKLRG

SEQ ID NO: 114835 - protein, 7 aa, synthetic construct
DVNPRKF

SEQ ID NO: 114836 - protein, 7 aa, synthetic construct
DVNTVKR

SEQ ID NO: 114837 - protein, 7 aa, synthetic construct
DVNYHVR

SEQ ID NO: 114838 - protein, 7 aa, synthetic construct
DVPRPRA

SEQ ID NO: 114839 - protein, 7 aa, synthetic construct
DVPRSKM

SEQ ID NO: 114840 - protein, 7 aa, synthetic construct
DVPSKRM

SEQ ID NO: 114841 - protein, 7 aa, synthetic construct
DVPVKRN

SEQ ID NO: 114842 - protein, 7 aa, synthetic construct
DVQAQRK

SEQ ID NO: 114843 - protein, 7 aa, synthetic construct
DVQGKRI

SEQ ID NO: 114844 - protein, 7 aa, synthetic construct
DVQINKK

SEQ ID NO: 114845 - protein, 7 aa, synthetic construct
DVQKIMR

SEQ ID NO: 114846 - protein, 7 aa, synthetic construct
DVQKMRS

SEQ ID NO: 114847 - protein, 7 aa, synthetic construct
DVQNRSR

SEQ ID NO: 114848 - protein, 7 aa, synthetic construct
DVQRLRA

SEQ ID NO: 114849 - protein, 7 aa, synthetic construct
DVRARIG

SEQ ID NO: 114850 - protein, 7 aa, synthetic construct
DVRGNQR

SEQ ID NO: 114851 - protein, 7 aa, synthetic construct
DVRGTVR

SEQ ID NO: 114852 - protein, 7 aa, synthetic construct
DVRHKYT

SEQ ID NO: 114853 - protein, 7 aa, synthetic construct
DVRIAKT

SEQ ID NO: 114854 - protein, 7 aa, synthetic construct
DVRIARV

SEQ ID NO: 114855 - protein, 7 aa, synthetic construct
DVRIKYA

SEQ ID NO: 114856 - protein, 7 aa, synthetic construct
DVRKIAQ

SEQ ID NO: 114857 - protein, 7 aa, synthetic construct
DVRKLLS

SEQ ID NO: 114858 - protein, 7 aa, synthetic construct
DVRKQLS

SEQ ID NO: 114859 - protein, 7 aa, synthetic construct
DVRMQKL

SEQ ID NO: 114860 - protein, 7 aa, synthetic construct
DVRNLRA

SEQ ID NO: 114861 - protein, 7 aa, synthetic construct
DVRNVKN

SEQ ID NO: 114862 - protein, 7 aa, synthetic construct
DVRPRAP

SEQ ID NO: 114863 - protein, 7 aa, synthetic construct
DVRQAAR

SEQ ID NO: 114864 - protein, 7 aa, synthetic construct
DVRQPRM

SEQ ID NO: 114865 - protein, 7 aa, synthetic construct
DVRRMPG

SEQ ID NO: 114866 - protein, 7 aa, synthetic construct
DVRRPTI

SEQ ID NO: 114867 - protein, 7 aa, synthetic construct
DVRSFTH

SEQ ID NO: 114868 - protein, 7 aa, synthetic construct
DVRSGRV

SEQ ID NO: 114869 - protein, 7 aa, synthetic construct
DVRTQKH

SEQ ID NO: 114870 - protein, 7 aa, synthetic construct
DVRVKLS

SEQ ID NO: 114871 - protein, 7 aa, synthetic construct
DVRVPKS

SEQ ID NO: 114872 - protein, 7 aa, synthetic construct
DVRYIKA

SEQ ID NO: 114873 - protein, 7 aa, synthetic construct
DVRYKTA

SEQ ID NO: 114874 - protein, 7 aa, synthetic construct
DVSKARY

SEQ ID NO: 114875 - protein, 7 aa, synthetic construct
DVSQKPR

SEQ ID NO: 114876 - protein, 7 aa, synthetic construct
DVSRAPR

SEQ ID NO: 114877 - protein, 7 aa, synthetic construct
DVSRMTK

SEQ ID NO: 114878 - protein, 7 aa, synthetic construct
DVSYSAR

SEQ ID NO: 114879 - protein, 7 aa, synthetic construct
DVTGQKR

SEQ ID NO: 114880 - protein, 7 aa, synthetic construct
DVTKPRT

SEQ ID NO: 114881 - protein, 7 aa, synthetic construct
DVTKRAH

SEQ ID NO: 114882 - protein, 7 aa, synthetic construct
DVTKRGM

SEQ ID NO: 114883 - protein, 7 aa, synthetic construct
DVTKSKY

SEQ ID NO: 114884 - protein, 7 aa, synthetic construct
DVTQKRQ

SEQ ID NO: 114885 - protein, 7 aa, synthetic construct
DVTRMKN

SEQ ID NO: 114886 - protein, 7 aa, synthetic construct
DVTRSKN

SEQ ID NO: 114887 - protein, 7 aa, synthetic construct
DVTVTKK

SEQ ID NO: 114888 - protein, 7 aa, synthetic construct
DVVDERH

SEQ ID NO: 114889 - protein, 7 aa, synthetic construct
DVVVRKN

SEQ ID NO: 114890 - protein, 7 aa, synthetic construct
DVYRHSV

SEQ ID NO: 114891 - protein, 7 aa, synthetic construct
DVYRPVS

SEQ ID NO: 114892 - protein, 7 aa, synthetic construct
DVYTRSL

SEQ ID NO: 114893 - protein, 7 aa, synthetic construct
DWITEKD

SEQ ID NO: 114894 - protein, 7 aa, synthetic construct
DWKGGKM

SEQ ID NO: 114895 - protein, 7 aa, synthetic construct
DWKGKGM

SEQ ID NO: 114896 - protein, 7 aa, synthetic construct
DWKQVKQ

SEQ ID NO: 114897 - protein, 7 aa, synthetic construct
DWPQMQK

SEQ ID NO: 114898 - protein, 7 aa, synthetic construct
DWQSQAR

SEQ ID NO: 114899 - protein, 7 aa, synthetic construct
DYAKRQT

SEQ ID NO: 114900 - protein, 7 aa, synthetic construct
DYGKPTR

SEQ ID NO: 114901 - protein, 7 aa, synthetic construct
DYGTKTK

SEQ ID NO: 114902 - protein, 7 aa, synthetic construct
DYGVKKS

SEQ ID NO: 114903 - protein, 7 aa, synthetic construct
DYKAKQN

SEQ ID NO: 114904 - protein, 7 aa, synthetic construct
DYKAQSK

SEQ ID NO: 114905 - protein, 7 aa, synthetic construct
DYKARLN

SEQ ID NO: 114906 - protein, 7 aa, synthetic construct
DYKATRQ

SEQ ID NO: 114907 - protein, 7 aa, synthetic construct
DYKEAKR

SEQ ID NO: 114908 - protein, 7 aa, synthetic construct
DYKGARP

SEQ ID NO: 114909 - protein, 7 aa, synthetic construct
DYKGIPK

SEQ ID NO: 114910 - protein, 7 aa, synthetic construct
DYKGKML

SEQ ID NO: 114911 - protein, 7 aa, synthetic construct
DYKGRNT

SEQ ID NO: 114912 - protein, 7 aa, synthetic construct
DYKGRQV

SEQ ID NO: 114913 - protein, 7 aa, synthetic construct
DYKGVKG

SEQ ID NO: 114914 - protein, 7 aa, synthetic construct
DYKGVSK

SEQ ID NO: 114915 - protein, 7 aa, synthetic construct
DYKHPKT

SEQ ID NO: 114916 - protein, 7 aa, synthetic construct
DYKKHQG

SEQ ID NO: 114917 - protein, 7 aa, synthetic construct
DYKKNMS

SEQ ID NO: 114918 - protein, 7 aa, synthetic construct
DYKKRDV

SEQ ID NO: 114919 - protein, 7 aa, synthetic construct
DYKMSRV

SEQ ID NO: 114920 - protein, 7 aa, synthetic construct
DYKNKFG

SEQ ID NO: 114921 - protein, 7 aa, synthetic construct
DYKPGMK

SEQ ID NO: 114922 - protein, 7 aa, synthetic construct
DYKPKVI

SEQ ID NO: 114923 - protein, 7 aa, synthetic construct
DYKPNIR

SEQ ID NO: 114924 - protein, 7 aa, synthetic construct
DYKPNRL

SEQ ID NO: 114925 - protein, 7 aa, synthetic construct
DYKRVTA

SEQ ID NO: 114926 - protein, 7 aa, synthetic construct
DYKSKFT

SEQ ID NO: 114927 - protein, 7 aa, synthetic construct
DYKSKLT

SEQ ID NO: 114928 - protein, 7 aa, synthetic construct
DYKSQAK

SEQ ID NO: 114929 - protein, 7 aa, synthetic construct
DYKSQIK

SEQ ID NO: 114930 - protein, 7 aa, synthetic construct
DYKVGSR

SEQ ID NO: 114931 - protein, 7 aa, synthetic construct
DYKVPPK

SEQ ID NO: 114932 - protein, 7 aa, synthetic construct
DYLKAKA

SEQ ID NO: 114933 - protein, 7 aa, synthetic construct
DYMKNKG

SEQ ID NO: 114934 - protein, 7 aa, synthetic construct
DYPGRKV

SEQ ID NO: 114935 - protein, 7 aa, synthetic construct
DYPKAKI

SEQ ID NO: 114936 - protein, 7 aa, synthetic construct
DYQKVKQ

SEQ ID NO: 114937 - protein, 7 aa, synthetic construct
DYQKYPT

SEQ ID NO: 114938 - protein, 7 aa, synthetic construct
DYRIKGG

SEQ ID NO: 114939 - protein, 7 aa, synthetic construct
DYRVKVV

SEQ ID NO: 114940 - protein, 7 aa, synthetic construct
DYSKSKL

SEQ ID NO: 114941 - protein, 7 aa, synthetic construct
DYSRVPR

SEQ ID NO: 114942 - protein, 7 aa, synthetic construct
DYTKAKF

SEQ ID NO: 114943 - protein, 7 aa, synthetic construct
DYTNKQR

SEQ ID NO: 114944 - protein, 7 aa, synthetic construct
DYVSTGR

SEQ ID NO: 114945 - protein, 7 aa, synthetic construct
EAAKARA

SEQ ID NO: 114946 - protein, 7 aa, synthetic construct
EAAKKIY

SEQ ID NO: 114947 - protein, 7 aa, synthetic construct
EAAKPRN

SEQ ID NO: 114948 - protein, 7 aa, synthetic construct
EAAKPYK

SEQ ID NO: 114949 - protein, 7 aa, synthetic construct
EAAKRGM

SEQ ID NO: 114950 - protein, 7 aa, synthetic construct
EAAKRVM

SEQ ID NO: 114951 - protein, 7 aa, synthetic construct
EAAKVRS

SEQ ID NO: 114952 - protein, 7 aa, synthetic construct
EAAVKGK

SEQ ID NO: 114953 - protein, 7 aa, synthetic construct
EADHRFR

SEQ ID NO: 114954 - protein, 7 aa, synthetic construct
EAGKVIR

SEQ ID NO: 114955 - protein, 7 aa, synthetic construct
EAGVKKL

SEQ ID NO: 114956 - protein, 7 aa, synthetic construct
EAIKGFK

SEQ ID NO: 114957 - protein, 7 aa, synthetic construct
EAIKMRG

SEQ ID NO: 114958 - protein, 7 aa, synthetic construct
EAIKRNA

SEQ ID NO: 114959 - protein, 7 aa, synthetic construct
EAIQKRV

SEQ ID NO: 114960 - protein, 7 aa, synthetic construct
EAKHPIK

SEQ ID NO: 114961 - protein, 7 aa, synthetic construct
EAKIKYN

SEQ ID NO: 114962 - protein, 7 aa, synthetic construct
EAKIMVK

SEQ ID NO: 114963 - protein, 7 aa, synthetic construct
EAKISSR

SEQ ID NO: 114964 - protein, 7 aa, synthetic construct
EAKKMYN

SEQ ID NO: 114965 - protein, 7 aa, synthetic construct
EAKKQMQ

SEQ ID NO: 114966 - protein, 7 aa, synthetic construct
EAKKQMY

SEQ ID NO: 114967 - protein, 7 aa, synthetic construct
EAKLYKV

SEQ ID NO: 114968 - protein, 7 aa, synthetic construct
EAKNIGR

SEQ ID NO: 114969 - protein, 7 aa, synthetic construct
EAKPIMK

SEQ ID NO: 114970 - protein, 7 aa, synthetic construct
EAKPKAA

SEQ ID NO: 114971 - protein, 7 aa, synthetic construct
EAKPKFG

SEQ ID NO: 114972 - protein, 7 aa, synthetic construct
EAKPQSR

SEQ ID NO: 114973 - protein, 7 aa, synthetic construct
EAKPRAL

SEQ ID NO: 114974 - protein, 7 aa, synthetic construct
EAKRGLM

SEQ ID NO: 114975 - protein, 7 aa, synthetic construct
EAKVIKY

SEQ ID NO: 114976 - protein, 7 aa, synthetic construct
EAKVRYG

SEQ ID NO: 114977 - protein, 7 aa, synthetic construct
EALKQRA

SEQ ID NO: 114978 - protein, 7 aa, synthetic construct
EALRIKG

SEQ ID NO: 114979 - protein, 7 aa, synthetic construct
EAMKAMR

SEQ ID NO: 114980 - protein, 7 aa, synthetic construct
EAMKGAR

SEQ ID NO: 114981 - protein, 7 aa, synthetic construct
EAMKSNR

SEQ ID NO: 114982 - protein, 7 aa, synthetic construct
EANAKKN

SEQ ID NO: 114983 - protein, 7 aa, synthetic construct
EANIRLR

SEQ ID NO: 114984 - protein, 7 aa, synthetic construct
EANRQRA

SEQ ID NO: 114985 - protein, 7 aa, synthetic construct
EANYHLK

SEQ ID NO: 114986 - protein, 7 aa, synthetic construct
EANYTMR

SEQ ID NO: 114987 - protein, 7 aa, synthetic construct
EAPRVKM

SEQ ID NO: 114988 - protein, 7 aa, synthetic construct
EAQKAIR

SEQ ID NO: 114989 - protein, 7 aa, synthetic construct
EAQKARA

SEQ ID NO: 114990 - protein, 7 aa, synthetic construct
EAQKFKM

SEQ ID NO: 114991 - protein, 7 aa, synthetic construct
EAQKPIK

SEQ ID NO: 114992 - protein, 7 aa, synthetic construct
EAQKQKI

SEQ ID NO: 114993 - protein, 7 aa, synthetic construct
EAQKVKG

SEQ ID NO: 114994 - protein, 7 aa, synthetic construct
EAQRLKG

SEQ ID NO: 114995 - protein, 7 aa, synthetic construct
EAQWRQA

SEQ ID NO: 114996 - protein, 7 aa, synthetic construct
EARAQGR

SEQ ID NO: 114997 - protein, 7 aa, synthetic construct
EARATKI

SEQ ID NO: 114998 - protein, 7 aa, synthetic construct
EARGMKL

SEQ ID NO: 114999 - protein, 7 aa, synthetic construct
EARKGQF

SEQ ID NO: 115000 - protein, 7 aa, synthetic construct
EARKLEK

SEQ ID NO: 115001 - protein, 7 aa, synthetic construct
EARKTPF

SEQ ID NO: 115002 - protein, 7 aa, synthetic construct
EARMTKM

SEQ ID NO: 115003 - protein, 7 aa, synthetic construct
EARNNMK

SEQ ID NO: 115004 - protein, 7 aa, synthetic construct
EARNYNS

SEQ ID NO: 115005 - protein, 7 aa, synthetic construct
EARPLPK

SEQ ID NO: 115006 - protein, 7 aa, synthetic construct
EARTIMK

SEQ ID NO: 115007 - protein, 7 aa, synthetic construct
EARTKAI

SEQ ID NO: 115008 - protein, 7 aa, synthetic construct
EARTKLG

SEQ ID NO: 115009 - protein, 7 aa, synthetic construct
EARTQKV

SEQ ID NO: 115010 - protein, 7 aa, synthetic construct
EARVMKI

SEQ ID NO: 115011 - protein, 7 aa, synthetic construct
EARVMKV

SEQ ID NO: 115012 - protein, 7 aa, synthetic construct
EASKAKM

SEQ ID NO: 115013 - protein, 7 aa, synthetic construct
EATKLKY

SEQ ID NO: 115014 - protein, 7 aa, synthetic construct
EATKRTV

SEQ ID NO: 115015 - protein, 7 aa, synthetic construct
EATRQKG

SEQ ID NO: 115016 - protein, 7 aa, synthetic construct
EAVAKAK

SEQ ID NO: 115017 - protein, 7 aa, synthetic construct
EAVKTKM

SEQ ID NO: 115018 - protein, 7 aa, synthetic construct
EAVRRPD

SEQ ID NO: 115019 - protein, 7 aa, synthetic construct
EAYKGKM

SEQ ID NO: 115020 - protein, 7 aa, synthetic construct
EAYKPQD

SEQ ID NO: 115021 - protein, 7 aa, synthetic construct
EDGYARR

SEQ ID NO: 115022 - protein, 7 aa, synthetic construct
EDHATRR

SEQ ID NO: 115023 - protein, 7 aa, synthetic construct
EDKKLKT

SEQ ID NO: 115024 - protein, 7 aa, synthetic construct
EDMKKGR

SEQ ID NO: 115025 - protein, 7 aa, synthetic construct
EDRKIMK

SEQ ID NO: 115026 - protein, 7 aa, synthetic construct
EDTRGFR

SEQ ID NO: 115027 - protein, 7 aa, synthetic construct
EDTRHHY

SEQ ID NO: 115028 - protein, 7 aa, synthetic construct
EEAKKVK

SEQ ID NO: 115029 - protein, 7 aa, synthetic construct
EEAKRWT

SEQ ID NO: 115030 - protein, 7 aa, synthetic construct
EEKWKIV

SEQ ID NO: 115031 - protein, 7 aa, synthetic construct
EELKRYS

SEQ ID NO: 115032 - protein, 7 aa, synthetic construct
EERFKAM

SEQ ID NO: 115033 - protein, 7 aa, synthetic construct
EERVRHV

SEQ ID NO: 115034 - protein, 7 aa, synthetic construct
EEWRSKQ

SEQ ID NO: 115035 - protein, 7 aa, synthetic construct
EEYRHRP

SEQ ID NO: 115036 - protein, 7 aa, synthetic construct
EFGKNKT

SEQ ID NO: 115037 - protein, 7 aa, synthetic construct
EFGNTYR

SEQ ID NO: 115038 - protein, 7 aa, synthetic construct
EFGYKGM

SEQ ID NO: 115039 - protein, 7 aa, synthetic construct
EFKAKFP

SEQ ID NO: 115040 - protein, 7 aa, synthetic construct
EFKHKTP

SEQ ID NO: 115041 - protein, 7 aa, synthetic construct
EFKKEGR

SEQ ID NO: 115042 - protein, 7 aa, synthetic construct
EFKPQRS

SEQ ID NO: 115043 - protein, 7 aa, synthetic construct
EFKQTSR

SEQ ID NO: 115044 - protein, 7 aa, synthetic construct
EFKRGSV

SEQ ID NO: 115045 - protein, 7 aa, synthetic construct
EFKRPQA

SEQ ID NO: 115046 - protein, 7 aa, synthetic construct
EFMQAPK

SEQ ID NO: 115047 - protein, 7 aa, synthetic construct
EFNKGFK

SEQ ID NO: 115048 - protein, 7 aa, synthetic construct
EFNKVRM

SEQ ID NO: 115049 - protein, 7 aa, synthetic construct
EFNRSKV

SEQ ID NO: 115050 - protein, 7 aa, synthetic construct
EFNSTKR

SEQ ID NO: 115051 - protein, 7 aa, synthetic construct
EFPKTRI

SEQ ID NO: 115052 - protein, 7 aa, synthetic construct
EFQKFKG

SEQ ID NO: 115053 - protein, 7 aa, synthetic construct
EFQNKAK

SEQ ID NO: 115054 - protein, 7 aa, synthetic construct
EFQNKAR

SEQ ID NO: 115055 - protein, 7 aa, synthetic construct
EFRNYTA

SEQ ID NO: 115056 - protein, 7 aa, synthetic construct
EFTPKQK

SEQ ID NO: 115057 - protein, 7 aa, synthetic construct
EFTTRSM

SEQ ID NO: 115058 - protein, 7 aa, synthetic construct
EGAKIMR

SEQ ID NO: 115059 - protein, 7 aa, synthetic construct
EGAKMNK

SEQ ID NO: 115060 - protein, 7 aa, synthetic construct
EGAKTLR

SEQ ID NO: 115061 - protein, 7 aa, synthetic construct
EGEMDWH

SEQ ID NO: 115062 - protein, 7 aa, synthetic construct
EGGKLTK

SEQ ID NO: 115063 - protein, 7 aa, synthetic construct
EGHRNKD

SEQ ID NO: 115064 - protein, 7 aa, synthetic construct
EGIKTDK

SEQ ID NO: 115065 - protein, 7 aa, synthetic construct
EGKARPI

SEQ ID NO: 115066 - protein, 7 aa, synthetic construct
EGKIAAK

SEQ ID NO: 115067 - protein, 7 aa, synthetic construct
EGKKNVV

SEQ ID NO: 115068 - protein, 7 aa, synthetic construct
EGKKVIM

SEQ ID NO: 115069 - protein, 7 aa, synthetic construct
EGKKYMV

SEQ ID NO: 115070 - protein, 7 aa, synthetic construct
EGKLKPI

SEQ ID NO: 115071 - protein, 7 aa, synthetic construct
EGKLRGA

SEQ ID NO: 115072 - protein, 7 aa, synthetic construct
EGKMTGR

SEQ ID NO: 115073 - protein, 7 aa, synthetic construct
EGKRMGI

SEQ ID NO: 115074 - protein, 7 aa, synthetic construct
EGKVAQR

SEQ ID NO: 115075 - protein, 7 aa, synthetic construct
EGKWRTE

SEQ ID NO: 115076 - protein, 7 aa, synthetic construct
EGKYKPG

SEQ ID NO: 115077 - protein, 7 aa, synthetic construct
EGLKTRG

SEQ ID NO: 115078 - protein, 7 aa, synthetic construct
EGQKQKL

SEQ ID NO: 115079 - protein, 7 aa, synthetic construct
EGQKSMK

SEQ ID NO: 115080 - protein, 7 aa, synthetic construct
EGRKVDW

SEQ ID NO: 115081 - protein, 7 aa, synthetic construct
EGRKWEN

SEQ ID NO: 115082 - protein, 7 aa, synthetic construct
EGRWTLE

SEQ ID NO: 115083 - protein, 7 aa, synthetic construct
EGTKAKV

SEQ ID NO: 115084 - protein, 7 aa, synthetic construct
EGTKGVR

SEQ ID NO: 115085 - protein, 7 aa, synthetic construct
EGTVKRS

SEQ ID NO: 115086 - protein, 7 aa, synthetic construct
EGTYNRM

SEQ ID NO: 115087 - protein, 7 aa, synthetic construct
EGVKLYH

SEQ ID NO: 115088 - protein, 7 aa, synthetic construct
EHHKNDK

SEQ ID NO: 115089 - protein, 7 aa, synthetic construct
EHKKGNV

SEQ ID NO: 115090 - protein, 7 aa, synthetic construct
EHKKIMM

SEQ ID NO: 115091 - protein, 7 aa, synthetic construct
EHKLTRP

SEQ ID NO: 115092 - protein, 7 aa, synthetic construct
EHQHFVP

SEQ ID NO: 115093 - protein, 7 aa, synthetic construct
EHRRSEA

SEQ ID NO: 115094 - protein, 7 aa, synthetic construct
EHRYPDR

SEQ ID NO: 115095 - protein, 7 aa, synthetic construct
EHYNVAA

SEQ ID NO: 115096 - protein, 7 aa, synthetic construct
EIAKRMV

SEQ ID NO: 115097 - protein, 7 aa, synthetic construct
EIARARP

SEQ ID NO: 115098 - protein, 7 aa, synthetic construct
EIARPKS

SEQ ID NO: 115099 - protein, 7 aa, synthetic construct
EIAYKTM

SEQ ID NO: 115100 - protein, 7 aa, synthetic construct
EIGKKYQ

SEQ ID NO: 115101 - protein, 7 aa, synthetic construct
EIGKRVQ

SEQ ID NO: 115102 - protein, 7 aa, synthetic construct
EIGNKAR

SEQ ID NO: 115103 - protein, 7 aa, synthetic construct
EIGQKMR

SEQ ID NO: 115104 - protein, 7 aa, synthetic construct
EIIRKTD

SEQ ID NO: 115105 - protein, 7 aa, synthetic construct
EIKAAVR

SEQ ID NO: 115106 - protein, 7 aa, synthetic construct
EIKAGGR

SEQ ID NO: 115107 - protein, 7 aa, synthetic construct
EIKAKYV

SEQ ID NO: 115108 - protein, 7 aa, synthetic construct
EIKGNIR

SEQ ID NO: 115109 - protein, 7 aa, synthetic construct
EIKKAII

SEQ ID NO: 115110 - protein, 7 aa, synthetic construct
EIKLRNV

SEQ ID NO: 115111 - protein, 7 aa, synthetic construct
EIKMNKF

SEQ ID NO: 115112 - protein, 7 aa, synthetic construct
EIKMRQL

SEQ ID NO: 115113 - protein, 7 aa, synthetic construct
EIKNIRA

SEQ ID NO: 115114 - protein, 7 aa, synthetic construct
EIKPSAR

SEQ ID NO: 115115 - protein, 7 aa, synthetic construct
EIKQAKY

SEQ ID NO: 115116 - protein, 7 aa, synthetic construct
EIKQHKL

SEQ ID NO: 115117 - protein, 7 aa, synthetic construct
EIKRMQM

SEQ ID NO: 115118 - protein, 7 aa, synthetic construct
EIKTARY

SEQ ID NO: 115119 - protein, 7 aa, synthetic construct
EIKTRHV

SEQ ID NO: 115120 - protein, 7 aa, synthetic construct
EIKVTRI

SEQ ID NO: 115121 - protein, 7 aa, synthetic construct
EILKPAK

SEQ ID NO: 115122 - protein, 7 aa, synthetic construct
EIMNKTR

SEQ ID NO: 115123 - protein, 7 aa, synthetic construct
EINKPGF

SEQ ID NO: 115124 - protein, 7 aa, synthetic construct
EINNGKR

SEQ ID NO: 115125 - protein, 7 aa, synthetic construct
EINNRQK

SEQ ID NO: 115126 - protein, 7 aa, synthetic construct
EIPKRMQ

SEQ ID NO: 115127 - protein, 7 aa, synthetic construct
EIPKYMK

SEQ ID NO: 115128 - protein, 7 aa, synthetic construct
EIPTTRK

SEQ ID NO: 115129 - protein, 7 aa, synthetic construct
EIQKIRA

SEQ ID NO: 115130 - protein, 7 aa, synthetic construct
EIRKGQI

SEQ ID NO: 115131 - protein, 7 aa, synthetic construct
EIRKLTT

SEQ ID NO: 115132 - protein, 7 aa, synthetic construct
EIRQKTM

SEQ ID NO: 115133 - protein, 7 aa, synthetic construct
EIRQPKN

SEQ ID NO: 115134 - protein, 7 aa, synthetic construct
EIRTQKI

SEQ ID NO: 115135 - protein, 7 aa, synthetic construct
EISKAQM

SEQ ID NO: 115136 - protein, 7 aa, synthetic construct
EITKMRQ

SEQ ID NO: 115137 - protein, 7 aa, synthetic construct
EIVKTRN

SEQ ID NO: 115138 - protein, 7 aa, synthetic construct
EIYLTKA

SEQ ID NO: 115139 - protein, 7 aa, synthetic construct
EKAARNM

SEQ ID NO: 115140 - protein, 7 aa, synthetic construct
EKAHMRT

SEQ ID NO: 115141 - protein, 7 aa, synthetic construct
EKAHNKA

SEQ ID NO: 115142 - protein, 7 aa, synthetic construct
EKAINPR

SEQ ID NO: 115143 - protein, 7 aa, synthetic construct
EKAIPGK

SEQ ID NO: 115144 - protein, 7 aa, synthetic construct
EKAIRMQ

SEQ ID NO: 115145 - protein, 7 aa, synthetic construct
EKAISRV

SEQ ID NO: 115146 - protein, 7 aa, synthetic construct
EKAKGPF

SEQ ID NO: 115147 - protein, 7 aa, synthetic construct
EKAKQYT

SEQ ID NO: 115148 - protein, 7 aa, synthetic construct
EKALRAQ

SEQ ID NO: 115149 - protein, 7 aa, synthetic construct
EKALRVV

SEQ ID NO: 115150 - protein, 7 aa, synthetic construct
EKAMQTK

SEQ ID NO: 115151 - protein, 7 aa, synthetic construct
EKAMSGK

SEQ ID NO: 115152 - protein, 7 aa, synthetic construct
EKANASR

SEQ ID NO: 115153 - protein, 7 aa, synthetic construct
EKAPAHK

SEQ ID NO: 115154 - protein, 7 aa, synthetic construct
EKAPKMS

SEQ ID NO: 115155 - protein, 7 aa, synthetic construct
EKAPKTF

SEQ ID NO: 115156 - protein, 7 aa, synthetic construct
EKAPNYK

SEQ ID NO: 115157 - protein, 7 aa, synthetic construct
EKAPRVM

SEQ ID NO: 115158 - protein, 7 aa, synthetic construct
EKAQIRQ

SEQ ID NO: 115159 - protein, 7 aa, synthetic construct
EKAQLRS

SEQ ID NO: 115160 - protein, 7 aa, synthetic construct
EKARATI

SEQ ID NO: 115161 - protein, 7 aa, synthetic construct
EKARTIL

SEQ ID NO: 115162 - protein, 7 aa, synthetic construct
EKASTRS

SEQ ID NO: 115163 - protein, 7 aa, synthetic construct
EKAVRQI

SEQ ID NO: 115164 - protein, 7 aa, synthetic construct
EKAYPQK

SEQ ID NO: 115165 - protein, 7 aa, synthetic construct
EKDMTKR

SEQ ID NO: 115166 - protein, 7 aa, synthetic construct
EKDMVKR

SEQ ID NO: 115167 - protein, 7 aa, synthetic construct
EKEPKPR

SEQ ID NO: 115168 - protein, 7 aa, synthetic construct
EKEQKRS

SEQ ID NO: 115169 - protein, 7 aa, synthetic construct
EKERLRS

SEQ ID NO: 115170 - protein, 7 aa, synthetic construct
EKESLKR

SEQ ID NO: 115171 - protein, 7 aa, synthetic construct
EKETKRL

SEQ ID NO: 115172 - protein, 7 aa, synthetic construct
EKFAQGK

SEQ ID NO: 115173 - protein, 7 aa, synthetic construct
EKFAVGK

SEQ ID NO: 115174 - protein, 7 aa, synthetic construct
EKFKMSM

SEQ ID NO: 115175 - protein, 7 aa, synthetic construct
EKFNTGK

SEQ ID NO: 115176 - protein, 7 aa, synthetic construct
EKFPSGK

SEQ ID NO: 115177 - protein, 7 aa, synthetic construct
EKFQLAK

SEQ ID NO: 115178 - protein, 7 aa, synthetic construct
EKGANRF

SEQ ID NO: 115179 - protein, 7 aa, synthetic construct
EKGATRL

SEQ ID NO: 115180 - protein, 7 aa, synthetic construct
EKGAYPK

SEQ ID NO: 115181 - protein, 7 aa, synthetic construct
EKGGMFK

SEQ ID NO: 115182 - protein, 7 aa, synthetic construct
EKGHQWA

SEQ ID NO: 115183 - protein, 7 aa, synthetic construct
EKGKATI

SEQ ID NO: 115184 - protein, 7 aa, synthetic construct
EKGKMML

SEQ ID NO: 115185 - protein, 7 aa, synthetic construct
EKGKTFM

SEQ ID NO: 115186 - protein, 7 aa, synthetic construct
EKGNKFL

SEQ ID NO: 115187 - protein, 7 aa, synthetic construct
EKGNLKL

SEQ ID NO: 115188 - protein, 7 aa, synthetic construct
EKGNMQH

SEQ ID NO: 115189 - protein, 7 aa, synthetic construct
EKGNTLK

SEQ ID NO: 115190 - protein, 7 aa, synthetic construct
EKGPQKV

SEQ ID NO: 115191 - protein, 7 aa, synthetic construct
EKGPRAS

SEQ ID NO: 115192 - protein, 7 aa, synthetic construct
EKGQTVR

SEQ ID NO: 115193 - protein, 7 aa, synthetic construct
EKGRIIV

SEQ ID NO: 115194 - protein, 7 aa, synthetic construct
EKGRILV

SEQ ID NO: 115195 - protein, 7 aa, synthetic construct
EKGRITN

SEQ ID NO: 115196 - protein, 7 aa, synthetic construct
EKGRLNI

SEQ ID NO: 115197 - protein, 7 aa, synthetic construct
EKGRMGG

SEQ ID NO: 115198 - protein, 7 aa, synthetic construct
EKGRMSG

SEQ ID NO: 115199 - protein, 7 aa, synthetic construct
EKGRNLA

SEQ ID NO: 115200 - protein, 7 aa, synthetic construct
EKGRVMI

SEQ ID NO: 115201 - protein, 7 aa, synthetic construct
EKGRVVV

SEQ ID NO: 115202 - protein, 7 aa, synthetic construct
EKGSMGK

SEQ ID NO: 115203 - protein, 7 aa, synthetic construct
EKGSQNK

SEQ ID NO: 115204 - protein, 7 aa, synthetic construct
EKGTIPR

SEQ ID NO: 115205 - protein, 7 aa, synthetic construct
EKGVLIK

SEQ ID NO: 115206 - protein, 7 aa, synthetic construct
EKGWGQH

SEQ ID NO: 115207 - protein, 7 aa, synthetic construct
EKHGLRV

SEQ ID NO: 115208 - protein, 7 aa, synthetic construct
EKHIPKS

SEQ ID NO: 115209 - protein, 7 aa, synthetic construct
EKHKPTT

SEQ ID NO: 115210 - protein, 7 aa, synthetic construct
EKHKTYP

SEQ ID NO: 115211 - protein, 7 aa, synthetic construct
EKHPKIS

SEQ ID NO: 115212 - protein, 7 aa, synthetic construct
EKHPRLG

SEQ ID NO: 115213 - protein, 7 aa, synthetic construct
EKHQRQV

SEQ ID NO: 115214 - protein, 7 aa, synthetic construct
EKIAKVM

SEQ ID NO: 115215 - protein, 7 aa, synthetic construct
EKIKGHY

SEQ ID NO: 115216 - protein, 7 aa, synthetic construct
EKIKMHV

SEQ ID NO: 115217 - protein, 7 aa, synthetic construct
EKIKYQM

SEQ ID NO: 115218 - protein, 7 aa, synthetic construct
EKIQMGK

SEQ ID NO: 115219 - protein, 7 aa, synthetic construct
EKIQQRS

SEQ ID NO: 115220 - protein, 7 aa, synthetic construct
EKIQTTR

SEQ ID NO: 115221 - protein, 7 aa, synthetic construct
EKIRTNL

SEQ ID NO: 115222 - protein, 7 aa, synthetic construct
EKITRMV

SEQ ID NO: 115223 - protein, 7 aa, synthetic construct
EKKAADR

SEQ ID NO: 115224 - protein, 7 aa, synthetic construct
EKKDIWY

SEQ ID NO: 115225 - protein, 7 aa, synthetic construct
EKKFSQV

SEQ ID NO: 115226 - protein, 7 aa, synthetic construct
EKKHMPV

SEQ ID NO: 115227 - protein, 7 aa, synthetic construct
EKKIPTQ

SEQ ID NO: 115228 - protein, 7 aa, synthetic construct
EKKIVSV

SEQ ID NO: 115229 - protein, 7 aa, synthetic construct
EKKLGYM

SEQ ID NO: 115230 - protein, 7 aa, synthetic construct
EKKLQFM

SEQ ID NO: 115231 - protein, 7 aa, synthetic construct
EKKMPGY

SEQ ID NO: 115232 - protein, 7 aa, synthetic construct
EKKNAFQ

SEQ ID NO: 115233 - protein, 7 aa, synthetic construct
EKKPASY

SEQ ID NO: 115234 - protein, 7 aa, synthetic construct
EKKPDKW

SEQ ID NO: 115235 - protein, 7 aa, synthetic construct
EKKPIQW

SEQ ID NO: 115236 - protein, 7 aa, synthetic construct
EKKPMHY

SEQ ID NO: 115237 - protein, 7 aa, synthetic construct
EKKPQAW

SEQ ID NO: 115238 - protein, 7 aa, synthetic construct
EKKPVPL

SEQ ID NO: 115239 - protein, 7 aa, synthetic construct
EKKPYLM

SEQ ID NO: 115240 - protein, 7 aa, synthetic construct
EKKQYQV

SEQ ID NO: 115241 - protein, 7 aa, synthetic construct
EKKSKMD

SEQ ID NO: 115242 - protein, 7 aa, synthetic construct
EKKSPDR

SEQ ID NO: 115243 - protein, 7 aa, synthetic construct
EKKSSYI

SEQ ID NO: 115244 - protein, 7 aa, synthetic construct
EKKTQQW

SEQ ID NO: 115245 - protein, 7 aa, synthetic construct
EKKTSPF

SEQ ID NO: 115246 - protein, 7 aa, synthetic construct
EKKTYVQ

SEQ ID NO: 115247 - protein, 7 aa, synthetic construct
EKKYAGI

SEQ ID NO: 115248 - protein, 7 aa, synthetic construct
EKKYMPT

SEQ ID NO: 115249 - protein, 7 aa, synthetic construct
EKKYPPQ

SEQ ID NO: 115250 - protein, 7 aa, synthetic construct
EKKYSIP

SEQ ID NO: 115251 - protein, 7 aa, synthetic construct
EKLHKGF

SEQ ID NO: 115252 - protein, 7 aa, synthetic construct
EKLHPKS

SEQ ID NO: 115253 - protein, 7 aa, synthetic construct
EKLKWNE

SEQ ID NO: 115254 - protein, 7 aa, synthetic construct
EKLNRMS

SEQ ID NO: 115255 - protein, 7 aa, synthetic construct
EKLQKFM

SEQ ID NO: 115256 - protein, 7 aa, synthetic construct
EKLRGGS

SEQ ID NO: 115257 - protein, 7 aa, synthetic construct
EKLRGSF

SEQ ID NO: 115258 - protein, 7 aa, synthetic construct
EKLRVLS

SEQ ID NO: 115259 - protein, 7 aa, synthetic construct
EKLSNGR

SEQ ID NO: 115260 - protein, 7 aa, synthetic construct
EKLVRQG

SEQ ID NO: 115261 - protein, 7 aa, synthetic construct
EKLYGKA

SEQ ID NO: 115262 - protein, 7 aa, synthetic construct
EKMAFSK

SEQ ID NO: 115263 - protein, 7 aa, synthetic construct
EKMIKEK

SEQ ID NO: 115264 - protein, 7 aa, synthetic construct
EKMKNYA

SEQ ID NO: 115265 - protein, 7 aa, synthetic construct
EKMKPIF

SEQ ID NO: 115266 - protein, 7 aa, synthetic construct
EKMKSGL

SEQ ID NO: 115267 - protein, 7 aa, synthetic construct
EKMKTYQ

SEQ ID NO: 115268 - protein, 7 aa, synthetic construct
EKMKYAM

SEQ ID NO: 115269 - protein, 7 aa, synthetic construct
EKMMKPY

SEQ ID NO: 115270 - protein, 7 aa, synthetic construct
EKMNQRS

SEQ ID NO: 115271 - protein, 7 aa, synthetic construct
EKMPMRN

SEQ ID NO: 115272 - protein, 7 aa, synthetic construct
EKMPQNK

SEQ ID NO: 115273 - protein, 7 aa, synthetic construct
EKMQIGR

SEQ ID NO: 115274 - protein, 7 aa, synthetic construct
EKMQPSR

SEQ ID NO: 115275 - protein, 7 aa, synthetic construct
EKMQRNM

SEQ ID NO: 115276 - protein, 7 aa, synthetic construct
EKMRANI

SEQ ID NO: 115277 - protein, 7 aa, synthetic construct
EKMRPLM

SEQ ID NO: 115278 - protein, 7 aa, synthetic construct
EKMRTNF

SEQ ID NO: 115279 - protein, 7 aa, synthetic construct
EKMRTSA

SEQ ID NO: 115280 - protein, 7 aa, synthetic construct
EKMSAFK

SEQ ID NO: 115281 - protein, 7 aa, synthetic construct
EKMSLPR

SEQ ID NO: 115282 - protein, 7 aa, synthetic construct
EKMTRVI

SEQ ID NO: 115283 - protein, 7 aa, synthetic construct
EKMVRVM

SEQ ID NO: 115284 - protein, 7 aa, synthetic construct
EKNAARQ

SEQ ID NO: 115285 - protein, 7 aa, synthetic construct
EKNANTK

SEQ ID NO: 115286 - protein, 7 aa, synthetic construct
EKNAPQK

SEQ ID NO: 115287 - protein, 7 aa, synthetic construct
EKNFQGK

SEQ ID NO: 115288 - protein, 7 aa, synthetic construct
EKNFSVK

SEQ ID NO: 115289 - protein, 7 aa, synthetic construct
EKNGNVR

SEQ ID NO: 115290 - protein, 7 aa, synthetic construct
EKNGPAK

SEQ ID NO: 115291 - protein, 7 aa, synthetic construct
EKNGPIK

SEQ ID NO: 115292 - protein, 7 aa, synthetic construct
EKNLGRA

SEQ ID NO: 115293 - protein, 7 aa, synthetic construct
EKNLTRQ

SEQ ID NO: 115294 - protein, 7 aa, synthetic construct
EKNMQRA

SEQ ID NO: 115295 - protein, 7 aa, synthetic construct
EKNPIRY

SEQ ID NO: 115296 - protein, 7 aa, synthetic construct
EKNPPKY

SEQ ID NO: 115297 - protein, 7 aa, synthetic construct
EKNPQRS

SEQ ID NO: 115298 - protein, 7 aa, synthetic construct
EKNPRVT

SEQ ID NO: 115299 - protein, 7 aa, synthetic construct
EKNPRYP

SEQ ID NO: 115300 - protein, 7 aa, synthetic construct
EKNQPFK

SEQ ID NO: 115301 - protein, 7 aa, synthetic construct
EKNRGGS

SEQ ID NO: 115302 - protein, 7 aa, synthetic construct
EKNRQIV

SEQ ID NO: 115303 - protein, 7 aa, synthetic construct
EKNRVTL

SEQ ID NO: 115304 - protein, 7 aa, synthetic construct
EKNSYPK

SEQ ID NO: 115305 - protein, 7 aa, synthetic construct
EKNTPKM

SEQ ID NO: 115306 - protein, 7 aa, synthetic construct
EKNYIGK

SEQ ID NO: 115307 - protein, 7 aa, synthetic construct
EKNYKTS

SEQ ID NO: 115308 - protein, 7 aa, synthetic construct
EKPAKFH

SEQ ID NO: 115309 - protein, 7 aa, synthetic construct
EKPAKFI

SEQ ID NO: 115310 - protein, 7 aa, synthetic construct
EKPAKYN

SEQ ID NO: 115311 - protein, 7 aa, synthetic construct
EKPFAKS

SEQ ID NO: 115312 - protein, 7 aa, synthetic construct
EKPFSKA

SEQ ID NO: 115313 - protein, 7 aa, synthetic construct
EKPIQVR

SEQ ID NO: 115314 - protein, 7 aa, synthetic construct
EKPKQFF

SEQ ID NO: 115315 - protein, 7 aa, synthetic construct
EKPKYMT

SEQ ID NO: 115316 - protein, 7 aa, synthetic construct
EKPNRTQ

SEQ ID NO: 115317 - protein, 7 aa, synthetic construct
EKPPRQI

SEQ ID NO: 115318 - protein, 7 aa, synthetic construct
EKPPRTI

SEQ ID NO: 115319 - protein, 7 aa, synthetic construct
EKPRAMV

SEQ ID NO: 115320 - protein, 7 aa, synthetic construct
EKPRNAF

SEQ ID NO: 115321 - protein, 7 aa, synthetic construct
EKPRNNM

SEQ ID NO: 115322 - protein, 7 aa, synthetic construct
EKPRVAM

SEQ ID NO: 115323 - protein, 7 aa, synthetic construct
EKPVHAK

SEQ ID NO: 115324 - protein, 7 aa, synthetic construct
EKPVRTF

SEQ ID NO: 115325 - protein, 7 aa, synthetic construct
EKQANKY

SEQ ID NO: 115326 - protein, 7 aa, synthetic construct
EKQDRMR

SEQ ID NO: 115327 - protein, 7 aa, synthetic construct
EKQGAVK

SEQ ID NO: 115328 - protein, 7 aa, synthetic construct
EKQGLTK

SEQ ID NO: 115329 - protein, 7 aa, synthetic construct
EKQGVQR

SEQ ID NO: 115330 - protein, 7 aa, synthetic construct
EKQIGPR

SEQ ID NO: 115331 - protein, 7 aa, synthetic construct
EKQINSR

SEQ ID NO: 115332 - protein, 7 aa, synthetic construct
EKQKALN

SEQ ID NO: 115333 - protein, 7 aa, synthetic construct
EKQKFST

SEQ ID NO: 115334 - protein, 7 aa, synthetic construct
EKQKLYQ

SEQ ID NO: 115335 - protein, 7 aa, synthetic construct
EKQKNQL

SEQ ID NO: 115336 - protein, 7 aa, synthetic construct
EKQKPMM

SEQ ID NO: 115337 - protein, 7 aa, synthetic construct
EKQKYAT

SEQ ID NO: 115338 - protein, 7 aa, synthetic construct
EKQLGRL

SEQ ID NO: 115339 - protein, 7 aa, synthetic construct
EKQMAIK

SEQ ID NO: 115340 - protein, 7 aa, synthetic construct
EKQMQKM

SEQ ID NO: 115341 - protein, 7 aa, synthetic construct
EKQNKIY

SEQ ID NO: 115342 - protein, 7 aa, synthetic construct
EKQNPGK

SEQ ID NO: 115343 - protein, 7 aa, synthetic construct
EKQNTRQ

SEQ ID NO: 115344 - protein, 7 aa, synthetic construct
EKQPGVR

SEQ ID NO: 115345 - protein, 7 aa, synthetic construct
EKQPRIV

SEQ ID NO: 115346 - protein, 7 aa, synthetic construct
EKQQLGK

SEQ ID NO: 115347 - protein, 7 aa, synthetic construct
EKQQSFR

SEQ ID NO: 115348 - protein, 7 aa, synthetic construct
EKQQTKV

SEQ ID NO: 115349 - protein, 7 aa, synthetic construct
EKQRAAM

SEQ ID NO: 115350 - protein, 7 aa, synthetic construct
EKQREKG

SEQ ID NO: 115351 - protein, 7 aa, synthetic construct
EKQRLLQ

SEQ ID NO: 115352 - protein, 7 aa, synthetic construct
EKQRVLI

SEQ ID NO: 115353 - protein, 7 aa, synthetic construct
EKQRVMQ

SEQ ID NO: 115354 - protein, 7 aa, synthetic construct
EKQVQKA

SEQ ID NO: 115355 - protein, 7 aa, synthetic construct
EKQVTRQ

SEQ ID NO: 115356 - protein, 7 aa, synthetic construct
EKQVTYK

SEQ ID NO: 115357 - protein, 7 aa, synthetic construct
EKQYGIK

SEQ ID NO: 115358 - protein, 7 aa, synthetic construct
EKQYSAK

SEQ ID NO: 115359 - protein, 7 aa, synthetic construct
EKRADKI

SEQ ID NO: 115360 - protein, 7 aa, synthetic construct
EKRANQM

SEQ ID NO: 115361 - protein, 7 aa, synthetic construct
EKRDRAV

SEQ ID NO: 115362 - protein, 7 aa, synthetic construct
EKREAKM

SEQ ID NO: 115363 - protein, 7 aa, synthetic construct
EKRETRV

SEQ ID NO: 115364 - protein, 7 aa, synthetic construct
EKRGPQI

SEQ ID NO: 115365 - protein, 7 aa, synthetic construct
EKRGTSM

SEQ ID NO: 115366 - protein, 7 aa, synthetic construct
EKRGVTM

SEQ ID NO: 115367 - protein, 7 aa, synthetic construct
EKRINTT

SEQ ID NO: 115368 - protein, 7 aa, synthetic construct
EKRLAVV

SEQ ID NO: 115369 - protein, 7 aa, synthetic construct
EKRLPQL

SEQ ID NO: 115370 - protein, 7 aa, synthetic construct
EKRLQGY

SEQ ID NO: 115371 - protein, 7 aa, synthetic construct
EKRMANA

SEQ ID NO: 115372 - protein, 7 aa, synthetic construct
EKRMDGK

SEQ ID NO: 115373 - protein, 7 aa, synthetic construct
EKRMPQA

SEQ ID NO: 115374 - protein, 7 aa, synthetic construct
EKRMTMG

SEQ ID NO: 115375 - protein, 7 aa, synthetic construct
EKRMVTM

SEQ ID NO: 115376 - protein, 7 aa, synthetic construct
EKRNVIS

SEQ ID NO: 115377 - protein, 7 aa, synthetic construct
EKRPAMY

SEQ ID NO: 115378 - protein, 7 aa, synthetic construct
EKRPEKM

SEQ ID NO: 115379 - protein, 7 aa, synthetic construct
EKRPMPM

SEQ ID NO: 115380 - protein, 7 aa, synthetic construct
EKRPQMV

SEQ ID NO: 115381 - protein, 7 aa, synthetic construct
EKRPTQL

SEQ ID NO: 115382 - protein, 7 aa, synthetic construct
EKRPVQT

SEQ ID NO: 115383 - protein, 7 aa, synthetic construct
EKRQGGG

SEQ ID NO: 115384 - protein, 7 aa, synthetic construct
EKRQMWE

SEQ ID NO: 115385 - protein, 7 aa, synthetic construct
EKRQNAM

SEQ ID NO: 115386 - protein, 7 aa, synthetic construct
EKRQNPF

SEQ ID NO: 115387 - protein, 7 aa, synthetic construct
EKRQPAQ

SEQ ID NO: 115388 - protein, 7 aa, synthetic construct
EKRSIAP

SEQ ID NO: 115389 - protein, 7 aa, synthetic construct
EKRSMAG

SEQ ID NO: 115390 - protein, 7 aa, synthetic construct
EKRSMGF

SEQ ID NO: 115391 - protein, 7 aa, synthetic construct
EKRSPVI

SEQ ID NO: 115392 - protein, 7 aa, synthetic construct
EKRSVGA

SEQ ID NO: 115393 - protein, 7 aa, synthetic construct
EKRVNNA

SEQ ID NO: 115394 - protein, 7 aa, synthetic construct
EKRWGDP

SEQ ID NO: 115395 - protein, 7 aa, synthetic construct
EKRWVVE

SEQ ID NO: 115396 - protein, 7 aa, synthetic construct
EKSFNVK

SEQ ID NO: 115397 - protein, 7 aa, synthetic construct
EKSGYAK

SEQ ID NO: 115398 - protein, 7 aa, synthetic construct
EKSKALF

SEQ ID NO: 115399 - protein, 7 aa, synthetic construct
EKSKGYV

SEQ ID NO: 115400 - protein, 7 aa, synthetic construct
EKSKMSY

SEQ ID NO: 115401 - protein, 7 aa, synthetic construct
EKSLSPR

SEQ ID NO: 115402 - protein, 7 aa, synthetic construct
EKSMKMY

SEQ ID NO: 115403 - protein, 7 aa, synthetic construct
EKSQLRG

SEQ ID NO: 115404 - protein, 7 aa, synthetic construct
EKSQMRA

SEQ ID NO: 115405 - protein, 7 aa, synthetic construct
EKSRLGS

SEQ ID NO: 115406 - protein, 7 aa, synthetic construct
EKSRQLI

SEQ ID NO: 115407 - protein, 7 aa, synthetic construct
EKSRVAM

SEQ ID NO: 115408 - protein, 7 aa, synthetic construct
EKSRVGY

SEQ ID NO: 115409 - protein, 7 aa, synthetic construct
EKSVTRY

SEQ ID NO: 115410 - protein, 7 aa, synthetic construct
EKTMSTK

SEQ ID NO: 115411 - protein, 7 aa, synthetic construct
EKTNSAK

SEQ ID NO: 115412 - protein, 7 aa, synthetic construct
EKTPKFN

SEQ ID NO: 115413 - protein, 7 aa, synthetic construct
EKTQTRT

SEQ ID NO: 115414 - protein, 7 aa, synthetic construct
EKTRPLQ

SEQ ID NO: 115415 - protein, 7 aa, synthetic construct
EKTTRMN

SEQ ID NO: 115416 - protein, 7 aa, synthetic construct
EKTTYFE

SEQ ID NO: 115417 - protein, 7 aa, synthetic construct
EKTVVSK

SEQ ID NO: 115418 - protein, 7 aa, synthetic construct
EKTYRPL

SEQ ID NO: 115419 - protein, 7 aa, synthetic construct
EKTYTKA

SEQ ID NO: 115420 - protein, 7 aa, synthetic construct
EKTYVNK

SEQ ID NO: 115421 - protein, 7 aa, synthetic construct
EKTYVTK

SEQ ID NO: 115422 - protein, 7 aa, synthetic construct
EKVAMHK

SEQ ID NO: 115423 - protein, 7 aa, synthetic construct
EKVFPKN

SEQ ID NO: 115424 - protein, 7 aa, synthetic construct
EKVIKYS

SEQ ID NO: 115425 - protein, 7 aa, synthetic construct
EKVKQYY

SEQ ID NO: 115426 - protein, 7 aa, synthetic construct
EKVNPMR

SEQ ID NO: 115427 - protein, 7 aa, synthetic construct
EKVPHRV

SEQ ID NO: 115428 - protein, 7 aa, synthetic construct
EKVPKIY

SEQ ID NO: 115429 - protein, 7 aa, synthetic construct
EKVQRNN

SEQ ID NO: 115430 - protein, 7 aa, synthetic construct
EKVRQVI

SEQ ID NO: 115431 - protein, 7 aa, synthetic construct
EKVSQTR

SEQ ID NO: 115432 - protein, 7 aa, synthetic construct
EKVTMTR

SEQ ID NO: 115433 - protein, 7 aa, synthetic construct
EKVTRYA

SEQ ID NO: 115434 - protein, 7 aa, synthetic construct
EKVVATR

SEQ ID NO: 115435 - protein, 7 aa, synthetic construct
EKVYKNS

SEQ ID NO: 115436 - protein, 7 aa, synthetic construct
EKWHNQQ

SEQ ID NO: 115437 - protein, 7 aa, synthetic construct
EKWVPQD

SEQ ID NO: 115438 - protein, 7 aa, synthetic construct
EKYASKT

SEQ ID NO: 115439 - protein, 7 aa, synthetic construct
EKYGKNI

SEQ ID NO: 115440 - protein, 7 aa, synthetic construct
EKYGKPL

SEQ ID NO: 115441 - protein, 7 aa, synthetic construct
EKYGKTL

SEQ ID NO: 115442 - protein, 7 aa, synthetic construct
EKYKLNS

SEQ ID NO: 115443 - protein, 7 aa, synthetic construct
EKYKPNM

SEQ ID NO: 115444 - protein, 7 aa, synthetic construct
EKYKPTI

SEQ ID NO: 115445 - protein, 7 aa, synthetic construct
EKYKSVM

SEQ ID NO: 115446 - protein, 7 aa, synthetic construct
EKYKVAP

SEQ ID NO: 115447 - protein, 7 aa, synthetic construct
EKYKVTQ

SEQ ID NO: 115448 - protein, 7 aa, synthetic construct
EKYKVVA

SEQ ID NO: 115449 - protein, 7 aa, synthetic construct
EKYMKIS

SEQ ID NO: 115450 - protein, 7 aa, synthetic construct
EKYNSKA

SEQ ID NO: 115451 - protein, 7 aa, synthetic construct
EKYPKVQ

SEQ ID NO: 115452 - protein, 7 aa, synthetic construct
EKYQKGY

SEQ ID NO: 115453 - protein, 7 aa, synthetic construct
EKYQTVK

SEQ ID NO: 115454 - protein, 7 aa, synthetic construct
EKYQVKM

SEQ ID NO: 115455 - protein, 7 aa, synthetic construct
EKYSSKV

SEQ ID NO: 115456 - protein, 7 aa, synthetic construct
EKYTKVA

SEQ ID NO: 115457 - protein, 7 aa, synthetic construct
EKYVKVQ

SEQ ID NO: 115458 - protein, 7 aa, synthetic construct
EKYVLHD

SEQ ID NO: 115459 - protein, 7 aa, synthetic construct
ELARQNK

SEQ ID NO: 115460 - protein, 7 aa, synthetic construct
ELATRRP

SEQ ID NO: 115461 - protein, 7 aa, synthetic construct
ELDKVKR

SEQ ID NO: 115462 - protein, 7 aa, synthetic construct
ELDYRNK

SEQ ID NO: 115463 - protein, 7 aa, synthetic construct
ELGKKFH

SEQ ID NO: 115464 - protein, 7 aa, synthetic construct
ELGKRMV

SEQ ID NO: 115465 - protein, 7 aa, synthetic construct
ELGNVKK

SEQ ID NO: 115466 - protein, 7 aa, synthetic construct
ELHKQKS

SEQ ID NO: 115467 - protein, 7 aa, synthetic construct
ELKDRNR

SEQ ID NO: 115468 - protein, 7 aa, synthetic construct
ELKDTKR

SEQ ID NO: 115469 - protein, 7 aa, synthetic construct
ELKKHYD

SEQ ID NO: 115470 - protein, 7 aa, synthetic construct
ELKLKLS

SEQ ID NO: 115471 - protein, 7 aa, synthetic construct
ELKLPKS

SEQ ID NO: 115472 - protein, 7 aa, synthetic construct
ELKNIKF

SEQ ID NO: 115473 - protein, 7 aa, synthetic construct
ELKNRFA

SEQ ID NO: 115474 - protein, 7 aa, synthetic construct
ELKNRSN

SEQ ID NO: 115475 - protein, 7 aa, synthetic construct
ELKPNRG

SEQ ID NO: 115476 - protein, 7 aa, synthetic construct
ELKQIAR

SEQ ID NO: 115477 - protein, 7 aa, synthetic construct
ELKQIPR

SEQ ID NO: 115478 - protein, 7 aa, synthetic construct
ELKQMRQ

SEQ ID NO: 115479 - protein, 7 aa, synthetic construct
ELKQRAL

SEQ ID NO: 115480 - protein, 7 aa, synthetic construct
ELKRMGV

SEQ ID NO: 115481 - protein, 7 aa, synthetic construct
ELKRMPS

SEQ ID NO: 115482 - protein, 7 aa, synthetic construct
ELKRPAN

SEQ ID NO: 115483 - protein, 7 aa, synthetic construct
ELKRPNT

SEQ ID NO: 115484 - protein, 7 aa, synthetic construct
ELKTKFL

SEQ ID NO: 115485 - protein, 7 aa, synthetic construct
ELKTPRY

SEQ ID NO: 115486 - protein, 7 aa, synthetic construct
ELKTREW

SEQ ID NO: 115487 - protein, 7 aa, synthetic construct
ELKTYKF

SEQ ID NO: 115488 - protein, 7 aa, synthetic construct
ELKYKSN

SEQ ID NO: 115489 - protein, 7 aa, synthetic construct
ELKYNAK

SEQ ID NO: 115490 - protein, 7 aa, synthetic construct
ELLRGKN

SEQ ID NO: 115491 - protein, 7 aa, synthetic construct
ELLRVHS

SEQ ID NO: 115492 - protein, 7 aa, synthetic construct
ELMKNRA

SEQ ID NO: 115493 - protein, 7 aa, synthetic construct
ELMNISG

SEQ ID NO: 115494 - protein, 7 aa, synthetic construct
ELNKHRP

SEQ ID NO: 115495 - protein, 7 aa, synthetic construct
ELNKIRM

SEQ ID NO: 115496 - protein, 7 aa, synthetic construct
ELNKNRG

SEQ ID NO: 115497 - protein, 7 aa, synthetic construct
ELNRRAY

SEQ ID NO: 115498 - protein, 7 aa, synthetic construct
ELPKRYA

SEQ ID NO: 115499 - protein, 7 aa, synthetic construct
ELPRVKQ

SEQ ID NO: 115500 - protein, 7 aa, synthetic construct
ELPSKIR

SEQ ID NO: 115501 - protein, 7 aa, synthetic construct
ELPTKRL

SEQ ID NO: 115502 - protein, 7 aa, synthetic construct
ELQKMKH

SEQ ID NO: 115503 - protein, 7 aa, synthetic construct
ELQKQRS

SEQ ID NO: 115504 - protein, 7 aa, synthetic construct
ELRANKS

SEQ ID NO: 115505 - protein, 7 aa, synthetic construct
ELRNVKV

SEQ ID NO: 115506 - protein, 7 aa, synthetic construct
ELRPKTT

SEQ ID NO: 115507 - protein, 7 aa, synthetic construct
ELRQQKG

SEQ ID NO: 115508 - protein, 7 aa, synthetic construct
ELRTPKQ

SEQ ID NO: 115509 - protein, 7 aa, synthetic construct
ELRVTKM

SEQ ID NO: 115510 - protein, 7 aa, synthetic construct
ELRWKQD

SEQ ID NO: 115511 - protein, 7 aa, synthetic construct
ELSKPKI

SEQ ID NO: 115512 - protein, 7 aa, synthetic construct
ELTQKRI

SEQ ID NO: 115513 - protein, 7 aa, synthetic construct
ELTRSKI

SEQ ID NO: 115514 - protein, 7 aa, synthetic construct
ELVKGIH

SEQ ID NO: 115515 - protein, 7 aa, synthetic construct
ELVKPTK

SEQ ID NO: 115516 - protein, 7 aa, synthetic construct
EMAKART

SEQ ID NO: 115517 - protein, 7 aa, synthetic construct
EMAKIRN

SEQ ID NO: 115518 - protein, 7 aa, synthetic construct
EMAKQRL

SEQ ID NO: 115519 - protein, 7 aa, synthetic construct
EMAKRTM

SEQ ID NO: 115520 - protein, 7 aa, synthetic construct
EMARAGR

SEQ ID NO: 115521 - protein, 7 aa, synthetic construct
EMAYSRI

SEQ ID NO: 115522 - protein, 7 aa, synthetic construct
EMDKGKK

SEQ ID NO: 115523 - protein, 7 aa, synthetic construct
EMDKKPR

SEQ ID NO: 115524 - protein, 7 aa, synthetic construct
EMEKRLG

SEQ ID NO: 115525 - protein, 7 aa, synthetic construct
EMGNAKK

SEQ ID NO: 115526 - protein, 7 aa, synthetic construct
EMGVKRM

SEQ ID NO: 115527 - protein, 7 aa, synthetic construct
EMHKVQK

SEQ ID NO: 115528 - protein, 7 aa, synthetic construct
EMIKVKN

SEQ ID NO: 115529 - protein, 7 aa, synthetic construct
EMKDRLF

SEQ ID NO: 115530 - protein, 7 aa, synthetic construct
EMKDRRG

SEQ ID NO: 115531 - protein, 7 aa, synthetic construct
EMKHRQV

SEQ ID NO: 115532 - protein, 7 aa, synthetic construct
EMKIART

SEQ ID NO: 115533 - protein, 7 aa, synthetic construct
EMKKFST

SEQ ID NO: 115534 - protein, 7 aa, synthetic construct
EMKKGIF

SEQ ID NO: 115535 - protein, 7 aa, synthetic construct
EMKKPHF

SEQ ID NO: 115536 - protein, 7 aa, synthetic construct
EMKLLRG

SEQ ID NO: 115537 - protein, 7 aa, synthetic construct
EMKMHAK

SEQ ID NO: 115538 - protein, 7 aa, synthetic construct
EMKPARF

SEQ ID NO: 115539 - protein, 7 aa, synthetic construct
EMKPARN

SEQ ID NO: 115540 - protein, 7 aa, synthetic construct
EMKPDRK

SEQ ID NO: 115541 - protein, 7 aa, synthetic construct
EMKPRTF

SEQ ID NO: 115542 - protein, 7 aa, synthetic construct
EMKPSAR

SEQ ID NO: 115543 - protein, 7 aa, synthetic construct
EMKQRLV

SEQ ID NO: 115544 - protein, 7 aa, synthetic construct
EMKQVRT

SEQ ID NO: 115545 - protein, 7 aa, synthetic construct
EMKRGLQ

SEQ ID NO: 115546 - protein, 7 aa, synthetic construct
EMKRITT

SEQ ID NO: 115547 - protein, 7 aa, synthetic construct
EMKRQIM

SEQ ID NO: 115548 - protein, 7 aa, synthetic construct
EMKRSAM

SEQ ID NO: 115549 - protein, 7 aa, synthetic construct
EMKTKHY

SEQ ID NO: 115550 - protein, 7 aa, synthetic construct
EMKTMRQ

SEQ ID NO: 115551 - protein, 7 aa, synthetic construct
EMKTPSR

SEQ ID NO: 115552 - protein, 7 aa, synthetic construct
EMKVRNV

SEQ ID NO: 115553 - protein, 7 aa, synthetic construct
EMMKRIG

SEQ ID NO: 115554 - protein, 7 aa, synthetic construct
EMNKMGR

SEQ ID NO: 115555 - protein, 7 aa, synthetic construct
EMNKNSR

SEQ ID NO: 115556 - protein, 7 aa, synthetic construct
EMNRANK

SEQ ID NO: 115557 - protein, 7 aa, synthetic construct
EMNYPRS

SEQ ID NO: 115558 - protein, 7 aa, synthetic construct
EMPPRVK

SEQ ID NO: 115559 - protein, 7 aa, synthetic construct
EMPRKQQ

SEQ ID NO: 115560 - protein, 7 aa, synthetic construct
EMPRMIK

SEQ ID NO: 115561 - protein, 7 aa, synthetic construct
EMQKGVR

SEQ ID NO: 115562 - protein, 7 aa, synthetic construct
EMRIKAA

SEQ ID NO: 115563 - protein, 7 aa, synthetic construct
EMRKMAI

SEQ ID NO: 115564 - protein, 7 aa, synthetic construct
EMRTQAK

SEQ ID NO: 115565 - protein, 7 aa, synthetic construct
EMRVPKM

SEQ ID NO: 115566 - protein, 7 aa, synthetic construct
EMSKPTR

SEQ ID NO: 115567 - protein, 7 aa, synthetic construct
EMTKIGR

SEQ ID NO: 115568 - protein, 7 aa, synthetic construct
EMTQRRQ

SEQ ID NO: 115569 - protein, 7 aa, synthetic construct
EMTRIGK

SEQ ID NO: 115570 - protein, 7 aa, synthetic construct
EMTRVKN

SEQ ID NO: 115571 - protein, 7 aa, synthetic construct
EMTTNRW

SEQ ID NO: 115572 - protein, 7 aa, synthetic construct
EMTVPKK

SEQ ID NO: 115573 - protein, 7 aa, synthetic construct
EMVKRQM

SEQ ID NO: 115574 - protein, 7 aa, synthetic construct
EMVRRGE

SEQ ID NO: 115575 - protein, 7 aa, synthetic construct
ENAIKIR

SEQ ID NO: 115576 - protein, 7 aa, synthetic construct
ENAKFLK

SEQ ID NO: 115577 - protein, 7 aa, synthetic construct
ENAKMRM

SEQ ID NO: 115578 - protein, 7 aa, synthetic construct
ENAKMRV

SEQ ID NO: 115579 - protein, 7 aa, synthetic construct
ENATHYR

SEQ ID NO: 115580 - protein, 7 aa, synthetic construct
ENAWMQE

SEQ ID NO: 115581 - protein, 7 aa, synthetic construct
ENFARNY

SEQ ID NO: 115582 - protein, 7 aa, synthetic construct
ENGGSYR

SEQ ID NO: 115583 - protein, 7 aa, synthetic construct
ENHAHHR

SEQ ID NO: 115584 - protein, 7 aa, synthetic construct
ENIIKTK

SEQ ID NO: 115585 - protein, 7 aa, synthetic construct
ENIKPIK

SEQ ID NO: 115586 - protein, 7 aa, synthetic construct
ENKAARQ

SEQ ID NO: 115587 - protein, 7 aa, synthetic construct
ENKAKLM

SEQ ID NO: 115588 - protein, 7 aa, synthetic construct
ENKANKY

SEQ ID NO: 115589 - protein, 7 aa, synthetic construct
ENKDRRV

SEQ ID NO: 115590 - protein, 7 aa, synthetic construct
ENKFNSK

SEQ ID NO: 115591 - protein, 7 aa, synthetic construct
ENKFPKN

SEQ ID NO: 115592 - protein, 7 aa, synthetic construct
ENKISLR

SEQ ID NO: 115593 - protein, 7 aa, synthetic construct
ENKITRN

SEQ ID NO: 115594 - protein, 7 aa, synthetic construct
ENKIVTR

SEQ ID NO: 115595 - protein, 7 aa, synthetic construct
ENKKIAL

SEQ ID NO: 115596 - protein, 7 aa, synthetic construct
ENKKTSV

SEQ ID NO: 115597 - protein, 7 aa, synthetic construct
ENKLQRS

SEQ ID NO: 115598 - protein, 7 aa, synthetic construct
ENKNRAT

SEQ ID NO: 115599 - protein, 7 aa, synthetic construct
ENKPARI

SEQ ID NO: 115600 - protein, 7 aa, synthetic construct
ENKPIKF

SEQ ID NO: 115601 - protein, 7 aa, synthetic construct
ENKPMRN

SEQ ID NO: 115602 - protein, 7 aa, synthetic construct
ENKPRGP

SEQ ID NO: 115603 - protein, 7 aa, synthetic construct
ENKPRTL

SEQ ID NO: 115604 - protein, 7 aa, synthetic construct
ENKQNRV

SEQ ID NO: 115605 - protein, 7 aa, synthetic construct
ENKQQKF

SEQ ID NO: 115606 - protein, 7 aa, synthetic construct
ENKQRTM

SEQ ID NO: 115607 - protein, 7 aa, synthetic construct
ENKRPVY

SEQ ID NO: 115608 - protein, 7 aa, synthetic construct
ENKYTKI

SEQ ID NO: 115609 - protein, 7 aa, synthetic construct
ENMTNKK

SEQ ID NO: 115610 - protein, 7 aa, synthetic construct
ENNAKAR

SEQ ID NO: 115611 - protein, 7 aa, synthetic construct
ENNKARM

SEQ ID NO: 115612 - protein, 7 aa, synthetic construct
ENNKGKN

SEQ ID NO: 115613 - protein, 7 aa, synthetic construct
ENNTKRA

SEQ ID NO: 115614 - protein, 7 aa, synthetic construct
ENNVRRV

SEQ ID NO: 115615 - protein, 7 aa, synthetic construct
ENPAKKF

SEQ ID NO: 115616 - protein, 7 aa, synthetic construct
ENPGKTR

SEQ ID NO: 115617 - protein, 7 aa, synthetic construct
ENPKARV

SEQ ID NO: 115618 - protein, 7 aa, synthetic construct
ENPKLKN

SEQ ID NO: 115619 - protein, 7 aa, synthetic construct
ENPKMRQ

SEQ ID NO: 115620 - protein, 7 aa, synthetic construct
ENPKRAF

SEQ ID NO: 115621 - protein, 7 aa, synthetic construct
ENPKVLR

SEQ ID NO: 115622 - protein, 7 aa, synthetic construct
ENPRLRP

SEQ ID NO: 115623 - protein, 7 aa, synthetic construct
ENQKFKQ

SEQ ID NO: 115624 - protein, 7 aa, synthetic construct
ENQTKAK

SEQ ID NO: 115625 - protein, 7 aa, synthetic construct
ENQVKRM

SEQ ID NO: 115626 - protein, 7 aa, synthetic construct
ENRAKGL

SEQ ID NO: 115627 - protein, 7 aa, synthetic construct
ENRINTK

SEQ ID NO: 115628 - protein, 7 aa, synthetic construct
ENRKGFS

SEQ ID NO: 115629 - protein, 7 aa, synthetic construct
ENRQKGL

SEQ ID NO: 115630 - protein, 7 aa, synthetic construct
ENRVMKL

SEQ ID NO: 115631 - protein, 7 aa, synthetic construct
ENRVNAK

SEQ ID NO: 115632 - protein, 7 aa, synthetic construct
ENRVNVK

SEQ ID NO: 115633 - protein, 7 aa, synthetic construct
ENRVRMG

SEQ ID NO: 115634 - protein, 7 aa, synthetic construct
ENSIAFK

SEQ ID NO: 115635 - protein, 7 aa, synthetic construct
ENSKMGR

SEQ ID NO: 115636 - protein, 7 aa, synthetic construct
ENSSRGR

SEQ ID NO: 115637 - protein, 7 aa, synthetic construct
ENTGKRM

SEQ ID NO: 115638 - protein, 7 aa, synthetic construct
ENTQKLR

SEQ ID NO: 115639 - protein, 7 aa, synthetic construct
ENTRKTA

SEQ ID NO: 115640 - protein, 7 aa, synthetic construct
ENTTKKM

SEQ ID NO: 115641 - protein, 7 aa, synthetic construct
ENVGVKK

SEQ ID NO: 115642 - protein, 7 aa, synthetic construct
ENVRIQT

SEQ ID NO: 115643 - protein, 7 aa, synthetic construct
ENVVKPF

SEQ ID NO: 115644 - protein, 7 aa, synthetic construct
ENYKGKL

SEQ ID NO: 115645 - protein, 7 aa, synthetic construct
ENYVRHV

SEQ ID NO: 115646 - protein, 7 aa, synthetic construct
EPAKLKY

SEQ ID NO: 115647 - protein, 7 aa, synthetic construct
EPARLGR

SEQ ID NO: 115648 - protein, 7 aa, synthetic construct
EPEGRYR

SEQ ID NO: 115649 - protein, 7 aa, synthetic construct
EPGGKMR

SEQ ID NO: 115650 - protein, 7 aa, synthetic construct
EPIAKKT

SEQ ID NO: 115651 - protein, 7 aa, synthetic construct
EPILKRG

SEQ ID NO: 115652 - protein, 7 aa, synthetic construct
EPIQKKG

SEQ ID NO: 115653 - protein, 7 aa, synthetic construct
EPKITNR

SEQ ID NO: 115654 - protein, 7 aa, synthetic construct
EPKMRQM

SEQ ID NO: 115655 - protein, 7 aa, synthetic construct
EPKMRVQ

SEQ ID NO: 115656 - protein, 7 aa, synthetic construct
EPKNAFR

SEQ ID NO: 115657 - protein, 7 aa, synthetic construct
EPKNVRG

SEQ ID NO: 115658 - protein, 7 aa, synthetic construct
EPKPARF

SEQ ID NO: 115659 - protein, 7 aa, synthetic construct
EPKPIRI

SEQ ID NO: 115660 - protein, 7 aa, synthetic construct
EPKQQFV

SEQ ID NO: 115661 - protein, 7 aa, synthetic construct
EPKRATI

SEQ ID NO: 115662 - protein, 7 aa, synthetic construct
EPKRIGI

SEQ ID NO: 115663 - protein, 7 aa, synthetic construct
EPKRSAV

SEQ ID NO: 115664 - protein, 7 aa, synthetic construct
EPKRSTA

SEQ ID NO: 115665 - protein, 7 aa, synthetic construct
EPKRTFV

SEQ ID NO: 115666 - protein, 7 aa, synthetic construct
EPKSRSS

SEQ ID NO: 115667 - protein, 7 aa, synthetic construct
EPMKLRV

SEQ ID NO: 115668 - protein, 7 aa, synthetic construct
EPMRKGQ

SEQ ID NO: 115669 - protein, 7 aa, synthetic construct
EPNKAGR

SEQ ID NO: 115670 - protein, 7 aa, synthetic construct
EPNKSRG

SEQ ID NO: 115671 - protein, 7 aa, synthetic construct
EPNPQKR

SEQ ID NO: 115672 - protein, 7 aa, synthetic construct
EPNQKVR

SEQ ID NO: 115673 - protein, 7 aa, synthetic construct
EPNYKKM

SEQ ID NO: 115674 - protein, 7 aa, synthetic construct
EPPRAKM

SEQ ID NO: 115675 - protein, 7 aa, synthetic construct
EPQGKKS

SEQ ID NO: 115676 - protein, 7 aa, synthetic construct
EPQHYVK

SEQ ID NO: 115677 - protein, 7 aa, synthetic construct
EPQLKSR

SEQ ID NO: 115678 - protein, 7 aa, synthetic construct
EPRAIGR

SEQ ID NO: 115679 - protein, 7 aa, synthetic construct
EPREPAD

SEQ ID NO: 115680 - protein, 7 aa, synthetic construct
EPRGSVK

SEQ ID NO: 115681 - protein, 7 aa, synthetic construct
EPRINMK

SEQ ID NO: 115682 - protein, 7 aa, synthetic construct
EPRKIQI

SEQ ID NO: 115683 - protein, 7 aa, synthetic construct
EPRKTPT

SEQ ID NO: 115684 - protein, 7 aa, synthetic construct
EPRKVQY

SEQ ID NO: 115685 - protein, 7 aa, synthetic construct
EPRPKAV

SEQ ID NO: 115686 - protein, 7 aa, synthetic construct
EPRPKNV

SEQ ID NO: 115687 - protein, 7 aa, synthetic construct
EPRQSKP

SEQ ID NO: 115688 - protein, 7 aa, synthetic construct
EPRSPKM

SEQ ID NO: 115689 - protein, 7 aa, synthetic construct
EPSKLRT

SEQ ID NO: 115690 - protein, 7 aa, synthetic construct
EPSKNLR

SEQ ID NO: 115691 - protein, 7 aa, synthetic construct
EPTKRQF

SEQ ID NO: 115692 - protein, 7 aa, synthetic construct
EPVKLGR

SEQ ID NO: 115693 - protein, 7 aa, synthetic construct
EPVKVRL

SEQ ID NO: 115694 - protein, 7 aa, synthetic construct
EPVRTKV

SEQ ID NO: 115695 - protein, 7 aa, synthetic construct
EQAGKMK

SEQ ID NO: 115696 - protein, 7 aa, synthetic construct
EQAKARQ

SEQ ID NO: 115697 - protein, 7 aa, synthetic construct
EQAKKMQ

SEQ ID NO: 115698 - protein, 7 aa, synthetic construct
EQAKQAK

SEQ ID NO: 115699 - protein, 7 aa, synthetic construct
EQAKQGK

SEQ ID NO: 115700 - protein, 7 aa, synthetic construct
EQALRGK

SEQ ID NO: 115701 - protein, 7 aa, synthetic construct
EQAQGKR

SEQ ID NO: 115702 - protein, 7 aa, synthetic construct
EQAQKRS

SEQ ID NO: 115703 - protein, 7 aa, synthetic construct
EQARIGK

SEQ ID NO: 115704 - protein, 7 aa, synthetic construct
EQAVKQR

SEQ ID NO: 115705 - protein, 7 aa, synthetic construct
EQAVKRG

SEQ ID NO: 115706 - protein, 7 aa, synthetic construct
EQFHRPS

SEQ ID NO: 115707 - protein, 7 aa, synthetic construct
EQGKGNR

SEQ ID NO: 115708 - protein, 7 aa, synthetic construct
EQGKLIR

SEQ ID NO: 115709 - protein, 7 aa, synthetic construct
EQGNKLR

SEQ ID NO: 115710 - protein, 7 aa, synthetic construct
EQHYTMK

SEQ ID NO: 115711 - protein, 7 aa, synthetic construct
EQIHHRG

SEQ ID NO: 115712 - protein, 7 aa, synthetic construct
EQIKRSA

SEQ ID NO: 115713 - protein, 7 aa, synthetic construct
EQKGPKM

SEQ ID NO: 115714 - protein, 7 aa, synthetic construct
EQKGQRF

SEQ ID NO: 115715 - protein, 7 aa, synthetic construct
EQKGTRS

SEQ ID NO: 115716 - protein, 7 aa, synthetic construct
EQKIRAF

SEQ ID NO: 115717 - protein, 7 aa, synthetic construct
EQKITAR

SEQ ID NO: 115718 - protein, 7 aa, synthetic construct
EQKKAFQ

SEQ ID NO: 115719 - protein, 7 aa, synthetic construct
EQKKPAQ

SEQ ID NO: 115720 - protein, 7 aa, synthetic construct
EQKKPTM

SEQ ID NO: 115721 - protein, 7 aa, synthetic construct
EQKKQFT

SEQ ID NO: 115722 - protein, 7 aa, synthetic construct
EQKKSFI

SEQ ID NO: 115723 - protein, 7 aa, synthetic construct
EQKMASR

SEQ ID NO: 115724 - protein, 7 aa, synthetic construct
EQKMQKL

SEQ ID NO: 115725 - protein, 7 aa, synthetic construct
EQKNKDR

SEQ ID NO: 115726 - protein, 7 aa, synthetic construct
EQKNPMR

SEQ ID NO: 115727 - protein, 7 aa, synthetic construct
EQKPPRG

SEQ ID NO: 115728 - protein, 7 aa, synthetic construct
EQKPTPK

SEQ ID NO: 115729 - protein, 7 aa, synthetic construct
EQKQSGR

SEQ ID NO: 115730 - protein, 7 aa, synthetic construct
EQKRNQS

SEQ ID NO: 115731 - protein, 7 aa, synthetic construct
EQKRQHP

SEQ ID NO: 115732 - protein, 7 aa, synthetic construct
EQKRQMA

SEQ ID NO: 115733 - protein, 7 aa, synthetic construct
EQKRSFG

SEQ ID NO: 115734 - protein, 7 aa, synthetic construct
EQKTIRY

SEQ ID NO: 115735 - protein, 7 aa, synthetic construct
EQMKGNR

SEQ ID NO: 115736 - protein, 7 aa, synthetic construct
EQMKGRN

SEQ ID NO: 115737 - protein, 7 aa, synthetic construct
EQMKMRN

SEQ ID NO: 115738 - protein, 7 aa, synthetic construct
EQMKPKA

SEQ ID NO: 115739 - protein, 7 aa, synthetic construct
EQMKRLP

SEQ ID NO: 115740 - protein, 7 aa, synthetic construct
EQNANKR

SEQ ID NO: 115741 - protein, 7 aa, synthetic construct
EQNGKRG

SEQ ID NO: 115742 - protein, 7 aa, synthetic construct
EQNKAVK

SEQ ID NO: 115743 - protein, 7 aa, synthetic construct
EQNKMKF

SEQ ID NO: 115744 - protein, 7 aa, synthetic construct
EQNKVKL

SEQ ID NO: 115745 - protein, 7 aa, synthetic construct
EQNNKRT

SEQ ID NO: 115746 - protein, 7 aa, synthetic construct
EQNRKGG

SEQ ID NO: 115747 - protein, 7 aa, synthetic construct
EQPKIRM

SEQ ID NO: 115748 - protein, 7 aa, synthetic construct
EQPKKFS

SEQ ID NO: 115749 - protein, 7 aa, synthetic construct
EQPKRMG

SEQ ID NO: 115750 - protein, 7 aa, synthetic construct
EQPPKRM

SEQ ID NO: 115751 - protein, 7 aa, synthetic construct
EQPQGKK

SEQ ID NO: 115752 - protein, 7 aa, synthetic construct
EQPRRGV

SEQ ID NO: 115753 - protein, 7 aa, synthetic construct
EQPRYTI

SEQ ID NO: 115754 - protein, 7 aa, synthetic construct
EQPTKRI

SEQ ID NO: 115755 - protein, 7 aa, synthetic construct
EQPVKKY

SEQ ID NO: 115756 - protein, 7 aa, synthetic construct
EQQKASR

SEQ ID NO: 115757 - protein, 7 aa, synthetic construct
EQQKGRG

SEQ ID NO: 115758 - protein, 7 aa, synthetic construct
EQQKQKM

SEQ ID NO: 115759 - protein, 7 aa, synthetic construct
EQRKAIV

SEQ ID NO: 115760 - protein, 7 aa, synthetic construct
EQRKALV

SEQ ID NO: 115761 - protein, 7 aa, synthetic construct
EQRKELK

SEQ ID NO: 115762 - protein, 7 aa, synthetic construct
EQRKGII

SEQ ID NO: 115763 - protein, 7 aa, synthetic construct
EQRKSQS

SEQ ID NO: 115764 - protein, 7 aa, synthetic construct
EQRKVMI

SEQ ID NO: 115765 - protein, 7 aa, synthetic construct
EQRNASK

SEQ ID NO: 115766 - protein, 7 aa, synthetic construct
EQRPVPK

SEQ ID NO: 115767 - protein, 7 aa, synthetic construct
EQRSPMD

SEQ ID NO: 115768 - protein, 7 aa, synthetic construct
EQRVAVK

SEQ ID NO: 115769 - protein, 7 aa, synthetic construct
EQRVTSK

SEQ ID NO: 115770 - protein, 7 aa, synthetic construct
EQSVTKM

SEQ ID NO: 115771 - protein, 7 aa, synthetic construct
EQTGPKK

SEQ ID NO: 115772 - protein, 7 aa, synthetic construct
EQTKRAA

SEQ ID NO: 115773 - protein, 7 aa, synthetic construct
EQTKRVG

SEQ ID NO: 115774 - protein, 7 aa, synthetic construct
EQTMKRV

SEQ ID NO: 115775 - protein, 7 aa, synthetic construct
EQVGKPR

SEQ ID NO: 115776 - protein, 7 aa, synthetic construct
EQVRPKT

SEQ ID NO: 115777 - protein, 7 aa, synthetic construct
ERAAIKS

SEQ ID NO: 115778 - protein, 7 aa, synthetic construct
ERAAIPR

SEQ ID NO: 115779 - protein, 7 aa, synthetic construct
ERAGVSK

SEQ ID NO: 115780 - protein, 7 aa, synthetic construct
ERAKAPY

SEQ ID NO: 115781 - protein, 7 aa, synthetic construct
ERAKITL

SEQ ID NO: 115782 - protein, 7 aa, synthetic construct
ERAMKVV

SEQ ID NO: 115783 - protein, 7 aa, synthetic construct
ERANMKN

SEQ ID NO: 115784 - protein, 7 aa, synthetic construct
ERANPNK

SEQ ID NO: 115785 - protein, 7 aa, synthetic construct
ERAPTRT

SEQ ID NO: 115786 - protein, 7 aa, synthetic construct
ERAQPKF

SEQ ID NO: 115787 - protein, 7 aa, synthetic construct
ERASLSK

SEQ ID NO: 115788 - protein, 7 aa, synthetic construct
ERATKSI

SEQ ID NO: 115789 - protein, 7 aa, synthetic construct
ERATQRV

SEQ ID NO: 115790 - protein, 7 aa, synthetic construct
ERAVLKN

SEQ ID NO: 115791 - protein, 7 aa, synthetic construct
ERAVSNK

SEQ ID NO: 115792 - protein, 7 aa, synthetic construct
ERDKPKY

SEQ ID NO: 115793 - protein, 7 aa, synthetic construct
EREAPYD

SEQ ID NO: 115794 - protein, 7 aa, synthetic construct
EREKPIR

SEQ ID NO: 115795 - protein, 7 aa, synthetic construct
ERGINKI

SEQ ID NO: 115796 - protein, 7 aa, synthetic construct
ERGKLAF

SEQ ID NO: 115797 - protein, 7 aa, synthetic construct
ERGKPIF

SEQ ID NO: 115798 - protein, 7 aa, synthetic construct
ERGKQNS

SEQ ID NO: 115799 - protein, 7 aa, synthetic construct
ERGKTSF

SEQ ID NO: 115800 - protein, 7 aa, synthetic construct
ERGKVNF

SEQ ID NO: 115801 - protein, 7 aa, synthetic construct
ERGLQGK

SEQ ID NO: 115802 - protein, 7 aa, synthetic construct
ERGLRSP

SEQ ID NO: 115803 - protein, 7 aa, synthetic construct
ERGMLRP

SEQ ID NO: 115804 - protein, 7 aa, synthetic construct
ERGNKMA

SEQ ID NO: 115805 - protein, 7 aa, synthetic construct
ERGNMKG

SEQ ID NO: 115806 - protein, 7 aa, synthetic construct
ERGNPVK

SEQ ID NO: 115807 - protein, 7 aa, synthetic construct
ERGNTKG

SEQ ID NO: 115808 - protein, 7 aa, synthetic construct
ERGQDHR

SEQ ID NO: 115809 - protein, 7 aa, synthetic construct
ERGRVGV

SEQ ID NO: 115810 - protein, 7 aa, synthetic construct
ERGTIKQ

SEQ ID NO: 115811 - protein, 7 aa, synthetic construct
ERGVQRV

SEQ ID NO: 115812 - protein, 7 aa, synthetic construct
ERHAHRD

SEQ ID NO: 115813 - protein, 7 aa, synthetic construct
ERHVLID

SEQ ID NO: 115814 - protein, 7 aa, synthetic construct
ERIKPGY

SEQ ID NO: 115815 - protein, 7 aa, synthetic construct
ERINSKL

SEQ ID NO: 115816 - protein, 7 aa, synthetic construct
ERIQKTT

SEQ ID NO: 115817 - protein, 7 aa, synthetic construct
ERIVKTA

SEQ ID NO: 115818 - protein, 7 aa, synthetic construct
ERKANML

SEQ ID NO: 115819 - protein, 7 aa, synthetic construct
ERKAQNF

SEQ ID NO: 115820 - protein, 7 aa, synthetic construct
ERKDKMF

SEQ ID NO: 115821 - protein, 7 aa, synthetic construct
ERKDKQQ

SEQ ID NO: 115822 - protein, 7 aa, synthetic construct
ERKELSR

SEQ ID NO: 115823 - protein, 7 aa, synthetic construct
ERKEVGR

SEQ ID NO: 115824 - protein, 7 aa, synthetic construct
ERKGAAL

SEQ ID NO: 115825 - protein, 7 aa, synthetic construct
ERKGAPF

SEQ ID NO: 115826 - protein, 7 aa, synthetic construct
ERKGAQN

SEQ ID NO: 115827 - protein, 7 aa, synthetic construct
ERKGTQM

SEQ ID NO: 115828 - protein, 7 aa, synthetic construct
ERKGVSL

SEQ ID NO: 115829 - protein, 7 aa, synthetic construct
ERKIMQT

SEQ ID NO: 115830 - protein, 7 aa, synthetic construct
ERKLMSS

SEQ ID NO: 115831 - protein, 7 aa, synthetic construct
ERKLSTL

SEQ ID NO: 115832 - protein, 7 aa, synthetic construct
ERKMMQI

SEQ ID NO: 115833 - protein, 7 aa, synthetic construct
ERKMNQG

SEQ ID NO: 115834 - protein, 7 aa, synthetic construct
ERKPIGI

SEQ ID NO: 115835 - protein, 7 aa, synthetic construct
ERKPIHP

SEQ ID NO: 115836 - protein, 7 aa, synthetic construct
ERKPIVL

SEQ ID NO: 115837 - protein, 7 aa, synthetic construct
ERKPKEG

SEQ ID NO: 115838 - protein, 7 aa, synthetic construct
ERKPLAM

SEQ ID NO: 115839 - protein, 7 aa, synthetic construct
ERKPNIM

SEQ ID NO: 115840 - protein, 7 aa, synthetic construct
ERKPTTI

SEQ ID NO: 115841 - protein, 7 aa, synthetic construct
ERKQVGH

SEQ ID NO: 115842 - protein, 7 aa, synthetic construct
ERKQWGD

SEQ ID NO: 115843 - protein, 7 aa, synthetic construct
ERKSIMM

SEQ ID NO: 115844 - protein, 7 aa, synthetic construct
ERKSQFS

SEQ ID NO: 115845 - protein, 7 aa, synthetic construct
ERKSQSV

SEQ ID NO: 115846 - protein, 7 aa, synthetic construct
ERKSYPP

SEQ ID NO: 115847 - protein, 7 aa, synthetic construct
ERKTAMS

SEQ ID NO: 115848 - protein, 7 aa, synthetic construct
ERKTASM

SEQ ID NO: 115849 - protein, 7 aa, synthetic construct
ERKTSYV

SEQ ID NO: 115850 - protein, 7 aa, synthetic construct
ERKVPVM

SEQ ID NO: 115851 - protein, 7 aa, synthetic construct
ERKVTIT

SEQ ID NO: 115852 - protein, 7 aa, synthetic construct
ERLNAPK

SEQ ID NO: 115853 - protein, 7 aa, synthetic construct
ERLNKGF

SEQ ID NO: 115854 - protein, 7 aa, synthetic construct
ERLNKLT

SEQ ID NO: 115855 - protein, 7 aa, synthetic construct
ERLNVNK

SEQ ID NO: 115856 - protein, 7 aa, synthetic construct
ERLPKMQ

SEQ ID NO: 115857 - protein, 7 aa, synthetic construct
ERLQKNM

SEQ ID NO: 115858 - protein, 7 aa, synthetic construct
ERLQKPN

SEQ ID NO: 115859 - protein, 7 aa, synthetic construct
ERLSTMK

SEQ ID NO: 115860 - protein, 7 aa, synthetic construct
ERMGLTK

SEQ ID NO: 115861 - protein, 7 aa, synthetic construct
ERMKAIG

SEQ ID NO: 115862 - protein, 7 aa, synthetic construct
ERMKLMA

SEQ ID NO: 115863 - protein, 7 aa, synthetic construct
ERMKQPI

SEQ ID NO: 115864 - protein, 7 aa, synthetic construct
ERMPTRA

SEQ ID NO: 115865 - protein, 7 aa, synthetic construct
ERMQKTL

SEQ ID NO: 115866 - protein, 7 aa, synthetic construct
ERMSTLK

SEQ ID NO: 115867 - protein, 7 aa, synthetic construct
ERMTMTK

SEQ ID NO: 115868 - protein, 7 aa, synthetic construct
ERMTNRG

SEQ ID NO: 115869 - protein, 7 aa, synthetic construct
ERMVKSI

SEQ ID NO: 115870 - protein, 7 aa, synthetic construct
ERNGVGK

SEQ ID NO: 115871 - protein, 7 aa, synthetic construct
ERNIAKQ

SEQ ID NO: 115872 - protein, 7 aa, synthetic construct
ERNIVPK

SEQ ID NO: 115873 - protein, 7 aa, synthetic construct
ERNKAQN

SEQ ID NO: 115874 - protein, 7 aa, synthetic construct
ERNKGYI

SEQ ID NO: 115875 - protein, 7 aa, synthetic construct
ERNKPSA

SEQ ID NO: 115876 - protein, 7 aa, synthetic construct
ERNKQMA

SEQ ID NO: 115877 - protein, 7 aa, synthetic construct
ERNMKLV

SEQ ID NO: 115878 - protein, 7 aa, synthetic construct
ERNMPLK

SEQ ID NO: 115879 - protein, 7 aa, synthetic construct
ERNMPTD

SEQ ID NO: 115880 - protein, 7 aa, synthetic construct
ERNMTKT

SEQ ID NO: 115881 - protein, 7 aa, synthetic construct
ERNNPKM

SEQ ID NO: 115882 - protein, 7 aa, synthetic construct
ERNPKVF

SEQ ID NO: 115883 - protein, 7 aa, synthetic construct
ERNPNAR

SEQ ID NO: 115884 - protein, 7 aa, synthetic construct
ERNPRYP

SEQ ID NO: 115885 - protein, 7 aa, synthetic construct
ERNSKLT

SEQ ID NO: 115886 - protein, 7 aa, synthetic construct
ERNSVKT

SEQ ID NO: 115887 - protein, 7 aa, synthetic construct
ERNVKPT

SEQ ID NO: 115888 - protein, 7 aa, synthetic construct
ERNVLKT

SEQ ID NO: 115889 - protein, 7 aa, synthetic construct
ERPAKNM

SEQ ID NO: 115890 - protein, 7 aa, synthetic construct
ERPAKSI

SEQ ID NO: 115891 - protein, 7 aa, synthetic construct
ERPGRQS

SEQ ID NO: 115892 - protein, 7 aa, synthetic construct
ERPGRTV

SEQ ID NO: 115893 - protein, 7 aa, synthetic construct
ERPHYHA

SEQ ID NO: 115894 - protein, 7 aa, synthetic construct
ERPIQRP

SEQ ID NO: 115895 - protein, 7 aa, synthetic construct
ERPISNK

SEQ ID NO: 115896 - protein, 7 aa, synthetic construct
ERPKAFA

SEQ ID NO: 115897 - protein, 7 aa, synthetic construct
ERPKNTV

SEQ ID NO: 115898 - protein, 7 aa, synthetic construct
ERPKPVS

SEQ ID NO: 115899 - protein, 7 aa, synthetic construct
ERPLKSS

SEQ ID NO: 115900 - protein, 7 aa, synthetic construct
ERPMGRN

SEQ ID NO: 115901 - protein, 7 aa, synthetic construct
ERPPKAQ

SEQ ID NO: 115902 - protein, 7 aa, synthetic construct
ERPPVKM

SEQ ID NO: 115903 - protein, 7 aa, synthetic construct
ERPRGVV

SEQ ID NO: 115904 - protein, 7 aa, synthetic construct
ERPRVQP

SEQ ID NO: 115905 - protein, 7 aa, synthetic construct
ERPSTKF

SEQ ID NO: 115906 - protein, 7 aa, synthetic construct
ERPTRVI

SEQ ID NO: 115907 - protein, 7 aa, synthetic construct
ERPTSQK

SEQ ID NO: 115908 - protein, 7 aa, synthetic construct
ERPTTRM

SEQ ID NO: 115909 - protein, 7 aa, synthetic construct
ERPVVKM

SEQ ID NO: 115910 - protein, 7 aa, synthetic construct
ERQGPKI

SEQ ID NO: 115911 - protein, 7 aa, synthetic construct
ERQKALM

SEQ ID NO: 115912 - protein, 7 aa, synthetic construct
ERQKANI

SEQ ID NO: 115913 - protein, 7 aa, synthetic construct
ERQKGNV

SEQ ID NO: 115914 - protein, 7 aa, synthetic construct
ERQKHVA

SEQ ID NO: 115915 - protein, 7 aa, synthetic construct
ERQKLTQ

SEQ ID NO: 115916 - protein, 7 aa, synthetic construct
ERQKPAS

SEQ ID NO: 115917 - protein, 7 aa, synthetic construct
ERQKVAS

SEQ ID NO: 115918 - protein, 7 aa, synthetic construct
ERQNAKA

SEQ ID NO: 115919 - protein, 7 aa, synthetic construct
ERQNLMK

SEQ ID NO: 115920 - protein, 7 aa, synthetic construct
ERQPLRN

SEQ ID NO: 115921 - protein, 7 aa, synthetic construct
ERQQAVW

SEQ ID NO: 115922 - protein, 7 aa, synthetic construct
ERQQKVQ

SEQ ID NO: 115923 - protein, 7 aa, synthetic construct
ERQSPTD

SEQ ID NO: 115924 - protein, 7 aa, synthetic construct
ERQTKTI

SEQ ID NO: 115925 - protein, 7 aa, synthetic construct
ERQTKTV

SEQ ID NO: 115926 - protein, 7 aa, synthetic construct
ERQVAKM

SEQ ID NO: 115927 - protein, 7 aa, synthetic construct
ERRGMYD

SEQ ID NO: 115928 - protein, 7 aa, synthetic construct
ERRPVNP

SEQ ID NO: 115929 - protein, 7 aa, synthetic construct
ERSKIQV

SEQ ID NO: 115930 - protein, 7 aa, synthetic construct
ERSKPPQ

SEQ ID NO: 115931 - protein, 7 aa, synthetic construct
ERSKVLT

SEQ ID NO: 115932 - protein, 7 aa, synthetic construct
ERSLGSK

SEQ ID NO: 115933 - protein, 7 aa, synthetic construct
ERSQKIS

SEQ ID NO: 115934 - protein, 7 aa, synthetic construct
ERSRFEK

SEQ ID NO: 115935 - protein, 7 aa, synthetic construct
ERSSFPK

SEQ ID NO: 115936 - protein, 7 aa, synthetic construct
ERSSKPI

SEQ ID NO: 115937 - protein, 7 aa, synthetic construct
ERSVKAQ

SEQ ID NO: 115938 - protein, 7 aa, synthetic construct
ERTGSTK

SEQ ID NO: 115939 - protein, 7 aa, synthetic construct
ERTGTMK

SEQ ID NO: 115940 - protein, 7 aa, synthetic construct
ERTIQKM

SEQ ID NO: 115941 - protein, 7 aa, synthetic construct
ERTKGFV

SEQ ID NO: 115942 - protein, 7 aa, synthetic construct
ERTKGSV

SEQ ID NO: 115943 - protein, 7 aa, synthetic construct
ERTKNPS

SEQ ID NO: 115944 - protein, 7 aa, synthetic construct
ERTKPAN

SEQ ID NO: 115945 - protein, 7 aa, synthetic construct
ERTKPPN

SEQ ID NO: 115946 - protein, 7 aa, synthetic construct
ERTKPQF

SEQ ID NO: 115947 - protein, 7 aa, synthetic construct
ERTKPTL

SEQ ID NO: 115948 - protein, 7 aa, synthetic construct
ERTKSQL

SEQ ID NO: 115949 - protein, 7 aa, synthetic construct
ERTKSSG

SEQ ID NO: 115950 - protein, 7 aa, synthetic construct
ERTKVPY

SEQ ID NO: 115951 - protein, 7 aa, synthetic construct
ERTNKSM

SEQ ID NO: 115952 - protein, 7 aa, synthetic construct
ERTNVAR

SEQ ID NO: 115953 - protein, 7 aa, synthetic construct
ERTQIKL

SEQ ID NO: 115954 - protein, 7 aa, synthetic construct
ERTSAMK

SEQ ID NO: 115955 - protein, 7 aa, synthetic construct
ERTSGVK

SEQ ID NO: 115956 - protein, 7 aa, synthetic construct
ERTSKII

SEQ ID NO: 115957 - protein, 7 aa, synthetic construct
ERTVTKY

SEQ ID NO: 115958 - protein, 7 aa, synthetic construct
ERVKSMN

SEQ ID NO: 115959 - protein, 7 aa, synthetic construct
ERVKTSY

SEQ ID NO: 115960 - protein, 7 aa, synthetic construct
ERVKVHT

SEQ ID NO: 115961 - protein, 7 aa, synthetic construct
ERVMTPK

SEQ ID NO: 115962 - protein, 7 aa, synthetic construct
ERVNATR

SEQ ID NO: 115963 - protein, 7 aa, synthetic construct
ERVNMRP

SEQ ID NO: 115964 - protein, 7 aa, synthetic construct
ERVPIRG

SEQ ID NO: 115965 - protein, 7 aa, synthetic construct
ERVPRSP

SEQ ID NO: 115966 - protein, 7 aa, synthetic construct
ERVPRVT

SEQ ID NO: 115967 - protein, 7 aa, synthetic construct
ERVQLRG

SEQ ID NO: 115968 - protein, 7 aa, synthetic construct
ERVSKNI

SEQ ID NO: 115969 - protein, 7 aa, synthetic construct
ERVTYLA

SEQ ID NO: 115970 - protein, 7 aa, synthetic construct
ERVYRQD

SEQ ID NO: 115971 - protein, 7 aa, synthetic construct
ESAKLGR

SEQ ID NO: 115972 - protein, 7 aa, synthetic construct
ESAVKKN

SEQ ID NO: 115973 - protein, 7 aa, synthetic construct
ESAYHTR

SEQ ID NO: 115974 - protein, 7 aa, synthetic construct
ESAYQQR

SEQ ID NO: 115975 - protein, 7 aa, synthetic construct
ESEWDLQ

SEQ ID NO: 115976 - protein, 7 aa, synthetic construct
ESHWKHE

SEQ ID NO: 115977 - protein, 7 aa, synthetic construct
ESKLKYT

SEQ ID NO: 115978 - protein, 7 aa, synthetic construct
ESKPINR

SEQ ID NO: 115979 - protein, 7 aa, synthetic construct
ESKRPVM

SEQ ID NO: 115980 - protein, 7 aa, synthetic construct
ESKRTVV

SEQ ID NO: 115981 - protein, 7 aa, synthetic construct
ESKTALK

SEQ ID NO: 115982 - protein, 7 aa, synthetic construct
ESKTVPR

SEQ ID NO: 115983 - protein, 7 aa, synthetic construct
ESMKKMY

SEQ ID NO: 115984 - protein, 7 aa, synthetic construct
ESNKGFK

SEQ ID NO: 115985 - protein, 7 aa, synthetic construct
ESNKKGS

SEQ ID NO: 115986 - protein, 7 aa, synthetic construct
ESPRLKV

SEQ ID NO: 115987 - protein, 7 aa, synthetic construct
ESQAIKK

SEQ ID NO: 115988 - protein, 7 aa, synthetic construct
ESQQKKG

SEQ ID NO: 115989 - protein, 7 aa, synthetic construct
ESRKAGI

SEQ ID NO: 115990 - protein, 7 aa, synthetic construct
ESRKVMV

SEQ ID NO: 115991 - protein, 7 aa, synthetic construct
ESRRIQD

SEQ ID NO: 115992 - protein, 7 aa, synthetic construct
ESRTMKM

SEQ ID NO: 115993 - protein, 7 aa, synthetic construct
ESTKKVF

SEQ ID NO: 115994 - protein, 7 aa, synthetic construct
ESVKKWE

SEQ ID NO: 115995 - protein, 7 aa, synthetic construct
ESVKNAR

SEQ ID NO: 115996 - protein, 7 aa, synthetic construct
ESVTWSK

SEQ ID NO: 115997 - protein, 7 aa, synthetic construct
ESYALKM

SEQ ID NO: 115998 - protein, 7 aa, synthetic construct
ETFNNKK

SEQ ID NO: 115999 - protein, 7 aa, synthetic construct
ETGGKRV

SEQ ID NO: 116000 - protein, 7 aa, synthetic construct
ETGIVKK

SEQ ID NO: 116001 - protein, 7 aa, synthetic construct
ETGKARV

SEQ ID NO: 116002 - protein, 7 aa, synthetic construct
ETGKLRN

SEQ ID NO: 116003 - protein, 7 aa, synthetic construct
ETGKQRI

SEQ ID NO: 116004 - protein, 7 aa, synthetic construct
ETGKTAR

SEQ ID NO: 116005 - protein, 7 aa, synthetic construct
ETGKTRT

SEQ ID NO: 116006 - protein, 7 aa, synthetic construct
ETHAYQR

SEQ ID NO: 116007 - protein, 7 aa, synthetic construct
ETIKRHD

SEQ ID NO: 116008 - protein, 7 aa, synthetic construct
ETIRAKV

SEQ ID NO: 116009 - protein, 7 aa, synthetic construct
ETKFPAR

SEQ ID NO: 116010 - protein, 7 aa, synthetic construct
ETKFPMK

SEQ ID NO: 116011 - protein, 7 aa, synthetic construct
ETKFRTA

SEQ ID NO: 116012 - protein, 7 aa, synthetic construct
ETKIKYA

SEQ ID NO: 116013 - protein, 7 aa, synthetic construct
ETKKPIQ

SEQ ID NO: 116014 - protein, 7 aa, synthetic construct
ETKKPQM

SEQ ID NO: 116015 - protein, 7 aa, synthetic construct
ETKKTYS

SEQ ID NO: 116016 - protein, 7 aa, synthetic construct
ETKKVMY

SEQ ID NO: 116017 - protein, 7 aa, synthetic construct
ETKLIAR

SEQ ID NO: 116018 - protein, 7 aa, synthetic construct
ETKNPAK

SEQ ID NO: 116019 - protein, 7 aa, synthetic construct
ETKQMKY

SEQ ID NO: 116020 - protein, 7 aa, synthetic construct
ETKRGTS

SEQ ID NO: 116021 - protein, 7 aa, synthetic construct
ETKSMRQ

SEQ ID NO: 116022 - protein, 7 aa, synthetic construct
ETKSVLR

SEQ ID NO: 116023 - protein, 7 aa, synthetic construct
ETKTGFR

SEQ ID NO: 116024 - protein, 7 aa, synthetic construct
ETLKPKS

SEQ ID NO: 116025 - protein, 7 aa, synthetic construct
ETMKASK

SEQ ID NO: 116026 - protein, 7 aa, synthetic construct
ETMKMRA

SEQ ID NO: 116027 - protein, 7 aa, synthetic construct
ETNKIRT

SEQ ID NO: 116028 - protein, 7 aa, synthetic construct
ETNRAGR

SEQ ID NO: 116029 - protein, 7 aa, synthetic construct
ETNRHHF

SEQ ID NO: 116030 - protein, 7 aa, synthetic construct
ETNVKKL

SEQ ID NO: 116031 - protein, 7 aa, synthetic construct
ETPAVGK

SEQ ID NO: 116032 - protein, 7 aa, synthetic construct
ETPKQMR

SEQ ID NO: 116033 - protein, 7 aa, synthetic construct
ETPKRLM

SEQ ID NO: 116034 - protein, 7 aa, synthetic construct
ETPRQMK

SEQ ID NO: 116035 - protein, 7 aa, synthetic construct
ETQIRKT

SEQ ID NO: 116036 - protein, 7 aa, synthetic construct
ETQKFKN

SEQ ID NO: 116037 - protein, 7 aa, synthetic construct
ETQKKMQ

SEQ ID NO: 116038 - protein, 7 aa, synthetic construct
ETQKYSF

SEQ ID NO: 116039 - protein, 7 aa, synthetic construct
ETQNAKK

SEQ ID NO: 116040 - protein, 7 aa, synthetic construct
ETQRQKI

SEQ ID NO: 116041 - protein, 7 aa, synthetic construct
ETQYRQM

SEQ ID NO: 116042 - protein, 7 aa, synthetic construct
ETQYTRH

SEQ ID NO: 116043 - protein, 7 aa, synthetic construct
ETRGKSM

SEQ ID NO: 116044 - protein, 7 aa, synthetic construct
ETRITRP

SEQ ID NO: 116045 - protein, 7 aa, synthetic construct
ETRLKNS

SEQ ID NO: 116046 - protein, 7 aa, synthetic construct
ETRMKAG

SEQ ID NO: 116047 - protein, 7 aa, synthetic construct
ETRNPVK

SEQ ID NO: 116048 - protein, 7 aa, synthetic construct
ETRPAIK

SEQ ID NO: 116049 - protein, 7 aa, synthetic construct
ETRPGKN

SEQ ID NO: 116050 - protein, 7 aa, synthetic construct
ETRTPLK

SEQ ID NO: 116051 - protein, 7 aa, synthetic construct
ETRVKLS

SEQ ID NO: 116052 - protein, 7 aa, synthetic construct
ETSAKRS

SEQ ID NO: 116053 - protein, 7 aa, synthetic construct
ETSKAAR

SEQ ID NO: 116054 - protein, 7 aa, synthetic construct
ETSKFKS

SEQ ID NO: 116055 - protein, 7 aa, synthetic construct
ETSKGRM

SEQ ID NO: 116056 - protein, 7 aa, synthetic construct
ETSKKAF

SEQ ID NO: 116057 - protein, 7 aa, synthetic construct
ETSKNKY

SEQ ID NO: 116058 - protein, 7 aa, synthetic construct
ETSKRGF

SEQ ID NO: 116059 - protein, 7 aa, synthetic construct
ETSVPKR

SEQ ID NO: 116060 - protein, 7 aa, synthetic construct
ETTARGR

SEQ ID NO: 116061 - protein, 7 aa, synthetic construct
ETTKKDK

SEQ ID NO: 116062 - protein, 7 aa, synthetic construct
ETTKVLK

SEQ ID NO: 116063 - protein, 7 aa, synthetic construct
ETVKPRN

SEQ ID NO: 116064 - protein, 7 aa, synthetic construct
ETYETMR

SEQ ID NO: 116065 - protein, 7 aa, synthetic construct
ETYRMQT

SEQ ID NO: 116066 - protein, 7 aa, synthetic construct
ETYRSSI

SEQ ID NO: 116067 - protein, 7 aa, synthetic construct
EVANLKR

SEQ ID NO: 116068 - protein, 7 aa, synthetic construct
EVARQMK

SEQ ID NO: 116069 - protein, 7 aa, synthetic construct
EVDLRHA

SEQ ID NO: 116070 - protein, 7 aa, synthetic construct
EVDYRRS

SEQ ID NO: 116071 - protein, 7 aa, synthetic construct
EVEFANG

SEQ ID NO: 116072 - protein, 7 aa, synthetic construct
EVIKQNR

SEQ ID NO: 116073 - protein, 7 aa, synthetic construct
EVKAKYI

SEQ ID NO: 116074 - protein, 7 aa, synthetic construct
EVKDMRR

SEQ ID NO: 116075 - protein, 7 aa, synthetic construct
EVKFPKN

SEQ ID NO: 116076 - protein, 7 aa, synthetic construct
EVKHRGT

SEQ ID NO: 116077 - protein, 7 aa, synthetic construct
EVKIRNN

SEQ ID NO: 116078 - protein, 7 aa, synthetic construct
EVKKLHY

SEQ ID NO: 116079 - protein, 7 aa, synthetic construct
EVKMHRV

SEQ ID NO: 116080 - protein, 7 aa, synthetic construct
EVKMVAR

SEQ ID NO: 116081 - protein, 7 aa, synthetic construct
EVKPMKA

SEQ ID NO: 116082 - protein, 7 aa, synthetic construct
EVKPSRA

SEQ ID NO: 116083 - protein, 7 aa, synthetic construct
EVKRANV

SEQ ID NO: 116084 - protein, 7 aa, synthetic construct
EVKRLMS

SEQ ID NO: 116085 - protein, 7 aa, synthetic construct
EVKSLRQ

SEQ ID NO: 116086 - protein, 7 aa, synthetic construct
EVKSRLA

SEQ ID NO: 116087 - protein, 7 aa, synthetic construct
EVKTMGR

SEQ ID NO: 116088 - protein, 7 aa, synthetic construct
EVKTRFV

SEQ ID NO: 116089 - protein, 7 aa, synthetic construct
EVKVARL

SEQ ID NO: 116090 - protein, 7 aa, synthetic construct
EVKVSNR

SEQ ID NO: 116091 - protein, 7 aa, synthetic construct
EVKYHKP

SEQ ID NO: 116092 - protein, 7 aa, synthetic construct
EVKYMKA

SEQ ID NO: 116093 - protein, 7 aa, synthetic construct
EVLKPQK

SEQ ID NO: 116094 - protein, 7 aa, synthetic construct
EVMAVVG

SEQ ID NO: 116095 - protein, 7 aa, synthetic construct
EVMQRGK

SEQ ID NO: 116096 - protein, 7 aa, synthetic construct
EVMRMKS

SEQ ID NO: 116097 - protein, 7 aa, synthetic construct
EVNIIKK

SEQ ID NO: 116098 - protein, 7 aa, synthetic construct
EVNMKRT

SEQ ID NO: 116099 - protein, 7 aa, synthetic construct
EVNNKGR

SEQ ID NO: 116100 - protein, 7 aa, synthetic construct
EVNSTKK

SEQ ID NO: 116101 - protein, 7 aa, synthetic construct
EVNYHTR

SEQ ID NO: 116102 - protein, 7 aa, synthetic construct
EVNYMSK

SEQ ID NO: 116103 - protein, 7 aa, synthetic construct
EVPRRTP

SEQ ID NO: 116104 - protein, 7 aa, synthetic construct
EVQGAKR

SEQ ID NO: 116105 - protein, 7 aa, synthetic construct
EVQKPRN

SEQ ID NO: 116106 - protein, 7 aa, synthetic construct
EVQPKPK

SEQ ID NO: 116107 - protein, 7 aa, synthetic construct
EVQRIKN

SEQ ID NO: 116108 - protein, 7 aa, synthetic construct
EVQRMNK

SEQ ID NO: 116109 - protein, 7 aa, synthetic construct
EVRGARV

SEQ ID NO: 116110 - protein, 7 aa, synthetic construct
EVRGGFK

SEQ ID NO: 116111 - protein, 7 aa, synthetic construct
EVRGLRN

SEQ ID NO: 116112 - protein, 7 aa, synthetic construct
EVRGQRP

SEQ ID NO: 116113 - protein, 7 aa, synthetic construct
EVRKPHP

SEQ ID NO: 116114 - protein, 7 aa, synthetic construct
EVRLIKG

SEQ ID NO: 116115 - protein, 7 aa, synthetic construct
EVRLNKS

SEQ ID NO: 116116 - protein, 7 aa, synthetic construct
EVRNVVK

SEQ ID NO: 116117 - protein, 7 aa, synthetic construct
EVRPNKM

SEQ ID NO: 116118 - protein, 7 aa, synthetic construct
EVRQQMK

SEQ ID NO: 116119 - protein, 7 aa, synthetic construct
EVRSYKD

SEQ ID NO: 116120 - protein, 7 aa, synthetic construct
EVRVKNI

SEQ ID NO: 116121 - protein, 7 aa, synthetic construct
EVSKARM

SEQ ID NO: 116122 - protein, 7 aa, synthetic construct
EVSKGRS

SEQ ID NO: 116123 - protein, 7 aa, synthetic construct
EVSKIRT

SEQ ID NO: 116124 - protein, 7 aa, synthetic construct
EVSRGLK

SEQ ID NO: 116125 - protein, 7 aa, synthetic construct
EVSVKKY

SEQ ID NO: 116126 - protein, 7 aa, synthetic construct
EVTKRQI

SEQ ID NO: 116127 - protein, 7 aa, synthetic construct
EVTKVYK

SEQ ID NO: 116128 - protein, 7 aa, synthetic construct
EVTTRKA

SEQ ID NO: 116129 - protein, 7 aa, synthetic construct
EVVKLGR

SEQ ID NO: 116130 - protein, 7 aa, synthetic construct
EVVNKNR

SEQ ID NO: 116131 - protein, 7 aa, synthetic construct
EVVRGRP

SEQ ID NO: 116132 - protein, 7 aa, synthetic construct
EWKTMKG

SEQ ID NO: 116133 - protein, 7 aa, synthetic construct
EWRTPDR

SEQ ID NO: 116134 - protein, 7 aa, synthetic construct
EWSPAKF

SEQ ID NO: 116135 - protein, 7 aa, synthetic construct
EYAKPTK

SEQ ID NO: 116136 - protein, 7 aa, synthetic construct
EYERSQK

SEQ ID NO: 116137 - protein, 7 aa, synthetic construct
EYGKGVK

SEQ ID NO: 116138 - protein, 7 aa, synthetic construct
EYGKTVK

SEQ ID NO: 116139 - protein, 7 aa, synthetic construct
EYKINRS

SEQ ID NO: 116140 - protein, 7 aa, synthetic construct
EYKKALS

SEQ ID NO: 116141 - protein, 7 aa, synthetic construct
EYKNVQK

SEQ ID NO: 116142 - protein, 7 aa, synthetic construct
EYKQGVR

SEQ ID NO: 116143 - protein, 7 aa, synthetic construct
EYKTASK

SEQ ID NO: 116144 - protein, 7 aa, synthetic construct
EYKTNAK

SEQ ID NO: 116145 - protein, 7 aa, synthetic construct
EYKVSKI

SEQ ID NO: 116146 - protein, 7 aa, synthetic construct
EYMELQA

SEQ ID NO: 116147 - protein, 7 aa, synthetic construct
EYMKAQK

SEQ ID NO: 116148 - protein, 7 aa, synthetic construct
EYPKAVR

SEQ ID NO: 116149 - protein, 7 aa, synthetic construct
EYQKMKS

SEQ ID NO: 116150 - protein, 7 aa, synthetic construct
EYQTPPS

SEQ ID NO: 116151 - protein, 7 aa, synthetic construct
EYTKPAK

SEQ ID NO: 116152 - protein, 7 aa, synthetic construct
EYVKTKA

SEQ ID NO: 116153 - protein, 7 aa, synthetic construct
FAAERQD

SEQ ID NO: 116154 - protein, 7 aa, synthetic construct
FAAGKHN

SEQ ID NO: 116155 - protein, 7 aa, synthetic construct
FAAGNKA

SEQ ID NO: 116156 - protein, 7 aa, synthetic construct
FAAIHSK

SEQ ID NO: 116157 - protein, 7 aa, synthetic construct
FAAKFPP

SEQ ID NO: 116158 - protein, 7 aa, synthetic construct
FAALKNV

SEQ ID NO: 116159 - protein, 7 aa, synthetic construct
FAAPNSR

SEQ ID NO: 116160 - protein, 7 aa, synthetic construct
FAAPRTV

SEQ ID NO: 116161 - protein, 7 aa, synthetic construct
FAARMGS

SEQ ID NO: 116162 - protein, 7 aa, synthetic construct
FAATMRQ

SEQ ID NO: 116163 - protein, 7 aa, synthetic construct
FADKPNR

SEQ ID NO: 116164 - protein, 7 aa, synthetic construct
FADNKRV

SEQ ID NO: 116165 - protein, 7 aa, synthetic construct
FADTKRL

SEQ ID NO: 116166 - protein, 7 aa, synthetic construct
FAEAGRK

SEQ ID NO: 116167 - protein, 7 aa, synthetic construct
FAEGKRQ

SEQ ID NO: 116168 - protein, 7 aa, synthetic construct
FAESLKK

SEQ ID NO: 116169 - protein, 7 aa, synthetic construct
FAGAAKH

SEQ ID NO: 116170 - protein, 7 aa, synthetic construct
FAGGAKN

SEQ ID NO: 116171 - protein, 7 aa, synthetic construct
FAGGKYM

SEQ ID NO: 116172 - protein, 7 aa, synthetic construct
FAGHQKG

SEQ ID NO: 116173 - protein, 7 aa, synthetic construct
FAGITKL

SEQ ID NO: 116174 - protein, 7 aa, synthetic construct
FAGKARD

SEQ ID NO: 116175 - protein, 7 aa, synthetic construct
FAGLVKH

SEQ ID NO: 116176 - protein, 7 aa, synthetic construct
FAGMAKN

SEQ ID NO: 116177 - protein, 7 aa, synthetic construct
FAGMNGR

SEQ ID NO: 116178 - protein, 7 aa, synthetic construct
FAGQALR

SEQ ID NO: 116179 - protein, 7 aa, synthetic construct
FAGQPVR

SEQ ID NO: 116180 - protein, 7 aa, synthetic construct
FAGRPSS

SEQ ID NO: 116181 - protein, 7 aa, synthetic construct
FAGRQDR

SEQ ID NO: 116182 - protein, 7 aa, synthetic construct
FAGRTMM

SEQ ID NO: 116183 - protein, 7 aa, synthetic construct
FAGSSKA

SEQ ID NO: 116184 - protein, 7 aa, synthetic construct
FAGTMGR

SEQ ID NO: 116185 - protein, 7 aa, synthetic construct
FAGVNIK

SEQ ID NO: 116186 - protein, 7 aa, synthetic construct
FAGVVGR

SEQ ID NO: 116187 - protein, 7 aa, synthetic construct
FAHANSK

SEQ ID NO: 116188 - protein, 7 aa, synthetic construct
FAHASKM

SEQ ID NO: 116189 - protein, 7 aa, synthetic construct
FAHGAKI

SEQ ID NO: 116190 - protein, 7 aa, synthetic construct
FAHKATL

SEQ ID NO: 116191 - protein, 7 aa, synthetic construct
FAHKPQL

SEQ ID NO: 116192 - protein, 7 aa, synthetic construct
FAHKTPN

SEQ ID NO: 116193 - protein, 7 aa, synthetic construct
FAHNVRS

SEQ ID NO: 116194 - protein, 7 aa, synthetic construct
FAHPKSG

SEQ ID NO: 116195 - protein, 7 aa, synthetic construct
FAHQVKV

SEQ ID NO: 116196 - protein, 7 aa, synthetic construct
FAHTKLI

SEQ ID NO: 116197 - protein, 7 aa, synthetic construct
FAHTVKQ

SEQ ID NO: 116198 - protein, 7 aa, synthetic construct
FAHVMVD

SEQ ID NO: 116199 - protein, 7 aa, synthetic construct
FAIHKSG

SEQ ID NO: 116200 - protein, 7 aa, synthetic construct
FAIHKTA

SEQ ID NO: 116201 - protein, 7 aa, synthetic construct
FAIRNNA

SEQ ID NO: 116202 - protein, 7 aa, synthetic construct
FAKDRLM

SEQ ID NO: 116203 - protein, 7 aa, synthetic construct
FAKDVAR

SEQ ID NO: 116204 - protein, 7 aa, synthetic construct
FAKFEKM

SEQ ID NO: 116205 - protein, 7 aa, synthetic construct
FAKGAYS

SEQ ID NO: 116206 - protein, 7 aa, synthetic construct
FAKGPHM

SEQ ID NO: 116207 - protein, 7 aa, synthetic construct
FAKGSER

SEQ ID NO: 116208 - protein, 7 aa, synthetic construct
FAKGTSF

SEQ ID NO: 116209 - protein, 7 aa, synthetic construct
FAKHPMQ

SEQ ID NO: 116210 - protein, 7 aa, synthetic construct
FAKHPNT

SEQ ID NO: 116211 - protein, 7 aa, synthetic construct
FAKIERQ

SEQ ID NO: 116212 - protein, 7 aa, synthetic construct
FAKINVT

SEQ ID NO: 116213 - protein, 7 aa, synthetic construct
FAKMLPQ

SEQ ID NO: 116214 - protein, 7 aa, synthetic construct
FAKPDRM

SEQ ID NO: 116215 - protein, 7 aa, synthetic construct
FAKPHRD

SEQ ID NO: 116216 - protein, 7 aa, synthetic construct
FAKPSIL

SEQ ID NO: 116217 - protein, 7 aa, synthetic construct
FAKPTTH

SEQ ID NO: 116218 - protein, 7 aa, synthetic construct
FAKPVPS

SEQ ID NO: 116219 - protein, 7 aa, synthetic construct
FAKQTDR

SEQ ID NO: 116220 - protein, 7 aa, synthetic construct
FAKQTFS

SEQ ID NO: 116221 - protein, 7 aa, synthetic construct
FAKRESM

SEQ ID NO: 116222 - protein, 7 aa, synthetic construct
FAKRLEN

SEQ ID NO: 116223 - protein, 7 aa, synthetic construct
FAKVKEF

SEQ ID NO: 116224 - protein, 7 aa, synthetic construct
FAKVRAD

SEQ ID NO: 116225 - protein, 7 aa, synthetic construct
FAKVTYN

SEQ ID NO: 116226 - protein, 7 aa, synthetic construct
FAKYEKS

SEQ ID NO: 116227 - protein, 7 aa, synthetic construct
FAKYTSQ

SEQ ID NO: 116228 - protein, 7 aa, synthetic construct
FALNARG

SEQ ID NO: 116229 - protein, 7 aa, synthetic construct
FALNRNA

SEQ ID NO: 116230 - protein, 7 aa, synthetic construct
FAMKETR

SEQ ID NO: 116231 - protein, 7 aa, synthetic construct
FAMKPRE

SEQ ID NO: 116232 - protein, 7 aa, synthetic construct
FAMKTTH

SEQ ID NO: 116233 - protein, 7 aa, synthetic construct
FAMSGPK

SEQ ID NO: 116234 - protein, 7 aa, synthetic construct
FANANVR

SEQ ID NO: 116235 - protein, 7 aa, synthetic construct
FANATQR

SEQ ID NO: 116236 - protein, 7 aa, synthetic construct
FANAVRA

SEQ ID NO: 116237 - protein, 7 aa, synthetic construct
FANAVSR

SEQ ID NO: 116238 - protein, 7 aa, synthetic construct
FANGLQR

SEQ ID NO: 116239 - protein, 7 aa, synthetic construct
FANGSIR

SEQ ID NO: 116240 - protein, 7 aa, synthetic construct
FANHGTK

SEQ ID NO: 116241 - protein, 7 aa, synthetic construct
FANHWPN

SEQ ID NO: 116242 - protein, 7 aa, synthetic construct
FANKPHY

SEQ ID NO: 116243 - protein, 7 aa, synthetic construct
FANLRGP

SEQ ID NO: 116244 - protein, 7 aa, synthetic construct
FANPIRN

SEQ ID NO: 116245 - protein, 7 aa, synthetic construct
FANRMDK

SEQ ID NO: 116246 - protein, 7 aa, synthetic construct
FANSAVR

SEQ ID NO: 116247 - protein, 7 aa, synthetic construct
FANVRQV

SEQ ID NO: 116248 - protein, 7 aa, synthetic construct
FAPAMRP

SEQ ID NO: 116249 - protein, 7 aa, synthetic construct
FAPKNSL

SEQ ID NO: 116250 - protein, 7 aa, synthetic construct
FAPRGHV

SEQ ID NO: 116251 - protein, 7 aa, synthetic construct
FAPRGSI

SEQ ID NO: 116252 - protein, 7 aa, synthetic construct
FAPRSVT

SEQ ID NO: 116253 - protein, 7 aa, synthetic construct
FAPRVGT

SEQ ID NO: 116254 - protein, 7 aa, synthetic construct
FAPSGFK

SEQ ID NO: 116255 - protein, 7 aa, synthetic construct
FAQAAPR

SEQ ID NO: 116256 - protein, 7 aa, synthetic construct
FAQKKDT

SEQ ID NO: 116257 - protein, 7 aa, synthetic construct
FAQLTRT

SEQ ID NO: 116258 - protein, 7 aa, synthetic construct
FAQMGGK

SEQ ID NO: 116259 - protein, 7 aa, synthetic construct
FAQNRPT

SEQ ID NO: 116260 - protein, 7 aa, synthetic construct
FAQQSYK

SEQ ID NO: 116261 - protein, 7 aa, synthetic construct
FAQTSAR

SEQ ID NO: 116262 - protein, 7 aa, synthetic construct
FARAPQP

SEQ ID NO: 116263 - protein, 7 aa, synthetic construct
FARATSA

SEQ ID NO: 116264 - protein, 7 aa, synthetic construct
FARENKN

SEQ ID NO: 116265 - protein, 7 aa, synthetic construct
FARGIDR

SEQ ID NO: 116266 - protein, 7 aa, synthetic construct
FARGSQM

SEQ ID NO: 116267 - protein, 7 aa, synthetic construct
FARIKQE

SEQ ID NO: 116268 - protein, 7 aa, synthetic construct
FARKDAG

SEQ ID NO: 116269 - protein, 7 aa, synthetic construct
FARMSNA

SEQ ID NO: 116270 - protein, 7 aa, synthetic construct
FARNEMK

SEQ ID NO: 116271 - protein, 7 aa, synthetic construct
FARSEAR

SEQ ID NO: 116272 - protein, 7 aa, synthetic construct
FARSNPL

SEQ ID NO: 116273 - protein, 7 aa, synthetic construct
FARTNMP

SEQ ID NO: 116274 - protein, 7 aa, synthetic construct
FARTTEK

SEQ ID NO: 116275 - protein, 7 aa, synthetic construct
FARVNQT

SEQ ID NO: 116276 - protein, 7 aa, synthetic construct
FARVTAG

SEQ ID NO: 116277 - protein, 7 aa, synthetic construct
FASAGAR

SEQ ID NO: 116278 - protein, 7 aa, synthetic construct
FASAHNK

SEQ ID NO: 116279 - protein, 7 aa, synthetic construct
FASAQGR

SEQ ID NO: 116280 - protein, 7 aa, synthetic construct
FASHHKA

SEQ ID NO: 116281 - protein, 7 aa, synthetic construct
FASHKLA

SEQ ID NO: 116282 - protein, 7 aa, synthetic construct
FASKFRD

SEQ ID NO: 116283 - protein, 7 aa, synthetic construct
FASKVHL

SEQ ID NO: 116284 - protein, 7 aa, synthetic construct
FASMAKN

SEQ ID NO: 116285 - protein, 7 aa, synthetic construct
FASNIAR

SEQ ID NO: 116286 - protein, 7 aa, synthetic construct
FASNQIR

SEQ ID NO: 116287 - protein, 7 aa, synthetic construct
FASNREK

SEQ ID NO: 116288 - protein, 7 aa, synthetic construct
FASQSGK

SEQ ID NO: 116289 - protein, 7 aa, synthetic construct
FASRPHP

SEQ ID NO: 116290 - protein, 7 aa, synthetic construct
FASSHGK

SEQ ID NO: 116291 - protein, 7 aa, synthetic construct
FASSHKI

SEQ ID NO: 116292 - protein, 7 aa, synthetic construct
FASSTRL

SEQ ID NO: 116293 - protein, 7 aa, synthetic construct
FASVKLN

SEQ ID NO: 116294 - protein, 7 aa, synthetic construct
FATEKAR

SEQ ID NO: 116295 - protein, 7 aa, synthetic construct
FATHLSK

SEQ ID NO: 116296 - protein, 7 aa, synthetic construct
FATKLRD

SEQ ID NO: 116297 - protein, 7 aa, synthetic construct
FATSHGK

SEQ ID NO: 116298 - protein, 7 aa, synthetic construct
FATSRDK

SEQ ID NO: 116299 - protein, 7 aa, synthetic construct
FATYAKA

SEQ ID NO: 116300 - protein, 7 aa, synthetic construct
FAVNMRG

SEQ ID NO: 116301 - protein, 7 aa, synthetic construct
FAVNPRG

SEQ ID NO: 116302 - protein, 7 aa, synthetic construct
FAVSNVK

SEQ ID NO: 116303 - protein, 7 aa, synthetic construct
FDAARVK

SEQ ID NO: 116304 - protein, 7 aa, synthetic construct
FDAGNKK

SEQ ID NO: 116305 - protein, 7 aa, synthetic construct
FDAKRLT

SEQ ID NO: 116306 - protein, 7 aa, synthetic construct
FDANGKA

SEQ ID NO: 116307 - protein, 7 aa, synthetic construct
FDARLSK

SEQ ID NO: 116308 - protein, 7 aa, synthetic construct
FDARTKT

SEQ ID NO: 116309 - protein, 7 aa, synthetic construct
FDASKRL

SEQ ID NO: 116310 - protein, 7 aa, synthetic construct
FDDGRHR

SEQ ID NO: 116311 - protein, 7 aa, synthetic construct
FDDKKRQ

SEQ ID NO: 116312 - protein, 7 aa, synthetic construct
FDGRGTR

SEQ ID NO: 116313 - protein, 7 aa, synthetic construct
FDHKVRA

SEQ ID NO: 116314 - protein, 7 aa, synthetic construct
FDIARKA

SEQ ID NO: 116315 - protein, 7 aa, synthetic construct
FDIKTRN

SEQ ID NO: 116316 - protein, 7 aa, synthetic construct
FDKAFQK

SEQ ID NO: 116317 - protein, 7 aa, synthetic construct
FDKAMAR

SEQ ID NO: 116318 - protein, 7 aa, synthetic construct
FDKHPKF

SEQ ID NO: 116319 - protein, 7 aa, synthetic construct
FDKKASY

SEQ ID NO: 116320 - protein, 7 aa, synthetic construct
FDKKEGR

SEQ ID NO: 116321 - protein, 7 aa, synthetic construct
FDKKPHI

SEQ ID NO: 116322 - protein, 7 aa, synthetic construct
FDKKTYL

SEQ ID NO: 116323 - protein, 7 aa, synthetic construct
FDKLSRN

SEQ ID NO: 116324 - protein, 7 aa, synthetic construct
FDKMQQK

SEQ ID NO: 116325 - protein, 7 aa, synthetic construct
FDKMSIR

SEQ ID NO: 116326 - protein, 7 aa, synthetic construct
FDKMTFK

SEQ ID NO: 116327 - protein, 7 aa, synthetic construct
FDKPERK

SEQ ID NO: 116328 - protein, 7 aa, synthetic construct
FDKPMRG

SEQ ID NO: 116329 - protein, 7 aa, synthetic construct
FDKPRNY

SEQ ID NO: 116330 - protein, 7 aa, synthetic construct
FDKPSRQ

SEQ ID NO: 116331 - protein, 7 aa, synthetic construct
FDKQNRQ

SEQ ID NO: 116332 - protein, 7 aa, synthetic construct
FDKQTRA

SEQ ID NO: 116333 - protein, 7 aa, synthetic construct
FDKRLQM

SEQ ID NO: 116334 - protein, 7 aa, synthetic construct
FDKRNQS

SEQ ID NO: 116335 - protein, 7 aa, synthetic construct
FDKRRGE

SEQ ID NO: 116336 - protein, 7 aa, synthetic construct
FDKRTQN

SEQ ID NO: 116337 - protein, 7 aa, synthetic construct
FDKTIRM

SEQ ID NO: 116338 - protein, 7 aa, synthetic construct
FDKVTRS

SEQ ID NO: 116339 - protein, 7 aa, synthetic construct
FDKYAKL

SEQ ID NO: 116340 - protein, 7 aa, synthetic construct
FDKYARN

SEQ ID NO: 116341 - protein, 7 aa, synthetic construct
FDLKKRD

SEQ ID NO: 116342 - protein, 7 aa, synthetic construct
FDMKARI

SEQ ID NO: 116343 - protein, 7 aa, synthetic construct
FDMKPRS

SEQ ID NO: 116344 - protein, 7 aa, synthetic construct
FDMKRIN

SEQ ID NO: 116345 - protein, 7 aa, synthetic construct
FDMKSNR

SEQ ID NO: 116346 - protein, 7 aa, synthetic construct
FDMKSRV

SEQ ID NO: 116347 - protein, 7 aa, synthetic construct
FDMRGKN

SEQ ID NO: 116348 - protein, 7 aa, synthetic construct
FDNKHRV

SEQ ID NO: 116349 - protein, 7 aa, synthetic construct
FDNKRLT

SEQ ID NO: 116350 - protein, 7 aa, synthetic construct
FDPRGRQ

SEQ ID NO: 116351 - protein, 7 aa, synthetic construct
FDRAKAQ

SEQ ID NO: 116352 - protein, 7 aa, synthetic construct
FDRAQLK

SEQ ID NO: 116353 - protein, 7 aa, synthetic construct
FDRKAII

SEQ ID NO: 116354 - protein, 7 aa, synthetic construct
FDRKNAM

SEQ ID NO: 116355 - protein, 7 aa, synthetic construct
FDRKNPI

SEQ ID NO: 116356 - protein, 7 aa, synthetic construct
FDRKQVS

SEQ ID NO: 116357 - protein, 7 aa, synthetic construct
FDRKTNN

SEQ ID NO: 116358 - protein, 7 aa, synthetic construct
FDRMNSK

SEQ ID NO: 116359 - protein, 7 aa, synthetic construct
FDRNPKA

SEQ ID NO: 116360 - protein, 7 aa, synthetic construct
FDRPKAG

SEQ ID NO: 116361 - protein, 7 aa, synthetic construct
FDRPKNN

SEQ ID NO: 116362 - protein, 7 aa, synthetic construct
FDRQARG

SEQ ID NO: 116363 - protein, 7 aa, synthetic construct
FDRQKQG

SEQ ID NO: 116364 - protein, 7 aa, synthetic construct
FDRQKSQ

SEQ ID NO: 116365 - protein, 7 aa, synthetic construct
FDRSKAG

SEQ ID NO: 116366 - protein, 7 aa, synthetic construct
FDRTQKP

SEQ ID NO: 116367 - protein, 7 aa, synthetic construct
FDRTVTK

SEQ ID NO: 116368 - protein, 7 aa, synthetic construct
FDRVKEK

SEQ ID NO: 116369 - protein, 7 aa, synthetic construct
FDSAVKR

SEQ ID NO: 116370 - protein, 7 aa, synthetic construct
FDSIKRS

SEQ ID NO: 116371 - protein, 7 aa, synthetic construct
FDSNMKR

SEQ ID NO: 116372 - protein, 7 aa, synthetic construct
FDSNRRA

SEQ ID NO: 116373 - protein, 7 aa, synthetic construct
FDSPKKF

SEQ ID NO: 116374 - protein, 7 aa, synthetic construct
FDTAKRF

SEQ ID NO: 116375 - protein, 7 aa, synthetic construct
FDTGNKR

SEQ ID NO: 116376 - protein, 7 aa, synthetic construct
FDTRITK

SEQ ID NO: 116377 - protein, 7 aa, synthetic construct
FDTRSNK

SEQ ID NO: 116378 - protein, 7 aa, synthetic construct
FDVKIRN

SEQ ID NO: 116379 - protein, 7 aa, synthetic construct
FDVKSNR

SEQ ID NO: 116380 - protein, 7 aa, synthetic construct
FDVRSKQ

SEQ ID NO: 116381 - protein, 7 aa, synthetic construct
FEGKFQK

SEQ ID NO: 116382 - protein, 7 aa, synthetic construct
FEGKGRA

SEQ ID NO: 116383 - protein, 7 aa, synthetic construct
FEGRTKG

SEQ ID NO: 116384 - protein, 7 aa, synthetic construct
FEIKVSK

SEQ ID NO: 116385 - protein, 7 aa, synthetic construct
FEIRQKP

SEQ ID NO: 116386 - protein, 7 aa, synthetic construct
FEKFAKM

SEQ ID NO: 116387 - protein, 7 aa, synthetic construct
FEKGLRL

SEQ ID NO: 116388 - protein, 7 aa, synthetic construct
FEKKGER

SEQ ID NO: 116389 - protein, 7 aa, synthetic construct
FEKNFRN

SEQ ID NO: 116390 - protein, 7 aa, synthetic construct
FEKNPSK

SEQ ID NO: 116391 - protein, 7 aa, synthetic construct
FEKNSVR

SEQ ID NO: 116392 - protein, 7 aa, synthetic construct
FEKNVRV

SEQ ID NO: 116393 - protein, 7 aa, synthetic construct
FEKPKYN

SEQ ID NO: 116394 - protein, 7 aa, synthetic construct
FEKPLKG

SEQ ID NO: 116395 - protein, 7 aa, synthetic construct
FEKQHKM

SEQ ID NO: 116396 - protein, 7 aa, synthetic construct
FEKRPIN

SEQ ID NO: 116397 - protein, 7 aa, synthetic construct
FEKVAKF

SEQ ID NO: 116398 - protein, 7 aa, synthetic construct
FEKVTRQ

SEQ ID NO: 116399 - protein, 7 aa, synthetic construct
FELRPKP

SEQ ID NO: 116400 - protein, 7 aa, synthetic construct
FENIPKK

SEQ ID NO: 116401 - protein, 7 aa, synthetic construct
FENKSAR

SEQ ID NO: 116402 - protein, 7 aa, synthetic construct
FENTMKR

SEQ ID NO: 116403 - protein, 7 aa, synthetic construct
FENVRKQ

SEQ ID NO: 116404 - protein, 7 aa, synthetic construct
FENWMKS

SEQ ID NO: 116405 - protein, 7 aa, synthetic construct
FEPIKRQ

SEQ ID NO: 116406 - protein, 7 aa, synthetic construct
FEQAKRN

SEQ ID NO: 116407 - protein, 7 aa, synthetic construct
FEQKAKN

SEQ ID NO: 116408 - protein, 7 aa, synthetic construct
FEQKPQK

SEQ ID NO: 116409 - protein, 7 aa, synthetic construct
FEQKRSN

SEQ ID NO: 116410 - protein, 7 aa, synthetic construct
FERIKGS

SEQ ID NO: 116411 - protein, 7 aa, synthetic construct
FERIQKT

SEQ ID NO: 116412 - protein, 7 aa, synthetic construct
FERKPMM

SEQ ID NO: 116413 - protein, 7 aa, synthetic construct
FERRFTD

SEQ ID NO: 116414 - protein, 7 aa, synthetic construct
FERVMKS

SEQ ID NO: 116415 - protein, 7 aa, synthetic construct
FESKGNK

SEQ ID NO: 116416 - protein, 7 aa, synthetic construct
FESVKRQ

SEQ ID NO: 116417 - protein, 7 aa, synthetic construct
FETGQGQ

SEQ ID NO: 116418 - protein, 7 aa, synthetic construct
FETQSKR

SEQ ID NO: 116419 - protein, 7 aa, synthetic construct
FETRVRS

SEQ ID NO: 116420 - protein, 7 aa, synthetic construct
FETTRKS

SEQ ID NO: 116421 - protein, 7 aa, synthetic construct
FEVKKLT

SEQ ID NO: 116422 - protein, 7 aa, synthetic construct
FEVRGKN

SEQ ID NO: 116423 - protein, 7 aa, synthetic construct
FFKEKNA

SEQ ID NO: 116424 - protein, 7 aa, synthetic construct
FFKEQMK

SEQ ID NO: 116425 - protein, 7 aa, synthetic construct
FFKESGK

SEQ ID NO: 116426 - protein, 7 aa, synthetic construct
FFKGNTM

SEQ ID NO: 116427 - protein, 7 aa, synthetic construct
FFKGPTP

SEQ ID NO: 116428 - protein, 7 aa, synthetic construct
FFKSGDR

SEQ ID NO: 116429 - protein, 7 aa, synthetic construct
FFKVQNA

SEQ ID NO: 116430 - protein, 7 aa, synthetic construct
FFNAVKG

SEQ ID NO: 116431 - protein, 7 aa, synthetic construct
FFPQSNV

SEQ ID NO: 116432 - protein, 7 aa, synthetic construct
FFPSAKA

SEQ ID NO: 116433 - protein, 7 aa, synthetic construct
FFQKTQG

SEQ ID NO: 116434 - protein, 7 aa, synthetic construct
FFRSGAG

SEQ ID NO: 116435 - protein, 7 aa, synthetic construct
FGAGPAR

SEQ ID NO: 116436 - protein, 7 aa, synthetic construct
FGAGPKQ

SEQ ID NO: 116437 - protein, 7 aa, synthetic construct
FGAHKNN

SEQ ID NO: 116438 - protein, 7 aa, synthetic construct
FGAHKVL

SEQ ID NO: 116439 - protein, 7 aa, synthetic construct
FGAHQKL

SEQ ID NO: 116440 - protein, 7 aa, synthetic construct
FGANKDR

SEQ ID NO: 116441 - protein, 7 aa, synthetic construct
FGANNFK

SEQ ID NO: 116442 - protein, 7 aa, synthetic construct
FGANYKT

SEQ ID NO: 116443 - protein, 7 aa, synthetic construct
FGAPTNR

SEQ ID NO: 116444 - protein, 7 aa, synthetic construct
FGAQKRE

SEQ ID NO: 116445 - protein, 7 aa, synthetic construct
FGAQSAR

SEQ ID NO: 116446 - protein, 7 aa, synthetic construct
FGARKDN

SEQ ID NO: 116447 - protein, 7 aa, synthetic construct
FGARKDS

SEQ ID NO: 116448 - protein, 7 aa, synthetic construct
FGASPAR

SEQ ID NO: 116449 - protein, 7 aa, synthetic construct
FGDRTNR

SEQ ID NO: 116450 - protein, 7 aa, synthetic construct
FGDVKRH

SEQ ID NO: 116451 - protein, 7 aa, synthetic construct
FGEFRNK

SEQ ID NO: 116452 - protein, 7 aa, synthetic construct
FGEIRKQ

SEQ ID NO: 116453 - protein, 7 aa, synthetic construct
FGGGAKT

SEQ ID NO: 116454 - protein, 7 aa, synthetic construct
FGGGMKT

SEQ ID NO: 116455 - protein, 7 aa, synthetic construct
FGGGSIR

SEQ ID NO: 116456 - protein, 7 aa, synthetic construct
FGGHKWD

SEQ ID NO: 116457 - protein, 7 aa, synthetic construct
FGGHQKQ

SEQ ID NO: 116458 - protein, 7 aa, synthetic construct
FGGHTVK

SEQ ID NO: 116459 - protein, 7 aa, synthetic construct
FGGITRV

SEQ ID NO: 116460 - protein, 7 aa, synthetic construct
FGGKDRA

SEQ ID NO: 116461 - protein, 7 aa, synthetic construct
FGGKGAF

SEQ ID NO: 116462 - protein, 7 aa, synthetic construct
FGGKKDN

SEQ ID NO: 116463 - protein, 7 aa, synthetic construct
FGGKNLM

SEQ ID NO: 116464 - protein, 7 aa, synthetic construct
FGGKQML

SEQ ID NO: 116465 - protein, 7 aa, synthetic construct
FGGKSNN

SEQ ID NO: 116466 - protein, 7 aa, synthetic construct
FGGKTHL

SEQ ID NO: 116467 - protein, 7 aa, synthetic construct
FGGLRVS

SEQ ID NO: 116468 - protein, 7 aa, synthetic construct
FGGMKNM

SEQ ID NO: 116469 - protein, 7 aa, synthetic construct
FGGNIRM

SEQ ID NO: 116470 - protein, 7 aa, synthetic construct
FGGNQPR

SEQ ID NO: 116471 - protein, 7 aa, synthetic construct
FGGNSKL

SEQ ID NO: 116472 - protein, 7 aa, synthetic construct
FGGQFKA

SEQ ID NO: 116473 - protein, 7 aa, synthetic construct
FGGRNTV

SEQ ID NO: 116474 - protein, 7 aa, synthetic construct
FGGSKNF

SEQ ID NO: 116475 - protein, 7 aa, synthetic construct
FGGSQKQ

SEQ ID NO: 116476 - protein, 7 aa, synthetic construct
FGHKNIN

SEQ ID NO: 116477 - protein, 7 aa, synthetic construct
FGHMKTP

SEQ ID NO: 116478 - protein, 7 aa, synthetic construct
FGHVAVT

SEQ ID NO: 116479 - protein, 7 aa, synthetic construct
FGIHGKN

SEQ ID NO: 116480 - protein, 7 aa, synthetic construct
FGIKNRE

SEQ ID NO: 116481 - protein, 7 aa, synthetic construct
FGISTQK

SEQ ID NO: 116482 - protein, 7 aa, synthetic construct
FGKAGMY

SEQ ID NO: 116483 - protein, 7 aa, synthetic construct
FGKASNF

SEQ ID NO: 116484 - protein, 7 aa, synthetic construct
FGKDFLK

SEQ ID NO: 116485 - protein, 7 aa, synthetic construct
FGKFNPG

SEQ ID NO: 116486 - protein, 7 aa, synthetic construct
FGKFNTS

SEQ ID NO: 116487 - protein, 7 aa, synthetic construct
FGKGQFT

SEQ ID NO: 116488 - protein, 7 aa, synthetic construct
FGKHFGG

SEQ ID NO: 116489 - protein, 7 aa, synthetic construct
FGKHKES

SEQ ID NO: 116490 - protein, 7 aa, synthetic construct
FGKHLQL

SEQ ID NO: 116491 - protein, 7 aa, synthetic construct
FGKHVNM

SEQ ID NO: 116492 - protein, 7 aa, synthetic construct
FGKISHS

SEQ ID NO: 116493 - protein, 7 aa, synthetic construct
FGKKYAD

SEQ ID NO: 116494 - protein, 7 aa, synthetic construct
FGKPESR

SEQ ID NO: 116495 - protein, 7 aa, synthetic construct
FGKRADM

SEQ ID NO: 116496 - protein, 7 aa, synthetic construct
FGKRMQD

SEQ ID NO: 116497 - protein, 7 aa, synthetic construct
FGKRQDG

SEQ ID NO: 116498 - protein, 7 aa, synthetic construct
FGKSTNV

SEQ ID NO: 116499 - protein, 7 aa, synthetic construct
FGKTSNF

SEQ ID NO: 116500 - protein, 7 aa, synthetic construct
FGKTYAH

SEQ ID NO: 116501 - protein, 7 aa, synthetic construct
FGKTYTG

SEQ ID NO: 116502 - protein, 7 aa, synthetic construct
FGKTYVS

SEQ ID NO: 116503 - protein, 7 aa, synthetic construct
FGKVAAM

SEQ ID NO: 116504 - protein, 7 aa, synthetic construct
FGKVFNS

SEQ ID NO: 116505 - protein, 7 aa, synthetic construct
FGKVVGL

SEQ ID NO: 116506 - protein, 7 aa, synthetic construct
FGKYLTA

SEQ ID NO: 116507 - protein, 7 aa, synthetic construct
FGKYTPA

SEQ ID NO: 116508 - protein, 7 aa, synthetic construct
FGKYTTV

SEQ ID NO: 116509 - protein, 7 aa, synthetic construct
FGLSAKH

SEQ ID NO: 116510 - protein, 7 aa, synthetic construct
FGLSSAK

SEQ ID NO: 116511 - protein, 7 aa, synthetic construct
FGMGQPK

SEQ ID NO: 116512 - protein, 7 aa, synthetic construct
FGMGSIK

SEQ ID NO: 116513 - protein, 7 aa, synthetic construct
FGNASLR

SEQ ID NO: 116514 - protein, 7 aa, synthetic construct
FGNKQAF

SEQ ID NO: 116515 - protein, 7 aa, synthetic construct
FGNNLMK

SEQ ID NO: 116516 - protein, 7 aa, synthetic construct
FGNRIIN

SEQ ID NO: 116517 - protein, 7 aa, synthetic construct
FGNSNGK

SEQ ID NO: 116518 - protein, 7 aa, synthetic construct
FGNSTSK

SEQ ID NO: 116519 - protein, 7 aa, synthetic construct
FGNTMMK

SEQ ID NO: 116520 - protein, 7 aa, synthetic construct
FGNVAFK

SEQ ID NO: 116521 - protein, 7 aa, synthetic construct
FGPATRI

SEQ ID NO: 116522 - protein, 7 aa, synthetic construct
FGPETKR

SEQ ID NO: 116523 - protein, 7 aa, synthetic construct
FGPKSNF

SEQ ID NO: 116524 - protein, 7 aa, synthetic construct
FGPKVAM

SEQ ID NO: 116525 - protein, 7 aa, synthetic construct
FGPLNHE

SEQ ID NO: 116526 - protein, 7 aa, synthetic construct
FGPNDRK

SEQ ID NO: 116527 - protein, 7 aa, synthetic construct
FGPQGSR

SEQ ID NO: 116528 - protein, 7 aa, synthetic construct
FGPQKYG

SEQ ID NO: 116529 - protein, 7 aa, synthetic construct
FGPQRIP

SEQ ID NO: 116530 - protein, 7 aa, synthetic construct
FGQATRM

SEQ ID NO: 116531 - protein, 7 aa, synthetic construct
FGQGHKA

SEQ ID NO: 116532 - protein, 7 aa, synthetic construct
FGQGISR

SEQ ID NO: 116533 - protein, 7 aa, synthetic construct
FGQLSSK

SEQ ID NO: 116534 - protein, 7 aa, synthetic construct
FGQNLTR

SEQ ID NO: 116535 - protein, 7 aa, synthetic construct
FGQPRGH

SEQ ID NO: 116536 - protein, 7 aa, synthetic construct
FGQQMSK

SEQ ID NO: 116537 - protein, 7 aa, synthetic construct
FGQQSSK

SEQ ID NO: 116538 - protein, 7 aa, synthetic construct
FGQRIVG

SEQ ID NO: 116539 - protein, 7 aa, synthetic construct
FGQSRNS

SEQ ID NO: 116540 - protein, 7 aa, synthetic construct
FGQSTSR

SEQ ID NO: 116541 - protein, 7 aa, synthetic construct
FGQTRNL

SEQ ID NO: 116542 - protein, 7 aa, synthetic construct
FGRAISG

SEQ ID NO: 116543 - protein, 7 aa, synthetic construct
FGRAPPP

SEQ ID NO: 116544 - protein, 7 aa, synthetic construct
FGRKDAP

SEQ ID NO: 116545 - protein, 7 aa, synthetic construct
FGRLTKD

SEQ ID NO: 116546 - protein, 7 aa, synthetic construct
FGRPNAP

SEQ ID NO: 116547 - protein, 7 aa, synthetic construct
FGRPTSM

SEQ ID NO: 116548 - protein, 7 aa, synthetic construct
FGRQSSG

SEQ ID NO: 116549 - protein, 7 aa, synthetic construct
FGRREQE

SEQ ID NO: 116550 - protein, 7 aa, synthetic construct
FGRTPGH

SEQ ID NO: 116551 - protein, 7 aa, synthetic construct
FGRVVNP

SEQ ID NO: 116552 - protein, 7 aa, synthetic construct
FGSAQGR

SEQ ID NO: 116553 - protein, 7 aa, synthetic construct
FGSGKRD

SEQ ID NO: 116554 - protein, 7 aa, synthetic construct
FGSGPVR

SEQ ID NO: 116555 - protein, 7 aa, synthetic construct
FGSHKPF

SEQ ID NO: 116556 - protein, 7 aa, synthetic construct
FGSLQNR

SEQ ID NO: 116557 - protein, 7 aa, synthetic construct
FGSMVGR

SEQ ID NO: 116558 - protein, 7 aa, synthetic construct
FGSNSNK

SEQ ID NO: 116559 - protein, 7 aa, synthetic construct
FGSQAKI

SEQ ID NO: 116560 - protein, 7 aa, synthetic construct
FGSRVTG

SEQ ID NO: 116561 - protein, 7 aa, synthetic construct
FGSSMSR

SEQ ID NO: 116562 - protein, 7 aa, synthetic construct
FGSSSAR

SEQ ID NO: 116563 - protein, 7 aa, synthetic construct
FGSYTKA

SEQ ID NO: 116564 - protein, 7 aa, synthetic construct
FGTATRI

SEQ ID NO: 116565 - protein, 7 aa, synthetic construct
FGTHMNK

SEQ ID NO: 116566 - protein, 7 aa, synthetic construct
FGTKERS

SEQ ID NO: 116567 - protein, 7 aa, synthetic construct
FGTKVMH

SEQ ID NO: 116568 - protein, 7 aa, synthetic construct
FGTQQAR

SEQ ID NO: 116569 - protein, 7 aa, synthetic construct
FGTTQNR

SEQ ID NO: 116570 - protein, 7 aa, synthetic construct
FGTWNNA

SEQ ID NO: 116571 - protein, 7 aa, synthetic construct
FGTYAKA

SEQ ID NO: 116572 - protein, 7 aa, synthetic construct
FGVGNTR

SEQ ID NO: 116573 - protein, 7 aa, synthetic construct
FGVKGPI

SEQ ID NO: 116574 - protein, 7 aa, synthetic construct
FGVKPHS

SEQ ID NO: 116575 - protein, 7 aa, synthetic construct
FGVQGGR

SEQ ID NO: 116576 - protein, 7 aa, synthetic construct
FGVSSQR

SEQ ID NO: 116577 - protein, 7 aa, synthetic construct
FHAKAFG

SEQ ID NO: 116578 - protein, 7 aa, synthetic construct
FHAKPIN

SEQ ID NO: 116579 - protein, 7 aa, synthetic construct
FHAPQKP

SEQ ID NO: 116580 - protein, 7 aa, synthetic construct
FHAQGGK

SEQ ID NO: 116581 - protein, 7 aa, synthetic construct
FHAQIKQ

SEQ ID NO: 116582 - protein, 7 aa, synthetic construct
FHATGTK

SEQ ID NO: 116583 - protein, 7 aa, synthetic construct
FHAVSKM

SEQ ID NO: 116584 - protein, 7 aa, synthetic construct
FHDKKYQ

SEQ ID NO: 116585 - protein, 7 aa, synthetic construct
FHDKPSK

SEQ ID NO: 116586 - protein, 7 aa, synthetic construct
FHGATKA

SEQ ID NO: 116587 - protein, 7 aa, synthetic construct
FHGGRAQ

SEQ ID NO: 116588 - protein, 7 aa, synthetic construct
FHGGVRA

SEQ ID NO: 116589 - protein, 7 aa, synthetic construct
FHGKPIM

SEQ ID NO: 116590 - protein, 7 aa, synthetic construct
FHGLSKN

SEQ ID NO: 116591 - protein, 7 aa, synthetic construct
FHGSKWD

SEQ ID NO: 116592 - protein, 7 aa, synthetic construct
FHHGKMG

SEQ ID NO: 116593 - protein, 7 aa, synthetic construct
FHKGKDM

SEQ ID NO: 116594 - protein, 7 aa, synthetic construct
FHKGPNL

SEQ ID NO: 116595 - protein, 7 aa, synthetic construct
FHKINNT

SEQ ID NO: 116596 - protein, 7 aa, synthetic construct
FHKINVN

SEQ ID NO: 116597 - protein, 7 aa, synthetic construct
FHKISAN

SEQ ID NO: 116598 - protein, 7 aa, synthetic construct
FHKIVNA

SEQ ID NO: 116599 - protein, 7 aa, synthetic construct
FHKKFAE

SEQ ID NO: 116600 - protein, 7 aa, synthetic construct
FHKLSAG

SEQ ID NO: 116601 - protein, 7 aa, synthetic construct
FHKMPSN

SEQ ID NO: 116602 - protein, 7 aa, synthetic construct
FHKMSTV

SEQ ID NO: 116603 - protein, 7 aa, synthetic construct
FHKMTIS

SEQ ID NO: 116604 - protein, 7 aa, synthetic construct
FHKMTQI

SEQ ID NO: 116605 - protein, 7 aa, synthetic construct
FHKNQMM

SEQ ID NO: 116606 - protein, 7 aa, synthetic construct
FHKPAPP

SEQ ID NO: 116607 - protein, 7 aa, synthetic construct
FHKQEAK

SEQ ID NO: 116608 - protein, 7 aa, synthetic construct
FHKQKDT

SEQ ID NO: 116609 - protein, 7 aa, synthetic construct
FHKQPMQ

SEQ ID NO: 116610 - protein, 7 aa, synthetic construct
FHKVGMS

SEQ ID NO: 116611 - protein, 7 aa, synthetic construct
FHKVHAN

SEQ ID NO: 116612 - protein, 7 aa, synthetic construct
FHKVNPA

SEQ ID NO: 116613 - protein, 7 aa, synthetic construct
FHKVPLS

SEQ ID NO: 116614 - protein, 7 aa, synthetic construct
FHLGAGK

SEQ ID NO: 116615 - protein, 7 aa, synthetic construct
FHNAFKA

SEQ ID NO: 116616 - protein, 7 aa, synthetic construct
FHNAGKI

SEQ ID NO: 116617 - protein, 7 aa, synthetic construct
FHNHKSM

SEQ ID NO: 116618 - protein, 7 aa, synthetic construct
FHNKSSQ

SEQ ID NO: 116619 - protein, 7 aa, synthetic construct
FHNMSQK

SEQ ID NO: 116620 - protein, 7 aa, synthetic construct
FHNRNMT

SEQ ID NO: 116621 - protein, 7 aa, synthetic construct
FHNSKTQ

SEQ ID NO: 116622 - protein, 7 aa, synthetic construct
FHNTRLS

SEQ ID NO: 116623 - protein, 7 aa, synthetic construct
FHNVTGK

SEQ ID NO: 116624 - protein, 7 aa, synthetic construct
FHPASRG

SEQ ID NO: 116625 - protein, 7 aa, synthetic construct
FHPKVHQ

SEQ ID NO: 116626 - protein, 7 aa, synthetic construct
FHPKVPS

SEQ ID NO: 116627 - protein, 7 aa, synthetic construct
FHPNKLS

SEQ ID NO: 116628 - protein, 7 aa, synthetic construct
FHPTKGI

SEQ ID NO: 116629 - protein, 7 aa, synthetic construct
FHQAANK

SEQ ID NO: 116630 - protein, 7 aa, synthetic construct
FHQGGLR

SEQ ID NO: 116631 - protein, 7 aa, synthetic construct
FHQGWEE

SEQ ID NO: 116632 - protein, 7 aa, synthetic construct
FHQKTSQ

SEQ ID NO: 116633 - protein, 7 aa, synthetic construct
FHQKTVM

SEQ ID NO: 116634 - protein, 7 aa, synthetic construct
FHQLALN

SEQ ID NO: 116635 - protein, 7 aa, synthetic construct
FHQNKPV

SEQ ID NO: 116636 - protein, 7 aa, synthetic construct
FHRMSTS

SEQ ID NO: 116637 - protein, 7 aa, synthetic construct
FHRNGAP

SEQ ID NO: 116638 - protein, 7 aa, synthetic construct
FHRNQTQ

SEQ ID NO: 116639 - protein, 7 aa, synthetic construct
FHRNSIG

SEQ ID NO: 116640 - protein, 7 aa, synthetic construct
FHRNSNP

SEQ ID NO: 116641 - protein, 7 aa, synthetic construct
FHRTDFA

SEQ ID NO: 116642 - protein, 7 aa, synthetic construct
FHRTMQS

SEQ ID NO: 116643 - protein, 7 aa, synthetic construct
FHSAGQK

SEQ ID NO: 116644 - protein, 7 aa, synthetic construct
FHSKPSN

SEQ ID NO: 116645 - protein, 7 aa, synthetic construct
FHSNAKG

SEQ ID NO: 116646 - protein, 7 aa, synthetic construct
FHSPEAL

SEQ ID NO: 116647 - protein, 7 aa, synthetic construct
FHSSISK

SEQ ID NO: 116648 - protein, 7 aa, synthetic construct
FHSTTIK

SEQ ID NO: 116649 - protein, 7 aa, synthetic construct
FHTAIKS

SEQ ID NO: 116650 - protein, 7 aa, synthetic construct
FHTKAIV

SEQ ID NO: 116651 - protein, 7 aa, synthetic construct
FHTNITK

SEQ ID NO: 116652 - protein, 7 aa, synthetic construct
FHTTAGR

SEQ ID NO: 116653 - protein, 7 aa, synthetic construct
FHTVSPK

SEQ ID NO: 116654 - protein, 7 aa, synthetic construct
FHVGVQK

SEQ ID NO: 116655 - protein, 7 aa, synthetic construct
FHVKTNI

SEQ ID NO: 116656 - protein, 7 aa, synthetic construct
FIANNSR

SEQ ID NO: 116657 - protein, 7 aa, synthetic construct
FIDKRQQ

SEQ ID NO: 116658 - protein, 7 aa, synthetic construct
FIESKPR

SEQ ID NO: 116659 - protein, 7 aa, synthetic construct
FIGGSKM

SEQ ID NO: 116660 - protein, 7 aa, synthetic construct
FIGGVKI

SEQ ID NO: 116661 - protein, 7 aa, synthetic construct
FIGHVGK

SEQ ID NO: 116662 - protein, 7 aa, synthetic construct
FIGKDVR

SEQ ID NO: 116663 - protein, 7 aa, synthetic construct
FIGKNNM

SEQ ID NO: 116664 - protein, 7 aa, synthetic construct
FIGKQTL

SEQ ID NO: 116665 - protein, 7 aa, synthetic construct
FIGNDKK

SEQ ID NO: 116666 - protein, 7 aa, synthetic construct
FIGPAKA

SEQ ID NO: 116667 - protein, 7 aa, synthetic construct
FIGQIKN

SEQ ID NO: 116668 - protein, 7 aa, synthetic construct
FIGQSQR

SEQ ID NO: 116669 - protein, 7 aa, synthetic construct
FIGSLKS

SEQ ID NO: 116670 - protein, 7 aa, synthetic construct
FIGSRAG

SEQ ID NO: 116671 - protein, 7 aa, synthetic construct
FIGSSRN

SEQ ID NO: 116672 - protein, 7 aa, synthetic construct
FIGTKAM

SEQ ID NO: 116673 - protein, 7 aa, synthetic construct
FIGTNNR

SEQ ID NO: 116674 - protein, 7 aa, synthetic construct
FIGTVRG

SEQ ID NO: 116675 - protein, 7 aa, synthetic construct
FIHKAGA

SEQ ID NO: 116676 - protein, 7 aa, synthetic construct
FIHKKDS

SEQ ID NO: 116677 - protein, 7 aa, synthetic construct
FIHKSNP

SEQ ID NO: 116678 - protein, 7 aa, synthetic construct
FIHKSVA

SEQ ID NO: 116679 - protein, 7 aa, synthetic construct
FIHTQKQ

SEQ ID NO: 116680 - protein, 7 aa, synthetic construct
FIKDVAR

SEQ ID NO: 116681 - protein, 7 aa, synthetic construct
FIKGGDR

SEQ ID NO: 116682 - protein, 7 aa, synthetic construct
FIKGPIS

SEQ ID NO: 116683 - protein, 7 aa, synthetic construct
FIKHLQN

SEQ ID NO: 116684 - protein, 7 aa, synthetic construct
FIKHSNT

SEQ ID NO: 116685 - protein, 7 aa, synthetic construct
FIKKHDV

SEQ ID NO: 116686 - protein, 7 aa, synthetic construct
FIKKQEH

SEQ ID NO: 116687 - protein, 7 aa, synthetic construct
FIKMDRS

SEQ ID NO: 116688 - protein, 7 aa, synthetic construct
FIKPAIA

SEQ ID NO: 116689 - protein, 7 aa, synthetic construct
FIKPKDI

SEQ ID NO: 116690 - protein, 7 aa, synthetic construct
FIKPVRD

SEQ ID NO: 116691 - protein, 7 aa, synthetic construct
FIKQAQH

SEQ ID NO: 116692 - protein, 7 aa, synthetic construct
FIKQEKH

SEQ ID NO: 116693 - protein, 7 aa, synthetic construct
FIKQPTS

SEQ ID NO: 116694 - protein, 7 aa, synthetic construct
FIKREAS

SEQ ID NO: 116695 - protein, 7 aa, synthetic construct
FIMKSRE

SEQ ID NO: 116696 - protein, 7 aa, synthetic construct
FINSGSR

SEQ ID NO: 116697 - protein, 7 aa, synthetic construct
FINSIKA

SEQ ID NO: 116698 - protein, 7 aa, synthetic construct
FINSQKM

SEQ ID NO: 116699 - protein, 7 aa, synthetic construct
FINVSKG

SEQ ID NO: 116700 - protein, 7 aa, synthetic construct
FIPGTAR

SEQ ID NO: 116701 - protein, 7 aa, synthetic construct
FIPKEKY

SEQ ID NO: 116702 - protein, 7 aa, synthetic construct
FIPKPNA

SEQ ID NO: 116703 - protein, 7 aa, synthetic construct
FIPRQQN

SEQ ID NO: 116704 - protein, 7 aa, synthetic construct
FIPSSEP

SEQ ID NO: 116705 - protein, 7 aa, synthetic construct
FIPVKGN

SEQ ID NO: 116706 - protein, 7 aa, synthetic construct
FIQKEMR

SEQ ID NO: 116707 - protein, 7 aa, synthetic construct
FIQKNAI

SEQ ID NO: 116708 - protein, 7 aa, synthetic construct
FIQQKRD

SEQ ID NO: 116709 - protein, 7 aa, synthetic construct
FIQRSNP

SEQ ID NO: 116710 - protein, 7 aa, synthetic construct
FIQVSKG

SEQ ID NO: 116711 - protein, 7 aa, synthetic construct
FIRGKDM

SEQ ID NO: 116712 - protein, 7 aa, synthetic construct
FIRKGSE

SEQ ID NO: 116713 - protein, 7 aa, synthetic construct
FIRKQDG

SEQ ID NO: 116714 - protein, 7 aa, synthetic construct
FIRTQKD

SEQ ID NO: 116715 - protein, 7 aa, synthetic construct
FISGVKM

SEQ ID NO: 116716 - protein, 7 aa, synthetic construct
FISKAGM

SEQ ID NO: 116717 - protein, 7 aa, synthetic construct
FISKHSA

SEQ ID NO: 116718 - protein, 7 aa, synthetic construct
FISQTKS

SEQ ID NO: 116719 - protein, 7 aa, synthetic construct
FISQTRG

SEQ ID NO: 116720 - protein, 7 aa, synthetic construct
FISSIKA

SEQ ID NO: 116721 - protein, 7 aa, synthetic construct
FISSSKN

SEQ ID NO: 116722 - protein, 7 aa, synthetic construct
FITHVKA

SEQ ID NO: 116723 - protein, 7 aa, synthetic construct
FITQTRA

SEQ ID NO: 116724 - protein, 7 aa, synthetic construct
FITSHGK

SEQ ID NO: 116725 - protein, 7 aa, synthetic construct
FIVKNKD

SEQ ID NO: 116726 - protein, 7 aa, synthetic construct
FKAANHV

SEQ ID NO: 116727 - protein, 7 aa, synthetic construct
FKAERHM

SEQ ID NO: 116728 - protein, 7 aa, synthetic construct
FKAGPAH

SEQ ID NO: 116729 - protein, 7 aa, synthetic construct
FKAGSER

SEQ ID NO: 116730 - protein, 7 aa, synthetic construct
FKAIGAV

SEQ ID NO: 116731 - protein, 7 aa, synthetic construct
FKAIPHS

SEQ ID NO: 116732 - protein, 7 aa, synthetic construct
FKAITRD

SEQ ID NO: 116733 - protein, 7 aa, synthetic construct
FKALRVD

SEQ ID NO: 116734 - protein, 7 aa, synthetic construct
FKALSAH

SEQ ID NO: 116735 - protein, 7 aa, synthetic construct
FKAMPMS

SEQ ID NO: 116736 - protein, 7 aa, synthetic construct
FKANDYR

SEQ ID NO: 116737 - protein, 7 aa, synthetic construct
FKANQDR

SEQ ID NO: 116738 - protein, 7 aa, synthetic construct
FKANSFA

SEQ ID NO: 116739 - protein, 7 aa, synthetic construct
FKAPEPR

SEQ ID NO: 116740 - protein, 7 aa, synthetic construct
FKAPLTP

SEQ ID NO: 116741 - protein, 7 aa, synthetic construct
FKAPSAV

SEQ ID NO: 116742 - protein, 7 aa, synthetic construct
FKAPTSM

SEQ ID NO: 116743 - protein, 7 aa, synthetic construct
FKAQERS

SEQ ID NO: 116744 - protein, 7 aa, synthetic construct
FKASAYQ

SEQ ID NO: 116745 - protein, 7 aa, synthetic construct
FKATEAR

SEQ ID NO: 116746 - protein, 7 aa, synthetic construct
FKATEFK

SEQ ID NO: 116747 - protein, 7 aa, synthetic construct
FKATEIR

SEQ ID NO: 116748 - protein, 7 aa, synthetic construct
FKAYPSG

SEQ ID NO: 116749 - protein, 7 aa, synthetic construct
FKDAMNR

SEQ ID NO: 116750 - protein, 7 aa, synthetic construct
FKDGSLR

SEQ ID NO: 116751 - protein, 7 aa, synthetic construct
FKDIGQK

SEQ ID NO: 116752 - protein, 7 aa, synthetic construct
FKDILGK

SEQ ID NO: 116753 - protein, 7 aa, synthetic construct
FKDISMK

SEQ ID NO: 116754 - protein, 7 aa, synthetic construct
FKDISRS

SEQ ID NO: 116755 - protein, 7 aa, synthetic construct
FKDITKH

SEQ ID NO: 116756 - protein, 7 aa, synthetic construct
FKDMAQK

SEQ ID NO: 116757 - protein, 7 aa, synthetic construct
FKDPMAK

SEQ ID NO: 116758 - protein, 7 aa, synthetic construct
FKDPRSL

SEQ ID NO: 116759 - protein, 7 aa, synthetic construct
FKDQHKA

SEQ ID NO: 116760 - protein, 7 aa, synthetic construct
FKDRGEK

SEQ ID NO: 116761 - protein, 7 aa, synthetic construct
FKDRGQY

SEQ ID NO: 116762 - protein, 7 aa, synthetic construct
FKDRIGL

SEQ ID NO: 116763 - protein, 7 aa, synthetic construct
FKDRIGY

SEQ ID NO: 116764 - protein, 7 aa, synthetic construct
FKDRQPF

SEQ ID NO: 116765 - protein, 7 aa, synthetic construct
FKDRTER

SEQ ID NO: 116766 - protein, 7 aa, synthetic construct
FKDSYKT

SEQ ID NO: 116767 - protein, 7 aa, synthetic construct
FKDTKHQ

SEQ ID NO: 116768 - protein, 7 aa, synthetic construct
FKDVTNR

SEQ ID NO: 116769 - protein, 7 aa, synthetic construct
FKEARVL

SEQ ID NO: 116770 - protein, 7 aa, synthetic construct
FKEHAGR

SEQ ID NO: 116771 - protein, 7 aa, synthetic construct
FKEHKTL

SEQ ID NO: 116772 - protein, 7 aa, synthetic construct
FKEMHQR

SEQ ID NO: 116773 - protein, 7 aa, synthetic construct
FKENERR

SEQ ID NO: 116774 - protein, 7 aa, synthetic construct
FKEPIGR

SEQ ID NO: 116775 - protein, 7 aa, synthetic construct
FKEPSPR

SEQ ID NO: 116776 - protein, 7 aa, synthetic construct
FKERDQR

SEQ ID NO: 116777 - protein, 7 aa, synthetic construct
FKERMQY

SEQ ID NO: 116778 - protein, 7 aa, synthetic construct
FKERPNN

SEQ ID NO: 116779 - protein, 7 aa, synthetic construct
FKERYHQ

SEQ ID NO: 116780 - protein, 7 aa, synthetic construct
FKESTGK

SEQ ID NO: 116781 - protein, 7 aa, synthetic construct
FKETMRF

SEQ ID NO: 116782 - protein, 7 aa, synthetic construct
FKEVTMR

SEQ ID NO: 116783 - protein, 7 aa, synthetic construct
FKFKEIQ

SEQ ID NO: 116784 - protein, 7 aa, synthetic construct
FKFNMQG

SEQ ID NO: 116785 - protein, 7 aa, synthetic construct
FKFNTHA

SEQ ID NO: 116786 - protein, 7 aa, synthetic construct
FKFPNEK

SEQ ID NO: 116787 - protein, 7 aa, synthetic construct
FKFQENK

SEQ ID NO: 116788 - protein, 7 aa, synthetic construct
FKFQPQA

SEQ ID NO: 116789 - protein, 7 aa, synthetic construct
FKFQSTP

SEQ ID NO: 116790 - protein, 7 aa, synthetic construct
FKGAHGF

SEQ ID NO: 116791 - protein, 7 aa, synthetic construct
FKGAVAF

SEQ ID NO: 116792 - protein, 7 aa, synthetic construct
FKGDTSR

SEQ ID NO: 116793 - protein, 7 aa, synthetic construct
FKGGHST

SEQ ID NO: 116794 - protein, 7 aa, synthetic construct
FKGGPPH

SEQ ID NO: 116795 - protein, 7 aa, synthetic construct
FKGGSAY

SEQ ID NO: 116796 - protein, 7 aa, synthetic construct
FKGINYA

SEQ ID NO: 116797 - protein, 7 aa, synthetic construct
FKGIPAM

SEQ ID NO: 116798 - protein, 7 aa, synthetic construct
FKGIQTI

SEQ ID NO: 116799 - protein, 7 aa, synthetic construct
FKGKEFF

SEQ ID NO: 116800 - protein, 7 aa, synthetic construct
FKGKEWG

SEQ ID NO: 116801 - protein, 7 aa, synthetic construct
FKGLVHN

SEQ ID NO: 116802 - protein, 7 aa, synthetic construct
FKGMEYK

SEQ ID NO: 116803 - protein, 7 aa, synthetic construct
FKGMHDR

SEQ ID NO: 116804 - protein, 7 aa, synthetic construct
FKGNEKT

SEQ ID NO: 116805 - protein, 7 aa, synthetic construct
FKGNNAY

SEQ ID NO: 116806 - protein, 7 aa, synthetic construct
FKGNNYN

SEQ ID NO: 116807 - protein, 7 aa, synthetic construct
FKGNSFN

SEQ ID NO: 116808 - protein, 7 aa, synthetic construct
FKGPADR

SEQ ID NO: 116809 - protein, 7 aa, synthetic construct
FKGPATI

SEQ ID NO: 116810 - protein, 7 aa, synthetic construct
FKGPMVA

SEQ ID NO: 116811 - protein, 7 aa, synthetic construct
FKGPSTL

SEQ ID NO: 116812 - protein, 7 aa, synthetic construct
FKGQAIL

SEQ ID NO: 116813 - protein, 7 aa, synthetic construct
FKGQESR

SEQ ID NO: 116814 - protein, 7 aa, synthetic construct
FKGQGYN

SEQ ID NO: 116815 - protein, 7 aa, synthetic construct
FKGQHYA

SEQ ID NO: 116816 - protein, 7 aa, synthetic construct
FKGQQNT

SEQ ID NO: 116817 - protein, 7 aa, synthetic construct
FKGQTFM

SEQ ID NO: 116818 - protein, 7 aa, synthetic construct
FKGQYNP

SEQ ID NO: 116819 - protein, 7 aa, synthetic construct
FKGRQND

SEQ ID NO: 116820 - protein, 7 aa, synthetic construct
FKGSAPI

SEQ ID NO: 116821 - protein, 7 aa, synthetic construct
FKGSPIH

SEQ ID NO: 116822 - protein, 7 aa, synthetic construct
FKGSPMQ

SEQ ID NO: 116823 - protein, 7 aa, synthetic construct
FKGSSLH

SEQ ID NO: 116824 - protein, 7 aa, synthetic construct
FKGSTFV

SEQ ID NO: 116825 - protein, 7 aa, synthetic construct
FKGTEMK

SEQ ID NO: 116826 - protein, 7 aa, synthetic construct
FKGTLNL

SEQ ID NO: 116827 - protein, 7 aa, synthetic construct
FKGTPNY

SEQ ID NO: 116828 - protein, 7 aa, synthetic construct
FKGVRDI

SEQ ID NO: 116829 - protein, 7 aa, synthetic construct
FKGYNSA

SEQ ID NO: 116830 - protein, 7 aa, synthetic construct
FKHAALN

SEQ ID NO: 116831 - protein, 7 aa, synthetic construct
FKHAPVI

SEQ ID NO: 116832 - protein, 7 aa, synthetic construct
FKHAVNM

SEQ ID NO: 116833 - protein, 7 aa, synthetic construct
FKHEKPY

SEQ ID NO: 116834 - protein, 7 aa, synthetic construct
FKHGASV

SEQ ID NO: 116835 - protein, 7 aa, synthetic construct
FKHGGAG

SEQ ID NO: 116836 - protein, 7 aa, synthetic construct
FKHGPIT

SEQ ID NO: 116837 - protein, 7 aa, synthetic construct
FKHKISD

SEQ ID NO: 116838 - protein, 7 aa, synthetic construct
FKHLSQQ

SEQ ID NO: 116839 - protein, 7 aa, synthetic construct
FKHMATI

SEQ ID NO: 116840 - protein, 7 aa, synthetic construct
FKHMQDK

SEQ ID NO: 116841 - protein, 7 aa, synthetic construct
FKHNDTR

SEQ ID NO: 116842 - protein, 7 aa, synthetic construct
FKHNGSV

SEQ ID NO: 116843 - protein, 7 aa, synthetic construct
FKHNMAT

SEQ ID NO: 116844 - protein, 7 aa, synthetic construct
FKHNVAA

SEQ ID NO: 116845 - protein, 7 aa, synthetic construct
FKHPETR

SEQ ID NO: 116846 - protein, 7 aa, synthetic construct
FKHPKEF

SEQ ID NO: 116847 - protein, 7 aa, synthetic construct
FKHPPTN

SEQ ID NO: 116848 - protein, 7 aa, synthetic construct
FKHPQGQ

SEQ ID NO: 116849 - protein, 7 aa, synthetic construct
FKHPRDG

SEQ ID NO: 116850 - protein, 7 aa, synthetic construct
FKHPTNH

SEQ ID NO: 116851 - protein, 7 aa, synthetic construct
FKHPVQS

SEQ ID NO: 116852 - protein, 7 aa, synthetic construct
FKHQPMG

SEQ ID NO: 116853 - protein, 7 aa, synthetic construct
FKHQSFA

SEQ ID NO: 116854 - protein, 7 aa, synthetic construct
FKHSASA

SEQ ID NO: 116855 - protein, 7 aa, synthetic construct
FKHSKEQ

SEQ ID NO: 116856 - protein, 7 aa, synthetic construct
FKHSLNS

SEQ ID NO: 116857 - protein, 7 aa, synthetic construct
FKHSPIT

SEQ ID NO: 116858 - protein, 7 aa, synthetic construct
FKHTERM

SEQ ID NO: 116859 - protein, 7 aa, synthetic construct
FKHTIMS

SEQ ID NO: 116860 - protein, 7 aa, synthetic construct
FKHTMMS

SEQ ID NO: 116861 - protein, 7 aa, synthetic construct
FKHTNQL

SEQ ID NO: 116862 - protein, 7 aa, synthetic construct
FKHVGGS

SEQ ID NO: 116863 - protein, 7 aa, synthetic construct
FKHVISS

SEQ ID NO: 116864 - protein, 7 aa, synthetic construct
FKHVNPG

SEQ ID NO: 116865 - protein, 7 aa, synthetic construct
FKHVPTH

SEQ ID NO: 116866 - protein, 7 aa, synthetic construct
FKHVQST

SEQ ID NO: 116867 - protein, 7 aa, synthetic construct
FKHVSVQ

SEQ ID NO: 116868 - protein, 7 aa, synthetic construct
FKIADTR

SEQ ID NO: 116869 - protein, 7 aa, synthetic construct
FKIANGM

SEQ ID NO: 116870 - protein, 7 aa, synthetic construct
FKIGPNN

SEQ ID NO: 116871 - protein, 7 aa, synthetic construct
FKIHNDK

SEQ ID NO: 116872 - protein, 7 aa, synthetic construct
FKIHPGS

SEQ ID NO: 116873 - protein, 7 aa, synthetic construct
FKINALS

SEQ ID NO: 116874 - protein, 7 aa, synthetic construct
FKINTDR

SEQ ID NO: 116875 - protein, 7 aa, synthetic construct
FKIPQSQ

SEQ ID NO: 116876 - protein, 7 aa, synthetic construct
FKIQPVN

SEQ ID NO: 116877 - protein, 7 aa, synthetic construct
FKIQYKE

SEQ ID NO: 116878 - protein, 7 aa, synthetic construct
FKISVHS

SEQ ID NO: 116879 - protein, 7 aa, synthetic construct
FKKAVDL

SEQ ID NO: 116880 - protein, 7 aa, synthetic construct
FKKDYIQ

SEQ ID NO: 116881 - protein, 7 aa, synthetic construct
FKKFAND

SEQ ID NO: 116882 - protein, 7 aa, synthetic construct
FKKFMDG

SEQ ID NO: 116883 - protein, 7 aa, synthetic construct
FKKHMVD

SEQ ID NO: 116884 - protein, 7 aa, synthetic construct
FKKMDIL

SEQ ID NO: 116885 - protein, 7 aa, synthetic construct
FKKSEWG

SEQ ID NO: 116886 - protein, 7 aa, synthetic construct
FKKYETV

SEQ ID NO: 116887 - protein, 7 aa, synthetic construct
FKLAGAH

SEQ ID NO: 116888 - protein, 7 aa, synthetic construct
FKLAMPN

SEQ ID NO: 116889 - protein, 7 aa, synthetic construct
FKLANPT

SEQ ID NO: 116890 - protein, 7 aa, synthetic construct
FKLASHN

SEQ ID NO: 116891 - protein, 7 aa, synthetic construct
FKLHMQG

SEQ ID NO: 116892 - protein, 7 aa, synthetic construct
FKLMSNA

SEQ ID NO: 116893 - protein, 7 aa, synthetic construct
FKLNERA

SEQ ID NO: 116894 - protein, 7 aa, synthetic construct
FKLPRGD

SEQ ID NO: 116895 - protein, 7 aa, synthetic construct
FKLQGDR

SEQ ID NO: 116896 - protein, 7 aa, synthetic construct
FKLQHGN

SEQ ID NO: 116897 - protein, 7 aa, synthetic construct
FKLQLSN

SEQ ID NO: 116898 - protein, 7 aa, synthetic construct
FKLQNRD

SEQ ID NO: 116899 - protein, 7 aa, synthetic construct
FKLRDQS

SEQ ID NO: 116900 - protein, 7 aa, synthetic construct
FKLREHN

SEQ ID NO: 116901 - protein, 7 aa, synthetic construct
FKLTPTN

SEQ ID NO: 116902 - protein, 7 aa, synthetic construct
FKMGPDR

SEQ ID NO: 116903 - protein, 7 aa, synthetic construct
FKMHAIN

SEQ ID NO: 116904 - protein, 7 aa, synthetic construct
FKMHINA

SEQ ID NO: 116905 - protein, 7 aa, synthetic construct
FKMHNVN

SEQ ID NO: 116906 - protein, 7 aa, synthetic construct
FKMHTNA

SEQ ID NO: 116907 - protein, 7 aa, synthetic construct
FKMHTNS

SEQ ID NO: 116908 - protein, 7 aa, synthetic construct
FKMHVSN

SEQ ID NO: 116909 - protein, 7 aa, synthetic construct
FKMIHKE

SEQ ID NO: 116910 - protein, 7 aa, synthetic construct
FKMNVER

SEQ ID NO: 116911 - protein, 7 aa, synthetic construct
FKMPRDG

SEQ ID NO: 116912 - protein, 7 aa, synthetic construct
FKMPSHQ

SEQ ID NO: 116913 - protein, 7 aa, synthetic construct
FKMRMDS

SEQ ID NO: 116914 - protein, 7 aa, synthetic construct
FKMRNEN

SEQ ID NO: 116915 - protein, 7 aa, synthetic construct
FKMTPAV

SEQ ID NO: 116916 - protein, 7 aa, synthetic construct
FKNAGTY

SEQ ID NO: 116917 - protein, 7 aa, synthetic construct
FKNANVH

SEQ ID NO: 116918 - protein, 7 aa, synthetic construct
FKNEYAR

SEQ ID NO: 116919 - protein, 7 aa, synthetic construct
FKNFKDT

SEQ ID NO: 116920 - protein, 7 aa, synthetic construct
FKNFVSA

SEQ ID NO: 116921 - protein, 7 aa, synthetic construct
FKNHMPV

SEQ ID NO: 116922 - protein, 7 aa, synthetic construct
FKNIMAP

SEQ ID NO: 116923 - protein, 7 aa, synthetic construct
FKNIMGT

SEQ ID NO: 116924 - protein, 7 aa, synthetic construct
FKNIPHS

SEQ ID NO: 116925 - protein, 7 aa, synthetic construct
FKNIPSM

SEQ ID NO: 116926 - protein, 7 aa, synthetic construct
FKNITPH

SEQ ID NO: 116927 - protein, 7 aa, synthetic construct
FKNITQH

SEQ ID NO: 116928 - protein, 7 aa, synthetic construct
FKNLSNM

SEQ ID NO: 116929 - protein, 7 aa, synthetic construct
FKNLSTL

SEQ ID NO: 116930 - protein, 7 aa, synthetic construct
FKNMQDK

SEQ ID NO: 116931 - protein, 7 aa, synthetic construct
FKNMTHV

SEQ ID NO: 116932 - protein, 7 aa, synthetic construct
FKNNKTE

SEQ ID NO: 116933 - protein, 7 aa, synthetic construct
FKNPPHN

SEQ ID NO: 116934 - protein, 7 aa, synthetic construct
FKNQPTN

SEQ ID NO: 116935 - protein, 7 aa, synthetic construct
FKNQYAM

SEQ ID NO: 116936 - protein, 7 aa, synthetic construct
FKNRYEG

SEQ ID NO: 116937 - protein, 7 aa, synthetic construct
FKNSHPV

SEQ ID NO: 116938 - protein, 7 aa, synthetic construct
FKNTQYA

SEQ ID NO: 116939 - protein, 7 aa, synthetic construct
FKNTQYG

SEQ ID NO: 116940 - protein, 7 aa, synthetic construct
FKNYDKL

SEQ ID NO: 116941 - protein, 7 aa, synthetic construct
FKNYNTQ

SEQ ID NO: 116942 - protein, 7 aa, synthetic construct
FKPANHI

SEQ ID NO: 116943 - protein, 7 aa, synthetic construct
FKPDKFF

SEQ ID NO: 116944 - protein, 7 aa, synthetic construct
FKPDTNH

SEQ ID NO: 116945 - protein, 7 aa, synthetic construct
FKPHPGN

SEQ ID NO: 116946 - protein, 7 aa, synthetic construct
FKPHTPL

SEQ ID NO: 116947 - protein, 7 aa, synthetic construct
FKPLQYN

SEQ ID NO: 116948 - protein, 7 aa, synthetic construct
FKPNALV

SEQ ID NO: 116949 - protein, 7 aa, synthetic construct
FKPNMAI

SEQ ID NO: 116950 - protein, 7 aa, synthetic construct
FKPNPGH

SEQ ID NO: 116951 - protein, 7 aa, synthetic construct
FKPPPVT

SEQ ID NO: 116952 - protein, 7 aa, synthetic construct
FKPQDRY

SEQ ID NO: 116953 - protein, 7 aa, synthetic construct
FKPRDTM

SEQ ID NO: 116954 - protein, 7 aa, synthetic construct
FKPSFPN

SEQ ID NO: 116955 - protein, 7 aa, synthetic construct
FKPSIMS

SEQ ID NO: 116956 - protein, 7 aa, synthetic construct
FKPSLQM

SEQ ID NO: 116957 - protein, 7 aa, synthetic construct
FKPSSHQ

SEQ ID NO: 116958 - protein, 7 aa, synthetic construct
FKPSSMI

SEQ ID NO: 116959 - protein, 7 aa, synthetic construct
FKPTHLM

SEQ ID NO: 116960 - protein, 7 aa, synthetic construct
FKPVKEV

SEQ ID NO: 116961 - protein, 7 aa, synthetic construct
FKPVMGA

SEQ ID NO: 116962 - protein, 7 aa, synthetic construct
FKPVSSY

SEQ ID NO: 116963 - protein, 7 aa, synthetic construct
FKQAAMM

SEQ ID NO: 116964 - protein, 7 aa, synthetic construct
FKQAVNY

SEQ ID NO: 116965 - protein, 7 aa, synthetic construct
FKQDKIL

SEQ ID NO: 116966 - protein, 7 aa, synthetic construct
FKQDYKQ

SEQ ID NO: 116967 - protein, 7 aa, synthetic construct
FKQEYTK

SEQ ID NO: 116968 - protein, 7 aa, synthetic construct
FKQGEQR

SEQ ID NO: 116969 - protein, 7 aa, synthetic construct
FKQGGWQ

SEQ ID NO: 116970 - protein, 7 aa, synthetic construct
FKQGSFQ

SEQ ID NO: 116971 - protein, 7 aa, synthetic construct
FKQGVPY

SEQ ID NO: 116972 - protein, 7 aa, synthetic construct
FKQIPGT

SEQ ID NO: 116973 - protein, 7 aa, synthetic construct
FKQIPVN

SEQ ID NO: 116974 - protein, 7 aa, synthetic construct
FKQLNAI

SEQ ID NO: 116975 - protein, 7 aa, synthetic construct
FKQLNPN

SEQ ID NO: 116976 - protein, 7 aa, synthetic construct
FKQMNAL

SEQ ID NO: 116977 - protein, 7 aa, synthetic construct
FKQMPIP

SEQ ID NO: 116978 - protein, 7 aa, synthetic construct
FKQMSQT

SEQ ID NO: 116979 - protein, 7 aa, synthetic construct
FKQNPMS

SEQ ID NO: 116980 - protein, 7 aa, synthetic construct
FKQPSGI

SEQ ID NO: 116981 - protein, 7 aa, synthetic construct
FKQPYTN

SEQ ID NO: 116982 - protein, 7 aa, synthetic construct
FKQQADR

SEQ ID NO: 116983 - protein, 7 aa, synthetic construct
FKQQQPF

SEQ ID NO: 116984 - protein, 7 aa, synthetic construct
FKQRIEM

SEQ ID NO: 116985 - protein, 7 aa, synthetic construct
FKQSHQV

SEQ ID NO: 116986 - protein, 7 aa, synthetic construct
FKQSIPH

SEQ ID NO: 116987 - protein, 7 aa, synthetic construct
FKQSLER

SEQ ID NO: 116988 - protein, 7 aa, synthetic construct
FKQSQSL

SEQ ID NO: 116989 - protein, 7 aa, synthetic construct
FKQSSSL

SEQ ID NO: 116990 - protein, 7 aa, synthetic construct
FKRAADG

SEQ ID NO: 116991 - protein, 7 aa, synthetic construct
FKRATLE

SEQ ID NO: 116992 - protein, 7 aa, synthetic construct
FKRDAFA

SEQ ID NO: 116993 - protein, 7 aa, synthetic construct
FKRDAGH

SEQ ID NO: 116994 - protein, 7 aa, synthetic construct
FKRDEKA

SEQ ID NO: 116995 - protein, 7 aa, synthetic construct
FKRDGAS

SEQ ID NO: 116996 - protein, 7 aa, synthetic construct
FKRDKFD

SEQ ID NO: 116997 - protein, 7 aa, synthetic construct
FKRDPIA

SEQ ID NO: 116998 - protein, 7 aa, synthetic construct
FKRESQI

SEQ ID NO: 116999 - protein, 7 aa, synthetic construct
FKREWDA

SEQ ID NO: 117000 - protein, 7 aa, synthetic construct
FKRIAQE

SEQ ID NO: 117001 - protein, 7 aa, synthetic construct
FKRMTDA

SEQ ID NO: 117002 - protein, 7 aa, synthetic construct
FKRPEAG

SEQ ID NO: 117003 - protein, 7 aa, synthetic construct
FKRPLDQ

SEQ ID NO: 117004 - protein, 7 aa, synthetic construct
FKRPMVE

SEQ ID NO: 117005 - protein, 7 aa, synthetic construct
FKRSFEE

SEQ ID NO: 117006 - protein, 7 aa, synthetic construct
FKRSQQE

SEQ ID NO: 117007 - protein, 7 aa, synthetic construct
FKSEAKW

SEQ ID NO: 117008 - protein, 7 aa, synthetic construct
FKSHIMA

SEQ ID NO: 117009 - protein, 7 aa, synthetic construct
FKSIINS

SEQ ID NO: 117010 - protein, 7 aa, synthetic construct
FKSKNDS

SEQ ID NO: 117011 - protein, 7 aa, synthetic construct
FKSKSYD

SEQ ID NO: 117012 - protein, 7 aa, synthetic construct
FKSMIRD

SEQ ID NO: 117013 - protein, 7 aa, synthetic construct
FKSMYPG

SEQ ID NO: 117014 - protein, 7 aa, synthetic construct
FKSNVHF

SEQ ID NO: 117015 - protein, 7 aa, synthetic construct
FKSPMAM

SEQ ID NO: 117016 - protein, 7 aa, synthetic construct
FKSPPRD

SEQ ID NO: 117017 - protein, 7 aa, synthetic construct
FKSPPVL

SEQ ID NO: 117018 - protein, 7 aa, synthetic construct
FKSPSTL

SEQ ID NO: 117019 - protein, 7 aa, synthetic construct
FKSQVFS

SEQ ID NO: 117020 - protein, 7 aa, synthetic construct
FKSREVG

SEQ ID NO: 117021 - protein, 7 aa, synthetic construct
FKSSEMK

SEQ ID NO: 117022 - protein, 7 aa, synthetic construct
FKSSRDM

SEQ ID NO: 117023 - protein, 7 aa, synthetic construct
FKSTFQG

SEQ ID NO: 117024 - protein, 7 aa, synthetic construct
FKSVATM

SEQ ID NO: 117025 - protein, 7 aa, synthetic construct
FKSVLST

SEQ ID NO: 117026 - protein, 7 aa, synthetic construct
FKSVSDR

SEQ ID NO: 117027 - protein, 7 aa, synthetic construct
FKTAPQL

SEQ ID NO: 117028 - protein, 7 aa, synthetic construct
FKTAQMH

SEQ ID NO: 117029 - protein, 7 aa, synthetic construct
FKTATHY

SEQ ID NO: 117030 - protein, 7 aa, synthetic construct
FKTDRFV

SEQ ID NO: 117031 - protein, 7 aa, synthetic construct
FKTENRM

SEQ ID NO: 117032 - protein, 7 aa, synthetic construct
FKTGFDK

SEQ ID NO: 117033 - protein, 7 aa, synthetic construct
FKTGQYG

SEQ ID NO: 117034 - protein, 7 aa, synthetic construct
FKTHMTT

SEQ ID NO: 117035 - protein, 7 aa, synthetic construct
FKTKDGL

SEQ ID NO: 117036 - protein, 7 aa, synthetic construct
FKTMIVQ

SEQ ID NO: 117037 - protein, 7 aa, synthetic construct
FKTPREN

SEQ ID NO: 117038 - protein, 7 aa, synthetic construct
FKTPRGE

SEQ ID NO: 117039 - protein, 7 aa, synthetic construct
FKTPVTH

SEQ ID NO: 117040 - protein, 7 aa, synthetic construct
FKTQAAH

SEQ ID NO: 117041 - protein, 7 aa, synthetic construct
FKTQDRA

SEQ ID NO: 117042 - protein, 7 aa, synthetic construct
FKTQHHG

SEQ ID NO: 117043 - protein, 7 aa, synthetic construct
FKTQPYP

SEQ ID NO: 117044 - protein, 7 aa, synthetic construct
FKTRNEG

SEQ ID NO: 117045 - protein, 7 aa, synthetic construct
FKTSERS

SEQ ID NO: 117046 - protein, 7 aa, synthetic construct
FKTSHSM

SEQ ID NO: 117047 - protein, 7 aa, synthetic construct
FKTSMDR

SEQ ID NO: 117048 - protein, 7 aa, synthetic construct
FKTYNTA

SEQ ID NO: 117049 - protein, 7 aa, synthetic construct
FKVDLRS

SEQ ID NO: 117050 - protein, 7 aa, synthetic construct
FKVDYKS

SEQ ID NO: 117051 - protein, 7 aa, synthetic construct
FKVMAAN

SEQ ID NO: 117052 - protein, 7 aa, synthetic construct
FKVMHNA

SEQ ID NO: 117053 - protein, 7 aa, synthetic construct
FKVMQRD

SEQ ID NO: 117054 - protein, 7 aa, synthetic construct
FKVNGFS

SEQ ID NO: 117055 - protein, 7 aa, synthetic construct
FKVPAQS

SEQ ID NO: 117056 - protein, 7 aa, synthetic construct
FKVRNEG

SEQ ID NO: 117057 - protein, 7 aa, synthetic construct
FKVSSGH

SEQ ID NO: 117058 - protein, 7 aa, synthetic construct
FKVVDVK

SEQ ID NO: 117059 - protein, 7 aa, synthetic construct
FKWSHEE

SEQ ID NO: 117060 - protein, 7 aa, synthetic construct
FKYAQDK

SEQ ID NO: 117061 - protein, 7 aa, synthetic construct
FKYLMEG

SEQ ID NO: 117062 - protein, 7 aa, synthetic construct
FKYNNRD

SEQ ID NO: 117063 - protein, 7 aa, synthetic construct
FKYSDKM

SEQ ID NO: 117064 - protein, 7 aa, synthetic construct
FKYSSTG

SEQ ID NO: 117065 - protein, 7 aa, synthetic construct
FKYVAKE

SEQ ID NO: 117066 - protein, 7 aa, synthetic construct
FKYVKTE

SEQ ID NO: 117067 - protein, 7 aa, synthetic construct
FLAGIKG

SEQ ID NO: 117068 - protein, 7 aa, synthetic construct
FLAHKAG

SEQ ID NO: 117069 - protein, 7 aa, synthetic construct
FLAHTPK

SEQ ID NO: 117070 - protein, 7 aa, synthetic construct
FLARASP

SEQ ID NO: 117071 - protein, 7 aa, synthetic construct
FLDKRHQ

SEQ ID NO: 117072 - protein, 7 aa, synthetic construct
FLDRSKA

SEQ ID NO: 117073 - protein, 7 aa, synthetic construct
FLEGRRN

SEQ ID NO: 117074 - protein, 7 aa, synthetic construct
FLEKTSR

SEQ ID NO: 117075 - protein, 7 aa, synthetic construct
FLGGNNR

SEQ ID NO: 117076 - protein, 7 aa, synthetic construct
FLGGSNR

SEQ ID NO: 117077 - protein, 7 aa, synthetic construct
FLGHKIG

SEQ ID NO: 117078 - protein, 7 aa, synthetic construct
FLGHTKM

SEQ ID NO: 117079 - protein, 7 aa, synthetic construct
FLGHVNK

SEQ ID NO: 117080 - protein, 7 aa, synthetic construct
FLGKTIT

SEQ ID NO: 117081 - protein, 7 aa, synthetic construct
FLGNNNK

SEQ ID NO: 117082 - protein, 7 aa, synthetic construct
FLGQAKH

SEQ ID NO: 117083 - protein, 7 aa, synthetic construct
FLGQSAK

SEQ ID NO: 117084 - protein, 7 aa, synthetic construct
FLGSGGR

SEQ ID NO: 117085 - protein, 7 aa, synthetic construct
FLGVKHQ

SEQ ID NO: 117086 - protein, 7 aa, synthetic construct
FLHSQKV

SEQ ID NO: 117087 - protein, 7 aa, synthetic construct
FLHTMKG

SEQ ID NO: 117088 - protein, 7 aa, synthetic construct
FLHTTKS

SEQ ID NO: 117089 - protein, 7 aa, synthetic construct
FLKDRGM

SEQ ID NO: 117090 - protein, 7 aa, synthetic construct
FLKEMGR

SEQ ID NO: 117091 - protein, 7 aa, synthetic construct
FLKGGYG

SEQ ID NO: 117092 - protein, 7 aa, synthetic construct
FLKHNQL

SEQ ID NO: 117093 - protein, 7 aa, synthetic construct
FLKHTAG

SEQ ID NO: 117094 - protein, 7 aa, synthetic construct
FLKHTLN

SEQ ID NO: 117095 - protein, 7 aa, synthetic construct
FLKMGHG

SEQ ID NO: 117096 - protein, 7 aa, synthetic construct
FLKMRND

SEQ ID NO: 117097 - protein, 7 aa, synthetic construct
FLKSMHG

SEQ ID NO: 117098 - protein, 7 aa, synthetic construct
FLKSRMD

SEQ ID NO: 117099 - protein, 7 aa, synthetic construct
FLKVRQD

SEQ ID NO: 117100 - protein, 7 aa, synthetic construct
FLNAARA

SEQ ID NO: 117101 - protein, 7 aa, synthetic construct
FLNGRHN

SEQ ID NO: 117102 - protein, 7 aa, synthetic construct
FLNKNHP

SEQ ID NO: 117103 - protein, 7 aa, synthetic construct
FLNRQAG

SEQ ID NO: 117104 - protein, 7 aa, synthetic construct
FLNSTGR

SEQ ID NO: 117105 - protein, 7 aa, synthetic construct
FLNSTQR

SEQ ID NO: 117106 - protein, 7 aa, synthetic construct
FLNYHSE

SEQ ID NO: 117107 - protein, 7 aa, synthetic construct
FLPGRNS

SEQ ID NO: 117108 - protein, 7 aa, synthetic construct
FLPRGVP

SEQ ID NO: 117109 - protein, 7 aa, synthetic construct
FLPTTKL

SEQ ID NO: 117110 - protein, 7 aa, synthetic construct
FLQQIKN

SEQ ID NO: 117111 - protein, 7 aa, synthetic construct
FLQRSSG

SEQ ID NO: 117112 - protein, 7 aa, synthetic construct
FLQSVKN

SEQ ID NO: 117113 - protein, 7 aa, synthetic construct
FLRDKQV

SEQ ID NO: 117114 - protein, 7 aa, synthetic construct
FLRDQSK

SEQ ID NO: 117115 - protein, 7 aa, synthetic construct
FLRGDKV

SEQ ID NO: 117116 - protein, 7 aa, synthetic construct
FLRKEAG

SEQ ID NO: 117117 - protein, 7 aa, synthetic construct
FLRTSQA

SEQ ID NO: 117118 - protein, 7 aa, synthetic construct
FLTKDRG

SEQ ID NO: 117119 - protein, 7 aa, synthetic construct
FLTRGKD

SEQ ID NO: 117120 - protein, 7 aa, synthetic construct
FMAGHKM

SEQ ID NO: 117121 - protein, 7 aa, synthetic construct
FMAGHTK

SEQ ID NO: 117122 - protein, 7 aa, synthetic construct
FMAGNFK

SEQ ID NO: 117123 - protein, 7 aa, synthetic construct
FMAHMKA

SEQ ID NO: 117124 - protein, 7 aa, synthetic construct
FMAQGPK

SEQ ID NO: 117125 - protein, 7 aa, synthetic construct
FMASQRV

SEQ ID NO: 117126 - protein, 7 aa, synthetic construct
FMATNRT

SEQ ID NO: 117127 - protein, 7 aa, synthetic construct
FMDKREK

SEQ ID NO: 117128 - protein, 7 aa, synthetic construct
FMDNVRR

SEQ ID NO: 117129 - protein, 7 aa, synthetic construct
FMDQGKR

SEQ ID NO: 117130 - protein, 7 aa, synthetic construct
FMDTKSK

SEQ ID NO: 117131 - protein, 7 aa, synthetic construct
FMEGRKN

SEQ ID NO: 117132 - protein, 7 aa, synthetic construct
FMENQKR

SEQ ID NO: 117133 - protein, 7 aa, synthetic construct
FMERVKQ

SEQ ID NO: 117134 - protein, 7 aa, synthetic construct
FMGAAKH

SEQ ID NO: 117135 - protein, 7 aa, synthetic construct
FMGDRKV

SEQ ID NO: 117136 - protein, 7 aa, synthetic construct
FMGGQGK

SEQ ID NO: 117137 - protein, 7 aa, synthetic construct
FMGHNSK

SEQ ID NO: 117138 - protein, 7 aa, synthetic construct
FMGHQVK

SEQ ID NO: 117139 - protein, 7 aa, synthetic construct
FMGKGDK

SEQ ID NO: 117140 - protein, 7 aa, synthetic construct
FMGKMPA

SEQ ID NO: 117141 - protein, 7 aa, synthetic construct
FMGNARM

SEQ ID NO: 117142 - protein, 7 aa, synthetic construct
FMGNVPK

SEQ ID NO: 117143 - protein, 7 aa, synthetic construct
FMGQIKN

SEQ ID NO: 117144 - protein, 7 aa, synthetic construct
FMGQKNI

SEQ ID NO: 117145 - protein, 7 aa, synthetic construct
FMGRSPV

SEQ ID NO: 117146 - protein, 7 aa, synthetic construct
FMGVAKQ

SEQ ID NO: 117147 - protein, 7 aa, synthetic construct
FMHGAKQ

SEQ ID NO: 117148 - protein, 7 aa, synthetic construct
FMHKGVV

SEQ ID NO: 117149 - protein, 7 aa, synthetic construct
FMHQVKG

SEQ ID NO: 117150 - protein, 7 aa, synthetic construct
FMINKAP

SEQ ID NO: 117151 - protein, 7 aa, synthetic construct
FMKASSL

SEQ ID NO: 117152 - protein, 7 aa, synthetic construct
FMKEHKY

SEQ ID NO: 117153 - protein, 7 aa, synthetic construct
FMKEQFK

SEQ ID NO: 117154 - protein, 7 aa, synthetic construct
FMKHIQA

SEQ ID NO: 117155 - protein, 7 aa, synthetic construct
FMKHKGE

SEQ ID NO: 117156 - protein, 7 aa, synthetic construct
FMKKYQD

SEQ ID NO: 117157 - protein, 7 aa, synthetic construct
FMKMDNR

SEQ ID NO: 117158 - protein, 7 aa, synthetic construct
FMKMRQD

SEQ ID NO: 117159 - protein, 7 aa, synthetic construct
FMKNPNL

SEQ ID NO: 117160 - protein, 7 aa, synthetic construct
FMKNRDH

SEQ ID NO: 117161 - protein, 7 aa, synthetic construct
FMKPFKE

SEQ ID NO: 117162 - protein, 7 aa, synthetic construct
FMKPGMH

SEQ ID NO: 117163 - protein, 7 aa, synthetic construct
FMKPNVT

SEQ ID NO: 117164 - protein, 7 aa, synthetic construct
FMKRETL

SEQ ID NO: 117165 - protein, 7 aa, synthetic construct
FMKVAVP

SEQ ID NO: 117166 - protein, 7 aa, synthetic construct
FMKVVRE

SEQ ID NO: 117167 - protein, 7 aa, synthetic construct
FMLHKNP

SEQ ID NO: 117168 - protein, 7 aa, synthetic construct
FMMKDVE

SEQ ID NO: 117169 - protein, 7 aa, synthetic construct
FMNGHSK

SEQ ID NO: 117170 - protein, 7 aa, synthetic construct
FMNGQAK

SEQ ID NO: 117171 - protein, 7 aa, synthetic construct
FMNHAVK

SEQ ID NO: 117172 - protein, 7 aa, synthetic construct
FMNHKMV

SEQ ID NO: 117173 - protein, 7 aa, synthetic construct
FMNSTRI

SEQ ID NO: 117174 - protein, 7 aa, synthetic construct
FMQDKSR

SEQ ID NO: 117175 - protein, 7 aa, synthetic construct
FMQGNPK

SEQ ID NO: 117176 - protein, 7 aa, synthetic construct
FMQGTSR

SEQ ID NO: 117177 - protein, 7 aa, synthetic construct
FMQHSHM

SEQ ID NO: 117178 - protein, 7 aa, synthetic construct
FMQKGMV

SEQ ID NO: 117179 - protein, 7 aa, synthetic construct
FMQRNDK

SEQ ID NO: 117180 - protein, 7 aa, synthetic construct
FMQSSQK

SEQ ID NO: 117181 - protein, 7 aa, synthetic construct
FMQTHTK

SEQ ID NO: 117182 - protein, 7 aa, synthetic construct
FMQTTSK

SEQ ID NO: 117183 - protein, 7 aa, synthetic construct
FMRKNQE

SEQ ID NO: 117184 - protein, 7 aa, synthetic construct
FMRKTSE

SEQ ID NO: 117185 - protein, 7 aa, synthetic construct
FMRKVSE

SEQ ID NO: 117186 - protein, 7 aa, synthetic construct
FMRNANM

SEQ ID NO: 117187 - protein, 7 aa, synthetic construct
FMRQIKE

SEQ ID NO: 117188 - protein, 7 aa, synthetic construct
FMRSGGV

SEQ ID NO: 117189 - protein, 7 aa, synthetic construct
FMRVSDK

SEQ ID NO: 117190 - protein, 7 aa, synthetic construct
FMSGERY

SEQ ID NO: 117191 - protein, 7 aa, synthetic construct
FMSGSMK

SEQ ID NO: 117192 - protein, 7 aa, synthetic construct
FMSHSKA

SEQ ID NO: 117193 - protein, 7 aa, synthetic construct
FMSKQPL

SEQ ID NO: 117194 - protein, 7 aa, synthetic construct
FMSSRKE

SEQ ID NO: 117195 - protein, 7 aa, synthetic construct
FMSYRHE

SEQ ID NO: 117196 - protein, 7 aa, synthetic construct
FMTHSKV

SEQ ID NO: 117197 - protein, 7 aa, synthetic construct
FMTKHTV

SEQ ID NO: 117198 - protein, 7 aa, synthetic construct
FMTKIRE

SEQ ID NO: 117199 - protein, 7 aa, synthetic construct
FMTNHKI

SEQ ID NO: 117200 - protein, 7 aa, synthetic construct
FMTNVKS

SEQ ID NO: 117201 - protein, 7 aa, synthetic construct
FMTVKPP

SEQ ID NO: 117202 - protein, 7 aa, synthetic construct
FNAAPRV

SEQ ID NO: 117203 - protein, 7 aa, synthetic construct
FNAASKY

SEQ ID NO: 117204 - protein, 7 aa, synthetic construct
FNAGYTK

SEQ ID NO: 117205 - protein, 7 aa, synthetic construct
FNAHQAK

SEQ ID NO: 117206 - protein, 7 aa, synthetic construct
FNAKHLT

SEQ ID NO: 117207 - protein, 7 aa, synthetic construct
FNANNQR

SEQ ID NO: 117208 - protein, 7 aa, synthetic construct
FNANRMM

SEQ ID NO: 117209 - protein, 7 aa, synthetic construct
FNAPSVR

SEQ ID NO: 117210 - protein, 7 aa, synthetic construct
FNAREKL

SEQ ID NO: 117211 - protein, 7 aa, synthetic construct
FNASQYK

SEQ ID NO: 117212 - protein, 7 aa, synthetic construct
FNAVRAV

SEQ ID NO: 117213 - protein, 7 aa, synthetic construct
FNDHKPR

SEQ ID NO: 117214 - protein, 7 aa, synthetic construct
FNEMDWV

SEQ ID NO: 117215 - protein, 7 aa, synthetic construct
FNEREKK

SEQ ID NO: 117216 - protein, 7 aa, synthetic construct
FNGNTQR

SEQ ID NO: 117217 - protein, 7 aa, synthetic construct
FNGPAGR

SEQ ID NO: 117218 - protein, 7 aa, synthetic construct
FNGYVVK

SEQ ID NO: 117219 - protein, 7 aa, synthetic construct
FNHDARR

SEQ ID NO: 117220 - protein, 7 aa, synthetic construct
FNHGQRT

SEQ ID NO: 117221 - protein, 7 aa, synthetic construct
FNHILKP

SEQ ID NO: 117222 - protein, 7 aa, synthetic construct
FNHIQAK

SEQ ID NO: 117223 - protein, 7 aa, synthetic construct
FNHISTK

SEQ ID NO: 117224 - protein, 7 aa, synthetic construct
FNHKFPP

SEQ ID NO: 117225 - protein, 7 aa, synthetic construct
FNHKGLQ

SEQ ID NO: 117226 - protein, 7 aa, synthetic construct
FNHTNFK

SEQ ID NO: 117227 - protein, 7 aa, synthetic construct
FNIHMKS

SEQ ID NO: 117228 - protein, 7 aa, synthetic construct
FNKASER

SEQ ID NO: 117229 - protein, 7 aa, synthetic construct
FNKFSAV

SEQ ID NO: 117230 - protein, 7 aa, synthetic construct
FNKGDKV

SEQ ID NO: 117231 - protein, 7 aa, synthetic construct
FNKGENR

SEQ ID NO: 117232 - protein, 7 aa, synthetic construct
FNKHESK

SEQ ID NO: 117233 - protein, 7 aa, synthetic construct
FNKIREI

SEQ ID NO: 117234 - protein, 7 aa, synthetic construct
FNKPQSA

SEQ ID NO: 117235 - protein, 7 aa, synthetic construct
FNKQEHK

SEQ ID NO: 117236 - protein, 7 aa, synthetic construct
FNKQFPV

SEQ ID NO: 117237 - protein, 7 aa, synthetic construct
FNKQGMF

SEQ ID NO: 117238 - protein, 7 aa, synthetic construct
FNKTQIY

SEQ ID NO: 117239 - protein, 7 aa, synthetic construct
FNLGATR

SEQ ID NO: 117240 - protein, 7 aa, synthetic construct
FNLGGNR

SEQ ID NO: 117241 - protein, 7 aa, synthetic construct
FNLGSQK

SEQ ID NO: 117242 - protein, 7 aa, synthetic construct
FNLRDKG

SEQ ID NO: 117243 - protein, 7 aa, synthetic construct
FNLRQKD

SEQ ID NO: 117244 - protein, 7 aa, synthetic construct
FNLTKDR

SEQ ID NO: 117245 - protein, 7 aa, synthetic construct
FNMQATR

SEQ ID NO: 117246 - protein, 7 aa, synthetic construct
FNMRRVE

SEQ ID NO: 117247 - protein, 7 aa, synthetic construct
FNNAHGK

SEQ ID NO: 117248 - protein, 7 aa, synthetic construct
FNNGSPR

SEQ ID NO: 117249 - protein, 7 aa, synthetic construct
FNNNKNY

SEQ ID NO: 117250 - protein, 7 aa, synthetic construct
FNNNMTR

SEQ ID NO: 117251 - protein, 7 aa, synthetic construct
FNNNRHM

SEQ ID NO: 117252 - protein, 7 aa, synthetic construct
FNNRESK

SEQ ID NO: 117253 - protein, 7 aa, synthetic construct
FNNTLTR

SEQ ID NO: 117254 - protein, 7 aa, synthetic construct
FNPAGRI

SEQ ID NO: 117255 - protein, 7 aa, synthetic construct
FNPARTI

SEQ ID NO: 117256 - protein, 7 aa, synthetic construct
FNPRPSA

SEQ ID NO: 117257 - protein, 7 aa, synthetic construct
FNPTRIN

SEQ ID NO: 117258 - protein, 7 aa, synthetic construct
FNQAKEY

SEQ ID NO: 117259 - protein, 7 aa, synthetic construct
FNQANTR

SEQ ID NO: 117260 - protein, 7 aa, synthetic construct
FNQARPH

SEQ ID NO: 117261 - protein, 7 aa, synthetic construct
FNQGAFK

SEQ ID NO: 117262 - protein, 7 aa, synthetic construct
FNQHSRI

SEQ ID NO: 117263 - protein, 7 aa, synthetic construct
FNQKVDR

SEQ ID NO: 117264 - protein, 7 aa, synthetic construct
FNQPQQR

SEQ ID NO: 117265 - protein, 7 aa, synthetic construct
FNQPQTR

SEQ ID NO: 117266 - protein, 7 aa, synthetic construct
FNQRTVI

SEQ ID NO: 117267 - protein, 7 aa, synthetic construct
FNQSGKW

SEQ ID NO: 117268 - protein, 7 aa, synthetic construct
FNQTIKF

SEQ ID NO: 117269 - protein, 7 aa, synthetic construct
FNRKEVV

SEQ ID NO: 117270 - protein, 7 aa, synthetic construct
FNRLHSS

SEQ ID NO: 117271 - protein, 7 aa, synthetic construct
FNRLRTD

SEQ ID NO: 117272 - protein, 7 aa, synthetic construct
FNRLTPS

SEQ ID NO: 117273 - protein, 7 aa, synthetic construct
FNRNINQ

SEQ ID NO: 117274 - protein, 7 aa, synthetic construct
FNRPSIN

SEQ ID NO: 117275 - protein, 7 aa, synthetic construct
FNRQIGP

SEQ ID NO: 117276 - protein, 7 aa, synthetic construct
FNRQTLH

SEQ ID NO: 117277 - protein, 7 aa, synthetic construct
FNRTQQI

SEQ ID NO: 117278 - protein, 7 aa, synthetic construct
FNRTYTS

SEQ ID NO: 117279 - protein, 7 aa, synthetic construct
FNRVEKM

SEQ ID NO: 117280 - protein, 7 aa, synthetic construct
FNSIHGK

SEQ ID NO: 117281 - protein, 7 aa, synthetic construct
FNSIKSL

SEQ ID NO: 117282 - protein, 7 aa, synthetic construct
FNSMHKT

SEQ ID NO: 117283 - protein, 7 aa, synthetic construct
FNSNGNR

SEQ ID NO: 117284 - protein, 7 aa, synthetic construct
FNSQNGR

SEQ ID NO: 117285 - protein, 7 aa, synthetic construct
FNSRSFV

SEQ ID NO: 117286 - protein, 7 aa, synthetic construct
FNSTREK

SEQ ID NO: 117287 - protein, 7 aa, synthetic construct
FNSTSTR

SEQ ID NO: 117288 - protein, 7 aa, synthetic construct
FNSVKNL

SEQ ID NO: 117289 - protein, 7 aa, synthetic construct
FNTKSDK

SEQ ID NO: 117290 - protein, 7 aa, synthetic construct
FNTTIRT

SEQ ID NO: 117291 - protein, 7 aa, synthetic construct
FNTTKQF

SEQ ID NO: 117292 - protein, 7 aa, synthetic construct
FNTTQKY

SEQ ID NO: 117293 - protein, 7 aa, synthetic construct
FNTTRQL

SEQ ID NO: 117294 - protein, 7 aa, synthetic construct
FNTTVRL

SEQ ID NO: 117295 - protein, 7 aa, synthetic construct
FNTVRQV

SEQ ID NO: 117296 - protein, 7 aa, synthetic construct
FNVATRT

SEQ ID NO: 117297 - protein, 7 aa, synthetic construct
FNVKMRD

SEQ ID NO: 117298 - protein, 7 aa, synthetic construct
FPAAHGK

SEQ ID NO: 117299 - protein, 7 aa, synthetic construct
FPAAHNR

SEQ ID NO: 117300 - protein, 7 aa, synthetic construct
FPAGGAR

SEQ ID NO: 117301 - protein, 7 aa, synthetic construct
FPAGPKH

SEQ ID NO: 117302 - protein, 7 aa, synthetic construct
FPAIKGV

SEQ ID NO: 117303 - protein, 7 aa, synthetic construct
FPAKALI

SEQ ID NO: 117304 - protein, 7 aa, synthetic construct
FPANHLK

SEQ ID NO: 117305 - protein, 7 aa, synthetic construct
FPANSLR

SEQ ID NO: 117306 - protein, 7 aa, synthetic construct
FPATNGR

SEQ ID NO: 117307 - protein, 7 aa, synthetic construct
FPATNNR

SEQ ID NO: 117308 - protein, 7 aa, synthetic construct
FPAVVSK

SEQ ID NO: 117309 - protein, 7 aa, synthetic construct
FPDAKFR

SEQ ID NO: 117310 - protein, 7 aa, synthetic construct
FPDKARH

SEQ ID NO: 117311 - protein, 7 aa, synthetic construct
FPDKMYK

SEQ ID NO: 117312 - protein, 7 aa, synthetic construct
FPDKRYG

SEQ ID NO: 117313 - protein, 7 aa, synthetic construct
FPDRQSG

SEQ ID NO: 117314 - protein, 7 aa, synthetic construct
FPEAKKF

SEQ ID NO: 117315 - protein, 7 aa, synthetic construct
FPEGKRG

SEQ ID NO: 117316 - protein, 7 aa, synthetic construct
FPEKKQY

SEQ ID NO: 117317 - protein, 7 aa, synthetic construct
FPERAKS

SEQ ID NO: 117318 - protein, 7 aa, synthetic construct
FPGAPQK

SEQ ID NO: 117319 - protein, 7 aa, synthetic construct
FPGAQTR

SEQ ID NO: 117320 - protein, 7 aa, synthetic construct
FPGFKTS

SEQ ID NO: 117321 - protein, 7 aa, synthetic construct
FPGGHKL

SEQ ID NO: 117322 - protein, 7 aa, synthetic construct
FPGGSNR

SEQ ID NO: 117323 - protein, 7 aa, synthetic construct
FPGIKSM

SEQ ID NO: 117324 - protein, 7 aa, synthetic construct
FPGKSVV

SEQ ID NO: 117325 - protein, 7 aa, synthetic construct
FPGLQQK

SEQ ID NO: 117326 - protein, 7 aa, synthetic construct
FPGLQTR

SEQ ID NO: 117327 - protein, 7 aa, synthetic construct
FPGMIRA

SEQ ID NO: 117328 - protein, 7 aa, synthetic construct
FPGQNVR

SEQ ID NO: 117329 - protein, 7 aa, synthetic construct
FPGRPVT

SEQ ID NO: 117330 - protein, 7 aa, synthetic construct
FPGRSDK

SEQ ID NO: 117331 - protein, 7 aa, synthetic construct
FPGSVRN

SEQ ID NO: 117332 - protein, 7 aa, synthetic construct
FPGVIKS

SEQ ID NO: 117333 - protein, 7 aa, synthetic construct
FPGVMPL

SEQ ID NO: 117334 - protein, 7 aa, synthetic construct
FPHGLAK

SEQ ID NO: 117335 - protein, 7 aa, synthetic construct
FPHSNKV

SEQ ID NO: 117336 - protein, 7 aa, synthetic construct
FPHSPKT

SEQ ID NO: 117337 - protein, 7 aa, synthetic construct
FPIAGRG

SEQ ID NO: 117338 - protein, 7 aa, synthetic construct
FPIKHAN

SEQ ID NO: 117339 - protein, 7 aa, synthetic construct
FPIKLRE

SEQ ID NO: 117340 - protein, 7 aa, synthetic construct
FPIKTHG

SEQ ID NO: 117341 - protein, 7 aa, synthetic construct
FPINSQR

SEQ ID NO: 117342 - protein, 7 aa, synthetic construct
FPISSRG

SEQ ID NO: 117343 - protein, 7 aa, synthetic construct
FPITQKN

SEQ ID NO: 117344 - protein, 7 aa, synthetic construct
FPKAEPR

SEQ ID NO: 117345 - protein, 7 aa, synthetic construct
FPKAGHM

SEQ ID NO: 117346 - protein, 7 aa, synthetic construct
FPKAHPS

SEQ ID NO: 117347 - protein, 7 aa, synthetic construct
FPKDHNR

SEQ ID NO: 117348 - protein, 7 aa, synthetic construct
FPKFAQS

SEQ ID NO: 117349 - protein, 7 aa, synthetic construct
FPKHPNL

SEQ ID NO: 117350 - protein, 7 aa, synthetic construct
FPKHTPI

SEQ ID NO: 117351 - protein, 7 aa, synthetic construct
FPKKGDF

SEQ ID NO: 117352 - protein, 7 aa, synthetic construct
FPKLSSQ

SEQ ID NO: 117353 - protein, 7 aa, synthetic construct
FPKLYGA

SEQ ID NO: 117354 - protein, 7 aa, synthetic construct
FPKMAHN

SEQ ID NO: 117355 - protein, 7 aa, synthetic construct
FPKMTVQ

SEQ ID NO: 117356 - protein, 7 aa, synthetic construct
FPKNNFG

SEQ ID NO: 117357 - protein, 7 aa, synthetic construct
FPKPHFG

SEQ ID NO: 117358 - protein, 7 aa, synthetic construct
FPKPHIA

SEQ ID NO: 117359 - protein, 7 aa, synthetic construct
FPKPIIA

SEQ ID NO: 117360 - protein, 7 aa, synthetic construct
FPKPMTT

SEQ ID NO: 117361 - protein, 7 aa, synthetic construct
FPKPRGD

SEQ ID NO: 117362 - protein, 7 aa, synthetic construct
FPKPSSY

SEQ ID NO: 117363 - protein, 7 aa, synthetic construct
FPKQDRQ

SEQ ID NO: 117364 - protein, 7 aa, synthetic construct
FPKQFPA

SEQ ID NO: 117365 - protein, 7 aa, synthetic construct
FPKQSTY

SEQ ID NO: 117366 - protein, 7 aa, synthetic construct
FPKQYAQ

SEQ ID NO: 117367 - protein, 7 aa, synthetic construct
FPKRIAD

SEQ ID NO: 117368 - protein, 7 aa, synthetic construct
FPKSAAY

SEQ ID NO: 117369 - protein, 7 aa, synthetic construct
FPKSASL

SEQ ID NO: 117370 - protein, 7 aa, synthetic construct
FPKSPVT

SEQ ID NO: 117371 - protein, 7 aa, synthetic construct
FPKTHRD

SEQ ID NO: 117372 - protein, 7 aa, synthetic construct
FPKTIPH

SEQ ID NO: 117373 - protein, 7 aa, synthetic construct
FPKTIPV

SEQ ID NO: 117374 - protein, 7 aa, synthetic construct
FPKWAVD

SEQ ID NO: 117375 - protein, 7 aa, synthetic construct
FPKYVEK

SEQ ID NO: 117376 - protein, 7 aa, synthetic construct
FPLGTRQ

SEQ ID NO: 117377 - protein, 7 aa, synthetic construct
FPMEKNR

SEQ ID NO: 117378 - protein, 7 aa, synthetic construct
FPMGRAP

SEQ ID NO: 117379 - protein, 7 aa, synthetic construct
FPMKQAM

SEQ ID NO: 117380 - protein, 7 aa, synthetic construct
FPMKQSA

SEQ ID NO: 117381 - protein, 7 aa, synthetic construct
FPMSSKM

SEQ ID NO: 117382 - protein, 7 aa, synthetic construct
FPNARLG

SEQ ID NO: 117383 - protein, 7 aa, synthetic construct
FPNARVH

SEQ ID NO: 117384 - protein, 7 aa, synthetic construct
FPNEKRL

SEQ ID NO: 117385 - protein, 7 aa, synthetic construct
FPNGRTH

SEQ ID NO: 117386 - protein, 7 aa, synthetic construct
FPNHASR

SEQ ID NO: 117387 - protein, 7 aa, synthetic construct
FPNHATK

SEQ ID NO: 117388 - protein, 7 aa, synthetic construct
FPNHIQK

SEQ ID NO: 117389 - protein, 7 aa, synthetic construct
FPNHNKG

SEQ ID NO: 117390 - protein, 7 aa, synthetic construct
FPNHVGK

SEQ ID NO: 117391 - protein, 7 aa, synthetic construct
FPNHVPK

SEQ ID NO: 117392 - protein, 7 aa, synthetic construct
FPNKGVL

SEQ ID NO: 117393 - protein, 7 aa, synthetic construct
FPNLMKN

SEQ ID NO: 117394 - protein, 7 aa, synthetic construct
FPNNTMR

SEQ ID NO: 117395 - protein, 7 aa, synthetic construct
FPNPSQR

SEQ ID NO: 117396 - protein, 7 aa, synthetic construct
FPPKAYQ

SEQ ID NO: 117397 - protein, 7 aa, synthetic construct
FPPKGPP

SEQ ID NO: 117398 - protein, 7 aa, synthetic construct
FPPKTLH

SEQ ID NO: 117399 - protein, 7 aa, synthetic construct
FPQAHGK

SEQ ID NO: 117400 - protein, 7 aa, synthetic construct
FPQARSQ

SEQ ID NO: 117401 - protein, 7 aa, synthetic construct
FPQHASR

SEQ ID NO: 117402 - protein, 7 aa, synthetic construct
FPQKAFG

SEQ ID NO: 117403 - protein, 7 aa, synthetic construct
FPQKDAK

SEQ ID NO: 117404 - protein, 7 aa, synthetic construct
FPQNMAR

SEQ ID NO: 117405 - protein, 7 aa, synthetic construct
FPQPKEK

SEQ ID NO: 117406 - protein, 7 aa, synthetic construct
FPQQNFK

SEQ ID NO: 117407 - protein, 7 aa, synthetic construct
FPQQVRP

SEQ ID NO: 117408 - protein, 7 aa, synthetic construct
FPQRLKD

SEQ ID NO: 117409 - protein, 7 aa, synthetic construct
FPQRPKD

SEQ ID NO: 117410 - protein, 7 aa, synthetic construct
FPQRSLA

SEQ ID NO: 117411 - protein, 7 aa, synthetic construct
FPRASGS

SEQ ID NO: 117412 - protein, 7 aa, synthetic construct
FPRAVRD

SEQ ID NO: 117413 - protein, 7 aa, synthetic construct
FPREKAG

SEQ ID NO: 117414 - protein, 7 aa, synthetic construct
FPREKIN

SEQ ID NO: 117415 - protein, 7 aa, synthetic construct
FPRGATI

SEQ ID NO: 117416 - protein, 7 aa, synthetic construct
FPRGTTA

SEQ ID NO: 117417 - protein, 7 aa, synthetic construct
FPRHTGA

SEQ ID NO: 117418 - protein, 7 aa, synthetic construct
FPRITDK

SEQ ID NO: 117419 - protein, 7 aa, synthetic construct
FPRKVEV

SEQ ID NO: 117420 - protein, 7 aa, synthetic construct
FPRLGKD

SEQ ID NO: 117421 - protein, 7 aa, synthetic construct
FPRMASG

SEQ ID NO: 117422 - protein, 7 aa, synthetic construct
FPRMDKV

SEQ ID NO: 117423 - protein, 7 aa, synthetic construct
FPRMPAN

SEQ ID NO: 117424 - protein, 7 aa, synthetic construct
FPRNAMP

SEQ ID NO: 117425 - protein, 7 aa, synthetic construct
FPRNEAR

SEQ ID NO: 117426 - protein, 7 aa, synthetic construct
FPRNERN

SEQ ID NO: 117427 - protein, 7 aa, synthetic construct
FPRNIER

SEQ ID NO: 117428 - protein, 7 aa, synthetic construct
FPRNLGN

SEQ ID NO: 117429 - protein, 7 aa, synthetic construct
FPRNPAM

SEQ ID NO: 117430 - protein, 7 aa, synthetic construct
FPRNVGV

SEQ ID NO: 117431 - protein, 7 aa, synthetic construct
FPRPTSP

SEQ ID NO: 117432 - protein, 7 aa, synthetic construct
FPRQPTQ

SEQ ID NO: 117433 - protein, 7 aa, synthetic construct
FPRTDRP

SEQ ID NO: 117434 - protein, 7 aa, synthetic construct
FPRTKDQ

SEQ ID NO: 117435 - protein, 7 aa, synthetic construct
FPRTPEK

SEQ ID NO: 117436 - protein, 7 aa, synthetic construct
FPRTSAQ

SEQ ID NO: 117437 - protein, 7 aa, synthetic construct
FPRVIQA

SEQ ID NO: 117438 - protein, 7 aa, synthetic construct
FPRVMPQ

SEQ ID NO: 117439 - protein, 7 aa, synthetic construct
FPRVNKD

SEQ ID NO: 117440 - protein, 7 aa, synthetic construct
FPRVRGE

SEQ ID NO: 117441 - protein, 7 aa, synthetic construct
FPRVSMA

SEQ ID NO: 117442 - protein, 7 aa, synthetic construct
FPRVSSM

SEQ ID NO: 117443 - protein, 7 aa, synthetic construct
FPRVSTS

SEQ ID NO: 117444 - protein, 7 aa, synthetic construct
FPSAKYN

SEQ ID NO: 117445 - protein, 7 aa, synthetic construct
FPSGVKY

SEQ ID NO: 117446 - protein, 7 aa, synthetic construct
FPSHAQK

SEQ ID NO: 117447 - protein, 7 aa, synthetic construct
FPSHATR

SEQ ID NO: 117448 - protein, 7 aa, synthetic construct
FPSHRNA

SEQ ID NO: 117449 - protein, 7 aa, synthetic construct
FPSKDQR

SEQ ID NO: 117450 - protein, 7 aa, synthetic construct
FPSKGHQ

SEQ ID NO: 117451 - protein, 7 aa, synthetic construct
FPSKMIP

SEQ ID NO: 117452 - protein, 7 aa, synthetic construct
FPSKSQM

SEQ ID NO: 117453 - protein, 7 aa, synthetic construct
FPSNGHK

SEQ ID NO: 117454 - protein, 7 aa, synthetic construct
FPSQGFK

SEQ ID NO: 117455 - protein, 7 aa, synthetic construct
FPSQHGK

SEQ ID NO: 117456 - protein, 7 aa, synthetic construct
FPSRANL

SEQ ID NO: 117457 - protein, 7 aa, synthetic construct
FPSRGPT

SEQ ID NO: 117458 - protein, 7 aa, synthetic construct
FPSSNNR

SEQ ID NO: 117459 - protein, 7 aa, synthetic construct
FPSVRGP

SEQ ID NO: 117460 - protein, 7 aa, synthetic construct
FPTGGFK

SEQ ID NO: 117461 - protein, 7 aa, synthetic construct
FPTHNAR

SEQ ID NO: 117462 - protein, 7 aa, synthetic construct
FPTHSIK

SEQ ID NO: 117463 - protein, 7 aa, synthetic construct
FPTIKVS

SEQ ID NO: 117464 - protein, 7 aa, synthetic construct
FPTKALN

SEQ ID NO: 117465 - protein, 7 aa, synthetic construct
FPTKVER

SEQ ID NO: 117466 - protein, 7 aa, synthetic construct
FPTLKSH

SEQ ID NO: 117467 - protein, 7 aa, synthetic construct
FPTLRER

SEQ ID NO: 117468 - protein, 7 aa, synthetic construct
FPTMARN

SEQ ID NO: 117469 - protein, 7 aa, synthetic construct
FPTMGAR

SEQ ID NO: 117470 - protein, 7 aa, synthetic construct
FPTNPVK

SEQ ID NO: 117471 - protein, 7 aa, synthetic construct
FPTNQMR

SEQ ID NO: 117472 - protein, 7 aa, synthetic construct
FPTNSRN

SEQ ID NO: 117473 - protein, 7 aa, synthetic construct
FPTQKTF

SEQ ID NO: 117474 - protein, 7 aa, synthetic construct
FPTQREK

SEQ ID NO: 117475 - protein, 7 aa, synthetic construct
FPTRENK

SEQ ID NO: 117476 - protein, 7 aa, synthetic construct
FPTRTAG

SEQ ID NO: 117477 - protein, 7 aa, synthetic construct
FPTRVSA

SEQ ID NO: 117478 - protein, 7 aa, synthetic construct
FPTSDKK

SEQ ID NO: 117479 - protein, 7 aa, synthetic construct
FPTTRIA

SEQ ID NO: 117480 - protein, 7 aa, synthetic construct
FPVGVKV

SEQ ID NO: 117481 - protein, 7 aa, synthetic construct
FPVKHLS

SEQ ID NO: 117482 - protein, 7 aa, synthetic construct
FPVKNHV

SEQ ID NO: 117483 - protein, 7 aa, synthetic construct
FPVKTGH

SEQ ID NO: 117484 - protein, 7 aa, synthetic construct
FPVPKAI

SEQ ID NO: 117485 - protein, 7 aa, synthetic construct
FPVSRTA

SEQ ID NO: 117486 - protein, 7 aa, synthetic construct
FPVTTHK

SEQ ID NO: 117487 - protein, 7 aa, synthetic construct
FQADRRS

SEQ ID NO: 117488 - protein, 7 aa, synthetic construct
FQAGIAR

SEQ ID NO: 117489 - protein, 7 aa, synthetic construct
FQAHAGK

SEQ ID NO: 117490 - protein, 7 aa, synthetic construct
FQAMNSK

SEQ ID NO: 117491 - protein, 7 aa, synthetic construct
FQANTRT

SEQ ID NO: 117492 - protein, 7 aa, synthetic construct
FQAPASR

SEQ ID NO: 117493 - protein, 7 aa, synthetic construct
FQAPRGT

SEQ ID NO: 117494 - protein, 7 aa, synthetic construct
FQAPSMR

SEQ ID NO: 117495 - protein, 7 aa, synthetic construct
FQAQSKN

SEQ ID NO: 117496 - protein, 7 aa, synthetic construct
FQAREAK

SEQ ID NO: 117497 - protein, 7 aa, synthetic construct
FQARQDK

SEQ ID NO: 117498 - protein, 7 aa, synthetic construct
FQARQHN

SEQ ID NO: 117499 - protein, 7 aa, synthetic construct
FQASGYM

SEQ ID NO: 117500 - protein, 7 aa, synthetic construct
FQASQAK

SEQ ID NO: 117501 - protein, 7 aa, synthetic construct
FQASRPT

SEQ ID NO: 117502 - protein, 7 aa, synthetic construct
FQATAGR

SEQ ID NO: 117503 - protein, 7 aa, synthetic construct
FQATFKS

SEQ ID NO: 117504 - protein, 7 aa, synthetic construct
FQDAKKW

SEQ ID NO: 117505 - protein, 7 aa, synthetic construct
FQDAKVR

SEQ ID NO: 117506 - protein, 7 aa, synthetic construct
FQDGNKK

SEQ ID NO: 117507 - protein, 7 aa, synthetic construct
FQDRQKI

SEQ ID NO: 117508 - protein, 7 aa, synthetic construct
FQDRTMK

SEQ ID NO: 117509 - protein, 7 aa, synthetic construct
FQGAAAR

SEQ ID NO: 117510 - protein, 7 aa, synthetic construct
FQGERPK

SEQ ID NO: 117511 - protein, 7 aa, synthetic construct
FQGGNLR

SEQ ID NO: 117512 - protein, 7 aa, synthetic construct
FQGHISK

SEQ ID NO: 117513 - protein, 7 aa, synthetic construct
FQGIKYG

SEQ ID NO: 117514 - protein, 7 aa, synthetic construct
FQGKIAL

SEQ ID NO: 117515 - protein, 7 aa, synthetic construct
FQGKSHL

SEQ ID NO: 117516 - protein, 7 aa, synthetic construct
FQGLGAK

SEQ ID NO: 117517 - protein, 7 aa, synthetic construct
FQGMQKS

SEQ ID NO: 117518 - protein, 7 aa, synthetic construct
FQGNERK

SEQ ID NO: 117519 - protein, 7 aa, synthetic construct
FQGNGNR

SEQ ID NO: 117520 - protein, 7 aa, synthetic construct
FQGNQAR

SEQ ID NO: 117521 - protein, 7 aa, synthetic construct
FQGRQPT

SEQ ID NO: 117522 - protein, 7 aa, synthetic construct
FQGTDRK

SEQ ID NO: 117523 - protein, 7 aa, synthetic construct
FQGTGIR

SEQ ID NO: 117524 - protein, 7 aa, synthetic construct
FQGTPRL

SEQ ID NO: 117525 - protein, 7 aa, synthetic construct
FQHGNRV

SEQ ID NO: 117526 - protein, 7 aa, synthetic construct
FQHGRVS

SEQ ID NO: 117527 - protein, 7 aa, synthetic construct
FQHKAAI

SEQ ID NO: 117528 - protein, 7 aa, synthetic construct
FQHQTQK

SEQ ID NO: 117529 - protein, 7 aa, synthetic construct
FQHRTAM

SEQ ID NO: 117530 - protein, 7 aa, synthetic construct
FQIPKAG

SEQ ID NO: 117531 - protein, 7 aa, synthetic construct
FQKAPDR

SEQ ID NO: 117532 - protein, 7 aa, synthetic construct
FQKDTNK

SEQ ID NO: 117533 - protein, 7 aa, synthetic construct
FQKDYKY

SEQ ID NO: 117534 - protein, 7 aa, synthetic construct
FQKFSPQ

SEQ ID NO: 117535 - protein, 7 aa, synthetic construct
FQKGVAY

SEQ ID NO: 117536 - protein, 7 aa, synthetic construct
FQKGYAT

SEQ ID NO: 117537 - protein, 7 aa, synthetic construct
FQKHQAM

SEQ ID NO: 117538 - protein, 7 aa, synthetic construct
FQKKDTQ

SEQ ID NO: 117539 - protein, 7 aa, synthetic construct
FQKKENY

SEQ ID NO: 117540 - protein, 7 aa, synthetic construct
FQKKNEL

SEQ ID NO: 117541 - protein, 7 aa, synthetic construct
FQKMPHV

SEQ ID NO: 117542 - protein, 7 aa, synthetic construct
FQKNDAG

SEQ ID NO: 117543 - protein, 7 aa, synthetic construct
FQKNRDQ

SEQ ID NO: 117544 - protein, 7 aa, synthetic construct
FQKPPHT

SEQ ID NO: 117545 - protein, 7 aa, synthetic construct
FQKREAF

SEQ ID NO: 117546 - protein, 7 aa, synthetic construct
FQKRLGD

SEQ ID NO: 117547 - protein, 7 aa, synthetic construct
FQKVSHI

SEQ ID NO: 117548 - protein, 7 aa, synthetic construct
FQKYQIQ

SEQ ID NO: 117549 - protein, 7 aa, synthetic construct
FQLGVKN

SEQ ID NO: 117550 - protein, 7 aa, synthetic construct
FQMHAAK

SEQ ID NO: 117551 - protein, 7 aa, synthetic construct
FQMKNRD

SEQ ID NO: 117552 - protein, 7 aa, synthetic construct
FQMNLSK

SEQ ID NO: 117553 - protein, 7 aa, synthetic construct
FQMSMKT

SEQ ID NO: 117554 - protein, 7 aa, synthetic construct
FQNGART

SEQ ID NO: 117555 - protein, 7 aa, synthetic construct
FQNGIKY

SEQ ID NO: 117556 - protein, 7 aa, synthetic construct
FQNHARN

SEQ ID NO: 117557 - protein, 7 aa, synthetic construct
FQNHVHK

SEQ ID NO: 117558 - protein, 7 aa, synthetic construct
FQNKHGI

SEQ ID NO: 117559 - protein, 7 aa, synthetic construct
FQNKPIF

SEQ ID NO: 117560 - protein, 7 aa, synthetic construct
FQNNLSK

SEQ ID NO: 117561 - protein, 7 aa, synthetic construct
FQNQAFK

SEQ ID NO: 117562 - protein, 7 aa, synthetic construct
FQNQQMK

SEQ ID NO: 117563 - protein, 7 aa, synthetic construct
FQNTKYI

SEQ ID NO: 117564 - protein, 7 aa, synthetic construct
FQNTVSR

SEQ ID NO: 117565 - protein, 7 aa, synthetic construct
FQNVKQF

SEQ ID NO: 117566 - protein, 7 aa, synthetic construct
FQPGRNM

SEQ ID NO: 117567 - protein, 7 aa, synthetic construct
FQPRMKD

SEQ ID NO: 117568 - protein, 7 aa, synthetic construct
FQQAARS

SEQ ID NO: 117569 - protein, 7 aa, synthetic construct
FQQALKM

SEQ ID NO: 117570 - protein, 7 aa, synthetic construct
FQQGGSR

SEQ ID NO: 117571 - protein, 7 aa, synthetic construct
FQQGSRV

SEQ ID NO: 117572 - protein, 7 aa, synthetic construct
FQQGYQK

SEQ ID NO: 117573 - protein, 7 aa, synthetic construct
FQQKHRE

SEQ ID NO: 117574 - protein, 7 aa, synthetic construct
FQQKRDT

SEQ ID NO: 117575 - protein, 7 aa, synthetic construct
FQQKRGE

SEQ ID NO: 117576 - protein, 7 aa, synthetic construct
FQQPKGQ

SEQ ID NO: 117577 - protein, 7 aa, synthetic construct
FQQQGAK

SEQ ID NO: 117578 - protein, 7 aa, synthetic construct
FQQQRTT

SEQ ID NO: 117579 - protein, 7 aa, synthetic construct
FQQTSNK

SEQ ID NO: 117580 - protein, 7 aa, synthetic construct
FQRDMSK

SEQ ID NO: 117581 - protein, 7 aa, synthetic construct
FQRGGVM

SEQ ID NO: 117582 - protein, 7 aa, synthetic construct
FQRIKEG

SEQ ID NO: 117583 - protein, 7 aa, synthetic construct
FQRKAIE

SEQ ID NO: 117584 - protein, 7 aa, synthetic construct
FQRMSRD

SEQ ID NO: 117585 - protein, 7 aa, synthetic construct
FQRNAHG

SEQ ID NO: 117586 - protein, 7 aa, synthetic construct
FQRNGGL

SEQ ID NO: 117587 - protein, 7 aa, synthetic construct
FQRQSPP

SEQ ID NO: 117588 - protein, 7 aa, synthetic construct
FQRSIGH

SEQ ID NO: 117589 - protein, 7 aa, synthetic construct
FQRSQQV

SEQ ID NO: 117590 - protein, 7 aa, synthetic construct
FQSAHKN

SEQ ID NO: 117591 - protein, 7 aa, synthetic construct
FQSAQSR

SEQ ID NO: 117592 - protein, 7 aa, synthetic construct
FQSGLPR

SEQ ID NO: 117593 - protein, 7 aa, synthetic construct
FQSGQRF

SEQ ID NO: 117594 - protein, 7 aa, synthetic construct
FQSHRQV

SEQ ID NO: 117595 - protein, 7 aa, synthetic construct
FQSHSSK

SEQ ID NO: 117596 - protein, 7 aa, synthetic construct
FQSKESK

SEQ ID NO: 117597 - protein, 7 aa, synthetic construct
FQSNRMI

SEQ ID NO: 117598 - protein, 7 aa, synthetic construct
FQSRVVN

SEQ ID NO: 117599 - protein, 7 aa, synthetic construct
FQSSIGR

SEQ ID NO: 117600 - protein, 7 aa, synthetic construct
FQTAQPR

SEQ ID NO: 117601 - protein, 7 aa, synthetic construct
FQTESKR

SEQ ID NO: 117602 - protein, 7 aa, synthetic construct
FQTKLAT

SEQ ID NO: 117603 - protein, 7 aa, synthetic construct
FQTLQGK

SEQ ID NO: 117604 - protein, 7 aa, synthetic construct
FQTMHPK

SEQ ID NO: 117605 - protein, 7 aa, synthetic construct
FQTNDAS

SEQ ID NO: 117606 - protein, 7 aa, synthetic construct
FQTNKMM

SEQ ID NO: 117607 - protein, 7 aa, synthetic construct
FQTNSAR

SEQ ID NO: 117608 - protein, 7 aa, synthetic construct
FQTQSPR

SEQ ID NO: 117609 - protein, 7 aa, synthetic construct
FQTTGNR

SEQ ID NO: 117610 - protein, 7 aa, synthetic construct
FQTVKDR

SEQ ID NO: 117611 - protein, 7 aa, synthetic construct
FQVLGQD

SEQ ID NO: 117612 - protein, 7 aa, synthetic construct
FQVMRDK

SEQ ID NO: 117613 - protein, 7 aa, synthetic construct
FQVNTSR

SEQ ID NO: 117614 - protein, 7 aa, synthetic construct
FQVTNRV

SEQ ID NO: 117615 - protein, 7 aa, synthetic construct
FRAAQPH

SEQ ID NO: 117616 - protein, 7 aa, synthetic construct
FRAHKDA

SEQ ID NO: 117617 - protein, 7 aa, synthetic construct
FRAKESV

SEQ ID NO: 117618 - protein, 7 aa, synthetic construct
FRAKEWD

SEQ ID NO: 117619 - protein, 7 aa, synthetic construct
FRAKPEM

SEQ ID NO: 117620 - protein, 7 aa, synthetic construct
FRALSAA

SEQ ID NO: 117621 - protein, 7 aa, synthetic construct
FRALSKE

SEQ ID NO: 117622 - protein, 7 aa, synthetic construct
FRANTPA

SEQ ID NO: 117623 - protein, 7 aa, synthetic construct
FRASTEK

SEQ ID NO: 117624 - protein, 7 aa, synthetic construct
FRATVMT

SEQ ID NO: 117625 - protein, 7 aa, synthetic construct
FRDGMMK

SEQ ID NO: 117626 - protein, 7 aa, synthetic construct
FRDIRNH

SEQ ID NO: 117627 - protein, 7 aa, synthetic construct
FRDKALL

SEQ ID NO: 117628 - protein, 7 aa, synthetic construct
FRDKANV

SEQ ID NO: 117629 - protein, 7 aa, synthetic construct
FRDRVMN

SEQ ID NO: 117630 - protein, 7 aa, synthetic construct
FRDVHRA

SEQ ID NO: 117631 - protein, 7 aa, synthetic construct
FREAVSK

SEQ ID NO: 117632 - protein, 7 aa, synthetic construct
FREGMIK

SEQ ID NO: 117633 - protein, 7 aa, synthetic construct
FREHRQN

SEQ ID NO: 117634 - protein, 7 aa, synthetic construct
FREPKFT

SEQ ID NO: 117635 - protein, 7 aa, synthetic construct
FREQKMI

SEQ ID NO: 117636 - protein, 7 aa, synthetic construct
FRERTTG

SEQ ID NO: 117637 - protein, 7 aa, synthetic construct
FRETISK

SEQ ID NO: 117638 - protein, 7 aa, synthetic construct
FREVHKN

SEQ ID NO: 117639 - protein, 7 aa, synthetic construct
FRGATTM

SEQ ID NO: 117640 - protein, 7 aa, synthetic construct
FRGHVKE

SEQ ID NO: 117641 - protein, 7 aa, synthetic construct
FRGINIS

SEQ ID NO: 117642 - protein, 7 aa, synthetic construct
FRGKAEG

SEQ ID NO: 117643 - protein, 7 aa, synthetic construct
FRGLKET

SEQ ID NO: 117644 - protein, 7 aa, synthetic construct
FRGNLAG

SEQ ID NO: 117645 - protein, 7 aa, synthetic construct
FRGQIPP

SEQ ID NO: 117646 - protein, 7 aa, synthetic construct
FRGQLQT

SEQ ID NO: 117647 - protein, 7 aa, synthetic construct
FRGTEAK

SEQ ID NO: 117648 - protein, 7 aa, synthetic construct
FRGTVAG

SEQ ID NO: 117649 - protein, 7 aa, synthetic construct
FRGVLPA

SEQ ID NO: 117650 - protein, 7 aa, synthetic construct
FRGVNLG

SEQ ID NO: 117651 - protein, 7 aa, synthetic construct
FRGVPHA

SEQ ID NO: 117652 - protein, 7 aa, synthetic construct
FRGVQAS

SEQ ID NO: 117653 - protein, 7 aa, synthetic construct
FRGVSDK

SEQ ID NO: 117654 - protein, 7 aa, synthetic construct
FRHNTSN

SEQ ID NO: 117655 - protein, 7 aa, synthetic construct
FRKDANV

SEQ ID NO: 117656 - protein, 7 aa, synthetic construct
FRKDITT

SEQ ID NO: 117657 - protein, 7 aa, synthetic construct
FRKDPIM

SEQ ID NO: 117658 - protein, 7 aa, synthetic construct
FRKDQNT

SEQ ID NO: 117659 - protein, 7 aa, synthetic construct
FRKDSIT

SEQ ID NO: 117660 - protein, 7 aa, synthetic construct
FRKESDK

SEQ ID NO: 117661 - protein, 7 aa, synthetic construct
FRKGENA

SEQ ID NO: 117662 - protein, 7 aa, synthetic construct
FRKGPEM

SEQ ID NO: 117663 - protein, 7 aa, synthetic construct
FRKGSDG

SEQ ID NO: 117664 - protein, 7 aa, synthetic construct
FRKMTME

SEQ ID NO: 117665 - protein, 7 aa, synthetic construct
FRKPASD

SEQ ID NO: 117666 - protein, 7 aa, synthetic construct
FRKSEPP

SEQ ID NO: 117667 - protein, 7 aa, synthetic construct
FRKSMMD

SEQ ID NO: 117668 - protein, 7 aa, synthetic construct
FRKTMES

SEQ ID NO: 117669 - protein, 7 aa, synthetic construct
FRLDLPK

SEQ ID NO: 117670 - protein, 7 aa, synthetic construct
FRLGDKN

SEQ ID NO: 117671 - protein, 7 aa, synthetic construct
FRMDKNY

SEQ ID NO: 117672 - protein, 7 aa, synthetic construct
FRMEMTK

SEQ ID NO: 117673 - protein, 7 aa, synthetic construct
FRMGSHQ

SEQ ID NO: 117674 - protein, 7 aa, synthetic construct
FRMTNQP

SEQ ID NO: 117675 - protein, 7 aa, synthetic construct
FRNAAIQ

SEQ ID NO: 117676 - protein, 7 aa, synthetic construct
FRNAPYP

SEQ ID NO: 117677 - protein, 7 aa, synthetic construct
FRNASAG

SEQ ID NO: 117678 - protein, 7 aa, synthetic construct
FRNDQKI

SEQ ID NO: 117679 - protein, 7 aa, synthetic construct
FRNGNYA

SEQ ID NO: 117680 - protein, 7 aa, synthetic construct
FRNGSMM

SEQ ID NO: 117681 - protein, 7 aa, synthetic construct
FRNIAEK

SEQ ID NO: 117682 - protein, 7 aa, synthetic construct
FRNKEAN

SEQ ID NO: 117683 - protein, 7 aa, synthetic construct
FRNKIDL

SEQ ID NO: 117684 - protein, 7 aa, synthetic construct
FRNMKEL

SEQ ID NO: 117685 - protein, 7 aa, synthetic construct
FRNMQGT

SEQ ID NO: 117686 - protein, 7 aa, synthetic construct
FRNNAVL

SEQ ID NO: 117687 - protein, 7 aa, synthetic construct
FRNNQQH

SEQ ID NO: 117688 - protein, 7 aa, synthetic construct
FRNPERG

SEQ ID NO: 117689 - protein, 7 aa, synthetic construct
FRNPHTA

SEQ ID NO: 117690 - protein, 7 aa, synthetic construct
FRNPMAN

SEQ ID NO: 117691 - protein, 7 aa, synthetic construct
FRNPMQS

SEQ ID NO: 117692 - protein, 7 aa, synthetic construct
FRNQVSA

SEQ ID NO: 117693 - protein, 7 aa, synthetic construct
FRNSHTQ

SEQ ID NO: 117694 - protein, 7 aa, synthetic construct
FRNSPTI

SEQ ID NO: 117695 - protein, 7 aa, synthetic construct
FRNSQLT

SEQ ID NO: 117696 - protein, 7 aa, synthetic construct
FRNSSSF

SEQ ID NO: 117697 - protein, 7 aa, synthetic construct
FRNTTHS

SEQ ID NO: 117698 - protein, 7 aa, synthetic construct
FRNTVEK

SEQ ID NO: 117699 - protein, 7 aa, synthetic construct
FRNVAVA

SEQ ID NO: 117700 - protein, 7 aa, synthetic construct
FRNVIPN

SEQ ID NO: 117701 - protein, 7 aa, synthetic construct
FRNVITA

SEQ ID NO: 117702 - protein, 7 aa, synthetic construct
FRNVTSL

SEQ ID NO: 117703 - protein, 7 aa, synthetic construct
FRPAMHA

SEQ ID NO: 117704 - protein, 7 aa, synthetic construct
FRPGAGG

SEQ ID NO: 117705 - protein, 7 aa, synthetic construct
FRPGIVP

SEQ ID NO: 117706 - protein, 7 aa, synthetic construct
FRPIRES

SEQ ID NO: 117707 - protein, 7 aa, synthetic construct
FRPMSTN

SEQ ID NO: 117708 - protein, 7 aa, synthetic construct
FRPNPNS

SEQ ID NO: 117709 - protein, 7 aa, synthetic construct
FRPPQAH

SEQ ID NO: 117710 - protein, 7 aa, synthetic construct
FRPQSMA

SEQ ID NO: 117711 - protein, 7 aa, synthetic construct
FRPQSNQ

SEQ ID NO: 117712 - protein, 7 aa, synthetic construct
FRPQSTM

SEQ ID NO: 117713 - protein, 7 aa, synthetic construct
FRPRTEM

SEQ ID NO: 117714 - protein, 7 aa, synthetic construct
FRPSGVV

SEQ ID NO: 117715 - protein, 7 aa, synthetic construct
FRPSMGN

SEQ ID NO: 117716 - protein, 7 aa, synthetic construct
FRPTANV

SEQ ID NO: 117717 - protein, 7 aa, synthetic construct
FRPTSTI

SEQ ID NO: 117718 - protein, 7 aa, synthetic construct
FRPVAMG

SEQ ID NO: 117719 - protein, 7 aa, synthetic construct
FRPVGST

SEQ ID NO: 117720 - protein, 7 aa, synthetic construct
FRPVSTA

SEQ ID NO: 117721 - protein, 7 aa, synthetic construct
FRQATDK

SEQ ID NO: 117722 - protein, 7 aa, synthetic construct
FRQDQKL

SEQ ID NO: 117723 - protein, 7 aa, synthetic construct
FRQGFAS

SEQ ID NO: 117724 - protein, 7 aa, synthetic construct
FRQGSVI

SEQ ID NO: 117725 - protein, 7 aa, synthetic construct
FRQLQGS

SEQ ID NO: 117726 - protein, 7 aa, synthetic construct
FRQNHTS

SEQ ID NO: 117727 - protein, 7 aa, synthetic construct
FRQPNIT

SEQ ID NO: 117728 - protein, 7 aa, synthetic construct
FRQTGPM

SEQ ID NO: 117729 - protein, 7 aa, synthetic construct
FRQVNGI

SEQ ID NO: 117730 - protein, 7 aa, synthetic construct
FRRDYLD

SEQ ID NO: 117731 - protein, 7 aa, synthetic construct
FRREANH

SEQ ID NO: 117732 - protein, 7 aa, synthetic construct
FRRGEDS

SEQ ID NO: 117733 - protein, 7 aa, synthetic construct
FRSAMKE

SEQ ID NO: 117734 - protein, 7 aa, synthetic construct
FRSDNRH

SEQ ID NO: 117735 - protein, 7 aa, synthetic construct
FRSGLTM

SEQ ID NO: 117736 - protein, 7 aa, synthetic construct
FRSHIAQ

SEQ ID NO: 117737 - protein, 7 aa, synthetic construct
FRSKLSD

SEQ ID NO: 117738 - protein, 7 aa, synthetic construct
FRSNDRL

SEQ ID NO: 117739 - protein, 7 aa, synthetic construct
FRSNGPP

SEQ ID NO: 117740 - protein, 7 aa, synthetic construct
FRSNLPV

SEQ ID NO: 117741 - protein, 7 aa, synthetic construct
FRSNMAG

SEQ ID NO: 117742 - protein, 7 aa, synthetic construct
FRSPPSA

SEQ ID NO: 117743 - protein, 7 aa, synthetic construct
FRSSKDI

SEQ ID NO: 117744 - protein, 7 aa, synthetic construct
FRSTNPN

SEQ ID NO: 117745 - protein, 7 aa, synthetic construct
FRSTPMA

SEQ ID NO: 117746 - protein, 7 aa, synthetic construct
FRSVMKE

SEQ ID NO: 117747 - protein, 7 aa, synthetic construct
FRSVTVN

SEQ ID NO: 117748 - protein, 7 aa, synthetic construct
FRTAADR

SEQ ID NO: 117749 - protein, 7 aa, synthetic construct
FRTAQSL

SEQ ID NO: 117750 - protein, 7 aa, synthetic construct
FRTDAMK

SEQ ID NO: 117751 - protein, 7 aa, synthetic construct
FRTDLTK

SEQ ID NO: 117752 - protein, 7 aa, synthetic construct
FRTEVSK

SEQ ID NO: 117753 - protein, 7 aa, synthetic construct
FRTGAMQ

SEQ ID NO: 117754 - protein, 7 aa, synthetic construct
FRTGEIR

SEQ ID NO: 117755 - protein, 7 aa, synthetic construct
FRTGLTQ

SEQ ID NO: 117756 - protein, 7 aa, synthetic construct
FRTHQQP

SEQ ID NO: 117757 - protein, 7 aa, synthetic construct
FRTHVGT

SEQ ID NO: 117758 - protein, 7 aa, synthetic construct
FRTKLES

SEQ ID NO: 117759 - protein, 7 aa, synthetic construct
FRTKVDS

SEQ ID NO: 117760 - protein, 7 aa, synthetic construct
FRTLQPQ

SEQ ID NO: 117761 - protein, 7 aa, synthetic construct
FRTMDKV

SEQ ID NO: 117762 - protein, 7 aa, synthetic construct
FRTNELR

SEQ ID NO: 117763 - protein, 7 aa, synthetic construct
FRTNQGL

SEQ ID NO: 117764 - protein, 7 aa, synthetic construct
FRTNVQL

SEQ ID NO: 117765 - protein, 7 aa, synthetic construct
FRTPIQG

SEQ ID NO: 117766 - protein, 7 aa, synthetic construct
FRTPNPV

SEQ ID NO: 117767 - protein, 7 aa, synthetic construct
FRTPVPP

SEQ ID NO: 117768 - protein, 7 aa, synthetic construct
FRTSNTV

SEQ ID NO: 117769 - protein, 7 aa, synthetic construct
FRTSPST

SEQ ID NO: 117770 - protein, 7 aa, synthetic construct
FRTSTTM

SEQ ID NO: 117771 - protein, 7 aa, synthetic construct
FRTTSVL

SEQ ID NO: 117772 - protein, 7 aa, synthetic construct
FRVASGN

SEQ ID NO: 117773 - protein, 7 aa, synthetic construct
FRVKDIS

SEQ ID NO: 117774 - protein, 7 aa, synthetic construct
FRVTNAV

SEQ ID NO: 117775 - protein, 7 aa, synthetic construct
FSADRGK

SEQ ID NO: 117776 - protein, 7 aa, synthetic construct
FSAGHNK

SEQ ID NO: 117777 - protein, 7 aa, synthetic construct
FSAGLKS

SEQ ID NO: 117778 - protein, 7 aa, synthetic construct
FSAGVRS

SEQ ID NO: 117779 - protein, 7 aa, synthetic construct
FSAHMQK

SEQ ID NO: 117780 - protein, 7 aa, synthetic construct
FSAHTGR

SEQ ID NO: 117781 - protein, 7 aa, synthetic construct
FSAKMMV

SEQ ID NO: 117782 - protein, 7 aa, synthetic construct
FSAKPTM

SEQ ID NO: 117783 - protein, 7 aa, synthetic construct
FSAKRDM

SEQ ID NO: 117784 - protein, 7 aa, synthetic construct
FSAQHAR

SEQ ID NO: 117785 - protein, 7 aa, synthetic construct
FSARQPV

SEQ ID NO: 117786 - protein, 7 aa, synthetic construct
FSATHKL

SEQ ID NO: 117787 - protein, 7 aa, synthetic construct
FSATKSY

SEQ ID NO: 117788 - protein, 7 aa, synthetic construct
FSAYSKG

SEQ ID NO: 117789 - protein, 7 aa, synthetic construct
FSDKRIF

SEQ ID NO: 117790 - protein, 7 aa, synthetic construct
FSDNKTR

SEQ ID NO: 117791 - protein, 7 aa, synthetic construct
FSDRLNK

SEQ ID NO: 117792 - protein, 7 aa, synthetic construct
FSERVRN

SEQ ID NO: 117793 - protein, 7 aa, synthetic construct
FSFKNSG

SEQ ID NO: 117794 - protein, 7 aa, synthetic construct
FSGASSR

SEQ ID NO: 117795 - protein, 7 aa, synthetic construct
FSGAVMR

SEQ ID NO: 117796 - protein, 7 aa, synthetic construct
FSGFKSG

SEQ ID NO: 117797 - protein, 7 aa, synthetic construct
FSGFNKG

SEQ ID NO: 117798 - protein, 7 aa, synthetic construct
FSGGINR

SEQ ID NO: 117799 - protein, 7 aa, synthetic construct
FSGGVHY

SEQ ID NO: 117800 - protein, 7 aa, synthetic construct
FSGHAKA

SEQ ID NO: 117801 - protein, 7 aa, synthetic construct
FSGHLKS

SEQ ID NO: 117802 - protein, 7 aa, synthetic construct
FSGHNVK

SEQ ID NO: 117803 - protein, 7 aa, synthetic construct
FSGIKIT

SEQ ID NO: 117804 - protein, 7 aa, synthetic construct
FSGMTPK

SEQ ID NO: 117805 - protein, 7 aa, synthetic construct
FSGMVQR

SEQ ID NO: 117806 - protein, 7 aa, synthetic construct
FSGNHKG

SEQ ID NO: 117807 - protein, 7 aa, synthetic construct
FSGNIVR

SEQ ID NO: 117808 - protein, 7 aa, synthetic construct
FSGPTSK

SEQ ID NO: 117809 - protein, 7 aa, synthetic construct
FSGQGKQ

SEQ ID NO: 117810 - protein, 7 aa, synthetic construct
FSGQGTR

SEQ ID NO: 117811 - protein, 7 aa, synthetic construct
FSGQIRP

SEQ ID NO: 117812 - protein, 7 aa, synthetic construct
FSGQNRN

SEQ ID NO: 117813 - protein, 7 aa, synthetic construct
FSGQQLK

SEQ ID NO: 117814 - protein, 7 aa, synthetic construct
FSGRTSV

SEQ ID NO: 117815 - protein, 7 aa, synthetic construct
FSGSHKT

SEQ ID NO: 117816 - protein, 7 aa, synthetic construct
FSGSHYP

SEQ ID NO: 117817 - protein, 7 aa, synthetic construct
FSGSQQK

SEQ ID NO: 117818 - protein, 7 aa, synthetic construct
FSGTAHK

SEQ ID NO: 117819 - protein, 7 aa, synthetic construct
FSGTHKN

SEQ ID NO: 117820 - protein, 7 aa, synthetic construct
FSGTYKM

SEQ ID NO: 117821 - protein, 7 aa, synthetic construct
FSGTYKT

SEQ ID NO: 117822 - protein, 7 aa, synthetic construct
FSGVPSR

SEQ ID NO: 117823 - protein, 7 aa, synthetic construct
FSGVVQR

SEQ ID NO: 117824 - protein, 7 aa, synthetic construct
FSGYKGG

SEQ ID NO: 117825 - protein, 7 aa, synthetic construct
FSHAKFS

SEQ ID NO: 117826 - protein, 7 aa, synthetic construct
FSHAVKA

SEQ ID NO: 117827 - protein, 7 aa, synthetic construct
FSHKANS

SEQ ID NO: 117828 - protein, 7 aa, synthetic construct
FSHKPHV

SEQ ID NO: 117829 - protein, 7 aa, synthetic construct
FSHLKSQ

SEQ ID NO: 117830 - protein, 7 aa, synthetic construct
FSHLNQK

SEQ ID NO: 117831 - protein, 7 aa, synthetic construct
FSHMEAR

SEQ ID NO: 117832 - protein, 7 aa, synthetic construct
FSHNVRA

SEQ ID NO: 117833 - protein, 7 aa, synthetic construct
FSHPLKQ

SEQ ID NO: 117834 - protein, 7 aa, synthetic construct
FSHQLKN

SEQ ID NO: 117835 - protein, 7 aa, synthetic construct
FSHRHAP

SEQ ID NO: 117836 - protein, 7 aa, synthetic construct
FSHSGKL

SEQ ID NO: 117837 - protein, 7 aa, synthetic construct
FSHSSKV

SEQ ID NO: 117838 - protein, 7 aa, synthetic construct
FSHSSLK

SEQ ID NO: 117839 - protein, 7 aa, synthetic construct
FSHTGSK

SEQ ID NO: 117840 - protein, 7 aa, synthetic construct
FSHTQKT

SEQ ID NO: 117841 - protein, 7 aa, synthetic construct
FSHTSKA

SEQ ID NO: 117842 - protein, 7 aa, synthetic construct
FSHVAAK

SEQ ID NO: 117843 - protein, 7 aa, synthetic construct
FSIKSEK

SEQ ID NO: 117844 - protein, 7 aa, synthetic construct
FSKAEKF

SEQ ID NO: 117845 - protein, 7 aa, synthetic construct
FSKAHPM

SEQ ID NO: 117846 - protein, 7 aa, synthetic construct
FSKATAF

SEQ ID NO: 117847 - protein, 7 aa, synthetic construct
FSKDYPK

SEQ ID NO: 117848 - protein, 7 aa, synthetic construct
FSKEKHV

SEQ ID NO: 117849 - protein, 7 aa, synthetic construct
FSKEYKQ

SEQ ID NO: 117850 - protein, 7 aa, synthetic construct
FSKFAPM

SEQ ID NO: 117851 - protein, 7 aa, synthetic construct
FSKGFGT

SEQ ID NO: 117852 - protein, 7 aa, synthetic construct
FSKGPIT

SEQ ID NO: 117853 - protein, 7 aa, synthetic construct
FSKGYQA

SEQ ID NO: 117854 - protein, 7 aa, synthetic construct
FSKHFNA

SEQ ID NO: 117855 - protein, 7 aa, synthetic construct
FSKHIRD

SEQ ID NO: 117856 - protein, 7 aa, synthetic construct
FSKHLQN

SEQ ID NO: 117857 - protein, 7 aa, synthetic construct
FSKHPMP

SEQ ID NO: 117858 - protein, 7 aa, synthetic construct
FSKHSQL

SEQ ID NO: 117859 - protein, 7 aa, synthetic construct
FSKIERN

SEQ ID NO: 117860 - protein, 7 aa, synthetic construct
FSKKSID

SEQ ID NO: 117861 - protein, 7 aa, synthetic construct
FSKLEQR

SEQ ID NO: 117862 - protein, 7 aa, synthetic construct
FSKLSNV

SEQ ID NO: 117863 - protein, 7 aa, synthetic construct
FSKLTSY

SEQ ID NO: 117864 - protein, 7 aa, synthetic construct
FSKLYTG

SEQ ID NO: 117865 - protein, 7 aa, synthetic construct
FSKMQGI

SEQ ID NO: 117866 - protein, 7 aa, synthetic construct
FSKNPLN

SEQ ID NO: 117867 - protein, 7 aa, synthetic construct
FSKNSFA

SEQ ID NO: 117868 - protein, 7 aa, synthetic construct
FSKNSVF

SEQ ID NO: 117869 - protein, 7 aa, synthetic construct
FSKNVMH

SEQ ID NO: 117870 - protein, 7 aa, synthetic construct
FSKPGYG

SEQ ID NO: 117871 - protein, 7 aa, synthetic construct
FSKPIQM

SEQ ID NO: 117872 - protein, 7 aa, synthetic construct
FSKPLTH

SEQ ID NO: 117873 - protein, 7 aa, synthetic construct
FSKPSML

SEQ ID NO: 117874 - protein, 7 aa, synthetic construct
FSKQHDR

SEQ ID NO: 117875 - protein, 7 aa, synthetic construct
FSKRETM

SEQ ID NO: 117876 - protein, 7 aa, synthetic construct
FSKSDKT

SEQ ID NO: 117877 - protein, 7 aa, synthetic construct
FSKSFGG

SEQ ID NO: 117878 - protein, 7 aa, synthetic construct
FSKSITY

SEQ ID NO: 117879 - protein, 7 aa, synthetic construct
FSKSPIM

SEQ ID NO: 117880 - protein, 7 aa, synthetic construct
FSKSREM

SEQ ID NO: 117881 - protein, 7 aa, synthetic construct
FSKSTGA

SEQ ID NO: 117882 - protein, 7 aa, synthetic construct
FSKTMPH

SEQ ID NO: 117883 - protein, 7 aa, synthetic construct
FSKTQFV

SEQ ID NO: 117884 - protein, 7 aa, synthetic construct
FSKTYAA

SEQ ID NO: 117885 - protein, 7 aa, synthetic construct
FSKVAGF

SEQ ID NO: 117886 - protein, 7 aa, synthetic construct
FSKVANF

SEQ ID NO: 117887 - protein, 7 aa, synthetic construct
FSKYSVG

SEQ ID NO: 117888 - protein, 7 aa, synthetic construct
FSLHTKG

SEQ ID NO: 117889 - protein, 7 aa, synthetic construct
FSMAAKM

SEQ ID NO: 117890 - protein, 7 aa, synthetic construct
FSMASKA

SEQ ID NO: 117891 - protein, 7 aa, synthetic construct
FSMGNQK

SEQ ID NO: 117892 - protein, 7 aa, synthetic construct
FSMNAIK

SEQ ID NO: 117893 - protein, 7 aa, synthetic construct
FSNAQAK

SEQ ID NO: 117894 - protein, 7 aa, synthetic construct
FSNIRGP

SEQ ID NO: 117895 - protein, 7 aa, synthetic construct
FSNMTRA

SEQ ID NO: 117896 - protein, 7 aa, synthetic construct
FSNNYKT

SEQ ID NO: 117897 - protein, 7 aa, synthetic construct
FSNPTSR

SEQ ID NO: 117898 - protein, 7 aa, synthetic construct
FSNQSKQ

SEQ ID NO: 117899 - protein, 7 aa, synthetic construct
FSNRGGM

SEQ ID NO: 117900 - protein, 7 aa, synthetic construct
FSNRIDR

SEQ ID NO: 117901 - protein, 7 aa, synthetic construct
FSNRVIP

SEQ ID NO: 117902 - protein, 7 aa, synthetic construct
FSNSRSH

SEQ ID NO: 117903 - protein, 7 aa, synthetic construct
FSNSTRG

SEQ ID NO: 117904 - protein, 7 aa, synthetic construct
FSPAHNK

SEQ ID NO: 117905 - protein, 7 aa, synthetic construct
FSPARLA

SEQ ID NO: 117906 - protein, 7 aa, synthetic construct
FSPGARN

SEQ ID NO: 117907 - protein, 7 aa, synthetic construct
FSPNRIV

SEQ ID NO: 117908 - protein, 7 aa, synthetic construct
FSQAQHK

SEQ ID NO: 117909 - protein, 7 aa, synthetic construct
FSQASPR

SEQ ID NO: 117910 - protein, 7 aa, synthetic construct
FSQHMGK

SEQ ID NO: 117911 - protein, 7 aa, synthetic construct
FSQHPPK

SEQ ID NO: 117912 - protein, 7 aa, synthetic construct
FSQHSKI

SEQ ID NO: 117913 - protein, 7 aa, synthetic construct
FSQPHKN

SEQ ID NO: 117914 - protein, 7 aa, synthetic construct
FSQSHPK

SEQ ID NO: 117915 - protein, 7 aa, synthetic construct
FSQSQFK

SEQ ID NO: 117916 - protein, 7 aa, synthetic construct
FSQSQLR

SEQ ID NO: 117917 - protein, 7 aa, synthetic construct
FSQYSKA

SEQ ID NO: 117918 - protein, 7 aa, synthetic construct
FSRIPAN

SEQ ID NO: 117919 - protein, 7 aa, synthetic construct
FSRPAAG

SEQ ID NO: 117920 - protein, 7 aa, synthetic construct
FSRPKEV

SEQ ID NO: 117921 - protein, 7 aa, synthetic construct
FSRPQQV

SEQ ID NO: 117922 - protein, 7 aa, synthetic construct
FSRPSPN

SEQ ID NO: 117923 - protein, 7 aa, synthetic construct
FSRPVTN

SEQ ID NO: 117924 - protein, 7 aa, synthetic construct
FSRQITA

SEQ ID NO: 117925 - protein, 7 aa, synthetic construct
FSRQSPG

SEQ ID NO: 117926 - protein, 7 aa, synthetic construct
FSRQVVA

SEQ ID NO: 117927 - protein, 7 aa, synthetic construct
FSRSVTQ

SEQ ID NO: 117928 - protein, 7 aa, synthetic construct
FSRTSPM

SEQ ID NO: 117929 - protein, 7 aa, synthetic construct
FSRTVDR

SEQ ID NO: 117930 - protein, 7 aa, synthetic construct
FSSAGGR

SEQ ID NO: 117931 - protein, 7 aa, synthetic construct
FSSENYR

SEQ ID NO: 117932 - protein, 7 aa, synthetic construct
FSSGHRQ

SEQ ID NO: 117933 - protein, 7 aa, synthetic construct
FSSGRVL

SEQ ID NO: 117934 - protein, 7 aa, synthetic construct
FSSGTPR

SEQ ID NO: 117935 - protein, 7 aa, synthetic construct
FSSHMKG

SEQ ID NO: 117936 - protein, 7 aa, synthetic construct
FSSHQQK

SEQ ID NO: 117937 - protein, 7 aa, synthetic construct
FSSHTGK

SEQ ID NO: 117938 - protein, 7 aa, synthetic construct
FSSKHSI

SEQ ID NO: 117939 - protein, 7 aa, synthetic construct
FSSMTKQ

SEQ ID NO: 117940 - protein, 7 aa, synthetic construct
FSSMYKS

SEQ ID NO: 117941 - protein, 7 aa, synthetic construct
FSSQHGK

SEQ ID NO: 117942 - protein, 7 aa, synthetic construct
FSSRAHA

SEQ ID NO: 117943 - protein, 7 aa, synthetic construct
FSSSHQK

SEQ ID NO: 117944 - protein, 7 aa, synthetic construct
FSSTPSR

SEQ ID NO: 117945 - protein, 7 aa, synthetic construct
FSSTTQR

SEQ ID NO: 117946 - protein, 7 aa, synthetic construct
FSSVRPQ

SEQ ID NO: 117947 - protein, 7 aa, synthetic construct
FSTAARL

SEQ ID NO: 117948 - protein, 7 aa, synthetic construct
FSTGQVR

SEQ ID NO: 117949 - protein, 7 aa, synthetic construct
FSTIKNM

SEQ ID NO: 117950 - protein, 7 aa, synthetic construct
FSTNGLR

SEQ ID NO: 117951 - protein, 7 aa, synthetic construct
FSTPSGR

SEQ ID NO: 117952 - protein, 7 aa, synthetic construct
FSTRGTG

SEQ ID NO: 117953 - protein, 7 aa, synthetic construct
FSTSHMK

SEQ ID NO: 117954 - protein, 7 aa, synthetic construct
FSTTQRL

SEQ ID NO: 117955 - protein, 7 aa, synthetic construct
FSTVRSG

SEQ ID NO: 117956 - protein, 7 aa, synthetic construct
FSVPKVN

SEQ ID NO: 117957 - protein, 7 aa, synthetic construct
FTAAHTR

SEQ ID NO: 117958 - protein, 7 aa, synthetic construct
FTAGKYG

SEQ ID NO: 117959 - protein, 7 aa, synthetic construct
FTAHKHA

SEQ ID NO: 117960 - protein, 7 aa, synthetic construct
FTAHNKV

SEQ ID NO: 117961 - protein, 7 aa, synthetic construct
FTAKPVH

SEQ ID NO: 117962 - protein, 7 aa, synthetic construct
FTANHKA

SEQ ID NO: 117963 - protein, 7 aa, synthetic construct
FTANPQR

SEQ ID NO: 117964 - protein, 7 aa, synthetic construct
FTANRQI

SEQ ID NO: 117965 - protein, 7 aa, synthetic construct
FTATTRI

SEQ ID NO: 117966 - protein, 7 aa, synthetic construct
FTAYQKG

SEQ ID NO: 117967 - protein, 7 aa, synthetic construct
FTDKPSR

SEQ ID NO: 117968 - protein, 7 aa, synthetic construct
FTDRMNK

SEQ ID NO: 117969 - protein, 7 aa, synthetic construct
FTDSWKN

SEQ ID NO: 117970 - protein, 7 aa, synthetic construct
FTDVQKK

SEQ ID NO: 117971 - protein, 7 aa, synthetic construct
FTEARSK

SEQ ID NO: 117972 - protein, 7 aa, synthetic construct
FTEKRPF

SEQ ID NO: 117973 - protein, 7 aa, synthetic construct
FTEKVGK

SEQ ID NO: 117974 - protein, 7 aa, synthetic construct
FTGAGHK

SEQ ID NO: 117975 - protein, 7 aa, synthetic construct
FTGAKYG

SEQ ID NO: 117976 - protein, 7 aa, synthetic construct
FTGAVRS

SEQ ID NO: 117977 - protein, 7 aa, synthetic construct
FTGDRKN

SEQ ID NO: 117978 - protein, 7 aa, synthetic construct
FTGGHPK

SEQ ID NO: 117979 - protein, 7 aa, synthetic construct
FTGGIGR

SEQ ID NO: 117980 - protein, 7 aa, synthetic construct
FTGHKIP

SEQ ID NO: 117981 - protein, 7 aa, synthetic construct
FTGHSKQ

SEQ ID NO: 117982 - protein, 7 aa, synthetic construct
FTGKFAN

SEQ ID NO: 117983 - protein, 7 aa, synthetic construct
FTGLKGI

SEQ ID NO: 117984 - protein, 7 aa, synthetic construct
FTGMAQR

SEQ ID NO: 117985 - protein, 7 aa, synthetic construct
FTGMDKK

SEQ ID NO: 117986 - protein, 7 aa, synthetic construct
FTGMKHS

SEQ ID NO: 117987 - protein, 7 aa, synthetic construct
FTGMRSA

SEQ ID NO: 117988 - protein, 7 aa, synthetic construct
FTGNAFK

SEQ ID NO: 117989 - protein, 7 aa, synthetic construct
FTGNART

SEQ ID NO: 117990 - protein, 7 aa, synthetic construct
FTGNNPK

SEQ ID NO: 117991 - protein, 7 aa, synthetic construct
FTGNPGK

SEQ ID NO: 117992 - protein, 7 aa, synthetic construct
FTGNQKM

SEQ ID NO: 117993 - protein, 7 aa, synthetic construct
FTGNTRN

SEQ ID NO: 117994 - protein, 7 aa, synthetic construct
FTGREQK

SEQ ID NO: 117995 - protein, 7 aa, synthetic construct
FTGRPMV

SEQ ID NO: 117996 - protein, 7 aa, synthetic construct
FTGRVNM

SEQ ID NO: 117997 - protein, 7 aa, synthetic construct
FTGTGNR

SEQ ID NO: 117998 - protein, 7 aa, synthetic construct
FTGTHTK

SEQ ID NO: 117999 - protein, 7 aa, synthetic construct
FTGTNNR

SEQ ID NO: 118000 - protein, 7 aa, synthetic construct
FTGVGTR

SEQ ID NO: 118001 - protein, 7 aa, synthetic construct
FTGVHMK

SEQ ID NO: 118002 - protein, 7 aa, synthetic construct
FTGVKHS

SEQ ID NO: 118003 - protein, 7 aa, synthetic construct
FTGVTHK

SEQ ID NO: 118004 - protein, 7 aa, synthetic construct
FTHGMKA

SEQ ID NO: 118005 - protein, 7 aa, synthetic construct
FTHGRTV

SEQ ID NO: 118006 - protein, 7 aa, synthetic construct
FTHHVKV

SEQ ID NO: 118007 - protein, 7 aa, synthetic construct
FTHKLVA

SEQ ID NO: 118008 - protein, 7 aa, synthetic construct
FTHKVVT

SEQ ID NO: 118009 - protein, 7 aa, synthetic construct
FTHSQKA

SEQ ID NO: 118010 - protein, 7 aa, synthetic construct
FTHTVKS

SEQ ID NO: 118011 - protein, 7 aa, synthetic construct
FTHVKMG

SEQ ID NO: 118012 - protein, 7 aa, synthetic construct
FTKDNLR

SEQ ID NO: 118013 - protein, 7 aa, synthetic construct
FTKDTRF

SEQ ID NO: 118014 - protein, 7 aa, synthetic construct
FTKDVPR

SEQ ID NO: 118015 - protein, 7 aa, synthetic construct
FTKFPNA

SEQ ID NO: 118016 - protein, 7 aa, synthetic construct
FTKGADR

SEQ ID NO: 118017 - protein, 7 aa, synthetic construct
FTKGDSR

SEQ ID NO: 118018 - protein, 7 aa, synthetic construct
FTKGYIN

SEQ ID NO: 118019 - protein, 7 aa, synthetic construct
FTKHPQP

SEQ ID NO: 118020 - protein, 7 aa, synthetic construct
FTKIPIN

SEQ ID NO: 118021 - protein, 7 aa, synthetic construct
FTKLSRE

SEQ ID NO: 118022 - protein, 7 aa, synthetic construct
FTKMPNL

SEQ ID NO: 118023 - protein, 7 aa, synthetic construct
FTKPPGY

SEQ ID NO: 118024 - protein, 7 aa, synthetic construct
FTKRINE

SEQ ID NO: 118025 - protein, 7 aa, synthetic construct
FTKSAYA

SEQ ID NO: 118026 - protein, 7 aa, synthetic construct
FTKTRFD

SEQ ID NO: 118027 - protein, 7 aa, synthetic construct
FTKVERM

SEQ ID NO: 118028 - protein, 7 aa, synthetic construct
FTKYIKD

SEQ ID NO: 118029 - protein, 7 aa, synthetic construct
FTKYKEG

SEQ ID NO: 118030 - protein, 7 aa, synthetic construct
FTKYTPQ

SEQ ID NO: 118031 - protein, 7 aa, synthetic construct
FTLKGSM

SEQ ID NO: 118032 - protein, 7 aa, synthetic construct
FTLKPRE

SEQ ID NO: 118033 - protein, 7 aa, synthetic construct
FTLQVKN

SEQ ID NO: 118034 - protein, 7 aa, synthetic construct
FTMGNGK

SEQ ID NO: 118035 - protein, 7 aa, synthetic construct
FTMHSKA

SEQ ID NO: 118036 - protein, 7 aa, synthetic construct
FTMRMKE

SEQ ID NO: 118037 - protein, 7 aa, synthetic construct
FTNIDKK

SEQ ID NO: 118038 - protein, 7 aa, synthetic construct
FTNKETR

SEQ ID NO: 118039 - protein, 7 aa, synthetic construct
FTNLRRE

SEQ ID NO: 118040 - protein, 7 aa, synthetic construct
FTNMAQR

SEQ ID NO: 118041 - protein, 7 aa, synthetic construct
FTNQDRK

SEQ ID NO: 118042 - protein, 7 aa, synthetic construct
FTNQPKN

SEQ ID NO: 118043 - protein, 7 aa, synthetic construct
FTNRNLH

SEQ ID NO: 118044 - protein, 7 aa, synthetic construct
FTNRVRE

SEQ ID NO: 118045 - protein, 7 aa, synthetic construct
FTNSATR

SEQ ID NO: 118046 - protein, 7 aa, synthetic construct
FTNSNGA

SEQ ID NO: 118047 - protein, 7 aa, synthetic construct
FTNSRPI

SEQ ID NO: 118048 - protein, 7 aa, synthetic construct
FTPHATK

SEQ ID NO: 118049 - protein, 7 aa, synthetic construct
FTPKAVI

SEQ ID NO: 118050 - protein, 7 aa, synthetic construct
FTPKQHI

SEQ ID NO: 118051 - protein, 7 aa, synthetic construct
FTPNERK

SEQ ID NO: 118052 - protein, 7 aa, synthetic construct
FTPNGNR

SEQ ID NO: 118053 - protein, 7 aa, synthetic construct
FTPRGAQ

SEQ ID NO: 118054 - protein, 7 aa, synthetic construct
FTQGQQR

SEQ ID NO: 118055 - protein, 7 aa, synthetic construct
FTQGQYK

SEQ ID NO: 118056 - protein, 7 aa, synthetic construct
FTQHVNK

SEQ ID NO: 118057 - protein, 7 aa, synthetic construct
FTQKNKD

SEQ ID NO: 118058 - protein, 7 aa, synthetic construct
FTQMSAK

SEQ ID NO: 118059 - protein, 7 aa, synthetic construct
FTQNTRG

SEQ ID NO: 118060 - protein, 7 aa, synthetic construct
FTQRADK

SEQ ID NO: 118061 - protein, 7 aa, synthetic construct
FTQTKAL

SEQ ID NO: 118062 - protein, 7 aa, synthetic construct
FTREANK

SEQ ID NO: 118063 - protein, 7 aa, synthetic construct
FTRETSK

SEQ ID NO: 118064 - protein, 7 aa, synthetic construct
FTRGEKG

SEQ ID NO: 118065 - protein, 7 aa, synthetic construct
FTRMKEN

SEQ ID NO: 118066 - protein, 7 aa, synthetic construct
FTRMKGE

SEQ ID NO: 118067 - protein, 7 aa, synthetic construct
FTRNERV

SEQ ID NO: 118068 - protein, 7 aa, synthetic construct
FTRNMAA

SEQ ID NO: 118069 - protein, 7 aa, synthetic construct
FTRQAQI

SEQ ID NO: 118070 - protein, 7 aa, synthetic construct
FTRQTQG

SEQ ID NO: 118071 - protein, 7 aa, synthetic construct
FTRQVQG

SEQ ID NO: 118072 - protein, 7 aa, synthetic construct
FTRSTSA

SEQ ID NO: 118073 - protein, 7 aa, synthetic construct
FTRTVQG

SEQ ID NO: 118074 - protein, 7 aa, synthetic construct
FTSAQRG

SEQ ID NO: 118075 - protein, 7 aa, synthetic construct
FTSGARN

SEQ ID NO: 118076 - protein, 7 aa, synthetic construct
FTSGKYT

SEQ ID NO: 118077 - protein, 7 aa, synthetic construct
FTSGSRM

SEQ ID NO: 118078 - protein, 7 aa, synthetic construct
FTSGTNR

SEQ ID NO: 118079 - protein, 7 aa, synthetic construct
FTSGTYK

SEQ ID NO: 118080 - protein, 7 aa, synthetic construct
FTSKNIL

SEQ ID NO: 118081 - protein, 7 aa, synthetic construct
FTSQAAR

SEQ ID NO: 118082 - protein, 7 aa, synthetic construct
FTSQGFK

SEQ ID NO: 118083 - protein, 7 aa, synthetic construct
FTSQRGM

SEQ ID NO: 118084 - protein, 7 aa, synthetic construct
FTSRPTN

SEQ ID NO: 118085 - protein, 7 aa, synthetic construct
FTSRYPS

SEQ ID NO: 118086 - protein, 7 aa, synthetic construct
FTTAHKN

SEQ ID NO: 118087 - protein, 7 aa, synthetic construct
FTTGIRG

SEQ ID NO: 118088 - protein, 7 aa, synthetic construct
FTTGQRA

SEQ ID NO: 118089 - protein, 7 aa, synthetic construct
FTTKDRF

SEQ ID NO: 118090 - protein, 7 aa, synthetic construct
FTTKDVR

SEQ ID NO: 118091 - protein, 7 aa, synthetic construct
FTTKHIG

SEQ ID NO: 118092 - protein, 7 aa, synthetic construct
FTTKNYH

SEQ ID NO: 118093 - protein, 7 aa, synthetic construct
FTTNNGR

SEQ ID NO: 118094 - protein, 7 aa, synthetic construct
FTTNRHG

SEQ ID NO: 118095 - protein, 7 aa, synthetic construct
FTTPKVT

SEQ ID NO: 118096 - protein, 7 aa, synthetic construct
FTTRTGM

SEQ ID NO: 118097 - protein, 7 aa, synthetic construct
FTTSHNK

SEQ ID NO: 118098 - protein, 7 aa, synthetic construct
FTTTYNK

SEQ ID NO: 118099 - protein, 7 aa, synthetic construct
FTTVHGK

SEQ ID NO: 118100 - protein, 7 aa, synthetic construct
FVAGSGR

SEQ ID NO: 118101 - protein, 7 aa, synthetic construct
FVAHKAN

SEQ ID NO: 118102 - protein, 7 aa, synthetic construct
FVAHSKT

SEQ ID NO: 118103 - protein, 7 aa, synthetic construct
FVANAKS

SEQ ID NO: 118104 - protein, 7 aa, synthetic construct
FVAPRGA

SEQ ID NO: 118105 - protein, 7 aa, synthetic construct
FVARQPA

SEQ ID NO: 118106 - protein, 7 aa, synthetic construct
FVASHKT

SEQ ID NO: 118107 - protein, 7 aa, synthetic construct
FVDKRTL

SEQ ID NO: 118108 - protein, 7 aa, synthetic construct
FVDRTRN

SEQ ID NO: 118109 - protein, 7 aa, synthetic construct
FVGAKSI

SEQ ID NO: 118110 - protein, 7 aa, synthetic construct
FVGGHKG

SEQ ID NO: 118111 - protein, 7 aa, synthetic construct
FVGHKQI

SEQ ID NO: 118112 - protein, 7 aa, synthetic construct
FVGHKSM

SEQ ID NO: 118113 - protein, 7 aa, synthetic construct
FVGRQSG

SEQ ID NO: 118114 - protein, 7 aa, synthetic construct
FVGTARS

SEQ ID NO: 118115 - protein, 7 aa, synthetic construct
FVHGAKV

SEQ ID NO: 118116 - protein, 7 aa, synthetic construct
FVHGNKA

SEQ ID NO: 118117 - protein, 7 aa, synthetic construct
FVHKNQT

SEQ ID NO: 118118 - protein, 7 aa, synthetic construct
FVHKSNV

SEQ ID NO: 118119 - protein, 7 aa, synthetic construct
FVHMKGG

SEQ ID NO: 118120 - protein, 7 aa, synthetic construct
FVHNTQK

SEQ ID NO: 118121 - protein, 7 aa, synthetic construct
FVHSAKM

SEQ ID NO: 118122 - protein, 7 aa, synthetic construct
FVHSKAN

SEQ ID NO: 118123 - protein, 7 aa, synthetic construct
FVKDMHK

SEQ ID NO: 118124 - protein, 7 aa, synthetic construct
FVKGTYN

SEQ ID NO: 118125 - protein, 7 aa, synthetic construct
FVKHEQK

SEQ ID NO: 118126 - protein, 7 aa, synthetic construct
FVKKGDL

SEQ ID NO: 118127 - protein, 7 aa, synthetic construct
FVKLSAG

SEQ ID NO: 118128 - protein, 7 aa, synthetic construct
FVKMDAR

SEQ ID NO: 118129 - protein, 7 aa, synthetic construct
FVKNERY

SEQ ID NO: 118130 - protein, 7 aa, synthetic construct
FVKPTPP

SEQ ID NO: 118131 - protein, 7 aa, synthetic construct
FVKPTVV

SEQ ID NO: 118132 - protein, 7 aa, synthetic construct
FVKQKDF

SEQ ID NO: 118133 - protein, 7 aa, synthetic construct
FVKSDKY

SEQ ID NO: 118134 - protein, 7 aa, synthetic construct
FVKYAQA

SEQ ID NO: 118135 - protein, 7 aa, synthetic construct
FVLKAAP

SEQ ID NO: 118136 - protein, 7 aa, synthetic construct
FVLKQNG

SEQ ID NO: 118137 - protein, 7 aa, synthetic construct
FVMKNAN

SEQ ID NO: 118138 - protein, 7 aa, synthetic construct
FVNKQRE

SEQ ID NO: 118139 - protein, 7 aa, synthetic construct
FVNQSKA

SEQ ID NO: 118140 - protein, 7 aa, synthetic construct
FVPAHRG

SEQ ID NO: 118141 - protein, 7 aa, synthetic construct
FVPKADR

SEQ ID NO: 118142 - protein, 7 aa, synthetic construct
FVPKGVV

SEQ ID NO: 118143 - protein, 7 aa, synthetic construct
FVPNREK

SEQ ID NO: 118144 - protein, 7 aa, synthetic construct
FVPQSGK

SEQ ID NO: 118145 - protein, 7 aa, synthetic construct
FVQHKGA

SEQ ID NO: 118146 - protein, 7 aa, synthetic construct
FVQHKGG

SEQ ID NO: 118147 - protein, 7 aa, synthetic construct
FVQKHAT

SEQ ID NO: 118148 - protein, 7 aa, synthetic construct
FVRGLTA

SEQ ID NO: 118149 - protein, 7 aa, synthetic construct
FVRGNTV

SEQ ID NO: 118150 - protein, 7 aa, synthetic construct
FVRGPTG

SEQ ID NO: 118151 - protein, 7 aa, synthetic construct
FVRIQKE

SEQ ID NO: 118152 - protein, 7 aa, synthetic construct
FVRKENM

SEQ ID NO: 118153 - protein, 7 aa, synthetic construct
FVRLDHE

SEQ ID NO: 118154 - protein, 7 aa, synthetic construct
FVRNNPG

SEQ ID NO: 118155 - protein, 7 aa, synthetic construct
FVRNPAA

SEQ ID NO: 118156 - protein, 7 aa, synthetic construct
FVRNQQV

SEQ ID NO: 118157 - protein, 7 aa, synthetic construct
FVRQENK

SEQ ID NO: 118158 - protein, 7 aa, synthetic construct
FVRQNDK

SEQ ID NO: 118159 - protein, 7 aa, synthetic construct
FVRQSSS

SEQ ID NO: 118160 - protein, 7 aa, synthetic construct
FVSGTPR

SEQ ID NO: 118161 - protein, 7 aa, synthetic construct
FVSHKIS

SEQ ID NO: 118162 - protein, 7 aa, synthetic construct
FVSHTKI

SEQ ID NO: 118163 - protein, 7 aa, synthetic construct
FVSIQKA

SEQ ID NO: 118164 - protein, 7 aa, synthetic construct
FVSKPHT

SEQ ID NO: 118165 - protein, 7 aa, synthetic construct
FVSNMSK

SEQ ID NO: 118166 - protein, 7 aa, synthetic construct
FVSRTNP

SEQ ID NO: 118167 - protein, 7 aa, synthetic construct
FVSTKNL

SEQ ID NO: 118168 - protein, 7 aa, synthetic construct
FVTGQRN

SEQ ID NO: 118169 - protein, 7 aa, synthetic construct
FVTHAKN

SEQ ID NO: 118170 - protein, 7 aa, synthetic construct
FVTKAGL

SEQ ID NO: 118171 - protein, 7 aa, synthetic construct
FVTKHQI

SEQ ID NO: 118172 - protein, 7 aa, synthetic construct
FVTKNNI

SEQ ID NO: 118173 - protein, 7 aa, synthetic construct
FVTKQDK

SEQ ID NO: 118174 - protein, 7 aa, synthetic construct
FVTNPPR

SEQ ID NO: 118175 - protein, 7 aa, synthetic construct
FYKANGV

SEQ ID NO: 118176 - protein, 7 aa, synthetic construct
FYKAQVN

SEQ ID NO: 118177 - protein, 7 aa, synthetic construct
FYKEKTL

SEQ ID NO: 118178 - protein, 7 aa, synthetic construct
FYKESNK

SEQ ID NO: 118179 - protein, 7 aa, synthetic construct
FYKESVR

SEQ ID NO: 118180 - protein, 7 aa, synthetic construct
FYKEVKS

SEQ ID NO: 118181 - protein, 7 aa, synthetic construct
FYKGANA

SEQ ID NO: 118182 - protein, 7 aa, synthetic construct
FYKGNSV

SEQ ID NO: 118183 - protein, 7 aa, synthetic construct
FYKGQAA

SEQ ID NO: 118184 - protein, 7 aa, synthetic construct
FYKGTPS

SEQ ID NO: 118185 - protein, 7 aa, synthetic construct
FYKIKDP

SEQ ID NO: 118186 - protein, 7 aa, synthetic construct
FYKNEKA

SEQ ID NO: 118187 - protein, 7 aa, synthetic construct
FYKNSPT

SEQ ID NO: 118188 - protein, 7 aa, synthetic construct
FYKQTAV

SEQ ID NO: 118189 - protein, 7 aa, synthetic construct
FYKQTQG

SEQ ID NO: 118190 - protein, 7 aa, synthetic construct
FYKSSAI

SEQ ID NO: 118191 - protein, 7 aa, synthetic construct
FYKSSQG

SEQ ID NO: 118192 - protein, 7 aa, synthetic construct
FYKSTER

SEQ ID NO: 118193 - protein, 7 aa, synthetic construct
FYKSVKE

SEQ ID NO: 118194 - protein, 7 aa, synthetic construct
FYKTASA

SEQ ID NO: 118195 - protein, 7 aa, synthetic construct
FYKTEKA

SEQ ID NO: 118196 - protein, 7 aa, synthetic construct
FYKTEKI

SEQ ID NO: 118197 - protein, 7 aa, synthetic construct
FYNNMKQ

SEQ ID NO: 118198 - protein, 7 aa, synthetic construct
FYSKPDR

SEQ ID NO: 118199 - protein, 7 aa, synthetic construct
GAAGKYS

SEQ ID NO: 118200 - protein, 7 aa, synthetic construct
GAAHRIV

SEQ ID NO: 118201 - protein, 7 aa, synthetic construct
GAAHTRM

SEQ ID NO: 118202 - protein, 7 aa, synthetic construct
GAAKIIM

SEQ ID NO: 118203 - protein, 7 aa, synthetic construct
GAAKLVY

SEQ ID NO: 118204 - protein, 7 aa, synthetic construct
GAAKMAY

SEQ ID NO: 118205 - protein, 7 aa, synthetic construct
GAAMKPY

SEQ ID NO: 118206 - protein, 7 aa, synthetic construct
GAASKHI

SEQ ID NO: 118207 - protein, 7 aa, synthetic construct
GAASRAF

SEQ ID NO: 118208 - protein, 7 aa, synthetic construct
GAAYNHS

SEQ ID NO: 118209 - protein, 7 aa, synthetic construct
GADAKRS

SEQ ID NO: 118210 - protein, 7 aa, synthetic construct
GADGKKM

SEQ ID NO: 118211 - protein, 7 aa, synthetic construct
GADKRHA

SEQ ID NO: 118212 - protein, 7 aa, synthetic construct
GADKRNI

SEQ ID NO: 118213 - protein, 7 aa, synthetic construct
GADKRVL

SEQ ID NO: 118214 - protein, 7 aa, synthetic construct
GADRKLT

SEQ ID NO: 118215 - protein, 7 aa, synthetic construct
GADRKTS

SEQ ID NO: 118216 - protein, 7 aa, synthetic construct
GADRRLT

SEQ ID NO: 118217 - protein, 7 aa, synthetic construct
GADSRKI

SEQ ID NO: 118218 - protein, 7 aa, synthetic construct
GAEKPRV

SEQ ID NO: 118219 - protein, 7 aa, synthetic construct
GAERVSK

SEQ ID NO: 118220 - protein, 7 aa, synthetic construct
GAFAKIP

SEQ ID NO: 118221 - protein, 7 aa, synthetic construct
GAFGKVM

SEQ ID NO: 118222 - protein, 7 aa, synthetic construct
GAFRPKE

SEQ ID NO: 118223 - protein, 7 aa, synthetic construct
GAFTSKQ

SEQ ID NO: 118224 - protein, 7 aa, synthetic construct
GAGAKYL

SEQ ID NO: 118225 - protein, 7 aa, synthetic construct
GAGANMR

SEQ ID NO: 118226 - protein, 7 aa, synthetic construct
GAGFQGR

SEQ ID NO: 118227 - protein, 7 aa, synthetic construct
GAGHLRA

SEQ ID NO: 118228 - protein, 7 aa, synthetic construct
GAGHLTK

SEQ ID NO: 118229 - protein, 7 aa, synthetic construct
GAGIKVI

SEQ ID NO: 118230 - protein, 7 aa, synthetic construct
GAGIQGV

SEQ ID NO: 118231 - protein, 7 aa, synthetic construct
GAGIQSR

SEQ ID NO: 118232 - protein, 7 aa, synthetic construct
GAGNIMR

SEQ ID NO: 118233 - protein, 7 aa, synthetic construct
GAGNMYK

SEQ ID NO: 118234 - protein, 7 aa, synthetic construct
GAGNQGK

SEQ ID NO: 118235 - protein, 7 aa, synthetic construct
GAGNQKH

SEQ ID NO: 118236 - protein, 7 aa, synthetic construct
GAGPRGN

SEQ ID NO: 118237 - protein, 7 aa, synthetic construct
GAGRWAD

SEQ ID NO: 118238 - protein, 7 aa, synthetic construct
GAGSSMR

SEQ ID NO: 118239 - protein, 7 aa, synthetic construct
GAGVYKT

SEQ ID NO: 118240 - protein, 7 aa, synthetic construct
GAGYKIA

SEQ ID NO: 118241 - protein, 7 aa, synthetic construct
GAGYPKN

SEQ ID NO: 118242 - protein, 7 aa, synthetic construct
GAGYSMT

SEQ ID NO: 118243 - protein, 7 aa, synthetic construct
GAHFVKS

SEQ ID NO: 118244 - protein, 7 aa, synthetic construct
GAHGQKQ

SEQ ID NO: 118245 - protein, 7 aa, synthetic construct
GAHGRTN

SEQ ID NO: 118246 - protein, 7 aa, synthetic construct
GAHKAYN

SEQ ID NO: 118247 - protein, 7 aa, synthetic construct
GAHKEAR

SEQ ID NO: 118248 - protein, 7 aa, synthetic construct
GAHKNYG

SEQ ID NO: 118249 - protein, 7 aa, synthetic construct
GAHKSAL

SEQ ID NO: 118250 - protein, 7 aa, synthetic construct
GAHKVSM

SEQ ID NO: 118251 - protein, 7 aa, synthetic construct
GAHMSKS

SEQ ID NO: 118252 - protein, 7 aa, synthetic construct
GAHNKTL

SEQ ID NO: 118253 - protein, 7 aa, synthetic construct
GAHPKTQ

SEQ ID NO: 118254 - protein, 7 aa, synthetic construct
GAHPMTR

SEQ ID NO: 118255 - protein, 7 aa, synthetic construct
GAHPPRT

SEQ ID NO: 118256 - protein, 7 aa, synthetic construct
GAHQARV

SEQ ID NO: 118257 - protein, 7 aa, synthetic construct
GAHQIRS

SEQ ID NO: 118258 - protein, 7 aa, synthetic construct
GAHQQKQ

SEQ ID NO: 118259 - protein, 7 aa, synthetic construct
GAHRLSN

SEQ ID NO: 118260 - protein, 7 aa, synthetic construct
GAHRNMV

SEQ ID NO: 118261 - protein, 7 aa, synthetic construct
GAHSKNL

SEQ ID NO: 118262 - protein, 7 aa, synthetic construct
GAHTMKY

SEQ ID NO: 118263 - protein, 7 aa, synthetic construct
GAHVKFQ

SEQ ID NO: 118264 - protein, 7 aa, synthetic construct
GAHVTRQ

SEQ ID NO: 118265 - protein, 7 aa, synthetic construct
GAHYKGG

SEQ ID NO: 118266 - protein, 7 aa, synthetic construct
GAHYPKT

SEQ ID NO: 118267 - protein, 7 aa, synthetic construct
GAHYVSM

SEQ ID NO: 118268 - protein, 7 aa, synthetic construct
GAIHAQR

SEQ ID NO: 118269 - protein, 7 aa, synthetic construct
GAIHTKF

SEQ ID NO: 118270 - protein, 7 aa, synthetic construct
GAIQYKM

SEQ ID NO: 118271 - protein, 7 aa, synthetic construct
GAKFEMR

SEQ ID NO: 118272 - protein, 7 aa, synthetic construct
GAKHNMN

SEQ ID NO: 118273 - protein, 7 aa, synthetic construct
GAKLVAI

SEQ ID NO: 118274 - protein, 7 aa, synthetic construct
GAKQTWQ

SEQ ID NO: 118275 - protein, 7 aa, synthetic construct
GAKSESK

SEQ ID NO: 118276 - protein, 7 aa, synthetic construct
GAKSRDL

SEQ ID NO: 118277 - protein, 7 aa, synthetic construct
GAKYNMM

SEQ ID NO: 118278 - protein, 7 aa, synthetic construct
GAKYPAV

SEQ ID NO: 118279 - protein, 7 aa, synthetic construct
GAKYQPQ

SEQ ID NO: 118280 - protein, 7 aa, synthetic construct
GAKYVHG

SEQ ID NO: 118281 - protein, 7 aa, synthetic construct
GALGTGR

SEQ ID NO: 118282 - protein, 7 aa, synthetic construct
GALKYTN

SEQ ID NO: 118283 - protein, 7 aa, synthetic construct
GALREKM

SEQ ID NO: 118284 - protein, 7 aa, synthetic construct
GALRNPV

SEQ ID NO: 118285 - protein, 7 aa, synthetic construct
GALRVQH

SEQ ID NO: 118286 - protein, 7 aa, synthetic construct
GALYQKA

SEQ ID NO: 118287 - protein, 7 aa, synthetic construct
GAMHGQR

SEQ ID NO: 118288 - protein, 7 aa, synthetic construct
GAMHVKL

SEQ ID NO: 118289 - protein, 7 aa, synthetic construct
GAMKDAR

SEQ ID NO: 118290 - protein, 7 aa, synthetic construct
GAMKFEK

SEQ ID NO: 118291 - protein, 7 aa, synthetic construct
GAMNTNR

SEQ ID NO: 118292 - protein, 7 aa, synthetic construct
GAMQQKY

SEQ ID NO: 118293 - protein, 7 aa, synthetic construct
GAMRNMQ

SEQ ID NO: 118294 - protein, 7 aa, synthetic construct
GANGMKW

SEQ ID NO: 118295 - protein, 7 aa, synthetic construct
GANHIAR

SEQ ID NO: 118296 - protein, 7 aa, synthetic construct
GANHIPR

SEQ ID NO: 118297 - protein, 7 aa, synthetic construct
GANHNPK

SEQ ID NO: 118298 - protein, 7 aa, synthetic construct
GANNERR

SEQ ID NO: 118299 - protein, 7 aa, synthetic construct
GANNKDR

SEQ ID NO: 118300 - protein, 7 aa, synthetic construct
GANPKYA

SEQ ID NO: 118301 - protein, 7 aa, synthetic construct
GANQHWE

SEQ ID NO: 118302 - protein, 7 aa, synthetic construct
GANRLNI

SEQ ID NO: 118303 - protein, 7 aa, synthetic construct
GANRPKE

SEQ ID NO: 118304 - protein, 7 aa, synthetic construct
GANSGNR

SEQ ID NO: 118305 - protein, 7 aa, synthetic construct
GAPAIKY

SEQ ID NO: 118306 - protein, 7 aa, synthetic construct
GAPATGR

SEQ ID NO: 118307 - protein, 7 aa, synthetic construct
GAPHKYQ

SEQ ID NO: 118308 - protein, 7 aa, synthetic construct
GAPKSYI

SEQ ID NO: 118309 - protein, 7 aa, synthetic construct
GAPKSYL

SEQ ID NO: 118310 - protein, 7 aa, synthetic construct
GAPKWTG

SEQ ID NO: 118311 - protein, 7 aa, synthetic construct
GAPQIGR

SEQ ID NO: 118312 - protein, 7 aa, synthetic construct
GAQARQL

SEQ ID NO: 118313 - protein, 7 aa, synthetic construct
GAQGIRF

SEQ ID NO: 118314 - protein, 7 aa, synthetic construct
GAQGVFK

SEQ ID NO: 118315 - protein, 7 aa, synthetic construct
GAQGYLK

SEQ ID NO: 118316 - protein, 7 aa, synthetic construct
GAQHKGN

SEQ ID NO: 118317 - protein, 7 aa, synthetic construct
GAQITPY

SEQ ID NO: 118318 - protein, 7 aa, synthetic construct
GAQKMPF

SEQ ID NO: 118319 - protein, 7 aa, synthetic construct
GAQKYER

SEQ ID NO: 118320 - protein, 7 aa, synthetic construct
GAQLARS

SEQ ID NO: 118321 - protein, 7 aa, synthetic construct
GAQLKMI

SEQ ID NO: 118322 - protein, 7 aa, synthetic construct
GAQMRSV

SEQ ID NO: 118323 - protein, 7 aa, synthetic construct
GAQNAPR

SEQ ID NO: 118324 - protein, 7 aa, synthetic construct
GAQNSIR

SEQ ID NO: 118325 - protein, 7 aa, synthetic construct
GAQPRLQ

SEQ ID NO: 118326 - protein, 7 aa, synthetic construct
GAQQKHM

SEQ ID NO: 118327 - protein, 7 aa, synthetic construct
GAQQQRY

SEQ ID NO: 118328 - protein, 7 aa, synthetic construct
GAQSHGK

SEQ ID NO: 118329 - protein, 7 aa, synthetic construct
GAQTKHQ

SEQ ID NO: 118330 - protein, 7 aa, synthetic construct
GAQTNGR

SEQ ID NO: 118331 - protein, 7 aa, synthetic construct
GAQYAKQ

SEQ ID NO: 118332 - protein, 7 aa, synthetic construct
GAQYTPK

SEQ ID NO: 118333 - protein, 7 aa, synthetic construct
GARAHSV

SEQ ID NO: 118334 - protein, 7 aa, synthetic construct
GARATGF

SEQ ID NO: 118335 - protein, 7 aa, synthetic construct
GARDVIK

SEQ ID NO: 118336 - protein, 7 aa, synthetic construct
GAREAVR

SEQ ID NO: 118337 - protein, 7 aa, synthetic construct
GAREMSK

SEQ ID NO: 118338 - protein, 7 aa, synthetic construct
GAREQYK

SEQ ID NO: 118339 - protein, 7 aa, synthetic construct
GARETKQ

SEQ ID NO: 118340 - protein, 7 aa, synthetic construct
GARGADR

SEQ ID NO: 118341 - protein, 7 aa, synthetic construct
GARGHPI

SEQ ID NO: 118342 - protein, 7 aa, synthetic construct
GARGPLV

SEQ ID NO: 118343 - protein, 7 aa, synthetic construct
GARHTNA

SEQ ID NO: 118344 - protein, 7 aa, synthetic construct
GARKDNF

SEQ ID NO: 118345 - protein, 7 aa, synthetic construct
GARKQES

SEQ ID NO: 118346 - protein, 7 aa, synthetic construct
GARMNMN

SEQ ID NO: 118347 - protein, 7 aa, synthetic construct
GARMQGQ

SEQ ID NO: 118348 - protein, 7 aa, synthetic construct
GARNYSQ

SEQ ID NO: 118349 - protein, 7 aa, synthetic construct
GARPLRD

SEQ ID NO: 118350 - protein, 7 aa, synthetic construct
GARPNTY

SEQ ID NO: 118351 - protein, 7 aa, synthetic construct
GARQSAM

SEQ ID NO: 118352 - protein, 7 aa, synthetic construct
GARSIQI

SEQ ID NO: 118353 - protein, 7 aa, synthetic construct
GARSMLQ

SEQ ID NO: 118354 - protein, 7 aa, synthetic construct
GARTDTR

SEQ ID NO: 118355 - protein, 7 aa, synthetic construct
GARTEGR

SEQ ID NO: 118356 - protein, 7 aa, synthetic construct
GARTNQA

SEQ ID NO: 118357 - protein, 7 aa, synthetic construct
GARVKGD

SEQ ID NO: 118358 - protein, 7 aa, synthetic construct
GARVPMP

SEQ ID NO: 118359 - protein, 7 aa, synthetic construct
GARVQAY

SEQ ID NO: 118360 - protein, 7 aa, synthetic construct
GARYIEK

SEQ ID NO: 118361 - protein, 7 aa, synthetic construct
GASARGF

SEQ ID NO: 118362 - protein, 7 aa, synthetic construct
GASAVSR

SEQ ID NO: 118363 - protein, 7 aa, synthetic construct
GASHRLS

SEQ ID NO: 118364 - protein, 7 aa, synthetic construct
GASHTPR

SEQ ID NO: 118365 - protein, 7 aa, synthetic construct
GASNATR

SEQ ID NO: 118366 - protein, 7 aa, synthetic construct
GASNIGR

SEQ ID NO: 118367 - protein, 7 aa, synthetic construct
GASQHMR

SEQ ID NO: 118368 - protein, 7 aa, synthetic construct
GASQIRM

SEQ ID NO: 118369 - protein, 7 aa, synthetic construct
GASQSGR

SEQ ID NO: 118370 - protein, 7 aa, synthetic construct
GASVKIY

SEQ ID NO: 118371 - protein, 7 aa, synthetic construct
GASVRAM

SEQ ID NO: 118372 - protein, 7 aa, synthetic construct
GASVYKN

SEQ ID NO: 118373 - protein, 7 aa, synthetic construct
GATHPRV

SEQ ID NO: 118374 - protein, 7 aa, synthetic construct
GATKMNY

SEQ ID NO: 118375 - protein, 7 aa, synthetic construct
GATKNHW

SEQ ID NO: 118376 - protein, 7 aa, synthetic construct
GATRERV

SEQ ID NO: 118377 - protein, 7 aa, synthetic construct
GATSNPR

SEQ ID NO: 118378 - protein, 7 aa, synthetic construct
GATYGPN

SEQ ID NO: 118379 - protein, 7 aa, synthetic construct
GATYSKM

SEQ ID NO: 118380 - protein, 7 aa, synthetic construct
GAVAKYA

SEQ ID NO: 118381 - protein, 7 aa, synthetic construct
GAVGYKQ

SEQ ID NO: 118382 - protein, 7 aa, synthetic construct
GAVGYKT

SEQ ID NO: 118383 - protein, 7 aa, synthetic construct
GAVKIPF

SEQ ID NO: 118384 - protein, 7 aa, synthetic construct
GAVKNYS

SEQ ID NO: 118385 - protein, 7 aa, synthetic construct
GAVNKMF

SEQ ID NO: 118386 - protein, 7 aa, synthetic construct
GAVNRHM

SEQ ID NO: 118387 - protein, 7 aa, synthetic construct
GAVRHTV

SEQ ID NO: 118388 - protein, 7 aa, synthetic construct
GAVRHVG

SEQ ID NO: 118389 - protein, 7 aa, synthetic construct
GAVRPHA

SEQ ID NO: 118390 - protein, 7 aa, synthetic construct
GAVYHKG

SEQ ID NO: 118391 - protein, 7 aa, synthetic construct
GAYGAKS

SEQ ID NO: 118392 - protein, 7 aa, synthetic construct
GAYGSSQ

SEQ ID NO: 118393 - protein, 7 aa, synthetic construct
GAYHNLQ

SEQ ID NO: 118394 - protein, 7 aa, synthetic construct
GAYHYTA

SEQ ID NO: 118395 - protein, 7 aa, synthetic construct
GAYIKAG

SEQ ID NO: 118396 - protein, 7 aa, synthetic construct
GAYKGSQ

SEQ ID NO: 118397 - protein, 7 aa, synthetic construct
GAYKPVP

SEQ ID NO: 118398 - protein, 7 aa, synthetic construct
GAYKSQG

SEQ ID NO: 118399 - protein, 7 aa, synthetic construct
GAYKVMG

SEQ ID NO: 118400 - protein, 7 aa, synthetic construct
GAYQHKV

SEQ ID NO: 118401 - protein, 7 aa, synthetic construct
GAYSNPK

SEQ ID NO: 118402 - protein, 7 aa, synthetic construct
GAYTEGR

SEQ ID NO: 118403 - protein, 7 aa, synthetic construct
GAYTGNK

SEQ ID NO: 118404 - protein, 7 aa, synthetic construct
GAYVQKG

SEQ ID NO: 118405 - protein, 7 aa, synthetic construct
GAYYNKD

SEQ ID NO: 118406 - protein, 7 aa, synthetic construct
GDAAKRT

SEQ ID NO: 118407 - protein, 7 aa, synthetic construct
GDAKRSY

SEQ ID NO: 118408 - protein, 7 aa, synthetic construct
GDAKTLR

SEQ ID NO: 118409 - protein, 7 aa, synthetic construct
GDAMKIK

SEQ ID NO: 118410 - protein, 7 aa, synthetic construct
GDANKKI

SEQ ID NO: 118411 - protein, 7 aa, synthetic construct
GDANMKR

SEQ ID NO: 118412 - protein, 7 aa, synthetic construct
GDARGKQ

SEQ ID NO: 118413 - protein, 7 aa, synthetic construct
GDASKRV

SEQ ID NO: 118414 - protein, 7 aa, synthetic construct
GDAVRAK

SEQ ID NO: 118415 - protein, 7 aa, synthetic construct
GDFKRSS

SEQ ID NO: 118416 - protein, 7 aa, synthetic construct
GDFRVKA

SEQ ID NO: 118417 - protein, 7 aa, synthetic construct
GDGKKQN

SEQ ID NO: 118418 - protein, 7 aa, synthetic construct
GDGRKYA

SEQ ID NO: 118419 - protein, 7 aa, synthetic construct
GDHFSRS

SEQ ID NO: 118420 - protein, 7 aa, synthetic construct
GDIARNQ

SEQ ID NO: 118421 - protein, 7 aa, synthetic construct
GDIKRGQ

SEQ ID NO: 118422 - protein, 7 aa, synthetic construct
GDIKRTM

SEQ ID NO: 118423 - protein, 7 aa, synthetic construct
GDIQRKV

SEQ ID NO: 118424 - protein, 7 aa, synthetic construct
GDIRLGK

SEQ ID NO: 118425 - protein, 7 aa, synthetic construct
GDKAFPR

SEQ ID NO: 118426 - protein, 7 aa, synthetic construct
GDKAKNW

SEQ ID NO: 118427 - protein, 7 aa, synthetic construct
GDKASNR

SEQ ID NO: 118428 - protein, 7 aa, synthetic construct
GDKATRH

SEQ ID NO: 118429 - protein, 7 aa, synthetic construct
GDKKFMV

SEQ ID NO: 118430 - protein, 7 aa, synthetic construct
GDKKGYI

SEQ ID NO: 118431 - protein, 7 aa, synthetic construct
GDKLKFT

SEQ ID NO: 118432 - protein, 7 aa, synthetic construct
GDKMPSR

SEQ ID NO: 118433 - protein, 7 aa, synthetic construct
GDKPVPR

SEQ ID NO: 118434 - protein, 7 aa, synthetic construct
GDKQVMR

SEQ ID NO: 118435 - protein, 7 aa, synthetic construct
GDKRYNA

SEQ ID NO: 118436 - protein, 7 aa, synthetic construct
GDKSARN

SEQ ID NO: 118437 - protein, 7 aa, synthetic construct
GDKWAKP

SEQ ID NO: 118438 - protein, 7 aa, synthetic construct
GDKYVKV

SEQ ID NO: 118439 - protein, 7 aa, synthetic construct
GDLGKRN

SEQ ID NO: 118440 - protein, 7 aa, synthetic construct
GDLKQKY

SEQ ID NO: 118441 - protein, 7 aa, synthetic construct
GDLKRTT

SEQ ID NO: 118442 - protein, 7 aa, synthetic construct
GDMKAGR

SEQ ID NO: 118443 - protein, 7 aa, synthetic construct
GDMKLRS

SEQ ID NO: 118444 - protein, 7 aa, synthetic construct
GDMKPRG

SEQ ID NO: 118445 - protein, 7 aa, synthetic construct
GDMRFKA

SEQ ID NO: 118446 - protein, 7 aa, synthetic construct
GDMRLMK

SEQ ID NO: 118447 - protein, 7 aa, synthetic construct
GDMRTKY

SEQ ID NO: 118448 - protein, 7 aa, synthetic construct
GDNKAAK

SEQ ID NO: 118449 - protein, 7 aa, synthetic construct
GDNKRFV

SEQ ID NO: 118450 - protein, 7 aa, synthetic construct
GDNKSKM

SEQ ID NO: 118451 - protein, 7 aa, synthetic construct
GDNLRTK

SEQ ID NO: 118452 - protein, 7 aa, synthetic construct
GDNMRGK

SEQ ID NO: 118453 - protein, 7 aa, synthetic construct
GDNPRVR

SEQ ID NO: 118454 - protein, 7 aa, synthetic construct
GDPARNK

SEQ ID NO: 118455 - protein, 7 aa, synthetic construct
GDPARRP

SEQ ID NO: 118456 - protein, 7 aa, synthetic construct
GDPGKGR

SEQ ID NO: 118457 - protein, 7 aa, synthetic construct
GDPVRRM

SEQ ID NO: 118458 - protein, 7 aa, synthetic construct
GDQFKVR

SEQ ID NO: 118459 - protein, 7 aa, synthetic construct
GDQKFRA

SEQ ID NO: 118460 - protein, 7 aa, synthetic construct
GDQLKRT

SEQ ID NO: 118461 - protein, 7 aa, synthetic construct
GDRAAGR

SEQ ID NO: 118462 - protein, 7 aa, synthetic construct
GDRAMAR

SEQ ID NO: 118463 - protein, 7 aa, synthetic construct
GDRANMK

SEQ ID NO: 118464 - protein, 7 aa, synthetic construct
GDRGAQR

SEQ ID NO: 118465 - protein, 7 aa, synthetic construct
GDRGKQQ

SEQ ID NO: 118466 - protein, 7 aa, synthetic construct
GDRGVKL

SEQ ID NO: 118467 - protein, 7 aa, synthetic construct
GDRHKIV

SEQ ID NO: 118468 - protein, 7 aa, synthetic construct
GDRIQLK

SEQ ID NO: 118469 - protein, 7 aa, synthetic construct
GDRISKN

SEQ ID NO: 118470 - protein, 7 aa, synthetic construct
GDRKFPM

SEQ ID NO: 118471 - protein, 7 aa, synthetic construct
GDRKGMY

SEQ ID NO: 118472 - protein, 7 aa, synthetic construct
GDRKPQY

SEQ ID NO: 118473 - protein, 7 aa, synthetic construct
GDRKQMH

SEQ ID NO: 118474 - protein, 7 aa, synthetic construct
GDRKTFN

SEQ ID NO: 118475 - protein, 7 aa, synthetic construct
GDRKVER

SEQ ID NO: 118476 - protein, 7 aa, synthetic construct
GDRMKQT

SEQ ID NO: 118477 - protein, 7 aa, synthetic construct
GDRNQAK

SEQ ID NO: 118478 - protein, 7 aa, synthetic construct
GDRQAIR

SEQ ID NO: 118479 - protein, 7 aa, synthetic construct
GDRQPRM

SEQ ID NO: 118480 - protein, 7 aa, synthetic construct
GDRQTRP

SEQ ID NO: 118481 - protein, 7 aa, synthetic construct
GDRSQVR

SEQ ID NO: 118482 - protein, 7 aa, synthetic construct
GDRTLKF

SEQ ID NO: 118483 - protein, 7 aa, synthetic construct
GDRTMRN

SEQ ID NO: 118484 - protein, 7 aa, synthetic construct
GDRTNQR

SEQ ID NO: 118485 - protein, 7 aa, synthetic construct
GDRVKQF

SEQ ID NO: 118486 - protein, 7 aa, synthetic construct
GDRVPQR

SEQ ID NO: 118487 - protein, 7 aa, synthetic construct
GDRYKGV

SEQ ID NO: 118488 - protein, 7 aa, synthetic construct
GDSKLKY

SEQ ID NO: 118489 - protein, 7 aa, synthetic construct
GDSRTLR

SEQ ID NO: 118490 - protein, 7 aa, synthetic construct
GDSTKQR

SEQ ID NO: 118491 - protein, 7 aa, synthetic construct
GDSTLKR

SEQ ID NO: 118492 - protein, 7 aa, synthetic construct
GDTHMFR

SEQ ID NO: 118493 - protein, 7 aa, synthetic construct
GDTKRMT

SEQ ID NO: 118494 - protein, 7 aa, synthetic construct
GDTSTKK

SEQ ID NO: 118495 - protein, 7 aa, synthetic construct
GDVIKRI

SEQ ID NO: 118496 - protein, 7 aa, synthetic construct
GDVKMYK

SEQ ID NO: 118497 - protein, 7 aa, synthetic construct
GDVKRYM

SEQ ID NO: 118498 - protein, 7 aa, synthetic construct
GDVNMKR

SEQ ID NO: 118499 - protein, 7 aa, synthetic construct
GDVRMMK

SEQ ID NO: 118500 - protein, 7 aa, synthetic construct
GDVRMRT

SEQ ID NO: 118501 - protein, 7 aa, synthetic construct
GDVRQKI

SEQ ID NO: 118502 - protein, 7 aa, synthetic construct
GEAGYRM

SEQ ID NO: 118503 - protein, 7 aa, synthetic construct
GEAKARM

SEQ ID NO: 118504 - protein, 7 aa, synthetic construct
GEAKKGF

SEQ ID NO: 118505 - protein, 7 aa, synthetic construct
GEAKRGF

SEQ ID NO: 118506 - protein, 7 aa, synthetic construct
GEAKRGY

SEQ ID NO: 118507 - protein, 7 aa, synthetic construct
GEAKVIR

SEQ ID NO: 118508 - protein, 7 aa, synthetic construct
GEAMMKK

SEQ ID NO: 118509 - protein, 7 aa, synthetic construct
GEAVAKR

SEQ ID NO: 118510 - protein, 7 aa, synthetic construct
GEAYARM

SEQ ID NO: 118511 - protein, 7 aa, synthetic construct
GEFKASK

SEQ ID NO: 118512 - protein, 7 aa, synthetic construct
GEFKFKQ

SEQ ID NO: 118513 - protein, 7 aa, synthetic construct
GEGKFKV

SEQ ID NO: 118514 - protein, 7 aa, synthetic construct
GEGKMKF

SEQ ID NO: 118515 - protein, 7 aa, synthetic construct
GEGPKKG

SEQ ID NO: 118516 - protein, 7 aa, synthetic construct
GEGVKKV

SEQ ID NO: 118517 - protein, 7 aa, synthetic construct
GEHHSRM

SEQ ID NO: 118518 - protein, 7 aa, synthetic construct
GEHKKML

SEQ ID NO: 118519 - protein, 7 aa, synthetic construct
GEIRVKM

SEQ ID NO: 118520 - protein, 7 aa, synthetic construct
GEITMKK

SEQ ID NO: 118521 - protein, 7 aa, synthetic construct
GEIVRKM

SEQ ID NO: 118522 - protein, 7 aa, synthetic construct
GEKAFRS

SEQ ID NO: 118523 - protein, 7 aa, synthetic construct
GEKAVPR

SEQ ID NO: 118524 - protein, 7 aa, synthetic construct
GEKFQNK

SEQ ID NO: 118525 - protein, 7 aa, synthetic construct
GEKGIRY

SEQ ID NO: 118526 - protein, 7 aa, synthetic construct
GEKGSVK

SEQ ID NO: 118527 - protein, 7 aa, synthetic construct
GEKIGGR

SEQ ID NO: 118528 - protein, 7 aa, synthetic construct
GEKILRN

SEQ ID NO: 118529 - protein, 7 aa, synthetic construct
GEKKANL

SEQ ID NO: 118530 - protein, 7 aa, synthetic construct
GEKMLNR

SEQ ID NO: 118531 - protein, 7 aa, synthetic construct
GEKMMKY

SEQ ID NO: 118532 - protein, 7 aa, synthetic construct
GEKPRIA

SEQ ID NO: 118533 - protein, 7 aa, synthetic construct
GEKRFSV

SEQ ID NO: 118534 - protein, 7 aa, synthetic construct
GEKRIAI

SEQ ID NO: 118535 - protein, 7 aa, synthetic construct
GEKRIQS

SEQ ID NO: 118536 - protein, 7 aa, synthetic construct
GEKRLAN

SEQ ID NO: 118537 - protein, 7 aa, synthetic construct
GEKRPPY

SEQ ID NO: 118538 - protein, 7 aa, synthetic construct
GEKSIRS

SEQ ID NO: 118539 - protein, 7 aa, synthetic construct
GEKTYKQ

SEQ ID NO: 118540 - protein, 7 aa, synthetic construct
GELKGRF

SEQ ID NO: 118541 - protein, 7 aa, synthetic construct
GELKMRT

SEQ ID NO: 118542 - protein, 7 aa, synthetic construct
GELKYKM

SEQ ID NO: 118543 - protein, 7 aa, synthetic construct
GEMIRKI

SEQ ID NO: 118544 - protein, 7 aa, synthetic construct
GEMKNMR

SEQ ID NO: 118545 - protein, 7 aa, synthetic construct
GENKAKQ

SEQ ID NO: 118546 - protein, 7 aa, synthetic construct
GENLKRY

SEQ ID NO: 118547 - protein, 7 aa, synthetic construct
GENLRRV

SEQ ID NO: 118548 - protein, 7 aa, synthetic construct
GEPKARQ

SEQ ID NO: 118549 - protein, 7 aa, synthetic construct
GEPKNRY

SEQ ID NO: 118550 - protein, 7 aa, synthetic construct
GEPTKRL

SEQ ID NO: 118551 - protein, 7 aa, synthetic construct
GEQKIKF

SEQ ID NO: 118552 - protein, 7 aa, synthetic construct
GEQKRPL

SEQ ID NO: 118553 - protein, 7 aa, synthetic construct
GEQPKLR

SEQ ID NO: 118554 - protein, 7 aa, synthetic construct
GEQPLKK

SEQ ID NO: 118555 - protein, 7 aa, synthetic construct
GEQRQVK

SEQ ID NO: 118556 - protein, 7 aa, synthetic construct
GEQVKRV

SEQ ID NO: 118557 - protein, 7 aa, synthetic construct
GERAKII

SEQ ID NO: 118558 - protein, 7 aa, synthetic construct
GERATAR

SEQ ID NO: 118559 - protein, 7 aa, synthetic construct
GERATKV

SEQ ID NO: 118560 - protein, 7 aa, synthetic construct
GERGKFQ

SEQ ID NO: 118561 - protein, 7 aa, synthetic construct
GERHGSE

SEQ ID NO: 118562 - protein, 7 aa, synthetic construct
GERKFIG

SEQ ID NO: 118563 - protein, 7 aa, synthetic construct
GERKFVP

SEQ ID NO: 118564 - protein, 7 aa, synthetic construct
GERKGML

SEQ ID NO: 118565 - protein, 7 aa, synthetic construct
GERKQGV

SEQ ID NO: 118566 - protein, 7 aa, synthetic construct
GERKSPT

SEQ ID NO: 118567 - protein, 7 aa, synthetic construct
GERLVKQ

SEQ ID NO: 118568 - protein, 7 aa, synthetic construct
GERNGKI

SEQ ID NO: 118569 - protein, 7 aa, synthetic construct
GERNKLN

SEQ ID NO: 118570 - protein, 7 aa, synthetic construct
GERPMKM

SEQ ID NO: 118571 - protein, 7 aa, synthetic construct
GERPRVG

SEQ ID NO: 118572 - protein, 7 aa, synthetic construct
GERSLKA

SEQ ID NO: 118573 - protein, 7 aa, synthetic construct
GERTLKY

SEQ ID NO: 118574 - protein, 7 aa, synthetic construct
GERVVRN

SEQ ID NO: 118575 - protein, 7 aa, synthetic construct
GERYREL

SEQ ID NO: 118576 - protein, 7 aa, synthetic construct
GETRKPV

SEQ ID NO: 118577 - protein, 7 aa, synthetic construct
GETYHRV

SEQ ID NO: 118578 - protein, 7 aa, synthetic construct
GEVKANR

SEQ ID NO: 118579 - protein, 7 aa, synthetic construct
GEVNNYR

SEQ ID NO: 118580 - protein, 7 aa, synthetic construct
GEWGRGT

SEQ ID NO: 118581 - protein, 7 aa, synthetic construct
GEWRTAG

SEQ ID NO: 118582 - protein, 7 aa, synthetic construct
GEYKSKV

SEQ ID NO: 118583 - protein, 7 aa, synthetic construct
GFADKRL

SEQ ID NO: 118584 - protein, 7 aa, synthetic construct
GFAHIGK

SEQ ID NO: 118585 - protein, 7 aa, synthetic construct
GFAHKNL

SEQ ID NO: 118586 - protein, 7 aa, synthetic construct
GFANMAK

SEQ ID NO: 118587 - protein, 7 aa, synthetic construct
GFANMGK

SEQ ID NO: 118588 - protein, 7 aa, synthetic construct
GFARTTA

SEQ ID NO: 118589 - protein, 7 aa, synthetic construct
GFDQKGR

SEQ ID NO: 118590 - protein, 7 aa, synthetic construct
GFGAIPK

SEQ ID NO: 118591 - protein, 7 aa, synthetic construct
GFGAKIS

SEQ ID NO: 118592 - protein, 7 aa, synthetic construct
GFGGALK

SEQ ID NO: 118593 - protein, 7 aa, synthetic construct
GFGGPMK

SEQ ID NO: 118594 - protein, 7 aa, synthetic construct
GFGKGGL

SEQ ID NO: 118595 - protein, 7 aa, synthetic construct
GFGKGQL

SEQ ID NO: 118596 - protein, 7 aa, synthetic construct
GFGNGAK

SEQ ID NO: 118597 - protein, 7 aa, synthetic construct
GFGNKLV

SEQ ID NO: 118598 - protein, 7 aa, synthetic construct
GFGNKSV

SEQ ID NO: 118599 - protein, 7 aa, synthetic construct
GFGNMNR

SEQ ID NO: 118600 - protein, 7 aa, synthetic construct
GFGNVNR

SEQ ID NO: 118601 - protein, 7 aa, synthetic construct
GFGQMPK

SEQ ID NO: 118602 - protein, 7 aa, synthetic construct
GFGQNIR

SEQ ID NO: 118603 - protein, 7 aa, synthetic construct
GFGQTKH

SEQ ID NO: 118604 - protein, 7 aa, synthetic construct
GFGVHSK

SEQ ID NO: 118605 - protein, 7 aa, synthetic construct
GFHKASQ

SEQ ID NO: 118606 - protein, 7 aa, synthetic construct
GFHKQSN

SEQ ID NO: 118607 - protein, 7 aa, synthetic construct
GFHVNQK

SEQ ID NO: 118608 - protein, 7 aa, synthetic construct
GFHVTPK

SEQ ID NO: 118609 - protein, 7 aa, synthetic construct
GFIGKKD

SEQ ID NO: 118610 - protein, 7 aa, synthetic construct
GFKAADR

SEQ ID NO: 118611 - protein, 7 aa, synthetic construct
GFKAMER

SEQ ID NO: 118612 - protein, 7 aa, synthetic construct
GFKAMPP

SEQ ID NO: 118613 - protein, 7 aa, synthetic construct
GFKASHI

SEQ ID NO: 118614 - protein, 7 aa, synthetic construct
GFKELRQ

SEQ ID NO: 118615 - protein, 7 aa, synthetic construct
GFKETAK

SEQ ID NO: 118616 - protein, 7 aa, synthetic construct
GFKGHGN

SEQ ID NO: 118617 - protein, 7 aa, synthetic construct
GFKHATI

SEQ ID NO: 118618 - protein, 7 aa, synthetic construct
GFKHSTL

SEQ ID NO: 118619 - protein, 7 aa, synthetic construct
GFKIPNV

SEQ ID NO: 118620 - protein, 7 aa, synthetic construct
GFKMPTQ

SEQ ID NO: 118621 - protein, 7 aa, synthetic construct
GFKPAFP

SEQ ID NO: 118622 - protein, 7 aa, synthetic construct
GFKRLTE

SEQ ID NO: 118623 - protein, 7 aa, synthetic construct
GFKRSES

SEQ ID NO: 118624 - protein, 7 aa, synthetic construct
GFLKSDR

SEQ ID NO: 118625 - protein, 7 aa, synthetic construct
GFLVKSP

SEQ ID NO: 118626 - protein, 7 aa, synthetic construct
GFMRKEP

SEQ ID NO: 118627 - protein, 7 aa, synthetic construct
GFMTKHP

SEQ ID NO: 118628 - protein, 7 aa, synthetic construct
GFMTKMP

SEQ ID NO: 118629 - protein, 7 aa, synthetic construct
GFNATKH

SEQ ID NO: 118630 - protein, 7 aa, synthetic construct
GFNEAKR

SEQ ID NO: 118631 - protein, 7 aa, synthetic construct
GFNGQLR

SEQ ID NO: 118632 - protein, 7 aa, synthetic construct
GFNMISK

SEQ ID NO: 118633 - protein, 7 aa, synthetic construct
GFNNGYK

SEQ ID NO: 118634 - protein, 7 aa, synthetic construct
GFNQVKF

SEQ ID NO: 118635 - protein, 7 aa, synthetic construct
GFNSSMK

SEQ ID NO: 118636 - protein, 7 aa, synthetic construct
GFNVNGR

SEQ ID NO: 118637 - protein, 7 aa, synthetic construct
GFPGITV

SEQ ID NO: 118638 - protein, 7 aa, synthetic construct
GFPKLQT

SEQ ID NO: 118639 - protein, 7 aa, synthetic construct
GFPKPIN

SEQ ID NO: 118640 - protein, 7 aa, synthetic construct
GFPRNEK

SEQ ID NO: 118641 - protein, 7 aa, synthetic construct
GFPRSQV

SEQ ID NO: 118642 - protein, 7 aa, synthetic construct
GFQKFAA

SEQ ID NO: 118643 - protein, 7 aa, synthetic construct
GFQKLHA

SEQ ID NO: 118644 - protein, 7 aa, synthetic construct
GFQKNHI

SEQ ID NO: 118645 - protein, 7 aa, synthetic construct
GFQKQRE

SEQ ID NO: 118646 - protein, 7 aa, synthetic construct
GFQKSGY

SEQ ID NO: 118647 - protein, 7 aa, synthetic construct
GFQQSPR

SEQ ID NO: 118648 - protein, 7 aa, synthetic construct
GFQRGPP

SEQ ID NO: 118649 - protein, 7 aa, synthetic construct
GFQTISK

SEQ ID NO: 118650 - protein, 7 aa, synthetic construct
GFSGLKM

SEQ ID NO: 118651 - protein, 7 aa, synthetic construct
GFSGTVR

SEQ ID NO: 118652 - protein, 7 aa, synthetic construct
GFSGVMK

SEQ ID NO: 118653 - protein, 7 aa, synthetic construct
GFSKAIT

SEQ ID NO: 118654 - protein, 7 aa, synthetic construct
GFSKNKD

SEQ ID NO: 118655 - protein, 7 aa, synthetic construct
GFSQLKN

SEQ ID NO: 118656 - protein, 7 aa, synthetic construct
GFSQQQR

SEQ ID NO: 118657 - protein, 7 aa, synthetic construct
GFSQTKY

SEQ ID NO: 118658 - protein, 7 aa, synthetic construct
GFSQTNR

SEQ ID NO: 118659 - protein, 7 aa, synthetic construct
GFSREKS

SEQ ID NO: 118660 - protein, 7 aa, synthetic construct
GFSTQGK

SEQ ID NO: 118661 - protein, 7 aa, synthetic construct
GFSVTRA

SEQ ID NO: 118662 - protein, 7 aa, synthetic construct
GFTNVRN

SEQ ID NO: 118663 - protein, 7 aa, synthetic construct
GFTSFPK

SEQ ID NO: 118664 - protein, 7 aa, synthetic construct
GGAASQR

SEQ ID NO: 118665 - protein, 7 aa, synthetic construct
GGANMVR

SEQ ID NO: 118666 - protein, 7 aa, synthetic construct
GGAPSGR

SEQ ID NO: 118667 - protein, 7 aa, synthetic construct
GGAPSMR

SEQ ID NO: 118668 - protein, 7 aa, synthetic construct
GGAQREK

SEQ ID NO: 118669 - protein, 7 aa, synthetic construct
GGAQYIK

SEQ ID NO: 118670 - protein, 7 aa, synthetic construct
GGARIHV

SEQ ID NO: 118671 - protein, 7 aa, synthetic construct
GGATHRI

SEQ ID NO: 118672 - protein, 7 aa, synthetic construct
GGAVKYA

SEQ ID NO: 118673 - protein, 7 aa, synthetic construct
GGEKFRG

SEQ ID NO: 118674 - protein, 7 aa, synthetic construct
GGEKNNR

SEQ ID NO: 118675 - protein, 7 aa, synthetic construct
GGERMKV

SEQ ID NO: 118676 - protein, 7 aa, synthetic construct
GGFKQTN

SEQ ID NO: 118677 - protein, 7 aa, synthetic construct
GGFQNIK

SEQ ID NO: 118678 - protein, 7 aa, synthetic construct
GGGAQLR

SEQ ID NO: 118679 - protein, 7 aa, synthetic construct
GGGGIIR

SEQ ID NO: 118680 - protein, 7 aa, synthetic construct
GGGHGYT

SEQ ID NO: 118681 - protein, 7 aa, synthetic construct
GGGKYQL

SEQ ID NO: 118682 - protein, 7 aa, synthetic construct
GGGLQGK

SEQ ID NO: 118683 - protein, 7 aa, synthetic construct
GGGLSIK

SEQ ID NO: 118684 - protein, 7 aa, synthetic construct
GGGMKYS

SEQ ID NO: 118685 - protein, 7 aa, synthetic construct
GGGNFIK

SEQ ID NO: 118686 - protein, 7 aa, synthetic construct
GGGNKSL

SEQ ID NO: 118687 - protein, 7 aa, synthetic construct
GGGNNAK

SEQ ID NO: 118688 - protein, 7 aa, synthetic construct
GGGNPQK

SEQ ID NO: 118689 - protein, 7 aa, synthetic construct
GGGNTRA

SEQ ID NO: 118690 - protein, 7 aa, synthetic construct
GGGQGAR

SEQ ID NO: 118691 - protein, 7 aa, synthetic construct
GGGSGAR

SEQ ID NO: 118692 - protein, 7 aa, synthetic construct
GGGSLGR

SEQ ID NO: 118693 - protein, 7 aa, synthetic construct
GGGSQGR

SEQ ID NO: 118694 - protein, 7 aa, synthetic construct
GGGTSQR

SEQ ID NO: 118695 - protein, 7 aa, synthetic construct
GGGTTQR

SEQ ID NO: 118696 - protein, 7 aa, synthetic construct
GGGTTRS

SEQ ID NO: 118697 - protein, 7 aa, synthetic construct
GGGVKYN

SEQ ID NO: 118698 - protein, 7 aa, synthetic construct
GGGYMAQ

SEQ ID NO: 118699 - protein, 7 aa, synthetic construct
GGGYSKP

SEQ ID NO: 118700 - protein, 7 aa, synthetic construct
GGHGRHD

SEQ ID NO: 118701 - protein, 7 aa, synthetic construct
GGHMVKT

SEQ ID NO: 118702 - protein, 7 aa, synthetic construct
GGHQKPV

SEQ ID NO: 118703 - protein, 7 aa, synthetic construct
GGHQLPK

SEQ ID NO: 118704 - protein, 7 aa, synthetic construct
GGHVSKS

SEQ ID NO: 118705 - protein, 7 aa, synthetic construct
GGHYGQV

SEQ ID NO: 118706 - protein, 7 aa, synthetic construct
GGIDKLR

SEQ ID NO: 118707 - protein, 7 aa, synthetic construct
GGIGHGK

SEQ ID NO: 118708 - protein, 7 aa, synthetic construct
GGIHLGK

SEQ ID NO: 118709 - protein, 7 aa, synthetic construct
GGIIQRA

SEQ ID NO: 118710 - protein, 7 aa, synthetic construct
GGIQSAR

SEQ ID NO: 118711 - protein, 7 aa, synthetic construct
GGIQSSR

SEQ ID NO: 118712 - protein, 7 aa, synthetic construct
GGIRMEK

SEQ ID NO: 118713 - protein, 7 aa, synthetic construct
GGKDQRM

SEQ ID NO: 118714 - protein, 7 aa, synthetic construct
GGKDQTK

SEQ ID NO: 118715 - protein, 7 aa, synthetic construct
GGKFGDK

SEQ ID NO: 118716 - protein, 7 aa, synthetic construct
GGKFKTD

SEQ ID NO: 118717 - protein, 7 aa, synthetic construct
GGKFNQN

SEQ ID NO: 118718 - protein, 7 aa, synthetic construct
GGKFNTV

SEQ ID NO: 118719 - protein, 7 aa, synthetic construct
GGKFQNN

SEQ ID NO: 118720 - protein, 7 aa, synthetic construct
GGKFQTI

SEQ ID NO: 118721 - protein, 7 aa, synthetic construct
GGKHMAY

SEQ ID NO: 118722 - protein, 7 aa, synthetic construct
GGKHVVL

SEQ ID NO: 118723 - protein, 7 aa, synthetic construct
GGKQDLR

SEQ ID NO: 118724 - protein, 7 aa, synthetic construct
GGKQMML

SEQ ID NO: 118725 - protein, 7 aa, synthetic construct
GGKQQIY

SEQ ID NO: 118726 - protein, 7 aa, synthetic construct
GGKQYQV

SEQ ID NO: 118727 - protein, 7 aa, synthetic construct
GGKSNTW

SEQ ID NO: 118728 - protein, 7 aa, synthetic construct
GGKYATG

SEQ ID NO: 118729 - protein, 7 aa, synthetic construct
GGKYITT

SEQ ID NO: 118730 - protein, 7 aa, synthetic construct
GGKYTSS

SEQ ID NO: 118731 - protein, 7 aa, synthetic construct
GGLAKVH

SEQ ID NO: 118732 - protein, 7 aa, synthetic construct
GGLGQGR

SEQ ID NO: 118733 - protein, 7 aa, synthetic construct
GGLIVKN

SEQ ID NO: 118734 - protein, 7 aa, synthetic construct
GGLKYAN

SEQ ID NO: 118735 - protein, 7 aa, synthetic construct
GGLREKT

SEQ ID NO: 118736 - protein, 7 aa, synthetic construct
GGLTKRE

SEQ ID NO: 118737 - protein, 7 aa, synthetic construct
GGLVIAP

SEQ ID NO: 118738 - protein, 7 aa, synthetic construct
GGMHRVM

SEQ ID NO: 118739 - protein, 7 aa, synthetic construct
GGMIKLS

SEQ ID NO: 118740 - protein, 7 aa, synthetic construct
GGMKVAF

SEQ ID NO: 118741 - protein, 7 aa, synthetic construct
GGMNYKY

SEQ ID NO: 118742 - protein, 7 aa, synthetic construct
GGMPNTR

SEQ ID NO: 118743 - protein, 7 aa, synthetic construct
GGMQNGK

SEQ ID NO: 118744 - protein, 7 aa, synthetic construct
GGMQRLV

SEQ ID NO: 118745 - protein, 7 aa, synthetic construct
GGMQRMI

SEQ ID NO: 118746 - protein, 7 aa, synthetic construct
GGMRITS

SEQ ID NO: 118747 - protein, 7 aa, synthetic construct
GGMSRTM

SEQ ID NO: 118748 - protein, 7 aa, synthetic construct
GGMYIKA

SEQ ID NO: 118749 - protein, 7 aa, synthetic construct
GGNDTRR

SEQ ID NO: 118750 - protein, 7 aa, synthetic construct
GGNGFTR

SEQ ID NO: 118751 - protein, 7 aa, synthetic construct
GGNGSRM

SEQ ID NO: 118752 - protein, 7 aa, synthetic construct
GGNGWTK

SEQ ID NO: 118753 - protein, 7 aa, synthetic construct
GGNHVNK

SEQ ID NO: 118754 - protein, 7 aa, synthetic construct
GGNIAVR

SEQ ID NO: 118755 - protein, 7 aa, synthetic construct
GGNISGK

SEQ ID NO: 118756 - protein, 7 aa, synthetic construct
GGNITPR

SEQ ID NO: 118757 - protein, 7 aa, synthetic construct
GGNKHTV

SEQ ID NO: 118758 - protein, 7 aa, synthetic construct
GGNMKTW

SEQ ID NO: 118759 - protein, 7 aa, synthetic construct
GGNMSQK

SEQ ID NO: 118760 - protein, 7 aa, synthetic construct
GGNSAIR

SEQ ID NO: 118761 - protein, 7 aa, synthetic construct
GGNSYIK

SEQ ID NO: 118762 - protein, 7 aa, synthetic construct
GGNTYVK

SEQ ID NO: 118763 - protein, 7 aa, synthetic construct
GGNYTLN

SEQ ID NO: 118764 - protein, 7 aa, synthetic construct
GGPGHKM

SEQ ID NO: 118765 - protein, 7 aa, synthetic construct
GGPHLKN

SEQ ID NO: 118766 - protein, 7 aa, synthetic construct
GGPHQKQ

SEQ ID NO: 118767 - protein, 7 aa, synthetic construct
GGPIMAR

SEQ ID NO: 118768 - protein, 7 aa, synthetic construct
GGPIRTQ

SEQ ID NO: 118769 - protein, 7 aa, synthetic construct
GGPISRA

SEQ ID NO: 118770 - protein, 7 aa, synthetic construct
GGPIVSR

SEQ ID NO: 118771 - protein, 7 aa, synthetic construct
GGPKFNT

SEQ ID NO: 118772 - protein, 7 aa, synthetic construct
GGPKFVT

SEQ ID NO: 118773 - protein, 7 aa, synthetic construct
GGPKIAF

SEQ ID NO: 118774 - protein, 7 aa, synthetic construct
GGPLIRN

SEQ ID NO: 118775 - protein, 7 aa, synthetic construct
GGPMMMK

SEQ ID NO: 118776 - protein, 7 aa, synthetic construct
GGPNVQR

SEQ ID NO: 118777 - protein, 7 aa, synthetic construct
GGPQISR

SEQ ID NO: 118778 - protein, 7 aa, synthetic construct
GGPQKYN

SEQ ID NO: 118779 - protein, 7 aa, synthetic construct
GGPYKTN

SEQ ID NO: 118780 - protein, 7 aa, synthetic construct
GGQAGRM

SEQ ID NO: 118781 - protein, 7 aa, synthetic construct
GGQGLGK

SEQ ID NO: 118782 - protein, 7 aa, synthetic construct
GGQHVSK

SEQ ID NO: 118783 - protein, 7 aa, synthetic construct
GGQHVVK

SEQ ID NO: 118784 - protein, 7 aa, synthetic construct
GGQLPRP

SEQ ID NO: 118785 - protein, 7 aa, synthetic construct
GGQQANR

SEQ ID NO: 118786 - protein, 7 aa, synthetic construct
GGQQNIR

SEQ ID NO: 118787 - protein, 7 aa, synthetic construct
GGQREIK

SEQ ID NO: 118788 - protein, 7 aa, synthetic construct
GGQRLKD

SEQ ID NO: 118789 - protein, 7 aa, synthetic construct
GGQVQMR

SEQ ID NO: 118790 - protein, 7 aa, synthetic construct
GGQVTRM

SEQ ID NO: 118791 - protein, 7 aa, synthetic construct
GGRAMTI

SEQ ID NO: 118792 - protein, 7 aa, synthetic construct
GGRDIMK

SEQ ID NO: 118793 - protein, 7 aa, synthetic construct
GGREKLI

SEQ ID NO: 118794 - protein, 7 aa, synthetic construct
GGREMIR

SEQ ID NO: 118795 - protein, 7 aa, synthetic construct
GGREQPK

SEQ ID NO: 118796 - protein, 7 aa, synthetic construct
GGRFAAA

SEQ ID NO: 118797 - protein, 7 aa, synthetic construct
GGRFPPQ

SEQ ID NO: 118798 - protein, 7 aa, synthetic construct
GGRHTPI

SEQ ID NO: 118799 - protein, 7 aa, synthetic construct
GGRKDGM

SEQ ID NO: 118800 - protein, 7 aa, synthetic construct
GGRKIDV

SEQ ID NO: 118801 - protein, 7 aa, synthetic construct
GGRLKEN

SEQ ID NO: 118802 - protein, 7 aa, synthetic construct
GGRQAPV

SEQ ID NO: 118803 - protein, 7 aa, synthetic construct
GGRQLQT

SEQ ID NO: 118804 - protein, 7 aa, synthetic construct
GGRREPE

SEQ ID NO: 118805 - protein, 7 aa, synthetic construct
GGRSVAF

SEQ ID NO: 118806 - protein, 7 aa, synthetic construct
GGRTNWD

SEQ ID NO: 118807 - protein, 7 aa, synthetic construct
GGRTQDK

SEQ ID NO: 118808 - protein, 7 aa, synthetic construct
GGRTVDK

SEQ ID NO: 118809 - protein, 7 aa, synthetic construct
GGRTVEK

SEQ ID NO: 118810 - protein, 7 aa, synthetic construct
GGSAHSK

SEQ ID NO: 118811 - protein, 7 aa, synthetic construct
GGSFQQK

SEQ ID NO: 118812 - protein, 7 aa, synthetic construct
GGSGSAR

SEQ ID NO: 118813 - protein, 7 aa, synthetic construct
GGSGYKI

SEQ ID NO: 118814 - protein, 7 aa, synthetic construct
GGSHKQQ

SEQ ID NO: 118815 - protein, 7 aa, synthetic construct
GGSKTYV

SEQ ID NO: 118816 - protein, 7 aa, synthetic construct
GGSNMGR

SEQ ID NO: 118817 - protein, 7 aa, synthetic construct
GGSNSPR

SEQ ID NO: 118818 - protein, 7 aa, synthetic construct
GGSPYQK

SEQ ID NO: 118819 - protein, 7 aa, synthetic construct
GGSRMPT

SEQ ID NO: 118820 - protein, 7 aa, synthetic construct
GGSTGGR

SEQ ID NO: 118821 - protein, 7 aa, synthetic construct
GGSVYKN

SEQ ID NO: 118822 - protein, 7 aa, synthetic construct
GGTARGN

SEQ ID NO: 118823 - protein, 7 aa, synthetic construct
GGTGQSR

SEQ ID NO: 118824 - protein, 7 aa, synthetic construct
GGTHFQK

SEQ ID NO: 118825 - protein, 7 aa, synthetic construct
GGTHYKG

SEQ ID NO: 118826 - protein, 7 aa, synthetic construct
GGTMMPR

SEQ ID NO: 118827 - protein, 7 aa, synthetic construct
GGTNSVR

SEQ ID NO: 118828 - protein, 7 aa, synthetic construct
GGTQRDK

SEQ ID NO: 118829 - protein, 7 aa, synthetic construct
GGTSASR

SEQ ID NO: 118830 - protein, 7 aa, synthetic construct
GGTSGGK

SEQ ID NO: 118831 - protein, 7 aa, synthetic construct
GGTSMPR

SEQ ID NO: 118832 - protein, 7 aa, synthetic construct
GGTTTPR

SEQ ID NO: 118833 - protein, 7 aa, synthetic construct
GGTYKGN

SEQ ID NO: 118834 - protein, 7 aa, synthetic construct
GGVGQVR

SEQ ID NO: 118835 - protein, 7 aa, synthetic construct
GGVHKQL

SEQ ID NO: 118836 - protein, 7 aa, synthetic construct
GGVITRV

SEQ ID NO: 118837 - protein, 7 aa, synthetic construct
GGVLKRD

SEQ ID NO: 118838 - protein, 7 aa, synthetic construct
GGVNKQW

SEQ ID NO: 118839 - protein, 7 aa, synthetic construct
GGVNQPR

SEQ ID NO: 118840 - protein, 7 aa, synthetic construct
GGVQHAR

SEQ ID NO: 118841 - protein, 7 aa, synthetic construct
GGVRASI

SEQ ID NO: 118842 - protein, 7 aa, synthetic construct
GGVSNMR

SEQ ID NO: 118843 - protein, 7 aa, synthetic construct
GGYGQIN

SEQ ID NO: 118844 - protein, 7 aa, synthetic construct
GGYKKDT

SEQ ID NO: 118845 - protein, 7 aa, synthetic construct
GGYKSTG

SEQ ID NO: 118846 - protein, 7 aa, synthetic construct
GGYPNGY

SEQ ID NO: 118847 - protein, 7 aa, synthetic construct
GHAAGRV

SEQ ID NO: 118848 - protein, 7 aa, synthetic construct
GHAIVRS

SEQ ID NO: 118849 - protein, 7 aa, synthetic construct
GHAKASQ

SEQ ID NO: 118850 - protein, 7 aa, synthetic construct
GHAKFPP

SEQ ID NO: 118851 - protein, 7 aa, synthetic construct
GHAKHMP

SEQ ID NO: 118852 - protein, 7 aa, synthetic construct
GHALARM

SEQ ID NO: 118853 - protein, 7 aa, synthetic construct
GHAPKMT

SEQ ID NO: 118854 - protein, 7 aa, synthetic construct
GHAPVRQ

SEQ ID NO: 118855 - protein, 7 aa, synthetic construct
GHAQAMK

SEQ ID NO: 118856 - protein, 7 aa, synthetic construct
GHAQIKM

SEQ ID NO: 118857 - protein, 7 aa, synthetic construct
GHAQIQR

SEQ ID NO: 118858 - protein, 7 aa, synthetic construct
GHAQKMF

SEQ ID NO: 118859 - protein, 7 aa, synthetic construct
GHAQSMK

SEQ ID NO: 118860 - protein, 7 aa, synthetic construct
GHAQSRV

SEQ ID NO: 118861 - protein, 7 aa, synthetic construct
GHARGGS

SEQ ID NO: 118862 - protein, 7 aa, synthetic construct
GHASTIR

SEQ ID NO: 118863 - protein, 7 aa, synthetic construct
GHATGAR

SEQ ID NO: 118864 - protein, 7 aa, synthetic construct
GHATKNT

SEQ ID NO: 118865 - protein, 7 aa, synthetic construct
GHATPRT

SEQ ID NO: 118866 - protein, 7 aa, synthetic construct
GHAVGTR

SEQ ID NO: 118867 - protein, 7 aa, synthetic construct
GHAVIRG

SEQ ID NO: 118868 - protein, 7 aa, synthetic construct
GHAYTVS

SEQ ID NO: 118869 - protein, 7 aa, synthetic construct
GHDFGHK

SEQ ID NO: 118870 - protein, 7 aa, synthetic construct
GHDRPKV

SEQ ID NO: 118871 - protein, 7 aa, synthetic construct
GHERVMR

SEQ ID NO: 118872 - protein, 7 aa, synthetic construct
GHETFRM

SEQ ID NO: 118873 - protein, 7 aa, synthetic construct
GHGALKN

SEQ ID NO: 118874 - protein, 7 aa, synthetic construct
GHGIRTN

SEQ ID NO: 118875 - protein, 7 aa, synthetic construct
GHGKIMT

SEQ ID NO: 118876 - protein, 7 aa, synthetic construct
GHGKSII

SEQ ID NO: 118877 - protein, 7 aa, synthetic construct
GHGLTKL

SEQ ID NO: 118878 - protein, 7 aa, synthetic construct
GHGMQQK

SEQ ID NO: 118879 - protein, 7 aa, synthetic construct
GHGNKLI

SEQ ID NO: 118880 - protein, 7 aa, synthetic construct
GHGSQKQ

SEQ ID NO: 118881 - protein, 7 aa, synthetic construct
GHGVIQK

SEQ ID NO: 118882 - protein, 7 aa, synthetic construct
GHGVQVK

SEQ ID NO: 118883 - protein, 7 aa, synthetic construct
GHGYLAS

SEQ ID NO: 118884 - protein, 7 aa, synthetic construct
GHGYTGL

SEQ ID NO: 118885 - protein, 7 aa, synthetic construct
GHIGYSK

SEQ ID NO: 118886 - protein, 7 aa, synthetic construct
GHIKHQV

SEQ ID NO: 118887 - protein, 7 aa, synthetic construct
GHIKNSM

SEQ ID NO: 118888 - protein, 7 aa, synthetic construct
GHIPLPR

SEQ ID NO: 118889 - protein, 7 aa, synthetic construct
GHISQAR

SEQ ID NO: 118890 - protein, 7 aa, synthetic construct
GHISSGK

SEQ ID NO: 118891 - protein, 7 aa, synthetic construct
GHKAMPL

SEQ ID NO: 118892 - protein, 7 aa, synthetic construct
GHKANQV

SEQ ID NO: 118893 - protein, 7 aa, synthetic construct
GHKGFVV

SEQ ID NO: 118894 - protein, 7 aa, synthetic construct
GHKGSFS

SEQ ID NO: 118895 - protein, 7 aa, synthetic construct
GHKIENR

SEQ ID NO: 118896 - protein, 7 aa, synthetic construct
GHKKAFE

SEQ ID NO: 118897 - protein, 7 aa, synthetic construct
GHKKQDG

SEQ ID NO: 118898 - protein, 7 aa, synthetic construct
GHKLSQI

SEQ ID NO: 118899 - protein, 7 aa, synthetic construct
GHKLTMM

SEQ ID NO: 118900 - protein, 7 aa, synthetic construct
GHKMNLN

SEQ ID NO: 118901 - protein, 7 aa, synthetic construct
GHKNYNP

SEQ ID NO: 118902 - protein, 7 aa, synthetic construct
GHKQATT

SEQ ID NO: 118903 - protein, 7 aa, synthetic construct
GHKSIMT

SEQ ID NO: 118904 - protein, 7 aa, synthetic construct
GHKSPSI

SEQ ID NO: 118905 - protein, 7 aa, synthetic construct
GHKSVMQ

SEQ ID NO: 118906 - protein, 7 aa, synthetic construct
GHKTQPQ

SEQ ID NO: 118907 - protein, 7 aa, synthetic construct
GHKVSPY

SEQ ID NO: 118908 - protein, 7 aa, synthetic construct
GHLAKQL

SEQ ID NO: 118909 - protein, 7 aa, synthetic construct
GHLDKAR

SEQ ID NO: 118910 - protein, 7 aa, synthetic construct
GHLGLKM

SEQ ID NO: 118911 - protein, 7 aa, synthetic construct
GHLKFGV

SEQ ID NO: 118912 - protein, 7 aa, synthetic construct
GHLKLSN

SEQ ID NO: 118913 - protein, 7 aa, synthetic construct
GHLQKER

SEQ ID NO: 118914 - protein, 7 aa, synthetic construct
GHMKALI

SEQ ID NO: 118915 - protein, 7 aa, synthetic construct
GHMKTSQ

SEQ ID NO: 118916 - protein, 7 aa, synthetic construct
GHMMNPK

SEQ ID NO: 118917 - protein, 7 aa, synthetic construct
GHMNLMK

SEQ ID NO: 118918 - protein, 7 aa, synthetic construct
GHMPNQK

SEQ ID NO: 118919 - protein, 7 aa, synthetic construct
GHMQTRI

SEQ ID NO: 118920 - protein, 7 aa, synthetic construct
GHNFQQQ

SEQ ID NO: 118921 - protein, 7 aa, synthetic construct
GHNIPRT

SEQ ID NO: 118922 - protein, 7 aa, synthetic construct
GHNNRPY

SEQ ID NO: 118923 - protein, 7 aa, synthetic construct
GHNNVKF

SEQ ID NO: 118924 - protein, 7 aa, synthetic construct
GHNRTVF

SEQ ID NO: 118925 - protein, 7 aa, synthetic construct
GHNSLGK

SEQ ID NO: 118926 - protein, 7 aa, synthetic construct
GHNVVKY

SEQ ID NO: 118927 - protein, 7 aa, synthetic construct
GHNYKQS

SEQ ID NO: 118928 - protein, 7 aa, synthetic construct
GHNYTSH

SEQ ID NO: 118929 - protein, 7 aa, synthetic construct
GHPFNKV

SEQ ID NO: 118930 - protein, 7 aa, synthetic construct
GHPIIHP

SEQ ID NO: 118931 - protein, 7 aa, synthetic construct
GHPKMDR

SEQ ID NO: 118932 - protein, 7 aa, synthetic construct
GHPMVRN

SEQ ID NO: 118933 - protein, 7 aa, synthetic construct
GHPNVKL

SEQ ID NO: 118934 - protein, 7 aa, synthetic construct
GHPRAAV

SEQ ID NO: 118935 - protein, 7 aa, synthetic construct
GHPRINI

SEQ ID NO: 118936 - protein, 7 aa, synthetic construct
GHPRLAT

SEQ ID NO: 118937 - protein, 7 aa, synthetic construct
GHPRQLV

SEQ ID NO: 118938 - protein, 7 aa, synthetic construct
GHPSFKN

SEQ ID NO: 118939 - protein, 7 aa, synthetic construct
GHPSKSF

SEQ ID NO: 118940 - protein, 7 aa, synthetic construct
GHPSQRG

SEQ ID NO: 118941 - protein, 7 aa, synthetic construct
GHPYIKA

SEQ ID NO: 118942 - protein, 7 aa, synthetic construct
GHQATMR

SEQ ID NO: 118943 - protein, 7 aa, synthetic construct
GHQISQR

SEQ ID NO: 118944 - protein, 7 aa, synthetic construct
GHQKIQV

SEQ ID NO: 118945 - protein, 7 aa, synthetic construct
GHQMTLK

SEQ ID NO: 118946 - protein, 7 aa, synthetic construct
GHQNRPV

SEQ ID NO: 118947 - protein, 7 aa, synthetic construct
GHQSKMI

SEQ ID NO: 118948 - protein, 7 aa, synthetic construct
GHQTIRI

SEQ ID NO: 118949 - protein, 7 aa, synthetic construct
GHQVKMV

SEQ ID NO: 118950 - protein, 7 aa, synthetic construct
GHQVYKV

SEQ ID NO: 118951 - protein, 7 aa, synthetic construct
GHRDLNR

SEQ ID NO: 118952 - protein, 7 aa, synthetic construct
GHRGMSP

SEQ ID NO: 118953 - protein, 7 aa, synthetic construct
GHRGTSV

SEQ ID NO: 118954 - protein, 7 aa, synthetic construct
GHRPNTP

SEQ ID NO: 118955 - protein, 7 aa, synthetic construct
GHSAANK

SEQ ID NO: 118956 - protein, 7 aa, synthetic construct
GHSGGGK

SEQ ID NO: 118957 - protein, 7 aa, synthetic construct
GHSISQK

SEQ ID NO: 118958 - protein, 7 aa, synthetic construct
GHSPQRA

SEQ ID NO: 118959 - protein, 7 aa, synthetic construct
GHSQFPK

SEQ ID NO: 118960 - protein, 7 aa, synthetic construct
GHSQKTM

SEQ ID NO: 118961 - protein, 7 aa, synthetic construct
GHSTKST

SEQ ID NO: 118962 - protein, 7 aa, synthetic construct
GHTGIIR

SEQ ID NO: 118963 - protein, 7 aa, synthetic construct
GHTGMKQ

SEQ ID NO: 118964 - protein, 7 aa, synthetic construct
GHTGTSK

SEQ ID NO: 118965 - protein, 7 aa, synthetic construct
GHTKLQL

SEQ ID NO: 118966 - protein, 7 aa, synthetic construct
GHTLIRA

SEQ ID NO: 118967 - protein, 7 aa, synthetic construct
GHTNFVM

SEQ ID NO: 118968 - protein, 7 aa, synthetic construct
GHTNGMR

SEQ ID NO: 118969 - protein, 7 aa, synthetic construct
GHTPSGK

SEQ ID NO: 118970 - protein, 7 aa, synthetic construct
GHTQIAR

SEQ ID NO: 118971 - protein, 7 aa, synthetic construct
GHTSGYK

SEQ ID NO: 118972 - protein, 7 aa, synthetic construct
GHTTQFK

SEQ ID NO: 118973 - protein, 7 aa, synthetic construct
GHTTYPR

SEQ ID NO: 118974 - protein, 7 aa, synthetic construct
GHVAAQK

SEQ ID NO: 118975 - protein, 7 aa, synthetic construct
GHVGVAR

SEQ ID NO: 118976 - protein, 7 aa, synthetic construct
GHVGVMR

SEQ ID NO: 118977 - protein, 7 aa, synthetic construct
GHVKERT

SEQ ID NO: 118978 - protein, 7 aa, synthetic construct
GHVKMLA

SEQ ID NO: 118979 - protein, 7 aa, synthetic construct
GHVKSSM

SEQ ID NO: 118980 - protein, 7 aa, synthetic construct
GHVQQPR

SEQ ID NO: 118981 - protein, 7 aa, synthetic construct
GHVRVAA

SEQ ID NO: 118982 - protein, 7 aa, synthetic construct
GHVSGQP

SEQ ID NO: 118983 - protein, 7 aa, synthetic construct
GHYGAKV

SEQ ID NO: 118984 - protein, 7 aa, synthetic construct
GHYMNKA

SEQ ID NO: 118985 - protein, 7 aa, synthetic construct
GHYQVKP

SEQ ID NO: 118986 - protein, 7 aa, synthetic construct
GIAAHRL

SEQ ID NO: 118987 - protein, 7 aa, synthetic construct
GIAHIKT

SEQ ID NO: 118988 - protein, 7 aa, synthetic construct
GIAHPNR

SEQ ID NO: 118989 - protein, 7 aa, synthetic construct
GIAHPRG

SEQ ID NO: 118990 - protein, 7 aa, synthetic construct
GIAHRTT

SEQ ID NO: 118991 - protein, 7 aa, synthetic construct
GIAKHIV

SEQ ID NO: 118992 - protein, 7 aa, synthetic construct
GIAPYSK

SEQ ID NO: 118993 - protein, 7 aa, synthetic construct
GIAQRHA

SEQ ID NO: 118994 - protein, 7 aa, synthetic construct
GIDAKRM

SEQ ID NO: 118995 - protein, 7 aa, synthetic construct
GIDARMR

SEQ ID NO: 118996 - protein, 7 aa, synthetic construct
GIDKMYK

SEQ ID NO: 118997 - protein, 7 aa, synthetic construct
GIDRSRL

SEQ ID NO: 118998 - protein, 7 aa, synthetic construct
GIEKIAR

SEQ ID NO: 118999 - protein, 7 aa, synthetic construct
GIEKLRN

SEQ ID NO: 119000 - protein, 7 aa, synthetic construct
GIEKYSK

SEQ ID NO: 119001 - protein, 7 aa, synthetic construct
GIENFKK

SEQ ID NO: 119002 - protein, 7 aa, synthetic construct
GIENNRK

SEQ ID NO: 119003 - protein, 7 aa, synthetic construct
GIERLRV

SEQ ID NO: 119004 - protein, 7 aa, synthetic construct
GIFGAPK

SEQ ID NO: 119005 - protein, 7 aa, synthetic construct
GIGGMAR

SEQ ID NO: 119006 - protein, 7 aa, synthetic construct
GIGHNVR

SEQ ID NO: 119007 - protein, 7 aa, synthetic construct
GIGHQRI

SEQ ID NO: 119008 - protein, 7 aa, synthetic construct
GIGHRIV

SEQ ID NO: 119009 - protein, 7 aa, synthetic construct
GIGHVRV

SEQ ID NO: 119010 - protein, 7 aa, synthetic construct
GIGKAFQ

SEQ ID NO: 119011 - protein, 7 aa, synthetic construct
GIGKFDR

SEQ ID NO: 119012 - protein, 7 aa, synthetic construct
GIGNYKN

SEQ ID NO: 119013 - protein, 7 aa, synthetic construct
GIGRGLP

SEQ ID NO: 119014 - protein, 7 aa, synthetic construct
GIGRPPP

SEQ ID NO: 119015 - protein, 7 aa, synthetic construct
GIGTRVH

SEQ ID NO: 119016 - protein, 7 aa, synthetic construct
GIHAGKF

SEQ ID NO: 119017 - protein, 7 aa, synthetic construct
GIHAYAH

SEQ ID NO: 119018 - protein, 7 aa, synthetic construct
GIHGKNY

SEQ ID NO: 119019 - protein, 7 aa, synthetic construct
GIHKLDR

SEQ ID NO: 119020 - protein, 7 aa, synthetic construct
GIHKQFN

SEQ ID NO: 119021 - protein, 7 aa, synthetic construct
GIHKSLM

SEQ ID NO: 119022 - protein, 7 aa, synthetic construct
GIHMATR

SEQ ID NO: 119023 - protein, 7 aa, synthetic construct
GIHMQKM

SEQ ID NO: 119024 - protein, 7 aa, synthetic construct
GIHNANK

SEQ ID NO: 119025 - protein, 7 aa, synthetic construct
GIHNNQK

SEQ ID NO: 119026 - protein, 7 aa, synthetic construct
GIHPKNM

SEQ ID NO: 119027 - protein, 7 aa, synthetic construct
GIHPKYS

SEQ ID NO: 119028 - protein, 7 aa, synthetic construct
GIHQIKN

SEQ ID NO: 119029 - protein, 7 aa, synthetic construct
GIHRGLV

SEQ ID NO: 119030 - protein, 7 aa, synthetic construct
GIHSNKN

SEQ ID NO: 119031 - protein, 7 aa, synthetic construct
GIHSNKS

SEQ ID NO: 119032 - protein, 7 aa, synthetic construct
GIHTQNR

SEQ ID NO: 119033 - protein, 7 aa, synthetic construct
GIHVARA

SEQ ID NO: 119034 - protein, 7 aa, synthetic construct
GIHYPAK

SEQ ID NO: 119035 - protein, 7 aa, synthetic construct
GIIHASK

SEQ ID NO: 119036 - protein, 7 aa, synthetic construct
GIIQRKE

SEQ ID NO: 119037 - protein, 7 aa, synthetic construct
GIKDAGR

SEQ ID NO: 119038 - protein, 7 aa, synthetic construct
GIKFKSD

SEQ ID NO: 119039 - protein, 7 aa, synthetic construct
GIKGMYS

SEQ ID NO: 119040 - protein, 7 aa, synthetic construct
GIKHFTA

SEQ ID NO: 119041 - protein, 7 aa, synthetic construct
GIKHGLI

SEQ ID NO: 119042 - protein, 7 aa, synthetic construct
GIKPIMT

SEQ ID NO: 119043 - protein, 7 aa, synthetic construct
GIKPMPN

SEQ ID NO: 119044 - protein, 7 aa, synthetic construct
GIKTIPF

SEQ ID NO: 119045 - protein, 7 aa, synthetic construct
GIKVGAF

SEQ ID NO: 119046 - protein, 7 aa, synthetic construct
GIKYDQK

SEQ ID NO: 119047 - protein, 7 aa, synthetic construct
GIKYSEK

SEQ ID NO: 119048 - protein, 7 aa, synthetic construct
GIKYTLN

SEQ ID NO: 119049 - protein, 7 aa, synthetic construct
GILGHKV

SEQ ID NO: 119050 - protein, 7 aa, synthetic construct
GIMGQRQ

SEQ ID NO: 119051 - protein, 7 aa, synthetic construct
GIMHNNR

SEQ ID NO: 119052 - protein, 7 aa, synthetic construct
GIMHVKM

SEQ ID NO: 119053 - protein, 7 aa, synthetic construct
GIMNRGI

SEQ ID NO: 119054 - protein, 7 aa, synthetic construct
GIMPKFS

SEQ ID NO: 119055 - protein, 7 aa, synthetic construct
GIMPRIA

SEQ ID NO: 119056 - protein, 7 aa, synthetic construct
GINETRK

SEQ ID NO: 119057 - protein, 7 aa, synthetic construct
GINNKSW

SEQ ID NO: 119058 - protein, 7 aa, synthetic construct
GINREKQ

SEQ ID NO: 119059 - protein, 7 aa, synthetic construct
GINRERG

SEQ ID NO: 119060 - protein, 7 aa, synthetic construct
GINRQIT

SEQ ID NO: 119061 - protein, 7 aa, synthetic construct
GINTHRV

SEQ ID NO: 119062 - protein, 7 aa, synthetic construct
GINYKAM

SEQ ID NO: 119063 - protein, 7 aa, synthetic construct
GIPGVRA

SEQ ID NO: 119064 - protein, 7 aa, synthetic construct
GIPHKVT

SEQ ID NO: 119065 - protein, 7 aa, synthetic construct
GIPHNRN

SEQ ID NO: 119066 - protein, 7 aa, synthetic construct
GIPKYNV

SEQ ID NO: 119067 - protein, 7 aa, synthetic construct
GIPRGMT

SEQ ID NO: 119068 - protein, 7 aa, synthetic construct
GIPRIHA

SEQ ID NO: 119069 - protein, 7 aa, synthetic construct
GIPRIMS

SEQ ID NO: 119070 - protein, 7 aa, synthetic construct
GIPTHQR

SEQ ID NO: 119071 - protein, 7 aa, synthetic construct
GIPYAKM

SEQ ID NO: 119072 - protein, 7 aa, synthetic construct
GIQGISR

SEQ ID NO: 119073 - protein, 7 aa, synthetic construct
GIQGNGR

SEQ ID NO: 119074 - protein, 7 aa, synthetic construct
GIQGVRY

SEQ ID NO: 119075 - protein, 7 aa, synthetic construct
GIQHANK

SEQ ID NO: 119076 - protein, 7 aa, synthetic construct
GIQHSQR

SEQ ID NO: 119077 - protein, 7 aa, synthetic construct
GIQKRVD

SEQ ID NO: 119078 - protein, 7 aa, synthetic construct
GIQMGMR

SEQ ID NO: 119079 - protein, 7 aa, synthetic construct
GIQRPHT

SEQ ID NO: 119080 - protein, 7 aa, synthetic construct
GIQRTHI

SEQ ID NO: 119081 - protein, 7 aa, synthetic construct
GIRDRML

SEQ ID NO: 119082 - protein, 7 aa, synthetic construct
GIREMPK

SEQ ID NO: 119083 - protein, 7 aa, synthetic construct
GIREMRP

SEQ ID NO: 119084 - protein, 7 aa, synthetic construct
GIRERTI

SEQ ID NO: 119085 - protein, 7 aa, synthetic construct
GIRGPDK

SEQ ID NO: 119086 - protein, 7 aa, synthetic construct
GIRGYPA

SEQ ID NO: 119087 - protein, 7 aa, synthetic construct
GIRKSIE

SEQ ID NO: 119088 - protein, 7 aa, synthetic construct
GIRKVDT

SEQ ID NO: 119089 - protein, 7 aa, synthetic construct
GIRMETK

SEQ ID NO: 119090 - protein, 7 aa, synthetic construct
GIRNMHG

SEQ ID NO: 119091 - protein, 7 aa, synthetic construct
GIRPAHS

SEQ ID NO: 119092 - protein, 7 aa, synthetic construct
GIRPNSM

SEQ ID NO: 119093 - protein, 7 aa, synthetic construct
GIRSSDK

SEQ ID NO: 119094 - protein, 7 aa, synthetic construct
GIRVHSG

SEQ ID NO: 119095 - protein, 7 aa, synthetic construct
GIRVPAN

SEQ ID NO: 119096 - protein, 7 aa, synthetic construct
GIRVQRD

SEQ ID NO: 119097 - protein, 7 aa, synthetic construct
GIRYGEK

SEQ ID NO: 119098 - protein, 7 aa, synthetic construct
GISGDRK

SEQ ID NO: 119099 - protein, 7 aa, synthetic construct
GISGQGR

SEQ ID NO: 119100 - protein, 7 aa, synthetic construct
GISHARV

SEQ ID NO: 119101 - protein, 7 aa, synthetic construct
GISHPRG

SEQ ID NO: 119102 - protein, 7 aa, synthetic construct
GISKSER

SEQ ID NO: 119103 - protein, 7 aa, synthetic construct
GISNSGR

SEQ ID NO: 119104 - protein, 7 aa, synthetic construct
GISPYQK

SEQ ID NO: 119105 - protein, 7 aa, synthetic construct
GISQYMK

SEQ ID NO: 119106 - protein, 7 aa, synthetic construct
GISREGR

SEQ ID NO: 119107 - protein, 7 aa, synthetic construct
GISRKGD

SEQ ID NO: 119108 - protein, 7 aa, synthetic construct
GISRNNT

SEQ ID NO: 119109 - protein, 7 aa, synthetic construct
GISRNTQ

SEQ ID NO: 119110 - protein, 7 aa, synthetic construct
GISVRAT

SEQ ID NO: 119111 - protein, 7 aa, synthetic construct
GISYKST

SEQ ID NO: 119112 - protein, 7 aa, synthetic construct
GITGSRH

SEQ ID NO: 119113 - protein, 7 aa, synthetic construct
GITHLKL

SEQ ID NO: 119114 - protein, 7 aa, synthetic construct
GITNSNR

SEQ ID NO: 119115 - protein, 7 aa, synthetic construct
GITREAK

SEQ ID NO: 119116 - protein, 7 aa, synthetic construct
GIVHKPT

SEQ ID NO: 119117 - protein, 7 aa, synthetic construct
GIVHRTT

SEQ ID NO: 119118 - protein, 7 aa, synthetic construct
GIVHTKL

SEQ ID NO: 119119 - protein, 7 aa, synthetic construct
GIVRDKS

SEQ ID NO: 119120 - protein, 7 aa, synthetic construct
GIVRQNM

SEQ ID NO: 119121 - protein, 7 aa, synthetic construct
GIVTHRT

SEQ ID NO: 119122 - protein, 7 aa, synthetic construct
GIYGAAK

SEQ ID NO: 119123 - protein, 7 aa, synthetic construct
GIYQLKG

SEQ ID NO: 119124 - protein, 7 aa, synthetic construct
GIYTNKA

SEQ ID NO: 119125 - protein, 7 aa, synthetic construct
GKAASMY

SEQ ID NO: 119126 - protein, 7 aa, synthetic construct
GKAETQR

SEQ ID NO: 119127 - protein, 7 aa, synthetic construct
GKAHAPH

SEQ ID NO: 119128 - protein, 7 aa, synthetic construct
GKAHTQN

SEQ ID NO: 119129 - protein, 7 aa, synthetic construct
GKAKDPQ

SEQ ID NO: 119130 - protein, 7 aa, synthetic construct
GKALEGR

SEQ ID NO: 119131 - protein, 7 aa, synthetic construct
GKALPYA

SEQ ID NO: 119132 - protein, 7 aa, synthetic construct
GKAMHNT

SEQ ID NO: 119133 - protein, 7 aa, synthetic construct
GKAMHTH

SEQ ID NO: 119134 - protein, 7 aa, synthetic construct
GKANEAR

SEQ ID NO: 119135 - protein, 7 aa, synthetic construct
GKAPAMF

SEQ ID NO: 119136 - protein, 7 aa, synthetic construct
GKAQALY

SEQ ID NO: 119137 - protein, 7 aa, synthetic construct
GKAQHQQ

SEQ ID NO: 119138 - protein, 7 aa, synthetic construct
GKARVET

SEQ ID NO: 119139 - protein, 7 aa, synthetic construct
GKASELR

SEQ ID NO: 119140 - protein, 7 aa, synthetic construct
GKATNAW

SEQ ID NO: 119141 - protein, 7 aa, synthetic construct
GKAVHTY

SEQ ID NO: 119142 - protein, 7 aa, synthetic construct
GKAVYAV

SEQ ID NO: 119143 - protein, 7 aa, synthetic construct
GKAVYQN

SEQ ID NO: 119144 - protein, 7 aa, synthetic construct
GKAYDKN

SEQ ID NO: 119145 - protein, 7 aa, synthetic construct
GKDANAR

SEQ ID NO: 119146 - protein, 7 aa, synthetic construct
GKDHKGV

SEQ ID NO: 119147 - protein, 7 aa, synthetic construct
GKDIHKY

SEQ ID NO: 119148 - protein, 7 aa, synthetic construct
GKDKAQH

SEQ ID NO: 119149 - protein, 7 aa, synthetic construct
GKDKRDI

SEQ ID NO: 119150 - protein, 7 aa, synthetic construct
GKDLRFP

SEQ ID NO: 119151 - protein, 7 aa, synthetic construct
GKDMGTK

SEQ ID NO: 119152 - protein, 7 aa, synthetic construct
GKDPNRH

SEQ ID NO: 119153 - protein, 7 aa, synthetic construct
GKDQQTR

SEQ ID NO: 119154 - protein, 7 aa, synthetic construct
GKDRERQ

SEQ ID NO: 119155 - protein, 7 aa, synthetic construct
GKDRHYA

SEQ ID NO: 119156 - protein, 7 aa, synthetic construct
GKDRVRD

SEQ ID NO: 119157 - protein, 7 aa, synthetic construct
GKDSQLR

SEQ ID NO: 119158 - protein, 7 aa, synthetic construct
GKDSQTK

SEQ ID NO: 119159 - protein, 7 aa, synthetic construct
GKDVQAR

SEQ ID NO: 119160 - protein, 7 aa, synthetic construct
GKDWNTM

SEQ ID NO: 119161 - protein, 7 aa, synthetic construct
GKDYKFN

SEQ ID NO: 119162 - protein, 7 aa, synthetic construct
GKEFKYA

SEQ ID NO: 119163 - protein, 7 aa, synthetic construct
GKEGPNR

SEQ ID NO: 119164 - protein, 7 aa, synthetic construct
GKEGWAK

SEQ ID NO: 119165 - protein, 7 aa, synthetic construct
GKEKTMW

SEQ ID NO: 119166 - protein, 7 aa, synthetic construct
GKEKTWQ

SEQ ID NO: 119167 - protein, 7 aa, synthetic construct
GKEKYMN

SEQ ID NO: 119168 - protein, 7 aa, synthetic construct
GKELRFN

SEQ ID NO: 119169 - protein, 7 aa, synthetic construct
GKEMKGH

SEQ ID NO: 119170 - protein, 7 aa, synthetic construct
GKENRAT

SEQ ID NO: 119171 - protein, 7 aa, synthetic construct
GKENRMS

SEQ ID NO: 119172 - protein, 7 aa, synthetic construct
GKEPHTR

SEQ ID NO: 119173 - protein, 7 aa, synthetic construct
GKEPYTR

SEQ ID NO: 119174 - protein, 7 aa, synthetic construct
GKEQFKH

SEQ ID NO: 119175 - protein, 7 aa, synthetic construct
GKERDNK

SEQ ID NO: 119176 - protein, 7 aa, synthetic construct
GKEVRIF

SEQ ID NO: 119177 - protein, 7 aa, synthetic construct
GKEYLGR

SEQ ID NO: 119178 - protein, 7 aa, synthetic construct
GKFDISK

SEQ ID NO: 119179 - protein, 7 aa, synthetic construct
GKFDTTR

SEQ ID NO: 119180 - protein, 7 aa, synthetic construct
GKFEKYN

SEQ ID NO: 119181 - protein, 7 aa, synthetic construct
GKFHQGQ

SEQ ID NO: 119182 - protein, 7 aa, synthetic construct
GKFHVLA

SEQ ID NO: 119183 - protein, 7 aa, synthetic construct
GKFINVS

SEQ ID NO: 119184 - protein, 7 aa, synthetic construct
GKFIQKD

SEQ ID NO: 119185 - protein, 7 aa, synthetic construct
GKFKTAD

SEQ ID NO: 119186 - protein, 7 aa, synthetic construct
GKFKTYE

SEQ ID NO: 119187 - protein, 7 aa, synthetic construct
GKFMMTA

SEQ ID NO: 119188 - protein, 7 aa, synthetic construct
GKFNINS

SEQ ID NO: 119189 - protein, 7 aa, synthetic construct
GKFPHAV

SEQ ID NO: 119190 - protein, 7 aa, synthetic construct
GKFPHSA

SEQ ID NO: 119191 - protein, 7 aa, synthetic construct
GKFQSGH

SEQ ID NO: 119192 - protein, 7 aa, synthetic construct
GKFSGSS

SEQ ID NO: 119193 - protein, 7 aa, synthetic construct
GKFSIAA

SEQ ID NO: 119194 - protein, 7 aa, synthetic construct
GKFSNNF

SEQ ID NO: 119195 - protein, 7 aa, synthetic construct
GKFSSPH

SEQ ID NO: 119196 - protein, 7 aa, synthetic construct
GKFTMSQ

SEQ ID NO: 119197 - protein, 7 aa, synthetic construct
GKFTSAG

SEQ ID NO: 119198 - protein, 7 aa, synthetic construct
GKFTVER

SEQ ID NO: 119199 - protein, 7 aa, synthetic construct
GKFVASQ

SEQ ID NO: 119200 - protein, 7 aa, synthetic construct
GKFVNPS

SEQ ID NO: 119201 - protein, 7 aa, synthetic construct
GKFVSTV

SEQ ID NO: 119202 - protein, 7 aa, synthetic construct
GKGALHM

SEQ ID NO: 119203 - protein, 7 aa, synthetic construct
GKGDNMK

SEQ ID NO: 119204 - protein, 7 aa, synthetic construct
GKGEGNR

SEQ ID NO: 119205 - protein, 7 aa, synthetic construct
GKGFTSV

SEQ ID NO: 119206 - protein, 7 aa, synthetic construct
GKGGYVS

SEQ ID NO: 119207 - protein, 7 aa, synthetic construct
GKGHNPF

SEQ ID NO: 119208 - protein, 7 aa, synthetic construct
GKGHQGV

SEQ ID NO: 119209 - protein, 7 aa, synthetic construct
GKGHSML

SEQ ID NO: 119210 - protein, 7 aa, synthetic construct
GKGHTMI

SEQ ID NO: 119211 - protein, 7 aa, synthetic construct
GKGHTMV

SEQ ID NO: 119212 - protein, 7 aa, synthetic construct
GKGHTQI

SEQ ID NO: 119213 - protein, 7 aa, synthetic construct
GKGHVQI

SEQ ID NO: 119214 - protein, 7 aa, synthetic construct
GKGHVSF

SEQ ID NO: 119215 - protein, 7 aa, synthetic construct
GKGHVSL

SEQ ID NO: 119216 - protein, 7 aa, synthetic construct
GKGHYQP

SEQ ID NO: 119217 - protein, 7 aa, synthetic construct
GKGHYSA

SEQ ID NO: 119218 - protein, 7 aa, synthetic construct
GKGKLDY

SEQ ID NO: 119219 - protein, 7 aa, synthetic construct
GKGKTDQ

SEQ ID NO: 119220 - protein, 7 aa, synthetic construct
GKGLSPI

SEQ ID NO: 119221 - protein, 7 aa, synthetic construct
GKGMQYS

SEQ ID NO: 119222 - protein, 7 aa, synthetic construct
GKGNHLA

SEQ ID NO: 119223 - protein, 7 aa, synthetic construct
GKGNKDH

SEQ ID NO: 119224 - protein, 7 aa, synthetic construct
GKGNPRE

SEQ ID NO: 119225 - protein, 7 aa, synthetic construct
GKGNPYV

SEQ ID NO: 119226 - protein, 7 aa, synthetic construct
GKGPGYN

SEQ ID NO: 119227 - protein, 7 aa, synthetic construct
GKGPRET

SEQ ID NO: 119228 - protein, 7 aa, synthetic construct
GKGQADK

SEQ ID NO: 119229 - protein, 7 aa, synthetic construct
GKGQQTH

SEQ ID NO: 119230 - protein, 7 aa, synthetic construct
GKGQRDN

SEQ ID NO: 119231 - protein, 7 aa, synthetic construct
GKGRDIF

SEQ ID NO: 119232 - protein, 7 aa, synthetic construct
GKGRELY

SEQ ID NO: 119233 - protein, 7 aa, synthetic construct
GKGSSYN

SEQ ID NO: 119234 - protein, 7 aa, synthetic construct
GKGVQNY

SEQ ID NO: 119235 - protein, 7 aa, synthetic construct
GKGVYAT

SEQ ID NO: 119236 - protein, 7 aa, synthetic construct
GKGYDKI

SEQ ID NO: 119237 - protein, 7 aa, synthetic construct
GKGYLGV

SEQ ID NO: 119238 - protein, 7 aa, synthetic construct
GKGYLSN

SEQ ID NO: 119239 - protein, 7 aa, synthetic construct
GKGYPMA

SEQ ID NO: 119240 - protein, 7 aa, synthetic construct
GKGYSSA

SEQ ID NO: 119241 - protein, 7 aa, synthetic construct
GKGYTMT

SEQ ID NO: 119242 - protein, 7 aa, synthetic construct
GKGYTTM

SEQ ID NO: 119243 - protein, 7 aa, synthetic construct
GKHAAPT

SEQ ID NO: 119244 - protein, 7 aa, synthetic construct
GKHATQQ

SEQ ID NO: 119245 - protein, 7 aa, synthetic construct
GKHDRII

SEQ ID NO: 119246 - protein, 7 aa, synthetic construct
GKHENRI

SEQ ID NO: 119247 - protein, 7 aa, synthetic construct
GKHGPNV

SEQ ID NO: 119248 - protein, 7 aa, synthetic construct
GKHINVQ

SEQ ID NO: 119249 - protein, 7 aa, synthetic construct
GKHIPLQ

SEQ ID NO: 119250 - protein, 7 aa, synthetic construct
GKHMTQQ

SEQ ID NO: 119251 - protein, 7 aa, synthetic construct
GKHNSLT

SEQ ID NO: 119252 - protein, 7 aa, synthetic construct
GKHPAQL

SEQ ID NO: 119253 - protein, 7 aa, synthetic construct
GKHPGIP

SEQ ID NO: 119254 - protein, 7 aa, synthetic construct
GKHPHPI

SEQ ID NO: 119255 - protein, 7 aa, synthetic construct
GKHPLVP

SEQ ID NO: 119256 - protein, 7 aa, synthetic construct
GKHQDKI

SEQ ID NO: 119257 - protein, 7 aa, synthetic construct
GKHQGGT

SEQ ID NO: 119258 - protein, 7 aa, synthetic construct
GKHQGLM

SEQ ID NO: 119259 - protein, 7 aa, synthetic construct
GKHQIGT

SEQ ID NO: 119260 - protein, 7 aa, synthetic construct
GKHQNTI

SEQ ID NO: 119261 - protein, 7 aa, synthetic construct
GKHQPTN

SEQ ID NO: 119262 - protein, 7 aa, synthetic construct
GKHQVNM

SEQ ID NO: 119263 - protein, 7 aa, synthetic construct
GKHSIAT

SEQ ID NO: 119264 - protein, 7 aa, synthetic construct
GKHSNFA

SEQ ID NO: 119265 - protein, 7 aa, synthetic construct
GKHSPLT

SEQ ID NO: 119266 - protein, 7 aa, synthetic construct
GKHTKDM

SEQ ID NO: 119267 - protein, 7 aa, synthetic construct
GKHTYGV

SEQ ID NO: 119268 - protein, 7 aa, synthetic construct
GKHVGQF

SEQ ID NO: 119269 - protein, 7 aa, synthetic construct
GKHVPRD

SEQ ID NO: 119270 - protein, 7 aa, synthetic construct
GKHVVMQ

SEQ ID NO: 119271 - protein, 7 aa, synthetic construct
GKHYELK

SEQ ID NO: 119272 - protein, 7 aa, synthetic construct
GKHYPAG

SEQ ID NO: 119273 - protein, 7 aa, synthetic construct
GKIAHIS

SEQ ID NO: 119274 - protein, 7 aa, synthetic construct
GKIAQLH

SEQ ID NO: 119275 - protein, 7 aa, synthetic construct
GKIEKMT

SEQ ID NO: 119276 - protein, 7 aa, synthetic construct
GKIIHQM

SEQ ID NO: 119277 - protein, 7 aa, synthetic construct
GKIMHNS

SEQ ID NO: 119278 - protein, 7 aa, synthetic construct
GKIMVER

SEQ ID NO: 119279 - protein, 7 aa, synthetic construct
GKIPHAL

SEQ ID NO: 119280 - protein, 7 aa, synthetic construct
GKIRDVM

SEQ ID NO: 119281 - protein, 7 aa, synthetic construct
GKIRNDA

SEQ ID NO: 119282 - protein, 7 aa, synthetic construct
GKIVVSH

SEQ ID NO: 119283 - protein, 7 aa, synthetic construct
GKIYITP

SEQ ID NO: 119284 - protein, 7 aa, synthetic construct
GKIYQQT

SEQ ID NO: 119285 - protein, 7 aa, synthetic construct
GKKDFQF

SEQ ID NO: 119286 - protein, 7 aa, synthetic construct
GKKDSPW

SEQ ID NO: 119287 - protein, 7 aa, synthetic construct
GKKEHIV

SEQ ID NO: 119288 - protein, 7 aa, synthetic construct
GKKFVQD

SEQ ID NO: 119289 - protein, 7 aa, synthetic construct
GKKPQDQ

SEQ ID NO: 119290 - protein, 7 aa, synthetic construct
GKKQAEY

SEQ ID NO: 119291 - protein, 7 aa, synthetic construct
GKKSLDL

SEQ ID NO: 119292 - protein, 7 aa, synthetic construct
GKLAQIM

SEQ ID NO: 119293 - protein, 7 aa, synthetic construct
GKLARDM

SEQ ID NO: 119294 - protein, 7 aa, synthetic construct
GKLDFAR

SEQ ID NO: 119295 - protein, 7 aa, synthetic construct
GKLFGSG

SEQ ID NO: 119296 - protein, 7 aa, synthetic construct
GKLGNYV

SEQ ID NO: 119297 - protein, 7 aa, synthetic construct
GKLKPQD

SEQ ID NO: 119298 - protein, 7 aa, synthetic construct
GKLPAMH

SEQ ID NO: 119299 - protein, 7 aa, synthetic construct
GKLPTHL

SEQ ID NO: 119300 - protein, 7 aa, synthetic construct
GKLQQEK

SEQ ID NO: 119301 - protein, 7 aa, synthetic construct
GKLRILE

SEQ ID NO: 119302 - protein, 7 aa, synthetic construct
GKLSQFT

SEQ ID NO: 119303 - protein, 7 aa, synthetic construct
GKLSVIT

SEQ ID NO: 119304 - protein, 7 aa, synthetic construct
GKLVPPM

SEQ ID NO: 119305 - protein, 7 aa, synthetic construct
GKMAIGF

SEQ ID NO: 119306 - protein, 7 aa, synthetic construct
GKMAKYD

SEQ ID NO: 119307 - protein, 7 aa, synthetic construct
GKMAYGI

SEQ ID NO: 119308 - protein, 7 aa, synthetic construct
GKMDKLY

SEQ ID NO: 119309 - protein, 7 aa, synthetic construct
GKMDSPN

SEQ ID NO: 119310 - protein, 7 aa, synthetic construct
GKMDSSK

SEQ ID NO: 119311 - protein, 7 aa, synthetic construct
GKMDVIR

SEQ ID NO: 119312 - protein, 7 aa, synthetic construct
GKMEVRY

SEQ ID NO: 119313 - protein, 7 aa, synthetic construct
GKMFKTD

SEQ ID NO: 119314 - protein, 7 aa, synthetic construct
GKMGPTF

SEQ ID NO: 119315 - protein, 7 aa, synthetic construct
GKMGVVF

SEQ ID NO: 119316 - protein, 7 aa, synthetic construct
GKMGVYP

SEQ ID NO: 119317 - protein, 7 aa, synthetic construct
GKMKGDT

SEQ ID NO: 119318 - protein, 7 aa, synthetic construct
GKMLHAS

SEQ ID NO: 119319 - protein, 7 aa, synthetic construct
GKMMNQL

SEQ ID NO: 119320 - protein, 7 aa, synthetic construct
GKMMQPH

SEQ ID NO: 119321 - protein, 7 aa, synthetic construct
GKMNHMT

SEQ ID NO: 119322 - protein, 7 aa, synthetic construct
GKMNHQI

SEQ ID NO: 119323 - protein, 7 aa, synthetic construct
GKMPKDS

SEQ ID NO: 119324 - protein, 7 aa, synthetic construct
GKMPMQV

SEQ ID NO: 119325 - protein, 7 aa, synthetic construct
GKMPPTY

SEQ ID NO: 119326 - protein, 7 aa, synthetic construct
GKMQADK

SEQ ID NO: 119327 - protein, 7 aa, synthetic construct
GKMRQEN

SEQ ID NO: 119328 - protein, 7 aa, synthetic construct
GKMRVSD

SEQ ID NO: 119329 - protein, 7 aa, synthetic construct
GKMSEMR

SEQ ID NO: 119330 - protein, 7 aa, synthetic construct
GKMTRDL

SEQ ID NO: 119331 - protein, 7 aa, synthetic construct
GKMVRQD

SEQ ID NO: 119332 - protein, 7 aa, synthetic construct
GKMYKND

SEQ ID NO: 119333 - protein, 7 aa, synthetic construct
GKMYTSS

SEQ ID NO: 119334 - protein, 7 aa, synthetic construct
GKNAYAY

SEQ ID NO: 119335 - protein, 7 aa, synthetic construct
GKNFGSN

SEQ ID NO: 119336 - protein, 7 aa, synthetic construct
GKNHAGT

SEQ ID NO: 119337 - protein, 7 aa, synthetic construct
GKNHAQL

SEQ ID NO: 119338 - protein, 7 aa, synthetic construct
GKNHTNT

SEQ ID NO: 119339 - protein, 7 aa, synthetic construct
GKNIAVF

SEQ ID NO: 119340 - protein, 7 aa, synthetic construct
GKNIEAK

SEQ ID NO: 119341 - protein, 7 aa, synthetic construct
GKNIVMM

SEQ ID NO: 119342 - protein, 7 aa, synthetic construct
GKNIYAN

SEQ ID NO: 119343 - protein, 7 aa, synthetic construct
GKNKQDY

SEQ ID NO: 119344 - protein, 7 aa, synthetic construct
GKNLDSK

SEQ ID NO: 119345 - protein, 7 aa, synthetic construct
GKNMHQI

SEQ ID NO: 119346 - protein, 7 aa, synthetic construct
GKNMSVY

SEQ ID NO: 119347 - protein, 7 aa, synthetic construct
GKNSPAN

SEQ ID NO: 119348 - protein, 7 aa, synthetic construct
GKNSRDN

SEQ ID NO: 119349 - protein, 7 aa, synthetic construct
GKNTSQW

SEQ ID NO: 119350 - protein, 7 aa, synthetic construct
GKNYAAN

SEQ ID NO: 119351 - protein, 7 aa, synthetic construct
GKNYRGE

SEQ ID NO: 119352 - protein, 7 aa, synthetic construct
GKNYTPV

SEQ ID NO: 119353 - protein, 7 aa, synthetic construct
GKPAIHN

SEQ ID NO: 119354 - protein, 7 aa, synthetic construct
GKPALHL

SEQ ID NO: 119355 - protein, 7 aa, synthetic construct
GKPDRTY

SEQ ID NO: 119356 - protein, 7 aa, synthetic construct
GKPDTAR

SEQ ID NO: 119357 - protein, 7 aa, synthetic construct
GKPEGTR

SEQ ID NO: 119358 - protein, 7 aa, synthetic construct
GKPFAHA

SEQ ID NO: 119359 - protein, 7 aa, synthetic construct
GKPFGGG

SEQ ID NO: 119360 - protein, 7 aa, synthetic construct
GKPGYMQ

SEQ ID NO: 119361 - protein, 7 aa, synthetic construct
GKPHHMV

SEQ ID NO: 119362 - protein, 7 aa, synthetic construct
GKPIAMY

SEQ ID NO: 119363 - protein, 7 aa, synthetic construct
GKPISYS

SEQ ID NO: 119364 - protein, 7 aa, synthetic construct
GKPKDYM

SEQ ID NO: 119365 - protein, 7 aa, synthetic construct
GKPLGNH

SEQ ID NO: 119366 - protein, 7 aa, synthetic construct
GKPLNHV

SEQ ID NO: 119367 - protein, 7 aa, synthetic construct
GKPLSSF

SEQ ID NO: 119368 - protein, 7 aa, synthetic construct
GKPMHQY

SEQ ID NO: 119369 - protein, 7 aa, synthetic construct
GKPMIQY

SEQ ID NO: 119370 - protein, 7 aa, synthetic construct
GKPMVMT

SEQ ID NO: 119371 - protein, 7 aa, synthetic construct
GKPMYSS

SEQ ID NO: 119372 - protein, 7 aa, synthetic construct
GKPNYAM

SEQ ID NO: 119373 - protein, 7 aa, synthetic construct
GKPPHTH

SEQ ID NO: 119374 - protein, 7 aa, synthetic construct
GKPPLHI

SEQ ID NO: 119375 - protein, 7 aa, synthetic construct
GKPQGYL

SEQ ID NO: 119376 - protein, 7 aa, synthetic construct
GKPQWSG

SEQ ID NO: 119377 - protein, 7 aa, synthetic construct
GKPRDTG

SEQ ID NO: 119378 - protein, 7 aa, synthetic construct
GKPSGYN

SEQ ID NO: 119379 - protein, 7 aa, synthetic construct
GKPSVFV

SEQ ID NO: 119380 - protein, 7 aa, synthetic construct
GKPSVNW

SEQ ID NO: 119381 - protein, 7 aa, synthetic construct
GKPSYSQ

SEQ ID NO: 119382 - protein, 7 aa, synthetic construct
GKPTFQN

SEQ ID NO: 119383 - protein, 7 aa, synthetic construct
GKPTHVY

SEQ ID NO: 119384 - protein, 7 aa, synthetic construct
GKPVGPF

SEQ ID NO: 119385 - protein, 7 aa, synthetic construct
GKPYASV

SEQ ID NO: 119386 - protein, 7 aa, synthetic construct
GKPYIPQ

SEQ ID NO: 119387 - protein, 7 aa, synthetic construct
GKPYMAV

SEQ ID NO: 119388 - protein, 7 aa, synthetic construct
GKPYNGL

SEQ ID NO: 119389 - protein, 7 aa, synthetic construct
GKPYQAA

SEQ ID NO: 119390 - protein, 7 aa, synthetic construct
GKPYQGL

SEQ ID NO: 119391 - protein, 7 aa, synthetic construct
GKPYSTV

SEQ ID NO: 119392 - protein, 7 aa, synthetic construct
GKQALAY

SEQ ID NO: 119393 - protein, 7 aa, synthetic construct
GKQAMLY

SEQ ID NO: 119394 - protein, 7 aa, synthetic construct
GKQASLY

SEQ ID NO: 119395 - protein, 7 aa, synthetic construct
GKQAYDK

SEQ ID NO: 119396 - protein, 7 aa, synthetic construct
GKQDFQK

SEQ ID NO: 119397 - protein, 7 aa, synthetic construct
GKQDTAK

SEQ ID NO: 119398 - protein, 7 aa, synthetic construct
GKQEFGR

SEQ ID NO: 119399 - protein, 7 aa, synthetic construct
GKQELYR

SEQ ID NO: 119400 - protein, 7 aa, synthetic construct
GKQEQRS

SEQ ID NO: 119401 - protein, 7 aa, synthetic construct
GKQETKY

SEQ ID NO: 119402 - protein, 7 aa, synthetic construct
GKQEWRP

SEQ ID NO: 119403 - protein, 7 aa, synthetic construct
GKQFIQQ

SEQ ID NO: 119404 - protein, 7 aa, synthetic construct
GKQGTSW

SEQ ID NO: 119405 - protein, 7 aa, synthetic construct
GKQHPRE

SEQ ID NO: 119406 - protein, 7 aa, synthetic construct
GKQHSGI

SEQ ID NO: 119407 - protein, 7 aa, synthetic construct
GKQIHAH

SEQ ID NO: 119408 - protein, 7 aa, synthetic construct
GKQKELQ

SEQ ID NO: 119409 - protein, 7 aa, synthetic construct
GKQKQYE

SEQ ID NO: 119410 - protein, 7 aa, synthetic construct
GKQLGDR

SEQ ID NO: 119411 - protein, 7 aa, synthetic construct
GKQMLAM

SEQ ID NO: 119412 - protein, 7 aa, synthetic construct
GKQMLMH

SEQ ID NO: 119413 - protein, 7 aa, synthetic construct
GKQMTER

SEQ ID NO: 119414 - protein, 7 aa, synthetic construct
GKQNNQA

SEQ ID NO: 119415 - protein, 7 aa, synthetic construct
GKQNQLF

SEQ ID NO: 119416 - protein, 7 aa, synthetic construct
GKQPNMY

SEQ ID NO: 119417 - protein, 7 aa, synthetic construct
GKQPQIY

SEQ ID NO: 119418 - protein, 7 aa, synthetic construct
GKQQDGK

SEQ ID NO: 119419 - protein, 7 aa, synthetic construct
GKQRDNY

SEQ ID NO: 119420 - protein, 7 aa, synthetic construct
GKQRENH

SEQ ID NO: 119421 - protein, 7 aa, synthetic construct
GKQSMAW

SEQ ID NO: 119422 - protein, 7 aa, synthetic construct
GKQVLGY

SEQ ID NO: 119423 - protein, 7 aa, synthetic construct
GKQVSYI

SEQ ID NO: 119424 - protein, 7 aa, synthetic construct
GKQWKGD

SEQ ID NO: 119425 - protein, 7 aa, synthetic construct
GKQYTPT

SEQ ID NO: 119426 - protein, 7 aa, synthetic construct
GKRAEYG

SEQ ID NO: 119427 - protein, 7 aa, synthetic construct
GKRAIDG

SEQ ID NO: 119428 - protein, 7 aa, synthetic construct
GKRDEGR

SEQ ID NO: 119429 - protein, 7 aa, synthetic construct
GKRDGGQ

SEQ ID NO: 119430 - protein, 7 aa, synthetic construct
GKRDNNQ

SEQ ID NO: 119431 - protein, 7 aa, synthetic construct
GKRDSTF

SEQ ID NO: 119432 - protein, 7 aa, synthetic construct
GKREYAM

SEQ ID NO: 119433 - protein, 7 aa, synthetic construct
GKRGEVQ

SEQ ID NO: 119434 - protein, 7 aa, synthetic construct
GKRGGVE

SEQ ID NO: 119435 - protein, 7 aa, synthetic construct
GKRHDDT

SEQ ID NO: 119436 - protein, 7 aa, synthetic construct
GKRIENS

SEQ ID NO: 119437 - protein, 7 aa, synthetic construct
GKRIEYG

SEQ ID NO: 119438 - protein, 7 aa, synthetic construct
GKRMDIA

SEQ ID NO: 119439 - protein, 7 aa, synthetic construct
GKRQDQL

SEQ ID NO: 119440 - protein, 7 aa, synthetic construct
GKRQEVT

SEQ ID NO: 119441 - protein, 7 aa, synthetic construct
GKRQFME

SEQ ID NO: 119442 - protein, 7 aa, synthetic construct
GKRQGDP

SEQ ID NO: 119443 - protein, 7 aa, synthetic construct
GKRQTDP

SEQ ID NO: 119444 - protein, 7 aa, synthetic construct
GKRTEMS

SEQ ID NO: 119445 - protein, 7 aa, synthetic construct
GKRTFAE

SEQ ID NO: 119446 - protein, 7 aa, synthetic construct
GKRVETS

SEQ ID NO: 119447 - protein, 7 aa, synthetic construct
GKSDVSK

SEQ ID NO: 119448 - protein, 7 aa, synthetic construct
GKSELQR

SEQ ID NO: 119449 - protein, 7 aa, synthetic construct
GKSGYGN

SEQ ID NO: 119450 - protein, 7 aa, synthetic construct
GKSHAIT

SEQ ID NO: 119451 - protein, 7 aa, synthetic construct
GKSHLMS

SEQ ID NO: 119452 - protein, 7 aa, synthetic construct
GKSHMPH

SEQ ID NO: 119453 - protein, 7 aa, synthetic construct
GKSHTMQ

SEQ ID NO: 119454 - protein, 7 aa, synthetic construct
GKSHVMM

SEQ ID NO: 119455 - protein, 7 aa, synthetic construct
GKSLDWK

SEQ ID NO: 119456 - protein, 7 aa, synthetic construct
GKSLHIP

SEQ ID NO: 119457 - protein, 7 aa, synthetic construct
GKSNHSL

SEQ ID NO: 119458 - protein, 7 aa, synthetic construct
GKSNMYS

SEQ ID NO: 119459 - protein, 7 aa, synthetic construct
GKSRQPE

SEQ ID NO: 119460 - protein, 7 aa, synthetic construct
GKSTDGR

SEQ ID NO: 119461 - protein, 7 aa, synthetic construct
GKSTSYL

SEQ ID NO: 119462 - protein, 7 aa, synthetic construct
GKSVGQF

SEQ ID NO: 119463 - protein, 7 aa, synthetic construct
GKSVHST

SEQ ID NO: 119464 - protein, 7 aa, synthetic construct
GKSYQTQ

SEQ ID NO: 119465 - protein, 7 aa, synthetic construct
GKSYTSQ

SEQ ID NO: 119466 - protein, 7 aa, synthetic construct
GKTAGIY

SEQ ID NO: 119467 - protein, 7 aa, synthetic construct
GKTDRFL

SEQ ID NO: 119468 - protein, 7 aa, synthetic construct
GKTDWKM

SEQ ID NO: 119469 - protein, 7 aa, synthetic construct
GKTDYRA

SEQ ID NO: 119470 - protein, 7 aa, synthetic construct
GKTEQIR

SEQ ID NO: 119471 - protein, 7 aa, synthetic construct
GKTERAT

SEQ ID NO: 119472 - protein, 7 aa, synthetic construct
GKTEYQK

SEQ ID NO: 119473 - protein, 7 aa, synthetic construct
GKTFHAA

SEQ ID NO: 119474 - protein, 7 aa, synthetic construct
GKTFTSQ

SEQ ID NO: 119475 - protein, 7 aa, synthetic construct
GKTGSPF

SEQ ID NO: 119476 - protein, 7 aa, synthetic construct
GKTMHVQ

SEQ ID NO: 119477 - protein, 7 aa, synthetic construct
GKTMSLM

SEQ ID NO: 119478 - protein, 7 aa, synthetic construct
GKTMSSF

SEQ ID NO: 119479 - protein, 7 aa, synthetic construct
GKTNDMR

SEQ ID NO: 119480 - protein, 7 aa, synthetic construct
GKTNDRQ

SEQ ID NO: 119481 - protein, 7 aa, synthetic construct
GKTNLGY

SEQ ID NO: 119482 - protein, 7 aa, synthetic construct
GKTPMVI

SEQ ID NO: 119483 - protein, 7 aa, synthetic construct
GKTPRTD

SEQ ID NO: 119484 - protein, 7 aa, synthetic construct
GKTSHDK

SEQ ID NO: 119485 - protein, 7 aa, synthetic construct
GKTSTFL

SEQ ID NO: 119486 - protein, 7 aa, synthetic construct
GKTTYIV

SEQ ID NO: 119487 - protein, 7 aa, synthetic construct
GKTVDPW

SEQ ID NO: 119488 - protein, 7 aa, synthetic construct
GKTVREY

SEQ ID NO: 119489 - protein, 7 aa, synthetic construct
GKTYEKT

SEQ ID NO: 119490 - protein, 7 aa, synthetic construct
GKTYERV

SEQ ID NO: 119491 - protein, 7 aa, synthetic construct
GKVEFGR

SEQ ID NO: 119492 - protein, 7 aa, synthetic construct
GKVGVYV

SEQ ID NO: 119493 - protein, 7 aa, synthetic construct
GKVGYHP

SEQ ID NO: 119494 - protein, 7 aa, synthetic construct
GKVHQGN

SEQ ID NO: 119495 - protein, 7 aa, synthetic construct
GKVHSQV

SEQ ID NO: 119496 - protein, 7 aa, synthetic construct
GKVHTSY

SEQ ID NO: 119497 - protein, 7 aa, synthetic construct
GKVLETR

SEQ ID NO: 119498 - protein, 7 aa, synthetic construct
GKVLREL

SEQ ID NO: 119499 - protein, 7 aa, synthetic construct
GKVQHQH

SEQ ID NO: 119500 - protein, 7 aa, synthetic construct
GKVRQFE

SEQ ID NO: 119501 - protein, 7 aa, synthetic construct
GKVTSRD

SEQ ID NO: 119502 - protein, 7 aa, synthetic construct
GKVVSVL

SEQ ID NO: 119503 - protein, 7 aa, synthetic construct
GKVYAGN

SEQ ID NO: 119504 - protein, 7 aa, synthetic construct
GKVYASG

SEQ ID NO: 119505 - protein, 7 aa, synthetic construct
GKVYGNM

SEQ ID NO: 119506 - protein, 7 aa, synthetic construct
GKVYINS

SEQ ID NO: 119507 - protein, 7 aa, synthetic construct
GKVYQAN

SEQ ID NO: 119508 - protein, 7 aa, synthetic construct
GKWQTPA

SEQ ID NO: 119509 - protein, 7 aa, synthetic construct
GKWSTVA

SEQ ID NO: 119510 - protein, 7 aa, synthetic construct
GKWSTVG

SEQ ID NO: 119511 - protein, 7 aa, synthetic construct
GKYAKQD

SEQ ID NO: 119512 - protein, 7 aa, synthetic construct
GKYALKD

SEQ ID NO: 119513 - protein, 7 aa, synthetic construct
GKYANIA

SEQ ID NO: 119514 - protein, 7 aa, synthetic construct
GKYAPLN

SEQ ID NO: 119515 - protein, 7 aa, synthetic construct
GKYAQQQ

SEQ ID NO: 119516 - protein, 7 aa, synthetic construct
GKYATHI

SEQ ID NO: 119517 - protein, 7 aa, synthetic construct
GKYDPMK

SEQ ID NO: 119518 - protein, 7 aa, synthetic construct
GKYEPRA

SEQ ID NO: 119519 - protein, 7 aa, synthetic construct
GKYERGV

SEQ ID NO: 119520 - protein, 7 aa, synthetic construct
GKYEVHK

SEQ ID NO: 119521 - protein, 7 aa, synthetic construct
GKYGAPA

SEQ ID NO: 119522 - protein, 7 aa, synthetic construct
GKYGHVQ

SEQ ID NO: 119523 - protein, 7 aa, synthetic construct
GKYGSVL

SEQ ID NO: 119524 - protein, 7 aa, synthetic construct
GKYINIA

SEQ ID NO: 119525 - protein, 7 aa, synthetic construct
GKYINVN

SEQ ID NO: 119526 - protein, 7 aa, synthetic construct
GKYIQQG

SEQ ID NO: 119527 - protein, 7 aa, synthetic construct
GKYMKQD

SEQ ID NO: 119528 - protein, 7 aa, synthetic construct
GKYMNTT

SEQ ID NO: 119529 - protein, 7 aa, synthetic construct
GKYNKDL

SEQ ID NO: 119530 - protein, 7 aa, synthetic construct
GKYNMPA

SEQ ID NO: 119531 - protein, 7 aa, synthetic construct
GKYNQVS

SEQ ID NO: 119532 - protein, 7 aa, synthetic construct
GKYNSEW

SEQ ID NO: 119533 - protein, 7 aa, synthetic construct
GKYPDRI

SEQ ID NO: 119534 - protein, 7 aa, synthetic construct
GKYPITV

SEQ ID NO: 119535 - protein, 7 aa, synthetic construct
GKYPNRE

SEQ ID NO: 119536 - protein, 7 aa, synthetic construct
GKYPQDK

SEQ ID NO: 119537 - protein, 7 aa, synthetic construct
GKYPSHG

SEQ ID NO: 119538 - protein, 7 aa, synthetic construct
GKYPTTH

SEQ ID NO: 119539 - protein, 7 aa, synthetic construct
GKYQAAN

SEQ ID NO: 119540 - protein, 7 aa, synthetic construct
GKYSSIV

SEQ ID NO: 119541 - protein, 7 aa, synthetic construct
GKYSSPT

SEQ ID NO: 119542 - protein, 7 aa, synthetic construct
GKYSTPL

SEQ ID NO: 119543 - protein, 7 aa, synthetic construct
GKYTAEK

SEQ ID NO: 119544 - protein, 7 aa, synthetic construct
GKYTLGN

SEQ ID NO: 119545 - protein, 7 aa, synthetic construct
GKYTSPS

SEQ ID NO: 119546 - protein, 7 aa, synthetic construct
GKYVKEL

SEQ ID NO: 119547 - protein, 7 aa, synthetic construct
GKYVSGV

SEQ ID NO: 119548 - protein, 7 aa, synthetic construct
GKYVSQP

SEQ ID NO: 119549 - protein, 7 aa, synthetic construct
GLAAFKN

SEQ ID NO: 119550 - protein, 7 aa, synthetic construct
GLAEKQR

SEQ ID NO: 119551 - protein, 7 aa, synthetic construct
GLAGTRT

SEQ ID NO: 119552 - protein, 7 aa, synthetic construct
GLAHMRG

SEQ ID NO: 119553 - protein, 7 aa, synthetic construct
GLAIHSR

SEQ ID NO: 119554 - protein, 7 aa, synthetic construct
GLAMRKD

SEQ ID NO: 119555 - protein, 7 aa, synthetic construct
GLARENK

SEQ ID NO: 119556 - protein, 7 aa, synthetic construct
GLASKML

SEQ ID NO: 119557 - protein, 7 aa, synthetic construct
GLAYTKA

SEQ ID NO: 119558 - protein, 7 aa, synthetic construct
GLDGWTV

SEQ ID NO: 119559 - protein, 7 aa, synthetic construct
GLDKPRF

SEQ ID NO: 119560 - protein, 7 aa, synthetic construct
GLDNRRV

SEQ ID NO: 119561 - protein, 7 aa, synthetic construct
GLDRTFK

SEQ ID NO: 119562 - protein, 7 aa, synthetic construct
GLDTTKK

SEQ ID NO: 119563 - protein, 7 aa, synthetic construct
GLEIKRN

SEQ ID NO: 119564 - protein, 7 aa, synthetic construct
GLEKMRQ

SEQ ID NO: 119565 - protein, 7 aa, synthetic construct
GLEKRFM

SEQ ID NO: 119566 - protein, 7 aa, synthetic construct
GLERIKM

SEQ ID NO: 119567 - protein, 7 aa, synthetic construct
GLGAKVT

SEQ ID NO: 119568 - protein, 7 aa, synthetic construct
GLGASRN

SEQ ID NO: 119569 - protein, 7 aa, synthetic construct
GLGEKGK

SEQ ID NO: 119570 - protein, 7 aa, synthetic construct
GLGGSKF

SEQ ID NO: 119571 - protein, 7 aa, synthetic construct
GLGHPQK

SEQ ID NO: 119572 - protein, 7 aa, synthetic construct
GLGHQKF

SEQ ID NO: 119573 - protein, 7 aa, synthetic construct
GLGHRTG

SEQ ID NO: 119574 - protein, 7 aa, synthetic construct
GLGKNIY

SEQ ID NO: 119575 - protein, 7 aa, synthetic construct
GLGKYST

SEQ ID NO: 119576 - protein, 7 aa, synthetic construct
GLGLPVS

SEQ ID NO: 119577 - protein, 7 aa, synthetic construct
GLGMDKR

SEQ ID NO: 119578 - protein, 7 aa, synthetic construct
GLGSSPR

SEQ ID NO: 119579 - protein, 7 aa, synthetic construct
GLGVGKY

SEQ ID NO: 119580 - protein, 7 aa, synthetic construct
GLHAKTH

SEQ ID NO: 119581 - protein, 7 aa, synthetic construct
GLHANKM

SEQ ID NO: 119582 - protein, 7 aa, synthetic construct
GLHGFKP

SEQ ID NO: 119583 - protein, 7 aa, synthetic construct
GLHHNKA

SEQ ID NO: 119584 - protein, 7 aa, synthetic construct
GLHKFKD

SEQ ID NO: 119585 - protein, 7 aa, synthetic construct
GLHLKHP

SEQ ID NO: 119586 - protein, 7 aa, synthetic construct
GLHLKST

SEQ ID NO: 119587 - protein, 7 aa, synthetic construct
GLHLTKQ

SEQ ID NO: 119588 - protein, 7 aa, synthetic construct
GLHNNIR

SEQ ID NO: 119589 - protein, 7 aa, synthetic construct
GLHNNSR

SEQ ID NO: 119590 - protein, 7 aa, synthetic construct
GLHQGKQ

SEQ ID NO: 119591 - protein, 7 aa, synthetic construct
GLHQVQK

SEQ ID NO: 119592 - protein, 7 aa, synthetic construct
GLHRTSQ

SEQ ID NO: 119593 - protein, 7 aa, synthetic construct
GLHSMKL

SEQ ID NO: 119594 - protein, 7 aa, synthetic construct
GLHTAGK

SEQ ID NO: 119595 - protein, 7 aa, synthetic construct
GLHTMGK

SEQ ID NO: 119596 - protein, 7 aa, synthetic construct
GLHYTQK

SEQ ID NO: 119597 - protein, 7 aa, synthetic construct
GLIKARD

SEQ ID NO: 119598 - protein, 7 aa, synthetic construct
GLIKRID

SEQ ID NO: 119599 - protein, 7 aa, synthetic construct
GLKAGYI

SEQ ID NO: 119600 - protein, 7 aa, synthetic construct
GLKDIYR

SEQ ID NO: 119601 - protein, 7 aa, synthetic construct
GLKGYPP

SEQ ID NO: 119602 - protein, 7 aa, synthetic construct
GLKHPAM

SEQ ID NO: 119603 - protein, 7 aa, synthetic construct
GLKHYGG

SEQ ID NO: 119604 - protein, 7 aa, synthetic construct
GLKLVEK

SEQ ID NO: 119605 - protein, 7 aa, synthetic construct
GLKMHVS

SEQ ID NO: 119606 - protein, 7 aa, synthetic construct
GLKPQSF

SEQ ID NO: 119607 - protein, 7 aa, synthetic construct
GLKRDTF

SEQ ID NO: 119608 - protein, 7 aa, synthetic construct
GLKRMIE

SEQ ID NO: 119609 - protein, 7 aa, synthetic construct
GLKRMPD

SEQ ID NO: 119610 - protein, 7 aa, synthetic construct
GLKSPYT

SEQ ID NO: 119611 - protein, 7 aa, synthetic construct
GLKSRDL

SEQ ID NO: 119612 - protein, 7 aa, synthetic construct
GLKVRFD

SEQ ID NO: 119613 - protein, 7 aa, synthetic construct
GLKWTTP

SEQ ID NO: 119614 - protein, 7 aa, synthetic construct
GLLRADK

SEQ ID NO: 119615 - protein, 7 aa, synthetic construct
GLLRSKE

SEQ ID NO: 119616 - protein, 7 aa, synthetic construct
GLMRIKD

SEQ ID NO: 119617 - protein, 7 aa, synthetic construct
GLMRTTT

SEQ ID NO: 119618 - protein, 7 aa, synthetic construct
GLNATHK

SEQ ID NO: 119619 - protein, 7 aa, synthetic construct
GLNHATR

SEQ ID NO: 119620 - protein, 7 aa, synthetic construct
GLNYQAN

SEQ ID NO: 119621 - protein, 7 aa, synthetic construct
GLPHNKL

SEQ ID NO: 119622 - protein, 7 aa, synthetic construct
GLPHNRQ

SEQ ID NO: 119623 - protein, 7 aa, synthetic construct
GLPHVQR

SEQ ID NO: 119624 - protein, 7 aa, synthetic construct
GLPMAHK

SEQ ID NO: 119625 - protein, 7 aa, synthetic construct
GLPRPLG

SEQ ID NO: 119626 - protein, 7 aa, synthetic construct
GLPRRDI

SEQ ID NO: 119627 - protein, 7 aa, synthetic construct
GLPRTVQ

SEQ ID NO: 119628 - protein, 7 aa, synthetic construct
GLPYKGA

SEQ ID NO: 119629 - protein, 7 aa, synthetic construct
GLPYTNK

SEQ ID NO: 119630 - protein, 7 aa, synthetic construct
GLQDMRK

SEQ ID NO: 119631 - protein, 7 aa, synthetic construct
GLQGAYK

SEQ ID NO: 119632 - protein, 7 aa, synthetic construct
GLQGHFK

SEQ ID NO: 119633 - protein, 7 aa, synthetic construct
GLQHAVK

SEQ ID NO: 119634 - protein, 7 aa, synthetic construct
GLQHKHP

SEQ ID NO: 119635 - protein, 7 aa, synthetic construct
GLQHKLT

SEQ ID NO: 119636 - protein, 7 aa, synthetic construct
GLQKTHY

SEQ ID NO: 119637 - protein, 7 aa, synthetic construct
GLQLRVT

SEQ ID NO: 119638 - protein, 7 aa, synthetic construct
GLQMGHK

SEQ ID NO: 119639 - protein, 7 aa, synthetic construct
GLQQSAR

SEQ ID NO: 119640 - protein, 7 aa, synthetic construct
GLQRAMM

SEQ ID NO: 119641 - protein, 7 aa, synthetic construct
GLQRHTP

SEQ ID NO: 119642 - protein, 7 aa, synthetic construct
GLQSKYT

SEQ ID NO: 119643 - protein, 7 aa, synthetic construct
GLQSSNR

SEQ ID NO: 119644 - protein, 7 aa, synthetic construct
GLQTGGR

SEQ ID NO: 119645 - protein, 7 aa, synthetic construct
GLQVKMT

SEQ ID NO: 119646 - protein, 7 aa, synthetic construct
GLQYGTK

SEQ ID NO: 119647 - protein, 7 aa, synthetic construct
GLQYQKA

SEQ ID NO: 119648 - protein, 7 aa, synthetic construct
GLRAYEK

SEQ ID NO: 119649 - protein, 7 aa, synthetic construct
GLRDLAK

SEQ ID NO: 119650 - protein, 7 aa, synthetic construct
GLREVSR

SEQ ID NO: 119651 - protein, 7 aa, synthetic construct
GLRGGER

SEQ ID NO: 119652 - protein, 7 aa, synthetic construct
GLRNVRE

SEQ ID NO: 119653 - protein, 7 aa, synthetic construct
GLRPHTP

SEQ ID NO: 119654 - protein, 7 aa, synthetic construct
GLRQEPK

SEQ ID NO: 119655 - protein, 7 aa, synthetic construct
GLRQMEK

SEQ ID NO: 119656 - protein, 7 aa, synthetic construct
GLRQVDR

SEQ ID NO: 119657 - protein, 7 aa, synthetic construct
GLRSPQI

SEQ ID NO: 119658 - protein, 7 aa, synthetic construct
GLRTAKD

SEQ ID NO: 119659 - protein, 7 aa, synthetic construct
GLRTERS

SEQ ID NO: 119660 - protein, 7 aa, synthetic construct
GLSARHS

SEQ ID NO: 119661 - protein, 7 aa, synthetic construct
GLSARMQ

SEQ ID NO: 119662 - protein, 7 aa, synthetic construct
GLSHKEK

SEQ ID NO: 119663 - protein, 7 aa, synthetic construct
GLSHKSI

SEQ ID NO: 119664 - protein, 7 aa, synthetic construct
GLSIHRA

SEQ ID NO: 119665 - protein, 7 aa, synthetic construct
GLSRDKN

SEQ ID NO: 119666 - protein, 7 aa, synthetic construct
GLSYATS

SEQ ID NO: 119667 - protein, 7 aa, synthetic construct
GLSYQSK

SEQ ID NO: 119668 - protein, 7 aa, synthetic construct
GLSYSQY

SEQ ID NO: 119669 - protein, 7 aa, synthetic construct
GLSYYRE

SEQ ID NO: 119670 - protein, 7 aa, synthetic construct
GLTGFKS

SEQ ID NO: 119671 - protein, 7 aa, synthetic construct
GLTQYKA

SEQ ID NO: 119672 - protein, 7 aa, synthetic construct
GLTRDKI

SEQ ID NO: 119673 - protein, 7 aa, synthetic construct
GLTRIPT

SEQ ID NO: 119674 - protein, 7 aa, synthetic construct
GLTTYKA

SEQ ID NO: 119675 - protein, 7 aa, synthetic construct
GLTYKNS

SEQ ID NO: 119676 - protein, 7 aa, synthetic construct
GLVAKIV

SEQ ID NO: 119677 - protein, 7 aa, synthetic construct
GLVGHRG

SEQ ID NO: 119678 - protein, 7 aa, synthetic construct
GLVGRKD

SEQ ID NO: 119679 - protein, 7 aa, synthetic construct
GLVHTRN

SEQ ID NO: 119680 - protein, 7 aa, synthetic construct
GLVMKHA

SEQ ID NO: 119681 - protein, 7 aa, synthetic construct
GLVNHGK

SEQ ID NO: 119682 - protein, 7 aa, synthetic construct
GLVRYEK

SEQ ID NO: 119683 - protein, 7 aa, synthetic construct
GLYGVKS

SEQ ID NO: 119684 - protein, 7 aa, synthetic construct
GLYQNGK

SEQ ID NO: 119685 - protein, 7 aa, synthetic construct
GLYSAQK

SEQ ID NO: 119686 - protein, 7 aa, synthetic construct
GLYSLKG

SEQ ID NO: 119687 - protein, 7 aa, synthetic construct
GMAIRTN

SEQ ID NO: 119688 - protein, 7 aa, synthetic construct
GMAKQEK

SEQ ID NO: 119689 - protein, 7 aa, synthetic construct
GMAMKVI

SEQ ID NO: 119690 - protein, 7 aa, synthetic construct
GMAMNKL

SEQ ID NO: 119691 - protein, 7 aa, synthetic construct
GMAQAQR

SEQ ID NO: 119692 - protein, 7 aa, synthetic construct
GMAQISR

SEQ ID NO: 119693 - protein, 7 aa, synthetic construct
GMAQKII

SEQ ID NO: 119694 - protein, 7 aa, synthetic construct
GMARAHS

SEQ ID NO: 119695 - protein, 7 aa, synthetic construct
GMAREMK

SEQ ID NO: 119696 - protein, 7 aa, synthetic construct
GMARNQL

SEQ ID NO: 119697 - protein, 7 aa, synthetic construct
GMARPIP

SEQ ID NO: 119698 - protein, 7 aa, synthetic construct
GMATRMT

SEQ ID NO: 119699 - protein, 7 aa, synthetic construct
GMDKQAR

SEQ ID NO: 119700 - protein, 7 aa, synthetic construct
GMDKRVL

SEQ ID NO: 119701 - protein, 7 aa, synthetic construct
GMDRAFK

SEQ ID NO: 119702 - protein, 7 aa, synthetic construct
GMEKWKA

SEQ ID NO: 119703 - protein, 7 aa, synthetic construct
GMGGNYK

SEQ ID NO: 119704 - protein, 7 aa, synthetic construct
GMGGQQR

SEQ ID NO: 119705 - protein, 7 aa, synthetic construct
GMGHTNK

SEQ ID NO: 119706 - protein, 7 aa, synthetic construct
GMGIHRP

SEQ ID NO: 119707 - protein, 7 aa, synthetic construct
GMGIIKM

SEQ ID NO: 119708 - protein, 7 aa, synthetic construct
GMGIRHA

SEQ ID NO: 119709 - protein, 7 aa, synthetic construct
GMGMGHK

SEQ ID NO: 119710 - protein, 7 aa, synthetic construct
GMGMHKN

SEQ ID NO: 119711 - protein, 7 aa, synthetic construct
GMGNKDK

SEQ ID NO: 119712 - protein, 7 aa, synthetic construct
GMGPSSR

SEQ ID NO: 119713 - protein, 7 aa, synthetic construct
GMGREKF

SEQ ID NO: 119714 - protein, 7 aa, synthetic construct
GMGVNGR

SEQ ID NO: 119715 - protein, 7 aa, synthetic construct
GMHAGGK

SEQ ID NO: 119716 - protein, 7 aa, synthetic construct
GMHAPSK

SEQ ID NO: 119717 - protein, 7 aa, synthetic construct
GMHEKKP

SEQ ID NO: 119718 - protein, 7 aa, synthetic construct
GMHFNAT

SEQ ID NO: 119719 - protein, 7 aa, synthetic construct
GMHGTMK

SEQ ID NO: 119720 - protein, 7 aa, synthetic construct
GMHKAIM

SEQ ID NO: 119721 - protein, 7 aa, synthetic construct
GMHKSTY

SEQ ID NO: 119722 - protein, 7 aa, synthetic construct
GMHLHKV

SEQ ID NO: 119723 - protein, 7 aa, synthetic construct
GMHLRQP

SEQ ID NO: 119724 - protein, 7 aa, synthetic construct
GMHMSVK

SEQ ID NO: 119725 - protein, 7 aa, synthetic construct
GMHPKFA

SEQ ID NO: 119726 - protein, 7 aa, synthetic construct
GMHQIPK

SEQ ID NO: 119727 - protein, 7 aa, synthetic construct
GMHQIRG

SEQ ID NO: 119728 - protein, 7 aa, synthetic construct
GMHVQKY

SEQ ID NO: 119729 - protein, 7 aa, synthetic construct
GMIKRVD

SEQ ID NO: 119730 - protein, 7 aa, synthetic construct
GMIPTRA

SEQ ID NO: 119731 - protein, 7 aa, synthetic construct
GMIRTMA

SEQ ID NO: 119732 - protein, 7 aa, synthetic construct
GMKDIMR

SEQ ID NO: 119733 - protein, 7 aa, synthetic construct
GMKEAWK

SEQ ID NO: 119734 - protein, 7 aa, synthetic construct
GMKEYIR

SEQ ID NO: 119735 - protein, 7 aa, synthetic construct
GMKFKNE

SEQ ID NO: 119736 - protein, 7 aa, synthetic construct
GMKFNER

SEQ ID NO: 119737 - protein, 7 aa, synthetic construct
GMKMAIN

SEQ ID NO: 119738 - protein, 7 aa, synthetic construct
GMKMTLH

SEQ ID NO: 119739 - protein, 7 aa, synthetic construct
GMKQGYI

SEQ ID NO: 119740 - protein, 7 aa, synthetic construct
GMKRAEV

SEQ ID NO: 119741 - protein, 7 aa, synthetic construct
GMKRDQA

SEQ ID NO: 119742 - protein, 7 aa, synthetic construct
GMKRNQE

SEQ ID NO: 119743 - protein, 7 aa, synthetic construct
GMKSHVI

SEQ ID NO: 119744 - protein, 7 aa, synthetic construct
GMKTTYT

SEQ ID NO: 119745 - protein, 7 aa, synthetic construct
GMKYIAQ

SEQ ID NO: 119746 - protein, 7 aa, synthetic construct
GMKYQQT

SEQ ID NO: 119747 - protein, 7 aa, synthetic construct
GMKYTVP

SEQ ID NO: 119748 - protein, 7 aa, synthetic construct
GMLGRKD

SEQ ID NO: 119749 - protein, 7 aa, synthetic construct
GMLHKQT

SEQ ID NO: 119750 - protein, 7 aa, synthetic construct
GMLHNRA

SEQ ID NO: 119751 - protein, 7 aa, synthetic construct
GMLHTRA

SEQ ID NO: 119752 - protein, 7 aa, synthetic construct
GMMGGTR

SEQ ID NO: 119753 - protein, 7 aa, synthetic construct
GMMKKND

SEQ ID NO: 119754 - protein, 7 aa, synthetic construct
GMMLRDK

SEQ ID NO: 119755 - protein, 7 aa, synthetic construct
GMMNAPK

SEQ ID NO: 119756 - protein, 7 aa, synthetic construct
GMMRPTV

SEQ ID NO: 119757 - protein, 7 aa, synthetic construct
GMMRTQV

SEQ ID NO: 119758 - protein, 7 aa, synthetic construct
GMMVGNR

SEQ ID NO: 119759 - protein, 7 aa, synthetic construct
GMNARPY

SEQ ID NO: 119760 - protein, 7 aa, synthetic construct
GMNGTMR

SEQ ID NO: 119761 - protein, 7 aa, synthetic construct
GMNGYVK

SEQ ID NO: 119762 - protein, 7 aa, synthetic construct
GMNHATR

SEQ ID NO: 119763 - protein, 7 aa, synthetic construct
GMNHNFK

SEQ ID NO: 119764 - protein, 7 aa, synthetic construct
GMNIAGR

SEQ ID NO: 119765 - protein, 7 aa, synthetic construct
GMNMANR

SEQ ID NO: 119766 - protein, 7 aa, synthetic construct
GMNNERK

SEQ ID NO: 119767 - protein, 7 aa, synthetic construct
GMNNQAR

SEQ ID NO: 119768 - protein, 7 aa, synthetic construct
GMNPRSL

SEQ ID NO: 119769 - protein, 7 aa, synthetic construct
GMNTKTW

SEQ ID NO: 119770 - protein, 7 aa, synthetic construct
GMNTRRE

SEQ ID NO: 119771 - protein, 7 aa, synthetic construct
GMPHGAK

SEQ ID NO: 119772 - protein, 7 aa, synthetic construct
GMPKHVT

SEQ ID NO: 119773 - protein, 7 aa, synthetic construct
GMPMLKV

SEQ ID NO: 119774 - protein, 7 aa, synthetic construct
GMPMTRS

SEQ ID NO: 119775 - protein, 7 aa, synthetic construct
GMPMYSK

SEQ ID NO: 119776 - protein, 7 aa, synthetic construct
GMPNMIR

SEQ ID NO: 119777 - protein, 7 aa, synthetic construct
GMPPIKY

SEQ ID NO: 119778 - protein, 7 aa, synthetic construct
GMPRQPV

SEQ ID NO: 119779 - protein, 7 aa, synthetic construct
GMPRTLN

SEQ ID NO: 119780 - protein, 7 aa, synthetic construct
GMPTQHK

SEQ ID NO: 119781 - protein, 7 aa, synthetic construct
GMQHSSK

SEQ ID NO: 119782 - protein, 7 aa, synthetic construct
GMQIMTK

SEQ ID NO: 119783 - protein, 7 aa, synthetic construct
GMQKDKM

SEQ ID NO: 119784 - protein, 7 aa, synthetic construct
GMQKGYM

SEQ ID NO: 119785 - protein, 7 aa, synthetic construct
GMQKNTW

SEQ ID NO: 119786 - protein, 7 aa, synthetic construct
GMQRIIG

SEQ ID NO: 119787 - protein, 7 aa, synthetic construct
GMQRMQT

SEQ ID NO: 119788 - protein, 7 aa, synthetic construct
GMRAPPS

SEQ ID NO: 119789 - protein, 7 aa, synthetic construct
GMRASQM

SEQ ID NO: 119790 - protein, 7 aa, synthetic construct
GMRGVLQ

SEQ ID NO: 119791 - protein, 7 aa, synthetic construct
GMRKFME

SEQ ID NO: 119792 - protein, 7 aa, synthetic construct
GMRLNRE

SEQ ID NO: 119793 - protein, 7 aa, synthetic construct
GMRLSEK

SEQ ID NO: 119794 - protein, 7 aa, synthetic construct
GMRNQEK

SEQ ID NO: 119795 - protein, 7 aa, synthetic construct
GMRPHQI

SEQ ID NO: 119796 - protein, 7 aa, synthetic construct
GMRSEIK

SEQ ID NO: 119797 - protein, 7 aa, synthetic construct
GMRSNLN

SEQ ID NO: 119798 - protein, 7 aa, synthetic construct
GMRTEMR

SEQ ID NO: 119799 - protein, 7 aa, synthetic construct
GMSANNR

SEQ ID NO: 119800 - protein, 7 aa, synthetic construct
GMSDRTR

SEQ ID NO: 119801 - protein, 7 aa, synthetic construct
GMSFKHG

SEQ ID NO: 119802 - protein, 7 aa, synthetic construct
GMSHMKM

SEQ ID NO: 119803 - protein, 7 aa, synthetic construct
GMSIKSV

SEQ ID NO: 119804 - protein, 7 aa, synthetic construct
GMSKIMH

SEQ ID NO: 119805 - protein, 7 aa, synthetic construct
GMSLADR

SEQ ID NO: 119806 - protein, 7 aa, synthetic construct
GMSMHKL

SEQ ID NO: 119807 - protein, 7 aa, synthetic construct
GMSMKPI

SEQ ID NO: 119808 - protein, 7 aa, synthetic construct
GMSNPTR

SEQ ID NO: 119809 - protein, 7 aa, synthetic construct
GMSQRPI

SEQ ID NO: 119810 - protein, 7 aa, synthetic construct
GMSRQPL

SEQ ID NO: 119811 - protein, 7 aa, synthetic construct
GMSYTKM

SEQ ID NO: 119812 - protein, 7 aa, synthetic construct
GMSYVKG

SEQ ID NO: 119813 - protein, 7 aa, synthetic construct
GMTDIRR

SEQ ID NO: 119814 - protein, 7 aa, synthetic construct
GMTEKYR

SEQ ID NO: 119815 - protein, 7 aa, synthetic construct
GMTGKYM

SEQ ID NO: 119816 - protein, 7 aa, synthetic construct
GMTGTQR

SEQ ID NO: 119817 - protein, 7 aa, synthetic construct
GMTHKMT

SEQ ID NO: 119818 - protein, 7 aa, synthetic construct
GMTNHRG

SEQ ID NO: 119819 - protein, 7 aa, synthetic construct
GMTNHRM

SEQ ID NO: 119820 - protein, 7 aa, synthetic construct
GMTRPQL

SEQ ID NO: 119821 - protein, 7 aa, synthetic construct
GMVALKT

SEQ ID NO: 119822 - protein, 7 aa, synthetic construct
GMVGSKY

SEQ ID NO: 119823 - protein, 7 aa, synthetic construct
GMVKERA

SEQ ID NO: 119824 - protein, 7 aa, synthetic construct
GMVKHQM

SEQ ID NO: 119825 - protein, 7 aa, synthetic construct
GMVKHRE

SEQ ID NO: 119826 - protein, 7 aa, synthetic construct
GMVMRTP

SEQ ID NO: 119827 - protein, 7 aa, synthetic construct
GMVMRTS

SEQ ID NO: 119828 - protein, 7 aa, synthetic construct
GMVRDRV

SEQ ID NO: 119829 - protein, 7 aa, synthetic construct
GMVRPSS

SEQ ID NO: 119830 - protein, 7 aa, synthetic construct
GMYANKA

SEQ ID NO: 119831 - protein, 7 aa, synthetic construct
GMYGIQK

SEQ ID NO: 119832 - protein, 7 aa, synthetic construct
GMYKTHG

SEQ ID NO: 119833 - protein, 7 aa, synthetic construct
GMYPKTA

SEQ ID NO: 119834 - protein, 7 aa, synthetic construct
GMYSHKA

SEQ ID NO: 119835 - protein, 7 aa, synthetic construct
GNAETRK

SEQ ID NO: 119836 - protein, 7 aa, synthetic construct
GNAFPRS

SEQ ID NO: 119837 - protein, 7 aa, synthetic construct
GNAHMVR

SEQ ID NO: 119838 - protein, 7 aa, synthetic construct
GNAHQAK

SEQ ID NO: 119839 - protein, 7 aa, synthetic construct
GNAHVRL

SEQ ID NO: 119840 - protein, 7 aa, synthetic construct
GNAIKHT

SEQ ID NO: 119841 - protein, 7 aa, synthetic construct
GNAKTER

SEQ ID NO: 119842 - protein, 7 aa, synthetic construct
GNAMYKN

SEQ ID NO: 119843 - protein, 7 aa, synthetic construct
GNAPQRY

SEQ ID NO: 119844 - protein, 7 aa, synthetic construct
GNAQMTR

SEQ ID NO: 119845 - protein, 7 aa, synthetic construct
GNATSRQ

SEQ ID NO: 119846 - protein, 7 aa, synthetic construct
GNAYNHA

SEQ ID NO: 119847 - protein, 7 aa, synthetic construct
GNDIKHK

SEQ ID NO: 119848 - protein, 7 aa, synthetic construct
GNDLRPK

SEQ ID NO: 119849 - protein, 7 aa, synthetic construct
GNDNKVK

SEQ ID NO: 119850 - protein, 7 aa, synthetic construct
GNDRLAR

SEQ ID NO: 119851 - protein, 7 aa, synthetic construct
GNDRMNR

SEQ ID NO: 119852 - protein, 7 aa, synthetic construct
GNDVRRG

SEQ ID NO: 119853 - protein, 7 aa, synthetic construct
GNEFLKK

SEQ ID NO: 119854 - protein, 7 aa, synthetic construct
GNEIKRS

SEQ ID NO: 119855 - protein, 7 aa, synthetic construct
GNERPQK

SEQ ID NO: 119856 - protein, 7 aa, synthetic construct
GNEVRKP

SEQ ID NO: 119857 - protein, 7 aa, synthetic construct
GNFKTER

SEQ ID NO: 119858 - protein, 7 aa, synthetic construct
GNFNNLK

SEQ ID NO: 119859 - protein, 7 aa, synthetic construct
GNFNQPK

SEQ ID NO: 119860 - protein, 7 aa, synthetic construct
GNFNRMS

SEQ ID NO: 119861 - protein, 7 aa, synthetic construct
GNFTPQK

SEQ ID NO: 119862 - protein, 7 aa, synthetic construct
GNFVRTH

SEQ ID NO: 119863 - protein, 7 aa, synthetic construct
GNGAGSR

SEQ ID NO: 119864 - protein, 7 aa, synthetic construct
GNGEKRL

SEQ ID NO: 119865 - protein, 7 aa, synthetic construct
GNGFAKM

SEQ ID NO: 119866 - protein, 7 aa, synthetic construct
GNGHISR

SEQ ID NO: 119867 - protein, 7 aa, synthetic construct
GNGHQIR

SEQ ID NO: 119868 - protein, 7 aa, synthetic construct
GNGIHKF

SEQ ID NO: 119869 - protein, 7 aa, synthetic construct
GNGIHSK

SEQ ID NO: 119870 - protein, 7 aa, synthetic construct
GNGKEGK

SEQ ID NO: 119871 - protein, 7 aa, synthetic construct
GNGKHVH

SEQ ID NO: 119872 - protein, 7 aa, synthetic construct
GNGLPRY

SEQ ID NO: 119873 - protein, 7 aa, synthetic construct
GNGMVGR

SEQ ID NO: 119874 - protein, 7 aa, synthetic construct
GNGNAQR

SEQ ID NO: 119875 - protein, 7 aa, synthetic construct
GNGPRTT

SEQ ID NO: 119876 - protein, 7 aa, synthetic construct
GNGQNPR

SEQ ID NO: 119877 - protein, 7 aa, synthetic construct
GNGRKEV

SEQ ID NO: 119878 - protein, 7 aa, synthetic construct
GNGRYGS

SEQ ID NO: 119879 - protein, 7 aa, synthetic construct
GNGSSTR

SEQ ID NO: 119880 - protein, 7 aa, synthetic construct
GNGVVHR

SEQ ID NO: 119881 - protein, 7 aa, synthetic construct
GNGYAKQ

SEQ ID NO: 119882 - protein, 7 aa, synthetic construct
GNHAMKI

SEQ ID NO: 119883 - protein, 7 aa, synthetic construct
GNHGVTK

SEQ ID NO: 119884 - protein, 7 aa, synthetic construct
GNHINQR

SEQ ID NO: 119885 - protein, 7 aa, synthetic construct
GNHMPKM

SEQ ID NO: 119886 - protein, 7 aa, synthetic construct
GNHRGLP

SEQ ID NO: 119887 - protein, 7 aa, synthetic construct
GNHSIMK

SEQ ID NO: 119888 - protein, 7 aa, synthetic construct
GNHSYRP

SEQ ID NO: 119889 - protein, 7 aa, synthetic construct
GNHTAKF

SEQ ID NO: 119890 - protein, 7 aa, synthetic construct
GNHTHKV

SEQ ID NO: 119891 - protein, 7 aa, synthetic construct
GNHTNKT

SEQ ID NO: 119892 - protein, 7 aa, synthetic construct
GNHTQMK

SEQ ID NO: 119893 - protein, 7 aa, synthetic construct
GNIKFVA

SEQ ID NO: 119894 - protein, 7 aa, synthetic construct
GNINQRM

SEQ ID NO: 119895 - protein, 7 aa, synthetic construct
GNIPRPI

SEQ ID NO: 119896 - protein, 7 aa, synthetic construct
GNISSGK

SEQ ID NO: 119897 - protein, 7 aa, synthetic construct
GNIVKVQ

SEQ ID NO: 119898 - protein, 7 aa, synthetic construct
GNIYKSG

SEQ ID NO: 119899 - protein, 7 aa, synthetic construct
GNKDARM

SEQ ID NO: 119900 - protein, 7 aa, synthetic construct
GNKDMQK

SEQ ID NO: 119901 - protein, 7 aa, synthetic construct
GNKEQMR

SEQ ID NO: 119902 - protein, 7 aa, synthetic construct
GNKESKW

SEQ ID NO: 119903 - protein, 7 aa, synthetic construct
GNKGDIR

SEQ ID NO: 119904 - protein, 7 aa, synthetic construct
GNKGGYN

SEQ ID NO: 119905 - protein, 7 aa, synthetic construct
GNKGHFS

SEQ ID NO: 119906 - protein, 7 aa, synthetic construct
GNKHNAS

SEQ ID NO: 119907 - protein, 7 aa, synthetic construct
GNKIYPV

SEQ ID NO: 119908 - protein, 7 aa, synthetic construct
GNKNREN

SEQ ID NO: 119909 - protein, 7 aa, synthetic construct
GNKPTNF

SEQ ID NO: 119910 - protein, 7 aa, synthetic construct
GNKQVYM

SEQ ID NO: 119911 - protein, 7 aa, synthetic construct
GNKSLYH

SEQ ID NO: 119912 - protein, 7 aa, synthetic construct
GNKTMEK

SEQ ID NO: 119913 - protein, 7 aa, synthetic construct
GNKVKYD

SEQ ID NO: 119914 - protein, 7 aa, synthetic construct
GNKVTSW

SEQ ID NO: 119915 - protein, 7 aa, synthetic construct
GNKYPPM

SEQ ID NO: 119916 - protein, 7 aa, synthetic construct
GNKYSPG

SEQ ID NO: 119917 - protein, 7 aa, synthetic construct
GNKYVQH

SEQ ID NO: 119918 - protein, 7 aa, synthetic construct
GNLAMGR

SEQ ID NO: 119919 - protein, 7 aa, synthetic construct
GNLGIHK

SEQ ID NO: 119920 - protein, 7 aa, synthetic construct
GNLMNQR

SEQ ID NO: 119921 - protein, 7 aa, synthetic construct
GNLQHQR

SEQ ID NO: 119922 - protein, 7 aa, synthetic construct
GNLQNRM

SEQ ID NO: 119923 - protein, 7 aa, synthetic construct
GNLRATQ

SEQ ID NO: 119924 - protein, 7 aa, synthetic construct
GNLRDAK

SEQ ID NO: 119925 - protein, 7 aa, synthetic construct
GNLSVHR

SEQ ID NO: 119926 - protein, 7 aa, synthetic construct
GNLTKLH

SEQ ID NO: 119927 - protein, 7 aa, synthetic construct
GNLVHNK

SEQ ID NO: 119928 - protein, 7 aa, synthetic construct
GNMHTNK

SEQ ID NO: 119929 - protein, 7 aa, synthetic construct
GNMIIQR

SEQ ID NO: 119930 - protein, 7 aa, synthetic construct
GNMKAPF

SEQ ID NO: 119931 - protein, 7 aa, synthetic construct
GNMKIHI

SEQ ID NO: 119932 - protein, 7 aa, synthetic construct
GNMMHTK

SEQ ID NO: 119933 - protein, 7 aa, synthetic construct
GNMMPTR

SEQ ID NO: 119934 - protein, 7 aa, synthetic construct
GNMNNKQ

SEQ ID NO: 119935 - protein, 7 aa, synthetic construct
GNMNRTV

SEQ ID NO: 119936 - protein, 7 aa, synthetic construct
GNMPTRQ

SEQ ID NO: 119937 - protein, 7 aa, synthetic construct
GNMQGLR

SEQ ID NO: 119938 - protein, 7 aa, synthetic construct
GNMRQMT

SEQ ID NO: 119939 - protein, 7 aa, synthetic construct
GNMRVSY

SEQ ID NO: 119940 - protein, 7 aa, synthetic construct
GNMSTYK

SEQ ID NO: 119941 - protein, 7 aa, synthetic construct
GNMSVKY

SEQ ID NO: 119942 - protein, 7 aa, synthetic construct
GNMTKHS

SEQ ID NO: 119943 - protein, 7 aa, synthetic construct
GNMTMQR

SEQ ID NO: 119944 - protein, 7 aa, synthetic construct
GNMTRTN

SEQ ID NO: 119945 - protein, 7 aa, synthetic construct
GNMTRVL

SEQ ID NO: 119946 - protein, 7 aa, synthetic construct
GNNAILR

SEQ ID NO: 119947 - protein, 7 aa, synthetic construct
GNNGPLR

SEQ ID NO: 119948 - protein, 7 aa, synthetic construct
GNNHGKV

SEQ ID NO: 119949 - protein, 7 aa, synthetic construct
GNNIMPR

SEQ ID NO: 119950 - protein, 7 aa, synthetic construct
GNNKEVR

SEQ ID NO: 119951 - protein, 7 aa, synthetic construct
GNNMHKL

SEQ ID NO: 119952 - protein, 7 aa, synthetic construct
GNNNNVR

SEQ ID NO: 119953 - protein, 7 aa, synthetic construct
GNNNTNR

SEQ ID NO: 119954 - protein, 7 aa, synthetic construct
GNNPHTK

SEQ ID NO: 119955 - protein, 7 aa, synthetic construct
GNNSLKY

SEQ ID NO: 119956 - protein, 7 aa, synthetic construct
GNNTTHR

SEQ ID NO: 119957 - protein, 7 aa, synthetic construct
GNNVMQR

SEQ ID NO: 119958 - protein, 7 aa, synthetic construct
GNPDVKR

SEQ ID NO: 119959 - protein, 7 aa, synthetic construct
GNPFAKA

SEQ ID NO: 119960 - protein, 7 aa, synthetic construct
GNPGKYS

SEQ ID NO: 119961 - protein, 7 aa, synthetic construct
GNPHKSF

SEQ ID NO: 119962 - protein, 7 aa, synthetic construct
GNPIRKD

SEQ ID NO: 119963 - protein, 7 aa, synthetic construct
GNPKYNN

SEQ ID NO: 119964 - protein, 7 aa, synthetic construct
GNPNGTR

SEQ ID NO: 119965 - protein, 7 aa, synthetic construct
GNPNSSK

SEQ ID NO: 119966 - protein, 7 aa, synthetic construct
GNPNTGR

SEQ ID NO: 119967 - protein, 7 aa, synthetic construct
GNPPKRD

SEQ ID NO: 119968 - protein, 7 aa, synthetic construct
GNPQVNR

SEQ ID NO: 119969 - protein, 7 aa, synthetic construct
GNPRHTI

SEQ ID NO: 119970 - protein, 7 aa, synthetic construct
GNPRMHA

SEQ ID NO: 119971 - protein, 7 aa, synthetic construct
GNPRQQY

SEQ ID NO: 119972 - protein, 7 aa, synthetic construct
GNPTLRM

SEQ ID NO: 119973 - protein, 7 aa, synthetic construct
GNPVSLR

SEQ ID NO: 119974 - protein, 7 aa, synthetic construct
GNQAKDR

SEQ ID NO: 119975 - protein, 7 aa, synthetic construct
GNQAKNF

SEQ ID NO: 119976 - protein, 7 aa, synthetic construct
GNQAMSR

SEQ ID NO: 119977 - protein, 7 aa, synthetic construct
GNQETRK

SEQ ID NO: 119978 - protein, 7 aa, synthetic construct
GNQGKQY

SEQ ID NO: 119979 - protein, 7 aa, synthetic construct
GNQGMYK

SEQ ID NO: 119980 - protein, 7 aa, synthetic construct
GNQGPMR

SEQ ID NO: 119981 - protein, 7 aa, synthetic construct
GNQGPRM

SEQ ID NO: 119982 - protein, 7 aa, synthetic construct
GNQGSVR

SEQ ID NO: 119983 - protein, 7 aa, synthetic construct
GNQHIPR

SEQ ID NO: 119984 - protein, 7 aa, synthetic construct
GNQHMMK

SEQ ID NO: 119985 - protein, 7 aa, synthetic construct
GNQHRPV

SEQ ID NO: 119986 - protein, 7 aa, synthetic construct
GNQHVQK

SEQ ID NO: 119987 - protein, 7 aa, synthetic construct
GNQIGAR

SEQ ID NO: 119988 - protein, 7 aa, synthetic construct
GNQIKKD

SEQ ID NO: 119989 - protein, 7 aa, synthetic construct
GNQIKYV

SEQ ID NO: 119990 - protein, 7 aa, synthetic construct
GNQISRM

SEQ ID NO: 119991 - protein, 7 aa, synthetic construct
GNQKQHL

SEQ ID NO: 119992 - protein, 7 aa, synthetic construct
GNQLANR

SEQ ID NO: 119993 - protein, 7 aa, synthetic construct
GNQNKLY

SEQ ID NO: 119994 - protein, 7 aa, synthetic construct
GNQNMRL

SEQ ID NO: 119995 - protein, 7 aa, synthetic construct
GNQNRAF

SEQ ID NO: 119996 - protein, 7 aa, synthetic construct
GNQPKSF

SEQ ID NO: 119997 - protein, 7 aa, synthetic construct
GNQPRMT

SEQ ID NO: 119998 - protein, 7 aa, synthetic construct
GNQQHKT

SEQ ID NO: 119999 - protein, 7 aa, synthetic construct
GNQQRGT

SEQ ID NO: 120000 - protein, 7 aa, synthetic construct
GNQQRPY

SEQ ID NO: 120001 - protein, 7 aa, synthetic construct
GNQSNRI

SEQ ID NO: 120002 - protein, 7 aa, synthetic construct
GNQTPAR

SEQ ID NO: 120003 - protein, 7 aa, synthetic construct
GNQTQKY

SEQ ID NO: 120004 - protein, 7 aa, synthetic construct
GNQVGGR

SEQ ID NO: 120005 - protein, 7 aa, synthetic construct
GNQYKQV

SEQ ID NO: 120006 - protein, 7 aa, synthetic construct
GNRAMPH

SEQ ID NO: 120007 - protein, 7 aa, synthetic construct
GNRDKIQ

SEQ ID NO: 120008 - protein, 7 aa, synthetic construct
GNRDYTK

SEQ ID NO: 120009 - protein, 7 aa, synthetic construct
GNREISR

SEQ ID NO: 120010 - protein, 7 aa, synthetic construct
GNREKQT

SEQ ID NO: 120011 - protein, 7 aa, synthetic construct
GNRINPI

SEQ ID NO: 120012 - protein, 7 aa, synthetic construct
GNRKSEA

SEQ ID NO: 120013 - protein, 7 aa, synthetic construct
GNRLGPV

SEQ ID NO: 120014 - protein, 7 aa, synthetic construct
GNRMTSL

SEQ ID NO: 120015 - protein, 7 aa, synthetic construct
GNRMVQN

SEQ ID NO: 120016 - protein, 7 aa, synthetic construct
GNRNFPP

SEQ ID NO: 120017 - protein, 7 aa, synthetic construct
GNRNVQL

SEQ ID NO: 120018 - protein, 7 aa, synthetic construct
GNRPGYA

SEQ ID NO: 120019 - protein, 7 aa, synthetic construct
GNRQGYS

SEQ ID NO: 120020 - protein, 7 aa, synthetic construct
GNRQIQL

SEQ ID NO: 120021 - protein, 7 aa, synthetic construct
GNRQQGL

SEQ ID NO: 120022 - protein, 7 aa, synthetic construct
GNRSFNT

SEQ ID NO: 120023 - protein, 7 aa, synthetic construct
GNRVHSV

SEQ ID NO: 120024 - protein, 7 aa, synthetic construct
GNRVIDR

SEQ ID NO: 120025 - protein, 7 aa, synthetic construct
GNSFAQK

SEQ ID NO: 120026 - protein, 7 aa, synthetic construct
GNSGSGK

SEQ ID NO: 120027 - protein, 7 aa, synthetic construct
GNSLNSR

SEQ ID NO: 120028 - protein, 7 aa, synthetic construct
GNSLSGR

SEQ ID NO: 120029 - protein, 7 aa, synthetic construct
GNSPHGR

SEQ ID NO: 120030 - protein, 7 aa, synthetic construct
GNSPHRV

SEQ ID NO: 120031 - protein, 7 aa, synthetic construct
GNSPRSV

SEQ ID NO: 120032 - protein, 7 aa, synthetic construct
GNSQHVK

SEQ ID NO: 120033 - protein, 7 aa, synthetic construct
GNSQPTR

SEQ ID NO: 120034 - protein, 7 aa, synthetic construct
GNSQYIK

SEQ ID NO: 120035 - protein, 7 aa, synthetic construct
GNSRMPL

SEQ ID NO: 120036 - protein, 7 aa, synthetic construct
GNSTRDK

SEQ ID NO: 120037 - protein, 7 aa, synthetic construct
GNTARNI

SEQ ID NO: 120038 - protein, 7 aa, synthetic construct
GNTATPR

SEQ ID NO: 120039 - protein, 7 aa, synthetic construct
GNTGGPR

SEQ ID NO: 120040 - protein, 7 aa, synthetic construct
GNTGQMR

SEQ ID NO: 120041 - protein, 7 aa, synthetic construct
GNTHVAK

SEQ ID NO: 120042 - protein, 7 aa, synthetic construct
GNTIERK

SEQ ID NO: 120043 - protein, 7 aa, synthetic construct
GNTIRPT

SEQ ID NO: 120044 - protein, 7 aa, synthetic construct
GNTNMYR

SEQ ID NO: 120045 - protein, 7 aa, synthetic construct
GNTNRHG

SEQ ID NO: 120046 - protein, 7 aa, synthetic construct
GNTPHAR

SEQ ID NO: 120047 - protein, 7 aa, synthetic construct
GNTSHGK

SEQ ID NO: 120048 - protein, 7 aa, synthetic construct
GNTSQRT

SEQ ID NO: 120049 - protein, 7 aa, synthetic construct
GNTSSPR

SEQ ID NO: 120050 - protein, 7 aa, synthetic construct
GNTVNRY

SEQ ID NO: 120051 - protein, 7 aa, synthetic construct
GNTYVAK

SEQ ID NO: 120052 - protein, 7 aa, synthetic construct
GNVGNER

SEQ ID NO: 120053 - protein, 7 aa, synthetic construct
GNVHQSK

SEQ ID NO: 120054 - protein, 7 aa, synthetic construct
GNVHTMR

SEQ ID NO: 120055 - protein, 7 aa, synthetic construct
GNVKAHL

SEQ ID NO: 120056 - protein, 7 aa, synthetic construct
GNVKYGH

SEQ ID NO: 120057 - protein, 7 aa, synthetic construct
GNVMRNQ

SEQ ID NO: 120058 - protein, 7 aa, synthetic construct
GNVNVTR

SEQ ID NO: 120059 - protein, 7 aa, synthetic construct
GNVQRGQ

SEQ ID NO: 120060 - protein, 7 aa, synthetic construct
GNVRHAV

SEQ ID NO: 120061 - protein, 7 aa, synthetic construct
GNVVRIN

SEQ ID NO: 120062 - protein, 7 aa, synthetic construct
GNVYLKG

SEQ ID NO: 120063 - protein, 7 aa, synthetic construct
GNYGMTQ

SEQ ID NO: 120064 - protein, 7 aa, synthetic construct
GNYINGK

SEQ ID NO: 120065 - protein, 7 aa, synthetic construct
GNYNGMK

SEQ ID NO: 120066 - protein, 7 aa, synthetic construct
GNYNHTM

SEQ ID NO: 120067 - protein, 7 aa, synthetic construct
GNYNKGG

SEQ ID NO: 120068 - protein, 7 aa, synthetic construct
GNYPMQR

SEQ ID NO: 120069 - protein, 7 aa, synthetic construct
GNYPVSR

SEQ ID NO: 120070 - protein, 7 aa, synthetic construct
GNYRGSI

SEQ ID NO: 120071 - protein, 7 aa, synthetic construct
GNYTIKT

SEQ ID NO: 120072 - protein, 7 aa, synthetic construct
GNYTVQR

SEQ ID NO: 120073 - protein, 7 aa, synthetic construct
GNYVTNY

SEQ ID NO: 120074 - protein, 7 aa, synthetic construct
GPAENRK

SEQ ID NO: 120075 - protein, 7 aa, synthetic construct
GPAGRHV

SEQ ID NO: 120076 - protein, 7 aa, synthetic construct
GPAHLRQ

SEQ ID NO: 120077 - protein, 7 aa, synthetic construct
GPAHNNR

SEQ ID NO: 120078 - protein, 7 aa, synthetic construct
GPAHRPM

SEQ ID NO: 120079 - protein, 7 aa, synthetic construct
GPAHRTM

SEQ ID NO: 120080 - protein, 7 aa, synthetic construct
GPAKHQI

SEQ ID NO: 120081 - protein, 7 aa, synthetic construct
GPAKIVI

SEQ ID NO: 120082 - protein, 7 aa, synthetic construct
GPAKYSA

SEQ ID NO: 120083 - protein, 7 aa, synthetic construct
GPAMKAY

SEQ ID NO: 120084 - protein, 7 aa, synthetic construct
GPAPIPR

SEQ ID NO: 120085 - protein, 7 aa, synthetic construct
GPATAGR

SEQ ID NO: 120086 - protein, 7 aa, synthetic construct
GPATPYM

SEQ ID NO: 120087 - protein, 7 aa, synthetic construct
GPAYNKN

SEQ ID NO: 120088 - protein, 7 aa, synthetic construct
GPDKMSK

SEQ ID NO: 120089 - protein, 7 aa, synthetic construct
GPDLKQR

SEQ ID NO: 120090 - protein, 7 aa, synthetic construct
GPDRLKM

SEQ ID NO: 120091 - protein, 7 aa, synthetic construct
GPEQKLR

SEQ ID NO: 120092 - protein, 7 aa, synthetic construct
GPETNKR

SEQ ID NO: 120093 - protein, 7 aa, synthetic construct
GPEYGFK

SEQ ID NO: 120094 - protein, 7 aa, synthetic construct
GPGGGYK

SEQ ID NO: 120095 - protein, 7 aa, synthetic construct
GPGGTSR

SEQ ID NO: 120096 - protein, 7 aa, synthetic construct
GPGGYGK

SEQ ID NO: 120097 - protein, 7 aa, synthetic construct
GPGHKGS

SEQ ID NO: 120098 - protein, 7 aa, synthetic construct
GPGIKPL

SEQ ID NO: 120099 - protein, 7 aa, synthetic construct
GPGMMSR

SEQ ID NO: 120100 - protein, 7 aa, synthetic construct
GPGQQTR

SEQ ID NO: 120101 - protein, 7 aa, synthetic construct
GPGQSKH

SEQ ID NO: 120102 - protein, 7 aa, synthetic construct
GPGQVFK

SEQ ID NO: 120103 - protein, 7 aa, synthetic construct
GPGVKLL

SEQ ID NO: 120104 - protein, 7 aa, synthetic construct
GPGVYSK

SEQ ID NO: 120105 - protein, 7 aa, synthetic construct
GPGYQLK

SEQ ID NO: 120106 - protein, 7 aa, synthetic construct
GPHGAKQ

SEQ ID NO: 120107 - protein, 7 aa, synthetic construct
GPHGNSK

SEQ ID NO: 120108 - protein, 7 aa, synthetic construct
GPHGRGQ

SEQ ID NO: 120109 - protein, 7 aa, synthetic construct
GPHIKNN

SEQ ID NO: 120110 - protein, 7 aa, synthetic construct
GPHKAYS

SEQ ID NO: 120111 - protein, 7 aa, synthetic construct
GPHKGLI

SEQ ID NO: 120112 - protein, 7 aa, synthetic construct
GPHLIKA

SEQ ID NO: 120113 - protein, 7 aa, synthetic construct
GPHNRGS

SEQ ID NO: 120114 - protein, 7 aa, synthetic construct
GPHNRTL

SEQ ID NO: 120115 - protein, 7 aa, synthetic construct
GPHPRIP

SEQ ID NO: 120116 - protein, 7 aa, synthetic construct
GPHQKNL

SEQ ID NO: 120117 - protein, 7 aa, synthetic construct
GPHRINT

SEQ ID NO: 120118 - protein, 7 aa, synthetic construct
GPHRTIQ

SEQ ID NO: 120119 - protein, 7 aa, synthetic construct
GPHTGRG

SEQ ID NO: 120120 - protein, 7 aa, synthetic construct
GPHVIRS

SEQ ID NO: 120121 - protein, 7 aa, synthetic construct
GPHVRPQ

SEQ ID NO: 120122 - protein, 7 aa, synthetic construct
GPHVSRP

SEQ ID NO: 120123 - protein, 7 aa, synthetic construct
GPIQHKA

SEQ ID NO: 120124 - protein, 7 aa, synthetic construct
GPISKIT

SEQ ID NO: 120125 - protein, 7 aa, synthetic construct
GPKFPIP

SEQ ID NO: 120126 - protein, 7 aa, synthetic construct
GPKHANL

SEQ ID NO: 120127 - protein, 7 aa, synthetic construct
GPKHPTY

SEQ ID NO: 120128 - protein, 7 aa, synthetic construct
GPKIHVI

SEQ ID NO: 120129 - protein, 7 aa, synthetic construct
GPKLAVY

SEQ ID NO: 120130 - protein, 7 aa, synthetic construct
GPKLPLA

SEQ ID NO: 120131 - protein, 7 aa, synthetic construct
GPKLSFS

SEQ ID NO: 120132 - protein, 7 aa, synthetic construct
GPKMRDQ

SEQ ID NO: 120133 - protein, 7 aa, synthetic construct
GPKNYHQ

SEQ ID NO: 120134 - protein, 7 aa, synthetic construct
GPKRIDM

SEQ ID NO: 120135 - protein, 7 aa, synthetic construct
GPKTNMY

SEQ ID NO: 120136 - protein, 7 aa, synthetic construct
GPKYMLN

SEQ ID NO: 120137 - protein, 7 aa, synthetic construct
GPKYPIV

SEQ ID NO: 120138 - protein, 7 aa, synthetic construct
GPKYSAN

SEQ ID NO: 120139 - protein, 7 aa, synthetic construct
GPKYVGL

SEQ ID NO: 120140 - protein, 7 aa, synthetic construct
GPLHKYS

SEQ ID NO: 120141 - protein, 7 aa, synthetic construct
GPLVRRE

SEQ ID NO: 120142 - protein, 7 aa, synthetic construct
GPMPKHQ

SEQ ID NO: 120143 - protein, 7 aa, synthetic construct
GPMRNHP

SEQ ID NO: 120144 - protein, 7 aa, synthetic construct
GPMRQDK

SEQ ID NO: 120145 - protein, 7 aa, synthetic construct
GPMRTKD

SEQ ID NO: 120146 - protein, 7 aa, synthetic construct
GPNENKR

SEQ ID NO: 120147 - protein, 7 aa, synthetic construct
GPNGGGR

SEQ ID NO: 120148 - protein, 7 aa, synthetic construct
GPNGGYK

SEQ ID NO: 120149 - protein, 7 aa, synthetic construct
GPNGSGR

SEQ ID NO: 120150 - protein, 7 aa, synthetic construct
GPNIRTL

SEQ ID NO: 120151 - protein, 7 aa, synthetic construct
GPNMHSK

SEQ ID NO: 120152 - protein, 7 aa, synthetic construct
GPNMPMR

SEQ ID NO: 120153 - protein, 7 aa, synthetic construct
GPNQHKM

SEQ ID NO: 120154 - protein, 7 aa, synthetic construct
GPNQNGR

SEQ ID NO: 120155 - protein, 7 aa, synthetic construct
GPNQTAR

SEQ ID NO: 120156 - protein, 7 aa, synthetic construct
GPNQYAK

SEQ ID NO: 120157 - protein, 7 aa, synthetic construct
GPNRDSK

SEQ ID NO: 120158 - protein, 7 aa, synthetic construct
GPNSASR

SEQ ID NO: 120159 - protein, 7 aa, synthetic construct
GPNVSKY

SEQ ID NO: 120160 - protein, 7 aa, synthetic construct
GPNVTIR

SEQ ID NO: 120161 - protein, 7 aa, synthetic construct
GPPRSPM

SEQ ID NO: 120162 - protein, 7 aa, synthetic construct
GPPTHAK

SEQ ID NO: 120163 - protein, 7 aa, synthetic construct
GPPTKYT

SEQ ID NO: 120164 - protein, 7 aa, synthetic construct
GPQDRKG

SEQ ID NO: 120165 - protein, 7 aa, synthetic construct
GPQGNPR

SEQ ID NO: 120166 - protein, 7 aa, synthetic construct
GPQHKDR

SEQ ID NO: 120167 - protein, 7 aa, synthetic construct
GPQHVQK

SEQ ID NO: 120168 - protein, 7 aa, synthetic construct
GPQIKYT

SEQ ID NO: 120169 - protein, 7 aa, synthetic construct
GPQITHR

SEQ ID NO: 120170 - protein, 7 aa, synthetic construct
GPQLHKQ

SEQ ID NO: 120171 - protein, 7 aa, synthetic construct
GPQMHPK

SEQ ID NO: 120172 - protein, 7 aa, synthetic construct
GPQNAQR

SEQ ID NO: 120173 - protein, 7 aa, synthetic construct
GPQNMSR

SEQ ID NO: 120174 - protein, 7 aa, synthetic construct
GPQQNPR

SEQ ID NO: 120175 - protein, 7 aa, synthetic construct
GPQQRFN

SEQ ID NO: 120176 - protein, 7 aa, synthetic construct
GPQQTSR

SEQ ID NO: 120177 - protein, 7 aa, synthetic construct
GPQRHQV

SEQ ID NO: 120178 - protein, 7 aa, synthetic construct
GPQRVPL

SEQ ID NO: 120179 - protein, 7 aa, synthetic construct
GPQSSQR

SEQ ID NO: 120180 - protein, 7 aa, synthetic construct
GPQYNGK

SEQ ID NO: 120181 - protein, 7 aa, synthetic construct
GPQYQTK

SEQ ID NO: 120182 - protein, 7 aa, synthetic construct
GPRATFT

SEQ ID NO: 120183 - protein, 7 aa, synthetic construct
GPRAVMI

SEQ ID NO: 120184 - protein, 7 aa, synthetic construct
GPRGERS

SEQ ID NO: 120185 - protein, 7 aa, synthetic construct
GPRHAQI

SEQ ID NO: 120186 - protein, 7 aa, synthetic construct
GPRIVAS

SEQ ID NO: 120187 - protein, 7 aa, synthetic construct
GPRIVQV

SEQ ID NO: 120188 - protein, 7 aa, synthetic construct
GPRMEQK

SEQ ID NO: 120189 - protein, 7 aa, synthetic construct
GPRNGIY

SEQ ID NO: 120190 - protein, 7 aa, synthetic construct
GPRNMVH

SEQ ID NO: 120191 - protein, 7 aa, synthetic construct
GPRNTPY

SEQ ID NO: 120192 - protein, 7 aa, synthetic construct
GPRPKDH

SEQ ID NO: 120193 - protein, 7 aa, synthetic construct
GPRPRDT

SEQ ID NO: 120194 - protein, 7 aa, synthetic construct
GPRPRGD

SEQ ID NO: 120195 - protein, 7 aa, synthetic construct
GPRTHIS

SEQ ID NO: 120196 - protein, 7 aa, synthetic construct
GPRTTPT

SEQ ID NO: 120197 - protein, 7 aa, synthetic construct
GPRYTNG

SEQ ID NO: 120198 - protein, 7 aa, synthetic construct
GPSAFKN

SEQ ID NO: 120199 - protein, 7 aa, synthetic construct
GPSAHRP

SEQ ID NO: 120200 - protein, 7 aa, synthetic construct
GPSFAKQ

SEQ ID NO: 120201 - protein, 7 aa, synthetic construct
GPSGMIK

SEQ ID NO: 120202 - protein, 7 aa, synthetic construct
GPSHAMR

SEQ ID NO: 120203 - protein, 7 aa, synthetic construct
GPSHKAM

SEQ ID NO: 120204 - protein, 7 aa, synthetic construct
GPSIRMP

SEQ ID NO: 120205 - protein, 7 aa, synthetic construct
GPSISVK

SEQ ID NO: 120206 - protein, 7 aa, synthetic construct
GPSKESY

SEQ ID NO: 120207 - protein, 7 aa, synthetic construct
GPSKTIY

SEQ ID NO: 120208 - protein, 7 aa, synthetic construct
GPSLYKN

SEQ ID NO: 120209 - protein, 7 aa, synthetic construct
GPSNMYK

SEQ ID NO: 120210 - protein, 7 aa, synthetic construct
GPSNSGK

SEQ ID NO: 120211 - protein, 7 aa, synthetic construct
GPSQARN

SEQ ID NO: 120212 - protein, 7 aa, synthetic construct
GPSRMGF

SEQ ID NO: 120213 - protein, 7 aa, synthetic construct
GPSTRGN

SEQ ID NO: 120214 - protein, 7 aa, synthetic construct
GPSYKAQ

SEQ ID NO: 120215 - protein, 7 aa, synthetic construct
GPTHSTK

SEQ ID NO: 120216 - protein, 7 aa, synthetic construct
GPTKSYS

SEQ ID NO: 120217 - protein, 7 aa, synthetic construct
GPTNHRG

SEQ ID NO: 120218 - protein, 7 aa, synthetic construct
GPTQARN

SEQ ID NO: 120219 - protein, 7 aa, synthetic construct
GPTSRIT

SEQ ID NO: 120220 - protein, 7 aa, synthetic construct
GPVHMQK

SEQ ID NO: 120221 - protein, 7 aa, synthetic construct
GPVHRTT

SEQ ID NO: 120222 - protein, 7 aa, synthetic construct
GPVIKER

SEQ ID NO: 120223 - protein, 7 aa, synthetic construct
GPVIKSH

SEQ ID NO: 120224 - protein, 7 aa, synthetic construct
GPVLRQP

SEQ ID NO: 120225 - protein, 7 aa, synthetic construct
GPVNKYQ

SEQ ID NO: 120226 - protein, 7 aa, synthetic construct
GPVPRYG

SEQ ID NO: 120227 - protein, 7 aa, synthetic construct
GPVRHPP

SEQ ID NO: 120228 - protein, 7 aa, synthetic construct
GPVTKAY

SEQ ID NO: 120229 - protein, 7 aa, synthetic construct
GPVVHRQ

SEQ ID NO: 120230 - protein, 7 aa, synthetic construct
GPYGMKG

SEQ ID NO: 120231 - protein, 7 aa, synthetic construct
GPYGNKM

SEQ ID NO: 120232 - protein, 7 aa, synthetic construct
GPYPGEM

SEQ ID NO: 120233 - protein, 7 aa, synthetic construct
GPYQQKG

SEQ ID NO: 120234 - protein, 7 aa, synthetic construct
GPYSNKA

SEQ ID NO: 120235 - protein, 7 aa, synthetic construct
GQAFVRT

SEQ ID NO: 120236 - protein, 7 aa, synthetic construct
GQAGQTR

SEQ ID NO: 120237 - protein, 7 aa, synthetic construct
GQAHRTG

SEQ ID NO: 120238 - protein, 7 aa, synthetic construct
GQAIPRS

SEQ ID NO: 120239 - protein, 7 aa, synthetic construct
GQAKFSV

SEQ ID NO: 120240 - protein, 7 aa, synthetic construct
GQAKHVM

SEQ ID NO: 120241 - protein, 7 aa, synthetic construct
GQALKGF

SEQ ID NO: 120242 - protein, 7 aa, synthetic construct
GQALTNR

SEQ ID NO: 120243 - protein, 7 aa, synthetic construct
GQALYGK

SEQ ID NO: 120244 - protein, 7 aa, synthetic construct
GQAMRGF

SEQ ID NO: 120245 - protein, 7 aa, synthetic construct
GQAMRGM

SEQ ID NO: 120246 - protein, 7 aa, synthetic construct
GQANMMR

SEQ ID NO: 120247 - protein, 7 aa, synthetic construct
GQANSGK

SEQ ID NO: 120248 - protein, 7 aa, synthetic construct
GQAPKQH

SEQ ID NO: 120249 - protein, 7 aa, synthetic construct
GQAQHIR

SEQ ID NO: 120250 - protein, 7 aa, synthetic construct
GQARDPK

SEQ ID NO: 120251 - protein, 7 aa, synthetic construct
GQARNIM

SEQ ID NO: 120252 - protein, 7 aa, synthetic construct
GQASIRS

SEQ ID NO: 120253 - protein, 7 aa, synthetic construct
GQASQYK

SEQ ID NO: 120254 - protein, 7 aa, synthetic construct
GQATYKM

SEQ ID NO: 120255 - protein, 7 aa, synthetic construct
GQAVQGR

SEQ ID NO: 120256 - protein, 7 aa, synthetic construct
GQAVQRY

SEQ ID NO: 120257 - protein, 7 aa, synthetic construct
GQAVRNY

SEQ ID NO: 120258 - protein, 7 aa, synthetic construct
GQAYIKQ

SEQ ID NO: 120259 - protein, 7 aa, synthetic construct
GQDKFNK

SEQ ID NO: 120260 - protein, 7 aa, synthetic construct
GQEKNKV

SEQ ID NO: 120261 - protein, 7 aa, synthetic construct
GQERMIR

SEQ ID NO: 120262 - protein, 7 aa, synthetic construct
GQESYRV

SEQ ID NO: 120263 - protein, 7 aa, synthetic construct
GQFANSR

SEQ ID NO: 120264 - protein, 7 aa, synthetic construct
GQFKPTM

SEQ ID NO: 120265 - protein, 7 aa, synthetic construct
GQFKVSV

SEQ ID NO: 120266 - protein, 7 aa, synthetic construct
GQFMNGK

SEQ ID NO: 120267 - protein, 7 aa, synthetic construct
GQFRIAT

SEQ ID NO: 120268 - protein, 7 aa, synthetic construct
GQFRSGM

SEQ ID NO: 120269 - protein, 7 aa, synthetic construct
GQGAQKH

SEQ ID NO: 120270 - protein, 7 aa, synthetic construct
GQGARTL

SEQ ID NO: 120271 - protein, 7 aa, synthetic construct
GQGAVRG

SEQ ID NO: 120272 - protein, 7 aa, synthetic construct
GQGGAQR

SEQ ID NO: 120273 - protein, 7 aa, synthetic construct
GQGGFKQ

SEQ ID NO: 120274 - protein, 7 aa, synthetic construct
GQGGRSV

SEQ ID NO: 120275 - protein, 7 aa, synthetic construct
GQGHFKT

SEQ ID NO: 120276 - protein, 7 aa, synthetic construct
GQGILHK

SEQ ID NO: 120277 - protein, 7 aa, synthetic construct
GQGINNR

SEQ ID NO: 120278 - protein, 7 aa, synthetic construct
GQGKDSR

SEQ ID NO: 120279 - protein, 7 aa, synthetic construct
GQGKQHM

SEQ ID NO: 120280 - protein, 7 aa, synthetic construct
GQGMVSR

SEQ ID NO: 120281 - protein, 7 aa, synthetic construct
GQGNSRA

SEQ ID NO: 120282 - protein, 7 aa, synthetic construct
GQGQASK

SEQ ID NO: 120283 - protein, 7 aa, synthetic construct
GQGRVAF

SEQ ID NO: 120284 - protein, 7 aa, synthetic construct
GQGSGRW

SEQ ID NO: 120285 - protein, 7 aa, synthetic construct
GQGSKGH

SEQ ID NO: 120286 - protein, 7 aa, synthetic construct
GQGSMMK

SEQ ID NO: 120287 - protein, 7 aa, synthetic construct
GQGYGTK

SEQ ID NO: 120288 - protein, 7 aa, synthetic construct
GQHAKQI

SEQ ID NO: 120289 - protein, 7 aa, synthetic construct
GQHANFK

SEQ ID NO: 120290 - protein, 7 aa, synthetic construct
GQHATAR

SEQ ID NO: 120291 - protein, 7 aa, synthetic construct
GQHGRTL

SEQ ID NO: 120292 - protein, 7 aa, synthetic construct
GQHKDKI

SEQ ID NO: 120293 - protein, 7 aa, synthetic construct
GQHKERQ

SEQ ID NO: 120294 - protein, 7 aa, synthetic construct
GQHLGKQ

SEQ ID NO: 120295 - protein, 7 aa, synthetic construct
GQHLMKV

SEQ ID NO: 120296 - protein, 7 aa, synthetic construct
GQHLNIY

SEQ ID NO: 120297 - protein, 7 aa, synthetic construct
GQHLSMK

SEQ ID NO: 120298 - protein, 7 aa, synthetic construct
GQHMIAR

SEQ ID NO: 120299 - protein, 7 aa, synthetic construct
GQHMQVK

SEQ ID NO: 120300 - protein, 7 aa, synthetic construct
GQHMRVH

SEQ ID NO: 120301 - protein, 7 aa, synthetic construct
GQHMTKQ

SEQ ID NO: 120302 - protein, 7 aa, synthetic construct
GQHQLQK

SEQ ID NO: 120303 - protein, 7 aa, synthetic construct
GQHQLRV

SEQ ID NO: 120304 - protein, 7 aa, synthetic construct
GQHSPPK

SEQ ID NO: 120305 - protein, 7 aa, synthetic construct
GQHVKFQ

SEQ ID NO: 120306 - protein, 7 aa, synthetic construct
GQHVKVT

SEQ ID NO: 120307 - protein, 7 aa, synthetic construct
GQHYSTQ

SEQ ID NO: 120308 - protein, 7 aa, synthetic construct
GQIKNNH

SEQ ID NO: 120309 - protein, 7 aa, synthetic construct
GQIQKYN

SEQ ID NO: 120310 - protein, 7 aa, synthetic construct
GQIRAPI

SEQ ID NO: 120311 - protein, 7 aa, synthetic construct
GQISQYV

SEQ ID NO: 120312 - protein, 7 aa, synthetic construct
GQITARQ

SEQ ID NO: 120313 - protein, 7 aa, synthetic construct
GQIVTRV

SEQ ID NO: 120314 - protein, 7 aa, synthetic construct
GQKAFQQ

SEQ ID NO: 120315 - protein, 7 aa, synthetic construct
GQKDFRI

SEQ ID NO: 120316 - protein, 7 aa, synthetic construct
GQKHITY

SEQ ID NO: 120317 - protein, 7 aa, synthetic construct
GQKHTFI

SEQ ID NO: 120318 - protein, 7 aa, synthetic construct
GQKIDWH

SEQ ID NO: 120319 - protein, 7 aa, synthetic construct
GQKKQDI

SEQ ID NO: 120320 - protein, 7 aa, synthetic construct
GQKKVDH

SEQ ID NO: 120321 - protein, 7 aa, synthetic construct
GQKNALY

SEQ ID NO: 120322 - protein, 7 aa, synthetic construct
GQKQRID

SEQ ID NO: 120323 - protein, 7 aa, synthetic construct
GQKQSDR

SEQ ID NO: 120324 - protein, 7 aa, synthetic construct
GQKRDQM

SEQ ID NO: 120325 - protein, 7 aa, synthetic construct
GQKRIET

SEQ ID NO: 120326 - protein, 7 aa, synthetic construct
GQKRTEM

SEQ ID NO: 120327 - protein, 7 aa, synthetic construct
GQKSYSQ

SEQ ID NO: 120328 - protein, 7 aa, synthetic construct
GQKTHGH

SEQ ID NO: 120329 - protein, 7 aa, synthetic construct
GQKVYIQ

SEQ ID NO: 120330 - protein, 7 aa, synthetic construct
GQKWATG

SEQ ID NO: 120331 - protein, 7 aa, synthetic construct
GQKYPAI

SEQ ID NO: 120332 - protein, 7 aa, synthetic construct
GQLAHVR

SEQ ID NO: 120333 - protein, 7 aa, synthetic construct
GQLARGN

SEQ ID NO: 120334 - protein, 7 aa, synthetic construct
GQLEGKR

SEQ ID NO: 120335 - protein, 7 aa, synthetic construct
GQLGKRD

SEQ ID NO: 120336 - protein, 7 aa, synthetic construct
GQLGMRA

SEQ ID NO: 120337 - protein, 7 aa, synthetic construct
GQLKHSY

SEQ ID NO: 120338 - protein, 7 aa, synthetic construct
GQLPKGH

SEQ ID NO: 120339 - protein, 7 aa, synthetic construct
GQLQQTR

SEQ ID NO: 120340 - protein, 7 aa, synthetic construct
GQLRLEK

SEQ ID NO: 120341 - protein, 7 aa, synthetic construct
GQMAMRT

SEQ ID NO: 120342 - protein, 7 aa, synthetic construct
GQMDKPR

SEQ ID NO: 120343 - protein, 7 aa, synthetic construct
GQMGQFK

SEQ ID NO: 120344 - protein, 7 aa, synthetic construct
GQMHGAK

SEQ ID NO: 120345 - protein, 7 aa, synthetic construct
GQMHTKT

SEQ ID NO: 120346 - protein, 7 aa, synthetic construct
GQMKEKQ

SEQ ID NO: 120347 - protein, 7 aa, synthetic construct
GQMKERY

SEQ ID NO: 120348 - protein, 7 aa, synthetic construct
GQMMNSR

SEQ ID NO: 120349 - protein, 7 aa, synthetic construct
GQMNSRI

SEQ ID NO: 120350 - protein, 7 aa, synthetic construct
GQMPVQR

SEQ ID NO: 120351 - protein, 7 aa, synthetic construct
GQNISQK

SEQ ID NO: 120352 - protein, 7 aa, synthetic construct
GQNLSRM

SEQ ID NO: 120353 - protein, 7 aa, synthetic construct
GQNMAVR

SEQ ID NO: 120354 - protein, 7 aa, synthetic construct
GQNMRDK

SEQ ID NO: 120355 - protein, 7 aa, synthetic construct
GQNNMRL

SEQ ID NO: 120356 - protein, 7 aa, synthetic construct
GQNNVKY

SEQ ID NO: 120357 - protein, 7 aa, synthetic construct
GQNQTRF

SEQ ID NO: 120358 - protein, 7 aa, synthetic construct
GQNRSNH

SEQ ID NO: 120359 - protein, 7 aa, synthetic construct
GQNSASR

SEQ ID NO: 120360 - protein, 7 aa, synthetic construct
GQNSIRS

SEQ ID NO: 120361 - protein, 7 aa, synthetic construct
GQNSKSA

SEQ ID NO: 120362 - protein, 7 aa, synthetic construct
GQNVSAR

SEQ ID NO: 120363 - protein, 7 aa, synthetic construct
GQPAQRY

SEQ ID NO: 120364 - protein, 7 aa, synthetic construct
GQPASGR

SEQ ID NO: 120365 - protein, 7 aa, synthetic construct
GQPKFSP

SEQ ID NO: 120366 - protein, 7 aa, synthetic construct
GQPMKML

SEQ ID NO: 120367 - protein, 7 aa, synthetic construct
GQPQHNR

SEQ ID NO: 120368 - protein, 7 aa, synthetic construct
GQPQSNR

SEQ ID NO: 120369 - protein, 7 aa, synthetic construct
GQPTNGR

SEQ ID NO: 120370 - protein, 7 aa, synthetic construct
GQPVLSK

SEQ ID NO: 120371 - protein, 7 aa, synthetic construct
GQPVQGR

SEQ ID NO: 120372 - protein, 7 aa, synthetic construct
GQPVQVR

SEQ ID NO: 120373 - protein, 7 aa, synthetic construct
GQQFIKS

SEQ ID NO: 120374 - protein, 7 aa, synthetic construct
GQQFVKL

SEQ ID NO: 120375 - protein, 7 aa, synthetic construct
GQQGAYM

SEQ ID NO: 120376 - protein, 7 aa, synthetic construct
GQQGRIM

SEQ ID NO: 120377 - protein, 7 aa, synthetic construct
GQQGRVM

SEQ ID NO: 120378 - protein, 7 aa, synthetic construct
GQQGYKM

SEQ ID NO: 120379 - protein, 7 aa, synthetic construct
GQQHGNK

SEQ ID NO: 120380 - protein, 7 aa, synthetic construct
GQQKYGI

SEQ ID NO: 120381 - protein, 7 aa, synthetic construct
GQQMIAR

SEQ ID NO: 120382 - protein, 7 aa, synthetic construct
GQQMTRT

SEQ ID NO: 120383 - protein, 7 aa, synthetic construct
GQQNHSK

SEQ ID NO: 120384 - protein, 7 aa, synthetic construct
GQQNKQH

SEQ ID NO: 120385 - protein, 7 aa, synthetic construct
GQQNTFK

SEQ ID NO: 120386 - protein, 7 aa, synthetic construct
GQQPRMN

SEQ ID NO: 120387 - protein, 7 aa, synthetic construct
GQQPRQT

SEQ ID NO: 120388 - protein, 7 aa, synthetic construct
GQQPYQK

SEQ ID NO: 120389 - protein, 7 aa, synthetic construct
GQQQHAK

SEQ ID NO: 120390 - protein, 7 aa, synthetic construct
GQQQKPW

SEQ ID NO: 120391 - protein, 7 aa, synthetic construct
GQQQRLS

SEQ ID NO: 120392 - protein, 7 aa, synthetic construct
GQQQYMK

SEQ ID NO: 120393 - protein, 7 aa, synthetic construct
GQQRAYI

SEQ ID NO: 120394 - protein, 7 aa, synthetic construct
GQQRISL

SEQ ID NO: 120395 - protein, 7 aa, synthetic construct
GQQRLMM

SEQ ID NO: 120396 - protein, 7 aa, synthetic construct
GQQRNAM

SEQ ID NO: 120397 - protein, 7 aa, synthetic construct
GQQRPSY

SEQ ID NO: 120398 - protein, 7 aa, synthetic construct
GQQRYTG

SEQ ID NO: 120399 - protein, 7 aa, synthetic construct
GQQSIGR

SEQ ID NO: 120400 - protein, 7 aa, synthetic construct
GQQSNRL

SEQ ID NO: 120401 - protein, 7 aa, synthetic construct
GQQSYKV

SEQ ID NO: 120402 - protein, 7 aa, synthetic construct
GQQTITR

SEQ ID NO: 120403 - protein, 7 aa, synthetic construct
GQQVRNI

SEQ ID NO: 120404 - protein, 7 aa, synthetic construct
GQQVVHR

SEQ ID NO: 120405 - protein, 7 aa, synthetic construct
GQQVYAK

SEQ ID NO: 120406 - protein, 7 aa, synthetic construct
GQQYPQN

SEQ ID NO: 120407 - protein, 7 aa, synthetic construct
GQQYRTD

SEQ ID NO: 120408 - protein, 7 aa, synthetic construct
GQRDNAK

SEQ ID NO: 120409 - protein, 7 aa, synthetic construct
GQRDPKY

SEQ ID NO: 120410 - protein, 7 aa, synthetic construct
GQRIKDY

SEQ ID NO: 120411 - protein, 7 aa, synthetic construct
GQRKDMG

SEQ ID NO: 120412 - protein, 7 aa, synthetic construct
GQRLDAK

SEQ ID NO: 120413 - protein, 7 aa, synthetic construct
GQRLEYK

SEQ ID NO: 120414 - protein, 7 aa, synthetic construct
GQRLQSQ

SEQ ID NO: 120415 - protein, 7 aa, synthetic construct
GQRMATM

SEQ ID NO: 120416 - protein, 7 aa, synthetic construct
GQRMMAV

SEQ ID NO: 120417 - protein, 7 aa, synthetic construct
GQRMQTF

SEQ ID NO: 120418 - protein, 7 aa, synthetic construct
GQRMTPQ

SEQ ID NO: 120419 - protein, 7 aa, synthetic construct
GQRNIMV

SEQ ID NO: 120420 - protein, 7 aa, synthetic construct
GQRPITY

SEQ ID NO: 120421 - protein, 7 aa, synthetic construct
GQRQNLT

SEQ ID NO: 120422 - protein, 7 aa, synthetic construct
GQRSIPQ

SEQ ID NO: 120423 - protein, 7 aa, synthetic construct
GQRSQMH

SEQ ID NO: 120424 - protein, 7 aa, synthetic construct
GQRVDLR

SEQ ID NO: 120425 - protein, 7 aa, synthetic construct
GQRVEPR

SEQ ID NO: 120426 - protein, 7 aa, synthetic construct
GQRVVDK

SEQ ID NO: 120427 - protein, 7 aa, synthetic construct
GQSAVRM

SEQ ID NO: 120428 - protein, 7 aa, synthetic construct
GQSGMFK

SEQ ID NO: 120429 - protein, 7 aa, synthetic construct
GQSHIAK

SEQ ID NO: 120430 - protein, 7 aa, synthetic construct
GQSHTKM

SEQ ID NO: 120431 - protein, 7 aa, synthetic construct
GQSMLPR

SEQ ID NO: 120432 - protein, 7 aa, synthetic construct
GQSMNAK

SEQ ID NO: 120433 - protein, 7 aa, synthetic construct
GQSPHPR

SEQ ID NO: 120434 - protein, 7 aa, synthetic construct
GQSQFGK

SEQ ID NO: 120435 - protein, 7 aa, synthetic construct
GQSQLRF

SEQ ID NO: 120436 - protein, 7 aa, synthetic construct
GQSRINL

SEQ ID NO: 120437 - protein, 7 aa, synthetic construct
GQSSLRQ

SEQ ID NO: 120438 - protein, 7 aa, synthetic construct
GQSSNMR

SEQ ID NO: 120439 - protein, 7 aa, synthetic construct
GQSSNQR

SEQ ID NO: 120440 - protein, 7 aa, synthetic construct
GQSSVMR

SEQ ID NO: 120441 - protein, 7 aa, synthetic construct
GQSTYKT

SEQ ID NO: 120442 - protein, 7 aa, synthetic construct
GQSVAMK

SEQ ID NO: 120443 - protein, 7 aa, synthetic construct
GQSVMKI

SEQ ID NO: 120444 - protein, 7 aa, synthetic construct
GQSVSAK

SEQ ID NO: 120445 - protein, 7 aa, synthetic construct
GQTAQTR

SEQ ID NO: 120446 - protein, 7 aa, synthetic construct
GQTARQV

SEQ ID NO: 120447 - protein, 7 aa, synthetic construct
GQTAVAR

SEQ ID NO: 120448 - protein, 7 aa, synthetic construct
GQTERKM

SEQ ID NO: 120449 - protein, 7 aa, synthetic construct
GQTFKAI

SEQ ID NO: 120450 - protein, 7 aa, synthetic construct
GQTGAMR

SEQ ID NO: 120451 - protein, 7 aa, synthetic construct
GQTGQSR

SEQ ID NO: 120452 - protein, 7 aa, synthetic construct
GQTGTMR

SEQ ID NO: 120453 - protein, 7 aa, synthetic construct
GQTHKQL

SEQ ID NO: 120454 - protein, 7 aa, synthetic construct
GQTHVQR

SEQ ID NO: 120455 - protein, 7 aa, synthetic construct
GQTKFER

SEQ ID NO: 120456 - protein, 7 aa, synthetic construct
GQTKLHY

SEQ ID NO: 120457 - protein, 7 aa, synthetic construct
GQTKLRD

SEQ ID NO: 120458 - protein, 7 aa, synthetic construct
GQTMAIR

SEQ ID NO: 120459 - protein, 7 aa, synthetic construct
GQTNAMR

SEQ ID NO: 120460 - protein, 7 aa, synthetic construct
GQTNHAK

SEQ ID NO: 120461 - protein, 7 aa, synthetic construct
GQTNVGR

SEQ ID NO: 120462 - protein, 7 aa, synthetic construct
GQTPRTQ

SEQ ID NO: 120463 - protein, 7 aa, synthetic construct
GQTTRMT

SEQ ID NO: 120464 - protein, 7 aa, synthetic construct
GQVAERK

SEQ ID NO: 120465 - protein, 7 aa, synthetic construct
GQVIHRG

SEQ ID NO: 120466 - protein, 7 aa, synthetic construct
GQVKFQM

SEQ ID NO: 120467 - protein, 7 aa, synthetic construct
GQVKNFH

SEQ ID NO: 120468 - protein, 7 aa, synthetic construct
GQVKNYL

SEQ ID NO: 120469 - protein, 7 aa, synthetic construct
GQVLRDK

SEQ ID NO: 120470 - protein, 7 aa, synthetic construct
GQVLRQM

SEQ ID NO: 120471 - protein, 7 aa, synthetic construct
GQVMHKQ

SEQ ID NO: 120472 - protein, 7 aa, synthetic construct
GQVMRQI

SEQ ID NO: 120473 - protein, 7 aa, synthetic construct
GQVNDRK

SEQ ID NO: 120474 - protein, 7 aa, synthetic construct
GQVNGYR

SEQ ID NO: 120475 - protein, 7 aa, synthetic construct
GQVNKNA

SEQ ID NO: 120476 - protein, 7 aa, synthetic construct
GQVRATL

SEQ ID NO: 120477 - protein, 7 aa, synthetic construct
GQVRERM

SEQ ID NO: 120478 - protein, 7 aa, synthetic construct
GQVREVR

SEQ ID NO: 120479 - protein, 7 aa, synthetic construct
GQVRLRE

SEQ ID NO: 120480 - protein, 7 aa, synthetic construct
GQVRNAY

SEQ ID NO: 120481 - protein, 7 aa, synthetic construct
GQVRNQN

SEQ ID NO: 120482 - protein, 7 aa, synthetic construct
GQVRNSS

SEQ ID NO: 120483 - protein, 7 aa, synthetic construct
GQVSSRM

SEQ ID NO: 120484 - protein, 7 aa, synthetic construct
GQVTGRY

SEQ ID NO: 120485 - protein, 7 aa, synthetic construct
GQVTRLV

SEQ ID NO: 120486 - protein, 7 aa, synthetic construct
GQVWKAD

SEQ ID NO: 120487 - protein, 7 aa, synthetic construct
GQWSAHV

SEQ ID NO: 120488 - protein, 7 aa, synthetic construct
GQYAATR

SEQ ID NO: 120489 - protein, 7 aa, synthetic construct
GQYAMKG

SEQ ID NO: 120490 - protein, 7 aa, synthetic construct
GQYAMSK

SEQ ID NO: 120491 - protein, 7 aa, synthetic construct
GQYGGKQ

SEQ ID NO: 120492 - protein, 7 aa, synthetic construct
GQYHIPS

SEQ ID NO: 120493 - protein, 7 aa, synthetic construct
GQYIQKT

SEQ ID NO: 120494 - protein, 7 aa, synthetic construct
GQYKAQM

SEQ ID NO: 120495 - protein, 7 aa, synthetic construct
GQYKQQM

SEQ ID NO: 120496 - protein, 7 aa, synthetic construct
GQYKYHA

SEQ ID NO: 120497 - protein, 7 aa, synthetic construct
GQYPAPK

SEQ ID NO: 120498 - protein, 7 aa, synthetic construct
GQYSALK

SEQ ID NO: 120499 - protein, 7 aa, synthetic construct
GQYTTKM

SEQ ID NO: 120500 - protein, 7 aa, synthetic construct
GRAAAMQ

SEQ ID NO: 120501 - protein, 7 aa, synthetic construct
GRAADRM

SEQ ID NO: 120502 - protein, 7 aa, synthetic construct
GRAANFV

SEQ ID NO: 120503 - protein, 7 aa, synthetic construct
GRAAPGL

SEQ ID NO: 120504 - protein, 7 aa, synthetic construct
GRAAPKD

SEQ ID NO: 120505 - protein, 7 aa, synthetic construct
GRAATLH

SEQ ID NO: 120506 - protein, 7 aa, synthetic construct
GRADITR

SEQ ID NO: 120507 - protein, 7 aa, synthetic construct
GRADLPR

SEQ ID NO: 120508 - protein, 7 aa, synthetic construct
GRAETSR

SEQ ID NO: 120509 - protein, 7 aa, synthetic construct
GRAGDVR

SEQ ID NO: 120510 - protein, 7 aa, synthetic construct
GRAGKDL

SEQ ID NO: 120511 - protein, 7 aa, synthetic construct
GRAGWVE

SEQ ID NO: 120512 - protein, 7 aa, synthetic construct
GRAHLPA

SEQ ID NO: 120513 - protein, 7 aa, synthetic construct
GRAHLSG

SEQ ID NO: 120514 - protein, 7 aa, synthetic construct
GRAHPPQ

SEQ ID NO: 120515 - protein, 7 aa, synthetic construct
GRAIDRA

SEQ ID NO: 120516 - protein, 7 aa, synthetic construct
GRAIKDN

SEQ ID NO: 120517 - protein, 7 aa, synthetic construct
GRAKAEG

SEQ ID NO: 120518 - protein, 7 aa, synthetic construct
GRAKGQE

SEQ ID NO: 120519 - protein, 7 aa, synthetic construct
GRAKVDI

SEQ ID NO: 120520 - protein, 7 aa, synthetic construct
GRAMKMD

SEQ ID NO: 120521 - protein, 7 aa, synthetic construct
GRANASM

SEQ ID NO: 120522 - protein, 7 aa, synthetic construct
GRAPQDK

SEQ ID NO: 120523 - protein, 7 aa, synthetic construct
GRAQLSM

SEQ ID NO: 120524 - protein, 7 aa, synthetic construct
GRAQMDK

SEQ ID NO: 120525 - protein, 7 aa, synthetic construct
GRAQMQI

SEQ ID NO: 120526 - protein, 7 aa, synthetic construct
GRAQNNV

SEQ ID NO: 120527 - protein, 7 aa, synthetic construct
GRAQQML

SEQ ID NO: 120528 - protein, 7 aa, synthetic construct
GRAQTAM

SEQ ID NO: 120529 - protein, 7 aa, synthetic construct
GRASLVT

SEQ ID NO: 120530 - protein, 7 aa, synthetic construct
GRAVHNP

SEQ ID NO: 120531 - protein, 7 aa, synthetic construct
GRAVQPI

SEQ ID NO: 120532 - protein, 7 aa, synthetic construct
GRDFIKA

SEQ ID NO: 120533 - protein, 7 aa, synthetic construct
GRDIRGQ

SEQ ID NO: 120534 - protein, 7 aa, synthetic construct
GRDIRSM

SEQ ID NO: 120535 - protein, 7 aa, synthetic construct
GRDKAYT

SEQ ID NO: 120536 - protein, 7 aa, synthetic construct
GRDMATR

SEQ ID NO: 120537 - protein, 7 aa, synthetic construct
GRDMIRS

SEQ ID NO: 120538 - protein, 7 aa, synthetic construct
GRDMKSH

SEQ ID NO: 120539 - protein, 7 aa, synthetic construct
GRDMKWQ

SEQ ID NO: 120540 - protein, 7 aa, synthetic construct
GRDMSGK

SEQ ID NO: 120541 - protein, 7 aa, synthetic construct
GRDNQTK

SEQ ID NO: 120542 - protein, 7 aa, synthetic construct
GRDNVLR

SEQ ID NO: 120543 - protein, 7 aa, synthetic construct
GRDNVRA

SEQ ID NO: 120544 - protein, 7 aa, synthetic construct
GRDPMTR

SEQ ID NO: 120545 - protein, 7 aa, synthetic construct
GRDQQMK

SEQ ID NO: 120546 - protein, 7 aa, synthetic construct
GRDSGRV

SEQ ID NO: 120547 - protein, 7 aa, synthetic construct
GRDVGTK

SEQ ID NO: 120548 - protein, 7 aa, synthetic construct
GRDVMSR

SEQ ID NO: 120549 - protein, 7 aa, synthetic construct
GRDVRNI

SEQ ID NO: 120550 - protein, 7 aa, synthetic construct
GREAQYK

SEQ ID NO: 120551 - protein, 7 aa, synthetic construct
GREFTAK

SEQ ID NO: 120552 - protein, 7 aa, synthetic construct
GREGMKY

SEQ ID NO: 120553 - protein, 7 aa, synthetic construct
GREGQLR

SEQ ID NO: 120554 - protein, 7 aa, synthetic construct
GREHRPI

SEQ ID NO: 120555 - protein, 7 aa, synthetic construct
GREHTKM

SEQ ID NO: 120556 - protein, 7 aa, synthetic construct
GREIMPK

SEQ ID NO: 120557 - protein, 7 aa, synthetic construct
GREIQGR

SEQ ID NO: 120558 - protein, 7 aa, synthetic construct
GREMYVK

SEQ ID NO: 120559 - protein, 7 aa, synthetic construct
GRENKIM

SEQ ID NO: 120560 - protein, 7 aa, synthetic construct
GREQKLQ

SEQ ID NO: 120561 - protein, 7 aa, synthetic construct
GREQTRV

SEQ ID NO: 120562 - protein, 7 aa, synthetic construct
GRERLSI

SEQ ID NO: 120563 - protein, 7 aa, synthetic construct
GRERTMV

SEQ ID NO: 120564 - protein, 7 aa, synthetic construct
GRETVTK

SEQ ID NO: 120565 - protein, 7 aa, synthetic construct
GREVFRA

SEQ ID NO: 120566 - protein, 7 aa, synthetic construct
GREVVGK

SEQ ID NO: 120567 - protein, 7 aa, synthetic construct
GRFKQQE

SEQ ID NO: 120568 - protein, 7 aa, synthetic construct
GRFNAAV

SEQ ID NO: 120569 - protein, 7 aa, synthetic construct
GRGAFVP

SEQ ID NO: 120570 - protein, 7 aa, synthetic construct
GRGAQLL

SEQ ID NO: 120571 - protein, 7 aa, synthetic construct
GRGDKYT

SEQ ID NO: 120572 - protein, 7 aa, synthetic construct
GRGEKVL

SEQ ID NO: 120573 - protein, 7 aa, synthetic construct
GRGERVI

SEQ ID NO: 120574 - protein, 7 aa, synthetic construct
GRGGAQV

SEQ ID NO: 120575 - protein, 7 aa, synthetic construct
GRGGATT

SEQ ID NO: 120576 - protein, 7 aa, synthetic construct
GRGGMLQ

SEQ ID NO: 120577 - protein, 7 aa, synthetic construct
GRGGQAI

SEQ ID NO: 120578 - protein, 7 aa, synthetic construct
GRGGSLI

SEQ ID NO: 120579 - protein, 7 aa, synthetic construct
GRGHILS

SEQ ID NO: 120580 - protein, 7 aa, synthetic construct
GRGHNIA

SEQ ID NO: 120581 - protein, 7 aa, synthetic construct
GRGHSQP

SEQ ID NO: 120582 - protein, 7 aa, synthetic construct
GRGINKD

SEQ ID NO: 120583 - protein, 7 aa, synthetic construct
GRGIQQI

SEQ ID NO: 120584 - protein, 7 aa, synthetic construct
GRGKDFG

SEQ ID NO: 120585 - protein, 7 aa, synthetic construct
GRGKELT

SEQ ID NO: 120586 - protein, 7 aa, synthetic construct
GRGKQDT

SEQ ID NO: 120587 - protein, 7 aa, synthetic construct
GRGKVDA

SEQ ID NO: 120588 - protein, 7 aa, synthetic construct
GRGMNVT

SEQ ID NO: 120589 - protein, 7 aa, synthetic construct
GRGMSIP

SEQ ID NO: 120590 - protein, 7 aa, synthetic construct
GRGNDKS

SEQ ID NO: 120591 - protein, 7 aa, synthetic construct
GRGNEPR

SEQ ID NO: 120592 - protein, 7 aa, synthetic construct
GRGNQMV

SEQ ID NO: 120593 - protein, 7 aa, synthetic construct
GRGPHGA

SEQ ID NO: 120594 - protein, 7 aa, synthetic construct
GRGPTTY

SEQ ID NO: 120595 - protein, 7 aa, synthetic construct
GRGQEKA

SEQ ID NO: 120596 - protein, 7 aa, synthetic construct
GRGQENK

SEQ ID NO: 120597 - protein, 7 aa, synthetic construct
GRGQFQP

SEQ ID NO: 120598 - protein, 7 aa, synthetic construct
GRGQIAI

SEQ ID NO: 120599 - protein, 7 aa, synthetic construct
GRGQITV

SEQ ID NO: 120600 - protein, 7 aa, synthetic construct
GRGQNSA

SEQ ID NO: 120601 - protein, 7 aa, synthetic construct
GRGQQAV

SEQ ID NO: 120602 - protein, 7 aa, synthetic construct
GRGRELV

SEQ ID NO: 120603 - protein, 7 aa, synthetic construct
GRGSSNL

SEQ ID NO: 120604 - protein, 7 aa, synthetic construct
GRGTDNR

SEQ ID NO: 120605 - protein, 7 aa, synthetic construct
GRGTGYA

SEQ ID NO: 120606 - protein, 7 aa, synthetic construct
GRGVQKD

SEQ ID NO: 120607 - protein, 7 aa, synthetic construct
GRGVQPF

SEQ ID NO: 120608 - protein, 7 aa, synthetic construct
GRHEKLA

SEQ ID NO: 120609 - protein, 7 aa, synthetic construct
GRHIANV

SEQ ID NO: 120610 - protein, 7 aa, synthetic construct
GRHINTG

SEQ ID NO: 120611 - protein, 7 aa, synthetic construct
GRHIQLP

SEQ ID NO: 120612 - protein, 7 aa, synthetic construct
GRHIVPP

SEQ ID NO: 120613 - protein, 7 aa, synthetic construct
GRHNLPA

SEQ ID NO: 120614 - protein, 7 aa, synthetic construct
GRHNQIA

SEQ ID NO: 120615 - protein, 7 aa, synthetic construct
GRHRELD

SEQ ID NO: 120616 - protein, 7 aa, synthetic construct
GRHTPSM

SEQ ID NO: 120617 - protein, 7 aa, synthetic construct
GRHVKEG

SEQ ID NO: 120618 - protein, 7 aa, synthetic construct
GRIDVQK

SEQ ID NO: 120619 - protein, 7 aa, synthetic construct
GRIHNGP

SEQ ID NO: 120620 - protein, 7 aa, synthetic construct
GRIIKND

SEQ ID NO: 120621 - protein, 7 aa, synthetic construct
GRIKEMQ

SEQ ID NO: 120622 - protein, 7 aa, synthetic construct
GRIKLME

SEQ ID NO: 120623 - protein, 7 aa, synthetic construct
GRIKNDV

SEQ ID NO: 120624 - protein, 7 aa, synthetic construct
GRILKEI

SEQ ID NO: 120625 - protein, 7 aa, synthetic construct
GRIMETK

SEQ ID NO: 120626 - protein, 7 aa, synthetic construct
GRINSTM

SEQ ID NO: 120627 - protein, 7 aa, synthetic construct
GRINVTH

SEQ ID NO: 120628 - protein, 7 aa, synthetic construct
GRIQQNI

SEQ ID NO: 120629 - protein, 7 aa, synthetic construct
GRIQSQT

SEQ ID NO: 120630 - protein, 7 aa, synthetic construct
GRITNGH

SEQ ID NO: 120631 - protein, 7 aa, synthetic construct
GRKAPDM

SEQ ID NO: 120632 - protein, 7 aa, synthetic construct
GRKDIVQ

SEQ ID NO: 120633 - protein, 7 aa, synthetic construct
GRKDNQT

SEQ ID NO: 120634 - protein, 7 aa, synthetic construct
GRKDNYI

SEQ ID NO: 120635 - protein, 7 aa, synthetic construct
GRKDTTQ

SEQ ID NO: 120636 - protein, 7 aa, synthetic construct
GRKFDQG

SEQ ID NO: 120637 - protein, 7 aa, synthetic construct
GRKFQDG

SEQ ID NO: 120638 - protein, 7 aa, synthetic construct
GRKGETF

SEQ ID NO: 120639 - protein, 7 aa, synthetic construct
GRKGTPE

SEQ ID NO: 120640 - protein, 7 aa, synthetic construct
GRKGVPE

SEQ ID NO: 120641 - protein, 7 aa, synthetic construct
GRKPDGF

SEQ ID NO: 120642 - protein, 7 aa, synthetic construct
GRKYDDH

SEQ ID NO: 120643 - protein, 7 aa, synthetic construct
GRLKAGD

SEQ ID NO: 120644 - protein, 7 aa, synthetic construct
GRLKIPD

SEQ ID NO: 120645 - protein, 7 aa, synthetic construct
GRLMDTR

SEQ ID NO: 120646 - protein, 7 aa, synthetic construct
GRLMETK

SEQ ID NO: 120647 - protein, 7 aa, synthetic construct
GRLPGVL

SEQ ID NO: 120648 - protein, 7 aa, synthetic construct
GRLQALQ

SEQ ID NO: 120649 - protein, 7 aa, synthetic construct
GRLQAQT

SEQ ID NO: 120650 - protein, 7 aa, synthetic construct
GRLSENK

SEQ ID NO: 120651 - protein, 7 aa, synthetic construct
GRMAGND

SEQ ID NO: 120652 - protein, 7 aa, synthetic construct
GRMASIQ

SEQ ID NO: 120653 - protein, 7 aa, synthetic construct
GRMASTM

SEQ ID NO: 120654 - protein, 7 aa, synthetic construct
GRMDMSK

SEQ ID NO: 120655 - protein, 7 aa, synthetic construct
GRMELAK

SEQ ID NO: 120656 - protein, 7 aa, synthetic construct
GRMIPGS

SEQ ID NO: 120657 - protein, 7 aa, synthetic construct
GRMLAIN

SEQ ID NO: 120658 - protein, 7 aa, synthetic construct
GRMLNPS

SEQ ID NO: 120659 - protein, 7 aa, synthetic construct
GRMMHKE

SEQ ID NO: 120660 - protein, 7 aa, synthetic construct
GRMPVSM

SEQ ID NO: 120661 - protein, 7 aa, synthetic construct
GRMQVPP

SEQ ID NO: 120662 - protein, 7 aa, synthetic construct
GRMQVTM

SEQ ID NO: 120663 - protein, 7 aa, synthetic construct
GRMSLSV

SEQ ID NO: 120664 - protein, 7 aa, synthetic construct
GRMTASL

SEQ ID NO: 120665 - protein, 7 aa, synthetic construct
GRMTMAL

SEQ ID NO: 120666 - protein, 7 aa, synthetic construct
GRMTNIQ

SEQ ID NO: 120667 - protein, 7 aa, synthetic construct
GRMTNQF

SEQ ID NO: 120668 - protein, 7 aa, synthetic construct
GRMVNQQ

SEQ ID NO: 120669 - protein, 7 aa, synthetic construct
GRMVSTT

SEQ ID NO: 120670 - protein, 7 aa, synthetic construct
GRNAGPL

SEQ ID NO: 120671 - protein, 7 aa, synthetic construct
GRNAQAN

SEQ ID NO: 120672 - protein, 7 aa, synthetic construct
GRNAQDR

SEQ ID NO: 120673 - protein, 7 aa, synthetic construct
GRNDKAV

SEQ ID NO: 120674 - protein, 7 aa, synthetic construct
GRNDPKT

SEQ ID NO: 120675 - protein, 7 aa, synthetic construct
GRNEKLQ

SEQ ID NO: 120676 - protein, 7 aa, synthetic construct
GRNFHSA

SEQ ID NO: 120677 - protein, 7 aa, synthetic construct
GRNGTAW

SEQ ID NO: 120678 - protein, 7 aa, synthetic construct
GRNHNMQ

SEQ ID NO: 120679 - protein, 7 aa, synthetic construct
GRNIALV

SEQ ID NO: 120680 - protein, 7 aa, synthetic construct
GRNIKDA

SEQ ID NO: 120681 - protein, 7 aa, synthetic construct
GRNITQM

SEQ ID NO: 120682 - protein, 7 aa, synthetic construct
GRNKLNE

SEQ ID NO: 120683 - protein, 7 aa, synthetic construct
GRNLSTL

SEQ ID NO: 120684 - protein, 7 aa, synthetic construct
GRNMAHM

SEQ ID NO: 120685 - protein, 7 aa, synthetic construct
GRNMKDM

SEQ ID NO: 120686 - protein, 7 aa, synthetic construct
GRNMLDK

SEQ ID NO: 120687 - protein, 7 aa, synthetic construct
GRNNFHG

SEQ ID NO: 120688 - protein, 7 aa, synthetic construct
GRNNGGV

SEQ ID NO: 120689 - protein, 7 aa, synthetic construct
GRNNGHM

SEQ ID NO: 120690 - protein, 7 aa, synthetic construct
GRNNLLN

SEQ ID NO: 120691 - protein, 7 aa, synthetic construct
GRNNLPN

SEQ ID NO: 120692 - protein, 7 aa, synthetic construct
GRNNQLI

SEQ ID NO: 120693 - protein, 7 aa, synthetic construct
GRNQDKW

SEQ ID NO: 120694 - protein, 7 aa, synthetic construct
GRNQHSI

SEQ ID NO: 120695 - protein, 7 aa, synthetic construct
GRNQNQT

SEQ ID NO: 120696 - protein, 7 aa, synthetic construct
GRNRELP

SEQ ID NO: 120697 - protein, 7 aa, synthetic construct
GRNSQPI

SEQ ID NO: 120698 - protein, 7 aa, synthetic construct
GRNSVQV

SEQ ID NO: 120699 - protein, 7 aa, synthetic construct
GRNTASI

SEQ ID NO: 120700 - protein, 7 aa, synthetic construct
GRNTILT

SEQ ID NO: 120701 - protein, 7 aa, synthetic construct
GRNTLDK

SEQ ID NO: 120702 - protein, 7 aa, synthetic construct
GRNTPPV

SEQ ID NO: 120703 - protein, 7 aa, synthetic construct
GRNTQSV

SEQ ID NO: 120704 - protein, 7 aa, synthetic construct
GRNVKDY

SEQ ID NO: 120705 - protein, 7 aa, synthetic construct
GRNVPQN

SEQ ID NO: 120706 - protein, 7 aa, synthetic construct
GRNVRDS

SEQ ID NO: 120707 - protein, 7 aa, synthetic construct
GRNWGHD

SEQ ID NO: 120708 - protein, 7 aa, synthetic construct
GRPDLLR

SEQ ID NO: 120709 - protein, 7 aa, synthetic construct
GRPGMIN

SEQ ID NO: 120710 - protein, 7 aa, synthetic construct
GRPHLGS

SEQ ID NO: 120711 - protein, 7 aa, synthetic construct
GRPHQTT

SEQ ID NO: 120712 - protein, 7 aa, synthetic construct
GRPHTSV

SEQ ID NO: 120713 - protein, 7 aa, synthetic construct
GRPIHQT

SEQ ID NO: 120714 - protein, 7 aa, synthetic construct
GRPIPER

SEQ ID NO: 120715 - protein, 7 aa, synthetic construct
GRPIPMQ

SEQ ID NO: 120716 - protein, 7 aa, synthetic construct
GRPIQSV

SEQ ID NO: 120717 - protein, 7 aa, synthetic construct
GRPISVS

SEQ ID NO: 120718 - protein, 7 aa, synthetic construct
GRPKPEQ

SEQ ID NO: 120719 - protein, 7 aa, synthetic construct
GRPMQGI

SEQ ID NO: 120720 - protein, 7 aa, synthetic construct
GRPMQMQ

SEQ ID NO: 120721 - protein, 7 aa, synthetic construct
GRPNHSA

SEQ ID NO: 120722 - protein, 7 aa, synthetic construct
GRPQSMH

SEQ ID NO: 120723 - protein, 7 aa, synthetic construct
GRPSDMK

SEQ ID NO: 120724 - protein, 7 aa, synthetic construct
GRPTANM

SEQ ID NO: 120725 - protein, 7 aa, synthetic construct
GRPTHVN

SEQ ID NO: 120726 - protein, 7 aa, synthetic construct
GRPTVLV

SEQ ID NO: 120727 - protein, 7 aa, synthetic construct
GRPVANT

SEQ ID NO: 120728 - protein, 7 aa, synthetic construct
GRPVHQA

SEQ ID NO: 120729 - protein, 7 aa, synthetic construct
GRPVNII

SEQ ID NO: 120730 - protein, 7 aa, synthetic construct
GRQAIAV

SEQ ID NO: 120731 - protein, 7 aa, synthetic construct
GRQAMTM

SEQ ID NO: 120732 - protein, 7 aa, synthetic construct
GRQAQQM

SEQ ID NO: 120733 - protein, 7 aa, synthetic construct
GRQAVQI

SEQ ID NO: 120734 - protein, 7 aa, synthetic construct
GRQAVSQ

SEQ ID NO: 120735 - protein, 7 aa, synthetic construct
GRQDIKF

SEQ ID NO: 120736 - protein, 7 aa, synthetic construct
GRQDIMK

SEQ ID NO: 120737 - protein, 7 aa, synthetic construct
GRQDKIL

SEQ ID NO: 120738 - protein, 7 aa, synthetic construct
GRQEFTK

SEQ ID NO: 120739 - protein, 7 aa, synthetic construct
GRQGATL

SEQ ID NO: 120740 - protein, 7 aa, synthetic construct
GRQGDKM

SEQ ID NO: 120741 - protein, 7 aa, synthetic construct
GRQGEFK

SEQ ID NO: 120742 - protein, 7 aa, synthetic construct
GRQGKDI

SEQ ID NO: 120743 - protein, 7 aa, synthetic construct
GRQGNST

SEQ ID NO: 120744 - protein, 7 aa, synthetic construct
GRQGQPY

SEQ ID NO: 120745 - protein, 7 aa, synthetic construct
GRQIVEK

SEQ ID NO: 120746 - protein, 7 aa, synthetic construct
GRQKQDV

SEQ ID NO: 120747 - protein, 7 aa, synthetic construct
GRQLKPD

SEQ ID NO: 120748 - protein, 7 aa, synthetic construct
GRQLSAQ

SEQ ID NO: 120749 - protein, 7 aa, synthetic construct
GRQMIDK

SEQ ID NO: 120750 - protein, 7 aa, synthetic construct
GRQMMPM

SEQ ID NO: 120751 - protein, 7 aa, synthetic construct
GRQNPHF

SEQ ID NO: 120752 - protein, 7 aa, synthetic construct
GRQNTAT

SEQ ID NO: 120753 - protein, 7 aa, synthetic construct
GRQNTPQ

SEQ ID NO: 120754 - protein, 7 aa, synthetic construct
GRQPAQT

SEQ ID NO: 120755 - protein, 7 aa, synthetic construct
GRQPEKT

SEQ ID NO: 120756 - protein, 7 aa, synthetic construct
GRQPHAI

SEQ ID NO: 120757 - protein, 7 aa, synthetic construct
GRQQAVV

SEQ ID NO: 120758 - protein, 7 aa, synthetic construct
GRQQDIK

SEQ ID NO: 120759 - protein, 7 aa, synthetic construct
GRQQIMQ

SEQ ID NO: 120760 - protein, 7 aa, synthetic construct
GRQQQVA

SEQ ID NO: 120761 - protein, 7 aa, synthetic construct
GRQSTQG

SEQ ID NO: 120762 - protein, 7 aa, synthetic construct
GRQTAIQ

SEQ ID NO: 120763 - protein, 7 aa, synthetic construct
GRQTQLN

SEQ ID NO: 120764 - protein, 7 aa, synthetic construct
GRQTVQM

SEQ ID NO: 120765 - protein, 7 aa, synthetic construct
GRQVHNI

SEQ ID NO: 120766 - protein, 7 aa, synthetic construct
GRQVQML

SEQ ID NO: 120767 - protein, 7 aa, synthetic construct
GRQYQGG

SEQ ID NO: 120768 - protein, 7 aa, synthetic construct
GRRETNP

SEQ ID NO: 120769 - protein, 7 aa, synthetic construct
GRRGDVP

SEQ ID NO: 120770 - protein, 7 aa, synthetic construct
GRSDARM

SEQ ID NO: 120771 - protein, 7 aa, synthetic construct
GRSDVRQ

SEQ ID NO: 120772 - protein, 7 aa, synthetic construct
GRSEFNK

SEQ ID NO: 120773 - protein, 7 aa, synthetic construct
GRSHTYG

SEQ ID NO: 120774 - protein, 7 aa, synthetic construct
GRSKETI

SEQ ID NO: 120775 - protein, 7 aa, synthetic construct
GRSKSEA

SEQ ID NO: 120776 - protein, 7 aa, synthetic construct
GRSLAAM

SEQ ID NO: 120777 - protein, 7 aa, synthetic construct
GRSLAEK

SEQ ID NO: 120778 - protein, 7 aa, synthetic construct
GRSLATH

SEQ ID NO: 120779 - protein, 7 aa, synthetic construct
GRSLATI

SEQ ID NO: 120780 - protein, 7 aa, synthetic construct
GRSMHNA

SEQ ID NO: 120781 - protein, 7 aa, synthetic construct
GRSMIQT

SEQ ID NO: 120782 - protein, 7 aa, synthetic construct
GRSMIST

SEQ ID NO: 120783 - protein, 7 aa, synthetic construct
GRSMPGL

SEQ ID NO: 120784 - protein, 7 aa, synthetic construct
GRSMTMT

SEQ ID NO: 120785 - protein, 7 aa, synthetic construct
GRSPIMN

SEQ ID NO: 120786 - protein, 7 aa, synthetic construct
GRSQESK

SEQ ID NO: 120787 - protein, 7 aa, synthetic construct
GRSQHGF

SEQ ID NO: 120788 - protein, 7 aa, synthetic construct
GRSQIMM

SEQ ID NO: 120789 - protein, 7 aa, synthetic construct
GRSQKEV

SEQ ID NO: 120790 - protein, 7 aa, synthetic construct
GRSQNEK

SEQ ID NO: 120791 - protein, 7 aa, synthetic construct
GRSQNSY

SEQ ID NO: 120792 - protein, 7 aa, synthetic construct
GRSQRDP

SEQ ID NO: 120793 - protein, 7 aa, synthetic construct
GRSRDEY

SEQ ID NO: 120794 - protein, 7 aa, synthetic construct
GRSSTLM

SEQ ID NO: 120795 - protein, 7 aa, synthetic construct
GRSTPPL

SEQ ID NO: 120796 - protein, 7 aa, synthetic construct
GRSTQQN

SEQ ID NO: 120797 - protein, 7 aa, synthetic construct
GRSVQDK

SEQ ID NO: 120798 - protein, 7 aa, synthetic construct
GRSVTHI

SEQ ID NO: 120799 - protein, 7 aa, synthetic construct
GRTAFQP

SEQ ID NO: 120800 - protein, 7 aa, synthetic construct
GRTAHTL

SEQ ID NO: 120801 - protein, 7 aa, synthetic construct
GRTAQNH

SEQ ID NO: 120802 - protein, 7 aa, synthetic construct
GRTAVMH

SEQ ID NO: 120803 - protein, 7 aa, synthetic construct
GRTDKHV

SEQ ID NO: 120804 - protein, 7 aa, synthetic construct
GRTDKMT

SEQ ID NO: 120805 - protein, 7 aa, synthetic construct
GRTIRTE

SEQ ID NO: 120806 - protein, 7 aa, synthetic construct
GRTKDLA

SEQ ID NO: 120807 - protein, 7 aa, synthetic construct
GRTLENK

SEQ ID NO: 120808 - protein, 7 aa, synthetic construct
GRTLTER

SEQ ID NO: 120809 - protein, 7 aa, synthetic construct
GRTMDNK

SEQ ID NO: 120810 - protein, 7 aa, synthetic construct
GRTMENR

SEQ ID NO: 120811 - protein, 7 aa, synthetic construct
GRTMESK

SEQ ID NO: 120812 - protein, 7 aa, synthetic construct
GRTMTMM

SEQ ID NO: 120813 - protein, 7 aa, synthetic construct
GRTMVEK

SEQ ID NO: 120814 - protein, 7 aa, synthetic construct
GRTNSSL

SEQ ID NO: 120815 - protein, 7 aa, synthetic construct
GRTPQQH

SEQ ID NO: 120816 - protein, 7 aa, synthetic construct
GRTQHVI

SEQ ID NO: 120817 - protein, 7 aa, synthetic construct
GRTREIV

SEQ ID NO: 120818 - protein, 7 aa, synthetic construct
GRTTGSW

SEQ ID NO: 120819 - protein, 7 aa, synthetic construct
GRTTNPV

SEQ ID NO: 120820 - protein, 7 aa, synthetic construct
GRTTNSH

SEQ ID NO: 120821 - protein, 7 aa, synthetic construct
GRTTSQQ

SEQ ID NO: 120822 - protein, 7 aa, synthetic construct
GRTVELK

SEQ ID NO: 120823 - protein, 7 aa, synthetic construct
GRTVHGV

SEQ ID NO: 120824 - protein, 7 aa, synthetic construct
GRTVKGE

SEQ ID NO: 120825 - protein, 7 aa, synthetic construct
GRTVPMM

SEQ ID NO: 120826 - protein, 7 aa, synthetic construct
GRVAHIA

SEQ ID NO: 120827 - protein, 7 aa, synthetic construct
GRVALSH

SEQ ID NO: 120828 - protein, 7 aa, synthetic construct
GRVDAAR

SEQ ID NO: 120829 - protein, 7 aa, synthetic construct
GRVGPQI

SEQ ID NO: 120830 - protein, 7 aa, synthetic construct
GRVHFKE

SEQ ID NO: 120831 - protein, 7 aa, synthetic construct
GRVKGDS

SEQ ID NO: 120832 - protein, 7 aa, synthetic construct
GRVKIIE

SEQ ID NO: 120833 - protein, 7 aa, synthetic construct
GRVLASH

SEQ ID NO: 120834 - protein, 7 aa, synthetic construct
GRVLNDK

SEQ ID NO: 120835 - protein, 7 aa, synthetic construct
GRVMEMK

SEQ ID NO: 120836 - protein, 7 aa, synthetic construct
GRVMQQS

SEQ ID NO: 120837 - protein, 7 aa, synthetic construct
GRVMSMT

SEQ ID NO: 120838 - protein, 7 aa, synthetic construct
GRVNASQ

SEQ ID NO: 120839 - protein, 7 aa, synthetic construct
GRVPALS

SEQ ID NO: 120840 - protein, 7 aa, synthetic construct
GRVPEMK

SEQ ID NO: 120841 - protein, 7 aa, synthetic construct
GRVQDPR

SEQ ID NO: 120842 - protein, 7 aa, synthetic construct
GRVQQSQ

SEQ ID NO: 120843 - protein, 7 aa, synthetic construct
GRVSFAQ

SEQ ID NO: 120844 - protein, 7 aa, synthetic construct
GRVTHSV

SEQ ID NO: 120845 - protein, 7 aa, synthetic construct
GRVTKLD

SEQ ID NO: 120846 - protein, 7 aa, synthetic construct
GRVTSQF

SEQ ID NO: 120847 - protein, 7 aa, synthetic construct
GRVVKYE

SEQ ID NO: 120848 - protein, 7 aa, synthetic construct
GRYGGQQ

SEQ ID NO: 120849 - protein, 7 aa, synthetic construct
GRYNVGP

SEQ ID NO: 120850 - protein, 7 aa, synthetic construct
GRYVKDP

SEQ ID NO: 120851 - protein, 7 aa, synthetic construct
GSAGVKH

SEQ ID NO: 120852 - protein, 7 aa, synthetic construct
GSAHVGR

SEQ ID NO: 120853 - protein, 7 aa, synthetic construct
GSAMHAK

SEQ ID NO: 120854 - protein, 7 aa, synthetic construct
GSAMRHG

SEQ ID NO: 120855 - protein, 7 aa, synthetic construct
GSAPRVM

SEQ ID NO: 120856 - protein, 7 aa, synthetic construct
GSAQYKF

SEQ ID NO: 120857 - protein, 7 aa, synthetic construct
GSARNSN

SEQ ID NO: 120858 - protein, 7 aa, synthetic construct
GSATHAR

SEQ ID NO: 120859 - protein, 7 aa, synthetic construct
GSATRMY

SEQ ID NO: 120860 - protein, 7 aa, synthetic construct
GSAVRVI

SEQ ID NO: 120861 - protein, 7 aa, synthetic construct
GSDKVRQ

SEQ ID NO: 120862 - protein, 7 aa, synthetic construct
GSDRPKV

SEQ ID NO: 120863 - protein, 7 aa, synthetic construct
GSDYKKM

SEQ ID NO: 120864 - protein, 7 aa, synthetic construct
GSEIKKN

SEQ ID NO: 120865 - protein, 7 aa, synthetic construct
GSERMVK

SEQ ID NO: 120866 - protein, 7 aa, synthetic construct
GSERPKM

SEQ ID NO: 120867 - protein, 7 aa, synthetic construct
GSERTKV

SEQ ID NO: 120868 - protein, 7 aa, synthetic construct
GSFGVKT

SEQ ID NO: 120869 - protein, 7 aa, synthetic construct
GSFQNLK

SEQ ID NO: 120870 - protein, 7 aa, synthetic construct
GSGASVR

SEQ ID NO: 120871 - protein, 7 aa, synthetic construct
GSGHVKM

SEQ ID NO: 120872 - protein, 7 aa, synthetic construct
GSGLRPM

SEQ ID NO: 120873 - protein, 7 aa, synthetic construct
GSGMHKL

SEQ ID NO: 120874 - protein, 7 aa, synthetic construct
GSGNANK

SEQ ID NO: 120875 - protein, 7 aa, synthetic construct
GSGNNGR

SEQ ID NO: 120876 - protein, 7 aa, synthetic construct
GSGNNPR

SEQ ID NO: 120877 - protein, 7 aa, synthetic construct
GSGNTYR

SEQ ID NO: 120878 - protein, 7 aa, synthetic construct
GSGPTSR

SEQ ID NO: 120879 - protein, 7 aa, synthetic construct
GSGPYKS

SEQ ID NO: 120880 - protein, 7 aa, synthetic construct
GSGVHNK

SEQ ID NO: 120881 - protein, 7 aa, synthetic construct
GSGVYGK

SEQ ID NO: 120882 - protein, 7 aa, synthetic construct
GSGYKSA

SEQ ID NO: 120883 - protein, 7 aa, synthetic construct
GSGYPTK

SEQ ID NO: 120884 - protein, 7 aa, synthetic construct
GSHAEGI

SEQ ID NO: 120885 - protein, 7 aa, synthetic construct
GSHAQTR

SEQ ID NO: 120886 - protein, 7 aa, synthetic construct
GSHGRTS

SEQ ID NO: 120887 - protein, 7 aa, synthetic construct
GSHHRHE

SEQ ID NO: 120888 - protein, 7 aa, synthetic construct
GSHIGGK

SEQ ID NO: 120889 - protein, 7 aa, synthetic construct
GSHINTR

SEQ ID NO: 120890 - protein, 7 aa, synthetic construct
GSHMPQR

SEQ ID NO: 120891 - protein, 7 aa, synthetic construct
GSHMQNK

SEQ ID NO: 120892 - protein, 7 aa, synthetic construct
GSHNRAG

SEQ ID NO: 120893 - protein, 7 aa, synthetic construct
GSHNRPV

SEQ ID NO: 120894 - protein, 7 aa, synthetic construct
GSHQGKF

SEQ ID NO: 120895 - protein, 7 aa, synthetic construct
GSHTGRA

SEQ ID NO: 120896 - protein, 7 aa, synthetic construct
GSHYTQN

SEQ ID NO: 120897 - protein, 7 aa, synthetic construct
GSIHLRA

SEQ ID NO: 120898 - protein, 7 aa, synthetic construct
GSIKIAH

SEQ ID NO: 120899 - protein, 7 aa, synthetic construct
GSIKLYA

SEQ ID NO: 120900 - protein, 7 aa, synthetic construct
GSIKRDV

SEQ ID NO: 120901 - protein, 7 aa, synthetic construct
GSINRSM

SEQ ID NO: 120902 - protein, 7 aa, synthetic construct
GSIRAHA

SEQ ID NO: 120903 - protein, 7 aa, synthetic construct
GSIRPTM

SEQ ID NO: 120904 - protein, 7 aa, synthetic construct
GSKAYSI

SEQ ID NO: 120905 - protein, 7 aa, synthetic construct
GSKDQIR

SEQ ID NO: 120906 - protein, 7 aa, synthetic construct
GSKFRDV

SEQ ID NO: 120907 - protein, 7 aa, synthetic construct
GSKHQLT

SEQ ID NO: 120908 - protein, 7 aa, synthetic construct
GSKHQMM

SEQ ID NO: 120909 - protein, 7 aa, synthetic construct
GSKKGDF

SEQ ID NO: 120910 - protein, 7 aa, synthetic construct
GSKLETR

SEQ ID NO: 120911 - protein, 7 aa, synthetic construct
GSKLIVT

SEQ ID NO: 120912 - protein, 7 aa, synthetic construct
GSKLRDF

SEQ ID NO: 120913 - protein, 7 aa, synthetic construct
GSKPHLI

SEQ ID NO: 120914 - protein, 7 aa, synthetic construct
GSKPYNL

SEQ ID NO: 120915 - protein, 7 aa, synthetic construct
GSKQIHH

SEQ ID NO: 120916 - protein, 7 aa, synthetic construct
GSKQYMV

SEQ ID NO: 120917 - protein, 7 aa, synthetic construct
GSKRMLE

SEQ ID NO: 120918 - protein, 7 aa, synthetic construct
GSKTAEK

SEQ ID NO: 120919 - protein, 7 aa, synthetic construct
GSKTPHW

SEQ ID NO: 120920 - protein, 7 aa, synthetic construct
GSKVPPF

SEQ ID NO: 120921 - protein, 7 aa, synthetic construct
GSKYKEI

SEQ ID NO: 120922 - protein, 7 aa, synthetic construct
GSKYTRE

SEQ ID NO: 120923 - protein, 7 aa, synthetic construct
GSLKHMM

SEQ ID NO: 120924 - protein, 7 aa, synthetic construct
GSLKHSL

SEQ ID NO: 120925 - protein, 7 aa, synthetic construct
GSLKREI

SEQ ID NO: 120926 - protein, 7 aa, synthetic construct
GSLKTSF

SEQ ID NO: 120927 - protein, 7 aa, synthetic construct
GSMDGKK

SEQ ID NO: 120928 - protein, 7 aa, synthetic construct
GSMKLAI

SEQ ID NO: 120929 - protein, 7 aa, synthetic construct
GSMMAGK

SEQ ID NO: 120930 - protein, 7 aa, synthetic construct
GSMQQRL

SEQ ID NO: 120931 - protein, 7 aa, synthetic construct
GSNHGKL

SEQ ID NO: 120932 - protein, 7 aa, synthetic construct
GSNHKVW

SEQ ID NO: 120933 - protein, 7 aa, synthetic construct
GSNMHGK

SEQ ID NO: 120934 - protein, 7 aa, synthetic construct
GSNQSAR

SEQ ID NO: 120935 - protein, 7 aa, synthetic construct
GSNRLSY

SEQ ID NO: 120936 - protein, 7 aa, synthetic construct
GSNSFPR

SEQ ID NO: 120937 - protein, 7 aa, synthetic construct
GSNTYKN

SEQ ID NO: 120938 - protein, 7 aa, synthetic construct
GSNVSQR

SEQ ID NO: 120939 - protein, 7 aa, synthetic construct
GSNVYKA

SEQ ID NO: 120940 - protein, 7 aa, synthetic construct
GSNYAKT

SEQ ID NO: 120941 - protein, 7 aa, synthetic construct
GSPGQGR

SEQ ID NO: 120942 - protein, 7 aa, synthetic construct
GSPHLRQ

SEQ ID NO: 120943 - protein, 7 aa, synthetic construct
GSPHMNK

SEQ ID NO: 120944 - protein, 7 aa, synthetic construct
GSPKYSM

SEQ ID NO: 120945 - protein, 7 aa, synthetic construct
GSPNSSR

SEQ ID NO: 120946 - protein, 7 aa, synthetic construct
GSPRGNY

SEQ ID NO: 120947 - protein, 7 aa, synthetic construct
GSPVKVM

SEQ ID NO: 120948 - protein, 7 aa, synthetic construct
GSPVRVV

SEQ ID NO: 120949 - protein, 7 aa, synthetic construct
GSQARIH

SEQ ID NO: 120950 - protein, 7 aa, synthetic construct
GSQGRGF

SEQ ID NO: 120951 - protein, 7 aa, synthetic construct
GSQHKMI

SEQ ID NO: 120952 - protein, 7 aa, synthetic construct
GSQHLRI

SEQ ID NO: 120953 - protein, 7 aa, synthetic construct
GSQHVKY

SEQ ID NO: 120954 - protein, 7 aa, synthetic construct
GSQKMHT

SEQ ID NO: 120955 - protein, 7 aa, synthetic construct
GSQKVQW

SEQ ID NO: 120956 - protein, 7 aa, synthetic construct
GSQKYSV

SEQ ID NO: 120957 - protein, 7 aa, synthetic construct
GSQLHKQ

SEQ ID NO: 120958 - protein, 7 aa, synthetic construct
GSQMKDR

SEQ ID NO: 120959 - protein, 7 aa, synthetic construct
GSQNTLR

SEQ ID NO: 120960 - protein, 7 aa, synthetic construct
GSQQHRV

SEQ ID NO: 120961 - protein, 7 aa, synthetic construct
GSQQKPW

SEQ ID NO: 120962 - protein, 7 aa, synthetic construct
GSQQRAQ

SEQ ID NO: 120963 - protein, 7 aa, synthetic construct
GSQREAR

SEQ ID NO: 120964 - protein, 7 aa, synthetic construct
GSQRPGL

SEQ ID NO: 120965 - protein, 7 aa, synthetic construct
GSQSPRT

SEQ ID NO: 120966 - protein, 7 aa, synthetic construct
GSQVHGR

SEQ ID NO: 120967 - protein, 7 aa, synthetic construct
GSQVREK

SEQ ID NO: 120968 - protein, 7 aa, synthetic construct
GSQVSMR

SEQ ID NO: 120969 - protein, 7 aa, synthetic construct
GSRAPMH

SEQ ID NO: 120970 - protein, 7 aa, synthetic construct
GSRDIGR

SEQ ID NO: 120971 - protein, 7 aa, synthetic construct
GSREKGH

SEQ ID NO: 120972 - protein, 7 aa, synthetic construct
GSREKQM

SEQ ID NO: 120973 - protein, 7 aa, synthetic construct
GSREMRV

SEQ ID NO: 120974 - protein, 7 aa, synthetic construct
GSREQRM

SEQ ID NO: 120975 - protein, 7 aa, synthetic construct
GSRETSR

SEQ ID NO: 120976 - protein, 7 aa, synthetic construct
GSRGLDR

SEQ ID NO: 120977 - protein, 7 aa, synthetic construct
GSRINPI

SEQ ID NO: 120978 - protein, 7 aa, synthetic construct
GSRLQAM

SEQ ID NO: 120979 - protein, 7 aa, synthetic construct
GSRPTER

SEQ ID NO: 120980 - protein, 7 aa, synthetic construct
GSRQKVE

SEQ ID NO: 120981 - protein, 7 aa, synthetic construct
GSRVTVI

SEQ ID NO: 120982 - protein, 7 aa, synthetic construct
GSRVVER

SEQ ID NO: 120983 - protein, 7 aa, synthetic construct
GSSFNKQ

SEQ ID NO: 120984 - protein, 7 aa, synthetic construct
GSSFWKE

SEQ ID NO: 120985 - protein, 7 aa, synthetic construct
GSSHIMR

SEQ ID NO: 120986 - protein, 7 aa, synthetic construct
GSSLPGR

SEQ ID NO: 120987 - protein, 7 aa, synthetic construct
GSSMTSR

SEQ ID NO: 120988 - protein, 7 aa, synthetic construct
GSSNVHK

SEQ ID NO: 120989 - protein, 7 aa, synthetic construct
GSSSQKY

SEQ ID NO: 120990 - protein, 7 aa, synthetic construct
GSSTLHR

SEQ ID NO: 120991 - protein, 7 aa, synthetic construct
GSSTYAK

SEQ ID NO: 120992 - protein, 7 aa, synthetic construct
GSSVKTL

SEQ ID NO: 120993 - protein, 7 aa, synthetic construct
GSSVMRG

SEQ ID NO: 120994 - protein, 7 aa, synthetic construct
GSTARHA

SEQ ID NO: 120995 - protein, 7 aa, synthetic construct
GSTIHRA

SEQ ID NO: 120996 - protein, 7 aa, synthetic construct
GSTKLHY

SEQ ID NO: 120997 - protein, 7 aa, synthetic construct
GSTKTAW

SEQ ID NO: 120998 - protein, 7 aa, synthetic construct
GSTNNIR

SEQ ID NO: 120999 - protein, 7 aa, synthetic construct
GSTPRYV

SEQ ID NO: 121000 - protein, 7 aa, synthetic construct
GSTQNGR

SEQ ID NO: 121001 - protein, 7 aa, synthetic construct
GSTSYKQ

SEQ ID NO: 121002 - protein, 7 aa, synthetic construct
GSTTYKS

SEQ ID NO: 121003 - protein, 7 aa, synthetic construct
GSTYHKP

SEQ ID NO: 121004 - protein, 7 aa, synthetic construct
GSVGYPR

SEQ ID NO: 121005 - protein, 7 aa, synthetic construct
GSVKAYI

SEQ ID NO: 121006 - protein, 7 aa, synthetic construct
GSVKIYA

SEQ ID NO: 121007 - protein, 7 aa, synthetic construct
GSVNEKR

SEQ ID NO: 121008 - protein, 7 aa, synthetic construct
GSVNRDK

SEQ ID NO: 121009 - protein, 7 aa, synthetic construct
GSVRGPI

SEQ ID NO: 121010 - protein, 7 aa, synthetic construct
GSYAKVM

SEQ ID NO: 121011 - protein, 7 aa, synthetic construct
GSYAPKN

SEQ ID NO: 121012 - protein, 7 aa, synthetic construct
GSYGMKV

SEQ ID NO: 121013 - protein, 7 aa, synthetic construct
GSYKMKD

SEQ ID NO: 121014 - protein, 7 aa, synthetic construct
GSYKTSI

SEQ ID NO: 121015 - protein, 7 aa, synthetic construct
GSYPAPK

SEQ ID NO: 121016 - protein, 7 aa, synthetic construct
GSYPGGK

SEQ ID NO: 121017 - protein, 7 aa, synthetic construct
GSYPTKG

SEQ ID NO: 121018 - protein, 7 aa, synthetic construct
GSYQKVG

SEQ ID NO: 121019 - protein, 7 aa, synthetic construct
GSYSIKQ

SEQ ID NO: 121020 - protein, 7 aa, synthetic construct
GSYSTKG

SEQ ID NO: 121021 - protein, 7 aa, synthetic construct
GTAASRN

SEQ ID NO: 121022 - protein, 7 aa, synthetic construct
GTAFQKN

SEQ ID NO: 121023 - protein, 7 aa, synthetic construct
GTAGKIF

SEQ ID NO: 121024 - protein, 7 aa, synthetic construct
GTAHKVT

SEQ ID NO: 121025 - protein, 7 aa, synthetic construct
GTAHMGK

SEQ ID NO: 121026 - protein, 7 aa, synthetic construct
GTAHPVK

SEQ ID NO: 121027 - protein, 7 aa, synthetic construct
GTAHRNA

SEQ ID NO: 121028 - protein, 7 aa, synthetic construct
GTAIKYM

SEQ ID NO: 121029 - protein, 7 aa, synthetic construct
GTANAKW

SEQ ID NO: 121030 - protein, 7 aa, synthetic construct
GTAPKNW

SEQ ID NO: 121031 - protein, 7 aa, synthetic construct
GTAPKYN

SEQ ID NO: 121032 - protein, 7 aa, synthetic construct
GTARPVH

SEQ ID NO: 121033 - protein, 7 aa, synthetic construct
GTAVRAI

SEQ ID NO: 121034 - protein, 7 aa, synthetic construct
GTAYMKA

SEQ ID NO: 121035 - protein, 7 aa, synthetic construct
GTDKWSK

SEQ ID NO: 121036 - protein, 7 aa, synthetic construct
GTEIRGK

SEQ ID NO: 121037 - protein, 7 aa, synthetic construct
GTEIRKY

SEQ ID NO: 121038 - protein, 7 aa, synthetic construct
GTEKFNK

SEQ ID NO: 121039 - protein, 7 aa, synthetic construct
GTEKRFM

SEQ ID NO: 121040 - protein, 7 aa, synthetic construct
GTEKWKA

SEQ ID NO: 121041 - protein, 7 aa, synthetic construct
GTELKRA

SEQ ID NO: 121042 - protein, 7 aa, synthetic construct
GTFGIKQ

SEQ ID NO: 121043 - protein, 7 aa, synthetic construct
GTFHKAP

SEQ ID NO: 121044 - protein, 7 aa, synthetic construct
GTFRNSG

SEQ ID NO: 121045 - protein, 7 aa, synthetic construct
GTGATGR

SEQ ID NO: 121046 - protein, 7 aa, synthetic construct
GTGAYHK

SEQ ID NO: 121047 - protein, 7 aa, synthetic construct
GTGAYQK

SEQ ID NO: 121048 - protein, 7 aa, synthetic construct
GTGFQGK

SEQ ID NO: 121049 - protein, 7 aa, synthetic construct
GTGGLHK

SEQ ID NO: 121050 - protein, 7 aa, synthetic construct
GTGGNTR

SEQ ID NO: 121051 - protein, 7 aa, synthetic construct
GTGGSRV

SEQ ID NO: 121052 - protein, 7 aa, synthetic construct
GTGHFKN

SEQ ID NO: 121053 - protein, 7 aa, synthetic construct
GTGHKTM

SEQ ID NO: 121054 - protein, 7 aa, synthetic construct
GTGHMVR

SEQ ID NO: 121055 - protein, 7 aa, synthetic construct
GTGIKMH

SEQ ID NO: 121056 - protein, 7 aa, synthetic construct
GTGISGR

SEQ ID NO: 121057 - protein, 7 aa, synthetic construct
GTGKAYS

SEQ ID NO: 121058 - protein, 7 aa, synthetic construct
GTGKAYV

SEQ ID NO: 121059 - protein, 7 aa, synthetic construct
GTGKYGS

SEQ ID NO: 121060 - protein, 7 aa, synthetic construct
GTGKYRE

SEQ ID NO: 121061 - protein, 7 aa, synthetic construct
GTGNPGK

SEQ ID NO: 121062 - protein, 7 aa, synthetic construct
GTGPNQR

SEQ ID NO: 121063 - protein, 7 aa, synthetic construct
GTGQQQR

SEQ ID NO: 121064 - protein, 7 aa, synthetic construct
GTGSLGR

SEQ ID NO: 121065 - protein, 7 aa, synthetic construct
GTGSMNR

SEQ ID NO: 121066 - protein, 7 aa, synthetic construct
GTGVRTY

SEQ ID NO: 121067 - protein, 7 aa, synthetic construct
GTGYMKV

SEQ ID NO: 121068 - protein, 7 aa, synthetic construct
GTGYPTR

SEQ ID NO: 121069 - protein, 7 aa, synthetic construct
GTHALPR

SEQ ID NO: 121070 - protein, 7 aa, synthetic construct
GTHAQRM

SEQ ID NO: 121071 - protein, 7 aa, synthetic construct
GTHAVRI

SEQ ID NO: 121072 - protein, 7 aa, synthetic construct
GTHGNKM

SEQ ID NO: 121073 - protein, 7 aa, synthetic construct
GTHKNMN

SEQ ID NO: 121074 - protein, 7 aa, synthetic construct
GTHMGKF

SEQ ID NO: 121075 - protein, 7 aa, synthetic construct
GTHNIRV

SEQ ID NO: 121076 - protein, 7 aa, synthetic construct
GTHNVTK

SEQ ID NO: 121077 - protein, 7 aa, synthetic construct
GTHPMRN

SEQ ID NO: 121078 - protein, 7 aa, synthetic construct
GTHPQRM

SEQ ID NO: 121079 - protein, 7 aa, synthetic construct
GTHRGSG

SEQ ID NO: 121080 - protein, 7 aa, synthetic construct
GTHSSTK

SEQ ID NO: 121081 - protein, 7 aa, synthetic construct
GTHTAIR

SEQ ID NO: 121082 - protein, 7 aa, synthetic construct
GTHTRGN

SEQ ID NO: 121083 - protein, 7 aa, synthetic construct
GTHVAAR

SEQ ID NO: 121084 - protein, 7 aa, synthetic construct
GTHVARQ

SEQ ID NO: 121085 - protein, 7 aa, synthetic construct
GTHYNST

SEQ ID NO: 121086 - protein, 7 aa, synthetic construct
GTHYQSM

SEQ ID NO: 121087 - protein, 7 aa, synthetic construct
GTIAKMN

SEQ ID NO: 121088 - protein, 7 aa, synthetic construct
GTIGRHA

SEQ ID NO: 121089 - protein, 7 aa, synthetic construct
GTIHATR

SEQ ID NO: 121090 - protein, 7 aa, synthetic construct
GTIHKDK

SEQ ID NO: 121091 - protein, 7 aa, synthetic construct
GTIHVNR

SEQ ID NO: 121092 - protein, 7 aa, synthetic construct
GTIKREV

SEQ ID NO: 121093 - protein, 7 aa, synthetic construct
GTIPKYG

SEQ ID NO: 121094 - protein, 7 aa, synthetic construct
GTIREIR

SEQ ID NO: 121095 - protein, 7 aa, synthetic construct
GTIRNER

SEQ ID NO: 121096 - protein, 7 aa, synthetic construct
GTKDMWK

SEQ ID NO: 121097 - protein, 7 aa, synthetic construct
GTKERSH

SEQ ID NO: 121098 - protein, 7 aa, synthetic construct
GTKEYRQ

SEQ ID NO: 121099 - protein, 7 aa, synthetic construct
GTKGHAY

SEQ ID NO: 121100 - protein, 7 aa, synthetic construct
GTKHFGG

SEQ ID NO: 121101 - protein, 7 aa, synthetic construct
GTKHMMT

SEQ ID NO: 121102 - protein, 7 aa, synthetic construct
GTKISHI

SEQ ID NO: 121103 - protein, 7 aa, synthetic construct
GTKMPMH

SEQ ID NO: 121104 - protein, 7 aa, synthetic construct
GTKPFRD

SEQ ID NO: 121105 - protein, 7 aa, synthetic construct
GTKPRNE

SEQ ID NO: 121106 - protein, 7 aa, synthetic construct
GTKPYNV

SEQ ID NO: 121107 - protein, 7 aa, synthetic construct
GTKSDSR

SEQ ID NO: 121108 - protein, 7 aa, synthetic construct
GTKVQMY

SEQ ID NO: 121109 - protein, 7 aa, synthetic construct
GTKVSEW

SEQ ID NO: 121110 - protein, 7 aa, synthetic construct
GTKWNAA

SEQ ID NO: 121111 - protein, 7 aa, synthetic construct
GTKYAMG

SEQ ID NO: 121112 - protein, 7 aa, synthetic construct
GTKYPDK

SEQ ID NO: 121113 - protein, 7 aa, synthetic construct
GTKYQIQ

SEQ ID NO: 121114 - protein, 7 aa, synthetic construct
GTLATRH

SEQ ID NO: 121115 - protein, 7 aa, synthetic construct
GTLRTDK

SEQ ID NO: 121116 - protein, 7 aa, synthetic construct
GTLTNRD

SEQ ID NO: 121117 - protein, 7 aa, synthetic construct
GTLTSRA

SEQ ID NO: 121118 - protein, 7 aa, synthetic construct
GTMGHMK

SEQ ID NO: 121119 - protein, 7 aa, synthetic construct
GTMGQRG

SEQ ID NO: 121120 - protein, 7 aa, synthetic construct
GTMHGGK

SEQ ID NO: 121121 - protein, 7 aa, synthetic construct
GTMHGKL

SEQ ID NO: 121122 - protein, 7 aa, synthetic construct
GTMHGMK

SEQ ID NO: 121123 - protein, 7 aa, synthetic construct
GTMHIKY

SEQ ID NO: 121124 - protein, 7 aa, synthetic construct
GTMHSRG

SEQ ID NO: 121125 - protein, 7 aa, synthetic construct
GTMHTRM

SEQ ID NO: 121126 - protein, 7 aa, synthetic construct
GTNAQRW

SEQ ID NO: 121127 - protein, 7 aa, synthetic construct
GTNHAKM

SEQ ID NO: 121128 - protein, 7 aa, synthetic construct
GTNNANR

SEQ ID NO: 121129 - protein, 7 aa, synthetic construct
GTNRDLR

SEQ ID NO: 121130 - protein, 7 aa, synthetic construct
GTNREKL

SEQ ID NO: 121131 - protein, 7 aa, synthetic construct
GTNRHVI

SEQ ID NO: 121132 - protein, 7 aa, synthetic construct
GTNTAHK

SEQ ID NO: 121133 - protein, 7 aa, synthetic construct
GTNVHIK

SEQ ID NO: 121134 - protein, 7 aa, synthetic construct
GTNVSHK

SEQ ID NO: 121135 - protein, 7 aa, synthetic construct
GTPAHKY

SEQ ID NO: 121136 - protein, 7 aa, synthetic construct
GTPHKNM

SEQ ID NO: 121137 - protein, 7 aa, synthetic construct
GTPIQGR

SEQ ID NO: 121138 - protein, 7 aa, synthetic construct
GTPRQER

SEQ ID NO: 121139 - protein, 7 aa, synthetic construct
GTPYHKP

SEQ ID NO: 121140 - protein, 7 aa, synthetic construct
GTQFHAK

SEQ ID NO: 121141 - protein, 7 aa, synthetic construct
GTQGIKW

SEQ ID NO: 121142 - protein, 7 aa, synthetic construct
GTQHLGR

SEQ ID NO: 121143 - protein, 7 aa, synthetic construct
GTQHVNK

SEQ ID NO: 121144 - protein, 7 aa, synthetic construct
GTQIKYI

SEQ ID NO: 121145 - protein, 7 aa, synthetic construct
GTQKNSW

SEQ ID NO: 121146 - protein, 7 aa, synthetic construct
GTQMAPR

SEQ ID NO: 121147 - protein, 7 aa, synthetic construct
GTQMVKW

SEQ ID NO: 121148 - protein, 7 aa, synthetic construct
GTQQYMK

SEQ ID NO: 121149 - protein, 7 aa, synthetic construct
GTQRMNF

SEQ ID NO: 121150 - protein, 7 aa, synthetic construct
GTQSYPR

SEQ ID NO: 121151 - protein, 7 aa, synthetic construct
GTQYKTQ

SEQ ID NO: 121152 - protein, 7 aa, synthetic construct
GTRAMDR

SEQ ID NO: 121153 - protein, 7 aa, synthetic construct
GTRDQKY

SEQ ID NO: 121154 - protein, 7 aa, synthetic construct
GTRDTTR

SEQ ID NO: 121155 - protein, 7 aa, synthetic construct
GTRENYK

SEQ ID NO: 121156 - protein, 7 aa, synthetic construct
GTRESRN

SEQ ID NO: 121157 - protein, 7 aa, synthetic construct
GTRHSTG

SEQ ID NO: 121158 - protein, 7 aa, synthetic construct
GTRIGPV

SEQ ID NO: 121159 - protein, 7 aa, synthetic construct
GTRIHLQ

SEQ ID NO: 121160 - protein, 7 aa, synthetic construct
GTRISSI

SEQ ID NO: 121161 - protein, 7 aa, synthetic construct
GTRKGET

SEQ ID NO: 121162 - protein, 7 aa, synthetic construct
GTRPHAM

SEQ ID NO: 121163 - protein, 7 aa, synthetic construct
GTRPLKD

SEQ ID NO: 121164 - protein, 7 aa, synthetic construct
GTRPNPF

SEQ ID NO: 121165 - protein, 7 aa, synthetic construct
GTRQPDR

SEQ ID NO: 121166 - protein, 7 aa, synthetic construct
GTRSKSE

SEQ ID NO: 121167 - protein, 7 aa, synthetic construct
GTRVQEK

SEQ ID NO: 121168 - protein, 7 aa, synthetic construct
GTRYEKV

SEQ ID NO: 121169 - protein, 7 aa, synthetic construct
GTSFKST

SEQ ID NO: 121170 - protein, 7 aa, synthetic construct
GTSFQGK

SEQ ID NO: 121171 - protein, 7 aa, synthetic construct
GTSIRPT

SEQ ID NO: 121172 - protein, 7 aa, synthetic construct
GTSKERY

SEQ ID NO: 121173 - protein, 7 aa, synthetic construct
GTSKTYM

SEQ ID NO: 121174 - protein, 7 aa, synthetic construct
GTSNKYS

SEQ ID NO: 121175 - protein, 7 aa, synthetic construct
GTSNNSR

SEQ ID NO: 121176 - protein, 7 aa, synthetic construct
GTSNTKW

SEQ ID NO: 121177 - protein, 7 aa, synthetic construct
GTSYIKP

SEQ ID NO: 121178 - protein, 7 aa, synthetic construct
GTSYKNL

SEQ ID NO: 121179 - protein, 7 aa, synthetic construct
GTTAHYK

SEQ ID NO: 121180 - protein, 7 aa, synthetic construct
GTTENKR

SEQ ID NO: 121181 - protein, 7 aa, synthetic construct
GTTNVRY

SEQ ID NO: 121182 - protein, 7 aa, synthetic construct
GTTTNRY

SEQ ID NO: 121183 - protein, 7 aa, synthetic construct
GTTVPKM

SEQ ID NO: 121184 - protein, 7 aa, synthetic construct
GTVDRAR

SEQ ID NO: 121185 - protein, 7 aa, synthetic construct
GTVHPTK

SEQ ID NO: 121186 - protein, 7 aa, synthetic construct
GTVQAHK

SEQ ID NO: 121187 - protein, 7 aa, synthetic construct
GTWRHTE

SEQ ID NO: 121188 - protein, 7 aa, synthetic construct
GTYGRQL

SEQ ID NO: 121189 - protein, 7 aa, synthetic construct
GTYGSMM

SEQ ID NO: 121190 - protein, 7 aa, synthetic construct
GTYHGVL

SEQ ID NO: 121191 - protein, 7 aa, synthetic construct
GTYHTMS

SEQ ID NO: 121192 - protein, 7 aa, synthetic construct
GTYKHGG

SEQ ID NO: 121193 - protein, 7 aa, synthetic construct
GTYKSSS

SEQ ID NO: 121194 - protein, 7 aa, synthetic construct
GTYMIKA

SEQ ID NO: 121195 - protein, 7 aa, synthetic construct
GTYNAMN

SEQ ID NO: 121196 - protein, 7 aa, synthetic construct
GTYNMKN

SEQ ID NO: 121197 - protein, 7 aa, synthetic construct
GTYNNNK

SEQ ID NO: 121198 - protein, 7 aa, synthetic construct
GTYPKNV

SEQ ID NO: 121199 - protein, 7 aa, synthetic construct
GTYPTRT

SEQ ID NO: 121200 - protein, 7 aa, synthetic construct
GTYQTKS

SEQ ID NO: 121201 - protein, 7 aa, synthetic construct
GTYSPME

SEQ ID NO: 121202 - protein, 7 aa, synthetic construct
GVAGMAR

SEQ ID NO: 121203 - protein, 7 aa, synthetic construct
GVAGQFK

SEQ ID NO: 121204 - protein, 7 aa, synthetic construct
GVAHAFK

SEQ ID NO: 121205 - protein, 7 aa, synthetic construct
GVAHFKN

SEQ ID NO: 121206 - protein, 7 aa, synthetic construct
GVAHRTV

SEQ ID NO: 121207 - protein, 7 aa, synthetic construct
GVAMKMV

SEQ ID NO: 121208 - protein, 7 aa, synthetic construct
GVAMSQR

SEQ ID NO: 121209 - protein, 7 aa, synthetic construct
GVANAAR

SEQ ID NO: 121210 - protein, 7 aa, synthetic construct
GVANARY

SEQ ID NO: 121211 - protein, 7 aa, synthetic construct
GVANHRG

SEQ ID NO: 121212 - protein, 7 aa, synthetic construct
GVANKFL

SEQ ID NO: 121213 - protein, 7 aa, synthetic construct
GVARDMR

SEQ ID NO: 121214 - protein, 7 aa, synthetic construct
GVARVHS

SEQ ID NO: 121215 - protein, 7 aa, synthetic construct
GVDAKGR

SEQ ID NO: 121216 - protein, 7 aa, synthetic construct
GVDGKRN

SEQ ID NO: 121217 - protein, 7 aa, synthetic construct
GVDKNMM

SEQ ID NO: 121218 - protein, 7 aa, synthetic construct
GVDPTKR

SEQ ID NO: 121219 - protein, 7 aa, synthetic construct
GVDRFGK

SEQ ID NO: 121220 - protein, 7 aa, synthetic construct
GVDRIKQ

SEQ ID NO: 121221 - protein, 7 aa, synthetic construct
GVDRLTR

SEQ ID NO: 121222 - protein, 7 aa, synthetic construct
GVDRPKM

SEQ ID NO: 121223 - protein, 7 aa, synthetic construct
GVEKNRM

SEQ ID NO: 121224 - protein, 7 aa, synthetic construct
GVEQLKR

SEQ ID NO: 121225 - protein, 7 aa, synthetic construct
GVERLKM

SEQ ID NO: 121226 - protein, 7 aa, synthetic construct
GVERMGK

SEQ ID NO: 121227 - protein, 7 aa, synthetic construct
GVESYRS

SEQ ID NO: 121228 - protein, 7 aa, synthetic construct
GVFKQSH

SEQ ID NO: 121229 - protein, 7 aa, synthetic construct
GVFNARG

SEQ ID NO: 121230 - protein, 7 aa, synthetic construct
GVFNNRA

SEQ ID NO: 121231 - protein, 7 aa, synthetic construct
GVFPHSK

SEQ ID NO: 121232 - protein, 7 aa, synthetic construct
GVFREMK

SEQ ID NO: 121233 - protein, 7 aa, synthetic construct
GVFRMKE

SEQ ID NO: 121234 - protein, 7 aa, synthetic construct
GVGAYKL

SEQ ID NO: 121235 - protein, 7 aa, synthetic construct
GVGGSRA

SEQ ID NO: 121236 - protein, 7 aa, synthetic construct
GVGHKQL

SEQ ID NO: 121237 - protein, 7 aa, synthetic construct
GVGHMSK

SEQ ID NO: 121238 - protein, 7 aa, synthetic construct
GVGILRN

SEQ ID NO: 121239 - protein, 7 aa, synthetic construct
GVGKEYK

SEQ ID NO: 121240 - protein, 7 aa, synthetic construct
GVGKMHM

SEQ ID NO: 121241 - protein, 7 aa, synthetic construct
GVGMHRP

SEQ ID NO: 121242 - protein, 7 aa, synthetic construct
GVGMNAR

SEQ ID NO: 121243 - protein, 7 aa, synthetic construct
GVGNFKM

SEQ ID NO: 121244 - protein, 7 aa, synthetic construct
GVGQGAR

SEQ ID NO: 121245 - protein, 7 aa, synthetic construct
GVGQQRH

SEQ ID NO: 121246 - protein, 7 aa, synthetic construct
GVGQSNR

SEQ ID NO: 121247 - protein, 7 aa, synthetic construct
GVGQYMK

SEQ ID NO: 121248 - protein, 7 aa, synthetic construct
GVGRHQV

SEQ ID NO: 121249 - protein, 7 aa, synthetic construct
GVGVREK

SEQ ID NO: 121250 - protein, 7 aa, synthetic construct
GVGYAQR

SEQ ID NO: 121251 - protein, 7 aa, synthetic construct
GVHGRTQ

SEQ ID NO: 121252 - protein, 7 aa, synthetic construct
GVHKFTN

SEQ ID NO: 121253 - protein, 7 aa, synthetic construct
GVHKGGF

SEQ ID NO: 121254 - protein, 7 aa, synthetic construct
GVHKLSI

SEQ ID NO: 121255 - protein, 7 aa, synthetic construct
GVHKSQY

SEQ ID NO: 121256 - protein, 7 aa, synthetic construct
GVHNNRL

SEQ ID NO: 121257 - protein, 7 aa, synthetic construct
GVHNVMR

SEQ ID NO: 121258 - protein, 7 aa, synthetic construct
GVHPKIM

SEQ ID NO: 121259 - protein, 7 aa, synthetic construct
GVHPTRQ

SEQ ID NO: 121260 - protein, 7 aa, synthetic construct
GVHRAMA

SEQ ID NO: 121261 - protein, 7 aa, synthetic construct
GVHRAQS

SEQ ID NO: 121262 - protein, 7 aa, synthetic construct
GVHRAQV

SEQ ID NO: 121263 - protein, 7 aa, synthetic construct
GVHRLTA

SEQ ID NO: 121264 - protein, 7 aa, synthetic construct
GVHRVTA

SEQ ID NO: 121265 - protein, 7 aa, synthetic construct
GVHSQKT

SEQ ID NO: 121266 - protein, 7 aa, synthetic construct
GVHSYKV

SEQ ID NO: 121267 - protein, 7 aa, synthetic construct
GVIGHKL

SEQ ID NO: 121268 - protein, 7 aa, synthetic construct
GVIGPGR

SEQ ID NO: 121269 - protein, 7 aa, synthetic construct
GVIHSQK

SEQ ID NO: 121270 - protein, 7 aa, synthetic construct
GVIRSGI

SEQ ID NO: 121271 - protein, 7 aa, synthetic construct
GVKAEHR

SEQ ID NO: 121272 - protein, 7 aa, synthetic construct
GVKAHYM

SEQ ID NO: 121273 - protein, 7 aa, synthetic construct
GVKAIER

SEQ ID NO: 121274 - protein, 7 aa, synthetic construct
GVKDKHY

SEQ ID NO: 121275 - protein, 7 aa, synthetic construct
GVKDWKT

SEQ ID NO: 121276 - protein, 7 aa, synthetic construct
GVKDYKY

SEQ ID NO: 121277 - protein, 7 aa, synthetic construct
GVKEQSR

SEQ ID NO: 121278 - protein, 7 aa, synthetic construct
GVKESGK

SEQ ID NO: 121279 - protein, 7 aa, synthetic construct
GVKGYIV

SEQ ID NO: 121280 - protein, 7 aa, synthetic construct
GVKIAVM

SEQ ID NO: 121281 - protein, 7 aa, synthetic construct
GVKIPYG

SEQ ID NO: 121282 - protein, 7 aa, synthetic construct
GVKKDYL

SEQ ID NO: 121283 - protein, 7 aa, synthetic construct
GVKLHHA

SEQ ID NO: 121284 - protein, 7 aa, synthetic construct
GVKNQYM

SEQ ID NO: 121285 - protein, 7 aa, synthetic construct
GVKPHGY

SEQ ID NO: 121286 - protein, 7 aa, synthetic construct
GVKQAMY

SEQ ID NO: 121287 - protein, 7 aa, synthetic construct
GVKQYSM

SEQ ID NO: 121288 - protein, 7 aa, synthetic construct
GVKREFQ

SEQ ID NO: 121289 - protein, 7 aa, synthetic construct
GVKRVDF

SEQ ID NO: 121290 - protein, 7 aa, synthetic construct
GVLDRGK

SEQ ID NO: 121291 - protein, 7 aa, synthetic construct
GVLGTRS

SEQ ID NO: 121292 - protein, 7 aa, synthetic construct
GVLGVRG

SEQ ID NO: 121293 - protein, 7 aa, synthetic construct
GVLMRSP

SEQ ID NO: 121294 - protein, 7 aa, synthetic construct
GVLRVDK

SEQ ID NO: 121295 - protein, 7 aa, synthetic construct
GVLTGPK

SEQ ID NO: 121296 - protein, 7 aa, synthetic construct
GVMHKQL

SEQ ID NO: 121297 - protein, 7 aa, synthetic construct
GVMITRA

SEQ ID NO: 121298 - protein, 7 aa, synthetic construct
GVMRKQE

SEQ ID NO: 121299 - protein, 7 aa, synthetic construct
GVMRQHV

SEQ ID NO: 121300 - protein, 7 aa, synthetic construct
GVNARVH

SEQ ID NO: 121301 - protein, 7 aa, synthetic construct
GVNEIRR

SEQ ID NO: 121302 - protein, 7 aa, synthetic construct
GVNGIMR

SEQ ID NO: 121303 - protein, 7 aa, synthetic construct
GVNHAGR

SEQ ID NO: 121304 - protein, 7 aa, synthetic construct
GVNMGHK

SEQ ID NO: 121305 - protein, 7 aa, synthetic construct
GVNNANR

SEQ ID NO: 121306 - protein, 7 aa, synthetic construct
GVNNHTR

SEQ ID NO: 121307 - protein, 7 aa, synthetic construct
GVNNLSR

SEQ ID NO: 121308 - protein, 7 aa, synthetic construct
GVNQGGR

SEQ ID NO: 121309 - protein, 7 aa, synthetic construct
GVNRQKD

SEQ ID NO: 121310 - protein, 7 aa, synthetic construct
GVNSPSR

SEQ ID NO: 121311 - protein, 7 aa, synthetic construct
GVNYHKA

SEQ ID NO: 121312 - protein, 7 aa, synthetic construct
GVNYTHT

SEQ ID NO: 121313 - protein, 7 aa, synthetic construct
GVPAMSR

SEQ ID NO: 121314 - protein, 7 aa, synthetic construct
GVPERMR

SEQ ID NO: 121315 - protein, 7 aa, synthetic construct
GVPGRFQ

SEQ ID NO: 121316 - protein, 7 aa, synthetic construct
GVPHRNV

SEQ ID NO: 121317 - protein, 7 aa, synthetic construct
GVPHRST

SEQ ID NO: 121318 - protein, 7 aa, synthetic construct
GVPHVKI

SEQ ID NO: 121319 - protein, 7 aa, synthetic construct
GVPKHER

SEQ ID NO: 121320 - protein, 7 aa, synthetic construct
GVPKMGY

SEQ ID NO: 121321 - protein, 7 aa, synthetic construct
GVPKTER

SEQ ID NO: 121322 - protein, 7 aa, synthetic construct
GVPKVAF

SEQ ID NO: 121323 - protein, 7 aa, synthetic construct
GVPMTRV

SEQ ID NO: 121324 - protein, 7 aa, synthetic construct
GVPMVQR

SEQ ID NO: 121325 - protein, 7 aa, synthetic construct
GVPNSFR

SEQ ID NO: 121326 - protein, 7 aa, synthetic construct
GVPNVKW

SEQ ID NO: 121327 - protein, 7 aa, synthetic construct
GVPRERV

SEQ ID NO: 121328 - protein, 7 aa, synthetic construct
GVPRQNL

SEQ ID NO: 121329 - protein, 7 aa, synthetic construct
GVPRSDK

SEQ ID NO: 121330 - protein, 7 aa, synthetic construct
GVPRYKE

SEQ ID NO: 121331 - protein, 7 aa, synthetic construct
GVPVTHR

SEQ ID NO: 121332 - protein, 7 aa, synthetic construct
GVPYNQK

SEQ ID NO: 121333 - protein, 7 aa, synthetic construct
GVQHQFK

SEQ ID NO: 121334 - protein, 7 aa, synthetic construct
GVQHQKL

SEQ ID NO: 121335 - protein, 7 aa, synthetic construct
GVQHRVI

SEQ ID NO: 121336 - protein, 7 aa, synthetic construct
GVQMNKH

SEQ ID NO: 121337 - protein, 7 aa, synthetic construct
GVQMQTR

SEQ ID NO: 121338 - protein, 7 aa, synthetic construct
GVQMRMP

SEQ ID NO: 121339 - protein, 7 aa, synthetic construct
GVQNKKD

SEQ ID NO: 121340 - protein, 7 aa, synthetic construct
GVQNYKG

SEQ ID NO: 121341 - protein, 7 aa, synthetic construct
GVQQERK

SEQ ID NO: 121342 - protein, 7 aa, synthetic construct
GVQQKNW

SEQ ID NO: 121343 - protein, 7 aa, synthetic construct
GVQRMGL

SEQ ID NO: 121344 - protein, 7 aa, synthetic construct
GVQRNHT

SEQ ID NO: 121345 - protein, 7 aa, synthetic construct
GVQSIQR

SEQ ID NO: 121346 - protein, 7 aa, synthetic construct
GVQSIRH

SEQ ID NO: 121347 - protein, 7 aa, synthetic construct
GVQTSRY

SEQ ID NO: 121348 - protein, 7 aa, synthetic construct
GVQTSSR

SEQ ID NO: 121349 - protein, 7 aa, synthetic construct
GVQTVPR

SEQ ID NO: 121350 - protein, 7 aa, synthetic construct
GVQYMTT

SEQ ID NO: 121351 - protein, 7 aa, synthetic construct
GVRAIMP

SEQ ID NO: 121352 - protein, 7 aa, synthetic construct
GVRALHQ

SEQ ID NO: 121353 - protein, 7 aa, synthetic construct
GVRDARA

SEQ ID NO: 121354 - protein, 7 aa, synthetic construct
GVRDRIM

SEQ ID NO: 121355 - protein, 7 aa, synthetic construct
GVRDSGR

SEQ ID NO: 121356 - protein, 7 aa, synthetic construct
GVRELGR

SEQ ID NO: 121357 - protein, 7 aa, synthetic construct
GVRGAGY

SEQ ID NO: 121358 - protein, 7 aa, synthetic construct
GVRNPYQ

SEQ ID NO: 121359 - protein, 7 aa, synthetic construct
GVRPGNF

SEQ ID NO: 121360 - protein, 7 aa, synthetic construct
GVRPHGP

SEQ ID NO: 121361 - protein, 7 aa, synthetic construct
GVRPNHI

SEQ ID NO: 121362 - protein, 7 aa, synthetic construct
GVRQMPT

SEQ ID NO: 121363 - protein, 7 aa, synthetic construct
GVRSADR

SEQ ID NO: 121364 - protein, 7 aa, synthetic construct
GVRSIQF

SEQ ID NO: 121365 - protein, 7 aa, synthetic construct
GVRSSAF

SEQ ID NO: 121366 - protein, 7 aa, synthetic construct
GVRSSER

SEQ ID NO: 121367 - protein, 7 aa, synthetic construct
GVRTIDR

SEQ ID NO: 121368 - protein, 7 aa, synthetic construct
GVRVHPP

SEQ ID NO: 121369 - protein, 7 aa, synthetic construct
GVRYNNA

SEQ ID NO: 121370 - protein, 7 aa, synthetic construct
GVSFQKN

SEQ ID NO: 121371 - protein, 7 aa, synthetic construct
GVSFVKN

SEQ ID NO: 121372 - protein, 7 aa, synthetic construct
GVSHGFK

SEQ ID NO: 121373 - protein, 7 aa, synthetic construct
GVSHIKY

SEQ ID NO: 121374 - protein, 7 aa, synthetic construct
GVSHPAR

SEQ ID NO: 121375 - protein, 7 aa, synthetic construct
GVSLRIG

SEQ ID NO: 121376 - protein, 7 aa, synthetic construct
GVSNAMR

SEQ ID NO: 121377 - protein, 7 aa, synthetic construct
GVSNHTR

SEQ ID NO: 121378 - protein, 7 aa, synthetic construct
GVSNPSR

SEQ ID NO: 121379 - protein, 7 aa, synthetic construct
GVSNSNR

SEQ ID NO: 121380 - protein, 7 aa, synthetic construct
GVSRVGL

SEQ ID NO: 121381 - protein, 7 aa, synthetic construct
GVSYAHT

SEQ ID NO: 121382 - protein, 7 aa, synthetic construct
GVTDRAR

SEQ ID NO: 121383 - protein, 7 aa, synthetic construct
GVTDRKQ

SEQ ID NO: 121384 - protein, 7 aa, synthetic construct
GVTGGAR

SEQ ID NO: 121385 - protein, 7 aa, synthetic construct
GVTGMSR

SEQ ID NO: 121386 - protein, 7 aa, synthetic construct
GVTHASR

SEQ ID NO: 121387 - protein, 7 aa, synthetic construct
GVTHIPR

SEQ ID NO: 121388 - protein, 7 aa, synthetic construct
GVTHSKQ

SEQ ID NO: 121389 - protein, 7 aa, synthetic construct
GVTHTRV

SEQ ID NO: 121390 - protein, 7 aa, synthetic construct
GVTHVRN

SEQ ID NO: 121391 - protein, 7 aa, synthetic construct
GVTIRKD

SEQ ID NO: 121392 - protein, 7 aa, synthetic construct
GVTKDGR

SEQ ID NO: 121393 - protein, 7 aa, synthetic construct
GVTMRRD

SEQ ID NO: 121394 - protein, 7 aa, synthetic construct
GVTNNSR

SEQ ID NO: 121395 - protein, 7 aa, synthetic construct
GVTYGKA

SEQ ID NO: 121396 - protein, 7 aa, synthetic construct
GVTYQKL

SEQ ID NO: 121397 - protein, 7 aa, synthetic construct
GVVHQRM

SEQ ID NO: 121398 - protein, 7 aa, synthetic construct
GVVHTAR

SEQ ID NO: 121399 - protein, 7 aa, synthetic construct
GVVKFKD

SEQ ID NO: 121400 - protein, 7 aa, synthetic construct
GVWVGDD

SEQ ID NO: 121401 - protein, 7 aa, synthetic construct
GVYNLKG

SEQ ID NO: 121402 - protein, 7 aa, synthetic construct
GVYNVQK

SEQ ID NO: 121403 - protein, 7 aa, synthetic construct
GWQQGNK

SEQ ID NO: 121404 - protein, 7 aa, synthetic construct
GYAASKI

SEQ ID NO: 121405 - protein, 7 aa, synthetic construct
GYAGGRS

SEQ ID NO: 121406 - protein, 7 aa, synthetic construct
GYAGQKN

SEQ ID NO: 121407 - protein, 7 aa, synthetic construct
GYAHIKN

SEQ ID NO: 121408 - protein, 7 aa, synthetic construct
GYAIGGK

SEQ ID NO: 121409 - protein, 7 aa, synthetic construct
GYALGKQ

SEQ ID NO: 121410 - protein, 7 aa, synthetic construct
GYAMNKG

SEQ ID NO: 121411 - protein, 7 aa, synthetic construct
GYAMNRP

SEQ ID NO: 121412 - protein, 7 aa, synthetic construct
GYAQFKG

SEQ ID NO: 121413 - protein, 7 aa, synthetic construct
GYASVKQ

SEQ ID NO: 121414 - protein, 7 aa, synthetic construct
GYAVKAM

SEQ ID NO: 121415 - protein, 7 aa, synthetic construct
GYDMPKK

SEQ ID NO: 121416 - protein, 7 aa, synthetic construct
GYDRLMS

SEQ ID NO: 121417 - protein, 7 aa, synthetic construct
GYDRMAK

SEQ ID NO: 121418 - protein, 7 aa, synthetic construct
GYDSRTW

SEQ ID NO: 121419 - protein, 7 aa, synthetic construct
GYEKPRQ

SEQ ID NO: 121420 - protein, 7 aa, synthetic construct
GYGFTQN

SEQ ID NO: 121421 - protein, 7 aa, synthetic construct
GYGGLPK

SEQ ID NO: 121422 - protein, 7 aa, synthetic construct
GYGGMKH

SEQ ID NO: 121423 - protein, 7 aa, synthetic construct
GYGHGHT

SEQ ID NO: 121424 - protein, 7 aa, synthetic construct
GYGHLKV

SEQ ID NO: 121425 - protein, 7 aa, synthetic construct
GYGHTSK

SEQ ID NO: 121426 - protein, 7 aa, synthetic construct
GYGISQK

SEQ ID NO: 121427 - protein, 7 aa, synthetic construct
GYGMASK

SEQ ID NO: 121428 - protein, 7 aa, synthetic construct
GYGMNKQ

SEQ ID NO: 121429 - protein, 7 aa, synthetic construct
GYGNGAR

SEQ ID NO: 121430 - protein, 7 aa, synthetic construct
GYGNGQK

SEQ ID NO: 121431 - protein, 7 aa, synthetic construct
GYGPTIT

SEQ ID NO: 121432 - protein, 7 aa, synthetic construct
GYGQKSG

SEQ ID NO: 121433 - protein, 7 aa, synthetic construct
GYGSARV

SEQ ID NO: 121434 - protein, 7 aa, synthetic construct
GYGSEHR

SEQ ID NO: 121435 - protein, 7 aa, synthetic construct
GYGTTPK

SEQ ID NO: 121436 - protein, 7 aa, synthetic construct
GYHGKPH

SEQ ID NO: 121437 - protein, 7 aa, synthetic construct
GYHIQKS

SEQ ID NO: 121438 - protein, 7 aa, synthetic construct
GYHKALS

SEQ ID NO: 121439 - protein, 7 aa, synthetic construct
GYHTATK

SEQ ID NO: 121440 - protein, 7 aa, synthetic construct
GYHTAVK

SEQ ID NO: 121441 - protein, 7 aa, synthetic construct
GYHVAKA

SEQ ID NO: 121442 - protein, 7 aa, synthetic construct
GYIGHAK

SEQ ID NO: 121443 - protein, 7 aa, synthetic construct
GYITGGK

SEQ ID NO: 121444 - protein, 7 aa, synthetic construct
GYKAEAR

SEQ ID NO: 121445 - protein, 7 aa, synthetic construct
GYKAEKQ

SEQ ID NO: 121446 - protein, 7 aa, synthetic construct
GYKANAN

SEQ ID NO: 121447 - protein, 7 aa, synthetic construct
GYKDLYK

SEQ ID NO: 121448 - protein, 7 aa, synthetic construct
GYKGLLA

SEQ ID NO: 121449 - protein, 7 aa, synthetic construct
GYKHISV

SEQ ID NO: 121450 - protein, 7 aa, synthetic construct
GYKHLPS

SEQ ID NO: 121451 - protein, 7 aa, synthetic construct
GYKHVMG

SEQ ID NO: 121452 - protein, 7 aa, synthetic construct
GYKIRPE

SEQ ID NO: 121453 - protein, 7 aa, synthetic construct
GYKMIPS

SEQ ID NO: 121454 - protein, 7 aa, synthetic construct
GYKRETA

SEQ ID NO: 121455 - protein, 7 aa, synthetic construct
GYKRMDP

SEQ ID NO: 121456 - protein, 7 aa, synthetic construct
GYKVADR

SEQ ID NO: 121457 - protein, 7 aa, synthetic construct
GYKVITA

SEQ ID NO: 121458 - protein, 7 aa, synthetic construct
GYKVKIE

SEQ ID NO: 121459 - protein, 7 aa, synthetic construct
GYKVNWE

SEQ ID NO: 121460 - protein, 7 aa, synthetic construct
GYKVVEK

SEQ ID NO: 121461 - protein, 7 aa, synthetic construct
GYLAHKG

SEQ ID NO: 121462 - protein, 7 aa, synthetic construct
GYLNSQK

SEQ ID NO: 121463 - protein, 7 aa, synthetic construct
GYLTAGK

SEQ ID NO: 121464 - protein, 7 aa, synthetic construct
GYMGLKA

SEQ ID NO: 121465 - protein, 7 aa, synthetic construct
GYMHKGP

SEQ ID NO: 121466 - protein, 7 aa, synthetic construct
GYNATSR

SEQ ID NO: 121467 - protein, 7 aa, synthetic construct
GYNGANR

SEQ ID NO: 121468 - protein, 7 aa, synthetic construct
GYNGFPK

SEQ ID NO: 121469 - protein, 7 aa, synthetic construct
GYNHAKI

SEQ ID NO: 121470 - protein, 7 aa, synthetic construct
GYNLAGK

SEQ ID NO: 121471 - protein, 7 aa, synthetic construct
GYNNSLR

SEQ ID NO: 121472 - protein, 7 aa, synthetic construct
GYNNSVK

SEQ ID NO: 121473 - protein, 7 aa, synthetic construct
GYNPHKG

SEQ ID NO: 121474 - protein, 7 aa, synthetic construct
GYNQNSR

SEQ ID NO: 121475 - protein, 7 aa, synthetic construct
GYNQTTK

SEQ ID NO: 121476 - protein, 7 aa, synthetic construct
GYNRAIP

SEQ ID NO: 121477 - protein, 7 aa, synthetic construct
GYNVGTR

SEQ ID NO: 121478 - protein, 7 aa, synthetic construct
GYNVKVQ

SEQ ID NO: 121479 - protein, 7 aa, synthetic construct
GYPAMAK

SEQ ID NO: 121480 - protein, 7 aa, synthetic construct
GYPAMSK

SEQ ID NO: 121481 - protein, 7 aa, synthetic construct
GYPGAGK

SEQ ID NO: 121482 - protein, 7 aa, synthetic construct
GYPGIKN

SEQ ID NO: 121483 - protein, 7 aa, synthetic construct
GYPIKKD

SEQ ID NO: 121484 - protein, 7 aa, synthetic construct
GYPKREG

SEQ ID NO: 121485 - protein, 7 aa, synthetic construct
GYPKSHG

SEQ ID NO: 121486 - protein, 7 aa, synthetic construct
GYPMKHS

SEQ ID NO: 121487 - protein, 7 aa, synthetic construct
GYQAMKT

SEQ ID NO: 121488 - protein, 7 aa, synthetic construct
GYQGLTK

SEQ ID NO: 121489 - protein, 7 aa, synthetic construct
GYQQHKV

SEQ ID NO: 121490 - protein, 7 aa, synthetic construct
GYQQISK

SEQ ID NO: 121491 - protein, 7 aa, synthetic construct
GYQQSKI

SEQ ID NO: 121492 - protein, 7 aa, synthetic construct
GYQRQAV

SEQ ID NO: 121493 - protein, 7 aa, synthetic construct
GYRQNLG

SEQ ID NO: 121494 - protein, 7 aa, synthetic construct
GYRQPNS

SEQ ID NO: 121495 - protein, 7 aa, synthetic construct
GYSAYKP

SEQ ID NO: 121496 - protein, 7 aa, synthetic construct
GYSGSVR

SEQ ID NO: 121497 - protein, 7 aa, synthetic construct
GYSGVKH

SEQ ID NO: 121498 - protein, 7 aa, synthetic construct
GYSITAK

SEQ ID NO: 121499 - protein, 7 aa, synthetic construct
GYSKFEK

SEQ ID NO: 121500 - protein, 7 aa, synthetic construct
GYSLSAK

SEQ ID NO: 121501 - protein, 7 aa, synthetic construct
GYSQNLK

SEQ ID NO: 121502 - protein, 7 aa, synthetic construct
GYSRGPN

SEQ ID NO: 121503 - protein, 7 aa, synthetic construct
GYSTKLV

SEQ ID NO: 121504 - protein, 7 aa, synthetic construct
GYTARGP

SEQ ID NO: 121505 - protein, 7 aa, synthetic construct
GYTGAMK

SEQ ID NO: 121506 - protein, 7 aa, synthetic construct
GYTGHKV

SEQ ID NO: 121507 - protein, 7 aa, synthetic construct
GYTHKGA

SEQ ID NO: 121508 - protein, 7 aa, synthetic construct
GYTKAER

SEQ ID NO: 121509 - protein, 7 aa, synthetic construct
GYTLKKD

SEQ ID NO: 121510 - protein, 7 aa, synthetic construct
GYTMGAK

SEQ ID NO: 121511 - protein, 7 aa, synthetic construct
GYTMPMK

SEQ ID NO: 121512 - protein, 7 aa, synthetic construct
GYTQMSK

SEQ ID NO: 121513 - protein, 7 aa, synthetic construct
GYVGMKG

SEQ ID NO: 121514 - protein, 7 aa, synthetic construct
GYVHAAK

SEQ ID NO: 121515 - protein, 7 aa, synthetic construct
GYVQMKA

SEQ ID NO: 121516 - protein, 7 aa, synthetic construct
GYVSIKG

SEQ ID NO: 121517 - protein, 7 aa, synthetic construct
HAAGQKQ

SEQ ID NO: 121518 - protein, 7 aa, synthetic construct
HAAHLKQ

SEQ ID NO: 121519 - protein, 7 aa, synthetic construct
HAAKAIL

SEQ ID NO: 121520 - protein, 7 aa, synthetic construct
HAAKITT

SEQ ID NO: 121521 - protein, 7 aa, synthetic construct
HAAKPIF

SEQ ID NO: 121522 - protein, 7 aa, synthetic construct
HAAKPML

SEQ ID NO: 121523 - protein, 7 aa, synthetic construct
HAANRTI

SEQ ID NO: 121524 - protein, 7 aa, synthetic construct
HAAPNGR

SEQ ID NO: 121525 - protein, 7 aa, synthetic construct
HAAQRPF

SEQ ID NO: 121526 - protein, 7 aa, synthetic construct
HAARQGI

SEQ ID NO: 121527 - protein, 7 aa, synthetic construct
HAASGTR

SEQ ID NO: 121528 - protein, 7 aa, synthetic construct
HAATNRL

SEQ ID NO: 121529 - protein, 7 aa, synthetic construct
HAATQKY

SEQ ID NO: 121530 - protein, 7 aa, synthetic construct
HAAVRDR

SEQ ID NO: 121531 - protein, 7 aa, synthetic construct
HADRLRN

SEQ ID NO: 121532 - protein, 7 aa, synthetic construct
HAEIRKN

SEQ ID NO: 121533 - protein, 7 aa, synthetic construct
HAEKRNN

SEQ ID NO: 121534 - protein, 7 aa, synthetic construct
HAERKGS

SEQ ID NO: 121535 - protein, 7 aa, synthetic construct
HAGAFKN

SEQ ID NO: 121536 - protein, 7 aa, synthetic construct
HAGAPRM

SEQ ID NO: 121537 - protein, 7 aa, synthetic construct
HAGAVRG

SEQ ID NO: 121538 - protein, 7 aa, synthetic construct
HAGGKFQ

SEQ ID NO: 121539 - protein, 7 aa, synthetic construct
HAGGSTR

SEQ ID NO: 121540 - protein, 7 aa, synthetic construct
HAGGVKF

SEQ ID NO: 121541 - protein, 7 aa, synthetic construct
HAGIRGP

SEQ ID NO: 121542 - protein, 7 aa, synthetic construct
HAGKSIL

SEQ ID NO: 121543 - protein, 7 aa, synthetic construct
HAGLQKS

SEQ ID NO: 121544 - protein, 7 aa, synthetic construct
HAGMTFK

SEQ ID NO: 121545 - protein, 7 aa, synthetic construct
HAGMVSK

SEQ ID NO: 121546 - protein, 7 aa, synthetic construct
HAGRVNA

SEQ ID NO: 121547 - protein, 7 aa, synthetic construct
HAGSLRV

SEQ ID NO: 121548 - protein, 7 aa, synthetic construct
HAGVNIR

SEQ ID NO: 121549 - protein, 7 aa, synthetic construct
HAGVQNR

SEQ ID NO: 121550 - protein, 7 aa, synthetic construct
HAHIQKV

SEQ ID NO: 121551 - protein, 7 aa, synthetic construct
HAHLRDY

SEQ ID NO: 121552 - protein, 7 aa, synthetic construct
HAHQRPF

SEQ ID NO: 121553 - protein, 7 aa, synthetic construct
HAHRQLV

SEQ ID NO: 121554 - protein, 7 aa, synthetic construct
HAIGMRP

SEQ ID NO: 121555 - protein, 7 aa, synthetic construct
HAIGREK

SEQ ID NO: 121556 - protein, 7 aa, synthetic construct
HAIHKGS

SEQ ID NO: 121557 - protein, 7 aa, synthetic construct
HAIHNKV

SEQ ID NO: 121558 - protein, 7 aa, synthetic construct
HAIRHDY

SEQ ID NO: 121559 - protein, 7 aa, synthetic construct
HAKAQHI

SEQ ID NO: 121560 - protein, 7 aa, synthetic construct
HAKFASS

SEQ ID NO: 121561 - protein, 7 aa, synthetic construct
HAKFSVS

SEQ ID NO: 121562 - protein, 7 aa, synthetic construct
HAKFTLN

SEQ ID NO: 121563 - protein, 7 aa, synthetic construct
HAKGPYN

SEQ ID NO: 121564 - protein, 7 aa, synthetic construct
HAKGQFP

SEQ ID NO: 121565 - protein, 7 aa, synthetic construct
HAKGSVF

SEQ ID NO: 121566 - protein, 7 aa, synthetic construct
HAKGYNV

SEQ ID NO: 121567 - protein, 7 aa, synthetic construct
HAKHMGT

SEQ ID NO: 121568 - protein, 7 aa, synthetic construct
HAKIPDR

SEQ ID NO: 121569 - protein, 7 aa, synthetic construct
HAKLQTY

SEQ ID NO: 121570 - protein, 7 aa, synthetic construct
HAKLSMV

SEQ ID NO: 121571 - protein, 7 aa, synthetic construct
HAKMMAM

SEQ ID NO: 121572 - protein, 7 aa, synthetic construct
HAKMQSL

SEQ ID NO: 121573 - protein, 7 aa, synthetic construct
HAKNPQF

SEQ ID NO: 121574 - protein, 7 aa, synthetic construct
HAKPDKY

SEQ ID NO: 121575 - protein, 7 aa, synthetic construct
HAKPLSY

SEQ ID NO: 121576 - protein, 7 aa, synthetic construct
HAKSLHQ

SEQ ID NO: 121577 - protein, 7 aa, synthetic construct
HAKSPIL

SEQ ID NO: 121578 - protein, 7 aa, synthetic construct
HAKSQGF

SEQ ID NO: 121579 - protein, 7 aa, synthetic construct
HAKVQNF

SEQ ID NO: 121580 - protein, 7 aa, synthetic construct
HAKYPGS

SEQ ID NO: 121581 - protein, 7 aa, synthetic construct
HAKYVVA

SEQ ID NO: 121582 - protein, 7 aa, synthetic construct
HALKMRD

SEQ ID NO: 121583 - protein, 7 aa, synthetic construct
HALSTSR

SEQ ID NO: 121584 - protein, 7 aa, synthetic construct
HAMASGK

SEQ ID NO: 121585 - protein, 7 aa, synthetic construct
HAMGKGF

SEQ ID NO: 121586 - protein, 7 aa, synthetic construct
HAMKTVH

SEQ ID NO: 121587 - protein, 7 aa, synthetic construct
HAMNTRV

SEQ ID NO: 121588 - protein, 7 aa, synthetic construct
HAMREKA

SEQ ID NO: 121589 - protein, 7 aa, synthetic construct
HAMTKSI

SEQ ID NO: 121590 - protein, 7 aa, synthetic construct
HANGPRM

SEQ ID NO: 121591 - protein, 7 aa, synthetic construct
HANKPER

SEQ ID NO: 121592 - protein, 7 aa, synthetic construct
HANNTSK

SEQ ID NO: 121593 - protein, 7 aa, synthetic construct
HANNTVR

SEQ ID NO: 121594 - protein, 7 aa, synthetic construct
HANPRAL

SEQ ID NO: 121595 - protein, 7 aa, synthetic construct
HANRSYS

SEQ ID NO: 121596 - protein, 7 aa, synthetic construct
HANSNSK

SEQ ID NO: 121597 - protein, 7 aa, synthetic construct
HANTGPK

SEQ ID NO: 121598 - protein, 7 aa, synthetic construct
HANYRSN

SEQ ID NO: 121599 - protein, 7 aa, synthetic construct
HAPASIR

SEQ ID NO: 121600 - protein, 7 aa, synthetic construct
HAPGIRA

SEQ ID NO: 121601 - protein, 7 aa, synthetic construct
HAPKNNY

SEQ ID NO: 121602 - protein, 7 aa, synthetic construct
HAPKQSF

SEQ ID NO: 121603 - protein, 7 aa, synthetic construct
HAPNPRS

SEQ ID NO: 121604 - protein, 7 aa, synthetic construct
HAPPSRY

SEQ ID NO: 121605 - protein, 7 aa, synthetic construct
HAPRGLT

SEQ ID NO: 121606 - protein, 7 aa, synthetic construct
HAPRNNI

SEQ ID NO: 121607 - protein, 7 aa, synthetic construct
HAPRQVI

SEQ ID NO: 121608 - protein, 7 aa, synthetic construct
HAPRVMP

SEQ ID NO: 121609 - protein, 7 aa, synthetic construct
HAPSQPK

SEQ ID NO: 121610 - protein, 7 aa, synthetic construct
HAPSRMN

SEQ ID NO: 121611 - protein, 7 aa, synthetic construct
HAQAGNK

SEQ ID NO: 121612 - protein, 7 aa, synthetic construct
HAQAKMY

SEQ ID NO: 121613 - protein, 7 aa, synthetic construct
HAQASRA

SEQ ID NO: 121614 - protein, 7 aa, synthetic construct
HAQGMSK

SEQ ID NO: 121615 - protein, 7 aa, synthetic construct
HAQMSNR

SEQ ID NO: 121616 - protein, 7 aa, synthetic construct
HAQNTVR

SEQ ID NO: 121617 - protein, 7 aa, synthetic construct
HAQRGGY

SEQ ID NO: 121618 - protein, 7 aa, synthetic construct
HAQSLGR

SEQ ID NO: 121619 - protein, 7 aa, synthetic construct
HAQSTPK

SEQ ID NO: 121620 - protein, 7 aa, synthetic construct
HARIPGS

SEQ ID NO: 121621 - protein, 7 aa, synthetic construct
HARLPPN

SEQ ID NO: 121622 - protein, 7 aa, synthetic construct
HARLPQA

SEQ ID NO: 121623 - protein, 7 aa, synthetic construct
HARNSAF

SEQ ID NO: 121624 - protein, 7 aa, synthetic construct
HARPAAV

SEQ ID NO: 121625 - protein, 7 aa, synthetic construct
HARQAGF

SEQ ID NO: 121626 - protein, 7 aa, synthetic construct
HASAVRQ

SEQ ID NO: 121627 - protein, 7 aa, synthetic construct
HASGFKA

SEQ ID NO: 121628 - protein, 7 aa, synthetic construct
HASHIKN

SEQ ID NO: 121629 - protein, 7 aa, synthetic construct
HASKQSL

SEQ ID NO: 121630 - protein, 7 aa, synthetic construct
HASKSFS

SEQ ID NO: 121631 - protein, 7 aa, synthetic construct
HASKTVF

SEQ ID NO: 121632 - protein, 7 aa, synthetic construct
HASLASR

SEQ ID NO: 121633 - protein, 7 aa, synthetic construct
HASMQVR

SEQ ID NO: 121634 - protein, 7 aa, synthetic construct
HASNIGK

SEQ ID NO: 121635 - protein, 7 aa, synthetic construct
HASPRSN

SEQ ID NO: 121636 - protein, 7 aa, synthetic construct
HASQLGK

SEQ ID NO: 121637 - protein, 7 aa, synthetic construct
HASQPPR

SEQ ID NO: 121638 - protein, 7 aa, synthetic construct
HASSGNK

SEQ ID NO: 121639 - protein, 7 aa, synthetic construct
HASVNPR

SEQ ID NO: 121640 - protein, 7 aa, synthetic construct
HATAMQR

SEQ ID NO: 121641 - protein, 7 aa, synthetic construct
HATGLPR

SEQ ID NO: 121642 - protein, 7 aa, synthetic construct
HATKAHF

SEQ ID NO: 121643 - protein, 7 aa, synthetic construct
HATKGHV

SEQ ID NO: 121644 - protein, 7 aa, synthetic construct
HATKPIL

SEQ ID NO: 121645 - protein, 7 aa, synthetic construct
HATKYTV

SEQ ID NO: 121646 - protein, 7 aa, synthetic construct
HATLRTT

SEQ ID NO: 121647 - protein, 7 aa, synthetic construct
HATNVYK

SEQ ID NO: 121648 - protein, 7 aa, synthetic construct
HATRAVM

SEQ ID NO: 121649 - protein, 7 aa, synthetic construct
HATRLGM

SEQ ID NO: 121650 - protein, 7 aa, synthetic construct
HATRMAI

SEQ ID NO: 121651 - protein, 7 aa, synthetic construct
HAVARSV

SEQ ID NO: 121652 - protein, 7 aa, synthetic construct
HAVKFQQ

SEQ ID NO: 121653 - protein, 7 aa, synthetic construct
HAVKIGI

SEQ ID NO: 121654 - protein, 7 aa, synthetic construct
HAVNARV

SEQ ID NO: 121655 - protein, 7 aa, synthetic construct
HAVRMMN

SEQ ID NO: 121656 - protein, 7 aa, synthetic construct
HAVRQGI

SEQ ID NO: 121657 - protein, 7 aa, synthetic construct
HAYKEPN

SEQ ID NO: 121658 - protein, 7 aa, synthetic construct
HAYKPGF

SEQ ID NO: 121659 - protein, 7 aa, synthetic construct
HAYSKQQ

SEQ ID NO: 121660 - protein, 7 aa, synthetic construct
HAYTTGQ

SEQ ID NO: 121661 - protein, 7 aa, synthetic construct
HAYVAAN

SEQ ID NO: 121662 - protein, 7 aa, synthetic construct
HDARGKL

SEQ ID NO: 121663 - protein, 7 aa, synthetic construct
HDDKIKK

SEQ ID NO: 121664 - protein, 7 aa, synthetic construct
HDERIAH

SEQ ID NO: 121665 - protein, 7 aa, synthetic construct
HDGKMKM

SEQ ID NO: 121666 - protein, 7 aa, synthetic construct
HDIKQRI

SEQ ID NO: 121667 - protein, 7 aa, synthetic construct
HDIRMKI

SEQ ID NO: 121668 - protein, 7 aa, synthetic construct
HDKALRG

SEQ ID NO: 121669 - protein, 7 aa, synthetic construct
HDKKPAY

SEQ ID NO: 121670 - protein, 7 aa, synthetic construct
HDKNNRV

SEQ ID NO: 121671 - protein, 7 aa, synthetic construct
HDKPYKP

SEQ ID NO: 121672 - protein, 7 aa, synthetic construct
HDKRLSS

SEQ ID NO: 121673 - protein, 7 aa, synthetic construct
HDKRMAT

SEQ ID NO: 121674 - protein, 7 aa, synthetic construct
HDKRQIV

SEQ ID NO: 121675 - protein, 7 aa, synthetic construct
HDKVQGR

SEQ ID NO: 121676 - protein, 7 aa, synthetic construct
HDKVRHA

SEQ ID NO: 121677 - protein, 7 aa, synthetic construct
HDLVKLR

SEQ ID NO: 121678 - protein, 7 aa, synthetic construct
HDMKHKS

SEQ ID NO: 121679 - protein, 7 aa, synthetic construct
HDMKSSK

SEQ ID NO: 121680 - protein, 7 aa, synthetic construct
HDNAKKT

SEQ ID NO: 121681 - protein, 7 aa, synthetic construct
HDNANKR

SEQ ID NO: 121682 - protein, 7 aa, synthetic construct
HDNKNRM

SEQ ID NO: 121683 - protein, 7 aa, synthetic construct
HDNQKKI

SEQ ID NO: 121684 - protein, 7 aa, synthetic construct
HDNRIKG

SEQ ID NO: 121685 - protein, 7 aa, synthetic construct
HDNRVRA

SEQ ID NO: 121686 - protein, 7 aa, synthetic construct
HDNRWTA

SEQ ID NO: 121687 - protein, 7 aa, synthetic construct
HDQIKRN

SEQ ID NO: 121688 - protein, 7 aa, synthetic construct
HDQKFRA

SEQ ID NO: 121689 - protein, 7 aa, synthetic construct
HDQKIGR

SEQ ID NO: 121690 - protein, 7 aa, synthetic construct
HDQRMKG

SEQ ID NO: 121691 - protein, 7 aa, synthetic construct
HDRAIRP

SEQ ID NO: 121692 - protein, 7 aa, synthetic construct
HDRHNWE

SEQ ID NO: 121693 - protein, 7 aa, synthetic construct
HDRKLQM

SEQ ID NO: 121694 - protein, 7 aa, synthetic construct
HDRVKHA

SEQ ID NO: 121695 - protein, 7 aa, synthetic construct
HDSKGNK

SEQ ID NO: 121696 - protein, 7 aa, synthetic construct
HDSWQAK

SEQ ID NO: 121697 - protein, 7 aa, synthetic construct
HDTKPKV

SEQ ID NO: 121698 - protein, 7 aa, synthetic construct
HDTKVRY

SEQ ID NO: 121699 - protein, 7 aa, synthetic construct
HDTRLKG

SEQ ID NO: 121700 - protein, 7 aa, synthetic construct
HDTTNKR

SEQ ID NO: 121701 - protein, 7 aa, synthetic construct
HDVKPNK

SEQ ID NO: 121702 - protein, 7 aa, synthetic construct
HDVKYLY

SEQ ID NO: 121703 - protein, 7 aa, synthetic construct
HEAYNND

SEQ ID NO: 121704 - protein, 7 aa, synthetic construct
HEAYNQR

SEQ ID NO: 121705 - protein, 7 aa, synthetic construct
HEGYTTR

SEQ ID NO: 121706 - protein, 7 aa, synthetic construct
HEIKGRG

SEQ ID NO: 121707 - protein, 7 aa, synthetic construct
HEKALKF

SEQ ID NO: 121708 - protein, 7 aa, synthetic construct
HEKIRVM

SEQ ID NO: 121709 - protein, 7 aa, synthetic construct
HEKKLYQ

SEQ ID NO: 121710 - protein, 7 aa, synthetic construct
HEKKMVY

SEQ ID NO: 121711 - protein, 7 aa, synthetic construct
HEKLSRQ

SEQ ID NO: 121712 - protein, 7 aa, synthetic construct
HEKQRVV

SEQ ID NO: 121713 - protein, 7 aa, synthetic construct
HEKRLVM

SEQ ID NO: 121714 - protein, 7 aa, synthetic construct
HEKRMIT

SEQ ID NO: 121715 - protein, 7 aa, synthetic construct
HEKVLRA

SEQ ID NO: 121716 - protein, 7 aa, synthetic construct
HEKYVKN

SEQ ID NO: 121717 - protein, 7 aa, synthetic construct
HEMKLRS

SEQ ID NO: 121718 - protein, 7 aa, synthetic construct
HENKALR

SEQ ID NO: 121719 - protein, 7 aa, synthetic construct
HEQQLGA

SEQ ID NO: 121720 - protein, 7 aa, synthetic construct
HEQTKPR

SEQ ID NO: 121721 - protein, 7 aa, synthetic construct
HERAAKV

SEQ ID NO: 121722 - protein, 7 aa, synthetic construct
HERIIKS

SEQ ID NO: 121723 - protein, 7 aa, synthetic construct
HERKNQI

SEQ ID NO: 121724 - protein, 7 aa, synthetic construct
HERLLKN

SEQ ID NO: 121725 - protein, 7 aa, synthetic construct
HERQLKP

SEQ ID NO: 121726 - protein, 7 aa, synthetic construct
HETKISR

SEQ ID NO: 121727 - protein, 7 aa, synthetic construct
HEYRERA

SEQ ID NO: 121728 - protein, 7 aa, synthetic construct
HFAAKVP

SEQ ID NO: 121729 - protein, 7 aa, synthetic construct
HFAQSDV

SEQ ID NO: 121730 - protein, 7 aa, synthetic construct
HFDKQRS

SEQ ID NO: 121731 - protein, 7 aa, synthetic construct
HFGETPE

SEQ ID NO: 121732 - protein, 7 aa, synthetic construct
HFGMKGG

SEQ ID NO: 121733 - protein, 7 aa, synthetic construct
HFGQIKA

SEQ ID NO: 121734 - protein, 7 aa, synthetic construct
HFGSGKV

SEQ ID NO: 121735 - protein, 7 aa, synthetic construct
HFGTQNK

SEQ ID NO: 121736 - protein, 7 aa, synthetic construct
HFGVSKA

SEQ ID NO: 121737 - protein, 7 aa, synthetic construct
HFKATAN

SEQ ID NO: 121738 - protein, 7 aa, synthetic construct
HFKATER

SEQ ID NO: 121739 - protein, 7 aa, synthetic construct
HFKETAR

SEQ ID NO: 121740 - protein, 7 aa, synthetic construct
HFKGKDI

SEQ ID NO: 121741 - protein, 7 aa, synthetic construct
HFKIAAA

SEQ ID NO: 121742 - protein, 7 aa, synthetic construct
HFKMGDK

SEQ ID NO: 121743 - protein, 7 aa, synthetic construct
HFKMNNA

SEQ ID NO: 121744 - protein, 7 aa, synthetic construct
HFKNADK

SEQ ID NO: 121745 - protein, 7 aa, synthetic construct
HFKNTNL

SEQ ID NO: 121746 - protein, 7 aa, synthetic construct
HFKNVGP

SEQ ID NO: 121747 - protein, 7 aa, synthetic construct
HFKPSSQ

SEQ ID NO: 121748 - protein, 7 aa, synthetic construct
HFKPVQP

SEQ ID NO: 121749 - protein, 7 aa, synthetic construct
HFKQISL

SEQ ID NO: 121750 - protein, 7 aa, synthetic construct
HFKQSSG

SEQ ID NO: 121751 - protein, 7 aa, synthetic construct
HFKSLNA

SEQ ID NO: 121752 - protein, 7 aa, synthetic construct
HFKVNSI

SEQ ID NO: 121753 - protein, 7 aa, synthetic construct
HFNPKAP

SEQ ID NO: 121754 - protein, 7 aa, synthetic construct
HFNQPKA

SEQ ID NO: 121755 - protein, 7 aa, synthetic construct
HFNRTSN

SEQ ID NO: 121756 - protein, 7 aa, synthetic construct
HFNTVKV

SEQ ID NO: 121757 - protein, 7 aa, synthetic construct
HFNVTMK

SEQ ID NO: 121758 - protein, 7 aa, synthetic construct
HFNVVTK

SEQ ID NO: 121759 - protein, 7 aa, synthetic construct
HFPASKG

SEQ ID NO: 121760 - protein, 7 aa, synthetic construct
HFPKASQ

SEQ ID NO: 121761 - protein, 7 aa, synthetic construct
HFPRGQG

SEQ ID NO: 121762 - protein, 7 aa, synthetic construct
HFPVKSQ

SEQ ID NO: 121763 - protein, 7 aa, synthetic construct
HFQAQSK

SEQ ID NO: 121764 - protein, 7 aa, synthetic construct
HFQKLGA

SEQ ID NO: 121765 - protein, 7 aa, synthetic construct
HFQKNAV

SEQ ID NO: 121766 - protein, 7 aa, synthetic construct
HFQTQGK

SEQ ID NO: 121767 - protein, 7 aa, synthetic construct
HFSHGDR

SEQ ID NO: 121768 - protein, 7 aa, synthetic construct
HFSQNGK

SEQ ID NO: 121769 - protein, 7 aa, synthetic construct
HFTKGSQ

SEQ ID NO: 121770 - protein, 7 aa, synthetic construct
HFTNTKG

SEQ ID NO: 121771 - protein, 7 aa, synthetic construct
HFTSIKA

SEQ ID NO: 121772 - protein, 7 aa, synthetic construct
HFVNQKA

SEQ ID NO: 121773 - protein, 7 aa, synthetic construct
HGAGSIK

SEQ ID NO: 121774 - protein, 7 aa, synthetic construct
HGAIPKL

SEQ ID NO: 121775 - protein, 7 aa, synthetic construct
HGAPMAK

SEQ ID NO: 121776 - protein, 7 aa, synthetic construct
HGAQFKV

SEQ ID NO: 121777 - protein, 7 aa, synthetic construct
HGAQMQK

SEQ ID NO: 121778 - protein, 7 aa, synthetic construct
HGARDKI

SEQ ID NO: 121779 - protein, 7 aa, synthetic construct
HGARITV

SEQ ID NO: 121780 - protein, 7 aa, synthetic construct
HGARPLV

SEQ ID NO: 121781 - protein, 7 aa, synthetic construct
HGATTQK

SEQ ID NO: 121782 - protein, 7 aa, synthetic construct
HGATYTK

SEQ ID NO: 121783 - protein, 7 aa, synthetic construct
HGAVFSK

SEQ ID NO: 121784 - protein, 7 aa, synthetic construct
HGAVPKF

SEQ ID NO: 121785 - protein, 7 aa, synthetic construct
HGAVQTR

SEQ ID NO: 121786 - protein, 7 aa, synthetic construct
HGDRALK

SEQ ID NO: 121787 - protein, 7 aa, synthetic construct
HGGGIKT

SEQ ID NO: 121788 - protein, 7 aa, synthetic construct
HGGIMKI

SEQ ID NO: 121789 - protein, 7 aa, synthetic construct
HGGKPYI

SEQ ID NO: 121790 - protein, 7 aa, synthetic construct
HGGLGSK

SEQ ID NO: 121791 - protein, 7 aa, synthetic construct
HGGQRVM

SEQ ID NO: 121792 - protein, 7 aa, synthetic construct
HGGRPVV

SEQ ID NO: 121793 - protein, 7 aa, synthetic construct
HGGRVAG

SEQ ID NO: 121794 - protein, 7 aa, synthetic construct
HGGTTRA

SEQ ID NO: 121795 - protein, 7 aa, synthetic construct
HGGVMLK

SEQ ID NO: 121796 - protein, 7 aa, synthetic construct
HGGWQRD

SEQ ID NO: 121797 - protein, 7 aa, synthetic construct
HGHHSYA

SEQ ID NO: 121798 - protein, 7 aa, synthetic construct
HGHVMRS

SEQ ID NO: 121799 - protein, 7 aa, synthetic construct
HGHVVKI

SEQ ID NO: 121800 - protein, 7 aa, synthetic construct
HGHYIKP

SEQ ID NO: 121801 - protein, 7 aa, synthetic construct
HGHYVRD

SEQ ID NO: 121802 - protein, 7 aa, synthetic construct
HGIHGTK

SEQ ID NO: 121803 - protein, 7 aa, synthetic construct
HGIIKHP

SEQ ID NO: 121804 - protein, 7 aa, synthetic construct
HGISTSY

SEQ ID NO: 121805 - protein, 7 aa, synthetic construct
HGKFMIA

SEQ ID NO: 121806 - protein, 7 aa, synthetic construct
HGKGVTI

SEQ ID NO: 121807 - protein, 7 aa, synthetic construct
HGKIIPM

SEQ ID NO: 121808 - protein, 7 aa, synthetic construct
HGKIIQV

SEQ ID NO: 121809 - protein, 7 aa, synthetic construct
HGKIMIA

SEQ ID NO: 121810 - protein, 7 aa, synthetic construct
HGKIPMT

SEQ ID NO: 121811 - protein, 7 aa, synthetic construct
HGKIVNL

SEQ ID NO: 121812 - protein, 7 aa, synthetic construct
HGKMAVV

SEQ ID NO: 121813 - protein, 7 aa, synthetic construct
HGKMHVV

SEQ ID NO: 121814 - protein, 7 aa, synthetic construct
HGKMPVM

SEQ ID NO: 121815 - protein, 7 aa, synthetic construct
HGKNVQV

SEQ ID NO: 121816 - protein, 7 aa, synthetic construct
HGKPGQW

SEQ ID NO: 121817 - protein, 7 aa, synthetic construct
HGKQGVV

SEQ ID NO: 121818 - protein, 7 aa, synthetic construct
HGKQMGI

SEQ ID NO: 121819 - protein, 7 aa, synthetic construct
HGKTFVP

SEQ ID NO: 121820 - protein, 7 aa, synthetic construct
HGLGMVR

SEQ ID NO: 121821 - protein, 7 aa, synthetic construct
HGMPPKT

SEQ ID NO: 121822 - protein, 7 aa, synthetic construct
HGMRATP

SEQ ID NO: 121823 - protein, 7 aa, synthetic construct
HGMRNMT

SEQ ID NO: 121824 - protein, 7 aa, synthetic construct
HGNAKSF

SEQ ID NO: 121825 - protein, 7 aa, synthetic construct
HGNINKS

SEQ ID NO: 121826 - protein, 7 aa, synthetic construct
HGNKFVS

SEQ ID NO: 121827 - protein, 7 aa, synthetic construct
HGNKMGL

SEQ ID NO: 121828 - protein, 7 aa, synthetic construct
HGNNKFN

SEQ ID NO: 121829 - protein, 7 aa, synthetic construct
HGNPTPR

SEQ ID NO: 121830 - protein, 7 aa, synthetic construct
HGNYMNQ

SEQ ID NO: 121831 - protein, 7 aa, synthetic construct
HGNYYKD

SEQ ID NO: 121832 - protein, 7 aa, synthetic construct
HGPAFKN

SEQ ID NO: 121833 - protein, 7 aa, synthetic construct
HGPAVTK

SEQ ID NO: 121834 - protein, 7 aa, synthetic construct
HGPDKRS

SEQ ID NO: 121835 - protein, 7 aa, synthetic construct
HGPIVKM

SEQ ID NO: 121836 - protein, 7 aa, synthetic construct
HGPKSAI

SEQ ID NO: 121837 - protein, 7 aa, synthetic construct
HGPNIKN

SEQ ID NO: 121838 - protein, 7 aa, synthetic construct
HGPRNYS

SEQ ID NO: 121839 - protein, 7 aa, synthetic construct
HGPRYGG

SEQ ID NO: 121840 - protein, 7 aa, synthetic construct
HGPTYKG

SEQ ID NO: 121841 - protein, 7 aa, synthetic construct
HGPVNNR

SEQ ID NO: 121842 - protein, 7 aa, synthetic construct
HGQAAKV

SEQ ID NO: 121843 - protein, 7 aa, synthetic construct
HGQAKMI

SEQ ID NO: 121844 - protein, 7 aa, synthetic construct
HGQGKAI

SEQ ID NO: 121845 - protein, 7 aa, synthetic construct
HGQIKSL

SEQ ID NO: 121846 - protein, 7 aa, synthetic construct
HGQMKWE

SEQ ID NO: 121847 - protein, 7 aa, synthetic construct
HGQSNKV

SEQ ID NO: 121848 - protein, 7 aa, synthetic construct
HGQTMVK

SEQ ID NO: 121849 - protein, 7 aa, synthetic construct
HGQVVQR

SEQ ID NO: 121850 - protein, 7 aa, synthetic construct
HGQYKHV

SEQ ID NO: 121851 - protein, 7 aa, synthetic construct
HGRDRPV

SEQ ID NO: 121852 - protein, 7 aa, synthetic construct
HGRPNNI

SEQ ID NO: 121853 - protein, 7 aa, synthetic construct
HGRQPMY

SEQ ID NO: 121854 - protein, 7 aa, synthetic construct
HGRVIDY

SEQ ID NO: 121855 - protein, 7 aa, synthetic construct
HGSAPRQ

SEQ ID NO: 121856 - protein, 7 aa, synthetic construct
HGSGKYQ

SEQ ID NO: 121857 - protein, 7 aa, synthetic construct
HGSISAR

SEQ ID NO: 121858 - protein, 7 aa, synthetic construct
HGSMKLQ

SEQ ID NO: 121859 - protein, 7 aa, synthetic construct
HGSNPRI

SEQ ID NO: 121860 - protein, 7 aa, synthetic construct
HGSPVSK

SEQ ID NO: 121861 - protein, 7 aa, synthetic construct
HGSTKSF

SEQ ID NO: 121862 - protein, 7 aa, synthetic construct
HGSVGTK

SEQ ID NO: 121863 - protein, 7 aa, synthetic construct
HGSVKGF

SEQ ID NO: 121864 - protein, 7 aa, synthetic construct
HGTFNGK

SEQ ID NO: 121865 - protein, 7 aa, synthetic construct
HGTGIVR

SEQ ID NO: 121866 - protein, 7 aa, synthetic construct
HGTGVMK

SEQ ID NO: 121867 - protein, 7 aa, synthetic construct
HGTKFNN

SEQ ID NO: 121868 - protein, 7 aa, synthetic construct
HGTPGRV

SEQ ID NO: 121869 - protein, 7 aa, synthetic construct
HGTQMAR

SEQ ID NO: 121870 - protein, 7 aa, synthetic construct
HGTQQKF

SEQ ID NO: 121871 - protein, 7 aa, synthetic construct
HGTVRPI

SEQ ID NO: 121872 - protein, 7 aa, synthetic construct
HGTYGTN

SEQ ID NO: 121873 - protein, 7 aa, synthetic construct
HGVGRIP

SEQ ID NO: 121874 - protein, 7 aa, synthetic construct
HGVGSSK

SEQ ID NO: 121875 - protein, 7 aa, synthetic construct
HGVHIKV

SEQ ID NO: 121876 - protein, 7 aa, synthetic construct
HGVHRVV

SEQ ID NO: 121877 - protein, 7 aa, synthetic construct
HGVNRIQ

SEQ ID NO: 121878 - protein, 7 aa, synthetic construct
HGVQKQY

SEQ ID NO: 121879 - protein, 7 aa, synthetic construct
HGVQLNR

SEQ ID NO: 121880 - protein, 7 aa, synthetic construct
HGVVTNR

SEQ ID NO: 121881 - protein, 7 aa, synthetic construct
HGVVTTR

SEQ ID NO: 121882 - protein, 7 aa, synthetic construct
HGWKGGE

SEQ ID NO: 121883 - protein, 7 aa, synthetic construct
HHAIKIS

SEQ ID NO: 121884 - protein, 7 aa, synthetic construct
HHAKVLG

SEQ ID NO: 121885 - protein, 7 aa, synthetic construct
HHASKGI

SEQ ID NO: 121886 - protein, 7 aa, synthetic construct
HHGKTPI

SEQ ID NO: 121887 - protein, 7 aa, synthetic construct
HHGLKPP

SEQ ID NO: 121888 - protein, 7 aa, synthetic construct
HHGNGKF

SEQ ID NO: 121889 - protein, 7 aa, synthetic construct
HHGYGKP

SEQ ID NO: 121890 - protein, 7 aa, synthetic construct
HHHQGDK

SEQ ID NO: 121891 - protein, 7 aa, synthetic construct
HHIKPTS

SEQ ID NO: 121892 - protein, 7 aa, synthetic construct
HHINGNK

SEQ ID NO: 121893 - protein, 7 aa, synthetic construct
HHIQRQQ

SEQ ID NO: 121894 - protein, 7 aa, synthetic construct
HHKAYQA

SEQ ID NO: 121895 - protein, 7 aa, synthetic construct
HHKGMVP

SEQ ID NO: 121896 - protein, 7 aa, synthetic construct
HHKGMVS

SEQ ID NO: 121897 - protein, 7 aa, synthetic construct
HHKGPAS

SEQ ID NO: 121898 - protein, 7 aa, synthetic construct
HHKTHTT

SEQ ID NO: 121899 - protein, 7 aa, synthetic construct
HHKTPSQ

SEQ ID NO: 121900 - protein, 7 aa, synthetic construct
HHKVMIA

SEQ ID NO: 121901 - protein, 7 aa, synthetic construct
HHLSSKQ

SEQ ID NO: 121902 - protein, 7 aa, synthetic construct
HHMPGKP

SEQ ID NO: 121903 - protein, 7 aa, synthetic construct
HHNAKGQ

SEQ ID NO: 121904 - protein, 7 aa, synthetic construct
HHNGKTI

SEQ ID NO: 121905 - protein, 7 aa, synthetic construct
HHNKHTM

SEQ ID NO: 121906 - protein, 7 aa, synthetic construct
HHNQRNS

SEQ ID NO: 121907 - protein, 7 aa, synthetic construct
HHNRIAN

SEQ ID NO: 121908 - protein, 7 aa, synthetic construct
HHNRLGM

SEQ ID NO: 121909 - protein, 7 aa, synthetic construct
HHPGKAM

SEQ ID NO: 121910 - protein, 7 aa, synthetic construct
HHPLARV

SEQ ID NO: 121911 - protein, 7 aa, synthetic construct
HHPTVRG

SEQ ID NO: 121912 - protein, 7 aa, synthetic construct
HHQQGRP

SEQ ID NO: 121913 - protein, 7 aa, synthetic construct
HHSQRNM

SEQ ID NO: 121914 - protein, 7 aa, synthetic construct
HHTIAIK

SEQ ID NO: 121915 - protein, 7 aa, synthetic construct
HHTNDKN

SEQ ID NO: 121916 - protein, 7 aa, synthetic construct
HHTQGKV

SEQ ID NO: 121917 - protein, 7 aa, synthetic construct
HHTSKVY

SEQ ID NO: 121918 - protein, 7 aa, synthetic construct
HHTVSKV

SEQ ID NO: 121919 - protein, 7 aa, synthetic construct
HHVRQVS

SEQ ID NO: 121920 - protein, 7 aa, synthetic construct
HHVSLRA

SEQ ID NO: 121921 - protein, 7 aa, synthetic construct
HIAAHTR

SEQ ID NO: 121922 - protein, 7 aa, synthetic construct
HIAAPKT

SEQ ID NO: 121923 - protein, 7 aa, synthetic construct
HIAGIPR

SEQ ID NO: 121924 - protein, 7 aa, synthetic construct
HIARNAV

SEQ ID NO: 121925 - protein, 7 aa, synthetic construct
HIARNVV

SEQ ID NO: 121926 - protein, 7 aa, synthetic construct
HIATHQK

SEQ ID NO: 121927 - protein, 7 aa, synthetic construct
HIDKNGR

SEQ ID NO: 121928 - protein, 7 aa, synthetic construct
HIEKRTI

SEQ ID NO: 121929 - protein, 7 aa, synthetic construct
HIGASRN

SEQ ID NO: 121930 - protein, 7 aa, synthetic construct
HIGHVTK

SEQ ID NO: 121931 - protein, 7 aa, synthetic construct
HIGKPML

SEQ ID NO: 121932 - protein, 7 aa, synthetic construct
HIGNAGK

SEQ ID NO: 121933 - protein, 7 aa, synthetic construct
HIGNQTK

SEQ ID NO: 121934 - protein, 7 aa, synthetic construct
HIGNTGR

SEQ ID NO: 121935 - protein, 7 aa, synthetic construct
HIGPHKV

SEQ ID NO: 121936 - protein, 7 aa, synthetic construct
HIGSNQR

SEQ ID NO: 121937 - protein, 7 aa, synthetic construct
HIGSSSR

SEQ ID NO: 121938 - protein, 7 aa, synthetic construct
HIHSAKQ

SEQ ID NO: 121939 - protein, 7 aa, synthetic construct
HIHSVKI

SEQ ID NO: 121940 - protein, 7 aa, synthetic construct
HIKATMM

SEQ ID NO: 121941 - protein, 7 aa, synthetic construct
HIKDLAK

SEQ ID NO: 121942 - protein, 7 aa, synthetic construct
HIKEIRY

SEQ ID NO: 121943 - protein, 7 aa, synthetic construct
HIKERAQ

SEQ ID NO: 121944 - protein, 7 aa, synthetic construct
HIKGGFP

SEQ ID NO: 121945 - protein, 7 aa, synthetic construct
HIKHLSS

SEQ ID NO: 121946 - protein, 7 aa, synthetic construct
HIKHPSS

SEQ ID NO: 121947 - protein, 7 aa, synthetic construct
HIKIMSA

SEQ ID NO: 121948 - protein, 7 aa, synthetic construct
HIKIQPQ

SEQ ID NO: 121949 - protein, 7 aa, synthetic construct
HIKMTGL

SEQ ID NO: 121950 - protein, 7 aa, synthetic construct
HIKMVSH

SEQ ID NO: 121951 - protein, 7 aa, synthetic construct
HIKNNYG

SEQ ID NO: 121952 - protein, 7 aa, synthetic construct
HIKPIGT

SEQ ID NO: 121953 - protein, 7 aa, synthetic construct
HIKPMGG

SEQ ID NO: 121954 - protein, 7 aa, synthetic construct
HIKVTVN

SEQ ID NO: 121955 - protein, 7 aa, synthetic construct
HIKYTAA

SEQ ID NO: 121956 - protein, 7 aa, synthetic construct
HINASSR

SEQ ID NO: 121957 - protein, 7 aa, synthetic construct
HINGARQ

SEQ ID NO: 121958 - protein, 7 aa, synthetic construct
HINKIRD

SEQ ID NO: 121959 - protein, 7 aa, synthetic construct
HINPRTV

SEQ ID NO: 121960 - protein, 7 aa, synthetic construct
HINRDKA

SEQ ID NO: 121961 - protein, 7 aa, synthetic construct
HIPARGQ

SEQ ID NO: 121962 - protein, 7 aa, synthetic construct
HIPEKRQ

SEQ ID NO: 121963 - protein, 7 aa, synthetic construct
HIPGKPL

SEQ ID NO: 121964 - protein, 7 aa, synthetic construct
HIPKGIS

SEQ ID NO: 121965 - protein, 7 aa, synthetic construct
HIPKVLA

SEQ ID NO: 121966 - protein, 7 aa, synthetic construct
HIPRVQA

SEQ ID NO: 121967 - protein, 7 aa, synthetic construct
HIPSARG

SEQ ID NO: 121968 - protein, 7 aa, synthetic construct
HIPSMGK

SEQ ID NO: 121969 - protein, 7 aa, synthetic construct
HIPTKTL

SEQ ID NO: 121970 - protein, 7 aa, synthetic construct
HIPTVRL

SEQ ID NO: 121971 - protein, 7 aa, synthetic construct
HIQANIR

SEQ ID NO: 121972 - protein, 7 aa, synthetic construct
HIQASRV

SEQ ID NO: 121973 - protein, 7 aa, synthetic construct
HIQQTKY

SEQ ID NO: 121974 - protein, 7 aa, synthetic construct
HIQSPRT

SEQ ID NO: 121975 - protein, 7 aa, synthetic construct
HIQTIRA

SEQ ID NO: 121976 - protein, 7 aa, synthetic construct
HIQTSRM

SEQ ID NO: 121977 - protein, 7 aa, synthetic construct
HIRNEKA

SEQ ID NO: 121978 - protein, 7 aa, synthetic construct
HIRPNAM

SEQ ID NO: 121979 - protein, 7 aa, synthetic construct
HIRPTMP

SEQ ID NO: 121980 - protein, 7 aa, synthetic construct
HIRTIMA

SEQ ID NO: 121981 - protein, 7 aa, synthetic construct
HIRTISP

SEQ ID NO: 121982 - protein, 7 aa, synthetic construct
HIRTLAQ

SEQ ID NO: 121983 - protein, 7 aa, synthetic construct
HIRTSQT

SEQ ID NO: 121984 - protein, 7 aa, synthetic construct
HIRVSAP

SEQ ID NO: 121985 - protein, 7 aa, synthetic construct
HISKQMY

SEQ ID NO: 121986 - protein, 7 aa, synthetic construct
HISMNAK

SEQ ID NO: 121987 - protein, 7 aa, synthetic construct
HISNMVK

SEQ ID NO: 121988 - protein, 7 aa, synthetic construct
HISRGVV

SEQ ID NO: 121989 - protein, 7 aa, synthetic construct
HISTPYK

SEQ ID NO: 121990 - protein, 7 aa, synthetic construct
HISTTRQ

SEQ ID NO: 121991 - protein, 7 aa, synthetic construct
HITGRSI

SEQ ID NO: 121992 - protein, 7 aa, synthetic construct
HITKNVM

SEQ ID NO: 121993 - protein, 7 aa, synthetic construct
HITNKPH

SEQ ID NO: 121994 - protein, 7 aa, synthetic construct
HITNTRQ

SEQ ID NO: 121995 - protein, 7 aa, synthetic construct
HITQVGR

SEQ ID NO: 121996 - protein, 7 aa, synthetic construct
HIVGTNR

SEQ ID NO: 121997 - protein, 7 aa, synthetic construct
HIVKMAS

SEQ ID NO: 121998 - protein, 7 aa, synthetic construct
HIYQNQK

SEQ ID NO: 121999 - protein, 7 aa, synthetic construct
HKAAGQH

SEQ ID NO: 122000 - protein, 7 aa, synthetic construct
HKAANAQ

SEQ ID NO: 122001 - protein, 7 aa, synthetic construct
HKAANIM

SEQ ID NO: 122002 - protein, 7 aa, synthetic construct
HKAAYQN

SEQ ID NO: 122003 - protein, 7 aa, synthetic construct
HKAAYTA

SEQ ID NO: 122004 - protein, 7 aa, synthetic construct
HKAGLHV

SEQ ID NO: 122005 - protein, 7 aa, synthetic construct
HKAGLNL

SEQ ID NO: 122006 - protein, 7 aa, synthetic construct
HKAGVHV

SEQ ID NO: 122007 - protein, 7 aa, synthetic construct
HKAIASL

SEQ ID NO: 122008 - protein, 7 aa, synthetic construct
HKAIYDK

SEQ ID NO: 122009 - protein, 7 aa, synthetic construct
HKALYEK

SEQ ID NO: 122010 - protein, 7 aa, synthetic construct
HKAMQTQ

SEQ ID NO: 122011 - protein, 7 aa, synthetic construct
HKANNLS

SEQ ID NO: 122012 - protein, 7 aa, synthetic construct
HKANNMM

SEQ ID NO: 122013 - protein, 7 aa, synthetic construct
HKANQAM

SEQ ID NO: 122014 - protein, 7 aa, synthetic construct
HKAPNPS

SEQ ID NO: 122015 - protein, 7 aa, synthetic construct
HKAPYSA

SEQ ID NO: 122016 - protein, 7 aa, synthetic construct
HKAQFMA

SEQ ID NO: 122017 - protein, 7 aa, synthetic construct
HKAQSMT

SEQ ID NO: 122018 - protein, 7 aa, synthetic construct
HKASTML

SEQ ID NO: 122019 - protein, 7 aa, synthetic construct
HKATHTL

SEQ ID NO: 122020 - protein, 7 aa, synthetic construct
HKAVAQL

SEQ ID NO: 122021 - protein, 7 aa, synthetic construct
HKAVHTA

SEQ ID NO: 122022 - protein, 7 aa, synthetic construct
HKAVQSQ

SEQ ID NO: 122023 - protein, 7 aa, synthetic construct
HKAVQST

SEQ ID NO: 122024 - protein, 7 aa, synthetic construct
HKAVSAL

SEQ ID NO: 122025 - protein, 7 aa, synthetic construct
HKAVSTL

SEQ ID NO: 122026 - protein, 7 aa, synthetic construct
HKDIAKQ

SEQ ID NO: 122027 - protein, 7 aa, synthetic construct
HKDIRFG

SEQ ID NO: 122028 - protein, 7 aa, synthetic construct
HKDLHRV

SEQ ID NO: 122029 - protein, 7 aa, synthetic construct
HKDMMLR

SEQ ID NO: 122030 - protein, 7 aa, synthetic construct
HKDQRNI

SEQ ID NO: 122031 - protein, 7 aa, synthetic construct
HKDRQPT

SEQ ID NO: 122032 - protein, 7 aa, synthetic construct
HKDRSPY

SEQ ID NO: 122033 - protein, 7 aa, synthetic construct
HKDRVST

SEQ ID NO: 122034 - protein, 7 aa, synthetic construct
HKDTRVL

SEQ ID NO: 122035 - protein, 7 aa, synthetic construct
HKDVTKY

SEQ ID NO: 122036 - protein, 7 aa, synthetic construct
HKEAKMV

SEQ ID NO: 122037 - protein, 7 aa, synthetic construct
HKEGKIN

SEQ ID NO: 122038 - protein, 7 aa, synthetic construct
HKEIRAI

SEQ ID NO: 122039 - protein, 7 aa, synthetic construct
HKEKSYF

SEQ ID NO: 122040 - protein, 7 aa, synthetic construct
HKELRIA

SEQ ID NO: 122041 - protein, 7 aa, synthetic construct
HKEMRVV

SEQ ID NO: 122042 - protein, 7 aa, synthetic construct
HKEMRYA

SEQ ID NO: 122043 - protein, 7 aa, synthetic construct
HKEMSRY

SEQ ID NO: 122044 - protein, 7 aa, synthetic construct
HKENVRG

SEQ ID NO: 122045 - protein, 7 aa, synthetic construct
HKEPKWN

SEQ ID NO: 122046 - protein, 7 aa, synthetic construct
HKERGFV

SEQ ID NO: 122047 - protein, 7 aa, synthetic construct
HKFAVTA

SEQ ID NO: 122048 - protein, 7 aa, synthetic construct
HKFNVVP

SEQ ID NO: 122049 - protein, 7 aa, synthetic construct
HKFQGLA

SEQ ID NO: 122050 - protein, 7 aa, synthetic construct
HKFQMVG

SEQ ID NO: 122051 - protein, 7 aa, synthetic construct
HKFQTSI

SEQ ID NO: 122052 - protein, 7 aa, synthetic construct
HKFQVNA

SEQ ID NO: 122053 - protein, 7 aa, synthetic construct
HKFSTAP

SEQ ID NO: 122054 - protein, 7 aa, synthetic construct
HKFSVPQ

SEQ ID NO: 122055 - protein, 7 aa, synthetic construct
HKGAERG

SEQ ID NO: 122056 - protein, 7 aa, synthetic construct
HKGAGIM

SEQ ID NO: 122057 - protein, 7 aa, synthetic construct
HKGANIV

SEQ ID NO: 122058 - protein, 7 aa, synthetic construct
HKGANYI

SEQ ID NO: 122059 - protein, 7 aa, synthetic construct
HKGATYN

SEQ ID NO: 122060 - protein, 7 aa, synthetic construct
HKGDGKV

SEQ ID NO: 122061 - protein, 7 aa, synthetic construct
HKGGPER

SEQ ID NO: 122062 - protein, 7 aa, synthetic construct
HKGHIMV

SEQ ID NO: 122063 - protein, 7 aa, synthetic construct
HKGIAQT

SEQ ID NO: 122064 - protein, 7 aa, synthetic construct
HKGILPQ

SEQ ID NO: 122065 - protein, 7 aa, synthetic construct
HKGLNVL

SEQ ID NO: 122066 - protein, 7 aa, synthetic construct
HKGLQPI

SEQ ID NO: 122067 - protein, 7 aa, synthetic construct
HKGLSSQ

SEQ ID NO: 122068 - protein, 7 aa, synthetic construct
HKGMGLV

SEQ ID NO: 122069 - protein, 7 aa, synthetic construct
HKGMNQI

SEQ ID NO: 122070 - protein, 7 aa, synthetic construct
HKGNATL

SEQ ID NO: 122071 - protein, 7 aa, synthetic construct
HKGNDRA

SEQ ID NO: 122072 - protein, 7 aa, synthetic construct
HKGPQNL

SEQ ID NO: 122073 - protein, 7 aa, synthetic construct
HKGPQVY

SEQ ID NO: 122074 - protein, 7 aa, synthetic construct
HKGPSPM

SEQ ID NO: 122075 - protein, 7 aa, synthetic construct
HKGPVGV

SEQ ID NO: 122076 - protein, 7 aa, synthetic construct
HKGQAQV

SEQ ID NO: 122077 - protein, 7 aa, synthetic construct
HKGQGLT

SEQ ID NO: 122078 - protein, 7 aa, synthetic construct
HKGQPEK

SEQ ID NO: 122079 - protein, 7 aa, synthetic construct
HKGQQVL

SEQ ID NO: 122080 - protein, 7 aa, synthetic construct
HKGSAVY

SEQ ID NO: 122081 - protein, 7 aa, synthetic construct
HKGSIAT

SEQ ID NO: 122082 - protein, 7 aa, synthetic construct
HKGSNIV

SEQ ID NO: 122083 - protein, 7 aa, synthetic construct
HKGSPLT

SEQ ID NO: 122084 - protein, 7 aa, synthetic construct
HKGTFAV

SEQ ID NO: 122085 - protein, 7 aa, synthetic construct
HKGTQMM

SEQ ID NO: 122086 - protein, 7 aa, synthetic construct
HKGVDRI

SEQ ID NO: 122087 - protein, 7 aa, synthetic construct
HKGVQGV

SEQ ID NO: 122088 - protein, 7 aa, synthetic construct
HKGVQPI

SEQ ID NO: 122089 - protein, 7 aa, synthetic construct
HKGVTNT

SEQ ID NO: 122090 - protein, 7 aa, synthetic construct
HKGYPSV

SEQ ID NO: 122091 - protein, 7 aa, synthetic construct
HKHATPM

SEQ ID NO: 122092 - protein, 7 aa, synthetic construct
HKHILSA

SEQ ID NO: 122093 - protein, 7 aa, synthetic construct
HKHMIPP

SEQ ID NO: 122094 - protein, 7 aa, synthetic construct
HKHMLPA

SEQ ID NO: 122095 - protein, 7 aa, synthetic construct
HKHPQVI

SEQ ID NO: 122096 - protein, 7 aa, synthetic construct
HKHQPMG

SEQ ID NO: 122097 - protein, 7 aa, synthetic construct
HKHQWTE

SEQ ID NO: 122098 - protein, 7 aa, synthetic construct
HKHYQIA

SEQ ID NO: 122099 - protein, 7 aa, synthetic construct
HKIAPMA

SEQ ID NO: 122100 - protein, 7 aa, synthetic construct
HKIDKYT

SEQ ID NO: 122101 - protein, 7 aa, synthetic construct
HKIERNN

SEQ ID NO: 122102 - protein, 7 aa, synthetic construct
HKIGHSS

SEQ ID NO: 122103 - protein, 7 aa, synthetic construct
HKILDAK

SEQ ID NO: 122104 - protein, 7 aa, synthetic construct
HKILRSD

SEQ ID NO: 122105 - protein, 7 aa, synthetic construct
HKIQGLV

SEQ ID NO: 122106 - protein, 7 aa, synthetic construct
HKIQGMV

SEQ ID NO: 122107 - protein, 7 aa, synthetic construct
HKISHNS

SEQ ID NO: 122108 - protein, 7 aa, synthetic construct
HKITGTY

SEQ ID NO: 122109 - protein, 7 aa, synthetic construct
HKIVNNT

SEQ ID NO: 122110 - protein, 7 aa, synthetic construct
HKIVVNA

SEQ ID NO: 122111 - protein, 7 aa, synthetic construct
HKKDPTF

SEQ ID NO: 122112 - protein, 7 aa, synthetic construct
HKLADNR

SEQ ID NO: 122113 - protein, 7 aa, synthetic construct
HKLAPTN

SEQ ID NO: 122114 - protein, 7 aa, synthetic construct
HKLARTE

SEQ ID NO: 122115 - protein, 7 aa, synthetic construct
HKLENRA

SEQ ID NO: 122116 - protein, 7 aa, synthetic construct
HKLHASS

SEQ ID NO: 122117 - protein, 7 aa, synthetic construct
HKLHNLV

SEQ ID NO: 122118 - protein, 7 aa, synthetic construct
HKLHPQA

SEQ ID NO: 122119 - protein, 7 aa, synthetic construct
HKLKEGF

SEQ ID NO: 122120 - protein, 7 aa, synthetic construct
HKLLSTH

SEQ ID NO: 122121 - protein, 7 aa, synthetic construct
HKLQRLD

SEQ ID NO: 122122 - protein, 7 aa, synthetic construct
HKLQTNH

SEQ ID NO: 122123 - protein, 7 aa, synthetic construct
HKMGGLV

SEQ ID NO: 122124 - protein, 7 aa, synthetic construct
HKMNVNI

SEQ ID NO: 122125 - protein, 7 aa, synthetic construct
HKMPLPA

SEQ ID NO: 122126 - protein, 7 aa, synthetic construct
HKMQAGV

SEQ ID NO: 122127 - protein, 7 aa, synthetic construct
HKMQMVT

SEQ ID NO: 122128 - protein, 7 aa, synthetic construct
HKMQVAI

SEQ ID NO: 122129 - protein, 7 aa, synthetic construct
HKMSIQQ

SEQ ID NO: 122130 - protein, 7 aa, synthetic construct
HKNANIL

SEQ ID NO: 122131 - protein, 7 aa, synthetic construct
HKNANPQ

SEQ ID NO: 122132 - protein, 7 aa, synthetic construct
HKNANPT

SEQ ID NO: 122133 - protein, 7 aa, synthetic construct
HKNAPMV

SEQ ID NO: 122134 - protein, 7 aa, synthetic construct
HKNGHGV

SEQ ID NO: 122135 - protein, 7 aa, synthetic construct
HKNGKEL

SEQ ID NO: 122136 - protein, 7 aa, synthetic construct
HKNIDKL

SEQ ID NO: 122137 - protein, 7 aa, synthetic construct
HKNIPSL

SEQ ID NO: 122138 - protein, 7 aa, synthetic construct
HKNLNQQ

SEQ ID NO: 122139 - protein, 7 aa, synthetic construct
HKNLPIS

SEQ ID NO: 122140 - protein, 7 aa, synthetic construct
HKNMMHP

SEQ ID NO: 122141 - protein, 7 aa, synthetic construct
HKNNAII

SEQ ID NO: 122142 - protein, 7 aa, synthetic construct
HKNNLVL

SEQ ID NO: 122143 - protein, 7 aa, synthetic construct
HKNNQYI

SEQ ID NO: 122144 - protein, 7 aa, synthetic construct
HKNPAFP

SEQ ID NO: 122145 - protein, 7 aa, synthetic construct
HKNPAGT

SEQ ID NO: 122146 - protein, 7 aa, synthetic construct
HKNPANN

SEQ ID NO: 122147 - protein, 7 aa, synthetic construct
HKNPSLV

SEQ ID NO: 122148 - protein, 7 aa, synthetic construct
HKNPVTM

SEQ ID NO: 122149 - protein, 7 aa, synthetic construct
HKNPYAA

SEQ ID NO: 122150 - protein, 7 aa, synthetic construct
HKNQAFG

SEQ ID NO: 122151 - protein, 7 aa, synthetic construct
HKNQAGT

SEQ ID NO: 122152 - protein, 7 aa, synthetic construct
HKNQQFP

SEQ ID NO: 122153 - protein, 7 aa, synthetic construct
HKNQTSL

SEQ ID NO: 122154 - protein, 7 aa, synthetic construct
HKNQVGT

SEQ ID NO: 122155 - protein, 7 aa, synthetic construct
HKNSMAL

SEQ ID NO: 122156 - protein, 7 aa, synthetic construct
HKNTAAY

SEQ ID NO: 122157 - protein, 7 aa, synthetic construct
HKNTASI

SEQ ID NO: 122158 - protein, 7 aa, synthetic construct
HKNVILS

SEQ ID NO: 122159 - protein, 7 aa, synthetic construct
HKNVPMN

SEQ ID NO: 122160 - protein, 7 aa, synthetic construct
HKNYGPP

SEQ ID NO: 122161 - protein, 7 aa, synthetic construct
HKNYIAA

SEQ ID NO: 122162 - protein, 7 aa, synthetic construct
HKPAFHA

SEQ ID NO: 122163 - protein, 7 aa, synthetic construct
HKPALYA

SEQ ID NO: 122164 - protein, 7 aa, synthetic construct
HKPAMHV

SEQ ID NO: 122165 - protein, 7 aa, synthetic construct
HKPDKQI

SEQ ID NO: 122166 - protein, 7 aa, synthetic construct
HKPGFQN

SEQ ID NO: 122167 - protein, 7 aa, synthetic construct
HKPGGLT

SEQ ID NO: 122168 - protein, 7 aa, synthetic construct
HKPHTIV

SEQ ID NO: 122169 - protein, 7 aa, synthetic construct
HKPIERA

SEQ ID NO: 122170 - protein, 7 aa, synthetic construct
HKPIGYN

SEQ ID NO: 122171 - protein, 7 aa, synthetic construct
HKPIHNS

SEQ ID NO: 122172 - protein, 7 aa, synthetic construct
HKPINSY

SEQ ID NO: 122173 - protein, 7 aa, synthetic construct
HKPIQQI

SEQ ID NO: 122174 - protein, 7 aa, synthetic construct
HKPIVTN

SEQ ID NO: 122175 - protein, 7 aa, synthetic construct
HKPIYNA

SEQ ID NO: 122176 - protein, 7 aa, synthetic construct
HKPLAYA

SEQ ID NO: 122177 - protein, 7 aa, synthetic construct
HKPLGNT

SEQ ID NO: 122178 - protein, 7 aa, synthetic construct
HKPLPKD

SEQ ID NO: 122179 - protein, 7 aa, synthetic construct
HKPMGNI

SEQ ID NO: 122180 - protein, 7 aa, synthetic construct
HKPMHST

SEQ ID NO: 122181 - protein, 7 aa, synthetic construct
HKPMQAM

SEQ ID NO: 122182 - protein, 7 aa, synthetic construct
HKPMVAV

SEQ ID NO: 122183 - protein, 7 aa, synthetic construct
HKPNAFS

SEQ ID NO: 122184 - protein, 7 aa, synthetic construct
HKPNHQF

SEQ ID NO: 122185 - protein, 7 aa, synthetic construct
HKPNNSA

SEQ ID NO: 122186 - protein, 7 aa, synthetic construct
HKPNTFL

SEQ ID NO: 122187 - protein, 7 aa, synthetic construct
HKPPHPQ

SEQ ID NO: 122188 - protein, 7 aa, synthetic construct
HKPPLLQ

SEQ ID NO: 122189 - protein, 7 aa, synthetic construct
HKPPLVH

SEQ ID NO: 122190 - protein, 7 aa, synthetic construct
HKPPRNE

SEQ ID NO: 122191 - protein, 7 aa, synthetic construct
HKPQFSN

SEQ ID NO: 122192 - protein, 7 aa, synthetic construct
HKPSVMP

SEQ ID NO: 122193 - protein, 7 aa, synthetic construct
HKPTFQA

SEQ ID NO: 122194 - protein, 7 aa, synthetic construct
HKPTNVM

SEQ ID NO: 122195 - protein, 7 aa, synthetic construct
HKPTVTF

SEQ ID NO: 122196 - protein, 7 aa, synthetic construct
HKPTYNV

SEQ ID NO: 122197 - protein, 7 aa, synthetic construct
HKPYNTI

SEQ ID NO: 122198 - protein, 7 aa, synthetic construct
HKQAAGF

SEQ ID NO: 122199 - protein, 7 aa, synthetic construct
HKQAQMV

SEQ ID NO: 122200 - protein, 7 aa, synthetic construct
HKQASSQ

SEQ ID NO: 122201 - protein, 7 aa, synthetic construct
HKQEAKM

SEQ ID NO: 122202 - protein, 7 aa, synthetic construct
HKQIAQL

SEQ ID NO: 122203 - protein, 7 aa, synthetic construct
HKQIDKI

SEQ ID NO: 122204 - protein, 7 aa, synthetic construct
HKQILQM

SEQ ID NO: 122205 - protein, 7 aa, synthetic construct
HKQINQM

SEQ ID NO: 122206 - protein, 7 aa, synthetic construct
HKQIRDS

SEQ ID NO: 122207 - protein, 7 aa, synthetic construct
HKQITAM

SEQ ID NO: 122208 - protein, 7 aa, synthetic construct
HKQITHA

SEQ ID NO: 122209 - protein, 7 aa, synthetic construct
HKQIYKD

SEQ ID NO: 122210 - protein, 7 aa, synthetic construct
HKQKIFD

SEQ ID NO: 122211 - protein, 7 aa, synthetic construct
HKQLMPS

SEQ ID NO: 122212 - protein, 7 aa, synthetic construct
HKQLTGM

SEQ ID NO: 122213 - protein, 7 aa, synthetic construct
HKQMGSQ

SEQ ID NO: 122214 - protein, 7 aa, synthetic construct
HKQNAVL

SEQ ID NO: 122215 - protein, 7 aa, synthetic construct
HKQNMGY

SEQ ID NO: 122216 - protein, 7 aa, synthetic construct
HKQNMSI

SEQ ID NO: 122217 - protein, 7 aa, synthetic construct
HKQNNML

SEQ ID NO: 122218 - protein, 7 aa, synthetic construct
HKQNTMQ

SEQ ID NO: 122219 - protein, 7 aa, synthetic construct
HKQPHTQ

SEQ ID NO: 122220 - protein, 7 aa, synthetic construct
HKQPQGL

SEQ ID NO: 122221 - protein, 7 aa, synthetic construct
HKQPQVN

SEQ ID NO: 122222 - protein, 7 aa, synthetic construct
HKQPSAI

SEQ ID NO: 122223 - protein, 7 aa, synthetic construct
HKQQAPF

SEQ ID NO: 122224 - protein, 7 aa, synthetic construct
HKQQPRD

SEQ ID NO: 122225 - protein, 7 aa, synthetic construct
HKQQSMV

SEQ ID NO: 122226 - protein, 7 aa, synthetic construct
HKQREIT

SEQ ID NO: 122227 - protein, 7 aa, synthetic construct
HKQSAAT

SEQ ID NO: 122228 - protein, 7 aa, synthetic construct
HKQSQIQ

SEQ ID NO: 122229 - protein, 7 aa, synthetic construct
HKQSTMM

SEQ ID NO: 122230 - protein, 7 aa, synthetic construct
HKQSVSI

SEQ ID NO: 122231 - protein, 7 aa, synthetic construct
HKQTIVT

SEQ ID NO: 122232 - protein, 7 aa, synthetic construct
HKQTMPT

SEQ ID NO: 122233 - protein, 7 aa, synthetic construct
HKQTSYI

SEQ ID NO: 122234 - protein, 7 aa, synthetic construct
HKQVANN

SEQ ID NO: 122235 - protein, 7 aa, synthetic construct
HKQVAPT

SEQ ID NO: 122236 - protein, 7 aa, synthetic construct
HKQVGAM

SEQ ID NO: 122237 - protein, 7 aa, synthetic construct
HKQVNGH

SEQ ID NO: 122238 - protein, 7 aa, synthetic construct
HKQVQGA

SEQ ID NO: 122239 - protein, 7 aa, synthetic construct
HKQVTAT

SEQ ID NO: 122240 - protein, 7 aa, synthetic construct
HKQYYES

SEQ ID NO: 122241 - protein, 7 aa, synthetic construct
HKRMDDM

SEQ ID NO: 122242 - protein, 7 aa, synthetic construct
HKSAPYN

SEQ ID NO: 122243 - protein, 7 aa, synthetic construct
HKSDKSI

SEQ ID NO: 122244 - protein, 7 aa, synthetic construct
HKSERIL

SEQ ID NO: 122245 - protein, 7 aa, synthetic construct
HKSGVHI

SEQ ID NO: 122246 - protein, 7 aa, synthetic construct
HKSISTI

SEQ ID NO: 122247 - protein, 7 aa, synthetic construct
HKSLPSL

SEQ ID NO: 122248 - protein, 7 aa, synthetic construct
HKSMAGY

SEQ ID NO: 122249 - protein, 7 aa, synthetic construct
HKSMASL

SEQ ID NO: 122250 - protein, 7 aa, synthetic construct
HKSMVIN

SEQ ID NO: 122251 - protein, 7 aa, synthetic construct
HKSNNGQ

SEQ ID NO: 122252 - protein, 7 aa, synthetic construct
HKSNPAI

SEQ ID NO: 122253 - protein, 7 aa, synthetic construct
HKSNVSV

SEQ ID NO: 122254 - protein, 7 aa, synthetic construct
HKSPAGM

SEQ ID NO: 122255 - protein, 7 aa, synthetic construct
HKSPVFG

SEQ ID NO: 122256 - protein, 7 aa, synthetic construct
HKSQFSG

SEQ ID NO: 122257 - protein, 7 aa, synthetic construct
HKSQQAN

SEQ ID NO: 122258 - protein, 7 aa, synthetic construct
HKSSMFA

SEQ ID NO: 122259 - protein, 7 aa, synthetic construct
HKSSMTY

SEQ ID NO: 122260 - protein, 7 aa, synthetic construct
HKSSPAN

SEQ ID NO: 122261 - protein, 7 aa, synthetic construct
HKSTHPV

SEQ ID NO: 122262 - protein, 7 aa, synthetic construct
HKSTVAF

SEQ ID NO: 122263 - protein, 7 aa, synthetic construct
HKSWQMD

SEQ ID NO: 122264 - protein, 7 aa, synthetic construct
HKTANNH

SEQ ID NO: 122265 - protein, 7 aa, synthetic construct
HKTANVF

SEQ ID NO: 122266 - protein, 7 aa, synthetic construct
HKTDKVS

SEQ ID NO: 122267 - protein, 7 aa, synthetic construct
HKTDRFQ

SEQ ID NO: 122268 - protein, 7 aa, synthetic construct
HKTEYTI

SEQ ID NO: 122269 - protein, 7 aa, synthetic construct
HKTFTGN

SEQ ID NO: 122270 - protein, 7 aa, synthetic construct
HKTGDRA

SEQ ID NO: 122271 - protein, 7 aa, synthetic construct
HKTHGGM

SEQ ID NO: 122272 - protein, 7 aa, synthetic construct
HKTHLSN

SEQ ID NO: 122273 - protein, 7 aa, synthetic construct
HKTMNTY

SEQ ID NO: 122274 - protein, 7 aa, synthetic construct
HKTMSGN

SEQ ID NO: 122275 - protein, 7 aa, synthetic construct
HKTMSGT

SEQ ID NO: 122276 - protein, 7 aa, synthetic construct
HKTMTHN

SEQ ID NO: 122277 - protein, 7 aa, synthetic construct
HKTPDGK

SEQ ID NO: 122278 - protein, 7 aa, synthetic construct
HKTPMMN

SEQ ID NO: 122279 - protein, 7 aa, synthetic construct
HKTPMST

SEQ ID NO: 122280 - protein, 7 aa, synthetic construct
HKTQNAM

SEQ ID NO: 122281 - protein, 7 aa, synthetic construct
HKTRDGA

SEQ ID NO: 122282 - protein, 7 aa, synthetic construct
HKTSDKQ

SEQ ID NO: 122283 - protein, 7 aa, synthetic construct
HKTSDVR

SEQ ID NO: 122284 - protein, 7 aa, synthetic construct
HKTTGHQ

SEQ ID NO: 122285 - protein, 7 aa, synthetic construct
HKTTHVI

SEQ ID NO: 122286 - protein, 7 aa, synthetic construct
HKTTSEK

SEQ ID NO: 122287 - protein, 7 aa, synthetic construct
HKTVHQS

SEQ ID NO: 122288 - protein, 7 aa, synthetic construct
HKTVNPL

SEQ ID NO: 122289 - protein, 7 aa, synthetic construct
HKTYEVP

SEQ ID NO: 122290 - protein, 7 aa, synthetic construct
HKTYQQV

SEQ ID NO: 122291 - protein, 7 aa, synthetic construct
HKVHTNA

SEQ ID NO: 122292 - protein, 7 aa, synthetic construct
HKVIHQA

SEQ ID NO: 122293 - protein, 7 aa, synthetic construct
HKVKEGI

SEQ ID NO: 122294 - protein, 7 aa, synthetic construct
HKVMGNS

SEQ ID NO: 122295 - protein, 7 aa, synthetic construct
HKVMNSH

SEQ ID NO: 122296 - protein, 7 aa, synthetic construct
HKVMRGE

SEQ ID NO: 122297 - protein, 7 aa, synthetic construct
HKVNGVF

SEQ ID NO: 122298 - protein, 7 aa, synthetic construct
HKVPIST

SEQ ID NO: 122299 - protein, 7 aa, synthetic construct
HKVPTMN

SEQ ID NO: 122300 - protein, 7 aa, synthetic construct
HKVPYTG

SEQ ID NO: 122301 - protein, 7 aa, synthetic construct
HKVQMMA

SEQ ID NO: 122302 - protein, 7 aa, synthetic construct
HKVQPAN

SEQ ID NO: 122303 - protein, 7 aa, synthetic construct
HKVQYKE

SEQ ID NO: 122304 - protein, 7 aa, synthetic construct
HKVTRSE

SEQ ID NO: 122305 - protein, 7 aa, synthetic construct
HKVTYQN

SEQ ID NO: 122306 - protein, 7 aa, synthetic construct
HKYPQTS

SEQ ID NO: 122307 - protein, 7 aa, synthetic construct
HKYPVKD

SEQ ID NO: 122308 - protein, 7 aa, synthetic construct
HKYVTNP

SEQ ID NO: 122309 - protein, 7 aa, synthetic construct
HLAGAKA

SEQ ID NO: 122310 - protein, 7 aa, synthetic construct
HLAGKGY

SEQ ID NO: 122311 - protein, 7 aa, synthetic construct
HLAGVNR

SEQ ID NO: 122312 - protein, 7 aa, synthetic construct
HLANNRM

SEQ ID NO: 122313 - protein, 7 aa, synthetic construct
HLAVQRQ

SEQ ID NO: 122314 - protein, 7 aa, synthetic construct
HLAYNKM

SEQ ID NO: 122315 - protein, 7 aa, synthetic construct
HLENSQR

SEQ ID NO: 122316 - protein, 7 aa, synthetic construct
HLGHKSS

SEQ ID NO: 122317 - protein, 7 aa, synthetic construct
HLGHVAK

SEQ ID NO: 122318 - protein, 7 aa, synthetic construct
HLGKLIQ

SEQ ID NO: 122319 - protein, 7 aa, synthetic construct
HLGKPYA

SEQ ID NO: 122320 - protein, 7 aa, synthetic construct
HLGKQTF

SEQ ID NO: 122321 - protein, 7 aa, synthetic construct
HLGMSKA

SEQ ID NO: 122322 - protein, 7 aa, synthetic construct
HLGRNAI

SEQ ID NO: 122323 - protein, 7 aa, synthetic construct
HLGVMRA

SEQ ID NO: 122324 - protein, 7 aa, synthetic construct
HLHATKA

SEQ ID NO: 122325 - protein, 7 aa, synthetic construct
HLHGNKV

SEQ ID NO: 122326 - protein, 7 aa, synthetic construct
HLHKAIS

SEQ ID NO: 122327 - protein, 7 aa, synthetic construct
HLHKMSA

SEQ ID NO: 122328 - protein, 7 aa, synthetic construct
HLHKQPT

SEQ ID NO: 122329 - protein, 7 aa, synthetic construct
HLIQEHP

SEQ ID NO: 122330 - protein, 7 aa, synthetic construct
HLKADRT

SEQ ID NO: 122331 - protein, 7 aa, synthetic construct
HLKDASR

SEQ ID NO: 122332 - protein, 7 aa, synthetic construct
HLKGERA

SEQ ID NO: 122333 - protein, 7 aa, synthetic construct
HLKGIGY

SEQ ID NO: 122334 - protein, 7 aa, synthetic construct
HLKHIGQ

SEQ ID NO: 122335 - protein, 7 aa, synthetic construct
HLKHLSA

SEQ ID NO: 122336 - protein, 7 aa, synthetic construct
HLKHQNS

SEQ ID NO: 122337 - protein, 7 aa, synthetic construct
HLKIGPT

SEQ ID NO: 122338 - protein, 7 aa, synthetic construct
HLKNPIS

SEQ ID NO: 122339 - protein, 7 aa, synthetic construct
HLKPMNQ

SEQ ID NO: 122340 - protein, 7 aa, synthetic construct
HLKQHSM

SEQ ID NO: 122341 - protein, 7 aa, synthetic construct
HLKQREF

SEQ ID NO: 122342 - protein, 7 aa, synthetic construct
HLKSRGE

SEQ ID NO: 122343 - protein, 7 aa, synthetic construct
HLMNGNR

SEQ ID NO: 122344 - protein, 7 aa, synthetic construct
HLMQRSP

SEQ ID NO: 122345 - protein, 7 aa, synthetic construct
HLMSSGR

SEQ ID NO: 122346 - protein, 7 aa, synthetic construct
HLNAKSY

SEQ ID NO: 122347 - protein, 7 aa, synthetic construct
HLNGGSR

SEQ ID NO: 122348 - protein, 7 aa, synthetic construct
HLNGNRM

SEQ ID NO: 122349 - protein, 7 aa, synthetic construct
HLNKGFN

SEQ ID NO: 122350 - protein, 7 aa, synthetic construct
HLNKQTF

SEQ ID NO: 122351 - protein, 7 aa, synthetic construct
HLNMKSM

SEQ ID NO: 122352 - protein, 7 aa, synthetic construct
HLNMSSR

SEQ ID NO: 122353 - protein, 7 aa, synthetic construct
HLNNIRP

SEQ ID NO: 122354 - protein, 7 aa, synthetic construct
HLNQTSK

SEQ ID NO: 122355 - protein, 7 aa, synthetic construct
HLNQVRQ

SEQ ID NO: 122356 - protein, 7 aa, synthetic construct
HLNRLDK

SEQ ID NO: 122357 - protein, 7 aa, synthetic construct
HLNRVSI

SEQ ID NO: 122358 - protein, 7 aa, synthetic construct
HLNSIPR

SEQ ID NO: 122359 - protein, 7 aa, synthetic construct
HLNSPAR

SEQ ID NO: 122360 - protein, 7 aa, synthetic construct
HLNSTSR

SEQ ID NO: 122361 - protein, 7 aa, synthetic construct
HLNYTKG

SEQ ID NO: 122362 - protein, 7 aa, synthetic construct
HLPGYKQ

SEQ ID NO: 122363 - protein, 7 aa, synthetic construct
HLPKHTM

SEQ ID NO: 122364 - protein, 7 aa, synthetic construct
HLPKMAH

SEQ ID NO: 122365 - protein, 7 aa, synthetic construct
HLPKMLP

SEQ ID NO: 122366 - protein, 7 aa, synthetic construct
HLPRHTG

SEQ ID NO: 122367 - protein, 7 aa, synthetic construct
HLPVRNA

SEQ ID NO: 122368 - protein, 7 aa, synthetic construct
HLQGNRM

SEQ ID NO: 122369 - protein, 7 aa, synthetic construct
HLQHANK

SEQ ID NO: 122370 - protein, 7 aa, synthetic construct
HLQHKMS

SEQ ID NO: 122371 - protein, 7 aa, synthetic construct
HLQHQTK

SEQ ID NO: 122372 - protein, 7 aa, synthetic construct
HLQKSAY

SEQ ID NO: 122373 - protein, 7 aa, synthetic construct
HLQRVQM

SEQ ID NO: 122374 - protein, 7 aa, synthetic construct
HLQSQRV

SEQ ID NO: 122375 - protein, 7 aa, synthetic construct
HLRGGMP

SEQ ID NO: 122376 - protein, 7 aa, synthetic construct
HLRHNYE

SEQ ID NO: 122377 - protein, 7 aa, synthetic construct
HLRNTAV

SEQ ID NO: 122378 - protein, 7 aa, synthetic construct
HLRNVTV

SEQ ID NO: 122379 - protein, 7 aa, synthetic construct
HLRPMST

SEQ ID NO: 122380 - protein, 7 aa, synthetic construct
HLRPNNV

SEQ ID NO: 122381 - protein, 7 aa, synthetic construct
HLRPQKE

SEQ ID NO: 122382 - protein, 7 aa, synthetic construct
HLRTDRP

SEQ ID NO: 122383 - protein, 7 aa, synthetic construct
HLSGHKA

SEQ ID NO: 122384 - protein, 7 aa, synthetic construct
HLSHKLA

SEQ ID NO: 122385 - protein, 7 aa, synthetic construct
HLSKMAI

SEQ ID NO: 122386 - protein, 7 aa, synthetic construct
HLSKMSH

SEQ ID NO: 122387 - protein, 7 aa, synthetic construct
HLSKNFP

SEQ ID NO: 122388 - protein, 7 aa, synthetic construct
HLSQAQR

SEQ ID NO: 122389 - protein, 7 aa, synthetic construct
HLSRGGI

SEQ ID NO: 122390 - protein, 7 aa, synthetic construct
HLSVHKI

SEQ ID NO: 122391 - protein, 7 aa, synthetic construct
HLSVKNM

SEQ ID NO: 122392 - protein, 7 aa, synthetic construct
HLTGASR

SEQ ID NO: 122393 - protein, 7 aa, synthetic construct
HLTNKHT

SEQ ID NO: 122394 - protein, 7 aa, synthetic construct
HLTNSQK

SEQ ID NO: 122395 - protein, 7 aa, synthetic construct
HLTQMSK

SEQ ID NO: 122396 - protein, 7 aa, synthetic construct
HLTYAKA

SEQ ID NO: 122397 - protein, 7 aa, synthetic construct
HLVHTSK

SEQ ID NO: 122398 - protein, 7 aa, synthetic construct
HLVNYKS

SEQ ID NO: 122399 - protein, 7 aa, synthetic construct
HLVRNTT

SEQ ID NO: 122400 - protein, 7 aa, synthetic construct
HMAHKHI

SEQ ID NO: 122401 - protein, 7 aa, synthetic construct
HMAKMNV

SEQ ID NO: 122402 - protein, 7 aa, synthetic construct
HMAQQRM

SEQ ID NO: 122403 - protein, 7 aa, synthetic construct
HMAQRVQ

SEQ ID NO: 122404 - protein, 7 aa, synthetic construct
HMASSPK

SEQ ID NO: 122405 - protein, 7 aa, synthetic construct
HMATVRT

SEQ ID NO: 122406 - protein, 7 aa, synthetic construct
HMAVRSN

SEQ ID NO: 122407 - protein, 7 aa, synthetic construct
HMDKPKF

SEQ ID NO: 122408 - protein, 7 aa, synthetic construct
HMDRKMG

SEQ ID NO: 122409 - protein, 7 aa, synthetic construct
HMGGSGK

SEQ ID NO: 122410 - protein, 7 aa, synthetic construct
HMGMNKI

SEQ ID NO: 122411 - protein, 7 aa, synthetic construct
HMGMRSP

SEQ ID NO: 122412 - protein, 7 aa, synthetic construct
HMGRAFA

SEQ ID NO: 122413 - protein, 7 aa, synthetic construct
HMGRTVP

SEQ ID NO: 122414 - protein, 7 aa, synthetic construct
HMGSSKM

SEQ ID NO: 122415 - protein, 7 aa, synthetic construct
HMGTQYK

SEQ ID NO: 122416 - protein, 7 aa, synthetic construct
HMGVNAK

SEQ ID NO: 122417 - protein, 7 aa, synthetic construct
HMIHKNP

SEQ ID NO: 122418 - protein, 7 aa, synthetic construct
HMIKHNA

SEQ ID NO: 122419 - protein, 7 aa, synthetic construct
HMIKSDR

SEQ ID NO: 122420 - protein, 7 aa, synthetic construct
HMIKTTA

SEQ ID NO: 122421 - protein, 7 aa, synthetic construct
HMKAMLA

SEQ ID NO: 122422 - protein, 7 aa, synthetic construct
HMKAVAL

SEQ ID NO: 122423 - protein, 7 aa, synthetic construct
HMKDAFK

SEQ ID NO: 122424 - protein, 7 aa, synthetic construct
HMKELNR

SEQ ID NO: 122425 - protein, 7 aa, synthetic construct
HMKGEQR

SEQ ID NO: 122426 - protein, 7 aa, synthetic construct
HMKGNYV

SEQ ID NO: 122427 - protein, 7 aa, synthetic construct
HMKIKDF

SEQ ID NO: 122428 - protein, 7 aa, synthetic construct
HMKIRDI

SEQ ID NO: 122429 - protein, 7 aa, synthetic construct
HMKISVA

SEQ ID NO: 122430 - protein, 7 aa, synthetic construct
HMKKFNE

SEQ ID NO: 122431 - protein, 7 aa, synthetic construct
HMKMRGE

SEQ ID NO: 122432 - protein, 7 aa, synthetic construct
HMKNHPS

SEQ ID NO: 122433 - protein, 7 aa, synthetic construct
HMKNHQP

SEQ ID NO: 122434 - protein, 7 aa, synthetic construct
HMKQPLN

SEQ ID NO: 122435 - protein, 7 aa, synthetic construct
HMKRDQL

SEQ ID NO: 122436 - protein, 7 aa, synthetic construct
HMKSAGF

SEQ ID NO: 122437 - protein, 7 aa, synthetic construct
HMKTYAG

SEQ ID NO: 122438 - protein, 7 aa, synthetic construct
HMKYKSE

SEQ ID NO: 122439 - protein, 7 aa, synthetic construct
HMLQKVS

SEQ ID NO: 122440 - protein, 7 aa, synthetic construct
HMMGVNR

SEQ ID NO: 122441 - protein, 7 aa, synthetic construct
HMMKVMP

SEQ ID NO: 122442 - protein, 7 aa, synthetic construct
HMMNGTK

SEQ ID NO: 122443 - protein, 7 aa, synthetic construct
HMMPKSP

SEQ ID NO: 122444 - protein, 7 aa, synthetic construct
HMNGRII

SEQ ID NO: 122445 - protein, 7 aa, synthetic construct
HMNKMQH

SEQ ID NO: 122446 - protein, 7 aa, synthetic construct
HMNTGNK

SEQ ID NO: 122447 - protein, 7 aa, synthetic construct
HMNTIKI

SEQ ID NO: 122448 - protein, 7 aa, synthetic construct
HMPKGFQ

SEQ ID NO: 122449 - protein, 7 aa, synthetic construct
HMPKQPM

SEQ ID NO: 122450 - protein, 7 aa, synthetic construct
HMPRMGV

SEQ ID NO: 122451 - protein, 7 aa, synthetic construct
HMPRNIQ

SEQ ID NO: 122452 - protein, 7 aa, synthetic construct
HMPRSGI

SEQ ID NO: 122453 - protein, 7 aa, synthetic construct
HMQHPKA

SEQ ID NO: 122454 - protein, 7 aa, synthetic construct
HMQKVML

SEQ ID NO: 122455 - protein, 7 aa, synthetic construct
HMQQKSV

SEQ ID NO: 122456 - protein, 7 aa, synthetic construct
HMQQRMP

SEQ ID NO: 122457 - protein, 7 aa, synthetic construct
HMQRLPP

SEQ ID NO: 122458 - protein, 7 aa, synthetic construct
HMQSRMP

SEQ ID NO: 122459 - protein, 7 aa, synthetic construct
HMQTTPR

SEQ ID NO: 122460 - protein, 7 aa, synthetic construct
HMRGFKE

SEQ ID NO: 122461 - protein, 7 aa, synthetic construct
HMRGLNP

SEQ ID NO: 122462 - protein, 7 aa, synthetic construct
HMRKMEN

SEQ ID NO: 122463 - protein, 7 aa, synthetic construct
HMRSAHI

SEQ ID NO: 122464 - protein, 7 aa, synthetic construct
HMSIAKV

SEQ ID NO: 122465 - protein, 7 aa, synthetic construct
HMSMMKS

SEQ ID NO: 122466 - protein, 7 aa, synthetic construct
HMSNKYP

SEQ ID NO: 122467 - protein, 7 aa, synthetic construct
HMSQPRV

SEQ ID NO: 122468 - protein, 7 aa, synthetic construct
HMSQRER

SEQ ID NO: 122469 - protein, 7 aa, synthetic construct
HMSTKYP

SEQ ID NO: 122470 - protein, 7 aa, synthetic construct
HMSTPGK

SEQ ID NO: 122471 - protein, 7 aa, synthetic construct
HMTKPSI

SEQ ID NO: 122472 - protein, 7 aa, synthetic construct
HMTSATR

SEQ ID NO: 122473 - protein, 7 aa, synthetic construct
HMTSTRI

SEQ ID NO: 122474 - protein, 7 aa, synthetic construct
HMVASAK

SEQ ID NO: 122475 - protein, 7 aa, synthetic construct
HMVKGHG

SEQ ID NO: 122476 - protein, 7 aa, synthetic construct
HMVNTAK

SEQ ID NO: 122477 - protein, 7 aa, synthetic construct
HMVRPSG

SEQ ID NO: 122478 - protein, 7 aa, synthetic construct
HMVRSNA

SEQ ID NO: 122479 - protein, 7 aa, synthetic construct
HMYGKQN

SEQ ID NO: 122480 - protein, 7 aa, synthetic construct
HMYHADK

SEQ ID NO: 122481 - protein, 7 aa, synthetic construct
HNAARPI

SEQ ID NO: 122482 - protein, 7 aa, synthetic construct
HNAGKYV

SEQ ID NO: 122483 - protein, 7 aa, synthetic construct
HNAHNRM

SEQ ID NO: 122484 - protein, 7 aa, synthetic construct
HNAMTSR

SEQ ID NO: 122485 - protein, 7 aa, synthetic construct
HNAQNMK

SEQ ID NO: 122486 - protein, 7 aa, synthetic construct
HNARMQV

SEQ ID NO: 122487 - protein, 7 aa, synthetic construct
HNARQMM

SEQ ID NO: 122488 - protein, 7 aa, synthetic construct
HNASVMR

SEQ ID NO: 122489 - protein, 7 aa, synthetic construct
HNATKQY

SEQ ID NO: 122490 - protein, 7 aa, synthetic construct
HNDKIGR

SEQ ID NO: 122491 - protein, 7 aa, synthetic construct
HNEMDWA

SEQ ID NO: 122492 - protein, 7 aa, synthetic construct
HNFNGGK

SEQ ID NO: 122493 - protein, 7 aa, synthetic construct
HNGAPRS

SEQ ID NO: 122494 - protein, 7 aa, synthetic construct
HNGAYLK

SEQ ID NO: 122495 - protein, 7 aa, synthetic construct
HNGGKDK

SEQ ID NO: 122496 - protein, 7 aa, synthetic construct
HNGGLAR

SEQ ID NO: 122497 - protein, 7 aa, synthetic construct
HNGGPGK

SEQ ID NO: 122498 - protein, 7 aa, synthetic construct
HNGGTIR

SEQ ID NO: 122499 - protein, 7 aa, synthetic construct
HNGITQR

SEQ ID NO: 122500 - protein, 7 aa, synthetic construct
HNGKQHV

SEQ ID NO: 122501 - protein, 7 aa, synthetic construct
HNGLSLR

SEQ ID NO: 122502 - protein, 7 aa, synthetic construct
HNGNAGK

SEQ ID NO: 122503 - protein, 7 aa, synthetic construct
HNGNSGK

SEQ ID NO: 122504 - protein, 7 aa, synthetic construct
HNGQFTR

SEQ ID NO: 122505 - protein, 7 aa, synthetic construct
HNGQIVR

SEQ ID NO: 122506 - protein, 7 aa, synthetic construct
HNGRQSI

SEQ ID NO: 122507 - protein, 7 aa, synthetic construct
HNGSGLR

SEQ ID NO: 122508 - protein, 7 aa, synthetic construct
HNGSIKH

SEQ ID NO: 122509 - protein, 7 aa, synthetic construct
HNGYRNV

SEQ ID NO: 122510 - protein, 7 aa, synthetic construct
HNHIGSK

SEQ ID NO: 122511 - protein, 7 aa, synthetic construct
HNHIKPL

SEQ ID NO: 122512 - protein, 7 aa, synthetic construct
HNHKMMP

SEQ ID NO: 122513 - protein, 7 aa, synthetic construct
HNHVKPN

SEQ ID NO: 122514 - protein, 7 aa, synthetic construct
HNHVTKL

SEQ ID NO: 122515 - protein, 7 aa, synthetic construct
HNIAGVR

SEQ ID NO: 122516 - protein, 7 aa, synthetic construct
HNIATPR

SEQ ID NO: 122517 - protein, 7 aa, synthetic construct
HNIKHQF

SEQ ID NO: 122518 - protein, 7 aa, synthetic construct
HNIKQQT

SEQ ID NO: 122519 - protein, 7 aa, synthetic construct
HNIPTRT

SEQ ID NO: 122520 - protein, 7 aa, synthetic construct
HNITRLV

SEQ ID NO: 122521 - protein, 7 aa, synthetic construct
HNKAFPI

SEQ ID NO: 122522 - protein, 7 aa, synthetic construct
HNKAHYA

SEQ ID NO: 122523 - protein, 7 aa, synthetic construct
HNKNPGY

SEQ ID NO: 122524 - protein, 7 aa, synthetic construct
HNKNVMV

SEQ ID NO: 122525 - protein, 7 aa, synthetic construct
HNKPKTD

SEQ ID NO: 122526 - protein, 7 aa, synthetic construct
HNKPNGN

SEQ ID NO: 122527 - protein, 7 aa, synthetic construct
HNKPSVV

SEQ ID NO: 122528 - protein, 7 aa, synthetic construct
HNKPVTN

SEQ ID NO: 122529 - protein, 7 aa, synthetic construct
HNKQQAI

SEQ ID NO: 122530 - protein, 7 aa, synthetic construct
HNKQSFP

SEQ ID NO: 122531 - protein, 7 aa, synthetic construct
HNKSNLN

SEQ ID NO: 122532 - protein, 7 aa, synthetic construct
HNKTMRD

SEQ ID NO: 122533 - protein, 7 aa, synthetic construct
HNKYIPP

SEQ ID NO: 122534 - protein, 7 aa, synthetic construct
HNLGSRA

SEQ ID NO: 122535 - protein, 7 aa, synthetic construct
HNLGSRP

SEQ ID NO: 122536 - protein, 7 aa, synthetic construct
HNLGTTK

SEQ ID NO: 122537 - protein, 7 aa, synthetic construct
HNMKMNF

SEQ ID NO: 122538 - protein, 7 aa, synthetic construct
HNMNRYG

SEQ ID NO: 122539 - protein, 7 aa, synthetic construct
HNMPKPA

SEQ ID NO: 122540 - protein, 7 aa, synthetic construct
HNNAKQI

SEQ ID NO: 122541 - protein, 7 aa, synthetic construct
HNNGGRM

SEQ ID NO: 122542 - protein, 7 aa, synthetic construct
HNNGQAK

SEQ ID NO: 122543 - protein, 7 aa, synthetic construct
HNNGRMV

SEQ ID NO: 122544 - protein, 7 aa, synthetic construct
HNNRMGS

SEQ ID NO: 122545 - protein, 7 aa, synthetic construct
HNPGKVY

SEQ ID NO: 122546 - protein, 7 aa, synthetic construct
HNPKAMI

SEQ ID NO: 122547 - protein, 7 aa, synthetic construct
HNPKQVT

SEQ ID NO: 122548 - protein, 7 aa, synthetic construct
HNPMRNT

SEQ ID NO: 122549 - protein, 7 aa, synthetic construct
HNPPTLK

SEQ ID NO: 122550 - protein, 7 aa, synthetic construct
HNPRQGN

SEQ ID NO: 122551 - protein, 7 aa, synthetic construct
HNPSTGK

SEQ ID NO: 122552 - protein, 7 aa, synthetic construct
HNPVIRQ

SEQ ID NO: 122553 - protein, 7 aa, synthetic construct
HNPVRGV

SEQ ID NO: 122554 - protein, 7 aa, synthetic construct
HNPVRHG

SEQ ID NO: 122555 - protein, 7 aa, synthetic construct
HNPVVKM

SEQ ID NO: 122556 - protein, 7 aa, synthetic construct
HNQEGDL

SEQ ID NO: 122557 - protein, 7 aa, synthetic construct
HNQGKSI

SEQ ID NO: 122558 - protein, 7 aa, synthetic construct
HNQGQRV

SEQ ID NO: 122559 - protein, 7 aa, synthetic construct
HNQKHPV

SEQ ID NO: 122560 - protein, 7 aa, synthetic construct
HNQQKAI

SEQ ID NO: 122561 - protein, 7 aa, synthetic construct
HNQVKVY

SEQ ID NO: 122562 - protein, 7 aa, synthetic construct
HNQYARV

SEQ ID NO: 122563 - protein, 7 aa, synthetic construct
HNRAAYN

SEQ ID NO: 122564 - protein, 7 aa, synthetic construct
HNRAVGM

SEQ ID NO: 122565 - protein, 7 aa, synthetic construct
HNRAVVH

SEQ ID NO: 122566 - protein, 7 aa, synthetic construct
HNRGPGP

SEQ ID NO: 122567 - protein, 7 aa, synthetic construct
HNRGSYI

SEQ ID NO: 122568 - protein, 7 aa, synthetic construct
HNRHQMS

SEQ ID NO: 122569 - protein, 7 aa, synthetic construct
HNRIKME

SEQ ID NO: 122570 - protein, 7 aa, synthetic construct
HNRSSAY

SEQ ID NO: 122571 - protein, 7 aa, synthetic construct
HNRVHNT

SEQ ID NO: 122572 - protein, 7 aa, synthetic construct
HNSAPRQ

SEQ ID NO: 122573 - protein, 7 aa, synthetic construct
HNSATPR

SEQ ID NO: 122574 - protein, 7 aa, synthetic construct
HNSLKQY

SEQ ID NO: 122575 - protein, 7 aa, synthetic construct
HNSLPRA

SEQ ID NO: 122576 - protein, 7 aa, synthetic construct
HNSPYKV

SEQ ID NO: 122577 - protein, 7 aa, synthetic construct
HNSQGMK

SEQ ID NO: 122578 - protein, 7 aa, synthetic construct
HNSTNVK

SEQ ID NO: 122579 - protein, 7 aa, synthetic construct
HNSVMNR

SEQ ID NO: 122580 - protein, 7 aa, synthetic construct
HNSYKSM

SEQ ID NO: 122581 - protein, 7 aa, synthetic construct
HNTGTPR

SEQ ID NO: 122582 - protein, 7 aa, synthetic construct
HNTKHVL

SEQ ID NO: 122583 - protein, 7 aa, synthetic construct
HNTMAPR

SEQ ID NO: 122584 - protein, 7 aa, synthetic construct
HNTMPRV

SEQ ID NO: 122585 - protein, 7 aa, synthetic construct
HNTNKQI

SEQ ID NO: 122586 - protein, 7 aa, synthetic construct
HNTRVTI

SEQ ID NO: 122587 - protein, 7 aa, synthetic construct
HNTVHNK

SEQ ID NO: 122588 - protein, 7 aa, synthetic construct
HNTVRSV

SEQ ID NO: 122589 - protein, 7 aa, synthetic construct
HNVGAAK

SEQ ID NO: 122590 - protein, 7 aa, synthetic construct
HNVGSRG

SEQ ID NO: 122591 - protein, 7 aa, synthetic construct
HNVGVRM

SEQ ID NO: 122592 - protein, 7 aa, synthetic construct
HNVMKTI

SEQ ID NO: 122593 - protein, 7 aa, synthetic construct
HNYKNQF

SEQ ID NO: 122594 - protein, 7 aa, synthetic construct
HNYNLGK

SEQ ID NO: 122595 - protein, 7 aa, synthetic construct
HNYNRGP

SEQ ID NO: 122596 - protein, 7 aa, synthetic construct
HPAAKAL

SEQ ID NO: 122597 - protein, 7 aa, synthetic construct
HPAANSR

SEQ ID NO: 122598 - protein, 7 aa, synthetic construct
HPAIQKN

SEQ ID NO: 122599 - protein, 7 aa, synthetic construct
HPAKISM

SEQ ID NO: 122600 - protein, 7 aa, synthetic construct
HPAKRQE

SEQ ID NO: 122601 - protein, 7 aa, synthetic construct
HPAPTGR

SEQ ID NO: 122602 - protein, 7 aa, synthetic construct
HPARGMM

SEQ ID NO: 122603 - protein, 7 aa, synthetic construct
HPATLRA

SEQ ID NO: 122604 - protein, 7 aa, synthetic construct
HPAVKVL

SEQ ID NO: 122605 - protein, 7 aa, synthetic construct
HPDKRYP

SEQ ID NO: 122606 - protein, 7 aa, synthetic construct
HPDRGKA

SEQ ID NO: 122607 - protein, 7 aa, synthetic construct
HPEYATR

SEQ ID NO: 122608 - protein, 7 aa, synthetic construct
HPGGNPR

SEQ ID NO: 122609 - protein, 7 aa, synthetic construct
HPGIHKP

SEQ ID NO: 122610 - protein, 7 aa, synthetic construct
HPGKERQ

SEQ ID NO: 122611 - protein, 7 aa, synthetic construct
HPGKFKD

SEQ ID NO: 122612 - protein, 7 aa, synthetic construct
HPGKIMQ

SEQ ID NO: 122613 - protein, 7 aa, synthetic construct
HPGKQYA

SEQ ID NO: 122614 - protein, 7 aa, synthetic construct
HPGKSLL

SEQ ID NO: 122615 - protein, 7 aa, synthetic construct
HPGKVHL

SEQ ID NO: 122616 - protein, 7 aa, synthetic construct
HPGMRTM

SEQ ID NO: 122617 - protein, 7 aa, synthetic construct
HPGMTKS

SEQ ID NO: 122618 - protein, 7 aa, synthetic construct
HPGMYKG

SEQ ID NO: 122619 - protein, 7 aa, synthetic construct
HPGPAAR

SEQ ID NO: 122620 - protein, 7 aa, synthetic construct
HPGRATL

SEQ ID NO: 122621 - protein, 7 aa, synthetic construct
HPGRISA

SEQ ID NO: 122622 - protein, 7 aa, synthetic construct
HPGRISS

SEQ ID NO: 122623 - protein, 7 aa, synthetic construct
HPGRLNQ

SEQ ID NO: 122624 - protein, 7 aa, synthetic construct
HPGRSVT

SEQ ID NO: 122625 - protein, 7 aa, synthetic construct
HPGSSKN

SEQ ID NO: 122626 - protein, 7 aa, synthetic construct
HPGTSGR

SEQ ID NO: 122627 - protein, 7 aa, synthetic construct
HPGVAMR

SEQ ID NO: 122628 - protein, 7 aa, synthetic construct
HPGVLRP

SEQ ID NO: 122629 - protein, 7 aa, synthetic construct
HPGYTMK

SEQ ID NO: 122630 - protein, 7 aa, synthetic construct
HPHKPTI

SEQ ID NO: 122631 - protein, 7 aa, synthetic construct
HPHKQPQ

SEQ ID NO: 122632 - protein, 7 aa, synthetic construct
HPHMKNP

SEQ ID NO: 122633 - protein, 7 aa, synthetic construct
HPHPMRG

SEQ ID NO: 122634 - protein, 7 aa, synthetic construct
HPIKGMP

SEQ ID NO: 122635 - protein, 7 aa, synthetic construct
HPIKHQQ

SEQ ID NO: 122636 - protein, 7 aa, synthetic construct
HPKANYN

SEQ ID NO: 122637 - protein, 7 aa, synthetic construct
HPKAPKD

SEQ ID NO: 122638 - protein, 7 aa, synthetic construct
HPKASVM

SEQ ID NO: 122639 - protein, 7 aa, synthetic construct
HPKGYPN

SEQ ID NO: 122640 - protein, 7 aa, synthetic construct
HPKHSLQ

SEQ ID NO: 122641 - protein, 7 aa, synthetic construct
HPKHVTA

SEQ ID NO: 122642 - protein, 7 aa, synthetic construct
HPKIHGI

SEQ ID NO: 122643 - protein, 7 aa, synthetic construct
HPKIPLQ

SEQ ID NO: 122644 - protein, 7 aa, synthetic construct
HPKIRVD

SEQ ID NO: 122645 - protein, 7 aa, synthetic construct
HPKIVMS

SEQ ID NO: 122646 - protein, 7 aa, synthetic construct
HPKMLTT

SEQ ID NO: 122647 - protein, 7 aa, synthetic construct
HPKMQQF

SEQ ID NO: 122648 - protein, 7 aa, synthetic construct
HPKMTML

SEQ ID NO: 122649 - protein, 7 aa, synthetic construct
HPKNPHF

SEQ ID NO: 122650 - protein, 7 aa, synthetic construct
HPKPNYM

SEQ ID NO: 122651 - protein, 7 aa, synthetic construct
HPKPYPA

SEQ ID NO: 122652 - protein, 7 aa, synthetic construct
HPKQGPM

SEQ ID NO: 122653 - protein, 7 aa, synthetic construct
HPKQPSN

SEQ ID NO: 122654 - protein, 7 aa, synthetic construct
HPKSPQF

SEQ ID NO: 122655 - protein, 7 aa, synthetic construct
HPKTDRF

SEQ ID NO: 122656 - protein, 7 aa, synthetic construct
HPLKRME

SEQ ID NO: 122657 - protein, 7 aa, synthetic construct
HPLRNAP

SEQ ID NO: 122658 - protein, 7 aa, synthetic construct
HPMAGAK

SEQ ID NO: 122659 - protein, 7 aa, synthetic construct
HPMGYKQ

SEQ ID NO: 122660 - protein, 7 aa, synthetic construct
HPMKGII

SEQ ID NO: 122661 - protein, 7 aa, synthetic construct
HPMKPVP

SEQ ID NO: 122662 - protein, 7 aa, synthetic construct
HPMNPKA

SEQ ID NO: 122663 - protein, 7 aa, synthetic construct
HPMRSGI

SEQ ID NO: 122664 - protein, 7 aa, synthetic construct
HPMTQSK

SEQ ID NO: 122665 - protein, 7 aa, synthetic construct
HPNKPNT

SEQ ID NO: 122666 - protein, 7 aa, synthetic construct
HPNKPSM

SEQ ID NO: 122667 - protein, 7 aa, synthetic construct
HPNPQRA

SEQ ID NO: 122668 - protein, 7 aa, synthetic construct
HPNRIVA

SEQ ID NO: 122669 - protein, 7 aa, synthetic construct
HPNRLTS

SEQ ID NO: 122670 - protein, 7 aa, synthetic construct
HPNRQNT

SEQ ID NO: 122671 - protein, 7 aa, synthetic construct
HPNTRLQ

SEQ ID NO: 122672 - protein, 7 aa, synthetic construct
HPNVSQR

SEQ ID NO: 122673 - protein, 7 aa, synthetic construct
HPNVVRV

SEQ ID NO: 122674 - protein, 7 aa, synthetic construct
HPPNVRQ

SEQ ID NO: 122675 - protein, 7 aa, synthetic construct
HPPNYGK

SEQ ID NO: 122676 - protein, 7 aa, synthetic construct
HPPPSQR

SEQ ID NO: 122677 - protein, 7 aa, synthetic construct
HPPRTQI

SEQ ID NO: 122678 - protein, 7 aa, synthetic construct
HPPSLQK

SEQ ID NO: 122679 - protein, 7 aa, synthetic construct
HPQKFAA

SEQ ID NO: 122680 - protein, 7 aa, synthetic construct
HPQNAQR

SEQ ID NO: 122681 - protein, 7 aa, synthetic construct
HPQQKFI

SEQ ID NO: 122682 - protein, 7 aa, synthetic construct
HPQRAIP

SEQ ID NO: 122683 - protein, 7 aa, synthetic construct
HPQRPSL

SEQ ID NO: 122684 - protein, 7 aa, synthetic construct
HPQSVPR

SEQ ID NO: 122685 - protein, 7 aa, synthetic construct
HPRLATP

SEQ ID NO: 122686 - protein, 7 aa, synthetic construct
HPRNQVQ

SEQ ID NO: 122687 - protein, 7 aa, synthetic construct
HPRPIAM

SEQ ID NO: 122688 - protein, 7 aa, synthetic construct
HPRPTLQ

SEQ ID NO: 122689 - protein, 7 aa, synthetic construct
HPRPTPS

SEQ ID NO: 122690 - protein, 7 aa, synthetic construct
HPRSPAN

SEQ ID NO: 122691 - protein, 7 aa, synthetic construct
HPRVSHA

SEQ ID NO: 122692 - protein, 7 aa, synthetic construct
HPRVSTA

SEQ ID NO: 122693 - protein, 7 aa, synthetic construct
HPSKPIF

SEQ ID NO: 122694 - protein, 7 aa, synthetic construct
HPSKPVT

SEQ ID NO: 122695 - protein, 7 aa, synthetic construct
HPSKYAG

SEQ ID NO: 122696 - protein, 7 aa, synthetic construct
HPSKYGG

SEQ ID NO: 122697 - protein, 7 aa, synthetic construct
HPSPAGR

SEQ ID NO: 122698 - protein, 7 aa, synthetic construct
HPSPRAT

SEQ ID NO: 122699 - protein, 7 aa, synthetic construct
HPSQKMF

SEQ ID NO: 122700 - protein, 7 aa, synthetic construct
HPSQRIV

SEQ ID NO: 122701 - protein, 7 aa, synthetic construct
HPSRPVL

SEQ ID NO: 122702 - protein, 7 aa, synthetic construct
HPSVMQR

SEQ ID NO: 122703 - protein, 7 aa, synthetic construct
HPSYGNR

SEQ ID NO: 122704 - protein, 7 aa, synthetic construct
HPTGRIA

SEQ ID NO: 122705 - protein, 7 aa, synthetic construct
HPTGYKG

SEQ ID NO: 122706 - protein, 7 aa, synthetic construct
HPTKAYA

SEQ ID NO: 122707 - protein, 7 aa, synthetic construct
HPTKERM

SEQ ID NO: 122708 - protein, 7 aa, synthetic construct
HPTKFVA

SEQ ID NO: 122709 - protein, 7 aa, synthetic construct
HPTKHSV

SEQ ID NO: 122710 - protein, 7 aa, synthetic construct
HPTKLQL

SEQ ID NO: 122711 - protein, 7 aa, synthetic construct
HPTKRET

SEQ ID NO: 122712 - protein, 7 aa, synthetic construct
HPTKYKE

SEQ ID NO: 122713 - protein, 7 aa, synthetic construct
HPTPSKF

SEQ ID NO: 122714 - protein, 7 aa, synthetic construct
HPTREGR

SEQ ID NO: 122715 - protein, 7 aa, synthetic construct
HPTRERT

SEQ ID NO: 122716 - protein, 7 aa, synthetic construct
HPTRPMP

SEQ ID NO: 122717 - protein, 7 aa, synthetic construct
HPTRPNQ

SEQ ID NO: 122718 - protein, 7 aa, synthetic construct
HPTRPQV

SEQ ID NO: 122719 - protein, 7 aa, synthetic construct
HPTRSAG

SEQ ID NO: 122720 - protein, 7 aa, synthetic construct
HPTSQQR

SEQ ID NO: 122721 - protein, 7 aa, synthetic construct
HPTTSRN

SEQ ID NO: 122722 - protein, 7 aa, synthetic construct
HPTVIKN

SEQ ID NO: 122723 - protein, 7 aa, synthetic construct
HPVARPS

SEQ ID NO: 122724 - protein, 7 aa, synthetic construct
HPVHHDD

SEQ ID NO: 122725 - protein, 7 aa, synthetic construct
HPVKPDR

SEQ ID NO: 122726 - protein, 7 aa, synthetic construct
HPVKTLT

SEQ ID NO: 122727 - protein, 7 aa, synthetic construct
HPVRGPV

SEQ ID NO: 122728 - protein, 7 aa, synthetic construct
HPYPAKG

SEQ ID NO: 122729 - protein, 7 aa, synthetic construct
HQAFIAQ

SEQ ID NO: 122730 - protein, 7 aa, synthetic construct
HQAKYQV

SEQ ID NO: 122731 - protein, 7 aa, synthetic construct
HQALTRN

SEQ ID NO: 122732 - protein, 7 aa, synthetic construct
HQAMQKY

SEQ ID NO: 122733 - protein, 7 aa, synthetic construct
HQAPQKS

SEQ ID NO: 122734 - protein, 7 aa, synthetic construct
HQAPRAP

SEQ ID NO: 122735 - protein, 7 aa, synthetic construct
HQAQYAK

SEQ ID NO: 122736 - protein, 7 aa, synthetic construct
HQARTNV

SEQ ID NO: 122737 - protein, 7 aa, synthetic construct
HQATKNF

SEQ ID NO: 122738 - protein, 7 aa, synthetic construct
HQAVRGT

SEQ ID NO: 122739 - protein, 7 aa, synthetic construct
HQAYGVV

SEQ ID NO: 122740 - protein, 7 aa, synthetic construct
HQEKQNR

SEQ ID NO: 122741 - protein, 7 aa, synthetic construct
HQFKTGM

SEQ ID NO: 122742 - protein, 7 aa, synthetic construct
HQFPQAI

SEQ ID NO: 122743 - protein, 7 aa, synthetic construct
HQGAVKM

SEQ ID NO: 122744 - protein, 7 aa, synthetic construct
HQGGGAR

SEQ ID NO: 122745 - protein, 7 aa, synthetic construct
HQGGKVL

SEQ ID NO: 122746 - protein, 7 aa, synthetic construct
HQGGPRV

SEQ ID NO: 122747 - protein, 7 aa, synthetic construct
HQGGRGI

SEQ ID NO: 122748 - protein, 7 aa, synthetic construct
HQGIKKD

SEQ ID NO: 122749 - protein, 7 aa, synthetic construct
HQGMPYK

SEQ ID NO: 122750 - protein, 7 aa, synthetic construct
HQGMTNR

SEQ ID NO: 122751 - protein, 7 aa, synthetic construct
HQGMVPR

SEQ ID NO: 122752 - protein, 7 aa, synthetic construct
HQGNFAK

SEQ ID NO: 122753 - protein, 7 aa, synthetic construct
HQGPATK

SEQ ID NO: 122754 - protein, 7 aa, synthetic construct
HQGQTRV

SEQ ID NO: 122755 - protein, 7 aa, synthetic construct
HQGRIGP

SEQ ID NO: 122756 - protein, 7 aa, synthetic construct
HQGTMPR

SEQ ID NO: 122757 - protein, 7 aa, synthetic construct
HQGVTYK

SEQ ID NO: 122758 - protein, 7 aa, synthetic construct
HQHHFPQ

SEQ ID NO: 122759 - protein, 7 aa, synthetic construct
HQHKAPV

SEQ ID NO: 122760 - protein, 7 aa, synthetic construct
HQIASPY

SEQ ID NO: 122761 - protein, 7 aa, synthetic construct
HQIGLRT

SEQ ID NO: 122762 - protein, 7 aa, synthetic construct
HQIGSRI

SEQ ID NO: 122763 - protein, 7 aa, synthetic construct
HQIGTIR

SEQ ID NO: 122764 - protein, 7 aa, synthetic construct
HQIKGPL

SEQ ID NO: 122765 - protein, 7 aa, synthetic construct
HQIKIGS

SEQ ID NO: 122766 - protein, 7 aa, synthetic construct
HQIKQFN

SEQ ID NO: 122767 - protein, 7 aa, synthetic construct
HQIKSNY

SEQ ID NO: 122768 - protein, 7 aa, synthetic construct
HQIKTSH

SEQ ID NO: 122769 - protein, 7 aa, synthetic construct
HQINNGR

SEQ ID NO: 122770 - protein, 7 aa, synthetic construct
HQIRTGL

SEQ ID NO: 122771 - protein, 7 aa, synthetic construct
HQIVGSK

SEQ ID NO: 122772 - protein, 7 aa, synthetic construct
HQKAAYN

SEQ ID NO: 122773 - protein, 7 aa, synthetic construct
HQKAQMN

SEQ ID NO: 122774 - protein, 7 aa, synthetic construct
HQKASNT

SEQ ID NO: 122775 - protein, 7 aa, synthetic construct
HQKATDR

SEQ ID NO: 122776 - protein, 7 aa, synthetic construct
HQKDKIQ

SEQ ID NO: 122777 - protein, 7 aa, synthetic construct
HQKDRPM

SEQ ID NO: 122778 - protein, 7 aa, synthetic construct
HQKFSPN

SEQ ID NO: 122779 - protein, 7 aa, synthetic construct
HQKGPFN

SEQ ID NO: 122780 - protein, 7 aa, synthetic construct
HQKHQIP

SEQ ID NO: 122781 - protein, 7 aa, synthetic construct
HQKLAMM

SEQ ID NO: 122782 - protein, 7 aa, synthetic construct
HQKMHVT

SEQ ID NO: 122783 - protein, 7 aa, synthetic construct
HQKNSFP

SEQ ID NO: 122784 - protein, 7 aa, synthetic construct
HQKPLGL

SEQ ID NO: 122785 - protein, 7 aa, synthetic construct
HQKPMNM

SEQ ID NO: 122786 - protein, 7 aa, synthetic construct
HQKPNAL

SEQ ID NO: 122787 - protein, 7 aa, synthetic construct
HQKPNAN

SEQ ID NO: 122788 - protein, 7 aa, synthetic construct
HQKPQTM

SEQ ID NO: 122789 - protein, 7 aa, synthetic construct
HQKPTMY

SEQ ID NO: 122790 - protein, 7 aa, synthetic construct
HQKPVTF

SEQ ID NO: 122791 - protein, 7 aa, synthetic construct
HQKQQML

SEQ ID NO: 122792 - protein, 7 aa, synthetic construct
HQKSLDK

SEQ ID NO: 122793 - protein, 7 aa, synthetic construct
HQKSNPF

SEQ ID NO: 122794 - protein, 7 aa, synthetic construct
HQKSSSQ

SEQ ID NO: 122795 - protein, 7 aa, synthetic construct
HQKTNQQ

SEQ ID NO: 122796 - protein, 7 aa, synthetic construct
HQKVTFA

SEQ ID NO: 122797 - protein, 7 aa, synthetic construct
HQKVTPY

SEQ ID NO: 122798 - protein, 7 aa, synthetic construct
HQKYIDQ

SEQ ID NO: 122799 - protein, 7 aa, synthetic construct
HQKYLKE

SEQ ID NO: 122800 - protein, 7 aa, synthetic construct
HQLKMVA

SEQ ID NO: 122801 - protein, 7 aa, synthetic construct
HQLKNMQ

SEQ ID NO: 122802 - protein, 7 aa, synthetic construct
HQLKSQQ

SEQ ID NO: 122803 - protein, 7 aa, synthetic construct
HQLNRGI

SEQ ID NO: 122804 - protein, 7 aa, synthetic construct
HQLNTRT

SEQ ID NO: 122805 - protein, 7 aa, synthetic construct
HQLPVKV

SEQ ID NO: 122806 - protein, 7 aa, synthetic construct
HQLSNGK

SEQ ID NO: 122807 - protein, 7 aa, synthetic construct
HQMAKQV

SEQ ID NO: 122808 - protein, 7 aa, synthetic construct
HQMARGA

SEQ ID NO: 122809 - protein, 7 aa, synthetic construct
HQMASQK

SEQ ID NO: 122810 - protein, 7 aa, synthetic construct
HQMHMKQ

SEQ ID NO: 122811 - protein, 7 aa, synthetic construct
HQMKGHV

SEQ ID NO: 122812 - protein, 7 aa, synthetic construct
HQMKVSI

SEQ ID NO: 122813 - protein, 7 aa, synthetic construct
HQMLKNM

SEQ ID NO: 122814 - protein, 7 aa, synthetic construct
HQMNRHT

SEQ ID NO: 122815 - protein, 7 aa, synthetic construct
HQMPKIA

SEQ ID NO: 122816 - protein, 7 aa, synthetic construct
HQMPKNS

SEQ ID NO: 122817 - protein, 7 aa, synthetic construct
HQMPKTN

SEQ ID NO: 122818 - protein, 7 aa, synthetic construct
HQMRMKE

SEQ ID NO: 122819 - protein, 7 aa, synthetic construct
HQMRTHP

SEQ ID NO: 122820 - protein, 7 aa, synthetic construct
HQMSTNK

SEQ ID NO: 122821 - protein, 7 aa, synthetic construct
HQNALQR

SEQ ID NO: 122822 - protein, 7 aa, synthetic construct
HQNGQMR

SEQ ID NO: 122823 - protein, 7 aa, synthetic construct
HQNKSLT

SEQ ID NO: 122824 - protein, 7 aa, synthetic construct
HQNMKVY

SEQ ID NO: 122825 - protein, 7 aa, synthetic construct
HQNMRPI

SEQ ID NO: 122826 - protein, 7 aa, synthetic construct
HQNNKVI

SEQ ID NO: 122827 - protein, 7 aa, synthetic construct
HQNQKGT

SEQ ID NO: 122828 - protein, 7 aa, synthetic construct
HQNSNFR

SEQ ID NO: 122829 - protein, 7 aa, synthetic construct
HQNSRIM

SEQ ID NO: 122830 - protein, 7 aa, synthetic construct
HQPAMRG

SEQ ID NO: 122831 - protein, 7 aa, synthetic construct
HQPGRTI

SEQ ID NO: 122832 - protein, 7 aa, synthetic construct
HQPKNAY

SEQ ID NO: 122833 - protein, 7 aa, synthetic construct
HQPMKLS

SEQ ID NO: 122834 - protein, 7 aa, synthetic construct
HQPRGLA

SEQ ID NO: 122835 - protein, 7 aa, synthetic construct
HQPRIGV

SEQ ID NO: 122836 - protein, 7 aa, synthetic construct
HQPRMSQ

SEQ ID NO: 122837 - protein, 7 aa, synthetic construct
HQPRMVQ

SEQ ID NO: 122838 - protein, 7 aa, synthetic construct
HQPRVIA

SEQ ID NO: 122839 - protein, 7 aa, synthetic construct
HQPSKNF

SEQ ID NO: 122840 - protein, 7 aa, synthetic construct
HQQAMNK

SEQ ID NO: 122841 - protein, 7 aa, synthetic construct
HQQHARG

SEQ ID NO: 122842 - protein, 7 aa, synthetic construct
HQQHRQM

SEQ ID NO: 122843 - protein, 7 aa, synthetic construct
HQQKGMQ

SEQ ID NO: 122844 - protein, 7 aa, synthetic construct
HQQKNGL

SEQ ID NO: 122845 - protein, 7 aa, synthetic construct
HQQKSGW

SEQ ID NO: 122846 - protein, 7 aa, synthetic construct
HQQMPKY

SEQ ID NO: 122847 - protein, 7 aa, synthetic construct
HQQNRGS

SEQ ID NO: 122848 - protein, 7 aa, synthetic construct
HQQQRPI

SEQ ID NO: 122849 - protein, 7 aa, synthetic construct
HQQQRQN

SEQ ID NO: 122850 - protein, 7 aa, synthetic construct
HQQTGTR

SEQ ID NO: 122851 - protein, 7 aa, synthetic construct
HQQTKMN

SEQ ID NO: 122852 - protein, 7 aa, synthetic construct
HQQVSKH

SEQ ID NO: 122853 - protein, 7 aa, synthetic construct
HQRGAPI

SEQ ID NO: 122854 - protein, 7 aa, synthetic construct
HQRIMPA

SEQ ID NO: 122855 - protein, 7 aa, synthetic construct
HQRMNGI

SEQ ID NO: 122856 - protein, 7 aa, synthetic construct
HQRNLAV

SEQ ID NO: 122857 - protein, 7 aa, synthetic construct
HQRNPTF

SEQ ID NO: 122858 - protein, 7 aa, synthetic construct
HQSIVVK

SEQ ID NO: 122859 - protein, 7 aa, synthetic construct
HQSKANL

SEQ ID NO: 122860 - protein, 7 aa, synthetic construct
HQSKNMI

SEQ ID NO: 122861 - protein, 7 aa, synthetic construct
HQSKPLL

SEQ ID NO: 122862 - protein, 7 aa, synthetic construct
HQSKQLL

SEQ ID NO: 122863 - protein, 7 aa, synthetic construct
HQSMRVM

SEQ ID NO: 122864 - protein, 7 aa, synthetic construct
HQSNPKT

SEQ ID NO: 122865 - protein, 7 aa, synthetic construct
HQSPKAA

SEQ ID NO: 122866 - protein, 7 aa, synthetic construct
HQSQLRQ

SEQ ID NO: 122867 - protein, 7 aa, synthetic construct
HQSSIVR

SEQ ID NO: 122868 - protein, 7 aa, synthetic construct
HQSSLKM

SEQ ID NO: 122869 - protein, 7 aa, synthetic construct
HQSVGNK

SEQ ID NO: 122870 - protein, 7 aa, synthetic construct
HQSYISV

SEQ ID NO: 122871 - protein, 7 aa, synthetic construct
HQTAGRA

SEQ ID NO: 122872 - protein, 7 aa, synthetic construct
HQTANPK

SEQ ID NO: 122873 - protein, 7 aa, synthetic construct
HQTATQK

SEQ ID NO: 122874 - protein, 7 aa, synthetic construct
HQTFSKG

SEQ ID NO: 122875 - protein, 7 aa, synthetic construct
HQTGKSQ

SEQ ID NO: 122876 - protein, 7 aa, synthetic construct
HQTKAVL

SEQ ID NO: 122877 - protein, 7 aa, synthetic construct
HQTKESR

SEQ ID NO: 122878 - protein, 7 aa, synthetic construct
HQTKSDR

SEQ ID NO: 122879 - protein, 7 aa, synthetic construct
HQTNSIR

SEQ ID NO: 122880 - protein, 7 aa, synthetic construct
HQTRTPQ

SEQ ID NO: 122881 - protein, 7 aa, synthetic construct
HQTTFKS

SEQ ID NO: 122882 - protein, 7 aa, synthetic construct
HQTTNKY

SEQ ID NO: 122883 - protein, 7 aa, synthetic construct
HQTVGNK

SEQ ID NO: 122884 - protein, 7 aa, synthetic construct
HQTVMRS

SEQ ID NO: 122885 - protein, 7 aa, synthetic construct
HQVAGRM

SEQ ID NO: 122886 - protein, 7 aa, synthetic construct
HQVKKFE

SEQ ID NO: 122887 - protein, 7 aa, synthetic construct
HQVKNNN

SEQ ID NO: 122888 - protein, 7 aa, synthetic construct
HQVNTTR

SEQ ID NO: 122889 - protein, 7 aa, synthetic construct
HQVQSKQ

SEQ ID NO: 122890 - protein, 7 aa, synthetic construct
HQVQTRM

SEQ ID NO: 122891 - protein, 7 aa, synthetic construct
HQVTPLN

SEQ ID NO: 122892 - protein, 7 aa, synthetic construct
HQVVGRA

SEQ ID NO: 122893 - protein, 7 aa, synthetic construct
HQYASPT

SEQ ID NO: 122894 - protein, 7 aa, synthetic construct
HQYGIKA

SEQ ID NO: 122895 - protein, 7 aa, synthetic construct
HQYGVKS

SEQ ID NO: 122896 - protein, 7 aa, synthetic construct
HQYKANM

SEQ ID NO: 122897 - protein, 7 aa, synthetic construct
HQYKIQA

SEQ ID NO: 122898 - protein, 7 aa, synthetic construct
HQYKSQV

SEQ ID NO: 122899 - protein, 7 aa, synthetic construct
HQYSTLV

SEQ ID NO: 122900 - protein, 7 aa, synthetic construct
HRAATVM

SEQ ID NO: 122901 - protein, 7 aa, synthetic construct
HRAGNAV

SEQ ID NO: 122902 - protein, 7 aa, synthetic construct
HRAGSIV

SEQ ID NO: 122903 - protein, 7 aa, synthetic construct
HRAGSVV

SEQ ID NO: 122904 - protein, 7 aa, synthetic construct
HRAPHTP

SEQ ID NO: 122905 - protein, 7 aa, synthetic construct
HRAPNTV

SEQ ID NO: 122906 - protein, 7 aa, synthetic construct
HRAQTSV

SEQ ID NO: 122907 - protein, 7 aa, synthetic construct
HRDKNVI

SEQ ID NO: 122908 - protein, 7 aa, synthetic construct
HRDLVKT

SEQ ID NO: 122909 - protein, 7 aa, synthetic construct
HRDMRMN

SEQ ID NO: 122910 - protein, 7 aa, synthetic construct
HRDSLKT

SEQ ID NO: 122911 - protein, 7 aa, synthetic construct
HREHRMQ

SEQ ID NO: 122912 - protein, 7 aa, synthetic construct
HREKTFT

SEQ ID NO: 122913 - protein, 7 aa, synthetic construct
HREPPRT

SEQ ID NO: 122914 - protein, 7 aa, synthetic construct
HREQKTV

SEQ ID NO: 122915 - protein, 7 aa, synthetic construct
HREVRAA

SEQ ID NO: 122916 - protein, 7 aa, synthetic construct
HREYKVH

SEQ ID NO: 122917 - protein, 7 aa, synthetic construct
HRGGLGA

SEQ ID NO: 122918 - protein, 7 aa, synthetic construct
HRGGLLN

SEQ ID NO: 122919 - protein, 7 aa, synthetic construct
HRGGLTN

SEQ ID NO: 122920 - protein, 7 aa, synthetic construct
HRGGTSS

SEQ ID NO: 122921 - protein, 7 aa, synthetic construct
HRGLNTA

SEQ ID NO: 122922 - protein, 7 aa, synthetic construct
HRGLTGG

SEQ ID NO: 122923 - protein, 7 aa, synthetic construct
HRGNLPN

SEQ ID NO: 122924 - protein, 7 aa, synthetic construct
HRGPVIS

SEQ ID NO: 122925 - protein, 7 aa, synthetic construct
HRGQAPP

SEQ ID NO: 122926 - protein, 7 aa, synthetic construct
HRGQTQI

SEQ ID NO: 122927 - protein, 7 aa, synthetic construct
HRGQVPG

SEQ ID NO: 122928 - protein, 7 aa, synthetic construct
HRGSQTG

SEQ ID NO: 122929 - protein, 7 aa, synthetic construct
HRGTNVI

SEQ ID NO: 122930 - protein, 7 aa, synthetic construct
HRGVIGG

SEQ ID NO: 122931 - protein, 7 aa, synthetic construct
HRIPMTT

SEQ ID NO: 122932 - protein, 7 aa, synthetic construct
HRLQGPP

SEQ ID NO: 122933 - protein, 7 aa, synthetic construct
HRMAGNS

SEQ ID NO: 122934 - protein, 7 aa, synthetic construct
HRMPTGP

SEQ ID NO: 122935 - protein, 7 aa, synthetic construct
HRNFNQN

SEQ ID NO: 122936 - protein, 7 aa, synthetic construct
HRNNQMS

SEQ ID NO: 122937 - protein, 7 aa, synthetic construct
HRNNTWE

SEQ ID NO: 122938 - protein, 7 aa, synthetic construct
HRNQIPN

SEQ ID NO: 122939 - protein, 7 aa, synthetic construct
HRNSISV

SEQ ID NO: 122940 - protein, 7 aa, synthetic construct
HRNTGGY

SEQ ID NO: 122941 - protein, 7 aa, synthetic construct
HRNTSMM

SEQ ID NO: 122942 - protein, 7 aa, synthetic construct
HRNVTAI

SEQ ID NO: 122943 - protein, 7 aa, synthetic construct
HRPDRTF

SEQ ID NO: 122944 - protein, 7 aa, synthetic construct
HRPGTGS

SEQ ID NO: 122945 - protein, 7 aa, synthetic construct
HRPKMLE

SEQ ID NO: 122946 - protein, 7 aa, synthetic construct
HRPLTNN

SEQ ID NO: 122947 - protein, 7 aa, synthetic construct
HRPMVNS

SEQ ID NO: 122948 - protein, 7 aa, synthetic construct
HRPNAIT

SEQ ID NO: 122949 - protein, 7 aa, synthetic construct
HRPNQII

SEQ ID NO: 122950 - protein, 7 aa, synthetic construct
HRPPNTA

SEQ ID NO: 122951 - protein, 7 aa, synthetic construct
HRPPTLM

SEQ ID NO: 122952 - protein, 7 aa, synthetic construct
HRPPTQT

SEQ ID NO: 122953 - protein, 7 aa, synthetic construct
HRPQPIN

SEQ ID NO: 122954 - protein, 7 aa, synthetic construct
HRPVINN

SEQ ID NO: 122955 - protein, 7 aa, synthetic construct
HRPVMNT

SEQ ID NO: 122956 - protein, 7 aa, synthetic construct
HRQALGM

SEQ ID NO: 122957 - protein, 7 aa, synthetic construct
HRQAPMP

SEQ ID NO: 122958 - protein, 7 aa, synthetic construct
HRQGIGT

SEQ ID NO: 122959 - protein, 7 aa, synthetic construct
HRQNGFQ

SEQ ID NO: 122960 - protein, 7 aa, synthetic construct
HRQNHPT

SEQ ID NO: 122961 - protein, 7 aa, synthetic construct
HRQPLQV

SEQ ID NO: 122962 - protein, 7 aa, synthetic construct
HRQPTLN

SEQ ID NO: 122963 - protein, 7 aa, synthetic construct
HRQPVPQ

SEQ ID NO: 122964 - protein, 7 aa, synthetic construct
HRQQNHS

SEQ ID NO: 122965 - protein, 7 aa, synthetic construct
HRQVTKE

SEQ ID NO: 122966 - protein, 7 aa, synthetic construct
HRRDEAF

SEQ ID NO: 122967 - protein, 7 aa, synthetic construct
HRSPMNP

SEQ ID NO: 122968 - protein, 7 aa, synthetic construct
HRSQISV

SEQ ID NO: 122969 - protein, 7 aa, synthetic construct
HRSRDDT

SEQ ID NO: 122970 - protein, 7 aa, synthetic construct
HRSSMTN

SEQ ID NO: 122971 - protein, 7 aa, synthetic construct
HRSSVVP

SEQ ID NO: 122972 - protein, 7 aa, synthetic construct
HRSTVQT

SEQ ID NO: 122973 - protein, 7 aa, synthetic construct
HRSYEAM

SEQ ID NO: 122974 - protein, 7 aa, synthetic construct
HRTAASV

SEQ ID NO: 122975 - protein, 7 aa, synthetic construct
HRTATHM

SEQ ID NO: 122976 - protein, 7 aa, synthetic construct
HRTGMPM

SEQ ID NO: 122977 - protein, 7 aa, synthetic construct
HRTGQGV

SEQ ID NO: 122978 - protein, 7 aa, synthetic construct
HRTIEKA

SEQ ID NO: 122979 - protein, 7 aa, synthetic construct
HRTIGTV

SEQ ID NO: 122980 - protein, 7 aa, synthetic construct
HRTKENV

SEQ ID NO: 122981 - protein, 7 aa, synthetic construct
HRTNQQF

SEQ ID NO: 122982 - protein, 7 aa, synthetic construct
HRTPAIP

SEQ ID NO: 122983 - protein, 7 aa, synthetic construct
HRTQATV

SEQ ID NO: 122984 - protein, 7 aa, synthetic construct
HRTVQSQ

SEQ ID NO: 122985 - protein, 7 aa, synthetic construct
HRTVTLQ

SEQ ID NO: 122986 - protein, 7 aa, synthetic construct
HRTVVPQ

SEQ ID NO: 122987 - protein, 7 aa, synthetic construct
HRVALQN

SEQ ID NO: 122988 - protein, 7 aa, synthetic construct
HRVEVRQ

SEQ ID NO: 122989 - protein, 7 aa, synthetic construct
HRVGMGG

SEQ ID NO: 122990 - protein, 7 aa, synthetic construct
HRVGWTD

SEQ ID NO: 122991 - protein, 7 aa, synthetic construct
HRVINQQ

SEQ ID NO: 122992 - protein, 7 aa, synthetic construct
HRVNGGI

SEQ ID NO: 122993 - protein, 7 aa, synthetic construct
HRVPNAI

SEQ ID NO: 122994 - protein, 7 aa, synthetic construct
HRVPTTT

SEQ ID NO: 122995 - protein, 7 aa, synthetic construct
HRVQASP

SEQ ID NO: 122996 - protein, 7 aa, synthetic construct
HRVQIRE

SEQ ID NO: 122997 - protein, 7 aa, synthetic construct
HRVQNGI

SEQ ID NO: 122998 - protein, 7 aa, synthetic construct
HRVTTQV

SEQ ID NO: 122999 - protein, 7 aa, synthetic construct
HRVVSQQ

SEQ ID NO: 123000 - protein, 7 aa, synthetic construct
HSAHSKA

SEQ ID NO: 123001 - protein, 7 aa, synthetic construct
HSAHTNK

SEQ ID NO: 123002 - protein, 7 aa, synthetic construct
HSAKYSG

SEQ ID NO: 123003 - protein, 7 aa, synthetic construct
HSALKVQ

SEQ ID NO: 123004 - protein, 7 aa, synthetic construct
HSANGGR

SEQ ID NO: 123005 - protein, 7 aa, synthetic construct
HSAPQRN

SEQ ID NO: 123006 - protein, 7 aa, synthetic construct
HSAQPNK

SEQ ID NO: 123007 - protein, 7 aa, synthetic construct
HSAQRGL

SEQ ID NO: 123008 - protein, 7 aa, synthetic construct
HSASMQR

SEQ ID NO: 123009 - protein, 7 aa, synthetic construct
HSAYNVI

SEQ ID NO: 123010 - protein, 7 aa, synthetic construct
HSDRWNG

SEQ ID NO: 123011 - protein, 7 aa, synthetic construct
HSEKIRQ

SEQ ID NO: 123012 - protein, 7 aa, synthetic construct
HSGARNV

SEQ ID NO: 123013 - protein, 7 aa, synthetic construct
HSGFKTN

SEQ ID NO: 123014 - protein, 7 aa, synthetic construct
HSGGKYV

SEQ ID NO: 123015 - protein, 7 aa, synthetic construct
HSGIKPM

SEQ ID NO: 123016 - protein, 7 aa, synthetic construct
HSGIVGK

SEQ ID NO: 123017 - protein, 7 aa, synthetic construct
HSGKSQT

SEQ ID NO: 123018 - protein, 7 aa, synthetic construct
HSGKSTQ

SEQ ID NO: 123019 - protein, 7 aa, synthetic construct
HSGKYPS

SEQ ID NO: 123020 - protein, 7 aa, synthetic construct
HSGLSRA

SEQ ID NO: 123021 - protein, 7 aa, synthetic construct
HSGLTQK

SEQ ID NO: 123022 - protein, 7 aa, synthetic construct
HSGMPKN

SEQ ID NO: 123023 - protein, 7 aa, synthetic construct
HSGNFKT

SEQ ID NO: 123024 - protein, 7 aa, synthetic construct
HSGNRTG

SEQ ID NO: 123025 - protein, 7 aa, synthetic construct
HSGPRGG

SEQ ID NO: 123026 - protein, 7 aa, synthetic construct
HSGRQVV

SEQ ID NO: 123027 - protein, 7 aa, synthetic construct
HSGRTPI

SEQ ID NO: 123028 - protein, 7 aa, synthetic construct
HSGSMKS

SEQ ID NO: 123029 - protein, 7 aa, synthetic construct
HSGSNYK

SEQ ID NO: 123030 - protein, 7 aa, synthetic construct
HSGVGRG

SEQ ID NO: 123031 - protein, 7 aa, synthetic construct
HSGVKSM

SEQ ID NO: 123032 - protein, 7 aa, synthetic construct
HSGVKYN

SEQ ID NO: 123033 - protein, 7 aa, synthetic construct
HSGVSVR

SEQ ID NO: 123034 - protein, 7 aa, synthetic construct
HSHNLKA

SEQ ID NO: 123035 - protein, 7 aa, synthetic construct
HSHTLKQ

SEQ ID NO: 123036 - protein, 7 aa, synthetic construct
HSHTNKI

SEQ ID NO: 123037 - protein, 7 aa, synthetic construct
HSIGKMP

SEQ ID NO: 123038 - protein, 7 aa, synthetic construct
HSINMRA

SEQ ID NO: 123039 - protein, 7 aa, synthetic construct
HSISQHI

SEQ ID NO: 123040 - protein, 7 aa, synthetic construct
HSKFPNA

SEQ ID NO: 123041 - protein, 7 aa, synthetic construct
HSKGDRG

SEQ ID NO: 123042 - protein, 7 aa, synthetic construct
HSKGLGY

SEQ ID NO: 123043 - protein, 7 aa, synthetic construct
HSKGPQT

SEQ ID NO: 123044 - protein, 7 aa, synthetic construct
HSKIHLN

SEQ ID NO: 123045 - protein, 7 aa, synthetic construct
HSKINYS

SEQ ID NO: 123046 - protein, 7 aa, synthetic construct
HSKMMPP

SEQ ID NO: 123047 - protein, 7 aa, synthetic construct
HSKMNTL

SEQ ID NO: 123048 - protein, 7 aa, synthetic construct
HSKMSLL

SEQ ID NO: 123049 - protein, 7 aa, synthetic construct
HSKMVPM

SEQ ID NO: 123050 - protein, 7 aa, synthetic construct
HSKNGNT

SEQ ID NO: 123051 - protein, 7 aa, synthetic construct
HSKPQST

SEQ ID NO: 123052 - protein, 7 aa, synthetic construct
HSKPTFA

SEQ ID NO: 123053 - protein, 7 aa, synthetic construct
HSKQFIS

SEQ ID NO: 123054 - protein, 7 aa, synthetic construct
HSKQFPQ

SEQ ID NO: 123055 - protein, 7 aa, synthetic construct
HSKQGFT

SEQ ID NO: 123056 - protein, 7 aa, synthetic construct
HSKQTGY

SEQ ID NO: 123057 - protein, 7 aa, synthetic construct
HSKQVQN

SEQ ID NO: 123058 - protein, 7 aa, synthetic construct
HSKSNGN

SEQ ID NO: 123059 - protein, 7 aa, synthetic construct
HSKSNMT

SEQ ID NO: 123060 - protein, 7 aa, synthetic construct
HSKTIHN

SEQ ID NO: 123061 - protein, 7 aa, synthetic construct
HSKVPPY

SEQ ID NO: 123062 - protein, 7 aa, synthetic construct
HSLGVRT

SEQ ID NO: 123063 - protein, 7 aa, synthetic construct
HSLKAQY

SEQ ID NO: 123064 - protein, 7 aa, synthetic construct
HSLQNRA

SEQ ID NO: 123065 - protein, 7 aa, synthetic construct
HSMAAPK

SEQ ID NO: 123066 - protein, 7 aa, synthetic construct
HSMAMVK

SEQ ID NO: 123067 - protein, 7 aa, synthetic construct
HSMKIMP

SEQ ID NO: 123068 - protein, 7 aa, synthetic construct
HSMKPTI

SEQ ID NO: 123069 - protein, 7 aa, synthetic construct
HSMNTPK

SEQ ID NO: 123070 - protein, 7 aa, synthetic construct
HSMPMKV

SEQ ID NO: 123071 - protein, 7 aa, synthetic construct
HSMQKLL

SEQ ID NO: 123072 - protein, 7 aa, synthetic construct
HSNASKL

SEQ ID NO: 123073 - protein, 7 aa, synthetic construct
HSNNPNR

SEQ ID NO: 123074 - protein, 7 aa, synthetic construct
HSNPNRV

SEQ ID NO: 123075 - protein, 7 aa, synthetic construct
HSNPRLP

SEQ ID NO: 123076 - protein, 7 aa, synthetic construct
HSNPTRN

SEQ ID NO: 123077 - protein, 7 aa, synthetic construct
HSNQYPK

SEQ ID NO: 123078 - protein, 7 aa, synthetic construct
HSNRMLP

SEQ ID NO: 123079 - protein, 7 aa, synthetic construct
HSNSLQR

SEQ ID NO: 123080 - protein, 7 aa, synthetic construct
HSNTLKY

SEQ ID NO: 123081 - protein, 7 aa, synthetic construct
HSNVKSW

SEQ ID NO: 123082 - protein, 7 aa, synthetic construct
HSPARQI

SEQ ID NO: 123083 - protein, 7 aa, synthetic construct
HSPHKYG

SEQ ID NO: 123084 - protein, 7 aa, synthetic construct
HSPRAMS

SEQ ID NO: 123085 - protein, 7 aa, synthetic construct
HSQGKQL

SEQ ID NO: 123086 - protein, 7 aa, synthetic construct
HSQGTRT

SEQ ID NO: 123087 - protein, 7 aa, synthetic construct
HSQKGSQ

SEQ ID NO: 123088 - protein, 7 aa, synthetic construct
HSQMKNI

SEQ ID NO: 123089 - protein, 7 aa, synthetic construct
HSQNRMQ

SEQ ID NO: 123090 - protein, 7 aa, synthetic construct
HSQQKST

SEQ ID NO: 123091 - protein, 7 aa, synthetic construct
HSQQMSR

SEQ ID NO: 123092 - protein, 7 aa, synthetic construct
HSQQNNK

SEQ ID NO: 123093 - protein, 7 aa, synthetic construct
HSQRAPI

SEQ ID NO: 123094 - protein, 7 aa, synthetic construct
HSQRGIT

SEQ ID NO: 123095 - protein, 7 aa, synthetic construct
HSQTRMI

SEQ ID NO: 123096 - protein, 7 aa, synthetic construct
HSQTYVK

SEQ ID NO: 123097 - protein, 7 aa, synthetic construct
HSQYHPV

SEQ ID NO: 123098 - protein, 7 aa, synthetic construct
HSRPMLA

SEQ ID NO: 123099 - protein, 7 aa, synthetic construct
HSRPMTN

SEQ ID NO: 123100 - protein, 7 aa, synthetic construct
HSRPSPI

SEQ ID NO: 123101 - protein, 7 aa, synthetic construct
HSRPSPQ

SEQ ID NO: 123102 - protein, 7 aa, synthetic construct
HSRSIVG

SEQ ID NO: 123103 - protein, 7 aa, synthetic construct
HSRSQSM

SEQ ID NO: 123104 - protein, 7 aa, synthetic construct
HSSAKSV

SEQ ID NO: 123105 - protein, 7 aa, synthetic construct
HSSGVRP

SEQ ID NO: 123106 - protein, 7 aa, synthetic construct
HSSKAVI

SEQ ID NO: 123107 - protein, 7 aa, synthetic construct
HSSKDGR

SEQ ID NO: 123108 - protein, 7 aa, synthetic construct
HSSKVVI

SEQ ID NO: 123109 - protein, 7 aa, synthetic construct
HSSNPNK

SEQ ID NO: 123110 - protein, 7 aa, synthetic construct
HSSPRLG

SEQ ID NO: 123111 - protein, 7 aa, synthetic construct
HSSRPPI

SEQ ID NO: 123112 - protein, 7 aa, synthetic construct
HSSSKTF

SEQ ID NO: 123113 - protein, 7 aa, synthetic construct
HSSSPRS

SEQ ID NO: 123114 - protein, 7 aa, synthetic construct
HSSTHVK

SEQ ID NO: 123115 - protein, 7 aa, synthetic construct
HSSTPNK

SEQ ID NO: 123116 - protein, 7 aa, synthetic construct
HSSVNRQ

SEQ ID NO: 123117 - protein, 7 aa, synthetic construct
HSTGKYM

SEQ ID NO: 123118 - protein, 7 aa, synthetic construct
HSTGNPK

SEQ ID NO: 123119 - protein, 7 aa, synthetic construct
HSTGYQK

SEQ ID NO: 123120 - protein, 7 aa, synthetic construct
HSTKPMM

SEQ ID NO: 123121 - protein, 7 aa, synthetic construct
HSTKYVV

SEQ ID NO: 123122 - protein, 7 aa, synthetic construct
HSTNLRM

SEQ ID NO: 123123 - protein, 7 aa, synthetic construct
HSTRLGG

SEQ ID NO: 123124 - protein, 7 aa, synthetic construct
HSTSSSK

SEQ ID NO: 123125 - protein, 7 aa, synthetic construct
HSTVGGK

SEQ ID NO: 123126 - protein, 7 aa, synthetic construct
HSVGSVR

SEQ ID NO: 123127 - protein, 7 aa, synthetic construct
HSVHKLP

SEQ ID NO: 123128 - protein, 7 aa, synthetic construct
HSVKAPI

SEQ ID NO: 123129 - protein, 7 aa, synthetic construct
HSVKLPI

SEQ ID NO: 123130 - protein, 7 aa, synthetic construct
HSVKQNF

SEQ ID NO: 123131 - protein, 7 aa, synthetic construct
HSVKQPL

SEQ ID NO: 123132 - protein, 7 aa, synthetic construct
HSVQART

SEQ ID NO: 123133 - protein, 7 aa, synthetic construct
HSYAIKA

SEQ ID NO: 123134 - protein, 7 aa, synthetic construct
HSYGVSK

SEQ ID NO: 123135 - protein, 7 aa, synthetic construct
HSYKPNA

SEQ ID NO: 123136 - protein, 7 aa, synthetic construct
HSYRDAG

SEQ ID NO: 123137 - protein, 7 aa, synthetic construct
HTAKPHM

SEQ ID NO: 123138 - protein, 7 aa, synthetic construct
HTAMNGR

SEQ ID NO: 123139 - protein, 7 aa, synthetic construct
HTAMREK

SEQ ID NO: 123140 - protein, 7 aa, synthetic construct
HTAMVRT

SEQ ID NO: 123141 - protein, 7 aa, synthetic construct
HTANKRE

SEQ ID NO: 123142 - protein, 7 aa, synthetic construct
HTAQKNF

SEQ ID NO: 123143 - protein, 7 aa, synthetic construct
HTARMMA

SEQ ID NO: 123144 - protein, 7 aa, synthetic construct
HTARNVM

SEQ ID NO: 123145 - protein, 7 aa, synthetic construct
HTARVNA

SEQ ID NO: 123146 - protein, 7 aa, synthetic construct
HTASQMR

SEQ ID NO: 123147 - protein, 7 aa, synthetic construct
HTASSNK

SEQ ID NO: 123148 - protein, 7 aa, synthetic construct
HTATSSK

SEQ ID NO: 123149 - protein, 7 aa, synthetic construct
HTEAWRQ

SEQ ID NO: 123150 - protein, 7 aa, synthetic construct
HTFKAGP

SEQ ID NO: 123151 - protein, 7 aa, synthetic construct
HTFKGAN

SEQ ID NO: 123152 - protein, 7 aa, synthetic construct
HTFKQSS

SEQ ID NO: 123153 - protein, 7 aa, synthetic construct
HTFKQTS

SEQ ID NO: 123154 - protein, 7 aa, synthetic construct
HTFQGPN

SEQ ID NO: 123155 - protein, 7 aa, synthetic construct
HTFQTKA

SEQ ID NO: 123156 - protein, 7 aa, synthetic construct
HTFSAKG

SEQ ID NO: 123157 - protein, 7 aa, synthetic construct
HTGAPKN

SEQ ID NO: 123158 - protein, 7 aa, synthetic construct
HTGARNV

SEQ ID NO: 123159 - protein, 7 aa, synthetic construct
HTGGSKA

SEQ ID NO: 123160 - protein, 7 aa, synthetic construct
HTGGSMR

SEQ ID NO: 123161 - protein, 7 aa, synthetic construct
HTGGSQR

SEQ ID NO: 123162 - protein, 7 aa, synthetic construct
HTGKPNY

SEQ ID NO: 123163 - protein, 7 aa, synthetic construct
HTGKYVV

SEQ ID NO: 123164 - protein, 7 aa, synthetic construct
HTGLKNL

SEQ ID NO: 123165 - protein, 7 aa, synthetic construct
HTGLTTR

SEQ ID NO: 123166 - protein, 7 aa, synthetic construct
HTGMTNR

SEQ ID NO: 123167 - protein, 7 aa, synthetic construct
HTGMTQR

SEQ ID NO: 123168 - protein, 7 aa, synthetic construct
HTGNKYV

SEQ ID NO: 123169 - protein, 7 aa, synthetic construct
HTGNLRG

SEQ ID NO: 123170 - protein, 7 aa, synthetic construct
HTGPYKG

SEQ ID NO: 123171 - protein, 7 aa, synthetic construct
HTGQSKS

SEQ ID NO: 123172 - protein, 7 aa, synthetic construct
HTGRALN

SEQ ID NO: 123173 - protein, 7 aa, synthetic construct
HTGRMQG

SEQ ID NO: 123174 - protein, 7 aa, synthetic construct
HTGRQTM

SEQ ID NO: 123175 - protein, 7 aa, synthetic construct
HTGSMRV

SEQ ID NO: 123176 - protein, 7 aa, synthetic construct
HTGYTGK

SEQ ID NO: 123177 - protein, 7 aa, synthetic construct
HTHAKMG

SEQ ID NO: 123178 - protein, 7 aa, synthetic construct
HTHAVQK

SEQ ID NO: 123179 - protein, 7 aa, synthetic construct
HTHKIAV

SEQ ID NO: 123180 - protein, 7 aa, synthetic construct
HTHKPNV

SEQ ID NO: 123181 - protein, 7 aa, synthetic construct
HTHKTAI

SEQ ID NO: 123182 - protein, 7 aa, synthetic construct
HTHMQKI

SEQ ID NO: 123183 - protein, 7 aa, synthetic construct
HTIGMKM

SEQ ID NO: 123184 - protein, 7 aa, synthetic construct
HTIGRTV

SEQ ID NO: 123185 - protein, 7 aa, synthetic construct
HTIPKVP

SEQ ID NO: 123186 - protein, 7 aa, synthetic construct
HTKADKI

SEQ ID NO: 123187 - protein, 7 aa, synthetic construct
HTKERAQ

SEQ ID NO: 123188 - protein, 7 aa, synthetic construct
HTKGVYT

SEQ ID NO: 123189 - protein, 7 aa, synthetic construct
HTKISNM

SEQ ID NO: 123190 - protein, 7 aa, synthetic construct
HTKLSYG

SEQ ID NO: 123191 - protein, 7 aa, synthetic construct
HTKLTAM

SEQ ID NO: 123192 - protein, 7 aa, synthetic construct
HTKNIYS

SEQ ID NO: 123193 - protein, 7 aa, synthetic construct
HTKNPNW

SEQ ID NO: 123194 - protein, 7 aa, synthetic construct
HTKPQTY

SEQ ID NO: 123195 - protein, 7 aa, synthetic construct
HTKPSDR

SEQ ID NO: 123196 - protein, 7 aa, synthetic construct
HTKQSYS

SEQ ID NO: 123197 - protein, 7 aa, synthetic construct
HTKQYLS

SEQ ID NO: 123198 - protein, 7 aa, synthetic construct
HTKTMQY

SEQ ID NO: 123199 - protein, 7 aa, synthetic construct
HTKVHPT

SEQ ID NO: 123200 - protein, 7 aa, synthetic construct
HTKYIQG

SEQ ID NO: 123201 - protein, 7 aa, synthetic construct
HTKYPQT

SEQ ID NO: 123202 - protein, 7 aa, synthetic construct
HTKYTGP

SEQ ID NO: 123203 - protein, 7 aa, synthetic construct
HTLHSKV

SEQ ID NO: 123204 - protein, 7 aa, synthetic construct
HTLQTRA

SEQ ID NO: 123205 - protein, 7 aa, synthetic construct
HTLRAQI

SEQ ID NO: 123206 - protein, 7 aa, synthetic construct
HTLRERP

SEQ ID NO: 123207 - protein, 7 aa, synthetic construct
HTMASMR

SEQ ID NO: 123208 - protein, 7 aa, synthetic construct
HTMPAHA

SEQ ID NO: 123209 - protein, 7 aa, synthetic construct
HTMQNSR

SEQ ID NO: 123210 - protein, 7 aa, synthetic construct
HTMTRGV

SEQ ID NO: 123211 - protein, 7 aa, synthetic construct
HTNKDAR

SEQ ID NO: 123212 - protein, 7 aa, synthetic construct
HTNKDLR

SEQ ID NO: 123213 - protein, 7 aa, synthetic construct
HTNLMRA

SEQ ID NO: 123214 - protein, 7 aa, synthetic construct
HTNRPAV

SEQ ID NO: 123215 - protein, 7 aa, synthetic construct
HTNRPLT

SEQ ID NO: 123216 - protein, 7 aa, synthetic construct
HTPGRSQ

SEQ ID NO: 123217 - protein, 7 aa, synthetic construct
HTPGRVT

SEQ ID NO: 123218 - protein, 7 aa, synthetic construct
HTPITAK

SEQ ID NO: 123219 - protein, 7 aa, synthetic construct
HTPKNVM

SEQ ID NO: 123220 - protein, 7 aa, synthetic construct
HTPPMHV

SEQ ID NO: 123221 - protein, 7 aa, synthetic construct
HTPRTNL

SEQ ID NO: 123222 - protein, 7 aa, synthetic construct
HTPRTSG

SEQ ID NO: 123223 - protein, 7 aa, synthetic construct
HTPVISR

SEQ ID NO: 123224 - protein, 7 aa, synthetic construct
HTQAIRQ

SEQ ID NO: 123225 - protein, 7 aa, synthetic construct
HTQFQNK

SEQ ID NO: 123226 - protein, 7 aa, synthetic construct
HTQGSRG

SEQ ID NO: 123227 - protein, 7 aa, synthetic construct
HTQGSRL

SEQ ID NO: 123228 - protein, 7 aa, synthetic construct
HTQITRS

SEQ ID NO: 123229 - protein, 7 aa, synthetic construct
HTQKMVV

SEQ ID NO: 123230 - protein, 7 aa, synthetic construct
HTQLQRQ

SEQ ID NO: 123231 - protein, 7 aa, synthetic construct
HTQQRVV

SEQ ID NO: 123232 - protein, 7 aa, synthetic construct
HTQRAAF

SEQ ID NO: 123233 - protein, 7 aa, synthetic construct
HTQRLVI

SEQ ID NO: 123234 - protein, 7 aa, synthetic construct
HTQSGYM

SEQ ID NO: 123235 - protein, 7 aa, synthetic construct
HTQVPNK

SEQ ID NO: 123236 - protein, 7 aa, synthetic construct
HTRAPPN

SEQ ID NO: 123237 - protein, 7 aa, synthetic construct
HTRDFPK

SEQ ID NO: 123238 - protein, 7 aa, synthetic construct
HTRDLKV

SEQ ID NO: 123239 - protein, 7 aa, synthetic construct
HTRGGPV

SEQ ID NO: 123240 - protein, 7 aa, synthetic construct
HTRGIGG

SEQ ID NO: 123241 - protein, 7 aa, synthetic construct
HTRIPAT

SEQ ID NO: 123242 - protein, 7 aa, synthetic construct
HTRLSKE

SEQ ID NO: 123243 - protein, 7 aa, synthetic construct
HTRNISA

SEQ ID NO: 123244 - protein, 7 aa, synthetic construct
HTRNTLG

SEQ ID NO: 123245 - protein, 7 aa, synthetic construct
HTRQLTV

SEQ ID NO: 123246 - protein, 7 aa, synthetic construct
HTSAIKY

SEQ ID NO: 123247 - protein, 7 aa, synthetic construct
HTSGTGK

SEQ ID NO: 123248 - protein, 7 aa, synthetic construct
HTSKQLI

SEQ ID NO: 123249 - protein, 7 aa, synthetic construct
HTSKVAI

SEQ ID NO: 123250 - protein, 7 aa, synthetic construct
HTSMAPK

SEQ ID NO: 123251 - protein, 7 aa, synthetic construct
HTSMPNR

SEQ ID NO: 123252 - protein, 7 aa, synthetic construct
HTSRVGN

SEQ ID NO: 123253 - protein, 7 aa, synthetic construct
HTSVIKT

SEQ ID NO: 123254 - protein, 7 aa, synthetic construct
HTTKPMM

SEQ ID NO: 123255 - protein, 7 aa, synthetic construct
HTTQKHV

SEQ ID NO: 123256 - protein, 7 aa, synthetic construct
HTTQNNR

SEQ ID NO: 123257 - protein, 7 aa, synthetic construct
HTTRPTI

SEQ ID NO: 123258 - protein, 7 aa, synthetic construct
HTTSHKS

SEQ ID NO: 123259 - protein, 7 aa, synthetic construct
HTTSIRT

SEQ ID NO: 123260 - protein, 7 aa, synthetic construct
HTTSRGI

SEQ ID NO: 123261 - protein, 7 aa, synthetic construct
HTVGRGG

SEQ ID NO: 123262 - protein, 7 aa, synthetic construct
HTVHSKI

SEQ ID NO: 123263 - protein, 7 aa, synthetic construct
HTWKSPE

SEQ ID NO: 123264 - protein, 7 aa, synthetic construct
HTYNLKA

SEQ ID NO: 123265 - protein, 7 aa, synthetic construct
HTYTVPQ

SEQ ID NO: 123266 - protein, 7 aa, synthetic construct
HVAAHKN

SEQ ID NO: 123267 - protein, 7 aa, synthetic construct
HVAARMS

SEQ ID NO: 123268 - protein, 7 aa, synthetic construct
HVAGINR

SEQ ID NO: 123269 - protein, 7 aa, synthetic construct
HVAGYNK

SEQ ID NO: 123270 - protein, 7 aa, synthetic construct
HVAKHIP

SEQ ID NO: 123271 - protein, 7 aa, synthetic construct
HVAMQAR

SEQ ID NO: 123272 - protein, 7 aa, synthetic construct
HVAPTRV

SEQ ID NO: 123273 - protein, 7 aa, synthetic construct
HVAQKSY

SEQ ID NO: 123274 - protein, 7 aa, synthetic construct
HVARNAL

SEQ ID NO: 123275 - protein, 7 aa, synthetic construct
HVASKDR

SEQ ID NO: 123276 - protein, 7 aa, synthetic construct
HVASTRT

SEQ ID NO: 123277 - protein, 7 aa, synthetic construct
HVAYQKA

SEQ ID NO: 123278 - protein, 7 aa, synthetic construct
HVDKRQV

SEQ ID NO: 123279 - protein, 7 aa, synthetic construct
HVDLRKS

SEQ ID NO: 123280 - protein, 7 aa, synthetic construct
HVDRPTK

SEQ ID NO: 123281 - protein, 7 aa, synthetic construct
HVEKQRQ

SEQ ID NO: 123282 - protein, 7 aa, synthetic construct
HVERMKA

SEQ ID NO: 123283 - protein, 7 aa, synthetic construct
HVETKRV

SEQ ID NO: 123284 - protein, 7 aa, synthetic construct
HVGGAKS

SEQ ID NO: 123285 - protein, 7 aa, synthetic construct
HVGHIKV

SEQ ID NO: 123286 - protein, 7 aa, synthetic construct
HVGHVKQ

SEQ ID NO: 123287 - protein, 7 aa, synthetic construct
HVGIAAR

SEQ ID NO: 123288 - protein, 7 aa, synthetic construct
HVGKFNQ

SEQ ID NO: 123289 - protein, 7 aa, synthetic construct
HVGKQTF

SEQ ID NO: 123290 - protein, 7 aa, synthetic construct
HVGMKMA

SEQ ID NO: 123291 - protein, 7 aa, synthetic construct
HVGNTRL

SEQ ID NO: 123292 - protein, 7 aa, synthetic construct
HVGRAVS

SEQ ID NO: 123293 - protein, 7 aa, synthetic construct
HVGRINN

SEQ ID NO: 123294 - protein, 7 aa, synthetic construct
HVGSNNK

SEQ ID NO: 123295 - protein, 7 aa, synthetic construct
HVGTSNR

SEQ ID NO: 123296 - protein, 7 aa, synthetic construct
HVGVANR

SEQ ID NO: 123297 - protein, 7 aa, synthetic construct
HVGVHNK

SEQ ID NO: 123298 - protein, 7 aa, synthetic construct
HVGVPSR

SEQ ID NO: 123299 - protein, 7 aa, synthetic construct
HVGVRTV

SEQ ID NO: 123300 - protein, 7 aa, synthetic construct
HVGYIKA

SEQ ID NO: 123301 - protein, 7 aa, synthetic construct
HVIGNSR

SEQ ID NO: 123302 - protein, 7 aa, synthetic construct
HVIGTRQ

SEQ ID NO: 123303 - protein, 7 aa, synthetic construct
HVIKSNM

SEQ ID NO: 123304 - protein, 7 aa, synthetic construct
HVIRNSI

SEQ ID NO: 123305 - protein, 7 aa, synthetic construct
HVKEQKY

SEQ ID NO: 123306 - protein, 7 aa, synthetic construct
HVKGGFQ

SEQ ID NO: 123307 - protein, 7 aa, synthetic construct
HVKGSAY

SEQ ID NO: 123308 - protein, 7 aa, synthetic construct
HVKIAGM

SEQ ID NO: 123309 - protein, 7 aa, synthetic construct
HVKIRDS

SEQ ID NO: 123310 - protein, 7 aa, synthetic construct
HVKLGMS

SEQ ID NO: 123311 - protein, 7 aa, synthetic construct
HVKNQSM

SEQ ID NO: 123312 - protein, 7 aa, synthetic construct
HVKPNII

SEQ ID NO: 123313 - protein, 7 aa, synthetic construct
HVKPSFP

SEQ ID NO: 123314 - protein, 7 aa, synthetic construct
HVKREAA

SEQ ID NO: 123315 - protein, 7 aa, synthetic construct
HVKSGYP

SEQ ID NO: 123316 - protein, 7 aa, synthetic construct
HVKSKDF

SEQ ID NO: 123317 - protein, 7 aa, synthetic construct
HVKTMAI

SEQ ID NO: 123318 - protein, 7 aa, synthetic construct
HVKTRDI

SEQ ID NO: 123319 - protein, 7 aa, synthetic construct
HVKVSQY

SEQ ID NO: 123320 - protein, 7 aa, synthetic construct
HVLRNQS

SEQ ID NO: 123321 - protein, 7 aa, synthetic construct
HVMKNTI

SEQ ID NO: 123322 - protein, 7 aa, synthetic construct
HVMKPSI

SEQ ID NO: 123323 - protein, 7 aa, synthetic construct
HVMKTIS

SEQ ID NO: 123324 - protein, 7 aa, synthetic construct
HVNAVAR

SEQ ID NO: 123325 - protein, 7 aa, synthetic construct
HVNGGYK

SEQ ID NO: 123326 - protein, 7 aa, synthetic construct
HVNHHTL

SEQ ID NO: 123327 - protein, 7 aa, synthetic construct
HVNKPYS

SEQ ID NO: 123328 - protein, 7 aa, synthetic construct
HVNLHKV

SEQ ID NO: 123329 - protein, 7 aa, synthetic construct
HVNNMGK

SEQ ID NO: 123330 - protein, 7 aa, synthetic construct
HVNRVQV

SEQ ID NO: 123331 - protein, 7 aa, synthetic construct
HVNSIRQ

SEQ ID NO: 123332 - protein, 7 aa, synthetic construct
HVPNNPR

SEQ ID NO: 123333 - protein, 7 aa, synthetic construct
HVPNQRN

SEQ ID NO: 123334 - protein, 7 aa, synthetic construct
HVPQKQY

SEQ ID NO: 123335 - protein, 7 aa, synthetic construct
HVPQRGA

SEQ ID NO: 123336 - protein, 7 aa, synthetic construct
HVPQRHG

SEQ ID NO: 123337 - protein, 7 aa, synthetic construct
HVPRIGQ

SEQ ID NO: 123338 - protein, 7 aa, synthetic construct
HVPRNSI

SEQ ID NO: 123339 - protein, 7 aa, synthetic construct
HVPRSIA

SEQ ID NO: 123340 - protein, 7 aa, synthetic construct
HVPRVQN

SEQ ID NO: 123341 - protein, 7 aa, synthetic construct
HVPSTAR

SEQ ID NO: 123342 - protein, 7 aa, synthetic construct
HVQATTR

SEQ ID NO: 123343 - protein, 7 aa, synthetic construct
HVQGARN

SEQ ID NO: 123344 - protein, 7 aa, synthetic construct
HVQGKER

SEQ ID NO: 123345 - protein, 7 aa, synthetic construct
HVQKIMS

SEQ ID NO: 123346 - protein, 7 aa, synthetic construct
HVQKPYA

SEQ ID NO: 123347 - protein, 7 aa, synthetic construct
HVQMSQK

SEQ ID NO: 123348 - protein, 7 aa, synthetic construct
HVQNRLT

SEQ ID NO: 123349 - protein, 7 aa, synthetic construct
HVQQARA

SEQ ID NO: 123350 - protein, 7 aa, synthetic construct
HVQQGSR

SEQ ID NO: 123351 - protein, 7 aa, synthetic construct
HVQTKIM

SEQ ID NO: 123352 - protein, 7 aa, synthetic construct
HVQVARQ

SEQ ID NO: 123353 - protein, 7 aa, synthetic construct
HVQVRNT

SEQ ID NO: 123354 - protein, 7 aa, synthetic construct
HVRAPPN

SEQ ID NO: 123355 - protein, 7 aa, synthetic construct
HVRELKI

SEQ ID NO: 123356 - protein, 7 aa, synthetic construct
HVRGGSI

SEQ ID NO: 123357 - protein, 7 aa, synthetic construct
HVRGPAV

SEQ ID NO: 123358 - protein, 7 aa, synthetic construct
HVRIQAV

SEQ ID NO: 123359 - protein, 7 aa, synthetic construct
HVRMMNS

SEQ ID NO: 123360 - protein, 7 aa, synthetic construct
HVRNQGI

SEQ ID NO: 123361 - protein, 7 aa, synthetic construct
HVRPNGV

SEQ ID NO: 123362 - protein, 7 aa, synthetic construct
HVRPTTG

SEQ ID NO: 123363 - protein, 7 aa, synthetic construct
HVRQANI

SEQ ID NO: 123364 - protein, 7 aa, synthetic construct
HVRQGAM

SEQ ID NO: 123365 - protein, 7 aa, synthetic construct
HVRQQKE

SEQ ID NO: 123366 - protein, 7 aa, synthetic construct
HVRQSQH

SEQ ID NO: 123367 - protein, 7 aa, synthetic construct
HVRQTVT

SEQ ID NO: 123368 - protein, 7 aa, synthetic construct
HVRQVTM

SEQ ID NO: 123369 - protein, 7 aa, synthetic construct
HVRSPPV

SEQ ID NO: 123370 - protein, 7 aa, synthetic construct
HVRSQNI

SEQ ID NO: 123371 - protein, 7 aa, synthetic construct
HVRSVMG

SEQ ID NO: 123372 - protein, 7 aa, synthetic construct
HVRVNNA

SEQ ID NO: 123373 - protein, 7 aa, synthetic construct
HVRVQKE

SEQ ID NO: 123374 - protein, 7 aa, synthetic construct
HVRVQQV

SEQ ID NO: 123375 - protein, 7 aa, synthetic construct
HVRVSAL

SEQ ID NO: 123376 - protein, 7 aa, synthetic construct
HVRVTSM

SEQ ID NO: 123377 - protein, 7 aa, synthetic construct
HVRYTHD

SEQ ID NO: 123378 - protein, 7 aa, synthetic construct
HVSGVRM

SEQ ID NO: 123379 - protein, 7 aa, synthetic construct
HVSKRDI

SEQ ID NO: 123380 - protein, 7 aa, synthetic construct
HVSNSYM

SEQ ID NO: 123381 - protein, 7 aa, synthetic construct
HVSNTIR

SEQ ID NO: 123382 - protein, 7 aa, synthetic construct
HVSPNMR

SEQ ID NO: 123383 - protein, 7 aa, synthetic construct
HVSTTSR

SEQ ID NO: 123384 - protein, 7 aa, synthetic construct
HVTAVPR

SEQ ID NO: 123385 - protein, 7 aa, synthetic construct
HVTGAPR

SEQ ID NO: 123386 - protein, 7 aa, synthetic construct
HVTGGAR

SEQ ID NO: 123387 - protein, 7 aa, synthetic construct
HVTGYKL

SEQ ID NO: 123388 - protein, 7 aa, synthetic construct
HVTKLLP

SEQ ID NO: 123389 - protein, 7 aa, synthetic construct
HVTRNFA

SEQ ID NO: 123390 - protein, 7 aa, synthetic construct
HVTSISR

SEQ ID NO: 123391 - protein, 7 aa, synthetic construct
HVTSNGR

SEQ ID NO: 123392 - protein, 7 aa, synthetic construct
HVVKHPP

SEQ ID NO: 123393 - protein, 7 aa, synthetic construct
HVVKREN

SEQ ID NO: 123394 - protein, 7 aa, synthetic construct
HVVRVNA

SEQ ID NO: 123395 - protein, 7 aa, synthetic construct
HVVSASR

SEQ ID NO: 123396 - protein, 7 aa, synthetic construct
HVYKGNN

SEQ ID NO: 123397 - protein, 7 aa, synthetic construct
HVYKTAP

SEQ ID NO: 123398 - protein, 7 aa, synthetic construct
HWKNSND

SEQ ID NO: 123399 - protein, 7 aa, synthetic construct
HYAGSKS

SEQ ID NO: 123400 - protein, 7 aa, synthetic construct
HYAKAMV

SEQ ID NO: 123401 - protein, 7 aa, synthetic construct
HYAKNSY

SEQ ID NO: 123402 - protein, 7 aa, synthetic construct
HYAKTMQ

SEQ ID NO: 123403 - protein, 7 aa, synthetic construct
HYAQGTK

SEQ ID NO: 123404 - protein, 7 aa, synthetic construct
HYGIKQS

SEQ ID NO: 123405 - protein, 7 aa, synthetic construct
HYKDNRI

SEQ ID NO: 123406 - protein, 7 aa, synthetic construct
HYKDTRI

SEQ ID NO: 123407 - protein, 7 aa, synthetic construct
HYKEVKT

SEQ ID NO: 123408 - protein, 7 aa, synthetic construct
HYKGQGA

SEQ ID NO: 123409 - protein, 7 aa, synthetic construct
HYKIQKE

SEQ ID NO: 123410 - protein, 7 aa, synthetic construct
HYKNALG

SEQ ID NO: 123411 - protein, 7 aa, synthetic construct
HYKPLQG

SEQ ID NO: 123412 - protein, 7 aa, synthetic construct
HYKPTQQ

SEQ ID NO: 123413 - protein, 7 aa, synthetic construct
HYKSTAG

SEQ ID NO: 123414 - protein, 7 aa, synthetic construct
HYKTMQM

SEQ ID NO: 123415 - protein, 7 aa, synthetic construct
HYKTQSI

SEQ ID NO: 123416 - protein, 7 aa, synthetic construct
HYKVKEN

SEQ ID NO: 123417 - protein, 7 aa, synthetic construct
HYNKHGP

SEQ ID NO: 123418 - protein, 7 aa, synthetic construct
HYNQARQ

SEQ ID NO: 123419 - protein, 7 aa, synthetic construct
HYPGKEI

SEQ ID NO: 123420 - protein, 7 aa, synthetic construct
HYPKPLI

SEQ ID NO: 123421 - protein, 7 aa, synthetic construct
HYPKSSP

SEQ ID NO: 123422 - protein, 7 aa, synthetic construct
HYPKTSI

SEQ ID NO: 123423 - protein, 7 aa, synthetic construct
HYPPKTV

SEQ ID NO: 123424 - protein, 7 aa, synthetic construct
HYQNAQR

SEQ ID NO: 123425 - protein, 7 aa, synthetic construct
HYRIQAD

SEQ ID NO: 123426 - protein, 7 aa, synthetic construct
HYTMGDK

SEQ ID NO: 123427 - protein, 7 aa, synthetic construct
HYTNGSK

SEQ ID NO: 123428 - protein, 7 aa, synthetic construct
HYTPAKP

SEQ ID NO: 123429 - protein, 7 aa, synthetic construct
IAAGYNR

SEQ ID NO: 123430 - protein, 7 aa, synthetic construct
IAAHTGR

SEQ ID NO: 123431 - protein, 7 aa, synthetic construct
IAAPQNR

SEQ ID NO: 123432 - protein, 7 aa, synthetic construct
IAARMAT

SEQ ID NO: 123433 - protein, 7 aa, synthetic construct
IADKHVR

SEQ ID NO: 123434 - protein, 7 aa, synthetic construct
IADKMRY

SEQ ID NO: 123435 - protein, 7 aa, synthetic construct
IADMRRA

SEQ ID NO: 123436 - protein, 7 aa, synthetic construct
IAENQRK

SEQ ID NO: 123437 - protein, 7 aa, synthetic construct
IAENRSR

SEQ ID NO: 123438 - protein, 7 aa, synthetic construct
IAERQSR

SEQ ID NO: 123439 - protein, 7 aa, synthetic construct
IAFKGSN

SEQ ID NO: 123440 - protein, 7 aa, synthetic construct
IAGGRML

SEQ ID NO: 123441 - protein, 7 aa, synthetic construct
IAGGWTK

SEQ ID NO: 123442 - protein, 7 aa, synthetic construct
IAGGYAR

SEQ ID NO: 123443 - protein, 7 aa, synthetic construct
IAGHAMK

SEQ ID NO: 123444 - protein, 7 aa, synthetic construct
IAGHKYA

SEQ ID NO: 123445 - protein, 7 aa, synthetic construct
IAGHQKS

SEQ ID NO: 123446 - protein, 7 aa, synthetic construct
IAGHTKA

SEQ ID NO: 123447 - protein, 7 aa, synthetic construct
IAGIKHN

SEQ ID NO: 123448 - protein, 7 aa, synthetic construct
IAGKFAM

SEQ ID NO: 123449 - protein, 7 aa, synthetic construct
IAGKYVQ

SEQ ID NO: 123450 - protein, 7 aa, synthetic construct
IAGMITR

SEQ ID NO: 123451 - protein, 7 aa, synthetic construct
IAGMKIT

SEQ ID NO: 123452 - protein, 7 aa, synthetic construct
IAGNRYN

SEQ ID NO: 123453 - protein, 7 aa, synthetic construct
IAGRQGY

SEQ ID NO: 123454 - protein, 7 aa, synthetic construct
IAGYKAV

SEQ ID NO: 123455 - protein, 7 aa, synthetic construct
IAHAKPY

SEQ ID NO: 123456 - protein, 7 aa, synthetic construct
IAHASQK

SEQ ID NO: 123457 - protein, 7 aa, synthetic construct
IAHAVRT

SEQ ID NO: 123458 - protein, 7 aa, synthetic construct
IAHGAFK

SEQ ID NO: 123459 - protein, 7 aa, synthetic construct
IAHGLKA

SEQ ID NO: 123460 - protein, 7 aa, synthetic construct
IAHGRIP

SEQ ID NO: 123461 - protein, 7 aa, synthetic construct
IAHKFNS

SEQ ID NO: 123462 - protein, 7 aa, synthetic construct
IAHKQQF

SEQ ID NO: 123463 - protein, 7 aa, synthetic construct
IAHKRDM

SEQ ID NO: 123464 - protein, 7 aa, synthetic construct
IAHMSGK

SEQ ID NO: 123465 - protein, 7 aa, synthetic construct
IAHNGGR

SEQ ID NO: 123466 - protein, 7 aa, synthetic construct
IAHQPRP

SEQ ID NO: 123467 - protein, 7 aa, synthetic construct
IAHQWRD

SEQ ID NO: 123468 - protein, 7 aa, synthetic construct
IAHRHAT

SEQ ID NO: 123469 - protein, 7 aa, synthetic construct
IAHRPGS

SEQ ID NO: 123470 - protein, 7 aa, synthetic construct
IAHRTSG

SEQ ID NO: 123471 - protein, 7 aa, synthetic construct
IAHRVNN

SEQ ID NO: 123472 - protein, 7 aa, synthetic construct
IAHSARV

SEQ ID NO: 123473 - protein, 7 aa, synthetic construct
IAHSRMS

SEQ ID NO: 123474 - protein, 7 aa, synthetic construct
IAHSSRV

SEQ ID NO: 123475 - protein, 7 aa, synthetic construct
IAHTARI

SEQ ID NO: 123476 - protein, 7 aa, synthetic construct
IAHVKNN

SEQ ID NO: 123477 - protein, 7 aa, synthetic construct
IAIARNT

SEQ ID NO: 123478 - protein, 7 aa, synthetic construct
IAIRTHG

SEQ ID NO: 123479 - protein, 7 aa, synthetic construct
IAKDERR

SEQ ID NO: 123480 - protein, 7 aa, synthetic construct
IAKDHNK

SEQ ID NO: 123481 - protein, 7 aa, synthetic construct
IAKDIFR

SEQ ID NO: 123482 - protein, 7 aa, synthetic construct
IAKFMRE

SEQ ID NO: 123483 - protein, 7 aa, synthetic construct
IAKFRTD

SEQ ID NO: 123484 - protein, 7 aa, synthetic construct
IAKFSSH

SEQ ID NO: 123485 - protein, 7 aa, synthetic construct
IAKLGYN

SEQ ID NO: 123486 - protein, 7 aa, synthetic construct
IAKMMTT

SEQ ID NO: 123487 - protein, 7 aa, synthetic construct
IAKNIYG

SEQ ID NO: 123488 - protein, 7 aa, synthetic construct
IAKPTYL

SEQ ID NO: 123489 - protein, 7 aa, synthetic construct
IAKQWAG

SEQ ID NO: 123490 - protein, 7 aa, synthetic construct
IAKREIF

SEQ ID NO: 123491 - protein, 7 aa, synthetic construct
IAKRLAD

SEQ ID NO: 123492 - protein, 7 aa, synthetic construct
IAKRSLE

SEQ ID NO: 123493 - protein, 7 aa, synthetic construct
IAKSFDR

SEQ ID NO: 123494 - protein, 7 aa, synthetic construct
IAKSSQW

SEQ ID NO: 123495 - protein, 7 aa, synthetic construct
IAKVGHI

SEQ ID NO: 123496 - protein, 7 aa, synthetic construct
IAKVSHI

SEQ ID NO: 123497 - protein, 7 aa, synthetic construct
IAKVYNN

SEQ ID NO: 123498 - protein, 7 aa, synthetic construct
IAKYQNL

SEQ ID NO: 123499 - protein, 7 aa, synthetic construct
IAKYQSQ

SEQ ID NO: 123500 - protein, 7 aa, synthetic construct
IAKYTAT

SEQ ID NO: 123501 - protein, 7 aa, synthetic construct
IALSPTD

SEQ ID NO: 123502 - protein, 7 aa, synthetic construct
IAMANRS

SEQ ID NO: 123503 - protein, 7 aa, synthetic construct
IAMHATK

SEQ ID NO: 123504 - protein, 7 aa, synthetic construct
IAMKHNT

SEQ ID NO: 123505 - protein, 7 aa, synthetic construct
IAMSQKY

SEQ ID NO: 123506 - protein, 7 aa, synthetic construct
IAMSQTR

SEQ ID NO: 123507 - protein, 7 aa, synthetic construct
IAMSREK

SEQ ID NO: 123508 - protein, 7 aa, synthetic construct
IAMTTKF

SEQ ID NO: 123509 - protein, 7 aa, synthetic construct
IANDRYK

SEQ ID NO: 123510 - protein, 7 aa, synthetic construct
IANFTKS

SEQ ID NO: 123511 - protein, 7 aa, synthetic construct
IANHLNK

SEQ ID NO: 123512 - protein, 7 aa, synthetic construct
IANIHTK

SEQ ID NO: 123513 - protein, 7 aa, synthetic construct
IANNDRR

SEQ ID NO: 123514 - protein, 7 aa, synthetic construct
IANRIPV

SEQ ID NO: 123515 - protein, 7 aa, synthetic construct
IANRVHA

SEQ ID NO: 123516 - protein, 7 aa, synthetic construct
IAPAYKI

SEQ ID NO: 123517 - protein, 7 aa, synthetic construct
IAPERKY

SEQ ID NO: 123518 - protein, 7 aa, synthetic construct
IAPHRSM

SEQ ID NO: 123519 - protein, 7 aa, synthetic construct
IAPNNQR

SEQ ID NO: 123520 - protein, 7 aa, synthetic construct
IAPNSKW

SEQ ID NO: 123521 - protein, 7 aa, synthetic construct
IAPQFTR

SEQ ID NO: 123522 - protein, 7 aa, synthetic construct
IAPRMTH

SEQ ID NO: 123523 - protein, 7 aa, synthetic construct
IAPRNNF

SEQ ID NO: 123524 - protein, 7 aa, synthetic construct
IAPSHRT

SEQ ID NO: 123525 - protein, 7 aa, synthetic construct
IAPSRYA

SEQ ID NO: 123526 - protein, 7 aa, synthetic construct
IAPTHRG

SEQ ID NO: 123527 - protein, 7 aa, synthetic construct
IAPTYKM

SEQ ID NO: 123528 - protein, 7 aa, synthetic construct
IAQKHLM

SEQ ID NO: 123529 - protein, 7 aa, synthetic construct
IAQKNMF

SEQ ID NO: 123530 - protein, 7 aa, synthetic construct
IAQMPRN

SEQ ID NO: 123531 - protein, 7 aa, synthetic construct
IAQNQNR

SEQ ID NO: 123532 - protein, 7 aa, synthetic construct
IAQSPFD

SEQ ID NO: 123533 - protein, 7 aa, synthetic construct
IAQTRLQ

SEQ ID NO: 123534 - protein, 7 aa, synthetic construct
IARETIK

SEQ ID NO: 123535 - protein, 7 aa, synthetic construct
IARGSTF

SEQ ID NO: 123536 - protein, 7 aa, synthetic construct
IARHKDP

SEQ ID NO: 123537 - protein, 7 aa, synthetic construct
IARHVLA

SEQ ID NO: 123538 - protein, 7 aa, synthetic construct
IARMKDL

SEQ ID NO: 123539 - protein, 7 aa, synthetic construct
IARMKTE

SEQ ID NO: 123540 - protein, 7 aa, synthetic construct
IARMSDR

SEQ ID NO: 123541 - protein, 7 aa, synthetic construct
IARMVTA

SEQ ID NO: 123542 - protein, 7 aa, synthetic construct
IARNIDR

SEQ ID NO: 123543 - protein, 7 aa, synthetic construct
IARNSAF

SEQ ID NO: 123544 - protein, 7 aa, synthetic construct
IARNTHP

SEQ ID NO: 123545 - protein, 7 aa, synthetic construct
IARPTER

SEQ ID NO: 123546 - protein, 7 aa, synthetic construct
IARQSPG

SEQ ID NO: 123547 - protein, 7 aa, synthetic construct
IARSASG

SEQ ID NO: 123548 - protein, 7 aa, synthetic construct
IARTERI

SEQ ID NO: 123549 - protein, 7 aa, synthetic construct
IARTQAY

SEQ ID NO: 123550 - protein, 7 aa, synthetic construct
IARTSMN

SEQ ID NO: 123551 - protein, 7 aa, synthetic construct
IARVTDR

SEQ ID NO: 123552 - protein, 7 aa, synthetic construct
IARVTPA

SEQ ID NO: 123553 - protein, 7 aa, synthetic construct
IASAKFQ

SEQ ID NO: 123554 - protein, 7 aa, synthetic construct
IASHKMN

SEQ ID NO: 123555 - protein, 7 aa, synthetic construct
IASKSVF

SEQ ID NO: 123556 - protein, 7 aa, synthetic construct
IASQQHR

SEQ ID NO: 123557 - protein, 7 aa, synthetic construct
IASRHTG

SEQ ID NO: 123558 - protein, 7 aa, synthetic construct
IASRLPT

SEQ ID NO: 123559 - protein, 7 aa, synthetic construct
IATAAFR

SEQ ID NO: 123560 - protein, 7 aa, synthetic construct
IATHAKF

SEQ ID NO: 123561 - protein, 7 aa, synthetic construct
IATHGRM

SEQ ID NO: 123562 - protein, 7 aa, synthetic construct
IATHITR

SEQ ID NO: 123563 - protein, 7 aa, synthetic construct
IATKGIF

SEQ ID NO: 123564 - protein, 7 aa, synthetic construct
IATQRHI

SEQ ID NO: 123565 - protein, 7 aa, synthetic construct
IATRDNR

SEQ ID NO: 123566 - protein, 7 aa, synthetic construct
IATTKHF

SEQ ID NO: 123567 - protein, 7 aa, synthetic construct
IATYSGK

SEQ ID NO: 123568 - protein, 7 aa, synthetic construct
IATYTRP

SEQ ID NO: 123569 - protein, 7 aa, synthetic construct
IAVARMP

SEQ ID NO: 123570 - protein, 7 aa, synthetic construct
IAVKNPH

SEQ ID NO: 123571 - protein, 7 aa, synthetic construct
IAYGSKV

SEQ ID NO: 123572 - protein, 7 aa, synthetic construct
IAYGTGM

SEQ ID NO: 123573 - protein, 7 aa, synthetic construct
IAYTPTS

SEQ ID NO: 123574 - protein, 7 aa, synthetic construct
IDAARFK

SEQ ID NO: 123575 - protein, 7 aa, synthetic construct
IDAKRYT

SEQ ID NO: 123576 - protein, 7 aa, synthetic construct
IDANRRN

SEQ ID NO: 123577 - protein, 7 aa, synthetic construct
IDANRRT

SEQ ID NO: 123578 - protein, 7 aa, synthetic construct
IDATRTR

SEQ ID NO: 123579 - protein, 7 aa, synthetic construct
IDFKAKM

SEQ ID NO: 123580 - protein, 7 aa, synthetic construct
IDFKARI

SEQ ID NO: 123581 - protein, 7 aa, synthetic construct
IDGAKRN

SEQ ID NO: 123582 - protein, 7 aa, synthetic construct
IDGIKVR

SEQ ID NO: 123583 - protein, 7 aa, synthetic construct
IDGLKKW

SEQ ID NO: 123584 - protein, 7 aa, synthetic construct
IDGLKRA

SEQ ID NO: 123585 - protein, 7 aa, synthetic construct
IDGMRKA

SEQ ID NO: 123586 - protein, 7 aa, synthetic construct
IDGPLRK

SEQ ID NO: 123587 - protein, 7 aa, synthetic construct
IDGRMKS

SEQ ID NO: 123588 - protein, 7 aa, synthetic construct
IDGRQRA

SEQ ID NO: 123589 - protein, 7 aa, synthetic construct
IDGRTKY

SEQ ID NO: 123590 - protein, 7 aa, synthetic construct
IDHKTMR

SEQ ID NO: 123591 - protein, 7 aa, synthetic construct
IDHNKPR

SEQ ID NO: 123592 - protein, 7 aa, synthetic construct
IDHQKKS

SEQ ID NO: 123593 - protein, 7 aa, synthetic construct
IDIAMKK

SEQ ID NO: 123594 - protein, 7 aa, synthetic construct
IDIPTRK

SEQ ID NO: 123595 - protein, 7 aa, synthetic construct
IDIRAKF

SEQ ID NO: 123596 - protein, 7 aa, synthetic construct
IDIVKRA

SEQ ID NO: 123597 - protein, 7 aa, synthetic construct
IDKARDR

SEQ ID NO: 123598 - protein, 7 aa, synthetic construct
IDKFRGV

SEQ ID NO: 123599 - protein, 7 aa, synthetic construct
IDKGPGR

SEQ ID NO: 123600 - protein, 7 aa, synthetic construct
IDKMQQR

SEQ ID NO: 123601 - protein, 7 aa, synthetic construct
IDKPRGY

SEQ ID NO: 123602 - protein, 7 aa, synthetic construct
IDKPTRH

SEQ ID NO: 123603 - protein, 7 aa, synthetic construct
IDKQFRG

SEQ ID NO: 123604 - protein, 7 aa, synthetic construct
IDKQMGR

SEQ ID NO: 123605 - protein, 7 aa, synthetic construct
IDKQWTK

SEQ ID NO: 123606 - protein, 7 aa, synthetic construct
IDKQYRI

SEQ ID NO: 123607 - protein, 7 aa, synthetic construct
IDKRLER

SEQ ID NO: 123608 - protein, 7 aa, synthetic construct
IDKRLQF

SEQ ID NO: 123609 - protein, 7 aa, synthetic construct
IDKSQTR

SEQ ID NO: 123610 - protein, 7 aa, synthetic construct
IDKSRYL

SEQ ID NO: 123611 - protein, 7 aa, synthetic construct
IDKSTYA

SEQ ID NO: 123612 - protein, 7 aa, synthetic construct
IDKSWLK

SEQ ID NO: 123613 - protein, 7 aa, synthetic construct
IDKTAYR

SEQ ID NO: 123614 - protein, 7 aa, synthetic construct
IDKWVKA

SEQ ID NO: 123615 - protein, 7 aa, synthetic construct
IDKYARA

SEQ ID NO: 123616 - protein, 7 aa, synthetic construct
IDLKYKL

SEQ ID NO: 123617 - protein, 7 aa, synthetic construct
IDLNKIR

SEQ ID NO: 123618 - protein, 7 aa, synthetic construct
IDLPAKR

SEQ ID NO: 123619 - protein, 7 aa, synthetic construct
IDLPKRT

SEQ ID NO: 123620 - protein, 7 aa, synthetic construct
IDMGAKK

SEQ ID NO: 123621 - protein, 7 aa, synthetic construct
IDMNKRM

SEQ ID NO: 123622 - protein, 7 aa, synthetic construct
IDMRARG

SEQ ID NO: 123623 - protein, 7 aa, synthetic construct
IDMRFKA

SEQ ID NO: 123624 - protein, 7 aa, synthetic construct
IDNARQR

SEQ ID NO: 123625 - protein, 7 aa, synthetic construct
IDNKPKL

SEQ ID NO: 123626 - protein, 7 aa, synthetic construct
IDNKPYR

SEQ ID NO: 123627 - protein, 7 aa, synthetic construct
IDNKRFV

SEQ ID NO: 123628 - protein, 7 aa, synthetic construct
IDNPKRF

SEQ ID NO: 123629 - protein, 7 aa, synthetic construct
IDNPRNK

SEQ ID NO: 123630 - protein, 7 aa, synthetic construct
IDNWRQG

SEQ ID NO: 123631 - protein, 7 aa, synthetic construct
IDPARKF

SEQ ID NO: 123632 - protein, 7 aa, synthetic construct
IDPRPAR

SEQ ID NO: 123633 - protein, 7 aa, synthetic construct
IDPRPKT

SEQ ID NO: 123634 - protein, 7 aa, synthetic construct
IDPRYRM

SEQ ID NO: 123635 - protein, 7 aa, synthetic construct
IDQGRTK

SEQ ID NO: 123636 - protein, 7 aa, synthetic construct
IDQHKMR

SEQ ID NO: 123637 - protein, 7 aa, synthetic construct
IDQKPRG

SEQ ID NO: 123638 - protein, 7 aa, synthetic construct
IDQKRFQ

SEQ ID NO: 123639 - protein, 7 aa, synthetic construct
IDRGNIR

SEQ ID NO: 123640 - protein, 7 aa, synthetic construct
IDRHKSA

SEQ ID NO: 123641 - protein, 7 aa, synthetic construct
IDRKFTS

SEQ ID NO: 123642 - protein, 7 aa, synthetic construct
IDRKIML

SEQ ID NO: 123643 - protein, 7 aa, synthetic construct
IDRKMRE

SEQ ID NO: 123644 - protein, 7 aa, synthetic construct
IDRKSNI

SEQ ID NO: 123645 - protein, 7 aa, synthetic construct
IDRKTYG

SEQ ID NO: 123646 - protein, 7 aa, synthetic construct
IDRLQTK

SEQ ID NO: 123647 - protein, 7 aa, synthetic construct
IDRMEFP

SEQ ID NO: 123648 - protein, 7 aa, synthetic construct
IDRMTTK

SEQ ID NO: 123649 - protein, 7 aa, synthetic construct
IDRNSMK

SEQ ID NO: 123650 - protein, 7 aa, synthetic construct
IDRPGRQ

SEQ ID NO: 123651 - protein, 7 aa, synthetic construct
IDRPSRI

SEQ ID NO: 123652 - protein, 7 aa, synthetic construct
IDRQSKV

SEQ ID NO: 123653 - protein, 7 aa, synthetic construct
IDRRIVP

SEQ ID NO: 123654 - protein, 7 aa, synthetic construct
IDRRLSQ

SEQ ID NO: 123655 - protein, 7 aa, synthetic construct
IDRVVRM

SEQ ID NO: 123656 - protein, 7 aa, synthetic construct
IDSARRM

SEQ ID NO: 123657 - protein, 7 aa, synthetic construct
IDSIRNK

SEQ ID NO: 123658 - protein, 7 aa, synthetic construct
IDSMPRK

SEQ ID NO: 123659 - protein, 7 aa, synthetic construct
IDSRRNT

SEQ ID NO: 123660 - protein, 7 aa, synthetic construct
IDSRVSR

SEQ ID NO: 123661 - protein, 7 aa, synthetic construct
IDSVKMR

SEQ ID NO: 123662 - protein, 7 aa, synthetic construct
IDTAARK

SEQ ID NO: 123663 - protein, 7 aa, synthetic construct
IDTKYRM

SEQ ID NO: 123664 - protein, 7 aa, synthetic construct
IDTRTRV

SEQ ID NO: 123665 - protein, 7 aa, synthetic construct
IDTSRSR

SEQ ID NO: 123666 - protein, 7 aa, synthetic construct
IDTWKGM

SEQ ID NO: 123667 - protein, 7 aa, synthetic construct
IDVRNLK

SEQ ID NO: 123668 - protein, 7 aa, synthetic construct
IDVTRKL

SEQ ID NO: 123669 - protein, 7 aa, synthetic construct
IDYKPKS

SEQ ID NO: 123670 - protein, 7 aa, synthetic construct
IDYKYKA

SEQ ID NO: 123671 - protein, 7 aa, synthetic construct
IEAKSRN

SEQ ID NO: 123672 - protein, 7 aa, synthetic construct
IEATKRF

SEQ ID NO: 123673 - protein, 7 aa, synthetic construct
IEFHNGR

SEQ ID NO: 123674 - protein, 7 aa, synthetic construct
IEGLKRG

SEQ ID NO: 123675 - protein, 7 aa, synthetic construct
IEHKPKI

SEQ ID NO: 123676 - protein, 7 aa, synthetic construct
IEIQRKQ

SEQ ID NO: 123677 - protein, 7 aa, synthetic construct
IEKGHRV

SEQ ID NO: 123678 - protein, 7 aa, synthetic construct
IEKGRYI

SEQ ID NO: 123679 - protein, 7 aa, synthetic construct
IEKHANR

SEQ ID NO: 123680 - protein, 7 aa, synthetic construct
IEKHRSQ

SEQ ID NO: 123681 - protein, 7 aa, synthetic construct
IEKMARQ

SEQ ID NO: 123682 - protein, 7 aa, synthetic construct
IEKNKYI

SEQ ID NO: 123683 - protein, 7 aa, synthetic construct
IEKRYGV

SEQ ID NO: 123684 - protein, 7 aa, synthetic construct
IEKTWKQ

SEQ ID NO: 123685 - protein, 7 aa, synthetic construct
IEKVKYV

SEQ ID NO: 123686 - protein, 7 aa, synthetic construct
IEKYKNS

SEQ ID NO: 123687 - protein, 7 aa, synthetic construct
IEMGPFS

SEQ ID NO: 123688 - protein, 7 aa, synthetic construct
IEMKPRQ

SEQ ID NO: 123689 - protein, 7 aa, synthetic construct
IEMRNRG

SEQ ID NO: 123690 - protein, 7 aa, synthetic construct
IEMRPKG

SEQ ID NO: 123691 - protein, 7 aa, synthetic construct
IEMRSSK

SEQ ID NO: 123692 - protein, 7 aa, synthetic construct
IEMRTNK

SEQ ID NO: 123693 - protein, 7 aa, synthetic construct
IENPRKP

SEQ ID NO: 123694 - protein, 7 aa, synthetic construct
IENRSLK

SEQ ID NO: 123695 - protein, 7 aa, synthetic construct
IENTNRK

SEQ ID NO: 123696 - protein, 7 aa, synthetic construct
IEPVNRK

SEQ ID NO: 123697 - protein, 7 aa, synthetic construct
IEQGKRS

SEQ ID NO: 123698 - protein, 7 aa, synthetic construct
IEQRLKA

SEQ ID NO: 123699 - protein, 7 aa, synthetic construct
IERGLPR

SEQ ID NO: 123700 - protein, 7 aa, synthetic construct
IERISKT

SEQ ID NO: 123701 - protein, 7 aa, synthetic construct
IERKLYG

SEQ ID NO: 123702 - protein, 7 aa, synthetic construct
IERKMTT

SEQ ID NO: 123703 - protein, 7 aa, synthetic construct
IERKVVI

SEQ ID NO: 123704 - protein, 7 aa, synthetic construct
IERLAKP

SEQ ID NO: 123705 - protein, 7 aa, synthetic construct
IERLQGK

SEQ ID NO: 123706 - protein, 7 aa, synthetic construct
IERLRQN

SEQ ID NO: 123707 - protein, 7 aa, synthetic construct
IERNRIN

SEQ ID NO: 123708 - protein, 7 aa, synthetic construct
IERRTQV

SEQ ID NO: 123709 - protein, 7 aa, synthetic construct
IERTKHS

SEQ ID NO: 123710 - protein, 7 aa, synthetic construct
IERVRTS

SEQ ID NO: 123711 - protein, 7 aa, synthetic construct
IESASKK

SEQ ID NO: 123712 - protein, 7 aa, synthetic construct
IESIKRS

SEQ ID NO: 123713 - protein, 7 aa, synthetic construct
IETKFRA

SEQ ID NO: 123714 - protein, 7 aa, synthetic construct
IETKPGK

SEQ ID NO: 123715 - protein, 7 aa, synthetic construct
IETNRIK

SEQ ID NO: 123716 - protein, 7 aa, synthetic construct
IETNRLR

SEQ ID NO: 123717 - protein, 7 aa, synthetic construct
IETSGKK

SEQ ID NO: 123718 - protein, 7 aa, synthetic construct
IEVAKRT

SEQ ID NO: 123719 - protein, 7 aa, synthetic construct
IEVKNRF

SEQ ID NO: 123720 - protein, 7 aa, synthetic construct
IEVQKSR

SEQ ID NO: 123721 - protein, 7 aa, synthetic construct
IEVQKTR

SEQ ID NO: 123722 - protein, 7 aa, synthetic construct
IEVQRKQ

SEQ ID NO: 123723 - protein, 7 aa, synthetic construct
IEVRVRS

SEQ ID NO: 123724 - protein, 7 aa, synthetic construct
IEYKPGK

SEQ ID NO: 123725 - protein, 7 aa, synthetic construct
IEYKTSK

SEQ ID NO: 123726 - protein, 7 aa, synthetic construct
IFAKARD

SEQ ID NO: 123727 - protein, 7 aa, synthetic construct
IFDKHRG

SEQ ID NO: 123728 - protein, 7 aa, synthetic construct
IFGGKGM

SEQ ID NO: 123729 - protein, 7 aa, synthetic construct
IFKAASV

SEQ ID NO: 123730 - protein, 7 aa, synthetic construct
IFKASQH

SEQ ID NO: 123731 - protein, 7 aa, synthetic construct
IFKDHRG

SEQ ID NO: 123732 - protein, 7 aa, synthetic construct
IFKESTR

SEQ ID NO: 123733 - protein, 7 aa, synthetic construct
IFKGHIG

SEQ ID NO: 123734 - protein, 7 aa, synthetic construct
IFKGVTM

SEQ ID NO: 123735 - protein, 7 aa, synthetic construct
IFKKFQE

SEQ ID NO: 123736 - protein, 7 aa, synthetic construct
IFKKPMD

SEQ ID NO: 123737 - protein, 7 aa, synthetic construct
IFKNQDK

SEQ ID NO: 123738 - protein, 7 aa, synthetic construct
IFKNSQH

SEQ ID NO: 123739 - protein, 7 aa, synthetic construct
IFKPQNN

SEQ ID NO: 123740 - protein, 7 aa, synthetic construct
IFKQTHQ

SEQ ID NO: 123741 - protein, 7 aa, synthetic construct
IFKSHDR

SEQ ID NO: 123742 - protein, 7 aa, synthetic construct
IFKSQMG

SEQ ID NO: 123743 - protein, 7 aa, synthetic construct
IFKTQHG

SEQ ID NO: 123744 - protein, 7 aa, synthetic construct
IFKTSIQ

SEQ ID NO: 123745 - protein, 7 aa, synthetic construct
IFNEKSR

SEQ ID NO: 123746 - protein, 7 aa, synthetic construct
IFPGKAV

SEQ ID NO: 123747 - protein, 7 aa, synthetic construct
IFQATKN

SEQ ID NO: 123748 - protein, 7 aa, synthetic construct
IFQNTAR

SEQ ID NO: 123749 - protein, 7 aa, synthetic construct
IFRNLKE

SEQ ID NO: 123750 - protein, 7 aa, synthetic construct
IFRNSQP

SEQ ID NO: 123751 - protein, 7 aa, synthetic construct
IFSKGSQ

SEQ ID NO: 123752 - protein, 7 aa, synthetic construct
IFSKGVT

SEQ ID NO: 123753 - protein, 7 aa, synthetic construct
IFTTSKA

SEQ ID NO: 123754 - protein, 7 aa, synthetic construct
IGAGSRA

SEQ ID NO: 123755 - protein, 7 aa, synthetic construct
IGAHRPV

SEQ ID NO: 123756 - protein, 7 aa, synthetic construct
IGASNHK

SEQ ID NO: 123757 - protein, 7 aa, synthetic construct
IGATKMY

SEQ ID NO: 123758 - protein, 7 aa, synthetic construct
IGATNYR

SEQ ID NO: 123759 - protein, 7 aa, synthetic construct
IGEGRKF

SEQ ID NO: 123760 - protein, 7 aa, synthetic construct
IGEIRNR

SEQ ID NO: 123761 - protein, 7 aa, synthetic construct
IGENARK

SEQ ID NO: 123762 - protein, 7 aa, synthetic construct
IGERPNR

SEQ ID NO: 123763 - protein, 7 aa, synthetic construct
IGGAHQK

SEQ ID NO: 123764 - protein, 7 aa, synthetic construct
IGGAKFV

SEQ ID NO: 123765 - protein, 7 aa, synthetic construct
IGGAWPK

SEQ ID NO: 123766 - protein, 7 aa, synthetic construct
IGGGHMK

SEQ ID NO: 123767 - protein, 7 aa, synthetic construct
IGGGKYG

SEQ ID NO: 123768 - protein, 7 aa, synthetic construct
IGGGVQR

SEQ ID NO: 123769 - protein, 7 aa, synthetic construct
IGGGYSR

SEQ ID NO: 123770 - protein, 7 aa, synthetic construct
IGGGYTK

SEQ ID NO: 123771 - protein, 7 aa, synthetic construct
IGGIHTK

SEQ ID NO: 123772 - protein, 7 aa, synthetic construct
IGGKAAF

SEQ ID NO: 123773 - protein, 7 aa, synthetic construct
IGGKMPI

SEQ ID NO: 123774 - protein, 7 aa, synthetic construct
IGGLHRQ

SEQ ID NO: 123775 - protein, 7 aa, synthetic construct
IGGMRRE

SEQ ID NO: 123776 - protein, 7 aa, synthetic construct
IGGPGVR

SEQ ID NO: 123777 - protein, 7 aa, synthetic construct
IGGPHRA

SEQ ID NO: 123778 - protein, 7 aa, synthetic construct
IGGPTRM

SEQ ID NO: 123779 - protein, 7 aa, synthetic construct
IGGQTRH

SEQ ID NO: 123780 - protein, 7 aa, synthetic construct
IGGRAIT

SEQ ID NO: 123781 - protein, 7 aa, synthetic construct
IGGRMIS

SEQ ID NO: 123782 - protein, 7 aa, synthetic construct
IGGRVGL

SEQ ID NO: 123783 - protein, 7 aa, synthetic construct
IGGTTGR

SEQ ID NO: 123784 - protein, 7 aa, synthetic construct
IGGVPRS

SEQ ID NO: 123785 - protein, 7 aa, synthetic construct
IGGYHTM

SEQ ID NO: 123786 - protein, 7 aa, synthetic construct
IGGYNQK

SEQ ID NO: 123787 - protein, 7 aa, synthetic construct
IGHAIRS

SEQ ID NO: 123788 - protein, 7 aa, synthetic construct
IGHIRSG

SEQ ID NO: 123789 - protein, 7 aa, synthetic construct
IGHLGGK

SEQ ID NO: 123790 - protein, 7 aa, synthetic construct
IGHLTTR

SEQ ID NO: 123791 - protein, 7 aa, synthetic construct
IGHNAAR

SEQ ID NO: 123792 - protein, 7 aa, synthetic construct
IGHNMLK

SEQ ID NO: 123793 - protein, 7 aa, synthetic construct
IGHNPKT

SEQ ID NO: 123794 - protein, 7 aa, synthetic construct
IGHNPSR

SEQ ID NO: 123795 - protein, 7 aa, synthetic construct
IGHPNVR

SEQ ID NO: 123796 - protein, 7 aa, synthetic construct
IGHQKSF

SEQ ID NO: 123797 - protein, 7 aa, synthetic construct
IGHRQIT

SEQ ID NO: 123798 - protein, 7 aa, synthetic construct
IGHVRNP

SEQ ID NO: 123799 - protein, 7 aa, synthetic construct
IGISNAR

SEQ ID NO: 123800 - protein, 7 aa, synthetic construct
IGKADMR

SEQ ID NO: 123801 - protein, 7 aa, synthetic construct
IGKFDAR

SEQ ID NO: 123802 - protein, 7 aa, synthetic construct
IGKFDKS

SEQ ID NO: 123803 - protein, 7 aa, synthetic construct
IGKFITQ

SEQ ID NO: 123804 - protein, 7 aa, synthetic construct
IGKGASY

SEQ ID NO: 123805 - protein, 7 aa, synthetic construct
IGKGHFN

SEQ ID NO: 123806 - protein, 7 aa, synthetic construct
IGKGIHY

SEQ ID NO: 123807 - protein, 7 aa, synthetic construct
IGKGNYP

SEQ ID NO: 123808 - protein, 7 aa, synthetic construct
IGKGYTI

SEQ ID NO: 123809 - protein, 7 aa, synthetic construct
IGKHGYS

SEQ ID NO: 123810 - protein, 7 aa, synthetic construct
IGKIHYS

SEQ ID NO: 123811 - protein, 7 aa, synthetic construct
IGKKYQE

SEQ ID NO: 123812 - protein, 7 aa, synthetic construct
IGKPAAF

SEQ ID NO: 123813 - protein, 7 aa, synthetic construct
IGKPFPI

SEQ ID NO: 123814 - protein, 7 aa, synthetic construct
IGKPHAY

SEQ ID NO: 123815 - protein, 7 aa, synthetic construct
IGKRMDA

SEQ ID NO: 123816 - protein, 7 aa, synthetic construct
IGKSNIY

SEQ ID NO: 123817 - protein, 7 aa, synthetic construct
IGKTVYA

SEQ ID NO: 123818 - protein, 7 aa, synthetic construct
IGKVTYN

SEQ ID NO: 123819 - protein, 7 aa, synthetic construct
IGKWMKE

SEQ ID NO: 123820 - protein, 7 aa, synthetic construct
IGKYLSV

SEQ ID NO: 123821 - protein, 7 aa, synthetic construct
IGKYMTG

SEQ ID NO: 123822 - protein, 7 aa, synthetic construct
IGKYPTT

SEQ ID NO: 123823 - protein, 7 aa, synthetic construct
IGKYQIS

SEQ ID NO: 123824 - protein, 7 aa, synthetic construct
IGKYVHS

SEQ ID NO: 123825 - protein, 7 aa, synthetic construct
IGLNFKA

SEQ ID NO: 123826 - protein, 7 aa, synthetic construct
IGLRERA

SEQ ID NO: 123827 - protein, 7 aa, synthetic construct
IGLSERK

SEQ ID NO: 123828 - protein, 7 aa, synthetic construct
IGNAYNK

SEQ ID NO: 123829 - protein, 7 aa, synthetic construct
IGNHQGK

SEQ ID NO: 123830 - protein, 7 aa, synthetic construct
IGNKQFI

SEQ ID NO: 123831 - protein, 7 aa, synthetic construct
IGNRVLT

SEQ ID NO: 123832 - protein, 7 aa, synthetic construct
IGNVTRH

SEQ ID NO: 123833 - protein, 7 aa, synthetic construct
IGPARFA

SEQ ID NO: 123834 - protein, 7 aa, synthetic construct
IGPEKTK

SEQ ID NO: 123835 - protein, 7 aa, synthetic construct
IGPELKR

SEQ ID NO: 123836 - protein, 7 aa, synthetic construct
IGPFHKN

SEQ ID NO: 123837 - protein, 7 aa, synthetic construct
IGPNLQR

SEQ ID NO: 123838 - protein, 7 aa, synthetic construct
IGPNYMK

SEQ ID NO: 123839 - protein, 7 aa, synthetic construct
IGPSVFK

SEQ ID NO: 123840 - protein, 7 aa, synthetic construct
IGPYGKN

SEQ ID NO: 123841 - protein, 7 aa, synthetic construct
IGQAEKK

SEQ ID NO: 123842 - protein, 7 aa, synthetic construct
IGQGATR

SEQ ID NO: 123843 - protein, 7 aa, synthetic construct
IGQGFSK

SEQ ID NO: 123844 - protein, 7 aa, synthetic construct
IGQIASR

SEQ ID NO: 123845 - protein, 7 aa, synthetic construct
IGQKMFS

SEQ ID NO: 123846 - protein, 7 aa, synthetic construct
IGQNQFR

SEQ ID NO: 123847 - protein, 7 aa, synthetic construct
IGQNWGK

SEQ ID NO: 123848 - protein, 7 aa, synthetic construct
IGQTALR

SEQ ID NO: 123849 - protein, 7 aa, synthetic construct
IGQTTHK

SEQ ID NO: 123850 - protein, 7 aa, synthetic construct
IGQVRMT

SEQ ID NO: 123851 - protein, 7 aa, synthetic construct
IGRASMS

SEQ ID NO: 123852 - protein, 7 aa, synthetic construct
IGRASNV

SEQ ID NO: 123853 - protein, 7 aa, synthetic construct
IGRASQG

SEQ ID NO: 123854 - protein, 7 aa, synthetic construct
IGRATAS

SEQ ID NO: 123855 - protein, 7 aa, synthetic construct
IGRATFS

SEQ ID NO: 123856 - protein, 7 aa, synthetic construct
IGRGAIG

SEQ ID NO: 123857 - protein, 7 aa, synthetic construct
IGRGANS

SEQ ID NO: 123858 - protein, 7 aa, synthetic construct
IGRGENK

SEQ ID NO: 123859 - protein, 7 aa, synthetic construct
IGRGSMM

SEQ ID NO: 123860 - protein, 7 aa, synthetic construct
IGRHPTS

SEQ ID NO: 123861 - protein, 7 aa, synthetic construct
IGRIMRE

SEQ ID NO: 123862 - protein, 7 aa, synthetic construct
IGRLAHP

SEQ ID NO: 123863 - protein, 7 aa, synthetic construct
IGRLDRA

SEQ ID NO: 123864 - protein, 7 aa, synthetic construct
IGRLGPA

SEQ ID NO: 123865 - protein, 7 aa, synthetic construct
IGRLINQ

SEQ ID NO: 123866 - protein, 7 aa, synthetic construct
IGRLKFE

SEQ ID NO: 123867 - protein, 7 aa, synthetic construct
IGRLMGN

SEQ ID NO: 123868 - protein, 7 aa, synthetic construct
IGRMIGS

SEQ ID NO: 123869 - protein, 7 aa, synthetic construct
IGRMPNV

SEQ ID NO: 123870 - protein, 7 aa, synthetic construct
IGRMTTM

SEQ ID NO: 123871 - protein, 7 aa, synthetic construct
IGRNQQS

SEQ ID NO: 123872 - protein, 7 aa, synthetic construct
IGRPAGF

SEQ ID NO: 123873 - protein, 7 aa, synthetic construct
IGRPHAQ

SEQ ID NO: 123874 - protein, 7 aa, synthetic construct
IGRPMMA

SEQ ID NO: 123875 - protein, 7 aa, synthetic construct
IGRPQGF

SEQ ID NO: 123876 - protein, 7 aa, synthetic construct
IGRQDMR

SEQ ID NO: 123877 - protein, 7 aa, synthetic construct
IGRQFTG

SEQ ID NO: 123878 - protein, 7 aa, synthetic construct
IGRQSGN

SEQ ID NO: 123879 - protein, 7 aa, synthetic construct
IGRQTLN

SEQ ID NO: 123880 - protein, 7 aa, synthetic construct
IGRSFGT

SEQ ID NO: 123881 - protein, 7 aa, synthetic construct
IGRVSIA

SEQ ID NO: 123882 - protein, 7 aa, synthetic construct
IGRVTYS

SEQ ID NO: 123883 - protein, 7 aa, synthetic construct
IGSGSGR

SEQ ID NO: 123884 - protein, 7 aa, synthetic construct
IGSGSSR

SEQ ID NO: 123885 - protein, 7 aa, synthetic construct
IGSRQHA

SEQ ID NO: 123886 - protein, 7 aa, synthetic construct
IGSSGYM

SEQ ID NO: 123887 - protein, 7 aa, synthetic construct
IGSVAIK

SEQ ID NO: 123888 - protein, 7 aa, synthetic construct
IGSYITR

SEQ ID NO: 123889 - protein, 7 aa, synthetic construct
IGTHVRG

SEQ ID NO: 123890 - protein, 7 aa, synthetic construct
IGTISRA

SEQ ID NO: 123891 - protein, 7 aa, synthetic construct
IGTKLFN

SEQ ID NO: 123892 - protein, 7 aa, synthetic construct
IGTPRHV

SEQ ID NO: 123893 - protein, 7 aa, synthetic construct
IGTRERG

SEQ ID NO: 123894 - protein, 7 aa, synthetic construct
IGVPRVG

SEQ ID NO: 123895 - protein, 7 aa, synthetic construct
IGVPTIK

SEQ ID NO: 123896 - protein, 7 aa, synthetic construct
IGVRIHA

SEQ ID NO: 123897 - protein, 7 aa, synthetic construct
IGYKGGG

SEQ ID NO: 123898 - protein, 7 aa, synthetic construct
IHAGARA

SEQ ID NO: 123899 - protein, 7 aa, synthetic construct
IHAGMQK

SEQ ID NO: 123900 - protein, 7 aa, synthetic construct
IHAGTRQ

SEQ ID NO: 123901 - protein, 7 aa, synthetic construct
IHAHLKN

SEQ ID NO: 123902 - protein, 7 aa, synthetic construct
IHAKDAR

SEQ ID NO: 123903 - protein, 7 aa, synthetic construct
IHAKFSA

SEQ ID NO: 123904 - protein, 7 aa, synthetic construct
IHANVNR

SEQ ID NO: 123905 - protein, 7 aa, synthetic construct
IHAPVTE

SEQ ID NO: 123906 - protein, 7 aa, synthetic construct
IHAQKQF

SEQ ID NO: 123907 - protein, 7 aa, synthetic construct
IHASPMK

SEQ ID NO: 123908 - protein, 7 aa, synthetic construct
IHDKLRL

SEQ ID NO: 123909 - protein, 7 aa, synthetic construct
IHDKPRN

SEQ ID NO: 123910 - protein, 7 aa, synthetic construct
IHDKVKY

SEQ ID NO: 123911 - protein, 7 aa, synthetic construct
IHEKRVM

SEQ ID NO: 123912 - protein, 7 aa, synthetic construct
IHENKRS

SEQ ID NO: 123913 - protein, 7 aa, synthetic construct
IHGFTKQ

SEQ ID NO: 123914 - protein, 7 aa, synthetic construct
IHGGYSK

SEQ ID NO: 123915 - protein, 7 aa, synthetic construct
IHGKGFS

SEQ ID NO: 123916 - protein, 7 aa, synthetic construct
IHGKILG

SEQ ID NO: 123917 - protein, 7 aa, synthetic construct
IHGKMIN

SEQ ID NO: 123918 - protein, 7 aa, synthetic construct
IHGNSRV

SEQ ID NO: 123919 - protein, 7 aa, synthetic construct
IHGNVRG

SEQ ID NO: 123920 - protein, 7 aa, synthetic construct
IHGSGNK

SEQ ID NO: 123921 - protein, 7 aa, synthetic construct
IHGTGRH

SEQ ID NO: 123922 - protein, 7 aa, synthetic construct
IHGVGPY

SEQ ID NO: 123923 - protein, 7 aa, synthetic construct
IHHARYD

SEQ ID NO: 123924 - protein, 7 aa, synthetic construct
IHHMKNS

SEQ ID NO: 123925 - protein, 7 aa, synthetic construct
IHHPKSG

SEQ ID NO: 123926 - protein, 7 aa, synthetic construct
IHHTTQK

SEQ ID NO: 123927 - protein, 7 aa, synthetic construct
IHIKTTN

SEQ ID NO: 123928 - protein, 7 aa, synthetic construct
IHKAKFD

SEQ ID NO: 123929 - protein, 7 aa, synthetic construct
IHKAVSF

SEQ ID NO: 123930 - protein, 7 aa, synthetic construct
IHKDIIR

SEQ ID NO: 123931 - protein, 7 aa, synthetic construct
IHKESLK

SEQ ID NO: 123932 - protein, 7 aa, synthetic construct
IHKFNNS

SEQ ID NO: 123933 - protein, 7 aa, synthetic construct
IHKFQAN

SEQ ID NO: 123934 - protein, 7 aa, synthetic construct
IHKGHNN

SEQ ID NO: 123935 - protein, 7 aa, synthetic construct
IHKGSAH

SEQ ID NO: 123936 - protein, 7 aa, synthetic construct
IHKGSFP

SEQ ID NO: 123937 - protein, 7 aa, synthetic construct
IHKGSQF

SEQ ID NO: 123938 - protein, 7 aa, synthetic construct
IHKIKFE

SEQ ID NO: 123939 - protein, 7 aa, synthetic construct
IHKISAH

SEQ ID NO: 123940 - protein, 7 aa, synthetic construct
IHKKMSE

SEQ ID NO: 123941 - protein, 7 aa, synthetic construct
IHKLANL

SEQ ID NO: 123942 - protein, 7 aa, synthetic construct
IHKLDRS

SEQ ID NO: 123943 - protein, 7 aa, synthetic construct
IHKLISS

SEQ ID NO: 123944 - protein, 7 aa, synthetic construct
IHKNYVG

SEQ ID NO: 123945 - protein, 7 aa, synthetic construct
IHKPDRG

SEQ ID NO: 123946 - protein, 7 aa, synthetic construct
IHKPNER

SEQ ID NO: 123947 - protein, 7 aa, synthetic construct
IHKQLTI

SEQ ID NO: 123948 - protein, 7 aa, synthetic construct
IHKQPVM

SEQ ID NO: 123949 - protein, 7 aa, synthetic construct
IHKQQGY

SEQ ID NO: 123950 - protein, 7 aa, synthetic construct
IHKSFKD

SEQ ID NO: 123951 - protein, 7 aa, synthetic construct
IHKSITM

SEQ ID NO: 123952 - protein, 7 aa, synthetic construct
IHKSSRE

SEQ ID NO: 123953 - protein, 7 aa, synthetic construct
IHKVERN

SEQ ID NO: 123954 - protein, 7 aa, synthetic construct
IHKVNYP

SEQ ID NO: 123955 - protein, 7 aa, synthetic construct
IHKYQVP

SEQ ID NO: 123956 - protein, 7 aa, synthetic construct
IHKYSVS

SEQ ID NO: 123957 - protein, 7 aa, synthetic construct
IHKYVSN

SEQ ID NO: 123958 - protein, 7 aa, synthetic construct
IHLPQRT

SEQ ID NO: 123959 - protein, 7 aa, synthetic construct
IHMKENR

SEQ ID NO: 123960 - protein, 7 aa, synthetic construct
IHMKHIQ

SEQ ID NO: 123961 - protein, 7 aa, synthetic construct
IHMKSPT

SEQ ID NO: 123962 - protein, 7 aa, synthetic construct
IHMKVRD

SEQ ID NO: 123963 - protein, 7 aa, synthetic construct
IHMTKTV

SEQ ID NO: 123964 - protein, 7 aa, synthetic construct
IHNAMMK

SEQ ID NO: 123965 - protein, 7 aa, synthetic construct
IHNGQSR

SEQ ID NO: 123966 - protein, 7 aa, synthetic construct
IHNGSRF

SEQ ID NO: 123967 - protein, 7 aa, synthetic construct
IHNHRSP

SEQ ID NO: 123968 - protein, 7 aa, synthetic construct
IHNKAII

SEQ ID NO: 123969 - protein, 7 aa, synthetic construct
IHNLAKN

SEQ ID NO: 123970 - protein, 7 aa, synthetic construct
IHNQTQK

SEQ ID NO: 123971 - protein, 7 aa, synthetic construct
IHNRGLN

SEQ ID NO: 123972 - protein, 7 aa, synthetic construct
IHNRIAG

SEQ ID NO: 123973 - protein, 7 aa, synthetic construct
IHNTIRM

SEQ ID NO: 123974 - protein, 7 aa, synthetic construct
IHNVKHH

SEQ ID NO: 123975 - protein, 7 aa, synthetic construct
IHPHSKS

SEQ ID NO: 123976 - protein, 7 aa, synthetic construct
IHPKNVF

SEQ ID NO: 123977 - protein, 7 aa, synthetic construct
IHPMIKT

SEQ ID NO: 123978 - protein, 7 aa, synthetic construct
IHQGHRL

SEQ ID NO: 123979 - protein, 7 aa, synthetic construct
IHQITSK

SEQ ID NO: 123980 - protein, 7 aa, synthetic construct
IHQRIGS

SEQ ID NO: 123981 - protein, 7 aa, synthetic construct
IHQTRGQ

SEQ ID NO: 123982 - protein, 7 aa, synthetic construct
IHRLLKE

SEQ ID NO: 123983 - protein, 7 aa, synthetic construct
IHRMQQS

SEQ ID NO: 123984 - protein, 7 aa, synthetic construct
IHRQMKE

SEQ ID NO: 123985 - protein, 7 aa, synthetic construct
IHRQSIA

SEQ ID NO: 123986 - protein, 7 aa, synthetic construct
IHRQVVS

SEQ ID NO: 123987 - protein, 7 aa, synthetic construct
IHRREVD

SEQ ID NO: 123988 - protein, 7 aa, synthetic construct
IHRSDQH

SEQ ID NO: 123989 - protein, 7 aa, synthetic construct
IHSGIRG

SEQ ID NO: 123990 - protein, 7 aa, synthetic construct
IHSHNKF

SEQ ID NO: 123991 - protein, 7 aa, synthetic construct
IHSKAYS

SEQ ID NO: 123992 - protein, 7 aa, synthetic construct
IHSKGFM

SEQ ID NO: 123993 - protein, 7 aa, synthetic construct
IHSKGYG

SEQ ID NO: 123994 - protein, 7 aa, synthetic construct
IHSLTRA

SEQ ID NO: 123995 - protein, 7 aa, synthetic construct
IHSMIKG

SEQ ID NO: 123996 - protein, 7 aa, synthetic construct
IHSQVRQ

SEQ ID NO: 123997 - protein, 7 aa, synthetic construct
IHSVKYG

SEQ ID NO: 123998 - protein, 7 aa, synthetic construct
IHTNFKG

SEQ ID NO: 123999 - protein, 7 aa, synthetic construct
IHTQNQR

SEQ ID NO: 124000 - protein, 7 aa, synthetic construct
IHTQQNK

SEQ ID NO: 124001 - protein, 7 aa, synthetic construct
IHVHTRQ

SEQ ID NO: 124002 - protein, 7 aa, synthetic construct
IHVKYSS

SEQ ID NO: 124003 - protein, 7 aa, synthetic construct
IHYNGSK

SEQ ID NO: 124004 - protein, 7 aa, synthetic construct
IIANMRN

SEQ ID NO: 124005 - protein, 7 aa, synthetic construct
IIANPNR

SEQ ID NO: 124006 - protein, 7 aa, synthetic construct
IIASHNK

SEQ ID NO: 124007 - protein, 7 aa, synthetic construct
IIDHKYK

SEQ ID NO: 124008 - protein, 7 aa, synthetic construct
IIDRSRH

SEQ ID NO: 124009 - protein, 7 aa, synthetic construct
IIENRNR

SEQ ID NO: 124010 - protein, 7 aa, synthetic construct
IIGGYKA

SEQ ID NO: 124011 - protein, 7 aa, synthetic construct
IIGHLKQ

SEQ ID NO: 124012 - protein, 7 aa, synthetic construct
IIGKGYS

SEQ ID NO: 124013 - protein, 7 aa, synthetic construct
IIGPRNP

SEQ ID NO: 124014 - protein, 7 aa, synthetic construct
IIGRAVN

SEQ ID NO: 124015 - protein, 7 aa, synthetic construct
IIGSHRV

SEQ ID NO: 124016 - protein, 7 aa, synthetic construct
IIGSPKL

SEQ ID NO: 124017 - protein, 7 aa, synthetic construct
IIGTPGK

SEQ ID NO: 124018 - protein, 7 aa, synthetic construct
IIHGAKA

SEQ ID NO: 124019 - protein, 7 aa, synthetic construct
IIHKNTI

SEQ ID NO: 124020 - protein, 7 aa, synthetic construct
IIHNTKS

SEQ ID NO: 124021 - protein, 7 aa, synthetic construct
IIHQTKQ

SEQ ID NO: 124022 - protein, 7 aa, synthetic construct
IIHSKHA

SEQ ID NO: 124023 - protein, 7 aa, synthetic construct
IIHTAKA

SEQ ID NO: 124024 - protein, 7 aa, synthetic construct
IIHTNRP

SEQ ID NO: 124025 - protein, 7 aa, synthetic construct
IIKEYNR

SEQ ID NO: 124026 - protein, 7 aa, synthetic construct
IIKGPSY

SEQ ID NO: 124027 - protein, 7 aa, synthetic construct
IIKGQFQ

SEQ ID NO: 124028 - protein, 7 aa, synthetic construct
IIKHNIN

SEQ ID NO: 124029 - protein, 7 aa, synthetic construct
IIKHPDR

SEQ ID NO: 124030 - protein, 7 aa, synthetic construct
IIKHPMQ

SEQ ID NO: 124031 - protein, 7 aa, synthetic construct
IIKNPPH

SEQ ID NO: 124032 - protein, 7 aa, synthetic construct
IIKSSNY

SEQ ID NO: 124033 - protein, 7 aa, synthetic construct
IIMHQKA

SEQ ID NO: 124034 - protein, 7 aa, synthetic construct
IIMPTKP

SEQ ID NO: 124035 - protein, 7 aa, synthetic construct
IINLQRA

SEQ ID NO: 124036 - protein, 7 aa, synthetic construct
IINPRER

SEQ ID NO: 124037 - protein, 7 aa, synthetic construct
IINRTHG

SEQ ID NO: 124038 - protein, 7 aa, synthetic construct
IIPAKYG

SEQ ID NO: 124039 - protein, 7 aa, synthetic construct
IIPDRRM

SEQ ID NO: 124040 - protein, 7 aa, synthetic construct
IIPKGTF

SEQ ID NO: 124041 - protein, 7 aa, synthetic construct
IIPKGYT

SEQ ID NO: 124042 - protein, 7 aa, synthetic construct
IIPNSRQ

SEQ ID NO: 124043 - protein, 7 aa, synthetic construct
IIPPART

SEQ ID NO: 124044 - protein, 7 aa, synthetic construct
IIPRGHG

SEQ ID NO: 124045 - protein, 7 aa, synthetic construct
IIPRHSA

SEQ ID NO: 124046 - protein, 7 aa, synthetic construct
IIPSIRS

SEQ ID NO: 124047 - protein, 7 aa, synthetic construct
IIPSNVR

SEQ ID NO: 124048 - protein, 7 aa, synthetic construct
IIPTARG

SEQ ID NO: 124049 - protein, 7 aa, synthetic construct
IIPTSRN

SEQ ID NO: 124050 - protein, 7 aa, synthetic construct
IIPTTRM

SEQ ID NO: 124051 - protein, 7 aa, synthetic construct
IIPTTRN

SEQ ID NO: 124052 - protein, 7 aa, synthetic construct
IIQTSRP

SEQ ID NO: 124053 - protein, 7 aa, synthetic construct
IIRAHNG

SEQ ID NO: 124054 - protein, 7 aa, synthetic construct
IIRDLKG

SEQ ID NO: 124055 - protein, 7 aa, synthetic construct
IIREKAQ

SEQ ID NO: 124056 - protein, 7 aa, synthetic construct
IIRGHNV

SEQ ID NO: 124057 - protein, 7 aa, synthetic construct
IIRGPGV

SEQ ID NO: 124058 - protein, 7 aa, synthetic construct
IIRGSMN

SEQ ID NO: 124059 - protein, 7 aa, synthetic construct
IIRGTDR

SEQ ID NO: 124060 - protein, 7 aa, synthetic construct
IIRGTIG

SEQ ID NO: 124061 - protein, 7 aa, synthetic construct
IIRNASS

SEQ ID NO: 124062 - protein, 7 aa, synthetic construct
IIRNVPG

SEQ ID NO: 124063 - protein, 7 aa, synthetic construct
IIRPQAQ

SEQ ID NO: 124064 - protein, 7 aa, synthetic construct
IIRPTGV

SEQ ID NO: 124065 - protein, 7 aa, synthetic construct
IIRQALP

SEQ ID NO: 124066 - protein, 7 aa, synthetic construct
IIRQTPS

SEQ ID NO: 124067 - protein, 7 aa, synthetic construct
IIRSTRE

SEQ ID NO: 124068 - protein, 7 aa, synthetic construct
IIRTSNN

SEQ ID NO: 124069 - protein, 7 aa, synthetic construct
IISAHSK

SEQ ID NO: 124070 - protein, 7 aa, synthetic construct
IISHKNM

SEQ ID NO: 124071 - protein, 7 aa, synthetic construct
IISREKV

SEQ ID NO: 124072 - protein, 7 aa, synthetic construct
IISSHRP

SEQ ID NO: 124073 - protein, 7 aa, synthetic construct
IITHNKN

SEQ ID NO: 124074 - protein, 7 aa, synthetic construct
IKADSAK

SEQ ID NO: 124075 - protein, 7 aa, synthetic construct
IKAFAAN

SEQ ID NO: 124076 - protein, 7 aa, synthetic construct
IKAFRDP

SEQ ID NO: 124077 - protein, 7 aa, synthetic construct
IKAGPLM

SEQ ID NO: 124078 - protein, 7 aa, synthetic construct
IKAHIGY

SEQ ID NO: 124079 - protein, 7 aa, synthetic construct
IKAHPEK

SEQ ID NO: 124080 - protein, 7 aa, synthetic construct
IKAPGVF

SEQ ID NO: 124081 - protein, 7 aa, synthetic construct
IKAPIHA

SEQ ID NO: 124082 - protein, 7 aa, synthetic construct
IKAPPVN

SEQ ID NO: 124083 - protein, 7 aa, synthetic construct
IKAQAVY

SEQ ID NO: 124084 - protein, 7 aa, synthetic construct
IKAQFEK

SEQ ID NO: 124085 - protein, 7 aa, synthetic construct
IKAQTYL

SEQ ID NO: 124086 - protein, 7 aa, synthetic construct
IKAQVVY

SEQ ID NO: 124087 - protein, 7 aa, synthetic construct
IKARADQ

SEQ ID NO: 124088 - protein, 7 aa, synthetic construct
IKARGDS

SEQ ID NO: 124089 - protein, 7 aa, synthetic construct
IKARNQD

SEQ ID NO: 124090 - protein, 7 aa, synthetic construct
IKARQSE

SEQ ID NO: 124091 - protein, 7 aa, synthetic construct
IKARVFE

SEQ ID NO: 124092 - protein, 7 aa, synthetic construct
IKASYLS

SEQ ID NO: 124093 - protein, 7 aa, synthetic construct
IKATLER

SEQ ID NO: 124094 - protein, 7 aa, synthetic construct
IKAVPIN

SEQ ID NO: 124095 - protein, 7 aa, synthetic construct
IKAVPYG

SEQ ID NO: 124096 - protein, 7 aa, synthetic construct
IKAYHTA

SEQ ID NO: 124097 - protein, 7 aa, synthetic construct
IKAYMDK

SEQ ID NO: 124098 - protein, 7 aa, synthetic construct
IKDAYKY

SEQ ID NO: 124099 - protein, 7 aa, synthetic construct
IKDFATK

SEQ ID NO: 124100 - protein, 7 aa, synthetic construct
IKDHATK

SEQ ID NO: 124101 - protein, 7 aa, synthetic construct
IKDHSRM

SEQ ID NO: 124102 - protein, 7 aa, synthetic construct
IKDKPWT

SEQ ID NO: 124103 - protein, 7 aa, synthetic construct
IKDKYYG

SEQ ID NO: 124104 - protein, 7 aa, synthetic construct
IKDLARY

SEQ ID NO: 124105 - protein, 7 aa, synthetic construct
IKDLMAK

SEQ ID NO: 124106 - protein, 7 aa, synthetic construct
IKDNALW

SEQ ID NO: 124107 - protein, 7 aa, synthetic construct
IKDNHNK

SEQ ID NO: 124108 - protein, 7 aa, synthetic construct
IKDNWRA

SEQ ID NO: 124109 - protein, 7 aa, synthetic construct
IKDPQGK

SEQ ID NO: 124110 - protein, 7 aa, synthetic construct
IKDPRYP

SEQ ID NO: 124111 - protein, 7 aa, synthetic construct
IKDQLMR

SEQ ID NO: 124112 - protein, 7 aa, synthetic construct
IKDQLRY

SEQ ID NO: 124113 - protein, 7 aa, synthetic construct
IKDRPGW

SEQ ID NO: 124114 - protein, 7 aa, synthetic construct
IKDSHPK

SEQ ID NO: 124115 - protein, 7 aa, synthetic construct
IKDTQRY

SEQ ID NO: 124116 - protein, 7 aa, synthetic construct
IKDYMKA

SEQ ID NO: 124117 - protein, 7 aa, synthetic construct
IKEAFGK

SEQ ID NO: 124118 - protein, 7 aa, synthetic construct
IKEFSRA

SEQ ID NO: 124119 - protein, 7 aa, synthetic construct
IKEHKHF

SEQ ID NO: 124120 - protein, 7 aa, synthetic construct
IKEIERR

SEQ ID NO: 124121 - protein, 7 aa, synthetic construct
IKEIYRN

SEQ ID NO: 124122 - protein, 7 aa, synthetic construct
IKEKHQQ

SEQ ID NO: 124123 - protein, 7 aa, synthetic construct
IKEPAQR

SEQ ID NO: 124124 - protein, 7 aa, synthetic construct
IKEPGTR

SEQ ID NO: 124125 - protein, 7 aa, synthetic construct
IKERDIK

SEQ ID NO: 124126 - protein, 7 aa, synthetic construct
IKERYHA

SEQ ID NO: 124127 - protein, 7 aa, synthetic construct
IKESLGR

SEQ ID NO: 124128 - protein, 7 aa, synthetic construct
IKESMTR

SEQ ID NO: 124129 - protein, 7 aa, synthetic construct
IKESNSR

SEQ ID NO: 124130 - protein, 7 aa, synthetic construct
IKEVARQ

SEQ ID NO: 124131 - protein, 7 aa, synthetic construct
IKEYNAK

SEQ ID NO: 124132 - protein, 7 aa, synthetic construct
IKFAGGP

SEQ ID NO: 124133 - protein, 7 aa, synthetic construct
IKFAREG

SEQ ID NO: 124134 - protein, 7 aa, synthetic construct
IKFDAAR

SEQ ID NO: 124135 - protein, 7 aa, synthetic construct
IKFGDKN

SEQ ID NO: 124136 - protein, 7 aa, synthetic construct
IKFKDMN

SEQ ID NO: 124137 - protein, 7 aa, synthetic construct
IKFNTNM

SEQ ID NO: 124138 - protein, 7 aa, synthetic construct
IKFPTSG

SEQ ID NO: 124139 - protein, 7 aa, synthetic construct
IKFQHSS

SEQ ID NO: 124140 - protein, 7 aa, synthetic construct
IKFQNHA

SEQ ID NO: 124141 - protein, 7 aa, synthetic construct
IKFSQHN

SEQ ID NO: 124142 - protein, 7 aa, synthetic construct
IKFTHSP

SEQ ID NO: 124143 - protein, 7 aa, synthetic construct
IKFTQQG

SEQ ID NO: 124144 - protein, 7 aa, synthetic construct
IKGAGYM

SEQ ID NO: 124145 - protein, 7 aa, synthetic construct
IKGAGYY

SEQ ID NO: 124146 - protein, 7 aa, synthetic construct
IKGAHYT

SEQ ID NO: 124147 - protein, 7 aa, synthetic construct
IKGAMYV

SEQ ID NO: 124148 - protein, 7 aa, synthetic construct
IKGATFI

SEQ ID NO: 124149 - protein, 7 aa, synthetic construct
IKGDMSR

SEQ ID NO: 124150 - protein, 7 aa, synthetic construct
IKGDQYR

SEQ ID NO: 124151 - protein, 7 aa, synthetic construct
IKGHLPF

SEQ ID NO: 124152 - protein, 7 aa, synthetic construct
IKGHPIS

SEQ ID NO: 124153 - protein, 7 aa, synthetic construct
IKGISQF

SEQ ID NO: 124154 - protein, 7 aa, synthetic construct
IKGISYS

SEQ ID NO: 124155 - protein, 7 aa, synthetic construct
IKGNAMY

SEQ ID NO: 124156 - protein, 7 aa, synthetic construct
IKGNNFL

SEQ ID NO: 124157 - protein, 7 aa, synthetic construct
IKGPAMV

SEQ ID NO: 124158 - protein, 7 aa, synthetic construct
IKGPDAR

SEQ ID NO: 124159 - protein, 7 aa, synthetic construct
IKGPMTQ

SEQ ID NO: 124160 - protein, 7 aa, synthetic construct
IKGPPPF

SEQ ID NO: 124161 - protein, 7 aa, synthetic construct
IKGPSAF

SEQ ID NO: 124162 - protein, 7 aa, synthetic construct
IKGPSTL

SEQ ID NO: 124163 - protein, 7 aa, synthetic construct
IKGRDYA

SEQ ID NO: 124164 - protein, 7 aa, synthetic construct
IKGRTEG

SEQ ID NO: 124165 - protein, 7 aa, synthetic construct
IKGSGMF

SEQ ID NO: 124166 - protein, 7 aa, synthetic construct
IKGSGYL

SEQ ID NO: 124167 - protein, 7 aa, synthetic construct
IKGSMIY

SEQ ID NO: 124168 - protein, 7 aa, synthetic construct
IKGTHML

SEQ ID NO: 124169 - protein, 7 aa, synthetic construct
IKGVPMV

SEQ ID NO: 124170 - protein, 7 aa, synthetic construct
IKGVVPY

SEQ ID NO: 124171 - protein, 7 aa, synthetic construct
IKGWNGN

SEQ ID NO: 124172 - protein, 7 aa, synthetic construct
IKGYGGN

SEQ ID NO: 124173 - protein, 7 aa, synthetic construct
IKGYNQN

SEQ ID NO: 124174 - protein, 7 aa, synthetic construct
IKGYPTQ

SEQ ID NO: 124175 - protein, 7 aa, synthetic construct
IKGYQVV

SEQ ID NO: 124176 - protein, 7 aa, synthetic construct
IKHAALV

SEQ ID NO: 124177 - protein, 7 aa, synthetic construct
IKHAFPG

SEQ ID NO: 124178 - protein, 7 aa, synthetic construct
IKHANIM

SEQ ID NO: 124179 - protein, 7 aa, synthetic construct
IKHAQHV

SEQ ID NO: 124180 - protein, 7 aa, synthetic construct
IKHAYGA

SEQ ID NO: 124181 - protein, 7 aa, synthetic construct
IKHDAKI

SEQ ID NO: 124182 - protein, 7 aa, synthetic construct
IKHDKTI

SEQ ID NO: 124183 - protein, 7 aa, synthetic construct
IKHDLKM

SEQ ID NO: 124184 - protein, 7 aa, synthetic construct
IKHDQRA

SEQ ID NO: 124185 - protein, 7 aa, synthetic construct
IKHDYGK

SEQ ID NO: 124186 - protein, 7 aa, synthetic construct
IKHFTQG

SEQ ID NO: 124187 - protein, 7 aa, synthetic construct
IKHGAFQ

SEQ ID NO: 124188 - protein, 7 aa, synthetic construct
IKHGGMI

SEQ ID NO: 124189 - protein, 7 aa, synthetic construct
IKHIHQP

SEQ ID NO: 124190 - protein, 7 aa, synthetic construct
IKHIKEY

SEQ ID NO: 124191 - protein, 7 aa, synthetic construct
IKHIMQG

SEQ ID NO: 124192 - protein, 7 aa, synthetic construct
IKHIPMN

SEQ ID NO: 124193 - protein, 7 aa, synthetic construct
IKHIQAH

SEQ ID NO: 124194 - protein, 7 aa, synthetic construct
IKHIRAD

SEQ ID NO: 124195 - protein, 7 aa, synthetic construct
IKHKSLE

SEQ ID NO: 124196 - protein, 7 aa, synthetic construct
IKHLPSM

SEQ ID NO: 124197 - protein, 7 aa, synthetic construct
IKHLSIP

SEQ ID NO: 124198 - protein, 7 aa, synthetic construct
IKHMGPQ

SEQ ID NO: 124199 - protein, 7 aa, synthetic construct
IKHMLNP

SEQ ID NO: 124200 - protein, 7 aa, synthetic construct
IKHMPPT

SEQ ID NO: 124201 - protein, 7 aa, synthetic construct
IKHMRSE

SEQ ID NO: 124202 - protein, 7 aa, synthetic construct
IKHNHSP

SEQ ID NO: 124203 - protein, 7 aa, synthetic construct
IKHNRQE

SEQ ID NO: 124204 - protein, 7 aa, synthetic construct
IKHPISS

SEQ ID NO: 124205 - protein, 7 aa, synthetic construct
IKHPRIE

SEQ ID NO: 124206 - protein, 7 aa, synthetic construct
IKHPTSH

SEQ ID NO: 124207 - protein, 7 aa, synthetic construct
IKHQNFP

SEQ ID NO: 124208 - protein, 7 aa, synthetic construct
IKHQPGM

SEQ ID NO: 124209 - protein, 7 aa, synthetic construct
IKHRDMP

SEQ ID NO: 124210 - protein, 7 aa, synthetic construct
IKHSRGE

SEQ ID NO: 124211 - protein, 7 aa, synthetic construct
IKHTPAM

SEQ ID NO: 124212 - protein, 7 aa, synthetic construct
IKHTPHL

SEQ ID NO: 124213 - protein, 7 aa, synthetic construct
IKHTPVT

SEQ ID NO: 124214 - protein, 7 aa, synthetic construct
IKHTRDL

SEQ ID NO: 124215 - protein, 7 aa, synthetic construct
IKHVDIK

SEQ ID NO: 124216 - protein, 7 aa, synthetic construct
IKHVDKM

SEQ ID NO: 124217 - protein, 7 aa, synthetic construct
IKHVHAG

SEQ ID NO: 124218 - protein, 7 aa, synthetic construct
IKHVPNV

SEQ ID NO: 124219 - protein, 7 aa, synthetic construct
IKHVVAM

SEQ ID NO: 124220 - protein, 7 aa, synthetic construct
IKHYQTV

SEQ ID NO: 124221 - protein, 7 aa, synthetic construct
IKIGPPM

SEQ ID NO: 124222 - protein, 7 aa, synthetic construct
IKIHMGA

SEQ ID NO: 124223 - protein, 7 aa, synthetic construct
IKIMSEK

SEQ ID NO: 124224 - protein, 7 aa, synthetic construct
IKIPMAS

SEQ ID NO: 124225 - protein, 7 aa, synthetic construct
IKIQANY

SEQ ID NO: 124226 - protein, 7 aa, synthetic construct
IKIQSSF

SEQ ID NO: 124227 - protein, 7 aa, synthetic construct
IKIQTGY

SEQ ID NO: 124228 - protein, 7 aa, synthetic construct
IKIRADM

SEQ ID NO: 124229 - protein, 7 aa, synthetic construct
IKIRDSL

SEQ ID NO: 124230 - protein, 7 aa, synthetic construct
IKKDPFL

SEQ ID NO: 124231 - protein, 7 aa, synthetic construct
IKKFDNA

SEQ ID NO: 124232 - protein, 7 aa, synthetic construct
IKKGPDM

SEQ ID NO: 124233 - protein, 7 aa, synthetic construct
IKKIIDV

SEQ ID NO: 124234 - protein, 7 aa, synthetic construct
IKKLSDY

SEQ ID NO: 124235 - protein, 7 aa, synthetic construct
IKKMGDQ

SEQ ID NO: 124236 - protein, 7 aa, synthetic construct
IKKMNDL

SEQ ID NO: 124237 - protein, 7 aa, synthetic construct
IKKQDGY

SEQ ID NO: 124238 - protein, 7 aa, synthetic construct
IKKVPDS

SEQ ID NO: 124239 - protein, 7 aa, synthetic construct
IKKYELQ

SEQ ID NO: 124240 - protein, 7 aa, synthetic construct
IKKYGLE

SEQ ID NO: 124241 - protein, 7 aa, synthetic construct
IKKYTEV

SEQ ID NO: 124242 - protein, 7 aa, synthetic construct
IKKYVPE

SEQ ID NO: 124243 - protein, 7 aa, synthetic construct
IKLGSYA

SEQ ID NO: 124244 - protein, 7 aa, synthetic construct
IKLHGHA

SEQ ID NO: 124245 - protein, 7 aa, synthetic construct
IKLQGQF

SEQ ID NO: 124246 - protein, 7 aa, synthetic construct
IKLRPSE

SEQ ID NO: 124247 - protein, 7 aa, synthetic construct
IKLSHMN

SEQ ID NO: 124248 - protein, 7 aa, synthetic construct
IKLSHNL

SEQ ID NO: 124249 - protein, 7 aa, synthetic construct
IKMAGPY

SEQ ID NO: 124250 - protein, 7 aa, synthetic construct
IKMASQY

SEQ ID NO: 124251 - protein, 7 aa, synthetic construct
IKMAYPG

SEQ ID NO: 124252 - protein, 7 aa, synthetic construct
IKMGNMH

SEQ ID NO: 124253 - protein, 7 aa, synthetic construct
IKMGQVY

SEQ ID NO: 124254 - protein, 7 aa, synthetic construct
IKMHINP

SEQ ID NO: 124255 - protein, 7 aa, synthetic construct
IKMHSPS

SEQ ID NO: 124256 - protein, 7 aa, synthetic construct
IKMPLPN

SEQ ID NO: 124257 - protein, 7 aa, synthetic construct
IKMQPSI

SEQ ID NO: 124258 - protein, 7 aa, synthetic construct
IKMRDMS

SEQ ID NO: 124259 - protein, 7 aa, synthetic construct
IKMSHIN

SEQ ID NO: 124260 - protein, 7 aa, synthetic construct
IKNETKY

SEQ ID NO: 124261 - protein, 7 aa, synthetic construct
IKNFVGN

SEQ ID NO: 124262 - protein, 7 aa, synthetic construct
IKNIPLQ

SEQ ID NO: 124263 - protein, 7 aa, synthetic construct
IKNIQHN

SEQ ID NO: 124264 - protein, 7 aa, synthetic construct
IKNKELI

SEQ ID NO: 124265 - protein, 7 aa, synthetic construct
IKNLHIN

SEQ ID NO: 124266 - protein, 7 aa, synthetic construct
IKNMTDR

SEQ ID NO: 124267 - protein, 7 aa, synthetic construct
IKNNPHT

SEQ ID NO: 124268 - protein, 7 aa, synthetic construct
IKNPHFG

SEQ ID NO: 124269 - protein, 7 aa, synthetic construct
IKNPHSN

SEQ ID NO: 124270 - protein, 7 aa, synthetic construct
IKNPITY

SEQ ID NO: 124271 - protein, 7 aa, synthetic construct
IKNPMHI

SEQ ID NO: 124272 - protein, 7 aa, synthetic construct
IKNPMYP

SEQ ID NO: 124273 - protein, 7 aa, synthetic construct
IKNPQEK

SEQ ID NO: 124274 - protein, 7 aa, synthetic construct
IKNPRQD

SEQ ID NO: 124275 - protein, 7 aa, synthetic construct
IKNQHML

SEQ ID NO: 124276 - protein, 7 aa, synthetic construct
IKNQPHH

SEQ ID NO: 124277 - protein, 7 aa, synthetic construct
IKNQPIL

SEQ ID NO: 124278 - protein, 7 aa, synthetic construct
IKNQSFM

SEQ ID NO: 124279 - protein, 7 aa, synthetic construct
IKNRDVQ

SEQ ID NO: 124280 - protein, 7 aa, synthetic construct
IKNRMVE

SEQ ID NO: 124281 - protein, 7 aa, synthetic construct
IKNSPAQ

SEQ ID NO: 124282 - protein, 7 aa, synthetic construct
IKNSPVN

SEQ ID NO: 124283 - protein, 7 aa, synthetic construct
IKNSVHH

SEQ ID NO: 124284 - protein, 7 aa, synthetic construct
IKNTYHH

SEQ ID NO: 124285 - protein, 7 aa, synthetic construct
IKNVAQQ

SEQ ID NO: 124286 - protein, 7 aa, synthetic construct
IKNVLYA

SEQ ID NO: 124287 - protein, 7 aa, synthetic construct
IKNVPSV

SEQ ID NO: 124288 - protein, 7 aa, synthetic construct
IKNVSQL

SEQ ID NO: 124289 - protein, 7 aa, synthetic construct
IKNYAPS

SEQ ID NO: 124290 - protein, 7 aa, synthetic construct
IKPAMTY

SEQ ID NO: 124291 - protein, 7 aa, synthetic construct
IKPGEFR

SEQ ID NO: 124292 - protein, 7 aa, synthetic construct
IKPGYTM

SEQ ID NO: 124293 - protein, 7 aa, synthetic construct
IKPHAVV

SEQ ID NO: 124294 - protein, 7 aa, synthetic construct
IKPHGLM

SEQ ID NO: 124295 - protein, 7 aa, synthetic construct
IKPHMYN

SEQ ID NO: 124296 - protein, 7 aa, synthetic construct
IKPHSSY

SEQ ID NO: 124297 - protein, 7 aa, synthetic construct
IKPHVMM

SEQ ID NO: 124298 - protein, 7 aa, synthetic construct
IKPIHHI

SEQ ID NO: 124299 - protein, 7 aa, synthetic construct
IKPNMYS

SEQ ID NO: 124300 - protein, 7 aa, synthetic construct
IKPNVYA

SEQ ID NO: 124301 - protein, 7 aa, synthetic construct
IKPNYMA

SEQ ID NO: 124302 - protein, 7 aa, synthetic construct
IKPPHPP

SEQ ID NO: 124303 - protein, 7 aa, synthetic construct
IKPPIMT

SEQ ID NO: 124304 - protein, 7 aa, synthetic construct
IKPQQYH

SEQ ID NO: 124305 - protein, 7 aa, synthetic construct
IKPSSYG

SEQ ID NO: 124306 - protein, 7 aa, synthetic construct
IKPTHFP

SEQ ID NO: 124307 - protein, 7 aa, synthetic construct
IKPTHNH

SEQ ID NO: 124308 - protein, 7 aa, synthetic construct
IKPTYGQ

SEQ ID NO: 124309 - protein, 7 aa, synthetic construct
IKPTYRE

SEQ ID NO: 124310 - protein, 7 aa, synthetic construct
IKPVNYQ

SEQ ID NO: 124311 - protein, 7 aa, synthetic construct
IKPVPKP

SEQ ID NO: 124312 - protein, 7 aa, synthetic construct
IKPYHMG

SEQ ID NO: 124313 - protein, 7 aa, synthetic construct
IKPYHNN

SEQ ID NO: 124314 - protein, 7 aa, synthetic construct
IKPYTAM

SEQ ID NO: 124315 - protein, 7 aa, synthetic construct
IKPYTRE

SEQ ID NO: 124316 - protein, 7 aa, synthetic construct
IKPYVGV

SEQ ID NO: 124317 - protein, 7 aa, synthetic construct
IKQFESK

SEQ ID NO: 124318 - protein, 7 aa, synthetic construct
IKQFHSA

SEQ ID NO: 124319 - protein, 7 aa, synthetic construct
IKQFTNV

SEQ ID NO: 124320 - protein, 7 aa, synthetic construct
IKQHAPQ

SEQ ID NO: 124321 - protein, 7 aa, synthetic construct
IKQHHQL

SEQ ID NO: 124322 - protein, 7 aa, synthetic construct
IKQHYSA

SEQ ID NO: 124323 - protein, 7 aa, synthetic construct
IKQIHHG

SEQ ID NO: 124324 - protein, 7 aa, synthetic construct
IKQIKGP

SEQ ID NO: 124325 - protein, 7 aa, synthetic construct
IKQISQQ

SEQ ID NO: 124326 - protein, 7 aa, synthetic construct
IKQLHGY

SEQ ID NO: 124327 - protein, 7 aa, synthetic construct
IKQMGDR

SEQ ID NO: 124328 - protein, 7 aa, synthetic construct
IKQMRDN

SEQ ID NO: 124329 - protein, 7 aa, synthetic construct
IKQMRYD

SEQ ID NO: 124330 - protein, 7 aa, synthetic construct
IKQQHGF

SEQ ID NO: 124331 - protein, 7 aa, synthetic construct
IKQRDMA

SEQ ID NO: 124332 - protein, 7 aa, synthetic construct
IKQSRDN

SEQ ID NO: 124333 - protein, 7 aa, synthetic construct
IKQTHTQ

SEQ ID NO: 124334 - protein, 7 aa, synthetic construct
IKQTRFD

SEQ ID NO: 124335 - protein, 7 aa, synthetic construct
IKQVDSR

SEQ ID NO: 124336 - protein, 7 aa, synthetic construct
IKQVTHI

SEQ ID NO: 124337 - protein, 7 aa, synthetic construct
IKQYADK

SEQ ID NO: 124338 - protein, 7 aa, synthetic construct
IKQYAMN

SEQ ID NO: 124339 - protein, 7 aa, synthetic construct
IKQYASQ

SEQ ID NO: 124340 - protein, 7 aa, synthetic construct
IKQYNTI

SEQ ID NO: 124341 - protein, 7 aa, synthetic construct
IKQYPIP

SEQ ID NO: 124342 - protein, 7 aa, synthetic construct
IKQYPSQ

SEQ ID NO: 124343 - protein, 7 aa, synthetic construct
IKQYQNI

SEQ ID NO: 124344 - protein, 7 aa, synthetic construct
IKQYQVV

SEQ ID NO: 124345 - protein, 7 aa, synthetic construct
IKQYVGQ

SEQ ID NO: 124346 - protein, 7 aa, synthetic construct
IKQYVRE

SEQ ID NO: 124347 - protein, 7 aa, synthetic construct
IKRDAPV

SEQ ID NO: 124348 - protein, 7 aa, synthetic construct
IKRDFGN

SEQ ID NO: 124349 - protein, 7 aa, synthetic construct
IKRDISI

SEQ ID NO: 124350 - protein, 7 aa, synthetic construct
IKRDLMG

SEQ ID NO: 124351 - protein, 7 aa, synthetic construct
IKRDQGV

SEQ ID NO: 124352 - protein, 7 aa, synthetic construct
IKRDSLL

SEQ ID NO: 124353 - protein, 7 aa, synthetic construct
IKRDVTI

SEQ ID NO: 124354 - protein, 7 aa, synthetic construct
IKREQLF

SEQ ID NO: 124355 - protein, 7 aa, synthetic construct
IKRETLL

SEQ ID NO: 124356 - protein, 7 aa, synthetic construct
IKREVQH

SEQ ID NO: 124357 - protein, 7 aa, synthetic construct
IKRGLET

SEQ ID NO: 124358 - protein, 7 aa, synthetic construct
IKRMEAP

SEQ ID NO: 124359 - protein, 7 aa, synthetic construct
IKRMVTD

SEQ ID NO: 124360 - protein, 7 aa, synthetic construct
IKRNDIV

SEQ ID NO: 124361 - protein, 7 aa, synthetic construct
IKRQEMP

SEQ ID NO: 124362 - protein, 7 aa, synthetic construct
IKRTISD

SEQ ID NO: 124363 - protein, 7 aa, synthetic construct
IKRVGYE

SEQ ID NO: 124364 - protein, 7 aa, synthetic construct
IKSAPML

SEQ ID NO: 124365 - protein, 7 aa, synthetic construct
IKSDHLK

SEQ ID NO: 124366 - protein, 7 aa, synthetic construct
IKSFTPG

SEQ ID NO: 124367 - protein, 7 aa, synthetic construct
IKSHNFP

SEQ ID NO: 124368 - protein, 7 aa, synthetic construct
IKSMGYP

SEQ ID NO: 124369 - protein, 7 aa, synthetic construct
IKSMILD

SEQ ID NO: 124370 - protein, 7 aa, synthetic construct
IKSNAMF

SEQ ID NO: 124371 - protein, 7 aa, synthetic construct
IKSNHLM

SEQ ID NO: 124372 - protein, 7 aa, synthetic construct
IKSNHYS

SEQ ID NO: 124373 - protein, 7 aa, synthetic construct
IKSPGFA

SEQ ID NO: 124374 - protein, 7 aa, synthetic construct
IKSQGLF

SEQ ID NO: 124375 - protein, 7 aa, synthetic construct
IKSQNFI

SEQ ID NO: 124376 - protein, 7 aa, synthetic construct
IKSREFP

SEQ ID NO: 124377 - protein, 7 aa, synthetic construct
IKSSPYV

SEQ ID NO: 124378 - protein, 7 aa, synthetic construct
IKSTEQR

SEQ ID NO: 124379 - protein, 7 aa, synthetic construct
IKSVQHY

SEQ ID NO: 124380 - protein, 7 aa, synthetic construct
IKSWNDG

SEQ ID NO: 124381 - protein, 7 aa, synthetic construct
IKSYEGK

SEQ ID NO: 124382 - protein, 7 aa, synthetic construct
IKSYEKV

SEQ ID NO: 124383 - protein, 7 aa, synthetic construct
IKSYGLN

SEQ ID NO: 124384 - protein, 7 aa, synthetic construct
IKSYTTQ

SEQ ID NO: 124385 - protein, 7 aa, synthetic construct
IKTAYGG

SEQ ID NO: 124386 - protein, 7 aa, synthetic construct
IKTDYTK

SEQ ID NO: 124387 - protein, 7 aa, synthetic construct
IKTEFGR

SEQ ID NO: 124388 - protein, 7 aa, synthetic construct
IKTEKDR

SEQ ID NO: 124389 - protein, 7 aa, synthetic construct
IKTGGYI

SEQ ID NO: 124390 - protein, 7 aa, synthetic construct
IKTGHAF

SEQ ID NO: 124391 - protein, 7 aa, synthetic construct
IKTHGHI

SEQ ID NO: 124392 - protein, 7 aa, synthetic construct
IKTHTSY

SEQ ID NO: 124393 - protein, 7 aa, synthetic construct
IKTHTYA

SEQ ID NO: 124394 - protein, 7 aa, synthetic construct
IKTISHH

SEQ ID NO: 124395 - protein, 7 aa, synthetic construct
IKTMRDH

SEQ ID NO: 124396 - protein, 7 aa, synthetic construct
IKTNDGR

SEQ ID NO: 124397 - protein, 7 aa, synthetic construct
IKTPHYT

SEQ ID NO: 124398 - protein, 7 aa, synthetic construct
IKTPYSA

SEQ ID NO: 124399 - protein, 7 aa, synthetic construct
IKTRNDV

SEQ ID NO: 124400 - protein, 7 aa, synthetic construct
IKTSHYN

SEQ ID NO: 124401 - protein, 7 aa, synthetic construct
IKTSPPH

SEQ ID NO: 124402 - protein, 7 aa, synthetic construct
IKTTPHM

SEQ ID NO: 124403 - protein, 7 aa, synthetic construct
IKTVHPQ

SEQ ID NO: 124404 - protein, 7 aa, synthetic construct
IKTVHYA

SEQ ID NO: 124405 - protein, 7 aa, synthetic construct
IKTYQPA

SEQ ID NO: 124406 - protein, 7 aa, synthetic construct
IKTYVAA

SEQ ID NO: 124407 - protein, 7 aa, synthetic construct
IKVADHK

SEQ ID NO: 124408 - protein, 7 aa, synthetic construct
IKVGDKW

SEQ ID NO: 124409 - protein, 7 aa, synthetic construct
IKVNGHH

SEQ ID NO: 124410 - protein, 7 aa, synthetic construct
IKVRENF

SEQ ID NO: 124411 - protein, 7 aa, synthetic construct
IKVRPDM

SEQ ID NO: 124412 - protein, 7 aa, synthetic construct
IKYGSTI

SEQ ID NO: 124413 - protein, 7 aa, synthetic construct
IKYGVQQ

SEQ ID NO: 124414 - protein, 7 aa, synthetic construct
IKYKNTE

SEQ ID NO: 124415 - protein, 7 aa, synthetic construct
IKYKVEA

SEQ ID NO: 124416 - protein, 7 aa, synthetic construct
IKYLQKD

SEQ ID NO: 124417 - protein, 7 aa, synthetic construct
IKYNLSG

SEQ ID NO: 124418 - protein, 7 aa, synthetic construct
IKYNPNQ

SEQ ID NO: 124419 - protein, 7 aa, synthetic construct
IKYNTVA

SEQ ID NO: 124420 - protein, 7 aa, synthetic construct
IKYPIQA

SEQ ID NO: 124421 - protein, 7 aa, synthetic construct
IKYPTTT

SEQ ID NO: 124422 - protein, 7 aa, synthetic construct
IKYQGPP

SEQ ID NO: 124423 - protein, 7 aa, synthetic construct
IKYVGDK

SEQ ID NO: 124424 - protein, 7 aa, synthetic construct
ILAHAKH

SEQ ID NO: 124425 - protein, 7 aa, synthetic construct
ILAHIKN

SEQ ID NO: 124426 - protein, 7 aa, synthetic construct
ILAHTRG

SEQ ID NO: 124427 - protein, 7 aa, synthetic construct
ILARNRE

SEQ ID NO: 124428 - protein, 7 aa, synthetic construct
ILDRPVR

SEQ ID NO: 124429 - protein, 7 aa, synthetic construct
ILEKKMV

SEQ ID NO: 124430 - protein, 7 aa, synthetic construct
ILESRRT

SEQ ID NO: 124431 - protein, 7 aa, synthetic construct
ILGAPRP

SEQ ID NO: 124432 - protein, 7 aa, synthetic construct
ILGAYKA

SEQ ID NO: 124433 - protein, 7 aa, synthetic construct
ILGGPGR

SEQ ID NO: 124434 - protein, 7 aa, synthetic construct
ILGGVRQ

SEQ ID NO: 124435 - protein, 7 aa, synthetic construct
ILGHAKN

SEQ ID NO: 124436 - protein, 7 aa, synthetic construct
ILGHGSK

SEQ ID NO: 124437 - protein, 7 aa, synthetic construct
ILGPKHV

SEQ ID NO: 124438 - protein, 7 aa, synthetic construct
ILHGQRP

SEQ ID NO: 124439 - protein, 7 aa, synthetic construct
ILHHAKN

SEQ ID NO: 124440 - protein, 7 aa, synthetic construct
ILHHPKN

SEQ ID NO: 124441 - protein, 7 aa, synthetic construct
ILHINSK

SEQ ID NO: 124442 - protein, 7 aa, synthetic construct
ILHMKRE

SEQ ID NO: 124443 - protein, 7 aa, synthetic construct
ILHNKNM

SEQ ID NO: 124444 - protein, 7 aa, synthetic construct
ILHNRTG

SEQ ID NO: 124445 - protein, 7 aa, synthetic construct
ILHPKYS

SEQ ID NO: 124446 - protein, 7 aa, synthetic construct
ILHQQKN

SEQ ID NO: 124447 - protein, 7 aa, synthetic construct
ILHQRGP

SEQ ID NO: 124448 - protein, 7 aa, synthetic construct
ILHSHKN

SEQ ID NO: 124449 - protein, 7 aa, synthetic construct
ILKEGPG

SEQ ID NO: 124450 - protein, 7 aa, synthetic construct
ILKGGYP

SEQ ID NO: 124451 - protein, 7 aa, synthetic construct
ILKHEQR

SEQ ID NO: 124452 - protein, 7 aa, synthetic construct
ILKPPSM

SEQ ID NO: 124453 - protein, 7 aa, synthetic construct
ILKRAVD

SEQ ID NO: 124454 - protein, 7 aa, synthetic construct
ILKRGVE

SEQ ID NO: 124455 - protein, 7 aa, synthetic construct
ILKSAYG

SEQ ID NO: 124456 - protein, 7 aa, synthetic construct
ILKSHDK

SEQ ID NO: 124457 - protein, 7 aa, synthetic construct
ILNHSRS

SEQ ID NO: 124458 - protein, 7 aa, synthetic construct
ILNIARA

SEQ ID NO: 124459 - protein, 7 aa, synthetic construct
ILNRLER

SEQ ID NO: 124460 - protein, 7 aa, synthetic construct
ILNRPSQ

SEQ ID NO: 124461 - protein, 7 aa, synthetic construct
ILNTARH

SEQ ID NO: 124462 - protein, 7 aa, synthetic construct
ILNTHSR

SEQ ID NO: 124463 - protein, 7 aa, synthetic construct
ILPHRNS

SEQ ID NO: 124464 - protein, 7 aa, synthetic construct
ILPKGMM

SEQ ID NO: 124465 - protein, 7 aa, synthetic construct
ILPNKNF

SEQ ID NO: 124466 - protein, 7 aa, synthetic construct
ILPNTHR

SEQ ID NO: 124467 - protein, 7 aa, synthetic construct
ILPRALP

SEQ ID NO: 124468 - protein, 7 aa, synthetic construct
ILPRHPS

SEQ ID NO: 124469 - protein, 7 aa, synthetic construct
ILQKHYP

SEQ ID NO: 124470 - protein, 7 aa, synthetic construct
ILQTNHK

SEQ ID NO: 124471 - protein, 7 aa, synthetic construct
ILQTRNT

SEQ ID NO: 124472 - protein, 7 aa, synthetic construct
ILRAARE

SEQ ID NO: 124473 - protein, 7 aa, synthetic construct
ILRDMQR

SEQ ID NO: 124474 - protein, 7 aa, synthetic construct
ILRDQQK

SEQ ID NO: 124475 - protein, 7 aa, synthetic construct
ILRGMGN

SEQ ID NO: 124476 - protein, 7 aa, synthetic construct
ILRNMKD

SEQ ID NO: 124477 - protein, 7 aa, synthetic construct
ILRNQSG

SEQ ID NO: 124478 - protein, 7 aa, synthetic construct
ILRNSTA

SEQ ID NO: 124479 - protein, 7 aa, synthetic construct
ILRPTNP

SEQ ID NO: 124480 - protein, 7 aa, synthetic construct
ILRQKVD

SEQ ID NO: 124481 - protein, 7 aa, synthetic construct
ILRSSSG

SEQ ID NO: 124482 - protein, 7 aa, synthetic construct
ILRSVHP

SEQ ID NO: 124483 - protein, 7 aa, synthetic construct
ILRSVTG

SEQ ID NO: 124484 - protein, 7 aa, synthetic construct
ILRTATG

SEQ ID NO: 124485 - protein, 7 aa, synthetic construct
ILRTPRD

SEQ ID NO: 124486 - protein, 7 aa, synthetic construct
ILRVKET

SEQ ID NO: 124487 - protein, 7 aa, synthetic construct
ILRVQAG

SEQ ID NO: 124488 - protein, 7 aa, synthetic construct
ILSHQRG

SEQ ID NO: 124489 - protein, 7 aa, synthetic construct
ILTGKHY

SEQ ID NO: 124490 - protein, 7 aa, synthetic construct
ILTHAKL

SEQ ID NO: 124491 - protein, 7 aa, synthetic construct
ILTHARN

SEQ ID NO: 124492 - protein, 7 aa, synthetic construct
ILTHQGR

SEQ ID NO: 124493 - protein, 7 aa, synthetic construct
ILTHRAG

SEQ ID NO: 124494 - protein, 7 aa, synthetic construct
ILVRKGE

SEQ ID NO: 124495 - protein, 7 aa, synthetic construct
IMAKRID

SEQ ID NO: 124496 - protein, 7 aa, synthetic construct
IMAPRGS

SEQ ID NO: 124497 - protein, 7 aa, synthetic construct
IMARHSA

SEQ ID NO: 124498 - protein, 7 aa, synthetic construct
IMATKNY

SEQ ID NO: 124499 - protein, 7 aa, synthetic construct
IMDAGRR

SEQ ID NO: 124500 - protein, 7 aa, synthetic construct
IMDRHRV

SEQ ID NO: 124501 - protein, 7 aa, synthetic construct
IMDRPRI

SEQ ID NO: 124502 - protein, 7 aa, synthetic construct
IMDRTNK

SEQ ID NO: 124503 - protein, 7 aa, synthetic construct
IMERRAN

SEQ ID NO: 124504 - protein, 7 aa, synthetic construct
IMGGLRA

SEQ ID NO: 124505 - protein, 7 aa, synthetic construct
IMGHGKL

SEQ ID NO: 124506 - protein, 7 aa, synthetic construct
IMGKFNP

SEQ ID NO: 124507 - protein, 7 aa, synthetic construct
IMGKGYQ

SEQ ID NO: 124508 - protein, 7 aa, synthetic construct
IMGKPER

SEQ ID NO: 124509 - protein, 7 aa, synthetic construct
IMGNQHK

SEQ ID NO: 124510 - protein, 7 aa, synthetic construct
IMGQQNR

SEQ ID NO: 124511 - protein, 7 aa, synthetic construct
IMGREKQ

SEQ ID NO: 124512 - protein, 7 aa, synthetic construct
IMGRMTT

SEQ ID NO: 124513 - protein, 7 aa, synthetic construct
IMGTPMK

SEQ ID NO: 124514 - protein, 7 aa, synthetic construct
IMGVFPK

SEQ ID NO: 124515 - protein, 7 aa, synthetic construct
IMHAAQR

SEQ ID NO: 124516 - protein, 7 aa, synthetic construct
IMHKQPN

SEQ ID NO: 124517 - protein, 7 aa, synthetic construct
IMHKVAT

SEQ ID NO: 124518 - protein, 7 aa, synthetic construct
IMHKYSA

SEQ ID NO: 124519 - protein, 7 aa, synthetic construct
IMHNSVK

SEQ ID NO: 124520 - protein, 7 aa, synthetic construct
IMHREKS

SEQ ID NO: 124521 - protein, 7 aa, synthetic construct
IMHTKER

SEQ ID NO: 124522 - protein, 7 aa, synthetic construct
IMKGGYN

SEQ ID NO: 124523 - protein, 7 aa, synthetic construct
IMKGPNY

SEQ ID NO: 124524 - protein, 7 aa, synthetic construct
IMKHSDR

SEQ ID NO: 124525 - protein, 7 aa, synthetic construct
IMKHVHP

SEQ ID NO: 124526 - protein, 7 aa, synthetic construct
IMKNHNL

SEQ ID NO: 124527 - protein, 7 aa, synthetic construct
IMKNPMQ

SEQ ID NO: 124528 - protein, 7 aa, synthetic construct
IMKPREY

SEQ ID NO: 124529 - protein, 7 aa, synthetic construct
IMKRVQD

SEQ ID NO: 124530 - protein, 7 aa, synthetic construct
IMKYASG

SEQ ID NO: 124531 - protein, 7 aa, synthetic construct
IMKYTNN

SEQ ID NO: 124532 - protein, 7 aa, synthetic construct
IMMAHKP

SEQ ID NO: 124533 - protein, 7 aa, synthetic construct
IMMQGAR

SEQ ID NO: 124534 - protein, 7 aa, synthetic construct
IMNALRG

SEQ ID NO: 124535 - protein, 7 aa, synthetic construct
IMNPRSG

SEQ ID NO: 124536 - protein, 7 aa, synthetic construct
IMNQQQR

SEQ ID NO: 124537 - protein, 7 aa, synthetic construct
IMNRRVE

SEQ ID NO: 124538 - protein, 7 aa, synthetic construct
IMNVNKL

SEQ ID NO: 124539 - protein, 7 aa, synthetic construct
IMNYTKA

SEQ ID NO: 124540 - protein, 7 aa, synthetic construct
IMPQHSK

SEQ ID NO: 124541 - protein, 7 aa, synthetic construct
IMPRGNQ

SEQ ID NO: 124542 - protein, 7 aa, synthetic construct
IMPRGSL

SEQ ID NO: 124543 - protein, 7 aa, synthetic construct
IMPRSLS

SEQ ID NO: 124544 - protein, 7 aa, synthetic construct
IMQERVR

SEQ ID NO: 124545 - protein, 7 aa, synthetic construct
IMQGHAR

SEQ ID NO: 124546 - protein, 7 aa, synthetic construct
IMQGPRQ

SEQ ID NO: 124547 - protein, 7 aa, synthetic construct
IMQGTHR

SEQ ID NO: 124548 - protein, 7 aa, synthetic construct
IMQGVTR

SEQ ID NO: 124549 - protein, 7 aa, synthetic construct
IMQHQAK

SEQ ID NO: 124550 - protein, 7 aa, synthetic construct
IMQKRIE

SEQ ID NO: 124551 - protein, 7 aa, synthetic construct
IMQKRLD

SEQ ID NO: 124552 - protein, 7 aa, synthetic construct
IMQPKYA

SEQ ID NO: 124553 - protein, 7 aa, synthetic construct
IMQPRAV

SEQ ID NO: 124554 - protein, 7 aa, synthetic construct
IMQQTAR

SEQ ID NO: 124555 - protein, 7 aa, synthetic construct
IMQRWNE

SEQ ID NO: 124556 - protein, 7 aa, synthetic construct
IMQSGHR

SEQ ID NO: 124557 - protein, 7 aa, synthetic construct
IMQSHAK

SEQ ID NO: 124558 - protein, 7 aa, synthetic construct
IMQTQRT

SEQ ID NO: 124559 - protein, 7 aa, synthetic construct
IMRADRG

SEQ ID NO: 124560 - protein, 7 aa, synthetic construct
IMRARDG

SEQ ID NO: 124561 - protein, 7 aa, synthetic construct
IMRGEAK

SEQ ID NO: 124562 - protein, 7 aa, synthetic construct
IMRGMRE

SEQ ID NO: 124563 - protein, 7 aa, synthetic construct
IMRGNAA

SEQ ID NO: 124564 - protein, 7 aa, synthetic construct
IMRGNAH

SEQ ID NO: 124565 - protein, 7 aa, synthetic construct
IMRIDSD

SEQ ID NO: 124566 - protein, 7 aa, synthetic construct
IMRKMEG

SEQ ID NO: 124567 - protein, 7 aa, synthetic construct
IMRKNDL

SEQ ID NO: 124568 - protein, 7 aa, synthetic construct
IMRNPAG

SEQ ID NO: 124569 - protein, 7 aa, synthetic construct
IMRNPSN

SEQ ID NO: 124570 - protein, 7 aa, synthetic construct
IMRNVAN

SEQ ID NO: 124571 - protein, 7 aa, synthetic construct
IMRNVVG

SEQ ID NO: 124572 - protein, 7 aa, synthetic construct
IMRPGLG

SEQ ID NO: 124573 - protein, 7 aa, synthetic construct
IMRPSSI

SEQ ID NO: 124574 - protein, 7 aa, synthetic construct
IMRSDIK

SEQ ID NO: 124575 - protein, 7 aa, synthetic construct
IMRSGPQ

SEQ ID NO: 124576 - protein, 7 aa, synthetic construct
IMRSIPN

SEQ ID NO: 124577 - protein, 7 aa, synthetic construct
IMRTSPI

SEQ ID NO: 124578 - protein, 7 aa, synthetic construct
IMSHASK

SEQ ID NO: 124579 - protein, 7 aa, synthetic construct
IMSNMAR

SEQ ID NO: 124580 - protein, 7 aa, synthetic construct
IMSQSAR

SEQ ID NO: 124581 - protein, 7 aa, synthetic construct
IMSTARA

SEQ ID NO: 124582 - protein, 7 aa, synthetic construct
IMTGYTK

SEQ ID NO: 124583 - protein, 7 aa, synthetic construct
IMTKIHS

SEQ ID NO: 124584 - protein, 7 aa, synthetic construct
IMTKPKD

SEQ ID NO: 124585 - protein, 7 aa, synthetic construct
IMTNKSW

SEQ ID NO: 124586 - protein, 7 aa, synthetic construct
IMTNRDR

SEQ ID NO: 124587 - protein, 7 aa, synthetic construct
IMTNSRN

SEQ ID NO: 124588 - protein, 7 aa, synthetic construct
IMTRHQG

SEQ ID NO: 124589 - protein, 7 aa, synthetic construct
IMTTDKR

SEQ ID NO: 124590 - protein, 7 aa, synthetic construct
IMVPKHG

SEQ ID NO: 124591 - protein, 7 aa, synthetic construct
IMYGKQN

SEQ ID NO: 124592 - protein, 7 aa, synthetic construct
IMYKYQD

SEQ ID NO: 124593 - protein, 7 aa, synthetic construct
INAAHGR

SEQ ID NO: 124594 - protein, 7 aa, synthetic construct
INAAKYI

SEQ ID NO: 124595 - protein, 7 aa, synthetic construct
INAHARI

SEQ ID NO: 124596 - protein, 7 aa, synthetic construct
INARIPT

SEQ ID NO: 124597 - protein, 7 aa, synthetic construct
INARNDK

SEQ ID NO: 124598 - protein, 7 aa, synthetic construct
INAYYEK

SEQ ID NO: 124599 - protein, 7 aa, synthetic construct
INDSRRM

SEQ ID NO: 124600 - protein, 7 aa, synthetic construct
INEITRK

SEQ ID NO: 124601 - protein, 7 aa, synthetic construct
INEKKYT

SEQ ID NO: 124602 - protein, 7 aa, synthetic construct
INEPRRV

SEQ ID NO: 124603 - protein, 7 aa, synthetic construct
INFGESH

SEQ ID NO: 124604 - protein, 7 aa, synthetic construct
INFKIRE

SEQ ID NO: 124605 - protein, 7 aa, synthetic construct
INFSGNK

SEQ ID NO: 124606 - protein, 7 aa, synthetic construct
INGAFTR

SEQ ID NO: 124607 - protein, 7 aa, synthetic construct
INGHGGK

SEQ ID NO: 124608 - protein, 7 aa, synthetic construct
INGHKHL

SEQ ID NO: 124609 - protein, 7 aa, synthetic construct
INGHMSR

SEQ ID NO: 124610 - protein, 7 aa, synthetic construct
INGHNIR

SEQ ID NO: 124611 - protein, 7 aa, synthetic construct
INGHYAK

SEQ ID NO: 124612 - protein, 7 aa, synthetic construct
INGQHQR

SEQ ID NO: 124613 - protein, 7 aa, synthetic construct
INHEKIR

SEQ ID NO: 124614 - protein, 7 aa, synthetic construct
INHGKLI

SEQ ID NO: 124615 - protein, 7 aa, synthetic construct
INHGLRN

SEQ ID NO: 124616 - protein, 7 aa, synthetic construct
INHGVRV

SEQ ID NO: 124617 - protein, 7 aa, synthetic construct
INHKMPV

SEQ ID NO: 124618 - protein, 7 aa, synthetic construct
INHKVPI

SEQ ID NO: 124619 - protein, 7 aa, synthetic construct
INHSNKY

SEQ ID NO: 124620 - protein, 7 aa, synthetic construct
INHTKYV

SEQ ID NO: 124621 - protein, 7 aa, synthetic construct
INHYPPK

SEQ ID NO: 124622 - protein, 7 aa, synthetic construct
INIGPRP

SEQ ID NO: 124623 - protein, 7 aa, synthetic construct
INISTSR

SEQ ID NO: 124624 - protein, 7 aa, synthetic construct
INKEFKY

SEQ ID NO: 124625 - protein, 7 aa, synthetic construct
INKEWTK

SEQ ID NO: 124626 - protein, 7 aa, synthetic construct
INKFDNK

SEQ ID NO: 124627 - protein, 7 aa, synthetic construct
INKFMSN

SEQ ID NO: 124628 - protein, 7 aa, synthetic construct
INKGDRA

SEQ ID NO: 124629 - protein, 7 aa, synthetic construct
INKGEYR

SEQ ID NO: 124630 - protein, 7 aa, synthetic construct
INKGPER

SEQ ID NO: 124631 - protein, 7 aa, synthetic construct
INKHSVF

SEQ ID NO: 124632 - protein, 7 aa, synthetic construct
INKHVHS

SEQ ID NO: 124633 - protein, 7 aa, synthetic construct
INKIDRH

SEQ ID NO: 124634 - protein, 7 aa, synthetic construct
INKMESR

SEQ ID NO: 124635 - protein, 7 aa, synthetic construct
INKMRDQ

SEQ ID NO: 124636 - protein, 7 aa, synthetic construct
INKPINL

SEQ ID NO: 124637 - protein, 7 aa, synthetic construct
INKQRND

SEQ ID NO: 124638 - protein, 7 aa, synthetic construct
INKRGMD

SEQ ID NO: 124639 - protein, 7 aa, synthetic construct
INKYQGV

SEQ ID NO: 124640 - protein, 7 aa, synthetic construct
INKYSAS

SEQ ID NO: 124641 - protein, 7 aa, synthetic construct
INKYVAV

SEQ ID NO: 124642 - protein, 7 aa, synthetic construct
INLRNRE

SEQ ID NO: 124643 - protein, 7 aa, synthetic construct
INLRVHG

SEQ ID NO: 124644 - protein, 7 aa, synthetic construct
INMHTAK

SEQ ID NO: 124645 - protein, 7 aa, synthetic construct
INMQRQI

SEQ ID NO: 124646 - protein, 7 aa, synthetic construct
INMRGYQ

SEQ ID NO: 124647 - protein, 7 aa, synthetic construct
INNIRHG

SEQ ID NO: 124648 - protein, 7 aa, synthetic construct
INNTRSW

SEQ ID NO: 124649 - protein, 7 aa, synthetic construct
INPHRQY

SEQ ID NO: 124650 - protein, 7 aa, synthetic construct
INPHSRP

SEQ ID NO: 124651 - protein, 7 aa, synthetic construct
INPKLHY

SEQ ID NO: 124652 - protein, 7 aa, synthetic construct
INPKVNF

SEQ ID NO: 124653 - protein, 7 aa, synthetic construct
INPKYER

SEQ ID NO: 124654 - protein, 7 aa, synthetic construct
INPNKYN

SEQ ID NO: 124655 - protein, 7 aa, synthetic construct
INPRPSI

SEQ ID NO: 124656 - protein, 7 aa, synthetic construct
INQAMKY

SEQ ID NO: 124657 - protein, 7 aa, synthetic construct
INQMPRS

SEQ ID NO: 124658 - protein, 7 aa, synthetic construct
INQRITM

SEQ ID NO: 124659 - protein, 7 aa, synthetic construct
INQTVKY

SEQ ID NO: 124660 - protein, 7 aa, synthetic construct
INQVHRN

SEQ ID NO: 124661 - protein, 7 aa, synthetic construct
INQVRHS

SEQ ID NO: 124662 - protein, 7 aa, synthetic construct
INRAGDR

SEQ ID NO: 124663 - protein, 7 aa, synthetic construct
INRANDR

SEQ ID NO: 124664 - protein, 7 aa, synthetic construct
INRGPTY

SEQ ID NO: 124665 - protein, 7 aa, synthetic construct
INRHVTP

SEQ ID NO: 124666 - protein, 7 aa, synthetic construct
INRKLEM

SEQ ID NO: 124667 - protein, 7 aa, synthetic construct
INRLSNQ

SEQ ID NO: 124668 - protein, 7 aa, synthetic construct
INRLTPA

SEQ ID NO: 124669 - protein, 7 aa, synthetic construct
INRMHVP

SEQ ID NO: 124670 - protein, 7 aa, synthetic construct
INRNHVM

SEQ ID NO: 124671 - protein, 7 aa, synthetic construct
INRPPIG

SEQ ID NO: 124672 - protein, 7 aa, synthetic construct
INRPQRE

SEQ ID NO: 124673 - protein, 7 aa, synthetic construct
INRPVHN

SEQ ID NO: 124674 - protein, 7 aa, synthetic construct
INRPVMS

SEQ ID NO: 124675 - protein, 7 aa, synthetic construct
INRPVTH

SEQ ID NO: 124676 - protein, 7 aa, synthetic construct
INRQHAG

SEQ ID NO: 124677 - protein, 7 aa, synthetic construct
INRQPHA

SEQ ID NO: 124678 - protein, 7 aa, synthetic construct
INRQRDS

SEQ ID NO: 124679 - protein, 7 aa, synthetic construct
INRSSPL

SEQ ID NO: 124680 - protein, 7 aa, synthetic construct
INRTIGL

SEQ ID NO: 124681 - protein, 7 aa, synthetic construct
INRTSNF

SEQ ID NO: 124682 - protein, 7 aa, synthetic construct
INRVITS

SEQ ID NO: 124683 - protein, 7 aa, synthetic construct
INRVNPQ

SEQ ID NO: 124684 - protein, 7 aa, synthetic construct
INRVQVN

SEQ ID NO: 124685 - protein, 7 aa, synthetic construct
INRVTER

SEQ ID NO: 124686 - protein, 7 aa, synthetic construct
INRVTSN

SEQ ID NO: 124687 - protein, 7 aa, synthetic construct
INRYNQS

SEQ ID NO: 124688 - protein, 7 aa, synthetic construct
INSHISK

SEQ ID NO: 124689 - protein, 7 aa, synthetic construct
INSPHSR

SEQ ID NO: 124690 - protein, 7 aa, synthetic construct
INSRERI

SEQ ID NO: 124691 - protein, 7 aa, synthetic construct
INSTARW

SEQ ID NO: 124692 - protein, 7 aa, synthetic construct
INSTTFR

SEQ ID NO: 124693 - protein, 7 aa, synthetic construct
INTHRGL

SEQ ID NO: 124694 - protein, 7 aa, synthetic construct
INTHRSV

SEQ ID NO: 124695 - protein, 7 aa, synthetic construct
INTIKVT

SEQ ID NO: 124696 - protein, 7 aa, synthetic construct
INTMRER

SEQ ID NO: 124697 - protein, 7 aa, synthetic construct
INTNRNT

SEQ ID NO: 124698 - protein, 7 aa, synthetic construct
INTRMDR

SEQ ID NO: 124699 - protein, 7 aa, synthetic construct
INTRTNY

SEQ ID NO: 124700 - protein, 7 aa, synthetic construct
INTSRMY

SEQ ID NO: 124701 - protein, 7 aa, synthetic construct
INVARHQ

SEQ ID NO: 124702 - protein, 7 aa, synthetic construct
INVARTI

SEQ ID NO: 124703 - protein, 7 aa, synthetic construct
INVHRQI

SEQ ID NO: 124704 - protein, 7 aa, synthetic construct
INVKMHV

SEQ ID NO: 124705 - protein, 7 aa, synthetic construct
INVRAHG

SEQ ID NO: 124706 - protein, 7 aa, synthetic construct
INVVAAG

SEQ ID NO: 124707 - protein, 7 aa, synthetic construct
INYKAPL

SEQ ID NO: 124708 - protein, 7 aa, synthetic construct
INYPNRA

SEQ ID NO: 124709 - protein, 7 aa, synthetic construct
IPAHKYI

SEQ ID NO: 124710 - protein, 7 aa, synthetic construct
IPAHNPR

SEQ ID NO: 124711 - protein, 7 aa, synthetic construct
IPAHNSR

SEQ ID NO: 124712 - protein, 7 aa, synthetic construct
IPAHSGK

SEQ ID NO: 124713 - protein, 7 aa, synthetic construct
IPAKEYR

SEQ ID NO: 124714 - protein, 7 aa, synthetic construct
IPAKTFM

SEQ ID NO: 124715 - protein, 7 aa, synthetic construct
IPAKYTQ

SEQ ID NO: 124716 - protein, 7 aa, synthetic construct
IPAQRHL

SEQ ID NO: 124717 - protein, 7 aa, synthetic construct
IPARFPS

SEQ ID NO: 124718 - protein, 7 aa, synthetic construct
IPARHMQ

SEQ ID NO: 124719 - protein, 7 aa, synthetic construct
IPARHQV

SEQ ID NO: 124720 - protein, 7 aa, synthetic construct
IPARPRE

SEQ ID NO: 124721 - protein, 7 aa, synthetic construct
IPARQAY

SEQ ID NO: 124722 - protein, 7 aa, synthetic construct
IPARSMQ

SEQ ID NO: 124723 - protein, 7 aa, synthetic construct
IPASHRN

SEQ ID NO: 124724 - protein, 7 aa, synthetic construct
IPATQRH

SEQ ID NO: 124725 - protein, 7 aa, synthetic construct
IPATRRD

SEQ ID NO: 124726 - protein, 7 aa, synthetic construct
IPDAQRR

SEQ ID NO: 124727 - protein, 7 aa, synthetic construct
IPDARRF

SEQ ID NO: 124728 - protein, 7 aa, synthetic construct
IPDHNLL

SEQ ID NO: 124729 - protein, 7 aa, synthetic construct
IPDRPVK

SEQ ID NO: 124730 - protein, 7 aa, synthetic construct
IPDSGKR

SEQ ID NO: 124731 - protein, 7 aa, synthetic construct
IPEGKPW

SEQ ID NO: 124732 - protein, 7 aa, synthetic construct
IPEIRRP

SEQ ID NO: 124733 - protein, 7 aa, synthetic construct
IPERQNK

SEQ ID NO: 124734 - protein, 7 aa, synthetic construct
IPERSKN

SEQ ID NO: 124735 - protein, 7 aa, synthetic construct
IPERSRA

SEQ ID NO: 124736 - protein, 7 aa, synthetic construct
IPFKGPT

SEQ ID NO: 124737 - protein, 7 aa, synthetic construct
IPGAKFV

SEQ ID NO: 124738 - protein, 7 aa, synthetic construct
IPGAQRH

SEQ ID NO: 124739 - protein, 7 aa, synthetic construct
IPGKPFT

SEQ ID NO: 124740 - protein, 7 aa, synthetic construct
IPGKYHA

SEQ ID NO: 124741 - protein, 7 aa, synthetic construct
IPGLKIH

SEQ ID NO: 124742 - protein, 7 aa, synthetic construct
IPGMLRQ

SEQ ID NO: 124743 - protein, 7 aa, synthetic construct
IPGNHMR

SEQ ID NO: 124744 - protein, 7 aa, synthetic construct
IPGPKIL

SEQ ID NO: 124745 - protein, 7 aa, synthetic construct
IPGQRYL

SEQ ID NO: 124746 - protein, 7 aa, synthetic construct
IPGQVNR

SEQ ID NO: 124747 - protein, 7 aa, synthetic construct
IPGRATF

SEQ ID NO: 124748 - protein, 7 aa, synthetic construct
IPGRIAT

SEQ ID NO: 124749 - protein, 7 aa, synthetic construct
IPGTGRQ

SEQ ID NO: 124750 - protein, 7 aa, synthetic construct
IPGYKSN

SEQ ID NO: 124751 - protein, 7 aa, synthetic construct
IPHGPMK

SEQ ID NO: 124752 - protein, 7 aa, synthetic construct
IPHHPKT

SEQ ID NO: 124753 - protein, 7 aa, synthetic construct
IPHIREK

SEQ ID NO: 124754 - protein, 7 aa, synthetic construct
IPHKVAI

SEQ ID NO: 124755 - protein, 7 aa, synthetic construct
IPHMPKA

SEQ ID NO: 124756 - protein, 7 aa, synthetic construct
IPHNSSR

SEQ ID NO: 124757 - protein, 7 aa, synthetic construct
IPHQIKH

SEQ ID NO: 124758 - protein, 7 aa, synthetic construct
IPHRGLN

SEQ ID NO: 124759 - protein, 7 aa, synthetic construct
IPHRPSI

SEQ ID NO: 124760 - protein, 7 aa, synthetic construct
IPHRVVS

SEQ ID NO: 124761 - protein, 7 aa, synthetic construct
IPHSIHM

SEQ ID NO: 124762 - protein, 7 aa, synthetic construct
IPHVPRA

SEQ ID NO: 124763 - protein, 7 aa, synthetic construct
IPIGIRQ

SEQ ID NO: 124764 - protein, 7 aa, synthetic construct
IPIHHKQ

SEQ ID NO: 124765 - protein, 7 aa, synthetic construct
IPIKNTH

SEQ ID NO: 124766 - protein, 7 aa, synthetic construct
IPIRDKH

SEQ ID NO: 124767 - protein, 7 aa, synthetic construct
IPIRSAN

SEQ ID NO: 124768 - protein, 7 aa, synthetic construct
IPKAHYN

SEQ ID NO: 124769 - protein, 7 aa, synthetic construct
IPKAPFA

SEQ ID NO: 124770 - protein, 7 aa, synthetic construct
IPKFNNA

SEQ ID NO: 124771 - protein, 7 aa, synthetic construct
IPKFSPS

SEQ ID NO: 124772 - protein, 7 aa, synthetic construct
IPKHFSP

SEQ ID NO: 124773 - protein, 7 aa, synthetic construct
IPKHIAT

SEQ ID NO: 124774 - protein, 7 aa, synthetic construct
IPKHVYQ

SEQ ID NO: 124775 - protein, 7 aa, synthetic construct
IPKHYTG

SEQ ID NO: 124776 - protein, 7 aa, synthetic construct
IPKHYTM

SEQ ID NO: 124777 - protein, 7 aa, synthetic construct
IPKKNYD

SEQ ID NO: 124778 - protein, 7 aa, synthetic construct
IPKMYKE

SEQ ID NO: 124779 - protein, 7 aa, synthetic construct
IPKNGFM

SEQ ID NO: 124780 - protein, 7 aa, synthetic construct
IPKNRSD

SEQ ID NO: 124781 - protein, 7 aa, synthetic construct
IPKPMHG

SEQ ID NO: 124782 - protein, 7 aa, synthetic construct
IPKQGFV

SEQ ID NO: 124783 - protein, 7 aa, synthetic construct
IPKQPPH

SEQ ID NO: 124784 - protein, 7 aa, synthetic construct
IPKSSFQ

SEQ ID NO: 124785 - protein, 7 aa, synthetic construct
IPKTSFQ

SEQ ID NO: 124786 - protein, 7 aa, synthetic construct
IPKVVVN

SEQ ID NO: 124787 - protein, 7 aa, synthetic construct
IPKYGTL

SEQ ID NO: 124788 - protein, 7 aa, synthetic construct
IPKYIGA

SEQ ID NO: 124789 - protein, 7 aa, synthetic construct
IPKYINS

SEQ ID NO: 124790 - protein, 7 aa, synthetic construct
IPKYKDL

SEQ ID NO: 124791 - protein, 7 aa, synthetic construct
IPKYMSQ

SEQ ID NO: 124792 - protein, 7 aa, synthetic construct
IPLHIKS

SEQ ID NO: 124793 - protein, 7 aa, synthetic construct
IPMAKSI

SEQ ID NO: 124794 - protein, 7 aa, synthetic construct
IPMARPQ

SEQ ID NO: 124795 - protein, 7 aa, synthetic construct
IPMNYKS

SEQ ID NO: 124796 - protein, 7 aa, synthetic construct
IPMQYKG

SEQ ID NO: 124797 - protein, 7 aa, synthetic construct
IPMSRHG

SEQ ID NO: 124798 - protein, 7 aa, synthetic construct
IPNDRKQ

SEQ ID NO: 124799 - protein, 7 aa, synthetic construct
IPNFGKN

SEQ ID NO: 124800 - protein, 7 aa, synthetic construct
IPNFTKN

SEQ ID NO: 124801 - protein, 7 aa, synthetic construct
IPNIVKH

SEQ ID NO: 124802 - protein, 7 aa, synthetic construct
IPNKGFI

SEQ ID NO: 124803 - protein, 7 aa, synthetic construct
IPNKSHF

SEQ ID NO: 124804 - protein, 7 aa, synthetic construct
IPNMQRQ

SEQ ID NO: 124805 - protein, 7 aa, synthetic construct
IPNQGFQ

SEQ ID NO: 124806 - protein, 7 aa, synthetic construct
IPNQGHK

SEQ ID NO: 124807 - protein, 7 aa, synthetic construct
IPNSPRI

SEQ ID NO: 124808 - protein, 7 aa, synthetic construct
IPNYTKI

SEQ ID NO: 124809 - protein, 7 aa, synthetic construct
IPPAIRV

SEQ ID NO: 124810 - protein, 7 aa, synthetic construct
IPPDRNK

SEQ ID NO: 124811 - protein, 7 aa, synthetic construct
IPPHMRN

SEQ ID NO: 124812 - protein, 7 aa, synthetic construct
IPPMRHV

SEQ ID NO: 124813 - protein, 7 aa, synthetic construct
IPPNRMH

SEQ ID NO: 124814 - protein, 7 aa, synthetic construct
IPPRAMS

SEQ ID NO: 124815 - protein, 7 aa, synthetic construct
IPPRAPA

SEQ ID NO: 124816 - protein, 7 aa, synthetic construct
IPPRPLQ

SEQ ID NO: 124817 - protein, 7 aa, synthetic construct
IPPSQYR

SEQ ID NO: 124818 - protein, 7 aa, synthetic construct
IPPSTRN

SEQ ID NO: 124819 - protein, 7 aa, synthetic construct
IPQAQLR

SEQ ID NO: 124820 - protein, 7 aa, synthetic construct
IPQHTRN

SEQ ID NO: 124821 - protein, 7 aa, synthetic construct
IPQIRGT

SEQ ID NO: 124822 - protein, 7 aa, synthetic construct
IPQMSQR

SEQ ID NO: 124823 - protein, 7 aa, synthetic construct
IPQPKHG

SEQ ID NO: 124824 - protein, 7 aa, synthetic construct
IPQRLHT

SEQ ID NO: 124825 - protein, 7 aa, synthetic construct
IPQRMLS

SEQ ID NO: 124826 - protein, 7 aa, synthetic construct
IPQRPHQ

SEQ ID NO: 124827 - protein, 7 aa, synthetic construct
IPQSRMI

SEQ ID NO: 124828 - protein, 7 aa, synthetic construct
IPRAGQN

SEQ ID NO: 124829 - protein, 7 aa, synthetic construct
IPRAHAQ

SEQ ID NO: 124830 - protein, 7 aa, synthetic construct
IPRAQER

SEQ ID NO: 124831 - protein, 7 aa, synthetic construct
IPRATIA

SEQ ID NO: 124832 - protein, 7 aa, synthetic construct
IPRDRFN

SEQ ID NO: 124833 - protein, 7 aa, synthetic construct
IPRFSDK

SEQ ID NO: 124834 - protein, 7 aa, synthetic construct
IPRGHIV

SEQ ID NO: 124835 - protein, 7 aa, synthetic construct
IPRGHNA

SEQ ID NO: 124836 - protein, 7 aa, synthetic construct
IPRGINV

SEQ ID NO: 124837 - protein, 7 aa, synthetic construct
IPRGISH

SEQ ID NO: 124838 - protein, 7 aa, synthetic construct
IPRGPYN

SEQ ID NO: 124839 - protein, 7 aa, synthetic construct
IPRGSQQ

SEQ ID NO: 124840 - protein, 7 aa, synthetic construct
IPRGVSS

SEQ ID NO: 124841 - protein, 7 aa, synthetic construct
IPRGVVM

SEQ ID NO: 124842 - protein, 7 aa, synthetic construct
IPRHAAV

SEQ ID NO: 124843 - protein, 7 aa, synthetic construct
IPRHKQE

SEQ ID NO: 124844 - protein, 7 aa, synthetic construct
IPRHMTA

SEQ ID NO: 124845 - protein, 7 aa, synthetic construct
IPRHNST

SEQ ID NO: 124846 - protein, 7 aa, synthetic construct
IPRHTAA

SEQ ID NO: 124847 - protein, 7 aa, synthetic construct
IPRIAPQ

SEQ ID NO: 124848 - protein, 7 aa, synthetic construct
IPRIQNM

SEQ ID NO: 124849 - protein, 7 aa, synthetic construct
IPRISQA

SEQ ID NO: 124850 - protein, 7 aa, synthetic construct
IPRIVQA

SEQ ID NO: 124851 - protein, 7 aa, synthetic construct
IPRLEKM

SEQ ID NO: 124852 - protein, 7 aa, synthetic construct
IPRLITA

SEQ ID NO: 124853 - protein, 7 aa, synthetic construct
IPRLNSV

SEQ ID NO: 124854 - protein, 7 aa, synthetic construct
IPRLRQE

SEQ ID NO: 124855 - protein, 7 aa, synthetic construct
IPRMNDK

SEQ ID NO: 124856 - protein, 7 aa, synthetic construct
IPRMNNH

SEQ ID NO: 124857 - protein, 7 aa, synthetic construct
IPRMSVS

SEQ ID NO: 124858 - protein, 7 aa, synthetic construct
IPRNISN

SEQ ID NO: 124859 - protein, 7 aa, synthetic construct
IPRNITA

SEQ ID NO: 124860 - protein, 7 aa, synthetic construct
IPRNKES

SEQ ID NO: 124861 - protein, 7 aa, synthetic construct
IPRNSGH

SEQ ID NO: 124862 - protein, 7 aa, synthetic construct
IPRPSHM

SEQ ID NO: 124863 - protein, 7 aa, synthetic construct
IPRQGLP

SEQ ID NO: 124864 - protein, 7 aa, synthetic construct
IPRQIAA

SEQ ID NO: 124865 - protein, 7 aa, synthetic construct
IPRQISN

SEQ ID NO: 124866 - protein, 7 aa, synthetic construct
IPRQMSQ

SEQ ID NO: 124867 - protein, 7 aa, synthetic construct
IPRQTMG

SEQ ID NO: 124868 - protein, 7 aa, synthetic construct
IPRREGL

SEQ ID NO: 124869 - protein, 7 aa, synthetic construct
IPRSPST

SEQ ID NO: 124870 - protein, 7 aa, synthetic construct
IPRSSSN

SEQ ID NO: 124871 - protein, 7 aa, synthetic construct
IPRSTHM

SEQ ID NO: 124872 - protein, 7 aa, synthetic construct
IPRTGTY

SEQ ID NO: 124873 - protein, 7 aa, synthetic construct
IPRTHPV

SEQ ID NO: 124874 - protein, 7 aa, synthetic construct
IPRTIAH

SEQ ID NO: 124875 - protein, 7 aa, synthetic construct
IPRTIGQ

SEQ ID NO: 124876 - protein, 7 aa, synthetic construct
IPRTIHS

SEQ ID NO: 124877 - protein, 7 aa, synthetic construct
IPRTNHP

SEQ ID NO: 124878 - protein, 7 aa, synthetic construct
IPRTQYA

SEQ ID NO: 124879 - protein, 7 aa, synthetic construct
IPRTSTG

SEQ ID NO: 124880 - protein, 7 aa, synthetic construct
IPSGYKV

SEQ ID NO: 124881 - protein, 7 aa, synthetic construct
IPSIRRE

SEQ ID NO: 124882 - protein, 7 aa, synthetic construct
IPSMTRQ

SEQ ID NO: 124883 - protein, 7 aa, synthetic construct
IPSRADR

SEQ ID NO: 124884 - protein, 7 aa, synthetic construct
IPSRQNL

SEQ ID NO: 124885 - protein, 7 aa, synthetic construct
IPSRSER

SEQ ID NO: 124886 - protein, 7 aa, synthetic construct
IPSRVST

SEQ ID NO: 124887 - protein, 7 aa, synthetic construct
IPSRVVT

SEQ ID NO: 124888 - protein, 7 aa, synthetic construct
IPSSGHR

SEQ ID NO: 124889 - protein, 7 aa, synthetic construct
IPSYAKT

SEQ ID NO: 124890 - protein, 7 aa, synthetic construct
IPTDKHR

SEQ ID NO: 124891 - protein, 7 aa, synthetic construct
IPTERKQ

SEQ ID NO: 124892 - protein, 7 aa, synthetic construct
IPTFVKG

SEQ ID NO: 124893 - protein, 7 aa, synthetic construct
IPTGHMR

SEQ ID NO: 124894 - protein, 7 aa, synthetic construct
IPTITRH

SEQ ID NO: 124895 - protein, 7 aa, synthetic construct
IPTKHYN

SEQ ID NO: 124896 - protein, 7 aa, synthetic construct
IPTNRHA

SEQ ID NO: 124897 - protein, 7 aa, synthetic construct
IPTNYLK

SEQ ID NO: 124898 - protein, 7 aa, synthetic construct
IPTQARG

SEQ ID NO: 124899 - protein, 7 aa, synthetic construct
IPTREKQ

SEQ ID NO: 124900 - protein, 7 aa, synthetic construct
IPTSARQ

SEQ ID NO: 124901 - protein, 7 aa, synthetic construct
IPTTFKG

SEQ ID NO: 124902 - protein, 7 aa, synthetic construct
IPVFNPE

SEQ ID NO: 124903 - protein, 7 aa, synthetic construct
IPVQHRA

SEQ ID NO: 124904 - protein, 7 aa, synthetic construct
IPYKIKD

SEQ ID NO: 124905 - protein, 7 aa, synthetic construct
IQAAPVR

SEQ ID NO: 124906 - protein, 7 aa, synthetic construct
IQARGHA

SEQ ID NO: 124907 - protein, 7 aa, synthetic construct
IQAVRRD

SEQ ID NO: 124908 - protein, 7 aa, synthetic construct
IQDGRRN

SEQ ID NO: 124909 - protein, 7 aa, synthetic construct
IQDMRNR

SEQ ID NO: 124910 - protein, 7 aa, synthetic construct
IQDPRTR

SEQ ID NO: 124911 - protein, 7 aa, synthetic construct
IQDRPNK

SEQ ID NO: 124912 - protein, 7 aa, synthetic construct
IQERPQK

SEQ ID NO: 124913 - protein, 7 aa, synthetic construct
IQETNRK

SEQ ID NO: 124914 - protein, 7 aa, synthetic construct
IQGAQSR

SEQ ID NO: 124915 - protein, 7 aa, synthetic construct
IQGHRMS

SEQ ID NO: 124916 - protein, 7 aa, synthetic construct
IQGHSIR

SEQ ID NO: 124917 - protein, 7 aa, synthetic construct
IQGKSYS

SEQ ID NO: 124918 - protein, 7 aa, synthetic construct
IQGLHRQ

SEQ ID NO: 124919 - protein, 7 aa, synthetic construct
IQGMHGK

SEQ ID NO: 124920 - protein, 7 aa, synthetic construct
IQGSFKN

SEQ ID NO: 124921 - protein, 7 aa, synthetic construct
IQGSHFK

SEQ ID NO: 124922 - protein, 7 aa, synthetic construct
IQGTKYS

SEQ ID NO: 124923 - protein, 7 aa, synthetic construct
IQGVPQR

SEQ ID NO: 124924 - protein, 7 aa, synthetic construct
IQGYIKQ

SEQ ID NO: 124925 - protein, 7 aa, synthetic construct
IQHGINR

SEQ ID NO: 124926 - protein, 7 aa, synthetic construct
IQHGLRQ

SEQ ID NO: 124927 - protein, 7 aa, synthetic construct
IQHGNKF

SEQ ID NO: 124928 - protein, 7 aa, synthetic construct
IQHIKHN

SEQ ID NO: 124929 - protein, 7 aa, synthetic construct
IQHKGSL

SEQ ID NO: 124930 - protein, 7 aa, synthetic construct
IQHKSMI

SEQ ID NO: 124931 - protein, 7 aa, synthetic construct
IQHKTYI

SEQ ID NO: 124932 - protein, 7 aa, synthetic construct
IQHLVKN

SEQ ID NO: 124933 - protein, 7 aa, synthetic construct
IQHMGGK

SEQ ID NO: 124934 - protein, 7 aa, synthetic construct
IQHNILK

SEQ ID NO: 124935 - protein, 7 aa, synthetic construct
IQHQKDK

SEQ ID NO: 124936 - protein, 7 aa, synthetic construct
IQHSVRN

SEQ ID NO: 124937 - protein, 7 aa, synthetic construct
IQHTKYA

SEQ ID NO: 124938 - protein, 7 aa, synthetic construct
IQHTSMK

SEQ ID NO: 124939 - protein, 7 aa, synthetic construct
IQIARDK

SEQ ID NO: 124940 - protein, 7 aa, synthetic construct
IQINNRM

SEQ ID NO: 124941 - protein, 7 aa, synthetic construct
IQIRGGM

SEQ ID NO: 124942 - protein, 7 aa, synthetic construct
IQISSSR

SEQ ID NO: 124943 - protein, 7 aa, synthetic construct
IQKDMSR

SEQ ID NO: 124944 - protein, 7 aa, synthetic construct
IQKFQNS

SEQ ID NO: 124945 - protein, 7 aa, synthetic construct
IQKGSTM

SEQ ID NO: 124946 - protein, 7 aa, synthetic construct
IQKHMVT

SEQ ID NO: 124947 - protein, 7 aa, synthetic construct
IQKHTPH

SEQ ID NO: 124948 - protein, 7 aa, synthetic construct
IQKNQYI

SEQ ID NO: 124949 - protein, 7 aa, synthetic construct
IQKPYAN

SEQ ID NO: 124950 - protein, 7 aa, synthetic construct
IQKRAID

SEQ ID NO: 124951 - protein, 7 aa, synthetic construct
IQKRDHI

SEQ ID NO: 124952 - protein, 7 aa, synthetic construct
IQKRVLE

SEQ ID NO: 124953 - protein, 7 aa, synthetic construct
IQKTMYS

SEQ ID NO: 124954 - protein, 7 aa, synthetic construct
IQKYASP

SEQ ID NO: 124955 - protein, 7 aa, synthetic construct
IQKYSST

SEQ ID NO: 124956 - protein, 7 aa, synthetic construct
IQLKPRD

SEQ ID NO: 124957 - protein, 7 aa, synthetic construct
IQLRHNA

SEQ ID NO: 124958 - protein, 7 aa, synthetic construct
IQMAAKM

SEQ ID NO: 124959 - protein, 7 aa, synthetic construct
IQMASQR

SEQ ID NO: 124960 - protein, 7 aa, synthetic construct
IQMGSVR

SEQ ID NO: 124961 - protein, 7 aa, synthetic construct
IQMHLSK

SEQ ID NO: 124962 - protein, 7 aa, synthetic construct
IQNAGYM

SEQ ID NO: 124963 - protein, 7 aa, synthetic construct
IQNARIM

SEQ ID NO: 124964 - protein, 7 aa, synthetic construct
IQNGHRN

SEQ ID NO: 124965 - protein, 7 aa, synthetic construct
IQNKSRD

SEQ ID NO: 124966 - protein, 7 aa, synthetic construct
IQNLPQD

SEQ ID NO: 124967 - protein, 7 aa, synthetic construct
IQNRAKE

SEQ ID NO: 124968 - protein, 7 aa, synthetic construct
IQNRMDK

SEQ ID NO: 124969 - protein, 7 aa, synthetic construct
IQNRTKE

SEQ ID NO: 124970 - protein, 7 aa, synthetic construct
IQNRYAH

SEQ ID NO: 124971 - protein, 7 aa, synthetic construct
IQPDTRR

SEQ ID NO: 124972 - protein, 7 aa, synthetic construct
IQPIKFQ

SEQ ID NO: 124973 - protein, 7 aa, synthetic construct
IQPKHTY

SEQ ID NO: 124974 - protein, 7 aa, synthetic construct
IQPKWKE

SEQ ID NO: 124975 - protein, 7 aa, synthetic construct
IQPNSLR

SEQ ID NO: 124976 - protein, 7 aa, synthetic construct
IQPRKSE

SEQ ID NO: 124977 - protein, 7 aa, synthetic construct
IQPRPKD

SEQ ID NO: 124978 - protein, 7 aa, synthetic construct
IQPRQFN

SEQ ID NO: 124979 - protein, 7 aa, synthetic construct
IQPRSMM

SEQ ID NO: 124980 - protein, 7 aa, synthetic construct
IQQAERK

SEQ ID NO: 124981 - protein, 7 aa, synthetic construct
IQQGRAF

SEQ ID NO: 124982 - protein, 7 aa, synthetic construct
IQQKQQW

SEQ ID NO: 124983 - protein, 7 aa, synthetic construct
IQQNLRV

SEQ ID NO: 124984 - protein, 7 aa, synthetic construct
IQQNRGY

SEQ ID NO: 124985 - protein, 7 aa, synthetic construct
IQQQKVY

SEQ ID NO: 124986 - protein, 7 aa, synthetic construct
IQQRFSQ

SEQ ID NO: 124987 - protein, 7 aa, synthetic construct
IQQRLRE

SEQ ID NO: 124988 - protein, 7 aa, synthetic construct
IQQRSPY

SEQ ID NO: 124989 - protein, 7 aa, synthetic construct
IQQTYGK

SEQ ID NO: 124990 - protein, 7 aa, synthetic construct
IQQVSHK

SEQ ID NO: 124991 - protein, 7 aa, synthetic construct
IQRATER

SEQ ID NO: 124992 - protein, 7 aa, synthetic construct
IQRDAGK

SEQ ID NO: 124993 - protein, 7 aa, synthetic construct
IQRDGNK

SEQ ID NO: 124994 - protein, 7 aa, synthetic construct
IQRDVGK

SEQ ID NO: 124995 - protein, 7 aa, synthetic construct
IQREMSK

SEQ ID NO: 124996 - protein, 7 aa, synthetic construct
IQRERNM

SEQ ID NO: 124997 - protein, 7 aa, synthetic construct
IQRGESK

SEQ ID NO: 124998 - protein, 7 aa, synthetic construct
IQRIAPN

SEQ ID NO: 124999 - protein, 7 aa, synthetic construct
IQRIGGV

SEQ ID NO: 125000 - protein, 7 aa, synthetic construct
IQRKLDS

SEQ ID NO: 125001 - protein, 7 aa, synthetic construct
IQRLVNS

SEQ ID NO: 125002 - protein, 7 aa, synthetic construct
IQRNIPL

SEQ ID NO: 125003 - protein, 7 aa, synthetic construct
IQRQAKD

SEQ ID NO: 125004 - protein, 7 aa, synthetic construct
IQRQSVS

SEQ ID NO: 125005 - protein, 7 aa, synthetic construct
IQRTPHA

SEQ ID NO: 125006 - protein, 7 aa, synthetic construct
IQRTTHI

SEQ ID NO: 125007 - protein, 7 aa, synthetic construct
IQSGSGR

SEQ ID NO: 125008 - protein, 7 aa, synthetic construct
IQSRTFA

SEQ ID NO: 125009 - protein, 7 aa, synthetic construct
IQSSPYD

SEQ ID NO: 125010 - protein, 7 aa, synthetic construct
IQSSTYR

SEQ ID NO: 125011 - protein, 7 aa, synthetic construct
IQSTPRF

SEQ ID NO: 125012 - protein, 7 aa, synthetic construct
IQTMKGY

SEQ ID NO: 125013 - protein, 7 aa, synthetic construct
IQTMRER

SEQ ID NO: 125014 - protein, 7 aa, synthetic construct
IQTNQGR

SEQ ID NO: 125015 - protein, 7 aa, synthetic construct
IQTSMKY

SEQ ID NO: 125016 - protein, 7 aa, synthetic construct
IQTTAKW

SEQ ID NO: 125017 - protein, 7 aa, synthetic construct
IQTTPRS

SEQ ID NO: 125018 - protein, 7 aa, synthetic construct
IQTYSKI

SEQ ID NO: 125019 - protein, 7 aa, synthetic construct
IQVSSYK

SEQ ID NO: 125020 - protein, 7 aa, synthetic construct
IQVTRHG

SEQ ID NO: 125021 - protein, 7 aa, synthetic construct
IRAAHSG

SEQ ID NO: 125022 - protein, 7 aa, synthetic construct
IRAAPEK

SEQ ID NO: 125023 - protein, 7 aa, synthetic construct
IRAARME

SEQ ID NO: 125024 - protein, 7 aa, synthetic construct
IRADHNK

SEQ ID NO: 125025 - protein, 7 aa, synthetic construct
IRADSFK

SEQ ID NO: 125026 - protein, 7 aa, synthetic construct
IRAERGI

SEQ ID NO: 125027 - protein, 7 aa, synthetic construct
IRAGAFA

SEQ ID NO: 125028 - protein, 7 aa, synthetic construct
IRAGDGR

SEQ ID NO: 125029 - protein, 7 aa, synthetic construct
IRAHVEK

SEQ ID NO: 125030 - protein, 7 aa, synthetic construct
IRAIIKE

SEQ ID NO: 125031 - protein, 7 aa, synthetic construct
IRALSAN

SEQ ID NO: 125032 - protein, 7 aa, synthetic construct
IRALSAP

SEQ ID NO: 125033 - protein, 7 aa, synthetic construct
IRAMIGS

SEQ ID NO: 125034 - protein, 7 aa, synthetic construct
IRAMKVD

SEQ ID NO: 125035 - protein, 7 aa, synthetic construct
IRAMSKD

SEQ ID NO: 125036 - protein, 7 aa, synthetic construct
IRANYGH

SEQ ID NO: 125037 - protein, 7 aa, synthetic construct
IRAPAHG

SEQ ID NO: 125038 - protein, 7 aa, synthetic construct
IRAPSHA

SEQ ID NO: 125039 - protein, 7 aa, synthetic construct
IRAQMEK

SEQ ID NO: 125040 - protein, 7 aa, synthetic construct
IRAQSPH

SEQ ID NO: 125041 - protein, 7 aa, synthetic construct
IRARDEW

SEQ ID NO: 125042 - protein, 7 aa, synthetic construct
IRASALQ

SEQ ID NO: 125043 - protein, 7 aa, synthetic construct
IRASITS

SEQ ID NO: 125044 - protein, 7 aa, synthetic construct
IRASQHA

SEQ ID NO: 125045 - protein, 7 aa, synthetic construct
IRASTHQ

SEQ ID NO: 125046 - protein, 7 aa, synthetic construct
IRASVTN

SEQ ID NO: 125047 - protein, 7 aa, synthetic construct
IRATMAH

SEQ ID NO: 125048 - protein, 7 aa, synthetic construct
IRATNGF

SEQ ID NO: 125049 - protein, 7 aa, synthetic construct
IRAVTDR

SEQ ID NO: 125050 - protein, 7 aa, synthetic construct
IRAVVSG

SEQ ID NO: 125051 - protein, 7 aa, synthetic construct
IRDGARS

SEQ ID NO: 125052 - protein, 7 aa, synthetic construct
IRDHRPI

SEQ ID NO: 125053 - protein, 7 aa, synthetic construct
IRDKMIH

SEQ ID NO: 125054 - protein, 7 aa, synthetic construct
IRDKRQD

SEQ ID NO: 125055 - protein, 7 aa, synthetic construct
IRDKYSV

SEQ ID NO: 125056 - protein, 7 aa, synthetic construct
IRDPPEH

SEQ ID NO: 125057 - protein, 7 aa, synthetic construct
IRDPTAK

SEQ ID NO: 125058 - protein, 7 aa, synthetic construct
IRDRMEK

SEQ ID NO: 125059 - protein, 7 aa, synthetic construct
IRDRREF

SEQ ID NO: 125060 - protein, 7 aa, synthetic construct
IRDSHKF

SEQ ID NO: 125061 - protein, 7 aa, synthetic construct
IRDSRIT

SEQ ID NO: 125062 - protein, 7 aa, synthetic construct
IRDSRTF

SEQ ID NO: 125063 - protein, 7 aa, synthetic construct
IRDVNSK

SEQ ID NO: 125064 - protein, 7 aa, synthetic construct
IRDYVVK

SEQ ID NO: 125065 - protein, 7 aa, synthetic construct
IREARQL

SEQ ID NO: 125066 - protein, 7 aa, synthetic construct
IREFQKG

SEQ ID NO: 125067 - protein, 7 aa, synthetic construct
IREGPKN

SEQ ID NO: 125068 - protein, 7 aa, synthetic construct
IREHQGK

SEQ ID NO: 125069 - protein, 7 aa, synthetic construct
IREHVRQ

SEQ ID NO: 125070 - protein, 7 aa, synthetic construct
IREKAFT

SEQ ID NO: 125071 - protein, 7 aa, synthetic construct
IREKAIT

SEQ ID NO: 125072 - protein, 7 aa, synthetic construct
IREKPIL

SEQ ID NO: 125073 - protein, 7 aa, synthetic construct
IREKRDT

SEQ ID NO: 125074 - protein, 7 aa, synthetic construct
IREKRNE

SEQ ID NO: 125075 - protein, 7 aa, synthetic construct
IREMHRQ

SEQ ID NO: 125076 - protein, 7 aa, synthetic construct
IREMNSK

SEQ ID NO: 125077 - protein, 7 aa, synthetic construct
IRENAVR

SEQ ID NO: 125078 - protein, 7 aa, synthetic construct
IREPRQV

SEQ ID NO: 125079 - protein, 7 aa, synthetic construct
IREQSLK

SEQ ID NO: 125080 - protein, 7 aa, synthetic construct
IRESVVS

SEQ ID NO: 125081 - protein, 7 aa, synthetic construct
IRETQLR

SEQ ID NO: 125082 - protein, 7 aa, synthetic construct
IREVNRN

SEQ ID NO: 125083 - protein, 7 aa, synthetic construct
IREYLKG

SEQ ID NO: 125084 - protein, 7 aa, synthetic construct
IRFNKEG

SEQ ID NO: 125085 - protein, 7 aa, synthetic construct
IRGADRI

SEQ ID NO: 125086 - protein, 7 aa, synthetic construct
IRGAFAG

SEQ ID NO: 125087 - protein, 7 aa, synthetic construct
IRGASNH

SEQ ID NO: 125088 - protein, 7 aa, synthetic construct
IRGDTKH

SEQ ID NO: 125089 - protein, 7 aa, synthetic construct
IRGEAKL

SEQ ID NO: 125090 - protein, 7 aa, synthetic construct
IRGERPV

SEQ ID NO: 125091 - protein, 7 aa, synthetic construct
IRGERVP

SEQ ID NO: 125092 - protein, 7 aa, synthetic construct
IRGGLPN

SEQ ID NO: 125093 - protein, 7 aa, synthetic construct
IRGGQHY

SEQ ID NO: 125094 - protein, 7 aa, synthetic construct
IRGHNGM

SEQ ID NO: 125095 - protein, 7 aa, synthetic construct
IRGIMPT

SEQ ID NO: 125096 - protein, 7 aa, synthetic construct
IRGIPST

SEQ ID NO: 125097 - protein, 7 aa, synthetic construct
IRGIRDS

SEQ ID NO: 125098 - protein, 7 aa, synthetic construct
IRGISNH

SEQ ID NO: 125099 - protein, 7 aa, synthetic construct
IRGKVEY

SEQ ID NO: 125100 - protein, 7 aa, synthetic construct
IRGLAQN

SEQ ID NO: 125101 - protein, 7 aa, synthetic construct
IRGLLGG

SEQ ID NO: 125102 - protein, 7 aa, synthetic construct
IRGMTQG

SEQ ID NO: 125103 - protein, 7 aa, synthetic construct
IRGMVAG

SEQ ID NO: 125104 - protein, 7 aa, synthetic construct
IRGNDRQ

SEQ ID NO: 125105 - protein, 7 aa, synthetic construct
IRGNPNT

SEQ ID NO: 125106 - protein, 7 aa, synthetic construct
IRGPTGI

SEQ ID NO: 125107 - protein, 7 aa, synthetic construct
IRGPTNM

SEQ ID NO: 125108 - protein, 7 aa, synthetic construct
IRGPVSL

SEQ ID NO: 125109 - protein, 7 aa, synthetic construct
IRGQENK

SEQ ID NO: 125110 - protein, 7 aa, synthetic construct
IRGQEQK

SEQ ID NO: 125111 - protein, 7 aa, synthetic construct
IRGQHNP

SEQ ID NO: 125112 - protein, 7 aa, synthetic construct
IRGQPHV

SEQ ID NO: 125113 - protein, 7 aa, synthetic construct
IRGQSTV

SEQ ID NO: 125114 - protein, 7 aa, synthetic construct
IRGQVGN

SEQ ID NO: 125115 - protein, 7 aa, synthetic construct
IRGRDQV

SEQ ID NO: 125116 - protein, 7 aa, synthetic construct
IRGSHVA

SEQ ID NO: 125117 - protein, 7 aa, synthetic construct
IRGSPPP

SEQ ID NO: 125118 - protein, 7 aa, synthetic construct
IRGSQFG

SEQ ID NO: 125119 - protein, 7 aa, synthetic construct
IRGSSGV

SEQ ID NO: 125120 - protein, 7 aa, synthetic construct
IRGSSLS

SEQ ID NO: 125121 - protein, 7 aa, synthetic construct
IRGTDKH

SEQ ID NO: 125122 - protein, 7 aa, synthetic construct
IRGTDRT

SEQ ID NO: 125123 - protein, 7 aa, synthetic construct
IRGTKDV

SEQ ID NO: 125124 - protein, 7 aa, synthetic construct
IRGTKGE

SEQ ID NO: 125125 - protein, 7 aa, synthetic construct
IRGTNHN

SEQ ID NO: 125126 - protein, 7 aa, synthetic construct
IRGTQNF

SEQ ID NO: 125127 - protein, 7 aa, synthetic construct
IRGTSVS

SEQ ID NO: 125128 - protein, 7 aa, synthetic construct
IRGVKDT

SEQ ID NO: 125129 - protein, 7 aa, synthetic construct
IRGVLQN

SEQ ID NO: 125130 - protein, 7 aa, synthetic construct
IRHAEKT

SEQ ID NO: 125131 - protein, 7 aa, synthetic construct
IRHAVKD

SEQ ID NO: 125132 - protein, 7 aa, synthetic construct
IRHGNAI

SEQ ID NO: 125133 - protein, 7 aa, synthetic construct
IRHGSTN

SEQ ID NO: 125134 - protein, 7 aa, synthetic construct
IRHHDSL

SEQ ID NO: 125135 - protein, 7 aa, synthetic construct
IRHISNG

SEQ ID NO: 125136 - protein, 7 aa, synthetic construct
IRHLASP

SEQ ID NO: 125137 - protein, 7 aa, synthetic construct
IRHNVVS

SEQ ID NO: 125138 - protein, 7 aa, synthetic construct
IRHPATS

SEQ ID NO: 125139 - protein, 7 aa, synthetic construct
IRHPTAA

SEQ ID NO: 125140 - protein, 7 aa, synthetic construct
IRHQNSF

SEQ ID NO: 125141 - protein, 7 aa, synthetic construct
IRHSAGY

SEQ ID NO: 125142 - protein, 7 aa, synthetic construct
IRHSITA

SEQ ID NO: 125143 - protein, 7 aa, synthetic construct
IRHSNSA

SEQ ID NO: 125144 - protein, 7 aa, synthetic construct
IRHTNPT

SEQ ID NO: 125145 - protein, 7 aa, synthetic construct
IRHTSIA

SEQ ID NO: 125146 - protein, 7 aa, synthetic construct
IRHTTVP

SEQ ID NO: 125147 - protein, 7 aa, synthetic construct
IRIHTSG

SEQ ID NO: 125148 - protein, 7 aa, synthetic construct
IRIPTQA

SEQ ID NO: 125149 - protein, 7 aa, synthetic construct
IRIQTKD

SEQ ID NO: 125150 - protein, 7 aa, synthetic construct
IRKAENS

SEQ ID NO: 125151 - protein, 7 aa, synthetic construct
IRKEHYG

SEQ ID NO: 125152 - protein, 7 aa, synthetic construct
IRKELPY

SEQ ID NO: 125153 - protein, 7 aa, synthetic construct
IRKGDAI

SEQ ID NO: 125154 - protein, 7 aa, synthetic construct
IRKGDPF

SEQ ID NO: 125155 - protein, 7 aa, synthetic construct
IRKGEVH

SEQ ID NO: 125156 - protein, 7 aa, synthetic construct
IRKMDSI

SEQ ID NO: 125157 - protein, 7 aa, synthetic construct
IRKNEAN

SEQ ID NO: 125158 - protein, 7 aa, synthetic construct
IRKPDPG

SEQ ID NO: 125159 - protein, 7 aa, synthetic construct
IRKTEIS

SEQ ID NO: 125160 - protein, 7 aa, synthetic construct
IRKVERD

SEQ ID NO: 125161 - protein, 7 aa, synthetic construct
IRKVETQ

SEQ ID NO: 125162 - protein, 7 aa, synthetic construct
IRLKDSL

SEQ ID NO: 125163 - protein, 7 aa, synthetic construct
IRLKPVE

SEQ ID NO: 125164 - protein, 7 aa, synthetic construct
IRLQKET

SEQ ID NO: 125165 - protein, 7 aa, synthetic construct
IRLREQN

SEQ ID NO: 125166 - protein, 7 aa, synthetic construct
IRMAATQ

SEQ ID NO: 125167 - protein, 7 aa, synthetic construct
IRMKGES

SEQ ID NO: 125168 - protein, 7 aa, synthetic construct
IRMKTND

SEQ ID NO: 125169 - protein, 7 aa, synthetic construct
IRMNSDR

SEQ ID NO: 125170 - protein, 7 aa, synthetic construct
IRMPMEK

SEQ ID NO: 125171 - protein, 7 aa, synthetic construct
IRMSLDK

SEQ ID NO: 125172 - protein, 7 aa, synthetic construct
IRMSNVM

SEQ ID NO: 125173 - protein, 7 aa, synthetic construct
IRNADKY

SEQ ID NO: 125174 - protein, 7 aa, synthetic construct
IRNAGPN

SEQ ID NO: 125175 - protein, 7 aa, synthetic construct
IRNAMAS

SEQ ID NO: 125176 - protein, 7 aa, synthetic construct
IRNAPNS

SEQ ID NO: 125177 - protein, 7 aa, synthetic construct
IRNASPI

SEQ ID NO: 125178 - protein, 7 aa, synthetic construct
IRNELKY

SEQ ID NO: 125179 - protein, 7 aa, synthetic construct
IRNERQN

SEQ ID NO: 125180 - protein, 7 aa, synthetic construct
IRNETKF

SEQ ID NO: 125181 - protein, 7 aa, synthetic construct
IRNGGYQ

SEQ ID NO: 125182 - protein, 7 aa, synthetic construct
IRNHDNK

SEQ ID NO: 125183 - protein, 7 aa, synthetic construct
IRNHMGT

SEQ ID NO: 125184 - protein, 7 aa, synthetic construct
IRNHPNI

SEQ ID NO: 125185 - protein, 7 aa, synthetic construct
IRNHTPL

SEQ ID NO: 125186 - protein, 7 aa, synthetic construct
IRNHVIG

SEQ ID NO: 125187 - protein, 7 aa, synthetic construct
IRNIQPS

SEQ ID NO: 125188 - protein, 7 aa, synthetic construct
IRNIVPS

SEQ ID NO: 125189 - protein, 7 aa, synthetic construct
IRNKEMQ

SEQ ID NO: 125190 - protein, 7 aa, synthetic construct
IRNKNME

SEQ ID NO: 125191 - protein, 7 aa, synthetic construct
IRNLHNP

SEQ ID NO: 125192 - protein, 7 aa, synthetic construct
IRNLMGG

SEQ ID NO: 125193 - protein, 7 aa, synthetic construct
IRNLQIA

SEQ ID NO: 125194 - protein, 7 aa, synthetic construct
IRNMPGN

SEQ ID NO: 125195 - protein, 7 aa, synthetic construct
IRNMTPH

SEQ ID NO: 125196 - protein, 7 aa, synthetic construct
IRNNESK

SEQ ID NO: 125197 - protein, 7 aa, synthetic construct
IRNNSHG

SEQ ID NO: 125198 - protein, 7 aa, synthetic construct
IRNQANL

SEQ ID NO: 125199 - protein, 7 aa, synthetic construct
IRNSHVA

SEQ ID NO: 125200 - protein, 7 aa, synthetic construct
IRNTIGQ

SEQ ID NO: 125201 - protein, 7 aa, synthetic construct
IRNTSLI

SEQ ID NO: 125202 - protein, 7 aa, synthetic construct
IRNVDSR

SEQ ID NO: 125203 - protein, 7 aa, synthetic construct
IRNVGNY

SEQ ID NO: 125204 - protein, 7 aa, synthetic construct
IRNVIQA

SEQ ID NO: 125205 - protein, 7 aa, synthetic construct
IRNVKYD

SEQ ID NO: 125206 - protein, 7 aa, synthetic construct
IRNVKYE

SEQ ID NO: 125207 - protein, 7 aa, synthetic construct
IRNVNNI

SEQ ID NO: 125208 - protein, 7 aa, synthetic construct
IRPAAHN

SEQ ID NO: 125209 - protein, 7 aa, synthetic construct
IRPANQY

SEQ ID NO: 125210 - protein, 7 aa, synthetic construct
IRPATAY

SEQ ID NO: 125211 - protein, 7 aa, synthetic construct
IRPAVTL

SEQ ID NO: 125212 - protein, 7 aa, synthetic construct
IRPEKGF

SEQ ID NO: 125213 - protein, 7 aa, synthetic construct
IRPGFEK

SEQ ID NO: 125214 - protein, 7 aa, synthetic construct
IRPGHGH

SEQ ID NO: 125215 - protein, 7 aa, synthetic construct
IRPGINL

SEQ ID NO: 125216 - protein, 7 aa, synthetic construct
IRPGNYS

SEQ ID NO: 125217 - protein, 7 aa, synthetic construct
IRPGSMH

SEQ ID NO: 125218 - protein, 7 aa, synthetic construct
IRPGYSA

SEQ ID NO: 125219 - protein, 7 aa, synthetic construct
IRPISPS

SEQ ID NO: 125220 - protein, 7 aa, synthetic construct
IRPLHQA

SEQ ID NO: 125221 - protein, 7 aa, synthetic construct
IRPMTRD

SEQ ID NO: 125222 - protein, 7 aa, synthetic construct
IRPNPAY

SEQ ID NO: 125223 - protein, 7 aa, synthetic construct
IRPPITT

SEQ ID NO: 125224 - protein, 7 aa, synthetic construct
IRPPSMH

SEQ ID NO: 125225 - protein, 7 aa, synthetic construct
IRPQGHA

SEQ ID NO: 125226 - protein, 7 aa, synthetic construct
IRPQHAN

SEQ ID NO: 125227 - protein, 7 aa, synthetic construct
IRPQMGL

SEQ ID NO: 125228 - protein, 7 aa, synthetic construct
IRPQPLA

SEQ ID NO: 125229 - protein, 7 aa, synthetic construct
IRPQQGL

SEQ ID NO: 125230 - protein, 7 aa, synthetic construct
IRPQVTH

SEQ ID NO: 125231 - protein, 7 aa, synthetic construct
IRPSAGS

SEQ ID NO: 125232 - protein, 7 aa, synthetic construct
IRPSHAI

SEQ ID NO: 125233 - protein, 7 aa, synthetic construct
IRPSIHN

SEQ ID NO: 125234 - protein, 7 aa, synthetic construct
IRPSQHF

SEQ ID NO: 125235 - protein, 7 aa, synthetic construct
IRPTINL

SEQ ID NO: 125236 - protein, 7 aa, synthetic construct
IRPVATM

SEQ ID NO: 125237 - protein, 7 aa, synthetic construct
IRPVVTQ

SEQ ID NO: 125238 - protein, 7 aa, synthetic construct
IRQAKEN

SEQ ID NO: 125239 - protein, 7 aa, synthetic construct
IRQEKLQ

SEQ ID NO: 125240 - protein, 7 aa, synthetic construct
IRQEKTL

SEQ ID NO: 125241 - protein, 7 aa, synthetic construct
IRQERVM

SEQ ID NO: 125242 - protein, 7 aa, synthetic construct
IRQGIMQ

SEQ ID NO: 125243 - protein, 7 aa, synthetic construct
IRQGNTY

SEQ ID NO: 125244 - protein, 7 aa, synthetic construct
IRQHAPA

SEQ ID NO: 125245 - protein, 7 aa, synthetic construct
IRQIPER

SEQ ID NO: 125246 - protein, 7 aa, synthetic construct
IRQIQGG

SEQ ID NO: 125247 - protein, 7 aa, synthetic construct
IRQKDTS

SEQ ID NO: 125248 - protein, 7 aa, synthetic construct
IRQKIEM

SEQ ID NO: 125249 - protein, 7 aa, synthetic construct
IRQKNDP

SEQ ID NO: 125250 - protein, 7 aa, synthetic construct
IRQNHYA

SEQ ID NO: 125251 - protein, 7 aa, synthetic construct
IRQNYNM

SEQ ID NO: 125252 - protein, 7 aa, synthetic construct
IRQPHSQ

SEQ ID NO: 125253 - protein, 7 aa, synthetic construct
IRQPNAL

SEQ ID NO: 125254 - protein, 7 aa, synthetic construct
IRQQNNY

SEQ ID NO: 125255 - protein, 7 aa, synthetic construct
IRQQPVT

SEQ ID NO: 125256 - protein, 7 aa, synthetic construct
IRQRDNE

SEQ ID NO: 125257 - protein, 7 aa, synthetic construct
IRQRDQG

SEQ ID NO: 125258 - protein, 7 aa, synthetic construct
IRQRVDP

SEQ ID NO: 125259 - protein, 7 aa, synthetic construct
IRQSEIR

SEQ ID NO: 125260 - protein, 7 aa, synthetic construct
IRQSMGL

SEQ ID NO: 125261 - protein, 7 aa, synthetic construct
IRQSPVH

SEQ ID NO: 125262 - protein, 7 aa, synthetic construct
IRQTERA

SEQ ID NO: 125263 - protein, 7 aa, synthetic construct
IRQTERN

SEQ ID NO: 125264 - protein, 7 aa, synthetic construct
IRQTMNT

SEQ ID NO: 125265 - protein, 7 aa, synthetic construct
IRQTSER

SEQ ID NO: 125266 - protein, 7 aa, synthetic construct
IRQTSTQ

SEQ ID NO: 125267 - protein, 7 aa, synthetic construct
IRQVDIK

SEQ ID NO: 125268 - protein, 7 aa, synthetic construct
IRQVTPM

SEQ ID NO: 125269 - protein, 7 aa, synthetic construct
IRRDGTG

SEQ ID NO: 125270 - protein, 7 aa, synthetic construct
IRRDTNS

SEQ ID NO: 125271 - protein, 7 aa, synthetic construct
IRREMPN

SEQ ID NO: 125272 - protein, 7 aa, synthetic construct
IRRESAP

SEQ ID NO: 125273 - protein, 7 aa, synthetic construct
IRRTESP

SEQ ID NO: 125274 - protein, 7 aa, synthetic construct
IRSELMI

SEQ ID NO: 125275 - protein, 7 aa, synthetic construct
IRSEQKQ

SEQ ID NO: 125276 - protein, 7 aa, synthetic construct
IRSGLKD

SEQ ID NO: 125277 - protein, 7 aa, synthetic construct
IRSGPPV

SEQ ID NO: 125278 - protein, 7 aa, synthetic construct
IRSHGQI

SEQ ID NO: 125279 - protein, 7 aa, synthetic construct
IRSHPQA

SEQ ID NO: 125280 - protein, 7 aa, synthetic construct
IRSIAGP

SEQ ID NO: 125281 - protein, 7 aa, synthetic construct
IRSKAEL

SEQ ID NO: 125282 - protein, 7 aa, synthetic construct
IRSKMQE

SEQ ID NO: 125283 - protein, 7 aa, synthetic construct
IRSKMTD

SEQ ID NO: 125284 - protein, 7 aa, synthetic construct
IRSMSKD

SEQ ID NO: 125285 - protein, 7 aa, synthetic construct
IRSMSTS

SEQ ID NO: 125286 - protein, 7 aa, synthetic construct
IRSNGNH

SEQ ID NO: 125287 - protein, 7 aa, synthetic construct
IRSQDKM

SEQ ID NO: 125288 - protein, 7 aa, synthetic construct
IRSQDQK

SEQ ID NO: 125289 - protein, 7 aa, synthetic construct
IRSQTMT

SEQ ID NO: 125290 - protein, 7 aa, synthetic construct
IRSSAMH

SEQ ID NO: 125291 - protein, 7 aa, synthetic construct
IRSSEYK

SEQ ID NO: 125292 - protein, 7 aa, synthetic construct
IRSTKTE

SEQ ID NO: 125293 - protein, 7 aa, synthetic construct
IRSTYDK

SEQ ID NO: 125294 - protein, 7 aa, synthetic construct
IRTAEAR

SEQ ID NO: 125295 - protein, 7 aa, synthetic construct
IRTDNTR

SEQ ID NO: 125296 - protein, 7 aa, synthetic construct
IRTDREK

SEQ ID NO: 125297 - protein, 7 aa, synthetic construct
IRTDRSV

SEQ ID NO: 125298 - protein, 7 aa, synthetic construct
IRTETRN

SEQ ID NO: 125299 - protein, 7 aa, synthetic construct
IRTFSKE

SEQ ID NO: 125300 - protein, 7 aa, synthetic construct
IRTHATA

SEQ ID NO: 125301 - protein, 7 aa, synthetic construct
IRTHQAP

SEQ ID NO: 125302 - protein, 7 aa, synthetic construct
IRTHQPV

SEQ ID NO: 125303 - protein, 7 aa, synthetic construct
IRTHTAA

SEQ ID NO: 125304 - protein, 7 aa, synthetic construct
IRTKDSV

SEQ ID NO: 125305 - protein, 7 aa, synthetic construct
IRTMERA

SEQ ID NO: 125306 - protein, 7 aa, synthetic construct
IRTNKDT

SEQ ID NO: 125307 - protein, 7 aa, synthetic construct
IRTPESR

SEQ ID NO: 125308 - protein, 7 aa, synthetic construct
IRTQKVD

SEQ ID NO: 125309 - protein, 7 aa, synthetic construct
IRTQRDM

SEQ ID NO: 125310 - protein, 7 aa, synthetic construct
IRTSDLR

SEQ ID NO: 125311 - protein, 7 aa, synthetic construct
IRTSDSR

SEQ ID NO: 125312 - protein, 7 aa, synthetic construct
IRTSEAK

SEQ ID NO: 125313 - protein, 7 aa, synthetic construct
IRTSIQQ

SEQ ID NO: 125314 - protein, 7 aa, synthetic construct
IRTTHSQ

SEQ ID NO: 125315 - protein, 7 aa, synthetic construct
IRTVDKS

SEQ ID NO: 125316 - protein, 7 aa, synthetic construct
IRVAENR

SEQ ID NO: 125317 - protein, 7 aa, synthetic construct
IRVDKTW

SEQ ID NO: 125318 - protein, 7 aa, synthetic construct
IRVHAPA

SEQ ID NO: 125319 - protein, 7 aa, synthetic construct
IRVHSVA

SEQ ID NO: 125320 - protein, 7 aa, synthetic construct
IRVHTKD

SEQ ID NO: 125321 - protein, 7 aa, synthetic construct
IRVKEFA

SEQ ID NO: 125322 - protein, 7 aa, synthetic construct
IRVKMDS

SEQ ID NO: 125323 - protein, 7 aa, synthetic construct
IRVPSIP

SEQ ID NO: 125324 - protein, 7 aa, synthetic construct
IRVPTSV

SEQ ID NO: 125325 - protein, 7 aa, synthetic construct
IRWKDDT

SEQ ID NO: 125326 - protein, 7 aa, synthetic construct
ISAHYLK

SEQ ID NO: 125327 - protein, 7 aa, synthetic construct
ISAIHRP

SEQ ID NO: 125328 - protein, 7 aa, synthetic construct
ISANWQK

SEQ ID NO: 125329 - protein, 7 aa, synthetic construct
ISARFPI

SEQ ID NO: 125330 - protein, 7 aa, synthetic construct
ISARPFA

SEQ ID NO: 125331 - protein, 7 aa, synthetic construct
ISARQKE

SEQ ID NO: 125332 - protein, 7 aa, synthetic construct
ISARTNF

SEQ ID NO: 125333 - protein, 7 aa, synthetic construct
ISATHSR

SEQ ID NO: 125334 - protein, 7 aa, synthetic construct
ISDARRS

SEQ ID NO: 125335 - protein, 7 aa, synthetic construct
ISEIRRG

SEQ ID NO: 125336 - protein, 7 aa, synthetic construct
ISEKPRS

SEQ ID NO: 125337 - protein, 7 aa, synthetic construct
ISEKRYV

SEQ ID NO: 125338 - protein, 7 aa, synthetic construct
ISERIRG

SEQ ID NO: 125339 - protein, 7 aa, synthetic construct
ISGAPSR

SEQ ID NO: 125340 - protein, 7 aa, synthetic construct
ISGFMNK

SEQ ID NO: 125341 - protein, 7 aa, synthetic construct
ISGIPRS

SEQ ID NO: 125342 - protein, 7 aa, synthetic construct
ISGKEGR

SEQ ID NO: 125343 - protein, 7 aa, synthetic construct
ISGKLYS

SEQ ID NO: 125344 - protein, 7 aa, synthetic construct
ISGKSVF

SEQ ID NO: 125345 - protein, 7 aa, synthetic construct
ISGMHKN

SEQ ID NO: 125346 - protein, 7 aa, synthetic construct
ISGRGPY

SEQ ID NO: 125347 - protein, 7 aa, synthetic construct
ISGRHTS

SEQ ID NO: 125348 - protein, 7 aa, synthetic construct
ISGSAFR

SEQ ID NO: 125349 - protein, 7 aa, synthetic construct
ISGSIRQ

SEQ ID NO: 125350 - protein, 7 aa, synthetic construct
ISGYTGK

SEQ ID NO: 125351 - protein, 7 aa, synthetic construct
ISHAKVQ

SEQ ID NO: 125352 - protein, 7 aa, synthetic construct
ISHDFKF

SEQ ID NO: 125353 - protein, 7 aa, synthetic construct
ISHIKSM

SEQ ID NO: 125354 - protein, 7 aa, synthetic construct
ISHKGVL

SEQ ID NO: 125355 - protein, 7 aa, synthetic construct
ISHKQFV

SEQ ID NO: 125356 - protein, 7 aa, synthetic construct
ISHLPNR

SEQ ID NO: 125357 - protein, 7 aa, synthetic construct
ISHMNKG

SEQ ID NO: 125358 - protein, 7 aa, synthetic construct
ISHMTAK

SEQ ID NO: 125359 - protein, 7 aa, synthetic construct
ISHQKML

SEQ ID NO: 125360 - protein, 7 aa, synthetic construct
ISHQPKM

SEQ ID NO: 125361 - protein, 7 aa, synthetic construct
ISHRPIP

SEQ ID NO: 125362 - protein, 7 aa, synthetic construct
ISHSQGK

SEQ ID NO: 125363 - protein, 7 aa, synthetic construct
ISHTPSR

SEQ ID NO: 125364 - protein, 7 aa, synthetic construct
ISKFPDR

SEQ ID NO: 125365 - protein, 7 aa, synthetic construct
ISKGYPL

SEQ ID NO: 125366 - protein, 7 aa, synthetic construct
ISKHHMP

SEQ ID NO: 125367 - protein, 7 aa, synthetic construct
ISKHSDR

SEQ ID NO: 125368 - protein, 7 aa, synthetic construct
ISKLPHQ

SEQ ID NO: 125369 - protein, 7 aa, synthetic construct
ISKNYMA

SEQ ID NO: 125370 - protein, 7 aa, synthetic construct
ISKPNFI

SEQ ID NO: 125371 - protein, 7 aa, synthetic construct
ISKPYRD

SEQ ID NO: 125372 - protein, 7 aa, synthetic construct
ISKQIGY

SEQ ID NO: 125373 - protein, 7 aa, synthetic construct
ISKQRFE

SEQ ID NO: 125374 - protein, 7 aa, synthetic construct
ISKQWTA

SEQ ID NO: 125375 - protein, 7 aa, synthetic construct
ISKSYPL

SEQ ID NO: 125376 - protein, 7 aa, synthetic construct
ISKVGGY

SEQ ID NO: 125377 - protein, 7 aa, synthetic construct
ISKYKVD

SEQ ID NO: 125378 - protein, 7 aa, synthetic construct
ISKYNIV

SEQ ID NO: 125379 - protein, 7 aa, synthetic construct
ISKYQER

SEQ ID NO: 125380 - protein, 7 aa, synthetic construct
ISKYTHS

SEQ ID NO: 125381 - protein, 7 aa, synthetic construct
ISKYTLA

SEQ ID NO: 125382 - protein, 7 aa, synthetic construct
ISKYTNV

SEQ ID NO: 125383 - protein, 7 aa, synthetic construct
ISMGYKA

SEQ ID NO: 125384 - protein, 7 aa, synthetic construct
ISMKNSF

SEQ ID NO: 125385 - protein, 7 aa, synthetic construct
ISMKSHM

SEQ ID NO: 125386 - protein, 7 aa, synthetic construct
ISNDVRR

SEQ ID NO: 125387 - protein, 7 aa, synthetic construct
ISNFMPK

SEQ ID NO: 125388 - protein, 7 aa, synthetic construct
ISNHNAK

SEQ ID NO: 125389 - protein, 7 aa, synthetic construct
ISNIIRP

SEQ ID NO: 125390 - protein, 7 aa, synthetic construct
ISNIYAK

SEQ ID NO: 125391 - protein, 7 aa, synthetic construct
ISNQAHK

SEQ ID NO: 125392 - protein, 7 aa, synthetic construct
ISNRIVT

SEQ ID NO: 125393 - protein, 7 aa, synthetic construct
ISPAAHR

SEQ ID NO: 125394 - protein, 7 aa, synthetic construct
ISPRGSH

SEQ ID NO: 125395 - protein, 7 aa, synthetic construct
ISQDRNR

SEQ ID NO: 125396 - protein, 7 aa, synthetic construct
ISQKHFS

SEQ ID NO: 125397 - protein, 7 aa, synthetic construct
ISQNVAR

SEQ ID NO: 125398 - protein, 7 aa, synthetic construct
ISQRSFS

SEQ ID NO: 125399 - protein, 7 aa, synthetic construct
ISQRSRE

SEQ ID NO: 125400 - protein, 7 aa, synthetic construct
ISQYNGK

SEQ ID NO: 125401 - protein, 7 aa, synthetic construct
ISRAAVV

SEQ ID NO: 125402 - protein, 7 aa, synthetic construct
ISRAMMN

SEQ ID NO: 125403 - protein, 7 aa, synthetic construct
ISRDKRE

SEQ ID NO: 125404 - protein, 7 aa, synthetic construct
ISRDSMK

SEQ ID NO: 125405 - protein, 7 aa, synthetic construct
ISRGITG

SEQ ID NO: 125406 - protein, 7 aa, synthetic construct
ISRGNEK

SEQ ID NO: 125407 - protein, 7 aa, synthetic construct
ISRGQRE

SEQ ID NO: 125408 - protein, 7 aa, synthetic construct
ISRGVIN

SEQ ID NO: 125409 - protein, 7 aa, synthetic construct
ISRIHAA

SEQ ID NO: 125410 - protein, 7 aa, synthetic construct
ISRIQPA

SEQ ID NO: 125411 - protein, 7 aa, synthetic construct
ISRISHA

SEQ ID NO: 125412 - protein, 7 aa, synthetic construct
ISRKALE

SEQ ID NO: 125413 - protein, 7 aa, synthetic construct
ISRLMPS

SEQ ID NO: 125414 - protein, 7 aa, synthetic construct
ISRNHPY

SEQ ID NO: 125415 - protein, 7 aa, synthetic construct
ISRNLHP

SEQ ID NO: 125416 - protein, 7 aa, synthetic construct
ISRNMQY

SEQ ID NO: 125417 - protein, 7 aa, synthetic construct
ISRNSPV

SEQ ID NO: 125418 - protein, 7 aa, synthetic construct
ISRPIQT

SEQ ID NO: 125419 - protein, 7 aa, synthetic construct
ISRPSAN

SEQ ID NO: 125420 - protein, 7 aa, synthetic construct
ISRPSPQ

SEQ ID NO: 125421 - protein, 7 aa, synthetic construct
ISRQGFA

SEQ ID NO: 125422 - protein, 7 aa, synthetic construct
ISRQIIA

SEQ ID NO: 125423 - protein, 7 aa, synthetic construct
ISRQTGA

SEQ ID NO: 125424 - protein, 7 aa, synthetic construct
ISRSLSQ

SEQ ID NO: 125425 - protein, 7 aa, synthetic construct
ISRTSSA

SEQ ID NO: 125426 - protein, 7 aa, synthetic construct
ISRTVDR

SEQ ID NO: 125427 - protein, 7 aa, synthetic construct
ISSARHT

SEQ ID NO: 125428 - protein, 7 aa, synthetic construct
ISSIQRQ

SEQ ID NO: 125429 - protein, 7 aa, synthetic construct
ISSKGYG

SEQ ID NO: 125430 - protein, 7 aa, synthetic construct
ISSKMYG

SEQ ID NO: 125431 - protein, 7 aa, synthetic construct
ISSKPRD

SEQ ID NO: 125432 - protein, 7 aa, synthetic construct
ISSRIVQ

SEQ ID NO: 125433 - protein, 7 aa, synthetic construct
ISSRTHG

SEQ ID NO: 125434 - protein, 7 aa, synthetic construct
ISSSHRM

SEQ ID NO: 125435 - protein, 7 aa, synthetic construct
ISSYLKG

SEQ ID NO: 125436 - protein, 7 aa, synthetic construct
ISTGYPR

SEQ ID NO: 125437 - protein, 7 aa, synthetic construct
ISTHGNR

SEQ ID NO: 125438 - protein, 7 aa, synthetic construct
ISTHRQI

SEQ ID NO: 125439 - protein, 7 aa, synthetic construct
ISTNHRQ

SEQ ID NO: 125440 - protein, 7 aa, synthetic construct
ISTRHAQ

SEQ ID NO: 125441 - protein, 7 aa, synthetic construct
ISTRQYP

SEQ ID NO: 125442 - protein, 7 aa, synthetic construct
ITAGRTY

SEQ ID NO: 125443 - protein, 7 aa, synthetic construct
ITAHRPV

SEQ ID NO: 125444 - protein, 7 aa, synthetic construct
ITAKRYE

SEQ ID NO: 125445 - protein, 7 aa, synthetic construct
ITANPRN

SEQ ID NO: 125446 - protein, 7 aa, synthetic construct
ITARHLG

SEQ ID NO: 125447 - protein, 7 aa, synthetic construct
ITARNKE

SEQ ID NO: 125448 - protein, 7 aa, synthetic construct
ITASKHY

SEQ ID NO: 125449 - protein, 7 aa, synthetic construct
ITAVRMG

SEQ ID NO: 125450 - protein, 7 aa, synthetic construct
ITDINRR

SEQ ID NO: 125451 - protein, 7 aa, synthetic construct
ITDKMRY

SEQ ID NO: 125452 - protein, 7 aa, synthetic construct
ITDRPNK

SEQ ID NO: 125453 - protein, 7 aa, synthetic construct
ITELRRT

SEQ ID NO: 125454 - protein, 7 aa, synthetic construct
ITERPKS

SEQ ID NO: 125455 - protein, 7 aa, synthetic construct
ITERQRS

SEQ ID NO: 125456 - protein, 7 aa, synthetic construct
ITGARYG

SEQ ID NO: 125457 - protein, 7 aa, synthetic construct
ITGDQRR

SEQ ID NO: 125458 - protein, 7 aa, synthetic construct
ITGFKHS

SEQ ID NO: 125459 - protein, 7 aa, synthetic construct
ITGFSKN

SEQ ID NO: 125460 - protein, 7 aa, synthetic construct
ITGGYKG

SEQ ID NO: 125461 - protein, 7 aa, synthetic construct
ITGHFKQ

SEQ ID NO: 125462 - protein, 7 aa, synthetic construct
ITGHLRN

SEQ ID NO: 125463 - protein, 7 aa, synthetic construct
ITGHMKS

SEQ ID NO: 125464 - protein, 7 aa, synthetic construct
ITGISGR

SEQ ID NO: 125465 - protein, 7 aa, synthetic construct
ITGKHDR

SEQ ID NO: 125466 - protein, 7 aa, synthetic construct
ITGKPDR

SEQ ID NO: 125467 - protein, 7 aa, synthetic construct
ITGKPVY

SEQ ID NO: 125468 - protein, 7 aa, synthetic construct
ITGPAHK

SEQ ID NO: 125469 - protein, 7 aa, synthetic construct
ITGPHRN

SEQ ID NO: 125470 - protein, 7 aa, synthetic construct
ITGPYKM

SEQ ID NO: 125471 - protein, 7 aa, synthetic construct
ITGRLGM

SEQ ID NO: 125472 - protein, 7 aa, synthetic construct
ITGRMNM

SEQ ID NO: 125473 - protein, 7 aa, synthetic construct
ITGSFKS

SEQ ID NO: 125474 - protein, 7 aa, synthetic construct
ITHGSKL

SEQ ID NO: 125475 - protein, 7 aa, synthetic construct
ITHLSKP

SEQ ID NO: 125476 - protein, 7 aa, synthetic construct
ITHMRNP

SEQ ID NO: 125477 - protein, 7 aa, synthetic construct
ITHQIQK

SEQ ID NO: 125478 - protein, 7 aa, synthetic construct
ITHRVSV

SEQ ID NO: 125479 - protein, 7 aa, synthetic construct
ITHTAGR

SEQ ID NO: 125480 - protein, 7 aa, synthetic construct
ITKAGIF

SEQ ID NO: 125481 - protein, 7 aa, synthetic construct
ITKDHRQ

SEQ ID NO: 125482 - protein, 7 aa, synthetic construct
ITKDKFY

SEQ ID NO: 125483 - protein, 7 aa, synthetic construct
ITKFLKD

SEQ ID NO: 125484 - protein, 7 aa, synthetic construct
ITKGAYI

SEQ ID NO: 125485 - protein, 7 aa, synthetic construct
ITKGYTQ

SEQ ID NO: 125486 - protein, 7 aa, synthetic construct
ITKHAQF

SEQ ID NO: 125487 - protein, 7 aa, synthetic construct
ITKIYSA

SEQ ID NO: 125488 - protein, 7 aa, synthetic construct
ITKMENK

SEQ ID NO: 125489 - protein, 7 aa, synthetic construct
ITKNQYS

SEQ ID NO: 125490 - protein, 7 aa, synthetic construct
ITKPHSF

SEQ ID NO: 125491 - protein, 7 aa, synthetic construct
ITKPNFM

SEQ ID NO: 125492 - protein, 7 aa, synthetic construct
ITKPSAW

SEQ ID NO: 125493 - protein, 7 aa, synthetic construct
ITKYHAP

SEQ ID NO: 125494 - protein, 7 aa, synthetic construct
ITKYINP

SEQ ID NO: 125495 - protein, 7 aa, synthetic construct
ITKYTSV

SEQ ID NO: 125496 - protein, 7 aa, synthetic construct
ITLGKYS

SEQ ID NO: 125497 - protein, 7 aa, synthetic construct
ITMKHVS

SEQ ID NO: 125498 - protein, 7 aa, synthetic construct
ITNDRRI

SEQ ID NO: 125499 - protein, 7 aa, synthetic construct
ITNFAKN

SEQ ID NO: 125500 - protein, 7 aa, synthetic construct
ITNHIRQ

SEQ ID NO: 125501 - protein, 7 aa, synthetic construct
ITNKHYG

SEQ ID NO: 125502 - protein, 7 aa, synthetic construct
ITNPRGN

SEQ ID NO: 125503 - protein, 7 aa, synthetic construct
ITNRDSR

SEQ ID NO: 125504 - protein, 7 aa, synthetic construct
ITNSIRN

SEQ ID NO: 125505 - protein, 7 aa, synthetic construct
ITPAAKW

SEQ ID NO: 125506 - protein, 7 aa, synthetic construct
ITPGRAF

SEQ ID NO: 125507 - protein, 7 aa, synthetic construct
ITPGVRG

SEQ ID NO: 125508 - protein, 7 aa, synthetic construct
ITPHHRV

SEQ ID NO: 125509 - protein, 7 aa, synthetic construct
ITPHVRP

SEQ ID NO: 125510 - protein, 7 aa, synthetic construct
ITPMTRN

SEQ ID NO: 125511 - protein, 7 aa, synthetic construct
ITPNRVY

SEQ ID NO: 125512 - protein, 7 aa, synthetic construct
ITPPHGR

SEQ ID NO: 125513 - protein, 7 aa, synthetic construct
ITPRGSH

SEQ ID NO: 125514 - protein, 7 aa, synthetic construct
ITPRHTS

SEQ ID NO: 125515 - protein, 7 aa, synthetic construct
ITPTGYR

SEQ ID NO: 125516 - protein, 7 aa, synthetic construct
ITPYMKA

SEQ ID NO: 125517 - protein, 7 aa, synthetic construct
ITQGAGR

SEQ ID NO: 125518 - protein, 7 aa, synthetic construct
ITQGYPR

SEQ ID NO: 125519 - protein, 7 aa, synthetic construct
ITQPRHT

SEQ ID NO: 125520 - protein, 7 aa, synthetic construct
ITQRHMS

SEQ ID NO: 125521 - protein, 7 aa, synthetic construct
ITQTKNW

SEQ ID NO: 125522 - protein, 7 aa, synthetic construct
ITRAHQA

SEQ ID NO: 125523 - protein, 7 aa, synthetic construct
ITRANLG

SEQ ID NO: 125524 - protein, 7 aa, synthetic construct
ITRAPMQ

SEQ ID NO: 125525 - protein, 7 aa, synthetic construct
ITRDPPK

SEQ ID NO: 125526 - protein, 7 aa, synthetic construct
ITRDSKG

SEQ ID NO: 125527 - protein, 7 aa, synthetic construct
ITRDSQR

SEQ ID NO: 125528 - protein, 7 aa, synthetic construct
ITREARM

SEQ ID NO: 125529 - protein, 7 aa, synthetic construct
ITREKYV

SEQ ID NO: 125530 - protein, 7 aa, synthetic construct
ITRELAK

SEQ ID NO: 125531 - protein, 7 aa, synthetic construct
ITREMAK

SEQ ID NO: 125532 - protein, 7 aa, synthetic construct
ITRERGN

SEQ ID NO: 125533 - protein, 7 aa, synthetic construct
ITRGAAQ

SEQ ID NO: 125534 - protein, 7 aa, synthetic construct
ITRGSAN

SEQ ID NO: 125535 - protein, 7 aa, synthetic construct
ITRITGG

SEQ ID NO: 125536 - protein, 7 aa, synthetic construct
ITRNAGN

SEQ ID NO: 125537 - protein, 7 aa, synthetic construct
ITRNPAS

SEQ ID NO: 125538 - protein, 7 aa, synthetic construct
ITRNVIN

SEQ ID NO: 125539 - protein, 7 aa, synthetic construct
ITRNVSQ

SEQ ID NO: 125540 - protein, 7 aa, synthetic construct
ITRPAYP

SEQ ID NO: 125541 - protein, 7 aa, synthetic construct
ITRPTHV

SEQ ID NO: 125542 - protein, 7 aa, synthetic construct
ITRQQVG

SEQ ID NO: 125543 - protein, 7 aa, synthetic construct
ITRQSIG

SEQ ID NO: 125544 - protein, 7 aa, synthetic construct
ITRQSQN

SEQ ID NO: 125545 - protein, 7 aa, synthetic construct
ITRQVIP

SEQ ID NO: 125546 - protein, 7 aa, synthetic construct
ITRSITA

SEQ ID NO: 125547 - protein, 7 aa, synthetic construct
ITRVSVA

SEQ ID NO: 125548 - protein, 7 aa, synthetic construct
ITSKPMF

SEQ ID NO: 125549 - protein, 7 aa, synthetic construct
ITSYTKS

SEQ ID NO: 125550 - protein, 7 aa, synthetic construct
ITTKPHF

SEQ ID NO: 125551 - protein, 7 aa, synthetic construct
ITTRAAQ

SEQ ID NO: 125552 - protein, 7 aa, synthetic construct
ITTRGTQ

SEQ ID NO: 125553 - protein, 7 aa, synthetic construct
ITTYHKG

SEQ ID NO: 125554 - protein, 7 aa, synthetic construct
ITVDARR

SEQ ID NO: 125555 - protein, 7 aa, synthetic construct
ITVHQKM

SEQ ID NO: 125556 - protein, 7 aa, synthetic construct
ITYSTKN

SEQ ID NO: 125557 - protein, 7 aa, synthetic construct
IVARASN

SEQ ID NO: 125558 - protein, 7 aa, synthetic construct
IVATRQH

SEQ ID NO: 125559 - protein, 7 aa, synthetic construct
IVDARRM

SEQ ID NO: 125560 - protein, 7 aa, synthetic construct
IVDHKRS

SEQ ID NO: 125561 - protein, 7 aa, synthetic construct
IVDRAYK

SEQ ID NO: 125562 - protein, 7 aa, synthetic construct
IVDRSRQ

SEQ ID NO: 125563 - protein, 7 aa, synthetic construct
IVDSNHR

SEQ ID NO: 125564 - protein, 7 aa, synthetic construct
IVEGRMK

SEQ ID NO: 125565 - protein, 7 aa, synthetic construct
IVETRRT

SEQ ID NO: 125566 - protein, 7 aa, synthetic construct
IVETRRV

SEQ ID NO: 125567 - protein, 7 aa, synthetic construct
IVGAHLR

SEQ ID NO: 125568 - protein, 7 aa, synthetic construct
IVGFMQK

SEQ ID NO: 125569 - protein, 7 aa, synthetic construct
IVGHASK

SEQ ID NO: 125570 - protein, 7 aa, synthetic construct
IVGHNQR

SEQ ID NO: 125571 - protein, 7 aa, synthetic construct
IVGHPVM

SEQ ID NO: 125572 - protein, 7 aa, synthetic construct
IVGHTKI

SEQ ID NO: 125573 - protein, 7 aa, synthetic construct
IVGPRHG

SEQ ID NO: 125574 - protein, 7 aa, synthetic construct
IVHASSK

SEQ ID NO: 125575 - protein, 7 aa, synthetic construct
IVHKDMR

SEQ ID NO: 125576 - protein, 7 aa, synthetic construct
IVHKSQL

SEQ ID NO: 125577 - protein, 7 aa, synthetic construct
IVHRATG

SEQ ID NO: 125578 - protein, 7 aa, synthetic construct
IVKDYPR

SEQ ID NO: 125579 - protein, 7 aa, synthetic construct
IVKFAGA

SEQ ID NO: 125580 - protein, 7 aa, synthetic construct
IVKGAYP

SEQ ID NO: 125581 - protein, 7 aa, synthetic construct
IVKGLYA

SEQ ID NO: 125582 - protein, 7 aa, synthetic construct
IVKGMMH

SEQ ID NO: 125583 - protein, 7 aa, synthetic construct
IVKGSYN

SEQ ID NO: 125584 - protein, 7 aa, synthetic construct
IVKGYNM

SEQ ID NO: 125585 - protein, 7 aa, synthetic construct
IVKKDDR

SEQ ID NO: 125586 - protein, 7 aa, synthetic construct
IVKNQYV

SEQ ID NO: 125587 - protein, 7 aa, synthetic construct
IVKQTAY

SEQ ID NO: 125588 - protein, 7 aa, synthetic construct
IVMGQRS

SEQ ID NO: 125589 - protein, 7 aa, synthetic construct
IVMNYQE

SEQ ID NO: 125590 - protein, 7 aa, synthetic construct
IVNAHGR

SEQ ID NO: 125591 - protein, 7 aa, synthetic construct
IVNRSGY

SEQ ID NO: 125592 - protein, 7 aa, synthetic construct
IVPGVRG

SEQ ID NO: 125593 - protein, 7 aa, synthetic construct
IVPHPRA

SEQ ID NO: 125594 - protein, 7 aa, synthetic construct
IVPKYSS

SEQ ID NO: 125595 - protein, 7 aa, synthetic construct
IVPQHKL

SEQ ID NO: 125596 - protein, 7 aa, synthetic construct
IVPRMVG

SEQ ID NO: 125597 - protein, 7 aa, synthetic construct
IVPRSNA

SEQ ID NO: 125598 - protein, 7 aa, synthetic construct
IVPRSNL

SEQ ID NO: 125599 - protein, 7 aa, synthetic construct
IVQKKFD

SEQ ID NO: 125600 - protein, 7 aa, synthetic construct
IVRAMRE

SEQ ID NO: 125601 - protein, 7 aa, synthetic construct
IVRAPGS

SEQ ID NO: 125602 - protein, 7 aa, synthetic construct
IVRGSVG

SEQ ID NO: 125603 - protein, 7 aa, synthetic construct
IVRINRD

SEQ ID NO: 125604 - protein, 7 aa, synthetic construct
IVRKEAT

SEQ ID NO: 125605 - protein, 7 aa, synthetic construct
IVRNTAG

SEQ ID NO: 125606 - protein, 7 aa, synthetic construct
IVRQHQG

SEQ ID NO: 125607 - protein, 7 aa, synthetic construct
IVRQMQP

SEQ ID NO: 125608 - protein, 7 aa, synthetic construct
IVRSATG

SEQ ID NO: 125609 - protein, 7 aa, synthetic construct
IVRSEKL

SEQ ID NO: 125610 - protein, 7 aa, synthetic construct
IVRSGTG

SEQ ID NO: 125611 - protein, 7 aa, synthetic construct
IVRSNPQ

SEQ ID NO: 125612 - protein, 7 aa, synthetic construct
IVRTQSH

SEQ ID NO: 125613 - protein, 7 aa, synthetic construct
IVSHTNR

SEQ ID NO: 125614 - protein, 7 aa, synthetic construct
IVSKFRE

SEQ ID NO: 125615 - protein, 7 aa, synthetic construct
IVSMQNR

SEQ ID NO: 125616 - protein, 7 aa, synthetic construct
IVSSNFR

SEQ ID NO: 125617 - protein, 7 aa, synthetic construct
IVTHRMG

SEQ ID NO: 125618 - protein, 7 aa, synthetic construct
IVTHSRG

SEQ ID NO: 125619 - protein, 7 aa, synthetic construct
IVVNARG

SEQ ID NO: 125620 - protein, 7 aa, synthetic construct
IWKDNRS

SEQ ID NO: 125621 - protein, 7 aa, synthetic construct
IYAAHKN

SEQ ID NO: 125622 - protein, 7 aa, synthetic construct
IYAAHKS

SEQ ID NO: 125623 - protein, 7 aa, synthetic construct
IYDNAHR

SEQ ID NO: 125624 - protein, 7 aa, synthetic construct
IYEATKR

SEQ ID NO: 125625 - protein, 7 aa, synthetic construct
IYENAKR

SEQ ID NO: 125626 - protein, 7 aa, synthetic construct
IYGNVKG

SEQ ID NO: 125627 - protein, 7 aa, synthetic construct
IYHKNGY

SEQ ID NO: 125628 - protein, 7 aa, synthetic construct
IYIKGHP

SEQ ID NO: 125629 - protein, 7 aa, synthetic construct
IYKAEAR

SEQ ID NO: 125630 - protein, 7 aa, synthetic construct
IYKAITA

SEQ ID NO: 125631 - protein, 7 aa, synthetic construct
IYKARQE

SEQ ID NO: 125632 - protein, 7 aa, synthetic construct
IYKASAI

SEQ ID NO: 125633 - protein, 7 aa, synthetic construct
IYKAVRD

SEQ ID NO: 125634 - protein, 7 aa, synthetic construct
IYKGAVQ

SEQ ID NO: 125635 - protein, 7 aa, synthetic construct
IYKGQNP

SEQ ID NO: 125636 - protein, 7 aa, synthetic construct
IYKGQVG

SEQ ID NO: 125637 - protein, 7 aa, synthetic construct
IYKGRTE

SEQ ID NO: 125638 - protein, 7 aa, synthetic construct
IYKGSLN

SEQ ID NO: 125639 - protein, 7 aa, synthetic construct
IYKINSS

SEQ ID NO: 125640 - protein, 7 aa, synthetic construct
IYKKESF

SEQ ID NO: 125641 - protein, 7 aa, synthetic construct
IYKKITD

SEQ ID NO: 125642 - protein, 7 aa, synthetic construct
IYKKMDS

SEQ ID NO: 125643 - protein, 7 aa, synthetic construct
IYKMVQG

SEQ ID NO: 125644 - protein, 7 aa, synthetic construct
IYKNMGV

SEQ ID NO: 125645 - protein, 7 aa, synthetic construct
IYKPGTM

SEQ ID NO: 125646 - protein, 7 aa, synthetic construct
IYKPQHG

SEQ ID NO: 125647 - protein, 7 aa, synthetic construct
IYKPSMQ

SEQ ID NO: 125648 - protein, 7 aa, synthetic construct
IYKQIGA

SEQ ID NO: 125649 - protein, 7 aa, synthetic construct
IYKQVPQ

SEQ ID NO: 125650 - protein, 7 aa, synthetic construct
IYKSIPG

SEQ ID NO: 125651 - protein, 7 aa, synthetic construct
IYKSTPG

SEQ ID NO: 125652 - protein, 7 aa, synthetic construct
IYKTIDK

SEQ ID NO: 125653 - protein, 7 aa, synthetic construct
IYKVDRA

SEQ ID NO: 125654 - protein, 7 aa, synthetic construct
IYKVHTS

SEQ ID NO: 125655 - protein, 7 aa, synthetic construct
IYKVQQQ

SEQ ID NO: 125656 - protein, 7 aa, synthetic construct
IYKVTPP

SEQ ID NO: 125657 - protein, 7 aa, synthetic construct
IYNKERS

SEQ ID NO: 125658 - protein, 7 aa, synthetic construct
IYNKTRD

SEQ ID NO: 125659 - protein, 7 aa, synthetic construct
IYNPRDK

SEQ ID NO: 125660 - protein, 7 aa, synthetic construct
IYNVKSV

SEQ ID NO: 125661 - protein, 7 aa, synthetic construct
IYPGAKG

SEQ ID NO: 125662 - protein, 7 aa, synthetic construct
IYPNIKG

SEQ ID NO: 125663 - protein, 7 aa, synthetic construct
IYPNKVV

SEQ ID NO: 125664 - protein, 7 aa, synthetic construct
IYPPKRD

SEQ ID NO: 125665 - protein, 7 aa, synthetic construct
IYQGAKA

SEQ ID NO: 125666 - protein, 7 aa, synthetic construct
IYQGRVS

SEQ ID NO: 125667 - protein, 7 aa, synthetic construct
IYQKLEK

SEQ ID NO: 125668 - protein, 7 aa, synthetic construct
IYQRQPV

SEQ ID NO: 125669 - protein, 7 aa, synthetic construct
IYRAAGN

SEQ ID NO: 125670 - protein, 7 aa, synthetic construct
IYRNQNA

SEQ ID NO: 125671 - protein, 7 aa, synthetic construct
IYRQGPH

SEQ ID NO: 125672 - protein, 7 aa, synthetic construct
IYSGGVK

SEQ ID NO: 125673 - protein, 7 aa, synthetic construct
IYSHKVS

SEQ ID NO: 125674 - protein, 7 aa, synthetic construct
IYSKMQI

SEQ ID NO: 125675 - protein, 7 aa, synthetic construct
IYSTLKN

SEQ ID NO: 125676 - protein, 7 aa, synthetic construct
IYTGNKQ

SEQ ID NO: 125677 - protein, 7 aa, synthetic construct
IYTHRGA

SEQ ID NO: 125678 - protein, 7 aa, synthetic construct
IYTKGSL

SEQ ID NO: 125679 - protein, 7 aa, synthetic construct
IYTKPSQ

SEQ ID NO: 125680 - protein, 7 aa, synthetic construct
IYTNAKA

SEQ ID NO: 125681 - protein, 7 aa, synthetic construct
IYTSSKL

SEQ ID NO: 125682 - protein, 7 aa, synthetic construct
IYTTKGG

SEQ ID NO: 125683 - protein, 7 aa, synthetic construct
KAADKWA

SEQ ID NO: 125684 - protein, 7 aa, synthetic construct
KAAHAQQ

SEQ ID NO: 125685 - protein, 7 aa, synthetic construct
KAAHDRS

SEQ ID NO: 125686 - protein, 7 aa, synthetic construct
KAAHGQQ

SEQ ID NO: 125687 - protein, 7 aa, synthetic construct
KAAHNLI

SEQ ID NO: 125688 - protein, 7 aa, synthetic construct
KAAHNVL

SEQ ID NO: 125689 - protein, 7 aa, synthetic construct
KAAHPAS

SEQ ID NO: 125690 - protein, 7 aa, synthetic construct
KAAMPPN

SEQ ID NO: 125691 - protein, 7 aa, synthetic construct
KAAMSQY

SEQ ID NO: 125692 - protein, 7 aa, synthetic construct
KAANHHI

SEQ ID NO: 125693 - protein, 7 aa, synthetic construct
KAARDQI

SEQ ID NO: 125694 - protein, 7 aa, synthetic construct
KAARFSE

SEQ ID NO: 125695 - protein, 7 aa, synthetic construct
KAASDQR

SEQ ID NO: 125696 - protein, 7 aa, synthetic construct
KAASMGF

SEQ ID NO: 125697 - protein, 7 aa, synthetic construct
KAASTPF

SEQ ID NO: 125698 - protein, 7 aa, synthetic construct
KAATFSH

SEQ ID NO: 125699 - protein, 7 aa, synthetic construct
KAATQDR

SEQ ID NO: 125700 - protein, 7 aa, synthetic construct
KAAYSKE

SEQ ID NO: 125701 - protein, 7 aa, synthetic construct
KADGWKN

SEQ ID NO: 125702 - protein, 7 aa, synthetic construct
KADHMRI

SEQ ID NO: 125703 - protein, 7 aa, synthetic construct
KADKGPW

SEQ ID NO: 125704 - protein, 7 aa, synthetic construct
KADKPFV

SEQ ID NO: 125705 - protein, 7 aa, synthetic construct
KADRHMI

SEQ ID NO: 125706 - protein, 7 aa, synthetic construct
KADRKDM

SEQ ID NO: 125707 - protein, 7 aa, synthetic construct
KADRNAT

SEQ ID NO: 125708 - protein, 7 aa, synthetic construct
KADSHKV

SEQ ID NO: 125709 - protein, 7 aa, synthetic construct
KADTRFI

SEQ ID NO: 125710 - protein, 7 aa, synthetic construct
KADYNSR

SEQ ID NO: 125711 - protein, 7 aa, synthetic construct
KAEARQI

SEQ ID NO: 125712 - protein, 7 aa, synthetic construct
KAEATRN

SEQ ID NO: 125713 - protein, 7 aa, synthetic construct
KAEKNGN

SEQ ID NO: 125714 - protein, 7 aa, synthetic construct
KAEQHSR

SEQ ID NO: 125715 - protein, 7 aa, synthetic construct
KAERQDR

SEQ ID NO: 125716 - protein, 7 aa, synthetic construct
KAERQHQ

SEQ ID NO: 125717 - protein, 7 aa, synthetic construct
KAETALR

SEQ ID NO: 125718 - protein, 7 aa, synthetic construct
KAETHYF

SEQ ID NO: 125719 - protein, 7 aa, synthetic construct
KAETKMY

SEQ ID NO: 125720 - protein, 7 aa, synthetic construct
KAETRAM

SEQ ID NO: 125721 - protein, 7 aa, synthetic construct
KAEVGRS

SEQ ID NO: 125722 - protein, 7 aa, synthetic construct
KAFERQI

SEQ ID NO: 125723 - protein, 7 aa, synthetic construct
KAFGPGA

SEQ ID NO: 125724 - protein, 7 aa, synthetic construct
KAFHAKE

SEQ ID NO: 125725 - protein, 7 aa, synthetic construct
KAFKMQD

SEQ ID NO: 125726 - protein, 7 aa, synthetic construct
KAFNNER

SEQ ID NO: 125727 - protein, 7 aa, synthetic construct
KAFNQGQ

SEQ ID NO: 125728 - protein, 7 aa, synthetic construct
KAFQGGL

SEQ ID NO: 125729 - protein, 7 aa, synthetic construct
KAGERYL

SEQ ID NO: 125730 - protein, 7 aa, synthetic construct
KAGGFLP

SEQ ID NO: 125731 - protein, 7 aa, synthetic construct
KAGHLHP

SEQ ID NO: 125732 - protein, 7 aa, synthetic construct
KAGHPYA

SEQ ID NO: 125733 - protein, 7 aa, synthetic construct
KAGIMQD

SEQ ID NO: 125734 - protein, 7 aa, synthetic construct
KAGKDNW

SEQ ID NO: 125735 - protein, 7 aa, synthetic construct
KAGLERN

SEQ ID NO: 125736 - protein, 7 aa, synthetic construct
KAGLHTI

SEQ ID NO: 125737 - protein, 7 aa, synthetic construct
KAGNMAF

SEQ ID NO: 125738 - protein, 7 aa, synthetic construct
KAGNRDN

SEQ ID NO: 125739 - protein, 7 aa, synthetic construct
KAGPLPI

SEQ ID NO: 125740 - protein, 7 aa, synthetic construct
KAGPMMQ

SEQ ID NO: 125741 - protein, 7 aa, synthetic construct
KAGPQYI

SEQ ID NO: 125742 - protein, 7 aa, synthetic construct
KAGQGDR

SEQ ID NO: 125743 - protein, 7 aa, synthetic construct
KAGRIVD

SEQ ID NO: 125744 - protein, 7 aa, synthetic construct
KAGSGYS

SEQ ID NO: 125745 - protein, 7 aa, synthetic construct
KAHAAIH

SEQ ID NO: 125746 - protein, 7 aa, synthetic construct
KAHAIGT

SEQ ID NO: 125747 - protein, 7 aa, synthetic construct
KAHAMVT

SEQ ID NO: 125748 - protein, 7 aa, synthetic construct
KAHASPT

SEQ ID NO: 125749 - protein, 7 aa, synthetic construct
KAHAVQN

SEQ ID NO: 125750 - protein, 7 aa, synthetic construct
KAHDPKY

SEQ ID NO: 125751 - protein, 7 aa, synthetic construct
KAHDQGR

SEQ ID NO: 125752 - protein, 7 aa, synthetic construct
KAHDSQR

SEQ ID NO: 125753 - protein, 7 aa, synthetic construct
KAHDYKS

SEQ ID NO: 125754 - protein, 7 aa, synthetic construct
KAHELKQ

SEQ ID NO: 125755 - protein, 7 aa, synthetic construct
KAHEYKP

SEQ ID NO: 125756 - protein, 7 aa, synthetic construct
KAHGMGT

SEQ ID NO: 125757 - protein, 7 aa, synthetic construct
KAHGMVT

SEQ ID NO: 125758 - protein, 7 aa, synthetic construct
KAHGQAI

SEQ ID NO: 125759 - protein, 7 aa, synthetic construct
KAHGSIQ

SEQ ID NO: 125760 - protein, 7 aa, synthetic construct
KAHGTPT

SEQ ID NO: 125761 - protein, 7 aa, synthetic construct
KAHGVSQ

SEQ ID NO: 125762 - protein, 7 aa, synthetic construct
KAHHPNA

SEQ ID NO: 125763 - protein, 7 aa, synthetic construct
KAHIAIA

SEQ ID NO: 125764 - protein, 7 aa, synthetic construct
KAHINGH

SEQ ID NO: 125765 - protein, 7 aa, synthetic construct
KAHKTDS

SEQ ID NO: 125766 - protein, 7 aa, synthetic construct
KAHMANT

SEQ ID NO: 125767 - protein, 7 aa, synthetic construct
KAHMPGT

SEQ ID NO: 125768 - protein, 7 aa, synthetic construct
KAHNARD

SEQ ID NO: 125769 - protein, 7 aa, synthetic construct
KAHNAST

SEQ ID NO: 125770 - protein, 7 aa, synthetic construct
KAHNGNY

SEQ ID NO: 125771 - protein, 7 aa, synthetic construct
KAHNIAM

SEQ ID NO: 125772 - protein, 7 aa, synthetic construct
KAHNPNF

SEQ ID NO: 125773 - protein, 7 aa, synthetic construct
KAHNSPQ

SEQ ID NO: 125774 - protein, 7 aa, synthetic construct
KAHNVML

SEQ ID NO: 125775 - protein, 7 aa, synthetic construct
KAHNVNT

SEQ ID NO: 125776 - protein, 7 aa, synthetic construct
KAHPIPA

SEQ ID NO: 125777 - protein, 7 aa, synthetic construct
KAHPNQL

SEQ ID NO: 125778 - protein, 7 aa, synthetic construct
KAHPRGD

SEQ ID NO: 125779 - protein, 7 aa, synthetic construct
KAHPSGM

SEQ ID NO: 125780 - protein, 7 aa, synthetic construct
KAHPTSV

SEQ ID NO: 125781 - protein, 7 aa, synthetic construct
KAHPTYA

SEQ ID NO: 125782 - protein, 7 aa, synthetic construct
KAHPVGT

SEQ ID NO: 125783 - protein, 7 aa, synthetic construct
KAHQDKV

SEQ ID NO: 125784 - protein, 7 aa, synthetic construct
KAHQNSP

SEQ ID NO: 125785 - protein, 7 aa, synthetic construct
KAHQNST

SEQ ID NO: 125786 - protein, 7 aa, synthetic construct
KAHQSIT

SEQ ID NO: 125787 - protein, 7 aa, synthetic construct
KAHQTGF

SEQ ID NO: 125788 - protein, 7 aa, synthetic construct
KAHSIMT

SEQ ID NO: 125789 - protein, 7 aa, synthetic construct
KAHSPTS

SEQ ID NO: 125790 - protein, 7 aa, synthetic construct
KAHSQMT

SEQ ID NO: 125791 - protein, 7 aa, synthetic construct
KAHSQQM

SEQ ID NO: 125792 - protein, 7 aa, synthetic construct
KAHSRPE

SEQ ID NO: 125793 - protein, 7 aa, synthetic construct
KAHSSPQ

SEQ ID NO: 125794 - protein, 7 aa, synthetic construct
KAHTGNM

SEQ ID NO: 125795 - protein, 7 aa, synthetic construct
KAHTGSF

SEQ ID NO: 125796 - protein, 7 aa, synthetic construct
KAHTTGA

SEQ ID NO: 125797 - protein, 7 aa, synthetic construct
KAHVIVQ

SEQ ID NO: 125798 - protein, 7 aa, synthetic construct
KAHVNSI

SEQ ID NO: 125799 - protein, 7 aa, synthetic construct
KAIAREN

SEQ ID NO: 125800 - protein, 7 aa, synthetic construct
KAIATSF

SEQ ID NO: 125801 - protein, 7 aa, synthetic construct
KAIDRQL

SEQ ID NO: 125802 - protein, 7 aa, synthetic construct
KAIHHQS

SEQ ID NO: 125803 - protein, 7 aa, synthetic construct
KAIHSMP

SEQ ID NO: 125804 - protein, 7 aa, synthetic construct
KAIMPGP

SEQ ID NO: 125805 - protein, 7 aa, synthetic construct
KAINIHQ

SEQ ID NO: 125806 - protein, 7 aa, synthetic construct
KAIPHTS

SEQ ID NO: 125807 - protein, 7 aa, synthetic construct
KAIQYAA

SEQ ID NO: 125808 - protein, 7 aa, synthetic construct
KAIRDIT

SEQ ID NO: 125809 - protein, 7 aa, synthetic construct
KAIRMEQ

SEQ ID NO: 125810 - protein, 7 aa, synthetic construct
KAITGYA

SEQ ID NO: 125811 - protein, 7 aa, synthetic construct
KAKDAGL

SEQ ID NO: 125812 - protein, 7 aa, synthetic construct
KAKDFGL

SEQ ID NO: 125813 - protein, 7 aa, synthetic construct
KAKMDLM

SEQ ID NO: 125814 - protein, 7 aa, synthetic construct
KAKNELN

SEQ ID NO: 125815 - protein, 7 aa, synthetic construct
KAKQPNE

SEQ ID NO: 125816 - protein, 7 aa, synthetic construct
KAKSDTL

SEQ ID NO: 125817 - protein, 7 aa, synthetic construct
KAKSEWQ

SEQ ID NO: 125818 - protein, 7 aa, synthetic construct
KAKTQEV

SEQ ID NO: 125819 - protein, 7 aa, synthetic construct
KAKVETW

SEQ ID NO: 125820 - protein, 7 aa, synthetic construct
KAKVPEF

SEQ ID NO: 125821 - protein, 7 aa, synthetic construct
KAKYGPE

SEQ ID NO: 125822 - protein, 7 aa, synthetic construct
KAKYNDV

SEQ ID NO: 125823 - protein, 7 aa, synthetic construct
KALDTTK

SEQ ID NO: 125824 - protein, 7 aa, synthetic construct
KALEFPR

SEQ ID NO: 125825 - protein, 7 aa, synthetic construct
KALERTS

SEQ ID NO: 125826 - protein, 7 aa, synthetic construct
KALGEIR

SEQ ID NO: 125827 - protein, 7 aa, synthetic construct
KALHHNS

SEQ ID NO: 125828 - protein, 7 aa, synthetic construct
KALHPMA

SEQ ID NO: 125829 - protein, 7 aa, synthetic construct
KALIAER

SEQ ID NO: 125830 - protein, 7 aa, synthetic construct
KALREMQ

SEQ ID NO: 125831 - protein, 7 aa, synthetic construct
KALRITE

SEQ ID NO: 125832 - protein, 7 aa, synthetic construct
KALRLPE

SEQ ID NO: 125833 - protein, 7 aa, synthetic construct
KAMAWPD

SEQ ID NO: 125834 - protein, 7 aa, synthetic construct
KAMHNVM

SEQ ID NO: 125835 - protein, 7 aa, synthetic construct
KAMKMYD

SEQ ID NO: 125836 - protein, 7 aa, synthetic construct
KAMLKIA

SEQ ID NO: 125837 - protein, 7 aa, synthetic construct
KAMNHLP

SEQ ID NO: 125838 - protein, 7 aa, synthetic construct
KAMPNYI

SEQ ID NO: 125839 - protein, 7 aa, synthetic construct
KAMPYNG

SEQ ID NO: 125840 - protein, 7 aa, synthetic construct
KAMQGHN

SEQ ID NO: 125841 - protein, 7 aa, synthetic construct
KAMQHTI

SEQ ID NO: 125842 - protein, 7 aa, synthetic construct
KAMRELV

SEQ ID NO: 125843 - protein, 7 aa, synthetic construct
KAMRQTD

SEQ ID NO: 125844 - protein, 7 aa, synthetic construct
KAMRSDT

SEQ ID NO: 125845 - protein, 7 aa, synthetic construct
KAMRTGD

SEQ ID NO: 125846 - protein, 7 aa, synthetic construct
KAMSPIN

SEQ ID NO: 125847 - protein, 7 aa, synthetic construct
KAMTIQM

SEQ ID NO: 125848 - protein, 7 aa, synthetic construct
KANFAKD

SEQ ID NO: 125849 - protein, 7 aa, synthetic construct
KANGYGM

SEQ ID NO: 125850 - protein, 7 aa, synthetic construct
KANHGVP

SEQ ID NO: 125851 - protein, 7 aa, synthetic construct
KANHNIL

SEQ ID NO: 125852 - protein, 7 aa, synthetic construct
KANHSMQ

SEQ ID NO: 125853 - protein, 7 aa, synthetic construct
KANKDFL

SEQ ID NO: 125854 - protein, 7 aa, synthetic construct
KANPQTW

SEQ ID NO: 125855 - protein, 7 aa, synthetic construct
KANQILY

SEQ ID NO: 125856 - protein, 7 aa, synthetic construct
KANREYN

SEQ ID NO: 125857 - protein, 7 aa, synthetic construct
KANRPEL

SEQ ID NO: 125858 - protein, 7 aa, synthetic construct
KANRQDF

SEQ ID NO: 125859 - protein, 7 aa, synthetic construct
KANTDNR

SEQ ID NO: 125860 - protein, 7 aa, synthetic construct
KANTERN

SEQ ID NO: 125861 - protein, 7 aa, synthetic construct
KANVNHH

SEQ ID NO: 125862 - protein, 7 aa, synthetic construct
KANYDKM

SEQ ID NO: 125863 - protein, 7 aa, synthetic construct
KANYEKA

SEQ ID NO: 125864 - protein, 7 aa, synthetic construct
KAPAPMS

SEQ ID NO: 125865 - protein, 7 aa, synthetic construct
KAPEATR

SEQ ID NO: 125866 - protein, 7 aa, synthetic construct
KAPEKFS

SEQ ID NO: 125867 - protein, 7 aa, synthetic construct
KAPHAIY

SEQ ID NO: 125868 - protein, 7 aa, synthetic construct
KAPHDRY

SEQ ID NO: 125869 - protein, 7 aa, synthetic construct
KAPHMVQ

SEQ ID NO: 125870 - protein, 7 aa, synthetic construct
KAPKSWD

SEQ ID NO: 125871 - protein, 7 aa, synthetic construct
KAPMGSF

SEQ ID NO: 125872 - protein, 7 aa, synthetic construct
KAPMQMV

SEQ ID NO: 125873 - protein, 7 aa, synthetic construct
KAPPPHN

SEQ ID NO: 125874 - protein, 7 aa, synthetic construct
KAPPVNI

SEQ ID NO: 125875 - protein, 7 aa, synthetic construct
KAPREYT

SEQ ID NO: 125876 - protein, 7 aa, synthetic construct
KAPSGPF

SEQ ID NO: 125877 - protein, 7 aa, synthetic construct
KAPTSHF

SEQ ID NO: 125878 - protein, 7 aa, synthetic construct
KAPVPMM

SEQ ID NO: 125879 - protein, 7 aa, synthetic construct
KAPYGDR

SEQ ID NO: 125880 - protein, 7 aa, synthetic construct
KAPYTNN

SEQ ID NO: 125881 - protein, 7 aa, synthetic construct
KAQDTRF

SEQ ID NO: 125882 - protein, 7 aa, synthetic construct
KAQGDRS

SEQ ID NO: 125883 - protein, 7 aa, synthetic construct
KAQGHMM

SEQ ID NO: 125884 - protein, 7 aa, synthetic construct
KAQHNFP

SEQ ID NO: 125885 - protein, 7 aa, synthetic construct
KAQHTMI

SEQ ID NO: 125886 - protein, 7 aa, synthetic construct
KAQITRD

SEQ ID NO: 125887 - protein, 7 aa, synthetic construct
KAQLNAF

SEQ ID NO: 125888 - protein, 7 aa, synthetic construct
KAQLNRD

SEQ ID NO: 125889 - protein, 7 aa, synthetic construct
KAQLPGM

SEQ ID NO: 125890 - protein, 7 aa, synthetic construct
KAQLSMH

SEQ ID NO: 125891 - protein, 7 aa, synthetic construct
KAQMNNY

SEQ ID NO: 125892 - protein, 7 aa, synthetic construct
KAQMQHY

SEQ ID NO: 125893 - protein, 7 aa, synthetic construct
KAQMQQY

SEQ ID NO: 125894 - protein, 7 aa, synthetic construct
KAQMSAH

SEQ ID NO: 125895 - protein, 7 aa, synthetic construct
KAQNPMF

SEQ ID NO: 125896 - protein, 7 aa, synthetic construct
KAQNYLP

SEQ ID NO: 125897 - protein, 7 aa, synthetic construct
KAQPHNM

SEQ ID NO: 125898 - protein, 7 aa, synthetic construct
KAQPNPY

SEQ ID NO: 125899 - protein, 7 aa, synthetic construct
KAQQHMQ

SEQ ID NO: 125900 - protein, 7 aa, synthetic construct
KAQRDMI

SEQ ID NO: 125901 - protein, 7 aa, synthetic construct
KAQRESF

SEQ ID NO: 125902 - protein, 7 aa, synthetic construct
KAQRGDA

SEQ ID NO: 125903 - protein, 7 aa, synthetic construct
KAQRLAE

SEQ ID NO: 125904 - protein, 7 aa, synthetic construct
KAQTDRM

SEQ ID NO: 125905 - protein, 7 aa, synthetic construct
KAQTMPY

SEQ ID NO: 125906 - protein, 7 aa, synthetic construct
KAQYDGK

SEQ ID NO: 125907 - protein, 7 aa, synthetic construct
KAQYENR

SEQ ID NO: 125908 - protein, 7 aa, synthetic construct
KARADTQ

SEQ ID NO: 125909 - protein, 7 aa, synthetic construct
KARDLNV

SEQ ID NO: 125910 - protein, 7 aa, synthetic construct
KARDNSI

SEQ ID NO: 125911 - protein, 7 aa, synthetic construct
KARDQIF

SEQ ID NO: 125912 - protein, 7 aa, synthetic construct
KARDQPY

SEQ ID NO: 125913 - protein, 7 aa, synthetic construct
KARDTIQ

SEQ ID NO: 125914 - protein, 7 aa, synthetic construct
KARDTLT

SEQ ID NO: 125915 - protein, 7 aa, synthetic construct
KAREGTL

SEQ ID NO: 125916 - protein, 7 aa, synthetic construct
KAREMVV

SEQ ID NO: 125917 - protein, 7 aa, synthetic construct
KARESNP

SEQ ID NO: 125918 - protein, 7 aa, synthetic construct
KAREVQM

SEQ ID NO: 125919 - protein, 7 aa, synthetic construct
KAREVTY

SEQ ID NO: 125920 - protein, 7 aa, synthetic construct
KARGEAQ

SEQ ID NO: 125921 - protein, 7 aa, synthetic construct
KARIQDV

SEQ ID NO: 125922 - protein, 7 aa, synthetic construct
KARMDIA

SEQ ID NO: 125923 - protein, 7 aa, synthetic construct
KARNLEG

SEQ ID NO: 125924 - protein, 7 aa, synthetic construct
KARPEYG

SEQ ID NO: 125925 - protein, 7 aa, synthetic construct
KARPEYQ

SEQ ID NO: 125926 - protein, 7 aa, synthetic construct
KARQGEY

SEQ ID NO: 125927 - protein, 7 aa, synthetic construct
KARSPDP

SEQ ID NO: 125928 - protein, 7 aa, synthetic construct
KARTEMS

SEQ ID NO: 125929 - protein, 7 aa, synthetic construct
KASFKDV

SEQ ID NO: 125930 - protein, 7 aa, synthetic construct
KASGQYQ

SEQ ID NO: 125931 - protein, 7 aa, synthetic construct
KASHNTF

SEQ ID NO: 125932 - protein, 7 aa, synthetic construct
KASHTIM

SEQ ID NO: 125933 - protein, 7 aa, synthetic construct
KASHTSW

SEQ ID NO: 125934 - protein, 7 aa, synthetic construct
KASKPDH

SEQ ID NO: 125935 - protein, 7 aa, synthetic construct
KASNQQW

SEQ ID NO: 125936 - protein, 7 aa, synthetic construct
KASQERM

SEQ ID NO: 125937 - protein, 7 aa, synthetic construct
KASQLDR

SEQ ID NO: 125938 - protein, 7 aa, synthetic construct
KASQTLF

SEQ ID NO: 125939 - protein, 7 aa, synthetic construct
KASRGGE

SEQ ID NO: 125940 - protein, 7 aa, synthetic construct
KASRPFE

SEQ ID NO: 125941 - protein, 7 aa, synthetic construct
KASSNSW

SEQ ID NO: 125942 - protein, 7 aa, synthetic construct
KASYENR

SEQ ID NO: 125943 - protein, 7 aa, synthetic construct
KASYNKE

SEQ ID NO: 125944 - protein, 7 aa, synthetic construct
KATAIYA

SEQ ID NO: 125945 - protein, 7 aa, synthetic construct
KATAQIY

SEQ ID NO: 125946 - protein, 7 aa, synthetic construct
KATDRFQ

SEQ ID NO: 125947 - protein, 7 aa, synthetic construct
KATDRQM

SEQ ID NO: 125948 - protein, 7 aa, synthetic construct
KATGMHM

SEQ ID NO: 125949 - protein, 7 aa, synthetic construct
KATHDRN

SEQ ID NO: 125950 - protein, 7 aa, synthetic construct
KATHEKS

SEQ ID NO: 125951 - protein, 7 aa, synthetic construct
KATHGAV

SEQ ID NO: 125952 - protein, 7 aa, synthetic construct
KATHHII

SEQ ID NO: 125953 - protein, 7 aa, synthetic construct
KATHTVL

SEQ ID NO: 125954 - protein, 7 aa, synthetic construct
KATHVAI

SEQ ID NO: 125955 - protein, 7 aa, synthetic construct
KATIHKD

SEQ ID NO: 125956 - protein, 7 aa, synthetic construct
KATMDAR

SEQ ID NO: 125957 - protein, 7 aa, synthetic construct
KATPKDW

SEQ ID NO: 125958 - protein, 7 aa, synthetic construct
KATRDSA

SEQ ID NO: 125959 - protein, 7 aa, synthetic construct
KATRDVF

SEQ ID NO: 125960 - protein, 7 aa, synthetic construct
KATSTIF

SEQ ID NO: 125961 - protein, 7 aa, synthetic construct
KATYKDM

SEQ ID NO: 125962 - protein, 7 aa, synthetic construct
KAVAHVV

SEQ ID NO: 125963 - protein, 7 aa, synthetic construct
KAVDPRL

SEQ ID NO: 125964 - protein, 7 aa, synthetic construct
KAVGPFS

SEQ ID NO: 125965 - protein, 7 aa, synthetic construct
KAVHGSF

SEQ ID NO: 125966 - protein, 7 aa, synthetic construct
KAVHHNP

SEQ ID NO: 125967 - protein, 7 aa, synthetic construct
KAVHQGY

SEQ ID NO: 125968 - protein, 7 aa, synthetic construct
KAVHQQN

SEQ ID NO: 125969 - protein, 7 aa, synthetic construct
KAVHYNA

SEQ ID NO: 125970 - protein, 7 aa, synthetic construct
KAVIGPQ

SEQ ID NO: 125971 - protein, 7 aa, synthetic construct
KAVPHPQ

SEQ ID NO: 125972 - protein, 7 aa, synthetic construct
KAVPITN

SEQ ID NO: 125973 - protein, 7 aa, synthetic construct
KAVQIMP

SEQ ID NO: 125974 - protein, 7 aa, synthetic construct
KAVREQI

SEQ ID NO: 125975 - protein, 7 aa, synthetic construct
KAVTHPH

SEQ ID NO: 125976 - protein, 7 aa, synthetic construct
KAVVAPM

SEQ ID NO: 125977 - protein, 7 aa, synthetic construct
KAVVDKY

SEQ ID NO: 125978 - protein, 7 aa, synthetic construct
KAWDNMS

SEQ ID NO: 125979 - protein, 7 aa, synthetic construct
KAYGLQV

SEQ ID NO: 125980 - protein, 7 aa, synthetic construct
KAYKAAE

SEQ ID NO: 125981 - protein, 7 aa, synthetic construct
KAYKDIG

SEQ ID NO: 125982 - protein, 7 aa, synthetic construct
KAYKTMD

SEQ ID NO: 125983 - protein, 7 aa, synthetic construct
KAYKVAD

SEQ ID NO: 125984 - protein, 7 aa, synthetic construct
KAYNMSM

SEQ ID NO: 125985 - protein, 7 aa, synthetic construct
KAYNQTY

SEQ ID NO: 125986 - protein, 7 aa, synthetic construct
KAYPGLV

SEQ ID NO: 125987 - protein, 7 aa, synthetic construct
KAYPHSV

SEQ ID NO: 125988 - protein, 7 aa, synthetic construct
KAYPNLQ

SEQ ID NO: 125989 - protein, 7 aa, synthetic construct
KAYPQNN

SEQ ID NO: 125990 - protein, 7 aa, synthetic construct
KAYPVSS

SEQ ID NO: 125991 - protein, 7 aa, synthetic construct
KAYTPTT

SEQ ID NO: 125992 - protein, 7 aa, synthetic construct
KAYTQQV

SEQ ID NO: 125993 - protein, 7 aa, synthetic construct
KAYTTAG

SEQ ID NO: 125994 - protein, 7 aa, synthetic construct
KAYTTSG

SEQ ID NO: 125995 - protein, 7 aa, synthetic construct
KDAGKYV

SEQ ID NO: 125996 - protein, 7 aa, synthetic construct
KDAHSSR

SEQ ID NO: 125997 - protein, 7 aa, synthetic construct
KDAMTMR

SEQ ID NO: 125998 - protein, 7 aa, synthetic construct
KDANYPR

SEQ ID NO: 125999 - protein, 7 aa, synthetic construct
KDAQHRM

SEQ ID NO: 126000 - protein, 7 aa, synthetic construct
KDARAFS

SEQ ID NO: 126001 - protein, 7 aa, synthetic construct
KDASYKQ

SEQ ID NO: 126002 - protein, 7 aa, synthetic construct
KDASYRM

SEQ ID NO: 126003 - protein, 7 aa, synthetic construct
KDATRIM

SEQ ID NO: 126004 - protein, 7 aa, synthetic construct
KDAVRRD

SEQ ID NO: 126005 - protein, 7 aa, synthetic construct
KDAYAQK

SEQ ID NO: 126006 - protein, 7 aa, synthetic construct
KDAYQRA

SEQ ID NO: 126007 - protein, 7 aa, synthetic construct
KDDKHFR

SEQ ID NO: 126008 - protein, 7 aa, synthetic construct
KDDMEFW

SEQ ID NO: 126009 - protein, 7 aa, synthetic construct
KDDQPRR

SEQ ID NO: 126010 - protein, 7 aa, synthetic construct
KDDRAFK

SEQ ID NO: 126011 - protein, 7 aa, synthetic construct
KDDRPIR

SEQ ID NO: 126012 - protein, 7 aa, synthetic construct
KDDRRSM

SEQ ID NO: 126013 - protein, 7 aa, synthetic construct
KDDRYNK

SEQ ID NO: 126014 - protein, 7 aa, synthetic construct
KDDSARR

SEQ ID NO: 126015 - protein, 7 aa, synthetic construct
KDDTKRP

SEQ ID NO: 126016 - protein, 7 aa, synthetic construct
KDDTRWN

SEQ ID NO: 126017 - protein, 7 aa, synthetic construct
KDERPRA

SEQ ID NO: 126018 - protein, 7 aa, synthetic construct
KDERQRM

SEQ ID NO: 126019 - protein, 7 aa, synthetic construct
KDERTRQ

SEQ ID NO: 126020 - protein, 7 aa, synthetic construct
KDFKPHI

SEQ ID NO: 126021 - protein, 7 aa, synthetic construct
KDFKRDT

SEQ ID NO: 126022 - protein, 7 aa, synthetic construct
KDFKVER

SEQ ID NO: 126023 - protein, 7 aa, synthetic construct
KDFNKTY

SEQ ID NO: 126024 - protein, 7 aa, synthetic construct
KDFNQSR

SEQ ID NO: 126025 - protein, 7 aa, synthetic construct
KDFSGVK

SEQ ID NO: 126026 - protein, 7 aa, synthetic construct
KDFTMNM

SEQ ID NO: 126027 - protein, 7 aa, synthetic construct
KDGIQTR

SEQ ID NO: 126028 - protein, 7 aa, synthetic construct
KDGNRSL

SEQ ID NO: 126029 - protein, 7 aa, synthetic construct
KDGNTAR

SEQ ID NO: 126030 - protein, 7 aa, synthetic construct
KDGRGFQ

SEQ ID NO: 126031 - protein, 7 aa, synthetic construct
KDGRQDR

SEQ ID NO: 126032 - protein, 7 aa, synthetic construct
KDGRTYN

SEQ ID NO: 126033 - protein, 7 aa, synthetic construct
KDGSARI

SEQ ID NO: 126034 - protein, 7 aa, synthetic construct
KDGSIMR

SEQ ID NO: 126035 - protein, 7 aa, synthetic construct
KDGTAYR

SEQ ID NO: 126036 - protein, 7 aa, synthetic construct
KDGYARP

SEQ ID NO: 126037 - protein, 7 aa, synthetic construct
KDHAQAR

SEQ ID NO: 126038 - protein, 7 aa, synthetic construct
KDHIGGR

SEQ ID NO: 126039 - protein, 7 aa, synthetic construct
KDHIRPI

SEQ ID NO: 126040 - protein, 7 aa, synthetic construct
KDHISVK

SEQ ID NO: 126041 - protein, 7 aa, synthetic construct
KDHKASV

SEQ ID NO: 126042 - protein, 7 aa, synthetic construct
KDHKVYQ

SEQ ID NO: 126043 - protein, 7 aa, synthetic construct
KDHNRAS

SEQ ID NO: 126044 - protein, 7 aa, synthetic construct
KDHNRNI

SEQ ID NO: 126045 - protein, 7 aa, synthetic construct
KDHPLGR

SEQ ID NO: 126046 - protein, 7 aa, synthetic construct
KDHQGLR

SEQ ID NO: 126047 - protein, 7 aa, synthetic construct
KDHQQRN

SEQ ID NO: 126048 - protein, 7 aa, synthetic construct
KDHQRMS

SEQ ID NO: 126049 - protein, 7 aa, synthetic construct
KDHRAIT

SEQ ID NO: 126050 - protein, 7 aa, synthetic construct
KDHRDKI

SEQ ID NO: 126051 - protein, 7 aa, synthetic construct
KDHRDKV

SEQ ID NO: 126052 - protein, 7 aa, synthetic construct
KDHRQYP

SEQ ID NO: 126053 - protein, 7 aa, synthetic construct
KDHRTNT

SEQ ID NO: 126054 - protein, 7 aa, synthetic construct
KDHRVSI

SEQ ID NO: 126055 - protein, 7 aa, synthetic construct
KDHTLTR

SEQ ID NO: 126056 - protein, 7 aa, synthetic construct
KDHTTRL

SEQ ID NO: 126057 - protein, 7 aa, synthetic construct
KDHVAQR

SEQ ID NO: 126058 - protein, 7 aa, synthetic construct
KDHVSRL

SEQ ID NO: 126059 - protein, 7 aa, synthetic construct
KDIGRVT

SEQ ID NO: 126060 - protein, 7 aa, synthetic construct
KDIHNAR

SEQ ID NO: 126061 - protein, 7 aa, synthetic construct
KDIPKTT

SEQ ID NO: 126062 - protein, 7 aa, synthetic construct
KDIQYIK

SEQ ID NO: 126063 - protein, 7 aa, synthetic construct
KDIRAQT

SEQ ID NO: 126064 - protein, 7 aa, synthetic construct
KDIRNQQ

SEQ ID NO: 126065 - protein, 7 aa, synthetic construct
KDIYHKG

SEQ ID NO: 126066 - protein, 7 aa, synthetic construct
KDKAASH

SEQ ID NO: 126067 - protein, 7 aa, synthetic construct
KDKGWPT

SEQ ID NO: 126068 - protein, 7 aa, synthetic construct
KDKHHFP

SEQ ID NO: 126069 - protein, 7 aa, synthetic construct
KDKHNGI

SEQ ID NO: 126070 - protein, 7 aa, synthetic construct
KDKHNNI

SEQ ID NO: 126071 - protein, 7 aa, synthetic construct
KDKHVPQ

SEQ ID NO: 126072 - protein, 7 aa, synthetic construct
KDKHYQH

SEQ ID NO: 126073 - protein, 7 aa, synthetic construct
KDKIMYP

SEQ ID NO: 126074 - protein, 7 aa, synthetic construct
KDKNMPF

SEQ ID NO: 126075 - protein, 7 aa, synthetic construct
KDKRDVI

SEQ ID NO: 126076 - protein, 7 aa, synthetic construct
KDKTNMW

SEQ ID NO: 126077 - protein, 7 aa, synthetic construct
KDKYSSL

SEQ ID NO: 126078 - protein, 7 aa, synthetic construct
KDLGGYK

SEQ ID NO: 126079 - protein, 7 aa, synthetic construct
KDLHARG

SEQ ID NO: 126080 - protein, 7 aa, synthetic construct
KDLHKYI

SEQ ID NO: 126081 - protein, 7 aa, synthetic construct
KDLIRHP

SEQ ID NO: 126082 - protein, 7 aa, synthetic construct
KDLKISY

SEQ ID NO: 126083 - protein, 7 aa, synthetic construct
KDLKLGY

SEQ ID NO: 126084 - protein, 7 aa, synthetic construct
KDLPRMT

SEQ ID NO: 126085 - protein, 7 aa, synthetic construct
KDLPSIK

SEQ ID NO: 126086 - protein, 7 aa, synthetic construct
KDLRGIM

SEQ ID NO: 126087 - protein, 7 aa, synthetic construct
KDLSARI

SEQ ID NO: 126088 - protein, 7 aa, synthetic construct
KDLTHKT

SEQ ID NO: 126089 - protein, 7 aa, synthetic construct
KDLTRLN

SEQ ID NO: 126090 - protein, 7 aa, synthetic construct
KDMAAAK

SEQ ID NO: 126091 - protein, 7 aa, synthetic construct
KDMGQVK

SEQ ID NO: 126092 - protein, 7 aa, synthetic construct
KDMMTVK

SEQ ID NO: 126093 - protein, 7 aa, synthetic construct
KDMPRVV

SEQ ID NO: 126094 - protein, 7 aa, synthetic construct
KDMRNIM

SEQ ID NO: 126095 - protein, 7 aa, synthetic construct
KDMSLSR

SEQ ID NO: 126096 - protein, 7 aa, synthetic construct
KDMTKFT

SEQ ID NO: 126097 - protein, 7 aa, synthetic construct
KDMTMKY

SEQ ID NO: 126098 - protein, 7 aa, synthetic construct
KDMTRIS

SEQ ID NO: 126099 - protein, 7 aa, synthetic construct
KDMTSKN

SEQ ID NO: 126100 - protein, 7 aa, synthetic construct
KDMTTYK

SEQ ID NO: 126101 - protein, 7 aa, synthetic construct
KDNKHQL

SEQ ID NO: 126102 - protein, 7 aa, synthetic construct
KDNLHKT

SEQ ID NO: 126103 - protein, 7 aa, synthetic construct
KDNRAHS

SEQ ID NO: 126104 - protein, 7 aa, synthetic construct
KDNRHTG

SEQ ID NO: 126105 - protein, 7 aa, synthetic construct
KDNRPVY

SEQ ID NO: 126106 - protein, 7 aa, synthetic construct
KDNTHTK

SEQ ID NO: 126107 - protein, 7 aa, synthetic construct
KDNYKGL

SEQ ID NO: 126108 - protein, 7 aa, synthetic construct
KDPHIRQ

SEQ ID NO: 126109 - protein, 7 aa, synthetic construct
KDPHKVI

SEQ ID NO: 126110 - protein, 7 aa, synthetic construct
KDPINSR

SEQ ID NO: 126111 - protein, 7 aa, synthetic construct
KDPRLVH

SEQ ID NO: 126112 - protein, 7 aa, synthetic construct
KDPRMMT

SEQ ID NO: 126113 - protein, 7 aa, synthetic construct
KDPTGNR

SEQ ID NO: 126114 - protein, 7 aa, synthetic construct
KDPVRIM

SEQ ID NO: 126115 - protein, 7 aa, synthetic construct
KDQAKHT

SEQ ID NO: 126116 - protein, 7 aa, synthetic construct
KDQAKNY

SEQ ID NO: 126117 - protein, 7 aa, synthetic construct
KDQANRA

SEQ ID NO: 126118 - protein, 7 aa, synthetic construct
KDQARIQ

SEQ ID NO: 126119 - protein, 7 aa, synthetic construct
KDQKHVQ

SEQ ID NO: 126120 - protein, 7 aa, synthetic construct
KDQKYVY

SEQ ID NO: 126121 - protein, 7 aa, synthetic construct
KDQNGLP

SEQ ID NO: 126122 - protein, 7 aa, synthetic construct
KDQQRQV

SEQ ID NO: 126123 - protein, 7 aa, synthetic construct
KDQRGGQ

SEQ ID NO: 126124 - protein, 7 aa, synthetic construct
KDQRHTN

SEQ ID NO: 126125 - protein, 7 aa, synthetic construct
KDQRTMH

SEQ ID NO: 126126 - protein, 7 aa, synthetic construct
KDQVRIQ

SEQ ID NO: 126127 - protein, 7 aa, synthetic construct
KDQYQLK

SEQ ID NO: 126128 - protein, 7 aa, synthetic construct
KDRFQNT

SEQ ID NO: 126129 - protein, 7 aa, synthetic construct
KDRGDGK

SEQ ID NO: 126130 - protein, 7 aa, synthetic construct
KDRGQAQ

SEQ ID NO: 126131 - protein, 7 aa, synthetic construct
KDRHNMA

SEQ ID NO: 126132 - protein, 7 aa, synthetic construct
KDRKQDL

SEQ ID NO: 126133 - protein, 7 aa, synthetic construct
KDRKTQD

SEQ ID NO: 126134 - protein, 7 aa, synthetic construct
KDRNNER

SEQ ID NO: 126135 - protein, 7 aa, synthetic construct
KDRNPDK

SEQ ID NO: 126136 - protein, 7 aa, synthetic construct
KDRNSYQ

SEQ ID NO: 126137 - protein, 7 aa, synthetic construct
KDRPFPN

SEQ ID NO: 126138 - protein, 7 aa, synthetic construct
KDRPHMT

SEQ ID NO: 126139 - protein, 7 aa, synthetic construct
KDRPYTP

SEQ ID NO: 126140 - protein, 7 aa, synthetic construct
KDRQHAS

SEQ ID NO: 126141 - protein, 7 aa, synthetic construct
KDRQRDV

SEQ ID NO: 126142 - protein, 7 aa, synthetic construct
KDRSPYM

SEQ ID NO: 126143 - protein, 7 aa, synthetic construct
KDRSSVW

SEQ ID NO: 126144 - protein, 7 aa, synthetic construct
KDRSYSV

SEQ ID NO: 126145 - protein, 7 aa, synthetic construct
KDRVHPA

SEQ ID NO: 126146 - protein, 7 aa, synthetic construct
KDRVVMM

SEQ ID NO: 126147 - protein, 7 aa, synthetic construct
KDSAAIR

SEQ ID NO: 126148 - protein, 7 aa, synthetic construct
KDSARHW

SEQ ID NO: 126149 - protein, 7 aa, synthetic construct
KDSGSVK

SEQ ID NO: 126150 - protein, 7 aa, synthetic construct
KDSKPFF

SEQ ID NO: 126151 - protein, 7 aa, synthetic construct
KDSLYVK

SEQ ID NO: 126152 - protein, 7 aa, synthetic construct
KDSNIPR

SEQ ID NO: 126153 - protein, 7 aa, synthetic construct
KDSQLMR

SEQ ID NO: 126154 - protein, 7 aa, synthetic construct
KDSRGAQ

SEQ ID NO: 126155 - protein, 7 aa, synthetic construct
KDSRLMT

SEQ ID NO: 126156 - protein, 7 aa, synthetic construct
KDSSNTK

SEQ ID NO: 126157 - protein, 7 aa, synthetic construct
KDSSPRN

SEQ ID NO: 126158 - protein, 7 aa, synthetic construct
KDSTTFR

SEQ ID NO: 126159 - protein, 7 aa, synthetic construct
KDSTYYH

SEQ ID NO: 126160 - protein, 7 aa, synthetic construct
KDSVTAR

SEQ ID NO: 126161 - protein, 7 aa, synthetic construct
KDSVYAK

SEQ ID NO: 126162 - protein, 7 aa, synthetic construct
KDTAFSK

SEQ ID NO: 126163 - protein, 7 aa, synthetic construct
KDTAKMM

SEQ ID NO: 126164 - protein, 7 aa, synthetic construct
KDTARNI

SEQ ID NO: 126165 - protein, 7 aa, synthetic construct
KDTIRHA

SEQ ID NO: 126166 - protein, 7 aa, synthetic construct
KDTLRSI

SEQ ID NO: 126167 - protein, 7 aa, synthetic construct
KDTMKFN

SEQ ID NO: 126168 - protein, 7 aa, synthetic construct
KDTRERA

SEQ ID NO: 126169 - protein, 7 aa, synthetic construct
KDTRGQL

SEQ ID NO: 126170 - protein, 7 aa, synthetic construct
KDTRMAI

SEQ ID NO: 126171 - protein, 7 aa, synthetic construct
KDTSLFR

SEQ ID NO: 126172 - protein, 7 aa, synthetic construct
KDTTKFT

SEQ ID NO: 126173 - protein, 7 aa, synthetic construct
KDTVRTH

SEQ ID NO: 126174 - protein, 7 aa, synthetic construct
KDVAARN

SEQ ID NO: 126175 - protein, 7 aa, synthetic construct
KDVAAVR

SEQ ID NO: 126176 - protein, 7 aa, synthetic construct
KDVNSTK

SEQ ID NO: 126177 - protein, 7 aa, synthetic construct
KDVRPVF

SEQ ID NO: 126178 - protein, 7 aa, synthetic construct
KDVSMRA

SEQ ID NO: 126179 - protein, 7 aa, synthetic construct
KDVSRQL

SEQ ID NO: 126180 - protein, 7 aa, synthetic construct
KDYGPAR

SEQ ID NO: 126181 - protein, 7 aa, synthetic construct
KDYHTSL

SEQ ID NO: 126182 - protein, 7 aa, synthetic construct
KDYKGTN

SEQ ID NO: 126183 - protein, 7 aa, synthetic construct
KDYKLGL

SEQ ID NO: 126184 - protein, 7 aa, synthetic construct
KDYKSTL

SEQ ID NO: 126185 - protein, 7 aa, synthetic construct
KDYREHQ

SEQ ID NO: 126186 - protein, 7 aa, synthetic construct
KDYRMST

SEQ ID NO: 126187 - protein, 7 aa, synthetic construct
KDYTHRD

SEQ ID NO: 126188 - protein, 7 aa, synthetic construct
KDYTSIK

SEQ ID NO: 126189 - protein, 7 aa, synthetic construct
KEAGWKA

SEQ ID NO: 126190 - protein, 7 aa, synthetic construct
KEAKIYM

SEQ ID NO: 126191 - protein, 7 aa, synthetic construct
KEAMYLK

SEQ ID NO: 126192 - protein, 7 aa, synthetic construct
KEAQKWN

SEQ ID NO: 126193 - protein, 7 aa, synthetic construct
KEAQRTT

SEQ ID NO: 126194 - protein, 7 aa, synthetic construct
KEAQYKV

SEQ ID NO: 126195 - protein, 7 aa, synthetic construct
KEARNDK

SEQ ID NO: 126196 - protein, 7 aa, synthetic construct
KEARSRE

SEQ ID NO: 126197 - protein, 7 aa, synthetic construct
KEASKNQ

SEQ ID NO: 126198 - protein, 7 aa, synthetic construct
KEATGKW

SEQ ID NO: 126199 - protein, 7 aa, synthetic construct
KEATTQR

SEQ ID NO: 126200 - protein, 7 aa, synthetic construct
KEAYKLA

SEQ ID NO: 126201 - protein, 7 aa, synthetic construct
KEAYPRA

SEQ ID NO: 126202 - protein, 7 aa, synthetic construct
KEDAKKW

SEQ ID NO: 126203 - protein, 7 aa, synthetic construct
KEDRQKN

SEQ ID NO: 126204 - protein, 7 aa, synthetic construct
KEEKRFM

SEQ ID NO: 126205 - protein, 7 aa, synthetic construct
KEFKYPN

SEQ ID NO: 126206 - protein, 7 aa, synthetic construct
KEFPQKH

SEQ ID NO: 126207 - protein, 7 aa, synthetic construct
KEFQKTM

SEQ ID NO: 126208 - protein, 7 aa, synthetic construct
KEFQTKS

SEQ ID NO: 126209 - protein, 7 aa, synthetic construct
KEFRTVG

SEQ ID NO: 126210 - protein, 7 aa, synthetic construct
KEGGITR

SEQ ID NO: 126211 - protein, 7 aa, synthetic construct
KEGGRVI

SEQ ID NO: 126212 - protein, 7 aa, synthetic construct
KEGGTPK

SEQ ID NO: 126213 - protein, 7 aa, synthetic construct
KEGHTKY

SEQ ID NO: 126214 - protein, 7 aa, synthetic construct
KEGMMRM

SEQ ID NO: 126215 - protein, 7 aa, synthetic construct
KEGPRYS

SEQ ID NO: 126216 - protein, 7 aa, synthetic construct
KEGQIRM

SEQ ID NO: 126217 - protein, 7 aa, synthetic construct
KEGQMRS

SEQ ID NO: 126218 - protein, 7 aa, synthetic construct
KEGRQLQ

SEQ ID NO: 126219 - protein, 7 aa, synthetic construct
KEGSRQL

SEQ ID NO: 126220 - protein, 7 aa, synthetic construct
KEGSRTI

SEQ ID NO: 126221 - protein, 7 aa, synthetic construct
KEGTWKM

SEQ ID NO: 126222 - protein, 7 aa, synthetic construct
KEGYLNK

SEQ ID NO: 126223 - protein, 7 aa, synthetic construct
KEHITRI

SEQ ID NO: 126224 - protein, 7 aa, synthetic construct
KEHMRSI

SEQ ID NO: 126225 - protein, 7 aa, synthetic construct
KEHQRTS

SEQ ID NO: 126226 - protein, 7 aa, synthetic construct
KEHRPIT

SEQ ID NO: 126227 - protein, 7 aa, synthetic construct
KEHRVVS

SEQ ID NO: 126228 - protein, 7 aa, synthetic construct
KEHVRFI

SEQ ID NO: 126229 - protein, 7 aa, synthetic construct
KEHVRNM

SEQ ID NO: 126230 - protein, 7 aa, synthetic construct
KEIQSGR

SEQ ID NO: 126231 - protein, 7 aa, synthetic construct
KEIRMNP

SEQ ID NO: 126232 - protein, 7 aa, synthetic construct
KEIRTSY

SEQ ID NO: 126233 - protein, 7 aa, synthetic construct
KEIRVQI

SEQ ID NO: 126234 - protein, 7 aa, synthetic construct
KEISSRV

SEQ ID NO: 126235 - protein, 7 aa, synthetic construct
KEKAPDR

SEQ ID NO: 126236 - protein, 7 aa, synthetic construct
KEKAPHF

SEQ ID NO: 126237 - protein, 7 aa, synthetic construct
KEKFGGM

SEQ ID NO: 126238 - protein, 7 aa, synthetic construct
KEKFSGY

SEQ ID NO: 126239 - protein, 7 aa, synthetic construct
KEKHLQM

SEQ ID NO: 126240 - protein, 7 aa, synthetic construct
KEKIMHS

SEQ ID NO: 126241 - protein, 7 aa, synthetic construct
KEKKMDY

SEQ ID NO: 126242 - protein, 7 aa, synthetic construct
KEKMFRD

SEQ ID NO: 126243 - protein, 7 aa, synthetic construct
KEKNPAN

SEQ ID NO: 126244 - protein, 7 aa, synthetic construct
KEKNSGH

SEQ ID NO: 126245 - protein, 7 aa, synthetic construct
KEKPGPF

SEQ ID NO: 126246 - protein, 7 aa, synthetic construct
KEKPLHH

SEQ ID NO: 126247 - protein, 7 aa, synthetic construct
KEKPMMM

SEQ ID NO: 126248 - protein, 7 aa, synthetic construct
KEKQHNA

SEQ ID NO: 126249 - protein, 7 aa, synthetic construct
KEKQHNV

SEQ ID NO: 126250 - protein, 7 aa, synthetic construct
KEKSHST

SEQ ID NO: 126251 - protein, 7 aa, synthetic construct
KEKSSQH

SEQ ID NO: 126252 - protein, 7 aa, synthetic construct
KEKSVSW

SEQ ID NO: 126253 - protein, 7 aa, synthetic construct
KEKTHYP

SEQ ID NO: 126254 - protein, 7 aa, synthetic construct
KEKTPRD

SEQ ID NO: 126255 - protein, 7 aa, synthetic construct
KEKTWPG

SEQ ID NO: 126256 - protein, 7 aa, synthetic construct
KEKTYHT

SEQ ID NO: 126257 - protein, 7 aa, synthetic construct
KEKVQWS

SEQ ID NO: 126258 - protein, 7 aa, synthetic construct
KEKYSVS

SEQ ID NO: 126259 - protein, 7 aa, synthetic construct
KEKYVAV

SEQ ID NO: 126260 - protein, 7 aa, synthetic construct
KELARHS

SEQ ID NO: 126261 - protein, 7 aa, synthetic construct
KELHTRA

SEQ ID NO: 126262 - protein, 7 aa, synthetic construct
KELQKAM

SEQ ID NO: 126263 - protein, 7 aa, synthetic construct
KELQTRT

SEQ ID NO: 126264 - protein, 7 aa, synthetic construct
KELRAMT

SEQ ID NO: 126265 - protein, 7 aa, synthetic construct
KELRIIQ

SEQ ID NO: 126266 - protein, 7 aa, synthetic construct
KELRMTM

SEQ ID NO: 126267 - protein, 7 aa, synthetic construct
KELRQDR

SEQ ID NO: 126268 - protein, 7 aa, synthetic construct
KELRSMA

SEQ ID NO: 126269 - protein, 7 aa, synthetic construct
KELRTQM

SEQ ID NO: 126270 - protein, 7 aa, synthetic construct
KELSSRG

SEQ ID NO: 126271 - protein, 7 aa, synthetic construct
KEMHKPP

SEQ ID NO: 126272 - protein, 7 aa, synthetic construct
KEMKLPH

SEQ ID NO: 126273 - protein, 7 aa, synthetic construct
KEMKMYA

SEQ ID NO: 126274 - protein, 7 aa, synthetic construct
KEMKQNW

SEQ ID NO: 126275 - protein, 7 aa, synthetic construct
KEMNRYV

SEQ ID NO: 126276 - protein, 7 aa, synthetic construct
KEMRHGG

SEQ ID NO: 126277 - protein, 7 aa, synthetic construct
KEMRNGA

SEQ ID NO: 126278 - protein, 7 aa, synthetic construct
KEMRQMS

SEQ ID NO: 126279 - protein, 7 aa, synthetic construct
KEMSMAR

SEQ ID NO: 126280 - protein, 7 aa, synthetic construct
KEMSTKW

SEQ ID NO: 126281 - protein, 7 aa, synthetic construct
KEMTATR

SEQ ID NO: 126282 - protein, 7 aa, synthetic construct
KEMTRGM

SEQ ID NO: 126283 - protein, 7 aa, synthetic construct
KEMVRSI

SEQ ID NO: 126284 - protein, 7 aa, synthetic construct
KENAYRG

SEQ ID NO: 126285 - protein, 7 aa, synthetic construct
KENFNQR

SEQ ID NO: 126286 - protein, 7 aa, synthetic construct
KENGIQR

SEQ ID NO: 126287 - protein, 7 aa, synthetic construct
KENHWRD

SEQ ID NO: 126288 - protein, 7 aa, synthetic construct
KENKGVQ

SEQ ID NO: 126289 - protein, 7 aa, synthetic construct
KENMART

SEQ ID NO: 126290 - protein, 7 aa, synthetic construct
KENNRWE

SEQ ID NO: 126291 - protein, 7 aa, synthetic construct
KENQHRM

SEQ ID NO: 126292 - protein, 7 aa, synthetic construct
KENRLMV

SEQ ID NO: 126293 - protein, 7 aa, synthetic construct
KENSYKN

SEQ ID NO: 126294 - protein, 7 aa, synthetic construct
KENYMKN

SEQ ID NO: 126295 - protein, 7 aa, synthetic construct
KEPAGTR

SEQ ID NO: 126296 - protein, 7 aa, synthetic construct
KEPASPR

SEQ ID NO: 126297 - protein, 7 aa, synthetic construct
KEPGIVR

SEQ ID NO: 126298 - protein, 7 aa, synthetic construct
KEPGMSR

SEQ ID NO: 126299 - protein, 7 aa, synthetic construct
KEPHRYS

SEQ ID NO: 126300 - protein, 7 aa, synthetic construct
KEPPNVR

SEQ ID NO: 126301 - protein, 7 aa, synthetic construct
KEPREIR

SEQ ID NO: 126302 - protein, 7 aa, synthetic construct
KEPVRHV

SEQ ID NO: 126303 - protein, 7 aa, synthetic construct
KEQGKFQ

SEQ ID NO: 126304 - protein, 7 aa, synthetic construct
KEQKAVM

SEQ ID NO: 126305 - protein, 7 aa, synthetic construct
KEQKGPW

SEQ ID NO: 126306 - protein, 7 aa, synthetic construct
KEQPKIW

SEQ ID NO: 126307 - protein, 7 aa, synthetic construct
KEQRQTN

SEQ ID NO: 126308 - protein, 7 aa, synthetic construct
KEQTKYT

SEQ ID NO: 126309 - protein, 7 aa, synthetic construct
KEQTRQI

SEQ ID NO: 126310 - protein, 7 aa, synthetic construct
KERAHSS

SEQ ID NO: 126311 - protein, 7 aa, synthetic construct
KERATNV

SEQ ID NO: 126312 - protein, 7 aa, synthetic construct
KERAVQF

SEQ ID NO: 126313 - protein, 7 aa, synthetic construct
KEREHGR

SEQ ID NO: 126314 - protein, 7 aa, synthetic construct
KEREKYT

SEQ ID NO: 126315 - protein, 7 aa, synthetic construct
KERHFPM

SEQ ID NO: 126316 - protein, 7 aa, synthetic construct
KERHQLG

SEQ ID NO: 126317 - protein, 7 aa, synthetic construct
KERIDRG

SEQ ID NO: 126318 - protein, 7 aa, synthetic construct
KERIQMQ

SEQ ID NO: 126319 - protein, 7 aa, synthetic construct
KERKDWD

SEQ ID NO: 126320 - protein, 7 aa, synthetic construct
KERMDRG

SEQ ID NO: 126321 - protein, 7 aa, synthetic construct
KERMVAT

SEQ ID NO: 126322 - protein, 7 aa, synthetic construct
KERNASI

SEQ ID NO: 126323 - protein, 7 aa, synthetic construct
KERNPPQ

SEQ ID NO: 126324 - protein, 7 aa, synthetic construct
KERNVGM

SEQ ID NO: 126325 - protein, 7 aa, synthetic construct
KERPHPT

SEQ ID NO: 126326 - protein, 7 aa, synthetic construct
KERPSSY

SEQ ID NO: 126327 - protein, 7 aa, synthetic construct
KERQIGN

SEQ ID NO: 126328 - protein, 7 aa, synthetic construct
KERQILH

SEQ ID NO: 126329 - protein, 7 aa, synthetic construct
KERQKEQ

SEQ ID NO: 126330 - protein, 7 aa, synthetic construct
KERQTMF

SEQ ID NO: 126331 - protein, 7 aa, synthetic construct
KERQVAN

SEQ ID NO: 126332 - protein, 7 aa, synthetic construct
KERSHVI

SEQ ID NO: 126333 - protein, 7 aa, synthetic construct
KERSSDK

SEQ ID NO: 126334 - protein, 7 aa, synthetic construct
KERSSGS

SEQ ID NO: 126335 - protein, 7 aa, synthetic construct
KERTHNL

SEQ ID NO: 126336 - protein, 7 aa, synthetic construct
KERVIQM

SEQ ID NO: 126337 - protein, 7 aa, synthetic construct
KERVSMM

SEQ ID NO: 126338 - protein, 7 aa, synthetic construct
KESANKF

SEQ ID NO: 126339 - protein, 7 aa, synthetic construct
KESFTRA

SEQ ID NO: 126340 - protein, 7 aa, synthetic construct
KESGNKL

SEQ ID NO: 126341 - protein, 7 aa, synthetic construct
KESGYKA

SEQ ID NO: 126342 - protein, 7 aa, synthetic construct
KESKHLM

SEQ ID NO: 126343 - protein, 7 aa, synthetic construct
KESKMSV

SEQ ID NO: 126344 - protein, 7 aa, synthetic construct
KESKTTQ

SEQ ID NO: 126345 - protein, 7 aa, synthetic construct
KESMKSM

SEQ ID NO: 126346 - protein, 7 aa, synthetic construct
KESNRFN

SEQ ID NO: 126347 - protein, 7 aa, synthetic construct
KESQKST

SEQ ID NO: 126348 - protein, 7 aa, synthetic construct
KESQNKM

SEQ ID NO: 126349 - protein, 7 aa, synthetic construct
KESRAGS

SEQ ID NO: 126350 - protein, 7 aa, synthetic construct
KESRMTG

SEQ ID NO: 126351 - protein, 7 aa, synthetic construct
KESRPDR

SEQ ID NO: 126352 - protein, 7 aa, synthetic construct
KESTKSQ

SEQ ID NO: 126353 - protein, 7 aa, synthetic construct
KESYNKN

SEQ ID NO: 126354 - protein, 7 aa, synthetic construct
KESYRGF

SEQ ID NO: 126355 - protein, 7 aa, synthetic construct
KETARGV

SEQ ID NO: 126356 - protein, 7 aa, synthetic construct
KETARNP

SEQ ID NO: 126357 - protein, 7 aa, synthetic construct
KETEYGG

SEQ ID NO: 126358 - protein, 7 aa, synthetic construct
KETHPRN

SEQ ID NO: 126359 - protein, 7 aa, synthetic construct
KETHQVR

SEQ ID NO: 126360 - protein, 7 aa, synthetic construct
KETIKHL

SEQ ID NO: 126361 - protein, 7 aa, synthetic construct
KETKGFS

SEQ ID NO: 126362 - protein, 7 aa, synthetic construct
KETKHLL

SEQ ID NO: 126363 - protein, 7 aa, synthetic construct
KETKQWA

SEQ ID NO: 126364 - protein, 7 aa, synthetic construct
KETMRSV

SEQ ID NO: 126365 - protein, 7 aa, synthetic construct
KETNRFI

SEQ ID NO: 126366 - protein, 7 aa, synthetic construct
KETNYRG

SEQ ID NO: 126367 - protein, 7 aa, synthetic construct
KETRPPF

SEQ ID NO: 126368 - protein, 7 aa, synthetic construct
KETRSPL

SEQ ID NO: 126369 - protein, 7 aa, synthetic construct
KETSYKA

SEQ ID NO: 126370 - protein, 7 aa, synthetic construct
KETSYKL

SEQ ID NO: 126371 - protein, 7 aa, synthetic construct
KETTRTA

SEQ ID NO: 126372 - protein, 7 aa, synthetic construct
KETVRQF

SEQ ID NO: 126373 - protein, 7 aa, synthetic construct
KETYHNL

SEQ ID NO: 126374 - protein, 7 aa, synthetic construct
KEVHRNI

SEQ ID NO: 126375 - protein, 7 aa, synthetic construct
KEVKGWG

SEQ ID NO: 126376 - protein, 7 aa, synthetic construct
KEVRQYM

SEQ ID NO: 126377 - protein, 7 aa, synthetic construct
KEVRTNS

SEQ ID NO: 126378 - protein, 7 aa, synthetic construct
KEVSKQY

SEQ ID NO: 126379 - protein, 7 aa, synthetic construct
KEVTKHA

SEQ ID NO: 126380 - protein, 7 aa, synthetic construct
KEVYMKQ

SEQ ID NO: 126381 - protein, 7 aa, synthetic construct
KEYKGLL

SEQ ID NO: 126382 - protein, 7 aa, synthetic construct
KEYKQTN

SEQ ID NO: 126383 - protein, 7 aa, synthetic construct
KEYLKGG

SEQ ID NO: 126384 - protein, 7 aa, synthetic construct
KEYNKPM

SEQ ID NO: 126385 - protein, 7 aa, synthetic construct
KEYQKTQ

SEQ ID NO: 126386 - protein, 7 aa, synthetic construct
KEYVKGS

SEQ ID NO: 126387 - protein, 7 aa, synthetic construct
KFAEQIR

SEQ ID NO: 126388 - protein, 7 aa, synthetic construct
KFAGDMR

SEQ ID NO: 126389 - protein, 7 aa, synthetic construct
KFAGMPT

SEQ ID NO: 126390 - protein, 7 aa, synthetic construct
KFAGPER

SEQ ID NO: 126391 - protein, 7 aa, synthetic construct
KFAGPNV

SEQ ID NO: 126392 - protein, 7 aa, synthetic construct
KFAHAVG

SEQ ID NO: 126393 - protein, 7 aa, synthetic construct
KFAHQNP

SEQ ID NO: 126394 - protein, 7 aa, synthetic construct
KFAIREG

SEQ ID NO: 126395 - protein, 7 aa, synthetic construct
KFANGIH

SEQ ID NO: 126396 - protein, 7 aa, synthetic construct
KFAPASN

SEQ ID NO: 126397 - protein, 7 aa, synthetic construct
KFAPSNQ

SEQ ID NO: 126398 - protein, 7 aa, synthetic construct
KFDMKIS

SEQ ID NO: 126399 - protein, 7 aa, synthetic construct
KFDNQKF

SEQ ID NO: 126400 - protein, 7 aa, synthetic construct
KFDRPPM

SEQ ID NO: 126401 - protein, 7 aa, synthetic construct
KFDRSAA

SEQ ID NO: 126402 - protein, 7 aa, synthetic construct
KFDSARI

SEQ ID NO: 126403 - protein, 7 aa, synthetic construct
KFDSQKF

SEQ ID NO: 126404 - protein, 7 aa, synthetic construct
KFDTRQV

SEQ ID NO: 126405 - protein, 7 aa, synthetic construct
KFDVANK

SEQ ID NO: 126406 - protein, 7 aa, synthetic construct
KFEEPWD

SEQ ID NO: 126407 - protein, 7 aa, synthetic construct
KFEGFKS

SEQ ID NO: 126408 - protein, 7 aa, synthetic construct
KFEPIRQ

SEQ ID NO: 126409 - protein, 7 aa, synthetic construct
KFERHAP

SEQ ID NO: 126410 - protein, 7 aa, synthetic construct
KFGEIAK

SEQ ID NO: 126411 - protein, 7 aa, synthetic construct
KFGGPAS

SEQ ID NO: 126412 - protein, 7 aa, synthetic construct
KFGHVKE

SEQ ID NO: 126413 - protein, 7 aa, synthetic construct
KFGKEYQ

SEQ ID NO: 126414 - protein, 7 aa, synthetic construct
KFGQAMV

SEQ ID NO: 126415 - protein, 7 aa, synthetic construct
KFGSPGM

SEQ ID NO: 126416 - protein, 7 aa, synthetic construct
KFHIKGE

SEQ ID NO: 126417 - protein, 7 aa, synthetic construct
KFHPATT

SEQ ID NO: 126418 - protein, 7 aa, synthetic construct
KFHPGPV

SEQ ID NO: 126419 - protein, 7 aa, synthetic construct
KFHPNAG

SEQ ID NO: 126420 - protein, 7 aa, synthetic construct
KFHPNAS

SEQ ID NO: 126421 - protein, 7 aa, synthetic construct
KFHPTPG

SEQ ID NO: 126422 - protein, 7 aa, synthetic construct
KFHPVQP

SEQ ID NO: 126423 - protein, 7 aa, synthetic construct
KFHQLNP

SEQ ID NO: 126424 - protein, 7 aa, synthetic construct
KFHSAGP

SEQ ID NO: 126425 - protein, 7 aa, synthetic construct
KFHTGGI

SEQ ID NO: 126426 - protein, 7 aa, synthetic construct
KFHTQTI

SEQ ID NO: 126427 - protein, 7 aa, synthetic construct
KFHVSQP

SEQ ID NO: 126428 - protein, 7 aa, synthetic construct
KFINTAP

SEQ ID NO: 126429 - protein, 7 aa, synthetic construct
KFITGDK

SEQ ID NO: 126430 - protein, 7 aa, synthetic construct
KFKAENY

SEQ ID NO: 126431 - protein, 7 aa, synthetic construct
KFKAEPY

SEQ ID NO: 126432 - protein, 7 aa, synthetic construct
KFKAIDT

SEQ ID NO: 126433 - protein, 7 aa, synthetic construct
KFKDPFV

SEQ ID NO: 126434 - protein, 7 aa, synthetic construct
KFKDSSW

SEQ ID NO: 126435 - protein, 7 aa, synthetic construct
KFKDYQM

SEQ ID NO: 126436 - protein, 7 aa, synthetic construct
KFKENVL

SEQ ID NO: 126437 - protein, 7 aa, synthetic construct
KFKGYAD

SEQ ID NO: 126438 - protein, 7 aa, synthetic construct
KFKHQEA

SEQ ID NO: 126439 - protein, 7 aa, synthetic construct
KFKMADL

SEQ ID NO: 126440 - protein, 7 aa, synthetic construct
KFKMTDI

SEQ ID NO: 126441 - protein, 7 aa, synthetic construct
KFKNDSF

SEQ ID NO: 126442 - protein, 7 aa, synthetic construct
KFKNIVD

SEQ ID NO: 126443 - protein, 7 aa, synthetic construct
KFKQEIY

SEQ ID NO: 126444 - protein, 7 aa, synthetic construct
KFKQGDQ

SEQ ID NO: 126445 - protein, 7 aa, synthetic construct
KFKQVPD

SEQ ID NO: 126446 - protein, 7 aa, synthetic construct
KFKSEAY

SEQ ID NO: 126447 - protein, 7 aa, synthetic construct
KFKSLHD

SEQ ID NO: 126448 - protein, 7 aa, synthetic construct
KFLNSTS

SEQ ID NO: 126449 - protein, 7 aa, synthetic construct
KFMGERT

SEQ ID NO: 126450 - protein, 7 aa, synthetic construct
KFMNNDR

SEQ ID NO: 126451 - protein, 7 aa, synthetic construct
KFMPGVS

SEQ ID NO: 126452 - protein, 7 aa, synthetic construct
KFNHSGM

SEQ ID NO: 126453 - protein, 7 aa, synthetic construct
KFNKELI

SEQ ID NO: 126454 - protein, 7 aa, synthetic construct
KFNLIKE

SEQ ID NO: 126455 - protein, 7 aa, synthetic construct
KFNLKDI

SEQ ID NO: 126456 - protein, 7 aa, synthetic construct
KFNPAAM

SEQ ID NO: 126457 - protein, 7 aa, synthetic construct
KFNPDGR

SEQ ID NO: 126458 - protein, 7 aa, synthetic construct
KFNPMAA

SEQ ID NO: 126459 - protein, 7 aa, synthetic construct
KFNPPLS

SEQ ID NO: 126460 - protein, 7 aa, synthetic construct
KFNRGDM

SEQ ID NO: 126461 - protein, 7 aa, synthetic construct
KFNSPVT

SEQ ID NO: 126462 - protein, 7 aa, synthetic construct
KFPEKQQ

SEQ ID NO: 126463 - protein, 7 aa, synthetic construct
KFPGAHM

SEQ ID NO: 126464 - protein, 7 aa, synthetic construct
KFPMANV

SEQ ID NO: 126465 - protein, 7 aa, synthetic construct
KFPNQER

SEQ ID NO: 126466 - protein, 7 aa, synthetic construct
KFPPKNE

SEQ ID NO: 126467 - protein, 7 aa, synthetic construct
KFPPTNH

SEQ ID NO: 126468 - protein, 7 aa, synthetic construct
KFPPTQS

SEQ ID NO: 126469 - protein, 7 aa, synthetic construct
KFPTHGQ

SEQ ID NO: 126470 - protein, 7 aa, synthetic construct
KFPTQVH

SEQ ID NO: 126471 - protein, 7 aa, synthetic construct
KFQAIGQ

SEQ ID NO: 126472 - protein, 7 aa, synthetic construct
KFQANLM

SEQ ID NO: 126473 - protein, 7 aa, synthetic construct
KFQGSGF

SEQ ID NO: 126474 - protein, 7 aa, synthetic construct
KFQHQSS

SEQ ID NO: 126475 - protein, 7 aa, synthetic construct
KFQIKDN

SEQ ID NO: 126476 - protein, 7 aa, synthetic construct
KFQKDLL

SEQ ID NO: 126477 - protein, 7 aa, synthetic construct
KFQKELI

SEQ ID NO: 126478 - protein, 7 aa, synthetic construct
KFQNKDV

SEQ ID NO: 126479 - protein, 7 aa, synthetic construct
KFQQQMV

SEQ ID NO: 126480 - protein, 7 aa, synthetic construct
KFQSIQV

SEQ ID NO: 126481 - protein, 7 aa, synthetic construct
KFQSLAQ

SEQ ID NO: 126482 - protein, 7 aa, synthetic construct
KFQTHHV

SEQ ID NO: 126483 - protein, 7 aa, synthetic construct
KFQTVHA

SEQ ID NO: 126484 - protein, 7 aa, synthetic construct
KFRATEV

SEQ ID NO: 126485 - protein, 7 aa, synthetic construct
KFRETTQ

SEQ ID NO: 126486 - protein, 7 aa, synthetic construct
KFREVSP

SEQ ID NO: 126487 - protein, 7 aa, synthetic construct
KFRQDTP

SEQ ID NO: 126488 - protein, 7 aa, synthetic construct
KFSDMTK

SEQ ID NO: 126489 - protein, 7 aa, synthetic construct
KFSEGSR

SEQ ID NO: 126490 - protein, 7 aa, synthetic construct
KFSGDAR

SEQ ID NO: 126491 - protein, 7 aa, synthetic construct
KFSHAEK

SEQ ID NO: 126492 - protein, 7 aa, synthetic construct
KFSMSNP

SEQ ID NO: 126493 - protein, 7 aa, synthetic construct
KFSNLIN

SEQ ID NO: 126494 - protein, 7 aa, synthetic construct
KFSPGIM

SEQ ID NO: 126495 - protein, 7 aa, synthetic construct
KFSPTHA

SEQ ID NO: 126496 - protein, 7 aa, synthetic construct
KFSQHSA

SEQ ID NO: 126497 - protein, 7 aa, synthetic construct
KFSQHVL

SEQ ID NO: 126498 - protein, 7 aa, synthetic construct
KFSRTEV

SEQ ID NO: 126499 - protein, 7 aa, synthetic construct
KFSTVHA

SEQ ID NO: 126500 - protein, 7 aa, synthetic construct
KFSVHKE

SEQ ID NO: 126501 - protein, 7 aa, synthetic construct
KFTAAIA

SEQ ID NO: 126502 - protein, 7 aa, synthetic construct
KFTHPAG

SEQ ID NO: 126503 - protein, 7 aa, synthetic construct
KFTKDYV

SEQ ID NO: 126504 - protein, 7 aa, synthetic construct
KFTMQRE

SEQ ID NO: 126505 - protein, 7 aa, synthetic construct
KFTNGGW

SEQ ID NO: 126506 - protein, 7 aa, synthetic construct
KFTPTSS

SEQ ID NO: 126507 - protein, 7 aa, synthetic construct
KFTSGER

SEQ ID NO: 126508 - protein, 7 aa, synthetic construct
KFTSMQN

SEQ ID NO: 126509 - protein, 7 aa, synthetic construct
KFTVKQD

SEQ ID NO: 126510 - protein, 7 aa, synthetic construct
KFVDGSR

SEQ ID NO: 126511 - protein, 7 aa, synthetic construct
KFVDPNK

SEQ ID NO: 126512 - protein, 7 aa, synthetic construct
KFVKIHE

SEQ ID NO: 126513 - protein, 7 aa, synthetic construct
KFVNNDR

SEQ ID NO: 126514 - protein, 7 aa, synthetic construct
KFYEKPD

SEQ ID NO: 126515 - protein, 7 aa, synthetic construct
KGAAHMV

SEQ ID NO: 126516 - protein, 7 aa, synthetic construct
KGAGHMT

SEQ ID NO: 126517 - protein, 7 aa, synthetic construct
KGAGVFV

SEQ ID NO: 126518 - protein, 7 aa, synthetic construct
KGAHPER

SEQ ID NO: 126519 - protein, 7 aa, synthetic construct
KGAHPMI

SEQ ID NO: 126520 - protein, 7 aa, synthetic construct
KGAITIM

SEQ ID NO: 126521 - protein, 7 aa, synthetic construct
KGANPDR

SEQ ID NO: 126522 - protein, 7 aa, synthetic construct
KGARLYE

SEQ ID NO: 126523 - protein, 7 aa, synthetic construct
KGARVDT

SEQ ID NO: 126524 - protein, 7 aa, synthetic construct
KGASIYM

SEQ ID NO: 126525 - protein, 7 aa, synthetic construct
KGATHPY

SEQ ID NO: 126526 - protein, 7 aa, synthetic construct
KGATYEK

SEQ ID NO: 126527 - protein, 7 aa, synthetic construct
KGDFRTT

SEQ ID NO: 126528 - protein, 7 aa, synthetic construct
KGDHRVT

SEQ ID NO: 126529 - protein, 7 aa, synthetic construct
KGDIKGT

SEQ ID NO: 126530 - protein, 7 aa, synthetic construct
KGDIYAK

SEQ ID NO: 126531 - protein, 7 aa, synthetic construct
KGDKFHS

SEQ ID NO: 126532 - protein, 7 aa, synthetic construct
KGDKSLH

SEQ ID NO: 126533 - protein, 7 aa, synthetic construct
KGDKSMY

SEQ ID NO: 126534 - protein, 7 aa, synthetic construct
KGDKYYM

SEQ ID NO: 126535 - protein, 7 aa, synthetic construct
KGDRLIT

SEQ ID NO: 126536 - protein, 7 aa, synthetic construct
KGDRMGY

SEQ ID NO: 126537 - protein, 7 aa, synthetic construct
KGDRREI

SEQ ID NO: 126538 - protein, 7 aa, synthetic construct
KGDSAKY

SEQ ID NO: 126539 - protein, 7 aa, synthetic construct
KGDSTRA

SEQ ID NO: 126540 - protein, 7 aa, synthetic construct
KGDTRLH

SEQ ID NO: 126541 - protein, 7 aa, synthetic construct
KGDVNRN

SEQ ID NO: 126542 - protein, 7 aa, synthetic construct
KGDYKPY

SEQ ID NO: 126543 - protein, 7 aa, synthetic construct
KGDYLET

SEQ ID NO: 126544 - protein, 7 aa, synthetic construct
KGDYSKS

SEQ ID NO: 126545 - protein, 7 aa, synthetic construct
KGEAGKY

SEQ ID NO: 126546 - protein, 7 aa, synthetic construct
KGEAQLR

SEQ ID NO: 126547 - protein, 7 aa, synthetic construct
KGEIRPM

SEQ ID NO: 126548 - protein, 7 aa, synthetic construct
KGENKQA

SEQ ID NO: 126549 - protein, 7 aa, synthetic construct
KGENKSY

SEQ ID NO: 126550 - protein, 7 aa, synthetic construct
KGEPKMM

SEQ ID NO: 126551 - protein, 7 aa, synthetic construct
KGERHVN

SEQ ID NO: 126552 - protein, 7 aa, synthetic construct
KGERMQI

SEQ ID NO: 126553 - protein, 7 aa, synthetic construct
KGETRPQ

SEQ ID NO: 126554 - protein, 7 aa, synthetic construct
KGEYIQK

SEQ ID NO: 126555 - protein, 7 aa, synthetic construct
KGFGGNV

SEQ ID NO: 126556 - protein, 7 aa, synthetic construct
KGFGSSH

SEQ ID NO: 126557 - protein, 7 aa, synthetic construct
KGFKALD

SEQ ID NO: 126558 - protein, 7 aa, synthetic construct
KGFKGDT

SEQ ID NO: 126559 - protein, 7 aa, synthetic construct
KGFNKDI

SEQ ID NO: 126560 - protein, 7 aa, synthetic construct
KGFRTEG

SEQ ID NO: 126561 - protein, 7 aa, synthetic construct
KGGDNRV

SEQ ID NO: 126562 - protein, 7 aa, synthetic construct
KGGDVSL

SEQ ID NO: 126563 - protein, 7 aa, synthetic construct
KGGGFGN

SEQ ID NO: 126564 - protein, 7 aa, synthetic construct
KGGHVSQ

SEQ ID NO: 126565 - protein, 7 aa, synthetic construct
KGGLGYG

SEQ ID NO: 126566 - protein, 7 aa, synthetic construct
KGGLYGN

SEQ ID NO: 126567 - protein, 7 aa, synthetic construct
KGGPSHI

SEQ ID NO: 126568 - protein, 7 aa, synthetic construct
KGGPSHV

SEQ ID NO: 126569 - protein, 7 aa, synthetic construct
KGGQHLN

SEQ ID NO: 126570 - protein, 7 aa, synthetic construct
KGGQNIH

SEQ ID NO: 126571 - protein, 7 aa, synthetic construct
KGGRDGG

SEQ ID NO: 126572 - protein, 7 aa, synthetic construct
KGGREDK

SEQ ID NO: 126573 - protein, 7 aa, synthetic construct
KGGSLDR

SEQ ID NO: 126574 - protein, 7 aa, synthetic construct
KGGYQPQ

SEQ ID NO: 126575 - protein, 7 aa, synthetic construct
KGHGMTV

SEQ ID NO: 126576 - protein, 7 aa, synthetic construct
KGHMMGT

SEQ ID NO: 126577 - protein, 7 aa, synthetic construct
KGHNQAM

SEQ ID NO: 126578 - protein, 7 aa, synthetic construct
KGHPQAI

SEQ ID NO: 126579 - protein, 7 aa, synthetic construct
KGHQFGT

SEQ ID NO: 126580 - protein, 7 aa, synthetic construct
KGHQIGL

SEQ ID NO: 126581 - protein, 7 aa, synthetic construct
KGHSKDT

SEQ ID NO: 126582 - protein, 7 aa, synthetic construct
KGHTGDR

SEQ ID NO: 126583 - protein, 7 aa, synthetic construct
KGIEKNY

SEQ ID NO: 126584 - protein, 7 aa, synthetic construct
KGIERVP

SEQ ID NO: 126585 - protein, 7 aa, synthetic construct
KGIEYKM

SEQ ID NO: 126586 - protein, 7 aa, synthetic construct
KGIGEMR

SEQ ID NO: 126587 - protein, 7 aa, synthetic construct
KGIPTKD

SEQ ID NO: 126588 - protein, 7 aa, synthetic construct
KGKAEVI

SEQ ID NO: 126589 - protein, 7 aa, synthetic construct
KGKENIM

SEQ ID NO: 126590 - protein, 7 aa, synthetic construct
KGKEQQF

SEQ ID NO: 126591 - protein, 7 aa, synthetic construct
KGKFMDS

SEQ ID NO: 126592 - protein, 7 aa, synthetic construct
KGKGPDS

SEQ ID NO: 126593 - protein, 7 aa, synthetic construct
KGKMELI

SEQ ID NO: 126594 - protein, 7 aa, synthetic construct
KGKMPDT

SEQ ID NO: 126595 - protein, 7 aa, synthetic construct
KGMGERM

SEQ ID NO: 126596 - protein, 7 aa, synthetic construct
KGMHHPP

SEQ ID NO: 126597 - protein, 7 aa, synthetic construct
KGMHSVM

SEQ ID NO: 126598 - protein, 7 aa, synthetic construct
KGMPSLH

SEQ ID NO: 126599 - protein, 7 aa, synthetic construct
KGMPVTV

SEQ ID NO: 126600 - protein, 7 aa, synthetic construct
KGMQIMQ

SEQ ID NO: 126601 - protein, 7 aa, synthetic construct
KGMRDTA

SEQ ID NO: 126602 - protein, 7 aa, synthetic construct
KGMSHQL

SEQ ID NO: 126603 - protein, 7 aa, synthetic construct
KGMTTVI

SEQ ID NO: 126604 - protein, 7 aa, synthetic construct
KGNALNW

SEQ ID NO: 126605 - protein, 7 aa, synthetic construct
KGNEKMM

SEQ ID NO: 126606 - protein, 7 aa, synthetic construct
KGNKYDA

SEQ ID NO: 126607 - protein, 7 aa, synthetic construct
KGNMQYP

SEQ ID NO: 126608 - protein, 7 aa, synthetic construct
KGNPGNW

SEQ ID NO: 126609 - protein, 7 aa, synthetic construct
KGNPRLD

SEQ ID NO: 126610 - protein, 7 aa, synthetic construct
KGNPSQY

SEQ ID NO: 126611 - protein, 7 aa, synthetic construct
KGNQGGN

SEQ ID NO: 126612 - protein, 7 aa, synthetic construct
KGNQQMW

SEQ ID NO: 126613 - protein, 7 aa, synthetic construct
KGNRLEN

SEQ ID NO: 126614 - protein, 7 aa, synthetic construct
KGNRTET

SEQ ID NO: 126615 - protein, 7 aa, synthetic construct
KGNSDKL

SEQ ID NO: 126616 - protein, 7 aa, synthetic construct
KGPAFNS

SEQ ID NO: 126617 - protein, 7 aa, synthetic construct
KGPANAF

SEQ ID NO: 126618 - protein, 7 aa, synthetic construct
KGPDSLK

SEQ ID NO: 126619 - protein, 7 aa, synthetic construct
KGPHMNM

SEQ ID NO: 126620 - protein, 7 aa, synthetic construct
KGPHQLV

SEQ ID NO: 126621 - protein, 7 aa, synthetic construct
KGPITNL

SEQ ID NO: 126622 - protein, 7 aa, synthetic construct
KGPNTLL

SEQ ID NO: 126623 - protein, 7 aa, synthetic construct
KGPPMIS

SEQ ID NO: 126624 - protein, 7 aa, synthetic construct
KGPPYPS

SEQ ID NO: 126625 - protein, 7 aa, synthetic construct
KGPRQDQ

SEQ ID NO: 126626 - protein, 7 aa, synthetic construct
KGPTGTW

SEQ ID NO: 126627 - protein, 7 aa, synthetic construct
KGPVHLP

SEQ ID NO: 126628 - protein, 7 aa, synthetic construct
KGPYTNN

SEQ ID NO: 126629 - protein, 7 aa, synthetic construct
KGPYTSQ

SEQ ID NO: 126630 - protein, 7 aa, synthetic construct
KGQAITF

SEQ ID NO: 126631 - protein, 7 aa, synthetic construct
KGQAMWD

SEQ ID NO: 126632 - protein, 7 aa, synthetic construct
KGQEIRQ

SEQ ID NO: 126633 - protein, 7 aa, synthetic construct
KGQFVSH

SEQ ID NO: 126634 - protein, 7 aa, synthetic construct
KGQHADR

SEQ ID NO: 126635 - protein, 7 aa, synthetic construct
KGQHMHI

SEQ ID NO: 126636 - protein, 7 aa, synthetic construct
KGQLSVI

SEQ ID NO: 126637 - protein, 7 aa, synthetic construct
KGQMQMV

SEQ ID NO: 126638 - protein, 7 aa, synthetic construct
KGQPHTY

SEQ ID NO: 126639 - protein, 7 aa, synthetic construct
KGQQEKA

SEQ ID NO: 126640 - protein, 7 aa, synthetic construct
KGQQHLN

SEQ ID NO: 126641 - protein, 7 aa, synthetic construct
KGQQYMS

SEQ ID NO: 126642 - protein, 7 aa, synthetic construct
KGQRDTS

SEQ ID NO: 126643 - protein, 7 aa, synthetic construct
KGQREHA

SEQ ID NO: 126644 - protein, 7 aa, synthetic construct
KGQSAPH

SEQ ID NO: 126645 - protein, 7 aa, synthetic construct
KGQSNAV

SEQ ID NO: 126646 - protein, 7 aa, synthetic construct
KGQTHQN

SEQ ID NO: 126647 - protein, 7 aa, synthetic construct
KGQYGIQ

SEQ ID NO: 126648 - protein, 7 aa, synthetic construct
KGRADLG

SEQ ID NO: 126649 - protein, 7 aa, synthetic construct
KGRADQG

SEQ ID NO: 126650 - protein, 7 aa, synthetic construct
KGRDGSQ

SEQ ID NO: 126651 - protein, 7 aa, synthetic construct
KGRDINS

SEQ ID NO: 126652 - protein, 7 aa, synthetic construct
KGRDTYG

SEQ ID NO: 126653 - protein, 7 aa, synthetic construct
KGRIPDA

SEQ ID NO: 126654 - protein, 7 aa, synthetic construct
KGRIPLE

SEQ ID NO: 126655 - protein, 7 aa, synthetic construct
KGRPDLS

SEQ ID NO: 126656 - protein, 7 aa, synthetic construct
KGRSDFG

SEQ ID NO: 126657 - protein, 7 aa, synthetic construct
KGRTNDP

SEQ ID NO: 126658 - protein, 7 aa, synthetic construct
KGRVMTE

SEQ ID NO: 126659 - protein, 7 aa, synthetic construct
KGSAHTY

SEQ ID NO: 126660 - protein, 7 aa, synthetic construct
KGSATSW

SEQ ID NO: 126661 - protein, 7 aa, synthetic construct
KGSETRM

SEQ ID NO: 126662 - protein, 7 aa, synthetic construct
KGSHPER

SEQ ID NO: 126663 - protein, 7 aa, synthetic construct
KGSIRGD

SEQ ID NO: 126664 - protein, 7 aa, synthetic construct
KGSQLDK

SEQ ID NO: 126665 - protein, 7 aa, synthetic construct
KGSQTYM

SEQ ID NO: 126666 - protein, 7 aa, synthetic construct
KGSRAME

SEQ ID NO: 126667 - protein, 7 aa, synthetic construct
KGSRGEL

SEQ ID NO: 126668 - protein, 7 aa, synthetic construct
KGSSHLT

SEQ ID NO: 126669 - protein, 7 aa, synthetic construct
KGSYEKQ

SEQ ID NO: 126670 - protein, 7 aa, synthetic construct
KGTAGAG

SEQ ID NO: 126671 - protein, 7 aa, synthetic construct
KGTAYGM

SEQ ID NO: 126672 - protein, 7 aa, synthetic construct
KGTEYQK

SEQ ID NO: 126673 - protein, 7 aa, synthetic construct
KGTMSSY

SEQ ID NO: 126674 - protein, 7 aa, synthetic construct
KGTPYVP

SEQ ID NO: 126675 - protein, 7 aa, synthetic construct
KGTRGDM

SEQ ID NO: 126676 - protein, 7 aa, synthetic construct
KGTTKDP

SEQ ID NO: 126677 - protein, 7 aa, synthetic construct
KGTTPPY

SEQ ID NO: 126678 - protein, 7 aa, synthetic construct
KGTWMKD

SEQ ID NO: 126679 - protein, 7 aa, synthetic construct
KGVHQPV

SEQ ID NO: 126680 - protein, 7 aa, synthetic construct
KGVKDLY

SEQ ID NO: 126681 - protein, 7 aa, synthetic construct
KGVPSYS

SEQ ID NO: 126682 - protein, 7 aa, synthetic construct
KGVPYSP

SEQ ID NO: 126683 - protein, 7 aa, synthetic construct
KGYATSM

SEQ ID NO: 126684 - protein, 7 aa, synthetic construct
KGYGGEK

SEQ ID NO: 126685 - protein, 7 aa, synthetic construct
KGYHSGD

SEQ ID NO: 126686 - protein, 7 aa, synthetic construct
KGYKGDP

SEQ ID NO: 126687 - protein, 7 aa, synthetic construct
KGYQYAD

SEQ ID NO: 126688 - protein, 7 aa, synthetic construct
KGYSKDG

SEQ ID NO: 126689 - protein, 7 aa, synthetic construct
KGYSTTN

SEQ ID NO: 126690 - protein, 7 aa, synthetic construct
KHAGMMP

SEQ ID NO: 126691 - protein, 7 aa, synthetic construct
KHAGNGM

SEQ ID NO: 126692 - protein, 7 aa, synthetic construct
KHAGPNT

SEQ ID NO: 126693 - protein, 7 aa, synthetic construct
KHAGQIT

SEQ ID NO: 126694 - protein, 7 aa, synthetic construct
KHAGTFA

SEQ ID NO: 126695 - protein, 7 aa, synthetic construct
KHAHNPS

SEQ ID NO: 126696 - protein, 7 aa, synthetic construct
KHAMPGV

SEQ ID NO: 126697 - protein, 7 aa, synthetic construct
KHAPFNA

SEQ ID NO: 126698 - protein, 7 aa, synthetic construct
KHAPPLM

SEQ ID NO: 126699 - protein, 7 aa, synthetic construct
KHAPVGI

SEQ ID NO: 126700 - protein, 7 aa, synthetic construct
KHAQINL

SEQ ID NO: 126701 - protein, 7 aa, synthetic construct
KHAQNVM

SEQ ID NO: 126702 - protein, 7 aa, synthetic construct
KHAQPGN

SEQ ID NO: 126703 - protein, 7 aa, synthetic construct
KHAQTQF

SEQ ID NO: 126704 - protein, 7 aa, synthetic construct
KHASEGR

SEQ ID NO: 126705 - protein, 7 aa, synthetic construct
KHASSPM

SEQ ID NO: 126706 - protein, 7 aa, synthetic construct
KHATGML

SEQ ID NO: 126707 - protein, 7 aa, synthetic construct
KHATHTL

SEQ ID NO: 126708 - protein, 7 aa, synthetic construct
KHATHYS

SEQ ID NO: 126709 - protein, 7 aa, synthetic construct
KHATNLS

SEQ ID NO: 126710 - protein, 7 aa, synthetic construct
KHATQAM

SEQ ID NO: 126711 - protein, 7 aa, synthetic construct
KHATVSM

SEQ ID NO: 126712 - protein, 7 aa, synthetic construct
KHAVLKE

SEQ ID NO: 126713 - protein, 7 aa, synthetic construct
KHAVQMP

SEQ ID NO: 126714 - protein, 7 aa, synthetic construct
KHDAMAP

SEQ ID NO: 126715 - protein, 7 aa, synthetic construct
KHDAQKS

SEQ ID NO: 126716 - protein, 7 aa, synthetic construct
KHDHRFD

SEQ ID NO: 126717 - protein, 7 aa, synthetic construct
KHDIAKQ

SEQ ID NO: 126718 - protein, 7 aa, synthetic construct
KHDRPFA

SEQ ID NO: 126719 - protein, 7 aa, synthetic construct
KHDSHRP

SEQ ID NO: 126720 - protein, 7 aa, synthetic construct
KHDTITL

SEQ ID NO: 126721 - protein, 7 aa, synthetic construct
KHDVGTR

SEQ ID NO: 126722 - protein, 7 aa, synthetic construct
KHEIGSA

SEQ ID NO: 126723 - protein, 7 aa, synthetic construct
KHEKPER

SEQ ID NO: 126724 - protein, 7 aa, synthetic construct
KHEKTLM

SEQ ID NO: 126725 - protein, 7 aa, synthetic construct
KHEKTTV

SEQ ID NO: 126726 - protein, 7 aa, synthetic construct
KHEMSEF

SEQ ID NO: 126727 - protein, 7 aa, synthetic construct
KHFANRE

SEQ ID NO: 126728 - protein, 7 aa, synthetic construct
KHGAGQY

SEQ ID NO: 126729 - protein, 7 aa, synthetic construct
KHGAPNT

SEQ ID NO: 126730 - protein, 7 aa, synthetic construct
KHGGLMS

SEQ ID NO: 126731 - protein, 7 aa, synthetic construct
KHGGLTM

SEQ ID NO: 126732 - protein, 7 aa, synthetic construct
KHGGSSL

SEQ ID NO: 126733 - protein, 7 aa, synthetic construct
KHGGVTF

SEQ ID NO: 126734 - protein, 7 aa, synthetic construct
KHGIGGI

SEQ ID NO: 126735 - protein, 7 aa, synthetic construct
KHGINMT

SEQ ID NO: 126736 - protein, 7 aa, synthetic construct
KHGLTPL

SEQ ID NO: 126737 - protein, 7 aa, synthetic construct
KHGNPII

SEQ ID NO: 126738 - protein, 7 aa, synthetic construct
KHGNPVN

SEQ ID NO: 126739 - protein, 7 aa, synthetic construct
KHGNQNQ

SEQ ID NO: 126740 - protein, 7 aa, synthetic construct
KHGPALT

SEQ ID NO: 126741 - protein, 7 aa, synthetic construct
KHGPLMQ

SEQ ID NO: 126742 - protein, 7 aa, synthetic construct
KHGPNVL

SEQ ID NO: 126743 - protein, 7 aa, synthetic construct
KHGPQAV

SEQ ID NO: 126744 - protein, 7 aa, synthetic construct
KHGPQMV

SEQ ID NO: 126745 - protein, 7 aa, synthetic construct
KHGPYKE

SEQ ID NO: 126746 - protein, 7 aa, synthetic construct
KHGQMQT

SEQ ID NO: 126747 - protein, 7 aa, synthetic construct
KHGQTQQ

SEQ ID NO: 126748 - protein, 7 aa, synthetic construct
KHGTVPF

SEQ ID NO: 126749 - protein, 7 aa, synthetic construct
KHGTYSM

SEQ ID NO: 126750 - protein, 7 aa, synthetic construct
KHGVLMN

SEQ ID NO: 126751 - protein, 7 aa, synthetic construct
KHHKEWE

SEQ ID NO: 126752 - protein, 7 aa, synthetic construct
KHHMITS

SEQ ID NO: 126753 - protein, 7 aa, synthetic construct
KHHNPGD

SEQ ID NO: 126754 - protein, 7 aa, synthetic construct
KHHPMNG

SEQ ID NO: 126755 - protein, 7 aa, synthetic construct
KHHRDEV

SEQ ID NO: 126756 - protein, 7 aa, synthetic construct
KHHSHGG

SEQ ID NO: 126757 - protein, 7 aa, synthetic construct
KHHSISP

SEQ ID NO: 126758 - protein, 7 aa, synthetic construct
KHIAATA

SEQ ID NO: 126759 - protein, 7 aa, synthetic construct
KHIAMSA

SEQ ID NO: 126760 - protein, 7 aa, synthetic construct
KHIANQT

SEQ ID NO: 126761 - protein, 7 aa, synthetic construct
KHIASTI

SEQ ID NO: 126762 - protein, 7 aa, synthetic construct
KHIETRV

SEQ ID NO: 126763 - protein, 7 aa, synthetic construct
KHINPNP

SEQ ID NO: 126764 - protein, 7 aa, synthetic construct
KHINTNV

SEQ ID NO: 126765 - protein, 7 aa, synthetic construct
KHINVQI

SEQ ID NO: 126766 - protein, 7 aa, synthetic construct
KHIPNYP

SEQ ID NO: 126767 - protein, 7 aa, synthetic construct
KHIPSNQ

SEQ ID NO: 126768 - protein, 7 aa, synthetic construct
KHIQMAS

SEQ ID NO: 126769 - protein, 7 aa, synthetic construct
KHIQMTP

SEQ ID NO: 126770 - protein, 7 aa, synthetic construct
KHIQQIV

SEQ ID NO: 126771 - protein, 7 aa, synthetic construct
KHIQQPT

SEQ ID NO: 126772 - protein, 7 aa, synthetic construct
KHISGTM

SEQ ID NO: 126773 - protein, 7 aa, synthetic construct
KHISSGM

SEQ ID NO: 126774 - protein, 7 aa, synthetic construct
KHISTGV

SEQ ID NO: 126775 - protein, 7 aa, synthetic construct
KHITALN

SEQ ID NO: 126776 - protein, 7 aa, synthetic construct
KHITQTM

SEQ ID NO: 126777 - protein, 7 aa, synthetic construct
KHKDLTI

SEQ ID NO: 126778 - protein, 7 aa, synthetic construct
KHKETII

SEQ ID NO: 126779 - protein, 7 aa, synthetic construct
KHKFMVE

SEQ ID NO: 126780 - protein, 7 aa, synthetic construct
KHKIQDF

SEQ ID NO: 126781 - protein, 7 aa, synthetic construct
KHKPLEV

SEQ ID NO: 126782 - protein, 7 aa, synthetic construct
KHLAGGM

SEQ ID NO: 126783 - protein, 7 aa, synthetic construct
KHLAGTM

SEQ ID NO: 126784 - protein, 7 aa, synthetic construct
KHLGVMP

SEQ ID NO: 126785 - protein, 7 aa, synthetic construct
KHLHNQT

SEQ ID NO: 126786 - protein, 7 aa, synthetic construct
KHLNMSM

SEQ ID NO: 126787 - protein, 7 aa, synthetic construct
KHLQGAA

SEQ ID NO: 126788 - protein, 7 aa, synthetic construct
KHLQTSL

SEQ ID NO: 126789 - protein, 7 aa, synthetic construct
KHLSGGL

SEQ ID NO: 126790 - protein, 7 aa, synthetic construct
KHMAIGP

SEQ ID NO: 126791 - protein, 7 aa, synthetic construct
KHMANTT

SEQ ID NO: 126792 - protein, 7 aa, synthetic construct
KHMAVMP

SEQ ID NO: 126793 - protein, 7 aa, synthetic construct
KHMGAIV

SEQ ID NO: 126794 - protein, 7 aa, synthetic construct
KHMHPMN

SEQ ID NO: 126795 - protein, 7 aa, synthetic construct
KHMKDVY

SEQ ID NO: 126796 - protein, 7 aa, synthetic construct
KHMNMGS

SEQ ID NO: 126797 - protein, 7 aa, synthetic construct
KHMPSSN

SEQ ID NO: 126798 - protein, 7 aa, synthetic construct
KHMQQSI

SEQ ID NO: 126799 - protein, 7 aa, synthetic construct
KHMTASA

SEQ ID NO: 126800 - protein, 7 aa, synthetic construct
KHMTIQN

SEQ ID NO: 126801 - protein, 7 aa, synthetic construct
KHMVGNT

SEQ ID NO: 126802 - protein, 7 aa, synthetic construct
KHNAGVL

SEQ ID NO: 126803 - protein, 7 aa, synthetic construct
KHNAQSV

SEQ ID NO: 126804 - protein, 7 aa, synthetic construct
KHNAVST

SEQ ID NO: 126805 - protein, 7 aa, synthetic construct
KHNDMKS

SEQ ID NO: 126806 - protein, 7 aa, synthetic construct
KHNIERS

SEQ ID NO: 126807 - protein, 7 aa, synthetic construct
KHNITGQ

SEQ ID NO: 126808 - protein, 7 aa, synthetic construct
KHNLPPN

SEQ ID NO: 126809 - protein, 7 aa, synthetic construct
KHNMPTN

SEQ ID NO: 126810 - protein, 7 aa, synthetic construct
KHNNPQN

SEQ ID NO: 126811 - protein, 7 aa, synthetic construct
KHNNQPQ

SEQ ID NO: 126812 - protein, 7 aa, synthetic construct
KHNPGPT

SEQ ID NO: 126813 - protein, 7 aa, synthetic construct
KHNPLPV

SEQ ID NO: 126814 - protein, 7 aa, synthetic construct
KHNPNVP

SEQ ID NO: 126815 - protein, 7 aa, synthetic construct
KHNPPQN

SEQ ID NO: 126816 - protein, 7 aa, synthetic construct
KHNPQVL

SEQ ID NO: 126817 - protein, 7 aa, synthetic construct
KHNPSMA

SEQ ID NO: 126818 - protein, 7 aa, synthetic construct
KHNPTPH

SEQ ID NO: 126819 - protein, 7 aa, synthetic construct
KHNQPMN

SEQ ID NO: 126820 - protein, 7 aa, synthetic construct
KHNQVQA

SEQ ID NO: 126821 - protein, 7 aa, synthetic construct
KHNSQLM

SEQ ID NO: 126822 - protein, 7 aa, synthetic construct
KHNTAMA

SEQ ID NO: 126823 - protein, 7 aa, synthetic construct
KHNTSVW

SEQ ID NO: 126824 - protein, 7 aa, synthetic construct
KHNTTQI

SEQ ID NO: 126825 - protein, 7 aa, synthetic construct
KHNTTTY

SEQ ID NO: 126826 - protein, 7 aa, synthetic construct
KHNVPNQ

SEQ ID NO: 126827 - protein, 7 aa, synthetic construct
KHNVSPM

SEQ ID NO: 126828 - protein, 7 aa, synthetic construct
KHPAPML

SEQ ID NO: 126829 - protein, 7 aa, synthetic construct
KHPAYVQ

SEQ ID NO: 126830 - protein, 7 aa, synthetic construct
KHPGPAP

SEQ ID NO: 126831 - protein, 7 aa, synthetic construct
KHPHPLN

SEQ ID NO: 126832 - protein, 7 aa, synthetic construct
KHPHSAS

SEQ ID NO: 126833 - protein, 7 aa, synthetic construct
KHPIRSE

SEQ ID NO: 126834 - protein, 7 aa, synthetic construct
KHPITSP

SEQ ID NO: 126835 - protein, 7 aa, synthetic construct
KHPNGFS

SEQ ID NO: 126836 - protein, 7 aa, synthetic construct
KHPNMPH

SEQ ID NO: 126837 - protein, 7 aa, synthetic construct
KHPNVAM

SEQ ID NO: 126838 - protein, 7 aa, synthetic construct
KHPPAVT

SEQ ID NO: 126839 - protein, 7 aa, synthetic construct
KHPPGAS

SEQ ID NO: 126840 - protein, 7 aa, synthetic construct
KHPPPSP

SEQ ID NO: 126841 - protein, 7 aa, synthetic construct
KHPQERQ

SEQ ID NO: 126842 - protein, 7 aa, synthetic construct
KHPQQVF

SEQ ID NO: 126843 - protein, 7 aa, synthetic construct
KHPQTMV

SEQ ID NO: 126844 - protein, 7 aa, synthetic construct
KHPSTFP

SEQ ID NO: 126845 - protein, 7 aa, synthetic construct
KHPTQIT

SEQ ID NO: 126846 - protein, 7 aa, synthetic construct
KHPVATY

SEQ ID NO: 126847 - protein, 7 aa, synthetic construct
KHQAGLV

SEQ ID NO: 126848 - protein, 7 aa, synthetic construct
KHQAIVT

SEQ ID NO: 126849 - protein, 7 aa, synthetic construct
KHQALSQ

SEQ ID NO: 126850 - protein, 7 aa, synthetic construct
KHQAVAQ

SEQ ID NO: 126851 - protein, 7 aa, synthetic construct
KHQAYAT

SEQ ID NO: 126852 - protein, 7 aa, synthetic construct
KHQDWMG

SEQ ID NO: 126853 - protein, 7 aa, synthetic construct
KHQGQSM

SEQ ID NO: 126854 - protein, 7 aa, synthetic construct
KHQIGQT

SEQ ID NO: 126855 - protein, 7 aa, synthetic construct
KHQIVPN

SEQ ID NO: 126856 - protein, 7 aa, synthetic construct
KHQLGPM

SEQ ID NO: 126857 - protein, 7 aa, synthetic construct
KHQMINS

SEQ ID NO: 126858 - protein, 7 aa, synthetic construct
KHQMLQI

SEQ ID NO: 126859 - protein, 7 aa, synthetic construct
KHQMQQI

SEQ ID NO: 126860 - protein, 7 aa, synthetic construct
KHQNIGT

SEQ ID NO: 126861 - protein, 7 aa, synthetic construct
KHQNIQL

SEQ ID NO: 126862 - protein, 7 aa, synthetic construct
KHQNTML

SEQ ID NO: 126863 - protein, 7 aa, synthetic construct
KHQPLPQ

SEQ ID NO: 126864 - protein, 7 aa, synthetic construct
KHQPLTS

SEQ ID NO: 126865 - protein, 7 aa, synthetic construct
KHQPMPS

SEQ ID NO: 126866 - protein, 7 aa, synthetic construct
KHQPSNM

SEQ ID NO: 126867 - protein, 7 aa, synthetic construct
KHQQGMA

SEQ ID NO: 126868 - protein, 7 aa, synthetic construct
KHQQNPV

SEQ ID NO: 126869 - protein, 7 aa, synthetic construct
KHQQQVT

SEQ ID NO: 126870 - protein, 7 aa, synthetic construct
KHQQTII

SEQ ID NO: 126871 - protein, 7 aa, synthetic construct
KHQSNLA

SEQ ID NO: 126872 - protein, 7 aa, synthetic construct
KHQTFQG

SEQ ID NO: 126873 - protein, 7 aa, synthetic construct
KHQTLPV

SEQ ID NO: 126874 - protein, 7 aa, synthetic construct
KHQTPNQ

SEQ ID NO: 126875 - protein, 7 aa, synthetic construct
KHQTQQP

SEQ ID NO: 126876 - protein, 7 aa, synthetic construct
KHQTVTM

SEQ ID NO: 126877 - protein, 7 aa, synthetic construct
KHQVGPT

SEQ ID NO: 126878 - protein, 7 aa, synthetic construct
KHQVTMV

SEQ ID NO: 126879 - protein, 7 aa, synthetic construct
KHQVYGS

SEQ ID NO: 126880 - protein, 7 aa, synthetic construct
KHRDQSG

SEQ ID NO: 126881 - protein, 7 aa, synthetic construct
KHRDTDW

SEQ ID NO: 126882 - protein, 7 aa, synthetic construct
KHSAGAF

SEQ ID NO: 126883 - protein, 7 aa, synthetic construct
KHSDSGR

SEQ ID NO: 126884 - protein, 7 aa, synthetic construct
KHSEKMT

SEQ ID NO: 126885 - protein, 7 aa, synthetic construct
KHSGIIT

SEQ ID NO: 126886 - protein, 7 aa, synthetic construct
KHSGMIA

SEQ ID NO: 126887 - protein, 7 aa, synthetic construct
KHSGTLQ

SEQ ID NO: 126888 - protein, 7 aa, synthetic construct
KHSLPNN

SEQ ID NO: 126889 - protein, 7 aa, synthetic construct
KHSLSSV

SEQ ID NO: 126890 - protein, 7 aa, synthetic construct
KHSMNLS

SEQ ID NO: 126891 - protein, 7 aa, synthetic construct
KHSNMVV

SEQ ID NO: 126892 - protein, 7 aa, synthetic construct
KHSNVMS

SEQ ID NO: 126893 - protein, 7 aa, synthetic construct
KHSPNYT

SEQ ID NO: 126894 - protein, 7 aa, synthetic construct
KHSPQLM

SEQ ID NO: 126895 - protein, 7 aa, synthetic construct
KHSPVVN

SEQ ID NO: 126896 - protein, 7 aa, synthetic construct
KHSQPVL

SEQ ID NO: 126897 - protein, 7 aa, synthetic construct
KHSQYVH

SEQ ID NO: 126898 - protein, 7 aa, synthetic construct
KHSSQLM

SEQ ID NO: 126899 - protein, 7 aa, synthetic construct
KHSVIPS

SEQ ID NO: 126900 - protein, 7 aa, synthetic construct
KHSYMSD

SEQ ID NO: 126901 - protein, 7 aa, synthetic construct
KHTAANT

SEQ ID NO: 126902 - protein, 7 aa, synthetic construct
KHTANMN

SEQ ID NO: 126903 - protein, 7 aa, synthetic construct
KHTANVQ

SEQ ID NO: 126904 - protein, 7 aa, synthetic construct
KHTETKM

SEQ ID NO: 126905 - protein, 7 aa, synthetic construct
KHTGEMR

SEQ ID NO: 126906 - protein, 7 aa, synthetic construct
KHTGPKD

SEQ ID NO: 126907 - protein, 7 aa, synthetic construct
KHTGVNT

SEQ ID NO: 126908 - protein, 7 aa, synthetic construct
KHTGVVM

SEQ ID NO: 126909 - protein, 7 aa, synthetic construct
KHTIGGL

SEQ ID NO: 126910 - protein, 7 aa, synthetic construct
KHTIQTT

SEQ ID NO: 126911 - protein, 7 aa, synthetic construct
KHTLNSS

SEQ ID NO: 126912 - protein, 7 aa, synthetic construct
KHTLSGQ

SEQ ID NO: 126913 - protein, 7 aa, synthetic construct
KHTNLMT

SEQ ID NO: 126914 - protein, 7 aa, synthetic construct
KHTNPNT

SEQ ID NO: 126915 - protein, 7 aa, synthetic construct
KHTPVGI

SEQ ID NO: 126916 - protein, 7 aa, synthetic construct
KHTQAVT

SEQ ID NO: 126917 - protein, 7 aa, synthetic construct
KHTQPSN

SEQ ID NO: 126918 - protein, 7 aa, synthetic construct
KHTSSVV

SEQ ID NO: 126919 - protein, 7 aa, synthetic construct
KHTTAPI

SEQ ID NO: 126920 - protein, 7 aa, synthetic construct
KHTTGQQ

SEQ ID NO: 126921 - protein, 7 aa, synthetic construct
KHTTHGF

SEQ ID NO: 126922 - protein, 7 aa, synthetic construct
KHTTPGQ

SEQ ID NO: 126923 - protein, 7 aa, synthetic construct
KHTTQNS

SEQ ID NO: 126924 - protein, 7 aa, synthetic construct
KHTVAAV

SEQ ID NO: 126925 - protein, 7 aa, synthetic construct
KHTVPNM

SEQ ID NO: 126926 - protein, 7 aa, synthetic construct
KHTVRES

SEQ ID NO: 126927 - protein, 7 aa, synthetic construct
KHTVREV

SEQ ID NO: 126928 - protein, 7 aa, synthetic construct
KHVALNV

SEQ ID NO: 126929 - protein, 7 aa, synthetic construct
KHVGLAN

SEQ ID NO: 126930 - protein, 7 aa, synthetic construct
KHVGPIQ

SEQ ID NO: 126931 - protein, 7 aa, synthetic construct
KHVGTNM

SEQ ID NO: 126932 - protein, 7 aa, synthetic construct
KHVHVKE

SEQ ID NO: 126933 - protein, 7 aa, synthetic construct
KHVIPTN

SEQ ID NO: 126934 - protein, 7 aa, synthetic construct
KHVMNPS

SEQ ID NO: 126935 - protein, 7 aa, synthetic construct
KHVNAQV

SEQ ID NO: 126936 - protein, 7 aa, synthetic construct
KHVNIQL

SEQ ID NO: 126937 - protein, 7 aa, synthetic construct
KHVQITN

SEQ ID NO: 126938 - protein, 7 aa, synthetic construct
KHVQQPN

SEQ ID NO: 126939 - protein, 7 aa, synthetic construct
KHVSTVV

SEQ ID NO: 126940 - protein, 7 aa, synthetic construct
KHVTMMG

SEQ ID NO: 126941 - protein, 7 aa, synthetic construct
KHVTTHS

SEQ ID NO: 126942 - protein, 7 aa, synthetic construct
KHVTVPM

SEQ ID NO: 126943 - protein, 7 aa, synthetic construct
KHYDRGA

SEQ ID NO: 126944 - protein, 7 aa, synthetic construct
KHYQSGD

SEQ ID NO: 126945 - protein, 7 aa, synthetic construct
KIAHHAV

SEQ ID NO: 126946 - protein, 7 aa, synthetic construct
KIAHQDR

SEQ ID NO: 126947 - protein, 7 aa, synthetic construct
KIALRHE

SEQ ID NO: 126948 - protein, 7 aa, synthetic construct
KIAMAHA

SEQ ID NO: 126949 - protein, 7 aa, synthetic construct
KIAPRFE

SEQ ID NO: 126950 - protein, 7 aa, synthetic construct
KIAQGHY

SEQ ID NO: 126951 - protein, 7 aa, synthetic construct
KIARQDN

SEQ ID NO: 126952 - protein, 7 aa, synthetic construct
KIARVEV

SEQ ID NO: 126953 - protein, 7 aa, synthetic construct
KIAVQQL

SEQ ID NO: 126954 - protein, 7 aa, synthetic construct
KIDHKNY

SEQ ID NO: 126955 - protein, 7 aa, synthetic construct
KIDKANW

SEQ ID NO: 126956 - protein, 7 aa, synthetic construct
KIDRSYN

SEQ ID NO: 126957 - protein, 7 aa, synthetic construct
KIEGSVK

SEQ ID NO: 126958 - protein, 7 aa, synthetic construct
KIENTYR

SEQ ID NO: 126959 - protein, 7 aa, synthetic construct
KIERAGV

SEQ ID NO: 126960 - protein, 7 aa, synthetic construct
KIERQVL

SEQ ID NO: 126961 - protein, 7 aa, synthetic construct
KIETRPY

SEQ ID NO: 126962 - protein, 7 aa, synthetic construct
KIGHMAV

SEQ ID NO: 126963 - protein, 7 aa, synthetic construct
KIGHSSM

SEQ ID NO: 126964 - protein, 7 aa, synthetic construct
KIGQHMT

SEQ ID NO: 126965 - protein, 7 aa, synthetic construct
KIGRETY

SEQ ID NO: 126966 - protein, 7 aa, synthetic construct
KIGSTHM

SEQ ID NO: 126967 - protein, 7 aa, synthetic construct
KIGVPIN

SEQ ID NO: 126968 - protein, 7 aa, synthetic construct
KIGVPMT

SEQ ID NO: 126969 - protein, 7 aa, synthetic construct
KIGYSTS

SEQ ID NO: 126970 - protein, 7 aa, synthetic construct
KIGYTKD

SEQ ID NO: 126971 - protein, 7 aa, synthetic construct
KIHAVHA

SEQ ID NO: 126972 - protein, 7 aa, synthetic construct
KIHAVSH

SEQ ID NO: 126973 - protein, 7 aa, synthetic construct
KIHGASM

SEQ ID NO: 126974 - protein, 7 aa, synthetic construct
KIHGFKD

SEQ ID NO: 126975 - protein, 7 aa, synthetic construct
KIHGNFA

SEQ ID NO: 126976 - protein, 7 aa, synthetic construct
KIHGPTH

SEQ ID NO: 126977 - protein, 7 aa, synthetic construct
KIHGQNT

SEQ ID NO: 126978 - protein, 7 aa, synthetic construct
KIHHPIA

SEQ ID NO: 126979 - protein, 7 aa, synthetic construct
KIHHSTA

SEQ ID NO: 126980 - protein, 7 aa, synthetic construct
KIHKFQE

SEQ ID NO: 126981 - protein, 7 aa, synthetic construct
KIHMINP

SEQ ID NO: 126982 - protein, 7 aa, synthetic construct
KIHMQNV

SEQ ID NO: 126983 - protein, 7 aa, synthetic construct
KIHMSQA

SEQ ID NO: 126984 - protein, 7 aa, synthetic construct
KIHNISA

SEQ ID NO: 126985 - protein, 7 aa, synthetic construct
KIHNPVS

SEQ ID NO: 126986 - protein, 7 aa, synthetic construct
KIHNQSS

SEQ ID NO: 126987 - protein, 7 aa, synthetic construct
KIHNVMN

SEQ ID NO: 126988 - protein, 7 aa, synthetic construct
KIHPAMN

SEQ ID NO: 126989 - protein, 7 aa, synthetic construct
KIHQADR

SEQ ID NO: 126990 - protein, 7 aa, synthetic construct
KIHQQMT

SEQ ID NO: 126991 - protein, 7 aa, synthetic construct
KIHQVAM

SEQ ID NO: 126992 - protein, 7 aa, synthetic construct
KIHSMQN

SEQ ID NO: 126993 - protein, 7 aa, synthetic construct
KIHSTAF

SEQ ID NO: 126994 - protein, 7 aa, synthetic construct
KIHTPGQ

SEQ ID NO: 126995 - protein, 7 aa, synthetic construct
KIHTQTQ

SEQ ID NO: 126996 - protein, 7 aa, synthetic construct
KIHTTGN

SEQ ID NO: 126997 - protein, 7 aa, synthetic construct
KIIENGR

SEQ ID NO: 126998 - protein, 7 aa, synthetic construct
KIIKDFG

SEQ ID NO: 126999 - protein, 7 aa, synthetic construct
KIIQSHA

SEQ ID NO: 127000 - protein, 7 aa, synthetic construct
KIIRGVE

SEQ ID NO: 127001 - protein, 7 aa, synthetic construct
KIIRTAE

SEQ ID NO: 127002 - protein, 7 aa, synthetic construct
KIKDFPA

SEQ ID NO: 127003 - protein, 7 aa, synthetic construct
KIKDGYM

SEQ ID NO: 127004 - protein, 7 aa, synthetic construct
KIKDYAT

SEQ ID NO: 127005 - protein, 7 aa, synthetic construct
KIKEGYH

SEQ ID NO: 127006 - protein, 7 aa, synthetic construct
KIKEMIY

SEQ ID NO: 127007 - protein, 7 aa, synthetic construct
KIKEPRD

SEQ ID NO: 127008 - protein, 7 aa, synthetic construct
KIKETWA

SEQ ID NO: 127009 - protein, 7 aa, synthetic construct
KIKEYGT

SEQ ID NO: 127010 - protein, 7 aa, synthetic construct
KIKGPLD

SEQ ID NO: 127011 - protein, 7 aa, synthetic construct
KIKHVID

SEQ ID NO: 127012 - protein, 7 aa, synthetic construct
KILRANE

SEQ ID NO: 127013 - protein, 7 aa, synthetic construct
KIMHNNL

SEQ ID NO: 127014 - protein, 7 aa, synthetic construct
KIMHQVA

SEQ ID NO: 127015 - protein, 7 aa, synthetic construct
KIMPATH

SEQ ID NO: 127016 - protein, 7 aa, synthetic construct
KIMPIDR

SEQ ID NO: 127017 - protein, 7 aa, synthetic construct
KIMPMAA

SEQ ID NO: 127018 - protein, 7 aa, synthetic construct
KIMQSSH

SEQ ID NO: 127019 - protein, 7 aa, synthetic construct
KIMRDGI

SEQ ID NO: 127020 - protein, 7 aa, synthetic construct
KIMRPEM

SEQ ID NO: 127021 - protein, 7 aa, synthetic construct
KINARDM

SEQ ID NO: 127022 - protein, 7 aa, synthetic construct
KINEKQW

SEQ ID NO: 127023 - protein, 7 aa, synthetic construct
KINQESR

SEQ ID NO: 127024 - protein, 7 aa, synthetic construct
KINRLLE

SEQ ID NO: 127025 - protein, 7 aa, synthetic construct
KINRQSE

SEQ ID NO: 127026 - protein, 7 aa, synthetic construct
KINTHVM

SEQ ID NO: 127027 - protein, 7 aa, synthetic construct
KIPASWE

SEQ ID NO: 127028 - protein, 7 aa, synthetic construct
KIPGHIY

SEQ ID NO: 127029 - protein, 7 aa, synthetic construct
KIPGLGS

SEQ ID NO: 127030 - protein, 7 aa, synthetic construct
KIPGPAH

SEQ ID NO: 127031 - protein, 7 aa, synthetic construct
KIPGQGW

SEQ ID NO: 127032 - protein, 7 aa, synthetic construct
KIPHAMQ

SEQ ID NO: 127033 - protein, 7 aa, synthetic construct
KIPHATY

SEQ ID NO: 127034 - protein, 7 aa, synthetic construct
KIPHSLP

SEQ ID NO: 127035 - protein, 7 aa, synthetic construct
KIPHTIT

SEQ ID NO: 127036 - protein, 7 aa, synthetic construct
KIPHYAG

SEQ ID NO: 127037 - protein, 7 aa, synthetic construct
KIPLHQS

SEQ ID NO: 127038 - protein, 7 aa, synthetic construct
KIPMDSR

SEQ ID NO: 127039 - protein, 7 aa, synthetic construct
KIPMSQA

SEQ ID NO: 127040 - protein, 7 aa, synthetic construct
KIPNMPL

SEQ ID NO: 127041 - protein, 7 aa, synthetic construct
KIPNNPY

SEQ ID NO: 127042 - protein, 7 aa, synthetic construct
KIPNSPF

SEQ ID NO: 127043 - protein, 7 aa, synthetic construct
KIPNYER

SEQ ID NO: 127044 - protein, 7 aa, synthetic construct
KIPNYNL

SEQ ID NO: 127045 - protein, 7 aa, synthetic construct
KIPNYSV

SEQ ID NO: 127046 - protein, 7 aa, synthetic construct
KIPPVAN

SEQ ID NO: 127047 - protein, 7 aa, synthetic construct
KIPQAPH

SEQ ID NO: 127048 - protein, 7 aa, synthetic construct
KIPQIER

SEQ ID NO: 127049 - protein, 7 aa, synthetic construct
KIPQLHP

SEQ ID NO: 127050 - protein, 7 aa, synthetic construct
KIPQPMV

SEQ ID NO: 127051 - protein, 7 aa, synthetic construct
KIPRDYA

SEQ ID NO: 127052 - protein, 7 aa, synthetic construct
KIPRPYD

SEQ ID NO: 127053 - protein, 7 aa, synthetic construct
KIPSNYV

SEQ ID NO: 127054 - protein, 7 aa, synthetic construct
KIPSPQI

SEQ ID NO: 127055 - protein, 7 aa, synthetic construct
KIPSYGP

SEQ ID NO: 127056 - protein, 7 aa, synthetic construct
KIPTMPV

SEQ ID NO: 127057 - protein, 7 aa, synthetic construct
KIPVSSL

SEQ ID NO: 127058 - protein, 7 aa, synthetic construct
KIQEQRN

SEQ ID NO: 127059 - protein, 7 aa, synthetic construct
KIQHPEK

SEQ ID NO: 127060 - protein, 7 aa, synthetic construct
KIQRADN

SEQ ID NO: 127061 - protein, 7 aa, synthetic construct
KIQRLQD

SEQ ID NO: 127062 - protein, 7 aa, synthetic construct
KIQRPEF

SEQ ID NO: 127063 - protein, 7 aa, synthetic construct
KIRADFP

SEQ ID NO: 127064 - protein, 7 aa, synthetic construct
KIRAENF

SEQ ID NO: 127065 - protein, 7 aa, synthetic construct
KIRALTE

SEQ ID NO: 127066 - protein, 7 aa, synthetic construct
KIRDMGH

SEQ ID NO: 127067 - protein, 7 aa, synthetic construct
KIRDQPI

SEQ ID NO: 127068 - protein, 7 aa, synthetic construct
KIRDSQV

SEQ ID NO: 127069 - protein, 7 aa, synthetic construct
KIRDTPY

SEQ ID NO: 127070 - protein, 7 aa, synthetic construct
KIREAHP

SEQ ID NO: 127071 - protein, 7 aa, synthetic construct
KIRELQN

SEQ ID NO: 127072 - protein, 7 aa, synthetic construct
KIRENAT

SEQ ID NO: 127073 - protein, 7 aa, synthetic construct
KIRENNT

SEQ ID NO: 127074 - protein, 7 aa, synthetic construct
KIREVPT

SEQ ID NO: 127075 - protein, 7 aa, synthetic construct
KIREYQG

SEQ ID NO: 127076 - protein, 7 aa, synthetic construct
KIRHVEP

SEQ ID NO: 127077 - protein, 7 aa, synthetic construct
KIRNAVE

SEQ ID NO: 127078 - protein, 7 aa, synthetic construct
KIRSDAI

SEQ ID NO: 127079 - protein, 7 aa, synthetic construct
KIRVSDV

SEQ ID NO: 127080 - protein, 7 aa, synthetic construct
KIRVTSD

SEQ ID NO: 127081 - protein, 7 aa, synthetic construct
KISDRHL

SEQ ID NO: 127082 - protein, 7 aa, synthetic construct
KISDVAR

SEQ ID NO: 127083 - protein, 7 aa, synthetic construct
KISGYSA

SEQ ID NO: 127084 - protein, 7 aa, synthetic construct
KISHHLA

SEQ ID NO: 127085 - protein, 7 aa, synthetic construct
KISHHVA

SEQ ID NO: 127086 - protein, 7 aa, synthetic construct
KISKEWA

SEQ ID NO: 127087 - protein, 7 aa, synthetic construct
KISNAHY

SEQ ID NO: 127088 - protein, 7 aa, synthetic construct
KISRDII

SEQ ID NO: 127089 - protein, 7 aa, synthetic construct
KISRDSA

SEQ ID NO: 127090 - protein, 7 aa, synthetic construct
KITGHQY

SEQ ID NO: 127091 - protein, 7 aa, synthetic construct
KITKDHI

SEQ ID NO: 127092 - protein, 7 aa, synthetic construct
KITKYAD

SEQ ID NO: 127093 - protein, 7 aa, synthetic construct
KITLRGD

SEQ ID NO: 127094 - protein, 7 aa, synthetic construct
KITNAFP

SEQ ID NO: 127095 - protein, 7 aa, synthetic construct
KITPMID

SEQ ID NO: 127096 - protein, 7 aa, synthetic construct
KITPYEK

SEQ ID NO: 127097 - protein, 7 aa, synthetic construct
KITTSTF

SEQ ID NO: 127098 - protein, 7 aa, synthetic construct
KITYATA

SEQ ID NO: 127099 - protein, 7 aa, synthetic construct
KIVGAYP

SEQ ID NO: 127100 - protein, 7 aa, synthetic construct
KIVHQNI

SEQ ID NO: 127101 - protein, 7 aa, synthetic construct
KIVIKEP

SEQ ID NO: 127102 - protein, 7 aa, synthetic construct
KIVNPMG

SEQ ID NO: 127103 - protein, 7 aa, synthetic construct
KIVPYNA

SEQ ID NO: 127104 - protein, 7 aa, synthetic construct
KIVQIRD

SEQ ID NO: 127105 - protein, 7 aa, synthetic construct
KIVRLEV

SEQ ID NO: 127106 - protein, 7 aa, synthetic construct
KIVVRQD

SEQ ID NO: 127107 - protein, 7 aa, synthetic construct
KIYDNTK

SEQ ID NO: 127108 - protein, 7 aa, synthetic construct
KIYPATS

SEQ ID NO: 127109 - protein, 7 aa, synthetic construct
KIYPSGP

SEQ ID NO: 127110 - protein, 7 aa, synthetic construct
KKADNGY

SEQ ID NO: 127111 - protein, 7 aa, synthetic construct
KKADVQF

SEQ ID NO: 127112 - protein, 7 aa, synthetic construct
KKAENGL

SEQ ID NO: 127113 - protein, 7 aa, synthetic construct
KKALPFE

SEQ ID NO: 127114 - protein, 7 aa, synthetic construct
KKAMDNF

SEQ ID NO: 127115 - protein, 7 aa, synthetic construct
KKAMIDA

SEQ ID NO: 127116 - protein, 7 aa, synthetic construct
KKANYND

SEQ ID NO: 127117 - protein, 7 aa, synthetic construct
KKAQQDM

SEQ ID NO: 127118 - protein, 7 aa, synthetic construct
KKASPGE

SEQ ID NO: 127119 - protein, 7 aa, synthetic construct
KKASPYD

SEQ ID NO: 127120 - protein, 7 aa, synthetic construct
KKAVPET

SEQ ID NO: 127121 - protein, 7 aa, synthetic construct
KKAYDAS

SEQ ID NO: 127122 - protein, 7 aa, synthetic construct
KKDAPGW

SEQ ID NO: 127123 - protein, 7 aa, synthetic construct
KKDGVTW

SEQ ID NO: 127124 - protein, 7 aa, synthetic construct
KKDIAPW

SEQ ID NO: 127125 - protein, 7 aa, synthetic construct
KKDLASH

SEQ ID NO: 127126 - protein, 7 aa, synthetic construct
KKDLNPI

SEQ ID NO: 127127 - protein, 7 aa, synthetic construct
KKDMSWS

SEQ ID NO: 127128 - protein, 7 aa, synthetic construct
KKDMVYG

SEQ ID NO: 127129 - protein, 7 aa, synthetic construct
KKDNASP

SEQ ID NO: 127130 - protein, 7 aa, synthetic construct
KKDRYME

SEQ ID NO: 127131 - protein, 7 aa, synthetic construct
KKDSPYN

SEQ ID NO: 127132 - protein, 7 aa, synthetic construct
KKDSYGF

SEQ ID NO: 127133 - protein, 7 aa, synthetic construct
KKDTANW

SEQ ID NO: 127134 - protein, 7 aa, synthetic construct
KKDVPFN

SEQ ID NO: 127135 - protein, 7 aa, synthetic construct
KKDYAAQ

SEQ ID NO: 127136 - protein, 7 aa, synthetic construct
KKDYGSN

SEQ ID NO: 127137 - protein, 7 aa, synthetic construct
KKDYQMQ

SEQ ID NO: 127138 - protein, 7 aa, synthetic construct
KKDYQRD

SEQ ID NO: 127139 - protein, 7 aa, synthetic construct
KKDYSHG

SEQ ID NO: 127140 - protein, 7 aa, synthetic construct
KKDYVST

SEQ ID NO: 127141 - protein, 7 aa, synthetic construct
KKEAATW

SEQ ID NO: 127142 - protein, 7 aa, synthetic construct
KKEDRYT

SEQ ID NO: 127143 - protein, 7 aa, synthetic construct
KKEGIYF

SEQ ID NO: 127144 - protein, 7 aa, synthetic construct
KKEGQWG

SEQ ID NO: 127145 - protein, 7 aa, synthetic construct
KKEGSYF

SEQ ID NO: 127146 - protein, 7 aa, synthetic construct
KKEGYQN

SEQ ID NO: 127147 - protein, 7 aa, synthetic construct
KKEHHAY

SEQ ID NO: 127148 - protein, 7 aa, synthetic construct
KKEHNML

SEQ ID NO: 127149 - protein, 7 aa, synthetic construct
KKEHQQP

SEQ ID NO: 127150 - protein, 7 aa, synthetic construct
KKEHQTP

SEQ ID NO: 127151 - protein, 7 aa, synthetic construct
KKEIGFN

SEQ ID NO: 127152 - protein, 7 aa, synthetic construct
KKEIMAF

SEQ ID NO: 127153 - protein, 7 aa, synthetic construct
KKELHLL

SEQ ID NO: 127154 - protein, 7 aa, synthetic construct
KKELHQI

SEQ ID NO: 127155 - protein, 7 aa, synthetic construct
KKELNQF

SEQ ID NO: 127156 - protein, 7 aa, synthetic construct
KKEMHAI

SEQ ID NO: 127157 - protein, 7 aa, synthetic construct
KKEMQIV

SEQ ID NO: 127158 - protein, 7 aa, synthetic construct
KKENPNW

SEQ ID NO: 127159 - protein, 7 aa, synthetic construct
KKENSSQ

SEQ ID NO: 127160 - protein, 7 aa, synthetic construct
KKEPSSW

SEQ ID NO: 127161 - protein, 7 aa, synthetic construct
KKEPTSH

SEQ ID NO: 127162 - protein, 7 aa, synthetic construct
KKETAFV

SEQ ID NO: 127163 - protein, 7 aa, synthetic construct
KKETHNI

SEQ ID NO: 127164 - protein, 7 aa, synthetic construct
KKETHYT

SEQ ID NO: 127165 - protein, 7 aa, synthetic construct
KKEVASY

SEQ ID NO: 127166 - protein, 7 aa, synthetic construct
KKEYNSA

SEQ ID NO: 127167 - protein, 7 aa, synthetic construct
KKEYQFG

SEQ ID NO: 127168 - protein, 7 aa, synthetic construct
KKEYVQN

SEQ ID NO: 127169 - protein, 7 aa, synthetic construct
KKEYYAG

SEQ ID NO: 127170 - protein, 7 aa, synthetic construct
KKFDIPQ

SEQ ID NO: 127171 - protein, 7 aa, synthetic construct
KKFDPTS

SEQ ID NO: 127172 - protein, 7 aa, synthetic construct
KKFEQMN

SEQ ID NO: 127173 - protein, 7 aa, synthetic construct
KKFMTAD

SEQ ID NO: 127174 - protein, 7 aa, synthetic construct
KKFPMTE

SEQ ID NO: 127175 - protein, 7 aa, synthetic construct
KKFPPGD

SEQ ID NO: 127176 - protein, 7 aa, synthetic construct
KKFTVDA

SEQ ID NO: 127177 - protein, 7 aa, synthetic construct
KKGADYF

SEQ ID NO: 127178 - protein, 7 aa, synthetic construct
KKGDAMW

SEQ ID NO: 127179 - protein, 7 aa, synthetic construct
KKGDPYS

SEQ ID NO: 127180 - protein, 7 aa, synthetic construct
KKGEVIW

SEQ ID NO: 127181 - protein, 7 aa, synthetic construct
KKGSPDN

SEQ ID NO: 127182 - protein, 7 aa, synthetic construct
KKGYDVV

SEQ ID NO: 127183 - protein, 7 aa, synthetic construct
KKHDPNN

SEQ ID NO: 127184 - protein, 7 aa, synthetic construct
KKHLTPE

SEQ ID NO: 127185 - protein, 7 aa, synthetic construct
KKHTDEY

SEQ ID NO: 127186 - protein, 7 aa, synthetic construct
KKIENLY

SEQ ID NO: 127187 - protein, 7 aa, synthetic construct
KKIPDHF

SEQ ID NO: 127188 - protein, 7 aa, synthetic construct
KKIPDHY

SEQ ID NO: 127189 - protein, 7 aa, synthetic construct
KKIPDTS

SEQ ID NO: 127190 - protein, 7 aa, synthetic construct
KKLENMM

SEQ ID NO: 127191 - protein, 7 aa, synthetic construct
KKLLENF

SEQ ID NO: 127192 - protein, 7 aa, synthetic construct
KKMDPTI

SEQ ID NO: 127193 - protein, 7 aa, synthetic construct
KKMFPVD

SEQ ID NO: 127194 - protein, 7 aa, synthetic construct
KKMMDAF

SEQ ID NO: 127195 - protein, 7 aa, synthetic construct
KKMPHDF

SEQ ID NO: 127196 - protein, 7 aa, synthetic construct
KKNDAIT

SEQ ID NO: 127197 - protein, 7 aa, synthetic construct
KKNDAPL

SEQ ID NO: 127198 - protein, 7 aa, synthetic construct
KKNDSMV

SEQ ID NO: 127199 - protein, 7 aa, synthetic construct
KKNEGGM

SEQ ID NO: 127200 - protein, 7 aa, synthetic construct
KKNIPDT

SEQ ID NO: 127201 - protein, 7 aa, synthetic construct
KKNLPYE

SEQ ID NO: 127202 - protein, 7 aa, synthetic construct
KKNMEMQ

SEQ ID NO: 127203 - protein, 7 aa, synthetic construct
KKNMPDM

SEQ ID NO: 127204 - protein, 7 aa, synthetic construct
KKNNDVP

SEQ ID NO: 127205 - protein, 7 aa, synthetic construct
KKNQEPF

SEQ ID NO: 127206 - protein, 7 aa, synthetic construct
KKNTDLL

SEQ ID NO: 127207 - protein, 7 aa, synthetic construct
KKNVEVI

SEQ ID NO: 127208 - protein, 7 aa, synthetic construct
KKPEAIY

SEQ ID NO: 127209 - protein, 7 aa, synthetic construct
KKPELHL

SEQ ID NO: 127210 - protein, 7 aa, synthetic construct
KKPESVQ

SEQ ID NO: 127211 - protein, 7 aa, synthetic construct
KKPGEYF

SEQ ID NO: 127212 - protein, 7 aa, synthetic construct
KKPLMDY

SEQ ID NO: 127213 - protein, 7 aa, synthetic construct
KKPVPES

SEQ ID NO: 127214 - protein, 7 aa, synthetic construct
KKPVYLD

SEQ ID NO: 127215 - protein, 7 aa, synthetic construct
KKPYDAS

SEQ ID NO: 127216 - protein, 7 aa, synthetic construct
KKPYGDT

SEQ ID NO: 127217 - protein, 7 aa, synthetic construct
KKPYMAD

SEQ ID NO: 127218 - protein, 7 aa, synthetic construct
KKPYMVD

SEQ ID NO: 127219 - protein, 7 aa, synthetic construct
KKQAELV

SEQ ID NO: 127220 - protein, 7 aa, synthetic construct
KKQDSMN

SEQ ID NO: 127221 - protein, 7 aa, synthetic construct
KKQEALM

SEQ ID NO: 127222 - protein, 7 aa, synthetic construct
KKQEITA

SEQ ID NO: 127223 - protein, 7 aa, synthetic construct
KKQEMQA

SEQ ID NO: 127224 - protein, 7 aa, synthetic construct
KKQGELL

SEQ ID NO: 127225 - protein, 7 aa, synthetic construct
KKQIPFE

SEQ ID NO: 127226 - protein, 7 aa, synthetic construct
KKQLEMQ

SEQ ID NO: 127227 - protein, 7 aa, synthetic construct
KKQQPDP

SEQ ID NO: 127228 - protein, 7 aa, synthetic construct
KKQTEIV

SEQ ID NO: 127229 - protein, 7 aa, synthetic construct
KKSDLTL

SEQ ID NO: 127230 - protein, 7 aa, synthetic construct
KKSDPPN

SEQ ID NO: 127231 - protein, 7 aa, synthetic construct
KKSDTIQ

SEQ ID NO: 127232 - protein, 7 aa, synthetic construct
KKSDVQT

SEQ ID NO: 127233 - protein, 7 aa, synthetic construct
KKSEGQL

SEQ ID NO: 127234 - protein, 7 aa, synthetic construct
KKSFSSE

SEQ ID NO: 127235 - protein, 7 aa, synthetic construct
KKSPDPM

SEQ ID NO: 127236 - protein, 7 aa, synthetic construct
KKSTEWA

SEQ ID NO: 127237 - protein, 7 aa, synthetic construct
KKTADIF

SEQ ID NO: 127238 - protein, 7 aa, synthetic construct
KKTEAFM

SEQ ID NO: 127239 - protein, 7 aa, synthetic construct
KKTEDKF

SEQ ID NO: 127240 - protein, 7 aa, synthetic construct
KKTEGGT

SEQ ID NO: 127241 - protein, 7 aa, synthetic construct
KKTEVHN

SEQ ID NO: 127242 - protein, 7 aa, synthetic construct
KKTEWPS

SEQ ID NO: 127243 - protein, 7 aa, synthetic construct
KKTEYSM

SEQ ID NO: 127244 - protein, 7 aa, synthetic construct
KKTMDMQ

SEQ ID NO: 127245 - protein, 7 aa, synthetic construct
KKTNESY

SEQ ID NO: 127246 - protein, 7 aa, synthetic construct
KKTNPFE

SEQ ID NO: 127247 - protein, 7 aa, synthetic construct
KKTPDFN

SEQ ID NO: 127248 - protein, 7 aa, synthetic construct
KKTPPME

SEQ ID NO: 127249 - protein, 7 aa, synthetic construct
KKVDMIQ

SEQ ID NO: 127250 - protein, 7 aa, synthetic construct
KKVEVGF

SEQ ID NO: 127251 - protein, 7 aa, synthetic construct
KKVPEYS

SEQ ID NO: 127252 - protein, 7 aa, synthetic construct
KKWQNDD

SEQ ID NO: 127253 - protein, 7 aa, synthetic construct
KKYDMAV

SEQ ID NO: 127254 - protein, 7 aa, synthetic construct
KKYDYTA

SEQ ID NO: 127255 - protein, 7 aa, synthetic construct
KKYGGDY

SEQ ID NO: 127256 - protein, 7 aa, synthetic construct
KKYGVGD

SEQ ID NO: 127257 - protein, 7 aa, synthetic construct
KKYPQMD

SEQ ID NO: 127258 - protein, 7 aa, synthetic construct
KKYQVIE

SEQ ID NO: 127259 - protein, 7 aa, synthetic construct
KKYVADP

SEQ ID NO: 127260 - protein, 7 aa, synthetic construct
KKYVIGD

SEQ ID NO: 127261 - protein, 7 aa, synthetic construct
KKYVSDP

SEQ ID NO: 127262 - protein, 7 aa, synthetic construct
KLADFPR

SEQ ID NO: 127263 - protein, 7 aa, synthetic construct
KLADPMK

SEQ ID NO: 127264 - protein, 7 aa, synthetic construct
KLAETSK

SEQ ID NO: 127265 - protein, 7 aa, synthetic construct
KLAHNVL

SEQ ID NO: 127266 - protein, 7 aa, synthetic construct
KLAHPGM

SEQ ID NO: 127267 - protein, 7 aa, synthetic construct
KLAHPSV

SEQ ID NO: 127268 - protein, 7 aa, synthetic construct
KLAKQWD

SEQ ID NO: 127269 - protein, 7 aa, synthetic construct
KLAPGAY

SEQ ID NO: 127270 - protein, 7 aa, synthetic construct
KLAPHSI

SEQ ID NO: 127271 - protein, 7 aa, synthetic construct
KLAQRNE

SEQ ID NO: 127272 - protein, 7 aa, synthetic construct
KLAYNAP

SEQ ID NO: 127273 - protein, 7 aa, synthetic construct
KLDIRVQ

SEQ ID NO: 127274 - protein, 7 aa, synthetic construct
KLDQREK

SEQ ID NO: 127275 - protein, 7 aa, synthetic construct
KLDRGSI

SEQ ID NO: 127276 - protein, 7 aa, synthetic construct
KLDRMSS

SEQ ID NO: 127277 - protein, 7 aa, synthetic construct
KLDRQNM

SEQ ID NO: 127278 - protein, 7 aa, synthetic construct
KLDRQVQ

SEQ ID NO: 127279 - protein, 7 aa, synthetic construct
KLDRSST

SEQ ID NO: 127280 - protein, 7 aa, synthetic construct
KLDTMAR

SEQ ID NO: 127281 - protein, 7 aa, synthetic construct
KLDTRGH

SEQ ID NO: 127282 - protein, 7 aa, synthetic construct
KLDYQKQ

SEQ ID NO: 127283 - protein, 7 aa, synthetic construct
KLEAHKY

SEQ ID NO: 127284 - protein, 7 aa, synthetic construct
KLEGIRQ

SEQ ID NO: 127285 - protein, 7 aa, synthetic construct
KLEHVRP

SEQ ID NO: 127286 - protein, 7 aa, synthetic construct
KLEMTAK

SEQ ID NO: 127287 - protein, 7 aa, synthetic construct
KLENRTN

SEQ ID NO: 127288 - protein, 7 aa, synthetic construct
KLEPKDR

SEQ ID NO: 127289 - protein, 7 aa, synthetic construct
KLEQRHI

SEQ ID NO: 127290 - protein, 7 aa, synthetic construct
KLERGSL

SEQ ID NO: 127291 - protein, 7 aa, synthetic construct
KLESPSK

SEQ ID NO: 127292 - protein, 7 aa, synthetic construct
KLEYSKS

SEQ ID NO: 127293 - protein, 7 aa, synthetic construct
KLGGARD

SEQ ID NO: 127294 - protein, 7 aa, synthetic construct
KLGGPSL

SEQ ID NO: 127295 - protein, 7 aa, synthetic construct
KLGKFNE

SEQ ID NO: 127296 - protein, 7 aa, synthetic construct
KLGNAFP

SEQ ID NO: 127297 - protein, 7 aa, synthetic construct
KLGNYKD

SEQ ID NO: 127298 - protein, 7 aa, synthetic construct
KLGRDGY

SEQ ID NO: 127299 - protein, 7 aa, synthetic construct
KLGRLEV

SEQ ID NO: 127300 - protein, 7 aa, synthetic construct
KLGRVME

SEQ ID NO: 127301 - protein, 7 aa, synthetic construct
KLGSHIN

SEQ ID NO: 127302 - protein, 7 aa, synthetic construct
KLGYMAA

SEQ ID NO: 127303 - protein, 7 aa, synthetic construct
KLGYQAA

SEQ ID NO: 127304 - protein, 7 aa, synthetic construct
KLHAPIP

SEQ ID NO: 127305 - protein, 7 aa, synthetic construct
KLHDPKT

SEQ ID NO: 127306 - protein, 7 aa, synthetic construct
KLHEKLY

SEQ ID NO: 127307 - protein, 7 aa, synthetic construct
KLHGIGS

SEQ ID NO: 127308 - protein, 7 aa, synthetic construct
KLHGVNM

SEQ ID NO: 127309 - protein, 7 aa, synthetic construct
KLHHSMA

SEQ ID NO: 127310 - protein, 7 aa, synthetic construct
KLHNLPQ

SEQ ID NO: 127311 - protein, 7 aa, synthetic construct
KLHNPAN

SEQ ID NO: 127312 - protein, 7 aa, synthetic construct
KLHPAQM

SEQ ID NO: 127313 - protein, 7 aa, synthetic construct
KLHPGAA

SEQ ID NO: 127314 - protein, 7 aa, synthetic construct
KLHPHNQ

SEQ ID NO: 127315 - protein, 7 aa, synthetic construct
KLHPKQD

SEQ ID NO: 127316 - protein, 7 aa, synthetic construct
KLHPRPD

SEQ ID NO: 127317 - protein, 7 aa, synthetic construct
KLHQRDA

SEQ ID NO: 127318 - protein, 7 aa, synthetic construct
KLHQSPV

SEQ ID NO: 127319 - protein, 7 aa, synthetic construct
KLHSSAS

SEQ ID NO: 127320 - protein, 7 aa, synthetic construct
KLHSSSF

SEQ ID NO: 127321 - protein, 7 aa, synthetic construct
KLHTSHP

SEQ ID NO: 127322 - protein, 7 aa, synthetic construct
KLHVKEN

SEQ ID NO: 127323 - protein, 7 aa, synthetic construct
KLIGMAP

SEQ ID NO: 127324 - protein, 7 aa, synthetic construct
KLIPGPS

SEQ ID NO: 127325 - protein, 7 aa, synthetic construct
KLKENQW

SEQ ID NO: 127326 - protein, 7 aa, synthetic construct
KLKMDSF

SEQ ID NO: 127327 - protein, 7 aa, synthetic construct
KLKPDYF

SEQ ID NO: 127328 - protein, 7 aa, synthetic construct
KLKPIYD

SEQ ID NO: 127329 - protein, 7 aa, synthetic construct
KLKQTYD

SEQ ID NO: 127330 - protein, 7 aa, synthetic construct
KLKYGTD

SEQ ID NO: 127331 - protein, 7 aa, synthetic construct
KLLGAVN

SEQ ID NO: 127332 - protein, 7 aa, synthetic construct
KLLPAGI

SEQ ID NO: 127333 - protein, 7 aa, synthetic construct
KLLRVGE

SEQ ID NO: 127334 - protein, 7 aa, synthetic construct
KLMGGHP

SEQ ID NO: 127335 - protein, 7 aa, synthetic construct
KLMGPIN

SEQ ID NO: 127336 - protein, 7 aa, synthetic construct
KLMPPRE

SEQ ID NO: 127337 - protein, 7 aa, synthetic construct
KLMREQI

SEQ ID NO: 127338 - protein, 7 aa, synthetic construct
KLMRMAD

SEQ ID NO: 127339 - protein, 7 aa, synthetic construct
KLMSHMP

SEQ ID NO: 127340 - protein, 7 aa, synthetic construct
KLNAHGH

SEQ ID NO: 127341 - protein, 7 aa, synthetic construct
KLNDVPR

SEQ ID NO: 127342 - protein, 7 aa, synthetic construct
KLNFSTA

SEQ ID NO: 127343 - protein, 7 aa, synthetic construct
KLNFSTG

SEQ ID NO: 127344 - protein, 7 aa, synthetic construct
KLNFTSA

SEQ ID NO: 127345 - protein, 7 aa, synthetic construct
KLNGPPL

SEQ ID NO: 127346 - protein, 7 aa, synthetic construct
KLNHHAP

SEQ ID NO: 127347 - protein, 7 aa, synthetic construct
KLNHVIS

SEQ ID NO: 127348 - protein, 7 aa, synthetic construct
KLNKSEV

SEQ ID NO: 127349 - protein, 7 aa, synthetic construct
KLNNYQM

SEQ ID NO: 127350 - protein, 7 aa, synthetic construct
KLNPARD

SEQ ID NO: 127351 - protein, 7 aa, synthetic construct
KLNQSSW

SEQ ID NO: 127352 - protein, 7 aa, synthetic construct
KLNRENM

SEQ ID NO: 127353 - protein, 7 aa, synthetic construct
KLNSHSH

SEQ ID NO: 127354 - protein, 7 aa, synthetic construct
KLNSHVM

SEQ ID NO: 127355 - protein, 7 aa, synthetic construct
KLNYSAN

SEQ ID NO: 127356 - protein, 7 aa, synthetic construct
KLNYTAN

SEQ ID NO: 127357 - protein, 7 aa, synthetic construct
KLPAMKQ

SEQ ID NO: 127358 - protein, 7 aa, synthetic construct
KLPANYL

SEQ ID NO: 127359 - protein, 7 aa, synthetic construct
KLPATGF

SEQ ID NO: 127360 - protein, 7 aa, synthetic construct
KLPERHQ

SEQ ID NO: 127361 - protein, 7 aa, synthetic construct
KLPGAGS

SEQ ID NO: 127362 - protein, 7 aa, synthetic construct
KLPGMGV

SEQ ID NO: 127363 - protein, 7 aa, synthetic construct
KLPGMMV

SEQ ID NO: 127364 - protein, 7 aa, synthetic construct
KLPGRYD

SEQ ID NO: 127365 - protein, 7 aa, synthetic construct
KLPHGLM

SEQ ID NO: 127366 - protein, 7 aa, synthetic construct
KLPHMHA

SEQ ID NO: 127367 - protein, 7 aa, synthetic construct
KLPHMMS

SEQ ID NO: 127368 - protein, 7 aa, synthetic construct
KLPHNER

SEQ ID NO: 127369 - protein, 7 aa, synthetic construct
KLPISVS

SEQ ID NO: 127370 - protein, 7 aa, synthetic construct
KLPKEFV

SEQ ID NO: 127371 - protein, 7 aa, synthetic construct
KLPMMGN

SEQ ID NO: 127372 - protein, 7 aa, synthetic construct
KLPMSHN

SEQ ID NO: 127373 - protein, 7 aa, synthetic construct
KLPNYVQ

SEQ ID NO: 127374 - protein, 7 aa, synthetic construct
KLPPIAL

SEQ ID NO: 127375 - protein, 7 aa, synthetic construct
KLPQTFA

SEQ ID NO: 127376 - protein, 7 aa, synthetic construct
KLPRDMV

SEQ ID NO: 127377 - protein, 7 aa, synthetic construct
KLPVTQQ

SEQ ID NO: 127378 - protein, 7 aa, synthetic construct
KLPYSTA

SEQ ID NO: 127379 - protein, 7 aa, synthetic construct
KLQAHKE

SEQ ID NO: 127380 - protein, 7 aa, synthetic construct
KLQHVSA

SEQ ID NO: 127381 - protein, 7 aa, synthetic construct
KLQNYGI

SEQ ID NO: 127382 - protein, 7 aa, synthetic construct
KLQPRDV

SEQ ID NO: 127383 - protein, 7 aa, synthetic construct
KLQRLET

SEQ ID NO: 127384 - protein, 7 aa, synthetic construct
KLQRMDT

SEQ ID NO: 127385 - protein, 7 aa, synthetic construct
KLQRTES

SEQ ID NO: 127386 - protein, 7 aa, synthetic construct
KLQSKFD

SEQ ID NO: 127387 - protein, 7 aa, synthetic construct
KLQVPHS

SEQ ID NO: 127388 - protein, 7 aa, synthetic construct
KLQVRET

SEQ ID NO: 127389 - protein, 7 aa, synthetic construct
KLQYGNV

SEQ ID NO: 127390 - protein, 7 aa, synthetic construct
KLRAAME

SEQ ID NO: 127391 - protein, 7 aa, synthetic construct
KLRDATQ

SEQ ID NO: 127392 - protein, 7 aa, synthetic construct
KLREAMI

SEQ ID NO: 127393 - protein, 7 aa, synthetic construct
KLRENVL

SEQ ID NO: 127394 - protein, 7 aa, synthetic construct
KLRESQV

SEQ ID NO: 127395 - protein, 7 aa, synthetic construct
KLRETQN

SEQ ID NO: 127396 - protein, 7 aa, synthetic construct
KLRGDSI

SEQ ID NO: 127397 - protein, 7 aa, synthetic construct
KLRGTEA

SEQ ID NO: 127398 - protein, 7 aa, synthetic construct
KLRLEHG

SEQ ID NO: 127399 - protein, 7 aa, synthetic construct
KLRMMTE

SEQ ID NO: 127400 - protein, 7 aa, synthetic construct
KLRPDPI

SEQ ID NO: 127401 - protein, 7 aa, synthetic construct
KLRPDYI

SEQ ID NO: 127402 - protein, 7 aa, synthetic construct
KLRPQET

SEQ ID NO: 127403 - protein, 7 aa, synthetic construct
KLRQDII

SEQ ID NO: 127404 - protein, 7 aa, synthetic construct
KLRQEGS

SEQ ID NO: 127405 - protein, 7 aa, synthetic construct
KLRSGTE

SEQ ID NO: 127406 - protein, 7 aa, synthetic construct
KLRTEQL

SEQ ID NO: 127407 - protein, 7 aa, synthetic construct
KLRTGFD

SEQ ID NO: 127408 - protein, 7 aa, synthetic construct
KLRTMDG

SEQ ID NO: 127409 - protein, 7 aa, synthetic construct
KLRTVVE

SEQ ID NO: 127410 - protein, 7 aa, synthetic construct
KLRVDPP

SEQ ID NO: 127411 - protein, 7 aa, synthetic construct
KLRVNSD

SEQ ID NO: 127412 - protein, 7 aa, synthetic construct
KLRVVME

SEQ ID NO: 127413 - protein, 7 aa, synthetic construct
KLSFKDS

SEQ ID NO: 127414 - protein, 7 aa, synthetic construct
KLSGAPF

SEQ ID NO: 127415 - protein, 7 aa, synthetic construct
KLSHAMS

SEQ ID NO: 127416 - protein, 7 aa, synthetic construct
KLSMQGY

SEQ ID NO: 127417 - protein, 7 aa, synthetic construct
KLSPYEK

SEQ ID NO: 127418 - protein, 7 aa, synthetic construct
KLSRDVV

SEQ ID NO: 127419 - protein, 7 aa, synthetic construct
KLSREMY

SEQ ID NO: 127420 - protein, 7 aa, synthetic construct
KLSREPG

SEQ ID NO: 127421 - protein, 7 aa, synthetic construct
KLSREPS

SEQ ID NO: 127422 - protein, 7 aa, synthetic construct
KLSRPET

SEQ ID NO: 127423 - protein, 7 aa, synthetic construct
KLSRQGD

SEQ ID NO: 127424 - protein, 7 aa, synthetic construct
KLSSPYG

SEQ ID NO: 127425 - protein, 7 aa, synthetic construct
KLSSYDK

SEQ ID NO: 127426 - protein, 7 aa, synthetic construct
KLTAREQ

SEQ ID NO: 127427 - protein, 7 aa, synthetic construct
KLTGVQY

SEQ ID NO: 127428 - protein, 7 aa, synthetic construct
KLTHVTQ

SEQ ID NO: 127429 - protein, 7 aa, synthetic construct
KLTRIDL

SEQ ID NO: 127430 - protein, 7 aa, synthetic construct
KLTRIVD

SEQ ID NO: 127431 - protein, 7 aa, synthetic construct
KLTSAPF

SEQ ID NO: 127432 - protein, 7 aa, synthetic construct
KLTSHNI

SEQ ID NO: 127433 - protein, 7 aa, synthetic construct
KLVHPVP

SEQ ID NO: 127434 - protein, 7 aa, synthetic construct
KLVKVDI

SEQ ID NO: 127435 - protein, 7 aa, synthetic construct
KLVMPEK

SEQ ID NO: 127436 - protein, 7 aa, synthetic construct
KLVPDVR

SEQ ID NO: 127437 - protein, 7 aa, synthetic construct
KLVRNAE

SEQ ID NO: 127438 - protein, 7 aa, synthetic construct
KLVRQLD

SEQ ID NO: 127439 - protein, 7 aa, synthetic construct
KLVTRND

SEQ ID NO: 127440 - protein, 7 aa, synthetic construct
KLYKLQD

SEQ ID NO: 127441 - protein, 7 aa, synthetic construct
KLYNPKD

SEQ ID NO: 127442 - protein, 7 aa, synthetic construct
KLYTVKD

SEQ ID NO: 127443 - protein, 7 aa, synthetic construct
KMAANAF

SEQ ID NO: 127444 - protein, 7 aa, synthetic construct
KMAAYQQ

SEQ ID NO: 127445 - protein, 7 aa, synthetic construct
KMADATK

SEQ ID NO: 127446 - protein, 7 aa, synthetic construct
KMADKHS

SEQ ID NO: 127447 - protein, 7 aa, synthetic construct
KMADTLR

SEQ ID NO: 127448 - protein, 7 aa, synthetic construct
KMAENRQ

SEQ ID NO: 127449 - protein, 7 aa, synthetic construct
KMAGPKD

SEQ ID NO: 127450 - protein, 7 aa, synthetic construct
KMAITEK

SEQ ID NO: 127451 - protein, 7 aa, synthetic construct
KMAKVDY

SEQ ID NO: 127452 - protein, 7 aa, synthetic construct
KMAPHGH

SEQ ID NO: 127453 - protein, 7 aa, synthetic construct
KMAPYTS

SEQ ID NO: 127454 - protein, 7 aa, synthetic construct
KMAQPQF

SEQ ID NO: 127455 - protein, 7 aa, synthetic construct
KMAREER

SEQ ID NO: 127456 - protein, 7 aa, synthetic construct
KMARGFE

SEQ ID NO: 127457 - protein, 7 aa, synthetic construct
KMARTSD

SEQ ID NO: 127458 - protein, 7 aa, synthetic construct
KMATHVV

SEQ ID NO: 127459 - protein, 7 aa, synthetic construct
KMAYSKE

SEQ ID NO: 127460 - protein, 7 aa, synthetic construct
KMDIRNQ

SEQ ID NO: 127461 - protein, 7 aa, synthetic construct
KMDKERI

SEQ ID NO: 127462 - protein, 7 aa, synthetic construct
KMDLKSF

SEQ ID NO: 127463 - protein, 7 aa, synthetic construct
KMDRNMF

SEQ ID NO: 127464 - protein, 7 aa, synthetic construct
KMDRREM

SEQ ID NO: 127465 - protein, 7 aa, synthetic construct
KMDVRIQ

SEQ ID NO: 127466 - protein, 7 aa, synthetic construct
KMEHSRS

SEQ ID NO: 127467 - protein, 7 aa, synthetic construct
KMEKMNQ

SEQ ID NO: 127468 - protein, 7 aa, synthetic construct
KMEKNSL

SEQ ID NO: 127469 - protein, 7 aa, synthetic construct
KMEMRVV

SEQ ID NO: 127470 - protein, 7 aa, synthetic construct
KMERLMN

SEQ ID NO: 127471 - protein, 7 aa, synthetic construct
KMERSTI

SEQ ID NO: 127472 - protein, 7 aa, synthetic construct
KMEVQRS

SEQ ID NO: 127473 - protein, 7 aa, synthetic construct
KMEYGKP

SEQ ID NO: 127474 - protein, 7 aa, synthetic construct
KMEYSKP

SEQ ID NO: 127475 - protein, 7 aa, synthetic construct
KMFAGNP

SEQ ID NO: 127476 - protein, 7 aa, synthetic construct
KMFKSDM

SEQ ID NO: 127477 - protein, 7 aa, synthetic construct
KMFLEDV

SEQ ID NO: 127478 - protein, 7 aa, synthetic construct
KMFPGTV

SEQ ID NO: 127479 - protein, 7 aa, synthetic construct
KMGAVIH

SEQ ID NO: 127480 - protein, 7 aa, synthetic construct
KMGDRDR

SEQ ID NO: 127481 - protein, 7 aa, synthetic construct
KMGHPVS

SEQ ID NO: 127482 - protein, 7 aa, synthetic construct
KMGPVMV

SEQ ID NO: 127483 - protein, 7 aa, synthetic construct
KMGQEPR

SEQ ID NO: 127484 - protein, 7 aa, synthetic construct
KMGQHHP

SEQ ID NO: 127485 - protein, 7 aa, synthetic construct
KMGRDVN

SEQ ID NO: 127486 - protein, 7 aa, synthetic construct
KMGRNDA

SEQ ID NO: 127487 - protein, 7 aa, synthetic construct
KMGSKFD

SEQ ID NO: 127488 - protein, 7 aa, synthetic construct
KMGSPKD

SEQ ID NO: 127489 - protein, 7 aa, synthetic construct
KMGTIVM

SEQ ID NO: 127490 - protein, 7 aa, synthetic construct
KMGTKYD

SEQ ID NO: 127491 - protein, 7 aa, synthetic construct
KMGTTGW

SEQ ID NO: 127492 - protein, 7 aa, synthetic construct
KMGVHQI

SEQ ID NO: 127493 - protein, 7 aa, synthetic construct
KMGVPNY

SEQ ID NO: 127494 - protein, 7 aa, synthetic construct
KMGYTAS

SEQ ID NO: 127495 - protein, 7 aa, synthetic construct
KMHAGMQ

SEQ ID NO: 127496 - protein, 7 aa, synthetic construct
KMHANTM

SEQ ID NO: 127497 - protein, 7 aa, synthetic construct
KMHAVMA

SEQ ID NO: 127498 - protein, 7 aa, synthetic construct
KMHGPNL

SEQ ID NO: 127499 - protein, 7 aa, synthetic construct
KMHGQAT

SEQ ID NO: 127500 - protein, 7 aa, synthetic construct
KMHPAHS

SEQ ID NO: 127501 - protein, 7 aa, synthetic construct
KMHPENR

SEQ ID NO: 127502 - protein, 7 aa, synthetic construct
KMHPGSF

SEQ ID NO: 127503 - protein, 7 aa, synthetic construct
KMHPIGA

SEQ ID NO: 127504 - protein, 7 aa, synthetic construct
KMHPQQQ

SEQ ID NO: 127505 - protein, 7 aa, synthetic construct
KMHPSGI

SEQ ID NO: 127506 - protein, 7 aa, synthetic construct
KMHPSPV

SEQ ID NO: 127507 - protein, 7 aa, synthetic construct
KMHQHQI

SEQ ID NO: 127508 - protein, 7 aa, synthetic construct
KMHQSPQ

SEQ ID NO: 127509 - protein, 7 aa, synthetic construct
KMHQTAT

SEQ ID NO: 127510 - protein, 7 aa, synthetic construct
KMHSSGL

SEQ ID NO: 127511 - protein, 7 aa, synthetic construct
KMHSSSN

SEQ ID NO: 127512 - protein, 7 aa, synthetic construct
KMHTITV

SEQ ID NO: 127513 - protein, 7 aa, synthetic construct
KMHTPNF

SEQ ID NO: 127514 - protein, 7 aa, synthetic construct
KMHVVPS

SEQ ID NO: 127515 - protein, 7 aa, synthetic construct
KMIDSVR

SEQ ID NO: 127516 - protein, 7 aa, synthetic construct
KMIGPGN

SEQ ID NO: 127517 - protein, 7 aa, synthetic construct
KMIHQPG

SEQ ID NO: 127518 - protein, 7 aa, synthetic construct
KMIQDGR

SEQ ID NO: 127519 - protein, 7 aa, synthetic construct
KMIRQPE

SEQ ID NO: 127520 - protein, 7 aa, synthetic construct
KMITNHP

SEQ ID NO: 127521 - protein, 7 aa, synthetic construct
KMKEAHI

SEQ ID NO: 127522 - protein, 7 aa, synthetic construct
KMKEFVQ

SEQ ID NO: 127523 - protein, 7 aa, synthetic construct
KMKFMDG

SEQ ID NO: 127524 - protein, 7 aa, synthetic construct
KMKFMTE

SEQ ID NO: 127525 - protein, 7 aa, synthetic construct
KMKGDLI

SEQ ID NO: 127526 - protein, 7 aa, synthetic construct
KMKPYID

SEQ ID NO: 127527 - protein, 7 aa, synthetic construct
KMKQDNF

SEQ ID NO: 127528 - protein, 7 aa, synthetic construct
KMKSFMD

SEQ ID NO: 127529 - protein, 7 aa, synthetic construct
KMKTPDS

SEQ ID NO: 127530 - protein, 7 aa, synthetic construct
KMKVYVE

SEQ ID NO: 127531 - protein, 7 aa, synthetic construct
KMKYAES

SEQ ID NO: 127532 - protein, 7 aa, synthetic construct
KMLHQPV

SEQ ID NO: 127533 - protein, 7 aa, synthetic construct
KMLPRDP

SEQ ID NO: 127534 - protein, 7 aa, synthetic construct
KMLPSGQ

SEQ ID NO: 127535 - protein, 7 aa, synthetic construct
KMLQRID

SEQ ID NO: 127536 - protein, 7 aa, synthetic construct
KMLRSVD

SEQ ID NO: 127537 - protein, 7 aa, synthetic construct
KMLRTLE

SEQ ID NO: 127538 - protein, 7 aa, synthetic construct
KMLSHGP

SEQ ID NO: 127539 - protein, 7 aa, synthetic construct
KMMAMGS

SEQ ID NO: 127540 - protein, 7 aa, synthetic construct
KMMDIAR

SEQ ID NO: 127541 - protein, 7 aa, synthetic construct
KMMGAGY

SEQ ID NO: 127542 - protein, 7 aa, synthetic construct
KMMGHQV

SEQ ID NO: 127543 - protein, 7 aa, synthetic construct
KMMHAHP

SEQ ID NO: 127544 - protein, 7 aa, synthetic construct
KMMHLNP

SEQ ID NO: 127545 - protein, 7 aa, synthetic construct
KMMHSQP

SEQ ID NO: 127546 - protein, 7 aa, synthetic construct
KMMPIVS

SEQ ID NO: 127547 - protein, 7 aa, synthetic construct
KMMPSTQ

SEQ ID NO: 127548 - protein, 7 aa, synthetic construct
KMMPTTV

SEQ ID NO: 127549 - protein, 7 aa, synthetic construct
KMMPYAA

SEQ ID NO: 127550 - protein, 7 aa, synthetic construct
KMMRDKE

SEQ ID NO: 127551 - protein, 7 aa, synthetic construct
KMMRITD

SEQ ID NO: 127552 - protein, 7 aa, synthetic construct
KMMRTQD

SEQ ID NO: 127553 - protein, 7 aa, synthetic construct
KMMSNTF

SEQ ID NO: 127554 - protein, 7 aa, synthetic construct
KMNAHGN

SEQ ID NO: 127555 - protein, 7 aa, synthetic construct
KMNARLD

SEQ ID NO: 127556 - protein, 7 aa, synthetic construct
KMNGQDK

SEQ ID NO: 127557 - protein, 7 aa, synthetic construct
KMNHNHM

SEQ ID NO: 127558 - protein, 7 aa, synthetic construct
KMNKEFH

SEQ ID NO: 127559 - protein, 7 aa, synthetic construct
KMNKFNE

SEQ ID NO: 127560 - protein, 7 aa, synthetic construct
KMNKIDF

SEQ ID NO: 127561 - protein, 7 aa, synthetic construct
KMNPQTM

SEQ ID NO: 127562 - protein, 7 aa, synthetic construct
KMNPTHH

SEQ ID NO: 127563 - protein, 7 aa, synthetic construct
KMNREYA

SEQ ID NO: 127564 - protein, 7 aa, synthetic construct
KMNTRFE

SEQ ID NO: 127565 - protein, 7 aa, synthetic construct
KMNVPMP

SEQ ID NO: 127566 - protein, 7 aa, synthetic construct
KMNYSKE

SEQ ID NO: 127567 - protein, 7 aa, synthetic construct
KMPEFRT

SEQ ID NO: 127568 - protein, 7 aa, synthetic construct
KMPEKMY

SEQ ID NO: 127569 - protein, 7 aa, synthetic construct
KMPGAIH

SEQ ID NO: 127570 - protein, 7 aa, synthetic construct
KMPGLAY

SEQ ID NO: 127571 - protein, 7 aa, synthetic construct
KMPHLQN

SEQ ID NO: 127572 - protein, 7 aa, synthetic construct
KMPHYSA

SEQ ID NO: 127573 - protein, 7 aa, synthetic construct
KMPMIDR

SEQ ID NO: 127574 - protein, 7 aa, synthetic construct
KMPMPHT

SEQ ID NO: 127575 - protein, 7 aa, synthetic construct
KMPPNTY

SEQ ID NO: 127576 - protein, 7 aa, synthetic construct
KMPPTER

SEQ ID NO: 127577 - protein, 7 aa, synthetic construct
KMPSAYQ

SEQ ID NO: 127578 - protein, 7 aa, synthetic construct
KMPSEIR

SEQ ID NO: 127579 - protein, 7 aa, synthetic construct
KMPSPLN

SEQ ID NO: 127580 - protein, 7 aa, synthetic construct
KMPYSTN

SEQ ID NO: 127581 - protein, 7 aa, synthetic construct
KMQASSH

SEQ ID NO: 127582 - protein, 7 aa, synthetic construct
KMQDSRA

SEQ ID NO: 127583 - protein, 7 aa, synthetic construct
KMQHGVQ

SEQ ID NO: 127584 - protein, 7 aa, synthetic construct
KMQHVNQ

SEQ ID NO: 127585 - protein, 7 aa, synthetic construct
KMQKDFL

SEQ ID NO: 127586 - protein, 7 aa, synthetic construct
KMQKFTD

SEQ ID NO: 127587 - protein, 7 aa, synthetic construct
KMQKYVE

SEQ ID NO: 127588 - protein, 7 aa, synthetic construct
KMQNASY

SEQ ID NO: 127589 - protein, 7 aa, synthetic construct
KMQNIQF

SEQ ID NO: 127590 - protein, 7 aa, synthetic construct
KMQNPMN

SEQ ID NO: 127591 - protein, 7 aa, synthetic construct
KMQPHGM

SEQ ID NO: 127592 - protein, 7 aa, synthetic construct
KMQRDAY

SEQ ID NO: 127593 - protein, 7 aa, synthetic construct
KMQRDTL

SEQ ID NO: 127594 - protein, 7 aa, synthetic construct
KMQRGEA

SEQ ID NO: 127595 - protein, 7 aa, synthetic construct
KMQRVIE

SEQ ID NO: 127596 - protein, 7 aa, synthetic construct
KMQTHAN

SEQ ID NO: 127597 - protein, 7 aa, synthetic construct
KMQVSHQ

SEQ ID NO: 127598 - protein, 7 aa, synthetic construct
KMQYAPS

SEQ ID NO: 127599 - protein, 7 aa, synthetic construct
KMRAGVD

SEQ ID NO: 127600 - protein, 7 aa, synthetic construct
KMRDSLQ

SEQ ID NO: 127601 - protein, 7 aa, synthetic construct
KMREARD

SEQ ID NO: 127602 - protein, 7 aa, synthetic construct
KMREKPD

SEQ ID NO: 127603 - protein, 7 aa, synthetic construct
KMREMTI

SEQ ID NO: 127604 - protein, 7 aa, synthetic construct
KMRETTA

SEQ ID NO: 127605 - protein, 7 aa, synthetic construct
KMRGPDP

SEQ ID NO: 127606 - protein, 7 aa, synthetic construct
KMRGQQE

SEQ ID NO: 127607 - protein, 7 aa, synthetic construct
KMRGVNE

SEQ ID NO: 127608 - protein, 7 aa, synthetic construct
KMRINEA

SEQ ID NO: 127609 - protein, 7 aa, synthetic construct
KMRLEIG

SEQ ID NO: 127610 - protein, 7 aa, synthetic construct
KMRQGDA

SEQ ID NO: 127611 - protein, 7 aa, synthetic construct
KMRSQEG

SEQ ID NO: 127612 - protein, 7 aa, synthetic construct
KMRTAGE

SEQ ID NO: 127613 - protein, 7 aa, synthetic construct
KMRTDLV

SEQ ID NO: 127614 - protein, 7 aa, synthetic construct
KMRTEAM

SEQ ID NO: 127615 - protein, 7 aa, synthetic construct
KMRTEFA

SEQ ID NO: 127616 - protein, 7 aa, synthetic construct
KMRVPEL

SEQ ID NO: 127617 - protein, 7 aa, synthetic construct
KMRVVTE

SEQ ID NO: 127618 - protein, 7 aa, synthetic construct
KMSANFV

SEQ ID NO: 127619 - protein, 7 aa, synthetic construct
KMSARID

SEQ ID NO: 127620 - protein, 7 aa, synthetic construct
KMSDMSR

SEQ ID NO: 127621 - protein, 7 aa, synthetic construct
KMSDRGL

SEQ ID NO: 127622 - protein, 7 aa, synthetic construct
KMSFKHE

SEQ ID NO: 127623 - protein, 7 aa, synthetic construct
KMSGHSF

SEQ ID NO: 127624 - protein, 7 aa, synthetic construct
KMSGPYQ

SEQ ID NO: 127625 - protein, 7 aa, synthetic construct
KMSHQQF

SEQ ID NO: 127626 - protein, 7 aa, synthetic construct
KMSPPMQ

SEQ ID NO: 127627 - protein, 7 aa, synthetic construct
KMSRQPE

SEQ ID NO: 127628 - protein, 7 aa, synthetic construct
KMTAEAK

SEQ ID NO: 127629 - protein, 7 aa, synthetic construct
KMTAEKH

SEQ ID NO: 127630 - protein, 7 aa, synthetic construct
KMTDAMR

SEQ ID NO: 127631 - protein, 7 aa, synthetic construct
KMTDAVK

SEQ ID NO: 127632 - protein, 7 aa, synthetic construct
KMTDRVQ

SEQ ID NO: 127633 - protein, 7 aa, synthetic construct
KMTERNQ

SEQ ID NO: 127634 - protein, 7 aa, synthetic construct
KMTGRDY

SEQ ID NO: 127635 - protein, 7 aa, synthetic construct
KMTHNMT

SEQ ID NO: 127636 - protein, 7 aa, synthetic construct
KMTHQRD

SEQ ID NO: 127637 - protein, 7 aa, synthetic construct
KMTHTTY

SEQ ID NO: 127638 - protein, 7 aa, synthetic construct
KMTMRMD

SEQ ID NO: 127639 - protein, 7 aa, synthetic construct
KMTPGNY

SEQ ID NO: 127640 - protein, 7 aa, synthetic construct
KMTPMPA

SEQ ID NO: 127641 - protein, 7 aa, synthetic construct
KMTSHGQ

SEQ ID NO: 127642 - protein, 7 aa, synthetic construct
KMVHITG

SEQ ID NO: 127643 - protein, 7 aa, synthetic construct
KMVKDPF

SEQ ID NO: 127644 - protein, 7 aa, synthetic construct
KMVLQGH

SEQ ID NO: 127645 - protein, 7 aa, synthetic construct
KMVQGYA

SEQ ID NO: 127646 - protein, 7 aa, synthetic construct
KMVRVDT

SEQ ID NO: 127647 - protein, 7 aa, synthetic construct
KMVSQHY

SEQ ID NO: 127648 - protein, 7 aa, synthetic construct
KMYDART

SEQ ID NO: 127649 - protein, 7 aa, synthetic construct
KMYEKAT

SEQ ID NO: 127650 - protein, 7 aa, synthetic construct
KMYGGHT

SEQ ID NO: 127651 - protein, 7 aa, synthetic construct
KMYKEGG

SEQ ID NO: 127652 - protein, 7 aa, synthetic construct
KMYKESA

SEQ ID NO: 127653 - protein, 7 aa, synthetic construct
KMYKESG

SEQ ID NO: 127654 - protein, 7 aa, synthetic construct
KMYKETV

SEQ ID NO: 127655 - protein, 7 aa, synthetic construct
KMYKGLE

SEQ ID NO: 127656 - protein, 7 aa, synthetic construct
KMYPNTP

SEQ ID NO: 127657 - protein, 7 aa, synthetic construct
KNAAHTF

SEQ ID NO: 127658 - protein, 7 aa, synthetic construct
KNAATYI

SEQ ID NO: 127659 - protein, 7 aa, synthetic construct
KNADNRN

SEQ ID NO: 127660 - protein, 7 aa, synthetic construct
KNAGHTN

SEQ ID NO: 127661 - protein, 7 aa, synthetic construct
KNAGVHQ

SEQ ID NO: 127662 - protein, 7 aa, synthetic construct
KNAHGDR

SEQ ID NO: 127663 - protein, 7 aa, synthetic construct
KNAIDQR

SEQ ID NO: 127664 - protein, 7 aa, synthetic construct
KNAPSHN

SEQ ID NO: 127665 - protein, 7 aa, synthetic construct
KNAPTDK

SEQ ID NO: 127666 - protein, 7 aa, synthetic construct
KNARNDG

SEQ ID NO: 127667 - protein, 7 aa, synthetic construct
KNASDRS

SEQ ID NO: 127668 - protein, 7 aa, synthetic construct
KNASLMY

SEQ ID NO: 127669 - protein, 7 aa, synthetic construct
KNASYLS

SEQ ID NO: 127670 - protein, 7 aa, synthetic construct
KNATPYM

SEQ ID NO: 127671 - protein, 7 aa, synthetic construct
KNAVSHQ

SEQ ID NO: 127672 - protein, 7 aa, synthetic construct
KNAYPDR

SEQ ID NO: 127673 - protein, 7 aa, synthetic construct
KNDARIV

SEQ ID NO: 127674 - protein, 7 aa, synthetic construct
KNDGVRS

SEQ ID NO: 127675 - protein, 7 aa, synthetic construct
KNDKHSI

SEQ ID NO: 127676 - protein, 7 aa, synthetic construct
KNDMAMF

SEQ ID NO: 127677 - protein, 7 aa, synthetic construct
KNDPNRN

SEQ ID NO: 127678 - protein, 7 aa, synthetic construct
KNDPRLQ

SEQ ID NO: 127679 - protein, 7 aa, synthetic construct
KNDRIER

SEQ ID NO: 127680 - protein, 7 aa, synthetic construct
KNDRMSI

SEQ ID NO: 127681 - protein, 7 aa, synthetic construct
KNDRQLI

SEQ ID NO: 127682 - protein, 7 aa, synthetic construct
KNDRQSL

SEQ ID NO: 127683 - protein, 7 aa, synthetic construct
KNDTKFQ

SEQ ID NO: 127684 - protein, 7 aa, synthetic construct
KNDYAKT

SEQ ID NO: 127685 - protein, 7 aa, synthetic construct
KNEAIRF

SEQ ID NO: 127686 - protein, 7 aa, synthetic construct
KNEARTI

SEQ ID NO: 127687 - protein, 7 aa, synthetic construct
KNEGKLM

SEQ ID NO: 127688 - protein, 7 aa, synthetic construct
KNEKYTT

SEQ ID NO: 127689 - protein, 7 aa, synthetic construct
KNEPKIY

SEQ ID NO: 127690 - protein, 7 aa, synthetic construct
KNEPRSL

SEQ ID NO: 127691 - protein, 7 aa, synthetic construct
KNERQFI

SEQ ID NO: 127692 - protein, 7 aa, synthetic construct
KNERVSV

SEQ ID NO: 127693 - protein, 7 aa, synthetic construct
KNETKAL

SEQ ID NO: 127694 - protein, 7 aa, synthetic construct
KNETKPQ

SEQ ID NO: 127695 - protein, 7 aa, synthetic construct
KNEVRYG

SEQ ID NO: 127696 - protein, 7 aa, synthetic construct
KNFAPSH

SEQ ID NO: 127697 - protein, 7 aa, synthetic construct
KNFDSTK

SEQ ID NO: 127698 - protein, 7 aa, synthetic construct
KNFEKSF

SEQ ID NO: 127699 - protein, 7 aa, synthetic construct
KNFGPGA

SEQ ID NO: 127700 - protein, 7 aa, synthetic construct
KNFGPQI

SEQ ID NO: 127701 - protein, 7 aa, synthetic construct
KNFHQTP

SEQ ID NO: 127702 - protein, 7 aa, synthetic construct
KNFKQDN

SEQ ID NO: 127703 - protein, 7 aa, synthetic construct
KNFKQDV

SEQ ID NO: 127704 - protein, 7 aa, synthetic construct
KNFPFKE

SEQ ID NO: 127705 - protein, 7 aa, synthetic construct
KNFPQTT

SEQ ID NO: 127706 - protein, 7 aa, synthetic construct
KNGEMIR

SEQ ID NO: 127707 - protein, 7 aa, synthetic construct
KNGESMR

SEQ ID NO: 127708 - protein, 7 aa, synthetic construct
KNGGWSA

SEQ ID NO: 127709 - protein, 7 aa, synthetic construct
KNGHHTI

SEQ ID NO: 127710 - protein, 7 aa, synthetic construct
KNGHNQT

SEQ ID NO: 127711 - protein, 7 aa, synthetic construct
KNGIDYK

SEQ ID NO: 127712 - protein, 7 aa, synthetic construct
KNGKNEM

SEQ ID NO: 127713 - protein, 7 aa, synthetic construct
KNGNVDK

SEQ ID NO: 127714 - protein, 7 aa, synthetic construct
KNGQDAK

SEQ ID NO: 127715 - protein, 7 aa, synthetic construct
KNGRLYE

SEQ ID NO: 127716 - protein, 7 aa, synthetic construct
KNGSHFT

SEQ ID NO: 127717 - protein, 7 aa, synthetic construct
KNGSREI

SEQ ID NO: 127718 - protein, 7 aa, synthetic construct
KNGTAVW

SEQ ID NO: 127719 - protein, 7 aa, synthetic construct
KNGVAYM

SEQ ID NO: 127720 - protein, 7 aa, synthetic construct
KNGVPPF

SEQ ID NO: 127721 - protein, 7 aa, synthetic construct
KNGYMTQ

SEQ ID NO: 127722 - protein, 7 aa, synthetic construct
KNGYNLM

SEQ ID NO: 127723 - protein, 7 aa, synthetic construct
KNHANLN

SEQ ID NO: 127724 - protein, 7 aa, synthetic construct
KNHATSY

SEQ ID NO: 127725 - protein, 7 aa, synthetic construct
KNHAVVT

SEQ ID NO: 127726 - protein, 7 aa, synthetic construct
KNHGPIP

SEQ ID NO: 127727 - protein, 7 aa, synthetic construct
KNHGQSQ

SEQ ID NO: 127728 - protein, 7 aa, synthetic construct
KNHGTMH

SEQ ID NO: 127729 - protein, 7 aa, synthetic construct
KNHHPGA

SEQ ID NO: 127730 - protein, 7 aa, synthetic construct
KNHLAAQ

SEQ ID NO: 127731 - protein, 7 aa, synthetic construct
KNHNIQI

SEQ ID NO: 127732 - protein, 7 aa, synthetic construct
KNHNPSL

SEQ ID NO: 127733 - protein, 7 aa, synthetic construct
KNHNTPT

SEQ ID NO: 127734 - protein, 7 aa, synthetic construct
KNHPHSA

SEQ ID NO: 127735 - protein, 7 aa, synthetic construct
KNHPMPN

SEQ ID NO: 127736 - protein, 7 aa, synthetic construct
KNHPNTY

SEQ ID NO: 127737 - protein, 7 aa, synthetic construct
KNHQGSP

SEQ ID NO: 127738 - protein, 7 aa, synthetic construct
KNHQLAH

SEQ ID NO: 127739 - protein, 7 aa, synthetic construct
KNHQQTI

SEQ ID NO: 127740 - protein, 7 aa, synthetic construct
KNHQTAV

SEQ ID NO: 127741 - protein, 7 aa, synthetic construct
KNHTSPQ

SEQ ID NO: 127742 - protein, 7 aa, synthetic construct
KNHTVSL

SEQ ID NO: 127743 - protein, 7 aa, synthetic construct
KNHVQNN

SEQ ID NO: 127744 - protein, 7 aa, synthetic construct
KNIGMVT

SEQ ID NO: 127745 - protein, 7 aa, synthetic construct
KNIGYSV

SEQ ID NO: 127746 - protein, 7 aa, synthetic construct
KNINGFV

SEQ ID NO: 127747 - protein, 7 aa, synthetic construct
KNINSMM

SEQ ID NO: 127748 - protein, 7 aa, synthetic construct
KNINSTY

SEQ ID NO: 127749 - protein, 7 aa, synthetic construct
KNIPHVQ

SEQ ID NO: 127750 - protein, 7 aa, synthetic construct
KNIPVIS

SEQ ID NO: 127751 - protein, 7 aa, synthetic construct
KNIQHSI

SEQ ID NO: 127752 - protein, 7 aa, synthetic construct
KNIQIMP

SEQ ID NO: 127753 - protein, 7 aa, synthetic construct
KNIQSHL

SEQ ID NO: 127754 - protein, 7 aa, synthetic construct
KNIREPM

SEQ ID NO: 127755 - protein, 7 aa, synthetic construct
KNISHGL

SEQ ID NO: 127756 - protein, 7 aa, synthetic construct
KNISTTY

SEQ ID NO: 127757 - protein, 7 aa, synthetic construct
KNKDAAL

SEQ ID NO: 127758 - protein, 7 aa, synthetic construct
KNKDHFT

SEQ ID NO: 127759 - protein, 7 aa, synthetic construct
KNKDLTL

SEQ ID NO: 127760 - protein, 7 aa, synthetic construct
KNKDPLI

SEQ ID NO: 127761 - protein, 7 aa, synthetic construct
KNKDSWS

SEQ ID NO: 127762 - protein, 7 aa, synthetic construct
KNKDTSM

SEQ ID NO: 127763 - protein, 7 aa, synthetic construct
KNKLPES

SEQ ID NO: 127764 - protein, 7 aa, synthetic construct
KNKQTDT

SEQ ID NO: 127765 - protein, 7 aa, synthetic construct
KNLGSMH

SEQ ID NO: 127766 - protein, 7 aa, synthetic construct
KNLHAMS

SEQ ID NO: 127767 - protein, 7 aa, synthetic construct
KNLHGGV

SEQ ID NO: 127768 - protein, 7 aa, synthetic construct
KNLHLAP

SEQ ID NO: 127769 - protein, 7 aa, synthetic construct
KNLHPVT

SEQ ID NO: 127770 - protein, 7 aa, synthetic construct
KNLHQSL

SEQ ID NO: 127771 - protein, 7 aa, synthetic construct
KNLKEHI

SEQ ID NO: 127772 - protein, 7 aa, synthetic construct
KNLREAI

SEQ ID NO: 127773 - protein, 7 aa, synthetic construct
KNLRGSD

SEQ ID NO: 127774 - protein, 7 aa, synthetic construct
KNLRTMD

SEQ ID NO: 127775 - protein, 7 aa, synthetic construct
KNLSDVK

SEQ ID NO: 127776 - protein, 7 aa, synthetic construct
KNLSYQA

SEQ ID NO: 127777 - protein, 7 aa, synthetic construct
KNLTQER

SEQ ID NO: 127778 - protein, 7 aa, synthetic construct
KNLTVPI

SEQ ID NO: 127779 - protein, 7 aa, synthetic construct
KNMANNH

SEQ ID NO: 127780 - protein, 7 aa, synthetic construct
KNMASTH

SEQ ID NO: 127781 - protein, 7 aa, synthetic construct
KNMGMNH

SEQ ID NO: 127782 - protein, 7 aa, synthetic construct
KNMHIAI

SEQ ID NO: 127783 - protein, 7 aa, synthetic construct
KNMISMQ

SEQ ID NO: 127784 - protein, 7 aa, synthetic construct
KNMKDGL

SEQ ID NO: 127785 - protein, 7 aa, synthetic construct
KNMMPPP

SEQ ID NO: 127786 - protein, 7 aa, synthetic construct
KNMNHLP

SEQ ID NO: 127787 - protein, 7 aa, synthetic construct
KNMNIKD

SEQ ID NO: 127788 - protein, 7 aa, synthetic construct
KNMQSTW

SEQ ID NO: 127789 - protein, 7 aa, synthetic construct
KNMTKEL

SEQ ID NO: 127790 - protein, 7 aa, synthetic construct
KNMTTHF

SEQ ID NO: 127791 - protein, 7 aa, synthetic construct
KNNAGYQ

SEQ ID NO: 127792 - protein, 7 aa, synthetic construct
KNNAQMY

SEQ ID NO: 127793 - protein, 7 aa, synthetic construct
KNNGDTR

SEQ ID NO: 127794 - protein, 7 aa, synthetic construct
KNNGVHY

SEQ ID NO: 127795 - protein, 7 aa, synthetic construct
KNNHPGT

SEQ ID NO: 127796 - protein, 7 aa, synthetic construct
KNNHPLL

SEQ ID NO: 127797 - protein, 7 aa, synthetic construct
KNNHTMQ

SEQ ID NO: 127798 - protein, 7 aa, synthetic construct
KNNHTMT

SEQ ID NO: 127799 - protein, 7 aa, synthetic construct
KNNMDGK

SEQ ID NO: 127800 - protein, 7 aa, synthetic construct
KNNMPQD

SEQ ID NO: 127801 - protein, 7 aa, synthetic construct
KNNQLTF

SEQ ID NO: 127802 - protein, 7 aa, synthetic construct
KNNQTSW

SEQ ID NO: 127803 - protein, 7 aa, synthetic construct
KNNRMDA

SEQ ID NO: 127804 - protein, 7 aa, synthetic construct
KNNRVSD

SEQ ID NO: 127805 - protein, 7 aa, synthetic construct
KNNVNLY

SEQ ID NO: 127806 - protein, 7 aa, synthetic construct
KNNYPPV

SEQ ID NO: 127807 - protein, 7 aa, synthetic construct
KNPELRY

SEQ ID NO: 127808 - protein, 7 aa, synthetic construct
KNPEQGR

SEQ ID NO: 127809 - protein, 7 aa, synthetic construct
KNPEYMR

SEQ ID NO: 127810 - protein, 7 aa, synthetic construct
KNPGAQW

SEQ ID NO: 127811 - protein, 7 aa, synthetic construct
KNPGAYP

SEQ ID NO: 127812 - protein, 7 aa, synthetic construct
KNPGEKW

SEQ ID NO: 127813 - protein, 7 aa, synthetic construct
KNPGHSL

SEQ ID NO: 127814 - protein, 7 aa, synthetic construct
KNPHLAI

SEQ ID NO: 127815 - protein, 7 aa, synthetic construct
KNPNPAN

SEQ ID NO: 127816 - protein, 7 aa, synthetic construct
KNPNPNF

SEQ ID NO: 127817 - protein, 7 aa, synthetic construct
KNPNQYV

SEQ ID NO: 127818 - protein, 7 aa, synthetic construct
KNPNYDR

SEQ ID NO: 127819 - protein, 7 aa, synthetic construct
KNPPITH

SEQ ID NO: 127820 - protein, 7 aa, synthetic construct
KNPPMLQ

SEQ ID NO: 127821 - protein, 7 aa, synthetic construct
KNPRDPN

SEQ ID NO: 127822 - protein, 7 aa, synthetic construct
KNPREHM

SEQ ID NO: 127823 - protein, 7 aa, synthetic construct
KNPRETT

SEQ ID NO: 127824 - protein, 7 aa, synthetic construct
KNPSSIF

SEQ ID NO: 127825 - protein, 7 aa, synthetic construct
KNPTIYP

SEQ ID NO: 127826 - protein, 7 aa, synthetic construct
KNPTPPY

SEQ ID NO: 127827 - protein, 7 aa, synthetic construct
KNPTTQV

SEQ ID NO: 127828 - protein, 7 aa, synthetic construct
KNQALYV

SEQ ID NO: 127829 - protein, 7 aa, synthetic construct
KNQATLY

SEQ ID NO: 127830 - protein, 7 aa, synthetic construct
KNQEKFN

SEQ ID NO: 127831 - protein, 7 aa, synthetic construct
KNQGFSA

SEQ ID NO: 127832 - protein, 7 aa, synthetic construct
KNQGHIM

SEQ ID NO: 127833 - protein, 7 aa, synthetic construct
KNQGPFT

SEQ ID NO: 127834 - protein, 7 aa, synthetic construct
KNQGPSL

SEQ ID NO: 127835 - protein, 7 aa, synthetic construct
KNQHAGM

SEQ ID NO: 127836 - protein, 7 aa, synthetic construct
KNQHNSI

SEQ ID NO: 127837 - protein, 7 aa, synthetic construct
KNQHNVI

SEQ ID NO: 127838 - protein, 7 aa, synthetic construct
KNQISSM

SEQ ID NO: 127839 - protein, 7 aa, synthetic construct
KNQMTQF

SEQ ID NO: 127840 - protein, 7 aa, synthetic construct
KNQNHMS

SEQ ID NO: 127841 - protein, 7 aa, synthetic construct
KNQPGAH

SEQ ID NO: 127842 - protein, 7 aa, synthetic construct
KNQPLQL

SEQ ID NO: 127843 - protein, 7 aa, synthetic construct
KNQPQKD

SEQ ID NO: 127844 - protein, 7 aa, synthetic construct
KNQPTSF

SEQ ID NO: 127845 - protein, 7 aa, synthetic construct
KNQQLTF

SEQ ID NO: 127846 - protein, 7 aa, synthetic construct
KNQQNMQ

SEQ ID NO: 127847 - protein, 7 aa, synthetic construct
KNQSHLQ

SEQ ID NO: 127848 - protein, 7 aa, synthetic construct
KNQTNFN

SEQ ID NO: 127849 - protein, 7 aa, synthetic construct
KNQVLSY

SEQ ID NO: 127850 - protein, 7 aa, synthetic construct
KNRDHEL

SEQ ID NO: 127851 - protein, 7 aa, synthetic construct
KNRDVNQ

SEQ ID NO: 127852 - protein, 7 aa, synthetic construct
KNREKDT

SEQ ID NO: 127853 - protein, 7 aa, synthetic construct
KNRMIDG

SEQ ID NO: 127854 - protein, 7 aa, synthetic construct
KNRPDLY

SEQ ID NO: 127855 - protein, 7 aa, synthetic construct
KNRPVFE

SEQ ID NO: 127856 - protein, 7 aa, synthetic construct
KNRTDSS

SEQ ID NO: 127857 - protein, 7 aa, synthetic construct
KNRTEFV

SEQ ID NO: 127858 - protein, 7 aa, synthetic construct
KNSHLVT

SEQ ID NO: 127859 - protein, 7 aa, synthetic construct
KNSHPQI

SEQ ID NO: 127860 - protein, 7 aa, synthetic construct
KNSIDIR

SEQ ID NO: 127861 - protein, 7 aa, synthetic construct
KNSLQGY

SEQ ID NO: 127862 - protein, 7 aa, synthetic construct
KNSMVQY

SEQ ID NO: 127863 - protein, 7 aa, synthetic construct
KNSNDRT

SEQ ID NO: 127864 - protein, 7 aa, synthetic construct
KNSPRSE

SEQ ID NO: 127865 - protein, 7 aa, synthetic construct
KNSQVYQ

SEQ ID NO: 127866 - protein, 7 aa, synthetic construct
KNSQYGL

SEQ ID NO: 127867 - protein, 7 aa, synthetic construct
KNSRNDG

SEQ ID NO: 127868 - protein, 7 aa, synthetic construct
KNSSEKF

SEQ ID NO: 127869 - protein, 7 aa, synthetic construct
KNSTHYV

SEQ ID NO: 127870 - protein, 7 aa, synthetic construct
KNTAHNQ

SEQ ID NO: 127871 - protein, 7 aa, synthetic construct
KNTAHQQ

SEQ ID NO: 127872 - protein, 7 aa, synthetic construct
KNTAYPY

SEQ ID NO: 127873 - protein, 7 aa, synthetic construct
KNTAYTL

SEQ ID NO: 127874 - protein, 7 aa, synthetic construct
KNTFKEY

SEQ ID NO: 127875 - protein, 7 aa, synthetic construct
KNTGAYT

SEQ ID NO: 127876 - protein, 7 aa, synthetic construct
KNTGERY

SEQ ID NO: 127877 - protein, 7 aa, synthetic construct
KNTGNWA

SEQ ID NO: 127878 - protein, 7 aa, synthetic construct
KNTHPPP

SEQ ID NO: 127879 - protein, 7 aa, synthetic construct
KNTMNAF

SEQ ID NO: 127880 - protein, 7 aa, synthetic construct
KNTMPSY

SEQ ID NO: 127881 - protein, 7 aa, synthetic construct
KNTNLQY

SEQ ID NO: 127882 - protein, 7 aa, synthetic construct
KNTNSGH

SEQ ID NO: 127883 - protein, 7 aa, synthetic construct
KNTQQFH

SEQ ID NO: 127884 - protein, 7 aa, synthetic construct
KNTSLAY

SEQ ID NO: 127885 - protein, 7 aa, synthetic construct
KNTSNQY

SEQ ID NO: 127886 - protein, 7 aa, synthetic construct
KNTSTDR

SEQ ID NO: 127887 - protein, 7 aa, synthetic construct
KNTTFAQ

SEQ ID NO: 127888 - protein, 7 aa, synthetic construct
KNTTFRD

SEQ ID NO: 127889 - protein, 7 aa, synthetic construct
KNTTLTM

SEQ ID NO: 127890 - protein, 7 aa, synthetic construct
KNTTPYN

SEQ ID NO: 127891 - protein, 7 aa, synthetic construct
KNTYAVH

SEQ ID NO: 127892 - protein, 7 aa, synthetic construct
KNVAQYI

SEQ ID NO: 127893 - protein, 7 aa, synthetic construct
KNVASVF

SEQ ID NO: 127894 - protein, 7 aa, synthetic construct
KNVHAGL

SEQ ID NO: 127895 - protein, 7 aa, synthetic construct
KNVHNTQ

SEQ ID NO: 127896 - protein, 7 aa, synthetic construct
KNVMVAH

SEQ ID NO: 127897 - protein, 7 aa, synthetic construct
KNVNIQY

SEQ ID NO: 127898 - protein, 7 aa, synthetic construct
KNVNTAY

SEQ ID NO: 127899 - protein, 7 aa, synthetic construct
KNVPGFS

SEQ ID NO: 127900 - protein, 7 aa, synthetic construct
KNVPHVV

SEQ ID NO: 127901 - protein, 7 aa, synthetic construct
KNVPSKD

SEQ ID NO: 127902 - protein, 7 aa, synthetic construct
KNVQVYA

SEQ ID NO: 127903 - protein, 7 aa, synthetic construct
KNVRDGV

SEQ ID NO: 127904 - protein, 7 aa, synthetic construct
KNVRELQ

SEQ ID NO: 127905 - protein, 7 aa, synthetic construct
KNVSKTE

SEQ ID NO: 127906 - protein, 7 aa, synthetic construct
KNVTHST

SEQ ID NO: 127907 - protein, 7 aa, synthetic construct
KNYAAAD

SEQ ID NO: 127908 - protein, 7 aa, synthetic construct
KNYAGDR

SEQ ID NO: 127909 - protein, 7 aa, synthetic construct
KNYAVTI

SEQ ID NO: 127910 - protein, 7 aa, synthetic construct
KNYGASM

SEQ ID NO: 127911 - protein, 7 aa, synthetic construct
KNYHGAQ

SEQ ID NO: 127912 - protein, 7 aa, synthetic construct
KNYNALQ

SEQ ID NO: 127913 - protein, 7 aa, synthetic construct
KNYPPQI

SEQ ID NO: 127914 - protein, 7 aa, synthetic construct
KNYPPST

SEQ ID NO: 127915 - protein, 7 aa, synthetic construct
KNYQHFE

SEQ ID NO: 127916 - protein, 7 aa, synthetic construct
KNYVANH

SEQ ID NO: 127917 - protein, 7 aa, synthetic construct
KNYVGST

SEQ ID NO: 127918 - protein, 7 aa, synthetic construct
KPADRHQ

SEQ ID NO: 127919 - protein, 7 aa, synthetic construct
KPAEPRM

SEQ ID NO: 127920 - protein, 7 aa, synthetic construct
KPAGSHY

SEQ ID NO: 127921 - protein, 7 aa, synthetic construct
KPAGVFH

SEQ ID NO: 127922 - protein, 7 aa, synthetic construct
KPAHHMQ

SEQ ID NO: 127923 - protein, 7 aa, synthetic construct
KPAHVST

SEQ ID NO: 127924 - protein, 7 aa, synthetic construct
KPAKHDV

SEQ ID NO: 127925 - protein, 7 aa, synthetic construct
KPALGPL

SEQ ID NO: 127926 - protein, 7 aa, synthetic construct
KPALNTF

SEQ ID NO: 127927 - protein, 7 aa, synthetic construct
KPALVTT

SEQ ID NO: 127928 - protein, 7 aa, synthetic construct
KPAPTPM

SEQ ID NO: 127929 - protein, 7 aa, synthetic construct
KPAQAWS

SEQ ID NO: 127930 - protein, 7 aa, synthetic construct
KPAQDQR

SEQ ID NO: 127931 - protein, 7 aa, synthetic construct
KPATTYV

SEQ ID NO: 127932 - protein, 7 aa, synthetic construct
KPATYVT

SEQ ID NO: 127933 - protein, 7 aa, synthetic construct
KPAYSTQ

SEQ ID NO: 127934 - protein, 7 aa, synthetic construct
KPAYTRE

SEQ ID NO: 127935 - protein, 7 aa, synthetic construct
KPDAARA

SEQ ID NO: 127936 - protein, 7 aa, synthetic construct
KPDFKPT

SEQ ID NO: 127937 - protein, 7 aa, synthetic construct
KPDKQHF

SEQ ID NO: 127938 - protein, 7 aa, synthetic construct
KPDLSAR

SEQ ID NO: 127939 - protein, 7 aa, synthetic construct
KPDQGRS

SEQ ID NO: 127940 - protein, 7 aa, synthetic construct
KPDRMGF

SEQ ID NO: 127941 - protein, 7 aa, synthetic construct
KPDRMHT

SEQ ID NO: 127942 - protein, 7 aa, synthetic construct
KPDRPNW

SEQ ID NO: 127943 - protein, 7 aa, synthetic construct
KPDSRFQ

SEQ ID NO: 127944 - protein, 7 aa, synthetic construct
KPDSRHV

SEQ ID NO: 127945 - protein, 7 aa, synthetic construct
KPEAKPW

SEQ ID NO: 127946 - protein, 7 aa, synthetic construct
KPEAMTR

SEQ ID NO: 127947 - protein, 7 aa, synthetic construct
KPEHQSR

SEQ ID NO: 127948 - protein, 7 aa, synthetic construct
KPEHRIM

SEQ ID NO: 127949 - protein, 7 aa, synthetic construct
KPEKYYA

SEQ ID NO: 127950 - protein, 7 aa, synthetic construct
KPELRGH

SEQ ID NO: 127951 - protein, 7 aa, synthetic construct
KPELRSQ

SEQ ID NO: 127952 - protein, 7 aa, synthetic construct
KPEQRNQ

SEQ ID NO: 127953 - protein, 7 aa, synthetic construct
KPERIMT

SEQ ID NO: 127954 - protein, 7 aa, synthetic construct
KPERPYP

SEQ ID NO: 127955 - protein, 7 aa, synthetic construct
KPERYTA

SEQ ID NO: 127956 - protein, 7 aa, synthetic construct
KPFKDTF

SEQ ID NO: 127957 - protein, 7 aa, synthetic construct
KPFNKSD

SEQ ID NO: 127958 - protein, 7 aa, synthetic construct
KPFSTRD

SEQ ID NO: 127959 - protein, 7 aa, synthetic construct
KPGAWKE

SEQ ID NO: 127960 - protein, 7 aa, synthetic construct
KPGHAGF

SEQ ID NO: 127961 - protein, 7 aa, synthetic construct
KPGHGYA

SEQ ID NO: 127962 - protein, 7 aa, synthetic construct
KPGHMDR

SEQ ID NO: 127963 - protein, 7 aa, synthetic construct
KPGKSDY

SEQ ID NO: 127964 - protein, 7 aa, synthetic construct
KPGLAMM

SEQ ID NO: 127965 - protein, 7 aa, synthetic construct
KPGMPPM

SEQ ID NO: 127966 - protein, 7 aa, synthetic construct
KPGPLLT

SEQ ID NO: 127967 - protein, 7 aa, synthetic construct
KPGQSRD

SEQ ID NO: 127968 - protein, 7 aa, synthetic construct
KPGRDAM

SEQ ID NO: 127969 - protein, 7 aa, synthetic construct
KPGRDQQ

SEQ ID NO: 127970 - protein, 7 aa, synthetic construct
KPGRFDP

SEQ ID NO: 127971 - protein, 7 aa, synthetic construct
KPGRVLD

SEQ ID NO: 127972 - protein, 7 aa, synthetic construct
KPGSPIL

SEQ ID NO: 127973 - protein, 7 aa, synthetic construct
KPGTLAY

SEQ ID NO: 127974 - protein, 7 aa, synthetic construct
KPGTPHY

SEQ ID NO: 127975 - protein, 7 aa, synthetic construct
KPGYDGR

SEQ ID NO: 127976 - protein, 7 aa, synthetic construct
KPHAVTI

SEQ ID NO: 127977 - protein, 7 aa, synthetic construct
KPHDSTR

SEQ ID NO: 127978 - protein, 7 aa, synthetic construct
KPHEKTY

SEQ ID NO: 127979 - protein, 7 aa, synthetic construct
KPHGADR

SEQ ID NO: 127980 - protein, 7 aa, synthetic construct
KPHKVTD

SEQ ID NO: 127981 - protein, 7 aa, synthetic construct
KPHMLRE

SEQ ID NO: 127982 - protein, 7 aa, synthetic construct
KPHMVQV

SEQ ID NO: 127983 - protein, 7 aa, synthetic construct
KPHNIAI

SEQ ID NO: 127984 - protein, 7 aa, synthetic construct
KPHNTFA

SEQ ID NO: 127985 - protein, 7 aa, synthetic construct
KPHPGYM

SEQ ID NO: 127986 - protein, 7 aa, synthetic construct
KPHPRID

SEQ ID NO: 127987 - protein, 7 aa, synthetic construct
KPHPSFS

SEQ ID NO: 127988 - protein, 7 aa, synthetic construct
KPHQTER

SEQ ID NO: 127989 - protein, 7 aa, synthetic construct
KPHRVET

SEQ ID NO: 127990 - protein, 7 aa, synthetic construct
KPHSADR

SEQ ID NO: 127991 - protein, 7 aa, synthetic construct
KPHTLPT

SEQ ID NO: 127992 - protein, 7 aa, synthetic construct
KPHTPNI

SEQ ID NO: 127993 - protein, 7 aa, synthetic construct
KPHTVQT

SEQ ID NO: 127994 - protein, 7 aa, synthetic construct
KPHVESR

SEQ ID NO: 127995 - protein, 7 aa, synthetic construct
KPHVPPS

SEQ ID NO: 127996 - protein, 7 aa, synthetic construct
KPIAISG

SEQ ID NO: 127997 - protein, 7 aa, synthetic construct
KPIGGIP

SEQ ID NO: 127998 - protein, 7 aa, synthetic construct
KPIGHTT

SEQ ID NO: 127999 - protein, 7 aa, synthetic construct
KPINVHP

SEQ ID NO: 128000 - protein, 7 aa, synthetic construct
KPIPSIN

SEQ ID NO: 128001 - protein, 7 aa, synthetic construct
KPIREAM

SEQ ID NO: 128002 - protein, 7 aa, synthetic construct
KPKAEFF

SEQ ID NO: 128003 - protein, 7 aa, synthetic construct
KPKDYMT

SEQ ID NO: 128004 - protein, 7 aa, synthetic construct
KPKGVDM

SEQ ID NO: 128005 - protein, 7 aa, synthetic construct
KPKHDST

SEQ ID NO: 128006 - protein, 7 aa, synthetic construct
KPKHQDF

SEQ ID NO: 128007 - protein, 7 aa, synthetic construct
KPKMPDY

SEQ ID NO: 128008 - protein, 7 aa, synthetic construct
KPKQIDV

SEQ ID NO: 128009 - protein, 7 aa, synthetic construct
KPKSAPD

SEQ ID NO: 128010 - protein, 7 aa, synthetic construct
KPKTIDL

SEQ ID NO: 128011 - protein, 7 aa, synthetic construct
KPKYENM

SEQ ID NO: 128012 - protein, 7 aa, synthetic construct
KPKYGFE

SEQ ID NO: 128013 - protein, 7 aa, synthetic construct
KPKYMTD

SEQ ID NO: 128014 - protein, 7 aa, synthetic construct
KPLEMRA

SEQ ID NO: 128015 - protein, 7 aa, synthetic construct
KPLGIMP

SEQ ID NO: 128016 - protein, 7 aa, synthetic construct
KPLHGSI

SEQ ID NO: 128017 - protein, 7 aa, synthetic construct
KPLPHIP

SEQ ID NO: 128018 - protein, 7 aa, synthetic construct
KPLREYP

SEQ ID NO: 128019 - protein, 7 aa, synthetic construct
KPLRISD

SEQ ID NO: 128020 - protein, 7 aa, synthetic construct
KPLSAQF

SEQ ID NO: 128021 - protein, 7 aa, synthetic construct
KPLVGPP

SEQ ID NO: 128022 - protein, 7 aa, synthetic construct
KPMAHPF

SEQ ID NO: 128023 - protein, 7 aa, synthetic construct
KPMHGAY

SEQ ID NO: 128024 - protein, 7 aa, synthetic construct
KPMHGQT

SEQ ID NO: 128025 - protein, 7 aa, synthetic construct
KPMHQMT

SEQ ID NO: 128026 - protein, 7 aa, synthetic construct
KPMKYAD

SEQ ID NO: 128027 - protein, 7 aa, synthetic construct
KPMMTHP

SEQ ID NO: 128028 - protein, 7 aa, synthetic construct
KPMNALY

SEQ ID NO: 128029 - protein, 7 aa, synthetic construct
KPMPISM

SEQ ID NO: 128030 - protein, 7 aa, synthetic construct
KPMQQIH

SEQ ID NO: 128031 - protein, 7 aa, synthetic construct
KPMRQMD

SEQ ID NO: 128032 - protein, 7 aa, synthetic construct
KPMTHGN

SEQ ID NO: 128033 - protein, 7 aa, synthetic construct
KPMTNSY

SEQ ID NO: 128034 - protein, 7 aa, synthetic construct
KPMVMGN

SEQ ID NO: 128035 - protein, 7 aa, synthetic construct
KPMVSIP

SEQ ID NO: 128036 - protein, 7 aa, synthetic construct
KPNGNFY

SEQ ID NO: 128037 - protein, 7 aa, synthetic construct
KPNHSYP

SEQ ID NO: 128038 - protein, 7 aa, synthetic construct
KPNMNHY

SEQ ID NO: 128039 - protein, 7 aa, synthetic construct
KPNNREY

SEQ ID NO: 128040 - protein, 7 aa, synthetic construct
KPNPRAD

SEQ ID NO: 128041 - protein, 7 aa, synthetic construct
KPNQNHF

SEQ ID NO: 128042 - protein, 7 aa, synthetic construct
KPNRDSN

SEQ ID NO: 128043 - protein, 7 aa, synthetic construct
KPNRLEL

SEQ ID NO: 128044 - protein, 7 aa, synthetic construct
KPNSRQD

SEQ ID NO: 128045 - protein, 7 aa, synthetic construct
KPNSRTD

SEQ ID NO: 128046 - protein, 7 aa, synthetic construct
KPNVRDM

SEQ ID NO: 128047 - protein, 7 aa, synthetic construct
KPPAQHH

SEQ ID NO: 128048 - protein, 7 aa, synthetic construct
KPPEMRF

SEQ ID NO: 128049 - protein, 7 aa, synthetic construct
KPPHSHM

SEQ ID NO: 128050 - protein, 7 aa, synthetic construct
KPPIRHD

SEQ ID NO: 128051 - protein, 7 aa, synthetic construct
KPPMVNI

SEQ ID NO: 128052 - protein, 7 aa, synthetic construct
KPPREFL

SEQ ID NO: 128053 - protein, 7 aa, synthetic construct
KPPTGFV

SEQ ID NO: 128054 - protein, 7 aa, synthetic construct
KPPTLHM

SEQ ID NO: 128055 - protein, 7 aa, synthetic construct
KPQAHYG

SEQ ID NO: 128056 - protein, 7 aa, synthetic construct
KPQAPIM

SEQ ID NO: 128057 - protein, 7 aa, synthetic construct
KPQDANR

SEQ ID NO: 128058 - protein, 7 aa, synthetic construct
KPQFAKD

SEQ ID NO: 128059 - protein, 7 aa, synthetic construct
KPQGAHF

SEQ ID NO: 128060 - protein, 7 aa, synthetic construct
KPQGHFV

SEQ ID NO: 128061 - protein, 7 aa, synthetic construct
KPQGPVF

SEQ ID NO: 128062 - protein, 7 aa, synthetic construct
KPQHGHQ

SEQ ID NO: 128063 - protein, 7 aa, synthetic construct
KPQHIIA

SEQ ID NO: 128064 - protein, 7 aa, synthetic construct
KPQHNTA

SEQ ID NO: 128065 - protein, 7 aa, synthetic construct
KPQIYGG

SEQ ID NO: 128066 - protein, 7 aa, synthetic construct
KPQKFSD

SEQ ID NO: 128067 - protein, 7 aa, synthetic construct
KPQNIYA

SEQ ID NO: 128068 - protein, 7 aa, synthetic construct
KPQRADQ

SEQ ID NO: 128069 - protein, 7 aa, synthetic construct
KPQRMQE

SEQ ID NO: 128070 - protein, 7 aa, synthetic construct
KPQSRQE

SEQ ID NO: 128071 - protein, 7 aa, synthetic construct
KPQSSYI

SEQ ID NO: 128072 - protein, 7 aa, synthetic construct
KPQSYGM

SEQ ID NO: 128073 - protein, 7 aa, synthetic construct
KPQTDRQ

SEQ ID NO: 128074 - protein, 7 aa, synthetic construct
KPQTSRD

SEQ ID NO: 128075 - protein, 7 aa, synthetic construct
KPQVGDR

SEQ ID NO: 128076 - protein, 7 aa, synthetic construct
KPQYRGE

SEQ ID NO: 128077 - protein, 7 aa, synthetic construct
KPREKPE

SEQ ID NO: 128078 - protein, 7 aa, synthetic construct
KPRELSQ

SEQ ID NO: 128079 - protein, 7 aa, synthetic construct
KPREYAA

SEQ ID NO: 128080 - protein, 7 aa, synthetic construct
KPREYIG

SEQ ID NO: 128081 - protein, 7 aa, synthetic construct
KPRGEAQ

SEQ ID NO: 128082 - protein, 7 aa, synthetic construct
KPRITDS

SEQ ID NO: 128083 - protein, 7 aa, synthetic construct
KPRLQES

SEQ ID NO: 128084 - protein, 7 aa, synthetic construct
KPRLTEG

SEQ ID NO: 128085 - protein, 7 aa, synthetic construct
KPRMIDA

SEQ ID NO: 128086 - protein, 7 aa, synthetic construct
KPRNMVE

SEQ ID NO: 128087 - protein, 7 aa, synthetic construct
KPRPVPD

SEQ ID NO: 128088 - protein, 7 aa, synthetic construct
KPRQLTD

SEQ ID NO: 128089 - protein, 7 aa, synthetic construct
KPRSMEN

SEQ ID NO: 128090 - protein, 7 aa, synthetic construct
KPRVAVE

SEQ ID NO: 128091 - protein, 7 aa, synthetic construct
KPRVEPN

SEQ ID NO: 128092 - protein, 7 aa, synthetic construct
KPRVLVE

SEQ ID NO: 128093 - protein, 7 aa, synthetic construct
KPSARDF

SEQ ID NO: 128094 - protein, 7 aa, synthetic construct
KPSATYM

SEQ ID NO: 128095 - protein, 7 aa, synthetic construct
KPSGYSI

SEQ ID NO: 128096 - protein, 7 aa, synthetic construct
KPSHTMM

SEQ ID NO: 128097 - protein, 7 aa, synthetic construct
KPSMPPH

SEQ ID NO: 128098 - protein, 7 aa, synthetic construct
KPSQGFH

SEQ ID NO: 128099 - protein, 7 aa, synthetic construct
KPSQHLM

SEQ ID NO: 128100 - protein, 7 aa, synthetic construct
KPSQKDW

SEQ ID NO: 128101 - protein, 7 aa, synthetic construct
KPSQTSW

SEQ ID NO: 128102 - protein, 7 aa, synthetic construct
KPSRDLA

SEQ ID NO: 128103 - protein, 7 aa, synthetic construct
KPSSGQW

SEQ ID NO: 128104 - protein, 7 aa, synthetic construct
KPSSHMM

SEQ ID NO: 128105 - protein, 7 aa, synthetic construct
KPSSRSE

SEQ ID NO: 128106 - protein, 7 aa, synthetic construct
KPSSTPF

SEQ ID NO: 128107 - protein, 7 aa, synthetic construct
KPSTTMF

SEQ ID NO: 128108 - protein, 7 aa, synthetic construct
KPSVTHY

SEQ ID NO: 128109 - protein, 7 aa, synthetic construct
KPSYKQE

SEQ ID NO: 128110 - protein, 7 aa, synthetic construct
KPSYQEK

SEQ ID NO: 128111 - protein, 7 aa, synthetic construct
KPSYRDP

SEQ ID NO: 128112 - protein, 7 aa, synthetic construct
KPTDHRY

SEQ ID NO: 128113 - protein, 7 aa, synthetic construct
KPTDLRI

SEQ ID NO: 128114 - protein, 7 aa, synthetic construct
KPTHANQ

SEQ ID NO: 128115 - protein, 7 aa, synthetic construct
KPTHVMQ

SEQ ID NO: 128116 - protein, 7 aa, synthetic construct
KPTIPLS

SEQ ID NO: 128117 - protein, 7 aa, synthetic construct
KPTKDAF

SEQ ID NO: 128118 - protein, 7 aa, synthetic construct
KPTNSKE

SEQ ID NO: 128119 - protein, 7 aa, synthetic construct
KPTNTER

SEQ ID NO: 128120 - protein, 7 aa, synthetic construct
KPTNYHA

SEQ ID NO: 128121 - protein, 7 aa, synthetic construct
KPTPHFG

SEQ ID NO: 128122 - protein, 7 aa, synthetic construct
KPTPQHH

SEQ ID NO: 128123 - protein, 7 aa, synthetic construct
KPTQSNW

SEQ ID NO: 128124 - protein, 7 aa, synthetic construct
KPTRDII

SEQ ID NO: 128125 - protein, 7 aa, synthetic construct
KPTRDQA

SEQ ID NO: 128126 - protein, 7 aa, synthetic construct
KPTRDST

SEQ ID NO: 128127 - protein, 7 aa, synthetic construct
KPTRLGE

SEQ ID NO: 128128 - protein, 7 aa, synthetic construct
KPTRSEA

SEQ ID NO: 128129 - protein, 7 aa, synthetic construct
KPTSAFT

SEQ ID NO: 128130 - protein, 7 aa, synthetic construct
KPTSSFL

SEQ ID NO: 128131 - protein, 7 aa, synthetic construct
KPTVTSY

SEQ ID NO: 128132 - protein, 7 aa, synthetic construct
KPTVVAY

SEQ ID NO: 128133 - protein, 7 aa, synthetic construct
KPVDKSW

SEQ ID NO: 128134 - protein, 7 aa, synthetic construct
KPVGPIT

SEQ ID NO: 128135 - protein, 7 aa, synthetic construct
KPVHQAF

SEQ ID NO: 128136 - protein, 7 aa, synthetic construct
KPVHSAL

SEQ ID NO: 128137 - protein, 7 aa, synthetic construct
KPVIPSS

SEQ ID NO: 128138 - protein, 7 aa, synthetic construct
KPVKYND

SEQ ID NO: 128139 - protein, 7 aa, synthetic construct
KPVNPQY

SEQ ID NO: 128140 - protein, 7 aa, synthetic construct
KPVREIT

SEQ ID NO: 128141 - protein, 7 aa, synthetic construct
KPYEGRP

SEQ ID NO: 128142 - protein, 7 aa, synthetic construct
KPYKEEK

SEQ ID NO: 128143 - protein, 7 aa, synthetic construct
KPYKEMN

SEQ ID NO: 128144 - protein, 7 aa, synthetic construct
KPYKESA

SEQ ID NO: 128145 - protein, 7 aa, synthetic construct
KPYNKDI

SEQ ID NO: 128146 - protein, 7 aa, synthetic construct
KPYPQNA

SEQ ID NO: 128147 - protein, 7 aa, synthetic construct
KPYSEAR

SEQ ID NO: 128148 - protein, 7 aa, synthetic construct
KPYVGKD

SEQ ID NO: 128149 - protein, 7 aa, synthetic construct
KQAAAMY

SEQ ID NO: 128150 - protein, 7 aa, synthetic construct
KQAAHAF

SEQ ID NO: 128151 - protein, 7 aa, synthetic construct
KQAAIDR

SEQ ID NO: 128152 - protein, 7 aa, synthetic construct
KQAAKEI

SEQ ID NO: 128153 - protein, 7 aa, synthetic construct
KQAAYMS

SEQ ID NO: 128154 - protein, 7 aa, synthetic construct
KQADKVY

SEQ ID NO: 128155 - protein, 7 aa, synthetic construct
KQAEHKV

SEQ ID NO: 128156 - protein, 7 aa, synthetic construct
KQAERQI

SEQ ID NO: 128157 - protein, 7 aa, synthetic construct
KQAGHIF

SEQ ID NO: 128158 - protein, 7 aa, synthetic construct
KQAGIRD

SEQ ID NO: 128159 - protein, 7 aa, synthetic construct
KQAGPHL

SEQ ID NO: 128160 - protein, 7 aa, synthetic construct
KQAGYKD

SEQ ID NO: 128161 - protein, 7 aa, synthetic construct
KQAGYPV

SEQ ID NO: 128162 - protein, 7 aa, synthetic construct
KQAHHQA

SEQ ID NO: 128163 - protein, 7 aa, synthetic construct
KQAHNPN

SEQ ID NO: 128164 - protein, 7 aa, synthetic construct
KQAHQTF

SEQ ID NO: 128165 - protein, 7 aa, synthetic construct
KQAIHAQ

SEQ ID NO: 128166 - protein, 7 aa, synthetic construct
KQAIHHI

SEQ ID NO: 128167 - protein, 7 aa, synthetic construct
KQAKFSD

SEQ ID NO: 128168 - protein, 7 aa, synthetic construct
KQALKGP

SEQ ID NO: 128169 - protein, 7 aa, synthetic construct
KQANERM

SEQ ID NO: 128170 - protein, 7 aa, synthetic construct
KQANQKD

SEQ ID NO: 128171 - protein, 7 aa, synthetic construct
KQAPPQY

SEQ ID NO: 128172 - protein, 7 aa, synthetic construct
KQAPTIY

SEQ ID NO: 128173 - protein, 7 aa, synthetic construct
KQAQPQY

SEQ ID NO: 128174 - protein, 7 aa, synthetic construct
KQAREQY

SEQ ID NO: 128175 - protein, 7 aa, synthetic construct
KQARGDT

SEQ ID NO: 128176 - protein, 7 aa, synthetic construct
KQASHGY

SEQ ID NO: 128177 - protein, 7 aa, synthetic construct
KQATHSM

SEQ ID NO: 128178 - protein, 7 aa, synthetic construct
KQATYMA

SEQ ID NO: 128179 - protein, 7 aa, synthetic construct
KQAYANV

SEQ ID NO: 128180 - protein, 7 aa, synthetic construct
KQAYNTT

SEQ ID NO: 128181 - protein, 7 aa, synthetic construct
KQDAPGK

SEQ ID NO: 128182 - protein, 7 aa, synthetic construct
KQDARNA

SEQ ID NO: 128183 - protein, 7 aa, synthetic construct
KQDGYAK

SEQ ID NO: 128184 - protein, 7 aa, synthetic construct
KQDHAKG

SEQ ID NO: 128185 - protein, 7 aa, synthetic construct
KQDHKMT

SEQ ID NO: 128186 - protein, 7 aa, synthetic construct
KQDHVKM

SEQ ID NO: 128187 - protein, 7 aa, synthetic construct
KQDNHGR

SEQ ID NO: 128188 - protein, 7 aa, synthetic construct
KQDNRNA

SEQ ID NO: 128189 - protein, 7 aa, synthetic construct
KQDPKQW

SEQ ID NO: 128190 - protein, 7 aa, synthetic construct
KQDPLGK

SEQ ID NO: 128191 - protein, 7 aa, synthetic construct
KQDQHKN

SEQ ID NO: 128192 - protein, 7 aa, synthetic construct
KQDQRFA

SEQ ID NO: 128193 - protein, 7 aa, synthetic construct
KQDQWKP

SEQ ID NO: 128194 - protein, 7 aa, synthetic construct
KQDRAIL

SEQ ID NO: 128195 - protein, 7 aa, synthetic construct
KQDREKA

SEQ ID NO: 128196 - protein, 7 aa, synthetic construct
KQDRPPT

SEQ ID NO: 128197 - protein, 7 aa, synthetic construct
KQDRSFN

SEQ ID NO: 128198 - protein, 7 aa, synthetic construct
KQDRVMT

SEQ ID NO: 128199 - protein, 7 aa, synthetic construct
KQDSAKM

SEQ ID NO: 128200 - protein, 7 aa, synthetic construct
KQDSPRM

SEQ ID NO: 128201 - protein, 7 aa, synthetic construct
KQDSRNL

SEQ ID NO: 128202 - protein, 7 aa, synthetic construct
KQDSRPT

SEQ ID NO: 128203 - protein, 7 aa, synthetic construct
KQDSVRN

SEQ ID NO: 128204 - protein, 7 aa, synthetic construct
KQDTGRM

SEQ ID NO: 128205 - protein, 7 aa, synthetic construct
KQDTRIM

SEQ ID NO: 128206 - protein, 7 aa, synthetic construct
KQDVRNQ

SEQ ID NO: 128207 - protein, 7 aa, synthetic construct
KQDVSVW

SEQ ID NO: 128208 - protein, 7 aa, synthetic construct
KQDYPKQ

SEQ ID NO: 128209 - protein, 7 aa, synthetic construct
KQEAIRQ

SEQ ID NO: 128210 - protein, 7 aa, synthetic construct
KQEGQWA

SEQ ID NO: 128211 - protein, 7 aa, synthetic construct
KQEGRLQ

SEQ ID NO: 128212 - protein, 7 aa, synthetic construct
KQEGRTV

SEQ ID NO: 128213 - protein, 7 aa, synthetic construct
KQEIRNL

SEQ ID NO: 128214 - protein, 7 aa, synthetic construct
KQEIRQT

SEQ ID NO: 128215 - protein, 7 aa, synthetic construct
KQEKERY

SEQ ID NO: 128216 - protein, 7 aa, synthetic construct
KQEKNNS

SEQ ID NO: 128217 - protein, 7 aa, synthetic construct
KQEKQAI

SEQ ID NO: 128218 - protein, 7 aa, synthetic construct
KQEKSSS

SEQ ID NO: 128219 - protein, 7 aa, synthetic construct
KQEKTAQ

SEQ ID NO: 128220 - protein, 7 aa, synthetic construct
KQEKYTQ

SEQ ID NO: 128221 - protein, 7 aa, synthetic construct
KQENKYV

SEQ ID NO: 128222 - protein, 7 aa, synthetic construct
KQEPKNS

SEQ ID NO: 128223 - protein, 7 aa, synthetic construct
KQEPQRS

SEQ ID NO: 128224 - protein, 7 aa, synthetic construct
KQEREVR

SEQ ID NO: 128225 - protein, 7 aa, synthetic construct
KQERMDK

SEQ ID NO: 128226 - protein, 7 aa, synthetic construct
KQERPSM

SEQ ID NO: 128227 - protein, 7 aa, synthetic construct
KQERQAP

SEQ ID NO: 128228 - protein, 7 aa, synthetic construct
KQESKQS

SEQ ID NO: 128229 - protein, 7 aa, synthetic construct
KQETRMA

SEQ ID NO: 128230 - protein, 7 aa, synthetic construct
KQEVMQK

SEQ ID NO: 128231 - protein, 7 aa, synthetic construct
KQFEKDR

SEQ ID NO: 128232 - protein, 7 aa, synthetic construct
KQFENRP

SEQ ID NO: 128233 - protein, 7 aa, synthetic construct
KQFKPET

SEQ ID NO: 128234 - protein, 7 aa, synthetic construct
KQFNPMP

SEQ ID NO: 128235 - protein, 7 aa, synthetic construct
KQFNTEK

SEQ ID NO: 128236 - protein, 7 aa, synthetic construct
KQFPKAD

SEQ ID NO: 128237 - protein, 7 aa, synthetic construct
KQFPQPN

SEQ ID NO: 128238 - protein, 7 aa, synthetic construct
KQFQSMP

SEQ ID NO: 128239 - protein, 7 aa, synthetic construct
KQFRQEP

SEQ ID NO: 128240 - protein, 7 aa, synthetic construct
KQFVDAK

SEQ ID NO: 128241 - protein, 7 aa, synthetic construct
KQGEHAR

SEQ ID NO: 128242 - protein, 7 aa, synthetic construct
KQGEIRQ

SEQ ID NO: 128243 - protein, 7 aa, synthetic construct
KQGEKNT

SEQ ID NO: 128244 - protein, 7 aa, synthetic construct
KQGGHQF

SEQ ID NO: 128245 - protein, 7 aa, synthetic construct
KQGHAIQ

SEQ ID NO: 128246 - protein, 7 aa, synthetic construct
KQGHATV

SEQ ID NO: 128247 - protein, 7 aa, synthetic construct
KQGHSIV

SEQ ID NO: 128248 - protein, 7 aa, synthetic construct
KQGIHVM

SEQ ID NO: 128249 - protein, 7 aa, synthetic construct
KQGKDFV

SEQ ID NO: 128250 - protein, 7 aa, synthetic construct
KQGLHNL

SEQ ID NO: 128251 - protein, 7 aa, synthetic construct
KQGLPPV

SEQ ID NO: 128252 - protein, 7 aa, synthetic construct
KQGLTER

SEQ ID NO: 128253 - protein, 7 aa, synthetic construct
KQGMNPY

SEQ ID NO: 128254 - protein, 7 aa, synthetic construct
KQGNHAQ

SEQ ID NO: 128255 - protein, 7 aa, synthetic construct
KQGNIFP

SEQ ID NO: 128256 - protein, 7 aa, synthetic construct
KQGPIHP

SEQ ID NO: 128257 - protein, 7 aa, synthetic construct
KQGPVLL

SEQ ID NO: 128258 - protein, 7 aa, synthetic construct
KQGQMDK

SEQ ID NO: 128259 - protein, 7 aa, synthetic construct
KQGSDRA

SEQ ID NO: 128260 - protein, 7 aa, synthetic construct
KQGTKYD

SEQ ID NO: 128261 - protein, 7 aa, synthetic construct
KQGVASF

SEQ ID NO: 128262 - protein, 7 aa, synthetic construct
KQGVMDK

SEQ ID NO: 128263 - protein, 7 aa, synthetic construct
KQGYTKD

SEQ ID NO: 128264 - protein, 7 aa, synthetic construct
KQHADQR

SEQ ID NO: 128265 - protein, 7 aa, synthetic construct
KQHAEND

SEQ ID NO: 128266 - protein, 7 aa, synthetic construct
KQHATST

SEQ ID NO: 128267 - protein, 7 aa, synthetic construct
KQHDKSM

SEQ ID NO: 128268 - protein, 7 aa, synthetic construct
KQHDRNH

SEQ ID NO: 128269 - protein, 7 aa, synthetic construct
KQHDTRM

SEQ ID NO: 128270 - protein, 7 aa, synthetic construct
KQHGLTT

SEQ ID NO: 128271 - protein, 7 aa, synthetic construct
KQHGQNI

SEQ ID NO: 128272 - protein, 7 aa, synthetic construct
KQHGSPL

SEQ ID NO: 128273 - protein, 7 aa, synthetic construct
KQHGVMV

SEQ ID NO: 128274 - protein, 7 aa, synthetic construct
KQHHGTL

SEQ ID NO: 128275 - protein, 7 aa, synthetic construct
KQHHIGY

SEQ ID NO: 128276 - protein, 7 aa, synthetic construct
KQHHMKE

SEQ ID NO: 128277 - protein, 7 aa, synthetic construct
KQHIEKA

SEQ ID NO: 128278 - protein, 7 aa, synthetic construct
KQHITVS

SEQ ID NO: 128279 - protein, 7 aa, synthetic construct
KQHLAAT

SEQ ID NO: 128280 - protein, 7 aa, synthetic construct
KQHLAIT

SEQ ID NO: 128281 - protein, 7 aa, synthetic construct
KQHLTTI

SEQ ID NO: 128282 - protein, 7 aa, synthetic construct
KQHLVAV

SEQ ID NO: 128283 - protein, 7 aa, synthetic construct
KQHMPER

SEQ ID NO: 128284 - protein, 7 aa, synthetic construct
KQHNHFG

SEQ ID NO: 128285 - protein, 7 aa, synthetic construct
KQHNLMS

SEQ ID NO: 128286 - protein, 7 aa, synthetic construct
KQHNPYP

SEQ ID NO: 128287 - protein, 7 aa, synthetic construct
KQHNQGT

SEQ ID NO: 128288 - protein, 7 aa, synthetic construct
KQHNVDR

SEQ ID NO: 128289 - protein, 7 aa, synthetic construct
KQHPGVH

SEQ ID NO: 128290 - protein, 7 aa, synthetic construct
KQHPNTQ

SEQ ID NO: 128291 - protein, 7 aa, synthetic construct
KQHPQVH

SEQ ID NO: 128292 - protein, 7 aa, synthetic construct
KQHPVNS

SEQ ID NO: 128293 - protein, 7 aa, synthetic construct
KQHQAGL

SEQ ID NO: 128294 - protein, 7 aa, synthetic construct
KQHQAVI

SEQ ID NO: 128295 - protein, 7 aa, synthetic construct
KQHQIMP

SEQ ID NO: 128296 - protein, 7 aa, synthetic construct
KQHQIQT

SEQ ID NO: 128297 - protein, 7 aa, synthetic construct
KQHQNGT

SEQ ID NO: 128298 - protein, 7 aa, synthetic construct
KQHQNLA

SEQ ID NO: 128299 - protein, 7 aa, synthetic construct
KQHQSAT

SEQ ID NO: 128300 - protein, 7 aa, synthetic construct
KQHQTHP

SEQ ID NO: 128301 - protein, 7 aa, synthetic construct
KQHSAGL

SEQ ID NO: 128302 - protein, 7 aa, synthetic construct
KQHSLNM

SEQ ID NO: 128303 - protein, 7 aa, synthetic construct
KQHSMIV

SEQ ID NO: 128304 - protein, 7 aa, synthetic construct
KQHSNGV

SEQ ID NO: 128305 - protein, 7 aa, synthetic construct
KQHSQGL

SEQ ID NO: 128306 - protein, 7 aa, synthetic construct
KQHSQNA

SEQ ID NO: 128307 - protein, 7 aa, synthetic construct
KQHSSLA

SEQ ID NO: 128308 - protein, 7 aa, synthetic construct
KQHTQSL

SEQ ID NO: 128309 - protein, 7 aa, synthetic construct
KQHVRLE

SEQ ID NO: 128310 - protein, 7 aa, synthetic construct
KQHVSPM

SEQ ID NO: 128311 - protein, 7 aa, synthetic construct
KQIAATY

SEQ ID NO: 128312 - protein, 7 aa, synthetic construct
KQIAKEL

SEQ ID NO: 128313 - protein, 7 aa, synthetic construct
KQIANAY

SEQ ID NO: 128314 - protein, 7 aa, synthetic construct
KQIDMRS

SEQ ID NO: 128315 - protein, 7 aa, synthetic construct
KQIHGMA

SEQ ID NO: 128316 - protein, 7 aa, synthetic construct
KQIHHTF

SEQ ID NO: 128317 - protein, 7 aa, synthetic construct
KQIMSKD

SEQ ID NO: 128318 - protein, 7 aa, synthetic construct
KQINPQF

SEQ ID NO: 128319 - protein, 7 aa, synthetic construct
KQIPAAI

SEQ ID NO: 128320 - protein, 7 aa, synthetic construct
KQIPSPT

SEQ ID NO: 128321 - protein, 7 aa, synthetic construct
KQIPSQL

SEQ ID NO: 128322 - protein, 7 aa, synthetic construct
KQIQNDK

SEQ ID NO: 128323 - protein, 7 aa, synthetic construct
KQIQPVN

SEQ ID NO: 128324 - protein, 7 aa, synthetic construct
KQIQQKD

SEQ ID NO: 128325 - protein, 7 aa, synthetic construct
KQIQTYQ

SEQ ID NO: 128326 - protein, 7 aa, synthetic construct
KQIREPV

SEQ ID NO: 128327 - protein, 7 aa, synthetic construct
KQIRMAD

SEQ ID NO: 128328 - protein, 7 aa, synthetic construct
KQIRTDT

SEQ ID NO: 128329 - protein, 7 aa, synthetic construct
KQIRTLD

SEQ ID NO: 128330 - protein, 7 aa, synthetic construct
KQISLHA

SEQ ID NO: 128331 - protein, 7 aa, synthetic construct
KQISMHA

SEQ ID NO: 128332 - protein, 7 aa, synthetic construct
KQISPMI

SEQ ID NO: 128333 - protein, 7 aa, synthetic construct
KQKDANQ

SEQ ID NO: 128334 - protein, 7 aa, synthetic construct
KQKDKDF

SEQ ID NO: 128335 - protein, 7 aa, synthetic construct
KQKDLGW

SEQ ID NO: 128336 - protein, 7 aa, synthetic construct
KQKDLNF

SEQ ID NO: 128337 - protein, 7 aa, synthetic construct
KQKDVVY

SEQ ID NO: 128338 - protein, 7 aa, synthetic construct
KQKEFNY

SEQ ID NO: 128339 - protein, 7 aa, synthetic construct
KQKEPTF

SEQ ID NO: 128340 - protein, 7 aa, synthetic construct
KQKESTM

SEQ ID NO: 128341 - protein, 7 aa, synthetic construct
KQKETAM

SEQ ID NO: 128342 - protein, 7 aa, synthetic construct
KQKETIY

SEQ ID NO: 128343 - protein, 7 aa, synthetic construct
KQKGTEL

SEQ ID NO: 128344 - protein, 7 aa, synthetic construct
KQKLDAY

SEQ ID NO: 128345 - protein, 7 aa, synthetic construct
KQKMVEP

SEQ ID NO: 128346 - protein, 7 aa, synthetic construct
KQKNEMS

SEQ ID NO: 128347 - protein, 7 aa, synthetic construct
KQKPDLM

SEQ ID NO: 128348 - protein, 7 aa, synthetic construct
KQKPLES

SEQ ID NO: 128349 - protein, 7 aa, synthetic construct
KQKVVEF

SEQ ID NO: 128350 - protein, 7 aa, synthetic construct
KQLAREL

SEQ ID NO: 128351 - protein, 7 aa, synthetic construct
KQLASRE

SEQ ID NO: 128352 - protein, 7 aa, synthetic construct
KQLAYGA

SEQ ID NO: 128353 - protein, 7 aa, synthetic construct
KQLDSNR

SEQ ID NO: 128354 - protein, 7 aa, synthetic construct
KQLGMYA

SEQ ID NO: 128355 - protein, 7 aa, synthetic construct
KQLHANV

SEQ ID NO: 128356 - protein, 7 aa, synthetic construct
KQLHGQQ

SEQ ID NO: 128357 - protein, 7 aa, synthetic construct
KQLHQQL

SEQ ID NO: 128358 - protein, 7 aa, synthetic construct
KQLHSPT

SEQ ID NO: 128359 - protein, 7 aa, synthetic construct
KQLKAYD

SEQ ID NO: 128360 - protein, 7 aa, synthetic construct
KQLKDGW

SEQ ID NO: 128361 - protein, 7 aa, synthetic construct
KQLKNEL

SEQ ID NO: 128362 - protein, 7 aa, synthetic construct
KQLNLDK

SEQ ID NO: 128363 - protein, 7 aa, synthetic construct
KQLPHQQ

SEQ ID NO: 128364 - protein, 7 aa, synthetic construct
KQLPQRD

SEQ ID NO: 128365 - protein, 7 aa, synthetic construct
KQLQMSH

SEQ ID NO: 128366 - protein, 7 aa, synthetic construct
KQLQQRE

SEQ ID NO: 128367 - protein, 7 aa, synthetic construct
KQLREVH

SEQ ID NO: 128368 - protein, 7 aa, synthetic construct
KQLRGID

SEQ ID NO: 128369 - protein, 7 aa, synthetic construct
KQLRTEV

SEQ ID NO: 128370 - protein, 7 aa, synthetic construct
KQLSAGH

SEQ ID NO: 128371 - protein, 7 aa, synthetic construct
KQLTQNW

SEQ ID NO: 128372 - protein, 7 aa, synthetic construct
KQMHASI

SEQ ID NO: 128373 - protein, 7 aa, synthetic construct
KQMHGAL

SEQ ID NO: 128374 - protein, 7 aa, synthetic construct
KQMHGST

SEQ ID NO: 128375 - protein, 7 aa, synthetic construct
KQMHGVT

SEQ ID NO: 128376 - protein, 7 aa, synthetic construct
KQMHMAQ

SEQ ID NO: 128377 - protein, 7 aa, synthetic construct
KQMIQEI

SEQ ID NO: 128378 - protein, 7 aa, synthetic construct
KQMKLDV

SEQ ID NO: 128379 - protein, 7 aa, synthetic construct
KQMPIKD

SEQ ID NO: 128380 - protein, 7 aa, synthetic construct
KQMQSMM

SEQ ID NO: 128381 - protein, 7 aa, synthetic construct
KQMRVTD

SEQ ID NO: 128382 - protein, 7 aa, synthetic construct
KQMSNQY

SEQ ID NO: 128383 - protein, 7 aa, synthetic construct
KQMVHGL

SEQ ID NO: 128384 - protein, 7 aa, synthetic construct
KQNAAQY

SEQ ID NO: 128385 - protein, 7 aa, synthetic construct
KQNDIIR

SEQ ID NO: 128386 - protein, 7 aa, synthetic construct
KQNHAAI

SEQ ID NO: 128387 - protein, 7 aa, synthetic construct
KQNHTGF

SEQ ID NO: 128388 - protein, 7 aa, synthetic construct
KQNKDMT

SEQ ID NO: 128389 - protein, 7 aa, synthetic construct
KQNMTKD

SEQ ID NO: 128390 - protein, 7 aa, synthetic construct
KQNNPDR

SEQ ID NO: 128391 - protein, 7 aa, synthetic construct
KQNPALL

SEQ ID NO: 128392 - protein, 7 aa, synthetic construct
KQNPHHA

SEQ ID NO: 128393 - protein, 7 aa, synthetic construct
KQNPVKE

SEQ ID NO: 128394 - protein, 7 aa, synthetic construct
KQNPYEK

SEQ ID NO: 128395 - protein, 7 aa, synthetic construct
KQNQIAY

SEQ ID NO: 128396 - protein, 7 aa, synthetic construct
KQNREIN

SEQ ID NO: 128397 - protein, 7 aa, synthetic construct
KQNRETQ

SEQ ID NO: 128398 - protein, 7 aa, synthetic construct
KQNRQEA

SEQ ID NO: 128399 - protein, 7 aa, synthetic construct
KQNRTVD

SEQ ID NO: 128400 - protein, 7 aa, synthetic construct
KQNSHHM

SEQ ID NO: 128401 - protein, 7 aa, synthetic construct
KQNTSSY

SEQ ID NO: 128402 - protein, 7 aa, synthetic construct
KQPAVHY

SEQ ID NO: 128403 - protein, 7 aa, synthetic construct
KQPAYNP

SEQ ID NO: 128404 - protein, 7 aa, synthetic construct
KQPDKGW

SEQ ID NO: 128405 - protein, 7 aa, synthetic construct
KQPDSTR

SEQ ID NO: 128406 - protein, 7 aa, synthetic construct
KQPDYLR

SEQ ID NO: 128407 - protein, 7 aa, synthetic construct
KQPEKFS

SEQ ID NO: 128408 - protein, 7 aa, synthetic construct
KQPHYHQ

SEQ ID NO: 128409 - protein, 7 aa, synthetic construct
KQPIGLV

SEQ ID NO: 128410 - protein, 7 aa, synthetic construct
KQPILHP

SEQ ID NO: 128411 - protein, 7 aa, synthetic construct
KQPIPMM

SEQ ID NO: 128412 - protein, 7 aa, synthetic construct
KQPLHGN

SEQ ID NO: 128413 - protein, 7 aa, synthetic construct
KQPLMGN

SEQ ID NO: 128414 - protein, 7 aa, synthetic construct
KQPLNNY

SEQ ID NO: 128415 - protein, 7 aa, synthetic construct
KQPLSQL

SEQ ID NO: 128416 - protein, 7 aa, synthetic construct
KQPMPNM

SEQ ID NO: 128417 - protein, 7 aa, synthetic construct
KQPNYLA

SEQ ID NO: 128418 - protein, 7 aa, synthetic construct
KQPPYTS

SEQ ID NO: 128419 - protein, 7 aa, synthetic construct
KQPQDLR

SEQ ID NO: 128420 - protein, 7 aa, synthetic construct
KQPQSHY

SEQ ID NO: 128421 - protein, 7 aa, synthetic construct
KQPRALE

SEQ ID NO: 128422 - protein, 7 aa, synthetic construct
KQPRSEM

SEQ ID NO: 128423 - protein, 7 aa, synthetic construct
KQPTREV

SEQ ID NO: 128424 - protein, 7 aa, synthetic construct
KQPVSGY

SEQ ID NO: 128425 - protein, 7 aa, synthetic construct
KQPYPNN

SEQ ID NO: 128426 - protein, 7 aa, synthetic construct
KQQAHPS

SEQ ID NO: 128427 - protein, 7 aa, synthetic construct
KQQDKGS

SEQ ID NO: 128428 - protein, 7 aa, synthetic construct
KQQDRLN

SEQ ID NO: 128429 - protein, 7 aa, synthetic construct
KQQDRVI

SEQ ID NO: 128430 - protein, 7 aa, synthetic construct
KQQERST

SEQ ID NO: 128431 - protein, 7 aa, synthetic construct
KQQFPSN

SEQ ID NO: 128432 - protein, 7 aa, synthetic construct
KQQGQGY

SEQ ID NO: 128433 - protein, 7 aa, synthetic construct
KQQGQTW

SEQ ID NO: 128434 - protein, 7 aa, synthetic construct
KQQGTSW

SEQ ID NO: 128435 - protein, 7 aa, synthetic construct
KQQGYMT

SEQ ID NO: 128436 - protein, 7 aa, synthetic construct
KQQHNTA

SEQ ID NO: 128437 - protein, 7 aa, synthetic construct
KQQHPMN

SEQ ID NO: 128438 - protein, 7 aa, synthetic construct
KQQKLDV

SEQ ID NO: 128439 - protein, 7 aa, synthetic construct
KQQLMHT

SEQ ID NO: 128440 - protein, 7 aa, synthetic construct
KQQMRFE

SEQ ID NO: 128441 - protein, 7 aa, synthetic construct
KQQMVSF

SEQ ID NO: 128442 - protein, 7 aa, synthetic construct
KQQNHLT

SEQ ID NO: 128443 - protein, 7 aa, synthetic construct
KQQNMKE

SEQ ID NO: 128444 - protein, 7 aa, synthetic construct
KQQNNQQ

SEQ ID NO: 128445 - protein, 7 aa, synthetic construct
KQQNSIH

SEQ ID NO: 128446 - protein, 7 aa, synthetic construct
KQQPLRD

SEQ ID NO: 128447 - protein, 7 aa, synthetic construct
KQQPYDK

SEQ ID NO: 128448 - protein, 7 aa, synthetic construct
KQQQQVF

SEQ ID NO: 128449 - protein, 7 aa, synthetic construct
KQQRDLM

SEQ ID NO: 128450 - protein, 7 aa, synthetic construct
KQQREKD

SEQ ID NO: 128451 - protein, 7 aa, synthetic construct
KQQRMDL

SEQ ID NO: 128452 - protein, 7 aa, synthetic construct
KQQRSLE

SEQ ID NO: 128453 - protein, 7 aa, synthetic construct
KQQSGYN

SEQ ID NO: 128454 - protein, 7 aa, synthetic construct
KQQSLDK

SEQ ID NO: 128455 - protein, 7 aa, synthetic construct
KQQSTAY

SEQ ID NO: 128456 - protein, 7 aa, synthetic construct
KQQSVYT

SEQ ID NO: 128457 - protein, 7 aa, synthetic construct
KQQTDRS

SEQ ID NO: 128458 - protein, 7 aa, synthetic construct
KQQTFGQ

SEQ ID NO: 128459 - protein, 7 aa, synthetic construct
KQQTHGH

SEQ ID NO: 128460 - protein, 7 aa, synthetic construct
KQQTTEK

SEQ ID NO: 128461 - protein, 7 aa, synthetic construct
KQQYSVV

SEQ ID NO: 128462 - protein, 7 aa, synthetic construct
KQRAVEI

SEQ ID NO: 128463 - protein, 7 aa, synthetic construct
KQRDIVY

SEQ ID NO: 128464 - protein, 7 aa, synthetic construct
KQRDLTT

SEQ ID NO: 128465 - protein, 7 aa, synthetic construct
KQRDQGI

SEQ ID NO: 128466 - protein, 7 aa, synthetic construct
KQRDRDP

SEQ ID NO: 128467 - protein, 7 aa, synthetic construct
KQRDTAL

SEQ ID NO: 128468 - protein, 7 aa, synthetic construct
KQRDTNP

SEQ ID NO: 128469 - protein, 7 aa, synthetic construct
KQRDVIM

SEQ ID NO: 128470 - protein, 7 aa, synthetic construct
KQREIGY

SEQ ID NO: 128471 - protein, 7 aa, synthetic construct
KQREIPI

SEQ ID NO: 128472 - protein, 7 aa, synthetic construct
KQRELSY

SEQ ID NO: 128473 - protein, 7 aa, synthetic construct
KQRENTQ

SEQ ID NO: 128474 - protein, 7 aa, synthetic construct
KQRETMH

SEQ ID NO: 128475 - protein, 7 aa, synthetic construct
KQRETNV

SEQ ID NO: 128476 - protein, 7 aa, synthetic construct
KQRETTN

SEQ ID NO: 128477 - protein, 7 aa, synthetic construct
KQREWSD

SEQ ID NO: 128478 - protein, 7 aa, synthetic construct
KQRHEND

SEQ ID NO: 128479 - protein, 7 aa, synthetic construct
KQRLQDG

SEQ ID NO: 128480 - protein, 7 aa, synthetic construct
KQRLTPE

SEQ ID NO: 128481 - protein, 7 aa, synthetic construct
KQRMEMS

SEQ ID NO: 128482 - protein, 7 aa, synthetic construct
KQRMLDS

SEQ ID NO: 128483 - protein, 7 aa, synthetic construct
KQRMQTE

SEQ ID NO: 128484 - protein, 7 aa, synthetic construct
KQRNSDV

SEQ ID NO: 128485 - protein, 7 aa, synthetic construct
KQRTDGY

SEQ ID NO: 128486 - protein, 7 aa, synthetic construct
KQRTDQQ

SEQ ID NO: 128487 - protein, 7 aa, synthetic construct
KQRTDTI

SEQ ID NO: 128488 - protein, 7 aa, synthetic construct
KQRVDMM

SEQ ID NO: 128489 - protein, 7 aa, synthetic construct
KQRVEPA

SEQ ID NO: 128490 - protein, 7 aa, synthetic construct
KQRVQDM

SEQ ID NO: 128491 - protein, 7 aa, synthetic construct
KQRVQET

SEQ ID NO: 128492 - protein, 7 aa, synthetic construct
KQSDMMR

SEQ ID NO: 128493 - protein, 7 aa, synthetic construct
KQSESRV

SEQ ID NO: 128494 - protein, 7 aa, synthetic construct
KQSFPER

SEQ ID NO: 128495 - protein, 7 aa, synthetic construct
KQSGAAY

SEQ ID NO: 128496 - protein, 7 aa, synthetic construct
KQSGEYR

SEQ ID NO: 128497 - protein, 7 aa, synthetic construct
KQSGHAL

SEQ ID NO: 128498 - protein, 7 aa, synthetic construct
KQSGHLM

SEQ ID NO: 128499 - protein, 7 aa, synthetic construct
KQSGLSF

SEQ ID NO: 128500 - protein, 7 aa, synthetic construct
KQSGLYQ

SEQ ID NO: 128501 - protein, 7 aa, synthetic construct
KQSGMYQ

SEQ ID NO: 128502 - protein, 7 aa, synthetic construct
KQSGTYQ

SEQ ID NO: 128503 - protein, 7 aa, synthetic construct
KQSHALQ

SEQ ID NO: 128504 - protein, 7 aa, synthetic construct
KQSHATP

SEQ ID NO: 128505 - protein, 7 aa, synthetic construct
KQSHHVF

SEQ ID NO: 128506 - protein, 7 aa, synthetic construct
KQSHSLI

SEQ ID NO: 128507 - protein, 7 aa, synthetic construct
KQSHSTV

SEQ ID NO: 128508 - protein, 7 aa, synthetic construct
KQSKNDS

SEQ ID NO: 128509 - protein, 7 aa, synthetic construct
KQSKSDN

SEQ ID NO: 128510 - protein, 7 aa, synthetic construct
KQSPAGH

SEQ ID NO: 128511 - protein, 7 aa, synthetic construct
KQSPERA

SEQ ID NO: 128512 - protein, 7 aa, synthetic construct
KQSPHSS

SEQ ID NO: 128513 - protein, 7 aa, synthetic construct
KQSPIPF

SEQ ID NO: 128514 - protein, 7 aa, synthetic construct
KQSPMIH

SEQ ID NO: 128515 - protein, 7 aa, synthetic construct
KQSPVPI

SEQ ID NO: 128516 - protein, 7 aa, synthetic construct
KQSQFGI

SEQ ID NO: 128517 - protein, 7 aa, synthetic construct
KQSQLRE

SEQ ID NO: 128518 - protein, 7 aa, synthetic construct
KQSQQSY

SEQ ID NO: 128519 - protein, 7 aa, synthetic construct
KQSSNTH

SEQ ID NO: 128520 - protein, 7 aa, synthetic construct
KQSSSHQ

SEQ ID NO: 128521 - protein, 7 aa, synthetic construct
KQSTHSM

SEQ ID NO: 128522 - protein, 7 aa, synthetic construct
KQTAKET

SEQ ID NO: 128523 - protein, 7 aa, synthetic construct
KQTAQHW

SEQ ID NO: 128524 - protein, 7 aa, synthetic construct
KQTARDI

SEQ ID NO: 128525 - protein, 7 aa, synthetic construct
KQTAYGA

SEQ ID NO: 128526 - protein, 7 aa, synthetic construct
KQTDPMD

SEQ ID NO: 128527 - protein, 7 aa, synthetic construct
KQTGKEQ

SEQ ID NO: 128528 - protein, 7 aa, synthetic construct
KQTHGNT

SEQ ID NO: 128529 - protein, 7 aa, synthetic construct
KQTHQVF

SEQ ID NO: 128530 - protein, 7 aa, synthetic construct
KQTKADI

SEQ ID NO: 128531 - protein, 7 aa, synthetic construct
KQTKADM

SEQ ID NO: 128532 - protein, 7 aa, synthetic construct
KQTPAYH

SEQ ID NO: 128533 - protein, 7 aa, synthetic construct
KQTPMQL

SEQ ID NO: 128534 - protein, 7 aa, synthetic construct
KQTPRDP

SEQ ID NO: 128535 - protein, 7 aa, synthetic construct
KQTPTYV

SEQ ID NO: 128536 - protein, 7 aa, synthetic construct
KQTREPV

SEQ ID NO: 128537 - protein, 7 aa, synthetic construct
KQTRETL

SEQ ID NO: 128538 - protein, 7 aa, synthetic construct
KQTREYG

SEQ ID NO: 128539 - protein, 7 aa, synthetic construct
KQTSHQT

SEQ ID NO: 128540 - protein, 7 aa, synthetic construct
KQTSSAN

SEQ ID NO: 128541 - protein, 7 aa, synthetic construct
KQTTQRE

SEQ ID NO: 128542 - protein, 7 aa, synthetic construct
KQTYNPI

SEQ ID NO: 128543 - protein, 7 aa, synthetic construct
KQVDMLR

SEQ ID NO: 128544 - protein, 7 aa, synthetic construct
KQVGNGW

SEQ ID NO: 128545 - protein, 7 aa, synthetic construct
KQVHAQM

SEQ ID NO: 128546 - protein, 7 aa, synthetic construct
KQVHPMV

SEQ ID NO: 128547 - protein, 7 aa, synthetic construct
KQVHQGF

SEQ ID NO: 128548 - protein, 7 aa, synthetic construct
KQVHSQA

SEQ ID NO: 128549 - protein, 7 aa, synthetic construct
KQVIGSY

SEQ ID NO: 128550 - protein, 7 aa, synthetic construct
KQVKQEW

SEQ ID NO: 128551 - protein, 7 aa, synthetic construct
KQVMGHI

SEQ ID NO: 128552 - protein, 7 aa, synthetic construct
KQVNSYM

SEQ ID NO: 128553 - protein, 7 aa, synthetic construct
KQVNTAW

SEQ ID NO: 128554 - protein, 7 aa, synthetic construct
KQVREHG

SEQ ID NO: 128555 - protein, 7 aa, synthetic construct
KQVTREQ

SEQ ID NO: 128556 - protein, 7 aa, synthetic construct
KQVYNKE

SEQ ID NO: 128557 - protein, 7 aa, synthetic construct
KQVYPIS

SEQ ID NO: 128558 - protein, 7 aa, synthetic construct
KQVYQNQ

SEQ ID NO: 128559 - protein, 7 aa, synthetic construct
KQYAQGF

SEQ ID NO: 128560 - protein, 7 aa, synthetic construct
KQYAQGM

SEQ ID NO: 128561 - protein, 7 aa, synthetic construct
KQYATLS

SEQ ID NO: 128562 - protein, 7 aa, synthetic construct
KQYDQKT

SEQ ID NO: 128563 - protein, 7 aa, synthetic construct
KQYGATN

SEQ ID NO: 128564 - protein, 7 aa, synthetic construct
KQYGTQA

SEQ ID NO: 128565 - protein, 7 aa, synthetic construct
KQYHDQM

SEQ ID NO: 128566 - protein, 7 aa, synthetic construct
KQYKELA

SEQ ID NO: 128567 - protein, 7 aa, synthetic construct
KQYKPEP

SEQ ID NO: 128568 - protein, 7 aa, synthetic construct
KQYKVSE

SEQ ID NO: 128569 - protein, 7 aa, synthetic construct
KQYNQVN

SEQ ID NO: 128570 - protein, 7 aa, synthetic construct
KQYPGGY

SEQ ID NO: 128571 - protein, 7 aa, synthetic construct
KQYPIAA

SEQ ID NO: 128572 - protein, 7 aa, synthetic construct
KQYPTGH

SEQ ID NO: 128573 - protein, 7 aa, synthetic construct
KQYQAQI

SEQ ID NO: 128574 - protein, 7 aa, synthetic construct
KQYQPAI

SEQ ID NO: 128575 - protein, 7 aa, synthetic construct
KQYTQQI

SEQ ID NO: 128576 - protein, 7 aa, synthetic construct
KRADLTI

SEQ ID NO: 128577 - protein, 7 aa, synthetic construct
KRADQLA

SEQ ID NO: 128578 - protein, 7 aa, synthetic construct
KRADVLA

SEQ ID NO: 128579 - protein, 7 aa, synthetic construct
KRADVLQ

SEQ ID NO: 128580 - protein, 7 aa, synthetic construct
KRADVTV

SEQ ID NO: 128581 - protein, 7 aa, synthetic construct
KRAEMLT

SEQ ID NO: 128582 - protein, 7 aa, synthetic construct
KRAEQDR

SEQ ID NO: 128583 - protein, 7 aa, synthetic construct
KRALEEH

SEQ ID NO: 128584 - protein, 7 aa, synthetic construct
KRAPDTL

SEQ ID NO: 128585 - protein, 7 aa, synthetic construct
KRAVDEY

SEQ ID NO: 128586 - protein, 7 aa, synthetic construct
KRDAQPS

SEQ ID NO: 128587 - protein, 7 aa, synthetic construct
KRDGGYQ

SEQ ID NO: 128588 - protein, 7 aa, synthetic construct
KRDGNLF

SEQ ID NO: 128589 - protein, 7 aa, synthetic construct
KRDGPNF

SEQ ID NO: 128590 - protein, 7 aa, synthetic construct
KRDHSQV

SEQ ID NO: 128591 - protein, 7 aa, synthetic construct
KRDIAAQ

SEQ ID NO: 128592 - protein, 7 aa, synthetic construct
KRDIQAQ

SEQ ID NO: 128593 - protein, 7 aa, synthetic construct
KRDISNF

SEQ ID NO: 128594 - protein, 7 aa, synthetic construct
KRDLQGF

SEQ ID NO: 128595 - protein, 7 aa, synthetic construct
KRDLSNQ

SEQ ID NO: 128596 - protein, 7 aa, synthetic construct
KRDLTER

SEQ ID NO: 128597 - protein, 7 aa, synthetic construct
KRDMHMV

SEQ ID NO: 128598 - protein, 7 aa, synthetic construct
KRDMLQN

SEQ ID NO: 128599 - protein, 7 aa, synthetic construct
KRDMNAS

SEQ ID NO: 128600 - protein, 7 aa, synthetic construct
KRDNHQP

SEQ ID NO: 128601 - protein, 7 aa, synthetic construct
KRDNNLN

SEQ ID NO: 128602 - protein, 7 aa, synthetic construct
KRDNVNA

SEQ ID NO: 128603 - protein, 7 aa, synthetic construct
KRDPIPL

SEQ ID NO: 128604 - protein, 7 aa, synthetic construct
KRDPMIT

SEQ ID NO: 128605 - protein, 7 aa, synthetic construct
KRDPMVP

SEQ ID NO: 128606 - protein, 7 aa, synthetic construct
KRDPQPN

SEQ ID NO: 128607 - protein, 7 aa, synthetic construct
KRDPVVL

SEQ ID NO: 128608 - protein, 7 aa, synthetic construct
KRDQNPA

SEQ ID NO: 128609 - protein, 7 aa, synthetic construct
KRDQQFV

SEQ ID NO: 128610 - protein, 7 aa, synthetic construct
KRDRVTE

SEQ ID NO: 128611 - protein, 7 aa, synthetic construct
KRDSNER

SEQ ID NO: 128612 - protein, 7 aa, synthetic construct
KRDTADR

SEQ ID NO: 128613 - protein, 7 aa, synthetic construct
KRDTPFN

SEQ ID NO: 128614 - protein, 7 aa, synthetic construct
KRDTQNA

SEQ ID NO: 128615 - protein, 7 aa, synthetic construct
KRDTQNS

SEQ ID NO: 128616 - protein, 7 aa, synthetic construct
KRDTTPY

SEQ ID NO: 128617 - protein, 7 aa, synthetic construct
KRDVERV

SEQ ID NO: 128618 - protein, 7 aa, synthetic construct
KRDVGQL

SEQ ID NO: 128619 - protein, 7 aa, synthetic construct
KRDVGSY

SEQ ID NO: 128620 - protein, 7 aa, synthetic construct
KRDVMTM

SEQ ID NO: 128621 - protein, 7 aa, synthetic construct
KRDVNTY

SEQ ID NO: 128622 - protein, 7 aa, synthetic construct
KRDWEQA

SEQ ID NO: 128623 - protein, 7 aa, synthetic construct
KREAGSV

SEQ ID NO: 128624 - protein, 7 aa, synthetic construct
KREEVKW

SEQ ID NO: 128625 - protein, 7 aa, synthetic construct
KREGHLI

SEQ ID NO: 128626 - protein, 7 aa, synthetic construct
KREGQGT

SEQ ID NO: 128627 - protein, 7 aa, synthetic construct
KREGSGF

SEQ ID NO: 128628 - protein, 7 aa, synthetic construct
KREGVAM

SEQ ID NO: 128629 - protein, 7 aa, synthetic construct
KREGVNV

SEQ ID NO: 128630 - protein, 7 aa, synthetic construct
KREIAAT

SEQ ID NO: 128631 - protein, 7 aa, synthetic construct
KREIHSV

SEQ ID NO: 128632 - protein, 7 aa, synthetic construct
KREINMQ

SEQ ID NO: 128633 - protein, 7 aa, synthetic construct
KREINQF

SEQ ID NO: 128634 - protein, 7 aa, synthetic construct
KREIPTI

SEQ ID NO: 128635 - protein, 7 aa, synthetic construct
KREIYPQ

SEQ ID NO: 128636 - protein, 7 aa, synthetic construct
KREKPIE

SEQ ID NO: 128637 - protein, 7 aa, synthetic construct
KREKQMD

SEQ ID NO: 128638 - protein, 7 aa, synthetic construct
KRELMPQ

SEQ ID NO: 128639 - protein, 7 aa, synthetic construct
KRELNSL

SEQ ID NO: 128640 - protein, 7 aa, synthetic construct
KRELQPL

SEQ ID NO: 128641 - protein, 7 aa, synthetic construct
KREMAHL

SEQ ID NO: 128642 - protein, 7 aa, synthetic construct
KREMATA

SEQ ID NO: 128643 - protein, 7 aa, synthetic construct
KREMNMN

SEQ ID NO: 128644 - protein, 7 aa, synthetic construct
KREMPLV

SEQ ID NO: 128645 - protein, 7 aa, synthetic construct
KREMTNL

SEQ ID NO: 128646 - protein, 7 aa, synthetic construct
KREMVSM

SEQ ID NO: 128647 - protein, 7 aa, synthetic construct
KRENEPR

SEQ ID NO: 128648 - protein, 7 aa, synthetic construct
KRENFPN

SEQ ID NO: 128649 - protein, 7 aa, synthetic construct
KRENGMV

SEQ ID NO: 128650 - protein, 7 aa, synthetic construct
KRENNIA

SEQ ID NO: 128651 - protein, 7 aa, synthetic construct
KRENSVP

SEQ ID NO: 128652 - protein, 7 aa, synthetic construct
KRENTVV

SEQ ID NO: 128653 - protein, 7 aa, synthetic construct
KRENVTN

SEQ ID NO: 128654 - protein, 7 aa, synthetic construct
KREPMQS

SEQ ID NO: 128655 - protein, 7 aa, synthetic construct
KREPPVL

SEQ ID NO: 128656 - protein, 7 aa, synthetic construct
KREPQAA

SEQ ID NO: 128657 - protein, 7 aa, synthetic construct
KREPSQQ

SEQ ID NO: 128658 - protein, 7 aa, synthetic construct
KREPYIQ

SEQ ID NO: 128659 - protein, 7 aa, synthetic construct
KREPYPP

SEQ ID NO: 128660 - protein, 7 aa, synthetic construct
KREQALQ

SEQ ID NO: 128661 - protein, 7 aa, synthetic construct
KREQATI

SEQ ID NO: 128662 - protein, 7 aa, synthetic construct
KREQNST

SEQ ID NO: 128663 - protein, 7 aa, synthetic construct
KREQNTM

SEQ ID NO: 128664 - protein, 7 aa, synthetic construct
KREQTPS

SEQ ID NO: 128665 - protein, 7 aa, synthetic construct
KREQTPV

SEQ ID NO: 128666 - protein, 7 aa, synthetic construct
KREQVAT

SEQ ID NO: 128667 - protein, 7 aa, synthetic construct
KRERETM

SEQ ID NO: 128668 - protein, 7 aa, synthetic construct
KRESMSL

SEQ ID NO: 128669 - protein, 7 aa, synthetic construct
KRETPAI

SEQ ID NO: 128670 - protein, 7 aa, synthetic construct
KRETQYY

SEQ ID NO: 128671 - protein, 7 aa, synthetic construct
KREVLGQ

SEQ ID NO: 128672 - protein, 7 aa, synthetic construct
KREYVQT

SEQ ID NO: 128673 - protein, 7 aa, synthetic construct
KRFMEEP

SEQ ID NO: 128674 - protein, 7 aa, synthetic construct
KRGDDRG

SEQ ID NO: 128675 - protein, 7 aa, synthetic construct
KRGDTPM

SEQ ID NO: 128676 - protein, 7 aa, synthetic construct
KRGNTDG

SEQ ID NO: 128677 - protein, 7 aa, synthetic construct
KRGPDPA

SEQ ID NO: 128678 - protein, 7 aa, synthetic construct
KRGPGNE

SEQ ID NO: 128679 - protein, 7 aa, synthetic construct
KRGPIDV

SEQ ID NO: 128680 - protein, 7 aa, synthetic construct
KRGSESI

SEQ ID NO: 128681 - protein, 7 aa, synthetic construct
KRGVEAV

SEQ ID NO: 128682 - protein, 7 aa, synthetic construct
KRGVIDV

SEQ ID NO: 128683 - protein, 7 aa, synthetic construct
KRHGYED

SEQ ID NO: 128684 - protein, 7 aa, synthetic construct
KRHIAED

SEQ ID NO: 128685 - protein, 7 aa, synthetic construct
KRHTDWE

SEQ ID NO: 128686 - protein, 7 aa, synthetic construct
KRLMTSE

SEQ ID NO: 128687 - protein, 7 aa, synthetic construct
KRLVIDG

SEQ ID NO: 128688 - protein, 7 aa, synthetic construct
KRMLSDG

SEQ ID NO: 128689 - protein, 7 aa, synthetic construct
KRMLTGD

SEQ ID NO: 128690 - protein, 7 aa, synthetic construct
KRMPDVG

SEQ ID NO: 128691 - protein, 7 aa, synthetic construct
KRMPNDM

SEQ ID NO: 128692 - protein, 7 aa, synthetic construct
KRMVDSG

SEQ ID NO: 128693 - protein, 7 aa, synthetic construct
KRNDQRD

SEQ ID NO: 128694 - protein, 7 aa, synthetic construct
KRNETFQ

SEQ ID NO: 128695 - protein, 7 aa, synthetic construct
KRNEVQT

SEQ ID NO: 128696 - protein, 7 aa, synthetic construct
KRNVMDA

SEQ ID NO: 128697 - protein, 7 aa, synthetic construct
KRPENVI

SEQ ID NO: 128698 - protein, 7 aa, synthetic construct
KRPEQAL

SEQ ID NO: 128699 - protein, 7 aa, synthetic construct
KRPIGPD

SEQ ID NO: 128700 - protein, 7 aa, synthetic construct
KRPLENM

SEQ ID NO: 128701 - protein, 7 aa, synthetic construct
KRPVSTE

SEQ ID NO: 128702 - protein, 7 aa, synthetic construct
KRQFEGG

SEQ ID NO: 128703 - protein, 7 aa, synthetic construct
KRQGDPV

SEQ ID NO: 128704 - protein, 7 aa, synthetic construct
KRQGPAD

SEQ ID NO: 128705 - protein, 7 aa, synthetic construct
KRQGVDT

SEQ ID NO: 128706 - protein, 7 aa, synthetic construct
KRQPDKD

SEQ ID NO: 128707 - protein, 7 aa, synthetic construct
KRQQEPP

SEQ ID NO: 128708 - protein, 7 aa, synthetic construct
KRQVADV

SEQ ID NO: 128709 - protein, 7 aa, synthetic construct
KRQVGDA

SEQ ID NO: 128710 - protein, 7 aa, synthetic construct
KRSIDQG

SEQ ID NO: 128711 - protein, 7 aa, synthetic construct
KRSLSDG

SEQ ID NO: 128712 - protein, 7 aa, synthetic construct
KRSPPDD

SEQ ID NO: 128713 - protein, 7 aa, synthetic construct
KRSPVGD

SEQ ID NO: 128714 - protein, 7 aa, synthetic construct
KRSTGDV

SEQ ID NO: 128715 - protein, 7 aa, synthetic construct
KRTADIT

SEQ ID NO: 128716 - protein, 7 aa, synthetic construct
KRTDTLV

SEQ ID NO: 128717 - protein, 7 aa, synthetic construct
KRTDVMQ

SEQ ID NO: 128718 - protein, 7 aa, synthetic construct
KRTDYFE

SEQ ID NO: 128719 - protein, 7 aa, synthetic construct
KRTEAPI

SEQ ID NO: 128720 - protein, 7 aa, synthetic construct
KRTELGT

SEQ ID NO: 128721 - protein, 7 aa, synthetic construct
KRTEMTT

SEQ ID NO: 128722 - protein, 7 aa, synthetic construct
KRTEQLN

SEQ ID NO: 128723 - protein, 7 aa, synthetic construct
KRTGPTE

SEQ ID NO: 128724 - protein, 7 aa, synthetic construct
KRTTEQA

SEQ ID NO: 128725 - protein, 7 aa, synthetic construct
KRVANVE

SEQ ID NO: 128726 - protein, 7 aa, synthetic construct
KRVDQVI

SEQ ID NO: 128727 - protein, 7 aa, synthetic construct
KRVELPT

SEQ ID NO: 128728 - protein, 7 aa, synthetic construct
KRVEQSA

SEQ ID NO: 128729 - protein, 7 aa, synthetic construct
KRVMDLA

SEQ ID NO: 128730 - protein, 7 aa, synthetic construct
KRVMELG

SEQ ID NO: 128731 - protein, 7 aa, synthetic construct
KRVTEYA

SEQ ID NO: 128732 - protein, 7 aa, synthetic construct
KRYDGGT

SEQ ID NO: 128733 - protein, 7 aa, synthetic construct
KRYDSEY

SEQ ID NO: 128734 - protein, 7 aa, synthetic construct
KSAAFEK

SEQ ID NO: 128735 - protein, 7 aa, synthetic construct
KSAAQVY

SEQ ID NO: 128736 - protein, 7 aa, synthetic construct
KSADNAR

SEQ ID NO: 128737 - protein, 7 aa, synthetic construct
KSAFNER

SEQ ID NO: 128738 - protein, 7 aa, synthetic construct
KSAHDRG

SEQ ID NO: 128739 - protein, 7 aa, synthetic construct
KSAHTTY

SEQ ID NO: 128740 - protein, 7 aa, synthetic construct
KSAMGSF

SEQ ID NO: 128741 - protein, 7 aa, synthetic construct
KSAMVGF

SEQ ID NO: 128742 - protein, 7 aa, synthetic construct
KSANMHI

SEQ ID NO: 128743 - protein, 7 aa, synthetic construct
KSAPARD

SEQ ID NO: 128744 - protein, 7 aa, synthetic construct
KSAQGWN

SEQ ID NO: 128745 - protein, 7 aa, synthetic construct
KSAQHQF

SEQ ID NO: 128746 - protein, 7 aa, synthetic construct
KSAQVPY

SEQ ID NO: 128747 - protein, 7 aa, synthetic construct
KSARENL

SEQ ID NO: 128748 - protein, 7 aa, synthetic construct
KSARLAD

SEQ ID NO: 128749 - protein, 7 aa, synthetic construct
KSARLLE

SEQ ID NO: 128750 - protein, 7 aa, synthetic construct
KSASNFI

SEQ ID NO: 128751 - protein, 7 aa, synthetic construct
KSASSSW

SEQ ID NO: 128752 - protein, 7 aa, synthetic construct
KSATQQW

SEQ ID NO: 128753 - protein, 7 aa, synthetic construct
KSATYRE

SEQ ID NO: 128754 - protein, 7 aa, synthetic construct
KSAYTSV

SEQ ID NO: 128755 - protein, 7 aa, synthetic construct
KSDAKHQ

SEQ ID NO: 128756 - protein, 7 aa, synthetic construct
KSDFQTK

SEQ ID NO: 128757 - protein, 7 aa, synthetic construct
KSDGLRQ

SEQ ID NO: 128758 - protein, 7 aa, synthetic construct
KSDHKFY

SEQ ID NO: 128759 - protein, 7 aa, synthetic construct
KSDHTKT

SEQ ID NO: 128760 - protein, 7 aa, synthetic construct
KSDKYNL

SEQ ID NO: 128761 - protein, 7 aa, synthetic construct
KSDNWKN

SEQ ID NO: 128762 - protein, 7 aa, synthetic construct
KSDQNRG

SEQ ID NO: 128763 - protein, 7 aa, synthetic construct
KSDQYKQ

SEQ ID NO: 128764 - protein, 7 aa, synthetic construct
KSDRDRN

SEQ ID NO: 128765 - protein, 7 aa, synthetic construct
KSDSAIR

SEQ ID NO: 128766 - protein, 7 aa, synthetic construct
KSDSRFT

SEQ ID NO: 128767 - protein, 7 aa, synthetic construct
KSDTNRM

SEQ ID NO: 128768 - protein, 7 aa, synthetic construct
KSDYNKA

SEQ ID NO: 128769 - protein, 7 aa, synthetic construct
KSEGQRP

SEQ ID NO: 128770 - protein, 7 aa, synthetic construct
KSEHFKP

SEQ ID NO: 128771 - protein, 7 aa, synthetic construct
KSEHNMR

SEQ ID NO: 128772 - protein, 7 aa, synthetic construct
KSEHPYF

SEQ ID NO: 128773 - protein, 7 aa, synthetic construct
KSEKRDL

SEQ ID NO: 128774 - protein, 7 aa, synthetic construct
KSENRSI

SEQ ID NO: 128775 - protein, 7 aa, synthetic construct
KSEPQGR

SEQ ID NO: 128776 - protein, 7 aa, synthetic construct
KSERPHN

SEQ ID NO: 128777 - protein, 7 aa, synthetic construct
KSESKQQ

SEQ ID NO: 128778 - protein, 7 aa, synthetic construct
KSESQKA

SEQ ID NO: 128779 - protein, 7 aa, synthetic construct
KSEYQNR

SEQ ID NO: 128780 - protein, 7 aa, synthetic construct
KSEYTRP

SEQ ID NO: 128781 - protein, 7 aa, synthetic construct
KSFGIKD

SEQ ID NO: 128782 - protein, 7 aa, synthetic construct
KSFKAQD

SEQ ID NO: 128783 - protein, 7 aa, synthetic construct
KSFPHNQ

SEQ ID NO: 128784 - protein, 7 aa, synthetic construct
KSFSPDK

SEQ ID NO: 128785 - protein, 7 aa, synthetic construct
KSFSSNP

SEQ ID NO: 128786 - protein, 7 aa, synthetic construct
KSGDLSR

SEQ ID NO: 128787 - protein, 7 aa, synthetic construct
KSGDWNK

SEQ ID NO: 128788 - protein, 7 aa, synthetic construct
KSGGSYA

SEQ ID NO: 128789 - protein, 7 aa, synthetic construct
KSGGYAP

SEQ ID NO: 128790 - protein, 7 aa, synthetic construct
KSGHQGF

SEQ ID NO: 128791 - protein, 7 aa, synthetic construct
KSGHYAA

SEQ ID NO: 128792 - protein, 7 aa, synthetic construct
KSGKYES

SEQ ID NO: 128793 - protein, 7 aa, synthetic construct
KSGLGDR

SEQ ID NO: 128794 - protein, 7 aa, synthetic construct
KSGNHAF

SEQ ID NO: 128795 - protein, 7 aa, synthetic construct
KSGPREM

SEQ ID NO: 128796 - protein, 7 aa, synthetic construct
KSGRETA

SEQ ID NO: 128797 - protein, 7 aa, synthetic construct
KSGSYSG

SEQ ID NO: 128798 - protein, 7 aa, synthetic construct
KSGYPGV

SEQ ID NO: 128799 - protein, 7 aa, synthetic construct
KSGYPLV

SEQ ID NO: 128800 - protein, 7 aa, synthetic construct
KSHAAST

SEQ ID NO: 128801 - protein, 7 aa, synthetic construct
KSHALQN

SEQ ID NO: 128802 - protein, 7 aa, synthetic construct
KSHATMS

SEQ ID NO: 128803 - protein, 7 aa, synthetic construct
KSHEARP

SEQ ID NO: 128804 - protein, 7 aa, synthetic construct
KSHGLIN

SEQ ID NO: 128805 - protein, 7 aa, synthetic construct
KSHGLVQ

SEQ ID NO: 128806 - protein, 7 aa, synthetic construct
KSHGPKD

SEQ ID NO: 128807 - protein, 7 aa, synthetic construct
KSHGTQV

SEQ ID NO: 128808 - protein, 7 aa, synthetic construct
KSHHMGV

SEQ ID NO: 128809 - protein, 7 aa, synthetic construct
KSHKFTE

SEQ ID NO: 128810 - protein, 7 aa, synthetic construct
KSHKMNE

SEQ ID NO: 128811 - protein, 7 aa, synthetic construct
KSHLASV

SEQ ID NO: 128812 - protein, 7 aa, synthetic construct
KSHLQSQ

SEQ ID NO: 128813 - protein, 7 aa, synthetic construct
KSHMDIK

SEQ ID NO: 128814 - protein, 7 aa, synthetic construct
KSHMSSF

SEQ ID NO: 128815 - protein, 7 aa, synthetic construct
KSHNGFI

SEQ ID NO: 128816 - protein, 7 aa, synthetic construct
KSHNVPV

SEQ ID NO: 128817 - protein, 7 aa, synthetic construct
KSHPITQ

SEQ ID NO: 128818 - protein, 7 aa, synthetic construct
KSHPPNN

SEQ ID NO: 128819 - protein, 7 aa, synthetic construct
KSHPPTF

SEQ ID NO: 128820 - protein, 7 aa, synthetic construct
KSHPQGM

SEQ ID NO: 128821 - protein, 7 aa, synthetic construct
KSHPQSQ

SEQ ID NO: 128822 - protein, 7 aa, synthetic construct
KSHPSHI

SEQ ID NO: 128823 - protein, 7 aa, synthetic construct
KSHPSTQ

SEQ ID NO: 128824 - protein, 7 aa, synthetic construct
KSHQAAV

SEQ ID NO: 128825 - protein, 7 aa, synthetic construct
KSHQAQV

SEQ ID NO: 128826 - protein, 7 aa, synthetic construct
KSHQLVS

SEQ ID NO: 128827 - protein, 7 aa, synthetic construct
KSHSAFQ

SEQ ID NO: 128828 - protein, 7 aa, synthetic construct
KSHSAPS

SEQ ID NO: 128829 - protein, 7 aa, synthetic construct
KSHSSAQ

SEQ ID NO: 128830 - protein, 7 aa, synthetic construct
KSHSVTL

SEQ ID NO: 128831 - protein, 7 aa, synthetic construct
KSHTPSL

SEQ ID NO: 128832 - protein, 7 aa, synthetic construct
KSHVQPF

SEQ ID NO: 128833 - protein, 7 aa, synthetic construct
KSIDNTR

SEQ ID NO: 128834 - protein, 7 aa, synthetic construct
KSIGPNM

SEQ ID NO: 128835 - protein, 7 aa, synthetic construct
KSIMPER

SEQ ID NO: 128836 - protein, 7 aa, synthetic construct
KSIQASY

SEQ ID NO: 128837 - protein, 7 aa, synthetic construct
KSIQHGM

SEQ ID NO: 128838 - protein, 7 aa, synthetic construct
KSISAMH

SEQ ID NO: 128839 - protein, 7 aa, synthetic construct
KSKAPDA

SEQ ID NO: 128840 - protein, 7 aa, synthetic construct
KSKDDAK

SEQ ID NO: 128841 - protein, 7 aa, synthetic construct
KSKDQAF

SEQ ID NO: 128842 - protein, 7 aa, synthetic construct
KSKENPW

SEQ ID NO: 128843 - protein, 7 aa, synthetic construct
KSKEPNF

SEQ ID NO: 128844 - protein, 7 aa, synthetic construct
KSKFDLA

SEQ ID NO: 128845 - protein, 7 aa, synthetic construct
KSKQPQE

SEQ ID NO: 128846 - protein, 7 aa, synthetic construct
KSKYGEP

SEQ ID NO: 128847 - protein, 7 aa, synthetic construct
KSLASTY

SEQ ID NO: 128848 - protein, 7 aa, synthetic construct
KSLDRDK

SEQ ID NO: 128849 - protein, 7 aa, synthetic construct
KSLDSFK

SEQ ID NO: 128850 - protein, 7 aa, synthetic construct
KSLDTAK

SEQ ID NO: 128851 - protein, 7 aa, synthetic construct
KSLERGM

SEQ ID NO: 128852 - protein, 7 aa, synthetic construct
KSLGPMS

SEQ ID NO: 128853 - protein, 7 aa, synthetic construct
KSLGPYA

SEQ ID NO: 128854 - protein, 7 aa, synthetic construct
KSLHNNV

SEQ ID NO: 128855 - protein, 7 aa, synthetic construct
KSLQHMS

SEQ ID NO: 128856 - protein, 7 aa, synthetic construct
KSMHGMP

SEQ ID NO: 128857 - protein, 7 aa, synthetic construct
KSMHQVV

SEQ ID NO: 128858 - protein, 7 aa, synthetic construct
KSMIPAV

SEQ ID NO: 128859 - protein, 7 aa, synthetic construct
KSMNERL

SEQ ID NO: 128860 - protein, 7 aa, synthetic construct
KSMNRDN

SEQ ID NO: 128861 - protein, 7 aa, synthetic construct
KSMNYDK

SEQ ID NO: 128862 - protein, 7 aa, synthetic construct
KSMREIA

SEQ ID NO: 128863 - protein, 7 aa, synthetic construct
KSMRGEA

SEQ ID NO: 128864 - protein, 7 aa, synthetic construct
KSMRGPE

SEQ ID NO: 128865 - protein, 7 aa, synthetic construct
KSMTIQH

SEQ ID NO: 128866 - protein, 7 aa, synthetic construct
KSMTIQM

SEQ ID NO: 128867 - protein, 7 aa, synthetic construct
KSMVQGY

SEQ ID NO: 128868 - protein, 7 aa, synthetic construct
KSNAAYL

SEQ ID NO: 128869 - protein, 7 aa, synthetic construct
KSNEARM

SEQ ID NO: 128870 - protein, 7 aa, synthetic construct
KSNFSTA

SEQ ID NO: 128871 - protein, 7 aa, synthetic construct
KSNHATI

SEQ ID NO: 128872 - protein, 7 aa, synthetic construct
KSNITDW

SEQ ID NO: 128873 - protein, 7 aa, synthetic construct
KSNKPSD

SEQ ID NO: 128874 - protein, 7 aa, synthetic construct
KSNKTYD

SEQ ID NO: 128875 - protein, 7 aa, synthetic construct
KSNMERL

SEQ ID NO: 128876 - protein, 7 aa, synthetic construct
KSNNGSH

SEQ ID NO: 128877 - protein, 7 aa, synthetic construct
KSNNISY

SEQ ID NO: 128878 - protein, 7 aa, synthetic construct
KSNPHAT

SEQ ID NO: 128879 - protein, 7 aa, synthetic construct
KSNQHGT

SEQ ID NO: 128880 - protein, 7 aa, synthetic construct
KSNQYNI

SEQ ID NO: 128881 - protein, 7 aa, synthetic construct
KSNYGVL

SEQ ID NO: 128882 - protein, 7 aa, synthetic construct
KSNYSVV

SEQ ID NO: 128883 - protein, 7 aa, synthetic construct
KSPAVIY

SEQ ID NO: 128884 - protein, 7 aa, synthetic construct
KSPHGVT

SEQ ID NO: 128885 - protein, 7 aa, synthetic construct
KSPHPAV

SEQ ID NO: 128886 - protein, 7 aa, synthetic construct
KSPMVTI

SEQ ID NO: 128887 - protein, 7 aa, synthetic construct
KSPPHGV

SEQ ID NO: 128888 - protein, 7 aa, synthetic construct
KSPPHMF

SEQ ID NO: 128889 - protein, 7 aa, synthetic construct
KSPPVKP

SEQ ID NO: 128890 - protein, 7 aa, synthetic construct
KSPQAPF

SEQ ID NO: 128891 - protein, 7 aa, synthetic construct
KSPRPLD

SEQ ID NO: 128892 - protein, 7 aa, synthetic construct
KSPSLMI

SEQ ID NO: 128893 - protein, 7 aa, synthetic construct
KSPSNNW

SEQ ID NO: 128894 - protein, 7 aa, synthetic construct
KSPSVFM

SEQ ID NO: 128895 - protein, 7 aa, synthetic construct
KSPTAFV

SEQ ID NO: 128896 - protein, 7 aa, synthetic construct
KSPTYDK

SEQ ID NO: 128897 - protein, 7 aa, synthetic construct
KSPVQVF

SEQ ID NO: 128898 - protein, 7 aa, synthetic construct
KSQDRLA

SEQ ID NO: 128899 - protein, 7 aa, synthetic construct
KSQGHYS

SEQ ID NO: 128900 - protein, 7 aa, synthetic construct
KSQHAQF

SEQ ID NO: 128901 - protein, 7 aa, synthetic construct
KSQHGGT

SEQ ID NO: 128902 - protein, 7 aa, synthetic construct
KSQHIVI

SEQ ID NO: 128903 - protein, 7 aa, synthetic construct
KSQHMSI

SEQ ID NO: 128904 - protein, 7 aa, synthetic construct
KSQHPGN

SEQ ID NO: 128905 - protein, 7 aa, synthetic construct
KSQHPVT

SEQ ID NO: 128906 - protein, 7 aa, synthetic construct
KSQHQVQ

SEQ ID NO: 128907 - protein, 7 aa, synthetic construct
KSQIPHM

SEQ ID NO: 128908 - protein, 7 aa, synthetic construct
KSQLIER

SEQ ID NO: 128909 - protein, 7 aa, synthetic construct
KSQNHIF

SEQ ID NO: 128910 - protein, 7 aa, synthetic construct
KSQPSHA

SEQ ID NO: 128911 - protein, 7 aa, synthetic construct
KSQRTTE

SEQ ID NO: 128912 - protein, 7 aa, synthetic construct
KSQSVFS

SEQ ID NO: 128913 - protein, 7 aa, synthetic construct
KSQTMYT

SEQ ID NO: 128914 - protein, 7 aa, synthetic construct
KSQTSFQ

SEQ ID NO: 128915 - protein, 7 aa, synthetic construct
KSQTVIY

SEQ ID NO: 128916 - protein, 7 aa, synthetic construct
KSQYREA

SEQ ID NO: 128917 - protein, 7 aa, synthetic construct
KSRDHFA

SEQ ID NO: 128918 - protein, 7 aa, synthetic construct
KSRDSQS

SEQ ID NO: 128919 - protein, 7 aa, synthetic construct
KSRDVGS

SEQ ID NO: 128920 - protein, 7 aa, synthetic construct
KSREATQ

SEQ ID NO: 128921 - protein, 7 aa, synthetic construct
KSRENFA

SEQ ID NO: 128922 - protein, 7 aa, synthetic construct
KSREQHQ

SEQ ID NO: 128923 - protein, 7 aa, synthetic construct
KSREQNA

SEQ ID NO: 128924 - protein, 7 aa, synthetic construct
KSRLDMV

SEQ ID NO: 128925 - protein, 7 aa, synthetic construct
KSRLEMA

SEQ ID NO: 128926 - protein, 7 aa, synthetic construct
KSRMPDG

SEQ ID NO: 128927 - protein, 7 aa, synthetic construct
KSRNDTG

SEQ ID NO: 128928 - protein, 7 aa, synthetic construct
KSRPSDA

SEQ ID NO: 128929 - protein, 7 aa, synthetic construct
KSRTDTV

SEQ ID NO: 128930 - protein, 7 aa, synthetic construct
KSRVTDM

SEQ ID NO: 128931 - protein, 7 aa, synthetic construct
KSSGAIF

SEQ ID NO: 128932 - protein, 7 aa, synthetic construct
KSSGIMF

SEQ ID NO: 128933 - protein, 7 aa, synthetic construct
KSSGTYV

SEQ ID NO: 128934 - protein, 7 aa, synthetic construct
KSSHPMH

SEQ ID NO: 128935 - protein, 7 aa, synthetic construct
KSSIAHL

SEQ ID NO: 128936 - protein, 7 aa, synthetic construct
KSSIREN

SEQ ID NO: 128937 - protein, 7 aa, synthetic construct
KSSMANY

SEQ ID NO: 128938 - protein, 7 aa, synthetic construct
KSSMLGL

SEQ ID NO: 128939 - protein, 7 aa, synthetic construct
KSSMRDS

SEQ ID NO: 128940 - protein, 7 aa, synthetic construct
KSSNWGA

SEQ ID NO: 128941 - protein, 7 aa, synthetic construct
KSSQVIF

SEQ ID NO: 128942 - protein, 7 aa, synthetic construct
KSSREPA

SEQ ID NO: 128943 - protein, 7 aa, synthetic construct
KSSRQPE

SEQ ID NO: 128944 - protein, 7 aa, synthetic construct
KSSSSIF

SEQ ID NO: 128945 - protein, 7 aa, synthetic construct
KSSTAHY

SEQ ID NO: 128946 - protein, 7 aa, synthetic construct
KSSTREF

SEQ ID NO: 128947 - protein, 7 aa, synthetic construct
KSSTTYM

SEQ ID NO: 128948 - protein, 7 aa, synthetic construct
KSTALEW

SEQ ID NO: 128949 - protein, 7 aa, synthetic construct
KSTARGD

SEQ ID NO: 128950 - protein, 7 aa, synthetic construct
KSTEKNW

SEQ ID NO: 128951 - protein, 7 aa, synthetic construct
KSTGVAW

SEQ ID NO: 128952 - protein, 7 aa, synthetic construct
KSTIYKD

SEQ ID NO: 128953 - protein, 7 aa, synthetic construct
KSTMASF

SEQ ID NO: 128954 - protein, 7 aa, synthetic construct
KSTNHPN

SEQ ID NO: 128955 - protein, 7 aa, synthetic construct
KSTNPHN

SEQ ID NO: 128956 - protein, 7 aa, synthetic construct
KSTPTPF

SEQ ID NO: 128957 - protein, 7 aa, synthetic construct
KSTQDFR

SEQ ID NO: 128958 - protein, 7 aa, synthetic construct
KSTQRDQ

SEQ ID NO: 128959 - protein, 7 aa, synthetic construct
KSTRSDL

SEQ ID NO: 128960 - protein, 7 aa, synthetic construct
KSTYVKE

SEQ ID NO: 128961 - protein, 7 aa, synthetic construct
KSVAHMM

SEQ ID NO: 128962 - protein, 7 aa, synthetic construct
KSVHISA

SEQ ID NO: 128963 - protein, 7 aa, synthetic construct
KSVHPSH

SEQ ID NO: 128964 - protein, 7 aa, synthetic construct
KSVHTVL

SEQ ID NO: 128965 - protein, 7 aa, synthetic construct
KSVIGGL

SEQ ID NO: 128966 - protein, 7 aa, synthetic construct
KSVIHGV

SEQ ID NO: 128967 - protein, 7 aa, synthetic construct
KSVPGSF

SEQ ID NO: 128968 - protein, 7 aa, synthetic construct
KSVPTGY

SEQ ID NO: 128969 - protein, 7 aa, synthetic construct
KSVREPM

SEQ ID NO: 128970 - protein, 7 aa, synthetic construct
KSVRVEQ

SEQ ID NO: 128971 - protein, 7 aa, synthetic construct
KSVSNSW

SEQ ID NO: 128972 - protein, 7 aa, synthetic construct
KSVYSNP

SEQ ID NO: 128973 - protein, 7 aa, synthetic construct
KSYEPMK

SEQ ID NO: 128974 - protein, 7 aa, synthetic construct
KSYGIEK

SEQ ID NO: 128975 - protein, 7 aa, synthetic construct
KSYKIEP

SEQ ID NO: 128976 - protein, 7 aa, synthetic construct
KSYKPEG

SEQ ID NO: 128977 - protein, 7 aa, synthetic construct
KSYPPNM

SEQ ID NO: 128978 - protein, 7 aa, synthetic construct
KTAERDR

SEQ ID NO: 128979 - protein, 7 aa, synthetic construct
KTAERQN

SEQ ID NO: 128980 - protein, 7 aa, synthetic construct
KTAGKWD

SEQ ID NO: 128981 - protein, 7 aa, synthetic construct
KTAHRDA

SEQ ID NO: 128982 - protein, 7 aa, synthetic construct
KTAMIHP

SEQ ID NO: 128983 - protein, 7 aa, synthetic construct
KTARDAI

SEQ ID NO: 128984 - protein, 7 aa, synthetic construct
KTARDLI

SEQ ID NO: 128985 - protein, 7 aa, synthetic construct
KTARDYG

SEQ ID NO: 128986 - protein, 7 aa, synthetic construct
KTASIYP

SEQ ID NO: 128987 - protein, 7 aa, synthetic construct
KTATDAR

SEQ ID NO: 128988 - protein, 7 aa, synthetic construct
KTAVYNA

SEQ ID NO: 128989 - protein, 7 aa, synthetic construct
KTAYANA

SEQ ID NO: 128990 - protein, 7 aa, synthetic construct
KTAYPLA

SEQ ID NO: 128991 - protein, 7 aa, synthetic construct
KTAYSVT

SEQ ID NO: 128992 - protein, 7 aa, synthetic construct
KTDAKSH

SEQ ID NO: 128993 - protein, 7 aa, synthetic construct
KTDGMHR

SEQ ID NO: 128994 - protein, 7 aa, synthetic construct
KTDLVQR

SEQ ID NO: 128995 - protein, 7 aa, synthetic construct
KTDNYKY

SEQ ID NO: 128996 - protein, 7 aa, synthetic construct
KTDPHKH

SEQ ID NO: 128997 - protein, 7 aa, synthetic construct
KTDQRYL

SEQ ID NO: 128998 - protein, 7 aa, synthetic construct
KTDRGFG

SEQ ID NO: 128999 - protein, 7 aa, synthetic construct
KTDRPTF

SEQ ID NO: 129000 - protein, 7 aa, synthetic construct
KTDTHKV

SEQ ID NO: 129001 - protein, 7 aa, synthetic construct
KTDTYRQ

SEQ ID NO: 129002 - protein, 7 aa, synthetic construct
KTDYKQQ

SEQ ID NO: 129003 - protein, 7 aa, synthetic construct
KTDYMKM

SEQ ID NO: 129004 - protein, 7 aa, synthetic construct
KTEARIV

SEQ ID NO: 129005 - protein, 7 aa, synthetic construct
KTEFNRS

SEQ ID NO: 129006 - protein, 7 aa, synthetic construct
KTEGMRA

SEQ ID NO: 129007 - protein, 7 aa, synthetic construct
KTEKQYA

SEQ ID NO: 129008 - protein, 7 aa, synthetic construct
KTERNGV

SEQ ID NO: 129009 - protein, 7 aa, synthetic construct
KTERQAV

SEQ ID NO: 129010 - protein, 7 aa, synthetic construct
KTERQFV

SEQ ID NO: 129011 - protein, 7 aa, synthetic construct
KTETYRS

SEQ ID NO: 129012 - protein, 7 aa, synthetic construct
KTEVRFS

SEQ ID NO: 129013 - protein, 7 aa, synthetic construct
KTEYAAR

SEQ ID NO: 129014 - protein, 7 aa, synthetic construct
KTEYPRN

SEQ ID NO: 129015 - protein, 7 aa, synthetic construct
KTFEASK

SEQ ID NO: 129016 - protein, 7 aa, synthetic construct
KTFGGMA

SEQ ID NO: 129017 - protein, 7 aa, synthetic construct
KTFGSTQ

SEQ ID NO: 129018 - protein, 7 aa, synthetic construct
KTGAGYH

SEQ ID NO: 129019 - protein, 7 aa, synthetic construct
KTGAHYS

SEQ ID NO: 129020 - protein, 7 aa, synthetic construct
KTGAMHM

SEQ ID NO: 129021 - protein, 7 aa, synthetic construct
KTGAYRD

SEQ ID NO: 129022 - protein, 7 aa, synthetic construct
KTGDLSR

SEQ ID NO: 129023 - protein, 7 aa, synthetic construct
KTGDQFK

SEQ ID NO: 129024 - protein, 7 aa, synthetic construct
KTGDSIR

SEQ ID NO: 129025 - protein, 7 aa, synthetic construct
KTGGHFS

SEQ ID NO: 129026 - protein, 7 aa, synthetic construct
KTGHDMR

SEQ ID NO: 129027 - protein, 7 aa, synthetic construct
KTGHNWE

SEQ ID NO: 129028 - protein, 7 aa, synthetic construct
KTGHVQY

SEQ ID NO: 129029 - protein, 7 aa, synthetic construct
KTGMGGT

SEQ ID NO: 129030 - protein, 7 aa, synthetic construct
KTGQPDR

SEQ ID NO: 129031 - protein, 7 aa, synthetic construct
KTGRDQV

SEQ ID NO: 129032 - protein, 7 aa, synthetic construct
KTGRNDI

SEQ ID NO: 129033 - protein, 7 aa, synthetic construct
KTGSPYV

SEQ ID NO: 129034 - protein, 7 aa, synthetic construct
KTGSSEK

SEQ ID NO: 129035 - protein, 7 aa, synthetic construct
KTGTASW

SEQ ID NO: 129036 - protein, 7 aa, synthetic construct
KTGVAHI

SEQ ID NO: 129037 - protein, 7 aa, synthetic construct
KTGVGDK

SEQ ID NO: 129038 - protein, 7 aa, synthetic construct
KTGYASS

SEQ ID NO: 129039 - protein, 7 aa, synthetic construct
KTGYTSI

SEQ ID NO: 129040 - protein, 7 aa, synthetic construct
KTHANYN

SEQ ID NO: 129041 - protein, 7 aa, synthetic construct
KTHDARY

SEQ ID NO: 129042 - protein, 7 aa, synthetic construct
KTHDIAR

SEQ ID NO: 129043 - protein, 7 aa, synthetic construct
KTHGIHV

SEQ ID NO: 129044 - protein, 7 aa, synthetic construct
KTHGMSM

SEQ ID NO: 129045 - protein, 7 aa, synthetic construct
KTHGNII

SEQ ID NO: 129046 - protein, 7 aa, synthetic construct
KTHGNNT

SEQ ID NO: 129047 - protein, 7 aa, synthetic construct
KTHGPIP

SEQ ID NO: 129048 - protein, 7 aa, synthetic construct
KTHGQIL

SEQ ID NO: 129049 - protein, 7 aa, synthetic construct
KTHNSIT

SEQ ID NO: 129050 - protein, 7 aa, synthetic construct
KTHPNTF

SEQ ID NO: 129051 - protein, 7 aa, synthetic construct
KTHPQNY

SEQ ID NO: 129052 - protein, 7 aa, synthetic construct
KTHQNMN

SEQ ID NO: 129053 - protein, 7 aa, synthetic construct
KTHQNQT

SEQ ID NO: 129054 - protein, 7 aa, synthetic construct
KTHQPMA

SEQ ID NO: 129055 - protein, 7 aa, synthetic construct
KTHQQAQ

SEQ ID NO: 129056 - protein, 7 aa, synthetic construct
KTHREMA

SEQ ID NO: 129057 - protein, 7 aa, synthetic construct
KTHSPAS

SEQ ID NO: 129058 - protein, 7 aa, synthetic construct
KTHSPLN

SEQ ID NO: 129059 - protein, 7 aa, synthetic construct
KTHSSFV

SEQ ID NO: 129060 - protein, 7 aa, synthetic construct
KTHSTSM

SEQ ID NO: 129061 - protein, 7 aa, synthetic construct
KTHTAIN

SEQ ID NO: 129062 - protein, 7 aa, synthetic construct
KTHTAVM

SEQ ID NO: 129063 - protein, 7 aa, synthetic construct
KTHTSGL

SEQ ID NO: 129064 - protein, 7 aa, synthetic construct
KTHVPNV

SEQ ID NO: 129065 - protein, 7 aa, synthetic construct
KTIARND

SEQ ID NO: 129066 - protein, 7 aa, synthetic construct
KTIDRNF

SEQ ID NO: 129067 - protein, 7 aa, synthetic construct
KTIHDRG

SEQ ID NO: 129068 - protein, 7 aa, synthetic construct
KTIHQNV

SEQ ID NO: 129069 - protein, 7 aa, synthetic construct
KTIKDAF

SEQ ID NO: 129070 - protein, 7 aa, synthetic construct
KTIKNYD

SEQ ID NO: 129071 - protein, 7 aa, synthetic construct
KTIPHIS

SEQ ID NO: 129072 - protein, 7 aa, synthetic construct
KTIPPNN

SEQ ID NO: 129073 - protein, 7 aa, synthetic construct
KTIQREY

SEQ ID NO: 129074 - protein, 7 aa, synthetic construct
KTIRDSA

SEQ ID NO: 129075 - protein, 7 aa, synthetic construct
KTIRVQE

SEQ ID NO: 129076 - protein, 7 aa, synthetic construct
KTKAADF

SEQ ID NO: 129077 - protein, 7 aa, synthetic construct
KTKDAIF

SEQ ID NO: 129078 - protein, 7 aa, synthetic construct
KTKDMHN

SEQ ID NO: 129079 - protein, 7 aa, synthetic construct
KTKDSIH

SEQ ID NO: 129080 - protein, 7 aa, synthetic construct
KTKEIAF

SEQ ID NO: 129081 - protein, 7 aa, synthetic construct
KTKLVDY

SEQ ID NO: 129082 - protein, 7 aa, synthetic construct
KTKMAGG

SEQ ID NO: 129083 - protein, 7 aa, synthetic construct
KTKMDPF

SEQ ID NO: 129084 - protein, 7 aa, synthetic construct
KTKMPTE

SEQ ID NO: 129085 - protein, 7 aa, synthetic construct
KTKQMDF

SEQ ID NO: 129086 - protein, 7 aa, synthetic construct
KTKYTSE

SEQ ID NO: 129087 - protein, 7 aa, synthetic construct
KTLDRMM

SEQ ID NO: 129088 - protein, 7 aa, synthetic construct
KTLGIDR

SEQ ID NO: 129089 - protein, 7 aa, synthetic construct
KTLQDQR

SEQ ID NO: 129090 - protein, 7 aa, synthetic construct
KTLRPDT

SEQ ID NO: 129091 - protein, 7 aa, synthetic construct
KTLSERA

SEQ ID NO: 129092 - protein, 7 aa, synthetic construct
KTMERMT

SEQ ID NO: 129093 - protein, 7 aa, synthetic construct
KTMHSNL

SEQ ID NO: 129094 - protein, 7 aa, synthetic construct
KTMKPGD

SEQ ID NO: 129095 - protein, 7 aa, synthetic construct
KTMPHTV

SEQ ID NO: 129096 - protein, 7 aa, synthetic construct
KTMQYQP

SEQ ID NO: 129097 - protein, 7 aa, synthetic construct
KTMREVI

SEQ ID NO: 129098 - protein, 7 aa, synthetic construct
KTMRIME

SEQ ID NO: 129099 - protein, 7 aa, synthetic construct
KTMSDRM

SEQ ID NO: 129100 - protein, 7 aa, synthetic construct
KTMSGFP

SEQ ID NO: 129101 - protein, 7 aa, synthetic construct
KTMSVSP

SEQ ID NO: 129102 - protein, 7 aa, synthetic construct
KTNFDKM

SEQ ID NO: 129103 - protein, 7 aa, synthetic construct
KTNGGWD

SEQ ID NO: 129104 - protein, 7 aa, synthetic construct
KTNGYGN

SEQ ID NO: 129105 - protein, 7 aa, synthetic construct
KTNHAML

SEQ ID NO: 129106 - protein, 7 aa, synthetic construct
KTNHAMN

SEQ ID NO: 129107 - protein, 7 aa, synthetic construct
KTNHSLH

SEQ ID NO: 129108 - protein, 7 aa, synthetic construct
KTNPPFN

SEQ ID NO: 129109 - protein, 7 aa, synthetic construct
KTNPSGH

SEQ ID NO: 129110 - protein, 7 aa, synthetic construct
KTNRENY

SEQ ID NO: 129111 - protein, 7 aa, synthetic construct
KTNRTQE

SEQ ID NO: 129112 - protein, 7 aa, synthetic construct
KTNTVPF

SEQ ID NO: 129113 - protein, 7 aa, synthetic construct
KTPAHLM

SEQ ID NO: 129114 - protein, 7 aa, synthetic construct
KTPASFN

SEQ ID NO: 129115 - protein, 7 aa, synthetic construct
KTPDVAR

SEQ ID NO: 129116 - protein, 7 aa, synthetic construct
KTPEHKA

SEQ ID NO: 129117 - protein, 7 aa, synthetic construct
KTPHLHN

SEQ ID NO: 129118 - protein, 7 aa, synthetic construct
KTPIETR

SEQ ID NO: 129119 - protein, 7 aa, synthetic construct
KTPIYSS

SEQ ID NO: 129120 - protein, 7 aa, synthetic construct
KTPKYES

SEQ ID NO: 129121 - protein, 7 aa, synthetic construct
KTPNFGA

SEQ ID NO: 129122 - protein, 7 aa, synthetic construct
KTPNTFM

SEQ ID NO: 129123 - protein, 7 aa, synthetic construct
KTPQPIF

SEQ ID NO: 129124 - protein, 7 aa, synthetic construct
KTPQVSY

SEQ ID NO: 129125 - protein, 7 aa, synthetic construct
KTPQWKD

SEQ ID NO: 129126 - protein, 7 aa, synthetic construct
KTPSMFA

SEQ ID NO: 129127 - protein, 7 aa, synthetic construct
KTPVVKP

SEQ ID NO: 129128 - protein, 7 aa, synthetic construct
KTPYIAN

SEQ ID NO: 129129 - protein, 7 aa, synthetic construct
KTPYKDT

SEQ ID NO: 129130 - protein, 7 aa, synthetic construct
KTQAGRD

SEQ ID NO: 129131 - protein, 7 aa, synthetic construct
KTQANPH

SEQ ID NO: 129132 - protein, 7 aa, synthetic construct
KTQATDR

SEQ ID NO: 129133 - protein, 7 aa, synthetic construct
KTQATER

SEQ ID NO: 129134 - protein, 7 aa, synthetic construct
KTQDHRV

SEQ ID NO: 129135 - protein, 7 aa, synthetic construct
KTQDRIL

SEQ ID NO: 129136 - protein, 7 aa, synthetic construct
KTQDRST

SEQ ID NO: 129137 - protein, 7 aa, synthetic construct
KTQDSIR

SEQ ID NO: 129138 - protein, 7 aa, synthetic construct
KTQLQEK

SEQ ID NO: 129139 - protein, 7 aa, synthetic construct
KTQNAYI

SEQ ID NO: 129140 - protein, 7 aa, synthetic construct
KTQPQRE

SEQ ID NO: 129141 - protein, 7 aa, synthetic construct
KTQQFGP

SEQ ID NO: 129142 - protein, 7 aa, synthetic construct
KTQRDAV

SEQ ID NO: 129143 - protein, 7 aa, synthetic construct
KTQTHPL

SEQ ID NO: 129144 - protein, 7 aa, synthetic construct
KTQTMQW

SEQ ID NO: 129145 - protein, 7 aa, synthetic construct
KTQYIQA

SEQ ID NO: 129146 - protein, 7 aa, synthetic construct
KTQYSTP

SEQ ID NO: 129147 - protein, 7 aa, synthetic construct
KTRAPFE

SEQ ID NO: 129148 - protein, 7 aa, synthetic construct
KTRDEKL

SEQ ID NO: 129149 - protein, 7 aa, synthetic construct
KTRDFKD

SEQ ID NO: 129150 - protein, 7 aa, synthetic construct
KTRDPFS

SEQ ID NO: 129151 - protein, 7 aa, synthetic construct
KTRELSI

SEQ ID NO: 129152 - protein, 7 aa, synthetic construct
KTRETGM

SEQ ID NO: 129153 - protein, 7 aa, synthetic construct
KTRETNQ

SEQ ID NO: 129154 - protein, 7 aa, synthetic construct
KTRIEML

SEQ ID NO: 129155 - protein, 7 aa, synthetic construct
KTRQADV

SEQ ID NO: 129156 - protein, 7 aa, synthetic construct
KTRVPID

SEQ ID NO: 129157 - protein, 7 aa, synthetic construct
KTRVVPE

SEQ ID NO: 129158 - protein, 7 aa, synthetic construct
KTSAHGH

SEQ ID NO: 129159 - protein, 7 aa, synthetic construct
KTSANFY

SEQ ID NO: 129160 - protein, 7 aa, synthetic construct
KTSDHVK

SEQ ID NO: 129161 - protein, 7 aa, synthetic construct
KTSDIPK

SEQ ID NO: 129162 - protein, 7 aa, synthetic construct
KTSEYRA

SEQ ID NO: 129163 - protein, 7 aa, synthetic construct
KTSGGGW

SEQ ID NO: 129164 - protein, 7 aa, synthetic construct
KTSGTYM

SEQ ID NO: 129165 - protein, 7 aa, synthetic construct
KTSHNQF

SEQ ID NO: 129166 - protein, 7 aa, synthetic construct
KTSHVVM

SEQ ID NO: 129167 - protein, 7 aa, synthetic construct
KTSIYKD

SEQ ID NO: 129168 - protein, 7 aa, synthetic construct
KTSKYGD

SEQ ID NO: 129169 - protein, 7 aa, synthetic construct
KTSMPPH

SEQ ID NO: 129170 - protein, 7 aa, synthetic construct
KTSNLSF

SEQ ID NO: 129171 - protein, 7 aa, synthetic construct
KTSSDYK

SEQ ID NO: 129172 - protein, 7 aa, synthetic construct
KTSTPMI

SEQ ID NO: 129173 - protein, 7 aa, synthetic construct
KTSVQEW

SEQ ID NO: 129174 - protein, 7 aa, synthetic construct
KTSVTVY

SEQ ID NO: 129175 - protein, 7 aa, synthetic construct
KTTDRML

SEQ ID NO: 129176 - protein, 7 aa, synthetic construct
KTTDSWH

SEQ ID NO: 129177 - protein, 7 aa, synthetic construct
KTTEHKS

SEQ ID NO: 129178 - protein, 7 aa, synthetic construct
KTTEYVR

SEQ ID NO: 129179 - protein, 7 aa, synthetic construct
KTTGERT

SEQ ID NO: 129180 - protein, 7 aa, synthetic construct
KTTGGPF

SEQ ID NO: 129181 - protein, 7 aa, synthetic construct
KTTGIDR

SEQ ID NO: 129182 - protein, 7 aa, synthetic construct
KTTGPYV

SEQ ID NO: 129183 - protein, 7 aa, synthetic construct
KTTHAGN

SEQ ID NO: 129184 - protein, 7 aa, synthetic construct
KTTHAQM

SEQ ID NO: 129185 - protein, 7 aa, synthetic construct
KTTHQSQ

SEQ ID NO: 129186 - protein, 7 aa, synthetic construct
KTTNIGY

SEQ ID NO: 129187 - protein, 7 aa, synthetic construct
KTTNWPS

SEQ ID NO: 129188 - protein, 7 aa, synthetic construct
KTTRMGD

SEQ ID NO: 129189 - protein, 7 aa, synthetic construct
KTTYAAV

SEQ ID NO: 129190 - protein, 7 aa, synthetic construct
KTVGGGF

SEQ ID NO: 129191 - protein, 7 aa, synthetic construct
KTVHGAQ

SEQ ID NO: 129192 - protein, 7 aa, synthetic construct
KTVHPSV

SEQ ID NO: 129193 - protein, 7 aa, synthetic construct
KTVHTHS

SEQ ID NO: 129194 - protein, 7 aa, synthetic construct
KTVPALN

SEQ ID NO: 129195 - protein, 7 aa, synthetic construct
KTVQYGV

SEQ ID NO: 129196 - protein, 7 aa, synthetic construct
KTVTYSM

SEQ ID NO: 129197 - protein, 7 aa, synthetic construct
KTVVMKP

SEQ ID NO: 129198 - protein, 7 aa, synthetic construct
KTYAPNT

SEQ ID NO: 129199 - protein, 7 aa, synthetic construct
KTYGEKA

SEQ ID NO: 129200 - protein, 7 aa, synthetic construct
KTYKGLD

SEQ ID NO: 129201 - protein, 7 aa, synthetic construct
KTYKIAE

SEQ ID NO: 129202 - protein, 7 aa, synthetic construct
KTYKLEA

SEQ ID NO: 129203 - protein, 7 aa, synthetic construct
KTYKVEP

SEQ ID NO: 129204 - protein, 7 aa, synthetic construct
KTYMPTS

SEQ ID NO: 129205 - protein, 7 aa, synthetic construct
KTYNQKD

SEQ ID NO: 129206 - protein, 7 aa, synthetic construct
KTYPAIQ

SEQ ID NO: 129207 - protein, 7 aa, synthetic construct
KTYPNGS

SEQ ID NO: 129208 - protein, 7 aa, synthetic construct
KTYPTGN

SEQ ID NO: 129209 - protein, 7 aa, synthetic construct
KTYQAMV

SEQ ID NO: 129210 - protein, 7 aa, synthetic construct
KTYQANI

SEQ ID NO: 129211 - protein, 7 aa, synthetic construct
KTYQMEK

SEQ ID NO: 129212 - protein, 7 aa, synthetic construct
KTYQSSI

SEQ ID NO: 129213 - protein, 7 aa, synthetic construct
KTYSKDP

SEQ ID NO: 129214 - protein, 7 aa, synthetic construct
KTYSKES

SEQ ID NO: 129215 - protein, 7 aa, synthetic construct
KTYSTAT

SEQ ID NO: 129216 - protein, 7 aa, synthetic construct
KTYTKVE

SEQ ID NO: 129217 - protein, 7 aa, synthetic construct
KTYTPMS

SEQ ID NO: 129218 - protein, 7 aa, synthetic construct
KVADNTR

SEQ ID NO: 129219 - protein, 7 aa, synthetic construct
KVADQSK

SEQ ID NO: 129220 - protein, 7 aa, synthetic construct
KVAERNS

SEQ ID NO: 129221 - protein, 7 aa, synthetic construct
KVAGHTF

SEQ ID NO: 129222 - protein, 7 aa, synthetic construct
KVAGHVH

SEQ ID NO: 129223 - protein, 7 aa, synthetic construct
KVAGPYI

SEQ ID NO: 129224 - protein, 7 aa, synthetic construct
KVAHFTA

SEQ ID NO: 129225 - protein, 7 aa, synthetic construct
KVAHNAH

SEQ ID NO: 129226 - protein, 7 aa, synthetic construct
KVAHNYP

SEQ ID NO: 129227 - protein, 7 aa, synthetic construct
KVAMQAY

SEQ ID NO: 129228 - protein, 7 aa, synthetic construct
KVANQSW

SEQ ID NO: 129229 - protein, 7 aa, synthetic construct
KVAPPHA

SEQ ID NO: 129230 - protein, 7 aa, synthetic construct
KVARDMY

SEQ ID NO: 129231 - protein, 7 aa, synthetic construct
KVARMEL

SEQ ID NO: 129232 - protein, 7 aa, synthetic construct
KVASLQP

SEQ ID NO: 129233 - protein, 7 aa, synthetic construct
KVASMDR

SEQ ID NO: 129234 - protein, 7 aa, synthetic construct
KVASMVH

SEQ ID NO: 129235 - protein, 7 aa, synthetic construct
KVASVYS

SEQ ID NO: 129236 - protein, 7 aa, synthetic construct
KVAYGNA

SEQ ID NO: 129237 - protein, 7 aa, synthetic construct
KVDAKTW

SEQ ID NO: 129238 - protein, 7 aa, synthetic construct
KVDGKHM

SEQ ID NO: 129239 - protein, 7 aa, synthetic construct
KVDHKTT

SEQ ID NO: 129240 - protein, 7 aa, synthetic construct
KVDHNKI

SEQ ID NO: 129241 - protein, 7 aa, synthetic construct
KVDKNWI

SEQ ID NO: 129242 - protein, 7 aa, synthetic construct
KVDLRNI

SEQ ID NO: 129243 - protein, 7 aa, synthetic construct
KVDNFRG

SEQ ID NO: 129244 - protein, 7 aa, synthetic construct
KVDRYQG

SEQ ID NO: 129245 - protein, 7 aa, synthetic construct
KVDYNGK

SEQ ID NO: 129246 - protein, 7 aa, synthetic construct
KVEHRVN

SEQ ID NO: 129247 - protein, 7 aa, synthetic construct
KVEMGRA

SEQ ID NO: 129248 - protein, 7 aa, synthetic construct
KVENRGI

SEQ ID NO: 129249 - protein, 7 aa, synthetic construct
KVERGSL

SEQ ID NO: 129250 - protein, 7 aa, synthetic construct
KVERMNT

SEQ ID NO: 129251 - protein, 7 aa, synthetic construct
KVERMYP

SEQ ID NO: 129252 - protein, 7 aa, synthetic construct
KVERQGM

SEQ ID NO: 129253 - protein, 7 aa, synthetic construct
KVERSLQ

SEQ ID NO: 129254 - protein, 7 aa, synthetic construct
KVESRLV

SEQ ID NO: 129255 - protein, 7 aa, synthetic construct
KVETTRF

SEQ ID NO: 129256 - protein, 7 aa, synthetic construct
KVEVMQK

SEQ ID NO: 129257 - protein, 7 aa, synthetic construct
KVEYHKG

SEQ ID NO: 129258 - protein, 7 aa, synthetic construct
KVFKDRD

SEQ ID NO: 129259 - protein, 7 aa, synthetic construct
KVFQKMD

SEQ ID NO: 129260 - protein, 7 aa, synthetic construct
KVFRADP

SEQ ID NO: 129261 - protein, 7 aa, synthetic construct
KVGAHYP

SEQ ID NO: 129262 - protein, 7 aa, synthetic construct
KVGRDLM

SEQ ID NO: 129263 - protein, 7 aa, synthetic construct
KVGREIY

SEQ ID NO: 129264 - protein, 7 aa, synthetic construct
KVGRNDV

SEQ ID NO: 129265 - protein, 7 aa, synthetic construct
KVGSHML

SEQ ID NO: 129266 - protein, 7 aa, synthetic construct
KVGVPSF

SEQ ID NO: 129267 - protein, 7 aa, synthetic construct
KVGVQML

SEQ ID NO: 129268 - protein, 7 aa, synthetic construct
KVHAQDR

SEQ ID NO: 129269 - protein, 7 aa, synthetic construct
KVHATGY

SEQ ID NO: 129270 - protein, 7 aa, synthetic construct
KVHGDRA

SEQ ID NO: 129271 - protein, 7 aa, synthetic construct
KVHGIAL

SEQ ID NO: 129272 - protein, 7 aa, synthetic construct
KVHIHAG

SEQ ID NO: 129273 - protein, 7 aa, synthetic construct
KVHMPDR

SEQ ID NO: 129274 - protein, 7 aa, synthetic construct
KVHNQSL

SEQ ID NO: 129275 - protein, 7 aa, synthetic construct
KVHPMSG

SEQ ID NO: 129276 - protein, 7 aa, synthetic construct
KVHQAPS

SEQ ID NO: 129277 - protein, 7 aa, synthetic construct
KVHQMNN

SEQ ID NO: 129278 - protein, 7 aa, synthetic construct
KVHQVHS

SEQ ID NO: 129279 - protein, 7 aa, synthetic construct
KVHSHAA

SEQ ID NO: 129280 - protein, 7 aa, synthetic construct
KVHSLKE

SEQ ID NO: 129281 - protein, 7 aa, synthetic construct
KVHSQHI

SEQ ID NO: 129282 - protein, 7 aa, synthetic construct
KVHVDSR

SEQ ID NO: 129283 - protein, 7 aa, synthetic construct
KVHVHNT

SEQ ID NO: 129284 - protein, 7 aa, synthetic construct
KVHVLSP

SEQ ID NO: 129285 - protein, 7 aa, synthetic construct
KVHVMNA

SEQ ID NO: 129286 - protein, 7 aa, synthetic construct
KVHVVAQ

SEQ ID NO: 129287 - protein, 7 aa, synthetic construct
KVIHASQ

SEQ ID NO: 129288 - protein, 7 aa, synthetic construct
KVIHPQN

SEQ ID NO: 129289 - protein, 7 aa, synthetic construct
KVINGHM

SEQ ID NO: 129290 - protein, 7 aa, synthetic construct
KVINMVA

SEQ ID NO: 129291 - protein, 7 aa, synthetic construct
KVIPIKD

SEQ ID NO: 129292 - protein, 7 aa, synthetic construct
KVIVQQA

SEQ ID NO: 129293 - protein, 7 aa, synthetic construct
KVKDEYR

SEQ ID NO: 129294 - protein, 7 aa, synthetic construct
KVKDYNI

SEQ ID NO: 129295 - protein, 7 aa, synthetic construct
KVKFEGI

SEQ ID NO: 129296 - protein, 7 aa, synthetic construct
KVKMTDI

SEQ ID NO: 129297 - protein, 7 aa, synthetic construct
KVKQIDF

SEQ ID NO: 129298 - protein, 7 aa, synthetic construct
KVKYNME

SEQ ID NO: 129299 - protein, 7 aa, synthetic construct
KVLRAPE

SEQ ID NO: 129300 - protein, 7 aa, synthetic construct
KVLREQL

SEQ ID NO: 129301 - protein, 7 aa, synthetic construct
KVLYTKE

SEQ ID NO: 129302 - protein, 7 aa, synthetic construct
KVMHSMA

SEQ ID NO: 129303 - protein, 7 aa, synthetic construct
KVMNYPQ

SEQ ID NO: 129304 - protein, 7 aa, synthetic construct
KVMPGFG

SEQ ID NO: 129305 - protein, 7 aa, synthetic construct
KVMPSMM

SEQ ID NO: 129306 - protein, 7 aa, synthetic construct
KVMPTNM

SEQ ID NO: 129307 - protein, 7 aa, synthetic construct
KVMQHQM

SEQ ID NO: 129308 - protein, 7 aa, synthetic construct
KVMQMQA

SEQ ID NO: 129309 - protein, 7 aa, synthetic construct
KVMRNNE

SEQ ID NO: 129310 - protein, 7 aa, synthetic construct
KVNAVPY

SEQ ID NO: 129311 - protein, 7 aa, synthetic construct
KVNGSFL

SEQ ID NO: 129312 - protein, 7 aa, synthetic construct
KVNHRDM

SEQ ID NO: 129313 - protein, 7 aa, synthetic construct
KVNKPMD

SEQ ID NO: 129314 - protein, 7 aa, synthetic construct
KVNKYQE

SEQ ID NO: 129315 - protein, 7 aa, synthetic construct
KVNMRET

SEQ ID NO: 129316 - protein, 7 aa, synthetic construct
KVNPHLY

SEQ ID NO: 129317 - protein, 7 aa, synthetic construct
KVNQYQI

SEQ ID NO: 129318 - protein, 7 aa, synthetic construct
KVNRENM

SEQ ID NO: 129319 - protein, 7 aa, synthetic construct
KVNRVDV

SEQ ID NO: 129320 - protein, 7 aa, synthetic construct
KVNSQPF

SEQ ID NO: 129321 - protein, 7 aa, synthetic construct
KVNYAER

SEQ ID NO: 129322 - protein, 7 aa, synthetic construct
KVPATYT

SEQ ID NO: 129323 - protein, 7 aa, synthetic construct
KVPEHAR

SEQ ID NO: 129324 - protein, 7 aa, synthetic construct
KVPFSAN

SEQ ID NO: 129325 - protein, 7 aa, synthetic construct
KVPGQGY

SEQ ID NO: 129326 - protein, 7 aa, synthetic construct
KVPHIHS

SEQ ID NO: 129327 - protein, 7 aa, synthetic construct
KVPHSHV

SEQ ID NO: 129328 - protein, 7 aa, synthetic construct
KVPIAGP

SEQ ID NO: 129329 - protein, 7 aa, synthetic construct
KVPITDR

SEQ ID NO: 129330 - protein, 7 aa, synthetic construct
KVPIVSP

SEQ ID NO: 129331 - protein, 7 aa, synthetic construct
KVPKDVW

SEQ ID NO: 129332 - protein, 7 aa, synthetic construct
KVPMMAT

SEQ ID NO: 129333 - protein, 7 aa, synthetic construct
KVPMSVT

SEQ ID NO: 129334 - protein, 7 aa, synthetic construct
KVPNGGW

SEQ ID NO: 129335 - protein, 7 aa, synthetic construct
KVPPAER

SEQ ID NO: 129336 - protein, 7 aa, synthetic construct
KVPPTYN

SEQ ID NO: 129337 - protein, 7 aa, synthetic construct
KVPQGYI

SEQ ID NO: 129338 - protein, 7 aa, synthetic construct
KVPQMVM

SEQ ID NO: 129339 - protein, 7 aa, synthetic construct
KVPQPAF

SEQ ID NO: 129340 - protein, 7 aa, synthetic construct
KVPQRYE

SEQ ID NO: 129341 - protein, 7 aa, synthetic construct
KVPRPSD

SEQ ID NO: 129342 - protein, 7 aa, synthetic construct
KVPSGPF

SEQ ID NO: 129343 - protein, 7 aa, synthetic construct
KVPSIPM

SEQ ID NO: 129344 - protein, 7 aa, synthetic construct
KVPTHHT

SEQ ID NO: 129345 - protein, 7 aa, synthetic construct
KVPVHGF

SEQ ID NO: 129346 - protein, 7 aa, synthetic construct
KVPYAGG

SEQ ID NO: 129347 - protein, 7 aa, synthetic construct
KVPYARE

SEQ ID NO: 129348 - protein, 7 aa, synthetic construct
KVPYSTV

SEQ ID NO: 129349 - protein, 7 aa, synthetic construct
KVQHMDR

SEQ ID NO: 129350 - protein, 7 aa, synthetic construct
KVQHRIE

SEQ ID NO: 129351 - protein, 7 aa, synthetic construct
KVQKESW

SEQ ID NO: 129352 - protein, 7 aa, synthetic construct
KVQKIDY

SEQ ID NO: 129353 - protein, 7 aa, synthetic construct
KVQNYIP

SEQ ID NO: 129354 - protein, 7 aa, synthetic construct
KVQPVGL

SEQ ID NO: 129355 - protein, 7 aa, synthetic construct
KVQREIF

SEQ ID NO: 129356 - protein, 7 aa, synthetic construct
KVQRVDQ

SEQ ID NO: 129357 - protein, 7 aa, synthetic construct
KVQRVDY

SEQ ID NO: 129358 - protein, 7 aa, synthetic construct
KVQVPDR

SEQ ID NO: 129359 - protein, 7 aa, synthetic construct
KVRAGEI

SEQ ID NO: 129360 - protein, 7 aa, synthetic construct
KVRAIVE

SEQ ID NO: 129361 - protein, 7 aa, synthetic construct
KVRDIQQ

SEQ ID NO: 129362 - protein, 7 aa, synthetic construct
KVRDSQA

SEQ ID NO: 129363 - protein, 7 aa, synthetic construct
KVRDVFN

SEQ ID NO: 129364 - protein, 7 aa, synthetic construct
KVREISH

SEQ ID NO: 129365 - protein, 7 aa, synthetic construct
KVREMHN

SEQ ID NO: 129366 - protein, 7 aa, synthetic construct
KVRENNT

SEQ ID NO: 129367 - protein, 7 aa, synthetic construct
KVREYTQ

SEQ ID NO: 129368 - protein, 7 aa, synthetic construct
KVRNENA

SEQ ID NO: 129369 - protein, 7 aa, synthetic construct
KVRNVEG

SEQ ID NO: 129370 - protein, 7 aa, synthetic construct
KVRPEHI

SEQ ID NO: 129371 - protein, 7 aa, synthetic construct
KVRPTGD

SEQ ID NO: 129372 - protein, 7 aa, synthetic construct
KVRQEHL

SEQ ID NO: 129373 - protein, 7 aa, synthetic construct
KVRQELN

SEQ ID NO: 129374 - protein, 7 aa, synthetic construct
KVRSNDA

SEQ ID NO: 129375 - protein, 7 aa, synthetic construct
KVRTTEI

SEQ ID NO: 129376 - protein, 7 aa, synthetic construct
KVSAPLI

SEQ ID NO: 129377 - protein, 7 aa, synthetic construct
KVSDRHV

SEQ ID NO: 129378 - protein, 7 aa, synthetic construct
KVSGFPP

SEQ ID NO: 129379 - protein, 7 aa, synthetic construct
KVSGMMM

SEQ ID NO: 129380 - protein, 7 aa, synthetic construct
KVSGTDR

SEQ ID NO: 129381 - protein, 7 aa, synthetic construct
KVSGTNA

SEQ ID NO: 129382 - protein, 7 aa, synthetic construct
KVSHGIM

SEQ ID NO: 129383 - protein, 7 aa, synthetic construct
KVSHPTQ

SEQ ID NO: 129384 - protein, 7 aa, synthetic construct
KVSHYPH

SEQ ID NO: 129385 - protein, 7 aa, synthetic construct
KVSKENW

SEQ ID NO: 129386 - protein, 7 aa, synthetic construct
KVSNGPF

SEQ ID NO: 129387 - protein, 7 aa, synthetic construct
KVSNGYF

SEQ ID NO: 129388 - protein, 7 aa, synthetic construct
KVSQMPL

SEQ ID NO: 129389 - protein, 7 aa, synthetic construct
KVSSHFP

SEQ ID NO: 129390 - protein, 7 aa, synthetic construct
KVSTSAA

SEQ ID NO: 129391 - protein, 7 aa, synthetic construct
KVTGHPF

SEQ ID NO: 129392 - protein, 7 aa, synthetic construct
KVTGHYP

SEQ ID NO: 129393 - protein, 7 aa, synthetic construct
KVTHAGN

SEQ ID NO: 129394 - protein, 7 aa, synthetic construct
KVTHGPQ

SEQ ID NO: 129395 - protein, 7 aa, synthetic construct
KVTHSYS

SEQ ID NO: 129396 - protein, 7 aa, synthetic construct
KVTKDGW

SEQ ID NO: 129397 - protein, 7 aa, synthetic construct
KVTMHIA

SEQ ID NO: 129398 - protein, 7 aa, synthetic construct
KVTNPDR

SEQ ID NO: 129399 - protein, 7 aa, synthetic construct
KVTPNYG

SEQ ID NO: 129400 - protein, 7 aa, synthetic construct
KVTPYQA

SEQ ID NO: 129401 - protein, 7 aa, synthetic construct
KVTQIGF

SEQ ID NO: 129402 - protein, 7 aa, synthetic construct
KVTRADL

SEQ ID NO: 129403 - protein, 7 aa, synthetic construct
KVTRDAV

SEQ ID NO: 129404 - protein, 7 aa, synthetic construct
KVTRESV

SEQ ID NO: 129405 - protein, 7 aa, synthetic construct
KVTTRES

SEQ ID NO: 129406 - protein, 7 aa, synthetic construct
KVTYGAN

SEQ ID NO: 129407 - protein, 7 aa, synthetic construct
KVTYTHQ

SEQ ID NO: 129408 - protein, 7 aa, synthetic construct
KVVGPGH

SEQ ID NO: 129409 - protein, 7 aa, synthetic construct
KVVGYQA

SEQ ID NO: 129410 - protein, 7 aa, synthetic construct
KVVHHTS

SEQ ID NO: 129411 - protein, 7 aa, synthetic construct
KVVHMGP

SEQ ID NO: 129412 - protein, 7 aa, synthetic construct
KVVHQLA

SEQ ID NO: 129413 - protein, 7 aa, synthetic construct
KVVKLYD

SEQ ID NO: 129414 - protein, 7 aa, synthetic construct
KVVPVAP

SEQ ID NO: 129415 - protein, 7 aa, synthetic construct
KVVRDGY

SEQ ID NO: 129416 - protein, 7 aa, synthetic construct
KVVRPDI

SEQ ID NO: 129417 - protein, 7 aa, synthetic construct
KVVRSLD

SEQ ID NO: 129418 - protein, 7 aa, synthetic construct
KVYAGSA

SEQ ID NO: 129419 - protein, 7 aa, synthetic construct
KVYGHST

SEQ ID NO: 129420 - protein, 7 aa, synthetic construct
KVYGPNT

SEQ ID NO: 129421 - protein, 7 aa, synthetic construct
KVYKDEK

SEQ ID NO: 129422 - protein, 7 aa, synthetic construct
KVYPTTA

SEQ ID NO: 129423 - protein, 7 aa, synthetic construct
KVYSENR

SEQ ID NO: 129424 - protein, 7 aa, synthetic construct
KVYSPAQ

SEQ ID NO: 129425 - protein, 7 aa, synthetic construct
KWANQVS

SEQ ID NO: 129426 - protein, 7 aa, synthetic construct
KWEGPNK

SEQ ID NO: 129427 - protein, 7 aa, synthetic construct
KWEKQLG

SEQ ID NO: 129428 - protein, 7 aa, synthetic construct
KWGKVDA

SEQ ID NO: 129429 - protein, 7 aa, synthetic construct
KWHENSQ

SEQ ID NO: 129430 - protein, 7 aa, synthetic construct
KWHPGDQ

SEQ ID NO: 129431 - protein, 7 aa, synthetic construct
KWKDPHP

SEQ ID NO: 129432 - protein, 7 aa, synthetic construct
KWKDYQA

SEQ ID NO: 129433 - protein, 7 aa, synthetic construct
KWKNVEP

SEQ ID NO: 129434 - protein, 7 aa, synthetic construct
KWKQDAY

SEQ ID NO: 129435 - protein, 7 aa, synthetic construct
KWKQEQY

SEQ ID NO: 129436 - protein, 7 aa, synthetic construct
KWKQQEP

SEQ ID NO: 129437 - protein, 7 aa, synthetic construct
KWNAVGS

SEQ ID NO: 129438 - protein, 7 aa, synthetic construct
KWNEQKS

SEQ ID NO: 129439 - protein, 7 aa, synthetic construct
KWPKAGD

SEQ ID NO: 129440 - protein, 7 aa, synthetic construct
KWQGVAS

SEQ ID NO: 129441 - protein, 7 aa, synthetic construct
KWQIQGD

SEQ ID NO: 129442 - protein, 7 aa, synthetic construct
KWQNARE

SEQ ID NO: 129443 - protein, 7 aa, synthetic construct
KWQQRED

SEQ ID NO: 129444 - protein, 7 aa, synthetic construct
KWSKADP

SEQ ID NO: 129445 - protein, 7 aa, synthetic construct
KWSNNDR

SEQ ID NO: 129446 - protein, 7 aa, synthetic construct
KWSNNTA

SEQ ID NO: 129447 - protein, 7 aa, synthetic construct
KWSNTTT

SEQ ID NO: 129448 - protein, 7 aa, synthetic construct
KWSTNVA

SEQ ID NO: 129449 - protein, 7 aa, synthetic construct
KWTQDKP

SEQ ID NO: 129450 - protein, 7 aa, synthetic construct
KYAAMSP

SEQ ID NO: 129451 - protein, 7 aa, synthetic construct
KYAEIKQ

SEQ ID NO: 129452 - protein, 7 aa, synthetic construct
KYAELKP

SEQ ID NO: 129453 - protein, 7 aa, synthetic construct
KYAELRT

SEQ ID NO: 129454 - protein, 7 aa, synthetic construct
KYAEMNK

SEQ ID NO: 129455 - protein, 7 aa, synthetic construct
KYAENRI

SEQ ID NO: 129456 - protein, 7 aa, synthetic construct
KYAEVRG

SEQ ID NO: 129457 - protein, 7 aa, synthetic construct
KYAGATQ

SEQ ID NO: 129458 - protein, 7 aa, synthetic construct
KYAGILQ

SEQ ID NO: 129459 - protein, 7 aa, synthetic construct
KYAGKFD

SEQ ID NO: 129460 - protein, 7 aa, synthetic construct
KYAGSSA

SEQ ID NO: 129461 - protein, 7 aa, synthetic construct
KYAHVGA

SEQ ID NO: 129462 - protein, 7 aa, synthetic construct
KYAKETI

SEQ ID NO: 129463 - protein, 7 aa, synthetic construct
KYAKSVD

SEQ ID NO: 129464 - protein, 7 aa, synthetic construct
KYALKHD

SEQ ID NO: 129465 - protein, 7 aa, synthetic construct
KYALSQP

SEQ ID NO: 129466 - protein, 7 aa, synthetic construct
KYALSSP

SEQ ID NO: 129467 - protein, 7 aa, synthetic construct
KYAMTEK

SEQ ID NO: 129468 - protein, 7 aa, synthetic construct
KYANHNT

SEQ ID NO: 129469 - protein, 7 aa, synthetic construct
KYANPLP

SEQ ID NO: 129470 - protein, 7 aa, synthetic construct
KYANQHV

SEQ ID NO: 129471 - protein, 7 aa, synthetic construct
KYANQMV

SEQ ID NO: 129472 - protein, 7 aa, synthetic construct
KYAPNNI

SEQ ID NO: 129473 - protein, 7 aa, synthetic construct
KYAPPQS

SEQ ID NO: 129474 - protein, 7 aa, synthetic construct
KYATAGL

SEQ ID NO: 129475 - protein, 7 aa, synthetic construct
KYATGHS

SEQ ID NO: 129476 - protein, 7 aa, synthetic construct
KYATGSV

SEQ ID NO: 129477 - protein, 7 aa, synthetic construct
KYATPQI

SEQ ID NO: 129478 - protein, 7 aa, synthetic construct
KYDLNQK

SEQ ID NO: 129479 - protein, 7 aa, synthetic construct
KYDRNFG

SEQ ID NO: 129480 - protein, 7 aa, synthetic construct
KYDSTKQ

SEQ ID NO: 129481 - protein, 7 aa, synthetic construct
KYDSVVK

SEQ ID NO: 129482 - protein, 7 aa, synthetic construct
KYDTQHK

SEQ ID NO: 129483 - protein, 7 aa, synthetic construct
KYEISGK

SEQ ID NO: 129484 - protein, 7 aa, synthetic construct
KYEKMTQ

SEQ ID NO: 129485 - protein, 7 aa, synthetic construct
KYEKQLL

SEQ ID NO: 129486 - protein, 7 aa, synthetic construct
KYEPFKA

SEQ ID NO: 129487 - protein, 7 aa, synthetic construct
KYEQKTL

SEQ ID NO: 129488 - protein, 7 aa, synthetic construct
KYEQMRV

SEQ ID NO: 129489 - protein, 7 aa, synthetic construct
KYGASLT

SEQ ID NO: 129490 - protein, 7 aa, synthetic construct
KYGDAFR

SEQ ID NO: 129491 - protein, 7 aa, synthetic construct
KYGDPLR

SEQ ID NO: 129492 - protein, 7 aa, synthetic construct
KYGGDQW

SEQ ID NO: 129493 - protein, 7 aa, synthetic construct
KYGGMPM

SEQ ID NO: 129494 - protein, 7 aa, synthetic construct
KYGNTER

SEQ ID NO: 129495 - protein, 7 aa, synthetic construct
KYGPATM

SEQ ID NO: 129496 - protein, 7 aa, synthetic construct
KYGTERV

SEQ ID NO: 129497 - protein, 7 aa, synthetic construct
KYGTNVQ

SEQ ID NO: 129498 - protein, 7 aa, synthetic construct
KYHAQGA

SEQ ID NO: 129499 - protein, 7 aa, synthetic construct
KYHGTNT

SEQ ID NO: 129500 - protein, 7 aa, synthetic construct
KYHNMTP

SEQ ID NO: 129501 - protein, 7 aa, synthetic construct
KYHQMTG

SEQ ID NO: 129502 - protein, 7 aa, synthetic construct
KYHSTQI

SEQ ID NO: 129503 - protein, 7 aa, synthetic construct
KYIGNQT

SEQ ID NO: 129504 - protein, 7 aa, synthetic construct
KYIHGTG

SEQ ID NO: 129505 - protein, 7 aa, synthetic construct
KYIKDQG

SEQ ID NO: 129506 - protein, 7 aa, synthetic construct
KYIKNDA

SEQ ID NO: 129507 - protein, 7 aa, synthetic construct
KYINPQA

SEQ ID NO: 129508 - protein, 7 aa, synthetic construct
KYISANA

SEQ ID NO: 129509 - protein, 7 aa, synthetic construct
KYISTST

SEQ ID NO: 129510 - protein, 7 aa, synthetic construct
KYITGTL

SEQ ID NO: 129511 - protein, 7 aa, synthetic construct
KYITQEQ

SEQ ID NO: 129512 - protein, 7 aa, synthetic construct
KYKAPVE

SEQ ID NO: 129513 - protein, 7 aa, synthetic construct
KYKDVYP

SEQ ID NO: 129514 - protein, 7 aa, synthetic construct
KYKENMM

SEQ ID NO: 129515 - protein, 7 aa, synthetic construct
KYKENQM

SEQ ID NO: 129516 - protein, 7 aa, synthetic construct
KYKETGQ

SEQ ID NO: 129517 - protein, 7 aa, synthetic construct
KYKGIAD

SEQ ID NO: 129518 - protein, 7 aa, synthetic construct
KYKIMGE

SEQ ID NO: 129519 - protein, 7 aa, synthetic construct
KYKITID

SEQ ID NO: 129520 - protein, 7 aa, synthetic construct
KYKLSDS

SEQ ID NO: 129521 - protein, 7 aa, synthetic construct
KYKMTDV

SEQ ID NO: 129522 - protein, 7 aa, synthetic construct
KYKNMQD

SEQ ID NO: 129523 - protein, 7 aa, synthetic construct
KYKPMEV

SEQ ID NO: 129524 - protein, 7 aa, synthetic construct
KYKPNIE

SEQ ID NO: 129525 - protein, 7 aa, synthetic construct
KYKQLNE

SEQ ID NO: 129526 - protein, 7 aa, synthetic construct
KYKSMFE

SEQ ID NO: 129527 - protein, 7 aa, synthetic construct
KYKSQDA

SEQ ID NO: 129528 - protein, 7 aa, synthetic construct
KYKTIGD

SEQ ID NO: 129529 - protein, 7 aa, synthetic construct
KYKVESA

SEQ ID NO: 129530 - protein, 7 aa, synthetic construct
KYKVMME

SEQ ID NO: 129531 - protein, 7 aa, synthetic construct
KYLKLTD

SEQ ID NO: 129532 - protein, 7 aa, synthetic construct
KYLPQTN

SEQ ID NO: 129533 - protein, 7 aa, synthetic construct
KYLQGEK

SEQ ID NO: 129534 - protein, 7 aa, synthetic construct
KYLSPEK

SEQ ID NO: 129535 - protein, 7 aa, synthetic construct
KYMGNSI

SEQ ID NO: 129536 - protein, 7 aa, synthetic construct
KYMKDAA

SEQ ID NO: 129537 - protein, 7 aa, synthetic construct
KYMKESS

SEQ ID NO: 129538 - protein, 7 aa, synthetic construct
KYMKGDV

SEQ ID NO: 129539 - protein, 7 aa, synthetic construct
KYMNKDF

SEQ ID NO: 129540 - protein, 7 aa, synthetic construct
KYMPQNQ

SEQ ID NO: 129541 - protein, 7 aa, synthetic construct
KYMTKDI

SEQ ID NO: 129542 - protein, 7 aa, synthetic construct
KYNHDAS

SEQ ID NO: 129543 - protein, 7 aa, synthetic construct
KYNKEFQ

SEQ ID NO: 129544 - protein, 7 aa, synthetic construct
KYNPDKF

SEQ ID NO: 129545 - protein, 7 aa, synthetic construct
KYNQSNY

SEQ ID NO: 129546 - protein, 7 aa, synthetic construct
KYNSITL

SEQ ID NO: 129547 - protein, 7 aa, synthetic construct
KYNTASI

SEQ ID NO: 129548 - protein, 7 aa, synthetic construct
KYNTMDK

SEQ ID NO: 129549 - protein, 7 aa, synthetic construct
KYNTMHP

SEQ ID NO: 129550 - protein, 7 aa, synthetic construct
KYNVGPM

SEQ ID NO: 129551 - protein, 7 aa, synthetic construct
KYNVPTA

SEQ ID NO: 129552 - protein, 7 aa, synthetic construct
KYPASSY

SEQ ID NO: 129553 - protein, 7 aa, synthetic construct
KYPATLT

SEQ ID NO: 129554 - protein, 7 aa, synthetic construct
KYPDGPR

SEQ ID NO: 129555 - protein, 7 aa, synthetic construct
KYPDHTK

SEQ ID NO: 129556 - protein, 7 aa, synthetic construct
KYPDLPR

SEQ ID NO: 129557 - protein, 7 aa, synthetic construct
KYPDTTR

SEQ ID NO: 129558 - protein, 7 aa, synthetic construct
KYPGMNA

SEQ ID NO: 129559 - protein, 7 aa, synthetic construct
KYPGNQH

SEQ ID NO: 129560 - protein, 7 aa, synthetic construct
KYPGVTQ

SEQ ID NO: 129561 - protein, 7 aa, synthetic construct
KYPHSNP

SEQ ID NO: 129562 - protein, 7 aa, synthetic construct
KYPIGQV

SEQ ID NO: 129563 - protein, 7 aa, synthetic construct
KYPKPDQ

SEQ ID NO: 129564 - protein, 7 aa, synthetic construct
KYPLHKD

SEQ ID NO: 129565 - protein, 7 aa, synthetic construct
KYPNIQH

SEQ ID NO: 129566 - protein, 7 aa, synthetic construct
KYPNPAN

SEQ ID NO: 129567 - protein, 7 aa, synthetic construct
KYPPEQR

SEQ ID NO: 129568 - protein, 7 aa, synthetic construct
KYPPMQT

SEQ ID NO: 129569 - protein, 7 aa, synthetic construct
KYPQLRE

SEQ ID NO: 129570 - protein, 7 aa, synthetic construct
KYPQMVP

SEQ ID NO: 129571 - protein, 7 aa, synthetic construct
KYPQVDK

SEQ ID NO: 129572 - protein, 7 aa, synthetic construct
KYPSPRD

SEQ ID NO: 129573 - protein, 7 aa, synthetic construct
KYPTSNF

SEQ ID NO: 129574 - protein, 7 aa, synthetic construct
KYPTSPL

SEQ ID NO: 129575 - protein, 7 aa, synthetic construct
KYPVATQ

SEQ ID NO: 129576 - protein, 7 aa, synthetic construct
KYPVHQP

SEQ ID NO: 129577 - protein, 7 aa, synthetic construct
KYPVRNE

SEQ ID NO: 129578 - protein, 7 aa, synthetic construct
KYPVSGM

SEQ ID NO: 129579 - protein, 7 aa, synthetic construct
KYQAAGI

SEQ ID NO: 129580 - protein, 7 aa, synthetic construct
KYQASTL

SEQ ID NO: 129581 - protein, 7 aa, synthetic construct
KYQATNT

SEQ ID NO: 129582 - protein, 7 aa, synthetic construct
KYQAYDH

SEQ ID NO: 129583 - protein, 7 aa, synthetic construct
KYQDKSL

SEQ ID NO: 129584 - protein, 7 aa, synthetic construct
KYQEKQL

SEQ ID NO: 129585 - protein, 7 aa, synthetic construct
KYQELKQ

SEQ ID NO: 129586 - protein, 7 aa, synthetic construct
KYQEVKI

SEQ ID NO: 129587 - protein, 7 aa, synthetic construct
KYQGAGI

SEQ ID NO: 129588 - protein, 7 aa, synthetic construct
KYQGASQ

SEQ ID NO: 129589 - protein, 7 aa, synthetic construct
KYQGHLN

SEQ ID NO: 129590 - protein, 7 aa, synthetic construct
KYQGNNI

SEQ ID NO: 129591 - protein, 7 aa, synthetic construct
KYQGQIT

SEQ ID NO: 129592 - protein, 7 aa, synthetic construct
KYQHNQS

SEQ ID NO: 129593 - protein, 7 aa, synthetic construct
KYQINGQ

SEQ ID NO: 129594 - protein, 7 aa, synthetic construct
KYQPQIA

SEQ ID NO: 129595 - protein, 7 aa, synthetic construct
KYQPQSI

SEQ ID NO: 129596 - protein, 7 aa, synthetic construct
KYQQVQA

SEQ ID NO: 129597 - protein, 7 aa, synthetic construct
KYQRDNI

SEQ ID NO: 129598 - protein, 7 aa, synthetic construct
KYQTLAA

SEQ ID NO: 129599 - protein, 7 aa, synthetic construct
KYQTQAQ

SEQ ID NO: 129600 - protein, 7 aa, synthetic construct
KYQVGLQ

SEQ ID NO: 129601 - protein, 7 aa, synthetic construct
KYQVRDS

SEQ ID NO: 129602 - protein, 7 aa, synthetic construct
KYQYPHD

SEQ ID NO: 129603 - protein, 7 aa, synthetic construct
KYRDNIG

SEQ ID NO: 129604 - protein, 7 aa, synthetic construct
KYRETVI

SEQ ID NO: 129605 - protein, 7 aa, synthetic construct
KYRMEQD

SEQ ID NO: 129606 - protein, 7 aa, synthetic construct
KYRMGDA

SEQ ID NO: 129607 - protein, 7 aa, synthetic construct
KYSAAGP

SEQ ID NO: 129608 - protein, 7 aa, synthetic construct
KYSEPFK

SEQ ID NO: 129609 - protein, 7 aa, synthetic construct
KYSGDTR

SEQ ID NO: 129610 - protein, 7 aa, synthetic construct
KYSGLEK

SEQ ID NO: 129611 - protein, 7 aa, synthetic construct
KYSGQIV

SEQ ID NO: 129612 - protein, 7 aa, synthetic construct
KYSGSTL

SEQ ID NO: 129613 - protein, 7 aa, synthetic construct
KYSHNGT

SEQ ID NO: 129614 - protein, 7 aa, synthetic construct
KYSHPMA

SEQ ID NO: 129615 - protein, 7 aa, synthetic construct
KYSKENA

SEQ ID NO: 129616 - protein, 7 aa, synthetic construct
KYSKEQT

SEQ ID NO: 129617 - protein, 7 aa, synthetic construct
KYSKPVE

SEQ ID NO: 129618 - protein, 7 aa, synthetic construct
KYSLKAD

SEQ ID NO: 129619 - protein, 7 aa, synthetic construct
KYSLKDT

SEQ ID NO: 129620 - protein, 7 aa, synthetic construct
KYSPPNN

SEQ ID NO: 129621 - protein, 7 aa, synthetic construct
KYSQAAM

SEQ ID NO: 129622 - protein, 7 aa, synthetic construct
KYSVPNV

SEQ ID NO: 129623 - protein, 7 aa, synthetic construct
KYTAGGV

SEQ ID NO: 129624 - protein, 7 aa, synthetic construct
KYTAYSD

SEQ ID NO: 129625 - protein, 7 aa, synthetic construct
KYTGIAM

SEQ ID NO: 129626 - protein, 7 aa, synthetic construct
KYTGVKD

SEQ ID NO: 129627 - protein, 7 aa, synthetic construct
KYTMNEK

SEQ ID NO: 129628 - protein, 7 aa, synthetic construct
KYTNADK

SEQ ID NO: 129629 - protein, 7 aa, synthetic construct
KYTNEKL

SEQ ID NO: 129630 - protein, 7 aa, synthetic construct
KYTNMHG

SEQ ID NO: 129631 - protein, 7 aa, synthetic construct
KYTNPNL

SEQ ID NO: 129632 - protein, 7 aa, synthetic construct
KYTNSFG

SEQ ID NO: 129633 - protein, 7 aa, synthetic construct
KYTNSLH

SEQ ID NO: 129634 - protein, 7 aa, synthetic construct
KYTPQAN

SEQ ID NO: 129635 - protein, 7 aa, synthetic construct
KYTPSSQ

SEQ ID NO: 129636 - protein, 7 aa, synthetic construct
KYTQISQ

SEQ ID NO: 129637 - protein, 7 aa, synthetic construct
KYTSPQI

SEQ ID NO: 129638 - protein, 7 aa, synthetic construct
KYTSQNL

SEQ ID NO: 129639 - protein, 7 aa, synthetic construct
KYTTKDQ

SEQ ID NO: 129640 - protein, 7 aa, synthetic construct
KYTTNGH

SEQ ID NO: 129641 - protein, 7 aa, synthetic construct
KYTVRDG

SEQ ID NO: 129642 - protein, 7 aa, synthetic construct
KYVAATT

SEQ ID NO: 129643 - protein, 7 aa, synthetic construct
KYVDMSK

SEQ ID NO: 129644 - protein, 7 aa, synthetic construct
KYVEKLS

SEQ ID NO: 129645 - protein, 7 aa, synthetic construct
KYVGEGK

SEQ ID NO: 129646 - protein, 7 aa, synthetic construct
KYVGQAM

SEQ ID NO: 129647 - protein, 7 aa, synthetic construct
KYVKDQQ

SEQ ID NO: 129648 - protein, 7 aa, synthetic construct
KYVNAGI

SEQ ID NO: 129649 - protein, 7 aa, synthetic construct
KYVNKET

SEQ ID NO: 129650 - protein, 7 aa, synthetic construct
KYVNPSA

SEQ ID NO: 129651 - protein, 7 aa, synthetic construct
KYVPQMS

SEQ ID NO: 129652 - protein, 7 aa, synthetic construct
KYVQAKD

SEQ ID NO: 129653 - protein, 7 aa, synthetic construct
KYVQKGE

SEQ ID NO: 129654 - protein, 7 aa, synthetic construct
KYVQSNP

SEQ ID NO: 129655 - protein, 7 aa, synthetic construct
KYVSPGP

SEQ ID NO: 129656 - protein, 7 aa, synthetic construct
KYVVSPP

SEQ ID NO: 129657 - protein, 7 aa, synthetic construct
KYYGSGD

SEQ ID NO: 129658 - protein, 7 aa, synthetic construct
KYYKEQT

SEQ ID NO: 129659 - protein, 7 aa, synthetic construct
LAAHGRM

SEQ ID NO: 129660 - protein, 7 aa, synthetic construct
LAARIKD

SEQ ID NO: 129661 - protein, 7 aa, synthetic construct
LAARPRD

SEQ ID NO: 129662 - protein, 7 aa, synthetic construct
LAARPSM

SEQ ID NO: 129663 - protein, 7 aa, synthetic construct
LAARWNE

SEQ ID NO: 129664 - protein, 7 aa, synthetic construct
LAAVSPR

SEQ ID NO: 129665 - protein, 7 aa, synthetic construct
LADFRTK

SEQ ID NO: 129666 - protein, 7 aa, synthetic construct
LADRQLR

SEQ ID NO: 129667 - protein, 7 aa, synthetic construct
LADRTLR

SEQ ID NO: 129668 - protein, 7 aa, synthetic construct
LAEKMWQ

SEQ ID NO: 129669 - protein, 7 aa, synthetic construct
LAERRVM

SEQ ID NO: 129670 - protein, 7 aa, synthetic construct
LAEVRRQ

SEQ ID NO: 129671 - protein, 7 aa, synthetic construct
LAFKPQA

SEQ ID NO: 129672 - protein, 7 aa, synthetic construct
LAFNAKN

SEQ ID NO: 129673 - protein, 7 aa, synthetic construct
LAGAIRN

SEQ ID NO: 129674 - protein, 7 aa, synthetic construct
LAGAYKQ

SEQ ID NO: 129675 - protein, 7 aa, synthetic construct
LAGHITR

SEQ ID NO: 129676 - protein, 7 aa, synthetic construct
LAGKHAF

SEQ ID NO: 129677 - protein, 7 aa, synthetic construct
LAGKHFT

SEQ ID NO: 129678 - protein, 7 aa, synthetic construct
LAGKRDL

SEQ ID NO: 129679 - protein, 7 aa, synthetic construct
LAGMAHK

SEQ ID NO: 129680 - protein, 7 aa, synthetic construct
LAGNMQR

SEQ ID NO: 129681 - protein, 7 aa, synthetic construct
LAGRDLK

SEQ ID NO: 129682 - protein, 7 aa, synthetic construct
LAGTHRS

SEQ ID NO: 129683 - protein, 7 aa, synthetic construct
LAGYVPK

SEQ ID NO: 129684 - protein, 7 aa, synthetic construct
LAHGKHM

SEQ ID NO: 129685 - protein, 7 aa, synthetic construct
LAHGKMM

SEQ ID NO: 129686 - protein, 7 aa, synthetic construct
LAHGYSM

SEQ ID NO: 129687 - protein, 7 aa, synthetic construct
LAHHKIA

SEQ ID NO: 129688 - protein, 7 aa, synthetic construct
LAHHKPY

SEQ ID NO: 129689 - protein, 7 aa, synthetic construct
LAHIQGK

SEQ ID NO: 129690 - protein, 7 aa, synthetic construct
LAHKDYK

SEQ ID NO: 129691 - protein, 7 aa, synthetic construct
LAHKFPA

SEQ ID NO: 129692 - protein, 7 aa, synthetic construct
LAHKHMS

SEQ ID NO: 129693 - protein, 7 aa, synthetic construct
LAHKPSN

SEQ ID NO: 129694 - protein, 7 aa, synthetic construct
LAHKRVD

SEQ ID NO: 129695 - protein, 7 aa, synthetic construct
LAHKTFQ

SEQ ID NO: 129696 - protein, 7 aa, synthetic construct
LAHMPKN

SEQ ID NO: 129697 - protein, 7 aa, synthetic construct
LAHNRAN

SEQ ID NO: 129698 - protein, 7 aa, synthetic construct
LAHNRNN

SEQ ID NO: 129699 - protein, 7 aa, synthetic construct
LAHNSNK

SEQ ID NO: 129700 - protein, 7 aa, synthetic construct
LAHNVKS

SEQ ID NO: 129701 - protein, 7 aa, synthetic construct
LAHPKTQ

SEQ ID NO: 129702 - protein, 7 aa, synthetic construct
LAHQKLM

SEQ ID NO: 129703 - protein, 7 aa, synthetic construct
LAHRPNQ

SEQ ID NO: 129704 - protein, 7 aa, synthetic construct
LAHRSTN

SEQ ID NO: 129705 - protein, 7 aa, synthetic construct
LAHRVAV

SEQ ID NO: 129706 - protein, 7 aa, synthetic construct
LAHSSRV

SEQ ID NO: 129707 - protein, 7 aa, synthetic construct
LAHSTMR

SEQ ID NO: 129708 - protein, 7 aa, synthetic construct
LAHTNLR

SEQ ID NO: 129709 - protein, 7 aa, synthetic construct
LAHYRSD

SEQ ID NO: 129710 - protein, 7 aa, synthetic construct
LAINQSR

SEQ ID NO: 129711 - protein, 7 aa, synthetic construct
LAKAQDR

SEQ ID NO: 129712 - protein, 7 aa, synthetic construct
LAKAYMQ

SEQ ID NO: 129713 - protein, 7 aa, synthetic construct
LAKFIQA

SEQ ID NO: 129714 - protein, 7 aa, synthetic construct
LAKFNAS

SEQ ID NO: 129715 - protein, 7 aa, synthetic construct
LAKFSRE

SEQ ID NO: 129716 - protein, 7 aa, synthetic construct
LAKFVTN

SEQ ID NO: 129717 - protein, 7 aa, synthetic construct
LAKGIYN

SEQ ID NO: 129718 - protein, 7 aa, synthetic construct
LAKHPSN

SEQ ID NO: 129719 - protein, 7 aa, synthetic construct
LAKHQFV

SEQ ID NO: 129720 - protein, 7 aa, synthetic construct
LAKHSMQ

SEQ ID NO: 129721 - protein, 7 aa, synthetic construct
LAKHYSA

SEQ ID NO: 129722 - protein, 7 aa, synthetic construct
LAKIAIN

SEQ ID NO: 129723 - protein, 7 aa, synthetic construct
LAKKVYD

SEQ ID NO: 129724 - protein, 7 aa, synthetic construct
LAKMPKD

SEQ ID NO: 129725 - protein, 7 aa, synthetic construct
LAKNYAM

SEQ ID NO: 129726 - protein, 7 aa, synthetic construct
LAKPPHL

SEQ ID NO: 129727 - protein, 7 aa, synthetic construct
LAKRDVL

SEQ ID NO: 129728 - protein, 7 aa, synthetic construct
LAKRGEG

SEQ ID NO: 129729 - protein, 7 aa, synthetic construct
LAKRLVD

SEQ ID NO: 129730 - protein, 7 aa, synthetic construct
LAKRVAE

SEQ ID NO: 129731 - protein, 7 aa, synthetic construct
LAKRVET

SEQ ID NO: 129732 - protein, 7 aa, synthetic construct
LAKRVIE

SEQ ID NO: 129733 - protein, 7 aa, synthetic construct
LAKTQYM

SEQ ID NO: 129734 - protein, 7 aa, synthetic construct
LAKVDRY

SEQ ID NO: 129735 - protein, 7 aa, synthetic construct
LAKYMAS

SEQ ID NO: 129736 - protein, 7 aa, synthetic construct
LAKYNKD

SEQ ID NO: 129737 - protein, 7 aa, synthetic construct
LALREGK

SEQ ID NO: 129738 - protein, 7 aa, synthetic construct
LALRPRE

SEQ ID NO: 129739 - protein, 7 aa, synthetic construct
LAMKSPM

SEQ ID NO: 129740 - protein, 7 aa, synthetic construct
LAMNSIR

SEQ ID NO: 129741 - protein, 7 aa, synthetic construct
LAMRHNA

SEQ ID NO: 129742 - protein, 7 aa, synthetic construct
LAMTQKY

SEQ ID NO: 129743 - protein, 7 aa, synthetic construct
LANAPRY

SEQ ID NO: 129744 - protein, 7 aa, synthetic construct
LANHHMK

SEQ ID NO: 129745 - protein, 7 aa, synthetic construct
LANHVSR

SEQ ID NO: 129746 - protein, 7 aa, synthetic construct
LANHYHT

SEQ ID NO: 129747 - protein, 7 aa, synthetic construct
LANNSYK

SEQ ID NO: 129748 - protein, 7 aa, synthetic construct
LANRFPP

SEQ ID NO: 129749 - protein, 7 aa, synthetic construct
LANYGMK

SEQ ID NO: 129750 - protein, 7 aa, synthetic construct
LAPAMGR

SEQ ID NO: 129751 - protein, 7 aa, synthetic construct
LAPHARG

SEQ ID NO: 129752 - protein, 7 aa, synthetic construct
LAPHSNR

SEQ ID NO: 129753 - protein, 7 aa, synthetic construct
LAPRHAN

SEQ ID NO: 129754 - protein, 7 aa, synthetic construct
LAPRHTT

SEQ ID NO: 129755 - protein, 7 aa, synthetic construct
LAPRTHM

SEQ ID NO: 129756 - protein, 7 aa, synthetic construct
LAPSPDD

SEQ ID NO: 129757 - protein, 7 aa, synthetic construct
LAPYLKQ

SEQ ID NO: 129758 - protein, 7 aa, synthetic construct
LAQFSNK

SEQ ID NO: 129759 - protein, 7 aa, synthetic construct
LAQGRGW

SEQ ID NO: 129760 - protein, 7 aa, synthetic construct
LAQHTAK

SEQ ID NO: 129761 - protein, 7 aa, synthetic construct
LAQKRFD

SEQ ID NO: 129762 - protein, 7 aa, synthetic construct
LAQKTGW

SEQ ID NO: 129763 - protein, 7 aa, synthetic construct
LAQKYKD

SEQ ID NO: 129764 - protein, 7 aa, synthetic construct
LAQLQQR

SEQ ID NO: 129765 - protein, 7 aa, synthetic construct
LAQRAPL

SEQ ID NO: 129766 - protein, 7 aa, synthetic construct
LAQRASY

SEQ ID NO: 129767 - protein, 7 aa, synthetic construct
LAQRTGF

SEQ ID NO: 129768 - protein, 7 aa, synthetic construct
LAQRTLH

SEQ ID NO: 129769 - protein, 7 aa, synthetic construct
LAQTPRM

SEQ ID NO: 129770 - protein, 7 aa, synthetic construct
LAQTYKM

SEQ ID NO: 129771 - protein, 7 aa, synthetic construct
LAQYIKA

SEQ ID NO: 129772 - protein, 7 aa, synthetic construct
LARDQKY

SEQ ID NO: 129773 - protein, 7 aa, synthetic construct
LARDRQL

SEQ ID NO: 129774 - protein, 7 aa, synthetic construct
LARDYSK

SEQ ID NO: 129775 - protein, 7 aa, synthetic construct
LAREGAR

SEQ ID NO: 129776 - protein, 7 aa, synthetic construct
LAREINR

SEQ ID NO: 129777 - protein, 7 aa, synthetic construct
LARENRV

SEQ ID NO: 129778 - protein, 7 aa, synthetic construct
LAREPAK

SEQ ID NO: 129779 - protein, 7 aa, synthetic construct
LARETMR

SEQ ID NO: 129780 - protein, 7 aa, synthetic construct
LAREVNK

SEQ ID NO: 129781 - protein, 7 aa, synthetic construct
LARGNRD

SEQ ID NO: 129782 - protein, 7 aa, synthetic construct
LARGNSY

SEQ ID NO: 129783 - protein, 7 aa, synthetic construct
LARGSFN

SEQ ID NO: 129784 - protein, 7 aa, synthetic construct
LARHDKI

SEQ ID NO: 129785 - protein, 7 aa, synthetic construct
LARHLKD

SEQ ID NO: 129786 - protein, 7 aa, synthetic construct
LARHPGM

SEQ ID NO: 129787 - protein, 7 aa, synthetic construct
LARHPTI

SEQ ID NO: 129788 - protein, 7 aa, synthetic construct
LARHQQV

SEQ ID NO: 129789 - protein, 7 aa, synthetic construct
LARIGNV

SEQ ID NO: 129790 - protein, 7 aa, synthetic construct
LARKDVI

SEQ ID NO: 129791 - protein, 7 aa, synthetic construct
LARKEYL

SEQ ID NO: 129792 - protein, 7 aa, synthetic construct
LARKGDY

SEQ ID NO: 129793 - protein, 7 aa, synthetic construct
LARLDKN

SEQ ID NO: 129794 - protein, 7 aa, synthetic construct
LARLKGE

SEQ ID NO: 129795 - protein, 7 aa, synthetic construct
LARNANA

SEQ ID NO: 129796 - protein, 7 aa, synthetic construct
LARNYKD

SEQ ID NO: 129797 - protein, 7 aa, synthetic construct
LARPLRE

SEQ ID NO: 129798 - protein, 7 aa, synthetic construct
LARPTMM

SEQ ID NO: 129799 - protein, 7 aa, synthetic construct
LARQLRE

SEQ ID NO: 129800 - protein, 7 aa, synthetic construct
LARSQDK

SEQ ID NO: 129801 - protein, 7 aa, synthetic construct
LARSSHV

SEQ ID NO: 129802 - protein, 7 aa, synthetic construct
LARTNAF

SEQ ID NO: 129803 - protein, 7 aa, synthetic construct
LARTSNY

SEQ ID NO: 129804 - protein, 7 aa, synthetic construct
LASGPRL

SEQ ID NO: 129805 - protein, 7 aa, synthetic construct
LASNTYR

SEQ ID NO: 129806 - protein, 7 aa, synthetic construct
LASRHTN

SEQ ID NO: 129807 - protein, 7 aa, synthetic construct
LATAHQR

SEQ ID NO: 129808 - protein, 7 aa, synthetic construct
LATGYTR

SEQ ID NO: 129809 - protein, 7 aa, synthetic construct
LATKLVT

SEQ ID NO: 129810 - protein, 7 aa, synthetic construct
LATKSDR

SEQ ID NO: 129811 - protein, 7 aa, synthetic construct
LATNRIY

SEQ ID NO: 129812 - protein, 7 aa, synthetic construct
LATQKSW

SEQ ID NO: 129813 - protein, 7 aa, synthetic construct
LATRMKD

SEQ ID NO: 129814 - protein, 7 aa, synthetic construct
LATYMER

SEQ ID NO: 129815 - protein, 7 aa, synthetic construct
LAVARST

SEQ ID NO: 129816 - protein, 7 aa, synthetic construct
LAVHHVK

SEQ ID NO: 129817 - protein, 7 aa, synthetic construct
LAYATAS

SEQ ID NO: 129818 - protein, 7 aa, synthetic construct
LAYGAKT

SEQ ID NO: 129819 - protein, 7 aa, synthetic construct
LAYGNKN

SEQ ID NO: 129820 - protein, 7 aa, synthetic construct
LAYGPHQ

SEQ ID NO: 129821 - protein, 7 aa, synthetic construct
LAYGPTM

SEQ ID NO: 129822 - protein, 7 aa, synthetic construct
LAYGSKI

SEQ ID NO: 129823 - protein, 7 aa, synthetic construct
LAYGSKN

SEQ ID NO: 129824 - protein, 7 aa, synthetic construct
LAYNGNK

SEQ ID NO: 129825 - protein, 7 aa, synthetic construct
LAYPQHN

SEQ ID NO: 129826 - protein, 7 aa, synthetic construct
LAYQAGK

SEQ ID NO: 129827 - protein, 7 aa, synthetic construct
LAYQTKV

SEQ ID NO: 129828 - protein, 7 aa, synthetic construct
LDANRFK

SEQ ID NO: 129829 - protein, 7 aa, synthetic construct
LDARGRS

SEQ ID NO: 129830 - protein, 7 aa, synthetic construct
LDARIGR

SEQ ID NO: 129831 - protein, 7 aa, synthetic construct
LDARVVK

SEQ ID NO: 129832 - protein, 7 aa, synthetic construct
LDASMRR

SEQ ID NO: 129833 - protein, 7 aa, synthetic construct
LDAYKKQ

SEQ ID NO: 129834 - protein, 7 aa, synthetic construct
LDFRAVI

SEQ ID NO: 129835 - protein, 7 aa, synthetic construct
LDGDRKR

SEQ ID NO: 129836 - protein, 7 aa, synthetic construct
LDGGYVS

SEQ ID NO: 129837 - protein, 7 aa, synthetic construct
LDGIKRL

SEQ ID NO: 129838 - protein, 7 aa, synthetic construct
LDGKMGR

SEQ ID NO: 129839 - protein, 7 aa, synthetic construct
LDGLKGR

SEQ ID NO: 129840 - protein, 7 aa, synthetic construct
LDGNRVR

SEQ ID NO: 129841 - protein, 7 aa, synthetic construct
LDHGMHR

SEQ ID NO: 129842 - protein, 7 aa, synthetic construct
LDHKLNR

SEQ ID NO: 129843 - protein, 7 aa, synthetic construct
LDIKNSR

SEQ ID NO: 129844 - protein, 7 aa, synthetic construct
LDIKRYG

SEQ ID NO: 129845 - protein, 7 aa, synthetic construct
LDIQKLR

SEQ ID NO: 129846 - protein, 7 aa, synthetic construct
LDKFMYK

SEQ ID NO: 129847 - protein, 7 aa, synthetic construct
LDKFQRG

SEQ ID NO: 129848 - protein, 7 aa, synthetic construct
LDKGHSR

SEQ ID NO: 129849 - protein, 7 aa, synthetic construct
LDKGLSR

SEQ ID NO: 129850 - protein, 7 aa, synthetic construct
LDKHQRN

SEQ ID NO: 129851 - protein, 7 aa, synthetic construct
LDKKGYF

SEQ ID NO: 129852 - protein, 7 aa, synthetic construct
LDKKYHV

SEQ ID NO: 129853 - protein, 7 aa, synthetic construct
LDKLSIR

SEQ ID NO: 129854 - protein, 7 aa, synthetic construct
LDKMYMK

SEQ ID NO: 129855 - protein, 7 aa, synthetic construct
LDKNSRY

SEQ ID NO: 129856 - protein, 7 aa, synthetic construct
LDKPQKY

SEQ ID NO: 129857 - protein, 7 aa, synthetic construct
LDKPRAY

SEQ ID NO: 129858 - protein, 7 aa, synthetic construct
LDKRAYN

SEQ ID NO: 129859 - protein, 7 aa, synthetic construct
LDKRQMF

SEQ ID NO: 129860 - protein, 7 aa, synthetic construct
LDKRYSL

SEQ ID NO: 129861 - protein, 7 aa, synthetic construct
LDKSGWK

SEQ ID NO: 129862 - protein, 7 aa, synthetic construct
LDKSMGR

SEQ ID NO: 129863 - protein, 7 aa, synthetic construct
LDKVSSR

SEQ ID NO: 129864 - protein, 7 aa, synthetic construct
LDKYGNK

SEQ ID NO: 129865 - protein, 7 aa, synthetic construct
LDKYKYT

SEQ ID NO: 129866 - protein, 7 aa, synthetic construct
LDKYNRM

SEQ ID NO: 129867 - protein, 7 aa, synthetic construct
LDLNRMK

SEQ ID NO: 129868 - protein, 7 aa, synthetic construct
LDMRAKA

SEQ ID NO: 129869 - protein, 7 aa, synthetic construct
LDMVRKQ

SEQ ID NO: 129870 - protein, 7 aa, synthetic construct
LDNFRKG

SEQ ID NO: 129871 - protein, 7 aa, synthetic construct
LDNMRQK

SEQ ID NO: 129872 - protein, 7 aa, synthetic construct
LDNMRRV

SEQ ID NO: 129873 - protein, 7 aa, synthetic construct
LDNRGRA

SEQ ID NO: 129874 - protein, 7 aa, synthetic construct
LDNRVFK

SEQ ID NO: 129875 - protein, 7 aa, synthetic construct
LDPGGRR

SEQ ID NO: 129876 - protein, 7 aa, synthetic construct
LDPHSIL

SEQ ID NO: 129877 - protein, 7 aa, synthetic construct
LDQKAHA

SEQ ID NO: 129878 - protein, 7 aa, synthetic construct
LDQKMSK

SEQ ID NO: 129879 - protein, 7 aa, synthetic construct
LDRGMNR

SEQ ID NO: 129880 - protein, 7 aa, synthetic construct
LDRKGIL

SEQ ID NO: 129881 - protein, 7 aa, synthetic construct
LDRKQNL

SEQ ID NO: 129882 - protein, 7 aa, synthetic construct
LDRKYTQ

SEQ ID NO: 129883 - protein, 7 aa, synthetic construct
LDRLINK

SEQ ID NO: 129884 - protein, 7 aa, synthetic construct
LDRMRGI

SEQ ID NO: 129885 - protein, 7 aa, synthetic construct
LDRMSKY

SEQ ID NO: 129886 - protein, 7 aa, synthetic construct
LDRPSLR

SEQ ID NO: 129887 - protein, 7 aa, synthetic construct
LDRRPLT

SEQ ID NO: 129888 - protein, 7 aa, synthetic construct
LDRRSLV

SEQ ID NO: 129889 - protein, 7 aa, synthetic construct
LDRTFLK

SEQ ID NO: 129890 - protein, 7 aa, synthetic construct
LDRTMFK

SEQ ID NO: 129891 - protein, 7 aa, synthetic construct
LDSKMHR

SEQ ID NO: 129892 - protein, 7 aa, synthetic construct
LDSNHST

SEQ ID NO: 129893 - protein, 7 aa, synthetic construct
LDSQRQK

SEQ ID NO: 129894 - protein, 7 aa, synthetic construct
LDTIQKK

SEQ ID NO: 129895 - protein, 7 aa, synthetic construct
LDTNPKR

SEQ ID NO: 129896 - protein, 7 aa, synthetic construct
LDTRGQR

SEQ ID NO: 129897 - protein, 7 aa, synthetic construct
LDTRPKN

SEQ ID NO: 129898 - protein, 7 aa, synthetic construct
LDTYHQR

SEQ ID NO: 129899 - protein, 7 aa, synthetic construct
LDVKGHR

SEQ ID NO: 129900 - protein, 7 aa, synthetic construct
LEAGRVR

SEQ ID NO: 129901 - protein, 7 aa, synthetic construct
LEAKRFQ

SEQ ID NO: 129902 - protein, 7 aa, synthetic construct
LEAKSYR

SEQ ID NO: 129903 - protein, 7 aa, synthetic construct
LEARRMS

SEQ ID NO: 129904 - protein, 7 aa, synthetic construct
LEARTLK

SEQ ID NO: 129905 - protein, 7 aa, synthetic construct
LEFKPRA

SEQ ID NO: 129906 - protein, 7 aa, synthetic construct
LEGIKRA

SEQ ID NO: 129907 - protein, 7 aa, synthetic construct
LEGKANR

SEQ ID NO: 129908 - protein, 7 aa, synthetic construct
LEGKFLK

SEQ ID NO: 129909 - protein, 7 aa, synthetic construct
LEGPTLK

SEQ ID NO: 129910 - protein, 7 aa, synthetic construct
LEGRPKS

SEQ ID NO: 129911 - protein, 7 aa, synthetic construct
LEGVRRN

SEQ ID NO: 129912 - protein, 7 aa, synthetic construct
LEHRLKN

SEQ ID NO: 129913 - protein, 7 aa, synthetic construct
LEISNRK

SEQ ID NO: 129914 - protein, 7 aa, synthetic construct
LEKFSRN

SEQ ID NO: 129915 - protein, 7 aa, synthetic construct
LEKGAVR

SEQ ID NO: 129916 - protein, 7 aa, synthetic construct
LEKGFAK

SEQ ID NO: 129917 - protein, 7 aa, synthetic construct
LEKGRSV

SEQ ID NO: 129918 - protein, 7 aa, synthetic construct
LEKGVNR

SEQ ID NO: 129919 - protein, 7 aa, synthetic construct
LEKKTYL

SEQ ID NO: 129920 - protein, 7 aa, synthetic construct
LEKKYTL

SEQ ID NO: 129921 - protein, 7 aa, synthetic construct
LEKMAMR

SEQ ID NO: 129922 - protein, 7 aa, synthetic construct
LEKMERK

SEQ ID NO: 129923 - protein, 7 aa, synthetic construct
LEKMQNR

SEQ ID NO: 129924 - protein, 7 aa, synthetic construct
LEKNIRY

SEQ ID NO: 129925 - protein, 7 aa, synthetic construct
LEKNYTR

SEQ ID NO: 129926 - protein, 7 aa, synthetic construct
LEKPRMY

SEQ ID NO: 129927 - protein, 7 aa, synthetic construct
LEKQATK

SEQ ID NO: 129928 - protein, 7 aa, synthetic construct
LEKQWGK

SEQ ID NO: 129929 - protein, 7 aa, synthetic construct
LEKRAIT

SEQ ID NO: 129930 - protein, 7 aa, synthetic construct
LEKRAMM

SEQ ID NO: 129931 - protein, 7 aa, synthetic construct
LEKRMFQ

SEQ ID NO: 129932 - protein, 7 aa, synthetic construct
LEKRMTV

SEQ ID NO: 129933 - protein, 7 aa, synthetic construct
LEKVSRF

SEQ ID NO: 129934 - protein, 7 aa, synthetic construct
LEKYKMQ

SEQ ID NO: 129935 - protein, 7 aa, synthetic construct
LEKYTQK

SEQ ID NO: 129936 - protein, 7 aa, synthetic construct
LELGGKK

SEQ ID NO: 129937 - protein, 7 aa, synthetic construct
LELKPRS

SEQ ID NO: 129938 - protein, 7 aa, synthetic construct
LEMKARL

SEQ ID NO: 129939 - protein, 7 aa, synthetic construct
LEMKSKF

SEQ ID NO: 129940 - protein, 7 aa, synthetic construct
LENHTYR

SEQ ID NO: 129941 - protein, 7 aa, synthetic construct
LENRQRN

SEQ ID NO: 129942 - protein, 7 aa, synthetic construct
LENRSAK

SEQ ID NO: 129943 - protein, 7 aa, synthetic construct
LEPRPRS

SEQ ID NO: 129944 - protein, 7 aa, synthetic construct
LEQKLKY

SEQ ID NO: 129945 - protein, 7 aa, synthetic construct
LEQKPSR

SEQ ID NO: 129946 - protein, 7 aa, synthetic construct
LEQTKKY

SEQ ID NO: 129947 - protein, 7 aa, synthetic construct
LERALTK

SEQ ID NO: 129948 - protein, 7 aa, synthetic construct
LERAQAR

SEQ ID NO: 129949 - protein, 7 aa, synthetic construct
LERGMKI

SEQ ID NO: 129950 - protein, 7 aa, synthetic construct
LERIKHA

SEQ ID NO: 129951 - protein, 7 aa, synthetic construct
LERKHQA

SEQ ID NO: 129952 - protein, 7 aa, synthetic construct
LERMMKS

SEQ ID NO: 129953 - protein, 7 aa, synthetic construct
LERMRAA

SEQ ID NO: 129954 - protein, 7 aa, synthetic construct
LERNMLK

SEQ ID NO: 129955 - protein, 7 aa, synthetic construct
LERQIGR

SEQ ID NO: 129956 - protein, 7 aa, synthetic construct
LERQPRN

SEQ ID NO: 129957 - protein, 7 aa, synthetic construct
LERQQAR

SEQ ID NO: 129958 - protein, 7 aa, synthetic construct
LERQSLK

SEQ ID NO: 129959 - protein, 7 aa, synthetic construct
LERRQNV

SEQ ID NO: 129960 - protein, 7 aa, synthetic construct
LERSVRP

SEQ ID NO: 129961 - protein, 7 aa, synthetic construct
LERTQSR

SEQ ID NO: 129962 - protein, 7 aa, synthetic construct
LERVHKN

SEQ ID NO: 129963 - protein, 7 aa, synthetic construct
LERVKHS

SEQ ID NO: 129964 - protein, 7 aa, synthetic construct
LERVLRG

SEQ ID NO: 129965 - protein, 7 aa, synthetic construct
LERVPNK

SEQ ID NO: 129966 - protein, 7 aa, synthetic construct
LESAKRN

SEQ ID NO: 129967 - protein, 7 aa, synthetic construct
LESGVRW

SEQ ID NO: 129968 - protein, 7 aa, synthetic construct
LESKLSR

SEQ ID NO: 129969 - protein, 7 aa, synthetic construct
LESKRSY

SEQ ID NO: 129970 - protein, 7 aa, synthetic construct
LESSTHK

SEQ ID NO: 129971 - protein, 7 aa, synthetic construct
LETAAKR

SEQ ID NO: 129972 - protein, 7 aa, synthetic construct
LETALKR

SEQ ID NO: 129973 - protein, 7 aa, synthetic construct
LETARLK

SEQ ID NO: 129974 - protein, 7 aa, synthetic construct
LETNYKK

SEQ ID NO: 129975 - protein, 7 aa, synthetic construct
LETVKRL

SEQ ID NO: 129976 - protein, 7 aa, synthetic construct
LEYKSNK

SEQ ID NO: 129977 - protein, 7 aa, synthetic construct
LEYTHTR

SEQ ID NO: 129978 - protein, 7 aa, synthetic construct
LFAKGDR

SEQ ID NO: 129979 - protein, 7 aa, synthetic construct
LFAQKQN

SEQ ID NO: 129980 - protein, 7 aa, synthetic construct
LFAQNKN

SEQ ID NO: 129981 - protein, 7 aa, synthetic construct
LFDERSP

SEQ ID NO: 129982 - protein, 7 aa, synthetic construct
LFGKERI

SEQ ID NO: 129983 - protein, 7 aa, synthetic construct
LFHSKAS

SEQ ID NO: 129984 - protein, 7 aa, synthetic construct
LFKESLR

SEQ ID NO: 129985 - protein, 7 aa, synthetic construct
LFKESMR

SEQ ID NO: 129986 - protein, 7 aa, synthetic construct
LFKGARD

SEQ ID NO: 129987 - protein, 7 aa, synthetic construct
LFKGISS

SEQ ID NO: 129988 - protein, 7 aa, synthetic construct
LFKHTEK

SEQ ID NO: 129989 - protein, 7 aa, synthetic construct
LFKTHKD

SEQ ID NO: 129990 - protein, 7 aa, synthetic construct
LFNHKAN

SEQ ID NO: 129991 - protein, 7 aa, synthetic construct
LFNHQKQ

SEQ ID NO: 129992 - protein, 7 aa, synthetic construct
LFNRDNK

SEQ ID NO: 129993 - protein, 7 aa, synthetic construct
LFPKGTM

SEQ ID NO: 129994 - protein, 7 aa, synthetic construct
LFQGSKQ

SEQ ID NO: 129995 - protein, 7 aa, synthetic construct
LFQSKIA

SEQ ID NO: 129996 - protein, 7 aa, synthetic construct
LFRAEKP

SEQ ID NO: 129997 - protein, 7 aa, synthetic construct
LFRAKEG

SEQ ID NO: 129998 - protein, 7 aa, synthetic construct
LFRTTQG

SEQ ID NO: 129999 - protein, 7 aa, synthetic construct
LFSAKNQ

SEQ ID NO: 130000 - protein, 7 aa, synthetic construct
LFSKDKM

SEQ ID NO: 130001 - protein, 7 aa, synthetic construct
LGAAFAK

SEQ ID NO: 130002 - protein, 7 aa, synthetic construct
LGAAKIT

SEQ ID NO: 130003 - protein, 7 aa, synthetic construct
LGAHQPR

SEQ ID NO: 130004 - protein, 7 aa, synthetic construct
LGAIRKD

SEQ ID NO: 130005 - protein, 7 aa, synthetic construct
LGAQRSF

SEQ ID NO: 130006 - protein, 7 aa, synthetic construct
LGARHMS

SEQ ID NO: 130007 - protein, 7 aa, synthetic construct
LGARLPT

SEQ ID NO: 130008 - protein, 7 aa, synthetic construct
LGAYTKI

SEQ ID NO: 130009 - protein, 7 aa, synthetic construct
LGDKQMR

SEQ ID NO: 130010 - protein, 7 aa, synthetic construct
LGDLKHR

SEQ ID NO: 130011 - protein, 7 aa, synthetic construct
LGDWMGS

SEQ ID NO: 130012 - protein, 7 aa, synthetic construct
LGEGLKR

SEQ ID NO: 130013 - protein, 7 aa, synthetic construct
LGELGKK

SEQ ID NO: 130014 - protein, 7 aa, synthetic construct
LGELRRQ

SEQ ID NO: 130015 - protein, 7 aa, synthetic construct
LGERTRA

SEQ ID NO: 130016 - protein, 7 aa, synthetic construct
LGFHQKV

SEQ ID NO: 130017 - protein, 7 aa, synthetic construct
LGFNNKI

SEQ ID NO: 130018 - protein, 7 aa, synthetic construct
LGGASYK

SEQ ID NO: 130019 - protein, 7 aa, synthetic construct
LGGFMQK

SEQ ID NO: 130020 - protein, 7 aa, synthetic construct
LGGFSNK

SEQ ID NO: 130021 - protein, 7 aa, synthetic construct
LGGHFKG

SEQ ID NO: 130022 - protein, 7 aa, synthetic construct
LGGHQVK

SEQ ID NO: 130023 - protein, 7 aa, synthetic construct
LGGHRLQ

SEQ ID NO: 130024 - protein, 7 aa, synthetic construct
LGGHRQI

SEQ ID NO: 130025 - protein, 7 aa, synthetic construct
LGGHSIK

SEQ ID NO: 130026 - protein, 7 aa, synthetic construct
LGGHVKL

SEQ ID NO: 130027 - protein, 7 aa, synthetic construct
LGGKMYV

SEQ ID NO: 130028 - protein, 7 aa, synthetic construct
LGGKVHT

SEQ ID NO: 130029 - protein, 7 aa, synthetic construct
LGGKYNT

SEQ ID NO: 130030 - protein, 7 aa, synthetic construct
LGGNHMK

SEQ ID NO: 130031 - protein, 7 aa, synthetic construct
LGGNPGK

SEQ ID NO: 130032 - protein, 7 aa, synthetic construct
LGGNSGR

SEQ ID NO: 130033 - protein, 7 aa, synthetic construct
LGGPRVH

SEQ ID NO: 130034 - protein, 7 aa, synthetic construct
LGGQQTR

SEQ ID NO: 130035 - protein, 7 aa, synthetic construct
LGGQWTK

SEQ ID NO: 130036 - protein, 7 aa, synthetic construct
LGGRVMQ

SEQ ID NO: 130037 - protein, 7 aa, synthetic construct
LGGSGRN

SEQ ID NO: 130038 - protein, 7 aa, synthetic construct
LGGSNLR

SEQ ID NO: 130039 - protein, 7 aa, synthetic construct
LGGTGGR

SEQ ID NO: 130040 - protein, 7 aa, synthetic construct
LGGYIPK

SEQ ID NO: 130041 - protein, 7 aa, synthetic construct
LGHGPKN

SEQ ID NO: 130042 - protein, 7 aa, synthetic construct
LGHHRLQ

SEQ ID NO: 130043 - protein, 7 aa, synthetic construct
LGHIGVK

SEQ ID NO: 130044 - protein, 7 aa, synthetic construct
LGHIKNT

SEQ ID NO: 130045 - protein, 7 aa, synthetic construct
LGHISGK

SEQ ID NO: 130046 - protein, 7 aa, synthetic construct
LGHKESK

SEQ ID NO: 130047 - protein, 7 aa, synthetic construct
LGHKGPY

SEQ ID NO: 130048 - protein, 7 aa, synthetic construct
LGHKQQL

SEQ ID NO: 130049 - protein, 7 aa, synthetic construct
LGHMKLV

SEQ ID NO: 130050 - protein, 7 aa, synthetic construct
LGHQHKG

SEQ ID NO: 130051 - protein, 7 aa, synthetic construct
LGHRLGA

SEQ ID NO: 130052 - protein, 7 aa, synthetic construct
LGHSKFM

SEQ ID NO: 130053 - protein, 7 aa, synthetic construct
LGHSLKM

SEQ ID NO: 130054 - protein, 7 aa, synthetic construct
LGHSLVK

SEQ ID NO: 130055 - protein, 7 aa, synthetic construct
LGHTMRS

SEQ ID NO: 130056 - protein, 7 aa, synthetic construct
LGHVKIQ

SEQ ID NO: 130057 - protein, 7 aa, synthetic construct
LGHVMSK

SEQ ID NO: 130058 - protein, 7 aa, synthetic construct
LGIHTSK

SEQ ID NO: 130059 - protein, 7 aa, synthetic construct
LGIQSQR

SEQ ID NO: 130060 - protein, 7 aa, synthetic construct
LGIYNKA

SEQ ID NO: 130061 - protein, 7 aa, synthetic construct
LGKANYQ

SEQ ID NO: 130062 - protein, 7 aa, synthetic construct
LGKFGSN

SEQ ID NO: 130063 - protein, 7 aa, synthetic construct
LGKFHVP

SEQ ID NO: 130064 - protein, 7 aa, synthetic construct
LGKFQIG

SEQ ID NO: 130065 - protein, 7 aa, synthetic construct
LGKFSAM

SEQ ID NO: 130066 - protein, 7 aa, synthetic construct
LGKGMYV

SEQ ID NO: 130067 - protein, 7 aa, synthetic construct
LGKGYLS

SEQ ID NO: 130068 - protein, 7 aa, synthetic construct
LGKGYQL

SEQ ID NO: 130069 - protein, 7 aa, synthetic construct
LGKHANF

SEQ ID NO: 130070 - protein, 7 aa, synthetic construct
LGKHFSS

SEQ ID NO: 130071 - protein, 7 aa, synthetic construct
LGKILGV

SEQ ID NO: 130072 - protein, 7 aa, synthetic construct
LGKISHY

SEQ ID NO: 130073 - protein, 7 aa, synthetic construct
LGKMYSA

SEQ ID NO: 130074 - protein, 7 aa, synthetic construct
LGKNIYA

SEQ ID NO: 130075 - protein, 7 aa, synthetic construct
LGKNRND

SEQ ID NO: 130076 - protein, 7 aa, synthetic construct
LGKPPYM

SEQ ID NO: 130077 - protein, 7 aa, synthetic construct
LGKPVVM

SEQ ID NO: 130078 - protein, 7 aa, synthetic construct
LGKQPRD

SEQ ID NO: 130079 - protein, 7 aa, synthetic construct
LGKQRND

SEQ ID NO: 130080 - protein, 7 aa, synthetic construct
LGKQSFP

SEQ ID NO: 130081 - protein, 7 aa, synthetic construct
LGKRDIA

SEQ ID NO: 130082 - protein, 7 aa, synthetic construct
LGKRETF

SEQ ID NO: 130083 - protein, 7 aa, synthetic construct
LGKRQIE

SEQ ID NO: 130084 - protein, 7 aa, synthetic construct
LGKRVAD

SEQ ID NO: 130085 - protein, 7 aa, synthetic construct
LGKSENK

SEQ ID NO: 130086 - protein, 7 aa, synthetic construct
LGKSHFP

SEQ ID NO: 130087 - protein, 7 aa, synthetic construct
LGKSNTH

SEQ ID NO: 130088 - protein, 7 aa, synthetic construct
LGKTHYN

SEQ ID NO: 130089 - protein, 7 aa, synthetic construct
LGKTRDS

SEQ ID NO: 130090 - protein, 7 aa, synthetic construct
LGKYAMV

SEQ ID NO: 130091 - protein, 7 aa, synthetic construct
LGKYEKT

SEQ ID NO: 130092 - protein, 7 aa, synthetic construct
LGKYGAV

SEQ ID NO: 130093 - protein, 7 aa, synthetic construct
LGKYISA

SEQ ID NO: 130094 - protein, 7 aa, synthetic construct
LGKYVPL

SEQ ID NO: 130095 - protein, 7 aa, synthetic construct
LGKYVST

SEQ ID NO: 130096 - protein, 7 aa, synthetic construct
LGLGHKI

SEQ ID NO: 130097 - protein, 7 aa, synthetic construct
LGLHVKT

SEQ ID NO: 130098 - protein, 7 aa, synthetic construct
LGLKSTY

SEQ ID NO: 130099 - protein, 7 aa, synthetic construct
LGLQAKY

SEQ ID NO: 130100 - protein, 7 aa, synthetic construct
LGMGANR

SEQ ID NO: 130101 - protein, 7 aa, synthetic construct
LGMNLNR

SEQ ID NO: 130102 - protein, 7 aa, synthetic construct
LGMNMRQ

SEQ ID NO: 130103 - protein, 7 aa, synthetic construct
LGMPPKN

SEQ ID NO: 130104 - protein, 7 aa, synthetic construct
LGMTSKY

SEQ ID NO: 130105 - protein, 7 aa, synthetic construct
LGNGPRN

SEQ ID NO: 130106 - protein, 7 aa, synthetic construct
LGNKPPF

SEQ ID NO: 130107 - protein, 7 aa, synthetic construct
LGNQAVR

SEQ ID NO: 130108 - protein, 7 aa, synthetic construct
LGNRVLT

SEQ ID NO: 130109 - protein, 7 aa, synthetic construct
LGNSIIR

SEQ ID NO: 130110 - protein, 7 aa, synthetic construct
LGNVHKH

SEQ ID NO: 130111 - protein, 7 aa, synthetic construct
LGNVHPR

SEQ ID NO: 130112 - protein, 7 aa, synthetic construct
LGPKLAI

SEQ ID NO: 130113 - protein, 7 aa, synthetic construct
LGPNLRL

SEQ ID NO: 130114 - protein, 7 aa, synthetic construct
LGPPMQR

SEQ ID NO: 130115 - protein, 7 aa, synthetic construct
LGPQDKR

SEQ ID NO: 130116 - protein, 7 aa, synthetic construct
LGPTRHQ

SEQ ID NO: 130117 - protein, 7 aa, synthetic construct
LGQAKKD

SEQ ID NO: 130118 - protein, 7 aa, synthetic construct
LGQGQFK

SEQ ID NO: 130119 - protein, 7 aa, synthetic construct
LGQHKTF

SEQ ID NO: 130120 - protein, 7 aa, synthetic construct
LGQHTGR

SEQ ID NO: 130121 - protein, 7 aa, synthetic construct
LGQKILH

SEQ ID NO: 130122 - protein, 7 aa, synthetic construct
LGQKLYT

SEQ ID NO: 130123 - protein, 7 aa, synthetic construct
LGQMLSR

SEQ ID NO: 130124 - protein, 7 aa, synthetic construct
LGQMRSM

SEQ ID NO: 130125 - protein, 7 aa, synthetic construct
LGQNNTR

SEQ ID NO: 130126 - protein, 7 aa, synthetic construct
LGQQANR

SEQ ID NO: 130127 - protein, 7 aa, synthetic construct
LGQSAPR

SEQ ID NO: 130128 - protein, 7 aa, synthetic construct
LGQSLQR

SEQ ID NO: 130129 - protein, 7 aa, synthetic construct
LGQSMYK

SEQ ID NO: 130130 - protein, 7 aa, synthetic construct
LGQSVQR

SEQ ID NO: 130131 - protein, 7 aa, synthetic construct
LGQSYKS

SEQ ID NO: 130132 - protein, 7 aa, synthetic construct
LGQTSNR

SEQ ID NO: 130133 - protein, 7 aa, synthetic construct
LGRAVNA

SEQ ID NO: 130134 - protein, 7 aa, synthetic construct
LGREPMK

SEQ ID NO: 130135 - protein, 7 aa, synthetic construct
LGRFIQQ

SEQ ID NO: 130136 - protein, 7 aa, synthetic construct
LGRGISN

SEQ ID NO: 130137 - protein, 7 aa, synthetic construct
LGRGQIM

SEQ ID NO: 130138 - protein, 7 aa, synthetic construct
LGRHTLS

SEQ ID NO: 130139 - protein, 7 aa, synthetic construct
LGRILAS

SEQ ID NO: 130140 - protein, 7 aa, synthetic construct
LGRIPNV

SEQ ID NO: 130141 - protein, 7 aa, synthetic construct
LGRITSG

SEQ ID NO: 130142 - protein, 7 aa, synthetic construct
LGRMIRE

SEQ ID NO: 130143 - protein, 7 aa, synthetic construct
LGRMKPD

SEQ ID NO: 130144 - protein, 7 aa, synthetic construct
LGRMMNA

SEQ ID NO: 130145 - protein, 7 aa, synthetic construct
LGRMTAS

SEQ ID NO: 130146 - protein, 7 aa, synthetic construct
LGRNITG

SEQ ID NO: 130147 - protein, 7 aa, synthetic construct
LGRNVLN

SEQ ID NO: 130148 - protein, 7 aa, synthetic construct
LGRPDKS

SEQ ID NO: 130149 - protein, 7 aa, synthetic construct
LGRPQPI

SEQ ID NO: 130150 - protein, 7 aa, synthetic construct
LGRQDTK

SEQ ID NO: 130151 - protein, 7 aa, synthetic construct
LGRQHLG

SEQ ID NO: 130152 - protein, 7 aa, synthetic construct
LGRQIMA

SEQ ID NO: 130153 - protein, 7 aa, synthetic construct
LGRQPTF

SEQ ID NO: 130154 - protein, 7 aa, synthetic construct
LGRQPYS

SEQ ID NO: 130155 - protein, 7 aa, synthetic construct
LGRQQNL

SEQ ID NO: 130156 - protein, 7 aa, synthetic construct
LGRQQTI

SEQ ID NO: 130157 - protein, 7 aa, synthetic construct
LGRSDIR

SEQ ID NO: 130158 - protein, 7 aa, synthetic construct
LGRSQVI

SEQ ID NO: 130159 - protein, 7 aa, synthetic construct
LGRSTGN

SEQ ID NO: 130160 - protein, 7 aa, synthetic construct
LGRTKEM

SEQ ID NO: 130161 - protein, 7 aa, synthetic construct
LGRTSIV

SEQ ID NO: 130162 - protein, 7 aa, synthetic construct
LGRTTNS

SEQ ID NO: 130163 - protein, 7 aa, synthetic construct
LGRTTQN

SEQ ID NO: 130164 - protein, 7 aa, synthetic construct
LGRVDRS

SEQ ID NO: 130165 - protein, 7 aa, synthetic construct
LGRVDTK

SEQ ID NO: 130166 - protein, 7 aa, synthetic construct
LGRVTNI

SEQ ID NO: 130167 - protein, 7 aa, synthetic construct
LGRVTQG

SEQ ID NO: 130168 - protein, 7 aa, synthetic construct
LGSGSHK

SEQ ID NO: 130169 - protein, 7 aa, synthetic construct
LGSIKYG

SEQ ID NO: 130170 - protein, 7 aa, synthetic construct
LGSINRM

SEQ ID NO: 130171 - protein, 7 aa, synthetic construct
LGSKMYG

SEQ ID NO: 130172 - protein, 7 aa, synthetic construct
LGSLRHA

SEQ ID NO: 130173 - protein, 7 aa, synthetic construct
LGSMIRA

SEQ ID NO: 130174 - protein, 7 aa, synthetic construct
LGSNFSR

SEQ ID NO: 130175 - protein, 7 aa, synthetic construct
LGSRGFP

SEQ ID NO: 130176 - protein, 7 aa, synthetic construct
LGSRHVI

SEQ ID NO: 130177 - protein, 7 aa, synthetic construct
LGSRKDM

SEQ ID NO: 130178 - protein, 7 aa, synthetic construct
LGSSHAR

SEQ ID NO: 130179 - protein, 7 aa, synthetic construct
LGSVKYV

SEQ ID NO: 130180 - protein, 7 aa, synthetic construct
LGSVSHK

SEQ ID NO: 130181 - protein, 7 aa, synthetic construct
LGSYALK

SEQ ID NO: 130182 - protein, 7 aa, synthetic construct
LGSYKSA

SEQ ID NO: 130183 - protein, 7 aa, synthetic construct
LGSYMSK

SEQ ID NO: 130184 - protein, 7 aa, synthetic construct
LGTGTFR

SEQ ID NO: 130185 - protein, 7 aa, synthetic construct
LGTGYTR

SEQ ID NO: 130186 - protein, 7 aa, synthetic construct
LGTHSIR

SEQ ID NO: 130187 - protein, 7 aa, synthetic construct
LGTKDRL

SEQ ID NO: 130188 - protein, 7 aa, synthetic construct
LGTLRPI

SEQ ID NO: 130189 - protein, 7 aa, synthetic construct
LGTQEKN

SEQ ID NO: 130190 - protein, 7 aa, synthetic construct
LGTTHVR

SEQ ID NO: 130191 - protein, 7 aa, synthetic construct
LGTYIKV

SEQ ID NO: 130192 - protein, 7 aa, synthetic construct
LGTYKLS

SEQ ID NO: 130193 - protein, 7 aa, synthetic construct
LGTYMSK

SEQ ID NO: 130194 - protein, 7 aa, synthetic construct
LGVGHVR

SEQ ID NO: 130195 - protein, 7 aa, synthetic construct
LGVMQQR

SEQ ID NO: 130196 - protein, 7 aa, synthetic construct
LGYGSST

SEQ ID NO: 130197 - protein, 7 aa, synthetic construct
LHAGNAR

SEQ ID NO: 130198 - protein, 7 aa, synthetic construct
LHAGTAR

SEQ ID NO: 130199 - protein, 7 aa, synthetic construct
LHAKASY

SEQ ID NO: 130200 - protein, 7 aa, synthetic construct
LHALQKN

SEQ ID NO: 130201 - protein, 7 aa, synthetic construct
LHAMTKN

SEQ ID NO: 130202 - protein, 7 aa, synthetic construct
LHAQIKN

SEQ ID NO: 130203 - protein, 7 aa, synthetic construct
LHAQKPF

SEQ ID NO: 130204 - protein, 7 aa, synthetic construct
LHAQSTR

SEQ ID NO: 130205 - protein, 7 aa, synthetic construct
LHARPTQ

SEQ ID NO: 130206 - protein, 7 aa, synthetic construct
LHASQNR

SEQ ID NO: 130207 - protein, 7 aa, synthetic construct
LHASQRV

SEQ ID NO: 130208 - protein, 7 aa, synthetic construct
LHATKFT

SEQ ID NO: 130209 - protein, 7 aa, synthetic construct
LHATKYM

SEQ ID NO: 130210 - protein, 7 aa, synthetic construct
LHDRVRS

SEQ ID NO: 130211 - protein, 7 aa, synthetic construct
LHERMKM

SEQ ID NO: 130212 - protein, 7 aa, synthetic construct
LHGANTK

SEQ ID NO: 130213 - protein, 7 aa, synthetic construct
LHGDRKG

SEQ ID NO: 130214 - protein, 7 aa, synthetic construct
LHGGLAK

SEQ ID NO: 130215 - protein, 7 aa, synthetic construct
LHGGPKL

SEQ ID NO: 130216 - protein, 7 aa, synthetic construct
LHGGRTY

SEQ ID NO: 130217 - protein, 7 aa, synthetic construct
LHGKFIN

SEQ ID NO: 130218 - protein, 7 aa, synthetic construct
LHGKPFV

SEQ ID NO: 130219 - protein, 7 aa, synthetic construct
LHGKQTF

SEQ ID NO: 130220 - protein, 7 aa, synthetic construct
LHGKTER

SEQ ID NO: 130221 - protein, 7 aa, synthetic construct
LHGKVFN

SEQ ID NO: 130222 - protein, 7 aa, synthetic construct
LHGLVGK

SEQ ID NO: 130223 - protein, 7 aa, synthetic construct
LHGMGKS

SEQ ID NO: 130224 - protein, 7 aa, synthetic construct
LHGNGLK

SEQ ID NO: 130225 - protein, 7 aa, synthetic construct
LHGNPRA

SEQ ID NO: 130226 - protein, 7 aa, synthetic construct
LHGSKLM

SEQ ID NO: 130227 - protein, 7 aa, synthetic construct
LHGSMKN

SEQ ID NO: 130228 - protein, 7 aa, synthetic construct
LHGSNNK

SEQ ID NO: 130229 - protein, 7 aa, synthetic construct
LHGTAQR

SEQ ID NO: 130230 - protein, 7 aa, synthetic construct
LHGVLGK

SEQ ID NO: 130231 - protein, 7 aa, synthetic construct
LHHHRDI

SEQ ID NO: 130232 - protein, 7 aa, synthetic construct
LHHKINA

SEQ ID NO: 130233 - protein, 7 aa, synthetic construct
LHIKHVN

SEQ ID NO: 130234 - protein, 7 aa, synthetic construct
LHKDIPK

SEQ ID NO: 130235 - protein, 7 aa, synthetic construct
LHKFPAS

SEQ ID NO: 130236 - protein, 7 aa, synthetic construct
LHKGIMV

SEQ ID NO: 130237 - protein, 7 aa, synthetic construct
LHKGVLM

SEQ ID NO: 130238 - protein, 7 aa, synthetic construct
LHKHLGA

SEQ ID NO: 130239 - protein, 7 aa, synthetic construct
LHKHNVI

SEQ ID NO: 130240 - protein, 7 aa, synthetic construct
LHKHQPS

SEQ ID NO: 130241 - protein, 7 aa, synthetic construct
LHKHSSS

SEQ ID NO: 130242 - protein, 7 aa, synthetic construct
LHKIQYG

SEQ ID NO: 130243 - protein, 7 aa, synthetic construct
LHKKTID

SEQ ID NO: 130244 - protein, 7 aa, synthetic construct
LHKLGPM

SEQ ID NO: 130245 - protein, 7 aa, synthetic construct
LHKLSGI

SEQ ID NO: 130246 - protein, 7 aa, synthetic construct
LHKMVAH

SEQ ID NO: 130247 - protein, 7 aa, synthetic construct
LHKNEGR

SEQ ID NO: 130248 - protein, 7 aa, synthetic construct
LHKNETR

SEQ ID NO: 130249 - protein, 7 aa, synthetic construct
LHKNQIT

SEQ ID NO: 130250 - protein, 7 aa, synthetic construct
LHKPGMS

SEQ ID NO: 130251 - protein, 7 aa, synthetic construct
LHKPIQI

SEQ ID NO: 130252 - protein, 7 aa, synthetic construct
LHKPPLP

SEQ ID NO: 130253 - protein, 7 aa, synthetic construct
LHKPSFG

SEQ ID NO: 130254 - protein, 7 aa, synthetic construct
LHKQYIG

SEQ ID NO: 130255 - protein, 7 aa, synthetic construct
LHKVQAY

SEQ ID NO: 130256 - protein, 7 aa, synthetic construct
LHLGKVT

SEQ ID NO: 130257 - protein, 7 aa, synthetic construct
LHLGSAR

SEQ ID NO: 130258 - protein, 7 aa, synthetic construct
LHLTKNM

SEQ ID NO: 130259 - protein, 7 aa, synthetic construct
LHMAKPI

SEQ ID NO: 130260 - protein, 7 aa, synthetic construct
LHMKYAG

SEQ ID NO: 130261 - protein, 7 aa, synthetic construct
LHMSAGK

SEQ ID NO: 130262 - protein, 7 aa, synthetic construct
LHMSASK

SEQ ID NO: 130263 - protein, 7 aa, synthetic construct
LHMSNAK

SEQ ID NO: 130264 - protein, 7 aa, synthetic construct
LHMSNGR

SEQ ID NO: 130265 - protein, 7 aa, synthetic construct
LHNASRP

SEQ ID NO: 130266 - protein, 7 aa, synthetic construct
LHNHIRS

SEQ ID NO: 130267 - protein, 7 aa, synthetic construct
LHNHSKT

SEQ ID NO: 130268 - protein, 7 aa, synthetic construct
LHNISNR

SEQ ID NO: 130269 - protein, 7 aa, synthetic construct
LHNKAMY

SEQ ID NO: 130270 - protein, 7 aa, synthetic construct
LHNKIVS

SEQ ID NO: 130271 - protein, 7 aa, synthetic construct
LHNKTPY

SEQ ID NO: 130272 - protein, 7 aa, synthetic construct
LHNKVDR

SEQ ID NO: 130273 - protein, 7 aa, synthetic construct
LHNKVGS

SEQ ID NO: 130274 - protein, 7 aa, synthetic construct
LHNMIKN

SEQ ID NO: 130275 - protein, 7 aa, synthetic construct
LHNPKLM

SEQ ID NO: 130276 - protein, 7 aa, synthetic construct
LHNPKYS

SEQ ID NO: 130277 - protein, 7 aa, synthetic construct
LHNQPMD

SEQ ID NO: 130278 - protein, 7 aa, synthetic construct
LHNQPQD

SEQ ID NO: 130279 - protein, 7 aa, synthetic construct
LHNQQKN

SEQ ID NO: 130280 - protein, 7 aa, synthetic construct
LHNQTAR

SEQ ID NO: 130281 - protein, 7 aa, synthetic construct
LHNQTIR

SEQ ID NO: 130282 - protein, 7 aa, synthetic construct
LHNRQNA

SEQ ID NO: 130283 - protein, 7 aa, synthetic construct
LHNSQFK

SEQ ID NO: 130284 - protein, 7 aa, synthetic construct
LHNSVPR

SEQ ID NO: 130285 - protein, 7 aa, synthetic construct
LHNTMMK

SEQ ID NO: 130286 - protein, 7 aa, synthetic construct
LHNVQAK

SEQ ID NO: 130287 - protein, 7 aa, synthetic construct
LHNVRMP

SEQ ID NO: 130288 - protein, 7 aa, synthetic construct
LHPGIKM

SEQ ID NO: 130289 - protein, 7 aa, synthetic construct
LHPKAHM

SEQ ID NO: 130290 - protein, 7 aa, synthetic construct
LHPRGNL

SEQ ID NO: 130291 - protein, 7 aa, synthetic construct
LHPRHAV

SEQ ID NO: 130292 - protein, 7 aa, synthetic construct
LHPRISS

SEQ ID NO: 130293 - protein, 7 aa, synthetic construct
LHPRTSQ

SEQ ID NO: 130294 - protein, 7 aa, synthetic construct
LHPSHKN

SEQ ID NO: 130295 - protein, 7 aa, synthetic construct
LHPYTKQ

SEQ ID NO: 130296 - protein, 7 aa, synthetic construct
LHQAMSR

SEQ ID NO: 130297 - protein, 7 aa, synthetic construct
LHQKSTL

SEQ ID NO: 130298 - protein, 7 aa, synthetic construct
LHQMQNR

SEQ ID NO: 130299 - protein, 7 aa, synthetic construct
LHQMVSK

SEQ ID NO: 130300 - protein, 7 aa, synthetic construct
LHQNRFS

SEQ ID NO: 130301 - protein, 7 aa, synthetic construct
LHQQNGR

SEQ ID NO: 130302 - protein, 7 aa, synthetic construct
LHQRQGL

SEQ ID NO: 130303 - protein, 7 aa, synthetic construct
LHQSMRT

SEQ ID NO: 130304 - protein, 7 aa, synthetic construct
LHQYKHV

SEQ ID NO: 130305 - protein, 7 aa, synthetic construct
LHRGAVA

SEQ ID NO: 130306 - protein, 7 aa, synthetic construct
LHRGPQS

SEQ ID NO: 130307 - protein, 7 aa, synthetic construct
LHRGTVV

SEQ ID NO: 130308 - protein, 7 aa, synthetic construct
LHRLASG

SEQ ID NO: 130309 - protein, 7 aa, synthetic construct
LHRNIGV

SEQ ID NO: 130310 - protein, 7 aa, synthetic construct
LHRSTPS

SEQ ID NO: 130311 - protein, 7 aa, synthetic construct
LHRSVST

SEQ ID NO: 130312 - protein, 7 aa, synthetic construct
LHRTQGM

SEQ ID NO: 130313 - protein, 7 aa, synthetic construct
LHRTVSA

SEQ ID NO: 130314 - protein, 7 aa, synthetic construct
LHRVQYE

SEQ ID NO: 130315 - protein, 7 aa, synthetic construct
LHRVVAA

SEQ ID NO: 130316 - protein, 7 aa, synthetic construct
LHSGIAR

SEQ ID NO: 130317 - protein, 7 aa, synthetic construct
LHSGIRM

SEQ ID NO: 130318 - protein, 7 aa, synthetic construct
LHSGQSR

SEQ ID NO: 130319 - protein, 7 aa, synthetic construct
LHSGSGK

SEQ ID NO: 130320 - protein, 7 aa, synthetic construct
LHSGVAR

SEQ ID NO: 130321 - protein, 7 aa, synthetic construct
LHSGYAK

SEQ ID NO: 130322 - protein, 7 aa, synthetic construct
LHSKLNI

SEQ ID NO: 130323 - protein, 7 aa, synthetic construct
LHSLIKA

SEQ ID NO: 130324 - protein, 7 aa, synthetic construct
LHSMPKQ

SEQ ID NO: 130325 - protein, 7 aa, synthetic construct
LHSNGNR

SEQ ID NO: 130326 - protein, 7 aa, synthetic construct
LHSNIKS

SEQ ID NO: 130327 - protein, 7 aa, synthetic construct
LHSNLMK

SEQ ID NO: 130328 - protein, 7 aa, synthetic construct
LHSRGQS

SEQ ID NO: 130329 - protein, 7 aa, synthetic construct
LHSSHKS

SEQ ID NO: 130330 - protein, 7 aa, synthetic construct
LHSSTRQ

SEQ ID NO: 130331 - protein, 7 aa, synthetic construct
LHTAISR

SEQ ID NO: 130332 - protein, 7 aa, synthetic construct
LHTHYIA

SEQ ID NO: 130333 - protein, 7 aa, synthetic construct
LHTITRT

SEQ ID NO: 130334 - protein, 7 aa, synthetic construct
LHTKGYI

SEQ ID NO: 130335 - protein, 7 aa, synthetic construct
LHTMKHS

SEQ ID NO: 130336 - protein, 7 aa, synthetic construct
LHTNRIQ

SEQ ID NO: 130337 - protein, 7 aa, synthetic construct
LHTQSRV

SEQ ID NO: 130338 - protein, 7 aa, synthetic construct
LHTRQGH

SEQ ID NO: 130339 - protein, 7 aa, synthetic construct
LHTSNVR

SEQ ID NO: 130340 - protein, 7 aa, synthetic construct
LHTVNQR

SEQ ID NO: 130341 - protein, 7 aa, synthetic construct
LHVGTYK

SEQ ID NO: 130342 - protein, 7 aa, synthetic construct
LHVGVQR

SEQ ID NO: 130343 - protein, 7 aa, synthetic construct
LHYGSSQ

SEQ ID NO: 130344 - protein, 7 aa, synthetic construct
LIADHKR

SEQ ID NO: 130345 - protein, 7 aa, synthetic construct
LIAHTTR

SEQ ID NO: 130346 - protein, 7 aa, synthetic construct
LIANRVN

SEQ ID NO: 130347 - protein, 7 aa, synthetic construct
LIDGRRL

SEQ ID NO: 130348 - protein, 7 aa, synthetic construct
LIDKANR

SEQ ID NO: 130349 - protein, 7 aa, synthetic construct
LIDPRGR

SEQ ID NO: 130350 - protein, 7 aa, synthetic construct
LIDQNRK

SEQ ID NO: 130351 - protein, 7 aa, synthetic construct
LIGGHKI

SEQ ID NO: 130352 - protein, 7 aa, synthetic construct
LIGGKYV

SEQ ID NO: 130353 - protein, 7 aa, synthetic construct
LIGHPKN

SEQ ID NO: 130354 - protein, 7 aa, synthetic construct
LIGKAIT

SEQ ID NO: 130355 - protein, 7 aa, synthetic construct
LIGKDRH

SEQ ID NO: 130356 - protein, 7 aa, synthetic construct
LIGMGGR

SEQ ID NO: 130357 - protein, 7 aa, synthetic construct
LIGMRAS

SEQ ID NO: 130358 - protein, 7 aa, synthetic construct
LIGRHSA

SEQ ID NO: 130359 - protein, 7 aa, synthetic construct
LIHGARP

SEQ ID NO: 130360 - protein, 7 aa, synthetic construct
LIHGSKA

SEQ ID NO: 130361 - protein, 7 aa, synthetic construct
LIHKSIS

SEQ ID NO: 130362 - protein, 7 aa, synthetic construct
LIHNAQK

SEQ ID NO: 130363 - protein, 7 aa, synthetic construct
LIHNMKN

SEQ ID NO: 130364 - protein, 7 aa, synthetic construct
LIHSAGK

SEQ ID NO: 130365 - protein, 7 aa, synthetic construct
LIHSASR

SEQ ID NO: 130366 - protein, 7 aa, synthetic construct
LIHSSNR

SEQ ID NO: 130367 - protein, 7 aa, synthetic construct
LIKERHV

SEQ ID NO: 130368 - protein, 7 aa, synthetic construct
LIKGYSA

SEQ ID NO: 130369 - protein, 7 aa, synthetic construct
LIKGYVN

SEQ ID NO: 130370 - protein, 7 aa, synthetic construct
LIKKHYE

SEQ ID NO: 130371 - protein, 7 aa, synthetic construct
LIKMPTN

SEQ ID NO: 130372 - protein, 7 aa, synthetic construct
LIKNHAF

SEQ ID NO: 130373 - protein, 7 aa, synthetic construct
LIKQPHV

SEQ ID NO: 130374 - protein, 7 aa, synthetic construct
LIKRDIA

SEQ ID NO: 130375 - protein, 7 aa, synthetic construct
LIKRDMG

SEQ ID NO: 130376 - protein, 7 aa, synthetic construct
LIKRDTG

SEQ ID NO: 130377 - protein, 7 aa, synthetic construct
LIKSAYG

SEQ ID NO: 130378 - protein, 7 aa, synthetic construct
LIKYNPA

SEQ ID NO: 130379 - protein, 7 aa, synthetic construct
LINHRQN

SEQ ID NO: 130380 - protein, 7 aa, synthetic construct
LINKNVY

SEQ ID NO: 130381 - protein, 7 aa, synthetic construct
LINKPHS

SEQ ID NO: 130382 - protein, 7 aa, synthetic construct
LINVHKS

SEQ ID NO: 130383 - protein, 7 aa, synthetic construct
LINYQKA

SEQ ID NO: 130384 - protein, 7 aa, synthetic construct
LIPHGRP

SEQ ID NO: 130385 - protein, 7 aa, synthetic construct
LIPHNAR

SEQ ID NO: 130386 - protein, 7 aa, synthetic construct
LIPKHSM

SEQ ID NO: 130387 - protein, 7 aa, synthetic construct
LIPRVGT

SEQ ID NO: 130388 - protein, 7 aa, synthetic construct
LIPTART

SEQ ID NO: 130389 - protein, 7 aa, synthetic construct
LIQNRQH

SEQ ID NO: 130390 - protein, 7 aa, synthetic construct
LIQRKTE

SEQ ID NO: 130391 - protein, 7 aa, synthetic construct
LIQSRQM

SEQ ID NO: 130392 - protein, 7 aa, synthetic construct
LIRASTQ

SEQ ID NO: 130393 - protein, 7 aa, synthetic construct
LIRERSQ

SEQ ID NO: 130394 - protein, 7 aa, synthetic construct
LIRESKA

SEQ ID NO: 130395 - protein, 7 aa, synthetic construct
LIRESTR

SEQ ID NO: 130396 - protein, 7 aa, synthetic construct
LIRGDKY

SEQ ID NO: 130397 - protein, 7 aa, synthetic construct
LIRGIPQ

SEQ ID NO: 130398 - protein, 7 aa, synthetic construct
LIRGNKD

SEQ ID NO: 130399 - protein, 7 aa, synthetic construct
LIRGVTN

SEQ ID NO: 130400 - protein, 7 aa, synthetic construct
LIRKELT

SEQ ID NO: 130401 - protein, 7 aa, synthetic construct
LIRKENL

SEQ ID NO: 130402 - protein, 7 aa, synthetic construct
LIRKNDT

SEQ ID NO: 130403 - protein, 7 aa, synthetic construct
LIRMDKG

SEQ ID NO: 130404 - protein, 7 aa, synthetic construct
LIRMSSP

SEQ ID NO: 130405 - protein, 7 aa, synthetic construct
LIRNSNA

SEQ ID NO: 130406 - protein, 7 aa, synthetic construct
LIRPGNV

SEQ ID NO: 130407 - protein, 7 aa, synthetic construct
LIRQKEQ

SEQ ID NO: 130408 - protein, 7 aa, synthetic construct
LIRQQKD

SEQ ID NO: 130409 - protein, 7 aa, synthetic construct
LIRTAVH

SEQ ID NO: 130410 - protein, 7 aa, synthetic construct
LIRTNMP

SEQ ID NO: 130411 - protein, 7 aa, synthetic construct
LIRTSSN

SEQ ID NO: 130412 - protein, 7 aa, synthetic construct
LISGHSR

SEQ ID NO: 130413 - protein, 7 aa, synthetic construct
LISHKSM

SEQ ID NO: 130414 - protein, 7 aa, synthetic construct
LISKNYN

SEQ ID NO: 130415 - protein, 7 aa, synthetic construct
LISRHQG

SEQ ID NO: 130416 - protein, 7 aa, synthetic construct
LITHGRA

SEQ ID NO: 130417 - protein, 7 aa, synthetic construct
LITHMKT

SEQ ID NO: 130418 - protein, 7 aa, synthetic construct
LITHSKM

SEQ ID NO: 130419 - protein, 7 aa, synthetic construct
LITHVKN

SEQ ID NO: 130420 - protein, 7 aa, synthetic construct
LITRAHA

SEQ ID NO: 130421 - protein, 7 aa, synthetic construct
LITSRSQ

SEQ ID NO: 130422 - protein, 7 aa, synthetic construct
LIYGPKQ

SEQ ID NO: 130423 - protein, 7 aa, synthetic construct
LIYKSSP

SEQ ID NO: 130424 - protein, 7 aa, synthetic construct
LKAAYEK

SEQ ID NO: 130425 - protein, 7 aa, synthetic construct
LKADYQR

SEQ ID NO: 130426 - protein, 7 aa, synthetic construct
LKAESSR

SEQ ID NO: 130427 - protein, 7 aa, synthetic construct
LKAGYNI

SEQ ID NO: 130428 - protein, 7 aa, synthetic construct
LKAHDRM

SEQ ID NO: 130429 - protein, 7 aa, synthetic construct
LKAHFRE

SEQ ID NO: 130430 - protein, 7 aa, synthetic construct
LKAHLHS

SEQ ID NO: 130431 - protein, 7 aa, synthetic construct
LKAHSRD

SEQ ID NO: 130432 - protein, 7 aa, synthetic construct
LKAHSSM

SEQ ID NO: 130433 - protein, 7 aa, synthetic construct
LKAHSYP

SEQ ID NO: 130434 - protein, 7 aa, synthetic construct
LKAIAIN

SEQ ID NO: 130435 - protein, 7 aa, synthetic construct
LKAIPTH

SEQ ID NO: 130436 - protein, 7 aa, synthetic construct
LKAPAFA

SEQ ID NO: 130437 - protein, 7 aa, synthetic construct
LKAPTTF

SEQ ID NO: 130438 - protein, 7 aa, synthetic construct
LKAPVMS

SEQ ID NO: 130439 - protein, 7 aa, synthetic construct
LKARGME

SEQ ID NO: 130440 - protein, 7 aa, synthetic construct
LKARYAE

SEQ ID NO: 130441 - protein, 7 aa, synthetic construct
LKASHQY

SEQ ID NO: 130442 - protein, 7 aa, synthetic construct
LKASHVY

SEQ ID NO: 130443 - protein, 7 aa, synthetic construct
LKASNPF

SEQ ID NO: 130444 - protein, 7 aa, synthetic construct
LKASWRE

SEQ ID NO: 130445 - protein, 7 aa, synthetic construct
LKATEMR

SEQ ID NO: 130446 - protein, 7 aa, synthetic construct
LKAVGGY

SEQ ID NO: 130447 - protein, 7 aa, synthetic construct
LKAVHQM

SEQ ID NO: 130448 - protein, 7 aa, synthetic construct
LKAVMKP

SEQ ID NO: 130449 - protein, 7 aa, synthetic construct
LKDARHF

SEQ ID NO: 130450 - protein, 7 aa, synthetic construct
LKDGYRA

SEQ ID NO: 130451 - protein, 7 aa, synthetic construct
LKDLRHM

SEQ ID NO: 130452 - protein, 7 aa, synthetic construct
LKDMYRP

SEQ ID NO: 130453 - protein, 7 aa, synthetic construct
LKDNVRY

SEQ ID NO: 130454 - protein, 7 aa, synthetic construct
LKDPHNR

SEQ ID NO: 130455 - protein, 7 aa, synthetic construct
LKDPKWG

SEQ ID NO: 130456 - protein, 7 aa, synthetic construct
LKDQAPK

SEQ ID NO: 130457 - protein, 7 aa, synthetic construct
LKDQSSK

SEQ ID NO: 130458 - protein, 7 aa, synthetic construct
LKDRWQG

SEQ ID NO: 130459 - protein, 7 aa, synthetic construct
LKDSIRF

SEQ ID NO: 130460 - protein, 7 aa, synthetic construct
LKDSKYY

SEQ ID NO: 130461 - protein, 7 aa, synthetic construct
LKDTNLR

SEQ ID NO: 130462 - protein, 7 aa, synthetic construct
LKDTTGR

SEQ ID NO: 130463 - protein, 7 aa, synthetic construct
LKDTTRQ

SEQ ID NO: 130464 - protein, 7 aa, synthetic construct
LKDTWKQ

SEQ ID NO: 130465 - protein, 7 aa, synthetic construct
LKDVSRY

SEQ ID NO: 130466 - protein, 7 aa, synthetic construct
LKDYGRS

SEQ ID NO: 130467 - protein, 7 aa, synthetic construct
LKDYKER

SEQ ID NO: 130468 - protein, 7 aa, synthetic construct
LKDYTRT

SEQ ID NO: 130469 - protein, 7 aa, synthetic construct
LKEANFR

SEQ ID NO: 130470 - protein, 7 aa, synthetic construct
LKEAPGR

SEQ ID NO: 130471 - protein, 7 aa, synthetic construct
LKEHRFQ

SEQ ID NO: 130472 - protein, 7 aa, synthetic construct
LKEHVRV

SEQ ID NO: 130473 - protein, 7 aa, synthetic construct
LKEKGQH

SEQ ID NO: 130474 - protein, 7 aa, synthetic construct
LKEKNSW

SEQ ID NO: 130475 - protein, 7 aa, synthetic construct
LKEMHKF

SEQ ID NO: 130476 - protein, 7 aa, synthetic construct
LKEPKGW

SEQ ID NO: 130477 - protein, 7 aa, synthetic construct
LKESTSR

SEQ ID NO: 130478 - protein, 7 aa, synthetic construct
LKEWKVS

SEQ ID NO: 130479 - protein, 7 aa, synthetic construct
LKEYQGK

SEQ ID NO: 130480 - protein, 7 aa, synthetic construct
LKEYVQR

SEQ ID NO: 130481 - protein, 7 aa, synthetic construct
LKFADKA

SEQ ID NO: 130482 - protein, 7 aa, synthetic construct
LKFAIKE

SEQ ID NO: 130483 - protein, 7 aa, synthetic construct
LKFAPDK

SEQ ID NO: 130484 - protein, 7 aa, synthetic construct
LKFGAHG

SEQ ID NO: 130485 - protein, 7 aa, synthetic construct
LKFGPTS

SEQ ID NO: 130486 - protein, 7 aa, synthetic construct
LKFGVAS

SEQ ID NO: 130487 - protein, 7 aa, synthetic construct
LKFKMLE

SEQ ID NO: 130488 - protein, 7 aa, synthetic construct
LKFNASM

SEQ ID NO: 130489 - protein, 7 aa, synthetic construct
LKFNMTP

SEQ ID NO: 130490 - protein, 7 aa, synthetic construct
LKFPEKA

SEQ ID NO: 130491 - protein, 7 aa, synthetic construct
LKFPSSA

SEQ ID NO: 130492 - protein, 7 aa, synthetic construct
LKFPTTN

SEQ ID NO: 130493 - protein, 7 aa, synthetic construct
LKFQAGP

SEQ ID NO: 130494 - protein, 7 aa, synthetic construct
LKFQPSS

SEQ ID NO: 130495 - protein, 7 aa, synthetic construct
LKFQTTG

SEQ ID NO: 130496 - protein, 7 aa, synthetic construct
LKFQVTG

SEQ ID NO: 130497 - protein, 7 aa, synthetic construct
LKFTGSG

SEQ ID NO: 130498 - protein, 7 aa, synthetic construct
LKGDAWS

SEQ ID NO: 130499 - protein, 7 aa, synthetic construct
LKGDPTK

SEQ ID NO: 130500 - protein, 7 aa, synthetic construct
LKGDSVR

SEQ ID NO: 130501 - protein, 7 aa, synthetic construct
LKGEKWV

SEQ ID NO: 130502 - protein, 7 aa, synthetic construct
LKGEQIK

SEQ ID NO: 130503 - protein, 7 aa, synthetic construct
LKGESWS

SEQ ID NO: 130504 - protein, 7 aa, synthetic construct
LKGFNSS

SEQ ID NO: 130505 - protein, 7 aa, synthetic construct
LKGFPAQ

SEQ ID NO: 130506 - protein, 7 aa, synthetic construct
LKGGDLR

SEQ ID NO: 130507 - protein, 7 aa, synthetic construct
LKGGHPY

SEQ ID NO: 130508 - protein, 7 aa, synthetic construct
LKGGMYQ

SEQ ID NO: 130509 - protein, 7 aa, synthetic construct
LKGHGGY

SEQ ID NO: 130510 - protein, 7 aa, synthetic construct
LKGHNVY

SEQ ID NO: 130511 - protein, 7 aa, synthetic construct
LKGHSFQ

SEQ ID NO: 130512 - protein, 7 aa, synthetic construct
LKGHVTY

SEQ ID NO: 130513 - protein, 7 aa, synthetic construct
LKGHYGN

SEQ ID NO: 130514 - protein, 7 aa, synthetic construct
LKGHYGS

SEQ ID NO: 130515 - protein, 7 aa, synthetic construct
LKGIAYN

SEQ ID NO: 130516 - protein, 7 aa, synthetic construct
LKGINYS

SEQ ID NO: 130517 - protein, 7 aa, synthetic construct
LKGISHF

SEQ ID NO: 130518 - protein, 7 aa, synthetic construct
LKGIYNA

SEQ ID NO: 130519 - protein, 7 aa, synthetic construct
LKGKFFD

SEQ ID NO: 130520 - protein, 7 aa, synthetic construct
LKGLPTY

SEQ ID NO: 130521 - protein, 7 aa, synthetic construct
LKGMPHA

SEQ ID NO: 130522 - protein, 7 aa, synthetic construct
LKGPAHY

SEQ ID NO: 130523 - protein, 7 aa, synthetic construct
LKGPDKW

SEQ ID NO: 130524 - protein, 7 aa, synthetic construct
LKGPIIQ

SEQ ID NO: 130525 - protein, 7 aa, synthetic construct
LKGPKEH

SEQ ID NO: 130526 - protein, 7 aa, synthetic construct
LKGQQAY

SEQ ID NO: 130527 - protein, 7 aa, synthetic construct
LKGRDHI

SEQ ID NO: 130528 - protein, 7 aa, synthetic construct
LKGSHYI

SEQ ID NO: 130529 - protein, 7 aa, synthetic construct
LKGSPSY

SEQ ID NO: 130530 - protein, 7 aa, synthetic construct
LKGSTYG

SEQ ID NO: 130531 - protein, 7 aa, synthetic construct
LKGTHIM

SEQ ID NO: 130532 - protein, 7 aa, synthetic construct
LKGTPFA

SEQ ID NO: 130533 - protein, 7 aa, synthetic construct
LKGVEIR

SEQ ID NO: 130534 - protein, 7 aa, synthetic construct
LKGVEMK

SEQ ID NO: 130535 - protein, 7 aa, synthetic construct
LKGYATL

SEQ ID NO: 130536 - protein, 7 aa, synthetic construct
LKGYEKM

SEQ ID NO: 130537 - protein, 7 aa, synthetic construct
LKHAQAY

SEQ ID NO: 130538 - protein, 7 aa, synthetic construct
LKHASVV

SEQ ID NO: 130539 - protein, 7 aa, synthetic construct
LKHATHI

SEQ ID NO: 130540 - protein, 7 aa, synthetic construct
LKHATSL

SEQ ID NO: 130541 - protein, 7 aa, synthetic construct
LKHDLKM

SEQ ID NO: 130542 - protein, 7 aa, synthetic construct
LKHDRTS

SEQ ID NO: 130543 - protein, 7 aa, synthetic construct
LKHDVNR

SEQ ID NO: 130544 - protein, 7 aa, synthetic construct
LKHEQKM

SEQ ID NO: 130545 - protein, 7 aa, synthetic construct
LKHERDK

SEQ ID NO: 130546 - protein, 7 aa, synthetic construct
LKHGIPY

SEQ ID NO: 130547 - protein, 7 aa, synthetic construct
LKHGQLI

SEQ ID NO: 130548 - protein, 7 aa, synthetic construct
LKHIHSN

SEQ ID NO: 130549 - protein, 7 aa, synthetic construct
LKHIIHG

SEQ ID NO: 130550 - protein, 7 aa, synthetic construct
LKHISNM

SEQ ID NO: 130551 - protein, 7 aa, synthetic construct
LKHKDAY

SEQ ID NO: 130552 - protein, 7 aa, synthetic construct
LKHKDPV

SEQ ID NO: 130553 - protein, 7 aa, synthetic construct
LKHLHKE

SEQ ID NO: 130554 - protein, 7 aa, synthetic construct
LKHLHSP

SEQ ID NO: 130555 - protein, 7 aa, synthetic construct
LKHMHVG

SEQ ID NO: 130556 - protein, 7 aa, synthetic construct
LKHNDNR

SEQ ID NO: 130557 - protein, 7 aa, synthetic construct
LKHNFGP

SEQ ID NO: 130558 - protein, 7 aa, synthetic construct
LKHNQPY

SEQ ID NO: 130559 - protein, 7 aa, synthetic construct
LKHNTPF

SEQ ID NO: 130560 - protein, 7 aa, synthetic construct
LKHPAVL

SEQ ID NO: 130561 - protein, 7 aa, synthetic construct
LKHPMSA

SEQ ID NO: 130562 - protein, 7 aa, synthetic construct
LKHPNYG

SEQ ID NO: 130563 - protein, 7 aa, synthetic construct
LKHPSAH

SEQ ID NO: 130564 - protein, 7 aa, synthetic construct
LKHPSPN

SEQ ID NO: 130565 - protein, 7 aa, synthetic construct
LKHPVIG

SEQ ID NO: 130566 - protein, 7 aa, synthetic construct
LKHQIIS

SEQ ID NO: 130567 - protein, 7 aa, synthetic construct
LKHQIPQ

SEQ ID NO: 130568 - protein, 7 aa, synthetic construct
LKHQVLQ

SEQ ID NO: 130569 - protein, 7 aa, synthetic construct
LKHSIPY

SEQ ID NO: 130570 - protein, 7 aa, synthetic construct
LKHSPPF

SEQ ID NO: 130571 - protein, 7 aa, synthetic construct
LKHSVIM

SEQ ID NO: 130572 - protein, 7 aa, synthetic construct
LKHSVNF

SEQ ID NO: 130573 - protein, 7 aa, synthetic construct
LKHTAPF

SEQ ID NO: 130574 - protein, 7 aa, synthetic construct
LKHTFTA

SEQ ID NO: 130575 - protein, 7 aa, synthetic construct
LKHTVAM

SEQ ID NO: 130576 - protein, 7 aa, synthetic construct
LKHTYNS

SEQ ID NO: 130577 - protein, 7 aa, synthetic construct
LKHVMQT

SEQ ID NO: 130578 - protein, 7 aa, synthetic construct
LKIHNIQ

SEQ ID NO: 130579 - protein, 7 aa, synthetic construct
LKIHSIP

SEQ ID NO: 130580 - protein, 7 aa, synthetic construct
LKIKHYE

SEQ ID NO: 130581 - protein, 7 aa, synthetic construct
LKIPHNA

SEQ ID NO: 130582 - protein, 7 aa, synthetic construct
LKIRADL

SEQ ID NO: 130583 - protein, 7 aa, synthetic construct
LKIRELQ

SEQ ID NO: 130584 - protein, 7 aa, synthetic construct
LKIREPM

SEQ ID NO: 130585 - protein, 7 aa, synthetic construct
LKIRMAD

SEQ ID NO: 130586 - protein, 7 aa, synthetic construct
LKKDNLW

SEQ ID NO: 130587 - protein, 7 aa, synthetic construct
LKKDNWT

SEQ ID NO: 130588 - protein, 7 aa, synthetic construct
LKKEHMT

SEQ ID NO: 130589 - protein, 7 aa, synthetic construct
LKKFALD

SEQ ID NO: 130590 - protein, 7 aa, synthetic construct
LKKFQVE

SEQ ID NO: 130591 - protein, 7 aa, synthetic construct
LKKFTHE

SEQ ID NO: 130592 - protein, 7 aa, synthetic construct
LKKMPTD

SEQ ID NO: 130593 - protein, 7 aa, synthetic construct
LKKQEPH

SEQ ID NO: 130594 - protein, 7 aa, synthetic construct
LKKVIDT

SEQ ID NO: 130595 - protein, 7 aa, synthetic construct
LKKYEMI

SEQ ID NO: 130596 - protein, 7 aa, synthetic construct
LKKYIIE

SEQ ID NO: 130597 - protein, 7 aa, synthetic construct
LKKYPEM

SEQ ID NO: 130598 - protein, 7 aa, synthetic construct
LKLGSSY

SEQ ID NO: 130599 - protein, 7 aa, synthetic construct
LKLHTSQ

SEQ ID NO: 130600 - protein, 7 aa, synthetic construct
LKLPHAN

SEQ ID NO: 130601 - protein, 7 aa, synthetic construct
LKLPHVS

SEQ ID NO: 130602 - protein, 7 aa, synthetic construct
LKLRDQV

SEQ ID NO: 130603 - protein, 7 aa, synthetic construct
LKLRMQD

SEQ ID NO: 130604 - protein, 7 aa, synthetic construct
LKLSAEK

SEQ ID NO: 130605 - protein, 7 aa, synthetic construct
LKLTHMA

SEQ ID NO: 130606 - protein, 7 aa, synthetic construct
LKMGQPF

SEQ ID NO: 130607 - protein, 7 aa, synthetic construct
LKMGRFE

SEQ ID NO: 130608 - protein, 7 aa, synthetic construct
LKMHRNE

SEQ ID NO: 130609 - protein, 7 aa, synthetic construct
LKMHRQD

SEQ ID NO: 130610 - protein, 7 aa, synthetic construct
LKMPHNM

SEQ ID NO: 130611 - protein, 7 aa, synthetic construct
LKMPISN

SEQ ID NO: 130612 - protein, 7 aa, synthetic construct
LKMPLVP

SEQ ID NO: 130613 - protein, 7 aa, synthetic construct
LKMPMTN

SEQ ID NO: 130614 - protein, 7 aa, synthetic construct
LKMPNYV

SEQ ID NO: 130615 - protein, 7 aa, synthetic construct
LKMQPIP

SEQ ID NO: 130616 - protein, 7 aa, synthetic construct
LKMRLTE

SEQ ID NO: 130617 - protein, 7 aa, synthetic construct
LKMSYVA

SEQ ID NO: 130618 - protein, 7 aa, synthetic construct
LKMVQRD

SEQ ID NO: 130619 - protein, 7 aa, synthetic construct
LKNANMF

SEQ ID NO: 130620 - protein, 7 aa, synthetic construct
LKNDSKW

SEQ ID NO: 130621 - protein, 7 aa, synthetic construct
LKNEARM

SEQ ID NO: 130622 - protein, 7 aa, synthetic construct
LKNFNQQ

SEQ ID NO: 130623 - protein, 7 aa, synthetic construct
LKNFQDK

SEQ ID NO: 130624 - protein, 7 aa, synthetic construct
LKNFTNN

SEQ ID NO: 130625 - protein, 7 aa, synthetic construct
LKNFVAQ

SEQ ID NO: 130626 - protein, 7 aa, synthetic construct
LKNGGYY

SEQ ID NO: 130627 - protein, 7 aa, synthetic construct
LKNHFGP

SEQ ID NO: 130628 - protein, 7 aa, synthetic construct
LKNHGTL

SEQ ID NO: 130629 - protein, 7 aa, synthetic construct
LKNHPMQ

SEQ ID NO: 130630 - protein, 7 aa, synthetic construct
LKNHQLM

SEQ ID NO: 130631 - protein, 7 aa, synthetic construct
LKNIPTQ

SEQ ID NO: 130632 - protein, 7 aa, synthetic construct
LKNIQYN

SEQ ID NO: 130633 - protein, 7 aa, synthetic construct
LKNKNYD

SEQ ID NO: 130634 - protein, 7 aa, synthetic construct
LKNKYDP

SEQ ID NO: 130635 - protein, 7 aa, synthetic construct
LKNMGAF

SEQ ID NO: 130636 - protein, 7 aa, synthetic construct
LKNMGTF

SEQ ID NO: 130637 - protein, 7 aa, synthetic construct
LKNMPNI

SEQ ID NO: 130638 - protein, 7 aa, synthetic construct
LKNMPQN

SEQ ID NO: 130639 - protein, 7 aa, synthetic construct
LKNMRDT

SEQ ID NO: 130640 - protein, 7 aa, synthetic construct
LKNNYDR

SEQ ID NO: 130641 - protein, 7 aa, synthetic construct
LKNPALH

SEQ ID NO: 130642 - protein, 7 aa, synthetic construct
LKNQRND

SEQ ID NO: 130643 - protein, 7 aa, synthetic construct
LKNRDQA

SEQ ID NO: 130644 - protein, 7 aa, synthetic construct
LKNSGQW

SEQ ID NO: 130645 - protein, 7 aa, synthetic construct
LKNVAIY

SEQ ID NO: 130646 - protein, 7 aa, synthetic construct
LKNVSYT

SEQ ID NO: 130647 - protein, 7 aa, synthetic construct
LKNYARD

SEQ ID NO: 130648 - protein, 7 aa, synthetic construct
LKNYTDK

SEQ ID NO: 130649 - protein, 7 aa, synthetic construct
LKPERIT

SEQ ID NO: 130650 - protein, 7 aa, synthetic construct
LKPGTMF

SEQ ID NO: 130651 - protein, 7 aa, synthetic construct
LKPHFGQ

SEQ ID NO: 130652 - protein, 7 aa, synthetic construct
LKPHGFQ

SEQ ID NO: 130653 - protein, 7 aa, synthetic construct
LKPHMQH

SEQ ID NO: 130654 - protein, 7 aa, synthetic construct
LKPHQQY

SEQ ID NO: 130655 - protein, 7 aa, synthetic construct
LKPHTGY

SEQ ID NO: 130656 - protein, 7 aa, synthetic construct
LKPIANY

SEQ ID NO: 130657 - protein, 7 aa, synthetic construct
LKPIYHA

SEQ ID NO: 130658 - protein, 7 aa, synthetic construct
LKPMYMA

SEQ ID NO: 130659 - protein, 7 aa, synthetic construct
LKPNWSG

SEQ ID NO: 130660 - protein, 7 aa, synthetic construct
LKPPLNL

SEQ ID NO: 130661 - protein, 7 aa, synthetic construct
LKPPSAY

SEQ ID NO: 130662 - protein, 7 aa, synthetic construct
LKPQWMA

SEQ ID NO: 130663 - protein, 7 aa, synthetic construct
LKPRDIQ

SEQ ID NO: 130664 - protein, 7 aa, synthetic construct
LKPRSFD

SEQ ID NO: 130665 - protein, 7 aa, synthetic construct
LKPSHTF

SEQ ID NO: 130666 - protein, 7 aa, synthetic construct
LKPSMQY

SEQ ID NO: 130667 - protein, 7 aa, synthetic construct
LKPSQYT

SEQ ID NO: 130668 - protein, 7 aa, synthetic construct
LKPTQFQ

SEQ ID NO: 130669 - protein, 7 aa, synthetic construct
LKPVMSY

SEQ ID NO: 130670 - protein, 7 aa, synthetic construct
LKPVPSS

SEQ ID NO: 130671 - protein, 7 aa, synthetic construct
LKPYSTV

SEQ ID NO: 130672 - protein, 7 aa, synthetic construct
LKQDSRY

SEQ ID NO: 130673 - protein, 7 aa, synthetic construct
LKQERSI

SEQ ID NO: 130674 - protein, 7 aa, synthetic construct
LKQHGML

SEQ ID NO: 130675 - protein, 7 aa, synthetic construct
LKQHSPF

SEQ ID NO: 130676 - protein, 7 aa, synthetic construct
LKQIQHT

SEQ ID NO: 130677 - protein, 7 aa, synthetic construct
LKQIYPS

SEQ ID NO: 130678 - protein, 7 aa, synthetic construct
LKQLARD

SEQ ID NO: 130679 - protein, 7 aa, synthetic construct
LKQPHGL

SEQ ID NO: 130680 - protein, 7 aa, synthetic construct
LKQPRFD

SEQ ID NO: 130681 - protein, 7 aa, synthetic construct
LKQPSVY

SEQ ID NO: 130682 - protein, 7 aa, synthetic construct
LKQQDNR

SEQ ID NO: 130683 - protein, 7 aa, synthetic construct
LKQQEHR

SEQ ID NO: 130684 - protein, 7 aa, synthetic construct
LKQQIHQ

SEQ ID NO: 130685 - protein, 7 aa, synthetic construct
LKQQTAH

SEQ ID NO: 130686 - protein, 7 aa, synthetic construct
LKQQYGV

SEQ ID NO: 130687 - protein, 7 aa, synthetic construct
LKQRDQY

SEQ ID NO: 130688 - protein, 7 aa, synthetic construct
LKQRIAD

SEQ ID NO: 130689 - protein, 7 aa, synthetic construct
LKQRLQD

SEQ ID NO: 130690 - protein, 7 aa, synthetic construct
LKQRQEM

SEQ ID NO: 130691 - protein, 7 aa, synthetic construct
LKQRQTE

SEQ ID NO: 130692 - protein, 7 aa, synthetic construct
LKQSALF

SEQ ID NO: 130693 - protein, 7 aa, synthetic construct
LKQSRAD

SEQ ID NO: 130694 - protein, 7 aa, synthetic construct
LKQSRDM

SEQ ID NO: 130695 - protein, 7 aa, synthetic construct
LKQSRDS

SEQ ID NO: 130696 - protein, 7 aa, synthetic construct
LKQYSTQ

SEQ ID NO: 130697 - protein, 7 aa, synthetic construct
LKRDASV

SEQ ID NO: 130698 - protein, 7 aa, synthetic construct
LKRDIAL

SEQ ID NO: 130699 - protein, 7 aa, synthetic construct
LKRDIRE

SEQ ID NO: 130700 - protein, 7 aa, synthetic construct
LKRDMHA

SEQ ID NO: 130701 - protein, 7 aa, synthetic construct
LKRDNLF

SEQ ID NO: 130702 - protein, 7 aa, synthetic construct
LKRDSIF

SEQ ID NO: 130703 - protein, 7 aa, synthetic construct
LKREIQY

SEQ ID NO: 130704 - protein, 7 aa, synthetic construct
LKRENIL

SEQ ID NO: 130705 - protein, 7 aa, synthetic construct
LKRETWD

SEQ ID NO: 130706 - protein, 7 aa, synthetic construct
LKREYYD

SEQ ID NO: 130707 - protein, 7 aa, synthetic construct
LKRGVDP

SEQ ID NO: 130708 - protein, 7 aa, synthetic construct
LKRINIE

SEQ ID NO: 130709 - protein, 7 aa, synthetic construct
LKRLAEV

SEQ ID NO: 130710 - protein, 7 aa, synthetic construct
LKRQADD

SEQ ID NO: 130711 - protein, 7 aa, synthetic construct
LKRQDVP

SEQ ID NO: 130712 - protein, 7 aa, synthetic construct
LKRQEDW

SEQ ID NO: 130713 - protein, 7 aa, synthetic construct
LKRTIQD

SEQ ID NO: 130714 - protein, 7 aa, synthetic construct
LKRVASE

SEQ ID NO: 130715 - protein, 7 aa, synthetic construct
LKRVDVV

SEQ ID NO: 130716 - protein, 7 aa, synthetic construct
LKRVENQ

SEQ ID NO: 130717 - protein, 7 aa, synthetic construct
LKRVLAD

SEQ ID NO: 130718 - protein, 7 aa, synthetic construct
LKRVPDP

SEQ ID NO: 130719 - protein, 7 aa, synthetic construct
LKSAHLL

SEQ ID NO: 130720 - protein, 7 aa, synthetic construct
LKSAHSY

SEQ ID NO: 130721 - protein, 7 aa, synthetic construct
LKSAMNL

SEQ ID NO: 130722 - protein, 7 aa, synthetic construct
LKSDPYR

SEQ ID NO: 130723 - protein, 7 aa, synthetic construct
LKSFNSN

SEQ ID NO: 130724 - protein, 7 aa, synthetic construct
LKSHMGT

SEQ ID NO: 130725 - protein, 7 aa, synthetic construct
LKSHYAA

SEQ ID NO: 130726 - protein, 7 aa, synthetic construct
LKSLADR

SEQ ID NO: 130727 - protein, 7 aa, synthetic construct
LKSMPAH

SEQ ID NO: 130728 - protein, 7 aa, synthetic construct
LKSNYIT

SEQ ID NO: 130729 - protein, 7 aa, synthetic construct
LKSPEGR

SEQ ID NO: 130730 - protein, 7 aa, synthetic construct
LKSPFMG

SEQ ID NO: 130731 - protein, 7 aa, synthetic construct
LKSPHMT

SEQ ID NO: 130732 - protein, 7 aa, synthetic construct
LKSPTYM

SEQ ID NO: 130733 - protein, 7 aa, synthetic construct
LKSQMSY

SEQ ID NO: 130734 - protein, 7 aa, synthetic construct
LKSRDMV

SEQ ID NO: 130735 - protein, 7 aa, synthetic construct
LKSRTVD

SEQ ID NO: 130736 - protein, 7 aa, synthetic construct
LKSRVEN

SEQ ID NO: 130737 - protein, 7 aa, synthetic construct
LKSRVGD

SEQ ID NO: 130738 - protein, 7 aa, synthetic construct
LKSSGPF

SEQ ID NO: 130739 - protein, 7 aa, synthetic construct
LKSTHHT

SEQ ID NO: 130740 - protein, 7 aa, synthetic construct
LKSVHPT

SEQ ID NO: 130741 - protein, 7 aa, synthetic construct
LKSYAPA

SEQ ID NO: 130742 - protein, 7 aa, synthetic construct
LKSYKSE

SEQ ID NO: 130743 - protein, 7 aa, synthetic construct
LKSYTNT

SEQ ID NO: 130744 - protein, 7 aa, synthetic construct
LKSYTSM

SEQ ID NO: 130745 - protein, 7 aa, synthetic construct
LKSYTSP

SEQ ID NO: 130746 - protein, 7 aa, synthetic construct
LKTDSPW

SEQ ID NO: 130747 - protein, 7 aa, synthetic construct
LKTEYAK

SEQ ID NO: 130748 - protein, 7 aa, synthetic construct
LKTFSDK

SEQ ID NO: 130749 - protein, 7 aa, synthetic construct
LKTGTGW

SEQ ID NO: 130750 - protein, 7 aa, synthetic construct
LKTGYHV

SEQ ID NO: 130751 - protein, 7 aa, synthetic construct
LKTHDSR

SEQ ID NO: 130752 - protein, 7 aa, synthetic construct
LKTHFSG

SEQ ID NO: 130753 - protein, 7 aa, synthetic construct
LKTHFTS

SEQ ID NO: 130754 - protein, 7 aa, synthetic construct
LKTHQFV

SEQ ID NO: 130755 - protein, 7 aa, synthetic construct
LKTINHM

SEQ ID NO: 130756 - protein, 7 aa, synthetic construct
LKTIRDV

SEQ ID NO: 130757 - protein, 7 aa, synthetic construct
LKTMYAP

SEQ ID NO: 130758 - protein, 7 aa, synthetic construct
LKTPYPM

SEQ ID NO: 130759 - protein, 7 aa, synthetic construct
LKTQHSY

SEQ ID NO: 130760 - protein, 7 aa, synthetic construct
LKTQHYA

SEQ ID NO: 130761 - protein, 7 aa, synthetic construct
LKTQSHF

SEQ ID NO: 130762 - protein, 7 aa, synthetic construct
LKTRFQE

SEQ ID NO: 130763 - protein, 7 aa, synthetic construct
LKTSGYH

SEQ ID NO: 130764 - protein, 7 aa, synthetic construct
LKTSSIY

SEQ ID NO: 130765 - protein, 7 aa, synthetic construct
LKTYASS

SEQ ID NO: 130766 - protein, 7 aa, synthetic construct
LKTYGSA

SEQ ID NO: 130767 - protein, 7 aa, synthetic construct
LKTYKME

SEQ ID NO: 130768 - protein, 7 aa, synthetic construct
LKTYPMA

SEQ ID NO: 130769 - protein, 7 aa, synthetic construct
LKVASQY

SEQ ID NO: 130770 - protein, 7 aa, synthetic construct
LKVGPPL

SEQ ID NO: 130771 - protein, 7 aa, synthetic construct
LKVMPHA

SEQ ID NO: 130772 - protein, 7 aa, synthetic construct
LKVPGPA

SEQ ID NO: 130773 - protein, 7 aa, synthetic construct
LKVPLGN

SEQ ID NO: 130774 - protein, 7 aa, synthetic construct
LKVRPMD

SEQ ID NO: 130775 - protein, 7 aa, synthetic construct
LKVRTND

SEQ ID NO: 130776 - protein, 7 aa, synthetic construct
LKVYADK

SEQ ID NO: 130777 - protein, 7 aa, synthetic construct
LKYAASQ

SEQ ID NO: 130778 - protein, 7 aa, synthetic construct
LKYAPDR

SEQ ID NO: 130779 - protein, 7 aa, synthetic construct
LKYDQRA

SEQ ID NO: 130780 - protein, 7 aa, synthetic construct
LKYEKFG

SEQ ID NO: 130781 - protein, 7 aa, synthetic construct
LKYGETR

SEQ ID NO: 130782 - protein, 7 aa, synthetic construct
LKYGNTQ

SEQ ID NO: 130783 - protein, 7 aa, synthetic construct
LKYHVQG

SEQ ID NO: 130784 - protein, 7 aa, synthetic construct
LKYKAEP

SEQ ID NO: 130785 - protein, 7 aa, synthetic construct
LKYKDIS

SEQ ID NO: 130786 - protein, 7 aa, synthetic construct
LKYKGID

SEQ ID NO: 130787 - protein, 7 aa, synthetic construct
LKYKITE

SEQ ID NO: 130788 - protein, 7 aa, synthetic construct
LKYKQGE

SEQ ID NO: 130789 - protein, 7 aa, synthetic construct
LKYKTSD

SEQ ID NO: 130790 - protein, 7 aa, synthetic construct
LKYMAKE

SEQ ID NO: 130791 - protein, 7 aa, synthetic construct
LKYNARD

SEQ ID NO: 130792 - protein, 7 aa, synthetic construct
LKYNPTA

SEQ ID NO: 130793 - protein, 7 aa, synthetic construct
LKYPQQT

SEQ ID NO: 130794 - protein, 7 aa, synthetic construct
LKYPSFD

SEQ ID NO: 130795 - protein, 7 aa, synthetic construct
LKYPTHA

SEQ ID NO: 130796 - protein, 7 aa, synthetic construct
LKYQEKA

SEQ ID NO: 130797 - protein, 7 aa, synthetic construct
LKYQHQA

SEQ ID NO: 130798 - protein, 7 aa, synthetic construct
LKYQINS

SEQ ID NO: 130799 - protein, 7 aa, synthetic construct
LKYQTTM

SEQ ID NO: 130800 - protein, 7 aa, synthetic construct
LKYRETG

SEQ ID NO: 130801 - protein, 7 aa, synthetic construct
LKYSPSS

SEQ ID NO: 130802 - protein, 7 aa, synthetic construct
LKYSSMG

SEQ ID NO: 130803 - protein, 7 aa, synthetic construct
LKYSTIS

SEQ ID NO: 130804 - protein, 7 aa, synthetic construct
LKYTVGQ

SEQ ID NO: 130805 - protein, 7 aa, synthetic construct
LKYVSGS

SEQ ID NO: 130806 - protein, 7 aa, synthetic construct
LLARNER

SEQ ID NO: 130807 - protein, 7 aa, synthetic construct
LLDRMGK

SEQ ID NO: 130808 - protein, 7 aa, synthetic construct
LLDRNNK

SEQ ID NO: 130809 - protein, 7 aa, synthetic construct
LLEKMSR

SEQ ID NO: 130810 - protein, 7 aa, synthetic construct
LLENTKR

SEQ ID NO: 130811 - protein, 7 aa, synthetic construct
LLERNAR

SEQ ID NO: 130812 - protein, 7 aa, synthetic construct
LLGDRRT

SEQ ID NO: 130813 - protein, 7 aa, synthetic construct
LLGERNR

SEQ ID NO: 130814 - protein, 7 aa, synthetic construct
LLGGKPY

SEQ ID NO: 130815 - protein, 7 aa, synthetic construct
LLGGMKF

SEQ ID NO: 130816 - protein, 7 aa, synthetic construct
LLGHNTR

SEQ ID NO: 130817 - protein, 7 aa, synthetic construct
LLGHQSK

SEQ ID NO: 130818 - protein, 7 aa, synthetic construct
LLGKYSG

SEQ ID NO: 130819 - protein, 7 aa, synthetic construct
LLGKYSN

SEQ ID NO: 130820 - protein, 7 aa, synthetic construct
LLGQHKQ

SEQ ID NO: 130821 - protein, 7 aa, synthetic construct
LLGQKYN

SEQ ID NO: 130822 - protein, 7 aa, synthetic construct
LLGSVRA

SEQ ID NO: 130823 - protein, 7 aa, synthetic construct
LLGTIKM

SEQ ID NO: 130824 - protein, 7 aa, synthetic construct
LLGTSRH

SEQ ID NO: 130825 - protein, 7 aa, synthetic construct
LLHASNR

SEQ ID NO: 130826 - protein, 7 aa, synthetic construct
LLHGQGR

SEQ ID NO: 130827 - protein, 7 aa, synthetic construct
LLHIQKP

SEQ ID NO: 130828 - protein, 7 aa, synthetic construct
LLHKNAI

SEQ ID NO: 130829 - protein, 7 aa, synthetic construct
LLHKPAQ

SEQ ID NO: 130830 - protein, 7 aa, synthetic construct
LLHNNRV

SEQ ID NO: 130831 - protein, 7 aa, synthetic construct
LLHQRNP

SEQ ID NO: 130832 - protein, 7 aa, synthetic construct
LLHRSVP

SEQ ID NO: 130833 - protein, 7 aa, synthetic construct
LLHSSRG

SEQ ID NO: 130834 - protein, 7 aa, synthetic construct
LLHTSKS

SEQ ID NO: 130835 - protein, 7 aa, synthetic construct
LLKFAKD

SEQ ID NO: 130836 - protein, 7 aa, synthetic construct
LLKGERY

SEQ ID NO: 130837 - protein, 7 aa, synthetic construct
LLKHHGT

SEQ ID NO: 130838 - protein, 7 aa, synthetic construct
LLKHTHQ

SEQ ID NO: 130839 - protein, 7 aa, synthetic construct
LLKMKDF

SEQ ID NO: 130840 - protein, 7 aa, synthetic construct
LLKNRYD

SEQ ID NO: 130841 - protein, 7 aa, synthetic construct
LLKPHVS

SEQ ID NO: 130842 - protein, 7 aa, synthetic construct
LLKPMGM

SEQ ID NO: 130843 - protein, 7 aa, synthetic construct
LLKREFN

SEQ ID NO: 130844 - protein, 7 aa, synthetic construct
LLKREYG

SEQ ID NO: 130845 - protein, 7 aa, synthetic construct
LLKRIQE

SEQ ID NO: 130846 - protein, 7 aa, synthetic construct
LLKRQSD

SEQ ID NO: 130847 - protein, 7 aa, synthetic construct
LLKYKTD

SEQ ID NO: 130848 - protein, 7 aa, synthetic construct
LLKYQAA

SEQ ID NO: 130849 - protein, 7 aa, synthetic construct
LLMHGSK

SEQ ID NO: 130850 - protein, 7 aa, synthetic construct
LLMHQKP

SEQ ID NO: 130851 - protein, 7 aa, synthetic construct
LLNRAER

SEQ ID NO: 130852 - protein, 7 aa, synthetic construct
LLPAAQR

SEQ ID NO: 130853 - protein, 7 aa, synthetic construct
LLPGYKA

SEQ ID NO: 130854 - protein, 7 aa, synthetic construct
LLPIKNT

SEQ ID NO: 130855 - protein, 7 aa, synthetic construct
LLPKRDM

SEQ ID NO: 130856 - protein, 7 aa, synthetic construct
LLPRAHP

SEQ ID NO: 130857 - protein, 7 aa, synthetic construct
LLPRSSV

SEQ ID NO: 130858 - protein, 7 aa, synthetic construct
LLPTHRN

SEQ ID NO: 130859 - protein, 7 aa, synthetic construct
LLPTNSR

SEQ ID NO: 130860 - protein, 7 aa, synthetic construct
LLQQRNQ

SEQ ID NO: 130861 - protein, 7 aa, synthetic construct
LLQRGVQ

SEQ ID NO: 130862 - protein, 7 aa, synthetic construct
LLQRTTT

SEQ ID NO: 130863 - protein, 7 aa, synthetic construct
LLQSRNM

SEQ ID NO: 130864 - protein, 7 aa, synthetic construct
LLRANPA

SEQ ID NO: 130865 - protein, 7 aa, synthetic construct
LLRDASK

SEQ ID NO: 130866 - protein, 7 aa, synthetic construct
LLRDKNL

SEQ ID NO: 130867 - protein, 7 aa, synthetic construct
LLREHKT

SEQ ID NO: 130868 - protein, 7 aa, synthetic construct
LLRERTI

SEQ ID NO: 130869 - protein, 7 aa, synthetic construct
LLRGDKY

SEQ ID NO: 130870 - protein, 7 aa, synthetic construct
LLRGISA

SEQ ID NO: 130871 - protein, 7 aa, synthetic construct
LLRHLKE

SEQ ID NO: 130872 - protein, 7 aa, synthetic construct
LLRKDMT

SEQ ID NO: 130873 - protein, 7 aa, synthetic construct
LLRKEIQ

SEQ ID NO: 130874 - protein, 7 aa, synthetic construct
LLRKEIS

SEQ ID NO: 130875 - protein, 7 aa, synthetic construct
LLRMKPD

SEQ ID NO: 130876 - protein, 7 aa, synthetic construct
LLRNMGP

SEQ ID NO: 130877 - protein, 7 aa, synthetic construct
LLRPHKD

SEQ ID NO: 130878 - protein, 7 aa, synthetic construct
LLRSAIP

SEQ ID NO: 130879 - protein, 7 aa, synthetic construct
LLRSSAH

SEQ ID NO: 130880 - protein, 7 aa, synthetic construct
LLSHRTQ

SEQ ID NO: 130881 - protein, 7 aa, synthetic construct
LLSKFRD

SEQ ID NO: 130882 - protein, 7 aa, synthetic construct
LLSPMRS

SEQ ID NO: 130883 - protein, 7 aa, synthetic construct
LLSRERQ

SEQ ID NO: 130884 - protein, 7 aa, synthetic construct
LLTHSRG

SEQ ID NO: 130885 - protein, 7 aa, synthetic construct
LLTHSRT

SEQ ID NO: 130886 - protein, 7 aa, synthetic construct
LLTRQSG

SEQ ID NO: 130887 - protein, 7 aa, synthetic construct
LMAEKKW

SEQ ID NO: 130888 - protein, 7 aa, synthetic construct
LMAHKSN

SEQ ID NO: 130889 - protein, 7 aa, synthetic construct
LMARAHA

SEQ ID NO: 130890 - protein, 7 aa, synthetic construct
LMARERA

SEQ ID NO: 130891 - protein, 7 aa, synthetic construct
LMAVRER

SEQ ID NO: 130892 - protein, 7 aa, synthetic construct
LMDRARG

SEQ ID NO: 130893 - protein, 7 aa, synthetic construct
LMDRNLK

SEQ ID NO: 130894 - protein, 7 aa, synthetic construct
LMDRSRM

SEQ ID NO: 130895 - protein, 7 aa, synthetic construct
LMEKPSR

SEQ ID NO: 130896 - protein, 7 aa, synthetic construct
LMETRKM

SEQ ID NO: 130897 - protein, 7 aa, synthetic construct
LMGFSQK

SEQ ID NO: 130898 - protein, 7 aa, synthetic construct
LMGHTQK

SEQ ID NO: 130899 - protein, 7 aa, synthetic construct
LMGKIAH

SEQ ID NO: 130900 - protein, 7 aa, synthetic construct
LMGMQGR

SEQ ID NO: 130901 - protein, 7 aa, synthetic construct
LMGNRAI

SEQ ID NO: 130902 - protein, 7 aa, synthetic construct
LMGQHNR

SEQ ID NO: 130903 - protein, 7 aa, synthetic construct
LMGQYSK

SEQ ID NO: 130904 - protein, 7 aa, synthetic construct
LMGREAR

SEQ ID NO: 130905 - protein, 7 aa, synthetic construct
LMGRNHH

SEQ ID NO: 130906 - protein, 7 aa, synthetic construct
LMGSHNK

SEQ ID NO: 130907 - protein, 7 aa, synthetic construct
LMGYNAK

SEQ ID NO: 130908 - protein, 7 aa, synthetic construct
LMGYPKA

SEQ ID NO: 130909 - protein, 7 aa, synthetic construct
LMHAHKN

SEQ ID NO: 130910 - protein, 7 aa, synthetic construct
LMHEKKS

SEQ ID NO: 130911 - protein, 7 aa, synthetic construct
LMHKTAQ

SEQ ID NO: 130912 - protein, 7 aa, synthetic construct
LMHNKVT

SEQ ID NO: 130913 - protein, 7 aa, synthetic construct
LMHQKIA

SEQ ID NO: 130914 - protein, 7 aa, synthetic construct
LMHTSKA

SEQ ID NO: 130915 - protein, 7 aa, synthetic construct
LMIDKRG

SEQ ID NO: 130916 - protein, 7 aa, synthetic construct
LMKAHPT

SEQ ID NO: 130917 - protein, 7 aa, synthetic construct
LMKDTQR

SEQ ID NO: 130918 - protein, 7 aa, synthetic construct
LMKFSNG

SEQ ID NO: 130919 - protein, 7 aa, synthetic construct
LMKGHPL

SEQ ID NO: 130920 - protein, 7 aa, synthetic construct
LMKGISY

SEQ ID NO: 130921 - protein, 7 aa, synthetic construct
LMKGTPF

SEQ ID NO: 130922 - protein, 7 aa, synthetic construct
LMKHHIS

SEQ ID NO: 130923 - protein, 7 aa, synthetic construct
LMKHHMG

SEQ ID NO: 130924 - protein, 7 aa, synthetic construct
LMKHPGV

SEQ ID NO: 130925 - protein, 7 aa, synthetic construct
LMKPAFP

SEQ ID NO: 130926 - protein, 7 aa, synthetic construct
LMKQLER

SEQ ID NO: 130927 - protein, 7 aa, synthetic construct
LMKQQYA

SEQ ID NO: 130928 - protein, 7 aa, synthetic construct
LMKRTET

SEQ ID NO: 130929 - protein, 7 aa, synthetic construct
LMKSHPL

SEQ ID NO: 130930 - protein, 7 aa, synthetic construct
LMKTHYN

SEQ ID NO: 130931 - protein, 7 aa, synthetic construct
LMKTHYS

SEQ ID NO: 130932 - protein, 7 aa, synthetic construct
LMMGSQR

SEQ ID NO: 130933 - protein, 7 aa, synthetic construct
LMMKKEV

SEQ ID NO: 130934 - protein, 7 aa, synthetic construct
LMMNKGY

SEQ ID NO: 130935 - protein, 7 aa, synthetic construct
LMMQTRP

SEQ ID NO: 130936 - protein, 7 aa, synthetic construct
LMMTHKA

SEQ ID NO: 130937 - protein, 7 aa, synthetic construct
LMNARRD

SEQ ID NO: 130938 - protein, 7 aa, synthetic construct
LMNERRS

SEQ ID NO: 130939 - protein, 7 aa, synthetic construct
LMNHRQV

SEQ ID NO: 130940 - protein, 7 aa, synthetic construct
LMNHTRI

SEQ ID NO: 130941 - protein, 7 aa, synthetic construct
LMNKSTF

SEQ ID NO: 130942 - protein, 7 aa, synthetic construct
LMNNPVR

SEQ ID NO: 130943 - protein, 7 aa, synthetic construct
LMNNRDK

SEQ ID NO: 130944 - protein, 7 aa, synthetic construct
LMNTQKH

SEQ ID NO: 130945 - protein, 7 aa, synthetic construct
LMPAKHI

SEQ ID NO: 130946 - protein, 7 aa, synthetic construct
LMPKFAA

SEQ ID NO: 130947 - protein, 7 aa, synthetic construct
LMPKKFE

SEQ ID NO: 130948 - protein, 7 aa, synthetic construct
LMPNRVM

SEQ ID NO: 130949 - protein, 7 aa, synthetic construct
LMPSKYM

SEQ ID NO: 130950 - protein, 7 aa, synthetic construct
LMPTANR

SEQ ID NO: 130951 - protein, 7 aa, synthetic construct
LMQGSYK

SEQ ID NO: 130952 - protein, 7 aa, synthetic construct
LMQNPGR

SEQ ID NO: 130953 - protein, 7 aa, synthetic construct
LMQPQRM

SEQ ID NO: 130954 - protein, 7 aa, synthetic construct
LMQQSAR

SEQ ID NO: 130955 - protein, 7 aa, synthetic construct
LMQQVRS

SEQ ID NO: 130956 - protein, 7 aa, synthetic construct
LMQRLNP

SEQ ID NO: 130957 - protein, 7 aa, synthetic construct
LMQTIRN

SEQ ID NO: 130958 - protein, 7 aa, synthetic construct
LMRAHNA

SEQ ID NO: 130959 - protein, 7 aa, synthetic construct
LMRAHTA

SEQ ID NO: 130960 - protein, 7 aa, synthetic construct
LMRAVSS

SEQ ID NO: 130961 - protein, 7 aa, synthetic construct
LMRDKPH

SEQ ID NO: 130962 - protein, 7 aa, synthetic construct
LMRDNNR

SEQ ID NO: 130963 - protein, 7 aa, synthetic construct
LMRDSTK

SEQ ID NO: 130964 - protein, 7 aa, synthetic construct
LMRDVAR

SEQ ID NO: 130965 - protein, 7 aa, synthetic construct
LMREKMH

SEQ ID NO: 130966 - protein, 7 aa, synthetic construct
LMREPPK

SEQ ID NO: 130967 - protein, 7 aa, synthetic construct
LMRESKH

SEQ ID NO: 130968 - protein, 7 aa, synthetic construct
LMRGQKE

SEQ ID NO: 130969 - protein, 7 aa, synthetic construct
LMRGSDK

SEQ ID NO: 130970 - protein, 7 aa, synthetic construct
LMRHHTP

SEQ ID NO: 130971 - protein, 7 aa, synthetic construct
LMRKMDS

SEQ ID NO: 130972 - protein, 7 aa, synthetic construct
LMRKVTE

SEQ ID NO: 130973 - protein, 7 aa, synthetic construct
LMRNHTM

SEQ ID NO: 130974 - protein, 7 aa, synthetic construct
LMRNPIP

SEQ ID NO: 130975 - protein, 7 aa, synthetic construct
LMRNVEK

SEQ ID NO: 130976 - protein, 7 aa, synthetic construct
LMRQGLN

SEQ ID NO: 130977 - protein, 7 aa, synthetic construct
LMRQNSG

SEQ ID NO: 130978 - protein, 7 aa, synthetic construct
LMRSDKS

SEQ ID NO: 130979 - protein, 7 aa, synthetic construct
LMRSSTG

SEQ ID NO: 130980 - protein, 7 aa, synthetic construct
LMRTEKQ

SEQ ID NO: 130981 - protein, 7 aa, synthetic construct
LMRTEKY

SEQ ID NO: 130982 - protein, 7 aa, synthetic construct
LMRTQHA

SEQ ID NO: 130983 - protein, 7 aa, synthetic construct
LMRVQKE

SEQ ID NO: 130984 - protein, 7 aa, synthetic construct
LMSNIQR

SEQ ID NO: 130985 - protein, 7 aa, synthetic construct
LMSQNRM

SEQ ID NO: 130986 - protein, 7 aa, synthetic construct
LMSSSKY

SEQ ID NO: 130987 - protein, 7 aa, synthetic construct
LMTHYKP

SEQ ID NO: 130988 - protein, 7 aa, synthetic construct
LMTKYNP

SEQ ID NO: 130989 - protein, 7 aa, synthetic construct
LMTNRHN

SEQ ID NO: 130990 - protein, 7 aa, synthetic construct
LMTNVHK

SEQ ID NO: 130991 - protein, 7 aa, synthetic construct
LMTNYKP

SEQ ID NO: 130992 - protein, 7 aa, synthetic construct
LMTPREK

SEQ ID NO: 130993 - protein, 7 aa, synthetic construct
LMTRGAG

SEQ ID NO: 130994 - protein, 7 aa, synthetic construct
LMTRNKE

SEQ ID NO: 130995 - protein, 7 aa, synthetic construct
LMTSKYT

SEQ ID NO: 130996 - protein, 7 aa, synthetic construct
LMTTTRM

SEQ ID NO: 130997 - protein, 7 aa, synthetic construct
LMVTTRA

SEQ ID NO: 130998 - protein, 7 aa, synthetic construct
LMYKEKA

SEQ ID NO: 130999 - protein, 7 aa, synthetic construct
LNAERQR

SEQ ID NO: 131000 - protein, 7 aa, synthetic construct
LNAERVR

SEQ ID NO: 131001 - protein, 7 aa, synthetic construct
LNANSNR

SEQ ID NO: 131002 - protein, 7 aa, synthetic construct
LNAPRMM

SEQ ID NO: 131003 - protein, 7 aa, synthetic construct
LNARASY

SEQ ID NO: 131004 - protein, 7 aa, synthetic construct
LNARTHL

SEQ ID NO: 131005 - protein, 7 aa, synthetic construct
LNASHRL

SEQ ID NO: 131006 - protein, 7 aa, synthetic construct
LNASSHR

SEQ ID NO: 131007 - protein, 7 aa, synthetic construct
LNAVKLT

SEQ ID NO: 131008 - protein, 7 aa, synthetic construct
LNDIGRR

SEQ ID NO: 131009 - protein, 7 aa, synthetic construct
LNDKPRS

SEQ ID NO: 131010 - protein, 7 aa, synthetic construct
LNDRFRH

SEQ ID NO: 131011 - protein, 7 aa, synthetic construct
LNEGRRS

SEQ ID NO: 131012 - protein, 7 aa, synthetic construct
LNEMTRR

SEQ ID NO: 131013 - protein, 7 aa, synthetic construct
LNERPIK

SEQ ID NO: 131014 - protein, 7 aa, synthetic construct
LNERTRS

SEQ ID NO: 131015 - protein, 7 aa, synthetic construct
LNGFHTK

SEQ ID NO: 131016 - protein, 7 aa, synthetic construct
LNGGSYR

SEQ ID NO: 131017 - protein, 7 aa, synthetic construct
LNGLHTR

SEQ ID NO: 131018 - protein, 7 aa, synthetic construct
LNGLRLQ

SEQ ID NO: 131019 - protein, 7 aa, synthetic construct
LNGNPRY

SEQ ID NO: 131020 - protein, 7 aa, synthetic construct
LNGPNRF

SEQ ID NO: 131021 - protein, 7 aa, synthetic construct
LNGYQGR

SEQ ID NO: 131022 - protein, 7 aa, synthetic construct
LNGYSHK

SEQ ID NO: 131023 - protein, 7 aa, synthetic construct
LNGYVAK

SEQ ID NO: 131024 - protein, 7 aa, synthetic construct
LNHAIKL

SEQ ID NO: 131025 - protein, 7 aa, synthetic construct
LNHAPRM

SEQ ID NO: 131026 - protein, 7 aa, synthetic construct
LNHARQT

SEQ ID NO: 131027 - protein, 7 aa, synthetic construct
LNHGKEK

SEQ ID NO: 131028 - protein, 7 aa, synthetic construct
LNHGMKF

SEQ ID NO: 131029 - protein, 7 aa, synthetic construct
LNHGTSR

SEQ ID NO: 131030 - protein, 7 aa, synthetic construct
LNHGVRL

SEQ ID NO: 131031 - protein, 7 aa, synthetic construct
LNHHMNK

SEQ ID NO: 131032 - protein, 7 aa, synthetic construct
LNHKAFQ

SEQ ID NO: 131033 - protein, 7 aa, synthetic construct
LNHKTIY

SEQ ID NO: 131034 - protein, 7 aa, synthetic construct
LNHMVQK

SEQ ID NO: 131035 - protein, 7 aa, synthetic construct
LNHPTAR

SEQ ID NO: 131036 - protein, 7 aa, synthetic construct
LNHPTGR

SEQ ID NO: 131037 - protein, 7 aa, synthetic construct
LNHQFTK

SEQ ID NO: 131038 - protein, 7 aa, synthetic construct
LNHRPIP

SEQ ID NO: 131039 - protein, 7 aa, synthetic construct
LNHRTQI

SEQ ID NO: 131040 - protein, 7 aa, synthetic construct
LNHSGPK

SEQ ID NO: 131041 - protein, 7 aa, synthetic construct
LNHSHRI

SEQ ID NO: 131042 - protein, 7 aa, synthetic construct
LNHTFKS

SEQ ID NO: 131043 - protein, 7 aa, synthetic construct
LNHTNKY

SEQ ID NO: 131044 - protein, 7 aa, synthetic construct
LNHTPKW

SEQ ID NO: 131045 - protein, 7 aa, synthetic construct
LNHTRGM

SEQ ID NO: 131046 - protein, 7 aa, synthetic construct
LNHTSMR

SEQ ID NO: 131047 - protein, 7 aa, synthetic construct
LNHVARS

SEQ ID NO: 131048 - protein, 7 aa, synthetic construct
LNHVKAT

SEQ ID NO: 131049 - protein, 7 aa, synthetic construct
LNIHASK

SEQ ID NO: 131050 - protein, 7 aa, synthetic construct
LNINRDK

SEQ ID NO: 131051 - protein, 7 aa, synthetic construct
LNIQRNV

SEQ ID NO: 131052 - protein, 7 aa, synthetic construct
LNIQRQV

SEQ ID NO: 131053 - protein, 7 aa, synthetic construct
LNIRIGS

SEQ ID NO: 131054 - protein, 7 aa, synthetic construct
LNITQKH

SEQ ID NO: 131055 - protein, 7 aa, synthetic construct
LNITRTQ

SEQ ID NO: 131056 - protein, 7 aa, synthetic construct
LNKAVQS

SEQ ID NO: 131057 - protein, 7 aa, synthetic construct
LNKENKW

SEQ ID NO: 131058 - protein, 7 aa, synthetic construct
LNKFNRD

SEQ ID NO: 131059 - protein, 7 aa, synthetic construct
LNKHIPY

SEQ ID NO: 131060 - protein, 7 aa, synthetic construct
LNKHLTH

SEQ ID NO: 131061 - protein, 7 aa, synthetic construct
LNKKEYF

SEQ ID NO: 131062 - protein, 7 aa, synthetic construct
LNKLQSY

SEQ ID NO: 131063 - protein, 7 aa, synthetic construct
LNKQVYS

SEQ ID NO: 131064 - protein, 7 aa, synthetic construct
LNKRAEQ

SEQ ID NO: 131065 - protein, 7 aa, synthetic construct
LNKSDSK

SEQ ID NO: 131066 - protein, 7 aa, synthetic construct
LNKSIEK

SEQ ID NO: 131067 - protein, 7 aa, synthetic construct
LNKTYDR

SEQ ID NO: 131068 - protein, 7 aa, synthetic construct
LNKVSYP

SEQ ID NO: 131069 - protein, 7 aa, synthetic construct
LNKYAGS

SEQ ID NO: 131070 - protein, 7 aa, synthetic construct
LNKYENK

SEQ ID NO: 131071 - protein, 7 aa, synthetic construct
LNKYQPI

SEQ ID NO: 131072 - protein, 7 aa, synthetic construct
LNLETKR

SEQ ID NO: 131073 - protein, 7 aa, synthetic construct
LNLHASR

SEQ ID NO: 131074 - protein, 7 aa, synthetic construct
LNMHLRG

SEQ ID NO: 131075 - protein, 7 aa, synthetic construct
LNMHMRS

SEQ ID NO: 131076 - protein, 7 aa, synthetic construct
LNMNTAR

SEQ ID NO: 131077 - protein, 7 aa, synthetic construct
LNMQAGR

SEQ ID NO: 131078 - protein, 7 aa, synthetic construct
LNMTKLM

SEQ ID NO: 131079 - protein, 7 aa, synthetic construct
LNMYSKA

SEQ ID NO: 131080 - protein, 7 aa, synthetic construct
LNNARTY

SEQ ID NO: 131081 - protein, 7 aa, synthetic construct
LNNAYRN

SEQ ID NO: 131082 - protein, 7 aa, synthetic construct
LNNFAQK

SEQ ID NO: 131083 - protein, 7 aa, synthetic construct
LNNHTGR

SEQ ID NO: 131084 - protein, 7 aa, synthetic construct
LNNHVAR

SEQ ID NO: 131085 - protein, 7 aa, synthetic construct
LNNIKIT

SEQ ID NO: 131086 - protein, 7 aa, synthetic construct
LNNKPKD

SEQ ID NO: 131087 - protein, 7 aa, synthetic construct
LNNNYGK

SEQ ID NO: 131088 - protein, 7 aa, synthetic construct
LNNQAQR

SEQ ID NO: 131089 - protein, 7 aa, synthetic construct
LNNSIQR

SEQ ID NO: 131090 - protein, 7 aa, synthetic construct
LNNSISR

SEQ ID NO: 131091 - protein, 7 aa, synthetic construct
LNNSPRL

SEQ ID NO: 131092 - protein, 7 aa, synthetic construct
LNNVRQH

SEQ ID NO: 131093 - protein, 7 aa, synthetic construct
LNNYPNK

SEQ ID NO: 131094 - protein, 7 aa, synthetic construct
LNPGGSR

SEQ ID NO: 131095 - protein, 7 aa, synthetic construct
LNPKIHY

SEQ ID NO: 131096 - protein, 7 aa, synthetic construct
LNPRHQN

SEQ ID NO: 131097 - protein, 7 aa, synthetic construct
LNPRISH

SEQ ID NO: 131098 - protein, 7 aa, synthetic construct
LNPYAKP

SEQ ID NO: 131099 - protein, 7 aa, synthetic construct
LNQAKQW

SEQ ID NO: 131100 - protein, 7 aa, synthetic construct
LNQFASK

SEQ ID NO: 131101 - protein, 7 aa, synthetic construct
LNQGLHK

SEQ ID NO: 131102 - protein, 7 aa, synthetic construct
LNQHHLK

SEQ ID NO: 131103 - protein, 7 aa, synthetic construct
LNQHTRI

SEQ ID NO: 131104 - protein, 7 aa, synthetic construct
LNQKADK

SEQ ID NO: 131105 - protein, 7 aa, synthetic construct
LNQLARL

SEQ ID NO: 131106 - protein, 7 aa, synthetic construct
LNQMARL

SEQ ID NO: 131107 - protein, 7 aa, synthetic construct
LNQNTRL

SEQ ID NO: 131108 - protein, 7 aa, synthetic construct
LNQREKT

SEQ ID NO: 131109 - protein, 7 aa, synthetic construct
LNQRMGF

SEQ ID NO: 131110 - protein, 7 aa, synthetic construct
LNQRQDK

SEQ ID NO: 131111 - protein, 7 aa, synthetic construct
LNQRVFQ

SEQ ID NO: 131112 - protein, 7 aa, synthetic construct
LNQSPSR

SEQ ID NO: 131113 - protein, 7 aa, synthetic construct
LNQTRIV

SEQ ID NO: 131114 - protein, 7 aa, synthetic construct
LNQVRGF

SEQ ID NO: 131115 - protein, 7 aa, synthetic construct
LNRDGIK

SEQ ID NO: 131116 - protein, 7 aa, synthetic construct
LNRDMVK

SEQ ID NO: 131117 - protein, 7 aa, synthetic construct
LNREGVR

SEQ ID NO: 131118 - protein, 7 aa, synthetic construct
LNREILR

SEQ ID NO: 131119 - protein, 7 aa, synthetic construct
LNREKQQ

SEQ ID NO: 131120 - protein, 7 aa, synthetic construct
LNREKVL

SEQ ID NO: 131121 - protein, 7 aa, synthetic construct
LNREKYL

SEQ ID NO: 131122 - protein, 7 aa, synthetic construct
LNRGSLA

SEQ ID NO: 131123 - protein, 7 aa, synthetic construct
LNRHIPA

SEQ ID NO: 131124 - protein, 7 aa, synthetic construct
LNRIIGQ

SEQ ID NO: 131125 - protein, 7 aa, synthetic construct
LNRISKE

SEQ ID NO: 131126 - protein, 7 aa, synthetic construct
LNRIVHN

SEQ ID NO: 131127 - protein, 7 aa, synthetic construct
LNRMHSP

SEQ ID NO: 131128 - protein, 7 aa, synthetic construct
LNRNTGY

SEQ ID NO: 131129 - protein, 7 aa, synthetic construct
LNRNVIN

SEQ ID NO: 131130 - protein, 7 aa, synthetic construct
LNRPLNT

SEQ ID NO: 131131 - protein, 7 aa, synthetic construct
LNRPPTI

SEQ ID NO: 131132 - protein, 7 aa, synthetic construct
LNRQIAN

SEQ ID NO: 131133 - protein, 7 aa, synthetic construct
LNRQISS

SEQ ID NO: 131134 - protein, 7 aa, synthetic construct
LNRQKFD

SEQ ID NO: 131135 - protein, 7 aa, synthetic construct
LNRQPII

SEQ ID NO: 131136 - protein, 7 aa, synthetic construct
LNRVINA

SEQ ID NO: 131137 - protein, 7 aa, synthetic construct
LNRVRTE

SEQ ID NO: 131138 - protein, 7 aa, synthetic construct
LNSARDR

SEQ ID NO: 131139 - protein, 7 aa, synthetic construct
LNSERKM

SEQ ID NO: 131140 - protein, 7 aa, synthetic construct
LNSHANR

SEQ ID NO: 131141 - protein, 7 aa, synthetic construct
LNSKYAI

SEQ ID NO: 131142 - protein, 7 aa, synthetic construct
LNSNARM

SEQ ID NO: 131143 - protein, 7 aa, synthetic construct
LNSYRGA

SEQ ID NO: 131144 - protein, 7 aa, synthetic construct
LNTAKNW

SEQ ID NO: 131145 - protein, 7 aa, synthetic construct
LNTAKQW

SEQ ID NO: 131146 - protein, 7 aa, synthetic construct
LNTNKHM

SEQ ID NO: 131147 - protein, 7 aa, synthetic construct
LNTNNQR

SEQ ID NO: 131148 - protein, 7 aa, synthetic construct
LNTPRSI

SEQ ID NO: 131149 - protein, 7 aa, synthetic construct
LNTPRSV

SEQ ID NO: 131150 - protein, 7 aa, synthetic construct
LNTQASR

SEQ ID NO: 131151 - protein, 7 aa, synthetic construct
LNTTDRR

SEQ ID NO: 131152 - protein, 7 aa, synthetic construct
LNTTKNW

SEQ ID NO: 131153 - protein, 7 aa, synthetic construct
LNTYHAK

SEQ ID NO: 131154 - protein, 7 aa, synthetic construct
LNTYVKG

SEQ ID NO: 131155 - protein, 7 aa, synthetic construct
LNTYYKN

SEQ ID NO: 131156 - protein, 7 aa, synthetic construct
LNVARGH

SEQ ID NO: 131157 - protein, 7 aa, synthetic construct
LNVHTQR

SEQ ID NO: 131158 - protein, 7 aa, synthetic construct
LNVKERF

SEQ ID NO: 131159 - protein, 7 aa, synthetic construct
LNVMPRV

SEQ ID NO: 131160 - protein, 7 aa, synthetic construct
LNVSMAR

SEQ ID NO: 131161 - protein, 7 aa, synthetic construct
LNVSRNT

SEQ ID NO: 131162 - protein, 7 aa, synthetic construct
LNWPKQD

SEQ ID NO: 131163 - protein, 7 aa, synthetic construct
LNYAIKA

SEQ ID NO: 131164 - protein, 7 aa, synthetic construct
LNYEMGK

SEQ ID NO: 131165 - protein, 7 aa, synthetic construct
LNYKYSG

SEQ ID NO: 131166 - protein, 7 aa, synthetic construct
LNYNSKS

SEQ ID NO: 131167 - protein, 7 aa, synthetic construct
LNYPTTK

SEQ ID NO: 131168 - protein, 7 aa, synthetic construct
LNYSTKY

SEQ ID NO: 131169 - protein, 7 aa, synthetic construct
LPAAMTR

SEQ ID NO: 131170 - protein, 7 aa, synthetic construct
LPAFSKN

SEQ ID NO: 131171 - protein, 7 aa, synthetic construct
LPAHVTR

SEQ ID NO: 131172 - protein, 7 aa, synthetic construct
LPAIYKS

SEQ ID NO: 131173 - protein, 7 aa, synthetic construct
LPAMKFN

SEQ ID NO: 131174 - protein, 7 aa, synthetic construct
LPANHMK

SEQ ID NO: 131175 - protein, 7 aa, synthetic construct
LPARIHA

SEQ ID NO: 131176 - protein, 7 aa, synthetic construct
LPARMMS

SEQ ID NO: 131177 - protein, 7 aa, synthetic construct
LPATHKL

SEQ ID NO: 131178 - protein, 7 aa, synthetic construct
LPAVNNR

SEQ ID NO: 131179 - protein, 7 aa, synthetic construct
LPDIKTR

SEQ ID NO: 131180 - protein, 7 aa, synthetic construct
LPDKYFK

SEQ ID NO: 131181 - protein, 7 aa, synthetic construct
LPDNKRF

SEQ ID NO: 131182 - protein, 7 aa, synthetic construct
LPDRHRV

SEQ ID NO: 131183 - protein, 7 aa, synthetic construct
LPDRPRV

SEQ ID NO: 131184 - protein, 7 aa, synthetic construct
LPDRRDK

SEQ ID NO: 131185 - protein, 7 aa, synthetic construct
LPEKRYL

SEQ ID NO: 131186 - protein, 7 aa, synthetic construct
LPERIQR

SEQ ID NO: 131187 - protein, 7 aa, synthetic construct
LPGARIT

SEQ ID NO: 131188 - protein, 7 aa, synthetic construct
LPGASYR

SEQ ID NO: 131189 - protein, 7 aa, synthetic construct
LPGATKY

SEQ ID NO: 131190 - protein, 7 aa, synthetic construct
LPGENTK

SEQ ID NO: 131191 - protein, 7 aa, synthetic construct
LPGFAKA

SEQ ID NO: 131192 - protein, 7 aa, synthetic construct
LPGHKFV

SEQ ID NO: 131193 - protein, 7 aa, synthetic construct
LPGHRGA

SEQ ID NO: 131194 - protein, 7 aa, synthetic construct
LPGHTYI

SEQ ID NO: 131195 - protein, 7 aa, synthetic construct
LPGSYKG

SEQ ID NO: 131196 - protein, 7 aa, synthetic construct
LPGTQSA

SEQ ID NO: 131197 - protein, 7 aa, synthetic construct
LPGVHKM

SEQ ID NO: 131198 - protein, 7 aa, synthetic construct
LPGYLKA

SEQ ID NO: 131199 - protein, 7 aa, synthetic construct
LPHFAKA

SEQ ID NO: 131200 - protein, 7 aa, synthetic construct
LPHGTRN

SEQ ID NO: 131201 - protein, 7 aa, synthetic construct
LPHHMKV

SEQ ID NO: 131202 - protein, 7 aa, synthetic construct
LPHHTKA

SEQ ID NO: 131203 - protein, 7 aa, synthetic construct
LPHINRN

SEQ ID NO: 131204 - protein, 7 aa, synthetic construct
LPHIVKS

SEQ ID NO: 131205 - protein, 7 aa, synthetic construct
LPHKGNF

SEQ ID NO: 131206 - protein, 7 aa, synthetic construct
LPHKMLV

SEQ ID NO: 131207 - protein, 7 aa, synthetic construct
LPHKQMT

SEQ ID NO: 131208 - protein, 7 aa, synthetic construct
LPHKTVN

SEQ ID NO: 131209 - protein, 7 aa, synthetic construct
LPHKYVQ

SEQ ID NO: 131210 - protein, 7 aa, synthetic construct
LPHLAKA

SEQ ID NO: 131211 - protein, 7 aa, synthetic construct
LPHMIKN

SEQ ID NO: 131212 - protein, 7 aa, synthetic construct
LPHNNRG

SEQ ID NO: 131213 - protein, 7 aa, synthetic construct
LPHNPRQ

SEQ ID NO: 131214 - protein, 7 aa, synthetic construct
LPHNRAG

SEQ ID NO: 131215 - protein, 7 aa, synthetic construct
LPHNTGR

SEQ ID NO: 131216 - protein, 7 aa, synthetic construct
LPHNVKQ

SEQ ID NO: 131217 - protein, 7 aa, synthetic construct
LPHQARQ

SEQ ID NO: 131218 - protein, 7 aa, synthetic construct
LPHQKHV

SEQ ID NO: 131219 - protein, 7 aa, synthetic construct
LPHQKLV

SEQ ID NO: 131220 - protein, 7 aa, synthetic construct
LPHQNRQ

SEQ ID NO: 131221 - protein, 7 aa, synthetic construct
LPHQQSK

SEQ ID NO: 131222 - protein, 7 aa, synthetic construct
LPHRKQE

SEQ ID NO: 131223 - protein, 7 aa, synthetic construct
LPHRNVN

SEQ ID NO: 131224 - protein, 7 aa, synthetic construct
LPHRQSA

SEQ ID NO: 131225 - protein, 7 aa, synthetic construct
LPHRTIN

SEQ ID NO: 131226 - protein, 7 aa, synthetic construct
LPHVKFQ

SEQ ID NO: 131227 - protein, 7 aa, synthetic construct
LPHVVKQ

SEQ ID NO: 131228 - protein, 7 aa, synthetic construct
LPIGGHR

SEQ ID NO: 131229 - protein, 7 aa, synthetic construct
LPIKSMM

SEQ ID NO: 131230 - protein, 7 aa, synthetic construct
LPINARS

SEQ ID NO: 131231 - protein, 7 aa, synthetic construct
LPIPKSN

SEQ ID NO: 131232 - protein, 7 aa, synthetic construct
LPIRSRD

SEQ ID NO: 131233 - protein, 7 aa, synthetic construct
LPISQRA

SEQ ID NO: 131234 - protein, 7 aa, synthetic construct
LPKEMRY

SEQ ID NO: 131235 - protein, 7 aa, synthetic construct
LPKERHQ

SEQ ID NO: 131236 - protein, 7 aa, synthetic construct
LPKFKYD

SEQ ID NO: 131237 - protein, 7 aa, synthetic construct
LPKFQGN

SEQ ID NO: 131238 - protein, 7 aa, synthetic construct
LPKGYSH

SEQ ID NO: 131239 - protein, 7 aa, synthetic construct
LPKHDAK

SEQ ID NO: 131240 - protein, 7 aa, synthetic construct
LPKHDRI

SEQ ID NO: 131241 - protein, 7 aa, synthetic construct
LPKHPQN

SEQ ID NO: 131242 - protein, 7 aa, synthetic construct
LPKHTMT

SEQ ID NO: 131243 - protein, 7 aa, synthetic construct
LPKIGVM

SEQ ID NO: 131244 - protein, 7 aa, synthetic construct
LPKIHHQ

SEQ ID NO: 131245 - protein, 7 aa, synthetic construct
LPKIPIT

SEQ ID NO: 131246 - protein, 7 aa, synthetic construct
LPKLNNY

SEQ ID NO: 131247 - protein, 7 aa, synthetic construct
LPKLPSH

SEQ ID NO: 131248 - protein, 7 aa, synthetic construct
LPKNFHQ

SEQ ID NO: 131249 - protein, 7 aa, synthetic construct
LPKPMYD

SEQ ID NO: 131250 - protein, 7 aa, synthetic construct
LPKQVIY

SEQ ID NO: 131251 - protein, 7 aa, synthetic construct
LPKRDFN

SEQ ID NO: 131252 - protein, 7 aa, synthetic construct
LPKRNEN

SEQ ID NO: 131253 - protein, 7 aa, synthetic construct
LPKSPIH

SEQ ID NO: 131254 - protein, 7 aa, synthetic construct
LPKVAYG

SEQ ID NO: 131255 - protein, 7 aa, synthetic construct
LPKVHFA

SEQ ID NO: 131256 - protein, 7 aa, synthetic construct
LPKVMHM

SEQ ID NO: 131257 - protein, 7 aa, synthetic construct
LPKYEKH

SEQ ID NO: 131258 - protein, 7 aa, synthetic construct
LPKYEKQ

SEQ ID NO: 131259 - protein, 7 aa, synthetic construct
LPKYSAT

SEQ ID NO: 131260 - protein, 7 aa, synthetic construct
LPKYSGG

SEQ ID NO: 131261 - protein, 7 aa, synthetic construct
LPKYVTG

SEQ ID NO: 131262 - protein, 7 aa, synthetic construct
LPLAKHA

SEQ ID NO: 131263 - protein, 7 aa, synthetic construct
LPLHRGN

SEQ ID NO: 131264 - protein, 7 aa, synthetic construct
LPLKTQH

SEQ ID NO: 131265 - protein, 7 aa, synthetic construct
LPLNPKM

SEQ ID NO: 131266 - protein, 7 aa, synthetic construct
LPLRAHA

SEQ ID NO: 131267 - protein, 7 aa, synthetic construct
LPLRHSS

SEQ ID NO: 131268 - protein, 7 aa, synthetic construct
LPLVTRP

SEQ ID NO: 131269 - protein, 7 aa, synthetic construct
LPMGTRQ

SEQ ID NO: 131270 - protein, 7 aa, synthetic construct
LPMHSAK

SEQ ID NO: 131271 - protein, 7 aa, synthetic construct
LPMKIST

SEQ ID NO: 131272 - protein, 7 aa, synthetic construct
LPMKPNH

SEQ ID NO: 131273 - protein, 7 aa, synthetic construct
LPMKQMH

SEQ ID NO: 131274 - protein, 7 aa, synthetic construct
LPMRHQS

SEQ ID NO: 131275 - protein, 7 aa, synthetic construct
LPMSKTF

SEQ ID NO: 131276 - protein, 7 aa, synthetic construct
LPMTNKY

SEQ ID NO: 131277 - protein, 7 aa, synthetic construct
LPMVKSA

SEQ ID NO: 131278 - protein, 7 aa, synthetic construct
LPNARHM

SEQ ID NO: 131279 - protein, 7 aa, synthetic construct
LPNAVLR

SEQ ID NO: 131280 - protein, 7 aa, synthetic construct
LPNFAKL

SEQ ID NO: 131281 - protein, 7 aa, synthetic construct
LPNGWMK

SEQ ID NO: 131282 - protein, 7 aa, synthetic construct
LPNHMRS

SEQ ID NO: 131283 - protein, 7 aa, synthetic construct
LPNHNNR

SEQ ID NO: 131284 - protein, 7 aa, synthetic construct
LPNIFKG

SEQ ID NO: 131285 - protein, 7 aa, synthetic construct
LPNKHFS

SEQ ID NO: 131286 - protein, 7 aa, synthetic construct
LPNKQHH

SEQ ID NO: 131287 - protein, 7 aa, synthetic construct
LPNLVRG

SEQ ID NO: 131288 - protein, 7 aa, synthetic construct
LPPATHK

SEQ ID NO: 131289 - protein, 7 aa, synthetic construct
LPPHYKS

SEQ ID NO: 131290 - protein, 7 aa, synthetic construct
LPPKHPL

SEQ ID NO: 131291 - protein, 7 aa, synthetic construct
LPPNHKY

SEQ ID NO: 131292 - protein, 7 aa, synthetic construct
LPPPRIQ

SEQ ID NO: 131293 - protein, 7 aa, synthetic construct
LPPRERQ

SEQ ID NO: 131294 - protein, 7 aa, synthetic construct
LPPRIMS

SEQ ID NO: 131295 - protein, 7 aa, synthetic construct
LPPRITH

SEQ ID NO: 131296 - protein, 7 aa, synthetic construct
LPPRSQI

SEQ ID NO: 131297 - protein, 7 aa, synthetic construct
LPPRVAM

SEQ ID NO: 131298 - protein, 7 aa, synthetic construct
LPPSRHQ

SEQ ID NO: 131299 - protein, 7 aa, synthetic construct
LPPTGHR

SEQ ID NO: 131300 - protein, 7 aa, synthetic construct
LPPTHRN

SEQ ID NO: 131301 - protein, 7 aa, synthetic construct
LPPVSRS

SEQ ID NO: 131302 - protein, 7 aa, synthetic construct
LPQAGYR

SEQ ID NO: 131303 - protein, 7 aa, synthetic construct
LPQFSSK

SEQ ID NO: 131304 - protein, 7 aa, synthetic construct
LPQHNGR

SEQ ID NO: 131305 - protein, 7 aa, synthetic construct
LPQHNRN

SEQ ID NO: 131306 - protein, 7 aa, synthetic construct
LPQKIMH

SEQ ID NO: 131307 - protein, 7 aa, synthetic construct
LPQKMPI

SEQ ID NO: 131308 - protein, 7 aa, synthetic construct
LPQMAVR

SEQ ID NO: 131309 - protein, 7 aa, synthetic construct
LPQRVHM

SEQ ID NO: 131310 - protein, 7 aa, synthetic construct
LPQTQQR

SEQ ID NO: 131311 - protein, 7 aa, synthetic construct
LPQTQRN

SEQ ID NO: 131312 - protein, 7 aa, synthetic construct
LPRAERG

SEQ ID NO: 131313 - protein, 7 aa, synthetic construct
LPRAISQ

SEQ ID NO: 131314 - protein, 7 aa, synthetic construct
LPRAKLE

SEQ ID NO: 131315 - protein, 7 aa, synthetic construct
LPRASNQ

SEQ ID NO: 131316 - protein, 7 aa, synthetic construct
LPRDNHK

SEQ ID NO: 131317 - protein, 7 aa, synthetic construct
LPRDQSK

SEQ ID NO: 131318 - protein, 7 aa, synthetic construct
LPRESKM

SEQ ID NO: 131319 - protein, 7 aa, synthetic construct
LPRESTR

SEQ ID NO: 131320 - protein, 7 aa, synthetic construct
LPRGQIQ

SEQ ID NO: 131321 - protein, 7 aa, synthetic construct
LPRGSYH

SEQ ID NO: 131322 - protein, 7 aa, synthetic construct
LPRGTHN

SEQ ID NO: 131323 - protein, 7 aa, synthetic construct
LPRHHGP

SEQ ID NO: 131324 - protein, 7 aa, synthetic construct
LPRHLNA

SEQ ID NO: 131325 - protein, 7 aa, synthetic construct
LPRHMPA

SEQ ID NO: 131326 - protein, 7 aa, synthetic construct
LPRHQSV

SEQ ID NO: 131327 - protein, 7 aa, synthetic construct
LPRHVNG

SEQ ID NO: 131328 - protein, 7 aa, synthetic construct
LPRIPGV

SEQ ID NO: 131329 - protein, 7 aa, synthetic construct
LPRKDEK

SEQ ID NO: 131330 - protein, 7 aa, synthetic construct
LPRKPDN

SEQ ID NO: 131331 - protein, 7 aa, synthetic construct
LPRLVDK

SEQ ID NO: 131332 - protein, 7 aa, synthetic construct
LPRMGYA

SEQ ID NO: 131333 - protein, 7 aa, synthetic construct
LPRMIHA

SEQ ID NO: 131334 - protein, 7 aa, synthetic construct
LPRMIPH

SEQ ID NO: 131335 - protein, 7 aa, synthetic construct
LPRMLSN

SEQ ID NO: 131336 - protein, 7 aa, synthetic construct
LPRNFRE

SEQ ID NO: 131337 - protein, 7 aa, synthetic construct
LPRNIAA

SEQ ID NO: 131338 - protein, 7 aa, synthetic construct
LPRNNMQ

SEQ ID NO: 131339 - protein, 7 aa, synthetic construct
LPRNSAH

SEQ ID NO: 131340 - protein, 7 aa, synthetic construct
LPRNTQG

SEQ ID NO: 131341 - protein, 7 aa, synthetic construct
LPRNVGM

SEQ ID NO: 131342 - protein, 7 aa, synthetic construct
LPRPQHT

SEQ ID NO: 131343 - protein, 7 aa, synthetic construct
LPRPSML

SEQ ID NO: 131344 - protein, 7 aa, synthetic construct
LPRQQGQ

SEQ ID NO: 131345 - protein, 7 aa, synthetic construct
LPRQQTL

SEQ ID NO: 131346 - protein, 7 aa, synthetic construct
LPRQSHQ

SEQ ID NO: 131347 - protein, 7 aa, synthetic construct
LPRQSIV

SEQ ID NO: 131348 - protein, 7 aa, synthetic construct
LPRQVTA

SEQ ID NO: 131349 - protein, 7 aa, synthetic construct
LPRSDKM

SEQ ID NO: 131350 - protein, 7 aa, synthetic construct
LPRSQVH

SEQ ID NO: 131351 - protein, 7 aa, synthetic construct
LPRSTGQ

SEQ ID NO: 131352 - protein, 7 aa, synthetic construct
LPRSYSA

SEQ ID NO: 131353 - protein, 7 aa, synthetic construct
LPRTHAT

SEQ ID NO: 131354 - protein, 7 aa, synthetic construct
LPRTRVE

SEQ ID NO: 131355 - protein, 7 aa, synthetic construct
LPRTTNQ

SEQ ID NO: 131356 - protein, 7 aa, synthetic construct
LPRVASQ

SEQ ID NO: 131357 - protein, 7 aa, synthetic construct
LPRVATH

SEQ ID NO: 131358 - protein, 7 aa, synthetic construct
LPRVEGR

SEQ ID NO: 131359 - protein, 7 aa, synthetic construct
LPRVGIN

SEQ ID NO: 131360 - protein, 7 aa, synthetic construct
LPRVNAH

SEQ ID NO: 131361 - protein, 7 aa, synthetic construct
LPRVPQT

SEQ ID NO: 131362 - protein, 7 aa, synthetic construct
LPRVQPV

SEQ ID NO: 131363 - protein, 7 aa, synthetic construct
LPRVRVE

SEQ ID NO: 131364 - protein, 7 aa, synthetic construct
LPRVSQG

SEQ ID NO: 131365 - protein, 7 aa, synthetic construct
LPRVTHA

SEQ ID NO: 131366 - protein, 7 aa, synthetic construct
LPSHSKY

SEQ ID NO: 131367 - protein, 7 aa, synthetic construct
LPSKGAF

SEQ ID NO: 131368 - protein, 7 aa, synthetic construct
LPSRGHP

SEQ ID NO: 131369 - protein, 7 aa, synthetic construct
LPSRQVI

SEQ ID NO: 131370 - protein, 7 aa, synthetic construct
LPSSSWS

SEQ ID NO: 131371 - protein, 7 aa, synthetic construct
LPSSYSK

SEQ ID NO: 131372 - protein, 7 aa, synthetic construct
LPSYAKM

SEQ ID NO: 131373 - protein, 7 aa, synthetic construct
LPSYAPK

SEQ ID NO: 131374 - protein, 7 aa, synthetic construct
LPSYAQK

SEQ ID NO: 131375 - protein, 7 aa, synthetic construct
LPSYKLQ

SEQ ID NO: 131376 - protein, 7 aa, synthetic construct
LPTERPR

SEQ ID NO: 131377 - protein, 7 aa, synthetic construct
LPTFTKN

SEQ ID NO: 131378 - protein, 7 aa, synthetic construct
LPTGHKY

SEQ ID NO: 131379 - protein, 7 aa, synthetic construct
LPTGYRG

SEQ ID NO: 131380 - protein, 7 aa, synthetic construct
LPTHRHS

SEQ ID NO: 131381 - protein, 7 aa, synthetic construct
LPTHRVV

SEQ ID NO: 131382 - protein, 7 aa, synthetic construct
LPTKEHR

SEQ ID NO: 131383 - protein, 7 aa, synthetic construct
LPTMHRQ

SEQ ID NO: 131384 - protein, 7 aa, synthetic construct
LPTMTRN

SEQ ID NO: 131385 - protein, 7 aa, synthetic construct
LPTRFKD

SEQ ID NO: 131386 - protein, 7 aa, synthetic construct
LPTRIHQ

SEQ ID NO: 131387 - protein, 7 aa, synthetic construct
LPTRLKD

SEQ ID NO: 131388 - protein, 7 aa, synthetic construct
LPTRPMS

SEQ ID NO: 131389 - protein, 7 aa, synthetic construct
LPTTMRG

SEQ ID NO: 131390 - protein, 7 aa, synthetic construct
LPVKIVS

SEQ ID NO: 131391 - protein, 7 aa, synthetic construct
LPVPKHS

SEQ ID NO: 131392 - protein, 7 aa, synthetic construct
LPVRTIP

SEQ ID NO: 131393 - protein, 7 aa, synthetic construct
LPVRTNI

SEQ ID NO: 131394 - protein, 7 aa, synthetic construct
LPVTNRY

SEQ ID NO: 131395 - protein, 7 aa, synthetic construct
LPYAIKP

SEQ ID NO: 131396 - protein, 7 aa, synthetic construct
LPYANKG

SEQ ID NO: 131397 - protein, 7 aa, synthetic construct
LPYAQRA

SEQ ID NO: 131398 - protein, 7 aa, synthetic construct
LPYATNK

SEQ ID NO: 131399 - protein, 7 aa, synthetic construct
LPYGKQM

SEQ ID NO: 131400 - protein, 7 aa, synthetic construct
LPYGTAY

SEQ ID NO: 131401 - protein, 7 aa, synthetic construct
LPYNMKQ

SEQ ID NO: 131402 - protein, 7 aa, synthetic construct
LPYNSKG

SEQ ID NO: 131403 - protein, 7 aa, synthetic construct
LQAAHPR

SEQ ID NO: 131404 - protein, 7 aa, synthetic construct
LQAAHTR

SEQ ID NO: 131405 - protein, 7 aa, synthetic construct
LQAHGFK

SEQ ID NO: 131406 - protein, 7 aa, synthetic construct
LQAHMSR

SEQ ID NO: 131407 - protein, 7 aa, synthetic construct
LQAKGYL

SEQ ID NO: 131408 - protein, 7 aa, synthetic construct
LQAPRSQ

SEQ ID NO: 131409 - protein, 7 aa, synthetic construct
LQASRHV

SEQ ID NO: 131410 - protein, 7 aa, synthetic construct
LQASYKA

SEQ ID NO: 131411 - protein, 7 aa, synthetic construct
LQDKSGR

SEQ ID NO: 131412 - protein, 7 aa, synthetic construct
LQDRMVR

SEQ ID NO: 131413 - protein, 7 aa, synthetic construct
LQDSRYK

SEQ ID NO: 131414 - protein, 7 aa, synthetic construct
LQEITRK

SEQ ID NO: 131415 - protein, 7 aa, synthetic construct
LQERIRQ

SEQ ID NO: 131416 - protein, 7 aa, synthetic construct
LQERSRG

SEQ ID NO: 131417 - protein, 7 aa, synthetic construct
LQFGSAK

SEQ ID NO: 131418 - protein, 7 aa, synthetic construct
LQFKGTM

SEQ ID NO: 131419 - protein, 7 aa, synthetic construct
LQGKDSR

SEQ ID NO: 131420 - protein, 7 aa, synthetic construct
LQGKEYK

SEQ ID NO: 131421 - protein, 7 aa, synthetic construct
LQGPRIS

SEQ ID NO: 131422 - protein, 7 aa, synthetic construct
LQGSFKN

SEQ ID NO: 131423 - protein, 7 aa, synthetic construct
LQGTHPK

SEQ ID NO: 131424 - protein, 7 aa, synthetic construct
LQGTTKW

SEQ ID NO: 131425 - protein, 7 aa, synthetic construct
LQGYNQK

SEQ ID NO: 131426 - protein, 7 aa, synthetic construct
LQGYVKS

SEQ ID NO: 131427 - protein, 7 aa, synthetic construct
LQHAAMK

SEQ ID NO: 131428 - protein, 7 aa, synthetic construct
LQHAFKA

SEQ ID NO: 131429 - protein, 7 aa, synthetic construct
LQHAGLR

SEQ ID NO: 131430 - protein, 7 aa, synthetic construct
LQHGQTR

SEQ ID NO: 131431 - protein, 7 aa, synthetic construct
LQHGSMK

SEQ ID NO: 131432 - protein, 7 aa, synthetic construct
LQHHANK

SEQ ID NO: 131433 - protein, 7 aa, synthetic construct
LQHKIGI

SEQ ID NO: 131434 - protein, 7 aa, synthetic construct
LQHKMQI

SEQ ID NO: 131435 - protein, 7 aa, synthetic construct
LQHKMTV

SEQ ID NO: 131436 - protein, 7 aa, synthetic construct
LQHMLKA

SEQ ID NO: 131437 - protein, 7 aa, synthetic construct
LQHMRGI

SEQ ID NO: 131438 - protein, 7 aa, synthetic construct
LQHNIMK

SEQ ID NO: 131439 - protein, 7 aa, synthetic construct
LQHNIRG

SEQ ID NO: 131440 - protein, 7 aa, synthetic construct
LQHNVTL

SEQ ID NO: 131441 - protein, 7 aa, synthetic construct
LQHQSRN

SEQ ID NO: 131442 - protein, 7 aa, synthetic construct
LQHRQAG

SEQ ID NO: 131443 - protein, 7 aa, synthetic construct
LQHTARM

SEQ ID NO: 131444 - protein, 7 aa, synthetic construct
LQHTIPR

SEQ ID NO: 131445 - protein, 7 aa, synthetic construct
LQIGPSD

SEQ ID NO: 131446 - protein, 7 aa, synthetic construct
LQIHTPD

SEQ ID NO: 131447 - protein, 7 aa, synthetic construct
LQIKHAV

SEQ ID NO: 131448 - protein, 7 aa, synthetic construct
LQIRNVT

SEQ ID NO: 131449 - protein, 7 aa, synthetic construct
LQKAMFN

SEQ ID NO: 131450 - protein, 7 aa, synthetic construct
LQKEKYY

SEQ ID NO: 131451 - protein, 7 aa, synthetic construct
LQKEQTR

SEQ ID NO: 131452 - protein, 7 aa, synthetic construct
LQKFADR

SEQ ID NO: 131453 - protein, 7 aa, synthetic construct
LQKFTHN

SEQ ID NO: 131454 - protein, 7 aa, synthetic construct
LQKHGLH

SEQ ID NO: 131455 - protein, 7 aa, synthetic construct
LQKHTDR

SEQ ID NO: 131456 - protein, 7 aa, synthetic construct
LQKIYAG

SEQ ID NO: 131457 - protein, 7 aa, synthetic construct
LQKLRDY

SEQ ID NO: 131458 - protein, 7 aa, synthetic construct
LQKLYKD

SEQ ID NO: 131459 - protein, 7 aa, synthetic construct
LQKNQFL

SEQ ID NO: 131460 - protein, 7 aa, synthetic construct
LQKPFSN

SEQ ID NO: 131461 - protein, 7 aa, synthetic construct
LQKPRSD

SEQ ID NO: 131462 - protein, 7 aa, synthetic construct
LQKRATE

SEQ ID NO: 131463 - protein, 7 aa, synthetic construct
LQKRDLV

SEQ ID NO: 131464 - protein, 7 aa, synthetic construct
LQKRDTV

SEQ ID NO: 131465 - protein, 7 aa, synthetic construct
LQKRLNE

SEQ ID NO: 131466 - protein, 7 aa, synthetic construct
LQKRVDI

SEQ ID NO: 131467 - protein, 7 aa, synthetic construct
LQKRVEL

SEQ ID NO: 131468 - protein, 7 aa, synthetic construct
LQKVIDR

SEQ ID NO: 131469 - protein, 7 aa, synthetic construct
LQKVQAY

SEQ ID NO: 131470 - protein, 7 aa, synthetic construct
LQKYTTS

SEQ ID NO: 131471 - protein, 7 aa, synthetic construct
LQLHAKA

SEQ ID NO: 131472 - protein, 7 aa, synthetic construct
LQLRGHN

SEQ ID NO: 131473 - protein, 7 aa, synthetic construct
LQLTRTV

SEQ ID NO: 131474 - protein, 7 aa, synthetic construct
LQMKAVI

SEQ ID NO: 131475 - protein, 7 aa, synthetic construct
LQMNRQI

SEQ ID NO: 131476 - protein, 7 aa, synthetic construct
LQNKGPF

SEQ ID NO: 131477 - protein, 7 aa, synthetic construct
LQNPRRE

SEQ ID NO: 131478 - protein, 7 aa, synthetic construct
LQNQIRQ

SEQ ID NO: 131479 - protein, 7 aa, synthetic construct
LQNQVHR

SEQ ID NO: 131480 - protein, 7 aa, synthetic construct
LQNRIAI

SEQ ID NO: 131481 - protein, 7 aa, synthetic construct
LQNSGYR

SEQ ID NO: 131482 - protein, 7 aa, synthetic construct
LQNSQSR

SEQ ID NO: 131483 - protein, 7 aa, synthetic construct
LQNSRNI

SEQ ID NO: 131484 - protein, 7 aa, synthetic construct
LQNTPRN

SEQ ID NO: 131485 - protein, 7 aa, synthetic construct
LQNTRQF

SEQ ID NO: 131486 - protein, 7 aa, synthetic construct
LQNVMRQ

SEQ ID NO: 131487 - protein, 7 aa, synthetic construct
LQNYAKI

SEQ ID NO: 131488 - protein, 7 aa, synthetic construct
LQNYAQK

SEQ ID NO: 131489 - protein, 7 aa, synthetic construct
LQPHQRN

SEQ ID NO: 131490 - protein, 7 aa, synthetic construct
LQPHTGR

SEQ ID NO: 131491 - protein, 7 aa, synthetic construct
LQPHTSK

SEQ ID NO: 131492 - protein, 7 aa, synthetic construct
LQPNVHR

SEQ ID NO: 131493 - protein, 7 aa, synthetic construct
LQPRHAL

SEQ ID NO: 131494 - protein, 7 aa, synthetic construct
LQPSERR

SEQ ID NO: 131495 - protein, 7 aa, synthetic construct
LQPYTAK

SEQ ID NO: 131496 - protein, 7 aa, synthetic construct
LQQAKYI

SEQ ID NO: 131497 - protein, 7 aa, synthetic construct
LQQGIAR

SEQ ID NO: 131498 - protein, 7 aa, synthetic construct
LQQGRLM

SEQ ID NO: 131499 - protein, 7 aa, synthetic construct
LQQNNRS

SEQ ID NO: 131500 - protein, 7 aa, synthetic construct
LQQNPYN

SEQ ID NO: 131501 - protein, 7 aa, synthetic construct
LQQNRTT

SEQ ID NO: 131502 - protein, 7 aa, synthetic construct
LQQPTKH

SEQ ID NO: 131503 - protein, 7 aa, synthetic construct
LQQQKLY

SEQ ID NO: 131504 - protein, 7 aa, synthetic construct
LQQQKYT

SEQ ID NO: 131505 - protein, 7 aa, synthetic construct
LQQQNRN

SEQ ID NO: 131506 - protein, 7 aa, synthetic construct
LQQQQRQ

SEQ ID NO: 131507 - protein, 7 aa, synthetic construct
LQQQRQM

SEQ ID NO: 131508 - protein, 7 aa, synthetic construct
LQQQYAR

SEQ ID NO: 131509 - protein, 7 aa, synthetic construct
LQQSVRS

SEQ ID NO: 131510 - protein, 7 aa, synthetic construct
LQQTTRM

SEQ ID NO: 131511 - protein, 7 aa, synthetic construct
LQQTVRQ

SEQ ID NO: 131512 - protein, 7 aa, synthetic construct
LQRADVK

SEQ ID NO: 131513 - protein, 7 aa, synthetic construct
LQRATGG

SEQ ID NO: 131514 - protein, 7 aa, synthetic construct
LQRDGHD

SEQ ID NO: 131515 - protein, 7 aa, synthetic construct
LQRDKQN

SEQ ID NO: 131516 - protein, 7 aa, synthetic construct
LQRDVPR

SEQ ID NO: 131517 - protein, 7 aa, synthetic construct
LQREAGK

SEQ ID NO: 131518 - protein, 7 aa, synthetic construct
LQREAKN

SEQ ID NO: 131519 - protein, 7 aa, synthetic construct
LQREGVR

SEQ ID NO: 131520 - protein, 7 aa, synthetic construct
LQREIKY

SEQ ID NO: 131521 - protein, 7 aa, synthetic construct
LQREVKS

SEQ ID NO: 131522 - protein, 7 aa, synthetic construct
LQRIIKE

SEQ ID NO: 131523 - protein, 7 aa, synthetic construct
LQRIRDG

SEQ ID NO: 131524 - protein, 7 aa, synthetic construct
LQRKESF

SEQ ID NO: 131525 - protein, 7 aa, synthetic construct
LQRLDKM

SEQ ID NO: 131526 - protein, 7 aa, synthetic construct
LQRLKVD

SEQ ID NO: 131527 - protein, 7 aa, synthetic construct
LQRLQNT

SEQ ID NO: 131528 - protein, 7 aa, synthetic construct
LQRMKMD

SEQ ID NO: 131529 - protein, 7 aa, synthetic construct
LQRMSDK

SEQ ID NO: 131530 - protein, 7 aa, synthetic construct
LQRMSPS

SEQ ID NO: 131531 - protein, 7 aa, synthetic construct
LQRNEYK

SEQ ID NO: 131532 - protein, 7 aa, synthetic construct
LQRNVNV

SEQ ID NO: 131533 - protein, 7 aa, synthetic construct
LQRPMRE

SEQ ID NO: 131534 - protein, 7 aa, synthetic construct
LQRPPLA

SEQ ID NO: 131535 - protein, 7 aa, synthetic construct
LQRQEKF

SEQ ID NO: 131536 - protein, 7 aa, synthetic construct
LQRQKEM

SEQ ID NO: 131537 - protein, 7 aa, synthetic construct
LQRSSRE

SEQ ID NO: 131538 - protein, 7 aa, synthetic construct
LQRTASM

SEQ ID NO: 131539 - protein, 7 aa, synthetic construct
LQRTVAM

SEQ ID NO: 131540 - protein, 7 aa, synthetic construct
LQRVHKD

SEQ ID NO: 131541 - protein, 7 aa, synthetic construct
LQRVQRD

SEQ ID NO: 131542 - protein, 7 aa, synthetic construct
LQRVREQ

SEQ ID NO: 131543 - protein, 7 aa, synthetic construct
LQRVSPN

SEQ ID NO: 131544 - protein, 7 aa, synthetic construct
LQRVTHG

SEQ ID NO: 131545 - protein, 7 aa, synthetic construct
LQRYADQ

SEQ ID NO: 131546 - protein, 7 aa, synthetic construct
LQSNMNR

SEQ ID NO: 131547 - protein, 7 aa, synthetic construct
LQSNTHR

SEQ ID NO: 131548 - protein, 7 aa, synthetic construct
LQSNTQR

SEQ ID NO: 131549 - protein, 7 aa, synthetic construct
LQSPRMM

SEQ ID NO: 131550 - protein, 7 aa, synthetic construct
LQSPRNS

SEQ ID NO: 131551 - protein, 7 aa, synthetic construct
LQSQPFD

SEQ ID NO: 131552 - protein, 7 aa, synthetic construct
LQSSAKY

SEQ ID NO: 131553 - protein, 7 aa, synthetic construct
LQSSGGR

SEQ ID NO: 131554 - protein, 7 aa, synthetic construct
LQSSKQW

SEQ ID NO: 131555 - protein, 7 aa, synthetic construct
LQSSSNR

SEQ ID NO: 131556 - protein, 7 aa, synthetic construct
LQSSVRH

SEQ ID NO: 131557 - protein, 7 aa, synthetic construct
LQTARQI

SEQ ID NO: 131558 - protein, 7 aa, synthetic construct
LQTDRMR

SEQ ID NO: 131559 - protein, 7 aa, synthetic construct
LQTHIRV

SEQ ID NO: 131560 - protein, 7 aa, synthetic construct
LQTKDRM

SEQ ID NO: 131561 - protein, 7 aa, synthetic construct
LQTKPKD

SEQ ID NO: 131562 - protein, 7 aa, synthetic construct
LQTMAHR

SEQ ID NO: 131563 - protein, 7 aa, synthetic construct
LQTMQRQ

SEQ ID NO: 131564 - protein, 7 aa, synthetic construct
LQTMRDK

SEQ ID NO: 131565 - protein, 7 aa, synthetic construct
LQTNQQR

SEQ ID NO: 131566 - protein, 7 aa, synthetic construct
LQTNRNT

SEQ ID NO: 131567 - protein, 7 aa, synthetic construct
LQTQAKW

SEQ ID NO: 131568 - protein, 7 aa, synthetic construct
LQTQVRM

SEQ ID NO: 131569 - protein, 7 aa, synthetic construct
LQTRPQV

SEQ ID NO: 131570 - protein, 7 aa, synthetic construct
LQTRSAG

SEQ ID NO: 131571 - protein, 7 aa, synthetic construct
LQTSHMR

SEQ ID NO: 131572 - protein, 7 aa, synthetic construct
LQTSMRQ

SEQ ID NO: 131573 - protein, 7 aa, synthetic construct
LQTYATK

SEQ ID NO: 131574 - protein, 7 aa, synthetic construct
LQVARNN

SEQ ID NO: 131575 - protein, 7 aa, synthetic construct
LQVGPQD

SEQ ID NO: 131576 - protein, 7 aa, synthetic construct
LQVPAVM

SEQ ID NO: 131577 - protein, 7 aa, synthetic construct
LQVQSMR

SEQ ID NO: 131578 - protein, 7 aa, synthetic construct
LQVRGSL

SEQ ID NO: 131579 - protein, 7 aa, synthetic construct
LQYKTRE

SEQ ID NO: 131580 - protein, 7 aa, synthetic construct
LRAAEVR

SEQ ID NO: 131581 - protein, 7 aa, synthetic construct
LRAEMAK

SEQ ID NO: 131582 - protein, 7 aa, synthetic construct
LRAEMTR

SEQ ID NO: 131583 - protein, 7 aa, synthetic construct
LRAGERL

SEQ ID NO: 131584 - protein, 7 aa, synthetic construct
LRAGLPM

SEQ ID NO: 131585 - protein, 7 aa, synthetic construct
LRAGVHN

SEQ ID NO: 131586 - protein, 7 aa, synthetic construct
LRAHLKD

SEQ ID NO: 131587 - protein, 7 aa, synthetic construct
LRAHPSA

SEQ ID NO: 131588 - protein, 7 aa, synthetic construct
LRAHQQG

SEQ ID NO: 131589 - protein, 7 aa, synthetic construct
LRAKIDV

SEQ ID NO: 131590 - protein, 7 aa, synthetic construct
LRALAEK

SEQ ID NO: 131591 - protein, 7 aa, synthetic construct
LRALTKD

SEQ ID NO: 131592 - protein, 7 aa, synthetic construct
LRANAHA

SEQ ID NO: 131593 - protein, 7 aa, synthetic construct
LRANGFT

SEQ ID NO: 131594 - protein, 7 aa, synthetic construct
LRANIIN

SEQ ID NO: 131595 - protein, 7 aa, synthetic construct
LRANNQQ

SEQ ID NO: 131596 - protein, 7 aa, synthetic construct
LRANPDK

SEQ ID NO: 131597 - protein, 7 aa, synthetic construct
LRAPAGM

SEQ ID NO: 131598 - protein, 7 aa, synthetic construct
LRAPLAT

SEQ ID NO: 131599 - protein, 7 aa, synthetic construct
LRASNLQ

SEQ ID NO: 131600 - protein, 7 aa, synthetic construct
LRASNPN

SEQ ID NO: 131601 - protein, 7 aa, synthetic construct
LRASSVA

SEQ ID NO: 131602 - protein, 7 aa, synthetic construct
LRATHVG

SEQ ID NO: 131603 - protein, 7 aa, synthetic construct
LRATPRD

SEQ ID NO: 131604 - protein, 7 aa, synthetic construct
LRAVPHP

SEQ ID NO: 131605 - protein, 7 aa, synthetic construct
LRAVTMN

SEQ ID NO: 131606 - protein, 7 aa, synthetic construct
LRDATIR

SEQ ID NO: 131607 - protein, 7 aa, synthetic construct
LRDGDRR

SEQ ID NO: 131608 - protein, 7 aa, synthetic construct
LRDHVGK

SEQ ID NO: 131609 - protein, 7 aa, synthetic construct
LRDKGIY

SEQ ID NO: 131610 - protein, 7 aa, synthetic construct
LRDKHLI

SEQ ID NO: 131611 - protein, 7 aa, synthetic construct
LRDKHPY

SEQ ID NO: 131612 - protein, 7 aa, synthetic construct
LRDKHYP

SEQ ID NO: 131613 - protein, 7 aa, synthetic construct
LRDKLGF

SEQ ID NO: 131614 - protein, 7 aa, synthetic construct
LRDKLQH

SEQ ID NO: 131615 - protein, 7 aa, synthetic construct
LRDKRDI

SEQ ID NO: 131616 - protein, 7 aa, synthetic construct
LRDLKDR

SEQ ID NO: 131617 - protein, 7 aa, synthetic construct
LRDMAQR

SEQ ID NO: 131618 - protein, 7 aa, synthetic construct
LRDNARN

SEQ ID NO: 131619 - protein, 7 aa, synthetic construct
LRDNSGK

SEQ ID NO: 131620 - protein, 7 aa, synthetic construct
LRDPLAK

SEQ ID NO: 131621 - protein, 7 aa, synthetic construct
LRDQLRQ

SEQ ID NO: 131622 - protein, 7 aa, synthetic construct
LRDQTRM

SEQ ID NO: 131623 - protein, 7 aa, synthetic construct
LRDRGFQ

SEQ ID NO: 131624 - protein, 7 aa, synthetic construct
LRDRHPI

SEQ ID NO: 131625 - protein, 7 aa, synthetic construct
LRDRSHP

SEQ ID NO: 131626 - protein, 7 aa, synthetic construct
LRDTKIY

SEQ ID NO: 131627 - protein, 7 aa, synthetic construct
LRDTQRT

SEQ ID NO: 131628 - protein, 7 aa, synthetic construct
LRDTREK

SEQ ID NO: 131629 - protein, 7 aa, synthetic construct
LRDTTQR

SEQ ID NO: 131630 - protein, 7 aa, synthetic construct
LRDVKYS

SEQ ID NO: 131631 - protein, 7 aa, synthetic construct
LRDVLRS

SEQ ID NO: 131632 - protein, 7 aa, synthetic construct
LREKAFQ

SEQ ID NO: 131633 - protein, 7 aa, synthetic construct
LRELKRD

SEQ ID NO: 131634 - protein, 7 aa, synthetic construct
LRELQRN

SEQ ID NO: 131635 - protein, 7 aa, synthetic construct
LREMGRI

SEQ ID NO: 131636 - protein, 7 aa, synthetic construct
LRENKSM

SEQ ID NO: 131637 - protein, 7 aa, synthetic construct
LRENNSK

SEQ ID NO: 131638 - protein, 7 aa, synthetic construct
LREPTTR

SEQ ID NO: 131639 - protein, 7 aa, synthetic construct
LREPYDK

SEQ ID NO: 131640 - protein, 7 aa, synthetic construct
LRESIRG

SEQ ID NO: 131641 - protein, 7 aa, synthetic construct
LRETAVR

SEQ ID NO: 131642 - protein, 7 aa, synthetic construct
LRETTQK

SEQ ID NO: 131643 - protein, 7 aa, synthetic construct
LRGAHQI

SEQ ID NO: 131644 - protein, 7 aa, synthetic construct
LRGARDT

SEQ ID NO: 131645 - protein, 7 aa, synthetic construct
LRGDHKM

SEQ ID NO: 131646 - protein, 7 aa, synthetic construct
LRGDQKN

SEQ ID NO: 131647 - protein, 7 aa, synthetic construct
LRGDRVS

SEQ ID NO: 131648 - protein, 7 aa, synthetic construct
LRGEIAR

SEQ ID NO: 131649 - protein, 7 aa, synthetic construct
LRGERAM

SEQ ID NO: 131650 - protein, 7 aa, synthetic construct
LRGGEKY

SEQ ID NO: 131651 - protein, 7 aa, synthetic construct
LRGGGYP

SEQ ID NO: 131652 - protein, 7 aa, synthetic construct
LRGHSQI

SEQ ID NO: 131653 - protein, 7 aa, synthetic construct
LRGIANL

SEQ ID NO: 131654 - protein, 7 aa, synthetic construct
LRGIQTM

SEQ ID NO: 131655 - protein, 7 aa, synthetic construct
LRGIVHN

SEQ ID NO: 131656 - protein, 7 aa, synthetic construct
LRGKATE

SEQ ID NO: 131657 - protein, 7 aa, synthetic construct
LRGKDMY

SEQ ID NO: 131658 - protein, 7 aa, synthetic construct
LRGKDQN

SEQ ID NO: 131659 - protein, 7 aa, synthetic construct
LRGKETL

SEQ ID NO: 131660 - protein, 7 aa, synthetic construct
LRGLKDQ

SEQ ID NO: 131661 - protein, 7 aa, synthetic construct
LRGLPGT

SEQ ID NO: 131662 - protein, 7 aa, synthetic construct
LRGMDKI

SEQ ID NO: 131663 - protein, 7 aa, synthetic construct
LRGMNTI

SEQ ID NO: 131664 - protein, 7 aa, synthetic construct
LRGNKAE

SEQ ID NO: 131665 - protein, 7 aa, synthetic construct
LRGNNVF

SEQ ID NO: 131666 - protein, 7 aa, synthetic construct
LRGPITH

SEQ ID NO: 131667 - protein, 7 aa, synthetic construct
LRGPNPN

SEQ ID NO: 131668 - protein, 7 aa, synthetic construct
LRGQKDY

SEQ ID NO: 131669 - protein, 7 aa, synthetic construct
LRGQQML

SEQ ID NO: 131670 - protein, 7 aa, synthetic construct
LRGQQTN

SEQ ID NO: 131671 - protein, 7 aa, synthetic construct
LRGREMM

SEQ ID NO: 131672 - protein, 7 aa, synthetic construct
LRGRTME

SEQ ID NO: 131673 - protein, 7 aa, synthetic construct
LRGSAHI

SEQ ID NO: 131674 - protein, 7 aa, synthetic construct
LRGSAPN

SEQ ID NO: 131675 - protein, 7 aa, synthetic construct
LRGSIAM

SEQ ID NO: 131676 - protein, 7 aa, synthetic construct
LRGSIIQ

SEQ ID NO: 131677 - protein, 7 aa, synthetic construct
LRGSVHM

SEQ ID NO: 131678 - protein, 7 aa, synthetic construct
LRGSVQI

SEQ ID NO: 131679 - protein, 7 aa, synthetic construct
LRGTAYS

SEQ ID NO: 131680 - protein, 7 aa, synthetic construct
LRGTIHP

SEQ ID NO: 131681 - protein, 7 aa, synthetic construct
LRGTPMT

SEQ ID NO: 131682 - protein, 7 aa, synthetic construct
LRGTPVP

SEQ ID NO: 131683 - protein, 7 aa, synthetic construct
LRGVISH

SEQ ID NO: 131684 - protein, 7 aa, synthetic construct
LRHAAKE

SEQ ID NO: 131685 - protein, 7 aa, synthetic construct
LRHAIGA

SEQ ID NO: 131686 - protein, 7 aa, synthetic construct
LRHAIQN

SEQ ID NO: 131687 - protein, 7 aa, synthetic construct
LRHALNA

SEQ ID NO: 131688 - protein, 7 aa, synthetic construct
LRHGLAA

SEQ ID NO: 131689 - protein, 7 aa, synthetic construct
LRHIAKE

SEQ ID NO: 131690 - protein, 7 aa, synthetic construct
LRHLQNP

SEQ ID NO: 131691 - protein, 7 aa, synthetic construct
LRHLTSA

SEQ ID NO: 131692 - protein, 7 aa, synthetic construct
LRHNLKD

SEQ ID NO: 131693 - protein, 7 aa, synthetic construct
LRHNSVS

SEQ ID NO: 131694 - protein, 7 aa, synthetic construct
LRHSVTQ

SEQ ID NO: 131695 - protein, 7 aa, synthetic construct
LRHTPQV

SEQ ID NO: 131696 - protein, 7 aa, synthetic construct
LRIKMGE

SEQ ID NO: 131697 - protein, 7 aa, synthetic construct
LRIKQEL

SEQ ID NO: 131698 - protein, 7 aa, synthetic construct
LRIQSKE

SEQ ID NO: 131699 - protein, 7 aa, synthetic construct
LRISKTD

SEQ ID NO: 131700 - protein, 7 aa, synthetic construct
LRKDYVN

SEQ ID NO: 131701 - protein, 7 aa, synthetic construct
LRKEPTS

SEQ ID NO: 131702 - protein, 7 aa, synthetic construct
LRKGVEM

SEQ ID NO: 131703 - protein, 7 aa, synthetic construct
LRKLDGL

SEQ ID NO: 131704 - protein, 7 aa, synthetic construct
LRKMDVV

SEQ ID NO: 131705 - protein, 7 aa, synthetic construct
LRKMPDP

SEQ ID NO: 131706 - protein, 7 aa, synthetic construct
LRKNDQV

SEQ ID NO: 131707 - protein, 7 aa, synthetic construct
LRKNFPE

SEQ ID NO: 131708 - protein, 7 aa, synthetic construct
LRKPETY

SEQ ID NO: 131709 - protein, 7 aa, synthetic construct
LRKPMPE

SEQ ID NO: 131710 - protein, 7 aa, synthetic construct
LRKSTDI

SEQ ID NO: 131711 - protein, 7 aa, synthetic construct
LRKTDLG

SEQ ID NO: 131712 - protein, 7 aa, synthetic construct
LRKTVAD

SEQ ID NO: 131713 - protein, 7 aa, synthetic construct
LRKVDSV

SEQ ID NO: 131714 - protein, 7 aa, synthetic construct
LRKYVDE

SEQ ID NO: 131715 - protein, 7 aa, synthetic construct
LRLESTK

SEQ ID NO: 131716 - protein, 7 aa, synthetic construct
LRLMKQE

SEQ ID NO: 131717 - protein, 7 aa, synthetic construct
LRLPKDT

SEQ ID NO: 131718 - protein, 7 aa, synthetic construct
LRLSNVH

SEQ ID NO: 131719 - protein, 7 aa, synthetic construct
LRMDLKH

SEQ ID NO: 131720 - protein, 7 aa, synthetic construct
LRMGSNI

SEQ ID NO: 131721 - protein, 7 aa, synthetic construct
LRMKDTQ

SEQ ID NO: 131722 - protein, 7 aa, synthetic construct
LRMKEHV

SEQ ID NO: 131723 - protein, 7 aa, synthetic construct
LRMKEPI

SEQ ID NO: 131724 - protein, 7 aa, synthetic construct
LRMNAHG

SEQ ID NO: 131725 - protein, 7 aa, synthetic construct
LRMNESR

SEQ ID NO: 131726 - protein, 7 aa, synthetic construct
LRMPSEK

SEQ ID NO: 131727 - protein, 7 aa, synthetic construct
LRMPSVP

SEQ ID NO: 131728 - protein, 7 aa, synthetic construct
LRMQGYV

SEQ ID NO: 131729 - protein, 7 aa, synthetic construct
LRMQTTI

SEQ ID NO: 131730 - protein, 7 aa, synthetic construct
LRMQVDK

SEQ ID NO: 131731 - protein, 7 aa, synthetic construct
LRNAAHS

SEQ ID NO: 131732 - protein, 7 aa, synthetic construct
LRNAPSI

SEQ ID NO: 131733 - protein, 7 aa, synthetic construct
LRNASSH

SEQ ID NO: 131734 - protein, 7 aa, synthetic construct
LRNDARL

SEQ ID NO: 131735 - protein, 7 aa, synthetic construct
LRNDMTR

SEQ ID NO: 131736 - protein, 7 aa, synthetic construct
LRNEKLN

SEQ ID NO: 131737 - protein, 7 aa, synthetic construct
LRNEPMR

SEQ ID NO: 131738 - protein, 7 aa, synthetic construct
LRNGLSY

SEQ ID NO: 131739 - protein, 7 aa, synthetic construct
LRNHGPM

SEQ ID NO: 131740 - protein, 7 aa, synthetic construct
LRNHGSM

SEQ ID NO: 131741 - protein, 7 aa, synthetic construct
LRNHVAT

SEQ ID NO: 131742 - protein, 7 aa, synthetic construct
LRNHVQA

SEQ ID NO: 131743 - protein, 7 aa, synthetic construct
LRNIERG

SEQ ID NO: 131744 - protein, 7 aa, synthetic construct
LRNIHSV

SEQ ID NO: 131745 - protein, 7 aa, synthetic construct
LRNIKEN

SEQ ID NO: 131746 - protein, 7 aa, synthetic construct
LRNIPAN

SEQ ID NO: 131747 - protein, 7 aa, synthetic construct
LRNISNI

SEQ ID NO: 131748 - protein, 7 aa, synthetic construct
LRNKDIQ

SEQ ID NO: 131749 - protein, 7 aa, synthetic construct
LRNLGER

SEQ ID NO: 131750 - protein, 7 aa, synthetic construct
LRNLTMQ

SEQ ID NO: 131751 - protein, 7 aa, synthetic construct
LRNMMDK

SEQ ID NO: 131752 - protein, 7 aa, synthetic construct
LRNNQTI

SEQ ID NO: 131753 - protein, 7 aa, synthetic construct
LRNNTTI

SEQ ID NO: 131754 - protein, 7 aa, synthetic construct
LRNPMHP

SEQ ID NO: 131755 - protein, 7 aa, synthetic construct
LRNPQGH

SEQ ID NO: 131756 - protein, 7 aa, synthetic construct
LRNQGST

SEQ ID NO: 131757 - protein, 7 aa, synthetic construct
LRNQKAD

SEQ ID NO: 131758 - protein, 7 aa, synthetic construct
LRNQQGV

SEQ ID NO: 131759 - protein, 7 aa, synthetic construct
LRNQQLQ

SEQ ID NO: 131760 - protein, 7 aa, synthetic construct
LRNQVTV

SEQ ID NO: 131761 - protein, 7 aa, synthetic construct
LRNSMSV

SEQ ID NO: 131762 - protein, 7 aa, synthetic construct
LRNSQNN

SEQ ID NO: 131763 - protein, 7 aa, synthetic construct
LRNTGSQ

SEQ ID NO: 131764 - protein, 7 aa, synthetic construct
LRNTHNI

SEQ ID NO: 131765 - protein, 7 aa, synthetic construct
LRNVAPI

SEQ ID NO: 131766 - protein, 7 aa, synthetic construct
LRNVNTV

SEQ ID NO: 131767 - protein, 7 aa, synthetic construct
LRNVQNI

SEQ ID NO: 131768 - protein, 7 aa, synthetic construct
LRNVSTP

SEQ ID NO: 131769 - protein, 7 aa, synthetic construct
LRNVTVV

SEQ ID NO: 131770 - protein, 7 aa, synthetic construct
LRNYHEG

SEQ ID NO: 131771 - protein, 7 aa, synthetic construct
LRPAHNN

SEQ ID NO: 131772 - protein, 7 aa, synthetic construct
LRPAVRD

SEQ ID NO: 131773 - protein, 7 aa, synthetic construct
LRPAYAN

SEQ ID NO: 131774 - protein, 7 aa, synthetic construct
LRPDHPR

SEQ ID NO: 131775 - protein, 7 aa, synthetic construct
LRPGHIP

SEQ ID NO: 131776 - protein, 7 aa, synthetic construct
LRPHSLQ

SEQ ID NO: 131777 - protein, 7 aa, synthetic construct
LRPNAPM

SEQ ID NO: 131778 - protein, 7 aa, synthetic construct
LRPNGMM

SEQ ID NO: 131779 - protein, 7 aa, synthetic construct
LRPNQER

SEQ ID NO: 131780 - protein, 7 aa, synthetic construct
LRPNSAF

SEQ ID NO: 131781 - protein, 7 aa, synthetic construct
LRPQGPY

SEQ ID NO: 131782 - protein, 7 aa, synthetic construct
LRPQHSG

SEQ ID NO: 131783 - protein, 7 aa, synthetic construct
LRPQIDR

SEQ ID NO: 131784 - protein, 7 aa, synthetic construct
LRPQKYD

SEQ ID NO: 131785 - protein, 7 aa, synthetic construct
LRPQQHM

SEQ ID NO: 131786 - protein, 7 aa, synthetic construct
LRPSNDR

SEQ ID NO: 131787 - protein, 7 aa, synthetic construct
LRPSPNI

SEQ ID NO: 131788 - protein, 7 aa, synthetic construct
LRPSQGY

SEQ ID NO: 131789 - protein, 7 aa, synthetic construct
LRPTPMN

SEQ ID NO: 131790 - protein, 7 aa, synthetic construct
LRPTQWE

SEQ ID NO: 131791 - protein, 7 aa, synthetic construct
LRQADRI

SEQ ID NO: 131792 - protein, 7 aa, synthetic construct
LRQADTK

SEQ ID NO: 131793 - protein, 7 aa, synthetic construct
LRQAQVM

SEQ ID NO: 131794 - protein, 7 aa, synthetic construct
LRQAVSA

SEQ ID NO: 131795 - protein, 7 aa, synthetic construct
LRQDQMK

SEQ ID NO: 131796 - protein, 7 aa, synthetic construct
LRQDSRI

SEQ ID NO: 131797 - protein, 7 aa, synthetic construct
LRQEAGK

SEQ ID NO: 131798 - protein, 7 aa, synthetic construct
LRQENRV

SEQ ID NO: 131799 - protein, 7 aa, synthetic construct
LRQHSAN

SEQ ID NO: 131800 - protein, 7 aa, synthetic construct
LRQKEFL

SEQ ID NO: 131801 - protein, 7 aa, synthetic construct
LRQKEHL

SEQ ID NO: 131802 - protein, 7 aa, synthetic construct
LRQKEQG

SEQ ID NO: 131803 - protein, 7 aa, synthetic construct
LRQKFME

SEQ ID NO: 131804 - protein, 7 aa, synthetic construct
LRQLQVN

SEQ ID NO: 131805 - protein, 7 aa, synthetic construct
LRQMANI

SEQ ID NO: 131806 - protein, 7 aa, synthetic construct
LRQMNGL

SEQ ID NO: 131807 - protein, 7 aa, synthetic construct
LRQMREG

SEQ ID NO: 131808 - protein, 7 aa, synthetic construct
LRQNGLM

SEQ ID NO: 131809 - protein, 7 aa, synthetic construct
LRQNITI

SEQ ID NO: 131810 - protein, 7 aa, synthetic construct
LRQNQDR

SEQ ID NO: 131811 - protein, 7 aa, synthetic construct
LRQNTYP

SEQ ID NO: 131812 - protein, 7 aa, synthetic construct
LRQPINV

SEQ ID NO: 131813 - protein, 7 aa, synthetic construct
LRQPSER

SEQ ID NO: 131814 - protein, 7 aa, synthetic construct
LRQQASI

SEQ ID NO: 131815 - protein, 7 aa, synthetic construct
LRQQGFN

SEQ ID NO: 131816 - protein, 7 aa, synthetic construct
LRQQKPE

SEQ ID NO: 131817 - protein, 7 aa, synthetic construct
LRQQLTH

SEQ ID NO: 131818 - protein, 7 aa, synthetic construct
LRQQMTI

SEQ ID NO: 131819 - protein, 7 aa, synthetic construct
LRQSGYA

SEQ ID NO: 131820 - protein, 7 aa, synthetic construct
LRQSINS

SEQ ID NO: 131821 - protein, 7 aa, synthetic construct
LRQSMPF

SEQ ID NO: 131822 - protein, 7 aa, synthetic construct
LRQSMQI

SEQ ID NO: 131823 - protein, 7 aa, synthetic construct
LRQSQVL

SEQ ID NO: 131824 - protein, 7 aa, synthetic construct
LRQSSVQ

SEQ ID NO: 131825 - protein, 7 aa, synthetic construct
LRQSTSL

SEQ ID NO: 131826 - protein, 7 aa, synthetic construct
LRQTSML

SEQ ID NO: 131827 - protein, 7 aa, synthetic construct
LRQTTAF

SEQ ID NO: 131828 - protein, 7 aa, synthetic construct
LRQVATA

SEQ ID NO: 131829 - protein, 7 aa, synthetic construct
LRQVGNQ

SEQ ID NO: 131830 - protein, 7 aa, synthetic construct
LRQVLKD

SEQ ID NO: 131831 - protein, 7 aa, synthetic construct
LRQVNDK

SEQ ID NO: 131832 - protein, 7 aa, synthetic construct
LRQVTNV

SEQ ID NO: 131833 - protein, 7 aa, synthetic construct
LRREHTP

SEQ ID NO: 131834 - protein, 7 aa, synthetic construct
LRREMSV

SEQ ID NO: 131835 - protein, 7 aa, synthetic construct
LRRESMN

SEQ ID NO: 131836 - protein, 7 aa, synthetic construct
LRRGDFD

SEQ ID NO: 131837 - protein, 7 aa, synthetic construct
LRSADNR

SEQ ID NO: 131838 - protein, 7 aa, synthetic construct
LRSDKSM

SEQ ID NO: 131839 - protein, 7 aa, synthetic construct
LRSEAFK

SEQ ID NO: 131840 - protein, 7 aa, synthetic construct
LRSKPAD

SEQ ID NO: 131841 - protein, 7 aa, synthetic construct
LRSKVDS

SEQ ID NO: 131842 - protein, 7 aa, synthetic construct
LRSLPRD

SEQ ID NO: 131843 - protein, 7 aa, synthetic construct
LRSPGMH

SEQ ID NO: 131844 - protein, 7 aa, synthetic construct
LRSPIMQ

SEQ ID NO: 131845 - protein, 7 aa, synthetic construct
LRSPTFG

SEQ ID NO: 131846 - protein, 7 aa, synthetic construct
LRSQALI

SEQ ID NO: 131847 - protein, 7 aa, synthetic construct
LRSQHQI

SEQ ID NO: 131848 - protein, 7 aa, synthetic construct
LRSQITQ

SEQ ID NO: 131849 - protein, 7 aa, synthetic construct
LRSQKTD

SEQ ID NO: 131850 - protein, 7 aa, synthetic construct
LRSQLQM

SEQ ID NO: 131851 - protein, 7 aa, synthetic construct
LRSSERQ

SEQ ID NO: 131852 - protein, 7 aa, synthetic construct
LRSSPIM

SEQ ID NO: 131853 - protein, 7 aa, synthetic construct
LRSTPQT

SEQ ID NO: 131854 - protein, 7 aa, synthetic construct
LRSVIRD

SEQ ID NO: 131855 - protein, 7 aa, synthetic construct
LRSVSPQ

SEQ ID NO: 131856 - protein, 7 aa, synthetic construct
LRSVTHG

SEQ ID NO: 131857 - protein, 7 aa, synthetic construct
LRTANRD

SEQ ID NO: 131858 - protein, 7 aa, synthetic construct
LRTATRD

SEQ ID NO: 131859 - protein, 7 aa, synthetic construct
LRTDRTN

SEQ ID NO: 131860 - protein, 7 aa, synthetic construct
LRTHLRE

SEQ ID NO: 131861 - protein, 7 aa, synthetic construct
LRTHLSN

SEQ ID NO: 131862 - protein, 7 aa, synthetic construct
LRTHQMA

SEQ ID NO: 131863 - protein, 7 aa, synthetic construct
LRTIPSP

SEQ ID NO: 131864 - protein, 7 aa, synthetic construct
LRTKADM

SEQ ID NO: 131865 - protein, 7 aa, synthetic construct
LRTKSEM

SEQ ID NO: 131866 - protein, 7 aa, synthetic construct
LRTLSRE

SEQ ID NO: 131867 - protein, 7 aa, synthetic construct
LRTMANQ

SEQ ID NO: 131868 - protein, 7 aa, synthetic construct
LRTNHPN

SEQ ID NO: 131869 - protein, 7 aa, synthetic construct
LRTNKQD

SEQ ID NO: 131870 - protein, 7 aa, synthetic construct
LRTNPGH

SEQ ID NO: 131871 - protein, 7 aa, synthetic construct
LRTNQVY

SEQ ID NO: 131872 - protein, 7 aa, synthetic construct
LRTPAGF

SEQ ID NO: 131873 - protein, 7 aa, synthetic construct
LRTQGIM

SEQ ID NO: 131874 - protein, 7 aa, synthetic construct
LRTREQA

SEQ ID NO: 131875 - protein, 7 aa, synthetic construct
LRTREVT

SEQ ID NO: 131876 - protein, 7 aa, synthetic construct
LRTSDGR

SEQ ID NO: 131877 - protein, 7 aa, synthetic construct
LRTSMNM

SEQ ID NO: 131878 - protein, 7 aa, synthetic construct
LRTTESK

SEQ ID NO: 131879 - protein, 7 aa, synthetic construct
LRTTQER

SEQ ID NO: 131880 - protein, 7 aa, synthetic construct
LRTVEGR

SEQ ID NO: 131881 - protein, 7 aa, synthetic construct
LRTVERN

SEQ ID NO: 131882 - protein, 7 aa, synthetic construct
LRTVKDY

SEQ ID NO: 131883 - protein, 7 aa, synthetic construct
LRVEKPF

SEQ ID NO: 131884 - protein, 7 aa, synthetic construct
LRVHVNS

SEQ ID NO: 131885 - protein, 7 aa, synthetic construct
LRVKEPH

SEQ ID NO: 131886 - protein, 7 aa, synthetic construct
LRVNINH

SEQ ID NO: 131887 - protein, 7 aa, synthetic construct
LRVQHSA

SEQ ID NO: 131888 - protein, 7 aa, synthetic construct
LRVQSNI

SEQ ID NO: 131889 - protein, 7 aa, synthetic construct
LRVQTNH

SEQ ID NO: 131890 - protein, 7 aa, synthetic construct
LRVSQAL

SEQ ID NO: 131891 - protein, 7 aa, synthetic construct
LRVTQTH

SEQ ID NO: 131892 - protein, 7 aa, synthetic construct
LRYAHGD

SEQ ID NO: 131893 - protein, 7 aa, synthetic construct
LRYASNG

SEQ ID NO: 131894 - protein, 7 aa, synthetic construct
LSAAHLK

SEQ ID NO: 131895 - protein, 7 aa, synthetic construct
LSADLKR

SEQ ID NO: 131896 - protein, 7 aa, synthetic construct
LSAGSHR

SEQ ID NO: 131897 - protein, 7 aa, synthetic construct
LSAGTHK

SEQ ID NO: 131898 - protein, 7 aa, synthetic construct
LSAHIRS

SEQ ID NO: 131899 - protein, 7 aa, synthetic construct
LSANFHK

SEQ ID NO: 131900 - protein, 7 aa, synthetic construct
LSAQDKR

SEQ ID NO: 131901 - protein, 7 aa, synthetic construct
LSDRGNK

SEQ ID NO: 131902 - protein, 7 aa, synthetic construct
LSDRSFK

SEQ ID NO: 131903 - protein, 7 aa, synthetic construct
LSDRYKA

SEQ ID NO: 131904 - protein, 7 aa, synthetic construct
LSEQRYK

SEQ ID NO: 131905 - protein, 7 aa, synthetic construct
LSGERRV

SEQ ID NO: 131906 - protein, 7 aa, synthetic construct
LSGGRAY

SEQ ID NO: 131907 - protein, 7 aa, synthetic construct
LSGGRGY

SEQ ID NO: 131908 - protein, 7 aa, synthetic construct
LSGHKNF

SEQ ID NO: 131909 - protein, 7 aa, synthetic construct
LSGHLRA

SEQ ID NO: 131910 - protein, 7 aa, synthetic construct
LSGHPRS

SEQ ID NO: 131911 - protein, 7 aa, synthetic construct
LSGKSRD

SEQ ID NO: 131912 - protein, 7 aa, synthetic construct
LSGLHKT

SEQ ID NO: 131913 - protein, 7 aa, synthetic construct
LSGQGQR

SEQ ID NO: 131914 - protein, 7 aa, synthetic construct
LSGRLKD

SEQ ID NO: 131915 - protein, 7 aa, synthetic construct
LSGRLSL

SEQ ID NO: 131916 - protein, 7 aa, synthetic construct
LSGSGFR

SEQ ID NO: 131917 - protein, 7 aa, synthetic construct
LSGVPVR

SEQ ID NO: 131918 - protein, 7 aa, synthetic construct
LSGVSLR

SEQ ID NO: 131919 - protein, 7 aa, synthetic construct
LSGYSKQ

SEQ ID NO: 131920 - protein, 7 aa, synthetic construct
LSHAHKS

SEQ ID NO: 131921 - protein, 7 aa, synthetic construct
LSHAKSH

SEQ ID NO: 131922 - protein, 7 aa, synthetic construct
LSHANGR

SEQ ID NO: 131923 - protein, 7 aa, synthetic construct
LSHGAAR

SEQ ID NO: 131924 - protein, 7 aa, synthetic construct
LSHGVKF

SEQ ID NO: 131925 - protein, 7 aa, synthetic construct
LSHHTAK

SEQ ID NO: 131926 - protein, 7 aa, synthetic construct
LSHIKHQ

SEQ ID NO: 131927 - protein, 7 aa, synthetic construct
LSHIKQM

SEQ ID NO: 131928 - protein, 7 aa, synthetic construct
LSHKGER

SEQ ID NO: 131929 - protein, 7 aa, synthetic construct
LSHKGVF

SEQ ID NO: 131930 - protein, 7 aa, synthetic construct
LSHKHIP

SEQ ID NO: 131931 - protein, 7 aa, synthetic construct
LSHKPIV

SEQ ID NO: 131932 - protein, 7 aa, synthetic construct
LSHLRSA

SEQ ID NO: 131933 - protein, 7 aa, synthetic construct
LSHLSKN

SEQ ID NO: 131934 - protein, 7 aa, synthetic construct
LSHMPAK

SEQ ID NO: 131935 - protein, 7 aa, synthetic construct
LSHMVKQ

SEQ ID NO: 131936 - protein, 7 aa, synthetic construct
LSHPQRI

SEQ ID NO: 131937 - protein, 7 aa, synthetic construct
LSHQNKQ

SEQ ID NO: 131938 - protein, 7 aa, synthetic construct
LSHQVRI

SEQ ID NO: 131939 - protein, 7 aa, synthetic construct
LSHRLGQ

SEQ ID NO: 131940 - protein, 7 aa, synthetic construct
LSHSIRS

SEQ ID NO: 131941 - protein, 7 aa, synthetic construct
LSHSQPK

SEQ ID NO: 131942 - protein, 7 aa, synthetic construct
LSHTLNR

SEQ ID NO: 131943 - protein, 7 aa, synthetic construct
LSHVKNH

SEQ ID NO: 131944 - protein, 7 aa, synthetic construct
LSIGHTK

SEQ ID NO: 131945 - protein, 7 aa, synthetic construct
LSIHNPK

SEQ ID NO: 131946 - protein, 7 aa, synthetic construct
LSIRGKD

SEQ ID NO: 131947 - protein, 7 aa, synthetic construct
LSKARYD

SEQ ID NO: 131948 - protein, 7 aa, synthetic construct
LSKFAQN

SEQ ID NO: 131949 - protein, 7 aa, synthetic construct
LSKFRLE

SEQ ID NO: 131950 - protein, 7 aa, synthetic construct
LSKHLAY

SEQ ID NO: 131951 - protein, 7 aa, synthetic construct
LSKHLNM

SEQ ID NO: 131952 - protein, 7 aa, synthetic construct
LSKHLYA

SEQ ID NO: 131953 - protein, 7 aa, synthetic construct
LSKHTER

SEQ ID NO: 131954 - protein, 7 aa, synthetic construct
LSKIVSY

SEQ ID NO: 131955 - protein, 7 aa, synthetic construct
LSKIYST

SEQ ID NO: 131956 - protein, 7 aa, synthetic construct
LSKLSHY

SEQ ID NO: 131957 - protein, 7 aa, synthetic construct
LSKLYRE

SEQ ID NO: 131958 - protein, 7 aa, synthetic construct
LSKNRDM

SEQ ID NO: 131959 - protein, 7 aa, synthetic construct
LSKPFAQ

SEQ ID NO: 131960 - protein, 7 aa, synthetic construct
LSKPTDW

SEQ ID NO: 131961 - protein, 7 aa, synthetic construct
LSKQLAY

SEQ ID NO: 131962 - protein, 7 aa, synthetic construct
LSKQTER

SEQ ID NO: 131963 - protein, 7 aa, synthetic construct
LSKRSVE

SEQ ID NO: 131964 - protein, 7 aa, synthetic construct
LSKSYLG

SEQ ID NO: 131965 - protein, 7 aa, synthetic construct
LSKYAST

SEQ ID NO: 131966 - protein, 7 aa, synthetic construct
LSKYIQV

SEQ ID NO: 131967 - protein, 7 aa, synthetic construct
LSKYMSQ

SEQ ID NO: 131968 - protein, 7 aa, synthetic construct
LSKYQAI

SEQ ID NO: 131969 - protein, 7 aa, synthetic construct
LSMKPMS

SEQ ID NO: 131970 - protein, 7 aa, synthetic construct
LSNAYAK

SEQ ID NO: 131971 - protein, 7 aa, synthetic construct
LSNGWKM

SEQ ID NO: 131972 - protein, 7 aa, synthetic construct
LSNKIHY

SEQ ID NO: 131973 - protein, 7 aa, synthetic construct
LSNPLIK

SEQ ID NO: 131974 - protein, 7 aa, synthetic construct
LSNPYAK

SEQ ID NO: 131975 - protein, 7 aa, synthetic construct
LSNQNAR

SEQ ID NO: 131976 - protein, 7 aa, synthetic construct
LSNQRDR

SEQ ID NO: 131977 - protein, 7 aa, synthetic construct
LSNQTRQ

SEQ ID NO: 131978 - protein, 7 aa, synthetic construct
LSNREAK

SEQ ID NO: 131979 - protein, 7 aa, synthetic construct
LSNRVQY

SEQ ID NO: 131980 - protein, 7 aa, synthetic construct
LSNSGHR

SEQ ID NO: 131981 - protein, 7 aa, synthetic construct
LSNYKVT

SEQ ID NO: 131982 - protein, 7 aa, synthetic construct
LSPHPKN

SEQ ID NO: 131983 - protein, 7 aa, synthetic construct
LSPKLAF

SEQ ID NO: 131984 - protein, 7 aa, synthetic construct
LSPQHRN

SEQ ID NO: 131985 - protein, 7 aa, synthetic construct
LSPRLNM

SEQ ID NO: 131986 - protein, 7 aa, synthetic construct
LSQHSQK

SEQ ID NO: 131987 - protein, 7 aa, synthetic construct
LSQHTAR

SEQ ID NO: 131988 - protein, 7 aa, synthetic construct
LSQHTFK

SEQ ID NO: 131989 - protein, 7 aa, synthetic construct
LSQMSAR

SEQ ID NO: 131990 - protein, 7 aa, synthetic construct
LSQNISR

SEQ ID NO: 131991 - protein, 7 aa, synthetic construct
LSQNMGR

SEQ ID NO: 131992 - protein, 7 aa, synthetic construct
LSQQNNR

SEQ ID NO: 131993 - protein, 7 aa, synthetic construct
LSQQYRS

SEQ ID NO: 131994 - protein, 7 aa, synthetic construct
LSQRAYS

SEQ ID NO: 131995 - protein, 7 aa, synthetic construct
LSQRSMI

SEQ ID NO: 131996 - protein, 7 aa, synthetic construct
LSQSQSR

SEQ ID NO: 131997 - protein, 7 aa, synthetic construct
LSQSYSK

SEQ ID NO: 131998 - protein, 7 aa, synthetic construct
LSQTVRM

SEQ ID NO: 131999 - protein, 7 aa, synthetic construct
LSRADLK

SEQ ID NO: 132000 - protein, 7 aa, synthetic construct
LSRAKES

SEQ ID NO: 132001 - protein, 7 aa, synthetic construct
LSRAMPM

SEQ ID NO: 132002 - protein, 7 aa, synthetic construct
LSRDNVK

SEQ ID NO: 132003 - protein, 7 aa, synthetic construct
LSREKGH

SEQ ID NO: 132004 - protein, 7 aa, synthetic construct
LSRETSR

SEQ ID NO: 132005 - protein, 7 aa, synthetic construct
LSRGQAY

SEQ ID NO: 132006 - protein, 7 aa, synthetic construct
LSRGSAY

SEQ ID NO: 132007 - protein, 7 aa, synthetic construct
LSRGTTA

SEQ ID NO: 132008 - protein, 7 aa, synthetic construct
LSRGTTG

SEQ ID NO: 132009 - protein, 7 aa, synthetic construct
LSRHPTA

SEQ ID NO: 132010 - protein, 7 aa, synthetic construct
LSRMSDR

SEQ ID NO: 132011 - protein, 7 aa, synthetic construct
LSRMTAN

SEQ ID NO: 132012 - protein, 7 aa, synthetic construct
LSRNPNI

SEQ ID NO: 132013 - protein, 7 aa, synthetic construct
LSRNVNF

SEQ ID NO: 132014 - protein, 7 aa, synthetic construct
LSRPAHI

SEQ ID NO: 132015 - protein, 7 aa, synthetic construct
LSRPGFS

SEQ ID NO: 132016 - protein, 7 aa, synthetic construct
LSRPHNQ

SEQ ID NO: 132017 - protein, 7 aa, synthetic construct
LSRQSMA

SEQ ID NO: 132018 - protein, 7 aa, synthetic construct
LSRQTHS

SEQ ID NO: 132019 - protein, 7 aa, synthetic construct
LSRSSDH

SEQ ID NO: 132020 - protein, 7 aa, synthetic construct
LSRSTPI

SEQ ID NO: 132021 - protein, 7 aa, synthetic construct
LSRSTPN

SEQ ID NO: 132022 - protein, 7 aa, synthetic construct
LSRTITA

SEQ ID NO: 132023 - protein, 7 aa, synthetic construct
LSRVISG

SEQ ID NO: 132024 - protein, 7 aa, synthetic construct
LSRVSSA

SEQ ID NO: 132025 - protein, 7 aa, synthetic construct
LSSGFPR

SEQ ID NO: 132026 - protein, 7 aa, synthetic construct
LSSGISR

SEQ ID NO: 132027 - protein, 7 aa, synthetic construct
LSSGYTR

SEQ ID NO: 132028 - protein, 7 aa, synthetic construct
LSSHIQR

SEQ ID NO: 132029 - protein, 7 aa, synthetic construct
LSSHKHG

SEQ ID NO: 132030 - protein, 7 aa, synthetic construct
LSSHLQR

SEQ ID NO: 132031 - protein, 7 aa, synthetic construct
LSSKFTL

SEQ ID NO: 132032 - protein, 7 aa, synthetic construct
LSSKRGD

SEQ ID NO: 132033 - protein, 7 aa, synthetic construct
LSSQHLR

SEQ ID NO: 132034 - protein, 7 aa, synthetic construct
LSSQTRF

SEQ ID NO: 132035 - protein, 7 aa, synthetic construct
LSSRHVT

SEQ ID NO: 132036 - protein, 7 aa, synthetic construct
LSSRPNI

SEQ ID NO: 132037 - protein, 7 aa, synthetic construct
LSSRVRD

SEQ ID NO: 132038 - protein, 7 aa, synthetic construct
LSSTYHK

SEQ ID NO: 132039 - protein, 7 aa, synthetic construct
LSSVGYI

SEQ ID NO: 132040 - protein, 7 aa, synthetic construct
LSSVKTY

SEQ ID NO: 132041 - protein, 7 aa, synthetic construct
LSSVNVK

SEQ ID NO: 132042 - protein, 7 aa, synthetic construct
LSTAHTR

SEQ ID NO: 132043 - protein, 7 aa, synthetic construct
LSTARHT

SEQ ID NO: 132044 - protein, 7 aa, synthetic construct
LSTHHSK

SEQ ID NO: 132045 - protein, 7 aa, synthetic construct
LSTKFVN

SEQ ID NO: 132046 - protein, 7 aa, synthetic construct
LSTKQIY

SEQ ID NO: 132047 - protein, 7 aa, synthetic construct
LSTMHRS

SEQ ID NO: 132048 - protein, 7 aa, synthetic construct
LSTNHTR

SEQ ID NO: 132049 - protein, 7 aa, synthetic construct
LSTRIGH

SEQ ID NO: 132050 - protein, 7 aa, synthetic construct
LSTYNKI

SEQ ID NO: 132051 - protein, 7 aa, synthetic construct
LSVKHST

SEQ ID NO: 132052 - protein, 7 aa, synthetic construct
LSVKSAF

SEQ ID NO: 132053 - protein, 7 aa, synthetic construct
LSVKVHT

SEQ ID NO: 132054 - protein, 7 aa, synthetic construct
LSVQAHR

SEQ ID NO: 132055 - protein, 7 aa, synthetic construct
LSYAPKM

SEQ ID NO: 132056 - protein, 7 aa, synthetic construct
LSYGPTV

SEQ ID NO: 132057 - protein, 7 aa, synthetic construct
LSYGSVK

SEQ ID NO: 132058 - protein, 7 aa, synthetic construct
LSYGTTI

SEQ ID NO: 132059 - protein, 7 aa, synthetic construct
LSYSPKD

SEQ ID NO: 132060 - protein, 7 aa, synthetic construct
LSYSRGA

SEQ ID NO: 132061 - protein, 7 aa, synthetic construct
LTAHSGK

SEQ ID NO: 132062 - protein, 7 aa, synthetic construct
LTARAHM

SEQ ID NO: 132063 - protein, 7 aa, synthetic construct
LTARHVS

SEQ ID NO: 132064 - protein, 7 aa, synthetic construct
LTAYGSM

SEQ ID NO: 132065 - protein, 7 aa, synthetic construct
LTDRAFK

SEQ ID NO: 132066 - protein, 7 aa, synthetic construct
LTDRKVT

SEQ ID NO: 132067 - protein, 7 aa, synthetic construct
LTEARNR

SEQ ID NO: 132068 - protein, 7 aa, synthetic construct
LTEQAKK

SEQ ID NO: 132069 - protein, 7 aa, synthetic construct
LTERARM

SEQ ID NO: 132070 - protein, 7 aa, synthetic construct
LTERGRA

SEQ ID NO: 132071 - protein, 7 aa, synthetic construct
LTESMKR

SEQ ID NO: 132072 - protein, 7 aa, synthetic construct
LTGGKYV

SEQ ID NO: 132073 - protein, 7 aa, synthetic construct
LTGHARI

SEQ ID NO: 132074 - protein, 7 aa, synthetic construct
LTGHKFL

SEQ ID NO: 132075 - protein, 7 aa, synthetic construct
LTGHVVR

SEQ ID NO: 132076 - protein, 7 aa, synthetic construct
LTGMSGR

SEQ ID NO: 132077 - protein, 7 aa, synthetic construct
LTGMSHK

SEQ ID NO: 132078 - protein, 7 aa, synthetic construct
LTGREKM

SEQ ID NO: 132079 - protein, 7 aa, synthetic construct
LTGSNKW

SEQ ID NO: 132080 - protein, 7 aa, synthetic construct
LTGVRHN

SEQ ID NO: 132081 - protein, 7 aa, synthetic construct
LTHAHRA

SEQ ID NO: 132082 - protein, 7 aa, synthetic construct
LTHGNKQ

SEQ ID NO: 132083 - protein, 7 aa, synthetic construct
LTHKASM

SEQ ID NO: 132084 - protein, 7 aa, synthetic construct
LTHKHMV

SEQ ID NO: 132085 - protein, 7 aa, synthetic construct
LTHKMMS

SEQ ID NO: 132086 - protein, 7 aa, synthetic construct
LTHKPMI

SEQ ID NO: 132087 - protein, 7 aa, synthetic construct
LTHKSQI

SEQ ID NO: 132088 - protein, 7 aa, synthetic construct
LTHNGRL

SEQ ID NO: 132089 - protein, 7 aa, synthetic construct
LTHPSMK

SEQ ID NO: 132090 - protein, 7 aa, synthetic construct
LTHQKER

SEQ ID NO: 132091 - protein, 7 aa, synthetic construct
LTHQKNF

SEQ ID NO: 132092 - protein, 7 aa, synthetic construct
LTHQVQR

SEQ ID NO: 132093 - protein, 7 aa, synthetic construct
LTHRTQV

SEQ ID NO: 132094 - protein, 7 aa, synthetic construct
LTHSARV

SEQ ID NO: 132095 - protein, 7 aa, synthetic construct
LTHSHKN

SEQ ID NO: 132096 - protein, 7 aa, synthetic construct
LTHSMSK

SEQ ID NO: 132097 - protein, 7 aa, synthetic construct
LTHTARA

SEQ ID NO: 132098 - protein, 7 aa, synthetic construct
LTHTSKM

SEQ ID NO: 132099 - protein, 7 aa, synthetic construct
LTHTSRP

SEQ ID NO: 132100 - protein, 7 aa, synthetic construct
LTHVRQN

SEQ ID NO: 132101 - protein, 7 aa, synthetic construct
LTIHHGK

SEQ ID NO: 132102 - protein, 7 aa, synthetic construct
LTKFPNS

SEQ ID NO: 132103 - protein, 7 aa, synthetic construct
LTKGIYG

SEQ ID NO: 132104 - protein, 7 aa, synthetic construct
LTKHPNL

SEQ ID NO: 132105 - protein, 7 aa, synthetic construct
LTKPTSW

SEQ ID NO: 132106 - protein, 7 aa, synthetic construct
LTKSVYQ

SEQ ID NO: 132107 - protein, 7 aa, synthetic construct
LTKVREY

SEQ ID NO: 132108 - protein, 7 aa, synthetic construct
LTKYMQN

SEQ ID NO: 132109 - protein, 7 aa, synthetic construct
LTKYSQT

SEQ ID NO: 132110 - protein, 7 aa, synthetic construct
LTKYTPV

SEQ ID NO: 132111 - protein, 7 aa, synthetic construct
LTLHQKV

SEQ ID NO: 132112 - protein, 7 aa, synthetic construct
LTLQYKP

SEQ ID NO: 132113 - protein, 7 aa, synthetic construct
LTMHQKL

SEQ ID NO: 132114 - protein, 7 aa, synthetic construct
LTMHTQK

SEQ ID NO: 132115 - protein, 7 aa, synthetic construct
LTMNTRG

SEQ ID NO: 132116 - protein, 7 aa, synthetic construct
LTMVRSA

SEQ ID NO: 132117 - protein, 7 aa, synthetic construct
LTNFRDK

SEQ ID NO: 132118 - protein, 7 aa, synthetic construct
LTNGHNR

SEQ ID NO: 132119 - protein, 7 aa, synthetic construct
LTNGQFR

SEQ ID NO: 132120 - protein, 7 aa, synthetic construct
LTNHGKW

SEQ ID NO: 132121 - protein, 7 aa, synthetic construct
LTNKPHF

SEQ ID NO: 132122 - protein, 7 aa, synthetic construct
LTNNARA

SEQ ID NO: 132123 - protein, 7 aa, synthetic construct
LTNNTHK

SEQ ID NO: 132124 - protein, 7 aa, synthetic construct
LTNREPR

SEQ ID NO: 132125 - protein, 7 aa, synthetic construct
LTNRSHQ

SEQ ID NO: 132126 - protein, 7 aa, synthetic construct
LTNSRDR

SEQ ID NO: 132127 - protein, 7 aa, synthetic construct
LTNYNKQ

SEQ ID NO: 132128 - protein, 7 aa, synthetic construct
LTPKQYM

SEQ ID NO: 132129 - protein, 7 aa, synthetic construct
LTPQNNR

SEQ ID NO: 132130 - protein, 7 aa, synthetic construct
LTPRHNS

SEQ ID NO: 132131 - protein, 7 aa, synthetic construct
LTPRIQT

SEQ ID NO: 132132 - protein, 7 aa, synthetic construct
LTPRQTQ

SEQ ID NO: 132133 - protein, 7 aa, synthetic construct
LTPRRDV

SEQ ID NO: 132134 - protein, 7 aa, synthetic construct
LTPRSNM

SEQ ID NO: 132135 - protein, 7 aa, synthetic construct
LTPRSTQ

SEQ ID NO: 132136 - protein, 7 aa, synthetic construct
LTPRTHV

SEQ ID NO: 132137 - protein, 7 aa, synthetic construct
LTQETKR

SEQ ID NO: 132138 - protein, 7 aa, synthetic construct
LTQHKFS

SEQ ID NO: 132139 - protein, 7 aa, synthetic construct
LTQKLYN

SEQ ID NO: 132140 - protein, 7 aa, synthetic construct
LTQMHKY

SEQ ID NO: 132141 - protein, 7 aa, synthetic construct
LTQREFK

SEQ ID NO: 132142 - protein, 7 aa, synthetic construct
LTQRPSV

SEQ ID NO: 132143 - protein, 7 aa, synthetic construct
LTQTRNM

SEQ ID NO: 132144 - protein, 7 aa, synthetic construct
LTQYNSK

SEQ ID NO: 132145 - protein, 7 aa, synthetic construct
LTRASNQ

SEQ ID NO: 132146 - protein, 7 aa, synthetic construct
LTRDKNL

SEQ ID NO: 132147 - protein, 7 aa, synthetic construct
LTRENKY

SEQ ID NO: 132148 - protein, 7 aa, synthetic construct
LTRERTI

SEQ ID NO: 132149 - protein, 7 aa, synthetic construct
LTRERTV

SEQ ID NO: 132150 - protein, 7 aa, synthetic construct
LTRGAFN

SEQ ID NO: 132151 - protein, 7 aa, synthetic construct
LTRGISH

SEQ ID NO: 132152 - protein, 7 aa, synthetic construct
LTRGNVY

SEQ ID NO: 132153 - protein, 7 aa, synthetic construct
LTRGTPV

SEQ ID NO: 132154 - protein, 7 aa, synthetic construct
LTRHIVS

SEQ ID NO: 132155 - protein, 7 aa, synthetic construct
LTRKTET

SEQ ID NO: 132156 - protein, 7 aa, synthetic construct
LTRLHGN

SEQ ID NO: 132157 - protein, 7 aa, synthetic construct
LTRMPDK

SEQ ID NO: 132158 - protein, 7 aa, synthetic construct
LTRNPLS

SEQ ID NO: 132159 - protein, 7 aa, synthetic construct
LTRPNHP

SEQ ID NO: 132160 - protein, 7 aa, synthetic construct
LTRPPKD

SEQ ID NO: 132161 - protein, 7 aa, synthetic construct
LTRQHQA

SEQ ID NO: 132162 - protein, 7 aa, synthetic construct
LTRQHVN

SEQ ID NO: 132163 - protein, 7 aa, synthetic construct
LTRTSNS

SEQ ID NO: 132164 - protein, 7 aa, synthetic construct
LTRTTQY

SEQ ID NO: 132165 - protein, 7 aa, synthetic construct
LTSHKYV

SEQ ID NO: 132166 - protein, 7 aa, synthetic construct
LTSHQTK

SEQ ID NO: 132167 - protein, 7 aa, synthetic construct
LTSHRLQ

SEQ ID NO: 132168 - protein, 7 aa, synthetic construct
LTSHTLK

SEQ ID NO: 132169 - protein, 7 aa, synthetic construct
LTSKAYL

SEQ ID NO: 132170 - protein, 7 aa, synthetic construct
LTSMRHS

SEQ ID NO: 132171 - protein, 7 aa, synthetic construct
LTSNHVK

SEQ ID NO: 132172 - protein, 7 aa, synthetic construct
LTSNSRH

SEQ ID NO: 132173 - protein, 7 aa, synthetic construct
LTSPHRT

SEQ ID NO: 132174 - protein, 7 aa, synthetic construct
LTSSQRA

SEQ ID NO: 132175 - protein, 7 aa, synthetic construct
LTSSRHY

SEQ ID NO: 132176 - protein, 7 aa, synthetic construct
LTTHPRP

SEQ ID NO: 132177 - protein, 7 aa, synthetic construct
LTTHRGN

SEQ ID NO: 132178 - protein, 7 aa, synthetic construct
LTTHRHG

SEQ ID NO: 132179 - protein, 7 aa, synthetic construct
LTTHTRS

SEQ ID NO: 132180 - protein, 7 aa, synthetic construct
LTTHWLE

SEQ ID NO: 132181 - protein, 7 aa, synthetic construct
LTTNKYM

SEQ ID NO: 132182 - protein, 7 aa, synthetic construct
LTTRAAM

SEQ ID NO: 132183 - protein, 7 aa, synthetic construct
LTTRASN

SEQ ID NO: 132184 - protein, 7 aa, synthetic construct
LTTRFKE

SEQ ID NO: 132185 - protein, 7 aa, synthetic construct
LTTSRHS

SEQ ID NO: 132186 - protein, 7 aa, synthetic construct
LTVNHRM

SEQ ID NO: 132187 - protein, 7 aa, synthetic construct
LTVRGSQ

SEQ ID NO: 132188 - protein, 7 aa, synthetic construct
LTYGVQQ

SEQ ID NO: 132189 - protein, 7 aa, synthetic construct
LTYHSST

SEQ ID NO: 132190 - protein, 7 aa, synthetic construct
LTYKDKM

SEQ ID NO: 132191 - protein, 7 aa, synthetic construct
LVAERGR

SEQ ID NO: 132192 - protein, 7 aa, synthetic construct
LVATHRM

SEQ ID NO: 132193 - protein, 7 aa, synthetic construct
LVDAIKR

SEQ ID NO: 132194 - protein, 7 aa, synthetic construct
LVDARQR

SEQ ID NO: 132195 - protein, 7 aa, synthetic construct
LVDRVRQ

SEQ ID NO: 132196 - protein, 7 aa, synthetic construct
LVEKRPF

SEQ ID NO: 132197 - protein, 7 aa, synthetic construct
LVEMRTR

SEQ ID NO: 132198 - protein, 7 aa, synthetic construct
LVERRLV

SEQ ID NO: 132199 - protein, 7 aa, synthetic construct
LVGHANK

SEQ ID NO: 132200 - protein, 7 aa, synthetic construct
LVGHIKV

SEQ ID NO: 132201 - protein, 7 aa, synthetic construct
LVGHTRV

SEQ ID NO: 132202 - protein, 7 aa, synthetic construct
LVGNHTR

SEQ ID NO: 132203 - protein, 7 aa, synthetic construct
LVGNRER

SEQ ID NO: 132204 - protein, 7 aa, synthetic construct
LVGRTKD

SEQ ID NO: 132205 - protein, 7 aa, synthetic construct
LVGTRML

SEQ ID NO: 132206 - protein, 7 aa, synthetic construct
LVGVAHK

SEQ ID NO: 132207 - protein, 7 aa, synthetic construct
LVHAAKQ

SEQ ID NO: 132208 - protein, 7 aa, synthetic construct
LVHASKA

SEQ ID NO: 132209 - protein, 7 aa, synthetic construct
LVHGPKM

SEQ ID NO: 132210 - protein, 7 aa, synthetic construct
LVHGVKM

SEQ ID NO: 132211 - protein, 7 aa, synthetic construct
LVHKAHN

SEQ ID NO: 132212 - protein, 7 aa, synthetic construct
LVHKHGA

SEQ ID NO: 132213 - protein, 7 aa, synthetic construct
LVHKQDR

SEQ ID NO: 132214 - protein, 7 aa, synthetic construct
LVHMPSK

SEQ ID NO: 132215 - protein, 7 aa, synthetic construct
LVHQQKM

SEQ ID NO: 132216 - protein, 7 aa, synthetic construct
LVHQQRG

SEQ ID NO: 132217 - protein, 7 aa, synthetic construct
LVHRGIG

SEQ ID NO: 132218 - protein, 7 aa, synthetic construct
LVIKRQE

SEQ ID NO: 132219 - protein, 7 aa, synthetic construct
LVKFQAG

SEQ ID NO: 132220 - protein, 7 aa, synthetic construct
LVKHYPA

SEQ ID NO: 132221 - protein, 7 aa, synthetic construct
LVKNAYM

SEQ ID NO: 132222 - protein, 7 aa, synthetic construct
LVKPNFQ

SEQ ID NO: 132223 - protein, 7 aa, synthetic construct
LVKPYQG

SEQ ID NO: 132224 - protein, 7 aa, synthetic construct
LVKQRFD

SEQ ID NO: 132225 - protein, 7 aa, synthetic construct
LVKRIQE

SEQ ID NO: 132226 - protein, 7 aa, synthetic construct
LVKRQGE

SEQ ID NO: 132227 - protein, 7 aa, synthetic construct
LVKYAQS

SEQ ID NO: 132228 - protein, 7 aa, synthetic construct
LVKYKEN

SEQ ID NO: 132229 - protein, 7 aa, synthetic construct
LVMPARP

SEQ ID NO: 132230 - protein, 7 aa, synthetic construct
LVNHRGI

SEQ ID NO: 132231 - protein, 7 aa, synthetic construct
LVNRENR

SEQ ID NO: 132232 - protein, 7 aa, synthetic construct
LVNRPQL

SEQ ID NO: 132233 - protein, 7 aa, synthetic construct
LVPAHQK

SEQ ID NO: 132234 - protein, 7 aa, synthetic construct
LVPARLN

SEQ ID NO: 132235 - protein, 7 aa, synthetic construct
LVPHRPM

SEQ ID NO: 132236 - protein, 7 aa, synthetic construct
LVPKHNL

SEQ ID NO: 132237 - protein, 7 aa, synthetic construct
LVPMSRA

SEQ ID NO: 132238 - protein, 7 aa, synthetic construct
LVPRGIQ

SEQ ID NO: 132239 - protein, 7 aa, synthetic construct
LVPRNQH

SEQ ID NO: 132240 - protein, 7 aa, synthetic construct
LVPRNRE

SEQ ID NO: 132241 - protein, 7 aa, synthetic construct
LVPRTER

SEQ ID NO: 132242 - protein, 7 aa, synthetic construct
LVPRTMN

SEQ ID NO: 132243 - protein, 7 aa, synthetic construct
LVQNRIQ

SEQ ID NO: 132244 - protein, 7 aa, synthetic construct
LVQNRQM

SEQ ID NO: 132245 - protein, 7 aa, synthetic construct
LVQPNHR

SEQ ID NO: 132246 - protein, 7 aa, synthetic construct
LVQRERQ

SEQ ID NO: 132247 - protein, 7 aa, synthetic construct
LVQSRNT

SEQ ID NO: 132248 - protein, 7 aa, synthetic construct
LVRAKSD

SEQ ID NO: 132249 - protein, 7 aa, synthetic construct
LVRAMGN

SEQ ID NO: 132250 - protein, 7 aa, synthetic construct
LVRDHAK

SEQ ID NO: 132251 - protein, 7 aa, synthetic construct
LVRDPRG

SEQ ID NO: 132252 - protein, 7 aa, synthetic construct
LVRESFK

SEQ ID NO: 132253 - protein, 7 aa, synthetic construct
LVRGAGA

SEQ ID NO: 132254 - protein, 7 aa, synthetic construct
LVRGEKN

SEQ ID NO: 132255 - protein, 7 aa, synthetic construct
LVRGSIN

SEQ ID NO: 132256 - protein, 7 aa, synthetic construct
LVRGTTN

SEQ ID NO: 132257 - protein, 7 aa, synthetic construct
LVRHIQA

SEQ ID NO: 132258 - protein, 7 aa, synthetic construct
LVRHPGQ

SEQ ID NO: 132259 - protein, 7 aa, synthetic construct
LVRKDDR

SEQ ID NO: 132260 - protein, 7 aa, synthetic construct
LVRMKEM

SEQ ID NO: 132261 - protein, 7 aa, synthetic construct
LVRNNTM

SEQ ID NO: 132262 - protein, 7 aa, synthetic construct
LVRPGHA

SEQ ID NO: 132263 - protein, 7 aa, synthetic construct
LVRQINN

SEQ ID NO: 132264 - protein, 7 aa, synthetic construct
LVRQVQN

SEQ ID NO: 132265 - protein, 7 aa, synthetic construct
LVRSARE

SEQ ID NO: 132266 - protein, 7 aa, synthetic construct
LVRTIDK

SEQ ID NO: 132267 - protein, 7 aa, synthetic construct
LVSQEKR

SEQ ID NO: 132268 - protein, 7 aa, synthetic construct
LVSRVSQ

SEQ ID NO: 132269 - protein, 7 aa, synthetic construct
LVTHNKA

SEQ ID NO: 132270 - protein, 7 aa, synthetic construct
LVTNRER

SEQ ID NO: 132271 - protein, 7 aa, synthetic construct
LVTRNHG

SEQ ID NO: 132272 - protein, 7 aa, synthetic construct
LWEIKSE

SEQ ID NO: 132273 - protein, 7 aa, synthetic construct
LWNQPLD

SEQ ID NO: 132274 - protein, 7 aa, synthetic construct
LYAKNSA

SEQ ID NO: 132275 - protein, 7 aa, synthetic construct
LYAMSKN

SEQ ID NO: 132276 - protein, 7 aa, synthetic construct
LYANQKM

SEQ ID NO: 132277 - protein, 7 aa, synthetic construct
LYAQVKG

SEQ ID NO: 132278 - protein, 7 aa, synthetic construct
LYASIKQ

SEQ ID NO: 132279 - protein, 7 aa, synthetic construct
LYDGVHR

SEQ ID NO: 132280 - protein, 7 aa, synthetic construct
LYENHTR

SEQ ID NO: 132281 - protein, 7 aa, synthetic construct
LYGDDAN

SEQ ID NO: 132282 - protein, 7 aa, synthetic construct
LYGDTKP

SEQ ID NO: 132283 - protein, 7 aa, synthetic construct
LYGGPKI

SEQ ID NO: 132284 - protein, 7 aa, synthetic construct
LYGKPIT

SEQ ID NO: 132285 - protein, 7 aa, synthetic construct
LYGKPVH

SEQ ID NO: 132286 - protein, 7 aa, synthetic construct
LYGPVTS

SEQ ID NO: 132287 - protein, 7 aa, synthetic construct
LYGQGGK

SEQ ID NO: 132288 - protein, 7 aa, synthetic construct
LYGQPTK

SEQ ID NO: 132289 - protein, 7 aa, synthetic construct
LYHMRSD

SEQ ID NO: 132290 - protein, 7 aa, synthetic construct
LYKAAHA

SEQ ID NO: 132291 - protein, 7 aa, synthetic construct
LYKDTVR

SEQ ID NO: 132292 - protein, 7 aa, synthetic construct
LYKEKNM

SEQ ID NO: 132293 - protein, 7 aa, synthetic construct
LYKGAPS

SEQ ID NO: 132294 - protein, 7 aa, synthetic construct
LYKGGSL

SEQ ID NO: 132295 - protein, 7 aa, synthetic construct
LYKHQGG

SEQ ID NO: 132296 - protein, 7 aa, synthetic construct
LYKIQKD

SEQ ID NO: 132297 - protein, 7 aa, synthetic construct
LYKNELR

SEQ ID NO: 132298 - protein, 7 aa, synthetic construct
LYKPIKE

SEQ ID NO: 132299 - protein, 7 aa, synthetic construct
LYKPSSS

SEQ ID NO: 132300 - protein, 7 aa, synthetic construct
LYKQEKH

SEQ ID NO: 132301 - protein, 7 aa, synthetic construct
LYKQINA

SEQ ID NO: 132302 - protein, 7 aa, synthetic construct
LYKQSDR

SEQ ID NO: 132303 - protein, 7 aa, synthetic construct
LYKSIAG

SEQ ID NO: 132304 - protein, 7 aa, synthetic construct
LYKSMER

SEQ ID NO: 132305 - protein, 7 aa, synthetic construct
LYKVRDA

SEQ ID NO: 132306 - protein, 7 aa, synthetic construct
LYNAARQ

SEQ ID NO: 132307 - protein, 7 aa, synthetic construct
LYNGLGK

SEQ ID NO: 132308 - protein, 7 aa, synthetic construct
LYNQKIQ

SEQ ID NO: 132309 - protein, 7 aa, synthetic construct
LYPATKN

SEQ ID NO: 132310 - protein, 7 aa, synthetic construct
LYPGVAK

SEQ ID NO: 132311 - protein, 7 aa, synthetic construct
LYPKQVV

SEQ ID NO: 132312 - protein, 7 aa, synthetic construct
LYPNRAM

SEQ ID NO: 132313 - protein, 7 aa, synthetic construct
LYPRTGA

SEQ ID NO: 132314 - protein, 7 aa, synthetic construct
LYQRSAM

SEQ ID NO: 132315 - protein, 7 aa, synthetic construct
LYREGIR

SEQ ID NO: 132316 - protein, 7 aa, synthetic construct
LYRGTQS

SEQ ID NO: 132317 - protein, 7 aa, synthetic construct
LYRQGHS

SEQ ID NO: 132318 - protein, 7 aa, synthetic construct
LYRRDDN

SEQ ID NO: 132319 - protein, 7 aa, synthetic construct
LYRSSGM

SEQ ID NO: 132320 - protein, 7 aa, synthetic construct
LYRTHTP

SEQ ID NO: 132321 - protein, 7 aa, synthetic construct
LYSAKPV

SEQ ID NO: 132322 - protein, 7 aa, synthetic construct
LYSAKSG

SEQ ID NO: 132323 - protein, 7 aa, synthetic construct
LYSGATR

SEQ ID NO: 132324 - protein, 7 aa, synthetic construct
LYSGGSK

SEQ ID NO: 132325 - protein, 7 aa, synthetic construct
LYSKVAS

SEQ ID NO: 132326 - protein, 7 aa, synthetic construct
LYSRSTA

SEQ ID NO: 132327 - protein, 7 aa, synthetic construct
LYSVSKQ

SEQ ID NO: 132328 - protein, 7 aa, synthetic construct
LYTKKDQ

SEQ ID NO: 132329 - protein, 7 aa, synthetic construct
LYTNVKQ

SEQ ID NO: 132330 - protein, 7 aa, synthetic construct
LYTQVGK

SEQ ID NO: 132331 - protein, 7 aa, synthetic construct
LYTSIKN

SEQ ID NO: 132332 - protein, 7 aa, synthetic construct
MAAHRNL

SEQ ID NO: 132333 - protein, 7 aa, synthetic construct
MAAHVKY

SEQ ID NO: 132334 - protein, 7 aa, synthetic construct
MAAKGNW

SEQ ID NO: 132335 - protein, 7 aa, synthetic construct
MAANQAR

SEQ ID NO: 132336 - protein, 7 aa, synthetic construct
MAAQTRY

SEQ ID NO: 132337 - protein, 7 aa, synthetic construct
MAARFDK

SEQ ID NO: 132338 - protein, 7 aa, synthetic construct
MAARHVT

SEQ ID NO: 132339 - protein, 7 aa, synthetic construct
MAARNNF

SEQ ID NO: 132340 - protein, 7 aa, synthetic construct
MAARQSF

SEQ ID NO: 132341 - protein, 7 aa, synthetic construct
MAASHMR

SEQ ID NO: 132342 - protein, 7 aa, synthetic construct
MAAVKHT

SEQ ID NO: 132343 - protein, 7 aa, synthetic construct
MADRARV

SEQ ID NO: 132344 - protein, 7 aa, synthetic construct
MADRSKN

SEQ ID NO: 132345 - protein, 7 aa, synthetic construct
MADVARR

SEQ ID NO: 132346 - protein, 7 aa, synthetic construct
MAEAKRM

SEQ ID NO: 132347 - protein, 7 aa, synthetic construct
MAERAIK

SEQ ID NO: 132348 - protein, 7 aa, synthetic construct
MAERAQR

SEQ ID NO: 132349 - protein, 7 aa, synthetic construct
MAETRRI

SEQ ID NO: 132350 - protein, 7 aa, synthetic construct
MAFGNKN

SEQ ID NO: 132351 - protein, 7 aa, synthetic construct
MAFPAAD

SEQ ID NO: 132352 - protein, 7 aa, synthetic construct
MAGGHWE

SEQ ID NO: 132353 - protein, 7 aa, synthetic construct
MAGGMKF

SEQ ID NO: 132354 - protein, 7 aa, synthetic construct
MAGHAMK

SEQ ID NO: 132355 - protein, 7 aa, synthetic construct
MAGHFKP

SEQ ID NO: 132356 - protein, 7 aa, synthetic construct
MAGHIAK

SEQ ID NO: 132357 - protein, 7 aa, synthetic construct
MAGIQGR

SEQ ID NO: 132358 - protein, 7 aa, synthetic construct
MAGKINP

SEQ ID NO: 132359 - protein, 7 aa, synthetic construct
MAGKYDR

SEQ ID NO: 132360 - protein, 7 aa, synthetic construct
MAGLMRA

SEQ ID NO: 132361 - protein, 7 aa, synthetic construct
MAGMMKH

SEQ ID NO: 132362 - protein, 7 aa, synthetic construct
MAGMRGM

SEQ ID NO: 132363 - protein, 7 aa, synthetic construct
MAGPNAR

SEQ ID NO: 132364 - protein, 7 aa, synthetic construct
MAGQFSR

SEQ ID NO: 132365 - protein, 7 aa, synthetic construct
MAGQHRI

SEQ ID NO: 132366 - protein, 7 aa, synthetic construct
MAGSSKW

SEQ ID NO: 132367 - protein, 7 aa, synthetic construct
MAGYQAK

SEQ ID NO: 132368 - protein, 7 aa, synthetic construct
MAHASGK

SEQ ID NO: 132369 - protein, 7 aa, synthetic construct
MAHATRI

SEQ ID NO: 132370 - protein, 7 aa, synthetic construct
MAHATRM

SEQ ID NO: 132371 - protein, 7 aa, synthetic construct
MAHGVMR

SEQ ID NO: 132372 - protein, 7 aa, synthetic construct
MAHHTKV

SEQ ID NO: 132373 - protein, 7 aa, synthetic construct
MAHIRPS

SEQ ID NO: 132374 - protein, 7 aa, synthetic construct
MAHKIYA

SEQ ID NO: 132375 - protein, 7 aa, synthetic construct
MAHKKDY

SEQ ID NO: 132376 - protein, 7 aa, synthetic construct
MAHKLMS

SEQ ID NO: 132377 - protein, 7 aa, synthetic construct
MAHLSGR

SEQ ID NO: 132378 - protein, 7 aa, synthetic construct
MAHPKMN

SEQ ID NO: 132379 - protein, 7 aa, synthetic construct
MAHPRNI

SEQ ID NO: 132380 - protein, 7 aa, synthetic construct
MAHRLGV

SEQ ID NO: 132381 - protein, 7 aa, synthetic construct
MAHTNRL

SEQ ID NO: 132382 - protein, 7 aa, synthetic construct
MAHTQNK

SEQ ID NO: 132383 - protein, 7 aa, synthetic construct
MAHTSIK

SEQ ID NO: 132384 - protein, 7 aa, synthetic construct
MAHTSKH

SEQ ID NO: 132385 - protein, 7 aa, synthetic construct
MAHVKSF

SEQ ID NO: 132386 - protein, 7 aa, synthetic construct
MAIHVKP

SEQ ID NO: 132387 - protein, 7 aa, synthetic construct
MAIKQVN

SEQ ID NO: 132388 - protein, 7 aa, synthetic construct
MAIKSGY

SEQ ID NO: 132389 - protein, 7 aa, synthetic construct
MAIPRKD

SEQ ID NO: 132390 - protein, 7 aa, synthetic construct
MAIRNSM

SEQ ID NO: 132391 - protein, 7 aa, synthetic construct
MAIRPGA

SEQ ID NO: 132392 - protein, 7 aa, synthetic construct
MAIRPKD

SEQ ID NO: 132393 - protein, 7 aa, synthetic construct
MAIRPTS

SEQ ID NO: 132394 - protein, 7 aa, synthetic construct
MAKDHRL

SEQ ID NO: 132395 - protein, 7 aa, synthetic construct
MAKFVQS

SEQ ID NO: 132396 - protein, 7 aa, synthetic construct
MAKGPHF

SEQ ID NO: 132397 - protein, 7 aa, synthetic construct
MAKHFAS

SEQ ID NO: 132398 - protein, 7 aa, synthetic construct
MAKHMMN

SEQ ID NO: 132399 - protein, 7 aa, synthetic construct
MAKHPNM

SEQ ID NO: 132400 - protein, 7 aa, synthetic construct
MAKHVQQ

SEQ ID NO: 132401 - protein, 7 aa, synthetic construct
MAKHYGN

SEQ ID NO: 132402 - protein, 7 aa, synthetic construct
MAKISHF

SEQ ID NO: 132403 - protein, 7 aa, synthetic construct
MAKKFDI

SEQ ID NO: 132404 - protein, 7 aa, synthetic construct
MAKLREY

SEQ ID NO: 132405 - protein, 7 aa, synthetic construct
MAKMVPL

SEQ ID NO: 132406 - protein, 7 aa, synthetic construct
MAKNHPF

SEQ ID NO: 132407 - protein, 7 aa, synthetic construct
MAKNIMY

SEQ ID NO: 132408 - protein, 7 aa, synthetic construct
MAKNNYL

SEQ ID NO: 132409 - protein, 7 aa, synthetic construct
MAKQVYA

SEQ ID NO: 132410 - protein, 7 aa, synthetic construct
MAKRDSF

SEQ ID NO: 132411 - protein, 7 aa, synthetic construct
MAKRGDG

SEQ ID NO: 132412 - protein, 7 aa, synthetic construct
MAKRLEN

SEQ ID NO: 132413 - protein, 7 aa, synthetic construct
MAKRLPD

SEQ ID NO: 132414 - protein, 7 aa, synthetic construct
MAKYLEK

SEQ ID NO: 132415 - protein, 7 aa, synthetic construct
MAKYVKE

SEQ ID NO: 132416 - protein, 7 aa, synthetic construct
MALHPKA

SEQ ID NO: 132417 - protein, 7 aa, synthetic construct
MALPHTR

SEQ ID NO: 132418 - protein, 7 aa, synthetic construct
MALQSHK

SEQ ID NO: 132419 - protein, 7 aa, synthetic construct
MALRDNK

SEQ ID NO: 132420 - protein, 7 aa, synthetic construct
MAMHTKF

SEQ ID NO: 132421 - protein, 7 aa, synthetic construct
MAMKRHE

SEQ ID NO: 132422 - protein, 7 aa, synthetic construct
MAMKYKE

SEQ ID NO: 132423 - protein, 7 aa, synthetic construct
MAMNNTE

SEQ ID NO: 132424 - protein, 7 aa, synthetic construct
MANHSLR

SEQ ID NO: 132425 - protein, 7 aa, synthetic construct
MANKNQW

SEQ ID NO: 132426 - protein, 7 aa, synthetic construct
MANKPHF

SEQ ID NO: 132427 - protein, 7 aa, synthetic construct
MANLRDK

SEQ ID NO: 132428 - protein, 7 aa, synthetic construct
MANMPGD

SEQ ID NO: 132429 - protein, 7 aa, synthetic construct
MANNPRH

SEQ ID NO: 132430 - protein, 7 aa, synthetic construct
MANPIQR

SEQ ID NO: 132431 - protein, 7 aa, synthetic construct
MANQNHK

SEQ ID NO: 132432 - protein, 7 aa, synthetic construct
MANRITT

SEQ ID NO: 132433 - protein, 7 aa, synthetic construct
MANRYKE

SEQ ID NO: 132434 - protein, 7 aa, synthetic construct
MANSPAD

SEQ ID NO: 132435 - protein, 7 aa, synthetic construct
MANSRDR

SEQ ID NO: 132436 - protein, 7 aa, synthetic construct
MANYVTQ

SEQ ID NO: 132437 - protein, 7 aa, synthetic construct
MAPDPSA

SEQ ID NO: 132438 - protein, 7 aa, synthetic construct
MAPERRG

SEQ ID NO: 132439 - protein, 7 aa, synthetic construct
MAPHKYQ

SEQ ID NO: 132440 - protein, 7 aa, synthetic construct
MAPHTMR

SEQ ID NO: 132441 - protein, 7 aa, synthetic construct
MAPRAPN

SEQ ID NO: 132442 - protein, 7 aa, synthetic construct
MAPRISV

SEQ ID NO: 132443 - protein, 7 aa, synthetic construct
MAPVASR

SEQ ID NO: 132444 - protein, 7 aa, synthetic construct
MAPYGKA

SEQ ID NO: 132445 - protein, 7 aa, synthetic construct
MAQAQQR

SEQ ID NO: 132446 - protein, 7 aa, synthetic construct
MAQATRY

SEQ ID NO: 132447 - protein, 7 aa, synthetic construct
MAQHVRV

SEQ ID NO: 132448 - protein, 7 aa, synthetic construct
MAQLHGK

SEQ ID NO: 132449 - protein, 7 aa, synthetic construct
MAQMNRS

SEQ ID NO: 132450 - protein, 7 aa, synthetic construct
MAQNMKY

SEQ ID NO: 132451 - protein, 7 aa, synthetic construct
MAQPKYV

SEQ ID NO: 132452 - protein, 7 aa, synthetic construct
MAQTHRY

SEQ ID NO: 132453 - protein, 7 aa, synthetic construct
MAQTPRS

SEQ ID NO: 132454 - protein, 7 aa, synthetic construct
MARAKDA

SEQ ID NO: 132455 - protein, 7 aa, synthetic construct
MARDKSQ

SEQ ID NO: 132456 - protein, 7 aa, synthetic construct
MARDTRM

SEQ ID NO: 132457 - protein, 7 aa, synthetic construct
MAREKPY

SEQ ID NO: 132458 - protein, 7 aa, synthetic construct
MAREVKF

SEQ ID NO: 132459 - protein, 7 aa, synthetic construct
MARFGKE

SEQ ID NO: 132460 - protein, 7 aa, synthetic construct
MARHQVA

SEQ ID NO: 132461 - protein, 7 aa, synthetic construct
MARKDTY

SEQ ID NO: 132462 - protein, 7 aa, synthetic construct
MARKEST

SEQ ID NO: 132463 - protein, 7 aa, synthetic construct
MARKGES

SEQ ID NO: 132464 - protein, 7 aa, synthetic construct
MARKLES

SEQ ID NO: 132465 - protein, 7 aa, synthetic construct
MARKLND

SEQ ID NO: 132466 - protein, 7 aa, synthetic construct
MARLENR

SEQ ID NO: 132467 - protein, 7 aa, synthetic construct
MARLSSG

SEQ ID NO: 132468 - protein, 7 aa, synthetic construct
MARMDKA

SEQ ID NO: 132469 - protein, 7 aa, synthetic construct
MARMQTV

SEQ ID NO: 132470 - protein, 7 aa, synthetic construct
MARMSRE

SEQ ID NO: 132471 - protein, 7 aa, synthetic construct
MARNNVF

SEQ ID NO: 132472 - protein, 7 aa, synthetic construct
MARNSTI

SEQ ID NO: 132473 - protein, 7 aa, synthetic construct
MARNTGA

SEQ ID NO: 132474 - protein, 7 aa, synthetic construct
MARNTTG

SEQ ID NO: 132475 - protein, 7 aa, synthetic construct
MARNVSN

SEQ ID NO: 132476 - protein, 7 aa, synthetic construct
MARPAAI

SEQ ID NO: 132477 - protein, 7 aa, synthetic construct
MARPGLL

SEQ ID NO: 132478 - protein, 7 aa, synthetic construct
MARPHTM

SEQ ID NO: 132479 - protein, 7 aa, synthetic construct
MARQGHM

SEQ ID NO: 132480 - protein, 7 aa, synthetic construct
MARSKEA

SEQ ID NO: 132481 - protein, 7 aa, synthetic construct
MARSNEK

SEQ ID NO: 132482 - protein, 7 aa, synthetic construct
MARTIKE

SEQ ID NO: 132483 - protein, 7 aa, synthetic construct
MARTSHA

SEQ ID NO: 132484 - protein, 7 aa, synthetic construct
MARVLHA

SEQ ID NO: 132485 - protein, 7 aa, synthetic construct
MARVSSS

SEQ ID NO: 132486 - protein, 7 aa, synthetic construct
MASGHLK

SEQ ID NO: 132487 - protein, 7 aa, synthetic construct
MASKYPT

SEQ ID NO: 132488 - protein, 7 aa, synthetic construct
MASMHQK

SEQ ID NO: 132489 - protein, 7 aa, synthetic construct
MASNKFI

SEQ ID NO: 132490 - protein, 7 aa, synthetic construct
MASRKEN

SEQ ID NO: 132491 - protein, 7 aa, synthetic construct
MASRMPH

SEQ ID NO: 132492 - protein, 7 aa, synthetic construct
MATHRNM

SEQ ID NO: 132493 - protein, 7 aa, synthetic construct
MATHVSK

SEQ ID NO: 132494 - protein, 7 aa, synthetic construct
MATNNMR

SEQ ID NO: 132495 - protein, 7 aa, synthetic construct
MATRAHM

SEQ ID NO: 132496 - protein, 7 aa, synthetic construct
MATRQYP

SEQ ID NO: 132497 - protein, 7 aa, synthetic construct
MATTRTF

SEQ ID NO: 132498 - protein, 7 aa, synthetic construct
MAVAYKQ

SEQ ID NO: 132499 - protein, 7 aa, synthetic construct
MAVMRQP

SEQ ID NO: 132500 - protein, 7 aa, synthetic construct
MAVQRKD

SEQ ID NO: 132501 - protein, 7 aa, synthetic construct
MAVRNNQ

SEQ ID NO: 132502 - protein, 7 aa, synthetic construct
MAYGAAK

SEQ ID NO: 132503 - protein, 7 aa, synthetic construct
MAYKGGI

SEQ ID NO: 132504 - protein, 7 aa, synthetic construct
MAYKIKD

SEQ ID NO: 132505 - protein, 7 aa, synthetic construct
MDAALRK

SEQ ID NO: 132506 - protein, 7 aa, synthetic construct
MDAKGTR

SEQ ID NO: 132507 - protein, 7 aa, synthetic construct
MDAMKRI

SEQ ID NO: 132508 - protein, 7 aa, synthetic construct
MDAQRKM

SEQ ID NO: 132509 - protein, 7 aa, synthetic construct
MDARAKN

SEQ ID NO: 132510 - protein, 7 aa, synthetic construct
MDARLKY

SEQ ID NO: 132511 - protein, 7 aa, synthetic construct
MDATKKF

SEQ ID NO: 132512 - protein, 7 aa, synthetic construct
MDFKKGI

SEQ ID NO: 132513 - protein, 7 aa, synthetic construct
MDGKFQR

SEQ ID NO: 132514 - protein, 7 aa, synthetic construct
MDGKGMR

SEQ ID NO: 132515 - protein, 7 aa, synthetic construct
MDGKPKH

SEQ ID NO: 132516 - protein, 7 aa, synthetic construct
MDGKRTF

SEQ ID NO: 132517 - protein, 7 aa, synthetic construct
MDGLRKN

SEQ ID NO: 132518 - protein, 7 aa, synthetic construct
MDGQRRI

SEQ ID NO: 132519 - protein, 7 aa, synthetic construct
MDGVKRA

SEQ ID NO: 132520 - protein, 7 aa, synthetic construct
MDGVRGK

SEQ ID NO: 132521 - protein, 7 aa, synthetic construct
MDHHMSK

SEQ ID NO: 132522 - protein, 7 aa, synthetic construct
MDHKYKA

SEQ ID NO: 132523 - protein, 7 aa, synthetic construct
MDHMRKV

SEQ ID NO: 132524 - protein, 7 aa, synthetic construct
MDIKPSR

SEQ ID NO: 132525 - protein, 7 aa, synthetic construct
MDIKTRY

SEQ ID NO: 132526 - protein, 7 aa, synthetic construct
MDIRAGK

SEQ ID NO: 132527 - protein, 7 aa, synthetic construct
MDKAPNR

SEQ ID NO: 132528 - protein, 7 aa, synthetic construct
MDKFSRG

SEQ ID NO: 132529 - protein, 7 aa, synthetic construct
MDKGINK

SEQ ID NO: 132530 - protein, 7 aa, synthetic construct
MDKGLQR

SEQ ID NO: 132531 - protein, 7 aa, synthetic construct
MDKIASR

SEQ ID NO: 132532 - protein, 7 aa, synthetic construct
MDKIVMR

SEQ ID NO: 132533 - protein, 7 aa, synthetic construct
MDKKHDR

SEQ ID NO: 132534 - protein, 7 aa, synthetic construct
MDKMMLK

SEQ ID NO: 132535 - protein, 7 aa, synthetic construct
MDKMQQR

SEQ ID NO: 132536 - protein, 7 aa, synthetic construct
MDKMSAR

SEQ ID NO: 132537 - protein, 7 aa, synthetic construct
MDKNKYY

SEQ ID NO: 132538 - protein, 7 aa, synthetic construct
MDKNMAR

SEQ ID NO: 132539 - protein, 7 aa, synthetic construct
MDKNMVR

SEQ ID NO: 132540 - protein, 7 aa, synthetic construct
MDKNQTK

SEQ ID NO: 132541 - protein, 7 aa, synthetic construct
MDKPIQK

SEQ ID NO: 132542 - protein, 7 aa, synthetic construct
MDKPMQR

SEQ ID NO: 132543 - protein, 7 aa, synthetic construct
MDKPRHG

SEQ ID NO: 132544 - protein, 7 aa, synthetic construct
MDKQANK

SEQ ID NO: 132545 - protein, 7 aa, synthetic construct
MDKQAYK

SEQ ID NO: 132546 - protein, 7 aa, synthetic construct
MDKQSQR

SEQ ID NO: 132547 - protein, 7 aa, synthetic construct
MDKRERM

SEQ ID NO: 132548 - protein, 7 aa, synthetic construct
MDKRLTI

SEQ ID NO: 132549 - protein, 7 aa, synthetic construct
MDKRQRE

SEQ ID NO: 132550 - protein, 7 aa, synthetic construct
MDKSYPR

SEQ ID NO: 132551 - protein, 7 aa, synthetic construct
MDKTREK

SEQ ID NO: 132552 - protein, 7 aa, synthetic construct
MDKWKSV

SEQ ID NO: 132553 - protein, 7 aa, synthetic construct
MDLARTK

SEQ ID NO: 132554 - protein, 7 aa, synthetic construct
MDLRAKQ

SEQ ID NO: 132555 - protein, 7 aa, synthetic construct
MDNMRRV

SEQ ID NO: 132556 - protein, 7 aa, synthetic construct
MDNPKMR

SEQ ID NO: 132557 - protein, 7 aa, synthetic construct
MDPKIRY

SEQ ID NO: 132558 - protein, 7 aa, synthetic construct
MDPPKMR

SEQ ID NO: 132559 - protein, 7 aa, synthetic construct
MDPVNRK

SEQ ID NO: 132560 - protein, 7 aa, synthetic construct
MDPVRAR

SEQ ID NO: 132561 - protein, 7 aa, synthetic construct
MDQKPRN

SEQ ID NO: 132562 - protein, 7 aa, synthetic construct
MDQMKKN

SEQ ID NO: 132563 - protein, 7 aa, synthetic construct
MDQRTIK

SEQ ID NO: 132564 - protein, 7 aa, synthetic construct
MDRAQAK

SEQ ID NO: 132565 - protein, 7 aa, synthetic construct
MDRAVPK

SEQ ID NO: 132566 - protein, 7 aa, synthetic construct
MDRDGKR

SEQ ID NO: 132567 - protein, 7 aa, synthetic construct
MDRGGAR

SEQ ID NO: 132568 - protein, 7 aa, synthetic construct
MDRGHVR

SEQ ID NO: 132569 - protein, 7 aa, synthetic construct
MDRHKTS

SEQ ID NO: 132570 - protein, 7 aa, synthetic construct
MDRIQPK

SEQ ID NO: 132571 - protein, 7 aa, synthetic construct
MDRITKS

SEQ ID NO: 132572 - protein, 7 aa, synthetic construct
MDRKAAF

SEQ ID NO: 132573 - protein, 7 aa, synthetic construct
MDRKAMQ

SEQ ID NO: 132574 - protein, 7 aa, synthetic construct
MDRKPQF

SEQ ID NO: 132575 - protein, 7 aa, synthetic construct
MDRKSMG

SEQ ID NO: 132576 - protein, 7 aa, synthetic construct
MDRKVQN

SEQ ID NO: 132577 - protein, 7 aa, synthetic construct
MDRLAKT

SEQ ID NO: 132578 - protein, 7 aa, synthetic construct
MDRMKQQ

SEQ ID NO: 132579 - protein, 7 aa, synthetic construct
MDRMKVM

SEQ ID NO: 132580 - protein, 7 aa, synthetic construct
MDRMVKL

SEQ ID NO: 132581 - protein, 7 aa, synthetic construct
MDRNLRG

SEQ ID NO: 132582 - protein, 7 aa, synthetic construct
MDRPITK

SEQ ID NO: 132583 - protein, 7 aa, synthetic construct
MDRPIVR

SEQ ID NO: 132584 - protein, 7 aa, synthetic construct
MDRPPKN

SEQ ID NO: 132585 - protein, 7 aa, synthetic construct
MDRPVKA

SEQ ID NO: 132586 - protein, 7 aa, synthetic construct
MDRPVKT

SEQ ID NO: 132587 - protein, 7 aa, synthetic construct
MDRQAKN

SEQ ID NO: 132588 - protein, 7 aa, synthetic construct
MDRRGSM

SEQ ID NO: 132589 - protein, 7 aa, synthetic construct
MDRRISG

SEQ ID NO: 132590 - protein, 7 aa, synthetic construct
MDRRMAG

SEQ ID NO: 132591 - protein, 7 aa, synthetic construct
MDRTINR

SEQ ID NO: 132592 - protein, 7 aa, synthetic construct
MDRVNAK

SEQ ID NO: 132593 - protein, 7 aa, synthetic construct
MDSHHRM

SEQ ID NO: 132594 - protein, 7 aa, synthetic construct
MDSKARI

SEQ ID NO: 132595 - protein, 7 aa, synthetic construct
MDSKVLK

SEQ ID NO: 132596 - protein, 7 aa, synthetic construct
MDSQPRK

SEQ ID NO: 132597 - protein, 7 aa, synthetic construct
MDTMAKR

SEQ ID NO: 132598 - protein, 7 aa, synthetic construct
MDTQTRK

SEQ ID NO: 132599 - protein, 7 aa, synthetic construct
MDVKRIL

SEQ ID NO: 132600 - protein, 7 aa, synthetic construct
MDVMRKS

SEQ ID NO: 132601 - protein, 7 aa, synthetic construct
MDVRNRV

SEQ ID NO: 132602 - protein, 7 aa, synthetic construct
MDWPNTK

SEQ ID NO: 132603 - protein, 7 aa, synthetic construct
MEAIKKN

SEQ ID NO: 132604 - protein, 7 aa, synthetic construct
MEAKKHY

SEQ ID NO: 132605 - protein, 7 aa, synthetic construct
MEAKVPR

SEQ ID NO: 132606 - protein, 7 aa, synthetic construct
MEASRTK

SEQ ID NO: 132607 - protein, 7 aa, synthetic construct
MEAVFKK

SEQ ID NO: 132608 - protein, 7 aa, synthetic construct
MEDTKKK

SEQ ID NO: 132609 - protein, 7 aa, synthetic construct
MEGKKNF

SEQ ID NO: 132610 - protein, 7 aa, synthetic construct
MEGKMRV

SEQ ID NO: 132611 - protein, 7 aa, synthetic construct
MEHSHRM

SEQ ID NO: 132612 - protein, 7 aa, synthetic construct
MEIRNVK

SEQ ID NO: 132613 - protein, 7 aa, synthetic construct
MEKGTTR

SEQ ID NO: 132614 - protein, 7 aa, synthetic construct
MEKHTNR

SEQ ID NO: 132615 - protein, 7 aa, synthetic construct
MEKIYKT

SEQ ID NO: 132616 - protein, 7 aa, synthetic construct
MEKMHRS

SEQ ID NO: 132617 - protein, 7 aa, synthetic construct
MEKNIRF

SEQ ID NO: 132618 - protein, 7 aa, synthetic construct
MEKNSRI

SEQ ID NO: 132619 - protein, 7 aa, synthetic construct
MEKPRFS

SEQ ID NO: 132620 - protein, 7 aa, synthetic construct
MEKPRNY

SEQ ID NO: 132621 - protein, 7 aa, synthetic construct
MEKPVGR

SEQ ID NO: 132622 - protein, 7 aa, synthetic construct
MEKQGHR

SEQ ID NO: 132623 - protein, 7 aa, synthetic construct
MEKQILK

SEQ ID NO: 132624 - protein, 7 aa, synthetic construct
MEKQQLR

SEQ ID NO: 132625 - protein, 7 aa, synthetic construct
MEKRAFA

SEQ ID NO: 132626 - protein, 7 aa, synthetic construct
MEKRAMM

SEQ ID NO: 132627 - protein, 7 aa, synthetic construct
MEKRERM

SEQ ID NO: 132628 - protein, 7 aa, synthetic construct
MEKRNVF

SEQ ID NO: 132629 - protein, 7 aa, synthetic construct
MEKRQNT

SEQ ID NO: 132630 - protein, 7 aa, synthetic construct
MEKTYKF

SEQ ID NO: 132631 - protein, 7 aa, synthetic construct
MEKVRHV

SEQ ID NO: 132632 - protein, 7 aa, synthetic construct
MELKGGR

SEQ ID NO: 132633 - protein, 7 aa, synthetic construct
MEMKQTR

SEQ ID NO: 132634 - protein, 7 aa, synthetic construct
MEMKSKH

SEQ ID NO: 132635 - protein, 7 aa, synthetic construct
MENIKRY

SEQ ID NO: 132636 - protein, 7 aa, synthetic construct
MENKIYK

SEQ ID NO: 132637 - protein, 7 aa, synthetic construct
MENKPYK

SEQ ID NO: 132638 - protein, 7 aa, synthetic construct
MENKVRA

SEQ ID NO: 132639 - protein, 7 aa, synthetic construct
MEPARQR

SEQ ID NO: 132640 - protein, 7 aa, synthetic construct
MEPRQRT

SEQ ID NO: 132641 - protein, 7 aa, synthetic construct
MEPRRSV

SEQ ID NO: 132642 - protein, 7 aa, synthetic construct
MEQAKRT

SEQ ID NO: 132643 - protein, 7 aa, synthetic construct
MEQKARM

SEQ ID NO: 132644 - protein, 7 aa, synthetic construct
MEQRPKM

SEQ ID NO: 132645 - protein, 7 aa, synthetic construct
MEQRVVK

SEQ ID NO: 132646 - protein, 7 aa, synthetic construct
MERARTV

SEQ ID NO: 132647 - protein, 7 aa, synthetic construct
MERKMIG

SEQ ID NO: 132648 - protein, 7 aa, synthetic construct
MERKMSN

SEQ ID NO: 132649 - protein, 7 aa, synthetic construct
MERKVHI

SEQ ID NO: 132650 - protein, 7 aa, synthetic construct
MERMAKV

SEQ ID NO: 132651 - protein, 7 aa, synthetic construct
MERNKGN

SEQ ID NO: 132652 - protein, 7 aa, synthetic construct
MERNSKY

SEQ ID NO: 132653 - protein, 7 aa, synthetic construct
MERNTPR

SEQ ID NO: 132654 - protein, 7 aa, synthetic construct
MERPMMK

SEQ ID NO: 132655 - protein, 7 aa, synthetic construct
MERQAKN

SEQ ID NO: 132656 - protein, 7 aa, synthetic construct
MERQKGN

SEQ ID NO: 132657 - protein, 7 aa, synthetic construct
MERTQKM

SEQ ID NO: 132658 - protein, 7 aa, synthetic construct
MERVARS

SEQ ID NO: 132659 - protein, 7 aa, synthetic construct
MERVKLQ

SEQ ID NO: 132660 - protein, 7 aa, synthetic construct
METKSQR

SEQ ID NO: 132661 - protein, 7 aa, synthetic construct
MEVKAGR

SEQ ID NO: 132662 - protein, 7 aa, synthetic construct
MEVRPMK

SEQ ID NO: 132663 - protein, 7 aa, synthetic construct
MEYKGGK

SEQ ID NO: 132664 - protein, 7 aa, synthetic construct
MFAGAKG

SEQ ID NO: 132665 - protein, 7 aa, synthetic construct
MFANAGK

SEQ ID NO: 132666 - protein, 7 aa, synthetic construct
MFASKRE

SEQ ID NO: 132667 - protein, 7 aa, synthetic construct
MFGKPEK

SEQ ID NO: 132668 - protein, 7 aa, synthetic construct
MFHATKG

SEQ ID NO: 132669 - protein, 7 aa, synthetic construct
MFKAAHN

SEQ ID NO: 132670 - protein, 7 aa, synthetic construct
MFKASNL

SEQ ID NO: 132671 - protein, 7 aa, synthetic construct
MFKATLA

SEQ ID NO: 132672 - protein, 7 aa, synthetic construct
MFKEIAR

SEQ ID NO: 132673 - protein, 7 aa, synthetic construct
MFKESTK

SEQ ID NO: 132674 - protein, 7 aa, synthetic construct
MFKHKFE

SEQ ID NO: 132675 - protein, 7 aa, synthetic construct
MFKPPTQ

SEQ ID NO: 132676 - protein, 7 aa, synthetic construct
MFKQLPP

SEQ ID NO: 132677 - protein, 7 aa, synthetic construct
MFKQPTH

SEQ ID NO: 132678 - protein, 7 aa, synthetic construct
MFKSNFQ

SEQ ID NO: 132679 - protein, 7 aa, synthetic construct
MFKTEYK

SEQ ID NO: 132680 - protein, 7 aa, synthetic construct
MFKTGVH

SEQ ID NO: 132681 - protein, 7 aa, synthetic construct
MFKTNMV

SEQ ID NO: 132682 - protein, 7 aa, synthetic construct
MFNKGHP

SEQ ID NO: 132683 - protein, 7 aa, synthetic construct
MFNKPTM

SEQ ID NO: 132684 - protein, 7 aa, synthetic construct
MFNKQDK

SEQ ID NO: 132685 - protein, 7 aa, synthetic construct
MFNNATR

SEQ ID NO: 132686 - protein, 7 aa, synthetic construct
MFPGAKH

SEQ ID NO: 132687 - protein, 7 aa, synthetic construct
MFQKMAA

SEQ ID NO: 132688 - protein, 7 aa, synthetic construct
MFQKNNP

SEQ ID NO: 132689 - protein, 7 aa, synthetic construct
MFQKPTQ

SEQ ID NO: 132690 - protein, 7 aa, synthetic construct
MFQKRDV

SEQ ID NO: 132691 - protein, 7 aa, synthetic construct
MFQNEKK

SEQ ID NO: 132692 - protein, 7 aa, synthetic construct
MFRNQEK

SEQ ID NO: 132693 - protein, 7 aa, synthetic construct
MFSDNQV

SEQ ID NO: 132694 - protein, 7 aa, synthetic construct
MFSKPSH

SEQ ID NO: 132695 - protein, 7 aa, synthetic construct
MFSRGKE

SEQ ID NO: 132696 - protein, 7 aa, synthetic construct
MFTKHSG

SEQ ID NO: 132697 - protein, 7 aa, synthetic construct
MGAASRY

SEQ ID NO: 132698 - protein, 7 aa, synthetic construct
MGAGAMR

SEQ ID NO: 132699 - protein, 7 aa, synthetic construct
MGAHINR

SEQ ID NO: 132700 - protein, 7 aa, synthetic construct
MGAHKAM

SEQ ID NO: 132701 - protein, 7 aa, synthetic construct
MGAMQNR

SEQ ID NO: 132702 - protein, 7 aa, synthetic construct
MGARALM

SEQ ID NO: 132703 - protein, 7 aa, synthetic construct
MGARANN

SEQ ID NO: 132704 - protein, 7 aa, synthetic construct
MGARKNE

SEQ ID NO: 132705 - protein, 7 aa, synthetic construct
MGARTML

SEQ ID NO: 132706 - protein, 7 aa, synthetic construct
MGASHKQ

SEQ ID NO: 132707 - protein, 7 aa, synthetic construct
MGDKITR

SEQ ID NO: 132708 - protein, 7 aa, synthetic construct
MGDKKYF

SEQ ID NO: 132709 - protein, 7 aa, synthetic construct
MGDKRSY

SEQ ID NO: 132710 - protein, 7 aa, synthetic construct
MGDKWAK

SEQ ID NO: 132711 - protein, 7 aa, synthetic construct
MGDPMRK

SEQ ID NO: 132712 - protein, 7 aa, synthetic construct
MGEGNRK

SEQ ID NO: 132713 - protein, 7 aa, synthetic construct
MGEKKMT

SEQ ID NO: 132714 - protein, 7 aa, synthetic construct
MGFGNTQ

SEQ ID NO: 132715 - protein, 7 aa, synthetic construct
MGGALQR

SEQ ID NO: 132716 - protein, 7 aa, synthetic construct
MGGASNR

SEQ ID NO: 132717 - protein, 7 aa, synthetic construct
MGGGFQK

SEQ ID NO: 132718 - protein, 7 aa, synthetic construct
MGGIRGN

SEQ ID NO: 132719 - protein, 7 aa, synthetic construct
MGGKRQD

SEQ ID NO: 132720 - protein, 7 aa, synthetic construct
MGGKYIV

SEQ ID NO: 132721 - protein, 7 aa, synthetic construct
MGGPHKQ

SEQ ID NO: 132722 - protein, 7 aa, synthetic construct
MGGQKNW

SEQ ID NO: 132723 - protein, 7 aa, synthetic construct
MGGRGTN

SEQ ID NO: 132724 - protein, 7 aa, synthetic construct
MGGRNPI

SEQ ID NO: 132725 - protein, 7 aa, synthetic construct
MGGRTER

SEQ ID NO: 132726 - protein, 7 aa, synthetic construct
MGGRVHS

SEQ ID NO: 132727 - protein, 7 aa, synthetic construct
MGGSQQR

SEQ ID NO: 132728 - protein, 7 aa, synthetic construct
MGGTMSR

SEQ ID NO: 132729 - protein, 7 aa, synthetic construct
MGGYNVQ

SEQ ID NO: 132730 - protein, 7 aa, synthetic construct
MGHFNKA

SEQ ID NO: 132731 - protein, 7 aa, synthetic construct
MGHGNYK

SEQ ID NO: 132732 - protein, 7 aa, synthetic construct
MGHGVQK

SEQ ID NO: 132733 - protein, 7 aa, synthetic construct
MGHHGYN

SEQ ID NO: 132734 - protein, 7 aa, synthetic construct
MGHKIMQ

SEQ ID NO: 132735 - protein, 7 aa, synthetic construct
MGHRQPV

SEQ ID NO: 132736 - protein, 7 aa, synthetic construct
MGHRVNP

SEQ ID NO: 132737 - protein, 7 aa, synthetic construct
MGHSKMV

SEQ ID NO: 132738 - protein, 7 aa, synthetic construct
MGHTKYS

SEQ ID NO: 132739 - protein, 7 aa, synthetic construct
MGHVVQK

SEQ ID NO: 132740 - protein, 7 aa, synthetic construct
MGIASAK

SEQ ID NO: 132741 - protein, 7 aa, synthetic construct
MGIHAKI

SEQ ID NO: 132742 - protein, 7 aa, synthetic construct
MGIHNKQ

SEQ ID NO: 132743 - protein, 7 aa, synthetic construct
MGIHSQK

SEQ ID NO: 132744 - protein, 7 aa, synthetic construct
MGINMMK

SEQ ID NO: 132745 - protein, 7 aa, synthetic construct
MGIQRKD

SEQ ID NO: 132746 - protein, 7 aa, synthetic construct
MGITYKG

SEQ ID NO: 132747 - protein, 7 aa, synthetic construct
MGKAHDR

SEQ ID NO: 132748 - protein, 7 aa, synthetic construct
MGKAHFG

SEQ ID NO: 132749 - protein, 7 aa, synthetic construct
MGKAYSA

SEQ ID NO: 132750 - protein, 7 aa, synthetic construct
MGKDFAK

SEQ ID NO: 132751 - protein, 7 aa, synthetic construct
MGKEQSK

SEQ ID NO: 132752 - protein, 7 aa, synthetic construct
MGKFLNA

SEQ ID NO: 132753 - protein, 7 aa, synthetic construct
MGKFPER

SEQ ID NO: 132754 - protein, 7 aa, synthetic construct
MGKGERG

SEQ ID NO: 132755 - protein, 7 aa, synthetic construct
MGKGRYE

SEQ ID NO: 132756 - protein, 7 aa, synthetic construct
MGKGVFQ

SEQ ID NO: 132757 - protein, 7 aa, synthetic construct
MGKHFVS

SEQ ID NO: 132758 - protein, 7 aa, synthetic construct
MGKHQNM

SEQ ID NO: 132759 - protein, 7 aa, synthetic construct
MGKIQHY

SEQ ID NO: 132760 - protein, 7 aa, synthetic construct
MGKMMHM

SEQ ID NO: 132761 - protein, 7 aa, synthetic construct
MGKNWAG

SEQ ID NO: 132762 - protein, 7 aa, synthetic construct
MGKPGNF

SEQ ID NO: 132763 - protein, 7 aa, synthetic construct
MGKQRMD

SEQ ID NO: 132764 - protein, 7 aa, synthetic construct
MGKQTQW

SEQ ID NO: 132765 - protein, 7 aa, synthetic construct
MGKQTYP

SEQ ID NO: 132766 - protein, 7 aa, synthetic construct
MGKQYNV

SEQ ID NO: 132767 - protein, 7 aa, synthetic construct
MGKRPSE

SEQ ID NO: 132768 - protein, 7 aa, synthetic construct
MGKTDMR

SEQ ID NO: 132769 - protein, 7 aa, synthetic construct
MGKTRDT

SEQ ID NO: 132770 - protein, 7 aa, synthetic construct
MGKVAHY

SEQ ID NO: 132771 - protein, 7 aa, synthetic construct
MGKVHMT

SEQ ID NO: 132772 - protein, 7 aa, synthetic construct
MGKVHVY

SEQ ID NO: 132773 - protein, 7 aa, synthetic construct
MGKYLHP

SEQ ID NO: 132774 - protein, 7 aa, synthetic construct
MGKYMAA

SEQ ID NO: 132775 - protein, 7 aa, synthetic construct
MGKYQPI

SEQ ID NO: 132776 - protein, 7 aa, synthetic construct
MGKYTEK

SEQ ID NO: 132777 - protein, 7 aa, synthetic construct
MGLAHQK

SEQ ID NO: 132778 - protein, 7 aa, synthetic construct
MGLGRGP

SEQ ID NO: 132779 - protein, 7 aa, synthetic construct
MGLHNKQ

SEQ ID NO: 132780 - protein, 7 aa, synthetic construct
MGLHQAK

SEQ ID NO: 132781 - protein, 7 aa, synthetic construct
MGLKDKY

SEQ ID NO: 132782 - protein, 7 aa, synthetic construct
MGLNSGR

SEQ ID NO: 132783 - protein, 7 aa, synthetic construct
MGMGINR

SEQ ID NO: 132784 - protein, 7 aa, synthetic construct
MGMGSMK

SEQ ID NO: 132785 - protein, 7 aa, synthetic construct
MGMHGLK

SEQ ID NO: 132786 - protein, 7 aa, synthetic construct
MGMKMTL

SEQ ID NO: 132787 - protein, 7 aa, synthetic construct
MGMMIKP

SEQ ID NO: 132788 - protein, 7 aa, synthetic construct
MGMMSRP

SEQ ID NO: 132789 - protein, 7 aa, synthetic construct
MGMPQVK

SEQ ID NO: 132790 - protein, 7 aa, synthetic construct
MGMQNQK

SEQ ID NO: 132791 - protein, 7 aa, synthetic construct
MGMQNSK

SEQ ID NO: 132792 - protein, 7 aa, synthetic construct
MGMRAVN

SEQ ID NO: 132793 - protein, 7 aa, synthetic construct
MGMSYPK

SEQ ID NO: 132794 - protein, 7 aa, synthetic construct
MGNAAAR

SEQ ID NO: 132795 - protein, 7 aa, synthetic construct
MGNFKQI

SEQ ID NO: 132796 - protein, 7 aa, synthetic construct
MGNFSAK

SEQ ID NO: 132797 - protein, 7 aa, synthetic construct
MGNGSTR

SEQ ID NO: 132798 - protein, 7 aa, synthetic construct
MGNHILK

SEQ ID NO: 132799 - protein, 7 aa, synthetic construct
MGNKSFI

SEQ ID NO: 132800 - protein, 7 aa, synthetic construct
MGNLRNI

SEQ ID NO: 132801 - protein, 7 aa, synthetic construct
MGNMKFH

SEQ ID NO: 132802 - protein, 7 aa, synthetic construct
MGNPRQL

SEQ ID NO: 132803 - protein, 7 aa, synthetic construct
MGNRDIK

SEQ ID NO: 132804 - protein, 7 aa, synthetic construct
MGNRHPH

SEQ ID NO: 132805 - protein, 7 aa, synthetic construct
MGNRPMI

SEQ ID NO: 132806 - protein, 7 aa, synthetic construct
MGNRVIM

SEQ ID NO: 132807 - protein, 7 aa, synthetic construct
MGNSHKI

SEQ ID NO: 132808 - protein, 7 aa, synthetic construct
MGNSPYR

SEQ ID NO: 132809 - protein, 7 aa, synthetic construct
MGNSTRT

SEQ ID NO: 132810 - protein, 7 aa, synthetic construct
MGNSVPR

SEQ ID NO: 132811 - protein, 7 aa, synthetic construct
MGNTHNK

SEQ ID NO: 132812 - protein, 7 aa, synthetic construct
MGPAQHR

SEQ ID NO: 132813 - protein, 7 aa, synthetic construct
MGPHVRN

SEQ ID NO: 132814 - protein, 7 aa, synthetic construct
MGPNPRL

SEQ ID NO: 132815 - protein, 7 aa, synthetic construct
MGPQKLL

SEQ ID NO: 132816 - protein, 7 aa, synthetic construct
MGPRAIL

SEQ ID NO: 132817 - protein, 7 aa, synthetic construct
MGPSTHR

SEQ ID NO: 132818 - protein, 7 aa, synthetic construct
MGPYIKQ

SEQ ID NO: 132819 - protein, 7 aa, synthetic construct
MGPYTKS

SEQ ID NO: 132820 - protein, 7 aa, synthetic construct
MGQAIMR

SEQ ID NO: 132821 - protein, 7 aa, synthetic construct
MGQFSTK

SEQ ID NO: 132822 - protein, 7 aa, synthetic construct
MGQGPNR

SEQ ID NO: 132823 - protein, 7 aa, synthetic construct
MGQIIPR

SEQ ID NO: 132824 - protein, 7 aa, synthetic construct
MGQKFTT

SEQ ID NO: 132825 - protein, 7 aa, synthetic construct
MGQKVYM

SEQ ID NO: 132826 - protein, 7 aa, synthetic construct
MGQMIRT

SEQ ID NO: 132827 - protein, 7 aa, synthetic construct
MGQMSTR

SEQ ID NO: 132828 - protein, 7 aa, synthetic construct
MGQPMLK

SEQ ID NO: 132829 - protein, 7 aa, synthetic construct
MGQQPFK

SEQ ID NO: 132830 - protein, 7 aa, synthetic construct
MGQSFTK

SEQ ID NO: 132831 - protein, 7 aa, synthetic construct
MGQTSQR

SEQ ID NO: 132832 - protein, 7 aa, synthetic construct
MGQTVLR

SEQ ID NO: 132833 - protein, 7 aa, synthetic construct
MGQVMGR

SEQ ID NO: 132834 - protein, 7 aa, synthetic construct
MGQYMGI

SEQ ID NO: 132835 - protein, 7 aa, synthetic construct
MGQYRHP

SEQ ID NO: 132836 - protein, 7 aa, synthetic construct
MGRELSK

SEQ ID NO: 132837 - protein, 7 aa, synthetic construct
MGREMKG

SEQ ID NO: 132838 - protein, 7 aa, synthetic construct
MGRGVAV

SEQ ID NO: 132839 - protein, 7 aa, synthetic construct
MGRHAMP

SEQ ID NO: 132840 - protein, 7 aa, synthetic construct
MGRLPTT

SEQ ID NO: 132841 - protein, 7 aa, synthetic construct
MGRMVRE

SEQ ID NO: 132842 - protein, 7 aa, synthetic construct
MGRNAQG

SEQ ID NO: 132843 - protein, 7 aa, synthetic construct
MGRNTIG

SEQ ID NO: 132844 - protein, 7 aa, synthetic construct
MGRQSMA

SEQ ID NO: 132845 - protein, 7 aa, synthetic construct
MGRQVTN

SEQ ID NO: 132846 - protein, 7 aa, synthetic construct
MGRSMGS

SEQ ID NO: 132847 - protein, 7 aa, synthetic construct
MGRTHQP

SEQ ID NO: 132848 - protein, 7 aa, synthetic construct
MGRVGAL

SEQ ID NO: 132849 - protein, 7 aa, synthetic construct
MGRVSPP

SEQ ID NO: 132850 - protein, 7 aa, synthetic construct
MGRVTHV

SEQ ID NO: 132851 - protein, 7 aa, synthetic construct
MGRVTTG

SEQ ID NO: 132852 - protein, 7 aa, synthetic construct
MGSEKMR

SEQ ID NO: 132853 - protein, 7 aa, synthetic construct
MGSFIKG

SEQ ID NO: 132854 - protein, 7 aa, synthetic construct
MGSFTRA

SEQ ID NO: 132855 - protein, 7 aa, synthetic construct
MGSGVAR

SEQ ID NO: 132856 - protein, 7 aa, synthetic construct
MGSIKFN

SEQ ID NO: 132857 - protein, 7 aa, synthetic construct
MGSKLYT

SEQ ID NO: 132858 - protein, 7 aa, synthetic construct
MGSKSYA

SEQ ID NO: 132859 - protein, 7 aa, synthetic construct
MGSLRTI

SEQ ID NO: 132860 - protein, 7 aa, synthetic construct
MGSQSGK

SEQ ID NO: 132861 - protein, 7 aa, synthetic construct
MGSTHLR

SEQ ID NO: 132862 - protein, 7 aa, synthetic construct
MGSVVVK

SEQ ID NO: 132863 - protein, 7 aa, synthetic construct
MGTFHGK

SEQ ID NO: 132864 - protein, 7 aa, synthetic construct
MGTGSMR

SEQ ID NO: 132865 - protein, 7 aa, synthetic construct
MGTHKIV

SEQ ID NO: 132866 - protein, 7 aa, synthetic construct
MGTHLAK

SEQ ID NO: 132867 - protein, 7 aa, synthetic construct
MGTHMTR

SEQ ID NO: 132868 - protein, 7 aa, synthetic construct
MGTKFPM

SEQ ID NO: 132869 - protein, 7 aa, synthetic construct
MGTKHYS

SEQ ID NO: 132870 - protein, 7 aa, synthetic construct
MGTNNSR

SEQ ID NO: 132871 - protein, 7 aa, synthetic construct
MGTPSPR

SEQ ID NO: 132872 - protein, 7 aa, synthetic construct
MGTQSNR

SEQ ID NO: 132873 - protein, 7 aa, synthetic construct
MGTQSRL

SEQ ID NO: 132874 - protein, 7 aa, synthetic construct
MGTRHSF

SEQ ID NO: 132875 - protein, 7 aa, synthetic construct
MGTTYAR

SEQ ID NO: 132876 - protein, 7 aa, synthetic construct
MGVAQVR

SEQ ID NO: 132877 - protein, 7 aa, synthetic construct
MGVQGPR

SEQ ID NO: 132878 - protein, 7 aa, synthetic construct
MGVQQGR

SEQ ID NO: 132879 - protein, 7 aa, synthetic construct
MGYQGKQ

SEQ ID NO: 132880 - protein, 7 aa, synthetic construct
MGYTGSL

SEQ ID NO: 132881 - protein, 7 aa, synthetic construct
MHAAVAR

SEQ ID NO: 132882 - protein, 7 aa, synthetic construct
MHAGFSK

SEQ ID NO: 132883 - protein, 7 aa, synthetic construct
MHAGPSK

SEQ ID NO: 132884 - protein, 7 aa, synthetic construct
MHAKPHI

SEQ ID NO: 132885 - protein, 7 aa, synthetic construct
MHAKPSI

SEQ ID NO: 132886 - protein, 7 aa, synthetic construct
MHAKSIV

SEQ ID NO: 132887 - protein, 7 aa, synthetic construct
MHAKVPF

SEQ ID NO: 132888 - protein, 7 aa, synthetic construct
MHANKFA

SEQ ID NO: 132889 - protein, 7 aa, synthetic construct
MHAQMRV

SEQ ID NO: 132890 - protein, 7 aa, synthetic construct
MHARNLS

SEQ ID NO: 132891 - protein, 7 aa, synthetic construct
MHASHLK

SEQ ID NO: 132892 - protein, 7 aa, synthetic construct
MHASHNK

SEQ ID NO: 132893 - protein, 7 aa, synthetic construct
MHASVAR

SEQ ID NO: 132894 - protein, 7 aa, synthetic construct
MHATKHW

SEQ ID NO: 132895 - protein, 7 aa, synthetic construct
MHAVTAR

SEQ ID NO: 132896 - protein, 7 aa, synthetic construct
MHDAGIG

SEQ ID NO: 132897 - protein, 7 aa, synthetic construct
MHGALKT

SEQ ID NO: 132898 - protein, 7 aa, synthetic construct
MHGAMGK

SEQ ID NO: 132899 - protein, 7 aa, synthetic construct
MHGAMTK

SEQ ID NO: 132900 - protein, 7 aa, synthetic construct
MHGANTK

SEQ ID NO: 132901 - protein, 7 aa, synthetic construct
MHGAQRG

SEQ ID NO: 132902 - protein, 7 aa, synthetic construct
MHGASVK

SEQ ID NO: 132903 - protein, 7 aa, synthetic construct
MHGGIKN

SEQ ID NO: 132904 - protein, 7 aa, synthetic construct
MHGGMNK

SEQ ID NO: 132905 - protein, 7 aa, synthetic construct
MHGGVKF

SEQ ID NO: 132906 - protein, 7 aa, synthetic construct
MHGHKMA

SEQ ID NO: 132907 - protein, 7 aa, synthetic construct
MHGKAML

SEQ ID NO: 132908 - protein, 7 aa, synthetic construct
MHGKIGL

SEQ ID NO: 132909 - protein, 7 aa, synthetic construct
MHGKKDV

SEQ ID NO: 132910 - protein, 7 aa, synthetic construct
MHGKPNF

SEQ ID NO: 132911 - protein, 7 aa, synthetic construct
MHGKSFS

SEQ ID NO: 132912 - protein, 7 aa, synthetic construct
MHGLGRG

SEQ ID NO: 132913 - protein, 7 aa, synthetic construct
MHGLQKL

SEQ ID NO: 132914 - protein, 7 aa, synthetic construct
MHGMRPV

SEQ ID NO: 132915 - protein, 7 aa, synthetic construct
MHGNAKA

SEQ ID NO: 132916 - protein, 7 aa, synthetic construct
MHGNLQK

SEQ ID NO: 132917 - protein, 7 aa, synthetic construct
MHGNMRA

SEQ ID NO: 132918 - protein, 7 aa, synthetic construct
MHGNRAA

SEQ ID NO: 132919 - protein, 7 aa, synthetic construct
MHGPPVK

SEQ ID NO: 132920 - protein, 7 aa, synthetic construct
MHGRGYN

SEQ ID NO: 132921 - protein, 7 aa, synthetic construct
MHGRLVP

SEQ ID NO: 132922 - protein, 7 aa, synthetic construct
MHGSQKN

SEQ ID NO: 132923 - protein, 7 aa, synthetic construct
MHGSSSK

SEQ ID NO: 132924 - protein, 7 aa, synthetic construct
MHGTIRN

SEQ ID NO: 132925 - protein, 7 aa, synthetic construct
MHGTNMK

SEQ ID NO: 132926 - protein, 7 aa, synthetic construct
MHGVTAR

SEQ ID NO: 132927 - protein, 7 aa, synthetic construct
MHGYSHG

SEQ ID NO: 132928 - protein, 7 aa, synthetic construct
MHHGQRG

SEQ ID NO: 132929 - protein, 7 aa, synthetic construct
MHHIPKT

SEQ ID NO: 132930 - protein, 7 aa, synthetic construct
MHIGVSK

SEQ ID NO: 132931 - protein, 7 aa, synthetic construct
MHIKSSI

SEQ ID NO: 132932 - protein, 7 aa, synthetic construct
MHIQAPK

SEQ ID NO: 132933 - protein, 7 aa, synthetic construct
MHKAHMN

SEQ ID NO: 132934 - protein, 7 aa, synthetic construct
MHKAHYS

SEQ ID NO: 132935 - protein, 7 aa, synthetic construct
MHKASLT

SEQ ID NO: 132936 - protein, 7 aa, synthetic construct
MHKAVGF

SEQ ID NO: 132937 - protein, 7 aa, synthetic construct
MHKDMFK

SEQ ID NO: 132938 - protein, 7 aa, synthetic construct
MHKEMTR

SEQ ID NO: 132939 - protein, 7 aa, synthetic construct
MHKGINY

SEQ ID NO: 132940 - protein, 7 aa, synthetic construct
MHKGYTS

SEQ ID NO: 132941 - protein, 7 aa, synthetic construct
MHKIHMP

SEQ ID NO: 132942 - protein, 7 aa, synthetic construct
MHKIHRE

SEQ ID NO: 132943 - protein, 7 aa, synthetic construct
MHKIVPT

SEQ ID NO: 132944 - protein, 7 aa, synthetic construct
MHKKFAE

SEQ ID NO: 132945 - protein, 7 aa, synthetic construct
MHKKLMD

SEQ ID NO: 132946 - protein, 7 aa, synthetic construct
MHKKSIE

SEQ ID NO: 132947 - protein, 7 aa, synthetic construct
MHKLAER

SEQ ID NO: 132948 - protein, 7 aa, synthetic construct
MHKLDQR

SEQ ID NO: 132949 - protein, 7 aa, synthetic construct
MHKLSAV

SEQ ID NO: 132950 - protein, 7 aa, synthetic construct
MHKLSVV

SEQ ID NO: 132951 - protein, 7 aa, synthetic construct
MHKMNHS

SEQ ID NO: 132952 - protein, 7 aa, synthetic construct
MHKMQTH

SEQ ID NO: 132953 - protein, 7 aa, synthetic construct
MHKNPFQ

SEQ ID NO: 132954 - protein, 7 aa, synthetic construct
MHKPFQG

SEQ ID NO: 132955 - protein, 7 aa, synthetic construct
MHKPHIM

SEQ ID NO: 132956 - protein, 7 aa, synthetic construct
MHKPLHN

SEQ ID NO: 132957 - protein, 7 aa, synthetic construct
MHKQERG

SEQ ID NO: 132958 - protein, 7 aa, synthetic construct
MHKQTMM

SEQ ID NO: 132959 - protein, 7 aa, synthetic construct
MHKTDQR

SEQ ID NO: 132960 - protein, 7 aa, synthetic construct
MHKTNGF

SEQ ID NO: 132961 - protein, 7 aa, synthetic construct
MHKTYPA

SEQ ID NO: 132962 - protein, 7 aa, synthetic construct
MHKVMSQ

SEQ ID NO: 132963 - protein, 7 aa, synthetic construct
MHKVPHQ

SEQ ID NO: 132964 - protein, 7 aa, synthetic construct
MHKVPHS

SEQ ID NO: 132965 - protein, 7 aa, synthetic construct
MHLKAQL

SEQ ID NO: 132966 - protein, 7 aa, synthetic construct
MHMEKPG

SEQ ID NO: 132967 - protein, 7 aa, synthetic construct
MHMGGMK

SEQ ID NO: 132968 - protein, 7 aa, synthetic construct
MHMKSPL

SEQ ID NO: 132969 - protein, 7 aa, synthetic construct
MHNAIPR

SEQ ID NO: 132970 - protein, 7 aa, synthetic construct
MHNITSR

SEQ ID NO: 132971 - protein, 7 aa, synthetic construct
MHNKNNL

SEQ ID NO: 132972 - protein, 7 aa, synthetic construct
MHNKPDR

SEQ ID NO: 132973 - protein, 7 aa, synthetic construct
MHNLTTR

SEQ ID NO: 132974 - protein, 7 aa, synthetic construct
MHNMSNK

SEQ ID NO: 132975 - protein, 7 aa, synthetic construct
MHNNKVW

SEQ ID NO: 132976 - protein, 7 aa, synthetic construct
MHNPMTK

SEQ ID NO: 132977 - protein, 7 aa, synthetic construct
MHNPRGI

SEQ ID NO: 132978 - protein, 7 aa, synthetic construct
MHNPRSV

SEQ ID NO: 132979 - protein, 7 aa, synthetic construct
MHNSMTK

SEQ ID NO: 132980 - protein, 7 aa, synthetic construct
MHNSRYV

SEQ ID NO: 132981 - protein, 7 aa, synthetic construct
MHNTHLK

SEQ ID NO: 132982 - protein, 7 aa, synthetic construct
MHNTTVR

SEQ ID NO: 132983 - protein, 7 aa, synthetic construct
MHNVSKN

SEQ ID NO: 132984 - protein, 7 aa, synthetic construct
MHPITRN

SEQ ID NO: 132985 - protein, 7 aa, synthetic construct
MHPRTNL

SEQ ID NO: 132986 - protein, 7 aa, synthetic construct
MHQHTKG

SEQ ID NO: 132987 - protein, 7 aa, synthetic construct
MHQKAFG

SEQ ID NO: 132988 - protein, 7 aa, synthetic construct
MHQKHAI

SEQ ID NO: 132989 - protein, 7 aa, synthetic construct
MHQKLER

SEQ ID NO: 132990 - protein, 7 aa, synthetic construct
MHQQSNK

SEQ ID NO: 132991 - protein, 7 aa, synthetic construct
MHQRTGI

SEQ ID NO: 132992 - protein, 7 aa, synthetic construct
MHRLSNP

SEQ ID NO: 132993 - protein, 7 aa, synthetic construct
MHRNGTA

SEQ ID NO: 132994 - protein, 7 aa, synthetic construct
MHRNITV

SEQ ID NO: 132995 - protein, 7 aa, synthetic construct
MHRNNFS

SEQ ID NO: 132996 - protein, 7 aa, synthetic construct
MHRNTNM

SEQ ID NO: 132997 - protein, 7 aa, synthetic construct
MHRPVNA

SEQ ID NO: 132998 - protein, 7 aa, synthetic construct
MHRPVSA

SEQ ID NO: 132999 - protein, 7 aa, synthetic construct
MHRSAMP

SEQ ID NO: 133000 - protein, 7 aa, synthetic construct
MHRSATV

SEQ ID NO: 133001 - protein, 7 aa, synthetic construct
MHRSPAI

SEQ ID NO: 133002 - protein, 7 aa, synthetic construct
MHRSPGS

SEQ ID NO: 133003 - protein, 7 aa, synthetic construct
MHRTSPS

SEQ ID NO: 133004 - protein, 7 aa, synthetic construct
MHSLKNT

SEQ ID NO: 133005 - protein, 7 aa, synthetic construct
MHSQKWD

SEQ ID NO: 133006 - protein, 7 aa, synthetic construct
MHSRGAM

SEQ ID NO: 133007 - protein, 7 aa, synthetic construct
MHSRGTT

SEQ ID NO: 133008 - protein, 7 aa, synthetic construct
MHSSTRA

SEQ ID NO: 133009 - protein, 7 aa, synthetic construct
MHSTVSK

SEQ ID NO: 133010 - protein, 7 aa, synthetic construct
MHTGTLR

SEQ ID NO: 133011 - protein, 7 aa, synthetic construct
MHTHTKF

SEQ ID NO: 133012 - protein, 7 aa, synthetic construct
MHTKAFA

SEQ ID NO: 133013 - protein, 7 aa, synthetic construct
MHTNISK

SEQ ID NO: 133014 - protein, 7 aa, synthetic construct
MHTNRER

SEQ ID NO: 133015 - protein, 7 aa, synthetic construct
MHTQGTR

SEQ ID NO: 133016 - protein, 7 aa, synthetic construct
MHTQRVV

SEQ ID NO: 133017 - protein, 7 aa, synthetic construct
MHTRYGA

SEQ ID NO: 133018 - protein, 7 aa, synthetic construct
MHVKAMI

SEQ ID NO: 133019 - protein, 7 aa, synthetic construct
MHYGNKN

SEQ ID NO: 133020 - protein, 7 aa, synthetic construct
MHYSGTQ

SEQ ID NO: 133021 - protein, 7 aa, synthetic construct
MIAGHRP

SEQ ID NO: 133022 - protein, 7 aa, synthetic construct
MIAGPRG

SEQ ID NO: 133023 - protein, 7 aa, synthetic construct
MIAHRTN

SEQ ID NO: 133024 - protein, 7 aa, synthetic construct
MIAKAQH

SEQ ID NO: 133025 - protein, 7 aa, synthetic construct
MIASGSR

SEQ ID NO: 133026 - protein, 7 aa, synthetic construct
MIDRARV

SEQ ID NO: 133027 - protein, 7 aa, synthetic construct
MIERKLA

SEQ ID NO: 133028 - protein, 7 aa, synthetic construct
MIGAHRV

SEQ ID NO: 133029 - protein, 7 aa, synthetic construct
MIGAPKH

SEQ ID NO: 133030 - protein, 7 aa, synthetic construct
MIGARSQ

SEQ ID NO: 133031 - protein, 7 aa, synthetic construct
MIGGKYS

SEQ ID NO: 133032 - protein, 7 aa, synthetic construct
MIGHQKM

SEQ ID NO: 133033 - protein, 7 aa, synthetic construct
MIGKGYQ

SEQ ID NO: 133034 - protein, 7 aa, synthetic construct
MIGKVPT

SEQ ID NO: 133035 - protein, 7 aa, synthetic construct
MIGLHKN

SEQ ID NO: 133036 - protein, 7 aa, synthetic construct
MIGMRTA

SEQ ID NO: 133037 - protein, 7 aa, synthetic construct
MIGNSRM

SEQ ID NO: 133038 - protein, 7 aa, synthetic construct
MIGQYKQ

SEQ ID NO: 133039 - protein, 7 aa, synthetic construct
MIGSQVR

SEQ ID NO: 133040 - protein, 7 aa, synthetic construct
MIHAKVS

SEQ ID NO: 133041 - protein, 7 aa, synthetic construct
MIHAPGK

SEQ ID NO: 133042 - protein, 7 aa, synthetic construct
MIHGVSK

SEQ ID NO: 133043 - protein, 7 aa, synthetic construct
MIHKQDR

SEQ ID NO: 133044 - protein, 7 aa, synthetic construct
MIHRQNA

SEQ ID NO: 133045 - protein, 7 aa, synthetic construct
MIHSNPK

SEQ ID NO: 133046 - protein, 7 aa, synthetic construct
MIHSSKI

SEQ ID NO: 133047 - protein, 7 aa, synthetic construct
MIHSSKM

SEQ ID NO: 133048 - protein, 7 aa, synthetic construct
MIIAKSP

SEQ ID NO: 133049 - protein, 7 aa, synthetic construct
MIKHTGY

SEQ ID NO: 133050 - protein, 7 aa, synthetic construct
MIKKGDH

SEQ ID NO: 133051 - protein, 7 aa, synthetic construct
MIKPGVL

SEQ ID NO: 133052 - protein, 7 aa, synthetic construct
MIKPREL

SEQ ID NO: 133053 - protein, 7 aa, synthetic construct
MIKPYSA

SEQ ID NO: 133054 - protein, 7 aa, synthetic construct
MIKQQTY

SEQ ID NO: 133055 - protein, 7 aa, synthetic construct
MIKRNEM

SEQ ID NO: 133056 - protein, 7 aa, synthetic construct
MIKRTIE

SEQ ID NO: 133057 - protein, 7 aa, synthetic construct
MIKTYQG

SEQ ID NO: 133058 - protein, 7 aa, synthetic construct
MIKVQHS

SEQ ID NO: 133059 - protein, 7 aa, synthetic construct
MILGKGN

SEQ ID NO: 133060 - protein, 7 aa, synthetic construct
MILKTNG

SEQ ID NO: 133061 - protein, 7 aa, synthetic construct
MIMKGQN

SEQ ID NO: 133062 - protein, 7 aa, synthetic construct
MINIKNA

SEQ ID NO: 133063 - protein, 7 aa, synthetic construct
MINMARG

SEQ ID NO: 133064 - protein, 7 aa, synthetic construct
MINNKHF

SEQ ID NO: 133065 - protein, 7 aa, synthetic construct
MINPRQN

SEQ ID NO: 133066 - protein, 7 aa, synthetic construct
MINRDKM

SEQ ID NO: 133067 - protein, 7 aa, synthetic construct
MINRVGP

SEQ ID NO: 133068 - protein, 7 aa, synthetic construct
MINTAHR

SEQ ID NO: 133069 - protein, 7 aa, synthetic construct
MINVHKQ

SEQ ID NO: 133070 - protein, 7 aa, synthetic construct
MIPAKQM

SEQ ID NO: 133071 - protein, 7 aa, synthetic construct
MIPGLGR

SEQ ID NO: 133072 - protein, 7 aa, synthetic construct
MIPKAYI

SEQ ID NO: 133073 - protein, 7 aa, synthetic construct
MIPKMAH

SEQ ID NO: 133074 - protein, 7 aa, synthetic construct
MIPREKA

SEQ ID NO: 133075 - protein, 7 aa, synthetic construct
MIPRQKD

SEQ ID NO: 133076 - protein, 7 aa, synthetic construct
MIPYSKG

SEQ ID NO: 133077 - protein, 7 aa, synthetic construct
MIQGARN

SEQ ID NO: 133078 - protein, 7 aa, synthetic construct
MIQHAPK

SEQ ID NO: 133079 - protein, 7 aa, synthetic construct
MIQHKSL

SEQ ID NO: 133080 - protein, 7 aa, synthetic construct
MIQNMRP

SEQ ID NO: 133081 - protein, 7 aa, synthetic construct
MIQRGGL

SEQ ID NO: 133082 - protein, 7 aa, synthetic construct
MIRANNP

SEQ ID NO: 133083 - protein, 7 aa, synthetic construct
MIRANQN

SEQ ID NO: 133084 - protein, 7 aa, synthetic construct
MIRASSN

SEQ ID NO: 133085 - protein, 7 aa, synthetic construct
MIRDTKY

SEQ ID NO: 133086 - protein, 7 aa, synthetic construct
MIRDTRM

SEQ ID NO: 133087 - protein, 7 aa, synthetic construct
MIREMGK

SEQ ID NO: 133088 - protein, 7 aa, synthetic construct
MIRGAGQ

SEQ ID NO: 133089 - protein, 7 aa, synthetic construct
MIRGDSR

SEQ ID NO: 133090 - protein, 7 aa, synthetic construct
MIRGNAQ

SEQ ID NO: 133091 - protein, 7 aa, synthetic construct
MIRGQSN

SEQ ID NO: 133092 - protein, 7 aa, synthetic construct
MIRHHGP

SEQ ID NO: 133093 - protein, 7 aa, synthetic construct
MIRKAEV

SEQ ID NO: 133094 - protein, 7 aa, synthetic construct
MIRKEQA

SEQ ID NO: 133095 - protein, 7 aa, synthetic construct
MIRKVPE

SEQ ID NO: 133096 - protein, 7 aa, synthetic construct
MIRNASQ

SEQ ID NO: 133097 - protein, 7 aa, synthetic construct
MIRNPAM

SEQ ID NO: 133098 - protein, 7 aa, synthetic construct
MIRPQNT

SEQ ID NO: 133099 - protein, 7 aa, synthetic construct
MIRQARE

SEQ ID NO: 133100 - protein, 7 aa, synthetic construct
MIRQDKV

SEQ ID NO: 133101 - protein, 7 aa, synthetic construct
MIRQKQD

SEQ ID NO: 133102 - protein, 7 aa, synthetic construct
MIRQSHG

SEQ ID NO: 133103 - protein, 7 aa, synthetic construct
MIRSDTR

SEQ ID NO: 133104 - protein, 7 aa, synthetic construct
MIRSGYQ

SEQ ID NO: 133105 - protein, 7 aa, synthetic construct
MIRSVSG

SEQ ID NO: 133106 - protein, 7 aa, synthetic construct
MISGTRG

SEQ ID NO: 133107 - protein, 7 aa, synthetic construct
MITGSGR

SEQ ID NO: 133108 - protein, 7 aa, synthetic construct
MITRHGG

SEQ ID NO: 133109 - protein, 7 aa, synthetic construct
MKADRQM

SEQ ID NO: 133110 - protein, 7 aa, synthetic construct
MKADTQK

SEQ ID NO: 133111 - protein, 7 aa, synthetic construct
MKAETIR

SEQ ID NO: 133112 - protein, 7 aa, synthetic construct
MKAGTYA

SEQ ID NO: 133113 - protein, 7 aa, synthetic construct
MKAHAPI

SEQ ID NO: 133114 - protein, 7 aa, synthetic construct
MKAHELR

SEQ ID NO: 133115 - protein, 7 aa, synthetic construct
MKAHIHP

SEQ ID NO: 133116 - protein, 7 aa, synthetic construct
MKAHILQ

SEQ ID NO: 133117 - protein, 7 aa, synthetic construct
MKAHTNT

SEQ ID NO: 133118 - protein, 7 aa, synthetic construct
MKAHVAM

SEQ ID NO: 133119 - protein, 7 aa, synthetic construct
MKAHVHL

SEQ ID NO: 133120 - protein, 7 aa, synthetic construct
MKAHYKD

SEQ ID NO: 133121 - protein, 7 aa, synthetic construct
MKAIPLS

SEQ ID NO: 133122 - protein, 7 aa, synthetic construct
MKAKDLQ

SEQ ID NO: 133123 - protein, 7 aa, synthetic construct
MKAMIKP

SEQ ID NO: 133124 - protein, 7 aa, synthetic construct
MKAMQDK

SEQ ID NO: 133125 - protein, 7 aa, synthetic construct
MKANTHY

SEQ ID NO: 133126 - protein, 7 aa, synthetic construct
MKAPNTY

SEQ ID NO: 133127 - protein, 7 aa, synthetic construct
MKAPPFG

SEQ ID NO: 133128 - protein, 7 aa, synthetic construct
MKAPYAS

SEQ ID NO: 133129 - protein, 7 aa, synthetic construct
MKAQPYQ

SEQ ID NO: 133130 - protein, 7 aa, synthetic construct
MKARADQ

SEQ ID NO: 133131 - protein, 7 aa, synthetic construct
MKAREYM

SEQ ID NO: 133132 - protein, 7 aa, synthetic construct
MKARGDN

SEQ ID NO: 133133 - protein, 7 aa, synthetic construct
MKATYRE

SEQ ID NO: 133134 - protein, 7 aa, synthetic construct
MKAVKWD

SEQ ID NO: 133135 - protein, 7 aa, synthetic construct
MKAYGEK

SEQ ID NO: 133136 - protein, 7 aa, synthetic construct
MKAYNNL

SEQ ID NO: 133137 - protein, 7 aa, synthetic construct
MKAYQNQ

SEQ ID NO: 133138 - protein, 7 aa, synthetic construct
MKDFTPK

SEQ ID NO: 133139 - protein, 7 aa, synthetic construct
MKDGFRQ

SEQ ID NO: 133140 - protein, 7 aa, synthetic construct
MKDIQNK

SEQ ID NO: 133141 - protein, 7 aa, synthetic construct
MKDKDMR

SEQ ID NO: 133142 - protein, 7 aa, synthetic construct
MKDKEWR

SEQ ID NO: 133143 - protein, 7 aa, synthetic construct
MKDLARY

SEQ ID NO: 133144 - protein, 7 aa, synthetic construct
MKDMSRF

SEQ ID NO: 133145 - protein, 7 aa, synthetic construct
MKDNAMR

SEQ ID NO: 133146 - protein, 7 aa, synthetic construct
MKDNERR

SEQ ID NO: 133147 - protein, 7 aa, synthetic construct
MKDNPIW

SEQ ID NO: 133148 - protein, 7 aa, synthetic construct
MKDPNNR

SEQ ID NO: 133149 - protein, 7 aa, synthetic construct
MKDQGRA

SEQ ID NO: 133150 - protein, 7 aa, synthetic construct
MKDQTNK

SEQ ID NO: 133151 - protein, 7 aa, synthetic construct
MKDRPTY

SEQ ID NO: 133152 - protein, 7 aa, synthetic construct
MKDSFRQ

SEQ ID NO: 133153 - protein, 7 aa, synthetic construct
MKDTHRI

SEQ ID NO: 133154 - protein, 7 aa, synthetic construct
MKDTSRM

SEQ ID NO: 133155 - protein, 7 aa, synthetic construct
MKDYKYG

SEQ ID NO: 133156 - protein, 7 aa, synthetic construct
MKDYRAS

SEQ ID NO: 133157 - protein, 7 aa, synthetic construct
MKEGYRQ

SEQ ID NO: 133158 - protein, 7 aa, synthetic construct
MKEHLKY

SEQ ID NO: 133159 - protein, 7 aa, synthetic construct
MKEMSRQ

SEQ ID NO: 133160 - protein, 7 aa, synthetic construct
MKENYGR

SEQ ID NO: 133161 - protein, 7 aa, synthetic construct
MKEQIRQ

SEQ ID NO: 133162 - protein, 7 aa, synthetic construct
MKERSQL

SEQ ID NO: 133163 - protein, 7 aa, synthetic construct
MKERYKD

SEQ ID NO: 133164 - protein, 7 aa, synthetic construct
MKESVMR

SEQ ID NO: 133165 - protein, 7 aa, synthetic construct
MKEWTPK

SEQ ID NO: 133166 - protein, 7 aa, synthetic construct
MKFAPQN

SEQ ID NO: 133167 - protein, 7 aa, synthetic construct
MKFETRS

SEQ ID NO: 133168 - protein, 7 aa, synthetic construct
MKFHNSA

SEQ ID NO: 133169 - protein, 7 aa, synthetic construct
MKFHPQA

SEQ ID NO: 133170 - protein, 7 aa, synthetic construct
MKFKDHA

SEQ ID NO: 133171 - protein, 7 aa, synthetic construct
MKFKDTL

SEQ ID NO: 133172 - protein, 7 aa, synthetic construct
MKFKIAD

SEQ ID NO: 133173 - protein, 7 aa, synthetic construct
MKFKLME

SEQ ID NO: 133174 - protein, 7 aa, synthetic construct
MKFKMIE

SEQ ID NO: 133175 - protein, 7 aa, synthetic construct
MKFNAVA

SEQ ID NO: 133176 - protein, 7 aa, synthetic construct
MKFNSQA

SEQ ID NO: 133177 - protein, 7 aa, synthetic construct
MKFNTPS

SEQ ID NO: 133178 - protein, 7 aa, synthetic construct
MKFPEKA

SEQ ID NO: 133179 - protein, 7 aa, synthetic construct
MKFPNNI

SEQ ID NO: 133180 - protein, 7 aa, synthetic construct
MKFQHTA

SEQ ID NO: 133181 - protein, 7 aa, synthetic construct
MKFQPHA

SEQ ID NO: 133182 - protein, 7 aa, synthetic construct
MKFSPIN

SEQ ID NO: 133183 - protein, 7 aa, synthetic construct
MKGAHLL

SEQ ID NO: 133184 - protein, 7 aa, synthetic construct
MKGAQYM

SEQ ID NO: 133185 - protein, 7 aa, synthetic construct
MKGDHKY

SEQ ID NO: 133186 - protein, 7 aa, synthetic construct
MKGDSAK

SEQ ID NO: 133187 - protein, 7 aa, synthetic construct
MKGFIAS

SEQ ID NO: 133188 - protein, 7 aa, synthetic construct
MKGFMTS

SEQ ID NO: 133189 - protein, 7 aa, synthetic construct
MKGGRYD

SEQ ID NO: 133190 - protein, 7 aa, synthetic construct
MKGGVFH

SEQ ID NO: 133191 - protein, 7 aa, synthetic construct
MKGGYIQ

SEQ ID NO: 133192 - protein, 7 aa, synthetic construct
MKGHFGS

SEQ ID NO: 133193 - protein, 7 aa, synthetic construct
MKGHSNF

SEQ ID NO: 133194 - protein, 7 aa, synthetic construct
MKGHTFS

SEQ ID NO: 133195 - protein, 7 aa, synthetic construct
MKGHVHV

SEQ ID NO: 133196 - protein, 7 aa, synthetic construct
MKGIPAV

SEQ ID NO: 133197 - protein, 7 aa, synthetic construct
MKGIPMS

SEQ ID NO: 133198 - protein, 7 aa, synthetic construct
MKGKDFF

SEQ ID NO: 133199 - protein, 7 aa, synthetic construct
MKGKPGD

SEQ ID NO: 133200 - protein, 7 aa, synthetic construct
MKGKQYD

SEQ ID NO: 133201 - protein, 7 aa, synthetic construct
MKGLVDR

SEQ ID NO: 133202 - protein, 7 aa, synthetic construct
MKGMANY

SEQ ID NO: 133203 - protein, 7 aa, synthetic construct
MKGMPMH

SEQ ID NO: 133204 - protein, 7 aa, synthetic construct
MKGNDYK

SEQ ID NO: 133205 - protein, 7 aa, synthetic construct
MKGPMMV

SEQ ID NO: 133206 - protein, 7 aa, synthetic construct
MKGPNLV

SEQ ID NO: 133207 - protein, 7 aa, synthetic construct
MKGPSPM

SEQ ID NO: 133208 - protein, 7 aa, synthetic construct
MKGPTHY

SEQ ID NO: 133209 - protein, 7 aa, synthetic construct
MKGPVTQ

SEQ ID NO: 133210 - protein, 7 aa, synthetic construct
MKGRLYE

SEQ ID NO: 133211 - protein, 7 aa, synthetic construct
MKGRNTE

SEQ ID NO: 133212 - protein, 7 aa, synthetic construct
MKGSQLH

SEQ ID NO: 133213 - protein, 7 aa, synthetic construct
MKGTLYA

SEQ ID NO: 133214 - protein, 7 aa, synthetic construct
MKGTSFM

SEQ ID NO: 133215 - protein, 7 aa, synthetic construct
MKGTYLA

SEQ ID NO: 133216 - protein, 7 aa, synthetic construct
MKGVQMF

SEQ ID NO: 133217 - protein, 7 aa, synthetic construct
MKGYLEK

SEQ ID NO: 133218 - protein, 7 aa, synthetic construct
MKGYMGA

SEQ ID NO: 133219 - protein, 7 aa, synthetic construct
MKGYPPI

SEQ ID NO: 133220 - protein, 7 aa, synthetic construct
MKGYRDG

SEQ ID NO: 133221 - protein, 7 aa, synthetic construct
MKGYSIG

SEQ ID NO: 133222 - protein, 7 aa, synthetic construct
MKGYTQN

SEQ ID NO: 133223 - protein, 7 aa, synthetic construct
MKGYVGI

SEQ ID NO: 133224 - protein, 7 aa, synthetic construct
MKHANYG

SEQ ID NO: 133225 - protein, 7 aa, synthetic construct
MKHAPNY

SEQ ID NO: 133226 - protein, 7 aa, synthetic construct
MKHAQVI

SEQ ID NO: 133227 - protein, 7 aa, synthetic construct
MKHATDR

SEQ ID NO: 133228 - protein, 7 aa, synthetic construct
MKHFVKD

SEQ ID NO: 133229 - protein, 7 aa, synthetic construct
MKHGSPM

SEQ ID NO: 133230 - protein, 7 aa, synthetic construct
MKHHPNP

SEQ ID NO: 133231 - protein, 7 aa, synthetic construct
MKHIEAR

SEQ ID NO: 133232 - protein, 7 aa, synthetic construct
MKHIPGV

SEQ ID NO: 133233 - protein, 7 aa, synthetic construct
MKHIPKD

SEQ ID NO: 133234 - protein, 7 aa, synthetic construct
MKHIVRD

SEQ ID NO: 133235 - protein, 7 aa, synthetic construct
MKHKEPY

SEQ ID NO: 133236 - protein, 7 aa, synthetic construct
MKHLPNM

SEQ ID NO: 133237 - protein, 7 aa, synthetic construct
MKHLPQT

SEQ ID NO: 133238 - protein, 7 aa, synthetic construct
MKHLPRD

SEQ ID NO: 133239 - protein, 7 aa, synthetic construct
MKHMDAR

SEQ ID NO: 133240 - protein, 7 aa, synthetic construct
MKHPVPM

SEQ ID NO: 133241 - protein, 7 aa, synthetic construct
MKHQIGI

SEQ ID NO: 133242 - protein, 7 aa, synthetic construct
MKHQSPS

SEQ ID NO: 133243 - protein, 7 aa, synthetic construct
MKHQVAY

SEQ ID NO: 133244 - protein, 7 aa, synthetic construct
MKHREMG

SEQ ID NO: 133245 - protein, 7 aa, synthetic construct
MKHRETV

SEQ ID NO: 133246 - protein, 7 aa, synthetic construct
MKHTDKL

SEQ ID NO: 133247 - protein, 7 aa, synthetic construct
MKHTLTI

SEQ ID NO: 133248 - protein, 7 aa, synthetic construct
MKHTPIP

SEQ ID NO: 133249 - protein, 7 aa, synthetic construct
MKHTPKE

SEQ ID NO: 133250 - protein, 7 aa, synthetic construct
MKHTPSH

SEQ ID NO: 133251 - protein, 7 aa, synthetic construct
MKHVAHL

SEQ ID NO: 133252 - protein, 7 aa, synthetic construct
MKHVGMN

SEQ ID NO: 133253 - protein, 7 aa, synthetic construct
MKHVHAP

SEQ ID NO: 133254 - protein, 7 aa, synthetic construct
MKHVPLQ

SEQ ID NO: 133255 - protein, 7 aa, synthetic construct
MKHVYQA

SEQ ID NO: 133256 - protein, 7 aa, synthetic construct
MKIAPHT

SEQ ID NO: 133257 - protein, 7 aa, synthetic construct
MKIASHN

SEQ ID NO: 133258 - protein, 7 aa, synthetic construct
MKIEAAR

SEQ ID NO: 133259 - protein, 7 aa, synthetic construct
MKIGHTY

SEQ ID NO: 133260 - protein, 7 aa, synthetic construct
MKIMPNN

SEQ ID NO: 133261 - protein, 7 aa, synthetic construct
MKINMPM

SEQ ID NO: 133262 - protein, 7 aa, synthetic construct
MKIPVIN

SEQ ID NO: 133263 - protein, 7 aa, synthetic construct
MKIRETI

SEQ ID NO: 133264 - protein, 7 aa, synthetic construct
MKIVHPS

SEQ ID NO: 133265 - protein, 7 aa, synthetic construct
MKKAVDH

SEQ ID NO: 133266 - protein, 7 aa, synthetic construct
MKKDTVW

SEQ ID NO: 133267 - protein, 7 aa, synthetic construct
MKKEEWR

SEQ ID NO: 133268 - protein, 7 aa, synthetic construct
MKKESWL

SEQ ID NO: 133269 - protein, 7 aa, synthetic construct
MKKFPDS

SEQ ID NO: 133270 - protein, 7 aa, synthetic construct
MKKGDGW

SEQ ID NO: 133271 - protein, 7 aa, synthetic construct
MKKGDWG

SEQ ID NO: 133272 - protein, 7 aa, synthetic construct
MKKIPFD

SEQ ID NO: 133273 - protein, 7 aa, synthetic construct
MKKMVEF

SEQ ID NO: 133274 - protein, 7 aa, synthetic construct
MKKSIDI

SEQ ID NO: 133275 - protein, 7 aa, synthetic construct
MKKSPDA

SEQ ID NO: 133276 - protein, 7 aa, synthetic construct
MKLENRY

SEQ ID NO: 133277 - protein, 7 aa, synthetic construct
MKLKFTD

SEQ ID NO: 133278 - protein, 7 aa, synthetic construct
MKLNSQY

SEQ ID NO: 133279 - protein, 7 aa, synthetic construct
MKLPGTM

SEQ ID NO: 133280 - protein, 7 aa, synthetic construct
MKLPHSV

SEQ ID NO: 133281 - protein, 7 aa, synthetic construct
MKLPPVN

SEQ ID NO: 133282 - protein, 7 aa, synthetic construct
MKLPYNA

SEQ ID NO: 133283 - protein, 7 aa, synthetic construct
MKLRIPE

SEQ ID NO: 133284 - protein, 7 aa, synthetic construct
MKLRMND

SEQ ID NO: 133285 - protein, 7 aa, synthetic construct
MKLRVND

SEQ ID NO: 133286 - protein, 7 aa, synthetic construct
MKMAQAY

SEQ ID NO: 133287 - protein, 7 aa, synthetic construct
MKMARDY

SEQ ID NO: 133288 - protein, 7 aa, synthetic construct
MKMGPAV

SEQ ID NO: 133289 - protein, 7 aa, synthetic construct
MKMHISA

SEQ ID NO: 133290 - protein, 7 aa, synthetic construct
MKMHLHA

SEQ ID NO: 133291 - protein, 7 aa, synthetic construct
MKMNPGF

SEQ ID NO: 133292 - protein, 7 aa, synthetic construct
MKMNPTF

SEQ ID NO: 133293 - protein, 7 aa, synthetic construct
MKMPMQP

SEQ ID NO: 133294 - protein, 7 aa, synthetic construct
MKMPQPL

SEQ ID NO: 133295 - protein, 7 aa, synthetic construct
MKMPVER

SEQ ID NO: 133296 - protein, 7 aa, synthetic construct
MKMPVHS

SEQ ID NO: 133297 - protein, 7 aa, synthetic construct
MKMQSPY

SEQ ID NO: 133298 - protein, 7 aa, synthetic construct
MKMQSTY

SEQ ID NO: 133299 - protein, 7 aa, synthetic construct
MKMRDPP

SEQ ID NO: 133300 - protein, 7 aa, synthetic construct
MKMRGET

SEQ ID NO: 133301 - protein, 7 aa, synthetic construct
MKMRTDI

SEQ ID NO: 133302 - protein, 7 aa, synthetic construct
MKMYKND

SEQ ID NO: 133303 - protein, 7 aa, synthetic construct
MKNAHIY

SEQ ID NO: 133304 - protein, 7 aa, synthetic construct
MKNAHLL

SEQ ID NO: 133305 - protein, 7 aa, synthetic construct
MKNAPLH

SEQ ID NO: 133306 - protein, 7 aa, synthetic construct
MKNEKLY

SEQ ID NO: 133307 - protein, 7 aa, synthetic construct
MKNFTGN

SEQ ID NO: 133308 - protein, 7 aa, synthetic construct
MKNGDAR

SEQ ID NO: 133309 - protein, 7 aa, synthetic construct
MKNGGMW

SEQ ID NO: 133310 - protein, 7 aa, synthetic construct
MKNHAYN

SEQ ID NO: 133311 - protein, 7 aa, synthetic construct
MKNHNLI

SEQ ID NO: 133312 - protein, 7 aa, synthetic construct
MKNHPAN

SEQ ID NO: 133313 - protein, 7 aa, synthetic construct
MKNIHNL

SEQ ID NO: 133314 - protein, 7 aa, synthetic construct
MKNINEK

SEQ ID NO: 133315 - protein, 7 aa, synthetic construct
MKNIPAF

SEQ ID NO: 133316 - protein, 7 aa, synthetic construct
MKNIPAM

SEQ ID NO: 133317 - protein, 7 aa, synthetic construct
MKNISAY

SEQ ID NO: 133318 - protein, 7 aa, synthetic construct
MKNKDFY

SEQ ID NO: 133319 - protein, 7 aa, synthetic construct
MKNKIYD

SEQ ID NO: 133320 - protein, 7 aa, synthetic construct
MKNMTNF

SEQ ID NO: 133321 - protein, 7 aa, synthetic construct
MKNNNMH

SEQ ID NO: 133322 - protein, 7 aa, synthetic construct
MKNNTAW

SEQ ID NO: 133323 - protein, 7 aa, synthetic construct
MKNPMSA

SEQ ID NO: 133324 - protein, 7 aa, synthetic construct
MKNQDPK

SEQ ID NO: 133325 - protein, 7 aa, synthetic construct
MKNQWED

SEQ ID NO: 133326 - protein, 7 aa, synthetic construct
MKNRANE

SEQ ID NO: 133327 - protein, 7 aa, synthetic construct
MKNRLIE

SEQ ID NO: 133328 - protein, 7 aa, synthetic construct
MKNRNTE

SEQ ID NO: 133329 - protein, 7 aa, synthetic construct
MKNSFRD

SEQ ID NO: 133330 - protein, 7 aa, synthetic construct
MKNSSYI

SEQ ID NO: 133331 - protein, 7 aa, synthetic construct
MKNTHIT

SEQ ID NO: 133332 - protein, 7 aa, synthetic construct
MKNTPNM

SEQ ID NO: 133333 - protein, 7 aa, synthetic construct
MKNVDNK

SEQ ID NO: 133334 - protein, 7 aa, synthetic construct
MKNVPFN

SEQ ID NO: 133335 - protein, 7 aa, synthetic construct
MKNVTYS

SEQ ID NO: 133336 - protein, 7 aa, synthetic construct
MKNYKIE

SEQ ID NO: 133337 - protein, 7 aa, synthetic construct
MKNYPAM

SEQ ID NO: 133338 - protein, 7 aa, synthetic construct
MKNYVRE

SEQ ID NO: 133339 - protein, 7 aa, synthetic construct
MKPAHHV

SEQ ID NO: 133340 - protein, 7 aa, synthetic construct
MKPAVPF

SEQ ID NO: 133341 - protein, 7 aa, synthetic construct
MKPAYVQ

SEQ ID NO: 133342 - protein, 7 aa, synthetic construct
MKPDTTR

SEQ ID NO: 133343 - protein, 7 aa, synthetic construct
MKPFQNN

SEQ ID NO: 133344 - protein, 7 aa, synthetic construct
MKPFVNS

SEQ ID NO: 133345 - protein, 7 aa, synthetic construct
MKPGPAH

SEQ ID NO: 133346 - protein, 7 aa, synthetic construct
MKPGQPW

SEQ ID NO: 133347 - protein, 7 aa, synthetic construct
MKPHENR

SEQ ID NO: 133348 - protein, 7 aa, synthetic construct
MKPHNQY

SEQ ID NO: 133349 - protein, 7 aa, synthetic construct
MKPHPAN

SEQ ID NO: 133350 - protein, 7 aa, synthetic construct
MKPHSVY

SEQ ID NO: 133351 - protein, 7 aa, synthetic construct
MKPHTHF

SEQ ID NO: 133352 - protein, 7 aa, synthetic construct
MKPIVQH

SEQ ID NO: 133353 - protein, 7 aa, synthetic construct
MKPMANL

SEQ ID NO: 133354 - protein, 7 aa, synthetic construct
MKPMSAY

SEQ ID NO: 133355 - protein, 7 aa, synthetic construct
MKPNFHN

SEQ ID NO: 133356 - protein, 7 aa, synthetic construct
MKPPHAM

SEQ ID NO: 133357 - protein, 7 aa, synthetic construct
MKPQHFN

SEQ ID NO: 133358 - protein, 7 aa, synthetic construct
MKPRGTD

SEQ ID NO: 133359 - protein, 7 aa, synthetic construct
MKPRQSE

SEQ ID NO: 133360 - protein, 7 aa, synthetic construct
MKPRSDV

SEQ ID NO: 133361 - protein, 7 aa, synthetic construct
MKPSMIY

SEQ ID NO: 133362 - protein, 7 aa, synthetic construct
MKPSQYA

SEQ ID NO: 133363 - protein, 7 aa, synthetic construct
MKPTHFN

SEQ ID NO: 133364 - protein, 7 aa, synthetic construct
MKPTPAF

SEQ ID NO: 133365 - protein, 7 aa, synthetic construct
MKPVAAL

SEQ ID NO: 133366 - protein, 7 aa, synthetic construct
MKPVHNF

SEQ ID NO: 133367 - protein, 7 aa, synthetic construct
MKPVHSI

SEQ ID NO: 133368 - protein, 7 aa, synthetic construct
MKPVHYN

SEQ ID NO: 133369 - protein, 7 aa, synthetic construct
MKPYEAK

SEQ ID NO: 133370 - protein, 7 aa, synthetic construct
MKPYHSV

SEQ ID NO: 133371 - protein, 7 aa, synthetic construct
MKPYLQA

SEQ ID NO: 133372 - protein, 7 aa, synthetic construct
MKPYMNN

SEQ ID NO: 133373 - protein, 7 aa, synthetic construct
MKPYNIA

SEQ ID NO: 133374 - protein, 7 aa, synthetic construct
MKPYQAG

SEQ ID NO: 133375 - protein, 7 aa, synthetic construct
MKPYQVA

SEQ ID NO: 133376 - protein, 7 aa, synthetic construct
MKPYVTQ

SEQ ID NO: 133377 - protein, 7 aa, synthetic construct
MKQDMAR

SEQ ID NO: 133378 - protein, 7 aa, synthetic construct
MKQFVSA

SEQ ID NO: 133379 - protein, 7 aa, synthetic construct
MKQHTLY

SEQ ID NO: 133380 - protein, 7 aa, synthetic construct
MKQIKWE

SEQ ID NO: 133381 - protein, 7 aa, synthetic construct
MKQIVGL

SEQ ID NO: 133382 - protein, 7 aa, synthetic construct
MKQKFND

SEQ ID NO: 133383 - protein, 7 aa, synthetic construct
MKQLEFK

SEQ ID NO: 133384 - protein, 7 aa, synthetic construct
MKQNYSG

SEQ ID NO: 133385 - protein, 7 aa, synthetic construct
MKQPIMS

SEQ ID NO: 133386 - protein, 7 aa, synthetic construct
MKQQAFI

SEQ ID NO: 133387 - protein, 7 aa, synthetic construct
MKQQTHY

SEQ ID NO: 133388 - protein, 7 aa, synthetic construct
MKQRDNI

SEQ ID NO: 133389 - protein, 7 aa, synthetic construct
MKQRIDQ

SEQ ID NO: 133390 - protein, 7 aa, synthetic construct
MKQTHNT

SEQ ID NO: 133391 - protein, 7 aa, synthetic construct
MKQTQQY

SEQ ID NO: 133392 - protein, 7 aa, synthetic construct
MKQVAYH

SEQ ID NO: 133393 - protein, 7 aa, synthetic construct
MKQVAYN

SEQ ID NO: 133394 - protein, 7 aa, synthetic construct
MKQVTYN

SEQ ID NO: 133395 - protein, 7 aa, synthetic construct
MKQVYRE

SEQ ID NO: 133396 - protein, 7 aa, synthetic construct
MKQYETR

SEQ ID NO: 133397 - protein, 7 aa, synthetic construct
MKQYKDT

SEQ ID NO: 133398 - protein, 7 aa, synthetic construct
MKQYRGD

SEQ ID NO: 133399 - protein, 7 aa, synthetic construct
MKRALTE

SEQ ID NO: 133400 - protein, 7 aa, synthetic construct
MKRDAYM

SEQ ID NO: 133401 - protein, 7 aa, synthetic construct
MKRDFSA

SEQ ID NO: 133402 - protein, 7 aa, synthetic construct
MKRDIHV

SEQ ID NO: 133403 - protein, 7 aa, synthetic construct
MKRDIIT

SEQ ID NO: 133404 - protein, 7 aa, synthetic construct
MKRDIYS

SEQ ID NO: 133405 - protein, 7 aa, synthetic construct
MKRDLAY

SEQ ID NO: 133406 - protein, 7 aa, synthetic construct
MKRDPAM

SEQ ID NO: 133407 - protein, 7 aa, synthetic construct
MKRDQAY

SEQ ID NO: 133408 - protein, 7 aa, synthetic construct
MKRDQSL

SEQ ID NO: 133409 - protein, 7 aa, synthetic construct
MKRDQTS

SEQ ID NO: 133410 - protein, 7 aa, synthetic construct
MKRDQVM

SEQ ID NO: 133411 - protein, 7 aa, synthetic construct
MKRDVVG

SEQ ID NO: 133412 - protein, 7 aa, synthetic construct
MKREAFP

SEQ ID NO: 133413 - protein, 7 aa, synthetic construct
MKREMLQ

SEQ ID NO: 133414 - protein, 7 aa, synthetic construct
MKREMPM

SEQ ID NO: 133415 - protein, 7 aa, synthetic construct
MKRESNF

SEQ ID NO: 133416 - protein, 7 aa, synthetic construct
MKRLAVD

SEQ ID NO: 133417 - protein, 7 aa, synthetic construct
MKRLIQD

SEQ ID NO: 133418 - protein, 7 aa, synthetic construct
MKRLMIE

SEQ ID NO: 133419 - protein, 7 aa, synthetic construct
MKRLSLE

SEQ ID NO: 133420 - protein, 7 aa, synthetic construct
MKRMGET

SEQ ID NO: 133421 - protein, 7 aa, synthetic construct
MKRNVEM

SEQ ID NO: 133422 - protein, 7 aa, synthetic construct
MKRPQFD

SEQ ID NO: 133423 - protein, 7 aa, synthetic construct
MKRSVEM

SEQ ID NO: 133424 - protein, 7 aa, synthetic construct
MKRTVDT

SEQ ID NO: 133425 - protein, 7 aa, synthetic construct
MKSFAKD

SEQ ID NO: 133426 - protein, 7 aa, synthetic construct
MKSGLNY

SEQ ID NO: 133427 - protein, 7 aa, synthetic construct
MKSHAFS

SEQ ID NO: 133428 - protein, 7 aa, synthetic construct
MKSHFNG

SEQ ID NO: 133429 - protein, 7 aa, synthetic construct
MKSHTGF

SEQ ID NO: 133430 - protein, 7 aa, synthetic construct
MKSIDRA

SEQ ID NO: 133431 - protein, 7 aa, synthetic construct
MKSKEWI

SEQ ID NO: 133432 - protein, 7 aa, synthetic construct
MKSKEWQ

SEQ ID NO: 133433 - protein, 7 aa, synthetic construct
MKSKSDM

SEQ ID NO: 133434 - protein, 7 aa, synthetic construct
MKSLQDR

SEQ ID NO: 133435 - protein, 7 aa, synthetic construct
MKSMDTR

SEQ ID NO: 133436 - protein, 7 aa, synthetic construct
MKSMEMK

SEQ ID NO: 133437 - protein, 7 aa, synthetic construct
MKSMPTN

SEQ ID NO: 133438 - protein, 7 aa, synthetic construct
MKSQAPY

SEQ ID NO: 133439 - protein, 7 aa, synthetic construct
MKSRLEA

SEQ ID NO: 133440 - protein, 7 aa, synthetic construct
MKSSSYG

SEQ ID NO: 133441 - protein, 7 aa, synthetic construct
MKSVPPP

SEQ ID NO: 133442 - protein, 7 aa, synthetic construct
MKSYKEP

SEQ ID NO: 133443 - protein, 7 aa, synthetic construct
MKSYSNM

SEQ ID NO: 133444 - protein, 7 aa, synthetic construct
MKTDASR

SEQ ID NO: 133445 - protein, 7 aa, synthetic construct
MKTDNAK

SEQ ID NO: 133446 - protein, 7 aa, synthetic construct
MKTESQR

SEQ ID NO: 133447 - protein, 7 aa, synthetic construct
MKTETAR

SEQ ID NO: 133448 - protein, 7 aa, synthetic construct
MKTFQEK

SEQ ID NO: 133449 - protein, 7 aa, synthetic construct
MKTFQHA

SEQ ID NO: 133450 - protein, 7 aa, synthetic construct
MKTFVEK

SEQ ID NO: 133451 - protein, 7 aa, synthetic construct
MKTGDTR

SEQ ID NO: 133452 - protein, 7 aa, synthetic construct
MKTGGAW

SEQ ID NO: 133453 - protein, 7 aa, synthetic construct
MKTHDKT

SEQ ID NO: 133454 - protein, 7 aa, synthetic construct
MKTIEAK

SEQ ID NO: 133455 - protein, 7 aa, synthetic construct
MKTLHDK

SEQ ID NO: 133456 - protein, 7 aa, synthetic construct
MKTLPNM

SEQ ID NO: 133457 - protein, 7 aa, synthetic construct
MKTPLNM

SEQ ID NO: 133458 - protein, 7 aa, synthetic construct
MKTPRFD

SEQ ID NO: 133459 - protein, 7 aa, synthetic construct
MKTPVYQ

SEQ ID NO: 133460 - protein, 7 aa, synthetic construct
MKTQRHD

SEQ ID NO: 133461 - protein, 7 aa, synthetic construct
MKTRDTI

SEQ ID NO: 133462 - protein, 7 aa, synthetic construct
MKTRGDA

SEQ ID NO: 133463 - protein, 7 aa, synthetic construct
MKTRQFE

SEQ ID NO: 133464 - protein, 7 aa, synthetic construct
MKTVYDK

SEQ ID NO: 133465 - protein, 7 aa, synthetic construct
MKTYINA

SEQ ID NO: 133466 - protein, 7 aa, synthetic construct
MKTYSAP

SEQ ID NO: 133467 - protein, 7 aa, synthetic construct
MKVAIHP

SEQ ID NO: 133468 - protein, 7 aa, synthetic construct
MKVDVTR

SEQ ID NO: 133469 - protein, 7 aa, synthetic construct
MKVHSYG

SEQ ID NO: 133470 - protein, 7 aa, synthetic construct
MKVIRES

SEQ ID NO: 133471 - protein, 7 aa, synthetic construct
MKVPAVM

SEQ ID NO: 133472 - protein, 7 aa, synthetic construct
MKVPGTY

SEQ ID NO: 133473 - protein, 7 aa, synthetic construct
MKVPPVL

SEQ ID NO: 133474 - protein, 7 aa, synthetic construct
MKVPTHQ

SEQ ID NO: 133475 - protein, 7 aa, synthetic construct
MKVPVAP

SEQ ID NO: 133476 - protein, 7 aa, synthetic construct
MKVPVMN

SEQ ID NO: 133477 - protein, 7 aa, synthetic construct
MKVPYSG

SEQ ID NO: 133478 - protein, 7 aa, synthetic construct
MKVQVYA

SEQ ID NO: 133479 - protein, 7 aa, synthetic construct
MKVRADH

SEQ ID NO: 133480 - protein, 7 aa, synthetic construct
MKVRMSE

SEQ ID NO: 133481 - protein, 7 aa, synthetic construct
MKVSSII

SEQ ID NO: 133482 - protein, 7 aa, synthetic construct
MKVTYKD

SEQ ID NO: 133483 - protein, 7 aa, synthetic construct
MKYAGLS

SEQ ID NO: 133484 - protein, 7 aa, synthetic construct
MKYATDK

SEQ ID NO: 133485 - protein, 7 aa, synthetic construct
MKYGIPS

SEQ ID NO: 133486 - protein, 7 aa, synthetic construct
MKYGQGL

SEQ ID NO: 133487 - protein, 7 aa, synthetic construct
MKYHAGP

SEQ ID NO: 133488 - protein, 7 aa, synthetic construct
MKYHTTV

SEQ ID NO: 133489 - protein, 7 aa, synthetic construct
MKYKGEF

SEQ ID NO: 133490 - protein, 7 aa, synthetic construct
MKYKGEL

SEQ ID NO: 133491 - protein, 7 aa, synthetic construct
MKYKSPD

SEQ ID NO: 133492 - protein, 7 aa, synthetic construct
MKYMTEK

SEQ ID NO: 133493 - protein, 7 aa, synthetic construct
MKYNEKM

SEQ ID NO: 133494 - protein, 7 aa, synthetic construct
MKYNKID

SEQ ID NO: 133495 - protein, 7 aa, synthetic construct
MKYNNAI

SEQ ID NO: 133496 - protein, 7 aa, synthetic construct
MKYPEVR

SEQ ID NO: 133497 - protein, 7 aa, synthetic construct
MKYPKDA

SEQ ID NO: 133498 - protein, 7 aa, synthetic construct
MKYQIKD

SEQ ID NO: 133499 - protein, 7 aa, synthetic construct
MKYQPQN

SEQ ID NO: 133500 - protein, 7 aa, synthetic construct
MKYTDNK

SEQ ID NO: 133501 - protein, 7 aa, synthetic construct
MKYTTNP

SEQ ID NO: 133502 - protein, 7 aa, synthetic construct
MKYVKAD

SEQ ID NO: 133503 - protein, 7 aa, synthetic construct
MKYVPAN

SEQ ID NO: 133504 - protein, 7 aa, synthetic construct
MLARDRA

SEQ ID NO: 133505 - protein, 7 aa, synthetic construct
MLDKPRM

SEQ ID NO: 133506 - protein, 7 aa, synthetic construct
MLDKQGR

SEQ ID NO: 133507 - protein, 7 aa, synthetic construct
MLDKRHL

SEQ ID NO: 133508 - protein, 7 aa, synthetic construct
MLDNRSR

SEQ ID NO: 133509 - protein, 7 aa, synthetic construct
MLEKTTR

SEQ ID NO: 133510 - protein, 7 aa, synthetic construct
MLERAGR

SEQ ID NO: 133511 - protein, 7 aa, synthetic construct
MLERPSK

SEQ ID NO: 133512 - protein, 7 aa, synthetic construct
MLGDRLK

SEQ ID NO: 133513 - protein, 7 aa, synthetic construct
MLGGGMR

SEQ ID NO: 133514 - protein, 7 aa, synthetic construct
MLGGRQT

SEQ ID NO: 133515 - protein, 7 aa, synthetic construct
MLGHARN

SEQ ID NO: 133516 - protein, 7 aa, synthetic construct
MLGIARP

SEQ ID NO: 133517 - protein, 7 aa, synthetic construct
MLGKHTY

SEQ ID NO: 133518 - protein, 7 aa, synthetic construct
MLGLTRG

SEQ ID NO: 133519 - protein, 7 aa, synthetic construct
MLGNKYP

SEQ ID NO: 133520 - protein, 7 aa, synthetic construct
MLGPNAR

SEQ ID NO: 133521 - protein, 7 aa, synthetic construct
MLGQHMK

SEQ ID NO: 133522 - protein, 7 aa, synthetic construct
MLGQRAI

SEQ ID NO: 133523 - protein, 7 aa, synthetic construct
MLGQSRN

SEQ ID NO: 133524 - protein, 7 aa, synthetic construct
MLGSHRS

SEQ ID NO: 133525 - protein, 7 aa, synthetic construct
MLGVKRD

SEQ ID NO: 133526 - protein, 7 aa, synthetic construct
MLHKDRG

SEQ ID NO: 133527 - protein, 7 aa, synthetic construct
MLHKEKI

SEQ ID NO: 133528 - protein, 7 aa, synthetic construct
MLHKGPN

SEQ ID NO: 133529 - protein, 7 aa, synthetic construct
MLHKHNV

SEQ ID NO: 133530 - protein, 7 aa, synthetic construct
MLHKSVN

SEQ ID NO: 133531 - protein, 7 aa, synthetic construct
MLHMAKA

SEQ ID NO: 133532 - protein, 7 aa, synthetic construct
MLHMPAK

SEQ ID NO: 133533 - protein, 7 aa, synthetic construct
MLHNAKI

SEQ ID NO: 133534 - protein, 7 aa, synthetic construct
MLHNKFG

SEQ ID NO: 133535 - protein, 7 aa, synthetic construct
MLHQNKN

SEQ ID NO: 133536 - protein, 7 aa, synthetic construct
MLHQPMK

SEQ ID NO: 133537 - protein, 7 aa, synthetic construct
MLHSSKS

SEQ ID NO: 133538 - protein, 7 aa, synthetic construct
MLKGGYL

SEQ ID NO: 133539 - protein, 7 aa, synthetic construct
MLKGPHY

SEQ ID NO: 133540 - protein, 7 aa, synthetic construct
MLKGRYE

SEQ ID NO: 133541 - protein, 7 aa, synthetic construct
MLKGVYA

SEQ ID NO: 133542 - protein, 7 aa, synthetic construct
MLKHRDT

SEQ ID NO: 133543 - protein, 7 aa, synthetic construct
MLKRIEV

SEQ ID NO: 133544 - protein, 7 aa, synthetic construct
MLKSSFS

SEQ ID NO: 133545 - protein, 7 aa, synthetic construct
MLKTHYA

SEQ ID NO: 133546 - protein, 7 aa, synthetic construct
MLKTHYS

SEQ ID NO: 133547 - protein, 7 aa, synthetic construct
MLKYKEY

SEQ ID NO: 133548 - protein, 7 aa, synthetic construct
MLLNRKD

SEQ ID NO: 133549 - protein, 7 aa, synthetic construct
MLMRDKG

SEQ ID NO: 133550 - protein, 7 aa, synthetic construct
MLNMHAK

SEQ ID NO: 133551 - protein, 7 aa, synthetic construct
MLNMRGV

SEQ ID NO: 133552 - protein, 7 aa, synthetic construct
MLNNYQK

SEQ ID NO: 133553 - protein, 7 aa, synthetic construct
MLNPTRM

SEQ ID NO: 133554 - protein, 7 aa, synthetic construct
MLNRGVL

SEQ ID NO: 133555 - protein, 7 aa, synthetic construct
MLNVRGQ

SEQ ID NO: 133556 - protein, 7 aa, synthetic construct
MLPAYNK

SEQ ID NO: 133557 - protein, 7 aa, synthetic construct
MLPHANR

SEQ ID NO: 133558 - protein, 7 aa, synthetic construct
MLPNPNR

SEQ ID NO: 133559 - protein, 7 aa, synthetic construct
MLPQHTR

SEQ ID NO: 133560 - protein, 7 aa, synthetic construct
MLPRDKM

SEQ ID NO: 133561 - protein, 7 aa, synthetic construct
MLPRSSL

SEQ ID NO: 133562 - protein, 7 aa, synthetic construct
MLPTYKA

SEQ ID NO: 133563 - protein, 7 aa, synthetic construct
MLQHNGR

SEQ ID NO: 133564 - protein, 7 aa, synthetic construct
MLQQRST

SEQ ID NO: 133565 - protein, 7 aa, synthetic construct
MLQRGPT

SEQ ID NO: 133566 - protein, 7 aa, synthetic construct
MLRKSEV

SEQ ID NO: 133567 - protein, 7 aa, synthetic construct
MLRNQAN

SEQ ID NO: 133568 - protein, 7 aa, synthetic construct
MLRNTAS

SEQ ID NO: 133569 - protein, 7 aa, synthetic construct
MLRPGNH

SEQ ID NO: 133570 - protein, 7 aa, synthetic construct
MLRPGVP

SEQ ID NO: 133571 - protein, 7 aa, synthetic construct
MLRQKMD

SEQ ID NO: 133572 - protein, 7 aa, synthetic construct
MLRQTNA

SEQ ID NO: 133573 - protein, 7 aa, synthetic construct
MLRQVTA

SEQ ID NO: 133574 - protein, 7 aa, synthetic construct
MLRSKDM

SEQ ID NO: 133575 - protein, 7 aa, synthetic construct
MLRSKGE

SEQ ID NO: 133576 - protein, 7 aa, synthetic construct
MLRTSQS

SEQ ID NO: 133577 - protein, 7 aa, synthetic construct
MLRTVDK

SEQ ID NO: 133578 - protein, 7 aa, synthetic construct
MLSHAKY

SEQ ID NO: 133579 - protein, 7 aa, synthetic construct
MLSHVRP

SEQ ID NO: 133580 - protein, 7 aa, synthetic construct
MLSMSAA

SEQ ID NO: 133581 - protein, 7 aa, synthetic construct
MLSNTRA

SEQ ID NO: 133582 - protein, 7 aa, synthetic construct
MLSPRKD

SEQ ID NO: 133583 - protein, 7 aa, synthetic construct
MLSRAKE

SEQ ID NO: 133584 - protein, 7 aa, synthetic construct
MLSRFKE

SEQ ID NO: 133585 - protein, 7 aa, synthetic construct
MLSRSGM

SEQ ID NO: 133586 - protein, 7 aa, synthetic construct
MLSRTQM

SEQ ID NO: 133587 - protein, 7 aa, synthetic construct
MLSTAIK

SEQ ID NO: 133588 - protein, 7 aa, synthetic construct
MLTHIKQ

SEQ ID NO: 133589 - protein, 7 aa, synthetic construct
MLTHNSR

SEQ ID NO: 133590 - protein, 7 aa, synthetic construct
MLTHRGS

SEQ ID NO: 133591 - protein, 7 aa, synthetic construct
MLTRAGI

SEQ ID NO: 133592 - protein, 7 aa, synthetic construct
MLTRDKM

SEQ ID NO: 133593 - protein, 7 aa, synthetic construct
MLTRMKD

SEQ ID NO: 133594 - protein, 7 aa, synthetic construct
MLVKHRD

SEQ ID NO: 133595 - protein, 7 aa, synthetic construct
MLVNSAR

SEQ ID NO: 133596 - protein, 7 aa, synthetic construct
MLVRSQA

SEQ ID NO: 133597 - protein, 7 aa, synthetic construct
MLYKMKD

SEQ ID NO: 133598 - protein, 7 aa, synthetic construct
MMAGHPK

SEQ ID NO: 133599 - protein, 7 aa, synthetic construct
MMAGRNH

SEQ ID NO: 133600 - protein, 7 aa, synthetic construct
MMAGYAK

SEQ ID NO: 133601 - protein, 7 aa, synthetic construct
MMAHAKQ

SEQ ID NO: 133602 - protein, 7 aa, synthetic construct
MMAHRSN

SEQ ID NO: 133603 - protein, 7 aa, synthetic construct
MMAPRHS

SEQ ID NO: 133604 - protein, 7 aa, synthetic construct
MMARAMG

SEQ ID NO: 133605 - protein, 7 aa, synthetic construct
MMARDKM

SEQ ID NO: 133606 - protein, 7 aa, synthetic construct
MMARIRE

SEQ ID NO: 133607 - protein, 7 aa, synthetic construct
MMARTAM

SEQ ID NO: 133608 - protein, 7 aa, synthetic construct
MMASARM

SEQ ID NO: 133609 - protein, 7 aa, synthetic construct
MMATSRQ

SEQ ID NO: 133610 - protein, 7 aa, synthetic construct
MMDNRPR

SEQ ID NO: 133611 - protein, 7 aa, synthetic construct
MMDRRPV

SEQ ID NO: 133612 - protein, 7 aa, synthetic construct
MMDVRKI

SEQ ID NO: 133613 - protein, 7 aa, synthetic construct
MMEKSHR

SEQ ID NO: 133614 - protein, 7 aa, synthetic construct
MMERRPV

SEQ ID NO: 133615 - protein, 7 aa, synthetic construct
MMERSKQ

SEQ ID NO: 133616 - protein, 7 aa, synthetic construct
MMGGARS

SEQ ID NO: 133617 - protein, 7 aa, synthetic construct
MMGGVRL

SEQ ID NO: 133618 - protein, 7 aa, synthetic construct
MMGHARP

SEQ ID NO: 133619 - protein, 7 aa, synthetic construct
MMGHTMK

SEQ ID NO: 133620 - protein, 7 aa, synthetic construct
MMGIRPP

SEQ ID NO: 133621 - protein, 7 aa, synthetic construct
MMGKMVI

SEQ ID NO: 133622 - protein, 7 aa, synthetic construct
MMGNKYM

SEQ ID NO: 133623 - protein, 7 aa, synthetic construct
MMGNPNR

SEQ ID NO: 133624 - protein, 7 aa, synthetic construct
MMGQSMR

SEQ ID NO: 133625 - protein, 7 aa, synthetic construct
MMGRASL

SEQ ID NO: 133626 - protein, 7 aa, synthetic construct
MMGRHLA

SEQ ID NO: 133627 - protein, 7 aa, synthetic construct
MMGRVDR

SEQ ID NO: 133628 - protein, 7 aa, synthetic construct
MMGSHLK

SEQ ID NO: 133629 - protein, 7 aa, synthetic construct
MMGTKLL

SEQ ID NO: 133630 - protein, 7 aa, synthetic construct
MMGVDKR

SEQ ID NO: 133631 - protein, 7 aa, synthetic construct
MMGVSPK

SEQ ID NO: 133632 - protein, 7 aa, synthetic construct
MMGYGKA

SEQ ID NO: 133633 - protein, 7 aa, synthetic construct
MMHEKRP

SEQ ID NO: 133634 - protein, 7 aa, synthetic construct
MMHFHEE

SEQ ID NO: 133635 - protein, 7 aa, synthetic construct
MMHGIRS

SEQ ID NO: 133636 - protein, 7 aa, synthetic construct
MMHKHNA

SEQ ID NO: 133637 - protein, 7 aa, synthetic construct
MMHKTTM

SEQ ID NO: 133638 - protein, 7 aa, synthetic construct
MMHPRAV

SEQ ID NO: 133639 - protein, 7 aa, synthetic construct
MMHRVGS

SEQ ID NO: 133640 - protein, 7 aa, synthetic construct
MMHTKNY

SEQ ID NO: 133641 - protein, 7 aa, synthetic construct
MMIKNNA

SEQ ID NO: 133642 - protein, 7 aa, synthetic construct
MMIRNQP

SEQ ID NO: 133643 - protein, 7 aa, synthetic construct
MMKAMHA

SEQ ID NO: 133644 - protein, 7 aa, synthetic construct
MMKDYIK

SEQ ID NO: 133645 - protein, 7 aa, synthetic construct
MMKEQYR

SEQ ID NO: 133646 - protein, 7 aa, synthetic construct
MMKEYNR

SEQ ID NO: 133647 - protein, 7 aa, synthetic construct
MMKGIDK

SEQ ID NO: 133648 - protein, 7 aa, synthetic construct
MMKHGHM

SEQ ID NO: 133649 - protein, 7 aa, synthetic construct
MMKHRDT

SEQ ID NO: 133650 - protein, 7 aa, synthetic construct
MMKHVGY

SEQ ID NO: 133651 - protein, 7 aa, synthetic construct
MMKIKYD

SEQ ID NO: 133652 - protein, 7 aa, synthetic construct
MMKISPM

SEQ ID NO: 133653 - protein, 7 aa, synthetic construct
MMKNPMQ

SEQ ID NO: 133654 - protein, 7 aa, synthetic construct
MMKPLST

SEQ ID NO: 133655 - protein, 7 aa, synthetic construct
MMKRGSE

SEQ ID NO: 133656 - protein, 7 aa, synthetic construct
MMKRPDV

SEQ ID NO: 133657 - protein, 7 aa, synthetic construct
MMKVTNY

SEQ ID NO: 133658 - protein, 7 aa, synthetic construct
MMLRDKG

SEQ ID NO: 133659 - protein, 7 aa, synthetic construct
MMMPREK

SEQ ID NO: 133660 - protein, 7 aa, synthetic construct
MMNERRQ

SEQ ID NO: 133661 - protein, 7 aa, synthetic construct
MMNHREK

SEQ ID NO: 133662 - protein, 7 aa, synthetic construct
MMNHTIR

SEQ ID NO: 133663 - protein, 7 aa, synthetic construct
MMNKRTD

SEQ ID NO: 133664 - protein, 7 aa, synthetic construct
MMNKYTS

SEQ ID NO: 133665 - protein, 7 aa, synthetic construct
MMNMGSR

SEQ ID NO: 133666 - protein, 7 aa, synthetic construct
MMNQARN

SEQ ID NO: 133667 - protein, 7 aa, synthetic construct
MMNRVGV

SEQ ID NO: 133668 - protein, 7 aa, synthetic construct
MMNSHKT

SEQ ID NO: 133669 - protein, 7 aa, synthetic construct
MMNTPRG

SEQ ID NO: 133670 - protein, 7 aa, synthetic construct
MMNYVKP

SEQ ID NO: 133671 - protein, 7 aa, synthetic construct
MMPHRSP

SEQ ID NO: 133672 - protein, 7 aa, synthetic construct
MMPNAVR

SEQ ID NO: 133673 - protein, 7 aa, synthetic construct
MMPRHMA

SEQ ID NO: 133674 - protein, 7 aa, synthetic construct
MMPRNAQ

SEQ ID NO: 133675 - protein, 7 aa, synthetic construct
MMPRSSG

SEQ ID NO: 133676 - protein, 7 aa, synthetic construct
MMPRTTH

SEQ ID NO: 133677 - protein, 7 aa, synthetic construct
MMPSAKY

SEQ ID NO: 133678 - protein, 7 aa, synthetic construct
MMPSKYM

SEQ ID NO: 133679 - protein, 7 aa, synthetic construct
MMQDKRW

SEQ ID NO: 133680 - protein, 7 aa, synthetic construct
MMQGPSR

SEQ ID NO: 133681 - protein, 7 aa, synthetic construct
MMQHIKQ

SEQ ID NO: 133682 - protein, 7 aa, synthetic construct
MMQHKVQ

SEQ ID NO: 133683 - protein, 7 aa, synthetic construct
MMQIQRN

SEQ ID NO: 133684 - protein, 7 aa, synthetic construct
MMQKAHH

SEQ ID NO: 133685 - protein, 7 aa, synthetic construct
MMQSHAR

SEQ ID NO: 133686 - protein, 7 aa, synthetic construct
MMRAHAA

SEQ ID NO: 133687 - protein, 7 aa, synthetic construct
MMRANVS

SEQ ID NO: 133688 - protein, 7 aa, synthetic construct
MMRATNH

SEQ ID NO: 133689 - protein, 7 aa, synthetic construct
MMRDNTR

SEQ ID NO: 133690 - protein, 7 aa, synthetic construct
MMRGEQK

SEQ ID NO: 133691 - protein, 7 aa, synthetic construct
MMRHANV

SEQ ID NO: 133692 - protein, 7 aa, synthetic construct
MMRMQGA

SEQ ID NO: 133693 - protein, 7 aa, synthetic construct
MMRQAGL

SEQ ID NO: 133694 - protein, 7 aa, synthetic construct
MMRQAMP

SEQ ID NO: 133695 - protein, 7 aa, synthetic construct
MMRQEKN

SEQ ID NO: 133696 - protein, 7 aa, synthetic construct
MMRQNVV

SEQ ID NO: 133697 - protein, 7 aa, synthetic construct
MMRSHGA

SEQ ID NO: 133698 - protein, 7 aa, synthetic construct
MMRSMQH

SEQ ID NO: 133699 - protein, 7 aa, synthetic construct
MMRSQNH

SEQ ID NO: 133700 - protein, 7 aa, synthetic construct
MMRSSTH

SEQ ID NO: 133701 - protein, 7 aa, synthetic construct
MMRTAIQ

SEQ ID NO: 133702 - protein, 7 aa, synthetic construct
MMRTHTP

SEQ ID NO: 133703 - protein, 7 aa, synthetic construct
MMRVQRD

SEQ ID NO: 133704 - protein, 7 aa, synthetic construct
MMRVRSE

SEQ ID NO: 133705 - protein, 7 aa, synthetic construct
MMSGKYI

SEQ ID NO: 133706 - protein, 7 aa, synthetic construct
MMSHGSK

SEQ ID NO: 133707 - protein, 7 aa, synthetic construct
MMSHSRA

SEQ ID NO: 133708 - protein, 7 aa, synthetic construct
MMSKAHF

SEQ ID NO: 133709 - protein, 7 aa, synthetic construct
MMSKAVY

SEQ ID NO: 133710 - protein, 7 aa, synthetic construct
MMSTQRM

SEQ ID NO: 133711 - protein, 7 aa, synthetic construct
MMTARKD

SEQ ID NO: 133712 - protein, 7 aa, synthetic construct
MMTGHKS

SEQ ID NO: 133713 - protein, 7 aa, synthetic construct
MMTHKQV

SEQ ID NO: 133714 - protein, 7 aa, synthetic construct
MMTNQSR

SEQ ID NO: 133715 - protein, 7 aa, synthetic construct
MMTRQPP

SEQ ID NO: 133716 - protein, 7 aa, synthetic construct
MMTSHRA

SEQ ID NO: 133717 - protein, 7 aa, synthetic construct
MMTSHTK

SEQ ID NO: 133718 - protein, 7 aa, synthetic construct
MMVGGMK

SEQ ID NO: 133719 - protein, 7 aa, synthetic construct
MMVKRDT

SEQ ID NO: 133720 - protein, 7 aa, synthetic construct
MMVNKIA

SEQ ID NO: 133721 - protein, 7 aa, synthetic construct
MMVQKQA

SEQ ID NO: 133722 - protein, 7 aa, synthetic construct
MMVRQKE

SEQ ID NO: 133723 - protein, 7 aa, synthetic construct
MMYGQKH

SEQ ID NO: 133724 - protein, 7 aa, synthetic construct
MNAHNRI

SEQ ID NO: 133725 - protein, 7 aa, synthetic construct
MNAHQKF

SEQ ID NO: 133726 - protein, 7 aa, synthetic construct
MNAHQLK

SEQ ID NO: 133727 - protein, 7 aa, synthetic construct
MNANERR

SEQ ID NO: 133728 - protein, 7 aa, synthetic construct
MNANRQI

SEQ ID NO: 133729 - protein, 7 aa, synthetic construct
MNANTSR

SEQ ID NO: 133730 - protein, 7 aa, synthetic construct
MNAQKSW

SEQ ID NO: 133731 - protein, 7 aa, synthetic construct
MNAQQYR

SEQ ID NO: 133732 - protein, 7 aa, synthetic construct
MNAQRYV

SEQ ID NO: 133733 - protein, 7 aa, synthetic construct
MNAQTHK

SEQ ID NO: 133734 - protein, 7 aa, synthetic construct
MNAREGR

SEQ ID NO: 133735 - protein, 7 aa, synthetic construct
MNARMPM

SEQ ID NO: 133736 - protein, 7 aa, synthetic construct
MNATKHY

SEQ ID NO: 133737 - protein, 7 aa, synthetic construct
MNAVHAR

SEQ ID NO: 133738 - protein, 7 aa, synthetic construct
MNAYGKM

SEQ ID NO: 133739 - protein, 7 aa, synthetic construct
MNDRPGK

SEQ ID NO: 133740 - protein, 7 aa, synthetic construct
MNDVNRR

SEQ ID NO: 133741 - protein, 7 aa, synthetic construct
MNEIRWD

SEQ ID NO: 133742 - protein, 7 aa, synthetic construct
MNFTKER

SEQ ID NO: 133743 - protein, 7 aa, synthetic construct
MNGERKY

SEQ ID NO: 133744 - protein, 7 aa, synthetic construct
MNGHAFK

SEQ ID NO: 133745 - protein, 7 aa, synthetic construct
MNGKHYM

SEQ ID NO: 133746 - protein, 7 aa, synthetic construct
MNGMSHK

SEQ ID NO: 133747 - protein, 7 aa, synthetic construct
MNGPMGR

SEQ ID NO: 133748 - protein, 7 aa, synthetic construct
MNGPPRN

SEQ ID NO: 133749 - protein, 7 aa, synthetic construct
MNGQSHK

SEQ ID NO: 133750 - protein, 7 aa, synthetic construct
MNGYMVK

SEQ ID NO: 133751 - protein, 7 aa, synthetic construct
MNHALGR

SEQ ID NO: 133752 - protein, 7 aa, synthetic construct
MNHATGK

SEQ ID NO: 133753 - protein, 7 aa, synthetic construct
MNHATSK

SEQ ID NO: 133754 - protein, 7 aa, synthetic construct
MNHKMGL

SEQ ID NO: 133755 - protein, 7 aa, synthetic construct
MNHLPMD

SEQ ID NO: 133756 - protein, 7 aa, synthetic construct
MNHNVNK

SEQ ID NO: 133757 - protein, 7 aa, synthetic construct
MNHPKAF

SEQ ID NO: 133758 - protein, 7 aa, synthetic construct
MNHPRQV

SEQ ID NO: 133759 - protein, 7 aa, synthetic construct
MNHQAMK

SEQ ID NO: 133760 - protein, 7 aa, synthetic construct
MNHSPDS

SEQ ID NO: 133761 - protein, 7 aa, synthetic construct
MNHTHNK

SEQ ID NO: 133762 - protein, 7 aa, synthetic construct
MNHTIAR

SEQ ID NO: 133763 - protein, 7 aa, synthetic construct
MNHTMKH

SEQ ID NO: 133764 - protein, 7 aa, synthetic construct
MNIAART

SEQ ID NO: 133765 - protein, 7 aa, synthetic construct
MNIAYKA

SEQ ID NO: 133766 - protein, 7 aa, synthetic construct
MNIGTRM

SEQ ID NO: 133767 - protein, 7 aa, synthetic construct
MNIKLTN

SEQ ID NO: 133768 - protein, 7 aa, synthetic construct
MNIQKSY

SEQ ID NO: 133769 - protein, 7 aa, synthetic construct
MNIRPGN

SEQ ID NO: 133770 - protein, 7 aa, synthetic construct
MNITRVV

SEQ ID NO: 133771 - protein, 7 aa, synthetic construct
MNKANYI

SEQ ID NO: 133772 - protein, 7 aa, synthetic construct
MNKDWHK

SEQ ID NO: 133773 - protein, 7 aa, synthetic construct
MNKGHYM

SEQ ID NO: 133774 - protein, 7 aa, synthetic construct
MNKLEGK

SEQ ID NO: 133775 - protein, 7 aa, synthetic construct
MNKQWSH

SEQ ID NO: 133776 - protein, 7 aa, synthetic construct
MNKRIDM

SEQ ID NO: 133777 - protein, 7 aa, synthetic construct
MNKRQES

SEQ ID NO: 133778 - protein, 7 aa, synthetic construct
MNKTEKY

SEQ ID NO: 133779 - protein, 7 aa, synthetic construct
MNKVYTN

SEQ ID NO: 133780 - protein, 7 aa, synthetic construct
MNLHKAT

SEQ ID NO: 133781 - protein, 7 aa, synthetic construct
MNLHKER

SEQ ID NO: 133782 - protein, 7 aa, synthetic construct
MNLRNMT

SEQ ID NO: 133783 - protein, 7 aa, synthetic construct
MNLTKVY

SEQ ID NO: 133784 - protein, 7 aa, synthetic construct
MNMEVKR

SEQ ID NO: 133785 - protein, 7 aa, synthetic construct
MNMKIPM

SEQ ID NO: 133786 - protein, 7 aa, synthetic construct
MNMPMKQ

SEQ ID NO: 133787 - protein, 7 aa, synthetic construct
MNMRNAY

SEQ ID NO: 133788 - protein, 7 aa, synthetic construct
MNNARNL

SEQ ID NO: 133789 - protein, 7 aa, synthetic construct
MNNHKYN

SEQ ID NO: 133790 - protein, 7 aa, synthetic construct
MNNLRNN

SEQ ID NO: 133791 - protein, 7 aa, synthetic construct
MNNMKFI

SEQ ID NO: 133792 - protein, 7 aa, synthetic construct
MNNNKDK

SEQ ID NO: 133793 - protein, 7 aa, synthetic construct
MNNNVYK

SEQ ID NO: 133794 - protein, 7 aa, synthetic construct
MNNPKMH

SEQ ID NO: 133795 - protein, 7 aa, synthetic construct
MNNQGAR

SEQ ID NO: 133796 - protein, 7 aa, synthetic construct
MNNQSVR

SEQ ID NO: 133797 - protein, 7 aa, synthetic construct
MNNQSYK

SEQ ID NO: 133798 - protein, 7 aa, synthetic construct
MNNVARY

SEQ ID NO: 133799 - protein, 7 aa, synthetic construct
MNPAIRH

SEQ ID NO: 133800 - protein, 7 aa, synthetic construct
MNPARDR

SEQ ID NO: 133801 - protein, 7 aa, synthetic construct
MNPGRFP

SEQ ID NO: 133802 - protein, 7 aa, synthetic construct
MNPPKHI

SEQ ID NO: 133803 - protein, 7 aa, synthetic construct
MNPQKFT

SEQ ID NO: 133804 - protein, 7 aa, synthetic construct
MNQAKAY

SEQ ID NO: 133805 - protein, 7 aa, synthetic construct
MNQASKF

SEQ ID NO: 133806 - protein, 7 aa, synthetic construct
MNQHMNK

SEQ ID NO: 133807 - protein, 7 aa, synthetic construct
MNQIRNL

SEQ ID NO: 133808 - protein, 7 aa, synthetic construct
MNQKYAT

SEQ ID NO: 133809 - protein, 7 aa, synthetic construct
MNQLHKM

SEQ ID NO: 133810 - protein, 7 aa, synthetic construct
MNQMTRL

SEQ ID NO: 133811 - protein, 7 aa, synthetic construct
MNQNRDK

SEQ ID NO: 133812 - protein, 7 aa, synthetic construct
MNQNRYP

SEQ ID NO: 133813 - protein, 7 aa, synthetic construct
MNQNSAK

SEQ ID NO: 133814 - protein, 7 aa, synthetic construct
MNQPKLM

SEQ ID NO: 133815 - protein, 7 aa, synthetic construct
MNQPKQQ

SEQ ID NO: 133816 - protein, 7 aa, synthetic construct
MNQREIK

SEQ ID NO: 133817 - protein, 7 aa, synthetic construct
MNQRINT

SEQ ID NO: 133818 - protein, 7 aa, synthetic construct
MNQRPVY

SEQ ID NO: 133819 - protein, 7 aa, synthetic construct
MNQSAYK

SEQ ID NO: 133820 - protein, 7 aa, synthetic construct
MNQTLSR

SEQ ID NO: 133821 - protein, 7 aa, synthetic construct
MNQTTLR

SEQ ID NO: 133822 - protein, 7 aa, synthetic construct
MNQVSRL

SEQ ID NO: 133823 - protein, 7 aa, synthetic construct
MNQYKEK

SEQ ID NO: 133824 - protein, 7 aa, synthetic construct
MNQYQQK

SEQ ID NO: 133825 - protein, 7 aa, synthetic construct
MNQYSRP

SEQ ID NO: 133826 - protein, 7 aa, synthetic construct
MNRAHAG

SEQ ID NO: 133827 - protein, 7 aa, synthetic construct
MNRAHAV

SEQ ID NO: 133828 - protein, 7 aa, synthetic construct
MNRDKQL

SEQ ID NO: 133829 - protein, 7 aa, synthetic construct
MNRDMSK

SEQ ID NO: 133830 - protein, 7 aa, synthetic construct
MNRGEKM

SEQ ID NO: 133831 - protein, 7 aa, synthetic construct
MNRGSYS

SEQ ID NO: 133832 - protein, 7 aa, synthetic construct
MNRGVIA

SEQ ID NO: 133833 - protein, 7 aa, synthetic construct
MNRIITS

SEQ ID NO: 133834 - protein, 7 aa, synthetic construct
MNRLKPD

SEQ ID NO: 133835 - protein, 7 aa, synthetic construct
MNRLVDK

SEQ ID NO: 133836 - protein, 7 aa, synthetic construct
MNRLVTS

SEQ ID NO: 133837 - protein, 7 aa, synthetic construct
MNRPKEY

SEQ ID NO: 133838 - protein, 7 aa, synthetic construct
MNRQAHA

SEQ ID NO: 133839 - protein, 7 aa, synthetic construct
MNRQSTG

SEQ ID NO: 133840 - protein, 7 aa, synthetic construct
MNRQTER

SEQ ID NO: 133841 - protein, 7 aa, synthetic construct
MNRQVGF

SEQ ID NO: 133842 - protein, 7 aa, synthetic construct
MNRVHSA

SEQ ID NO: 133843 - protein, 7 aa, synthetic construct
MNRVIGA

SEQ ID NO: 133844 - protein, 7 aa, synthetic construct
MNRVKQE

SEQ ID NO: 133845 - protein, 7 aa, synthetic construct
MNSGYVK

SEQ ID NO: 133846 - protein, 7 aa, synthetic construct
MNSIKSL

SEQ ID NO: 133847 - protein, 7 aa, synthetic construct
MNSSARL

SEQ ID NO: 133848 - protein, 7 aa, synthetic construct
MNTAIKY

SEQ ID NO: 133849 - protein, 7 aa, synthetic construct
MNTAKYL

SEQ ID NO: 133850 - protein, 7 aa, synthetic construct
MNTARQV

SEQ ID NO: 133851 - protein, 7 aa, synthetic construct
MNTERKY

SEQ ID NO: 133852 - protein, 7 aa, synthetic construct
MNTGAMR

SEQ ID NO: 133853 - protein, 7 aa, synthetic construct
MNTGKNW

SEQ ID NO: 133854 - protein, 7 aa, synthetic construct
MNTGYPR

SEQ ID NO: 133855 - protein, 7 aa, synthetic construct
MNTHTSR

SEQ ID NO: 133856 - protein, 7 aa, synthetic construct
MNTKNER

SEQ ID NO: 133857 - protein, 7 aa, synthetic construct
MNTQARM

SEQ ID NO: 133858 - protein, 7 aa, synthetic construct
MNTQTHR

SEQ ID NO: 133859 - protein, 7 aa, synthetic construct
MNVKRDF

SEQ ID NO: 133860 - protein, 7 aa, synthetic construct
MNVNRQV

SEQ ID NO: 133861 - protein, 7 aa, synthetic construct
MNVQSVR

SEQ ID NO: 133862 - protein, 7 aa, synthetic construct
MNVSRSM

SEQ ID NO: 133863 - protein, 7 aa, synthetic construct
MNVTRAT

SEQ ID NO: 133864 - protein, 7 aa, synthetic construct
MNVVRKD

SEQ ID NO: 133865 - protein, 7 aa, synthetic construct
MNYVKQM

SEQ ID NO: 133866 - protein, 7 aa, synthetic construct
MPAGAKY

SEQ ID NO: 133867 - protein, 7 aa, synthetic construct
MPAGRYP

SEQ ID NO: 133868 - protein, 7 aa, synthetic construct
MPAKPPM

SEQ ID NO: 133869 - protein, 7 aa, synthetic construct
MPAMSTK

SEQ ID NO: 133870 - protein, 7 aa, synthetic construct
MPANHKY

SEQ ID NO: 133871 - protein, 7 aa, synthetic construct
MPANHRV

SEQ ID NO: 133872 - protein, 7 aa, synthetic construct
MPAQSHR

SEQ ID NO: 133873 - protein, 7 aa, synthetic construct
MPARNQF

SEQ ID NO: 133874 - protein, 7 aa, synthetic construct
MPARPNL

SEQ ID NO: 133875 - protein, 7 aa, synthetic construct
MPDKYRV

SEQ ID NO: 133876 - protein, 7 aa, synthetic construct
MPERNRN

SEQ ID NO: 133877 - protein, 7 aa, synthetic construct
MPESRRV

SEQ ID NO: 133878 - protein, 7 aa, synthetic construct
MPFNAKS

SEQ ID NO: 133879 - protein, 7 aa, synthetic construct
MPGHPTK

SEQ ID NO: 133880 - protein, 7 aa, synthetic construct
MPGLTRI

SEQ ID NO: 133881 - protein, 7 aa, synthetic construct
MPGMRMT

SEQ ID NO: 133882 - protein, 7 aa, synthetic construct
MPGRSTH

SEQ ID NO: 133883 - protein, 7 aa, synthetic construct
MPGTKMF

SEQ ID NO: 133884 - protein, 7 aa, synthetic construct
MPGYSAK

SEQ ID NO: 133885 - protein, 7 aa, synthetic construct
MPHALRQ

SEQ ID NO: 133886 - protein, 7 aa, synthetic construct
MPHARQQ

SEQ ID NO: 133887 - protein, 7 aa, synthetic construct
MPHATRG

SEQ ID NO: 133888 - protein, 7 aa, synthetic construct
MPHGLAR

SEQ ID NO: 133889 - protein, 7 aa, synthetic construct
MPHGTAR

SEQ ID NO: 133890 - protein, 7 aa, synthetic construct
MPHGTRL

SEQ ID NO: 133891 - protein, 7 aa, synthetic construct
MPHKGLM

SEQ ID NO: 133892 - protein, 7 aa, synthetic construct
MPHKMPA

SEQ ID NO: 133893 - protein, 7 aa, synthetic construct
MPHLSGK

SEQ ID NO: 133894 - protein, 7 aa, synthetic construct
MPHMSAK

SEQ ID NO: 133895 - protein, 7 aa, synthetic construct
MPHNSQK

SEQ ID NO: 133896 - protein, 7 aa, synthetic construct
MPHPNMR

SEQ ID NO: 133897 - protein, 7 aa, synthetic construct
MPHQMKQ

SEQ ID NO: 133898 - protein, 7 aa, synthetic construct
MPHQMRQ

SEQ ID NO: 133899 - protein, 7 aa, synthetic construct
MPHSGRN

SEQ ID NO: 133900 - protein, 7 aa, synthetic construct
MPHSSRV

SEQ ID NO: 133901 - protein, 7 aa, synthetic construct
MPHTQGK

SEQ ID NO: 133902 - protein, 7 aa, synthetic construct
MPIAKHT

SEQ ID NO: 133903 - protein, 7 aa, synthetic construct
MPIKPHA

SEQ ID NO: 133904 - protein, 7 aa, synthetic construct
MPIKSNF

SEQ ID NO: 133905 - protein, 7 aa, synthetic construct
MPIPNRG

SEQ ID NO: 133906 - protein, 7 aa, synthetic construct
MPIQKAQ

SEQ ID NO: 133907 - protein, 7 aa, synthetic construct
MPISRQQ

SEQ ID NO: 133908 - protein, 7 aa, synthetic construct
MPITGSR

SEQ ID NO: 133909 - protein, 7 aa, synthetic construct
MPKFTDR

SEQ ID NO: 133910 - protein, 7 aa, synthetic construct
MPKGHYS

SEQ ID NO: 133911 - protein, 7 aa, synthetic construct
MPKHPSN

SEQ ID NO: 133912 - protein, 7 aa, synthetic construct
MPKIPAL

SEQ ID NO: 133913 - protein, 7 aa, synthetic construct
MPKITYP

SEQ ID NO: 133914 - protein, 7 aa, synthetic construct
MPKLPLN

SEQ ID NO: 133915 - protein, 7 aa, synthetic construct
MPKLQHQ

SEQ ID NO: 133916 - protein, 7 aa, synthetic construct
MPKLYVG

SEQ ID NO: 133917 - protein, 7 aa, synthetic construct
MPKNVPF

SEQ ID NO: 133918 - protein, 7 aa, synthetic construct
MPKPPIL

SEQ ID NO: 133919 - protein, 7 aa, synthetic construct
MPKVFRE

SEQ ID NO: 133920 - protein, 7 aa, synthetic construct
MPKVRDF

SEQ ID NO: 133921 - protein, 7 aa, synthetic construct
MPKYGAH

SEQ ID NO: 133922 - protein, 7 aa, synthetic construct
MPKYKDN

SEQ ID NO: 133923 - protein, 7 aa, synthetic construct
MPKYSMS

SEQ ID NO: 133924 - protein, 7 aa, synthetic construct
MPLANKM

SEQ ID NO: 133925 - protein, 7 aa, synthetic construct
MPLHSNK

SEQ ID NO: 133926 - protein, 7 aa, synthetic construct
MPMGAGR

SEQ ID NO: 133927 - protein, 7 aa, synthetic construct
MPMMAKA

SEQ ID NO: 133928 - protein, 7 aa, synthetic construct
MPMQVSK

SEQ ID NO: 133929 - protein, 7 aa, synthetic construct
MPMRGAA

SEQ ID NO: 133930 - protein, 7 aa, synthetic construct
MPNHTRN

SEQ ID NO: 133931 - protein, 7 aa, synthetic construct
MPNKSYH

SEQ ID NO: 133932 - protein, 7 aa, synthetic construct
MPNLVRQ

SEQ ID NO: 133933 - protein, 7 aa, synthetic construct
MPNNKFM

SEQ ID NO: 133934 - protein, 7 aa, synthetic construct
MPNNYRA

SEQ ID NO: 133935 - protein, 7 aa, synthetic construct
MPNRPHG

SEQ ID NO: 133936 - protein, 7 aa, synthetic construct
MPNRSHL

SEQ ID NO: 133937 - protein, 7 aa, synthetic construct
MPNRYAA

SEQ ID NO: 133938 - protein, 7 aa, synthetic construct
MPNSHTD

SEQ ID NO: 133939 - protein, 7 aa, synthetic construct
MPNTPKN

SEQ ID NO: 133940 - protein, 7 aa, synthetic construct
MPNVKLT

SEQ ID NO: 133941 - protein, 7 aa, synthetic construct
MPNVQRN

SEQ ID NO: 133942 - protein, 7 aa, synthetic construct
MPNYTQK

SEQ ID NO: 133943 - protein, 7 aa, synthetic construct
MPPGRFG

SEQ ID NO: 133944 - protein, 7 aa, synthetic construct
MPPKHLI

SEQ ID NO: 133945 - protein, 7 aa, synthetic construct
MPPNIRQ

SEQ ID NO: 133946 - protein, 7 aa, synthetic construct
MPPQQRF

SEQ ID NO: 133947 - protein, 7 aa, synthetic construct
MPPRSGH

SEQ ID NO: 133948 - protein, 7 aa, synthetic construct
MPPRVHQ

SEQ ID NO: 133949 - protein, 7 aa, synthetic construct
MPPVGGR

SEQ ID NO: 133950 - protein, 7 aa, synthetic construct
MPQAPLR

SEQ ID NO: 133951 - protein, 7 aa, synthetic construct
MPQERRT

SEQ ID NO: 133952 - protein, 7 aa, synthetic construct
MPQERVR

SEQ ID NO: 133953 - protein, 7 aa, synthetic construct
MPQGYGR

SEQ ID NO: 133954 - protein, 7 aa, synthetic construct
MPQHRSM

SEQ ID NO: 133955 - protein, 7 aa, synthetic construct
MPQHRSP

SEQ ID NO: 133956 - protein, 7 aa, synthetic construct
MPQKPYS

SEQ ID NO: 133957 - protein, 7 aa, synthetic construct
MPQLSGR

SEQ ID NO: 133958 - protein, 7 aa, synthetic construct
MPQNHKF

SEQ ID NO: 133959 - protein, 7 aa, synthetic construct
MPQNSLR

SEQ ID NO: 133960 - protein, 7 aa, synthetic construct
MPQPDPA

SEQ ID NO: 133961 - protein, 7 aa, synthetic construct
MPQQAMR

SEQ ID NO: 133962 - protein, 7 aa, synthetic construct
MPQRPRE

SEQ ID NO: 133963 - protein, 7 aa, synthetic construct
MPQVRHG

SEQ ID NO: 133964 - protein, 7 aa, synthetic construct
MPQYSAK

SEQ ID NO: 133965 - protein, 7 aa, synthetic construct
MPRAQQY

SEQ ID NO: 133966 - protein, 7 aa, synthetic construct
MPRASER

SEQ ID NO: 133967 - protein, 7 aa, synthetic construct
MPRDNTR

SEQ ID NO: 133968 - protein, 7 aa, synthetic construct
MPRDRSS

SEQ ID NO: 133969 - protein, 7 aa, synthetic construct
MPRDTRL

SEQ ID NO: 133970 - protein, 7 aa, synthetic construct
MPREGVR

SEQ ID NO: 133971 - protein, 7 aa, synthetic construct
MPREKHQ

SEQ ID NO: 133972 - protein, 7 aa, synthetic construct
MPREMSR

SEQ ID NO: 133973 - protein, 7 aa, synthetic construct
MPRERAG

SEQ ID NO: 133974 - protein, 7 aa, synthetic construct
MPREVRS

SEQ ID NO: 133975 - protein, 7 aa, synthetic construct
MPREYTK

SEQ ID NO: 133976 - protein, 7 aa, synthetic construct
MPRGEVR

SEQ ID NO: 133977 - protein, 7 aa, synthetic construct
MPRGGYM

SEQ ID NO: 133978 - protein, 7 aa, synthetic construct
MPRGSTV

SEQ ID NO: 133979 - protein, 7 aa, synthetic construct
MPRGVQQ

SEQ ID NO: 133980 - protein, 7 aa, synthetic construct
MPRHNVM

SEQ ID NO: 133981 - protein, 7 aa, synthetic construct
MPRHTGG

SEQ ID NO: 133982 - protein, 7 aa, synthetic construct
MPRHVSG

SEQ ID NO: 133983 - protein, 7 aa, synthetic construct
MPRINVQ

SEQ ID NO: 133984 - protein, 7 aa, synthetic construct
MPRISPQ

SEQ ID NO: 133985 - protein, 7 aa, synthetic construct
MPRITVQ

SEQ ID NO: 133986 - protein, 7 aa, synthetic construct
MPRKDTT

SEQ ID NO: 133987 - protein, 7 aa, synthetic construct
MPRKEVD

SEQ ID NO: 133988 - protein, 7 aa, synthetic construct
MPRKMMD

SEQ ID NO: 133989 - protein, 7 aa, synthetic construct
MPRKQEL

SEQ ID NO: 133990 - protein, 7 aa, synthetic construct
MPRLSSA

SEQ ID NO: 133991 - protein, 7 aa, synthetic construct
MPRMSVQ

SEQ ID NO: 133992 - protein, 7 aa, synthetic construct
MPRNEPR

SEQ ID NO: 133993 - protein, 7 aa, synthetic construct
MPRNMQM

SEQ ID NO: 133994 - protein, 7 aa, synthetic construct
MPRNTNM

SEQ ID NO: 133995 - protein, 7 aa, synthetic construct
MPRNVPN

SEQ ID NO: 133996 - protein, 7 aa, synthetic construct
MPRNVSA

SEQ ID NO: 133997 - protein, 7 aa, synthetic construct
MPRNVSI

SEQ ID NO: 133998 - protein, 7 aa, synthetic construct
MPRPGPV

SEQ ID NO: 133999 - protein, 7 aa, synthetic construct
MPRPMRE

SEQ ID NO: 134000 - protein, 7 aa, synthetic construct
MPRPTIA

SEQ ID NO: 134001 - protein, 7 aa, synthetic construct
MPRQEHK

SEQ ID NO: 134002 - protein, 7 aa, synthetic construct
MPRQEKY

SEQ ID NO: 134003 - protein, 7 aa, synthetic construct
MPRQNAN

SEQ ID NO: 134004 - protein, 7 aa, synthetic construct
MPRQQAY

SEQ ID NO: 134005 - protein, 7 aa, synthetic construct
MPRQRDG

SEQ ID NO: 134006 - protein, 7 aa, synthetic construct
MPRQSMN

SEQ ID NO: 134007 - protein, 7 aa, synthetic construct
MPRQTHS

SEQ ID NO: 134008 - protein, 7 aa, synthetic construct
MPRSIAA

SEQ ID NO: 134009 - protein, 7 aa, synthetic construct
MPRSISA

SEQ ID NO: 134010 - protein, 7 aa, synthetic construct
MPRSNKE

SEQ ID NO: 134011 - protein, 7 aa, synthetic construct
MPRSQNL

SEQ ID NO: 134012 - protein, 7 aa, synthetic construct
MPRSSVG

SEQ ID NO: 134013 - protein, 7 aa, synthetic construct
MPRSVNL

SEQ ID NO: 134014 - protein, 7 aa, synthetic construct
MPRTAGH

SEQ ID NO: 134015 - protein, 7 aa, synthetic construct
MPRTHPQ

SEQ ID NO: 134016 - protein, 7 aa, synthetic construct
MPRTNAH

SEQ ID NO: 134017 - protein, 7 aa, synthetic construct
MPRVKLE

SEQ ID NO: 134018 - protein, 7 aa, synthetic construct
MPRVLTA

SEQ ID NO: 134019 - protein, 7 aa, synthetic construct
MPRVNLG

SEQ ID NO: 134020 - protein, 7 aa, synthetic construct
MPSFQKA

SEQ ID NO: 134021 - protein, 7 aa, synthetic construct
MPSGPHK

SEQ ID NO: 134022 - protein, 7 aa, synthetic construct
MPSHSTR

SEQ ID NO: 134023 - protein, 7 aa, synthetic construct
MPSPTRM

SEQ ID NO: 134024 - protein, 7 aa, synthetic construct
MPSRGHM

SEQ ID NO: 134025 - protein, 7 aa, synthetic construct
MPSSRHV

SEQ ID NO: 134026 - protein, 7 aa, synthetic construct
MPSSTRY

SEQ ID NO: 134027 - protein, 7 aa, synthetic construct
MPSYKAT

SEQ ID NO: 134028 - protein, 7 aa, synthetic construct
MPTHRLN

SEQ ID NO: 134029 - protein, 7 aa, synthetic construct
MPTKVYS

SEQ ID NO: 134030 - protein, 7 aa, synthetic construct
MPTMRER

SEQ ID NO: 134031 - protein, 7 aa, synthetic construct
MPTNQRG

SEQ ID NO: 134032 - protein, 7 aa, synthetic construct
MPTNSRQ

SEQ ID NO: 134033 - protein, 7 aa, synthetic construct
MPTPRHN

SEQ ID NO: 134034 - protein, 7 aa, synthetic construct
MPTRGDR

SEQ ID NO: 134035 - protein, 7 aa, synthetic construct
MPTRGSH

SEQ ID NO: 134036 - protein, 7 aa, synthetic construct
MPTRVIP

SEQ ID NO: 134037 - protein, 7 aa, synthetic construct
MPTSYKG

SEQ ID NO: 134038 - protein, 7 aa, synthetic construct
MPVLQKA

SEQ ID NO: 134039 - protein, 7 aa, synthetic construct
MPVRAGA

SEQ ID NO: 134040 - protein, 7 aa, synthetic construct
MPVRGHG

SEQ ID NO: 134041 - protein, 7 aa, synthetic construct
MPVRRLE

SEQ ID NO: 134042 - protein, 7 aa, synthetic construct
MPVRTHT

SEQ ID NO: 134043 - protein, 7 aa, synthetic construct
MPVTPRA

SEQ ID NO: 134044 - protein, 7 aa, synthetic construct
MPVVKVA

SEQ ID NO: 134045 - protein, 7 aa, synthetic construct
MPYSTKV

SEQ ID NO: 134046 - protein, 7 aa, synthetic construct
MQAGSYK

SEQ ID NO: 134047 - protein, 7 aa, synthetic construct
MQANAPR

SEQ ID NO: 134048 - protein, 7 aa, synthetic construct
MQANARM

SEQ ID NO: 134049 - protein, 7 aa, synthetic construct
MQANYSK

SEQ ID NO: 134050 - protein, 7 aa, synthetic construct
MQARLVP

SEQ ID NO: 134051 - protein, 7 aa, synthetic construct
MQASPRM

SEQ ID NO: 134052 - protein, 7 aa, synthetic construct
MQATHRT

SEQ ID NO: 134053 - protein, 7 aa, synthetic construct
MQATRGM

SEQ ID NO: 134054 - protein, 7 aa, synthetic construct
MQATSKY

SEQ ID NO: 134055 - protein, 7 aa, synthetic construct
MQDKFSK

SEQ ID NO: 134056 - protein, 7 aa, synthetic construct
MQDRQKS

SEQ ID NO: 134057 - protein, 7 aa, synthetic construct
MQERVKF

SEQ ID NO: 134058 - protein, 7 aa, synthetic construct
MQFKTSN

SEQ ID NO: 134059 - protein, 7 aa, synthetic construct
MQFRGTN

SEQ ID NO: 134060 - protein, 7 aa, synthetic construct
MQFSVKG

SEQ ID NO: 134061 - protein, 7 aa, synthetic construct
MQFTNQH

SEQ ID NO: 134062 - protein, 7 aa, synthetic construct
MQGAQSR

SEQ ID NO: 134063 - protein, 7 aa, synthetic construct
MQGFPSK

SEQ ID NO: 134064 - protein, 7 aa, synthetic construct
MQGGEKR

SEQ ID NO: 134065 - protein, 7 aa, synthetic construct
MQGGHRN

SEQ ID NO: 134066 - protein, 7 aa, synthetic construct
MQGGSRP

SEQ ID NO: 134067 - protein, 7 aa, synthetic construct
MQGHIQK

SEQ ID NO: 134068 - protein, 7 aa, synthetic construct
MQGKSDK

SEQ ID NO: 134069 - protein, 7 aa, synthetic construct
MQGKSYG

SEQ ID NO: 134070 - protein, 7 aa, synthetic construct
MQGMIRA

SEQ ID NO: 134071 - protein, 7 aa, synthetic construct
MQGNTRQ

SEQ ID NO: 134072 - protein, 7 aa, synthetic construct
MQGQAAR

SEQ ID NO: 134073 - protein, 7 aa, synthetic construct
MQGQRSL

SEQ ID NO: 134074 - protein, 7 aa, synthetic construct
MQGRANI

SEQ ID NO: 134075 - protein, 7 aa, synthetic construct
MQGSTGR

SEQ ID NO: 134076 - protein, 7 aa, synthetic construct
MQGTHRL

SEQ ID NO: 134077 - protein, 7 aa, synthetic construct
MQGTKLF

SEQ ID NO: 134078 - protein, 7 aa, synthetic construct
MQGVMTR

SEQ ID NO: 134079 - protein, 7 aa, synthetic construct
MQHIKIP

SEQ ID NO: 134080 - protein, 7 aa, synthetic construct
MQHKDVR

SEQ ID NO: 134081 - protein, 7 aa, synthetic construct
MQHKGYG

SEQ ID NO: 134082 - protein, 7 aa, synthetic construct
MQHKKDF

SEQ ID NO: 134083 - protein, 7 aa, synthetic construct
MQHKRME

SEQ ID NO: 134084 - protein, 7 aa, synthetic construct
MQHNKFG

SEQ ID NO: 134085 - protein, 7 aa, synthetic construct
MQHNQKA

SEQ ID NO: 134086 - protein, 7 aa, synthetic construct
MQHQAPK

SEQ ID NO: 134087 - protein, 7 aa, synthetic construct
MQHQSTK

SEQ ID NO: 134088 - protein, 7 aa, synthetic construct
MQHRTGM

SEQ ID NO: 134089 - protein, 7 aa, synthetic construct
MQHSAKY

SEQ ID NO: 134090 - protein, 7 aa, synthetic construct
MQHSKSV

SEQ ID NO: 134091 - protein, 7 aa, synthetic construct
MQIKYQQ

SEQ ID NO: 134092 - protein, 7 aa, synthetic construct
MQKAYLP

SEQ ID NO: 134093 - protein, 7 aa, synthetic construct
MQKDARY

SEQ ID NO: 134094 - protein, 7 aa, synthetic construct
MQKDSQK

SEQ ID NO: 134095 - protein, 7 aa, synthetic construct
MQKEKAW

SEQ ID NO: 134096 - protein, 7 aa, synthetic construct
MQKERVF

SEQ ID NO: 134097 - protein, 7 aa, synthetic construct
MQKHPIS

SEQ ID NO: 134098 - protein, 7 aa, synthetic construct
MQKIYAA

SEQ ID NO: 134099 - protein, 7 aa, synthetic construct
MQKKDAL

SEQ ID NO: 134100 - protein, 7 aa, synthetic construct
MQKKNVD

SEQ ID NO: 134101 - protein, 7 aa, synthetic construct
MQKLQPY

SEQ ID NO: 134102 - protein, 7 aa, synthetic construct
MQKNYPM

SEQ ID NO: 134103 - protein, 7 aa, synthetic construct
MQKQDIR

SEQ ID NO: 134104 - protein, 7 aa, synthetic construct
MQKQFPQ

SEQ ID NO: 134105 - protein, 7 aa, synthetic construct
MQKRENQ

SEQ ID NO: 134106 - protein, 7 aa, synthetic construct
MQKRPDN

SEQ ID NO: 134107 - protein, 7 aa, synthetic construct
MQKRQEF

SEQ ID NO: 134108 - protein, 7 aa, synthetic construct
MQLDRPR

SEQ ID NO: 134109 - protein, 7 aa, synthetic construct
MQLRGDR

SEQ ID NO: 134110 - protein, 7 aa, synthetic construct
MQMGQPR

SEQ ID NO: 134111 - protein, 7 aa, synthetic construct
MQMHTNK

SEQ ID NO: 134112 - protein, 7 aa, synthetic construct
MQMHTSK

SEQ ID NO: 134113 - protein, 7 aa, synthetic construct
MQMHVKT

SEQ ID NO: 134114 - protein, 7 aa, synthetic construct
MQMNAGR

SEQ ID NO: 134115 - protein, 7 aa, synthetic construct
MQMQKGH

SEQ ID NO: 134116 - protein, 7 aa, synthetic construct
MQMRARE

SEQ ID NO: 134117 - protein, 7 aa, synthetic construct
MQNARNT

SEQ ID NO: 134118 - protein, 7 aa, synthetic construct
MQNKDAR

SEQ ID NO: 134119 - protein, 7 aa, synthetic construct
MQNMPTD

SEQ ID NO: 134120 - protein, 7 aa, synthetic construct
MQNNFSK

SEQ ID NO: 134121 - protein, 7 aa, synthetic construct
MQNRGIL

SEQ ID NO: 134122 - protein, 7 aa, synthetic construct
MQNRIKD

SEQ ID NO: 134123 - protein, 7 aa, synthetic construct
MQNSPAR

SEQ ID NO: 134124 - protein, 7 aa, synthetic construct
MQNSQRL

SEQ ID NO: 134125 - protein, 7 aa, synthetic construct
MQNVRDR

SEQ ID NO: 134126 - protein, 7 aa, synthetic construct
MQPAQKP

SEQ ID NO: 134127 - protein, 7 aa, synthetic construct
MQPGAGR

SEQ ID NO: 134128 - protein, 7 aa, synthetic construct
MQPHKNF

SEQ ID NO: 134129 - protein, 7 aa, synthetic construct
MQPHLKI

SEQ ID NO: 134130 - protein, 7 aa, synthetic construct
MQPPRNL

SEQ ID NO: 134131 - protein, 7 aa, synthetic construct
MQPRAGQ

SEQ ID NO: 134132 - protein, 7 aa, synthetic construct
MQPRHQV

SEQ ID NO: 134133 - protein, 7 aa, synthetic construct
MQPRPTM

SEQ ID NO: 134134 - protein, 7 aa, synthetic construct
MQPYNSQ

SEQ ID NO: 134135 - protein, 7 aa, synthetic construct
MQPYTAK

SEQ ID NO: 134136 - protein, 7 aa, synthetic construct
MQQAGYK

SEQ ID NO: 134137 - protein, 7 aa, synthetic construct
MQQGIQR

SEQ ID NO: 134138 - protein, 7 aa, synthetic construct
MQQGKLF

SEQ ID NO: 134139 - protein, 7 aa, synthetic construct
MQQGSRS

SEQ ID NO: 134140 - protein, 7 aa, synthetic construct
MQQGVKW

SEQ ID NO: 134141 - protein, 7 aa, synthetic construct
MQQGYVK

SEQ ID NO: 134142 - protein, 7 aa, synthetic construct
MQQHNGR

SEQ ID NO: 134143 - protein, 7 aa, synthetic construct
MQQISRQ

SEQ ID NO: 134144 - protein, 7 aa, synthetic construct
MQQKHMM

SEQ ID NO: 134145 - protein, 7 aa, synthetic construct
MQQKHTF

SEQ ID NO: 134146 - protein, 7 aa, synthetic construct
MQQKRNE

SEQ ID NO: 134147 - protein, 7 aa, synthetic construct
MQQMKHT

SEQ ID NO: 134148 - protein, 7 aa, synthetic construct
MQQNKER

SEQ ID NO: 134149 - protein, 7 aa, synthetic construct
MQQNWGG

SEQ ID NO: 134150 - protein, 7 aa, synthetic construct
MQQQRSM

SEQ ID NO: 134151 - protein, 7 aa, synthetic construct
MQQQVRV

SEQ ID NO: 134152 - protein, 7 aa, synthetic construct
MQQQYKT

SEQ ID NO: 134153 - protein, 7 aa, synthetic construct
MQQVGHK

SEQ ID NO: 134154 - protein, 7 aa, synthetic construct
MQQVMRN

SEQ ID NO: 134155 - protein, 7 aa, synthetic construct
MQRAVDK

SEQ ID NO: 134156 - protein, 7 aa, synthetic construct
MQRETMK

SEQ ID NO: 134157 - protein, 7 aa, synthetic construct
MQRGAKD

SEQ ID NO: 134158 - protein, 7 aa, synthetic construct
MQRGPMA

SEQ ID NO: 134159 - protein, 7 aa, synthetic construct
MQRGPMQ

SEQ ID NO: 134160 - protein, 7 aa, synthetic construct
MQRGSIT

SEQ ID NO: 134161 - protein, 7 aa, synthetic construct
MQRHGAI

SEQ ID NO: 134162 - protein, 7 aa, synthetic construct
MQRITKE

SEQ ID NO: 134163 - protein, 7 aa, synthetic construct
MQRKEEK

SEQ ID NO: 134164 - protein, 7 aa, synthetic construct
MQRKMQE

SEQ ID NO: 134165 - protein, 7 aa, synthetic construct
MQRLGPN

SEQ ID NO: 134166 - protein, 7 aa, synthetic construct
MQRLKDL

SEQ ID NO: 134167 - protein, 7 aa, synthetic construct
MQRMKDT

SEQ ID NO: 134168 - protein, 7 aa, synthetic construct
MQRPFKD

SEQ ID NO: 134169 - protein, 7 aa, synthetic construct
MQRPMVA

SEQ ID NO: 134170 - protein, 7 aa, synthetic construct
MQRQEKG

SEQ ID NO: 134171 - protein, 7 aa, synthetic construct
MQRREVV

SEQ ID NO: 134172 - protein, 7 aa, synthetic construct
MQRSMAI

SEQ ID NO: 134173 - protein, 7 aa, synthetic construct
MQRTKDF

SEQ ID NO: 134174 - protein, 7 aa, synthetic construct
MQRVKEM

SEQ ID NO: 134175 - protein, 7 aa, synthetic construct
MQRYIPE

SEQ ID NO: 134176 - protein, 7 aa, synthetic construct
MQSASKY

SEQ ID NO: 134177 - protein, 7 aa, synthetic construct
MQSGAMR

SEQ ID NO: 134178 - protein, 7 aa, synthetic construct
MQSHMVK

SEQ ID NO: 134179 - protein, 7 aa, synthetic construct
MQSMSAR

SEQ ID NO: 134180 - protein, 7 aa, synthetic construct
MQSNNGR

SEQ ID NO: 134181 - protein, 7 aa, synthetic construct
MQSPRMV

SEQ ID NO: 134182 - protein, 7 aa, synthetic construct
MQSQIRN

SEQ ID NO: 134183 - protein, 7 aa, synthetic construct
MQSQQMR

SEQ ID NO: 134184 - protein, 7 aa, synthetic construct
MQSSNLR

SEQ ID NO: 134185 - protein, 7 aa, synthetic construct
MQSSVPR

SEQ ID NO: 134186 - protein, 7 aa, synthetic construct
MQSYKSS

SEQ ID NO: 134187 - protein, 7 aa, synthetic construct
MQTGVRA

SEQ ID NO: 134188 - protein, 7 aa, synthetic construct
MQTHPTK

SEQ ID NO: 134189 - protein, 7 aa, synthetic construct
MQTKGQH

SEQ ID NO: 134190 - protein, 7 aa, synthetic construct
MQTKNSH

SEQ ID NO: 134191 - protein, 7 aa, synthetic construct
MQTNHKM

SEQ ID NO: 134192 - protein, 7 aa, synthetic construct
MQTPRTL

SEQ ID NO: 134193 - protein, 7 aa, synthetic construct
MQTRGRD

SEQ ID NO: 134194 - protein, 7 aa, synthetic construct
MQTRPHG

SEQ ID NO: 134195 - protein, 7 aa, synthetic construct
MQTYQQK

SEQ ID NO: 134196 - protein, 7 aa, synthetic construct
MQVKAFQ

SEQ ID NO: 134197 - protein, 7 aa, synthetic construct
MQVNKRE

SEQ ID NO: 134198 - protein, 7 aa, synthetic construct
MQVRADK

SEQ ID NO: 134199 - protein, 7 aa, synthetic construct
MQVRTEK

SEQ ID NO: 134200 - protein, 7 aa, synthetic construct
MQVSSNR

SEQ ID NO: 134201 - protein, 7 aa, synthetic construct
MQVTRTQ

SEQ ID NO: 134202 - protein, 7 aa, synthetic construct
MQYTSMT

SEQ ID NO: 134203 - protein, 7 aa, synthetic construct
MRAAIDK

SEQ ID NO: 134204 - protein, 7 aa, synthetic construct
MRAAQSF

SEQ ID NO: 134205 - protein, 7 aa, synthetic construct
MRAEKLM

SEQ ID NO: 134206 - protein, 7 aa, synthetic construct
MRAGLPV

SEQ ID NO: 134207 - protein, 7 aa, synthetic construct
MRAGYPT

SEQ ID NO: 134208 - protein, 7 aa, synthetic construct
MRAHMTV

SEQ ID NO: 134209 - protein, 7 aa, synthetic construct
MRAHVKD

SEQ ID NO: 134210 - protein, 7 aa, synthetic construct
MRAIPVP

SEQ ID NO: 134211 - protein, 7 aa, synthetic construct
MRAISGN

SEQ ID NO: 134212 - protein, 7 aa, synthetic construct
MRAITPQ

SEQ ID NO: 134213 - protein, 7 aa, synthetic construct
MRAITTN

SEQ ID NO: 134214 - protein, 7 aa, synthetic construct
MRAKDIV

SEQ ID NO: 134215 - protein, 7 aa, synthetic construct
MRAKMGD

SEQ ID NO: 134216 - protein, 7 aa, synthetic construct
MRALQDK

SEQ ID NO: 134217 - protein, 7 aa, synthetic construct
MRANAQV

SEQ ID NO: 134218 - protein, 7 aa, synthetic construct
MRAQERS

SEQ ID NO: 134219 - protein, 7 aa, synthetic construct
MRAQPHA

SEQ ID NO: 134220 - protein, 7 aa, synthetic construct
MRAQSNS

SEQ ID NO: 134221 - protein, 7 aa, synthetic construct
MRAQSPQ

SEQ ID NO: 134222 - protein, 7 aa, synthetic construct
MRAQTTQ

SEQ ID NO: 134223 - protein, 7 aa, synthetic construct
MRARLQE

SEQ ID NO: 134224 - protein, 7 aa, synthetic construct
MRASLGM

SEQ ID NO: 134225 - protein, 7 aa, synthetic construct
MRASLHG

SEQ ID NO: 134226 - protein, 7 aa, synthetic construct
MRASLHN

SEQ ID NO: 134227 - protein, 7 aa, synthetic construct
MRASQGG

SEQ ID NO: 134228 - protein, 7 aa, synthetic construct
MRATHLA

SEQ ID NO: 134229 - protein, 7 aa, synthetic construct
MRATRDA

SEQ ID NO: 134230 - protein, 7 aa, synthetic construct
MRATSMN

SEQ ID NO: 134231 - protein, 7 aa, synthetic construct
MRATSNN

SEQ ID NO: 134232 - protein, 7 aa, synthetic construct
MRAVDRG

SEQ ID NO: 134233 - protein, 7 aa, synthetic construct
MRDASRV

SEQ ID NO: 134234 - protein, 7 aa, synthetic construct
MRDHTNR

SEQ ID NO: 134235 - protein, 7 aa, synthetic construct
MRDHVQK

SEQ ID NO: 134236 - protein, 7 aa, synthetic construct
MRDKMIT

SEQ ID NO: 134237 - protein, 7 aa, synthetic construct
MRDLRHS

SEQ ID NO: 134238 - protein, 7 aa, synthetic construct
MRDMTAK

SEQ ID NO: 134239 - protein, 7 aa, synthetic construct
MRDNGYK

SEQ ID NO: 134240 - protein, 7 aa, synthetic construct
MRDPMMK

SEQ ID NO: 134241 - protein, 7 aa, synthetic construct
MRDQKVY

SEQ ID NO: 134242 - protein, 7 aa, synthetic construct
MRDQPTK

SEQ ID NO: 134243 - protein, 7 aa, synthetic construct
MRDRKEL

SEQ ID NO: 134244 - protein, 7 aa, synthetic construct
MRDRTTS

SEQ ID NO: 134245 - protein, 7 aa, synthetic construct
MRDSATK

SEQ ID NO: 134246 - protein, 7 aa, synthetic construct
MRDSQRL

SEQ ID NO: 134247 - protein, 7 aa, synthetic construct
MRDSYPK

SEQ ID NO: 134248 - protein, 7 aa, synthetic construct
MRDTTIK

SEQ ID NO: 134249 - protein, 7 aa, synthetic construct
MRDVSMK

SEQ ID NO: 134250 - protein, 7 aa, synthetic construct
MREARQF

SEQ ID NO: 134251 - protein, 7 aa, synthetic construct
MREGHRV

SEQ ID NO: 134252 - protein, 7 aa, synthetic construct
MREKGTL

SEQ ID NO: 134253 - protein, 7 aa, synthetic construct
MREKHPF

SEQ ID NO: 134254 - protein, 7 aa, synthetic construct
MREKNIT

SEQ ID NO: 134255 - protein, 7 aa, synthetic construct
MREKSAQ

SEQ ID NO: 134256 - protein, 7 aa, synthetic construct
MRELKSQ

SEQ ID NO: 134257 - protein, 7 aa, synthetic construct
MRELNRV

SEQ ID NO: 134258 - protein, 7 aa, synthetic construct
MRENAIR

SEQ ID NO: 134259 - protein, 7 aa, synthetic construct
MRESKGL

SEQ ID NO: 134260 - protein, 7 aa, synthetic construct
MRESRSF

SEQ ID NO: 134261 - protein, 7 aa, synthetic construct
MRETRHP

SEQ ID NO: 134262 - protein, 7 aa, synthetic construct
MREVIRN

SEQ ID NO: 134263 - protein, 7 aa, synthetic construct
MRFKEQS

SEQ ID NO: 134264 - protein, 7 aa, synthetic construct
MRGAANL

SEQ ID NO: 134265 - protein, 7 aa, synthetic construct
MRGAATL

SEQ ID NO: 134266 - protein, 7 aa, synthetic construct
MRGAGSN

SEQ ID NO: 134267 - protein, 7 aa, synthetic construct
MRGAITS

SEQ ID NO: 134268 - protein, 7 aa, synthetic construct
MRGAMHT

SEQ ID NO: 134269 - protein, 7 aa, synthetic construct
MRGAMNV

SEQ ID NO: 134270 - protein, 7 aa, synthetic construct
MRGAPVI

SEQ ID NO: 134271 - protein, 7 aa, synthetic construct
MRGATNN

SEQ ID NO: 134272 - protein, 7 aa, synthetic construct
MRGAVSF

SEQ ID NO: 134273 - protein, 7 aa, synthetic construct
MRGAVSV

SEQ ID NO: 134274 - protein, 7 aa, synthetic construct
MRGERGT

SEQ ID NO: 134275 - protein, 7 aa, synthetic construct
MRGGAAY

SEQ ID NO: 134276 - protein, 7 aa, synthetic construct
MRGGDLR

SEQ ID NO: 134277 - protein, 7 aa, synthetic construct
MRGGKDT

SEQ ID NO: 134278 - protein, 7 aa, synthetic construct
MRGGKPD

SEQ ID NO: 134279 - protein, 7 aa, synthetic construct
MRGGKVD

SEQ ID NO: 134280 - protein, 7 aa, synthetic construct
MRGGSVY

SEQ ID NO: 134281 - protein, 7 aa, synthetic construct
MRGGTHV

SEQ ID NO: 134282 - protein, 7 aa, synthetic construct
MRGHAMP

SEQ ID NO: 134283 - protein, 7 aa, synthetic construct
MRGHEKP

SEQ ID NO: 134284 - protein, 7 aa, synthetic construct
MRGHLAQ

SEQ ID NO: 134285 - protein, 7 aa, synthetic construct
MRGHPIV

SEQ ID NO: 134286 - protein, 7 aa, synthetic construct
MRGINNV

SEQ ID NO: 134287 - protein, 7 aa, synthetic construct
MRGINPG

SEQ ID NO: 134288 - protein, 7 aa, synthetic construct
MRGINPT

SEQ ID NO: 134289 - protein, 7 aa, synthetic construct
MRGKEAY

SEQ ID NO: 134290 - protein, 7 aa, synthetic construct
MRGKEHA

SEQ ID NO: 134291 - protein, 7 aa, synthetic construct
MRGKILE

SEQ ID NO: 134292 - protein, 7 aa, synthetic construct
MRGKYEP

SEQ ID NO: 134293 - protein, 7 aa, synthetic construct
MRGLALS

SEQ ID NO: 134294 - protein, 7 aa, synthetic construct
MRGLAMA

SEQ ID NO: 134295 - protein, 7 aa, synthetic construct
MRGLMSP

SEQ ID NO: 134296 - protein, 7 aa, synthetic construct
MRGLNGM

SEQ ID NO: 134297 - protein, 7 aa, synthetic construct
MRGLVAS

SEQ ID NO: 134298 - protein, 7 aa, synthetic construct
MRGMKDS

SEQ ID NO: 134299 - protein, 7 aa, synthetic construct
MRGNASH

SEQ ID NO: 134300 - protein, 7 aa, synthetic construct
MRGNERS

SEQ ID NO: 134301 - protein, 7 aa, synthetic construct
MRGNTIT

SEQ ID NO: 134302 - protein, 7 aa, synthetic construct
MRGNVLV

SEQ ID NO: 134303 - protein, 7 aa, synthetic construct
MRGPAGV

SEQ ID NO: 134304 - protein, 7 aa, synthetic construct
MRGPKDS

SEQ ID NO: 134305 - protein, 7 aa, synthetic construct
MRGPRDI

SEQ ID NO: 134306 - protein, 7 aa, synthetic construct
MRGPSFS

SEQ ID NO: 134307 - protein, 7 aa, synthetic construct
MRGPTVV

SEQ ID NO: 134308 - protein, 7 aa, synthetic construct
MRGQMGG

SEQ ID NO: 134309 - protein, 7 aa, synthetic construct
MRGQPHV

SEQ ID NO: 134310 - protein, 7 aa, synthetic construct
MRGQQQI

SEQ ID NO: 134311 - protein, 7 aa, synthetic construct
MRGQQTG

SEQ ID NO: 134312 - protein, 7 aa, synthetic construct
MRGQTST

SEQ ID NO: 134313 - protein, 7 aa, synthetic construct
MRGRPEG

SEQ ID NO: 134314 - protein, 7 aa, synthetic construct
MRGSHGG

SEQ ID NO: 134315 - protein, 7 aa, synthetic construct
MRGSIAI

SEQ ID NO: 134316 - protein, 7 aa, synthetic construct
MRGSLAG

SEQ ID NO: 134317 - protein, 7 aa, synthetic construct
MRGSLTQ

SEQ ID NO: 134318 - protein, 7 aa, synthetic construct
MRGSMAN

SEQ ID NO: 134319 - protein, 7 aa, synthetic construct
MRGSVNT

SEQ ID NO: 134320 - protein, 7 aa, synthetic construct
MRGTGPM

SEQ ID NO: 134321 - protein, 7 aa, synthetic construct
MRGTHIY

SEQ ID NO: 134322 - protein, 7 aa, synthetic construct
MRGTKEQ

SEQ ID NO: 134323 - protein, 7 aa, synthetic construct
MRGTNKD

SEQ ID NO: 134324 - protein, 7 aa, synthetic construct
MRGTQTV

SEQ ID NO: 134325 - protein, 7 aa, synthetic construct
MRGTSTM

SEQ ID NO: 134326 - protein, 7 aa, synthetic construct
MRGVKME

SEQ ID NO: 134327 - protein, 7 aa, synthetic construct
MRGVPHN

SEQ ID NO: 134328 - protein, 7 aa, synthetic construct
MRGVPSL

SEQ ID NO: 134329 - protein, 7 aa, synthetic construct
MRGVQQY

SEQ ID NO: 134330 - protein, 7 aa, synthetic construct
MRGVRME

SEQ ID NO: 134331 - protein, 7 aa, synthetic construct
MRGVTHL

SEQ ID NO: 134332 - protein, 7 aa, synthetic construct
MRGVVHA

SEQ ID NO: 134333 - protein, 7 aa, synthetic construct
MRHGTIV

SEQ ID NO: 134334 - protein, 7 aa, synthetic construct
MRHKDMV

SEQ ID NO: 134335 - protein, 7 aa, synthetic construct
MRHKVDG

SEQ ID NO: 134336 - protein, 7 aa, synthetic construct
MRHLAGP

SEQ ID NO: 134337 - protein, 7 aa, synthetic construct
MRHNPVQ

SEQ ID NO: 134338 - protein, 7 aa, synthetic construct
MRHNQAV

SEQ ID NO: 134339 - protein, 7 aa, synthetic construct
MRHPAGN

SEQ ID NO: 134340 - protein, 7 aa, synthetic construct
MRHQTAA

SEQ ID NO: 134341 - protein, 7 aa, synthetic construct
MRHTSNA

SEQ ID NO: 134342 - protein, 7 aa, synthetic construct
MRHVKME

SEQ ID NO: 134343 - protein, 7 aa, synthetic construct
MRHYQEP

SEQ ID NO: 134344 - protein, 7 aa, synthetic construct
MRIGTHS

SEQ ID NO: 134345 - protein, 7 aa, synthetic construct
MRIPASP

SEQ ID NO: 134346 - protein, 7 aa, synthetic construct
MRIPNQA

SEQ ID NO: 134347 - protein, 7 aa, synthetic construct
MRIQVKE

SEQ ID NO: 134348 - protein, 7 aa, synthetic construct
MRIRSEP

SEQ ID NO: 134349 - protein, 7 aa, synthetic construct
MRISKDM

SEQ ID NO: 134350 - protein, 7 aa, synthetic construct
MRISSVT

SEQ ID NO: 134351 - protein, 7 aa, synthetic construct
MRKAEPM

SEQ ID NO: 134352 - protein, 7 aa, synthetic construct
MRKAPDI

SEQ ID NO: 134353 - protein, 7 aa, synthetic construct
MRKDNNY

SEQ ID NO: 134354 - protein, 7 aa, synthetic construct
MRKDPFT

SEQ ID NO: 134355 - protein, 7 aa, synthetic construct
MRKDVFM

SEQ ID NO: 134356 - protein, 7 aa, synthetic construct
MRKETYF

SEQ ID NO: 134357 - protein, 7 aa, synthetic construct
MRKGTEL

SEQ ID NO: 134358 - protein, 7 aa, synthetic construct
MRKGVQD

SEQ ID NO: 134359 - protein, 7 aa, synthetic construct
MRKNDQG

SEQ ID NO: 134360 - protein, 7 aa, synthetic construct
MRKNFTE

SEQ ID NO: 134361 - protein, 7 aa, synthetic construct
MRKQDMI

SEQ ID NO: 134362 - protein, 7 aa, synthetic construct
MRKSPVD

SEQ ID NO: 134363 - protein, 7 aa, synthetic construct
MRKTIDS

SEQ ID NO: 134364 - protein, 7 aa, synthetic construct
MRKTNAD

SEQ ID NO: 134365 - protein, 7 aa, synthetic construct
MRKVIIE

SEQ ID NO: 134366 - protein, 7 aa, synthetic construct
MRKVVDT

SEQ ID NO: 134367 - protein, 7 aa, synthetic construct
MRLKLEN

SEQ ID NO: 134368 - protein, 7 aa, synthetic construct
MRLKMDP

SEQ ID NO: 134369 - protein, 7 aa, synthetic construct
MRLKTEL

SEQ ID NO: 134370 - protein, 7 aa, synthetic construct
MRLKTVE

SEQ ID NO: 134371 - protein, 7 aa, synthetic construct
MRLKVTE

SEQ ID NO: 134372 - protein, 7 aa, synthetic construct
MRLREGN

SEQ ID NO: 134373 - protein, 7 aa, synthetic construct
MRMGSKD

SEQ ID NO: 134374 - protein, 7 aa, synthetic construct
MRMHQQT

SEQ ID NO: 134375 - protein, 7 aa, synthetic construct
MRMHTPP

SEQ ID NO: 134376 - protein, 7 aa, synthetic construct
MRMKLME

SEQ ID NO: 134377 - protein, 7 aa, synthetic construct
MRMQQTM

SEQ ID NO: 134378 - protein, 7 aa, synthetic construct
MRMSSDK

SEQ ID NO: 134379 - protein, 7 aa, synthetic construct
MRNADIR

SEQ ID NO: 134380 - protein, 7 aa, synthetic construct
MRNADVR

SEQ ID NO: 134381 - protein, 7 aa, synthetic construct
MRNAGTM

SEQ ID NO: 134382 - protein, 7 aa, synthetic construct
MRNAIPV

SEQ ID NO: 134383 - protein, 7 aa, synthetic construct
MRNDAIK

SEQ ID NO: 134384 - protein, 7 aa, synthetic construct
MRNEGKM

SEQ ID NO: 134385 - protein, 7 aa, synthetic construct
MRNEQKM

SEQ ID NO: 134386 - protein, 7 aa, synthetic construct
MRNEYKH

SEQ ID NO: 134387 - protein, 7 aa, synthetic construct
MRNGSYA

SEQ ID NO: 134388 - protein, 7 aa, synthetic construct
MRNHEEK

SEQ ID NO: 134389 - protein, 7 aa, synthetic construct
MRNIMEK

SEQ ID NO: 134390 - protein, 7 aa, synthetic construct
MRNIPNT

SEQ ID NO: 134391 - protein, 7 aa, synthetic construct
MRNIPTV

SEQ ID NO: 134392 - protein, 7 aa, synthetic construct
MRNISPI

SEQ ID NO: 134393 - protein, 7 aa, synthetic construct
MRNIVSN

SEQ ID NO: 134394 - protein, 7 aa, synthetic construct
MRNIVTN

SEQ ID NO: 134395 - protein, 7 aa, synthetic construct
MRNKAEF

SEQ ID NO: 134396 - protein, 7 aa, synthetic construct
MRNKDGM

SEQ ID NO: 134397 - protein, 7 aa, synthetic construct
MRNKMEL

SEQ ID NO: 134398 - protein, 7 aa, synthetic construct
MRNKSGE

SEQ ID NO: 134399 - protein, 7 aa, synthetic construct
MRNLVGS

SEQ ID NO: 134400 - protein, 7 aa, synthetic construct
MRNMGLS

SEQ ID NO: 134401 - protein, 7 aa, synthetic construct
MRNMMAA

SEQ ID NO: 134402 - protein, 7 aa, synthetic construct
MRNMMTP

SEQ ID NO: 134403 - protein, 7 aa, synthetic construct
MRNMQEK

SEQ ID NO: 134404 - protein, 7 aa, synthetic construct
MRNMTTL

SEQ ID NO: 134405 - protein, 7 aa, synthetic construct
MRNNHAG

SEQ ID NO: 134406 - protein, 7 aa, synthetic construct
MRNPAQN

SEQ ID NO: 134407 - protein, 7 aa, synthetic construct
MRNPMVA

SEQ ID NO: 134408 - protein, 7 aa, synthetic construct
MRNQSPA

SEQ ID NO: 134409 - protein, 7 aa, synthetic construct
MRNSNMH

SEQ ID NO: 134410 - protein, 7 aa, synthetic construct
MRNSPGF

SEQ ID NO: 134411 - protein, 7 aa, synthetic construct
MRNSQAG

SEQ ID NO: 134412 - protein, 7 aa, synthetic construct
MRNSTER

SEQ ID NO: 134413 - protein, 7 aa, synthetic construct
MRNTAAI

SEQ ID NO: 134414 - protein, 7 aa, synthetic construct
MRNTPNF

SEQ ID NO: 134415 - protein, 7 aa, synthetic construct
MRNTSFH

SEQ ID NO: 134416 - protein, 7 aa, synthetic construct
MRNVPTV

SEQ ID NO: 134417 - protein, 7 aa, synthetic construct
MRNVSGS

SEQ ID NO: 134418 - protein, 7 aa, synthetic construct
MRNVSIN

SEQ ID NO: 134419 - protein, 7 aa, synthetic construct
MRPAATH

SEQ ID NO: 134420 - protein, 7 aa, synthetic construct
MRPARDM

SEQ ID NO: 134421 - protein, 7 aa, synthetic construct
MRPDIRH

SEQ ID NO: 134422 - protein, 7 aa, synthetic construct
MRPGHST

SEQ ID NO: 134423 - protein, 7 aa, synthetic construct
MRPGSYM

SEQ ID NO: 134424 - protein, 7 aa, synthetic construct
MRPHMNQ

SEQ ID NO: 134425 - protein, 7 aa, synthetic construct
MRPHMVN

SEQ ID NO: 134426 - protein, 7 aa, synthetic construct
MRPHSGI

SEQ ID NO: 134427 - protein, 7 aa, synthetic construct
MRPHSGN

SEQ ID NO: 134428 - protein, 7 aa, synthetic construct
MRPHVST

SEQ ID NO: 134429 - protein, 7 aa, synthetic construct
MRPIGSA

SEQ ID NO: 134430 - protein, 7 aa, synthetic construct
MRPIHGQ

SEQ ID NO: 134431 - protein, 7 aa, synthetic construct
MRPINTA

SEQ ID NO: 134432 - protein, 7 aa, synthetic construct
MRPKDLL

SEQ ID NO: 134433 - protein, 7 aa, synthetic construct
MRPKDLY

SEQ ID NO: 134434 - protein, 7 aa, synthetic construct
MRPKIMD

SEQ ID NO: 134435 - protein, 7 aa, synthetic construct
MRPLGHN

SEQ ID NO: 134436 - protein, 7 aa, synthetic construct
MRPLPTP

SEQ ID NO: 134437 - protein, 7 aa, synthetic construct
MRPMAHA

SEQ ID NO: 134438 - protein, 7 aa, synthetic construct
MRPMHSN

SEQ ID NO: 134439 - protein, 7 aa, synthetic construct
MRPMSAS

SEQ ID NO: 134440 - protein, 7 aa, synthetic construct
MRPNVIT

SEQ ID NO: 134441 - protein, 7 aa, synthetic construct
MRPQISY

SEQ ID NO: 134442 - protein, 7 aa, synthetic construct
MRPRAEL

SEQ ID NO: 134443 - protein, 7 aa, synthetic construct
MRPRLDT

SEQ ID NO: 134444 - protein, 7 aa, synthetic construct
MRPSIDR

SEQ ID NO: 134445 - protein, 7 aa, synthetic construct
MRPSIHQ

SEQ ID NO: 134446 - protein, 7 aa, synthetic construct
MRPTKHD

SEQ ID NO: 134447 - protein, 7 aa, synthetic construct
MRPTTHI

SEQ ID NO: 134448 - protein, 7 aa, synthetic construct
MRPTTPM

SEQ ID NO: 134449 - protein, 7 aa, synthetic construct
MRPVASM

SEQ ID NO: 134450 - protein, 7 aa, synthetic construct
MRPVSSY

SEQ ID NO: 134451 - protein, 7 aa, synthetic construct
MRPVTHV

SEQ ID NO: 134452 - protein, 7 aa, synthetic construct
MRQAQVV

SEQ ID NO: 134453 - protein, 7 aa, synthetic construct
MRQIHGA

SEQ ID NO: 134454 - protein, 7 aa, synthetic construct
MRQISHP

SEQ ID NO: 134455 - protein, 7 aa, synthetic construct
MRQKADI

SEQ ID NO: 134456 - protein, 7 aa, synthetic construct
MRQKDSH

SEQ ID NO: 134457 - protein, 7 aa, synthetic construct
MRQKESI

SEQ ID NO: 134458 - protein, 7 aa, synthetic construct
MRQKILD

SEQ ID NO: 134459 - protein, 7 aa, synthetic construct
MRQKQPD

SEQ ID NO: 134460 - protein, 7 aa, synthetic construct
MRQKYEG

SEQ ID NO: 134461 - protein, 7 aa, synthetic construct
MRQLSKE

SEQ ID NO: 134462 - protein, 7 aa, synthetic construct
MRQMNPM

SEQ ID NO: 134463 - protein, 7 aa, synthetic construct
MRQNAIT

SEQ ID NO: 134464 - protein, 7 aa, synthetic construct
MRQNHLH

SEQ ID NO: 134465 - protein, 7 aa, synthetic construct
MRQPAAL

SEQ ID NO: 134466 - protein, 7 aa, synthetic construct
MRQPVPM

SEQ ID NO: 134467 - protein, 7 aa, synthetic construct
MRQQTDR

SEQ ID NO: 134468 - protein, 7 aa, synthetic construct
MRQRAEP

SEQ ID NO: 134469 - protein, 7 aa, synthetic construct
MRQSAGG

SEQ ID NO: 134470 - protein, 7 aa, synthetic construct
MRQTEQK

SEQ ID NO: 134471 - protein, 7 aa, synthetic construct
MRQTINV

SEQ ID NO: 134472 - protein, 7 aa, synthetic construct
MRQTIQV

SEQ ID NO: 134473 - protein, 7 aa, synthetic construct
MRQTNLV

SEQ ID NO: 134474 - protein, 7 aa, synthetic construct
MRQTNSI

SEQ ID NO: 134475 - protein, 7 aa, synthetic construct
MRQTTPL

SEQ ID NO: 134476 - protein, 7 aa, synthetic construct
MRQVGVH

SEQ ID NO: 134477 - protein, 7 aa, synthetic construct
MRQVQDK

SEQ ID NO: 134478 - protein, 7 aa, synthetic construct
MRQVVHA

SEQ ID NO: 134479 - protein, 7 aa, synthetic construct
MRQYMEE

SEQ ID NO: 134480 - protein, 7 aa, synthetic construct
MRREATV

SEQ ID NO: 134481 - protein, 7 aa, synthetic construct
MRREHIP

SEQ ID NO: 134482 - protein, 7 aa, synthetic construct
MRREQSV

SEQ ID NO: 134483 - protein, 7 aa, synthetic construct
MRRIETP

SEQ ID NO: 134484 - protein, 7 aa, synthetic construct
MRRTDTP

SEQ ID NO: 134485 - protein, 7 aa, synthetic construct
MRSADNK

SEQ ID NO: 134486 - protein, 7 aa, synthetic construct
MRSDILR

SEQ ID NO: 134487 - protein, 7 aa, synthetic construct
MRSEPSK

SEQ ID NO: 134488 - protein, 7 aa, synthetic construct
MRSERLN

SEQ ID NO: 134489 - protein, 7 aa, synthetic construct
MRSGDTR

SEQ ID NO: 134490 - protein, 7 aa, synthetic construct
MRSGERM

SEQ ID NO: 134491 - protein, 7 aa, synthetic construct
MRSGKGD

SEQ ID NO: 134492 - protein, 7 aa, synthetic construct
MRSGTVY

SEQ ID NO: 134493 - protein, 7 aa, synthetic construct
MRSGVHN

SEQ ID NO: 134494 - protein, 7 aa, synthetic construct
MRSIHTS

SEQ ID NO: 134495 - protein, 7 aa, synthetic construct
MRSIQDR

SEQ ID NO: 134496 - protein, 7 aa, synthetic construct
MRSKETF

SEQ ID NO: 134497 - protein, 7 aa, synthetic construct
MRSKSEA

SEQ ID NO: 134498 - protein, 7 aa, synthetic construct
MRSMNNI

SEQ ID NO: 134499 - protein, 7 aa, synthetic construct
MRSNVDK

SEQ ID NO: 134500 - protein, 7 aa, synthetic construct
MRSPHMV

SEQ ID NO: 134501 - protein, 7 aa, synthetic construct
MRSPMSI

SEQ ID NO: 134502 - protein, 7 aa, synthetic construct
MRSQAGA

SEQ ID NO: 134503 - protein, 7 aa, synthetic construct
MRSQDTK

SEQ ID NO: 134504 - protein, 7 aa, synthetic construct
MRSQISA

SEQ ID NO: 134505 - protein, 7 aa, synthetic construct
MRSRELS

SEQ ID NO: 134506 - protein, 7 aa, synthetic construct
MRSTHPI

SEQ ID NO: 134507 - protein, 7 aa, synthetic construct
MRSTHQP

SEQ ID NO: 134508 - protein, 7 aa, synthetic construct
MRSTHTV

SEQ ID NO: 134509 - protein, 7 aa, synthetic construct
MRSTSII

SEQ ID NO: 134510 - protein, 7 aa, synthetic construct
MRSVKDI

SEQ ID NO: 134511 - protein, 7 aa, synthetic construct
MRSVQHA

SEQ ID NO: 134512 - protein, 7 aa, synthetic construct
MRSVSIN

SEQ ID NO: 134513 - protein, 7 aa, synthetic construct
MRSVVHG

SEQ ID NO: 134514 - protein, 7 aa, synthetic construct
MRTAMER

SEQ ID NO: 134515 - protein, 7 aa, synthetic construct
MRTAQIV

SEQ ID NO: 134516 - protein, 7 aa, synthetic construct
MRTDNGK

SEQ ID NO: 134517 - protein, 7 aa, synthetic construct
MRTDNRQ

SEQ ID NO: 134518 - protein, 7 aa, synthetic construct
MRTDNVR

SEQ ID NO: 134519 - protein, 7 aa, synthetic construct
MRTEMKY

SEQ ID NO: 134520 - protein, 7 aa, synthetic construct
MRTGIER

SEQ ID NO: 134521 - protein, 7 aa, synthetic construct
MRTGPPH

SEQ ID NO: 134522 - protein, 7 aa, synthetic construct
MRTHMAA

SEQ ID NO: 134523 - protein, 7 aa, synthetic construct
MRTHSPV

SEQ ID NO: 134524 - protein, 7 aa, synthetic construct
MRTISNN

SEQ ID NO: 134525 - protein, 7 aa, synthetic construct
MRTKPDL

SEQ ID NO: 134526 - protein, 7 aa, synthetic construct
MRTKPEN

SEQ ID NO: 134527 - protein, 7 aa, synthetic construct
MRTMLDK

SEQ ID NO: 134528 - protein, 7 aa, synthetic construct
MRTMNDK

SEQ ID NO: 134529 - protein, 7 aa, synthetic construct
MRTMVDK

SEQ ID NO: 134530 - protein, 7 aa, synthetic construct
MRTNDQK

SEQ ID NO: 134531 - protein, 7 aa, synthetic construct
MRTNESK

SEQ ID NO: 134532 - protein, 7 aa, synthetic construct
MRTNPAY

SEQ ID NO: 134533 - protein, 7 aa, synthetic construct
MRTNSTA

SEQ ID NO: 134534 - protein, 7 aa, synthetic construct
MRTPAMI

SEQ ID NO: 134535 - protein, 7 aa, synthetic construct
MRTPAPH

SEQ ID NO: 134536 - protein, 7 aa, synthetic construct
MRTPGTF

SEQ ID NO: 134537 - protein, 7 aa, synthetic construct
MRTQKDH

SEQ ID NO: 134538 - protein, 7 aa, synthetic construct
MRTQNNL

SEQ ID NO: 134539 - protein, 7 aa, synthetic construct
MRTQQAF

SEQ ID NO: 134540 - protein, 7 aa, synthetic construct
MRTQTSF

SEQ ID NO: 134541 - protein, 7 aa, synthetic construct
MRTTAAM

SEQ ID NO: 134542 - protein, 7 aa, synthetic construct
MRTTDGK

SEQ ID NO: 134543 - protein, 7 aa, synthetic construct
MRTTHVN

SEQ ID NO: 134544 - protein, 7 aa, synthetic construct
MRTVAKD

SEQ ID NO: 134545 - protein, 7 aa, synthetic construct
MRTVKYE

SEQ ID NO: 134546 - protein, 7 aa, synthetic construct
MRVALDK

SEQ ID NO: 134547 - protein, 7 aa, synthetic construct
MRVATPV

SEQ ID NO: 134548 - protein, 7 aa, synthetic construct
MRVHAVA

SEQ ID NO: 134549 - protein, 7 aa, synthetic construct
MRVHGGP

SEQ ID NO: 134550 - protein, 7 aa, synthetic construct
MRVISDK

SEQ ID NO: 134551 - protein, 7 aa, synthetic construct
MRVKDYG

SEQ ID NO: 134552 - protein, 7 aa, synthetic construct
MRVKGND

SEQ ID NO: 134553 - protein, 7 aa, synthetic construct
MRVKLEQ

SEQ ID NO: 134554 - protein, 7 aa, synthetic construct
MRVKNDL

SEQ ID NO: 134555 - protein, 7 aa, synthetic construct
MRVMRNE

SEQ ID NO: 134556 - protein, 7 aa, synthetic construct
MRVNRTD

SEQ ID NO: 134557 - protein, 7 aa, synthetic construct
MRVPKTD

SEQ ID NO: 134558 - protein, 7 aa, synthetic construct
MRVPTNL

SEQ ID NO: 134559 - protein, 7 aa, synthetic construct
MRVPVTP

SEQ ID NO: 134560 - protein, 7 aa, synthetic construct
MRVRDTI

SEQ ID NO: 134561 - protein, 7 aa, synthetic construct
MRVRVGE

SEQ ID NO: 134562 - protein, 7 aa, synthetic construct
MRVSALN

SEQ ID NO: 134563 - protein, 7 aa, synthetic construct
MRVTASV

SEQ ID NO: 134564 - protein, 7 aa, synthetic construct
MRVTMSQ

SEQ ID NO: 134565 - protein, 7 aa, synthetic construct
MRYMSND

SEQ ID NO: 134566 - protein, 7 aa, synthetic construct
MSAGHKM

SEQ ID NO: 134567 - protein, 7 aa, synthetic construct
MSAIHGK

SEQ ID NO: 134568 - protein, 7 aa, synthetic construct
MSAKPNF

SEQ ID NO: 134569 - protein, 7 aa, synthetic construct
MSAKTYL

SEQ ID NO: 134570 - protein, 7 aa, synthetic construct
MSANHKF

SEQ ID NO: 134571 - protein, 7 aa, synthetic construct
MSAQRHM

SEQ ID NO: 134572 - protein, 7 aa, synthetic construct
MSASMHR

SEQ ID NO: 134573 - protein, 7 aa, synthetic construct
MSDHGLI

SEQ ID NO: 134574 - protein, 7 aa, synthetic construct
MSDTPKR

SEQ ID NO: 134575 - protein, 7 aa, synthetic construct
MSEKNGR

SEQ ID NO: 134576 - protein, 7 aa, synthetic construct
MSEMGRK

SEQ ID NO: 134577 - protein, 7 aa, synthetic construct
MSERVRN

SEQ ID NO: 134578 - protein, 7 aa, synthetic construct
MSESMKV

SEQ ID NO: 134579 - protein, 7 aa, synthetic construct
MSFREPH

SEQ ID NO: 134580 - protein, 7 aa, synthetic construct
MSFSPQN

SEQ ID NO: 134581 - protein, 7 aa, synthetic construct
MSGFAKQ

SEQ ID NO: 134582 - protein, 7 aa, synthetic construct
MSGFTKV

SEQ ID NO: 134583 - protein, 7 aa, synthetic construct
MSGGHRT

SEQ ID NO: 134584 - protein, 7 aa, synthetic construct
MSGHASR

SEQ ID NO: 134585 - protein, 7 aa, synthetic construct
MSGIPPR

SEQ ID NO: 134586 - protein, 7 aa, synthetic construct
MSGKEWQ

SEQ ID NO: 134587 - protein, 7 aa, synthetic construct
MSGKFMN

SEQ ID NO: 134588 - protein, 7 aa, synthetic construct
MSGKHGF

SEQ ID NO: 134589 - protein, 7 aa, synthetic construct
MSGMTFK

SEQ ID NO: 134590 - protein, 7 aa, synthetic construct
MSGNIRG

SEQ ID NO: 134591 - protein, 7 aa, synthetic construct
MSGPRIV

SEQ ID NO: 134592 - protein, 7 aa, synthetic construct
MSGPRTQ

SEQ ID NO: 134593 - protein, 7 aa, synthetic construct
MSGQPRQ

SEQ ID NO: 134594 - protein, 7 aa, synthetic construct
MSGRLER

SEQ ID NO: 134595 - protein, 7 aa, synthetic construct
MSGTHRQ

SEQ ID NO: 134596 - protein, 7 aa, synthetic construct
MSGTSAR

SEQ ID NO: 134597 - protein, 7 aa, synthetic construct
MSGVNVR

SEQ ID NO: 134598 - protein, 7 aa, synthetic construct
MSGYKSS

SEQ ID NO: 134599 - protein, 7 aa, synthetic construct
MSGYNTK

SEQ ID NO: 134600 - protein, 7 aa, synthetic construct
MSGYQPK

SEQ ID NO: 134601 - protein, 7 aa, synthetic construct
MSHAIPR

SEQ ID NO: 134602 - protein, 7 aa, synthetic construct
MSHEKVR

SEQ ID NO: 134603 - protein, 7 aa, synthetic construct
MSHGALK

SEQ ID NO: 134604 - protein, 7 aa, synthetic construct
MSHGPKV

SEQ ID NO: 134605 - protein, 7 aa, synthetic construct
MSHHIAK

SEQ ID NO: 134606 - protein, 7 aa, synthetic construct
MSHKQTQ

SEQ ID NO: 134607 - protein, 7 aa, synthetic construct
MSHKREG

SEQ ID NO: 134608 - protein, 7 aa, synthetic construct
MSHMNIK

SEQ ID NO: 134609 - protein, 7 aa, synthetic construct
MSHNQRN

SEQ ID NO: 134610 - protein, 7 aa, synthetic construct
MSHNTKG

SEQ ID NO: 134611 - protein, 7 aa, synthetic construct
MSHPMRA

SEQ ID NO: 134612 - protein, 7 aa, synthetic construct
MSHPRTM

SEQ ID NO: 134613 - protein, 7 aa, synthetic construct
MSHQFKG

SEQ ID NO: 134614 - protein, 7 aa, synthetic construct
MSHRPSA

SEQ ID NO: 134615 - protein, 7 aa, synthetic construct
MSHSGFK

SEQ ID NO: 134616 - protein, 7 aa, synthetic construct
MSHSSKM

SEQ ID NO: 134617 - protein, 7 aa, synthetic construct
MSHTFKA

SEQ ID NO: 134618 - protein, 7 aa, synthetic construct
MSHVKVM

SEQ ID NO: 134619 - protein, 7 aa, synthetic construct
MSIGHGK

SEQ ID NO: 134620 - protein, 7 aa, synthetic construct
MSIHGKI

SEQ ID NO: 134621 - protein, 7 aa, synthetic construct
MSIQSSR

SEQ ID NO: 134622 - protein, 7 aa, synthetic construct
MSKAEYR

SEQ ID NO: 134623 - protein, 7 aa, synthetic construct
MSKDTGK

SEQ ID NO: 134624 - protein, 7 aa, synthetic construct
MSKFDRP

SEQ ID NO: 134625 - protein, 7 aa, synthetic construct
MSKGNPF

SEQ ID NO: 134626 - protein, 7 aa, synthetic construct
MSKGPTN

SEQ ID NO: 134627 - protein, 7 aa, synthetic construct
MSKHLQM

SEQ ID NO: 134628 - protein, 7 aa, synthetic construct
MSKHPMQ

SEQ ID NO: 134629 - protein, 7 aa, synthetic construct
MSKHTYA

SEQ ID NO: 134630 - protein, 7 aa, synthetic construct
MSKKDQF

SEQ ID NO: 134631 - protein, 7 aa, synthetic construct
MSKMYAP

SEQ ID NO: 134632 - protein, 7 aa, synthetic construct
MSKNPHV

SEQ ID NO: 134633 - protein, 7 aa, synthetic construct
MSKPHRD

SEQ ID NO: 134634 - protein, 7 aa, synthetic construct
MSKQHYG

SEQ ID NO: 134635 - protein, 7 aa, synthetic construct
MSKQRTD

SEQ ID NO: 134636 - protein, 7 aa, synthetic construct
MSKQSDR

SEQ ID NO: 134637 - protein, 7 aa, synthetic construct
MSKQYLG

SEQ ID NO: 134638 - protein, 7 aa, synthetic construct
MSKTTER

SEQ ID NO: 134639 - protein, 7 aa, synthetic construct
MSKVPHH

SEQ ID NO: 134640 - protein, 7 aa, synthetic construct
MSKYIQA

SEQ ID NO: 134641 - protein, 7 aa, synthetic construct
MSKYTVS

SEQ ID NO: 134642 - protein, 7 aa, synthetic construct
MSLKHQT

SEQ ID NO: 134643 - protein, 7 aa, synthetic construct
MSLRSPP

SEQ ID NO: 134644 - protein, 7 aa, synthetic construct
MSMAAYK

SEQ ID NO: 134645 - protein, 7 aa, synthetic construct
MSMGRLA

SEQ ID NO: 134646 - protein, 7 aa, synthetic construct
MSMLKRE

SEQ ID NO: 134647 - protein, 7 aa, synthetic construct
MSMNQRV

SEQ ID NO: 134648 - protein, 7 aa, synthetic construct
MSNFVKG

SEQ ID NO: 134649 - protein, 7 aa, synthetic construct
MSNHVHK

SEQ ID NO: 134650 - protein, 7 aa, synthetic construct
MSNKYSM

SEQ ID NO: 134651 - protein, 7 aa, synthetic construct
MSNNQQR

SEQ ID NO: 134652 - protein, 7 aa, synthetic construct
MSNQGYK

SEQ ID NO: 134653 - protein, 7 aa, synthetic construct
MSNVKHT

SEQ ID NO: 134654 - protein, 7 aa, synthetic construct
MSNVTRF

SEQ ID NO: 134655 - protein, 7 aa, synthetic construct
MSNVVIK

SEQ ID NO: 134656 - protein, 7 aa, synthetic construct
MSPNNSR

SEQ ID NO: 134657 - protein, 7 aa, synthetic construct
MSPQMTR

SEQ ID NO: 134658 - protein, 7 aa, synthetic construct
MSQDMRK

SEQ ID NO: 134659 - protein, 7 aa, synthetic construct
MSQGAKY

SEQ ID NO: 134660 - protein, 7 aa, synthetic construct
MSQGHSK

SEQ ID NO: 134661 - protein, 7 aa, synthetic construct
MSQIRTT

SEQ ID NO: 134662 - protein, 7 aa, synthetic construct
MSQKERQ

SEQ ID NO: 134663 - protein, 7 aa, synthetic construct
MSQKSEK

SEQ ID NO: 134664 - protein, 7 aa, synthetic construct
MSQKVYL

SEQ ID NO: 134665 - protein, 7 aa, synthetic construct
MSQNAKY

SEQ ID NO: 134666 - protein, 7 aa, synthetic construct
MSQQHAK

SEQ ID NO: 134667 - protein, 7 aa, synthetic construct
MSQQMAR

SEQ ID NO: 134668 - protein, 7 aa, synthetic construct
MSQQRHM

SEQ ID NO: 134669 - protein, 7 aa, synthetic construct
MSQQRQL

SEQ ID NO: 134670 - protein, 7 aa, synthetic construct
MSQRMQM

SEQ ID NO: 134671 - protein, 7 aa, synthetic construct
MSQRPLQ

SEQ ID NO: 134672 - protein, 7 aa, synthetic construct
MSRAVDK

SEQ ID NO: 134673 - protein, 7 aa, synthetic construct
MSRAVPI

SEQ ID NO: 134674 - protein, 7 aa, synthetic construct
MSRDKLN

SEQ ID NO: 134675 - protein, 7 aa, synthetic construct
MSRDKST

SEQ ID NO: 134676 - protein, 7 aa, synthetic construct
MSRDQKN

SEQ ID NO: 134677 - protein, 7 aa, synthetic construct
MSRGDRI

SEQ ID NO: 134678 - protein, 7 aa, synthetic construct
MSRGIPI

SEQ ID NO: 134679 - protein, 7 aa, synthetic construct
MSRGLNL

SEQ ID NO: 134680 - protein, 7 aa, synthetic construct
MSRGQPL

SEQ ID NO: 134681 - protein, 7 aa, synthetic construct
MSRIAGM

SEQ ID NO: 134682 - protein, 7 aa, synthetic construct
MSRLKVD

SEQ ID NO: 134683 - protein, 7 aa, synthetic construct
MSRLTHS

SEQ ID NO: 134684 - protein, 7 aa, synthetic construct
MSRMAKD

SEQ ID NO: 134685 - protein, 7 aa, synthetic construct
MSRMIPQ

SEQ ID NO: 134686 - protein, 7 aa, synthetic construct
MSRNISG

SEQ ID NO: 134687 - protein, 7 aa, synthetic construct
MSRNTIS

SEQ ID NO: 134688 - protein, 7 aa, synthetic construct
MSRPLVQ

SEQ ID NO: 134689 - protein, 7 aa, synthetic construct
MSRQQDK

SEQ ID NO: 134690 - protein, 7 aa, synthetic construct
MSRQVPQ

SEQ ID NO: 134691 - protein, 7 aa, synthetic construct
MSRSIHV

SEQ ID NO: 134692 - protein, 7 aa, synthetic construct
MSRSNFS

SEQ ID NO: 134693 - protein, 7 aa, synthetic construct
MSRTKVD

SEQ ID NO: 134694 - protein, 7 aa, synthetic construct
MSRVGHQ

SEQ ID NO: 134695 - protein, 7 aa, synthetic construct
MSRVPVQ

SEQ ID NO: 134696 - protein, 7 aa, synthetic construct
MSSAPLR

SEQ ID NO: 134697 - protein, 7 aa, synthetic construct
MSSGARA

SEQ ID NO: 134698 - protein, 7 aa, synthetic construct
MSSIASR

SEQ ID NO: 134699 - protein, 7 aa, synthetic construct
MSSRPSN

SEQ ID NO: 134700 - protein, 7 aa, synthetic construct
MSSSQGR

SEQ ID NO: 134701 - protein, 7 aa, synthetic construct
MSSYQKN

SEQ ID NO: 134702 - protein, 7 aa, synthetic construct
MSTGGFR

SEQ ID NO: 134703 - protein, 7 aa, synthetic construct
MSTHKDR

SEQ ID NO: 134704 - protein, 7 aa, synthetic construct
MSTKHYA

SEQ ID NO: 134705 - protein, 7 aa, synthetic construct
MSTQGFR

SEQ ID NO: 134706 - protein, 7 aa, synthetic construct
MSTQKYL

SEQ ID NO: 134707 - protein, 7 aa, synthetic construct
MSTRHGM

SEQ ID NO: 134708 - protein, 7 aa, synthetic construct
MSTRPSY

SEQ ID NO: 134709 - protein, 7 aa, synthetic construct
MSTTYKL

SEQ ID NO: 134710 - protein, 7 aa, synthetic construct
MSTYSKV

SEQ ID NO: 134711 - protein, 7 aa, synthetic construct
MSVGRHI

SEQ ID NO: 134712 - protein, 7 aa, synthetic construct
MSVRPTI

SEQ ID NO: 134713 - protein, 7 aa, synthetic construct
MSVVQTS

SEQ ID NO: 134714 - protein, 7 aa, synthetic construct
MSYASKV

SEQ ID NO: 134715 - protein, 7 aa, synthetic construct
MTAHKIS

SEQ ID NO: 134716 - protein, 7 aa, synthetic construct
MTAHMGR

SEQ ID NO: 134717 - protein, 7 aa, synthetic construct
MTAHSKQ

SEQ ID NO: 134718 - protein, 7 aa, synthetic construct
MTAHVAR

SEQ ID NO: 134719 - protein, 7 aa, synthetic construct
MTAKDRY

SEQ ID NO: 134720 - protein, 7 aa, synthetic construct
MTAKLGF

SEQ ID NO: 134721 - protein, 7 aa, synthetic construct
MTAMAGR

SEQ ID NO: 134722 - protein, 7 aa, synthetic construct
MTARKDM

SEQ ID NO: 134723 - protein, 7 aa, synthetic construct
MTAYGAM

SEQ ID NO: 134724 - protein, 7 aa, synthetic construct
MTDKQMR

SEQ ID NO: 134725 - protein, 7 aa, synthetic construct
MTDRGRV

SEQ ID NO: 134726 - protein, 7 aa, synthetic construct
MTDRPQK

SEQ ID NO: 134727 - protein, 7 aa, synthetic construct
MTENMRK

SEQ ID NO: 134728 - protein, 7 aa, synthetic construct
MTERQSR

SEQ ID NO: 134729 - protein, 7 aa, synthetic construct
MTGADKK

SEQ ID NO: 134730 - protein, 7 aa, synthetic construct
MTGAPRQ

SEQ ID NO: 134731 - protein, 7 aa, synthetic construct
MTGATHK

SEQ ID NO: 134732 - protein, 7 aa, synthetic construct
MTGAYSK

SEQ ID NO: 134733 - protein, 7 aa, synthetic construct
MTGFKSN

SEQ ID NO: 134734 - protein, 7 aa, synthetic construct
MTGGFPR

SEQ ID NO: 134735 - protein, 7 aa, synthetic construct
MTGGPFK

SEQ ID NO: 134736 - protein, 7 aa, synthetic construct
MTGHARN

SEQ ID NO: 134737 - protein, 7 aa, synthetic construct
MTGKPSF

SEQ ID NO: 134738 - protein, 7 aa, synthetic construct
MTGLGNR

SEQ ID NO: 134739 - protein, 7 aa, synthetic construct
MTGNRII

SEQ ID NO: 134740 - protein, 7 aa, synthetic construct
MTGPTIK

SEQ ID NO: 134741 - protein, 7 aa, synthetic construct
MTGQPKN

SEQ ID NO: 134742 - protein, 7 aa, synthetic construct
MTGRENK

SEQ ID NO: 134743 - protein, 7 aa, synthetic construct
MTGRGGY

SEQ ID NO: 134744 - protein, 7 aa, synthetic construct
MTGSPSR

SEQ ID NO: 134745 - protein, 7 aa, synthetic construct
MTGSRSW

SEQ ID NO: 134746 - protein, 7 aa, synthetic construct
MTHAQQK

SEQ ID NO: 134747 - protein, 7 aa, synthetic construct
MTHASKL

SEQ ID NO: 134748 - protein, 7 aa, synthetic construct
MTHGKLQ

SEQ ID NO: 134749 - protein, 7 aa, synthetic construct
MTHGTQK

SEQ ID NO: 134750 - protein, 7 aa, synthetic construct
MTHIQQK

SEQ ID NO: 134751 - protein, 7 aa, synthetic construct
MTHKHLN

SEQ ID NO: 134752 - protein, 7 aa, synthetic construct
MTHMQVK

SEQ ID NO: 134753 - protein, 7 aa, synthetic construct
MTHNPRP

SEQ ID NO: 134754 - protein, 7 aa, synthetic construct
MTHPKFG

SEQ ID NO: 134755 - protein, 7 aa, synthetic construct
MTHQMQR

SEQ ID NO: 134756 - protein, 7 aa, synthetic construct
MTHQQAK

SEQ ID NO: 134757 - protein, 7 aa, synthetic construct
MTHRLPS

SEQ ID NO: 134758 - protein, 7 aa, synthetic construct
MTHRTST

SEQ ID NO: 134759 - protein, 7 aa, synthetic construct
MTHSTQR

SEQ ID NO: 134760 - protein, 7 aa, synthetic construct
MTHTFKA

SEQ ID NO: 134761 - protein, 7 aa, synthetic construct
MTHTQAK

SEQ ID NO: 134762 - protein, 7 aa, synthetic construct
MTIAKMS

SEQ ID NO: 134763 - protein, 7 aa, synthetic construct
MTIERRS

SEQ ID NO: 134764 - protein, 7 aa, synthetic construct
MTIHGSK

SEQ ID NO: 134765 - protein, 7 aa, synthetic construct
MTIKRQD

SEQ ID NO: 134766 - protein, 7 aa, synthetic construct
MTKDMMR

SEQ ID NO: 134767 - protein, 7 aa, synthetic construct
MTKFDNR

SEQ ID NO: 134768 - protein, 7 aa, synthetic construct
MTKGIYT

SEQ ID NO: 134769 - protein, 7 aa, synthetic construct
MTKGPSN

SEQ ID NO: 134770 - protein, 7 aa, synthetic construct
MTKGPYN

SEQ ID NO: 134771 - protein, 7 aa, synthetic construct
MTKHPHN

SEQ ID NO: 134772 - protein, 7 aa, synthetic construct
MTKHVQF

SEQ ID NO: 134773 - protein, 7 aa, synthetic construct
MTKLRYD

SEQ ID NO: 134774 - protein, 7 aa, synthetic construct
MTKMPHP

SEQ ID NO: 134775 - protein, 7 aa, synthetic construct
MTKPGFM

SEQ ID NO: 134776 - protein, 7 aa, synthetic construct
MTKRIEQ

SEQ ID NO: 134777 - protein, 7 aa, synthetic construct
MTKSTNG

SEQ ID NO: 134778 - protein, 7 aa, synthetic construct
MTKYQAQ

SEQ ID NO: 134779 - protein, 7 aa, synthetic construct
MTLRKLE

SEQ ID NO: 134780 - protein, 7 aa, synthetic construct
MTMAKHA

SEQ ID NO: 134781 - protein, 7 aa, synthetic construct
MTMHAGK

SEQ ID NO: 134782 - protein, 7 aa, synthetic construct
MTMHSKQ

SEQ ID NO: 134783 - protein, 7 aa, synthetic construct
MTMRESR

SEQ ID NO: 134784 - protein, 7 aa, synthetic construct
MTMRVQA

SEQ ID NO: 134785 - protein, 7 aa, synthetic construct
MTNAVRG

SEQ ID NO: 134786 - protein, 7 aa, synthetic construct
MTNKTGW

SEQ ID NO: 134787 - protein, 7 aa, synthetic construct
MTNLKYG

SEQ ID NO: 134788 - protein, 7 aa, synthetic construct
MTNPRTM

SEQ ID NO: 134789 - protein, 7 aa, synthetic construct
MTNQSQR

SEQ ID NO: 134790 - protein, 7 aa, synthetic construct
MTNRADK

SEQ ID NO: 134791 - protein, 7 aa, synthetic construct
MTNREKQ

SEQ ID NO: 134792 - protein, 7 aa, synthetic construct
MTNTVTK

SEQ ID NO: 134793 - protein, 7 aa, synthetic construct
MTPDQRK

SEQ ID NO: 134794 - protein, 7 aa, synthetic construct
MTPIRTT

SEQ ID NO: 134795 - protein, 7 aa, synthetic construct
MTPNHRN

SEQ ID NO: 134796 - protein, 7 aa, synthetic construct
MTPQHGK

SEQ ID NO: 134797 - protein, 7 aa, synthetic construct
MTPRAFQ

SEQ ID NO: 134798 - protein, 7 aa, synthetic construct
MTPRGHN

SEQ ID NO: 134799 - protein, 7 aa, synthetic construct
MTPSKHF

SEQ ID NO: 134800 - protein, 7 aa, synthetic construct
MTPVKFA

SEQ ID NO: 134801 - protein, 7 aa, synthetic construct
MTPYPKG

SEQ ID NO: 134802 - protein, 7 aa, synthetic construct
MTQAHQR

SEQ ID NO: 134803 - protein, 7 aa, synthetic construct
MTQGSGK

SEQ ID NO: 134804 - protein, 7 aa, synthetic construct
MTQHITK

SEQ ID NO: 134805 - protein, 7 aa, synthetic construct
MTQKKFD

SEQ ID NO: 134806 - protein, 7 aa, synthetic construct
MTQKMAF

SEQ ID NO: 134807 - protein, 7 aa, synthetic construct
MTQKYDK

SEQ ID NO: 134808 - protein, 7 aa, synthetic construct
MTQMQRQ

SEQ ID NO: 134809 - protein, 7 aa, synthetic construct
MTQPKFQ

SEQ ID NO: 134810 - protein, 7 aa, synthetic construct
MTQSMYK

SEQ ID NO: 134811 - protein, 7 aa, synthetic construct
MTRAVIP

SEQ ID NO: 134812 - protein, 7 aa, synthetic construct
MTRDLVK

SEQ ID NO: 134813 - protein, 7 aa, synthetic construct
MTRDMFK

SEQ ID NO: 134814 - protein, 7 aa, synthetic construct
MTREGKQ

SEQ ID NO: 134815 - protein, 7 aa, synthetic construct
MTREPQR

SEQ ID NO: 134816 - protein, 7 aa, synthetic construct
MTRERTN

SEQ ID NO: 134817 - protein, 7 aa, synthetic construct
MTRGGSV

SEQ ID NO: 134818 - protein, 7 aa, synthetic construct
MTRGLPI

SEQ ID NO: 134819 - protein, 7 aa, synthetic construct
MTRGMMS

SEQ ID NO: 134820 - protein, 7 aa, synthetic construct
MTRGSQV

SEQ ID NO: 134821 - protein, 7 aa, synthetic construct
MTRHMQP

SEQ ID NO: 134822 - protein, 7 aa, synthetic construct
MTRISTS

SEQ ID NO: 134823 - protein, 7 aa, synthetic construct
MTRKDMI

SEQ ID NO: 134824 - protein, 7 aa, synthetic construct
MTRMAKD

SEQ ID NO: 134825 - protein, 7 aa, synthetic construct
MTRMMKD

SEQ ID NO: 134826 - protein, 7 aa, synthetic construct
MTRNAVT

SEQ ID NO: 134827 - protein, 7 aa, synthetic construct
MTRNHQP

SEQ ID NO: 134828 - protein, 7 aa, synthetic construct
MTRNPAS

SEQ ID NO: 134829 - protein, 7 aa, synthetic construct
MTRNPNY

SEQ ID NO: 134830 - protein, 7 aa, synthetic construct
MTRNSQQ

SEQ ID NO: 134831 - protein, 7 aa, synthetic construct
MTRPANF

SEQ ID NO: 134832 - protein, 7 aa, synthetic construct
MTRPHMV

SEQ ID NO: 134833 - protein, 7 aa, synthetic construct
MTRQKDG

SEQ ID NO: 134834 - protein, 7 aa, synthetic construct
MTRQLER

SEQ ID NO: 134835 - protein, 7 aa, synthetic construct
MTRQLPV

SEQ ID NO: 134836 - protein, 7 aa, synthetic construct
MTRQSTV

SEQ ID NO: 134837 - protein, 7 aa, synthetic construct
MTRSMKE

SEQ ID NO: 134838 - protein, 7 aa, synthetic construct
MTRSMSN

SEQ ID NO: 134839 - protein, 7 aa, synthetic construct
MTRSSAM

SEQ ID NO: 134840 - protein, 7 aa, synthetic construct
MTRTQKE

SEQ ID NO: 134841 - protein, 7 aa, synthetic construct
MTRVKDS

SEQ ID NO: 134842 - protein, 7 aa, synthetic construct
MTSAHSR

SEQ ID NO: 134843 - protein, 7 aa, synthetic construct
MTSAHTR

SEQ ID NO: 134844 - protein, 7 aa, synthetic construct
MTSGIRQ

SEQ ID NO: 134845 - protein, 7 aa, synthetic construct
MTSHQSR

SEQ ID NO: 134846 - protein, 7 aa, synthetic construct
MTSKSGW

SEQ ID NO: 134847 - protein, 7 aa, synthetic construct
MTSLKRD

SEQ ID NO: 134848 - protein, 7 aa, synthetic construct
MTSRANM

SEQ ID NO: 134849 - protein, 7 aa, synthetic construct
MTSRGLI

SEQ ID NO: 134850 - protein, 7 aa, synthetic construct
MTSRPKD

SEQ ID NO: 134851 - protein, 7 aa, synthetic construct
MTSYVKG

SEQ ID NO: 134852 - protein, 7 aa, synthetic construct
MTTAHGK

SEQ ID NO: 134853 - protein, 7 aa, synthetic construct
MTTARHS

SEQ ID NO: 134854 - protein, 7 aa, synthetic construct
MTTGDKR

SEQ ID NO: 134855 - protein, 7 aa, synthetic construct
MTTHAKQ

SEQ ID NO: 134856 - protein, 7 aa, synthetic construct
MTTPREK

SEQ ID NO: 134857 - protein, 7 aa, synthetic construct
MTTQRHP

SEQ ID NO: 134858 - protein, 7 aa, synthetic construct
MTTRHLG

SEQ ID NO: 134859 - protein, 7 aa, synthetic construct
MTTRRAE

SEQ ID NO: 134860 - protein, 7 aa, synthetic construct
MTTRSHG

SEQ ID NO: 134861 - protein, 7 aa, synthetic construct
MTTSARG

SEQ ID NO: 134862 - protein, 7 aa, synthetic construct
MTTTQHR

SEQ ID NO: 134863 - protein, 7 aa, synthetic construct
MTTTRNH

SEQ ID NO: 134864 - protein, 7 aa, synthetic construct
MTVRERV

SEQ ID NO: 134865 - protein, 7 aa, synthetic construct
MTVRMRE

SEQ ID NO: 134866 - protein, 7 aa, synthetic construct
MTVRRAE

SEQ ID NO: 134867 - protein, 7 aa, synthetic construct
MTYGAGK

SEQ ID NO: 134868 - protein, 7 aa, synthetic construct
MTYGTKQ

SEQ ID NO: 134869 - protein, 7 aa, synthetic construct
MTYRQNG

SEQ ID NO: 134870 - protein, 7 aa, synthetic construct
MVARERQ

SEQ ID NO: 134871 - protein, 7 aa, synthetic construct
MVARSKE

SEQ ID NO: 134872 - protein, 7 aa, synthetic construct
MVARSSQ

SEQ ID NO: 134873 - protein, 7 aa, synthetic construct
MVDKKHV

SEQ ID NO: 134874 - protein, 7 aa, synthetic construct
MVDRIKS

SEQ ID NO: 134875 - protein, 7 aa, synthetic construct
MVDTGRR

SEQ ID NO: 134876 - protein, 7 aa, synthetic construct
MVESRRV

SEQ ID NO: 134877 - protein, 7 aa, synthetic construct
MVGERQK

SEQ ID NO: 134878 - protein, 7 aa, synthetic construct
MVGFQKA

SEQ ID NO: 134879 - protein, 7 aa, synthetic construct
MVGGMQR

SEQ ID NO: 134880 - protein, 7 aa, synthetic construct
MVGHFKG

SEQ ID NO: 134881 - protein, 7 aa, synthetic construct
MVGHKGT

SEQ ID NO: 134882 - protein, 7 aa, synthetic construct
MVGKPFQ

SEQ ID NO: 134883 - protein, 7 aa, synthetic construct
MVGKQPY

SEQ ID NO: 134884 - protein, 7 aa, synthetic construct
MVGNPQR

SEQ ID NO: 134885 - protein, 7 aa, synthetic construct
MVGQKYL

SEQ ID NO: 134886 - protein, 7 aa, synthetic construct
MVGRQGF

SEQ ID NO: 134887 - protein, 7 aa, synthetic construct
MVGRQPM

SEQ ID NO: 134888 - protein, 7 aa, synthetic construct
MVGRVTT

SEQ ID NO: 134889 - protein, 7 aa, synthetic construct
MVGTRMN

SEQ ID NO: 134890 - protein, 7 aa, synthetic construct
MVGTYKQ

SEQ ID NO: 134891 - protein, 7 aa, synthetic construct
MVHAKTT

SEQ ID NO: 134892 - protein, 7 aa, synthetic construct
MVHKDRM

SEQ ID NO: 134893 - protein, 7 aa, synthetic construct
MVHKDTR

SEQ ID NO: 134894 - protein, 7 aa, synthetic construct
MVHKFNG

SEQ ID NO: 134895 - protein, 7 aa, synthetic construct
MVHKPNN

SEQ ID NO: 134896 - protein, 7 aa, synthetic construct
MVHKPQH

SEQ ID NO: 134897 - protein, 7 aa, synthetic construct
MVHKRME

SEQ ID NO: 134898 - protein, 7 aa, synthetic construct
MVHKSVI

SEQ ID NO: 134899 - protein, 7 aa, synthetic construct
MVHNNRN

SEQ ID NO: 134900 - protein, 7 aa, synthetic construct
MVHSIAK

SEQ ID NO: 134901 - protein, 7 aa, synthetic construct
MVHTHNK

SEQ ID NO: 134902 - protein, 7 aa, synthetic construct
MVHVANK

SEQ ID NO: 134903 - protein, 7 aa, synthetic construct
MVINRQA

SEQ ID NO: 134904 - protein, 7 aa, synthetic construct
MVIQKQG

SEQ ID NO: 134905 - protein, 7 aa, synthetic construct
MVKAHIT

SEQ ID NO: 134906 - protein, 7 aa, synthetic construct
MVKDYHK

SEQ ID NO: 134907 - protein, 7 aa, synthetic construct
MVKEYSR

SEQ ID NO: 134908 - protein, 7 aa, synthetic construct
MVKHRNE

SEQ ID NO: 134909 - protein, 7 aa, synthetic construct
MVKNRDF

SEQ ID NO: 134910 - protein, 7 aa, synthetic construct
MVKPKMD

SEQ ID NO: 134911 - protein, 7 aa, synthetic construct
MVKPPRD

SEQ ID NO: 134912 - protein, 7 aa, synthetic construct
MVKQHHS

SEQ ID NO: 134913 - protein, 7 aa, synthetic construct
MVKREYA

SEQ ID NO: 134914 - protein, 7 aa, synthetic construct
MVKRGVE

SEQ ID NO: 134915 - protein, 7 aa, synthetic construct
MVKRLSD

SEQ ID NO: 134916 - protein, 7 aa, synthetic construct
MVKRMSE

SEQ ID NO: 134917 - protein, 7 aa, synthetic construct
MVKSKYD

SEQ ID NO: 134918 - protein, 7 aa, synthetic construct
MVNMADR

SEQ ID NO: 134919 - protein, 7 aa, synthetic construct
MVNRERG

SEQ ID NO: 134920 - protein, 7 aa, synthetic construct
MVPDANR

SEQ ID NO: 134921 - protein, 7 aa, synthetic construct
MVPKMHQ

SEQ ID NO: 134922 - protein, 7 aa, synthetic construct
MVPQERK

SEQ ID NO: 134923 - protein, 7 aa, synthetic construct
MVPRAIS

SEQ ID NO: 134924 - protein, 7 aa, synthetic construct
MVPRAQQ

SEQ ID NO: 134925 - protein, 7 aa, synthetic construct
MVPSRDR

SEQ ID NO: 134926 - protein, 7 aa, synthetic construct
MVPTRSM

SEQ ID NO: 134927 - protein, 7 aa, synthetic construct
MVPYAKG

SEQ ID NO: 134928 - protein, 7 aa, synthetic construct
MVQGGQR

SEQ ID NO: 134929 - protein, 7 aa, synthetic construct
MVQGHRQ

SEQ ID NO: 134930 - protein, 7 aa, synthetic construct
MVQLHKA

SEQ ID NO: 134931 - protein, 7 aa, synthetic construct
MVQNARM

SEQ ID NO: 134932 - protein, 7 aa, synthetic construct
MVQPRER

SEQ ID NO: 134933 - protein, 7 aa, synthetic construct
MVQRGQI

SEQ ID NO: 134934 - protein, 7 aa, synthetic construct
MVRAIQA

SEQ ID NO: 134935 - protein, 7 aa, synthetic construct
MVRATRE

SEQ ID NO: 134936 - protein, 7 aa, synthetic construct
MVRDPKI

SEQ ID NO: 134937 - protein, 7 aa, synthetic construct
MVRDSGR

SEQ ID NO: 134938 - protein, 7 aa, synthetic construct
MVRESVR

SEQ ID NO: 134939 - protein, 7 aa, synthetic construct
MVRGAGQ

SEQ ID NO: 134940 - protein, 7 aa, synthetic construct
MVRGATS

SEQ ID NO: 134941 - protein, 7 aa, synthetic construct
MVRGEKQ

SEQ ID NO: 134942 - protein, 7 aa, synthetic construct
MVRGHGA

SEQ ID NO: 134943 - protein, 7 aa, synthetic construct
MVRGITV

SEQ ID NO: 134944 - protein, 7 aa, synthetic construct
MVRGNQA

SEQ ID NO: 134945 - protein, 7 aa, synthetic construct
MVRGNSA

SEQ ID NO: 134946 - protein, 7 aa, synthetic construct
MVRGTNL

SEQ ID NO: 134947 - protein, 7 aa, synthetic construct
MVRHEKI

SEQ ID NO: 134948 - protein, 7 aa, synthetic construct
MVRHIAA

SEQ ID NO: 134949 - protein, 7 aa, synthetic construct
MVRHKEG

SEQ ID NO: 134950 - protein, 7 aa, synthetic construct
MVRKDSL

SEQ ID NO: 134951 - protein, 7 aa, synthetic construct
MVRKTIE

SEQ ID NO: 134952 - protein, 7 aa, synthetic construct
MVRLTPA

SEQ ID NO: 134953 - protein, 7 aa, synthetic construct
MVRMSTG

SEQ ID NO: 134954 - protein, 7 aa, synthetic construct
MVRNEKG

SEQ ID NO: 134955 - protein, 7 aa, synthetic construct
MVRPIEK

SEQ ID NO: 134956 - protein, 7 aa, synthetic construct
MVRPSRE

SEQ ID NO: 134957 - protein, 7 aa, synthetic construct
MVRQDRG

SEQ ID NO: 134958 - protein, 7 aa, synthetic construct
MVRQGEK

SEQ ID NO: 134959 - protein, 7 aa, synthetic construct
MVRQTPQ

SEQ ID NO: 134960 - protein, 7 aa, synthetic construct
MVRQVPN

SEQ ID NO: 134961 - protein, 7 aa, synthetic construct
MVRSLEK

SEQ ID NO: 134962 - protein, 7 aa, synthetic construct
MVRTSSM

SEQ ID NO: 134963 - protein, 7 aa, synthetic construct
MVSHRQG

SEQ ID NO: 134964 - protein, 7 aa, synthetic construct
MVSKHIT

SEQ ID NO: 134965 - protein, 7 aa, synthetic construct
MVSKLER

SEQ ID NO: 134966 - protein, 7 aa, synthetic construct
MVSTLRA

SEQ ID NO: 134967 - protein, 7 aa, synthetic construct
MVTHAKM

SEQ ID NO: 134968 - protein, 7 aa, synthetic construct
MVTKFEK

SEQ ID NO: 134969 - protein, 7 aa, synthetic construct
MVTSHAK

SEQ ID NO: 134970 - protein, 7 aa, synthetic construct
MVTTAHR

SEQ ID NO: 134971 - protein, 7 aa, synthetic construct
MVVARGP

SEQ ID NO: 134972 - protein, 7 aa, synthetic construct
MVVHKNV

SEQ ID NO: 134973 - protein, 7 aa, synthetic construct
MVVKHRE

SEQ ID NO: 134974 - protein, 7 aa, synthetic construct
MVVRAQQ

SEQ ID NO: 134975 - protein, 7 aa, synthetic construct
MVYKGSA

SEQ ID NO: 134976 - protein, 7 aa, synthetic construct
MWHGTGE

SEQ ID NO: 134977 - protein, 7 aa, synthetic construct
MWKEHRG

SEQ ID NO: 134978 - protein, 7 aa, synthetic construct
MWKESSR

SEQ ID NO: 134979 - protein, 7 aa, synthetic construct
MWKKPNE

SEQ ID NO: 134980 - protein, 7 aa, synthetic construct
MYAGLKP

SEQ ID NO: 134981 - protein, 7 aa, synthetic construct
MYAHSPH

SEQ ID NO: 134982 - protein, 7 aa, synthetic construct
MYANGRQ

SEQ ID NO: 134983 - protein, 7 aa, synthetic construct
MYDAQKK

SEQ ID NO: 134984 - protein, 7 aa, synthetic construct
MYDKPRS

SEQ ID NO: 134985 - protein, 7 aa, synthetic construct
MYEKFKS

SEQ ID NO: 134986 - protein, 7 aa, synthetic construct
MYEKPVR

SEQ ID NO: 134987 - protein, 7 aa, synthetic construct
MYEKSMK

SEQ ID NO: 134988 - protein, 7 aa, synthetic construct
MYESSYS

SEQ ID NO: 134989 - protein, 7 aa, synthetic construct
MYGKRHE

SEQ ID NO: 134990 - protein, 7 aa, synthetic construct
MYGTGVK

SEQ ID NO: 134991 - protein, 7 aa, synthetic construct
MYHTKQT

SEQ ID NO: 134992 - protein, 7 aa, synthetic construct
MYKAMER

SEQ ID NO: 134993 - protein, 7 aa, synthetic construct
MYKASPL

SEQ ID NO: 134994 - protein, 7 aa, synthetic construct
MYKDKSF

SEQ ID NO: 134995 - protein, 7 aa, synthetic construct
MYKDTRA

SEQ ID NO: 134996 - protein, 7 aa, synthetic construct
MYKGEQK

SEQ ID NO: 134997 - protein, 7 aa, synthetic construct
MYKGTAV

SEQ ID NO: 134998 - protein, 7 aa, synthetic construct
MYKGTIH

SEQ ID NO: 134999 - protein, 7 aa, synthetic construct
MYKHMAP

SEQ ID NO: 135000 - protein, 7 aa, synthetic construct
MYKKDST

SEQ ID NO: 135001 - protein, 7 aa, synthetic construct
MYKKGDS

SEQ ID NO: 135002 - protein, 7 aa, synthetic construct
MYKKPQD

SEQ ID NO: 135003 - protein, 7 aa, synthetic construct
MYKPKIE

SEQ ID NO: 135004 - protein, 7 aa, synthetic construct
MYKPSLS

SEQ ID NO: 135005 - protein, 7 aa, synthetic construct
MYKPTAQ

SEQ ID NO: 135006 - protein, 7 aa, synthetic construct
MYKQDKM

SEQ ID NO: 135007 - protein, 7 aa, synthetic construct
MYKQIGG

SEQ ID NO: 135008 - protein, 7 aa, synthetic construct
MYKQMPA

SEQ ID NO: 135009 - protein, 7 aa, synthetic construct
MYKQNKE

SEQ ID NO: 135010 - protein, 7 aa, synthetic construct
MYKTNHP

SEQ ID NO: 135011 - protein, 7 aa, synthetic construct
MYKVNAP

SEQ ID NO: 135012 - protein, 7 aa, synthetic construct
MYKVTPN

SEQ ID NO: 135013 - protein, 7 aa, synthetic construct
MYNHSRA

SEQ ID NO: 135014 - protein, 7 aa, synthetic construct
MYNIPTD

SEQ ID NO: 135015 - protein, 7 aa, synthetic construct
MYNKRTD

SEQ ID NO: 135016 - protein, 7 aa, synthetic construct
MYNLGKP

SEQ ID NO: 135017 - protein, 7 aa, synthetic construct
MYNLNGK

SEQ ID NO: 135018 - protein, 7 aa, synthetic construct
MYQANRT

SEQ ID NO: 135019 - protein, 7 aa, synthetic construct
MYQPNSI

SEQ ID NO: 135020 - protein, 7 aa, synthetic construct
MYRDNVK

SEQ ID NO: 135021 - protein, 7 aa, synthetic construct
MYRNLNA

SEQ ID NO: 135022 - protein, 7 aa, synthetic construct
MYRRIEE

SEQ ID NO: 135023 - protein, 7 aa, synthetic construct
MYRSNVS

SEQ ID NO: 135024 - protein, 7 aa, synthetic construct
MYSKPKE

SEQ ID NO: 135025 - protein, 7 aa, synthetic construct
MYSKPSQ

SEQ ID NO: 135026 - protein, 7 aa, synthetic construct
MYTGMAK

SEQ ID NO: 135027 - protein, 7 aa, synthetic construct
MYTGNKT

SEQ ID NO: 135028 - protein, 7 aa, synthetic construct
MYTKEKL

SEQ ID NO: 135029 - protein, 7 aa, synthetic construct
MYTQGTK

SEQ ID NO: 135030 - protein, 7 aa, synthetic construct
MYVGSNK

SEQ ID NO: 135031 - protein, 7 aa, synthetic construct
NAAARYV

SEQ ID NO: 135032 - protein, 7 aa, synthetic construct
NAAFKSI

SEQ ID NO: 135033 - protein, 7 aa, synthetic construct
NAAHTNR

SEQ ID NO: 135034 - protein, 7 aa, synthetic construct
NAAKNNW

SEQ ID NO: 135035 - protein, 7 aa, synthetic construct
NAANYKQ

SEQ ID NO: 135036 - protein, 7 aa, synthetic construct
NAAPRLM

SEQ ID NO: 135037 - protein, 7 aa, synthetic construct
NAARSHF

SEQ ID NO: 135038 - protein, 7 aa, synthetic construct
NAARSKD

SEQ ID NO: 135039 - protein, 7 aa, synthetic construct
NAARVPH

SEQ ID NO: 135040 - protein, 7 aa, synthetic construct
NAAVRNH

SEQ ID NO: 135041 - protein, 7 aa, synthetic construct
NAAVRNY

SEQ ID NO: 135042 - protein, 7 aa, synthetic construct
NAAYASM

SEQ ID NO: 135043 - protein, 7 aa, synthetic construct
NAAYQKA

SEQ ID NO: 135044 - protein, 7 aa, synthetic construct
NAAYQRI

SEQ ID NO: 135045 - protein, 7 aa, synthetic construct
NADGKRV

SEQ ID NO: 135046 - protein, 7 aa, synthetic construct
NADKYMR

SEQ ID NO: 135047 - protein, 7 aa, synthetic construct
NADMRKT

SEQ ID NO: 135048 - protein, 7 aa, synthetic construct
NADRGLK

SEQ ID NO: 135049 - protein, 7 aa, synthetic construct
NAEFKRQ

SEQ ID NO: 135050 - protein, 7 aa, synthetic construct
NAEKFRG

SEQ ID NO: 135051 - protein, 7 aa, synthetic construct
NAEKMRM

SEQ ID NO: 135052 - protein, 7 aa, synthetic construct
NAEMKRN

SEQ ID NO: 135053 - protein, 7 aa, synthetic construct
NAERASR

SEQ ID NO: 135054 - protein, 7 aa, synthetic construct
NAERLKN

SEQ ID NO: 135055 - protein, 7 aa, synthetic construct
NAESKRN

SEQ ID NO: 135056 - protein, 7 aa, synthetic construct
NAEVRPK

SEQ ID NO: 135057 - protein, 7 aa, synthetic construct
NAEYGSR

SEQ ID NO: 135058 - protein, 7 aa, synthetic construct
NAFGANR

SEQ ID NO: 135059 - protein, 7 aa, synthetic construct
NAGGPAR

SEQ ID NO: 135060 - protein, 7 aa, synthetic construct
NAGGVHK

SEQ ID NO: 135061 - protein, 7 aa, synthetic construct
NAGHQKT

SEQ ID NO: 135062 - protein, 7 aa, synthetic construct
NAGHSKA

SEQ ID NO: 135063 - protein, 7 aa, synthetic construct
NAGINHK

SEQ ID NO: 135064 - protein, 7 aa, synthetic construct
NAGKEIR

SEQ ID NO: 135065 - protein, 7 aa, synthetic construct
NAGNYGK

SEQ ID NO: 135066 - protein, 7 aa, synthetic construct
NAGSTKH

SEQ ID NO: 135067 - protein, 7 aa, synthetic construct
NAGWRGD

SEQ ID NO: 135068 - protein, 7 aa, synthetic construct
NAGYLKN

SEQ ID NO: 135069 - protein, 7 aa, synthetic construct
NAGYNMH

SEQ ID NO: 135070 - protein, 7 aa, synthetic construct
NAHGAKM

SEQ ID NO: 135071 - protein, 7 aa, synthetic construct
NAHIKMN

SEQ ID NO: 135072 - protein, 7 aa, synthetic construct
NAHIKRD

SEQ ID NO: 135073 - protein, 7 aa, synthetic construct
NAHITNR

SEQ ID NO: 135074 - protein, 7 aa, synthetic construct
NAHLTKH

SEQ ID NO: 135075 - protein, 7 aa, synthetic construct
NAHMTGR

SEQ ID NO: 135076 - protein, 7 aa, synthetic construct
NAHPTLK

SEQ ID NO: 135077 - protein, 7 aa, synthetic construct
NAHQARV

SEQ ID NO: 135078 - protein, 7 aa, synthetic construct
NAHQFSK

SEQ ID NO: 135079 - protein, 7 aa, synthetic construct
NAHRQQL

SEQ ID NO: 135080 - protein, 7 aa, synthetic construct
NAHSPSK

SEQ ID NO: 135081 - protein, 7 aa, synthetic construct
NAHSQVK

SEQ ID NO: 135082 - protein, 7 aa, synthetic construct
NAHSSLK

SEQ ID NO: 135083 - protein, 7 aa, synthetic construct
NAHTAPR

SEQ ID NO: 135084 - protein, 7 aa, synthetic construct
NAHTGPK

SEQ ID NO: 135085 - protein, 7 aa, synthetic construct
NAHTQRL

SEQ ID NO: 135086 - protein, 7 aa, synthetic construct
NAHTRNV

SEQ ID NO: 135087 - protein, 7 aa, synthetic construct
NAHVRQV

SEQ ID NO: 135088 - protein, 7 aa, synthetic construct
NAHYHAS

SEQ ID NO: 135089 - protein, 7 aa, synthetic construct
NAHYRDH

SEQ ID NO: 135090 - protein, 7 aa, synthetic construct
NAHYSVN

SEQ ID NO: 135091 - protein, 7 aa, synthetic construct
NAIKDAR

SEQ ID NO: 135092 - protein, 7 aa, synthetic construct
NAINVNR

SEQ ID NO: 135093 - protein, 7 aa, synthetic construct
NAIRSLH

SEQ ID NO: 135094 - protein, 7 aa, synthetic construct
NAIRYNA

SEQ ID NO: 135095 - protein, 7 aa, synthetic construct
NAISTHR

SEQ ID NO: 135096 - protein, 7 aa, synthetic construct
NAIVRSV

SEQ ID NO: 135097 - protein, 7 aa, synthetic construct
NAKDAFR

SEQ ID NO: 135098 - protein, 7 aa, synthetic construct
NAKDNKW

SEQ ID NO: 135099 - protein, 7 aa, synthetic construct
NAKDRYF

SEQ ID NO: 135100 - protein, 7 aa, synthetic construct
NAKGELR

SEQ ID NO: 135101 - protein, 7 aa, synthetic construct
NAKHISF

SEQ ID NO: 135102 - protein, 7 aa, synthetic construct
NAKIGYP

SEQ ID NO: 135103 - protein, 7 aa, synthetic construct
NAKMHVM

SEQ ID NO: 135104 - protein, 7 aa, synthetic construct
NAKRLEN

SEQ ID NO: 135105 - protein, 7 aa, synthetic construct
NAKRSSE

SEQ ID NO: 135106 - protein, 7 aa, synthetic construct
NAKYHHT

SEQ ID NO: 135107 - protein, 7 aa, synthetic construct
NAKYMTT

SEQ ID NO: 135108 - protein, 7 aa, synthetic construct
NALAHRA

SEQ ID NO: 135109 - protein, 7 aa, synthetic construct
NALERKN

SEQ ID NO: 135110 - protein, 7 aa, synthetic construct
NALKRND

SEQ ID NO: 135111 - protein, 7 aa, synthetic construct
NALPKRD

SEQ ID NO: 135112 - protein, 7 aa, synthetic construct
NAMNEKR

SEQ ID NO: 135113 - protein, 7 aa, synthetic construct
NAMQGTR

SEQ ID NO: 135114 - protein, 7 aa, synthetic construct
NAMRNFV

SEQ ID NO: 135115 - protein, 7 aa, synthetic construct
NAMRNQS

SEQ ID NO: 135116 - protein, 7 aa, synthetic construct
NANGKHQ

SEQ ID NO: 135117 - protein, 7 aa, synthetic construct
NANGSKW

SEQ ID NO: 135118 - protein, 7 aa, synthetic construct
NANHTNK

SEQ ID NO: 135119 - protein, 7 aa, synthetic construct
NANNSYK

SEQ ID NO: 135120 - protein, 7 aa, synthetic construct
NANPVRY

SEQ ID NO: 135121 - protein, 7 aa, synthetic construct
NANPYPR

SEQ ID NO: 135122 - protein, 7 aa, synthetic construct
NANSQHK

SEQ ID NO: 135123 - protein, 7 aa, synthetic construct
NAPAYQK

SEQ ID NO: 135124 - protein, 7 aa, synthetic construct
NAPGANR

SEQ ID NO: 135125 - protein, 7 aa, synthetic construct
NAPGIQR

SEQ ID NO: 135126 - protein, 7 aa, synthetic construct
NAPGNLR

SEQ ID NO: 135127 - protein, 7 aa, synthetic construct
NAPHTRG

SEQ ID NO: 135128 - protein, 7 aa, synthetic construct
NAPNQAR

SEQ ID NO: 135129 - protein, 7 aa, synthetic construct
NAPQTMR

SEQ ID NO: 135130 - protein, 7 aa, synthetic construct
NAPRHGM

SEQ ID NO: 135131 - protein, 7 aa, synthetic construct
NAPRIDR

SEQ ID NO: 135132 - protein, 7 aa, synthetic construct
NAPRPIN

SEQ ID NO: 135133 - protein, 7 aa, synthetic construct
NAPTHTR

SEQ ID NO: 135134 - protein, 7 aa, synthetic construct
NAPYNKQ

SEQ ID NO: 135135 - protein, 7 aa, synthetic construct
NAQMEKR

SEQ ID NO: 135136 - protein, 7 aa, synthetic construct
NAQNIYK

SEQ ID NO: 135137 - protein, 7 aa, synthetic construct
NAQQGHK

SEQ ID NO: 135138 - protein, 7 aa, synthetic construct
NAQQTQR

SEQ ID NO: 135139 - protein, 7 aa, synthetic construct
NAQRPKD

SEQ ID NO: 135140 - protein, 7 aa, synthetic construct
NAQSKHT

SEQ ID NO: 135141 - protein, 7 aa, synthetic construct
NAQTHAR

SEQ ID NO: 135142 - protein, 7 aa, synthetic construct
NAQTRSY

SEQ ID NO: 135143 - protein, 7 aa, synthetic construct
NAQTSGR

SEQ ID NO: 135144 - protein, 7 aa, synthetic construct
NAQVNRY

SEQ ID NO: 135145 - protein, 7 aa, synthetic construct
NARAGDR

SEQ ID NO: 135146 - protein, 7 aa, synthetic construct
NARANPN

SEQ ID NO: 135147 - protein, 7 aa, synthetic construct
NARDINK

SEQ ID NO: 135148 - protein, 7 aa, synthetic construct
NAREKIF

SEQ ID NO: 135149 - protein, 7 aa, synthetic construct
NAREYKA

SEQ ID NO: 135150 - protein, 7 aa, synthetic construct
NARHATI

SEQ ID NO: 135151 - protein, 7 aa, synthetic construct
NARLKLD

SEQ ID NO: 135152 - protein, 7 aa, synthetic construct
NARNIGY

SEQ ID NO: 135153 - protein, 7 aa, synthetic construct
NARNSYV

SEQ ID NO: 135154 - protein, 7 aa, synthetic construct
NARNTYS

SEQ ID NO: 135155 - protein, 7 aa, synthetic construct
NARPIMS

SEQ ID NO: 135156 - protein, 7 aa, synthetic construct
NARPLHT

SEQ ID NO: 135157 - protein, 7 aa, synthetic construct
NARQGHY

SEQ ID NO: 135158 - protein, 7 aa, synthetic construct
NARQIPT

SEQ ID NO: 135159 - protein, 7 aa, synthetic construct
NARQPMF

SEQ ID NO: 135160 - protein, 7 aa, synthetic construct
NARQPSF

SEQ ID NO: 135161 - protein, 7 aa, synthetic construct
NARQQNL

SEQ ID NO: 135162 - protein, 7 aa, synthetic construct
NARTDLR

SEQ ID NO: 135163 - protein, 7 aa, synthetic construct
NARTHVT

SEQ ID NO: 135164 - protein, 7 aa, synthetic construct
NARTTSA

SEQ ID NO: 135165 - protein, 7 aa, synthetic construct
NARVDRN

SEQ ID NO: 135166 - protein, 7 aa, synthetic construct
NASGFTR

SEQ ID NO: 135167 - protein, 7 aa, synthetic construct
NASGHPK

SEQ ID NO: 135168 - protein, 7 aa, synthetic construct
NASHMRT

SEQ ID NO: 135169 - protein, 7 aa, synthetic construct
NASIRMS

SEQ ID NO: 135170 - protein, 7 aa, synthetic construct
NASKFHV

SEQ ID NO: 135171 - protein, 7 aa, synthetic construct
NASNKDR

SEQ ID NO: 135172 - protein, 7 aa, synthetic construct
NASPRNS

SEQ ID NO: 135173 - protein, 7 aa, synthetic construct
NASQASR

SEQ ID NO: 135174 - protein, 7 aa, synthetic construct
NASQKHM

SEQ ID NO: 135175 - protein, 7 aa, synthetic construct
NASQRSL

SEQ ID NO: 135176 - protein, 7 aa, synthetic construct
NASRGDR

SEQ ID NO: 135177 - protein, 7 aa, synthetic construct
NASRHLA

SEQ ID NO: 135178 - protein, 7 aa, synthetic construct
NASRSNY

SEQ ID NO: 135179 - protein, 7 aa, synthetic construct
NATNGRA

SEQ ID NO: 135180 - protein, 7 aa, synthetic construct
NATPRYA

SEQ ID NO: 135181 - protein, 7 aa, synthetic construct
NATQGFR

SEQ ID NO: 135182 - protein, 7 aa, synthetic construct
NATYGAK

SEQ ID NO: 135183 - protein, 7 aa, synthetic construct
NAVAKFN

SEQ ID NO: 135184 - protein, 7 aa, synthetic construct
NAVAVSG

SEQ ID NO: 135185 - protein, 7 aa, synthetic construct
NAVHKAY

SEQ ID NO: 135186 - protein, 7 aa, synthetic construct
NAVHPRA

SEQ ID NO: 135187 - protein, 7 aa, synthetic construct
NAVLRDR

SEQ ID NO: 135188 - protein, 7 aa, synthetic construct
NAVMRER

SEQ ID NO: 135189 - protein, 7 aa, synthetic construct
NAVRHPT

SEQ ID NO: 135190 - protein, 7 aa, synthetic construct
NAVVHRT

SEQ ID NO: 135191 - protein, 7 aa, synthetic construct
NAWAGGA

SEQ ID NO: 135192 - protein, 7 aa, synthetic construct
NAYEHKE

SEQ ID NO: 135193 - protein, 7 aa, synthetic construct
NAYGGAH

SEQ ID NO: 135194 - protein, 7 aa, synthetic construct
NAYGGSH

SEQ ID NO: 135195 - protein, 7 aa, synthetic construct
NAYHTGH

SEQ ID NO: 135196 - protein, 7 aa, synthetic construct
NAYNKPT

SEQ ID NO: 135197 - protein, 7 aa, synthetic construct
NAYNRSN

SEQ ID NO: 135198 - protein, 7 aa, synthetic construct
NAYPYKQ

SEQ ID NO: 135199 - protein, 7 aa, synthetic construct
NAYSTMT

SEQ ID NO: 135200 - protein, 7 aa, synthetic construct
NAYYQTA

SEQ ID NO: 135201 - protein, 7 aa, synthetic construct
NDAATKK

SEQ ID NO: 135202 - protein, 7 aa, synthetic construct
NDAHKKL

SEQ ID NO: 135203 - protein, 7 aa, synthetic construct
NDAIARR

SEQ ID NO: 135204 - protein, 7 aa, synthetic construct
NDALRGR

SEQ ID NO: 135205 - protein, 7 aa, synthetic construct
NDAQQKR

SEQ ID NO: 135206 - protein, 7 aa, synthetic construct
NDARFKV

SEQ ID NO: 135207 - protein, 7 aa, synthetic construct
NDARIRP

SEQ ID NO: 135208 - protein, 7 aa, synthetic construct
NDARMAR

SEQ ID NO: 135209 - protein, 7 aa, synthetic construct
NDASNKR

SEQ ID NO: 135210 - protein, 7 aa, synthetic construct
NDATRKA

SEQ ID NO: 135211 - protein, 7 aa, synthetic construct
NDAVSKK

SEQ ID NO: 135212 - protein, 7 aa, synthetic construct
NDDSKKK

SEQ ID NO: 135213 - protein, 7 aa, synthetic construct
NDFKRAN

SEQ ID NO: 135214 - protein, 7 aa, synthetic construct
NDGKQRM

SEQ ID NO: 135215 - protein, 7 aa, synthetic construct
NDGRALR

SEQ ID NO: 135216 - protein, 7 aa, synthetic construct
NDGRFKM

SEQ ID NO: 135217 - protein, 7 aa, synthetic construct
NDHKAFK

SEQ ID NO: 135218 - protein, 7 aa, synthetic construct
NDIINRK

SEQ ID NO: 135219 - protein, 7 aa, synthetic construct
NDIKSRN

SEQ ID NO: 135220 - protein, 7 aa, synthetic construct
NDINRAR

SEQ ID NO: 135221 - protein, 7 aa, synthetic construct
NDIVKRN

SEQ ID NO: 135222 - protein, 7 aa, synthetic construct
NDKFRGI

SEQ ID NO: 135223 - protein, 7 aa, synthetic construct
NDKGYRS

SEQ ID NO: 135224 - protein, 7 aa, synthetic construct
NDKHGNK

SEQ ID NO: 135225 - protein, 7 aa, synthetic construct
NDKHGRG

SEQ ID NO: 135226 - protein, 7 aa, synthetic construct
NDKKYVV

SEQ ID NO: 135227 - protein, 7 aa, synthetic construct
NDKMMGR

SEQ ID NO: 135228 - protein, 7 aa, synthetic construct
NDKMYAK

SEQ ID NO: 135229 - protein, 7 aa, synthetic construct
NDKNSIR

SEQ ID NO: 135230 - protein, 7 aa, synthetic construct
NDKNVNR

SEQ ID NO: 135231 - protein, 7 aa, synthetic construct
NDKPTRQ

SEQ ID NO: 135232 - protein, 7 aa, synthetic construct
NDKQAYR

SEQ ID NO: 135233 - protein, 7 aa, synthetic construct
NDKQIRY

SEQ ID NO: 135234 - protein, 7 aa, synthetic construct
NDKQMRN

SEQ ID NO: 135235 - protein, 7 aa, synthetic construct
NDKQNRV

SEQ ID NO: 135236 - protein, 7 aa, synthetic construct
NDKQPKN

SEQ ID NO: 135237 - protein, 7 aa, synthetic construct
NDKQRNI

SEQ ID NO: 135238 - protein, 7 aa, synthetic construct
NDKRPMN

SEQ ID NO: 135239 - protein, 7 aa, synthetic construct
NDKRQNS

SEQ ID NO: 135240 - protein, 7 aa, synthetic construct
NDKRTFS

SEQ ID NO: 135241 - protein, 7 aa, synthetic construct
NDKYGRA

SEQ ID NO: 135242 - protein, 7 aa, synthetic construct
NDKYNRS

SEQ ID NO: 135243 - protein, 7 aa, synthetic construct
NDLRLRA

SEQ ID NO: 135244 - protein, 7 aa, synthetic construct
NDLRRGP

SEQ ID NO: 135245 - protein, 7 aa, synthetic construct
NDMMMRK

SEQ ID NO: 135246 - protein, 7 aa, synthetic construct
NDMRSAK

SEQ ID NO: 135247 - protein, 7 aa, synthetic construct
NDMRTQK

SEQ ID NO: 135248 - protein, 7 aa, synthetic construct
NDMRTSK

SEQ ID NO: 135249 - protein, 7 aa, synthetic construct
NDNARKT

SEQ ID NO: 135250 - protein, 7 aa, synthetic construct
NDNFKQW

SEQ ID NO: 135251 - protein, 7 aa, synthetic construct
NDNNNRR

SEQ ID NO: 135252 - protein, 7 aa, synthetic construct
NDNRIRT

SEQ ID NO: 135253 - protein, 7 aa, synthetic construct
NDNSRKT

SEQ ID NO: 135254 - protein, 7 aa, synthetic construct
NDNTLKK

SEQ ID NO: 135255 - protein, 7 aa, synthetic construct
NDPGKRS

SEQ ID NO: 135256 - protein, 7 aa, synthetic construct
NDPGMRK

SEQ ID NO: 135257 - protein, 7 aa, synthetic construct
NDPIKSR

SEQ ID NO: 135258 - protein, 7 aa, synthetic construct
NDPKPRA

SEQ ID NO: 135259 - protein, 7 aa, synthetic construct
NDPPRKN

SEQ ID NO: 135260 - protein, 7 aa, synthetic construct
NDPRPKT

SEQ ID NO: 135261 - protein, 7 aa, synthetic construct
NDPYKRV

SEQ ID NO: 135262 - protein, 7 aa, synthetic construct
NDQKFKM

SEQ ID NO: 135263 - protein, 7 aa, synthetic construct
NDQKNYK

SEQ ID NO: 135264 - protein, 7 aa, synthetic construct
NDQKSQR

SEQ ID NO: 135265 - protein, 7 aa, synthetic construct
NDQNMKR

SEQ ID NO: 135266 - protein, 7 aa, synthetic construct
NDQRSIR

SEQ ID NO: 135267 - protein, 7 aa, synthetic construct
NDQTRMR

SEQ ID NO: 135268 - protein, 7 aa, synthetic construct
NDRAGKT

SEQ ID NO: 135269 - protein, 7 aa, synthetic construct
NDRAVKQ

SEQ ID NO: 135270 - protein, 7 aa, synthetic construct
NDRGLKA

SEQ ID NO: 135271 - protein, 7 aa, synthetic construct
NDRGRYN

SEQ ID NO: 135272 - protein, 7 aa, synthetic construct
NDRIRAG

SEQ ID NO: 135273 - protein, 7 aa, synthetic construct
NDRIRPL

SEQ ID NO: 135274 - protein, 7 aa, synthetic construct
NDRKAYI

SEQ ID NO: 135275 - protein, 7 aa, synthetic construct
NDRKLPY

SEQ ID NO: 135276 - protein, 7 aa, synthetic construct
NDRKSSI

SEQ ID NO: 135277 - protein, 7 aa, synthetic construct
NDRLIKN

SEQ ID NO: 135278 - protein, 7 aa, synthetic construct
NDRLKVT

SEQ ID NO: 135279 - protein, 7 aa, synthetic construct
NDRLPFV

SEQ ID NO: 135280 - protein, 7 aa, synthetic construct
NDRLSKA

SEQ ID NO: 135281 - protein, 7 aa, synthetic construct
NDRLTKV

SEQ ID NO: 135282 - protein, 7 aa, synthetic construct
NDRMQKM

SEQ ID NO: 135283 - protein, 7 aa, synthetic construct
NDRMTQK

SEQ ID NO: 135284 - protein, 7 aa, synthetic construct
NDRNKVT

SEQ ID NO: 135285 - protein, 7 aa, synthetic construct
NDRPSKF

SEQ ID NO: 135286 - protein, 7 aa, synthetic construct
NDRPTIR

SEQ ID NO: 135287 - protein, 7 aa, synthetic construct
NDRQATK

SEQ ID NO: 135288 - protein, 7 aa, synthetic construct
NDRQIMK

SEQ ID NO: 135289 - protein, 7 aa, synthetic construct
NDRQQAR

SEQ ID NO: 135290 - protein, 7 aa, synthetic construct
NDRQQKV

SEQ ID NO: 135291 - protein, 7 aa, synthetic construct
NDRRLGV

SEQ ID NO: 135292 - protein, 7 aa, synthetic construct
NDRRLSA

SEQ ID NO: 135293 - protein, 7 aa, synthetic construct
NDRTRAG

SEQ ID NO: 135294 - protein, 7 aa, synthetic construct
NDRVKHF

SEQ ID NO: 135295 - protein, 7 aa, synthetic construct
NDRVTRS

SEQ ID NO: 135296 - protein, 7 aa, synthetic construct
NDSAKMK

SEQ ID NO: 135297 - protein, 7 aa, synthetic construct
NDSGYRM

SEQ ID NO: 135298 - protein, 7 aa, synthetic construct
NDSKLRF

SEQ ID NO: 135299 - protein, 7 aa, synthetic construct
NDSKRTN

SEQ ID NO: 135300 - protein, 7 aa, synthetic construct
NDSRKSS

SEQ ID NO: 135301 - protein, 7 aa, synthetic construct
NDSVKSR

SEQ ID NO: 135302 - protein, 7 aa, synthetic construct
NDSVVRK

SEQ ID NO: 135303 - protein, 7 aa, synthetic construct
NDTFKKM

SEQ ID NO: 135304 - protein, 7 aa, synthetic construct
NDTGKVR

SEQ ID NO: 135305 - protein, 7 aa, synthetic construct
NDTIPKK

SEQ ID NO: 135306 - protein, 7 aa, synthetic construct
NDTKIRV

SEQ ID NO: 135307 - protein, 7 aa, synthetic construct
NDTPKFK

SEQ ID NO: 135308 - protein, 7 aa, synthetic construct
NDTRGSR

SEQ ID NO: 135309 - protein, 7 aa, synthetic construct
NDTRNAR

SEQ ID NO: 135310 - protein, 7 aa, synthetic construct
NDVRGKN

SEQ ID NO: 135311 - protein, 7 aa, synthetic construct
NDVRTKL

SEQ ID NO: 135312 - protein, 7 aa, synthetic construct
NDVRVRV

SEQ ID NO: 135313 - protein, 7 aa, synthetic construct
NDWGRGQ

SEQ ID NO: 135314 - protein, 7 aa, synthetic construct
NDYKQKT

SEQ ID NO: 135315 - protein, 7 aa, synthetic construct
NDYKSKS

SEQ ID NO: 135316 - protein, 7 aa, synthetic construct
NEAHYAR

SEQ ID NO: 135317 - protein, 7 aa, synthetic construct
NEAIKRV

SEQ ID NO: 135318 - protein, 7 aa, synthetic construct
NEAKGRF

SEQ ID NO: 135319 - protein, 7 aa, synthetic construct
NEAKRIT

SEQ ID NO: 135320 - protein, 7 aa, synthetic construct
NEANRPR

SEQ ID NO: 135321 - protein, 7 aa, synthetic construct
NEARKTQ

SEQ ID NO: 135322 - protein, 7 aa, synthetic construct
NEARPIR

SEQ ID NO: 135323 - protein, 7 aa, synthetic construct
NEARRLN

SEQ ID NO: 135324 - protein, 7 aa, synthetic construct
NEATAKR

SEQ ID NO: 135325 - protein, 7 aa, synthetic construct
NEAVKNK

SEQ ID NO: 135326 - protein, 7 aa, synthetic construct
NEAYARQ

SEQ ID NO: 135327 - protein, 7 aa, synthetic construct
NEAYKSY

SEQ ID NO: 135328 - protein, 7 aa, synthetic construct
NEFNKRI

SEQ ID NO: 135329 - protein, 7 aa, synthetic construct
NEFRTKS

SEQ ID NO: 135330 - protein, 7 aa, synthetic construct
NEGILKR

SEQ ID NO: 135331 - protein, 7 aa, synthetic construct
NEGKGAR

SEQ ID NO: 135332 - protein, 7 aa, synthetic construct
NEGRLPR

SEQ ID NO: 135333 - protein, 7 aa, synthetic construct
NEHGSFR

SEQ ID NO: 135334 - protein, 7 aa, synthetic construct
NEIKIKF

SEQ ID NO: 135335 - protein, 7 aa, synthetic construct
NEIKMQR

SEQ ID NO: 135336 - protein, 7 aa, synthetic construct
NEITTRK

SEQ ID NO: 135337 - protein, 7 aa, synthetic construct
NEKAHPR

SEQ ID NO: 135338 - protein, 7 aa, synthetic construct
NEKAQLR

SEQ ID NO: 135339 - protein, 7 aa, synthetic construct
NEKFSNK

SEQ ID NO: 135340 - protein, 7 aa, synthetic construct
NEKFTGR

SEQ ID NO: 135341 - protein, 7 aa, synthetic construct
NEKFTRV

SEQ ID NO: 135342 - protein, 7 aa, synthetic construct
NEKLVKY

SEQ ID NO: 135343 - protein, 7 aa, synthetic construct
NEKPPKW

SEQ ID NO: 135344 - protein, 7 aa, synthetic construct
NEKQFRS

SEQ ID NO: 135345 - protein, 7 aa, synthetic construct
NEKTQIR

SEQ ID NO: 135346 - protein, 7 aa, synthetic construct
NEKVRHT

SEQ ID NO: 135347 - protein, 7 aa, synthetic construct
NEKYKSV

SEQ ID NO: 135348 - protein, 7 aa, synthetic construct
NEKYNRV

SEQ ID NO: 135349 - protein, 7 aa, synthetic construct
NELKQRS

SEQ ID NO: 135350 - protein, 7 aa, synthetic construct
NELRIRP

SEQ ID NO: 135351 - protein, 7 aa, synthetic construct
NEMKIRM

SEQ ID NO: 135352 - protein, 7 aa, synthetic construct
NEMKRQF

SEQ ID NO: 135353 - protein, 7 aa, synthetic construct
NEMRQKM

SEQ ID NO: 135354 - protein, 7 aa, synthetic construct
NENKRVV

SEQ ID NO: 135355 - protein, 7 aa, synthetic construct
NENLRKV

SEQ ID NO: 135356 - protein, 7 aa, synthetic construct
NENMRQK

SEQ ID NO: 135357 - protein, 7 aa, synthetic construct
NENPRKL

SEQ ID NO: 135358 - protein, 7 aa, synthetic construct
NENRNVK

SEQ ID NO: 135359 - protein, 7 aa, synthetic construct
NENRPVK

SEQ ID NO: 135360 - protein, 7 aa, synthetic construct
NEPKYRG

SEQ ID NO: 135361 - protein, 7 aa, synthetic construct
NEPNTRK

SEQ ID NO: 135362 - protein, 7 aa, synthetic construct
NEQAVRR

SEQ ID NO: 135363 - protein, 7 aa, synthetic construct
NEQGTYR

SEQ ID NO: 135364 - protein, 7 aa, synthetic construct
NEQIPRK

SEQ ID NO: 135365 - protein, 7 aa, synthetic construct
NEQNQKR

SEQ ID NO: 135366 - protein, 7 aa, synthetic construct
NERKAAI

SEQ ID NO: 135367 - protein, 7 aa, synthetic construct
NERKFQN

SEQ ID NO: 135368 - protein, 7 aa, synthetic construct
NERKMFS

SEQ ID NO: 135369 - protein, 7 aa, synthetic construct
NERKMNQ

SEQ ID NO: 135370 - protein, 7 aa, synthetic construct
NERLWRE

SEQ ID NO: 135371 - protein, 7 aa, synthetic construct
NERMKNV

SEQ ID NO: 135372 - protein, 7 aa, synthetic construct
NERNFKN

SEQ ID NO: 135373 - protein, 7 aa, synthetic construct
NERNFKS

SEQ ID NO: 135374 - protein, 7 aa, synthetic construct
NERNPMK

SEQ ID NO: 135375 - protein, 7 aa, synthetic construct
NERPKLA

SEQ ID NO: 135376 - protein, 7 aa, synthetic construct
NERPTRP

SEQ ID NO: 135377 - protein, 7 aa, synthetic construct
NERQKAN

SEQ ID NO: 135378 - protein, 7 aa, synthetic construct
NERQLRV

SEQ ID NO: 135379 - protein, 7 aa, synthetic construct
NERQQVR

SEQ ID NO: 135380 - protein, 7 aa, synthetic construct
NERQVQK

SEQ ID NO: 135381 - protein, 7 aa, synthetic construct
NERRIVQ

SEQ ID NO: 135382 - protein, 7 aa, synthetic construct
NERRYHD

SEQ ID NO: 135383 - protein, 7 aa, synthetic construct
NERTPRQ

SEQ ID NO: 135384 - protein, 7 aa, synthetic construct
NERVHRV

SEQ ID NO: 135385 - protein, 7 aa, synthetic construct
NERVKHT

SEQ ID NO: 135386 - protein, 7 aa, synthetic construct
NERVVPR

SEQ ID NO: 135387 - protein, 7 aa, synthetic construct
NESLKRQ

SEQ ID NO: 135388 - protein, 7 aa, synthetic construct
NESQKRN

SEQ ID NO: 135389 - protein, 7 aa, synthetic construct
NESTHRW

SEQ ID NO: 135390 - protein, 7 aa, synthetic construct
NESTPKR

SEQ ID NO: 135391 - protein, 7 aa, synthetic construct
NETLRTK

SEQ ID NO: 135392 - protein, 7 aa, synthetic construct
NETQRKT

SEQ ID NO: 135393 - protein, 7 aa, synthetic construct
NETRKMI

SEQ ID NO: 135394 - protein, 7 aa, synthetic construct
NETRVTK

SEQ ID NO: 135395 - protein, 7 aa, synthetic construct
NEVKKHM

SEQ ID NO: 135396 - protein, 7 aa, synthetic construct
NEVKKTW

SEQ ID NO: 135397 - protein, 7 aa, synthetic construct
NEVKRGV

SEQ ID NO: 135398 - protein, 7 aa, synthetic construct
NEVKYKF

SEQ ID NO: 135399 - protein, 7 aa, synthetic construct
NEVRATR

SEQ ID NO: 135400 - protein, 7 aa, synthetic construct
NEVRGLK

SEQ ID NO: 135401 - protein, 7 aa, synthetic construct
NEVSAKR

SEQ ID NO: 135402 - protein, 7 aa, synthetic construct
NEYKPQK

SEQ ID NO: 135403 - protein, 7 aa, synthetic construct
NEYKVRT

SEQ ID NO: 135404 - protein, 7 aa, synthetic construct
NFAAPRA

SEQ ID NO: 135405 - protein, 7 aa, synthetic construct
NFAGMRA

SEQ ID NO: 135406 - protein, 7 aa, synthetic construct
NFAGQNR

SEQ ID NO: 135407 - protein, 7 aa, synthetic construct
NFAHPKQ

SEQ ID NO: 135408 - protein, 7 aa, synthetic construct
NFAKHQA

SEQ ID NO: 135409 - protein, 7 aa, synthetic construct
NFAKSMT

SEQ ID NO: 135410 - protein, 7 aa, synthetic construct
NFAQIKT

SEQ ID NO: 135411 - protein, 7 aa, synthetic construct
NFDARKQ

SEQ ID NO: 135412 - protein, 7 aa, synthetic construct
NFDRTKM

SEQ ID NO: 135413 - protein, 7 aa, synthetic construct
NFGKHTT

SEQ ID NO: 135414 - protein, 7 aa, synthetic construct
NFGNNSK

SEQ ID NO: 135415 - protein, 7 aa, synthetic construct
NFGNRKE

SEQ ID NO: 135416 - protein, 7 aa, synthetic construct
NFGSGQK

SEQ ID NO: 135417 - protein, 7 aa, synthetic construct
NFGSTIK

SEQ ID NO: 135418 - protein, 7 aa, synthetic construct
NFGTPKI

SEQ ID NO: 135419 - protein, 7 aa, synthetic construct
NFHGLKS

SEQ ID NO: 135420 - protein, 7 aa, synthetic construct
NFKAHNA

SEQ ID NO: 135421 - protein, 7 aa, synthetic construct
NFKAHSF

SEQ ID NO: 135422 - protein, 7 aa, synthetic construct
NFKAQYP

SEQ ID NO: 135423 - protein, 7 aa, synthetic construct
NFKERPY

SEQ ID NO: 135424 - protein, 7 aa, synthetic construct
NFKGPRD

SEQ ID NO: 135425 - protein, 7 aa, synthetic construct
NFKGYEK

SEQ ID NO: 135426 - protein, 7 aa, synthetic construct
NFKHAMP

SEQ ID NO: 135427 - protein, 7 aa, synthetic construct
NFKHITN

SEQ ID NO: 135428 - protein, 7 aa, synthetic construct
NFKISTV

SEQ ID NO: 135429 - protein, 7 aa, synthetic construct
NFKLDRG

SEQ ID NO: 135430 - protein, 7 aa, synthetic construct
NFKLRNE

SEQ ID NO: 135431 - protein, 7 aa, synthetic construct
NFKMAMS

SEQ ID NO: 135432 - protein, 7 aa, synthetic construct
NFKQNMM

SEQ ID NO: 135433 - protein, 7 aa, synthetic construct
NFKQPIN

SEQ ID NO: 135434 - protein, 7 aa, synthetic construct
NFKSNPL

SEQ ID NO: 135435 - protein, 7 aa, synthetic construct
NFKVIAS

SEQ ID NO: 135436 - protein, 7 aa, synthetic construct
NFKYTEK

SEQ ID NO: 135437 - protein, 7 aa, synthetic construct
NFNGPEF

SEQ ID NO: 135438 - protein, 7 aa, synthetic construct
NFNLSKA

SEQ ID NO: 135439 - protein, 7 aa, synthetic construct
NFNMQSK

SEQ ID NO: 135440 - protein, 7 aa, synthetic construct
NFPHAKV

SEQ ID NO: 135441 - protein, 7 aa, synthetic construct
NFPNDRK

SEQ ID NO: 135442 - protein, 7 aa, synthetic construct
NFQGVQR

SEQ ID NO: 135443 - protein, 7 aa, synthetic construct
NFQNVPK

SEQ ID NO: 135444 - protein, 7 aa, synthetic construct
NFQQTFK

SEQ ID NO: 135445 - protein, 7 aa, synthetic construct
NFQVKVN

SEQ ID NO: 135446 - protein, 7 aa, synthetic construct
NFRAEKS

SEQ ID NO: 135447 - protein, 7 aa, synthetic construct
NFRASNT

SEQ ID NO: 135448 - protein, 7 aa, synthetic construct
NFRGSVH

SEQ ID NO: 135449 - protein, 7 aa, synthetic construct
NFRKEAT

SEQ ID NO: 135450 - protein, 7 aa, synthetic construct
NFRKLDA

SEQ ID NO: 135451 - protein, 7 aa, synthetic construct
NFRKPEM

SEQ ID NO: 135452 - protein, 7 aa, synthetic construct
NFRPQQM

SEQ ID NO: 135453 - protein, 7 aa, synthetic construct
NFRTESK

SEQ ID NO: 135454 - protein, 7 aa, synthetic construct
NFRTTDK

SEQ ID NO: 135455 - protein, 7 aa, synthetic construct
NFSGGKQ

SEQ ID NO: 135456 - protein, 7 aa, synthetic construct
NFSKIDK

SEQ ID NO: 135457 - protein, 7 aa, synthetic construct
NFSKLSS

SEQ ID NO: 135458 - protein, 7 aa, synthetic construct
NFSNNVR

SEQ ID NO: 135459 - protein, 7 aa, synthetic construct
NFTGQVR

SEQ ID NO: 135460 - protein, 7 aa, synthetic construct
NFTGSTR

SEQ ID NO: 135461 - protein, 7 aa, synthetic construct
NFTKEKL

SEQ ID NO: 135462 - protein, 7 aa, synthetic construct
NFTKSRE

SEQ ID NO: 135463 - protein, 7 aa, synthetic construct
NFTNQSR

SEQ ID NO: 135464 - protein, 7 aa, synthetic construct
NFTNTPK

SEQ ID NO: 135465 - protein, 7 aa, synthetic construct
NGADRTR

SEQ ID NO: 135466 - protein, 7 aa, synthetic construct
NGAHIRI

SEQ ID NO: 135467 - protein, 7 aa, synthetic construct
NGAHTRM

SEQ ID NO: 135468 - protein, 7 aa, synthetic construct
NGAKEGR

SEQ ID NO: 135469 - protein, 7 aa, synthetic construct
NGAMGSR

SEQ ID NO: 135470 - protein, 7 aa, synthetic construct
NGASWAK

SEQ ID NO: 135471 - protein, 7 aa, synthetic construct
NGDKAAR

SEQ ID NO: 135472 - protein, 7 aa, synthetic construct
NGDNPKR

SEQ ID NO: 135473 - protein, 7 aa, synthetic construct
NGFSGNK

SEQ ID NO: 135474 - protein, 7 aa, synthetic construct
NGFVPEF

SEQ ID NO: 135475 - protein, 7 aa, synthetic construct
NGGAQGR

SEQ ID NO: 135476 - protein, 7 aa, synthetic construct
NGGDRPR

SEQ ID NO: 135477 - protein, 7 aa, synthetic construct
NGGFASK

SEQ ID NO: 135478 - protein, 7 aa, synthetic construct
NGGGAKY

SEQ ID NO: 135479 - protein, 7 aa, synthetic construct
NGGGHKS

SEQ ID NO: 135480 - protein, 7 aa, synthetic construct
NGGGMSR

SEQ ID NO: 135481 - protein, 7 aa, synthetic construct
NGGHFKM

SEQ ID NO: 135482 - protein, 7 aa, synthetic construct
NGGNAQR

SEQ ID NO: 135483 - protein, 7 aa, synthetic construct
NGGPNGR

SEQ ID NO: 135484 - protein, 7 aa, synthetic construct
NGGSMNR

SEQ ID NO: 135485 - protein, 7 aa, synthetic construct
NGGSSGR

SEQ ID NO: 135486 - protein, 7 aa, synthetic construct
NGGTNYR

SEQ ID NO: 135487 - protein, 7 aa, synthetic construct
NGGTQGR

SEQ ID NO: 135488 - protein, 7 aa, synthetic construct
NGGVQMR

SEQ ID NO: 135489 - protein, 7 aa, synthetic construct
NGHAVSR

SEQ ID NO: 135490 - protein, 7 aa, synthetic construct
NGHFVVK

SEQ ID NO: 135491 - protein, 7 aa, synthetic construct
NGHKPYQ

SEQ ID NO: 135492 - protein, 7 aa, synthetic construct
NGHLNAR

SEQ ID NO: 135493 - protein, 7 aa, synthetic construct
NGHMQRV

SEQ ID NO: 135494 - protein, 7 aa, synthetic construct
NGHNQVK

SEQ ID NO: 135495 - protein, 7 aa, synthetic construct
NGHQRGS

SEQ ID NO: 135496 - protein, 7 aa, synthetic construct
NGHSILR

SEQ ID NO: 135497 - protein, 7 aa, synthetic construct
NGHVIKV

SEQ ID NO: 135498 - protein, 7 aa, synthetic construct
NGHWQAA

SEQ ID NO: 135499 - protein, 7 aa, synthetic construct
NGIAMAR

SEQ ID NO: 135500 - protein, 7 aa, synthetic construct
NGIKEYK

SEQ ID NO: 135501 - protein, 7 aa, synthetic construct
NGINHRN

SEQ ID NO: 135502 - protein, 7 aa, synthetic construct
NGIPMMK

SEQ ID NO: 135503 - protein, 7 aa, synthetic construct
NGISTSR

SEQ ID NO: 135504 - protein, 7 aa, synthetic construct
NGKDGRY

SEQ ID NO: 135505 - protein, 7 aa, synthetic construct
NGKGDIR

SEQ ID NO: 135506 - protein, 7 aa, synthetic construct
NGKGDYK

SEQ ID NO: 135507 - protein, 7 aa, synthetic construct
NGKHNPL

SEQ ID NO: 135508 - protein, 7 aa, synthetic construct
NGKWPNT

SEQ ID NO: 135509 - protein, 7 aa, synthetic construct
NGKYHTV

SEQ ID NO: 135510 - protein, 7 aa, synthetic construct
NGLGSMR

SEQ ID NO: 135511 - protein, 7 aa, synthetic construct
NGLGYKL

SEQ ID NO: 135512 - protein, 7 aa, synthetic construct
NGLHAQR

SEQ ID NO: 135513 - protein, 7 aa, synthetic construct
NGLKDKY

SEQ ID NO: 135514 - protein, 7 aa, synthetic construct
NGLSRTV

SEQ ID NO: 135515 - protein, 7 aa, synthetic construct
NGMANGR

SEQ ID NO: 135516 - protein, 7 aa, synthetic construct
NGMKMYP

SEQ ID NO: 135517 - protein, 7 aa, synthetic construct
NGMNMQR

SEQ ID NO: 135518 - protein, 7 aa, synthetic construct
NGMPMQR

SEQ ID NO: 135519 - protein, 7 aa, synthetic construct
NGMQAKY

SEQ ID NO: 135520 - protein, 7 aa, synthetic construct
NGMRHTT

SEQ ID NO: 135521 - protein, 7 aa, synthetic construct
NGMRPSI

SEQ ID NO: 135522 - protein, 7 aa, synthetic construct
NGMSTRN

SEQ ID NO: 135523 - protein, 7 aa, synthetic construct
NGMTRNV

SEQ ID NO: 135524 - protein, 7 aa, synthetic construct
NGMTTRL

SEQ ID NO: 135525 - protein, 7 aa, synthetic construct
NGNAPRM

SEQ ID NO: 135526 - protein, 7 aa, synthetic construct
NGNMTRQ

SEQ ID NO: 135527 - protein, 7 aa, synthetic construct
NGNMVHK

SEQ ID NO: 135528 - protein, 7 aa, synthetic construct
NGNNRQY

SEQ ID NO: 135529 - protein, 7 aa, synthetic construct
NGNPRMI

SEQ ID NO: 135530 - protein, 7 aa, synthetic construct
NGNPRSI

SEQ ID NO: 135531 - protein, 7 aa, synthetic construct
NGNQVPR

SEQ ID NO: 135532 - protein, 7 aa, synthetic construct
NGNSQPR

SEQ ID NO: 135533 - protein, 7 aa, synthetic construct
NGNYGIN

SEQ ID NO: 135534 - protein, 7 aa, synthetic construct
NGPIHKI

SEQ ID NO: 135535 - protein, 7 aa, synthetic construct
NGPRGYM

SEQ ID NO: 135536 - protein, 7 aa, synthetic construct
NGPRQVI

SEQ ID NO: 135537 - protein, 7 aa, synthetic construct
NGPSLGR

SEQ ID NO: 135538 - protein, 7 aa, synthetic construct
NGQAIRM

SEQ ID NO: 135539 - protein, 7 aa, synthetic construct
NGQANFK

SEQ ID NO: 135540 - protein, 7 aa, synthetic construct
NGQAYMK

SEQ ID NO: 135541 - protein, 7 aa, synthetic construct
NGQHKFV

SEQ ID NO: 135542 - protein, 7 aa, synthetic construct
NGQIMAR

SEQ ID NO: 135543 - protein, 7 aa, synthetic construct
NGQLNAR

SEQ ID NO: 135544 - protein, 7 aa, synthetic construct
NGQMHAR

SEQ ID NO: 135545 - protein, 7 aa, synthetic construct
NGQMYVK

SEQ ID NO: 135546 - protein, 7 aa, synthetic construct
NGQNAAR

SEQ ID NO: 135547 - protein, 7 aa, synthetic construct
NGQNSFK

SEQ ID NO: 135548 - protein, 7 aa, synthetic construct
NGQRMML

SEQ ID NO: 135549 - protein, 7 aa, synthetic construct
NGQTKFL

SEQ ID NO: 135550 - protein, 7 aa, synthetic construct
NGQWGQK

SEQ ID NO: 135551 - protein, 7 aa, synthetic construct
NGRAISH

SEQ ID NO: 135552 - protein, 7 aa, synthetic construct
NGRMWTE

SEQ ID NO: 135553 - protein, 7 aa, synthetic construct
NGRQMTA

SEQ ID NO: 135554 - protein, 7 aa, synthetic construct
NGRQQLT

SEQ ID NO: 135555 - protein, 7 aa, synthetic construct
NGRSIVL

SEQ ID NO: 135556 - protein, 7 aa, synthetic construct
NGRSNMT

SEQ ID NO: 135557 - protein, 7 aa, synthetic construct
NGRTHLV

SEQ ID NO: 135558 - protein, 7 aa, synthetic construct
NGRTIML

SEQ ID NO: 135559 - protein, 7 aa, synthetic construct
NGRVIPT

SEQ ID NO: 135560 - protein, 7 aa, synthetic construct
NGRVTPH

SEQ ID NO: 135561 - protein, 7 aa, synthetic construct
NGSFNMK

SEQ ID NO: 135562 - protein, 7 aa, synthetic construct
NGSGFVR

SEQ ID NO: 135563 - protein, 7 aa, synthetic construct
NGSGTPR

SEQ ID NO: 135564 - protein, 7 aa, synthetic construct
NGSHLSR

SEQ ID NO: 135565 - protein, 7 aa, synthetic construct
NGSHMTR

SEQ ID NO: 135566 - protein, 7 aa, synthetic construct
NGSHVLR

SEQ ID NO: 135567 - protein, 7 aa, synthetic construct
NGSKELR

SEQ ID NO: 135568 - protein, 7 aa, synthetic construct
NGSKGER

SEQ ID NO: 135569 - protein, 7 aa, synthetic construct
NGSNYGK

SEQ ID NO: 135570 - protein, 7 aa, synthetic construct
NGSQTRY

SEQ ID NO: 135571 - protein, 7 aa, synthetic construct
NGSSMQR

SEQ ID NO: 135572 - protein, 7 aa, synthetic construct
NGSSVRQ

SEQ ID NO: 135573 - protein, 7 aa, synthetic construct
NGSTSYK

SEQ ID NO: 135574 - protein, 7 aa, synthetic construct
NGSYIGM

SEQ ID NO: 135575 - protein, 7 aa, synthetic construct
NGSYQSQ

SEQ ID NO: 135576 - protein, 7 aa, synthetic construct
NGSYRQM

SEQ ID NO: 135577 - protein, 7 aa, synthetic construct
NGSYSQK

SEQ ID NO: 135578 - protein, 7 aa, synthetic construct
NGSYTGM

SEQ ID NO: 135579 - protein, 7 aa, synthetic construct
NGTGPAW

SEQ ID NO: 135580 - protein, 7 aa, synthetic construct
NGTKQDR

SEQ ID NO: 135581 - protein, 7 aa, synthetic construct
NGTMRGH

SEQ ID NO: 135582 - protein, 7 aa, synthetic construct
NGTNYNK

SEQ ID NO: 135583 - protein, 7 aa, synthetic construct
NGTTGRY

SEQ ID NO: 135584 - protein, 7 aa, synthetic construct
NGTYKQT

SEQ ID NO: 135585 - protein, 7 aa, synthetic construct
NGVMLSR

SEQ ID NO: 135586 - protein, 7 aa, synthetic construct
NGVNAYK

SEQ ID NO: 135587 - protein, 7 aa, synthetic construct
NGVQSRM

SEQ ID NO: 135588 - protein, 7 aa, synthetic construct
NGVRDVR

SEQ ID NO: 135589 - protein, 7 aa, synthetic construct
NGVSAFK

SEQ ID NO: 135590 - protein, 7 aa, synthetic construct
NGYAATK

SEQ ID NO: 135591 - protein, 7 aa, synthetic construct
NGYPSKS

SEQ ID NO: 135592 - protein, 7 aa, synthetic construct
NGYQINT

SEQ ID NO: 135593 - protein, 7 aa, synthetic construct
NGYRNFD

SEQ ID NO: 135594 - protein, 7 aa, synthetic construct
NGYRSLP

SEQ ID NO: 135595 - protein, 7 aa, synthetic construct
NGYSGNK

SEQ ID NO: 135596 - protein, 7 aa, synthetic construct
NGYSTLV

SEQ ID NO: 135597 - protein, 7 aa, synthetic construct
NGYTTAT

SEQ ID NO: 135598 - protein, 7 aa, synthetic construct
NHAARLQ

SEQ ID NO: 135599 - protein, 7 aa, synthetic construct
NHAGNRV

SEQ ID NO: 135600 - protein, 7 aa, synthetic construct
NHAGTSR

SEQ ID NO: 135601 - protein, 7 aa, synthetic construct
NHAHVKL

SEQ ID NO: 135602 - protein, 7 aa, synthetic construct
NHAMKNL

SEQ ID NO: 135603 - protein, 7 aa, synthetic construct
NHAMMTK

SEQ ID NO: 135604 - protein, 7 aa, synthetic construct
NHAPAVR

SEQ ID NO: 135605 - protein, 7 aa, synthetic construct
NHAPNAK

SEQ ID NO: 135606 - protein, 7 aa, synthetic construct
NHAQLGK

SEQ ID NO: 135607 - protein, 7 aa, synthetic construct
NHAQRPT

SEQ ID NO: 135608 - protein, 7 aa, synthetic construct
NHARPLA

SEQ ID NO: 135609 - protein, 7 aa, synthetic construct
NHARQYG

SEQ ID NO: 135610 - protein, 7 aa, synthetic construct
NHASPRV

SEQ ID NO: 135611 - protein, 7 aa, synthetic construct
NHATLRM

SEQ ID NO: 135612 - protein, 7 aa, synthetic construct
NHATRAV

SEQ ID NO: 135613 - protein, 7 aa, synthetic construct
NHAVHGK

SEQ ID NO: 135614 - protein, 7 aa, synthetic construct
NHGGLAR

SEQ ID NO: 135615 - protein, 7 aa, synthetic construct
NHGGNSK

SEQ ID NO: 135616 - protein, 7 aa, synthetic construct
NHGGSKF

SEQ ID NO: 135617 - protein, 7 aa, synthetic construct
NHGGVPR

SEQ ID NO: 135618 - protein, 7 aa, synthetic construct
NHGHESR

SEQ ID NO: 135619 - protein, 7 aa, synthetic construct
NHGIKGQ

SEQ ID NO: 135620 - protein, 7 aa, synthetic construct
NHGIRGV

SEQ ID NO: 135621 - protein, 7 aa, synthetic construct
NHGKSTT

SEQ ID NO: 135622 - protein, 7 aa, synthetic construct
NHGKVTT

SEQ ID NO: 135623 - protein, 7 aa, synthetic construct
NHGPRPT

SEQ ID NO: 135624 - protein, 7 aa, synthetic construct
NHGQAKM

SEQ ID NO: 135625 - protein, 7 aa, synthetic construct
NHGQKGI

SEQ ID NO: 135626 - protein, 7 aa, synthetic construct
NHGRQFI

SEQ ID NO: 135627 - protein, 7 aa, synthetic construct
NHGTPAR

SEQ ID NO: 135628 - protein, 7 aa, synthetic construct
NHGWVNE

SEQ ID NO: 135629 - protein, 7 aa, synthetic construct
NHIKTSL

SEQ ID NO: 135630 - protein, 7 aa, synthetic construct
NHISKQQ

SEQ ID NO: 135631 - protein, 7 aa, synthetic construct
NHKAAML

SEQ ID NO: 135632 - protein, 7 aa, synthetic construct
NHKALHI

SEQ ID NO: 135633 - protein, 7 aa, synthetic construct
NHKAPPF

SEQ ID NO: 135634 - protein, 7 aa, synthetic construct
NHKAQAL

SEQ ID NO: 135635 - protein, 7 aa, synthetic construct
NHKDKIM

SEQ ID NO: 135636 - protein, 7 aa, synthetic construct
NHKFHAS

SEQ ID NO: 135637 - protein, 7 aa, synthetic construct
NHKGGFV

SEQ ID NO: 135638 - protein, 7 aa, synthetic construct
NHKGMLT

SEQ ID NO: 135639 - protein, 7 aa, synthetic construct
NHKGNTW

SEQ ID NO: 135640 - protein, 7 aa, synthetic construct
NHKHQLP

SEQ ID NO: 135641 - protein, 7 aa, synthetic construct
NHKIVQI

SEQ ID NO: 135642 - protein, 7 aa, synthetic construct
NHKLTTL

SEQ ID NO: 135643 - protein, 7 aa, synthetic construct
NHKNGKE

SEQ ID NO: 135644 - protein, 7 aa, synthetic construct
NHKNLQL

SEQ ID NO: 135645 - protein, 7 aa, synthetic construct
NHKPMPV

SEQ ID NO: 135646 - protein, 7 aa, synthetic construct
NHKQINI

SEQ ID NO: 135647 - protein, 7 aa, synthetic construct
NHKQIVL

SEQ ID NO: 135648 - protein, 7 aa, synthetic construct
NHKQLAI

SEQ ID NO: 135649 - protein, 7 aa, synthetic construct
NHKQMLV

SEQ ID NO: 135650 - protein, 7 aa, synthetic construct
NHKQTML

SEQ ID NO: 135651 - protein, 7 aa, synthetic construct
NHKSHMQ

SEQ ID NO: 135652 - protein, 7 aa, synthetic construct
NHKSSAY

SEQ ID NO: 135653 - protein, 7 aa, synthetic construct
NHKVIKD

SEQ ID NO: 135654 - protein, 7 aa, synthetic construct
NHLAANR

SEQ ID NO: 135655 - protein, 7 aa, synthetic construct
NHLAVKT

SEQ ID NO: 135656 - protein, 7 aa, synthetic construct
NHLQRGP

SEQ ID NO: 135657 - protein, 7 aa, synthetic construct
NHLQRGV

SEQ ID NO: 135658 - protein, 7 aa, synthetic construct
NHLTRVV

SEQ ID NO: 135659 - protein, 7 aa, synthetic construct
NHLTSAK

SEQ ID NO: 135660 - protein, 7 aa, synthetic construct
NHMASLK

SEQ ID NO: 135661 - protein, 7 aa, synthetic construct
NHMAYNP

SEQ ID NO: 135662 - protein, 7 aa, synthetic construct
NHMGNQK

SEQ ID NO: 135663 - protein, 7 aa, synthetic construct
NHMGTMK

SEQ ID NO: 135664 - protein, 7 aa, synthetic construct
NHMKNTM

SEQ ID NO: 135665 - protein, 7 aa, synthetic construct
NHNANKL

SEQ ID NO: 135666 - protein, 7 aa, synthetic construct
NHNGKFQ

SEQ ID NO: 135667 - protein, 7 aa, synthetic construct
NHNGQNK

SEQ ID NO: 135668 - protein, 7 aa, synthetic construct
NHNKVSL

SEQ ID NO: 135669 - protein, 7 aa, synthetic construct
NHNMRHP

SEQ ID NO: 135670 - protein, 7 aa, synthetic construct
NHNRVVY

SEQ ID NO: 135671 - protein, 7 aa, synthetic construct
NHNSIVK

SEQ ID NO: 135672 - protein, 7 aa, synthetic construct
NHNTIQR

SEQ ID NO: 135673 - protein, 7 aa, synthetic construct
NHNTMQK

SEQ ID NO: 135674 - protein, 7 aa, synthetic construct
NHNTQLR

SEQ ID NO: 135675 - protein, 7 aa, synthetic construct
NHPANKY

SEQ ID NO: 135676 - protein, 7 aa, synthetic construct
NHPITTK

SEQ ID NO: 135677 - protein, 7 aa, synthetic construct
NHPPVGR

SEQ ID NO: 135678 - protein, 7 aa, synthetic construct
NHPTYGK

SEQ ID NO: 135679 - protein, 7 aa, synthetic construct
NHQFKSH

SEQ ID NO: 135680 - protein, 7 aa, synthetic construct
NHQGLNR

SEQ ID NO: 135681 - protein, 7 aa, synthetic construct
NHQGLYK

SEQ ID NO: 135682 - protein, 7 aa, synthetic construct
NHQITKF

SEQ ID NO: 135683 - protein, 7 aa, synthetic construct
NHQKAHI

SEQ ID NO: 135684 - protein, 7 aa, synthetic construct
NHQKQVL

SEQ ID NO: 135685 - protein, 7 aa, synthetic construct
NHQLTKM

SEQ ID NO: 135686 - protein, 7 aa, synthetic construct
NHQMVTK

SEQ ID NO: 135687 - protein, 7 aa, synthetic construct
NHQQTYK

SEQ ID NO: 135688 - protein, 7 aa, synthetic construct
NHQSKSL

SEQ ID NO: 135689 - protein, 7 aa, synthetic construct
NHQSKSV

SEQ ID NO: 135690 - protein, 7 aa, synthetic construct
NHQTKTQ

SEQ ID NO: 135691 - protein, 7 aa, synthetic construct
NHRGNGF

SEQ ID NO: 135692 - protein, 7 aa, synthetic construct
NHRHSIP

SEQ ID NO: 135693 - protein, 7 aa, synthetic construct
NHRPVMG

SEQ ID NO: 135694 - protein, 7 aa, synthetic construct
NHRTVVV

SEQ ID NO: 135695 - protein, 7 aa, synthetic construct
NHSGKST

SEQ ID NO: 135696 - protein, 7 aa, synthetic construct
NHSGMNR

SEQ ID NO: 135697 - protein, 7 aa, synthetic construct
NHSGMSK

SEQ ID NO: 135698 - protein, 7 aa, synthetic construct
NHSHHDR

SEQ ID NO: 135699 - protein, 7 aa, synthetic construct
NHSITKY

SEQ ID NO: 135700 - protein, 7 aa, synthetic construct
NHSKIVS

SEQ ID NO: 135701 - protein, 7 aa, synthetic construct
NHSMMRP

SEQ ID NO: 135702 - protein, 7 aa, synthetic construct
NHSQKGT

SEQ ID NO: 135703 - protein, 7 aa, synthetic construct
NHSRQQF

SEQ ID NO: 135704 - protein, 7 aa, synthetic construct
NHSRYAG

SEQ ID NO: 135705 - protein, 7 aa, synthetic construct
NHSSKQL

SEQ ID NO: 135706 - protein, 7 aa, synthetic construct
NHSVQRV

SEQ ID NO: 135707 - protein, 7 aa, synthetic construct
NHTHTKI

SEQ ID NO: 135708 - protein, 7 aa, synthetic construct
NHTKHYA

SEQ ID NO: 135709 - protein, 7 aa, synthetic construct
NHTMPQK

SEQ ID NO: 135710 - protein, 7 aa, synthetic construct
NHTNLSR

SEQ ID NO: 135711 - protein, 7 aa, synthetic construct
NHTQGSK

SEQ ID NO: 135712 - protein, 7 aa, synthetic construct
NHTSAIK

SEQ ID NO: 135713 - protein, 7 aa, synthetic construct
NHTSMGK

SEQ ID NO: 135714 - protein, 7 aa, synthetic construct
NHTVIRQ

SEQ ID NO: 135715 - protein, 7 aa, synthetic construct
NHVAKPY

SEQ ID NO: 135716 - protein, 7 aa, synthetic construct
NHVGAAR

SEQ ID NO: 135717 - protein, 7 aa, synthetic construct
NHVGRVM

SEQ ID NO: 135718 - protein, 7 aa, synthetic construct
NHVKGYG

SEQ ID NO: 135719 - protein, 7 aa, synthetic construct
NHVQPQR

SEQ ID NO: 135720 - protein, 7 aa, synthetic construct
NHVQVKY

SEQ ID NO: 135721 - protein, 7 aa, synthetic construct
NHVRLQQ

SEQ ID NO: 135722 - protein, 7 aa, synthetic construct
NHVRMVV

SEQ ID NO: 135723 - protein, 7 aa, synthetic construct
NHVRNIV

SEQ ID NO: 135724 - protein, 7 aa, synthetic construct
NHVSNFK

SEQ ID NO: 135725 - protein, 7 aa, synthetic construct
NHYAPKT

SEQ ID NO: 135726 - protein, 7 aa, synthetic construct
NHYKAMA

SEQ ID NO: 135727 - protein, 7 aa, synthetic construct
NHYKHVA

SEQ ID NO: 135728 - protein, 7 aa, synthetic construct
NIAGNYR

SEQ ID NO: 135729 - protein, 7 aa, synthetic construct
NIAHKER

SEQ ID NO: 135730 - protein, 7 aa, synthetic construct
NIAHNRG

SEQ ID NO: 135731 - protein, 7 aa, synthetic construct
NIALRKD

SEQ ID NO: 135732 - protein, 7 aa, synthetic construct
NIAMAAR

SEQ ID NO: 135733 - protein, 7 aa, synthetic construct
NIANWKA

SEQ ID NO: 135734 - protein, 7 aa, synthetic construct
NIAPHAR

SEQ ID NO: 135735 - protein, 7 aa, synthetic construct
NIAQHRG

SEQ ID NO: 135736 - protein, 7 aa, synthetic construct
NIARIEK

SEQ ID NO: 135737 - protein, 7 aa, synthetic construct
NIARNNT

SEQ ID NO: 135738 - protein, 7 aa, synthetic construct
NIDKMQR

SEQ ID NO: 135739 - protein, 7 aa, synthetic construct
NIDKRGW

SEQ ID NO: 135740 - protein, 7 aa, synthetic construct
NIDRRQL

SEQ ID NO: 135741 - protein, 7 aa, synthetic construct
NIEGRKV

SEQ ID NO: 135742 - protein, 7 aa, synthetic construct
NIERTKM

SEQ ID NO: 135743 - protein, 7 aa, synthetic construct
NIGGMGR

SEQ ID NO: 135744 - protein, 7 aa, synthetic construct
NIGHNKA

SEQ ID NO: 135745 - protein, 7 aa, synthetic construct
NIGKPRD

SEQ ID NO: 135746 - protein, 7 aa, synthetic construct
NIGNKYA

SEQ ID NO: 135747 - protein, 7 aa, synthetic construct
NIGNVSR

SEQ ID NO: 135748 - protein, 7 aa, synthetic construct
NIGPQYK

SEQ ID NO: 135749 - protein, 7 aa, synthetic construct
NIGRPHT

SEQ ID NO: 135750 - protein, 7 aa, synthetic construct
NIGVHKQ

SEQ ID NO: 135751 - protein, 7 aa, synthetic construct
NIGYKSG

SEQ ID NO: 135752 - protein, 7 aa, synthetic construct
NIHEKRA

SEQ ID NO: 135753 - protein, 7 aa, synthetic construct
NIHGFKA

SEQ ID NO: 135754 - protein, 7 aa, synthetic construct
NIHGLRS

SEQ ID NO: 135755 - protein, 7 aa, synthetic construct
NIHGQRG

SEQ ID NO: 135756 - protein, 7 aa, synthetic construct
NIHHPKT

SEQ ID NO: 135757 - protein, 7 aa, synthetic construct
NIHIKNI

SEQ ID NO: 135758 - protein, 7 aa, synthetic construct
NIHINKM

SEQ ID NO: 135759 - protein, 7 aa, synthetic construct
NIHKNFP

SEQ ID NO: 135760 - protein, 7 aa, synthetic construct
NIHQKFP

SEQ ID NO: 135761 - protein, 7 aa, synthetic construct
NIHTTTR

SEQ ID NO: 135762 - protein, 7 aa, synthetic construct
NIHVKSQ

SEQ ID NO: 135763 - protein, 7 aa, synthetic construct
NIHYPKA

SEQ ID NO: 135764 - protein, 7 aa, synthetic construct
NIKAPRD

SEQ ID NO: 135765 - protein, 7 aa, synthetic construct
NIKFVSA

SEQ ID NO: 135766 - protein, 7 aa, synthetic construct
NIKGYNA

SEQ ID NO: 135767 - protein, 7 aa, synthetic construct
NIKILEP

SEQ ID NO: 135768 - protein, 7 aa, synthetic construct
NIKLMSM

SEQ ID NO: 135769 - protein, 7 aa, synthetic construct
NIKPHAY

SEQ ID NO: 135770 - protein, 7 aa, synthetic construct
NIKPHSI

SEQ ID NO: 135771 - protein, 7 aa, synthetic construct
NIKQDRM

SEQ ID NO: 135772 - protein, 7 aa, synthetic construct
NIKRSGE

SEQ ID NO: 135773 - protein, 7 aa, synthetic construct
NIKYKDT

SEQ ID NO: 135774 - protein, 7 aa, synthetic construct
NIKYKGD

SEQ ID NO: 135775 - protein, 7 aa, synthetic construct
NILNSPR

SEQ ID NO: 135776 - protein, 7 aa, synthetic construct
NILPRKD

SEQ ID NO: 135777 - protein, 7 aa, synthetic construct
NILRTRE

SEQ ID NO: 135778 - protein, 7 aa, synthetic construct
NILTHKV

SEQ ID NO: 135779 - protein, 7 aa, synthetic construct
NIMNMRA

SEQ ID NO: 135780 - protein, 7 aa, synthetic construct
NIMQKNY

SEQ ID NO: 135781 - protein, 7 aa, synthetic construct
NIMRSRE

SEQ ID NO: 135782 - protein, 7 aa, synthetic construct
NIMRVDK

SEQ ID NO: 135783 - protein, 7 aa, synthetic construct
NINFRRE

SEQ ID NO: 135784 - protein, 7 aa, synthetic construct
NINHIRA

SEQ ID NO: 135785 - protein, 7 aa, synthetic construct
NINHKQH

SEQ ID NO: 135786 - protein, 7 aa, synthetic construct
NINKIMN

SEQ ID NO: 135787 - protein, 7 aa, synthetic construct
NINQKRD

SEQ ID NO: 135788 - protein, 7 aa, synthetic construct
NINREQR

SEQ ID NO: 135789 - protein, 7 aa, synthetic construct
NINRPKE

SEQ ID NO: 135790 - protein, 7 aa, synthetic construct
NINTIHK

SEQ ID NO: 135791 - protein, 7 aa, synthetic construct
NINTVHR

SEQ ID NO: 135792 - protein, 7 aa, synthetic construct
NINVSQR

SEQ ID NO: 135793 - protein, 7 aa, synthetic construct
NINYVKN

SEQ ID NO: 135794 - protein, 7 aa, synthetic construct
NIPGIRH

SEQ ID NO: 135795 - protein, 7 aa, synthetic construct
NIPHRAL

SEQ ID NO: 135796 - protein, 7 aa, synthetic construct
NIPIKST

SEQ ID NO: 135797 - protein, 7 aa, synthetic construct
NIPRHAQ

SEQ ID NO: 135798 - protein, 7 aa, synthetic construct
NIPRVHN

SEQ ID NO: 135799 - protein, 7 aa, synthetic construct
NIPVLRG

SEQ ID NO: 135800 - protein, 7 aa, synthetic construct
NIQGHRA

SEQ ID NO: 135801 - protein, 7 aa, synthetic construct
NIQGLSR

SEQ ID NO: 135802 - protein, 7 aa, synthetic construct
NIQHITR

SEQ ID NO: 135803 - protein, 7 aa, synthetic construct
NIQQQSR

SEQ ID NO: 135804 - protein, 7 aa, synthetic construct
NIQQRQM

SEQ ID NO: 135805 - protein, 7 aa, synthetic construct
NIQRGPT

SEQ ID NO: 135806 - protein, 7 aa, synthetic construct
NIQTSQR

SEQ ID NO: 135807 - protein, 7 aa, synthetic construct
NIRIKND

SEQ ID NO: 135808 - protein, 7 aa, synthetic construct
NIRIQGN

SEQ ID NO: 135809 - protein, 7 aa, synthetic construct
NIRIRTE

SEQ ID NO: 135810 - protein, 7 aa, synthetic construct
NIRKSME

SEQ ID NO: 135811 - protein, 7 aa, synthetic construct
NIRNDLK

SEQ ID NO: 135812 - protein, 7 aa, synthetic construct
NIRNVPN

SEQ ID NO: 135813 - protein, 7 aa, synthetic construct
NIRPGFA

SEQ ID NO: 135814 - protein, 7 aa, synthetic construct
NIRPVGS

SEQ ID NO: 135815 - protein, 7 aa, synthetic construct
NIRQGHV

SEQ ID NO: 135816 - protein, 7 aa, synthetic construct
NIRQQVM

SEQ ID NO: 135817 - protein, 7 aa, synthetic construct
NIRQTTY

SEQ ID NO: 135818 - protein, 7 aa, synthetic construct
NIRRDYP

SEQ ID NO: 135819 - protein, 7 aa, synthetic construct
NIRREVT

SEQ ID NO: 135820 - protein, 7 aa, synthetic construct
NIRSPVH

SEQ ID NO: 135821 - protein, 7 aa, synthetic construct
NIRTNIT

SEQ ID NO: 135822 - protein, 7 aa, synthetic construct
NIRTPKE

SEQ ID NO: 135823 - protein, 7 aa, synthetic construct
NISGVRQ

SEQ ID NO: 135824 - protein, 7 aa, synthetic construct
NISHIRN

SEQ ID NO: 135825 - protein, 7 aa, synthetic construct
NISKGDR

SEQ ID NO: 135826 - protein, 7 aa, synthetic construct
NISQVSR

SEQ ID NO: 135827 - protein, 7 aa, synthetic construct
NISREKS

SEQ ID NO: 135828 - protein, 7 aa, synthetic construct
NISRHPP

SEQ ID NO: 135829 - protein, 7 aa, synthetic construct
NISSRLT

SEQ ID NO: 135830 - protein, 7 aa, synthetic construct
NISVPSR

SEQ ID NO: 135831 - protein, 7 aa, synthetic construct
NITKRDF

SEQ ID NO: 135832 - protein, 7 aa, synthetic construct
NITREKF

SEQ ID NO: 135833 - protein, 7 aa, synthetic construct
NITRIGP

SEQ ID NO: 135834 - protein, 7 aa, synthetic construct
NITRNDK

SEQ ID NO: 135835 - protein, 7 aa, synthetic construct
NIVNEKK

SEQ ID NO: 135836 - protein, 7 aa, synthetic construct
NIVTQRA

SEQ ID NO: 135837 - protein, 7 aa, synthetic construct
NIYGNAK

SEQ ID NO: 135838 - protein, 7 aa, synthetic construct
NIYKNDK

SEQ ID NO: 135839 - protein, 7 aa, synthetic construct
NKAANHN

SEQ ID NO: 135840 - protein, 7 aa, synthetic construct
NKAAPMM

SEQ ID NO: 135841 - protein, 7 aa, synthetic construct
NKAASDK

SEQ ID NO: 135842 - protein, 7 aa, synthetic construct
NKADKFN

SEQ ID NO: 135843 - protein, 7 aa, synthetic construct
NKADKMF

SEQ ID NO: 135844 - protein, 7 aa, synthetic construct
NKADRMA

SEQ ID NO: 135845 - protein, 7 aa, synthetic construct
NKAGDWK

SEQ ID NO: 135846 - protein, 7 aa, synthetic construct
NKAGHQL

SEQ ID NO: 135847 - protein, 7 aa, synthetic construct
NKAHSHI

SEQ ID NO: 135848 - protein, 7 aa, synthetic construct
NKAMQQY

SEQ ID NO: 135849 - protein, 7 aa, synthetic construct
NKANPAN

SEQ ID NO: 135850 - protein, 7 aa, synthetic construct
NKANVYA

SEQ ID NO: 135851 - protein, 7 aa, synthetic construct
NKAPHVI

SEQ ID NO: 135852 - protein, 7 aa, synthetic construct
NKARDQN

SEQ ID NO: 135853 - protein, 7 aa, synthetic construct
NKARNDM

SEQ ID NO: 135854 - protein, 7 aa, synthetic construct
NKASEPK

SEQ ID NO: 135855 - protein, 7 aa, synthetic construct
NKASNFY

SEQ ID NO: 135856 - protein, 7 aa, synthetic construct
NKATHSW

SEQ ID NO: 135857 - protein, 7 aa, synthetic construct
NKATTEK

SEQ ID NO: 135858 - protein, 7 aa, synthetic construct
NKATVNY

SEQ ID NO: 135859 - protein, 7 aa, synthetic construct
NKATYPI

SEQ ID NO: 135860 - protein, 7 aa, synthetic construct
NKAVKET

SEQ ID NO: 135861 - protein, 7 aa, synthetic construct
NKAWKVD

SEQ ID NO: 135862 - protein, 7 aa, synthetic construct
NKAYDKV

SEQ ID NO: 135863 - protein, 7 aa, synthetic construct
NKAYVNT

SEQ ID NO: 135864 - protein, 7 aa, synthetic construct
NKDERKA

SEQ ID NO: 135865 - protein, 7 aa, synthetic construct
NKDGYGR

SEQ ID NO: 135866 - protein, 7 aa, synthetic construct
NKDHPAR

SEQ ID NO: 135867 - protein, 7 aa, synthetic construct
NKDLWKQ

SEQ ID NO: 135868 - protein, 7 aa, synthetic construct
NKDRYDK

SEQ ID NO: 135869 - protein, 7 aa, synthetic construct
NKDSHKA

SEQ ID NO: 135870 - protein, 7 aa, synthetic construct
NKDYKSQ

SEQ ID NO: 135871 - protein, 7 aa, synthetic construct
NKDYPRV

SEQ ID NO: 135872 - protein, 7 aa, synthetic construct
NKEANQK

SEQ ID NO: 135873 - protein, 7 aa, synthetic construct
NKEARMI

SEQ ID NO: 135874 - protein, 7 aa, synthetic construct
NKEASNR

SEQ ID NO: 135875 - protein, 7 aa, synthetic construct
NKEGRNI

SEQ ID NO: 135876 - protein, 7 aa, synthetic construct
NKEGSRS

SEQ ID NO: 135877 - protein, 7 aa, synthetic construct
NKEHLRN

SEQ ID NO: 135878 - protein, 7 aa, synthetic construct
NKEIAYK

SEQ ID NO: 135879 - protein, 7 aa, synthetic construct
NKEQRFM

SEQ ID NO: 135880 - protein, 7 aa, synthetic construct
NKEQSKQ

SEQ ID NO: 135881 - protein, 7 aa, synthetic construct
NKEQSLR

SEQ ID NO: 135882 - protein, 7 aa, synthetic construct
NKERNTQ

SEQ ID NO: 135883 - protein, 7 aa, synthetic construct
NKESFKF

SEQ ID NO: 135884 - protein, 7 aa, synthetic construct
NKETGRM

SEQ ID NO: 135885 - protein, 7 aa, synthetic construct
NKETKGQ

SEQ ID NO: 135886 - protein, 7 aa, synthetic construct
NKETNSK

SEQ ID NO: 135887 - protein, 7 aa, synthetic construct
NKEYAIK

SEQ ID NO: 135888 - protein, 7 aa, synthetic construct
NKEYKQV

SEQ ID NO: 135889 - protein, 7 aa, synthetic construct
NKEYQRN

SEQ ID NO: 135890 - protein, 7 aa, synthetic construct
NKEYRSA

SEQ ID NO: 135891 - protein, 7 aa, synthetic construct
NKEYSRG

SEQ ID NO: 135892 - protein, 7 aa, synthetic construct
NKFAKDF

SEQ ID NO: 135893 - protein, 7 aa, synthetic construct
NKFATER

SEQ ID NO: 135894 - protein, 7 aa, synthetic construct
NKFDAVK

SEQ ID NO: 135895 - protein, 7 aa, synthetic construct
NKFDSPK

SEQ ID NO: 135896 - protein, 7 aa, synthetic construct
NKFDVRV

SEQ ID NO: 135897 - protein, 7 aa, synthetic construct
NKFISQA

SEQ ID NO: 135898 - protein, 7 aa, synthetic construct
NKFITAN

SEQ ID NO: 135899 - protein, 7 aa, synthetic construct
NKFITHP

SEQ ID NO: 135900 - protein, 7 aa, synthetic construct
NKFKPTD

SEQ ID NO: 135901 - protein, 7 aa, synthetic construct
NKFKYNE

SEQ ID NO: 135902 - protein, 7 aa, synthetic construct
NKFLQRD

SEQ ID NO: 135903 - protein, 7 aa, synthetic construct
NKFMSSA

SEQ ID NO: 135904 - protein, 7 aa, synthetic construct
NKFMTDK

SEQ ID NO: 135905 - protein, 7 aa, synthetic construct
NKFPHTN

SEQ ID NO: 135906 - protein, 7 aa, synthetic construct
NKFQQDR

SEQ ID NO: 135907 - protein, 7 aa, synthetic construct
NKFQSPM

SEQ ID NO: 135908 - protein, 7 aa, synthetic construct
NKFQVSM

SEQ ID NO: 135909 - protein, 7 aa, synthetic construct
NKFQYRE

SEQ ID NO: 135910 - protein, 7 aa, synthetic construct
NKFSHKD

SEQ ID NO: 135911 - protein, 7 aa, synthetic construct
NKFTHAS

SEQ ID NO: 135912 - protein, 7 aa, synthetic construct
NKGASHI

SEQ ID NO: 135913 - protein, 7 aa, synthetic construct
NKGDATR

SEQ ID NO: 135914 - protein, 7 aa, synthetic construct
NKGDKFY

SEQ ID NO: 135915 - protein, 7 aa, synthetic construct
NKGDKQT

SEQ ID NO: 135916 - protein, 7 aa, synthetic construct
NKGDMTR

SEQ ID NO: 135917 - protein, 7 aa, synthetic construct
NKGDRFS

SEQ ID NO: 135918 - protein, 7 aa, synthetic construct
NKGEASR

SEQ ID NO: 135919 - protein, 7 aa, synthetic construct
NKGEIRA

SEQ ID NO: 135920 - protein, 7 aa, synthetic construct
NKGEQRL

SEQ ID NO: 135921 - protein, 7 aa, synthetic construct
NKGERLI

SEQ ID NO: 135922 - protein, 7 aa, synthetic construct
NKGETMK

SEQ ID NO: 135923 - protein, 7 aa, synthetic construct
NKGEVRQ

SEQ ID NO: 135924 - protein, 7 aa, synthetic construct
NKGGFHA

SEQ ID NO: 135925 - protein, 7 aa, synthetic construct
NKGGHYV

SEQ ID NO: 135926 - protein, 7 aa, synthetic construct
NKGHHMV

SEQ ID NO: 135927 - protein, 7 aa, synthetic construct
NKGHSSL

SEQ ID NO: 135928 - protein, 7 aa, synthetic construct
NKGISHY

SEQ ID NO: 135929 - protein, 7 aa, synthetic construct
NKGKDTW

SEQ ID NO: 135930 - protein, 7 aa, synthetic construct
NKGKEIV

SEQ ID NO: 135931 - protein, 7 aa, synthetic construct
NKGKETL

SEQ ID NO: 135932 - protein, 7 aa, synthetic construct
NKGKVDY

SEQ ID NO: 135933 - protein, 7 aa, synthetic construct
NKGMMPH

SEQ ID NO: 135934 - protein, 7 aa, synthetic construct
NKGMYPS

SEQ ID NO: 135935 - protein, 7 aa, synthetic construct
NKGNEGR

SEQ ID NO: 135936 - protein, 7 aa, synthetic construct
NKGNPGN

SEQ ID NO: 135937 - protein, 7 aa, synthetic construct
NKGPATF

SEQ ID NO: 135938 - protein, 7 aa, synthetic construct
NKGQATW

SEQ ID NO: 135939 - protein, 7 aa, synthetic construct
NKGQLNF

SEQ ID NO: 135940 - protein, 7 aa, synthetic construct
NKGRDNS

SEQ ID NO: 135941 - protein, 7 aa, synthetic construct
NKGRYPE

SEQ ID NO: 135942 - protein, 7 aa, synthetic construct
NKGSDVK

SEQ ID NO: 135943 - protein, 7 aa, synthetic construct
NKGSHTT

SEQ ID NO: 135944 - protein, 7 aa, synthetic construct
NKGSYAL

SEQ ID NO: 135945 - protein, 7 aa, synthetic construct
NKGTEQK

SEQ ID NO: 135946 - protein, 7 aa, synthetic construct
NKGTHSI

SEQ ID NO: 135947 - protein, 7 aa, synthetic construct
NKGYSPM

SEQ ID NO: 135948 - protein, 7 aa, synthetic construct
NKGYTIA

SEQ ID NO: 135949 - protein, 7 aa, synthetic construct
NKHAGTQ

SEQ ID NO: 135950 - protein, 7 aa, synthetic construct
NKHALMP

SEQ ID NO: 135951 - protein, 7 aa, synthetic construct
NKHAPQF

SEQ ID NO: 135952 - protein, 7 aa, synthetic construct
NKHAPTL

SEQ ID NO: 135953 - protein, 7 aa, synthetic construct
NKHASPL

SEQ ID NO: 135954 - protein, 7 aa, synthetic construct
NKHATSM

SEQ ID NO: 135955 - protein, 7 aa, synthetic construct
NKHELRT

SEQ ID NO: 135956 - protein, 7 aa, synthetic construct
NKHGPAY

SEQ ID NO: 135957 - protein, 7 aa, synthetic construct
NKHGSDR

SEQ ID NO: 135958 - protein, 7 aa, synthetic construct
NKHGTQI

SEQ ID NO: 135959 - protein, 7 aa, synthetic construct
NKHHITG

SEQ ID NO: 135960 - protein, 7 aa, synthetic construct
NKHITSI

SEQ ID NO: 135961 - protein, 7 aa, synthetic construct
NKHLATL

SEQ ID NO: 135962 - protein, 7 aa, synthetic construct
NKHLITS

SEQ ID NO: 135963 - protein, 7 aa, synthetic construct
NKHLLQS

SEQ ID NO: 135964 - protein, 7 aa, synthetic construct
NKHLPIN

SEQ ID NO: 135965 - protein, 7 aa, synthetic construct
NKHLQGN

SEQ ID NO: 135966 - protein, 7 aa, synthetic construct
NKHLSAI

SEQ ID NO: 135967 - protein, 7 aa, synthetic construct
NKHMAGI

SEQ ID NO: 135968 - protein, 7 aa, synthetic construct
NKHMMGT

SEQ ID NO: 135969 - protein, 7 aa, synthetic construct
NKHMSMV

SEQ ID NO: 135970 - protein, 7 aa, synthetic construct
NKHNPPI

SEQ ID NO: 135971 - protein, 7 aa, synthetic construct
NKHPAQL

SEQ ID NO: 135972 - protein, 7 aa, synthetic construct
NKHPGIV

SEQ ID NO: 135973 - protein, 7 aa, synthetic construct
NKHPQLI

SEQ ID NO: 135974 - protein, 7 aa, synthetic construct
NKHQGFP

SEQ ID NO: 135975 - protein, 7 aa, synthetic construct
NKHQPVN

SEQ ID NO: 135976 - protein, 7 aa, synthetic construct
NKHSLPV

SEQ ID NO: 135977 - protein, 7 aa, synthetic construct
NKHSSLV

SEQ ID NO: 135978 - protein, 7 aa, synthetic construct
NKHTIAI

SEQ ID NO: 135979 - protein, 7 aa, synthetic construct
NKHTIMQ

SEQ ID NO: 135980 - protein, 7 aa, synthetic construct
NKHTMNI

SEQ ID NO: 135981 - protein, 7 aa, synthetic construct
NKHTQIT

SEQ ID NO: 135982 - protein, 7 aa, synthetic construct
NKHTTPT

SEQ ID NO: 135983 - protein, 7 aa, synthetic construct
NKHVDFK

SEQ ID NO: 135984 - protein, 7 aa, synthetic construct
NKHVQVA

SEQ ID NO: 135985 - protein, 7 aa, synthetic construct
NKHVSSM

SEQ ID NO: 135986 - protein, 7 aa, synthetic construct
NKHVTYG

SEQ ID NO: 135987 - protein, 7 aa, synthetic construct
NKIALGH

SEQ ID NO: 135988 - protein, 7 aa, synthetic construct
NKIFKHE

SEQ ID NO: 135989 - protein, 7 aa, synthetic construct
NKIGDRH

SEQ ID NO: 135990 - protein, 7 aa, synthetic construct
NKIGGLI

SEQ ID NO: 135991 - protein, 7 aa, synthetic construct
NKIGHHP

SEQ ID NO: 135992 - protein, 7 aa, synthetic construct
NKIHAMQ

SEQ ID NO: 135993 - protein, 7 aa, synthetic construct
NKIHPRD

SEQ ID NO: 135994 - protein, 7 aa, synthetic construct
NKILMGA

SEQ ID NO: 135995 - protein, 7 aa, synthetic construct
NKIPDVK

SEQ ID NO: 135996 - protein, 7 aa, synthetic construct
NKIPGGH

SEQ ID NO: 135997 - protein, 7 aa, synthetic construct
NKIPGNH

SEQ ID NO: 135998 - protein, 7 aa, synthetic construct
NKIPHNI

SEQ ID NO: 135999 - protein, 7 aa, synthetic construct
NKIPSLL

SEQ ID NO: 136000 - protein, 7 aa, synthetic construct
NKIRLDT

SEQ ID NO: 136001 - protein, 7 aa, synthetic construct
NKISGHF

SEQ ID NO: 136002 - protein, 7 aa, synthetic construct
NKKDEKW

SEQ ID NO: 136003 - protein, 7 aa, synthetic construct
NKKDKWD

SEQ ID NO: 136004 - protein, 7 aa, synthetic construct
NKKDPAW

SEQ ID NO: 136005 - protein, 7 aa, synthetic construct
NKKDVSW

SEQ ID NO: 136006 - protein, 7 aa, synthetic construct
NKKDYAY

SEQ ID NO: 136007 - protein, 7 aa, synthetic construct
NKKFDQQ

SEQ ID NO: 136008 - protein, 7 aa, synthetic construct
NKKIEWG

SEQ ID NO: 136009 - protein, 7 aa, synthetic construct
NKKMDSQ

SEQ ID NO: 136010 - protein, 7 aa, synthetic construct
NKKNDAQ

SEQ ID NO: 136011 - protein, 7 aa, synthetic construct
NKKPDSF

SEQ ID NO: 136012 - protein, 7 aa, synthetic construct
NKKPMYD

SEQ ID NO: 136013 - protein, 7 aa, synthetic construct
NKKSLDM

SEQ ID NO: 136014 - protein, 7 aa, synthetic construct
NKKTADM

SEQ ID NO: 136015 - protein, 7 aa, synthetic construct
NKLDPSR

SEQ ID NO: 136016 - protein, 7 aa, synthetic construct
NKLENRY

SEQ ID NO: 136017 - protein, 7 aa, synthetic construct
NKLERTI

SEQ ID NO: 136018 - protein, 7 aa, synthetic construct
NKLERVV

SEQ ID NO: 136019 - protein, 7 aa, synthetic construct
NKLESMR

SEQ ID NO: 136020 - protein, 7 aa, synthetic construct
NKLGLAI

SEQ ID NO: 136021 - protein, 7 aa, synthetic construct
NKLHGDR

SEQ ID NO: 136022 - protein, 7 aa, synthetic construct
NKLHGGL

SEQ ID NO: 136023 - protein, 7 aa, synthetic construct
NKLIRIE

SEQ ID NO: 136024 - protein, 7 aa, synthetic construct
NKLIRSD

SEQ ID NO: 136025 - protein, 7 aa, synthetic construct
NKLPRND

SEQ ID NO: 136026 - protein, 7 aa, synthetic construct
NKLQHNQ

SEQ ID NO: 136027 - protein, 7 aa, synthetic construct
NKLQVMH

SEQ ID NO: 136028 - protein, 7 aa, synthetic construct
NKLSAPF

SEQ ID NO: 136029 - protein, 7 aa, synthetic construct
NKLTHGN

SEQ ID NO: 136030 - protein, 7 aa, synthetic construct
NKLTPVL

SEQ ID NO: 136031 - protein, 7 aa, synthetic construct
NKLYTSG

SEQ ID NO: 136032 - protein, 7 aa, synthetic construct
NKMDRDR

SEQ ID NO: 136033 - protein, 7 aa, synthetic construct
NKMHATT

SEQ ID NO: 136034 - protein, 7 aa, synthetic construct
NKMHLNM

SEQ ID NO: 136035 - protein, 7 aa, synthetic construct
NKMHVAT

SEQ ID NO: 136036 - protein, 7 aa, synthetic construct
NKMIQAM

SEQ ID NO: 136037 - protein, 7 aa, synthetic construct
NKMKFID

SEQ ID NO: 136038 - protein, 7 aa, synthetic construct
NKMMDVR

SEQ ID NO: 136039 - protein, 7 aa, synthetic construct
NKMMMDK

SEQ ID NO: 136040 - protein, 7 aa, synthetic construct
NKMPHNQ

SEQ ID NO: 136041 - protein, 7 aa, synthetic construct
NKMPITY

SEQ ID NO: 136042 - protein, 7 aa, synthetic construct
NKMQDRA

SEQ ID NO: 136043 - protein, 7 aa, synthetic construct
NKMQRDQ

SEQ ID NO: 136044 - protein, 7 aa, synthetic construct
NKMQVAI

SEQ ID NO: 136045 - protein, 7 aa, synthetic construct
NKMRADV

SEQ ID NO: 136046 - protein, 7 aa, synthetic construct
NKMRASE

SEQ ID NO: 136047 - protein, 7 aa, synthetic construct
NKMRSDA

SEQ ID NO: 136048 - protein, 7 aa, synthetic construct
NKMSDTR

SEQ ID NO: 136049 - protein, 7 aa, synthetic construct
NKMSHIQ

SEQ ID NO: 136050 - protein, 7 aa, synthetic construct
NKMSKEI

SEQ ID NO: 136051 - protein, 7 aa, synthetic construct
NKMSLPI

SEQ ID NO: 136052 - protein, 7 aa, synthetic construct
NKMTDNR

SEQ ID NO: 136053 - protein, 7 aa, synthetic construct
NKMTGYN

SEQ ID NO: 136054 - protein, 7 aa, synthetic construct
NKMTPLH

SEQ ID NO: 136055 - protein, 7 aa, synthetic construct
NKMVDKY

SEQ ID NO: 136056 - protein, 7 aa, synthetic construct
NKMYNAA

SEQ ID NO: 136057 - protein, 7 aa, synthetic construct
NKMYQSV

SEQ ID NO: 136058 - protein, 7 aa, synthetic construct
NKNAPFH

SEQ ID NO: 136059 - protein, 7 aa, synthetic construct
NKNASPH

SEQ ID NO: 136060 - protein, 7 aa, synthetic construct
NKNDRYG

SEQ ID NO: 136061 - protein, 7 aa, synthetic construct
NKNEMRT

SEQ ID NO: 136062 - protein, 7 aa, synthetic construct
NKNEPAK

SEQ ID NO: 136063 - protein, 7 aa, synthetic construct
NKNGKHE

SEQ ID NO: 136064 - protein, 7 aa, synthetic construct
NKNHMMP

SEQ ID NO: 136065 - protein, 7 aa, synthetic construct
NKNHSPF

SEQ ID NO: 136066 - protein, 7 aa, synthetic construct
NKNPREL

SEQ ID NO: 136067 - protein, 7 aa, synthetic construct
NKNQQQW

SEQ ID NO: 136068 - protein, 7 aa, synthetic construct
NKNRDIV

SEQ ID NO: 136069 - protein, 7 aa, synthetic construct
NKNSNHF

SEQ ID NO: 136070 - protein, 7 aa, synthetic construct
NKNSWGA

SEQ ID NO: 136071 - protein, 7 aa, synthetic construct
NKNTNPY

SEQ ID NO: 136072 - protein, 7 aa, synthetic construct
NKNVMDK

SEQ ID NO: 136073 - protein, 7 aa, synthetic construct
NKNVPLN

SEQ ID NO: 136074 - protein, 7 aa, synthetic construct
NKNVVNY

SEQ ID NO: 136075 - protein, 7 aa, synthetic construct
NKPAKHD

SEQ ID NO: 136076 - protein, 7 aa, synthetic construct
NKPAPFM

SEQ ID NO: 136077 - protein, 7 aa, synthetic construct
NKPAYMS

SEQ ID NO: 136078 - protein, 7 aa, synthetic construct
NKPAYSH

SEQ ID NO: 136079 - protein, 7 aa, synthetic construct
NKPDYGV

SEQ ID NO: 136080 - protein, 7 aa, synthetic construct
NKPESAR

SEQ ID NO: 136081 - protein, 7 aa, synthetic construct
NKPFAAS

SEQ ID NO: 136082 - protein, 7 aa, synthetic construct
NKPFANH

SEQ ID NO: 136083 - protein, 7 aa, synthetic construct
NKPFHRE

SEQ ID NO: 136084 - protein, 7 aa, synthetic construct
NKPFQSV

SEQ ID NO: 136085 - protein, 7 aa, synthetic construct
NKPFSDK

SEQ ID NO: 136086 - protein, 7 aa, synthetic construct
NKPGYSV

SEQ ID NO: 136087 - protein, 7 aa, synthetic construct
NKPHDMR

SEQ ID NO: 136088 - protein, 7 aa, synthetic construct
NKPHLSY

SEQ ID NO: 136089 - protein, 7 aa, synthetic construct
NKPHPTF

SEQ ID NO: 136090 - protein, 7 aa, synthetic construct
NKPHVAY

SEQ ID NO: 136091 - protein, 7 aa, synthetic construct
NKPHYVP

SEQ ID NO: 136092 - protein, 7 aa, synthetic construct
NKPIGQY

SEQ ID NO: 136093 - protein, 7 aa, synthetic construct
NKPINLT

SEQ ID NO: 136094 - protein, 7 aa, synthetic construct
NKPLGIH

SEQ ID NO: 136095 - protein, 7 aa, synthetic construct
NKPLPSM

SEQ ID NO: 136096 - protein, 7 aa, synthetic construct
NKPMAHY

SEQ ID NO: 136097 - protein, 7 aa, synthetic construct
NKPMNFV

SEQ ID NO: 136098 - protein, 7 aa, synthetic construct
NKPNYIP

SEQ ID NO: 136099 - protein, 7 aa, synthetic construct
NKPPNMY

SEQ ID NO: 136100 - protein, 7 aa, synthetic construct
NKPPVLM

SEQ ID NO: 136101 - protein, 7 aa, synthetic construct
NKPPVQY

SEQ ID NO: 136102 - protein, 7 aa, synthetic construct
NKPQVFA

SEQ ID NO: 136103 - protein, 7 aa, synthetic construct
NKPRAIE

SEQ ID NO: 136104 - protein, 7 aa, synthetic construct
NKPREDR

SEQ ID NO: 136105 - protein, 7 aa, synthetic construct
NKPRFNE

SEQ ID NO: 136106 - protein, 7 aa, synthetic construct
NKPSRYE

SEQ ID NO: 136107 - protein, 7 aa, synthetic construct
NKPVGSW

SEQ ID NO: 136108 - protein, 7 aa, synthetic construct
NKPVPVY

SEQ ID NO: 136109 - protein, 7 aa, synthetic construct
NKPVSQF

SEQ ID NO: 136110 - protein, 7 aa, synthetic construct
NKPYMTG

SEQ ID NO: 136111 - protein, 7 aa, synthetic construct
NKPYQNL

SEQ ID NO: 136112 - protein, 7 aa, synthetic construct
NKPYSER

SEQ ID NO: 136113 - protein, 7 aa, synthetic construct
NKQEARA

SEQ ID NO: 136114 - protein, 7 aa, synthetic construct
NKQEHRM

SEQ ID NO: 136115 - protein, 7 aa, synthetic construct
NKQEYVR

SEQ ID NO: 136116 - protein, 7 aa, synthetic construct
NKQFQSL

SEQ ID NO: 136117 - protein, 7 aa, synthetic construct
NKQGAAY

SEQ ID NO: 136118 - protein, 7 aa, synthetic construct
NKQHDSK

SEQ ID NO: 136119 - protein, 7 aa, synthetic construct
NKQISQF

SEQ ID NO: 136120 - protein, 7 aa, synthetic construct
NKQISTH

SEQ ID NO: 136121 - protein, 7 aa, synthetic construct
NKQKDAY

SEQ ID NO: 136122 - protein, 7 aa, synthetic construct
NKQQQTA

SEQ ID NO: 136123 - protein, 7 aa, synthetic construct
NKQQYRE

SEQ ID NO: 136124 - protein, 7 aa, synthetic construct
NKQRIYE

SEQ ID NO: 136125 - protein, 7 aa, synthetic construct
NKQSAFM

SEQ ID NO: 136126 - protein, 7 aa, synthetic construct
NKQSHYQ

SEQ ID NO: 136127 - protein, 7 aa, synthetic construct
NKQTHAQ

SEQ ID NO: 136128 - protein, 7 aa, synthetic construct
NKQYPDK

SEQ ID NO: 136129 - protein, 7 aa, synthetic construct
NKQYPNI

SEQ ID NO: 136130 - protein, 7 aa, synthetic construct
NKQYTNA

SEQ ID NO: 136131 - protein, 7 aa, synthetic construct
NKQYVSP

SEQ ID NO: 136132 - protein, 7 aa, synthetic construct
NKRDAAY

SEQ ID NO: 136133 - protein, 7 aa, synthetic construct
NKRDDKA

SEQ ID NO: 136134 - protein, 7 aa, synthetic construct
NKRDFQQ

SEQ ID NO: 136135 - protein, 7 aa, synthetic construct
NKRDGQY

SEQ ID NO: 136136 - protein, 7 aa, synthetic construct
NKRDIIY

SEQ ID NO: 136137 - protein, 7 aa, synthetic construct
NKRFEMG

SEQ ID NO: 136138 - protein, 7 aa, synthetic construct
NKRIVGD

SEQ ID NO: 136139 - protein, 7 aa, synthetic construct
NKRPQFE

SEQ ID NO: 136140 - protein, 7 aa, synthetic construct
NKRSIIE

SEQ ID NO: 136141 - protein, 7 aa, synthetic construct
NKRTENV

SEQ ID NO: 136142 - protein, 7 aa, synthetic construct
NKRTGGD

SEQ ID NO: 136143 - protein, 7 aa, synthetic construct
NKRTMID

SEQ ID NO: 136144 - protein, 7 aa, synthetic construct
NKRTPIE

SEQ ID NO: 136145 - protein, 7 aa, synthetic construct
NKSADHK

SEQ ID NO: 136146 - protein, 7 aa, synthetic construct
NKSDRLI

SEQ ID NO: 136147 - protein, 7 aa, synthetic construct
NKSDTSK

SEQ ID NO: 136148 - protein, 7 aa, synthetic construct
NKSFNHP

SEQ ID NO: 136149 - protein, 7 aa, synthetic construct
NKSGFVH

SEQ ID NO: 136150 - protein, 7 aa, synthetic construct
NKSGHNV

SEQ ID NO: 136151 - protein, 7 aa, synthetic construct
NKSHAMQ

SEQ ID NO: 136152 - protein, 7 aa, synthetic construct
NKSHSLM

SEQ ID NO: 136153 - protein, 7 aa, synthetic construct
NKSKDGL

SEQ ID NO: 136154 - protein, 7 aa, synthetic construct
NKSLDRN

SEQ ID NO: 136155 - protein, 7 aa, synthetic construct
NKSLGEW

SEQ ID NO: 136156 - protein, 7 aa, synthetic construct
NKSMDQK

SEQ ID NO: 136157 - protein, 7 aa, synthetic construct
NKSMDTR

SEQ ID NO: 136158 - protein, 7 aa, synthetic construct
NKSMPSY

SEQ ID NO: 136159 - protein, 7 aa, synthetic construct
NKSNGSW

SEQ ID NO: 136160 - protein, 7 aa, synthetic construct
NKSNHYS

SEQ ID NO: 136161 - protein, 7 aa, synthetic construct
NKSNIYA

SEQ ID NO: 136162 - protein, 7 aa, synthetic construct
NKSPHMT

SEQ ID NO: 136163 - protein, 7 aa, synthetic construct
NKSPYGV

SEQ ID NO: 136164 - protein, 7 aa, synthetic construct
NKSRTVD

SEQ ID NO: 136165 - protein, 7 aa, synthetic construct
NKSSDWK

SEQ ID NO: 136166 - protein, 7 aa, synthetic construct
NKSSWNA

SEQ ID NO: 136167 - protein, 7 aa, synthetic construct
NKSTDYK

SEQ ID NO: 136168 - protein, 7 aa, synthetic construct
NKSTHSL

SEQ ID NO: 136169 - protein, 7 aa, synthetic construct
NKSYEVR

SEQ ID NO: 136170 - protein, 7 aa, synthetic construct
NKSYQNH

SEQ ID NO: 136171 - protein, 7 aa, synthetic construct
NKTAQMM

SEQ ID NO: 136172 - protein, 7 aa, synthetic construct
NKTDFAR

SEQ ID NO: 136173 - protein, 7 aa, synthetic construct
NKTEKNQ

SEQ ID NO: 136174 - protein, 7 aa, synthetic construct
NKTEMAR

SEQ ID NO: 136175 - protein, 7 aa, synthetic construct
NKTEQIR

SEQ ID NO: 136176 - protein, 7 aa, synthetic construct
NKTERTI

SEQ ID NO: 136177 - protein, 7 aa, synthetic construct
NKTFREN

SEQ ID NO: 136178 - protein, 7 aa, synthetic construct
NKTHDIK

SEQ ID NO: 136179 - protein, 7 aa, synthetic construct
NKTHGSL

SEQ ID NO: 136180 - protein, 7 aa, synthetic construct
NKTHLAY

SEQ ID NO: 136181 - protein, 7 aa, synthetic construct
NKTNHGL

SEQ ID NO: 136182 - protein, 7 aa, synthetic construct
NKTNSSH

SEQ ID NO: 136183 - protein, 7 aa, synthetic construct
NKTPLFA

SEQ ID NO: 136184 - protein, 7 aa, synthetic construct
NKTPNLF

SEQ ID NO: 136185 - protein, 7 aa, synthetic construct
NKTQHPI

SEQ ID NO: 136186 - protein, 7 aa, synthetic construct
NKTQYTH

SEQ ID NO: 136187 - protein, 7 aa, synthetic construct
NKTRDII

SEQ ID NO: 136188 - protein, 7 aa, synthetic construct
NKTRSDI

SEQ ID NO: 136189 - protein, 7 aa, synthetic construct
NKTSPMY

SEQ ID NO: 136190 - protein, 7 aa, synthetic construct
NKTYAMN

SEQ ID NO: 136191 - protein, 7 aa, synthetic construct
NKTYQAT

SEQ ID NO: 136192 - protein, 7 aa, synthetic construct
NKTYQRD

SEQ ID NO: 136193 - protein, 7 aa, synthetic construct
NKTYTAV

SEQ ID NO: 136194 - protein, 7 aa, synthetic construct
NKTYVGS

SEQ ID NO: 136195 - protein, 7 aa, synthetic construct
NKTYVHT

SEQ ID NO: 136196 - protein, 7 aa, synthetic construct
NKTYVTQ

SEQ ID NO: 136197 - protein, 7 aa, synthetic construct
NKVATRD

SEQ ID NO: 136198 - protein, 7 aa, synthetic construct
NKVDSVR

SEQ ID NO: 136199 - protein, 7 aa, synthetic construct
NKVHGSY

SEQ ID NO: 136200 - protein, 7 aa, synthetic construct
NKVIRSE

SEQ ID NO: 136201 - protein, 7 aa, synthetic construct
NKVLGPV

SEQ ID NO: 136202 - protein, 7 aa, synthetic construct
NKVLHRD

SEQ ID NO: 136203 - protein, 7 aa, synthetic construct
NKVLQGY

SEQ ID NO: 136204 - protein, 7 aa, synthetic construct
NKVNGYM

SEQ ID NO: 136205 - protein, 7 aa, synthetic construct
NKVNRDM

SEQ ID NO: 136206 - protein, 7 aa, synthetic construct
NKVNYMA

SEQ ID NO: 136207 - protein, 7 aa, synthetic construct
NKVQPMY

SEQ ID NO: 136208 - protein, 7 aa, synthetic construct
NKVRELT

SEQ ID NO: 136209 - protein, 7 aa, synthetic construct
NKVRQDF

SEQ ID NO: 136210 - protein, 7 aa, synthetic construct
NKVRQEH

SEQ ID NO: 136211 - protein, 7 aa, synthetic construct
NKVYQSQ

SEQ ID NO: 136212 - protein, 7 aa, synthetic construct
NKVYSGI

SEQ ID NO: 136213 - protein, 7 aa, synthetic construct
NKVYSVG

SEQ ID NO: 136214 - protein, 7 aa, synthetic construct
NKVYSVP

SEQ ID NO: 136215 - protein, 7 aa, synthetic construct
NKVYTPN

SEQ ID NO: 136216 - protein, 7 aa, synthetic construct
NKWNKEP

SEQ ID NO: 136217 - protein, 7 aa, synthetic construct
NKYAIPA

SEQ ID NO: 136218 - protein, 7 aa, synthetic construct
NKYANEK

SEQ ID NO: 136219 - protein, 7 aa, synthetic construct
NKYAQHP

SEQ ID NO: 136220 - protein, 7 aa, synthetic construct
NKYATQA

SEQ ID NO: 136221 - protein, 7 aa, synthetic construct
NKYAVPN

SEQ ID NO: 136222 - protein, 7 aa, synthetic construct
NKYDSVK

SEQ ID NO: 136223 - protein, 7 aa, synthetic construct
NKYEGSR

SEQ ID NO: 136224 - protein, 7 aa, synthetic construct
NKYEKQI

SEQ ID NO: 136225 - protein, 7 aa, synthetic construct
NKYHLTP

SEQ ID NO: 136226 - protein, 7 aa, synthetic construct
NKYIPVS

SEQ ID NO: 136227 - protein, 7 aa, synthetic construct
NKYISDK

SEQ ID NO: 136228 - protein, 7 aa, synthetic construct
NKYKAMD

SEQ ID NO: 136229 - protein, 7 aa, synthetic construct
NKYKEAL

SEQ ID NO: 136230 - protein, 7 aa, synthetic construct
NKYLPAN

SEQ ID NO: 136231 - protein, 7 aa, synthetic construct
NKYMSPT

SEQ ID NO: 136232 - protein, 7 aa, synthetic construct
NKYMVQS

SEQ ID NO: 136233 - protein, 7 aa, synthetic construct
NKYNINS

SEQ ID NO: 136234 - protein, 7 aa, synthetic construct
NKYNSPN

SEQ ID NO: 136235 - protein, 7 aa, synthetic construct
NKYPISS

SEQ ID NO: 136236 - protein, 7 aa, synthetic construct
NKYPMQA

SEQ ID NO: 136237 - protein, 7 aa, synthetic construct
NKYPSDK

SEQ ID NO: 136238 - protein, 7 aa, synthetic construct
NKYPTGN

SEQ ID NO: 136239 - protein, 7 aa, synthetic construct
NKYQDLK

SEQ ID NO: 136240 - protein, 7 aa, synthetic construct
NKYQPNS

SEQ ID NO: 136241 - protein, 7 aa, synthetic construct
NKYQPNV

SEQ ID NO: 136242 - protein, 7 aa, synthetic construct
NKYRLVE

SEQ ID NO: 136243 - protein, 7 aa, synthetic construct
NKYSVSG

SEQ ID NO: 136244 - protein, 7 aa, synthetic construct
NKYTMAN

SEQ ID NO: 136245 - protein, 7 aa, synthetic construct
NKYTPGI

SEQ ID NO: 136246 - protein, 7 aa, synthetic construct
NKYTPMA

SEQ ID NO: 136247 - protein, 7 aa, synthetic construct
NKYTPVV

SEQ ID NO: 136248 - protein, 7 aa, synthetic construct
NKYVGSN

SEQ ID NO: 136249 - protein, 7 aa, synthetic construct
NLAAKLT

SEQ ID NO: 136250 - protein, 7 aa, synthetic construct
NLAFQNK

SEQ ID NO: 136251 - protein, 7 aa, synthetic construct
NLAMRHG

SEQ ID NO: 136252 - protein, 7 aa, synthetic construct
NLANYSK

SEQ ID NO: 136253 - protein, 7 aa, synthetic construct
NLAPQHR

SEQ ID NO: 136254 - protein, 7 aa, synthetic construct
NLARFDK

SEQ ID NO: 136255 - protein, 7 aa, synthetic construct
NLARIPP

SEQ ID NO: 136256 - protein, 7 aa, synthetic construct
NLDIKQR

SEQ ID NO: 136257 - protein, 7 aa, synthetic construct
NLDKWPK

SEQ ID NO: 136258 - protein, 7 aa, synthetic construct
NLDREKR

SEQ ID NO: 136259 - protein, 7 aa, synthetic construct
NLDVRKM

SEQ ID NO: 136260 - protein, 7 aa, synthetic construct
NLEMRKQ

SEQ ID NO: 136261 - protein, 7 aa, synthetic construct
NLEPAKR

SEQ ID NO: 136262 - protein, 7 aa, synthetic construct
NLFGKKD

SEQ ID NO: 136263 - protein, 7 aa, synthetic construct
NLGAHKF

SEQ ID NO: 136264 - protein, 7 aa, synthetic construct
NLGAKYH

SEQ ID NO: 136265 - protein, 7 aa, synthetic construct
NLGGRPY

SEQ ID NO: 136266 - protein, 7 aa, synthetic construct
NLGHAAK

SEQ ID NO: 136267 - protein, 7 aa, synthetic construct
NLGPTRL

SEQ ID NO: 136268 - protein, 7 aa, synthetic construct
NLGQMHK

SEQ ID NO: 136269 - protein, 7 aa, synthetic construct
NLGQSRA

SEQ ID NO: 136270 - protein, 7 aa, synthetic construct
NLGQTRA

SEQ ID NO: 136271 - protein, 7 aa, synthetic construct
NLGTHMR

SEQ ID NO: 136272 - protein, 7 aa, synthetic construct
NLGYGSH

SEQ ID NO: 136273 - protein, 7 aa, synthetic construct
NLGYGSQ

SEQ ID NO: 136274 - protein, 7 aa, synthetic construct
NLHGRLG

SEQ ID NO: 136275 - protein, 7 aa, synthetic construct
NLHKTQF

SEQ ID NO: 136276 - protein, 7 aa, synthetic construct
NLHLSSR

SEQ ID NO: 136277 - protein, 7 aa, synthetic construct
NLHMGSK

SEQ ID NO: 136278 - protein, 7 aa, synthetic construct
NLHQARL

SEQ ID NO: 136279 - protein, 7 aa, synthetic construct
NLHQRAI

SEQ ID NO: 136280 - protein, 7 aa, synthetic construct
NLHQVGR

SEQ ID NO: 136281 - protein, 7 aa, synthetic construct
NLHRISA

SEQ ID NO: 136282 - protein, 7 aa, synthetic construct
NLIGREK

SEQ ID NO: 136283 - protein, 7 aa, synthetic construct
NLIHRAP

SEQ ID NO: 136284 - protein, 7 aa, synthetic construct
NLIQHKN

SEQ ID NO: 136285 - protein, 7 aa, synthetic construct
NLIRSEK

SEQ ID NO: 136286 - protein, 7 aa, synthetic construct
NLKAYPS

SEQ ID NO: 136287 - protein, 7 aa, synthetic construct
NLKDLYR

SEQ ID NO: 136288 - protein, 7 aa, synthetic construct
NLKDMPK

SEQ ID NO: 136289 - protein, 7 aa, synthetic construct
NLKDMSR

SEQ ID NO: 136290 - protein, 7 aa, synthetic construct
NLKDRYN

SEQ ID NO: 136291 - protein, 7 aa, synthetic construct
NLKGGYL

SEQ ID NO: 136292 - protein, 7 aa, synthetic construct
NLKHQAY

SEQ ID NO: 136293 - protein, 7 aa, synthetic construct
NLKHSPV

SEQ ID NO: 136294 - protein, 7 aa, synthetic construct
NLKMREY

SEQ ID NO: 136295 - protein, 7 aa, synthetic construct
NLKPPQF

SEQ ID NO: 136296 - protein, 7 aa, synthetic construct
NLKSYSS

SEQ ID NO: 136297 - protein, 7 aa, synthetic construct
NLKYISA

SEQ ID NO: 136298 - protein, 7 aa, synthetic construct
NLKYSAQ

SEQ ID NO: 136299 - protein, 7 aa, synthetic construct
NLKYSGA

SEQ ID NO: 136300 - protein, 7 aa, synthetic construct
NLLTHKN

SEQ ID NO: 136301 - protein, 7 aa, synthetic construct
NLMNANR

SEQ ID NO: 136302 - protein, 7 aa, synthetic construct
NLMREPK

SEQ ID NO: 136303 - protein, 7 aa, synthetic construct
NLNKAPF

SEQ ID NO: 136304 - protein, 7 aa, synthetic construct
NLPEKPR

SEQ ID NO: 136305 - protein, 7 aa, synthetic construct
NLPFTKS

SEQ ID NO: 136306 - protein, 7 aa, synthetic construct
NLPGNAR

SEQ ID NO: 136307 - protein, 7 aa, synthetic construct
NLPNAMR

SEQ ID NO: 136308 - protein, 7 aa, synthetic construct
NLPNKYT

SEQ ID NO: 136309 - protein, 7 aa, synthetic construct
NLPRHTV

SEQ ID NO: 136310 - protein, 7 aa, synthetic construct
NLPRMSH

SEQ ID NO: 136311 - protein, 7 aa, synthetic construct
NLPRSHG

SEQ ID NO: 136312 - protein, 7 aa, synthetic construct
NLPSHRN

SEQ ID NO: 136313 - protein, 7 aa, synthetic construct
NLPVQTR

SEQ ID NO: 136314 - protein, 7 aa, synthetic construct
NLPYPKQ

SEQ ID NO: 136315 - protein, 7 aa, synthetic construct
NLQAHNR

SEQ ID NO: 136316 - protein, 7 aa, synthetic construct
NLQDQKR

SEQ ID NO: 136317 - protein, 7 aa, synthetic construct
NLQGAGR

SEQ ID NO: 136318 - protein, 7 aa, synthetic construct
NLQHQFK

SEQ ID NO: 136319 - protein, 7 aa, synthetic construct
NLQHQGK

SEQ ID NO: 136320 - protein, 7 aa, synthetic construct
NLQKHHP

SEQ ID NO: 136321 - protein, 7 aa, synthetic construct
NLQNQIR

SEQ ID NO: 136322 - protein, 7 aa, synthetic construct
NLQRINM

SEQ ID NO: 136323 - protein, 7 aa, synthetic construct
NLQSQGR

SEQ ID NO: 136324 - protein, 7 aa, synthetic construct
NLRAFDK

SEQ ID NO: 136325 - protein, 7 aa, synthetic construct
NLRAYHD

SEQ ID NO: 136326 - protein, 7 aa, synthetic construct
NLRDITR

SEQ ID NO: 136327 - protein, 7 aa, synthetic construct
NLREVPR

SEQ ID NO: 136328 - protein, 7 aa, synthetic construct
NLRHSAG

SEQ ID NO: 136329 - protein, 7 aa, synthetic construct
NLRLTDK

SEQ ID NO: 136330 - protein, 7 aa, synthetic construct
NLRMKSD

SEQ ID NO: 136331 - protein, 7 aa, synthetic construct
NLRPPIP

SEQ ID NO: 136332 - protein, 7 aa, synthetic construct
NLRPQPP

SEQ ID NO: 136333 - protein, 7 aa, synthetic construct
NLRQEDE

SEQ ID NO: 136334 - protein, 7 aa, synthetic construct
NLSARHV

SEQ ID NO: 136335 - protein, 7 aa, synthetic construct
NLSRDGK

SEQ ID NO: 136336 - protein, 7 aa, synthetic construct
NLSYSKV

SEQ ID NO: 136337 - protein, 7 aa, synthetic construct
NLSYVKN

SEQ ID NO: 136338 - protein, 7 aa, synthetic construct
NLTGVPR

SEQ ID NO: 136339 - protein, 7 aa, synthetic construct
NLTGYSY

SEQ ID NO: 136340 - protein, 7 aa, synthetic construct
NLTHKSI

SEQ ID NO: 136341 - protein, 7 aa, synthetic construct
NLTHMKM

SEQ ID NO: 136342 - protein, 7 aa, synthetic construct
NLTHMSK

SEQ ID NO: 136343 - protein, 7 aa, synthetic construct
NLTRNQY

SEQ ID NO: 136344 - protein, 7 aa, synthetic construct
NLTYSKT

SEQ ID NO: 136345 - protein, 7 aa, synthetic construct
NLVLRQG

SEQ ID NO: 136346 - protein, 7 aa, synthetic construct
NLVNSGR

SEQ ID NO: 136347 - protein, 7 aa, synthetic construct
NLVNTPR

SEQ ID NO: 136348 - protein, 7 aa, synthetic construct
NLYNKDK

SEQ ID NO: 136349 - protein, 7 aa, synthetic construct
NLYTGTM

SEQ ID NO: 136350 - protein, 7 aa, synthetic construct
NMAEKRT

SEQ ID NO: 136351 - protein, 7 aa, synthetic construct
NMAGSPR

SEQ ID NO: 136352 - protein, 7 aa, synthetic construct
NMANEKK

SEQ ID NO: 136353 - protein, 7 aa, synthetic construct
NMAPIAR

SEQ ID NO: 136354 - protein, 7 aa, synthetic construct
NMARKDL

SEQ ID NO: 136355 - protein, 7 aa, synthetic construct
NMARKDN

SEQ ID NO: 136356 - protein, 7 aa, synthetic construct
NMASSIR

SEQ ID NO: 136357 - protein, 7 aa, synthetic construct
NMATHRG

SEQ ID NO: 136358 - protein, 7 aa, synthetic construct
NMATRVL

SEQ ID NO: 136359 - protein, 7 aa, synthetic construct
NMAVKMA

SEQ ID NO: 136360 - protein, 7 aa, synthetic construct
NMDQRKQ

SEQ ID NO: 136361 - protein, 7 aa, synthetic construct
NMDRAKS

SEQ ID NO: 136362 - protein, 7 aa, synthetic construct
NMDRGKQ

SEQ ID NO: 136363 - protein, 7 aa, synthetic construct
NMEKPSR

SEQ ID NO: 136364 - protein, 7 aa, synthetic construct
NMEKRQN

SEQ ID NO: 136365 - protein, 7 aa, synthetic construct
NMEPRKY

SEQ ID NO: 136366 - protein, 7 aa, synthetic construct
NMERTKL

SEQ ID NO: 136367 - protein, 7 aa, synthetic construct
NMFKSRE

SEQ ID NO: 136368 - protein, 7 aa, synthetic construct
NMGFTKS

SEQ ID NO: 136369 - protein, 7 aa, synthetic construct
NMGGSAR

SEQ ID NO: 136370 - protein, 7 aa, synthetic construct
NMGHARV

SEQ ID NO: 136371 - protein, 7 aa, synthetic construct
NMGIMRA

SEQ ID NO: 136372 - protein, 7 aa, synthetic construct
NMGKARD

SEQ ID NO: 136373 - protein, 7 aa, synthetic construct
NMGPMKI

SEQ ID NO: 136374 - protein, 7 aa, synthetic construct
NMGPRNA

SEQ ID NO: 136375 - protein, 7 aa, synthetic construct
NMGSSQR

SEQ ID NO: 136376 - protein, 7 aa, synthetic construct
NMGSSRA

SEQ ID NO: 136377 - protein, 7 aa, synthetic construct
NMGVRQL

SEQ ID NO: 136378 - protein, 7 aa, synthetic construct
NMHGGKN

SEQ ID NO: 136379 - protein, 7 aa, synthetic construct
NMHGKGF

SEQ ID NO: 136380 - protein, 7 aa, synthetic construct
NMHGSRP

SEQ ID NO: 136381 - protein, 7 aa, synthetic construct
NMHKSPI

SEQ ID NO: 136382 - protein, 7 aa, synthetic construct
NMHNGTR

SEQ ID NO: 136383 - protein, 7 aa, synthetic construct
NMHPYKA

SEQ ID NO: 136384 - protein, 7 aa, synthetic construct
NMHQVAK

SEQ ID NO: 136385 - protein, 7 aa, synthetic construct
NMHRNGN

SEQ ID NO: 136386 - protein, 7 aa, synthetic construct
NMHSPRA

SEQ ID NO: 136387 - protein, 7 aa, synthetic construct
NMHSQRY

SEQ ID NO: 136388 - protein, 7 aa, synthetic construct
NMIGHKI

SEQ ID NO: 136389 - protein, 7 aa, synthetic construct
NMIKKYE

SEQ ID NO: 136390 - protein, 7 aa, synthetic construct
NMIPKQI

SEQ ID NO: 136391 - protein, 7 aa, synthetic construct
NMISSTK

SEQ ID NO: 136392 - protein, 7 aa, synthetic construct
NMISTAR

SEQ ID NO: 136393 - protein, 7 aa, synthetic construct
NMIVKDK

SEQ ID NO: 136394 - protein, 7 aa, synthetic construct
NMKAQPY

SEQ ID NO: 136395 - protein, 7 aa, synthetic construct
NMKDLQR

SEQ ID NO: 136396 - protein, 7 aa, synthetic construct
NMKDQYK

SEQ ID NO: 136397 - protein, 7 aa, synthetic construct
NMKGEFR

SEQ ID NO: 136398 - protein, 7 aa, synthetic construct
NMKHTPY

SEQ ID NO: 136399 - protein, 7 aa, synthetic construct
NMKIYAG

SEQ ID NO: 136400 - protein, 7 aa, synthetic construct
NMKNMAF

SEQ ID NO: 136401 - protein, 7 aa, synthetic construct
NMKPYER

SEQ ID NO: 136402 - protein, 7 aa, synthetic construct
NMKRVQE

SEQ ID NO: 136403 - protein, 7 aa, synthetic construct
NMKSHGF

SEQ ID NO: 136404 - protein, 7 aa, synthetic construct
NMKSHIV

SEQ ID NO: 136405 - protein, 7 aa, synthetic construct
NMKSPKD

SEQ ID NO: 136406 - protein, 7 aa, synthetic construct
NMKSWEK

SEQ ID NO: 136407 - protein, 7 aa, synthetic construct
NMKTMKP

SEQ ID NO: 136408 - protein, 7 aa, synthetic construct
NMKTPGF

SEQ ID NO: 136409 - protein, 7 aa, synthetic construct
NMKYVPT

SEQ ID NO: 136410 - protein, 7 aa, synthetic construct
NMLGHKS

SEQ ID NO: 136411 - protein, 7 aa, synthetic construct
NMLGSRS

SEQ ID NO: 136412 - protein, 7 aa, synthetic construct
NMLKRDV

SEQ ID NO: 136413 - protein, 7 aa, synthetic construct
NMLNVPR

SEQ ID NO: 136414 - protein, 7 aa, synthetic construct
NMLPRQA

SEQ ID NO: 136415 - protein, 7 aa, synthetic construct
NMLRRVE

SEQ ID NO: 136416 - protein, 7 aa, synthetic construct
NMMHAAK

SEQ ID NO: 136417 - protein, 7 aa, synthetic construct
NMMKHRE

SEQ ID NO: 136418 - protein, 7 aa, synthetic construct
NMMPRQG

SEQ ID NO: 136419 - protein, 7 aa, synthetic construct
NMMQSQK

SEQ ID NO: 136420 - protein, 7 aa, synthetic construct
NMMSGSR

SEQ ID NO: 136421 - protein, 7 aa, synthetic construct
NMNLHRG

SEQ ID NO: 136422 - protein, 7 aa, synthetic construct
NMNPERR

SEQ ID NO: 136423 - protein, 7 aa, synthetic construct
NMNPRSS

SEQ ID NO: 136424 - protein, 7 aa, synthetic construct
NMNQVTR

SEQ ID NO: 136425 - protein, 7 aa, synthetic construct
NMNRDVK

SEQ ID NO: 136426 - protein, 7 aa, synthetic construct
NMNRQHM

SEQ ID NO: 136427 - protein, 7 aa, synthetic construct
NMNSSIR

SEQ ID NO: 136428 - protein, 7 aa, synthetic construct
NMNSVTR

SEQ ID NO: 136429 - protein, 7 aa, synthetic construct
NMPHKSL

SEQ ID NO: 136430 - protein, 7 aa, synthetic construct
NMPILRG

SEQ ID NO: 136431 - protein, 7 aa, synthetic construct
NMPKMYG

SEQ ID NO: 136432 - protein, 7 aa, synthetic construct
NMPNRER

SEQ ID NO: 136433 - protein, 7 aa, synthetic construct
NMPPRIV

SEQ ID NO: 136434 - protein, 7 aa, synthetic construct
NMPPRNI

SEQ ID NO: 136435 - protein, 7 aa, synthetic construct
NMPRAIQ

SEQ ID NO: 136436 - protein, 7 aa, synthetic construct
NMPRAVI

SEQ ID NO: 136437 - protein, 7 aa, synthetic construct
NMPRSIN

SEQ ID NO: 136438 - protein, 7 aa, synthetic construct
NMPSQGR

SEQ ID NO: 136439 - protein, 7 aa, synthetic construct
NMPVKYV

SEQ ID NO: 136440 - protein, 7 aa, synthetic construct
NMQKHNL

SEQ ID NO: 136441 - protein, 7 aa, synthetic construct
NMQNLNR

SEQ ID NO: 136442 - protein, 7 aa, synthetic construct
NMQVRVN

SEQ ID NO: 136443 - protein, 7 aa, synthetic construct
NMRAPRD

SEQ ID NO: 136444 - protein, 7 aa, synthetic construct
NMRAVPV

SEQ ID NO: 136445 - protein, 7 aa, synthetic construct
NMREQTK

SEQ ID NO: 136446 - protein, 7 aa, synthetic construct
NMRKGQD

SEQ ID NO: 136447 - protein, 7 aa, synthetic construct
NMRKVSD

SEQ ID NO: 136448 - protein, 7 aa, synthetic construct
NMRMPTV

SEQ ID NO: 136449 - protein, 7 aa, synthetic construct
NMRPPVL

SEQ ID NO: 136450 - protein, 7 aa, synthetic construct
NMRQADK

SEQ ID NO: 136451 - protein, 7 aa, synthetic construct
NMRQGAH

SEQ ID NO: 136452 - protein, 7 aa, synthetic construct
NMRQSPI

SEQ ID NO: 136453 - protein, 7 aa, synthetic construct
NMRSDMK

SEQ ID NO: 136454 - protein, 7 aa, synthetic construct
NMRTGLH

SEQ ID NO: 136455 - protein, 7 aa, synthetic construct
NMRTGRD

SEQ ID NO: 136456 - protein, 7 aa, synthetic construct
NMSGMNR

SEQ ID NO: 136457 - protein, 7 aa, synthetic construct
NMSGVSR

SEQ ID NO: 136458 - protein, 7 aa, synthetic construct
NMSGYKG

SEQ ID NO: 136459 - protein, 7 aa, synthetic construct
NMSHLRE

SEQ ID NO: 136460 - protein, 7 aa, synthetic construct
NMSHPMK

SEQ ID NO: 136461 - protein, 7 aa, synthetic construct
NMSHVRA

SEQ ID NO: 136462 - protein, 7 aa, synthetic construct
NMSKSDK

SEQ ID NO: 136463 - protein, 7 aa, synthetic construct
NMSMNAR

SEQ ID NO: 136464 - protein, 7 aa, synthetic construct
NMSMQPR

SEQ ID NO: 136465 - protein, 7 aa, synthetic construct
NMSSQRM

SEQ ID NO: 136466 - protein, 7 aa, synthetic construct
NMSTQSR

SEQ ID NO: 136467 - protein, 7 aa, synthetic construct
NMSTRKD

SEQ ID NO: 136468 - protein, 7 aa, synthetic construct
NMSVRSL

SEQ ID NO: 136469 - protein, 7 aa, synthetic construct
NMTGGIR

SEQ ID NO: 136470 - protein, 7 aa, synthetic construct
NMTHVPK

SEQ ID NO: 136471 - protein, 7 aa, synthetic construct
NMTNQMR

SEQ ID NO: 136472 - protein, 7 aa, synthetic construct
NMTRARD

SEQ ID NO: 136473 - protein, 7 aa, synthetic construct
NMTRMPV

SEQ ID NO: 136474 - protein, 7 aa, synthetic construct
NMVGIRN

SEQ ID NO: 136475 - protein, 7 aa, synthetic construct
NMVRARD

SEQ ID NO: 136476 - protein, 7 aa, synthetic construct
NMVSSVA

SEQ ID NO: 136477 - protein, 7 aa, synthetic construct
NMYKAHH

SEQ ID NO: 136478 - protein, 7 aa, synthetic construct
NMYPGKP

SEQ ID NO: 136479 - protein, 7 aa, synthetic construct
NMYSAKA

SEQ ID NO: 136480 - protein, 7 aa, synthetic construct
NNAAKHM

SEQ ID NO: 136481 - protein, 7 aa, synthetic construct
NNAHIKH

SEQ ID NO: 136482 - protein, 7 aa, synthetic construct
NNAKQSW

SEQ ID NO: 136483 - protein, 7 aa, synthetic construct
NNAMATR

SEQ ID NO: 136484 - protein, 7 aa, synthetic construct
NNAMRTS

SEQ ID NO: 136485 - protein, 7 aa, synthetic construct
NNAMSAR

SEQ ID NO: 136486 - protein, 7 aa, synthetic construct
NNAPSPR

SEQ ID NO: 136487 - protein, 7 aa, synthetic construct
NNAQRSM

SEQ ID NO: 136488 - protein, 7 aa, synthetic construct
NNAQTAR

SEQ ID NO: 136489 - protein, 7 aa, synthetic construct
NNARNQL

SEQ ID NO: 136490 - protein, 7 aa, synthetic construct
NNARQQM

SEQ ID NO: 136491 - protein, 7 aa, synthetic construct
NNASHIR

SEQ ID NO: 136492 - protein, 7 aa, synthetic construct
NNASNPR

SEQ ID NO: 136493 - protein, 7 aa, synthetic construct
NNASNVR

SEQ ID NO: 136494 - protein, 7 aa, synthetic construct
NNATRTT

SEQ ID NO: 136495 - protein, 7 aa, synthetic construct
NNDKRFI

SEQ ID NO: 136496 - protein, 7 aa, synthetic construct
NNDLKTR

SEQ ID NO: 136497 - protein, 7 aa, synthetic construct
NNDRLQK

SEQ ID NO: 136498 - protein, 7 aa, synthetic construct
NNDVKPR

SEQ ID NO: 136499 - protein, 7 aa, synthetic construct
NNEQRPR

SEQ ID NO: 136500 - protein, 7 aa, synthetic construct
NNEVKLR

SEQ ID NO: 136501 - protein, 7 aa, synthetic construct
NNFPKPH

SEQ ID NO: 136502 - protein, 7 aa, synthetic construct
NNFRQSV

SEQ ID NO: 136503 - protein, 7 aa, synthetic construct
NNFSSAK

SEQ ID NO: 136504 - protein, 7 aa, synthetic construct
NNFVKHH

SEQ ID NO: 136505 - protein, 7 aa, synthetic construct
NNGAHRM

SEQ ID NO: 136506 - protein, 7 aa, synthetic construct
NNGFGSK

SEQ ID NO: 136507 - protein, 7 aa, synthetic construct
NNGGIGR

SEQ ID NO: 136508 - protein, 7 aa, synthetic construct
NNGGTPW

SEQ ID NO: 136509 - protein, 7 aa, synthetic construct
NNGHQVR

SEQ ID NO: 136510 - protein, 7 aa, synthetic construct
NNGLGHK

SEQ ID NO: 136511 - protein, 7 aa, synthetic construct
NNGLYAK

SEQ ID NO: 136512 - protein, 7 aa, synthetic construct
NNGMGSR

SEQ ID NO: 136513 - protein, 7 aa, synthetic construct
NNGMSFK

SEQ ID NO: 136514 - protein, 7 aa, synthetic construct
NNGPHMR

SEQ ID NO: 136515 - protein, 7 aa, synthetic construct
NNGVHFK

SEQ ID NO: 136516 - protein, 7 aa, synthetic construct
NNGYTTR

SEQ ID NO: 136517 - protein, 7 aa, synthetic construct
NNHAKNN

SEQ ID NO: 136518 - protein, 7 aa, synthetic construct
NNHAKTL

SEQ ID NO: 136519 - protein, 7 aa, synthetic construct
NNHGKAF

SEQ ID NO: 136520 - protein, 7 aa, synthetic construct
NNHGKST

SEQ ID NO: 136521 - protein, 7 aa, synthetic construct
NNHGLRI

SEQ ID NO: 136522 - protein, 7 aa, synthetic construct
NNHLKIT

SEQ ID NO: 136523 - protein, 7 aa, synthetic construct
NNHMAVK

SEQ ID NO: 136524 - protein, 7 aa, synthetic construct
NNHMQAK

SEQ ID NO: 136525 - protein, 7 aa, synthetic construct
NNHNSTK

SEQ ID NO: 136526 - protein, 7 aa, synthetic construct
NNHSQRT

SEQ ID NO: 136527 - protein, 7 aa, synthetic construct
NNHSRYA

SEQ ID NO: 136528 - protein, 7 aa, synthetic construct
NNHTFKT

SEQ ID NO: 136529 - protein, 7 aa, synthetic construct
NNHTTPK

SEQ ID NO: 136530 - protein, 7 aa, synthetic construct
NNIAMQR

SEQ ID NO: 136531 - protein, 7 aa, synthetic construct
NNIKPPI

SEQ ID NO: 136532 - protein, 7 aa, synthetic construct
NNIPRGM

SEQ ID NO: 136533 - protein, 7 aa, synthetic construct
NNIQQRM

SEQ ID NO: 136534 - protein, 7 aa, synthetic construct
NNIRNIQ

SEQ ID NO: 136535 - protein, 7 aa, synthetic construct
NNIRNTL

SEQ ID NO: 136536 - protein, 7 aa, synthetic construct
NNIRSYS

SEQ ID NO: 136537 - protein, 7 aa, synthetic construct
NNITAKW

SEQ ID NO: 136538 - protein, 7 aa, synthetic construct
NNITQRS

SEQ ID NO: 136539 - protein, 7 aa, synthetic construct
NNITRQN

SEQ ID NO: 136540 - protein, 7 aa, synthetic construct
NNITSGR

SEQ ID NO: 136541 - protein, 7 aa, synthetic construct
NNIVHRT

SEQ ID NO: 136542 - protein, 7 aa, synthetic construct
NNIVRSI

SEQ ID NO: 136543 - protein, 7 aa, synthetic construct
NNKEGRF

SEQ ID NO: 136544 - protein, 7 aa, synthetic construct
NNKGDKM

SEQ ID NO: 136545 - protein, 7 aa, synthetic construct
NNKKEYQ

SEQ ID NO: 136546 - protein, 7 aa, synthetic construct
NNKVGHW

SEQ ID NO: 136547 - protein, 7 aa, synthetic construct
NNKVVPY

SEQ ID NO: 136548 - protein, 7 aa, synthetic construct
NNKYGNY

SEQ ID NO: 136549 - protein, 7 aa, synthetic construct
NNLAGPR

SEQ ID NO: 136550 - protein, 7 aa, synthetic construct
NNLAKLT

SEQ ID NO: 136551 - protein, 7 aa, synthetic construct
NNLGGYK

SEQ ID NO: 136552 - protein, 7 aa, synthetic construct
NNLHVPR

SEQ ID NO: 136553 - protein, 7 aa, synthetic construct
NNLPARS

SEQ ID NO: 136554 - protein, 7 aa, synthetic construct
NNLPVRM

SEQ ID NO: 136555 - protein, 7 aa, synthetic construct
NNLRMTQ

SEQ ID NO: 136556 - protein, 7 aa, synthetic construct
NNMAKTY

SEQ ID NO: 136557 - protein, 7 aa, synthetic construct
NNMAMRT

SEQ ID NO: 136558 - protein, 7 aa, synthetic construct
NNMAVKW

SEQ ID NO: 136559 - protein, 7 aa, synthetic construct
NNMMHNK

SEQ ID NO: 136560 - protein, 7 aa, synthetic construct
NNMNGSR

SEQ ID NO: 136561 - protein, 7 aa, synthetic construct
NNMPIKH

SEQ ID NO: 136562 - protein, 7 aa, synthetic construct
NNMPPRA

SEQ ID NO: 136563 - protein, 7 aa, synthetic construct
NNMRNSV

SEQ ID NO: 136564 - protein, 7 aa, synthetic construct
NNNANGR

SEQ ID NO: 136565 - protein, 7 aa, synthetic construct
NNNAPGR

SEQ ID NO: 136566 - protein, 7 aa, synthetic construct
NNNGKNW

SEQ ID NO: 136567 - protein, 7 aa, synthetic construct
NNNGSAR

SEQ ID NO: 136568 - protein, 7 aa, synthetic construct
NNNIRPY

SEQ ID NO: 136569 - protein, 7 aa, synthetic construct
NNNKQHY

SEQ ID NO: 136570 - protein, 7 aa, synthetic construct
NNNLHTK

SEQ ID NO: 136571 - protein, 7 aa, synthetic construct
NNNLKQW

SEQ ID NO: 136572 - protein, 7 aa, synthetic construct
NNNLNPR

SEQ ID NO: 136573 - protein, 7 aa, synthetic construct
NNNLSNR

SEQ ID NO: 136574 - protein, 7 aa, synthetic construct
NNNPKDK

SEQ ID NO: 136575 - protein, 7 aa, synthetic construct
NNNPSRY

SEQ ID NO: 136576 - protein, 7 aa, synthetic construct
NNNPTLR

SEQ ID NO: 136577 - protein, 7 aa, synthetic construct
NNNQGYK

SEQ ID NO: 136578 - protein, 7 aa, synthetic construct
NNNQQQR

SEQ ID NO: 136579 - protein, 7 aa, synthetic construct
NNNRPTT

SEQ ID NO: 136580 - protein, 7 aa, synthetic construct
NNNSGIR

SEQ ID NO: 136581 - protein, 7 aa, synthetic construct
NNNTFQK

SEQ ID NO: 136582 - protein, 7 aa, synthetic construct
NNNTTNR

SEQ ID NO: 136583 - protein, 7 aa, synthetic construct
NNPAERR

SEQ ID NO: 136584 - protein, 7 aa, synthetic construct
NNPAMMR

SEQ ID NO: 136585 - protein, 7 aa, synthetic construct
NNPNSFK

SEQ ID NO: 136586 - protein, 7 aa, synthetic construct
NNPPNTR

SEQ ID NO: 136587 - protein, 7 aa, synthetic construct
NNPRRDS

SEQ ID NO: 136588 - protein, 7 aa, synthetic construct
NNPTTGR

SEQ ID NO: 136589 - protein, 7 aa, synthetic construct
NNPVTTR

SEQ ID NO: 136590 - protein, 7 aa, synthetic construct
NNQANSR

SEQ ID NO: 136591 - protein, 7 aa, synthetic construct
NNQGHIK

SEQ ID NO: 136592 - protein, 7 aa, synthetic construct
NNQGSAR

SEQ ID NO: 136593 - protein, 7 aa, synthetic construct
NNQIGAR

SEQ ID NO: 136594 - protein, 7 aa, synthetic construct
NNQIRQT

SEQ ID NO: 136595 - protein, 7 aa, synthetic construct
NNQIRQV

SEQ ID NO: 136596 - protein, 7 aa, synthetic construct
NNQMRSI

SEQ ID NO: 136597 - protein, 7 aa, synthetic construct
NNQNPHD

SEQ ID NO: 136598 - protein, 7 aa, synthetic construct
NNQNRQA

SEQ ID NO: 136599 - protein, 7 aa, synthetic construct
NNQNSQK

SEQ ID NO: 136600 - protein, 7 aa, synthetic construct
NNQPFSK

SEQ ID NO: 136601 - protein, 7 aa, synthetic construct
NNQPRLY

SEQ ID NO: 136602 - protein, 7 aa, synthetic construct
NNQQFRN

SEQ ID NO: 136603 - protein, 7 aa, synthetic construct
NNQQSMK

SEQ ID NO: 136604 - protein, 7 aa, synthetic construct
NNQQTRL

SEQ ID NO: 136605 - protein, 7 aa, synthetic construct
NNQRAVV

SEQ ID NO: 136606 - protein, 7 aa, synthetic construct
NNQRIMT

SEQ ID NO: 136607 - protein, 7 aa, synthetic construct
NNQRPSI

SEQ ID NO: 136608 - protein, 7 aa, synthetic construct
NNQTQFK

SEQ ID NO: 136609 - protein, 7 aa, synthetic construct
NNQTRLH

SEQ ID NO: 136610 - protein, 7 aa, synthetic construct
NNQTYKL

SEQ ID NO: 136611 - protein, 7 aa, synthetic construct
NNQTYRQ

SEQ ID NO: 136612 - protein, 7 aa, synthetic construct
NNQVARN

SEQ ID NO: 136613 - protein, 7 aa, synthetic construct
NNQVRYT

SEQ ID NO: 136614 - protein, 7 aa, synthetic construct
NNRAVSL

SEQ ID NO: 136615 - protein, 7 aa, synthetic construct
NNRELGK

SEQ ID NO: 136616 - protein, 7 aa, synthetic construct
NNRETGK

SEQ ID NO: 136617 - protein, 7 aa, synthetic construct
NNRLDLK

SEQ ID NO: 136618 - protein, 7 aa, synthetic construct
NNRMVSL

SEQ ID NO: 136619 - protein, 7 aa, synthetic construct
NNRNGMY

SEQ ID NO: 136620 - protein, 7 aa, synthetic construct
NNRNLLV

SEQ ID NO: 136621 - protein, 7 aa, synthetic construct
NNRQTHS

SEQ ID NO: 136622 - protein, 7 aa, synthetic construct
NNRQVQW

SEQ ID NO: 136623 - protein, 7 aa, synthetic construct
NNRVIRD

SEQ ID NO: 136624 - protein, 7 aa, synthetic construct
NNRVQQT

SEQ ID NO: 136625 - protein, 7 aa, synthetic construct
NNSATNR

SEQ ID NO: 136626 - protein, 7 aa, synthetic construct
NNSGFGK

SEQ ID NO: 136627 - protein, 7 aa, synthetic construct
NNSGQAR

SEQ ID NO: 136628 - protein, 7 aa, synthetic construct
NNSNKDR

SEQ ID NO: 136629 - protein, 7 aa, synthetic construct
NNSNLAR

SEQ ID NO: 136630 - protein, 7 aa, synthetic construct
NNSQIRY

SEQ ID NO: 136631 - protein, 7 aa, synthetic construct
NNSQKDK

SEQ ID NO: 136632 - protein, 7 aa, synthetic construct
NNSQRST

SEQ ID NO: 136633 - protein, 7 aa, synthetic construct
NNSRFNS

SEQ ID NO: 136634 - protein, 7 aa, synthetic construct
NNSSAFK

SEQ ID NO: 136635 - protein, 7 aa, synthetic construct
NNSTARQ

SEQ ID NO: 136636 - protein, 7 aa, synthetic construct
NNSTQRQ

SEQ ID NO: 136637 - protein, 7 aa, synthetic construct
NNSTTHR

SEQ ID NO: 136638 - protein, 7 aa, synthetic construct
NNSVSLR

SEQ ID NO: 136639 - protein, 7 aa, synthetic construct
NNTAYAR

SEQ ID NO: 136640 - protein, 7 aa, synthetic construct
NNTGQHR

SEQ ID NO: 136641 - protein, 7 aa, synthetic construct
NNTHTSK

SEQ ID NO: 136642 - protein, 7 aa, synthetic construct
NNTHYVK

SEQ ID NO: 136643 - protein, 7 aa, synthetic construct
NNTIRDR

SEQ ID NO: 136644 - protein, 7 aa, synthetic construct
NNTITHR

SEQ ID NO: 136645 - protein, 7 aa, synthetic construct
NNTKHSQ

SEQ ID NO: 136646 - protein, 7 aa, synthetic construct
NNTMRAL

SEQ ID NO: 136647 - protein, 7 aa, synthetic construct
NNTQRSF

SEQ ID NO: 136648 - protein, 7 aa, synthetic construct
NNTQRSY

SEQ ID NO: 136649 - protein, 7 aa, synthetic construct
NNTRQMT

SEQ ID NO: 136650 - protein, 7 aa, synthetic construct
NNTSPQR

SEQ ID NO: 136651 - protein, 7 aa, synthetic construct
NNTSWPK

SEQ ID NO: 136652 - protein, 7 aa, synthetic construct
NNTTGSR

SEQ ID NO: 136653 - protein, 7 aa, synthetic construct
NNTTRMH

SEQ ID NO: 136654 - protein, 7 aa, synthetic construct
NNVAHIR

SEQ ID NO: 136655 - protein, 7 aa, synthetic construct
NNVAIRM

SEQ ID NO: 136656 - protein, 7 aa, synthetic construct
NNVARMM

SEQ ID NO: 136657 - protein, 7 aa, synthetic construct
NNVGKGW

SEQ ID NO: 136658 - protein, 7 aa, synthetic construct
NNVGSGK

SEQ ID NO: 136659 - protein, 7 aa, synthetic construct
NNVGYSK

SEQ ID NO: 136660 - protein, 7 aa, synthetic construct
NNVIRMQ

SEQ ID NO: 136661 - protein, 7 aa, synthetic construct
NNVKDAR

SEQ ID NO: 136662 - protein, 7 aa, synthetic construct
NNVMNMR

SEQ ID NO: 136663 - protein, 7 aa, synthetic construct
NNVNGFR

SEQ ID NO: 136664 - protein, 7 aa, synthetic construct
NNVNSKY

SEQ ID NO: 136665 - protein, 7 aa, synthetic construct
NNVNVRQ

SEQ ID NO: 136666 - protein, 7 aa, synthetic construct
NNVPQMR

SEQ ID NO: 136667 - protein, 7 aa, synthetic construct
NNVPRAA

SEQ ID NO: 136668 - protein, 7 aa, synthetic construct
NNVQRMM

SEQ ID NO: 136669 - protein, 7 aa, synthetic construct
NNVRTYV

SEQ ID NO: 136670 - protein, 7 aa, synthetic construct
NNVRVMH

SEQ ID NO: 136671 - protein, 7 aa, synthetic construct
NNYAPRS

SEQ ID NO: 136672 - protein, 7 aa, synthetic construct
NNYGDGH

SEQ ID NO: 136673 - protein, 7 aa, synthetic construct
NNYGGSL

SEQ ID NO: 136674 - protein, 7 aa, synthetic construct
NNYMRNG

SEQ ID NO: 136675 - protein, 7 aa, synthetic construct
NNYNVMK

SEQ ID NO: 136676 - protein, 7 aa, synthetic construct
NNYPKLL

SEQ ID NO: 136677 - protein, 7 aa, synthetic construct
NNYSGGR

SEQ ID NO: 136678 - protein, 7 aa, synthetic construct
NNYSQKF

SEQ ID NO: 136679 - protein, 7 aa, synthetic construct
NNYTKHL

SEQ ID NO: 136680 - protein, 7 aa, synthetic construct
NNYTLQK

SEQ ID NO: 136681 - protein, 7 aa, synthetic construct
NPAAKMY

SEQ ID NO: 136682 - protein, 7 aa, synthetic construct
NPAERRP

SEQ ID NO: 136683 - protein, 7 aa, synthetic construct
NPAHRMA

SEQ ID NO: 136684 - protein, 7 aa, synthetic construct
NPAHRTM

SEQ ID NO: 136685 - protein, 7 aa, synthetic construct
NPAKYST

SEQ ID NO: 136686 - protein, 7 aa, synthetic construct
NPAQSNR

SEQ ID NO: 136687 - protein, 7 aa, synthetic construct
NPARDNR

SEQ ID NO: 136688 - protein, 7 aa, synthetic construct
NPARDSK

SEQ ID NO: 136689 - protein, 7 aa, synthetic construct
NPARHPV

SEQ ID NO: 136690 - protein, 7 aa, synthetic construct
NPARKGD

SEQ ID NO: 136691 - protein, 7 aa, synthetic construct
NPASHSR

SEQ ID NO: 136692 - protein, 7 aa, synthetic construct
NPAVRRE

SEQ ID NO: 136693 - protein, 7 aa, synthetic construct
NPDARPK

SEQ ID NO: 136694 - protein, 7 aa, synthetic construct
NPDKKWA

SEQ ID NO: 136695 - protein, 7 aa, synthetic construct
NPDNRTR

SEQ ID NO: 136696 - protein, 7 aa, synthetic construct
NPDQRQR

SEQ ID NO: 136697 - protein, 7 aa, synthetic construct
NPDRKFV

SEQ ID NO: 136698 - protein, 7 aa, synthetic construct
NPDRKMF

SEQ ID NO: 136699 - protein, 7 aa, synthetic construct
NPDRMRN

SEQ ID NO: 136700 - protein, 7 aa, synthetic construct
NPDRSNK

SEQ ID NO: 136701 - protein, 7 aa, synthetic construct
NPDRSRT

SEQ ID NO: 136702 - protein, 7 aa, synthetic construct
NPDSRPR

SEQ ID NO: 136703 - protein, 7 aa, synthetic construct
NPEAKPR

SEQ ID NO: 136704 - protein, 7 aa, synthetic construct
NPEHKKV

SEQ ID NO: 136705 - protein, 7 aa, synthetic construct
NPFNKMG

SEQ ID NO: 136706 - protein, 7 aa, synthetic construct
NPFRAKE

SEQ ID NO: 136707 - protein, 7 aa, synthetic construct
NPFRENK

SEQ ID NO: 136708 - protein, 7 aa, synthetic construct
NPGIPNR

SEQ ID NO: 136709 - protein, 7 aa, synthetic construct
NPGPSRL

SEQ ID NO: 136710 - protein, 7 aa, synthetic construct
NPGQQAR

SEQ ID NO: 136711 - protein, 7 aa, synthetic construct
NPGREKT

SEQ ID NO: 136712 - protein, 7 aa, synthetic construct
NPGTKRD

SEQ ID NO: 136713 - protein, 7 aa, synthetic construct
NPGVTRY

SEQ ID NO: 136714 - protein, 7 aa, synthetic construct
NPGYSQK

SEQ ID NO: 136715 - protein, 7 aa, synthetic construct
NPHAARN

SEQ ID NO: 136716 - protein, 7 aa, synthetic construct
NPHASRQ

SEQ ID NO: 136717 - protein, 7 aa, synthetic construct
NPHGRMN

SEQ ID NO: 136718 - protein, 7 aa, synthetic construct
NPHHKTQ

SEQ ID NO: 136719 - protein, 7 aa, synthetic construct
NPHKAYP

SEQ ID NO: 136720 - protein, 7 aa, synthetic construct
NPHKHSG

SEQ ID NO: 136721 - protein, 7 aa, synthetic construct
NPHKLSH

SEQ ID NO: 136722 - protein, 7 aa, synthetic construct
NPHPSRY

SEQ ID NO: 136723 - protein, 7 aa, synthetic construct
NPHQGSK

SEQ ID NO: 136724 - protein, 7 aa, synthetic construct
NPHQTKY

SEQ ID NO: 136725 - protein, 7 aa, synthetic construct
NPHRVQT

SEQ ID NO: 136726 - protein, 7 aa, synthetic construct
NPHTGSR

SEQ ID NO: 136727 - protein, 7 aa, synthetic construct
NPHVALR

SEQ ID NO: 136728 - protein, 7 aa, synthetic construct
NPIERRA

SEQ ID NO: 136729 - protein, 7 aa, synthetic construct
NPIHNRG

SEQ ID NO: 136730 - protein, 7 aa, synthetic construct
NPILRGA

SEQ ID NO: 136731 - protein, 7 aa, synthetic construct
NPKHASM

SEQ ID NO: 136732 - protein, 7 aa, synthetic construct
NPKIAHF

SEQ ID NO: 136733 - protein, 7 aa, synthetic construct
NPKIVAI

SEQ ID NO: 136734 - protein, 7 aa, synthetic construct
NPKLDGR

SEQ ID NO: 136735 - protein, 7 aa, synthetic construct
NPKLGLM

SEQ ID NO: 136736 - protein, 7 aa, synthetic construct
NPKMIGH

SEQ ID NO: 136737 - protein, 7 aa, synthetic construct
NPKQPLF

SEQ ID NO: 136738 - protein, 7 aa, synthetic construct
NPKQRDN

SEQ ID NO: 136739 - protein, 7 aa, synthetic construct
NPKRVEM

SEQ ID NO: 136740 - protein, 7 aa, synthetic construct
NPKSQTW

SEQ ID NO: 136741 - protein, 7 aa, synthetic construct
NPKTRDM

SEQ ID NO: 136742 - protein, 7 aa, synthetic construct
NPKYTPM

SEQ ID NO: 136743 - protein, 7 aa, synthetic construct
NPLHARN

SEQ ID NO: 136744 - protein, 7 aa, synthetic construct
NPLHTRA

SEQ ID NO: 136745 - protein, 7 aa, synthetic construct
NPLQTHK

SEQ ID NO: 136746 - protein, 7 aa, synthetic construct
NPMALRP

SEQ ID NO: 136747 - protein, 7 aa, synthetic construct
NPMFSKG

SEQ ID NO: 136748 - protein, 7 aa, synthetic construct
NPMRIQV

SEQ ID NO: 136749 - protein, 7 aa, synthetic construct
NPNEVRR

SEQ ID NO: 136750 - protein, 7 aa, synthetic construct
NPNGSNR

SEQ ID NO: 136751 - protein, 7 aa, synthetic construct
NPNKARD

SEQ ID NO: 136752 - protein, 7 aa, synthetic construct
NPNKMPF

SEQ ID NO: 136753 - protein, 7 aa, synthetic construct
NPNQQNR

SEQ ID NO: 136754 - protein, 7 aa, synthetic construct
NPPHIRS

SEQ ID NO: 136755 - protein, 7 aa, synthetic construct
NPPIPRS

SEQ ID NO: 136756 - protein, 7 aa, synthetic construct
NPPNEKR

SEQ ID NO: 136757 - protein, 7 aa, synthetic construct
NPPNRHQ

SEQ ID NO: 136758 - protein, 7 aa, synthetic construct
NPPPRPI

SEQ ID NO: 136759 - protein, 7 aa, synthetic construct
NPPQGLR

SEQ ID NO: 136760 - protein, 7 aa, synthetic construct
NPPQMRN

SEQ ID NO: 136761 - protein, 7 aa, synthetic construct
NPPRAHP

SEQ ID NO: 136762 - protein, 7 aa, synthetic construct
NPPRQII

SEQ ID NO: 136763 - protein, 7 aa, synthetic construct
NPPRSLV

SEQ ID NO: 136764 - protein, 7 aa, synthetic construct
NPPSKYY

SEQ ID NO: 136765 - protein, 7 aa, synthetic construct
NPPTRDR

SEQ ID NO: 136766 - protein, 7 aa, synthetic construct
NPPVSRQ

SEQ ID NO: 136767 - protein, 7 aa, synthetic construct
NPQFLKH

SEQ ID NO: 136768 - protein, 7 aa, synthetic construct
NPQHGSR

SEQ ID NO: 136769 - protein, 7 aa, synthetic construct
NPQRGHF

SEQ ID NO: 136770 - protein, 7 aa, synthetic construct
NPQRLRD

SEQ ID NO: 136771 - protein, 7 aa, synthetic construct
NPQSYTK

SEQ ID NO: 136772 - protein, 7 aa, synthetic construct
NPQTHKL

SEQ ID NO: 136773 - protein, 7 aa, synthetic construct
NPRAVRD

SEQ ID NO: 136774 - protein, 7 aa, synthetic construct
NPRGDRA

SEQ ID NO: 136775 - protein, 7 aa, synthetic construct
NPRHPAV

SEQ ID NO: 136776 - protein, 7 aa, synthetic construct
NPRKGDT

SEQ ID NO: 136777 - protein, 7 aa, synthetic construct
NPRKMTE

SEQ ID NO: 136778 - protein, 7 aa, synthetic construct
NPRMSPT

SEQ ID NO: 136779 - protein, 7 aa, synthetic construct
NPRMVQH

SEQ ID NO: 136780 - protein, 7 aa, synthetic construct
NPRRDTG

SEQ ID NO: 136781 - protein, 7 aa, synthetic construct
NPRSFKD

SEQ ID NO: 136782 - protein, 7 aa, synthetic construct
NPRSMDR

SEQ ID NO: 136783 - protein, 7 aa, synthetic construct
NPRSPHI

SEQ ID NO: 136784 - protein, 7 aa, synthetic construct
NPRTPKD

SEQ ID NO: 136785 - protein, 7 aa, synthetic construct
NPRTPTT

SEQ ID NO: 136786 - protein, 7 aa, synthetic construct
NPRVAKD

SEQ ID NO: 136787 - protein, 7 aa, synthetic construct
NPRVPLQ

SEQ ID NO: 136788 - protein, 7 aa, synthetic construct
NPRVPTH

SEQ ID NO: 136789 - protein, 7 aa, synthetic construct
NPRVVPQ

SEQ ID NO: 136790 - protein, 7 aa, synthetic construct
NPSDGRR

SEQ ID NO: 136791 - protein, 7 aa, synthetic construct
NPSFSNK

SEQ ID NO: 136792 - protein, 7 aa, synthetic construct
NPSHVRM

SEQ ID NO: 136793 - protein, 7 aa, synthetic construct
NPSHYDR

SEQ ID NO: 136794 - protein, 7 aa, synthetic construct
NPSKFSV

SEQ ID NO: 136795 - protein, 7 aa, synthetic construct
NPSKMVF

SEQ ID NO: 136796 - protein, 7 aa, synthetic construct
NPSNNLR

SEQ ID NO: 136797 - protein, 7 aa, synthetic construct
NPSNSNR

SEQ ID NO: 136798 - protein, 7 aa, synthetic construct
NPSQRIM

SEQ ID NO: 136799 - protein, 7 aa, synthetic construct
NPTKRDS

SEQ ID NO: 136800 - protein, 7 aa, synthetic construct
NPTRPVH

SEQ ID NO: 136801 - protein, 7 aa, synthetic construct
NPTSHSR

SEQ ID NO: 136802 - protein, 7 aa, synthetic construct
NPTYQQK

SEQ ID NO: 136803 - protein, 7 aa, synthetic construct
NPTYSAK

SEQ ID NO: 136804 - protein, 7 aa, synthetic construct
NPVARTF

SEQ ID NO: 136805 - protein, 7 aa, synthetic construct
NPVDRKM

SEQ ID NO: 136806 - protein, 7 aa, synthetic construct
NPVHNKM

SEQ ID NO: 136807 - protein, 7 aa, synthetic construct
NPVHRAG

SEQ ID NO: 136808 - protein, 7 aa, synthetic construct
NPVKHRE

SEQ ID NO: 136809 - protein, 7 aa, synthetic construct
NPVLRKE

SEQ ID NO: 136810 - protein, 7 aa, synthetic construct
NPVRYQA

SEQ ID NO: 136811 - protein, 7 aa, synthetic construct
NPVSKFA

SEQ ID NO: 136812 - protein, 7 aa, synthetic construct
NPVYSKT

SEQ ID NO: 136813 - protein, 7 aa, synthetic construct
NPYAGNQ

SEQ ID NO: 136814 - protein, 7 aa, synthetic construct
NPYGAKA

SEQ ID NO: 136815 - protein, 7 aa, synthetic construct
NPYGLKG

SEQ ID NO: 136816 - protein, 7 aa, synthetic construct
NPYIQKG

SEQ ID NO: 136817 - protein, 7 aa, synthetic construct
NPYKERI

SEQ ID NO: 136818 - protein, 7 aa, synthetic construct
NPYLKTS

SEQ ID NO: 136819 - protein, 7 aa, synthetic construct
NPYQKAQ

SEQ ID NO: 136820 - protein, 7 aa, synthetic construct
NPYRPFE

SEQ ID NO: 136821 - protein, 7 aa, synthetic construct
NPYTKTS

SEQ ID NO: 136822 - protein, 7 aa, synthetic construct
NPYTKVG

SEQ ID NO: 136823 - protein, 7 aa, synthetic construct
NQAFPGR

SEQ ID NO: 136824 - protein, 7 aa, synthetic construct
NQAGQTR

SEQ ID NO: 136825 - protein, 7 aa, synthetic construct
NQAGWPK

SEQ ID NO: 136826 - protein, 7 aa, synthetic construct
NQAHIRP

SEQ ID NO: 136827 - protein, 7 aa, synthetic construct
NQAHKAI

SEQ ID NO: 136828 - protein, 7 aa, synthetic construct
NQAHKAL

SEQ ID NO: 136829 - protein, 7 aa, synthetic construct
NQAKRDH

SEQ ID NO: 136830 - protein, 7 aa, synthetic construct
NQALHRV

SEQ ID NO: 136831 - protein, 7 aa, synthetic construct
NQAMHAR

SEQ ID NO: 136832 - protein, 7 aa, synthetic construct
NQAPNMR

SEQ ID NO: 136833 - protein, 7 aa, synthetic construct
NQAPNQR

SEQ ID NO: 136834 - protein, 7 aa, synthetic construct
NQAPRNV

SEQ ID NO: 136835 - protein, 7 aa, synthetic construct
NQAQKHS

SEQ ID NO: 136836 - protein, 7 aa, synthetic construct
NQARDKM

SEQ ID NO: 136837 - protein, 7 aa, synthetic construct
NQAREAK

SEQ ID NO: 136838 - protein, 7 aa, synthetic construct
NQARSML

SEQ ID NO: 136839 - protein, 7 aa, synthetic construct
NQAVARF

SEQ ID NO: 136840 - protein, 7 aa, synthetic construct
NQAYHGI

SEQ ID NO: 136841 - protein, 7 aa, synthetic construct
NQAYHVG

SEQ ID NO: 136842 - protein, 7 aa, synthetic construct
NQAYPSR

SEQ ID NO: 136843 - protein, 7 aa, synthetic construct
NQDRKFI

SEQ ID NO: 136844 - protein, 7 aa, synthetic construct
NQERAKF

SEQ ID NO: 136845 - protein, 7 aa, synthetic construct
NQERKFS

SEQ ID NO: 136846 - protein, 7 aa, synthetic construct
NQERMHK

SEQ ID NO: 136847 - protein, 7 aa, synthetic construct
NQERPIR

SEQ ID NO: 136848 - protein, 7 aa, synthetic construct
NQEVRTK

SEQ ID NO: 136849 - protein, 7 aa, synthetic construct
NQFGVKM

SEQ ID NO: 136850 - protein, 7 aa, synthetic construct
NQFHPKM

SEQ ID NO: 136851 - protein, 7 aa, synthetic construct
NQFKVRD

SEQ ID NO: 136852 - protein, 7 aa, synthetic construct
NQFQPTK

SEQ ID NO: 136853 - protein, 7 aa, synthetic construct
NQGGHRM

SEQ ID NO: 136854 - protein, 7 aa, synthetic construct
NQGGTMR

SEQ ID NO: 136855 - protein, 7 aa, synthetic construct
NQGHKQM

SEQ ID NO: 136856 - protein, 7 aa, synthetic construct
NQGIQKH

SEQ ID NO: 136857 - protein, 7 aa, synthetic construct
NQGKDLR

SEQ ID NO: 136858 - protein, 7 aa, synthetic construct
NQGLKYA

SEQ ID NO: 136859 - protein, 7 aa, synthetic construct
NQGMKDR

SEQ ID NO: 136860 - protein, 7 aa, synthetic construct
NQGNNQR

SEQ ID NO: 136861 - protein, 7 aa, synthetic construct
NQGNSSR

SEQ ID NO: 136862 - protein, 7 aa, synthetic construct
NQGPAVR

SEQ ID NO: 136863 - protein, 7 aa, synthetic construct
NQGPSRM

SEQ ID NO: 136864 - protein, 7 aa, synthetic construct
NQGPVRY

SEQ ID NO: 136865 - protein, 7 aa, synthetic construct
NQGQYTK

SEQ ID NO: 136866 - protein, 7 aa, synthetic construct
NQGRDMK

SEQ ID NO: 136867 - protein, 7 aa, synthetic construct
NQGTNYK

SEQ ID NO: 136868 - protein, 7 aa, synthetic construct
NQGTRRE

SEQ ID NO: 136869 - protein, 7 aa, synthetic construct
NQGVHKF

SEQ ID NO: 136870 - protein, 7 aa, synthetic construct
NQGVRQL

SEQ ID NO: 136871 - protein, 7 aa, synthetic construct
NQGVSYK

SEQ ID NO: 136872 - protein, 7 aa, synthetic construct
NQHGFKN

SEQ ID NO: 136873 - protein, 7 aa, synthetic construct
NQHGRLV

SEQ ID NO: 136874 - protein, 7 aa, synthetic construct
NQHIPKS

SEQ ID NO: 136875 - protein, 7 aa, synthetic construct
NQHLPSK

SEQ ID NO: 136876 - protein, 7 aa, synthetic construct
NQHRINT

SEQ ID NO: 136877 - protein, 7 aa, synthetic construct
NQHTRGL

SEQ ID NO: 136878 - protein, 7 aa, synthetic construct
NQIHRAN

SEQ ID NO: 136879 - protein, 7 aa, synthetic construct
NQIKFAP

SEQ ID NO: 136880 - protein, 7 aa, synthetic construct
NQIPRQV

SEQ ID NO: 136881 - protein, 7 aa, synthetic construct
NQIPSTR

SEQ ID NO: 136882 - protein, 7 aa, synthetic construct
NQIPVPR

SEQ ID NO: 136883 - protein, 7 aa, synthetic construct
NQIPVRQ

SEQ ID NO: 136884 - protein, 7 aa, synthetic construct
NQIRISH

SEQ ID NO: 136885 - protein, 7 aa, synthetic construct
NQIRPDK

SEQ ID NO: 136886 - protein, 7 aa, synthetic construct
NQIRVRD

SEQ ID NO: 136887 - protein, 7 aa, synthetic construct
NQKAHYN

SEQ ID NO: 136888 - protein, 7 aa, synthetic construct
NQKDMIR

SEQ ID NO: 136889 - protein, 7 aa, synthetic construct
NQKDRSL

SEQ ID NO: 136890 - protein, 7 aa, synthetic construct
NQKFSLN

SEQ ID NO: 136891 - protein, 7 aa, synthetic construct
NQKHINF

SEQ ID NO: 136892 - protein, 7 aa, synthetic construct
NQKHTWE

SEQ ID NO: 136893 - protein, 7 aa, synthetic construct
NQKIPMH

SEQ ID NO: 136894 - protein, 7 aa, synthetic construct
NQKITHI

SEQ ID NO: 136895 - protein, 7 aa, synthetic construct
NQKRVMD

SEQ ID NO: 136896 - protein, 7 aa, synthetic construct
NQKSDRA

SEQ ID NO: 136897 - protein, 7 aa, synthetic construct
NQKTHYS

SEQ ID NO: 136898 - protein, 7 aa, synthetic construct
NQKVSHY

SEQ ID NO: 136899 - protein, 7 aa, synthetic construct
NQLHATR

SEQ ID NO: 136900 - protein, 7 aa, synthetic construct
NQLHTRS

SEQ ID NO: 136901 - protein, 7 aa, synthetic construct
NQLNHPK

SEQ ID NO: 136902 - protein, 7 aa, synthetic construct
NQLPIRS

SEQ ID NO: 136903 - protein, 7 aa, synthetic construct
NQLQRSF

SEQ ID NO: 136904 - protein, 7 aa, synthetic construct
NQLRNPI

SEQ ID NO: 136905 - protein, 7 aa, synthetic construct
NQLSARM

SEQ ID NO: 136906 - protein, 7 aa, synthetic construct
NQLSHKM

SEQ ID NO: 136907 - protein, 7 aa, synthetic construct
NQLSSQR

SEQ ID NO: 136908 - protein, 7 aa, synthetic construct
NQLTRTY

SEQ ID NO: 136909 - protein, 7 aa, synthetic construct
NQMAHTK

SEQ ID NO: 136910 - protein, 7 aa, synthetic construct
NQMKHGL

SEQ ID NO: 136911 - protein, 7 aa, synthetic construct
NQMLKGY

SEQ ID NO: 136912 - protein, 7 aa, synthetic construct
NQMMAQR

SEQ ID NO: 136913 - protein, 7 aa, synthetic construct
NQMNKYI

SEQ ID NO: 136914 - protein, 7 aa, synthetic construct
NQMPMAR

SEQ ID NO: 136915 - protein, 7 aa, synthetic construct
NQMQRPL

SEQ ID NO: 136916 - protein, 7 aa, synthetic construct
NQMQTRS

SEQ ID NO: 136917 - protein, 7 aa, synthetic construct
NQMRNKE

SEQ ID NO: 136918 - protein, 7 aa, synthetic construct
NQNARQI

SEQ ID NO: 136919 - protein, 7 aa, synthetic construct
NQNKGNY

SEQ ID NO: 136920 - protein, 7 aa, synthetic construct
NQNKVSW

SEQ ID NO: 136921 - protein, 7 aa, synthetic construct
NQNPRTM

SEQ ID NO: 136922 - protein, 7 aa, synthetic construct
NQNPRTT

SEQ ID NO: 136923 - protein, 7 aa, synthetic construct
NQNSTHK

SEQ ID NO: 136924 - protein, 7 aa, synthetic construct
NQNTPGR

SEQ ID NO: 136925 - protein, 7 aa, synthetic construct
NQNWGPK

SEQ ID NO: 136926 - protein, 7 aa, synthetic construct
NQPAYAK

SEQ ID NO: 136927 - protein, 7 aa, synthetic construct
NQPEKRY

SEQ ID NO: 136928 - protein, 7 aa, synthetic construct
NQPGYLK

SEQ ID NO: 136929 - protein, 7 aa, synthetic construct
NQPHLRQ

SEQ ID NO: 136930 - protein, 7 aa, synthetic construct
NQPKATV

SEQ ID NO: 136931 - protein, 7 aa, synthetic construct
NQPKGYI

SEQ ID NO: 136932 - protein, 7 aa, synthetic construct
NQPKVGY

SEQ ID NO: 136933 - protein, 7 aa, synthetic construct
NQPMIKY

SEQ ID NO: 136934 - protein, 7 aa, synthetic construct
NQPMIMK

SEQ ID NO: 136935 - protein, 7 aa, synthetic construct
NQPNVPR

SEQ ID NO: 136936 - protein, 7 aa, synthetic construct
NQPQLRI

SEQ ID NO: 136937 - protein, 7 aa, synthetic construct
NQPQSQR

SEQ ID NO: 136938 - protein, 7 aa, synthetic construct
NQPYSKA

SEQ ID NO: 136939 - protein, 7 aa, synthetic construct
NQQAKSM

SEQ ID NO: 136940 - protein, 7 aa, synthetic construct
NQQAKYI

SEQ ID NO: 136941 - protein, 7 aa, synthetic construct
NQQARPL

SEQ ID NO: 136942 - protein, 7 aa, synthetic construct
NQQINRY

SEQ ID NO: 136943 - protein, 7 aa, synthetic construct
NQQLREI

SEQ ID NO: 136944 - protein, 7 aa, synthetic construct
NQQMRTV

SEQ ID NO: 136945 - protein, 7 aa, synthetic construct
NQQNNNK

SEQ ID NO: 136946 - protein, 7 aa, synthetic construct
NQQNRIL

SEQ ID NO: 136947 - protein, 7 aa, synthetic construct
NQQPQRF

SEQ ID NO: 136948 - protein, 7 aa, synthetic construct
NQQRAIV

SEQ ID NO: 136949 - protein, 7 aa, synthetic construct
NQQTARS

SEQ ID NO: 136950 - protein, 7 aa, synthetic construct
NQQVNRM

SEQ ID NO: 136951 - protein, 7 aa, synthetic construct
NQRAIIQ

SEQ ID NO: 136952 - protein, 7 aa, synthetic construct
NQRAMGH

SEQ ID NO: 136953 - protein, 7 aa, synthetic construct
NQRDGLK

SEQ ID NO: 136954 - protein, 7 aa, synthetic construct
NQRFREA

SEQ ID NO: 136955 - protein, 7 aa, synthetic construct
NQRHIGI

SEQ ID NO: 136956 - protein, 7 aa, synthetic construct
NQRKQIE

SEQ ID NO: 136957 - protein, 7 aa, synthetic construct
NQRMDIK

SEQ ID NO: 136958 - protein, 7 aa, synthetic construct
NQRNAMH

SEQ ID NO: 136959 - protein, 7 aa, synthetic construct
NQRNLNV

SEQ ID NO: 136960 - protein, 7 aa, synthetic construct
NQRPMMH

SEQ ID NO: 136961 - protein, 7 aa, synthetic construct
NQRQETK

SEQ ID NO: 136962 - protein, 7 aa, synthetic construct
NQRQIQL

SEQ ID NO: 136963 - protein, 7 aa, synthetic construct
NQRTLVH

SEQ ID NO: 136964 - protein, 7 aa, synthetic construct
NQRVDNK

SEQ ID NO: 136965 - protein, 7 aa, synthetic construct
NQRVMNN

SEQ ID NO: 136966 - protein, 7 aa, synthetic construct
NQRYSGS

SEQ ID NO: 136967 - protein, 7 aa, synthetic construct
NQSIKHF

SEQ ID NO: 136968 - protein, 7 aa, synthetic construct
NQSMARM

SEQ ID NO: 136969 - protein, 7 aa, synthetic construct
NQSMASR

SEQ ID NO: 136970 - protein, 7 aa, synthetic construct
NQSNQVR

SEQ ID NO: 136971 - protein, 7 aa, synthetic construct
NQSNVYR

SEQ ID NO: 136972 - protein, 7 aa, synthetic construct
NQSPMRQ

SEQ ID NO: 136973 - protein, 7 aa, synthetic construct
NQSQIPR

SEQ ID NO: 136974 - protein, 7 aa, synthetic construct
NQSQPVR

SEQ ID NO: 136975 - protein, 7 aa, synthetic construct
NQSQRTL

SEQ ID NO: 136976 - protein, 7 aa, synthetic construct
NQSSGIR

SEQ ID NO: 136977 - protein, 7 aa, synthetic construct
NQSTDKK

SEQ ID NO: 136978 - protein, 7 aa, synthetic construct
NQSTLGR

SEQ ID NO: 136979 - protein, 7 aa, synthetic construct
NQSTYKS

SEQ ID NO: 136980 - protein, 7 aa, synthetic construct
NQSWGPP

SEQ ID NO: 136981 - protein, 7 aa, synthetic construct
NQTGKHL

SEQ ID NO: 136982 - protein, 7 aa, synthetic construct
NQTHHFK

SEQ ID NO: 136983 - protein, 7 aa, synthetic construct
NQTHSLK

SEQ ID NO: 136984 - protein, 7 aa, synthetic construct
NQTKERM

SEQ ID NO: 136985 - protein, 7 aa, synthetic construct
NQTKHAQ

SEQ ID NO: 136986 - protein, 7 aa, synthetic construct
NQTKYLM

SEQ ID NO: 136987 - protein, 7 aa, synthetic construct
NQTLRGM

SEQ ID NO: 136988 - protein, 7 aa, synthetic construct
NQTMTMR

SEQ ID NO: 136989 - protein, 7 aa, synthetic construct
NQTMVHR

SEQ ID NO: 136990 - protein, 7 aa, synthetic construct
NQTPRML

SEQ ID NO: 136991 - protein, 7 aa, synthetic construct
NQTQYIK

SEQ ID NO: 136992 - protein, 7 aa, synthetic construct
NQTRISH

SEQ ID NO: 136993 - protein, 7 aa, synthetic construct
NQTTTYR

SEQ ID NO: 136994 - protein, 7 aa, synthetic construct
NQTWSNA

SEQ ID NO: 136995 - protein, 7 aa, synthetic construct
NQVGKGW

SEQ ID NO: 136996 - protein, 7 aa, synthetic construct
NQVHAKT

SEQ ID NO: 136997 - protein, 7 aa, synthetic construct
NQVHVRA

SEQ ID NO: 136998 - protein, 7 aa, synthetic construct
NQVKYPP

SEQ ID NO: 136999 - protein, 7 aa, synthetic construct
NQVNARM

SEQ ID NO: 137000 - protein, 7 aa, synthetic construct
NQVNSPK

SEQ ID NO: 137001 - protein, 7 aa, synthetic construct
NQVQKYQ

SEQ ID NO: 137002 - protein, 7 aa, synthetic construct
NQVQSAR

SEQ ID NO: 137003 - protein, 7 aa, synthetic construct
NQVQSLR

SEQ ID NO: 137004 - protein, 7 aa, synthetic construct
NQVQSRQ

SEQ ID NO: 137005 - protein, 7 aa, synthetic construct
NQVQVPR

SEQ ID NO: 137006 - protein, 7 aa, synthetic construct
NQVSSMR

SEQ ID NO: 137007 - protein, 7 aa, synthetic construct
NQVTQGR

SEQ ID NO: 137008 - protein, 7 aa, synthetic construct
NQWALLE

SEQ ID NO: 137009 - protein, 7 aa, synthetic construct
NQWRQSD

SEQ ID NO: 137010 - protein, 7 aa, synthetic construct
NQWSILE

SEQ ID NO: 137011 - protein, 7 aa, synthetic construct
NQWVTSS

SEQ ID NO: 137012 - protein, 7 aa, synthetic construct
NQYAAQK

SEQ ID NO: 137013 - protein, 7 aa, synthetic construct
NQYAGAK

SEQ ID NO: 137014 - protein, 7 aa, synthetic construct
NQYNKPI

SEQ ID NO: 137015 - protein, 7 aa, synthetic construct
NQYPKMP

SEQ ID NO: 137016 - protein, 7 aa, synthetic construct
NQYPNAR

SEQ ID NO: 137017 - protein, 7 aa, synthetic construct
NQYQKPT

SEQ ID NO: 137018 - protein, 7 aa, synthetic construct
NQYTSVQ

SEQ ID NO: 137019 - protein, 7 aa, synthetic construct
NQYVQGY

SEQ ID NO: 137020 - protein, 7 aa, synthetic construct
NRADKNA

SEQ ID NO: 137021 - protein, 7 aa, synthetic construct
NRADPMK

SEQ ID NO: 137022 - protein, 7 aa, synthetic construct
NRAGIMH

SEQ ID NO: 137023 - protein, 7 aa, synthetic construct
NRAHQQF

SEQ ID NO: 137024 - protein, 7 aa, synthetic construct
NRAHSVN

SEQ ID NO: 137025 - protein, 7 aa, synthetic construct
NRAIQSQ

SEQ ID NO: 137026 - protein, 7 aa, synthetic construct
NRAKEPY

SEQ ID NO: 137027 - protein, 7 aa, synthetic construct
NRAKSEV

SEQ ID NO: 137028 - protein, 7 aa, synthetic construct
NRAMQGL

SEQ ID NO: 137029 - protein, 7 aa, synthetic construct
NRAPPFS

SEQ ID NO: 137030 - protein, 7 aa, synthetic construct
NRAPTDK

SEQ ID NO: 137031 - protein, 7 aa, synthetic construct
NRAREMA

SEQ ID NO: 137032 - protein, 7 aa, synthetic construct
NRASANY

SEQ ID NO: 137033 - protein, 7 aa, synthetic construct
NRASDRI

SEQ ID NO: 137034 - protein, 7 aa, synthetic construct
NRASQMY

SEQ ID NO: 137035 - protein, 7 aa, synthetic construct
NRASQWE

SEQ ID NO: 137036 - protein, 7 aa, synthetic construct
NRASYAA

SEQ ID NO: 137037 - protein, 7 aa, synthetic construct
NRATKDF

SEQ ID NO: 137038 - protein, 7 aa, synthetic construct
NRAVHTT

SEQ ID NO: 137039 - protein, 7 aa, synthetic construct
NRAVSNF

SEQ ID NO: 137040 - protein, 7 aa, synthetic construct
NRDAHKL

SEQ ID NO: 137041 - protein, 7 aa, synthetic construct
NRDAQTK

SEQ ID NO: 137042 - protein, 7 aa, synthetic construct
NRDARQL

SEQ ID NO: 137043 - protein, 7 aa, synthetic construct
NRDAVQK

SEQ ID NO: 137044 - protein, 7 aa, synthetic construct
NRDGVGK

SEQ ID NO: 137045 - protein, 7 aa, synthetic construct
NRDHRTA

SEQ ID NO: 137046 - protein, 7 aa, synthetic construct
NRDKSNL

SEQ ID NO: 137047 - protein, 7 aa, synthetic construct
NRDLRSY

SEQ ID NO: 137048 - protein, 7 aa, synthetic construct
NRDMKLT

SEQ ID NO: 137049 - protein, 7 aa, synthetic construct
NRDNVAK

SEQ ID NO: 137050 - protein, 7 aa, synthetic construct
NRDQKGQ

SEQ ID NO: 137051 - protein, 7 aa, synthetic construct
NRDQTRM

SEQ ID NO: 137052 - protein, 7 aa, synthetic construct
NRDSMLR

SEQ ID NO: 137053 - protein, 7 aa, synthetic construct
NRDVKGW

SEQ ID NO: 137054 - protein, 7 aa, synthetic construct
NREAVRS

SEQ ID NO: 137055 - protein, 7 aa, synthetic construct
NREFKHP

SEQ ID NO: 137056 - protein, 7 aa, synthetic construct
NREFQKG

SEQ ID NO: 137057 - protein, 7 aa, synthetic construct
NREGKTY

SEQ ID NO: 137058 - protein, 7 aa, synthetic construct
NREGQKL

SEQ ID NO: 137059 - protein, 7 aa, synthetic construct
NREGYIK

SEQ ID NO: 137060 - protein, 7 aa, synthetic construct
NREHIKI

SEQ ID NO: 137061 - protein, 7 aa, synthetic construct
NREIRNN

SEQ ID NO: 137062 - protein, 7 aa, synthetic construct
NREKLYV

SEQ ID NO: 137063 - protein, 7 aa, synthetic construct
NREKNVN

SEQ ID NO: 137064 - protein, 7 aa, synthetic construct
NREKSNV

SEQ ID NO: 137065 - protein, 7 aa, synthetic construct
NRELKAN

SEQ ID NO: 137066 - protein, 7 aa, synthetic construct
NRELKTY

SEQ ID NO: 137067 - protein, 7 aa, synthetic construct
NRELRAQ

SEQ ID NO: 137068 - protein, 7 aa, synthetic construct
NRENKML

SEQ ID NO: 137069 - protein, 7 aa, synthetic construct
NRENLGK

SEQ ID NO: 137070 - protein, 7 aa, synthetic construct
NRENWKM

SEQ ID NO: 137071 - protein, 7 aa, synthetic construct
NREPMPR

SEQ ID NO: 137072 - protein, 7 aa, synthetic construct
NREPTMK

SEQ ID NO: 137073 - protein, 7 aa, synthetic construct
NREQTRL

SEQ ID NO: 137074 - protein, 7 aa, synthetic construct
NRESIRI

SEQ ID NO: 137075 - protein, 7 aa, synthetic construct
NRESKQV

SEQ ID NO: 137076 - protein, 7 aa, synthetic construct
NRESKTV

SEQ ID NO: 137077 - protein, 7 aa, synthetic construct
NRESQRV

SEQ ID NO: 137078 - protein, 7 aa, synthetic construct
NRETMGK

SEQ ID NO: 137079 - protein, 7 aa, synthetic construct
NRETPPR

SEQ ID NO: 137080 - protein, 7 aa, synthetic construct
NREVKEK

SEQ ID NO: 137081 - protein, 7 aa, synthetic construct
NREVRSA

SEQ ID NO: 137082 - protein, 7 aa, synthetic construct
NREYKHL

SEQ ID NO: 137083 - protein, 7 aa, synthetic construct
NREYPQK

SEQ ID NO: 137084 - protein, 7 aa, synthetic construct
NRFTDKG

SEQ ID NO: 137085 - protein, 7 aa, synthetic construct
NRFTMKD

SEQ ID NO: 137086 - protein, 7 aa, synthetic construct
NRFVNKE

SEQ ID NO: 137087 - protein, 7 aa, synthetic construct
NRGAQGL

SEQ ID NO: 137088 - protein, 7 aa, synthetic construct
NRGAQMI

SEQ ID NO: 137089 - protein, 7 aa, synthetic construct
NRGDVKV

SEQ ID NO: 137090 - protein, 7 aa, synthetic construct
NRGEKSL

SEQ ID NO: 137091 - protein, 7 aa, synthetic construct
NRGEPKQ

SEQ ID NO: 137092 - protein, 7 aa, synthetic construct
NRGEYKV

SEQ ID NO: 137093 - protein, 7 aa, synthetic construct
NRGGILV

SEQ ID NO: 137094 - protein, 7 aa, synthetic construct
NRGITNF

SEQ ID NO: 137095 - protein, 7 aa, synthetic construct
NRGKQYE

SEQ ID NO: 137096 - protein, 7 aa, synthetic construct
NRGLQQT

SEQ ID NO: 137097 - protein, 7 aa, synthetic construct
NRGPYHA

SEQ ID NO: 137098 - protein, 7 aa, synthetic construct
NRGQITA

SEQ ID NO: 137099 - protein, 7 aa, synthetic construct
NRGQIVL

SEQ ID NO: 137100 - protein, 7 aa, synthetic construct
NRGQQGI

SEQ ID NO: 137101 - protein, 7 aa, synthetic construct
NRGQQRD

SEQ ID NO: 137102 - protein, 7 aa, synthetic construct
NRGQSTV

SEQ ID NO: 137103 - protein, 7 aa, synthetic construct
NRGSPYV

SEQ ID NO: 137104 - protein, 7 aa, synthetic construct
NRGSSPA

SEQ ID NO: 137105 - protein, 7 aa, synthetic construct
NRGTQQL

SEQ ID NO: 137106 - protein, 7 aa, synthetic construct
NRGTSIV

SEQ ID NO: 137107 - protein, 7 aa, synthetic construct
NRGYQSV

SEQ ID NO: 137108 - protein, 7 aa, synthetic construct
NRHEGRF

SEQ ID NO: 137109 - protein, 7 aa, synthetic construct
NRHKESV

SEQ ID NO: 137110 - protein, 7 aa, synthetic construct
NRHMPQS

SEQ ID NO: 137111 - protein, 7 aa, synthetic construct
NRHNGQA

SEQ ID NO: 137112 - protein, 7 aa, synthetic construct
NRHPNFI

SEQ ID NO: 137113 - protein, 7 aa, synthetic construct
NRHPPVQ

SEQ ID NO: 137114 - protein, 7 aa, synthetic construct
NRHQVAN

SEQ ID NO: 137115 - protein, 7 aa, synthetic construct
NRIDMRV

SEQ ID NO: 137116 - protein, 7 aa, synthetic construct
NRIEMRN

SEQ ID NO: 137117 - protein, 7 aa, synthetic construct
NRIGMGT

SEQ ID NO: 137118 - protein, 7 aa, synthetic construct
NRIGMGV

SEQ ID NO: 137119 - protein, 7 aa, synthetic construct
NRIKAAD

SEQ ID NO: 137120 - protein, 7 aa, synthetic construct
NRIKDAV

SEQ ID NO: 137121 - protein, 7 aa, synthetic construct
NRIKDSS

SEQ ID NO: 137122 - protein, 7 aa, synthetic construct
NRIQSQI

SEQ ID NO: 137123 - protein, 7 aa, synthetic construct
NRIQTSQ

SEQ ID NO: 137124 - protein, 7 aa, synthetic construct
NRIRETA

SEQ ID NO: 137125 - protein, 7 aa, synthetic construct
NRITPSL

SEQ ID NO: 137126 - protein, 7 aa, synthetic construct
NRKDNYI

SEQ ID NO: 137127 - protein, 7 aa, synthetic construct
NRKESIY

SEQ ID NO: 137128 - protein, 7 aa, synthetic construct
NRKGDFV

SEQ ID NO: 137129 - protein, 7 aa, synthetic construct
NRKGPDP

SEQ ID NO: 137130 - protein, 7 aa, synthetic construct
NRKLVVD

SEQ ID NO: 137131 - protein, 7 aa, synthetic construct
NRKQDNL

SEQ ID NO: 137132 - protein, 7 aa, synthetic construct
NRKSMSE

SEQ ID NO: 137133 - protein, 7 aa, synthetic construct
NRLDANK

SEQ ID NO: 137134 - protein, 7 aa, synthetic construct
NRLGMMP

SEQ ID NO: 137135 - protein, 7 aa, synthetic construct
NRLIKID

SEQ ID NO: 137136 - protein, 7 aa, synthetic construct
NRLIKVE

SEQ ID NO: 137137 - protein, 7 aa, synthetic construct
NRLKIDV

SEQ ID NO: 137138 - protein, 7 aa, synthetic construct
NRLKMPD

SEQ ID NO: 137139 - protein, 7 aa, synthetic construct
NRLPTMT

SEQ ID NO: 137140 - protein, 7 aa, synthetic construct
NRLQAQQ

SEQ ID NO: 137141 - protein, 7 aa, synthetic construct
NRLQEGR

SEQ ID NO: 137142 - protein, 7 aa, synthetic construct
NRLQKEH

SEQ ID NO: 137143 - protein, 7 aa, synthetic construct
NRMANAL

SEQ ID NO: 137144 - protein, 7 aa, synthetic construct
NRMATQQ

SEQ ID NO: 137145 - protein, 7 aa, synthetic construct
NRMETKF

SEQ ID NO: 137146 - protein, 7 aa, synthetic construct
NRMHGVP

SEQ ID NO: 137147 - protein, 7 aa, synthetic construct
NRMHIDQ

SEQ ID NO: 137148 - protein, 7 aa, synthetic construct
NRMKAMD

SEQ ID NO: 137149 - protein, 7 aa, synthetic construct
NRMKEGY

SEQ ID NO: 137150 - protein, 7 aa, synthetic construct
NRMLSGL

SEQ ID NO: 137151 - protein, 7 aa, synthetic construct
NRMMVQN

SEQ ID NO: 137152 - protein, 7 aa, synthetic construct
NRMNTGT

SEQ ID NO: 137153 - protein, 7 aa, synthetic construct
NRMPNVI

SEQ ID NO: 137154 - protein, 7 aa, synthetic construct
NRMPQGF

SEQ ID NO: 137155 - protein, 7 aa, synthetic construct
NRMPSGI

SEQ ID NO: 137156 - protein, 7 aa, synthetic construct
NRMPVSH

SEQ ID NO: 137157 - protein, 7 aa, synthetic construct
NRMQPHH

SEQ ID NO: 137158 - protein, 7 aa, synthetic construct
NRMQTNL

SEQ ID NO: 137159 - protein, 7 aa, synthetic construct
NRMQVNV

SEQ ID NO: 137160 - protein, 7 aa, synthetic construct
NRMTKEI

SEQ ID NO: 137161 - protein, 7 aa, synthetic construct
NRMTPVP

SEQ ID NO: 137162 - protein, 7 aa, synthetic construct
NRMVANV

SEQ ID NO: 137163 - protein, 7 aa, synthetic construct
NRMVAST

SEQ ID NO: 137164 - protein, 7 aa, synthetic construct
NRNANVI

SEQ ID NO: 137165 - protein, 7 aa, synthetic construct
NRNDKAV

SEQ ID NO: 137166 - protein, 7 aa, synthetic construct
NRNEPKM

SEQ ID NO: 137167 - protein, 7 aa, synthetic construct
NRNGERT

SEQ ID NO: 137168 - protein, 7 aa, synthetic construct
NRNGHTY

SEQ ID NO: 137169 - protein, 7 aa, synthetic construct
NRNGLDK

SEQ ID NO: 137170 - protein, 7 aa, synthetic construct
NRNKEHV

SEQ ID NO: 137171 - protein, 7 aa, synthetic construct
NRNKELI

SEQ ID NO: 137172 - protein, 7 aa, synthetic construct
NRNKVDM

SEQ ID NO: 137173 - protein, 7 aa, synthetic construct
NRNMPVI

SEQ ID NO: 137174 - protein, 7 aa, synthetic construct
NRNMSQH

SEQ ID NO: 137175 - protein, 7 aa, synthetic construct
NRNNMQY

SEQ ID NO: 137176 - protein, 7 aa, synthetic construct
NRNPLDK

SEQ ID NO: 137177 - protein, 7 aa, synthetic construct
NRNQKDT

SEQ ID NO: 137178 - protein, 7 aa, synthetic construct
NRNSDYR

SEQ ID NO: 137179 - protein, 7 aa, synthetic construct
NRNTATL

SEQ ID NO: 137180 - protein, 7 aa, synthetic construct
NRNTPPT

SEQ ID NO: 137181 - protein, 7 aa, synthetic construct
NRNWEDK

SEQ ID NO: 137182 - protein, 7 aa, synthetic construct
NRNYQHA

SEQ ID NO: 137183 - protein, 7 aa, synthetic construct
NRPENKL

SEQ ID NO: 137184 - protein, 7 aa, synthetic construct
NRPGEKQ

SEQ ID NO: 137185 - protein, 7 aa, synthetic construct
NRPHKFE

SEQ ID NO: 137186 - protein, 7 aa, synthetic construct
NRPHLNT

SEQ ID NO: 137187 - protein, 7 aa, synthetic construct
NRPHQGI

SEQ ID NO: 137188 - protein, 7 aa, synthetic construct
NRPISNT

SEQ ID NO: 137189 - protein, 7 aa, synthetic construct
NRPIVAH

SEQ ID NO: 137190 - protein, 7 aa, synthetic construct
NRPLHSN

SEQ ID NO: 137191 - protein, 7 aa, synthetic construct
NRPLMGA

SEQ ID NO: 137192 - protein, 7 aa, synthetic construct
NRPLTSV

SEQ ID NO: 137193 - protein, 7 aa, synthetic construct
NRPMGGM

SEQ ID NO: 137194 - protein, 7 aa, synthetic construct
NRPMISS

SEQ ID NO: 137195 - protein, 7 aa, synthetic construct
NRPMNTM

SEQ ID NO: 137196 - protein, 7 aa, synthetic construct
NRPPHHP

SEQ ID NO: 137197 - protein, 7 aa, synthetic construct
NRPQHNQ

SEQ ID NO: 137198 - protein, 7 aa, synthetic construct
NRPQSPY

SEQ ID NO: 137199 - protein, 7 aa, synthetic construct
NRPQVDR

SEQ ID NO: 137200 - protein, 7 aa, synthetic construct
NRPREQT

SEQ ID NO: 137201 - protein, 7 aa, synthetic construct
NRPTPMY

SEQ ID NO: 137202 - protein, 7 aa, synthetic construct
NRQADTS

SEQ ID NO: 137203 - protein, 7 aa, synthetic construct
NRQAQQI

SEQ ID NO: 137204 - protein, 7 aa, synthetic construct
NRQAVDK

SEQ ID NO: 137205 - protein, 7 aa, synthetic construct
NRQAVQQ

SEQ ID NO: 137206 - protein, 7 aa, synthetic construct
NRQEAKT

SEQ ID NO: 137207 - protein, 7 aa, synthetic construct
NRQEFRN

SEQ ID NO: 137208 - protein, 7 aa, synthetic construct
NRQELNK

SEQ ID NO: 137209 - protein, 7 aa, synthetic construct
NRQGIHI

SEQ ID NO: 137210 - protein, 7 aa, synthetic construct
NRQITIQ

SEQ ID NO: 137211 - protein, 7 aa, synthetic construct
NRQKIDV

SEQ ID NO: 137212 - protein, 7 aa, synthetic construct
NRQLGAY

SEQ ID NO: 137213 - protein, 7 aa, synthetic construct
NRQLHSV

SEQ ID NO: 137214 - protein, 7 aa, synthetic construct
NRQLKEQ

SEQ ID NO: 137215 - protein, 7 aa, synthetic construct
NRQMGMA

SEQ ID NO: 137216 - protein, 7 aa, synthetic construct
NRQPAQT

SEQ ID NO: 137217 - protein, 7 aa, synthetic construct
NRQPMMT

SEQ ID NO: 137218 - protein, 7 aa, synthetic construct
NRQPNPL

SEQ ID NO: 137219 - protein, 7 aa, synthetic construct
NRQPQAV

SEQ ID NO: 137220 - protein, 7 aa, synthetic construct
NRQPSGF

SEQ ID NO: 137221 - protein, 7 aa, synthetic construct
NRQQIHT

SEQ ID NO: 137222 - protein, 7 aa, synthetic construct
NRQQVSM

SEQ ID NO: 137223 - protein, 7 aa, synthetic construct
NRQSMPH

SEQ ID NO: 137224 - protein, 7 aa, synthetic construct
NRQSQQM

SEQ ID NO: 137225 - protein, 7 aa, synthetic construct
NRQTNLN

SEQ ID NO: 137226 - protein, 7 aa, synthetic construct
NRQTNYS

SEQ ID NO: 137227 - protein, 7 aa, synthetic construct
NRQTQAV

SEQ ID NO: 137228 - protein, 7 aa, synthetic construct
NRQTVPV

SEQ ID NO: 137229 - protein, 7 aa, synthetic construct
NRQVAQT

SEQ ID NO: 137230 - protein, 7 aa, synthetic construct
NRQVDRN

SEQ ID NO: 137231 - protein, 7 aa, synthetic construct
NRQVHTI

SEQ ID NO: 137232 - protein, 7 aa, synthetic construct
NRQVMNV

SEQ ID NO: 137233 - protein, 7 aa, synthetic construct
NRQVVQS

SEQ ID NO: 137234 - protein, 7 aa, synthetic construct
NRREIAA

SEQ ID NO: 137235 - protein, 7 aa, synthetic construct
NRSAAIL

SEQ ID NO: 137236 - protein, 7 aa, synthetic construct
NRSAGDK

SEQ ID NO: 137237 - protein, 7 aa, synthetic construct
NRSDKVQ

SEQ ID NO: 137238 - protein, 7 aa, synthetic construct
NRSEKSL

SEQ ID NO: 137239 - protein, 7 aa, synthetic construct
NRSEPSK

SEQ ID NO: 137240 - protein, 7 aa, synthetic construct
NRSETRT

SEQ ID NO: 137241 - protein, 7 aa, synthetic construct
NRSGPPL

SEQ ID NO: 137242 - protein, 7 aa, synthetic construct
NRSHSPV

SEQ ID NO: 137243 - protein, 7 aa, synthetic construct
NRSIDQK

SEQ ID NO: 137244 - protein, 7 aa, synthetic construct
NRSINKD

SEQ ID NO: 137245 - protein, 7 aa, synthetic construct
NRSMDTK

SEQ ID NO: 137246 - protein, 7 aa, synthetic construct
NRSNMVL

SEQ ID NO: 137247 - protein, 7 aa, synthetic construct
NRSNPAY

SEQ ID NO: 137248 - protein, 7 aa, synthetic construct
NRSPAVF

SEQ ID NO: 137249 - protein, 7 aa, synthetic construct
NRSPVHT

SEQ ID NO: 137250 - protein, 7 aa, synthetic construct
NRSSSFS

SEQ ID NO: 137251 - protein, 7 aa, synthetic construct
NRSTDRN

SEQ ID NO: 137252 - protein, 7 aa, synthetic construct
NRSVRNE

SEQ ID NO: 137253 - protein, 7 aa, synthetic construct
NRTADKF

SEQ ID NO: 137254 - protein, 7 aa, synthetic construct
NRTASDK

SEQ ID NO: 137255 - protein, 7 aa, synthetic construct
NRTDASK

SEQ ID NO: 137256 - protein, 7 aa, synthetic construct
NRTDKPM

SEQ ID NO: 137257 - protein, 7 aa, synthetic construct
NRTDKPV

SEQ ID NO: 137258 - protein, 7 aa, synthetic construct
NRTDSKM

SEQ ID NO: 137259 - protein, 7 aa, synthetic construct
NRTEIKY

SEQ ID NO: 137260 - protein, 7 aa, synthetic construct
NRTEKQL

SEQ ID NO: 137261 - protein, 7 aa, synthetic construct
NRTEKSF

SEQ ID NO: 137262 - protein, 7 aa, synthetic construct
NRTESFK

SEQ ID NO: 137263 - protein, 7 aa, synthetic construct
NRTGNPF

SEQ ID NO: 137264 - protein, 7 aa, synthetic construct
NRTHPGI

SEQ ID NO: 137265 - protein, 7 aa, synthetic construct
NRTHSNA

SEQ ID NO: 137266 - protein, 7 aa, synthetic construct
NRTITEK

SEQ ID NO: 137267 - protein, 7 aa, synthetic construct
NRTITRE

SEQ ID NO: 137268 - protein, 7 aa, synthetic construct
NRTKEPV

SEQ ID NO: 137269 - protein, 7 aa, synthetic construct
NRTKEVI

SEQ ID NO: 137270 - protein, 7 aa, synthetic construct
NRTKPEV

SEQ ID NO: 137271 - protein, 7 aa, synthetic construct
NRTKSEL

SEQ ID NO: 137272 - protein, 7 aa, synthetic construct
NRTKYDP

SEQ ID NO: 137273 - protein, 7 aa, synthetic construct
NRTLTNH

SEQ ID NO: 137274 - protein, 7 aa, synthetic construct
NRTMVTH

SEQ ID NO: 137275 - protein, 7 aa, synthetic construct
NRTNEKM

SEQ ID NO: 137276 - protein, 7 aa, synthetic construct
NRTQNVN

SEQ ID NO: 137277 - protein, 7 aa, synthetic construct
NRTQPDK

SEQ ID NO: 137278 - protein, 7 aa, synthetic construct
NRTQQSL

SEQ ID NO: 137279 - protein, 7 aa, synthetic construct
NRTQSMI

SEQ ID NO: 137280 - protein, 7 aa, synthetic construct
NRTRLTE

SEQ ID NO: 137281 - protein, 7 aa, synthetic construct
NRTSKEY

SEQ ID NO: 137282 - protein, 7 aa, synthetic construct
NRTSLEK

SEQ ID NO: 137283 - protein, 7 aa, synthetic construct
NRTTDNK

SEQ ID NO: 137284 - protein, 7 aa, synthetic construct
NRTTSEK

SEQ ID NO: 137285 - protein, 7 aa, synthetic construct
NRTYQAA

SEQ ID NO: 137286 - protein, 7 aa, synthetic construct
NRVAIQM

SEQ ID NO: 137287 - protein, 7 aa, synthetic construct
NRVAQQM

SEQ ID NO: 137288 - protein, 7 aa, synthetic construct
NRVASDK

SEQ ID NO: 137289 - protein, 7 aa, synthetic construct
NRVDKNF

SEQ ID NO: 137290 - protein, 7 aa, synthetic construct
NRVDLKY

SEQ ID NO: 137291 - protein, 7 aa, synthetic construct
NRVHSDK

SEQ ID NO: 137292 - protein, 7 aa, synthetic construct
NRVIKLE

SEQ ID NO: 137293 - protein, 7 aa, synthetic construct
NRVIRGD

SEQ ID NO: 137294 - protein, 7 aa, synthetic construct
NRVKKEE

SEQ ID NO: 137295 - protein, 7 aa, synthetic construct
NRVLHNP

SEQ ID NO: 137296 - protein, 7 aa, synthetic construct
NRVMEMK

SEQ ID NO: 137297 - protein, 7 aa, synthetic construct
NRVMNVN

SEQ ID NO: 137298 - protein, 7 aa, synthetic construct
NRVQQQT

SEQ ID NO: 137299 - protein, 7 aa, synthetic construct
NRVRVGE

SEQ ID NO: 137300 - protein, 7 aa, synthetic construct
NRVSIAQ

SEQ ID NO: 137301 - protein, 7 aa, synthetic construct
NRVSIMQ

SEQ ID NO: 137302 - protein, 7 aa, synthetic construct
NRVSNMQ

SEQ ID NO: 137303 - protein, 7 aa, synthetic construct
NRVSQSL

SEQ ID NO: 137304 - protein, 7 aa, synthetic construct
NRVVADR

SEQ ID NO: 137305 - protein, 7 aa, synthetic construct
NRYATQS

SEQ ID NO: 137306 - protein, 7 aa, synthetic construct
NRYGIQG

SEQ ID NO: 137307 - protein, 7 aa, synthetic construct
NRYKEQP

SEQ ID NO: 137308 - protein, 7 aa, synthetic construct
NRYMKEP

SEQ ID NO: 137309 - protein, 7 aa, synthetic construct
NSAEAKK

SEQ ID NO: 137310 - protein, 7 aa, synthetic construct
NSAHTLK

SEQ ID NO: 137311 - protein, 7 aa, synthetic construct
NSAMTTR

SEQ ID NO: 137312 - protein, 7 aa, synthetic construct
NSANNYK

SEQ ID NO: 137313 - protein, 7 aa, synthetic construct
NSAQARY

SEQ ID NO: 137314 - protein, 7 aa, synthetic construct
NSDAQRR

SEQ ID NO: 137315 - protein, 7 aa, synthetic construct
NSDLRKL

SEQ ID NO: 137316 - protein, 7 aa, synthetic construct
NSERARA

SEQ ID NO: 137317 - protein, 7 aa, synthetic construct
NSERPVR

SEQ ID NO: 137318 - protein, 7 aa, synthetic construct
NSETSRW

SEQ ID NO: 137319 - protein, 7 aa, synthetic construct
NSFGHKA

SEQ ID NO: 137320 - protein, 7 aa, synthetic construct
NSFGQKL

SEQ ID NO: 137321 - protein, 7 aa, synthetic construct
NSFKPAM

SEQ ID NO: 137322 - protein, 7 aa, synthetic construct
NSGAWNA

SEQ ID NO: 137323 - protein, 7 aa, synthetic construct
NSGKEMK

SEQ ID NO: 137324 - protein, 7 aa, synthetic construct
NSGLQAR

SEQ ID NO: 137325 - protein, 7 aa, synthetic construct
NSGNNSR

SEQ ID NO: 137326 - protein, 7 aa, synthetic construct
NSGPIAR

SEQ ID NO: 137327 - protein, 7 aa, synthetic construct
NSGPMKW

SEQ ID NO: 137328 - protein, 7 aa, synthetic construct
NSGPNGR

SEQ ID NO: 137329 - protein, 7 aa, synthetic construct
NSGRQMT

SEQ ID NO: 137330 - protein, 7 aa, synthetic construct
NSGRSEK

SEQ ID NO: 137331 - protein, 7 aa, synthetic construct
NSGVPRL

SEQ ID NO: 137332 - protein, 7 aa, synthetic construct
NSGWGNE

SEQ ID NO: 137333 - protein, 7 aa, synthetic construct
NSGWTQA

SEQ ID NO: 137334 - protein, 7 aa, synthetic construct
NSHALPA

SEQ ID NO: 137335 - protein, 7 aa, synthetic construct
NSHGIKT

SEQ ID NO: 137336 - protein, 7 aa, synthetic construct
NSHGKYS

SEQ ID NO: 137337 - protein, 7 aa, synthetic construct
NSHGVTR

SEQ ID NO: 137338 - protein, 7 aa, synthetic construct
NSHHLTK

SEQ ID NO: 137339 - protein, 7 aa, synthetic construct
NSHIGAK

SEQ ID NO: 137340 - protein, 7 aa, synthetic construct
NSHINKQ

SEQ ID NO: 137341 - protein, 7 aa, synthetic construct
NSHKSQL

SEQ ID NO: 137342 - protein, 7 aa, synthetic construct
NSHKTNL

SEQ ID NO: 137343 - protein, 7 aa, synthetic construct
NSHLKLV

SEQ ID NO: 137344 - protein, 7 aa, synthetic construct
NSHMPRL

SEQ ID NO: 137345 - protein, 7 aa, synthetic construct
NSHNKFP

SEQ ID NO: 137346 - protein, 7 aa, synthetic construct
NSHPVRV

SEQ ID NO: 137347 - protein, 7 aa, synthetic construct
NSHQWPS

SEQ ID NO: 137348 - protein, 7 aa, synthetic construct
NSHRPPL

SEQ ID NO: 137349 - protein, 7 aa, synthetic construct
NSHRVNV

SEQ ID NO: 137350 - protein, 7 aa, synthetic construct
NSHTTRM

SEQ ID NO: 137351 - protein, 7 aa, synthetic construct
NSHVGLK

SEQ ID NO: 137352 - protein, 7 aa, synthetic construct
NSHYAKI

SEQ ID NO: 137353 - protein, 7 aa, synthetic construct
NSIARHV

SEQ ID NO: 137354 - protein, 7 aa, synthetic construct
NSIHMRP

SEQ ID NO: 137355 - protein, 7 aa, synthetic construct
NSIRWNE

SEQ ID NO: 137356 - protein, 7 aa, synthetic construct
NSKAHYV

SEQ ID NO: 137357 - protein, 7 aa, synthetic construct
NSKERHV

SEQ ID NO: 137358 - protein, 7 aa, synthetic construct
NSKERNH

SEQ ID NO: 137359 - protein, 7 aa, synthetic construct
NSKIVSY

SEQ ID NO: 137360 - protein, 7 aa, synthetic construct
NSKKEYQ

SEQ ID NO: 137361 - protein, 7 aa, synthetic construct
NSKNHGL

SEQ ID NO: 137362 - protein, 7 aa, synthetic construct
NSKPPRD

SEQ ID NO: 137363 - protein, 7 aa, synthetic construct
NSKQERL

SEQ ID NO: 137364 - protein, 7 aa, synthetic construct
NSKRPFE

SEQ ID NO: 137365 - protein, 7 aa, synthetic construct
NSKSRSD

SEQ ID NO: 137366 - protein, 7 aa, synthetic construct
NSKTGQW

SEQ ID NO: 137367 - protein, 7 aa, synthetic construct
NSKVPML

SEQ ID NO: 137368 - protein, 7 aa, synthetic construct
NSKYKDS

SEQ ID NO: 137369 - protein, 7 aa, synthetic construct
NSLASSR

SEQ ID NO: 137370 - protein, 7 aa, synthetic construct
NSMANNR

SEQ ID NO: 137371 - protein, 7 aa, synthetic construct
NSMAQGR

SEQ ID NO: 137372 - protein, 7 aa, synthetic construct
NSMGFPK

SEQ ID NO: 137373 - protein, 7 aa, synthetic construct
NSMHPPR

SEQ ID NO: 137374 - protein, 7 aa, synthetic construct
NSMHSIK

SEQ ID NO: 137375 - protein, 7 aa, synthetic construct
NSMHTRV

SEQ ID NO: 137376 - protein, 7 aa, synthetic construct
NSMNGGR

SEQ ID NO: 137377 - protein, 7 aa, synthetic construct
NSMQMGR

SEQ ID NO: 137378 - protein, 7 aa, synthetic construct
NSMQNGR

SEQ ID NO: 137379 - protein, 7 aa, synthetic construct
NSMQRAT

SEQ ID NO: 137380 - protein, 7 aa, synthetic construct
NSMRVST

SEQ ID NO: 137381 - protein, 7 aa, synthetic construct
NSNARQL

SEQ ID NO: 137382 - protein, 7 aa, synthetic construct
NSNFRDR

SEQ ID NO: 137383 - protein, 7 aa, synthetic construct
NSNGAMR

SEQ ID NO: 137384 - protein, 7 aa, synthetic construct
NSNHGIK

SEQ ID NO: 137385 - protein, 7 aa, synthetic construct
NSNHRIV

SEQ ID NO: 137386 - protein, 7 aa, synthetic construct
NSNLKDR

SEQ ID NO: 137387 - protein, 7 aa, synthetic construct
NSNMERT

SEQ ID NO: 137388 - protein, 7 aa, synthetic construct
NSNNHTK

SEQ ID NO: 137389 - protein, 7 aa, synthetic construct
NSNNLGR

SEQ ID NO: 137390 - protein, 7 aa, synthetic construct
NSNQLGR

SEQ ID NO: 137391 - protein, 7 aa, synthetic construct
NSNQRDK

SEQ ID NO: 137392 - protein, 7 aa, synthetic construct
NSNSAKW

SEQ ID NO: 137393 - protein, 7 aa, synthetic construct
NSNSITR

SEQ ID NO: 137394 - protein, 7 aa, synthetic construct
NSPAARY

SEQ ID NO: 137395 - protein, 7 aa, synthetic construct
NSPRHTV

SEQ ID NO: 137396 - protein, 7 aa, synthetic construct
NSPRSLM

SEQ ID NO: 137397 - protein, 7 aa, synthetic construct
NSPRVGM

SEQ ID NO: 137398 - protein, 7 aa, synthetic construct
NSPSAMR

SEQ ID NO: 137399 - protein, 7 aa, synthetic construct
NSQFAAK

SEQ ID NO: 137400 - protein, 7 aa, synthetic construct
NSQGMIR

SEQ ID NO: 137401 - protein, 7 aa, synthetic construct
NSQHLSR

SEQ ID NO: 137402 - protein, 7 aa, synthetic construct
NSQISRQ

SEQ ID NO: 137403 - protein, 7 aa, synthetic construct
NSQLHRV

SEQ ID NO: 137404 - protein, 7 aa, synthetic construct
NSQLTRQ

SEQ ID NO: 137405 - protein, 7 aa, synthetic construct
NSQMKNY

SEQ ID NO: 137406 - protein, 7 aa, synthetic construct
NSQPRQS

SEQ ID NO: 137407 - protein, 7 aa, synthetic construct
NSQQAMR

SEQ ID NO: 137408 - protein, 7 aa, synthetic construct
NSQQARY

SEQ ID NO: 137409 - protein, 7 aa, synthetic construct
NSQQGYK

SEQ ID NO: 137410 - protein, 7 aa, synthetic construct
NSQRAGM

SEQ ID NO: 137411 - protein, 7 aa, synthetic construct
NSQRATL

SEQ ID NO: 137412 - protein, 7 aa, synthetic construct
NSQRNYI

SEQ ID NO: 137413 - protein, 7 aa, synthetic construct
NSQVASR

SEQ ID NO: 137414 - protein, 7 aa, synthetic construct
NSQYKPI

SEQ ID NO: 137415 - protein, 7 aa, synthetic construct
NSQYLKQ

SEQ ID NO: 137416 - protein, 7 aa, synthetic construct
NSQYSKT

SEQ ID NO: 137417 - protein, 7 aa, synthetic construct
NSRANNT

SEQ ID NO: 137418 - protein, 7 aa, synthetic construct
NSRAVDR

SEQ ID NO: 137419 - protein, 7 aa, synthetic construct
NSRDFGK

SEQ ID NO: 137420 - protein, 7 aa, synthetic construct
NSRDGSK

SEQ ID NO: 137421 - protein, 7 aa, synthetic construct
NSRDMVR

SEQ ID NO: 137422 - protein, 7 aa, synthetic construct
NSRDQKQ

SEQ ID NO: 137423 - protein, 7 aa, synthetic construct
NSRDSTK

SEQ ID NO: 137424 - protein, 7 aa, synthetic construct
NSRDVPR

SEQ ID NO: 137425 - protein, 7 aa, synthetic construct
NSREKVN

SEQ ID NO: 137426 - protein, 7 aa, synthetic construct
NSREPLK

SEQ ID NO: 137427 - protein, 7 aa, synthetic construct
NSRMEKF

SEQ ID NO: 137428 - protein, 7 aa, synthetic construct
NSRNTEK

SEQ ID NO: 137429 - protein, 7 aa, synthetic construct
NSRPYAP

SEQ ID NO: 137430 - protein, 7 aa, synthetic construct
NSRQIAM

SEQ ID NO: 137431 - protein, 7 aa, synthetic construct
NSRQIQM

SEQ ID NO: 137432 - protein, 7 aa, synthetic construct
NSRQQPT

SEQ ID NO: 137433 - protein, 7 aa, synthetic construct
NSRSASL

SEQ ID NO: 137434 - protein, 7 aa, synthetic construct
NSRVIKE

SEQ ID NO: 137435 - protein, 7 aa, synthetic construct
NSRVQRE

SEQ ID NO: 137436 - protein, 7 aa, synthetic construct
NSSAWDK

SEQ ID NO: 137437 - protein, 7 aa, synthetic construct
NSSAYPR

SEQ ID NO: 137438 - protein, 7 aa, synthetic construct
NSSGMLR

SEQ ID NO: 137439 - protein, 7 aa, synthetic construct
NSSKDAR

SEQ ID NO: 137440 - protein, 7 aa, synthetic construct
NSSKEVR

SEQ ID NO: 137441 - protein, 7 aa, synthetic construct
NSSKGVW

SEQ ID NO: 137442 - protein, 7 aa, synthetic construct
NSSKMDK

SEQ ID NO: 137443 - protein, 7 aa, synthetic construct
NSSLRKD

SEQ ID NO: 137444 - protein, 7 aa, synthetic construct
NSSMNNR

SEQ ID NO: 137445 - protein, 7 aa, synthetic construct
NSSREKM

SEQ ID NO: 137446 - protein, 7 aa, synthetic construct
NSSTVYR

SEQ ID NO: 137447 - protein, 7 aa, synthetic construct
NSSVKIT

SEQ ID NO: 137448 - protein, 7 aa, synthetic construct
NSTGKPW

SEQ ID NO: 137449 - protein, 7 aa, synthetic construct
NSTHWKA

SEQ ID NO: 137450 - protein, 7 aa, synthetic construct
NSTKLHY

SEQ ID NO: 137451 - protein, 7 aa, synthetic construct
NSTQNYR

SEQ ID NO: 137452 - protein, 7 aa, synthetic construct
NSTRQSY

SEQ ID NO: 137453 - protein, 7 aa, synthetic construct
NSTTRQF

SEQ ID NO: 137454 - protein, 7 aa, synthetic construct
NSTVRGH

SEQ ID NO: 137455 - protein, 7 aa, synthetic construct
NSTVRRD

SEQ ID NO: 137456 - protein, 7 aa, synthetic construct
NSTYGKY

SEQ ID NO: 137457 - protein, 7 aa, synthetic construct
NSVAVRM

SEQ ID NO: 137458 - protein, 7 aa, synthetic construct
NSVGTGR

SEQ ID NO: 137459 - protein, 7 aa, synthetic construct
NSVKYSI

SEQ ID NO: 137460 - protein, 7 aa, synthetic construct
NSVQTSR

SEQ ID NO: 137461 - protein, 7 aa, synthetic construct
NSVRTNF

SEQ ID NO: 137462 - protein, 7 aa, synthetic construct
NSVSKMH

SEQ ID NO: 137463 - protein, 7 aa, synthetic construct
NSWNGKS

SEQ ID NO: 137464 - protein, 7 aa, synthetic construct
NSYEKRP

SEQ ID NO: 137465 - protein, 7 aa, synthetic construct
NSYGPKI

SEQ ID NO: 137466 - protein, 7 aa, synthetic construct
NSYKHQM

SEQ ID NO: 137467 - protein, 7 aa, synthetic construct
NSYNRQI

SEQ ID NO: 137468 - protein, 7 aa, synthetic construct
NSYQGTN

SEQ ID NO: 137469 - protein, 7 aa, synthetic construct
NSYQPSK

SEQ ID NO: 137470 - protein, 7 aa, synthetic construct
NSYSELR

SEQ ID NO: 137471 - protein, 7 aa, synthetic construct
NTAERKI

SEQ ID NO: 137472 - protein, 7 aa, synthetic construct
NTAGRTH

SEQ ID NO: 137473 - protein, 7 aa, synthetic construct
NTAIRRD

SEQ ID NO: 137474 - protein, 7 aa, synthetic construct
NTAKFPT

SEQ ID NO: 137475 - protein, 7 aa, synthetic construct
NTAKMDR

SEQ ID NO: 137476 - protein, 7 aa, synthetic construct
NTAKVHF

SEQ ID NO: 137477 - protein, 7 aa, synthetic construct
NTANSMR

SEQ ID NO: 137478 - protein, 7 aa, synthetic construct
NTARHMA

SEQ ID NO: 137479 - protein, 7 aa, synthetic construct
NTARNNW

SEQ ID NO: 137480 - protein, 7 aa, synthetic construct
NTAVKVM

SEQ ID NO: 137481 - protein, 7 aa, synthetic construct
NTDANRR

SEQ ID NO: 137482 - protein, 7 aa, synthetic construct
NTEKPYK

SEQ ID NO: 137483 - protein, 7 aa, synthetic construct
NTEKRMV

SEQ ID NO: 137484 - protein, 7 aa, synthetic construct
NTENIRR

SEQ ID NO: 137485 - protein, 7 aa, synthetic construct
NTERMGK

SEQ ID NO: 137486 - protein, 7 aa, synthetic construct
NTEWTAK

SEQ ID NO: 137487 - protein, 7 aa, synthetic construct
NTFKPIP

SEQ ID NO: 137488 - protein, 7 aa, synthetic construct
NTFQPAR

SEQ ID NO: 137489 - protein, 7 aa, synthetic construct
NTFQRNM

SEQ ID NO: 137490 - protein, 7 aa, synthetic construct
NTFSQQR

SEQ ID NO: 137491 - protein, 7 aa, synthetic construct
NTGAHLR

SEQ ID NO: 137492 - protein, 7 aa, synthetic construct
NTGANRY

SEQ ID NO: 137493 - protein, 7 aa, synthetic construct
NTGGFNK

SEQ ID NO: 137494 - protein, 7 aa, synthetic construct
NTGTNYR

SEQ ID NO: 137495 - protein, 7 aa, synthetic construct
NTGYVTK

SEQ ID NO: 137496 - protein, 7 aa, synthetic construct
NTHAGLR

SEQ ID NO: 137497 - protein, 7 aa, synthetic construct
NTHAGRL

SEQ ID NO: 137498 - protein, 7 aa, synthetic construct
NTHGRSQ

SEQ ID NO: 137499 - protein, 7 aa, synthetic construct
NTHKMNL

SEQ ID NO: 137500 - protein, 7 aa, synthetic construct
NTHLGAK

SEQ ID NO: 137501 - protein, 7 aa, synthetic construct
NTHLKSL

SEQ ID NO: 137502 - protein, 7 aa, synthetic construct
NTHNTQK

SEQ ID NO: 137503 - protein, 7 aa, synthetic construct
NTHQGYM

SEQ ID NO: 137504 - protein, 7 aa, synthetic construct
NTHQVGK

SEQ ID NO: 137505 - protein, 7 aa, synthetic construct
NTHRNTF

SEQ ID NO: 137506 - protein, 7 aa, synthetic construct
NTHRPVT

SEQ ID NO: 137507 - protein, 7 aa, synthetic construct
NTHSIQR

SEQ ID NO: 137508 - protein, 7 aa, synthetic construct
NTHTKDR

SEQ ID NO: 137509 - protein, 7 aa, synthetic construct
NTHTRAL

SEQ ID NO: 137510 - protein, 7 aa, synthetic construct
NTHVKYG

SEQ ID NO: 137511 - protein, 7 aa, synthetic construct
NTHYHAA

SEQ ID NO: 137512 - protein, 7 aa, synthetic construct
NTHYNGK

SEQ ID NO: 137513 - protein, 7 aa, synthetic construct
NTHYVAT

SEQ ID NO: 137514 - protein, 7 aa, synthetic construct
NTIKTEW

SEQ ID NO: 137515 - protein, 7 aa, synthetic construct
NTKEWKN

SEQ ID NO: 137516 - protein, 7 aa, synthetic construct
NTKFAHH

SEQ ID NO: 137517 - protein, 7 aa, synthetic construct
NTKFVSH

SEQ ID NO: 137518 - protein, 7 aa, synthetic construct
NTKHQLI

SEQ ID NO: 137519 - protein, 7 aa, synthetic construct
NTKISDW

SEQ ID NO: 137520 - protein, 7 aa, synthetic construct
NTKRVET

SEQ ID NO: 137521 - protein, 7 aa, synthetic construct
NTKSDMR

SEQ ID NO: 137522 - protein, 7 aa, synthetic construct
NTKTGTW

SEQ ID NO: 137523 - protein, 7 aa, synthetic construct
NTKTHTY

SEQ ID NO: 137524 - protein, 7 aa, synthetic construct
NTKVYRE

SEQ ID NO: 137525 - protein, 7 aa, synthetic construct
NTKYQSQ

SEQ ID NO: 137526 - protein, 7 aa, synthetic construct
NTLKREY

SEQ ID NO: 137527 - protein, 7 aa, synthetic construct
NTLQGYR

SEQ ID NO: 137528 - protein, 7 aa, synthetic construct
NTLTRHL

SEQ ID NO: 137529 - protein, 7 aa, synthetic construct
NTLVRRE

SEQ ID NO: 137530 - protein, 7 aa, synthetic construct
NTMARQT

SEQ ID NO: 137531 - protein, 7 aa, synthetic construct
NTMGSNR

SEQ ID NO: 137532 - protein, 7 aa, synthetic construct
NTMGYNK

SEQ ID NO: 137533 - protein, 7 aa, synthetic construct
NTMKMAI

SEQ ID NO: 137534 - protein, 7 aa, synthetic construct
NTMMAQR

SEQ ID NO: 137535 - protein, 7 aa, synthetic construct
NTMRDGK

SEQ ID NO: 137536 - protein, 7 aa, synthetic construct
NTMSHGK

SEQ ID NO: 137537 - protein, 7 aa, synthetic construct
NTNHIQR

SEQ ID NO: 137538 - protein, 7 aa, synthetic construct
NTNHRGV

SEQ ID NO: 137539 - protein, 7 aa, synthetic construct
NTNLTHR

SEQ ID NO: 137540 - protein, 7 aa, synthetic construct
NTNMRNT

SEQ ID NO: 137541 - protein, 7 aa, synthetic construct
NTNMSPR

SEQ ID NO: 137542 - protein, 7 aa, synthetic construct
NTNQTPR

SEQ ID NO: 137543 - protein, 7 aa, synthetic construct
NTNSANR

SEQ ID NO: 137544 - protein, 7 aa, synthetic construct
NTNSNPR

SEQ ID NO: 137545 - protein, 7 aa, synthetic construct
NTNVRVY

SEQ ID NO: 137546 - protein, 7 aa, synthetic construct
NTPRLRD

SEQ ID NO: 137547 - protein, 7 aa, synthetic construct
NTPSYKI

SEQ ID NO: 137548 - protein, 7 aa, synthetic construct
NTPYKMG

SEQ ID NO: 137549 - protein, 7 aa, synthetic construct
NTQGFQR

SEQ ID NO: 137550 - protein, 7 aa, synthetic construct
NTQGMLR

SEQ ID NO: 137551 - protein, 7 aa, synthetic construct
NTQGSNR

SEQ ID NO: 137552 - protein, 7 aa, synthetic construct
NTQLRGY

SEQ ID NO: 137553 - protein, 7 aa, synthetic construct
NTQQASR

SEQ ID NO: 137554 - protein, 7 aa, synthetic construct
NTQRFIA

SEQ ID NO: 137555 - protein, 7 aa, synthetic construct
NTQYGHT

SEQ ID NO: 137556 - protein, 7 aa, synthetic construct
NTRAAPY

SEQ ID NO: 137557 - protein, 7 aa, synthetic construct
NTRDRPM

SEQ ID NO: 137558 - protein, 7 aa, synthetic construct
NTRDVAR

SEQ ID NO: 137559 - protein, 7 aa, synthetic construct
NTRGLDR

SEQ ID NO: 137560 - protein, 7 aa, synthetic construct
NTRHMMS

SEQ ID NO: 137561 - protein, 7 aa, synthetic construct
NTRLPKD

SEQ ID NO: 137562 - protein, 7 aa, synthetic construct
NTRLQDK

SEQ ID NO: 137563 - protein, 7 aa, synthetic construct
NTRMDRG

SEQ ID NO: 137564 - protein, 7 aa, synthetic construct
NTRPLER

SEQ ID NO: 137565 - protein, 7 aa, synthetic construct
NTRPTYV

SEQ ID NO: 137566 - protein, 7 aa, synthetic construct
NTRQPAY

SEQ ID NO: 137567 - protein, 7 aa, synthetic construct
NTSKFHH

SEQ ID NO: 137568 - protein, 7 aa, synthetic construct
NTSKPQW

SEQ ID NO: 137569 - protein, 7 aa, synthetic construct
NTSMGQR

SEQ ID NO: 137570 - protein, 7 aa, synthetic construct
NTSTRNW

SEQ ID NO: 137571 - protein, 7 aa, synthetic construct
NTTHTAR

SEQ ID NO: 137572 - protein, 7 aa, synthetic construct
NTTHWRE

SEQ ID NO: 137573 - protein, 7 aa, synthetic construct
NTTLRHG

SEQ ID NO: 137574 - protein, 7 aa, synthetic construct
NTTMHPR

SEQ ID NO: 137575 - protein, 7 aa, synthetic construct
NTTNVRY

SEQ ID NO: 137576 - protein, 7 aa, synthetic construct
NTTRLMY

SEQ ID NO: 137577 - protein, 7 aa, synthetic construct
NTTYKHG

SEQ ID NO: 137578 - protein, 7 aa, synthetic construct
NTTYKNA

SEQ ID NO: 137579 - protein, 7 aa, synthetic construct
NTVAHAR

SEQ ID NO: 137580 - protein, 7 aa, synthetic construct
NTVRMEK

SEQ ID NO: 137581 - protein, 7 aa, synthetic construct
NTVSDKR

SEQ ID NO: 137582 - protein, 7 aa, synthetic construct
NTVSRKD

SEQ ID NO: 137583 - protein, 7 aa, synthetic construct
NTVYHAS

SEQ ID NO: 137584 - protein, 7 aa, synthetic construct
NTWSTGS

SEQ ID NO: 137585 - protein, 7 aa, synthetic construct
NTYATHM

SEQ ID NO: 137586 - protein, 7 aa, synthetic construct
NTYHAGL

SEQ ID NO: 137587 - protein, 7 aa, synthetic construct
NTYKTEK

SEQ ID NO: 137588 - protein, 7 aa, synthetic construct
NTYNQKA

SEQ ID NO: 137589 - protein, 7 aa, synthetic construct
NVADRSR

SEQ ID NO: 137590 - protein, 7 aa, synthetic construct
NVAGMAR

SEQ ID NO: 137591 - protein, 7 aa, synthetic construct
NVAGMNR

SEQ ID NO: 137592 - protein, 7 aa, synthetic construct
NVAGVRQ

SEQ ID NO: 137593 - protein, 7 aa, synthetic construct
NVAHGQK

SEQ ID NO: 137594 - protein, 7 aa, synthetic construct
NVARDRN

SEQ ID NO: 137595 - protein, 7 aa, synthetic construct
NVARIQT

SEQ ID NO: 137596 - protein, 7 aa, synthetic construct
NVARNEK

SEQ ID NO: 137597 - protein, 7 aa, synthetic construct
NVASHRS

SEQ ID NO: 137598 - protein, 7 aa, synthetic construct
NVAYNHG

SEQ ID NO: 137599 - protein, 7 aa, synthetic construct
NVDANKK

SEQ ID NO: 137600 - protein, 7 aa, synthetic construct
NVDNPKR

SEQ ID NO: 137601 - protein, 7 aa, synthetic construct
NVDRGKS

SEQ ID NO: 137602 - protein, 7 aa, synthetic construct
NVDTRIK

SEQ ID NO: 137603 - protein, 7 aa, synthetic construct
NVDVKPR

SEQ ID NO: 137604 - protein, 7 aa, synthetic construct
NVENKRN

SEQ ID NO: 137605 - protein, 7 aa, synthetic construct
NVESIKR

SEQ ID NO: 137606 - protein, 7 aa, synthetic construct
NVFGNKQ

SEQ ID NO: 137607 - protein, 7 aa, synthetic construct
NVGELRK

SEQ ID NO: 137608 - protein, 7 aa, synthetic construct
NVGLTKY

SEQ ID NO: 137609 - protein, 7 aa, synthetic construct
NVGQFSR

SEQ ID NO: 137610 - protein, 7 aa, synthetic construct
NVGQRYQ

SEQ ID NO: 137611 - protein, 7 aa, synthetic construct
NVGQSFR

SEQ ID NO: 137612 - protein, 7 aa, synthetic construct
NVGQSHK

SEQ ID NO: 137613 - protein, 7 aa, synthetic construct
NVGRPHS

SEQ ID NO: 137614 - protein, 7 aa, synthetic construct
NVGRRLE

SEQ ID NO: 137615 - protein, 7 aa, synthetic construct
NVGSAPR

SEQ ID NO: 137616 - protein, 7 aa, synthetic construct
NVGTYHK

SEQ ID NO: 137617 - protein, 7 aa, synthetic construct
NVGVQGR

SEQ ID NO: 137618 - protein, 7 aa, synthetic construct
NVHAKPF

SEQ ID NO: 137619 - protein, 7 aa, synthetic construct
NVHATIR

SEQ ID NO: 137620 - protein, 7 aa, synthetic construct
NVHERRM

SEQ ID NO: 137621 - protein, 7 aa, synthetic construct
NVHGARV

SEQ ID NO: 137622 - protein, 7 aa, synthetic construct
NVHGRPL

SEQ ID NO: 137623 - protein, 7 aa, synthetic construct
NVHIRSN

SEQ ID NO: 137624 - protein, 7 aa, synthetic construct
NVHQSHK

SEQ ID NO: 137625 - protein, 7 aa, synthetic construct
NVHRGQP

SEQ ID NO: 137626 - protein, 7 aa, synthetic construct
NVHSLRG

SEQ ID NO: 137627 - protein, 7 aa, synthetic construct
NVHTYSK

SEQ ID NO: 137628 - protein, 7 aa, synthetic construct
NVIGPQR

SEQ ID NO: 137629 - protein, 7 aa, synthetic construct
NVIRPAQ

SEQ ID NO: 137630 - protein, 7 aa, synthetic construct
NVKDTMR

SEQ ID NO: 137631 - protein, 7 aa, synthetic construct
NVKEWNK

SEQ ID NO: 137632 - protein, 7 aa, synthetic construct
NVKGDHR

SEQ ID NO: 137633 - protein, 7 aa, synthetic construct
NVKHPMI

SEQ ID NO: 137634 - protein, 7 aa, synthetic construct
NVKIGAF

SEQ ID NO: 137635 - protein, 7 aa, synthetic construct
NVKITTY

SEQ ID NO: 137636 - protein, 7 aa, synthetic construct
NVKPDKW

SEQ ID NO: 137637 - protein, 7 aa, synthetic construct
NVKQEHR

SEQ ID NO: 137638 - protein, 7 aa, synthetic construct
NVKRPTD

SEQ ID NO: 137639 - protein, 7 aa, synthetic construct
NVKTSAW

SEQ ID NO: 137640 - protein, 7 aa, synthetic construct
NVKYSNT

SEQ ID NO: 137641 - protein, 7 aa, synthetic construct
NVLHQNR

SEQ ID NO: 137642 - protein, 7 aa, synthetic construct
NVLHRQA

SEQ ID NO: 137643 - protein, 7 aa, synthetic construct
NVLHTRA

SEQ ID NO: 137644 - protein, 7 aa, synthetic construct
NVLKHTI

SEQ ID NO: 137645 - protein, 7 aa, synthetic construct
NVLNSSR

SEQ ID NO: 137646 - protein, 7 aa, synthetic construct
NVMARNT

SEQ ID NO: 137647 - protein, 7 aa, synthetic construct
NVMGSVR

SEQ ID NO: 137648 - protein, 7 aa, synthetic construct
NVMKFRE

SEQ ID NO: 137649 - protein, 7 aa, synthetic construct
NVMNANR

SEQ ID NO: 137650 - protein, 7 aa, synthetic construct
NVMQHAK

SEQ ID NO: 137651 - protein, 7 aa, synthetic construct
NVMQYAK

SEQ ID NO: 137652 - protein, 7 aa, synthetic construct
NVMRQPP

SEQ ID NO: 137653 - protein, 7 aa, synthetic construct
NVNATHR

SEQ ID NO: 137654 - protein, 7 aa, synthetic construct
NVNNSYK

SEQ ID NO: 137655 - protein, 7 aa, synthetic construct
NVNPHVR

SEQ ID NO: 137656 - protein, 7 aa, synthetic construct
NVNRMPM

SEQ ID NO: 137657 - protein, 7 aa, synthetic construct
NVPGTYR

SEQ ID NO: 137658 - protein, 7 aa, synthetic construct
NVPGYSK

SEQ ID NO: 137659 - protein, 7 aa, synthetic construct
NVPHQRS

SEQ ID NO: 137660 - protein, 7 aa, synthetic construct
NVPKHSY

SEQ ID NO: 137661 - protein, 7 aa, synthetic construct
NVPKNYI

SEQ ID NO: 137662 - protein, 7 aa, synthetic construct
NVPLHSR

SEQ ID NO: 137663 - protein, 7 aa, synthetic construct
NVPLQNR

SEQ ID NO: 137664 - protein, 7 aa, synthetic construct
NVPMVKI

SEQ ID NO: 137665 - protein, 7 aa, synthetic construct
NVPNVNR

SEQ ID NO: 137666 - protein, 7 aa, synthetic construct
NVPRVGH

SEQ ID NO: 137667 - protein, 7 aa, synthetic construct
NVPSSFR

SEQ ID NO: 137668 - protein, 7 aa, synthetic construct
NVPTRSV

SEQ ID NO: 137669 - protein, 7 aa, synthetic construct
NVPYPKM

SEQ ID NO: 137670 - protein, 7 aa, synthetic construct
NVQFTKS

SEQ ID NO: 137671 - protein, 7 aa, synthetic construct
NVQGLPR

SEQ ID NO: 137672 - protein, 7 aa, synthetic construct
NVQGVGR

SEQ ID NO: 137673 - protein, 7 aa, synthetic construct
NVQHRST

SEQ ID NO: 137674 - protein, 7 aa, synthetic construct
NVQRAYP

SEQ ID NO: 137675 - protein, 7 aa, synthetic construct
NVRAIER

SEQ ID NO: 137676 - protein, 7 aa, synthetic construct
NVREVLK

SEQ ID NO: 137677 - protein, 7 aa, synthetic construct
NVRHEKA

SEQ ID NO: 137678 - protein, 7 aa, synthetic construct
NVRHIGT

SEQ ID NO: 137679 - protein, 7 aa, synthetic construct
NVRINRE

SEQ ID NO: 137680 - protein, 7 aa, synthetic construct
NVRMMQP

SEQ ID NO: 137681 - protein, 7 aa, synthetic construct
NVRMNSH

SEQ ID NO: 137682 - protein, 7 aa, synthetic construct
NVRPMDR

SEQ ID NO: 137683 - protein, 7 aa, synthetic construct
NVRPPMG

SEQ ID NO: 137684 - protein, 7 aa, synthetic construct
NVRQFQP

SEQ ID NO: 137685 - protein, 7 aa, synthetic construct
NVRSHLV

SEQ ID NO: 137686 - protein, 7 aa, synthetic construct
NVRTADK

SEQ ID NO: 137687 - protein, 7 aa, synthetic construct
NVRVMRE

SEQ ID NO: 137688 - protein, 7 aa, synthetic construct
NVSAMAR

SEQ ID NO: 137689 - protein, 7 aa, synthetic construct
NVSHRGG

SEQ ID NO: 137690 - protein, 7 aa, synthetic construct
NVSHTKY

SEQ ID NO: 137691 - protein, 7 aa, synthetic construct
NVSMRVQ

SEQ ID NO: 137692 - protein, 7 aa, synthetic construct
NVSNRER

SEQ ID NO: 137693 - protein, 7 aa, synthetic construct
NVSRHAP

SEQ ID NO: 137694 - protein, 7 aa, synthetic construct
NVSSASR

SEQ ID NO: 137695 - protein, 7 aa, synthetic construct
NVTDSAA

SEQ ID NO: 137696 - protein, 7 aa, synthetic construct
NVTERVR

SEQ ID NO: 137697 - protein, 7 aa, synthetic construct
NVTHARI

SEQ ID NO: 137698 - protein, 7 aa, synthetic construct
NVTLHKM

SEQ ID NO: 137699 - protein, 7 aa, synthetic construct
NVTRHNA

SEQ ID NO: 137700 - protein, 7 aa, synthetic construct
NVTRYPQ

SEQ ID NO: 137701 - protein, 7 aa, synthetic construct
NVTYAKQ

SEQ ID NO: 137702 - protein, 7 aa, synthetic construct
NVTYASH

SEQ ID NO: 137703 - protein, 7 aa, synthetic construct
NVTYGKQ

SEQ ID NO: 137704 - protein, 7 aa, synthetic construct
NVVHRVG

SEQ ID NO: 137705 - protein, 7 aa, synthetic construct
NVVRERS

SEQ ID NO: 137706 - protein, 7 aa, synthetic construct
NVVRKID

SEQ ID NO: 137707 - protein, 7 aa, synthetic construct
NVYGGIK

SEQ ID NO: 137708 - protein, 7 aa, synthetic construct
NVYGKRE

SEQ ID NO: 137709 - protein, 7 aa, synthetic construct
NVYGSKL

SEQ ID NO: 137710 - protein, 7 aa, synthetic construct
NVYGTKN

SEQ ID NO: 137711 - protein, 7 aa, synthetic construct
NVYHTQN

SEQ ID NO: 137712 - protein, 7 aa, synthetic construct
NVYQGTK

SEQ ID NO: 137713 - protein, 7 aa, synthetic construct
NVYQNTK

SEQ ID NO: 137714 - protein, 7 aa, synthetic construct
NVYSQAK

SEQ ID NO: 137715 - protein, 7 aa, synthetic construct
NVYVKGG

SEQ ID NO: 137716 - protein, 7 aa, synthetic construct
NVYVTKG

SEQ ID NO: 137717 - protein, 7 aa, synthetic construct
NWEKRGS

SEQ ID NO: 137718 - protein, 7 aa, synthetic construct
NWGDKSR

SEQ ID NO: 137719 - protein, 7 aa, synthetic construct
NWGENMR

SEQ ID NO: 137720 - protein, 7 aa, synthetic construct
NWGKEKG

SEQ ID NO: 137721 - protein, 7 aa, synthetic construct
NWGKRES

SEQ ID NO: 137722 - protein, 7 aa, synthetic construct
NWNKEFK

SEQ ID NO: 137723 - protein, 7 aa, synthetic construct
NYAGQAK

SEQ ID NO: 137724 - protein, 7 aa, synthetic construct
NYAHPTK

SEQ ID NO: 137725 - protein, 7 aa, synthetic construct
NYAIKPQ

SEQ ID NO: 137726 - protein, 7 aa, synthetic construct
NYAIKTN

SEQ ID NO: 137727 - protein, 7 aa, synthetic construct
NYARQTN

SEQ ID NO: 137728 - protein, 7 aa, synthetic construct
NYESHGR

SEQ ID NO: 137729 - protein, 7 aa, synthetic construct
NYESMKK

SEQ ID NO: 137730 - protein, 7 aa, synthetic construct
NYGAGTR

SEQ ID NO: 137731 - protein, 7 aa, synthetic construct
NYGGMKL

SEQ ID NO: 137732 - protein, 7 aa, synthetic construct
NYGKALL

SEQ ID NO: 137733 - protein, 7 aa, synthetic construct
NYGKIPH

SEQ ID NO: 137734 - protein, 7 aa, synthetic construct
NYGKPIL

SEQ ID NO: 137735 - protein, 7 aa, synthetic construct
NYGKSLM

SEQ ID NO: 137736 - protein, 7 aa, synthetic construct
NYGLAGK

SEQ ID NO: 137737 - protein, 7 aa, synthetic construct
NYGLLKG

SEQ ID NO: 137738 - protein, 7 aa, synthetic construct
NYGNSSK

SEQ ID NO: 137739 - protein, 7 aa, synthetic construct
NYGPAVK

SEQ ID NO: 137740 - protein, 7 aa, synthetic construct
NYGPFPK

SEQ ID NO: 137741 - protein, 7 aa, synthetic construct
NYGTYVK

SEQ ID NO: 137742 - protein, 7 aa, synthetic construct
NYHTAKT

SEQ ID NO: 137743 - protein, 7 aa, synthetic construct
NYIKNAG

SEQ ID NO: 137744 - protein, 7 aa, synthetic construct
NYKAEQR

SEQ ID NO: 137745 - protein, 7 aa, synthetic construct
NYKALAS

SEQ ID NO: 137746 - protein, 7 aa, synthetic construct
NYKAMPA

SEQ ID NO: 137747 - protein, 7 aa, synthetic construct
NYKERVF

SEQ ID NO: 137748 - protein, 7 aa, synthetic construct
NYKHAPN

SEQ ID NO: 137749 - protein, 7 aa, synthetic construct
NYKHVDK

SEQ ID NO: 137750 - protein, 7 aa, synthetic construct
NYKIAPN

SEQ ID NO: 137751 - protein, 7 aa, synthetic construct
NYKIMSN

SEQ ID NO: 137752 - protein, 7 aa, synthetic construct
NYKIQAS

SEQ ID NO: 137753 - protein, 7 aa, synthetic construct
NYKISST

SEQ ID NO: 137754 - protein, 7 aa, synthetic construct
NYKKAAD

SEQ ID NO: 137755 - protein, 7 aa, synthetic construct
NYKKGMD

SEQ ID NO: 137756 - protein, 7 aa, synthetic construct
NYKKTDM

SEQ ID NO: 137757 - protein, 7 aa, synthetic construct
NYKMVSG

SEQ ID NO: 137758 - protein, 7 aa, synthetic construct
NYKPLTG

SEQ ID NO: 137759 - protein, 7 aa, synthetic construct
NYKPRDL

SEQ ID NO: 137760 - protein, 7 aa, synthetic construct
NYKQLNS

SEQ ID NO: 137761 - protein, 7 aa, synthetic construct
NYKQMAG

SEQ ID NO: 137762 - protein, 7 aa, synthetic construct
NYKQNLY

SEQ ID NO: 137763 - protein, 7 aa, synthetic construct
NYKTKAD

SEQ ID NO: 137764 - protein, 7 aa, synthetic construct
NYKVDKS

SEQ ID NO: 137765 - protein, 7 aa, synthetic construct
NYKVKDQ

SEQ ID NO: 137766 - protein, 7 aa, synthetic construct
NYKVQAG

SEQ ID NO: 137767 - protein, 7 aa, synthetic construct
NYLGHKP

SEQ ID NO: 137768 - protein, 7 aa, synthetic construct
NYLKETK

SEQ ID NO: 137769 - protein, 7 aa, synthetic construct
NYLSQKQ

SEQ ID NO: 137770 - protein, 7 aa, synthetic construct
NYNNKGW

SEQ ID NO: 137771 - protein, 7 aa, synthetic construct
NYNQRVT

SEQ ID NO: 137772 - protein, 7 aa, synthetic construct
NYNTIAK

SEQ ID NO: 137773 - protein, 7 aa, synthetic construct
NYNTTGR

SEQ ID NO: 137774 - protein, 7 aa, synthetic construct
NYPGARA

SEQ ID NO: 137775 - protein, 7 aa, synthetic construct
NYPGKMT

SEQ ID NO: 137776 - protein, 7 aa, synthetic construct
NYPKQSQ

SEQ ID NO: 137777 - protein, 7 aa, synthetic construct
NYPNRQQ

SEQ ID NO: 137778 - protein, 7 aa, synthetic construct
NYPPNTK

SEQ ID NO: 137779 - protein, 7 aa, synthetic construct
NYQATNK

SEQ ID NO: 137780 - protein, 7 aa, synthetic construct
NYQGQKA

SEQ ID NO: 137781 - protein, 7 aa, synthetic construct
NYQINKT

SEQ ID NO: 137782 - protein, 7 aa, synthetic construct
NYQKKDF

SEQ ID NO: 137783 - protein, 7 aa, synthetic construct
NYQKQPL

SEQ ID NO: 137784 - protein, 7 aa, synthetic construct
NYQPKTM

SEQ ID NO: 137785 - protein, 7 aa, synthetic construct
NYQRSAT

SEQ ID NO: 137786 - protein, 7 aa, synthetic construct
NYQSALK

SEQ ID NO: 137787 - protein, 7 aa, synthetic construct
NYQVPTK

SEQ ID NO: 137788 - protein, 7 aa, synthetic construct
NYRGTNS

SEQ ID NO: 137789 - protein, 7 aa, synthetic construct
NYRKQEP

SEQ ID NO: 137790 - protein, 7 aa, synthetic construct
NYRMQGG

SEQ ID NO: 137791 - protein, 7 aa, synthetic construct
NYRVGSM

SEQ ID NO: 137792 - protein, 7 aa, synthetic construct
NYRVNNA

SEQ ID NO: 137793 - protein, 7 aa, synthetic construct
NYSAEKR

SEQ ID NO: 137794 - protein, 7 aa, synthetic construct
NYSARNT

SEQ ID NO: 137795 - protein, 7 aa, synthetic construct
NYSIVKS

SEQ ID NO: 137796 - protein, 7 aa, synthetic construct
NYSQPRQ

SEQ ID NO: 137797 - protein, 7 aa, synthetic construct
NYSREDS

SEQ ID NO: 137798 - protein, 7 aa, synthetic construct
NYSTKAG

SEQ ID NO: 137799 - protein, 7 aa, synthetic construct
NYSTRHP

SEQ ID NO: 137800 - protein, 7 aa, synthetic construct
NYTGNIK

SEQ ID NO: 137801 - protein, 7 aa, synthetic construct
NYTQAAK

SEQ ID NO: 137802 - protein, 7 aa, synthetic construct
NYTQLQK

SEQ ID NO: 137803 - protein, 7 aa, synthetic construct
NYTVQAK

SEQ ID NO: 137804 - protein, 7 aa, synthetic construct
NYVGRKE

SEQ ID NO: 137805 - protein, 7 aa, synthetic construct
NYYGNSS

SEQ ID NO: 137806 - protein, 7 aa, synthetic construct
PAANKFT

SEQ ID NO: 137807 - protein, 7 aa, synthetic construct
PAARSNM

SEQ ID NO: 137808 - protein, 7 aa, synthetic construct
PAAVRQT

SEQ ID NO: 137809 - protein, 7 aa, synthetic construct
PAAYQMK

SEQ ID NO: 137810 - protein, 7 aa, synthetic construct
PADGRRV

SEQ ID NO: 137811 - protein, 7 aa, synthetic construct
PADYKKP

SEQ ID NO: 137812 - protein, 7 aa, synthetic construct
PAGMKVT

SEQ ID NO: 137813 - protein, 7 aa, synthetic construct
PAGPKLY

SEQ ID NO: 137814 - protein, 7 aa, synthetic construct
PAGQHQR

SEQ ID NO: 137815 - protein, 7 aa, synthetic construct
PAGRDQK

SEQ ID NO: 137816 - protein, 7 aa, synthetic construct
PAGRMKE

SEQ ID NO: 137817 - protein, 7 aa, synthetic construct
PAGVRGL

SEQ ID NO: 137818 - protein, 7 aa, synthetic construct
PAGVRGM

SEQ ID NO: 137819 - protein, 7 aa, synthetic construct
PAGYSQK

SEQ ID NO: 137820 - protein, 7 aa, synthetic construct
PAHGKMF

SEQ ID NO: 137821 - protein, 7 aa, synthetic construct
PAHKPVP

SEQ ID NO: 137822 - protein, 7 aa, synthetic construct
PAHKSNA

SEQ ID NO: 137823 - protein, 7 aa, synthetic construct
PAHQGRQ

SEQ ID NO: 137824 - protein, 7 aa, synthetic construct
PAHRAAG

SEQ ID NO: 137825 - protein, 7 aa, synthetic construct
PAHTRNA

SEQ ID NO: 137826 - protein, 7 aa, synthetic construct
PAHTSKF

SEQ ID NO: 137827 - protein, 7 aa, synthetic construct
PAHVTRA

SEQ ID NO: 137828 - protein, 7 aa, synthetic construct
PAIRLPQ

SEQ ID NO: 137829 - protein, 7 aa, synthetic construct
PAIRPPQ

SEQ ID NO: 137830 - protein, 7 aa, synthetic construct
PAIRSPA

SEQ ID NO: 137831 - protein, 7 aa, synthetic construct
PAKDIRY

SEQ ID NO: 137832 - protein, 7 aa, synthetic construct
PAKGGNW

SEQ ID NO: 137833 - protein, 7 aa, synthetic construct
PAKLRTE

SEQ ID NO: 137834 - protein, 7 aa, synthetic construct
PAKMIHG

SEQ ID NO: 137835 - protein, 7 aa, synthetic construct
PAKMPAF

SEQ ID NO: 137836 - protein, 7 aa, synthetic construct
PAKNPHL

SEQ ID NO: 137837 - protein, 7 aa, synthetic construct
PAKNVRD

SEQ ID NO: 137838 - protein, 7 aa, synthetic construct
PAKNYKD

SEQ ID NO: 137839 - protein, 7 aa, synthetic construct
PAKQQVY

SEQ ID NO: 137840 - protein, 7 aa, synthetic construct
PAKRDTY

SEQ ID NO: 137841 - protein, 7 aa, synthetic construct
PALKPHP

SEQ ID NO: 137842 - protein, 7 aa, synthetic construct
PALRNDR

SEQ ID NO: 137843 - protein, 7 aa, synthetic construct
PAMGHAR

SEQ ID NO: 137844 - protein, 7 aa, synthetic construct
PAMGPRM

SEQ ID NO: 137845 - protein, 7 aa, synthetic construct
PAMRTGL

SEQ ID NO: 137846 - protein, 7 aa, synthetic construct
PANKMSY

SEQ ID NO: 137847 - protein, 7 aa, synthetic construct
PANKPRE

SEQ ID NO: 137848 - protein, 7 aa, synthetic construct
PANKVSY

SEQ ID NO: 137849 - protein, 7 aa, synthetic construct
PANRMPV

SEQ ID NO: 137850 - protein, 7 aa, synthetic construct
PAQKYKE

SEQ ID NO: 137851 - protein, 7 aa, synthetic construct
PAQPRQM

SEQ ID NO: 137852 - protein, 7 aa, synthetic construct
PAQRVPL

SEQ ID NO: 137853 - protein, 7 aa, synthetic construct
PAQVKRD

SEQ ID NO: 137854 - protein, 7 aa, synthetic construct
PAREKNF

SEQ ID NO: 137855 - protein, 7 aa, synthetic construct
PARETPR

SEQ ID NO: 137856 - protein, 7 aa, synthetic construct
PAREYNK

SEQ ID NO: 137857 - protein, 7 aa, synthetic construct
PARIENR

SEQ ID NO: 137858 - protein, 7 aa, synthetic construct
PARKQDA

SEQ ID NO: 137859 - protein, 7 aa, synthetic construct
PARLGDR

SEQ ID NO: 137860 - protein, 7 aa, synthetic construct
PARLHAP

SEQ ID NO: 137861 - protein, 7 aa, synthetic construct
PARLPRD

SEQ ID NO: 137862 - protein, 7 aa, synthetic construct
PARNAMF

SEQ ID NO: 137863 - protein, 7 aa, synthetic construct
PARNEQK

SEQ ID NO: 137864 - protein, 7 aa, synthetic construct
PARNNAY

SEQ ID NO: 137865 - protein, 7 aa, synthetic construct
PARNQYV

SEQ ID NO: 137866 - protein, 7 aa, synthetic construct
PARPPAN

SEQ ID NO: 137867 - protein, 7 aa, synthetic construct
PARPSVH

SEQ ID NO: 137868 - protein, 7 aa, synthetic construct
PARQANY

SEQ ID NO: 137869 - protein, 7 aa, synthetic construct
PARQHAI

SEQ ID NO: 137870 - protein, 7 aa, synthetic construct
PARQHTT

SEQ ID NO: 137871 - protein, 7 aa, synthetic construct
PARSAAY

SEQ ID NO: 137872 - protein, 7 aa, synthetic construct
PARSTPL

SEQ ID NO: 137873 - protein, 7 aa, synthetic construct
PARVHDK

SEQ ID NO: 137874 - protein, 7 aa, synthetic construct
PASAPYR

SEQ ID NO: 137875 - protein, 7 aa, synthetic construct
PASKNDR

SEQ ID NO: 137876 - protein, 7 aa, synthetic construct
PASKNIF

SEQ ID NO: 137877 - protein, 7 aa, synthetic construct
PASKQFM

SEQ ID NO: 137878 - protein, 7 aa, synthetic construct
PASMNSR

SEQ ID NO: 137879 - protein, 7 aa, synthetic construct
PASQRFA

SEQ ID NO: 137880 - protein, 7 aa, synthetic construct
PASRPDR

SEQ ID NO: 137881 - protein, 7 aa, synthetic construct
PASRPIN

SEQ ID NO: 137882 - protein, 7 aa, synthetic construct
PATARIV

SEQ ID NO: 137883 - protein, 7 aa, synthetic construct
PATASIR

SEQ ID NO: 137884 - protein, 7 aa, synthetic construct
PATMRGH

SEQ ID NO: 137885 - protein, 7 aa, synthetic construct
PATTRDR

SEQ ID NO: 137886 - protein, 7 aa, synthetic construct
PAVGSPR

SEQ ID NO: 137887 - protein, 7 aa, synthetic construct
PAVKQIM

SEQ ID NO: 137888 - protein, 7 aa, synthetic construct
PAVRPHG

SEQ ID NO: 137889 - protein, 7 aa, synthetic construct
PAYAKQA

SEQ ID NO: 137890 - protein, 7 aa, synthetic construct
PAYGSLG

SEQ ID NO: 137891 - protein, 7 aa, synthetic construct
PAYHTAA

SEQ ID NO: 137892 - protein, 7 aa, synthetic construct
PAYNTNK

SEQ ID NO: 137893 - protein, 7 aa, synthetic construct
PAYQSKM

SEQ ID NO: 137894 - protein, 7 aa, synthetic construct
PAYSAKT

SEQ ID NO: 137895 - protein, 7 aa, synthetic construct
PDAGAKR

SEQ ID NO: 137896 - protein, 7 aa, synthetic construct
PDAHKIK

SEQ ID NO: 137897 - protein, 7 aa, synthetic construct
PDAKALR

SEQ ID NO: 137898 - protein, 7 aa, synthetic construct
PDAPKRM

SEQ ID NO: 137899 - protein, 7 aa, synthetic construct
PDARMKQ

SEQ ID NO: 137900 - protein, 7 aa, synthetic construct
PDARSFK

SEQ ID NO: 137901 - protein, 7 aa, synthetic construct
PDFKAKV

SEQ ID NO: 137902 - protein, 7 aa, synthetic construct
PDGKRQV

SEQ ID NO: 137903 - protein, 7 aa, synthetic construct
PDIRKLV

SEQ ID NO: 137904 - protein, 7 aa, synthetic construct
PDKFNAK

SEQ ID NO: 137905 - protein, 7 aa, synthetic construct
PDKHKYS

SEQ ID NO: 137906 - protein, 7 aa, synthetic construct
PDKHRGF

SEQ ID NO: 137907 - protein, 7 aa, synthetic construct
PDKMQHR

SEQ ID NO: 137908 - protein, 7 aa, synthetic construct
PDKPKSM

SEQ ID NO: 137909 - protein, 7 aa, synthetic construct
PDKPRMG

SEQ ID NO: 137910 - protein, 7 aa, synthetic construct
PDKRASF

SEQ ID NO: 137911 - protein, 7 aa, synthetic construct
PDKRGER

SEQ ID NO: 137912 - protein, 7 aa, synthetic construct
PDKRILS

SEQ ID NO: 137913 - protein, 7 aa, synthetic construct
PDKRNVG

SEQ ID NO: 137914 - protein, 7 aa, synthetic construct
PDKRQNG

SEQ ID NO: 137915 - protein, 7 aa, synthetic construct
PDKRSPV

SEQ ID NO: 137916 - protein, 7 aa, synthetic construct
PDKRSQT

SEQ ID NO: 137917 - protein, 7 aa, synthetic construct
PDKSNMR

SEQ ID NO: 137918 - protein, 7 aa, synthetic construct
PDKYGKA

SEQ ID NO: 137919 - protein, 7 aa, synthetic construct
PDKYGKM

SEQ ID NO: 137920 - protein, 7 aa, synthetic construct
PDKYKSG

SEQ ID NO: 137921 - protein, 7 aa, synthetic construct
PDKYKTS

SEQ ID NO: 137922 - protein, 7 aa, synthetic construct
PDLKSTR

SEQ ID NO: 137923 - protein, 7 aa, synthetic construct
PDLMKGK

SEQ ID NO: 137924 - protein, 7 aa, synthetic construct
PDMNKAR

SEQ ID NO: 137925 - protein, 7 aa, synthetic construct
PDMRQGK

SEQ ID NO: 137926 - protein, 7 aa, synthetic construct
PDNKAPR

SEQ ID NO: 137927 - protein, 7 aa, synthetic construct
PDNKPRP

SEQ ID NO: 137928 - protein, 7 aa, synthetic construct
PDPRKYG

SEQ ID NO: 137929 - protein, 7 aa, synthetic construct
PDPRPRI

SEQ ID NO: 137930 - protein, 7 aa, synthetic construct
PDQGKGR

SEQ ID NO: 137931 - protein, 7 aa, synthetic construct
PDQKSAR

SEQ ID NO: 137932 - protein, 7 aa, synthetic construct
PDQRLKG

SEQ ID NO: 137933 - protein, 7 aa, synthetic construct
PDQRMTK

SEQ ID NO: 137934 - protein, 7 aa, synthetic construct
PDQRVNK

SEQ ID NO: 137935 - protein, 7 aa, synthetic construct
PDRGPRT

SEQ ID NO: 137936 - protein, 7 aa, synthetic construct
PDRKAAS

SEQ ID NO: 137937 - protein, 7 aa, synthetic construct
PDRKAHV

SEQ ID NO: 137938 - protein, 7 aa, synthetic construct
PDRKGVL

SEQ ID NO: 137939 - protein, 7 aa, synthetic construct
PDRKMGG

SEQ ID NO: 137940 - protein, 7 aa, synthetic construct
PDRKMSV

SEQ ID NO: 137941 - protein, 7 aa, synthetic construct
PDRKPGL

SEQ ID NO: 137942 - protein, 7 aa, synthetic construct
PDRKQPM

SEQ ID NO: 137943 - protein, 7 aa, synthetic construct
PDRKSVV

SEQ ID NO: 137944 - protein, 7 aa, synthetic construct
PDRKTYA

SEQ ID NO: 137945 - protein, 7 aa, synthetic construct
PDRLNKS

SEQ ID NO: 137946 - protein, 7 aa, synthetic construct
PDRNIMK

SEQ ID NO: 137947 - protein, 7 aa, synthetic construct
PDRPKMF

SEQ ID NO: 137948 - protein, 7 aa, synthetic construct
PDRPRND

SEQ ID NO: 137949 - protein, 7 aa, synthetic construct
PDRQAAK

SEQ ID NO: 137950 - protein, 7 aa, synthetic construct
PDRQGPK

SEQ ID NO: 137951 - protein, 7 aa, synthetic construct
PDRQMVR

SEQ ID NO: 137952 - protein, 7 aa, synthetic construct
PDRRSAV

SEQ ID NO: 137953 - protein, 7 aa, synthetic construct
PDRVGRN

SEQ ID NO: 137954 - protein, 7 aa, synthetic construct
PDRVQRM

SEQ ID NO: 137955 - protein, 7 aa, synthetic construct
PDRYQSK

SEQ ID NO: 137956 - protein, 7 aa, synthetic construct
PDSKPKM

SEQ ID NO: 137957 - protein, 7 aa, synthetic construct
PDTPKRY

SEQ ID NO: 137958 - protein, 7 aa, synthetic construct
PDVKGAR

SEQ ID NO: 137959 - protein, 7 aa, synthetic construct
PDVNKMF

SEQ ID NO: 137960 - protein, 7 aa, synthetic construct
PDVQKRA

SEQ ID NO: 137961 - protein, 7 aa, synthetic construct
PDVTKVR

SEQ ID NO: 137962 - protein, 7 aa, synthetic construct
PDWRGGA

SEQ ID NO: 137963 - protein, 7 aa, synthetic construct
PDYHKKI

SEQ ID NO: 137964 - protein, 7 aa, synthetic construct
PEAKPNR

SEQ ID NO: 137965 - protein, 7 aa, synthetic construct
PEDKIKR

SEQ ID NO: 137966 - protein, 7 aa, synthetic construct
PEHHPRN

SEQ ID NO: 137967 - protein, 7 aa, synthetic construct
PEIRNLK

SEQ ID NO: 137968 - protein, 7 aa, synthetic construct
PEKARLS

SEQ ID NO: 137969 - protein, 7 aa, synthetic construct
PEKFQKN

SEQ ID NO: 137970 - protein, 7 aa, synthetic construct
PEKGINR

SEQ ID NO: 137971 - protein, 7 aa, synthetic construct
PEKKPQW

SEQ ID NO: 137972 - protein, 7 aa, synthetic construct
PEKKSQY

SEQ ID NO: 137973 - protein, 7 aa, synthetic construct
PEKKVMY

SEQ ID NO: 137974 - protein, 7 aa, synthetic construct
PEKKYGA

SEQ ID NO: 137975 - protein, 7 aa, synthetic construct
PEKLRMG

SEQ ID NO: 137976 - protein, 7 aa, synthetic construct
PEKPTKM

SEQ ID NO: 137977 - protein, 7 aa, synthetic construct
PEKQKFQ

SEQ ID NO: 137978 - protein, 7 aa, synthetic construct
PEKQMQI

SEQ ID NO: 137979 - protein, 7 aa, synthetic construct
PEKRIVT

SEQ ID NO: 137980 - protein, 7 aa, synthetic construct
PEKSQRG

SEQ ID NO: 137981 - protein, 7 aa, synthetic construct
PEKVMTR

SEQ ID NO: 137982 - protein, 7 aa, synthetic construct
PEKVRVQ

SEQ ID NO: 137983 - protein, 7 aa, synthetic construct
PELKRPQ

SEQ ID NO: 137984 - protein, 7 aa, synthetic construct
PELKYKA

SEQ ID NO: 137985 - protein, 7 aa, synthetic construct
PELNGKR

SEQ ID NO: 137986 - protein, 7 aa, synthetic construct
PEMKNSK

SEQ ID NO: 137987 - protein, 7 aa, synthetic construct
PEMKSMR

SEQ ID NO: 137988 - protein, 7 aa, synthetic construct
PENKAIK

SEQ ID NO: 137989 - protein, 7 aa, synthetic construct
PENVGKR

SEQ ID NO: 137990 - protein, 7 aa, synthetic construct
PEPKQRN

SEQ ID NO: 137991 - protein, 7 aa, synthetic construct
PEQKIHK

SEQ ID NO: 137992 - protein, 7 aa, synthetic construct
PEQKMLR

SEQ ID NO: 137993 - protein, 7 aa, synthetic construct
PEQKPRP

SEQ ID NO: 137994 - protein, 7 aa, synthetic construct
PERGKQI

SEQ ID NO: 137995 - protein, 7 aa, synthetic construct
PERGRPV

SEQ ID NO: 137996 - protein, 7 aa, synthetic construct
PERKQVN

SEQ ID NO: 137997 - protein, 7 aa, synthetic construct
PERKTNA

SEQ ID NO: 137998 - protein, 7 aa, synthetic construct
PERMTKL

SEQ ID NO: 137999 - protein, 7 aa, synthetic construct
PERMTSK

SEQ ID NO: 138000 - protein, 7 aa, synthetic construct
PERNNFK

SEQ ID NO: 138001 - protein, 7 aa, synthetic construct
PERPQKV

SEQ ID NO: 138002 - protein, 7 aa, synthetic construct
PERQKMG

SEQ ID NO: 138003 - protein, 7 aa, synthetic construct
PERQKNI

SEQ ID NO: 138004 - protein, 7 aa, synthetic construct
PERQRGI

SEQ ID NO: 138005 - protein, 7 aa, synthetic construct
PERRVAP

SEQ ID NO: 138006 - protein, 7 aa, synthetic construct
PERTQPK

SEQ ID NO: 138007 - protein, 7 aa, synthetic construct
PERVALK

SEQ ID NO: 138008 - protein, 7 aa, synthetic construct
PERVPGK

SEQ ID NO: 138009 - protein, 7 aa, synthetic construct
PERVPVK

SEQ ID NO: 138010 - protein, 7 aa, synthetic construct
PETGTKK

SEQ ID NO: 138011 - protein, 7 aa, synthetic construct
PETKLKM

SEQ ID NO: 138012 - protein, 7 aa, synthetic construct
PETKVKM

SEQ ID NO: 138013 - protein, 7 aa, synthetic construct
PETPPKK

SEQ ID NO: 138014 - protein, 7 aa, synthetic construct
PEVKIRA

SEQ ID NO: 138015 - protein, 7 aa, synthetic construct
PEVKLHK

SEQ ID NO: 138016 - protein, 7 aa, synthetic construct
PEVKSYK

SEQ ID NO: 138017 - protein, 7 aa, synthetic construct
PFAGQPR

SEQ ID NO: 138018 - protein, 7 aa, synthetic construct
PFAKGPV

SEQ ID NO: 138019 - protein, 7 aa, synthetic construct
PFAKQER

SEQ ID NO: 138020 - protein, 7 aa, synthetic construct
PFAREKV

SEQ ID NO: 138021 - protein, 7 aa, synthetic construct
PFDAKNR

SEQ ID NO: 138022 - protein, 7 aa, synthetic construct
PFDKNLR

SEQ ID NO: 138023 - protein, 7 aa, synthetic construct
PFGKDAR

SEQ ID NO: 138024 - protein, 7 aa, synthetic construct
PFGKHAP

SEQ ID NO: 138025 - protein, 7 aa, synthetic construct
PFHATKS

SEQ ID NO: 138026 - protein, 7 aa, synthetic construct
PFHGSLK

SEQ ID NO: 138027 - protein, 7 aa, synthetic construct
PFHKVKE

SEQ ID NO: 138028 - protein, 7 aa, synthetic construct
PFHKVSG

SEQ ID NO: 138029 - protein, 7 aa, synthetic construct
PFIKNIS

SEQ ID NO: 138030 - protein, 7 aa, synthetic construct
PFKHPSS

SEQ ID NO: 138031 - protein, 7 aa, synthetic construct
PFKHQSM

SEQ ID NO: 138032 - protein, 7 aa, synthetic construct
PFKNHQS

SEQ ID NO: 138033 - protein, 7 aa, synthetic construct
PFKPPTS

SEQ ID NO: 138034 - protein, 7 aa, synthetic construct
PFKQMPT

SEQ ID NO: 138035 - protein, 7 aa, synthetic construct
PFKQQAI

SEQ ID NO: 138036 - protein, 7 aa, synthetic construct
PFKSAKD

SEQ ID NO: 138037 - protein, 7 aa, synthetic construct
PFKSGSM

SEQ ID NO: 138038 - protein, 7 aa, synthetic construct
PFKSYGA

SEQ ID NO: 138039 - protein, 7 aa, synthetic construct
PFLNSKS

SEQ ID NO: 138040 - protein, 7 aa, synthetic construct
PFNHATK

SEQ ID NO: 138041 - protein, 7 aa, synthetic construct
PFNTNKL

SEQ ID NO: 138042 - protein, 7 aa, synthetic construct
PFPGGKQ

SEQ ID NO: 138043 - protein, 7 aa, synthetic construct
PFPKRDS

SEQ ID NO: 138044 - protein, 7 aa, synthetic construct
PFPNARS

SEQ ID NO: 138045 - protein, 7 aa, synthetic construct
PFPPAKA

SEQ ID NO: 138046 - protein, 7 aa, synthetic construct
PFPPDPA

SEQ ID NO: 138047 - protein, 7 aa, synthetic construct
PFQKERQ

SEQ ID NO: 138048 - protein, 7 aa, synthetic construct
PFQKPSI

SEQ ID NO: 138049 - protein, 7 aa, synthetic construct
PFQQKKE

SEQ ID NO: 138050 - protein, 7 aa, synthetic construct
PFQREKA

SEQ ID NO: 138051 - protein, 7 aa, synthetic construct
PFRAGPN

SEQ ID NO: 138052 - protein, 7 aa, synthetic construct
PFRKEVG

SEQ ID NO: 138053 - protein, 7 aa, synthetic construct
PFRQHSG

SEQ ID NO: 138054 - protein, 7 aa, synthetic construct
PFSAGKM

SEQ ID NO: 138055 - protein, 7 aa, synthetic construct
PFSGNNL

SEQ ID NO: 138056 - protein, 7 aa, synthetic construct
PFSKVER

SEQ ID NO: 138057 - protein, 7 aa, synthetic construct
PFSNHNN

SEQ ID NO: 138058 - protein, 7 aa, synthetic construct
PFTGQSR

SEQ ID NO: 138059 - protein, 7 aa, synthetic construct
PFTNKER

SEQ ID NO: 138060 - protein, 7 aa, synthetic construct
PFTRDKS

SEQ ID NO: 138061 - protein, 7 aa, synthetic construct
PFVKARD

SEQ ID NO: 138062 - protein, 7 aa, synthetic construct
PGAPAMR

SEQ ID NO: 138063 - protein, 7 aa, synthetic construct
PGAQIRQ

SEQ ID NO: 138064 - protein, 7 aa, synthetic construct
PGASMRM

SEQ ID NO: 138065 - protein, 7 aa, synthetic construct
PGEKNSR

SEQ ID NO: 138066 - protein, 7 aa, synthetic construct
PGFGNNK

SEQ ID NO: 138067 - protein, 7 aa, synthetic construct
PGGAQRY

SEQ ID NO: 138068 - protein, 7 aa, synthetic construct
PGGERKV

SEQ ID NO: 138069 - protein, 7 aa, synthetic construct
PGGNRNF

SEQ ID NO: 138070 - protein, 7 aa, synthetic construct
PGGSHYA

SEQ ID NO: 138071 - protein, 7 aa, synthetic construct
PGGSRDK

SEQ ID NO: 138072 - protein, 7 aa, synthetic construct
PGHANRP

SEQ ID NO: 138073 - protein, 7 aa, synthetic construct
PGIQNQR

SEQ ID NO: 138074 - protein, 7 aa, synthetic construct
PGKELYR

SEQ ID NO: 138075 - protein, 7 aa, synthetic construct
PGKKEER

SEQ ID NO: 138076 - protein, 7 aa, synthetic construct
PGKNFMA

SEQ ID NO: 138077 - protein, 7 aa, synthetic construct
PGKNHLI

SEQ ID NO: 138078 - protein, 7 aa, synthetic construct
PGKNNSF

SEQ ID NO: 138079 - protein, 7 aa, synthetic construct
PGKPHAI

SEQ ID NO: 138080 - protein, 7 aa, synthetic construct
PGKPKDA

SEQ ID NO: 138081 - protein, 7 aa, synthetic construct
PGKQLPF

SEQ ID NO: 138082 - protein, 7 aa, synthetic construct
PGKRELI

SEQ ID NO: 138083 - protein, 7 aa, synthetic construct
PGKTPYQ

SEQ ID NO: 138084 - protein, 7 aa, synthetic construct
PGKVHSI

SEQ ID NO: 138085 - protein, 7 aa, synthetic construct
PGLRGVP

SEQ ID NO: 138086 - protein, 7 aa, synthetic construct
PGLSNAR

SEQ ID NO: 138087 - protein, 7 aa, synthetic construct
PGMPRPA

SEQ ID NO: 138088 - protein, 7 aa, synthetic construct
PGMQLRS

SEQ ID NO: 138089 - protein, 7 aa, synthetic construct
PGMQSRV

SEQ ID NO: 138090 - protein, 7 aa, synthetic construct
PGNHTRY

SEQ ID NO: 138091 - protein, 7 aa, synthetic construct
PGNKLYA

SEQ ID NO: 138092 - protein, 7 aa, synthetic construct
PGNNAVR

SEQ ID NO: 138093 - protein, 7 aa, synthetic construct
PGNQQYK

SEQ ID NO: 138094 - protein, 7 aa, synthetic construct
PGNRAQI

SEQ ID NO: 138095 - protein, 7 aa, synthetic construct
PGNTKPW

SEQ ID NO: 138096 - protein, 7 aa, synthetic construct
PGNYPRG

SEQ ID NO: 138097 - protein, 7 aa, synthetic construct
PGNYSAK

SEQ ID NO: 138098 - protein, 7 aa, synthetic construct
PGPATRM

SEQ ID NO: 138099 - protein, 7 aa, synthetic construct
PGPGHLR

SEQ ID NO: 138100 - protein, 7 aa, synthetic construct
PGPGTRL

SEQ ID NO: 138101 - protein, 7 aa, synthetic construct
PGPRAIS

SEQ ID NO: 138102 - protein, 7 aa, synthetic construct
PGPRKDM

SEQ ID NO: 138103 - protein, 7 aa, synthetic construct
PGPRQNQ

SEQ ID NO: 138104 - protein, 7 aa, synthetic construct
PGQHSKT

SEQ ID NO: 138105 - protein, 7 aa, synthetic construct
PGQKTYA

SEQ ID NO: 138106 - protein, 7 aa, synthetic construct
PGQLRDK

SEQ ID NO: 138107 - protein, 7 aa, synthetic construct
PGQQSQK

SEQ ID NO: 138108 - protein, 7 aa, synthetic construct
PGQQSYK

SEQ ID NO: 138109 - protein, 7 aa, synthetic construct
PGQRIQT

SEQ ID NO: 138110 - protein, 7 aa, synthetic construct
PGQRTLL

SEQ ID NO: 138111 - protein, 7 aa, synthetic construct
PGRAASI

SEQ ID NO: 138112 - protein, 7 aa, synthetic construct
PGRANTV

SEQ ID NO: 138113 - protein, 7 aa, synthetic construct
PGRDGSK

SEQ ID NO: 138114 - protein, 7 aa, synthetic construct
PGRGIMN

SEQ ID NO: 138115 - protein, 7 aa, synthetic construct
PGRMPHL

SEQ ID NO: 138116 - protein, 7 aa, synthetic construct
PGRNNAI

SEQ ID NO: 138117 - protein, 7 aa, synthetic construct
PGRNTMI

SEQ ID NO: 138118 - protein, 7 aa, synthetic construct
PGRPVPQ

SEQ ID NO: 138119 - protein, 7 aa, synthetic construct
PGRQQQI

SEQ ID NO: 138120 - protein, 7 aa, synthetic construct
PGRSNMT

SEQ ID NO: 138121 - protein, 7 aa, synthetic construct
PGRSQQL

SEQ ID NO: 138122 - protein, 7 aa, synthetic construct
PGRTATA

SEQ ID NO: 138123 - protein, 7 aa, synthetic construct
PGRVSSF

SEQ ID NO: 138124 - protein, 7 aa, synthetic construct
PGSQNGR

SEQ ID NO: 138125 - protein, 7 aa, synthetic construct
PGTKHFA

SEQ ID NO: 138126 - protein, 7 aa, synthetic construct
PGTKNYV

SEQ ID NO: 138127 - protein, 7 aa, synthetic construct
PGTKPFV

SEQ ID NO: 138128 - protein, 7 aa, synthetic construct
PGTNFPR

SEQ ID NO: 138129 - protein, 7 aa, synthetic construct
PGTNNQR

SEQ ID NO: 138130 - protein, 7 aa, synthetic construct
PGTPLKY

SEQ ID NO: 138131 - protein, 7 aa, synthetic construct
PGTRHQV

SEQ ID NO: 138132 - protein, 7 aa, synthetic construct
PGVAARQ

SEQ ID NO: 138133 - protein, 7 aa, synthetic construct
PGVVHRT

SEQ ID NO: 138134 - protein, 7 aa, synthetic construct
PGYNTAK

SEQ ID NO: 138135 - protein, 7 aa, synthetic construct
PHAKGYM

SEQ ID NO: 138136 - protein, 7 aa, synthetic construct
PHAPMPR

SEQ ID NO: 138137 - protein, 7 aa, synthetic construct
PHAQYSK

SEQ ID NO: 138138 - protein, 7 aa, synthetic construct
PHATRQA

SEQ ID NO: 138139 - protein, 7 aa, synthetic construct
PHDFRPQ

SEQ ID NO: 138140 - protein, 7 aa, synthetic construct
PHDRMKI

SEQ ID NO: 138141 - protein, 7 aa, synthetic construct
PHGGDYR

SEQ ID NO: 138142 - protein, 7 aa, synthetic construct
PHGQAMK

SEQ ID NO: 138143 - protein, 7 aa, synthetic construct
PHGRGPY

SEQ ID NO: 138144 - protein, 7 aa, synthetic construct
PHGVQKI

SEQ ID NO: 138145 - protein, 7 aa, synthetic construct
PHGYKQM

SEQ ID NO: 138146 - protein, 7 aa, synthetic construct
PHHKTNI

SEQ ID NO: 138147 - protein, 7 aa, synthetic construct
PHHTKLG

SEQ ID NO: 138148 - protein, 7 aa, synthetic construct
PHITPSR

SEQ ID NO: 138149 - protein, 7 aa, synthetic construct
PHKDRVM

SEQ ID NO: 138150 - protein, 7 aa, synthetic construct
PHKHTGG

SEQ ID NO: 138151 - protein, 7 aa, synthetic construct
PHKIPQS

SEQ ID NO: 138152 - protein, 7 aa, synthetic construct
PHKLAGP

SEQ ID NO: 138153 - protein, 7 aa, synthetic construct
PHKNVMA

SEQ ID NO: 138154 - protein, 7 aa, synthetic construct
PHKPAMS

SEQ ID NO: 138155 - protein, 7 aa, synthetic construct
PHKPMIA

SEQ ID NO: 138156 - protein, 7 aa, synthetic construct
PHKPTAG

SEQ ID NO: 138157 - protein, 7 aa, synthetic construct
PHKSDKI

SEQ ID NO: 138158 - protein, 7 aa, synthetic construct
PHKTGPF

SEQ ID NO: 138159 - protein, 7 aa, synthetic construct
PHKTQYP

SEQ ID NO: 138160 - protein, 7 aa, synthetic construct
PHKTSYV

SEQ ID NO: 138161 - protein, 7 aa, synthetic construct
PHKVMTT

SEQ ID NO: 138162 - protein, 7 aa, synthetic construct
PHLKMQQ

SEQ ID NO: 138163 - protein, 7 aa, synthetic construct
PHMHTKA

SEQ ID NO: 138164 - protein, 7 aa, synthetic construct
PHMKQFG

SEQ ID NO: 138165 - protein, 7 aa, synthetic construct
PHMSRPS

SEQ ID NO: 138166 - protein, 7 aa, synthetic construct
PHNHPHD

SEQ ID NO: 138167 - protein, 7 aa, synthetic construct
PHNKFGA

SEQ ID NO: 138168 - protein, 7 aa, synthetic construct
PHNKQGW

SEQ ID NO: 138169 - protein, 7 aa, synthetic construct
PHNPMKG

SEQ ID NO: 138170 - protein, 7 aa, synthetic construct
PHNYKNS

SEQ ID NO: 138171 - protein, 7 aa, synthetic construct
PHPGRSY

SEQ ID NO: 138172 - protein, 7 aa, synthetic construct
PHPQAQR

SEQ ID NO: 138173 - protein, 7 aa, synthetic construct
PHPQRQY

SEQ ID NO: 138174 - protein, 7 aa, synthetic construct
PHPQVAR

SEQ ID NO: 138175 - protein, 7 aa, synthetic construct
PHPRGTL

SEQ ID NO: 138176 - protein, 7 aa, synthetic construct
PHPRTGL

SEQ ID NO: 138177 - protein, 7 aa, synthetic construct
PHPSTRA

SEQ ID NO: 138178 - protein, 7 aa, synthetic construct
PHQKGFA

SEQ ID NO: 138179 - protein, 7 aa, synthetic construct
PHQKNVL

SEQ ID NO: 138180 - protein, 7 aa, synthetic construct
PHRAMGV

SEQ ID NO: 138181 - protein, 7 aa, synthetic construct
PHRGGVL

SEQ ID NO: 138182 - protein, 7 aa, synthetic construct
PHRQIPP

SEQ ID NO: 138183 - protein, 7 aa, synthetic construct
PHRSLGG

SEQ ID NO: 138184 - protein, 7 aa, synthetic construct
PHRTSGF

SEQ ID NO: 138185 - protein, 7 aa, synthetic construct
PHSHLKA

SEQ ID NO: 138186 - protein, 7 aa, synthetic construct
PHSKPNY

SEQ ID NO: 138187 - protein, 7 aa, synthetic construct
PHSKPSL

SEQ ID NO: 138188 - protein, 7 aa, synthetic construct
PHSKPSS

SEQ ID NO: 138189 - protein, 7 aa, synthetic construct
PHSVGGR

SEQ ID NO: 138190 - protein, 7 aa, synthetic construct
PHTAVRS

SEQ ID NO: 138191 - protein, 7 aa, synthetic construct
PHTGKYA

SEQ ID NO: 138192 - protein, 7 aa, synthetic construct
PHTGQPR

SEQ ID NO: 138193 - protein, 7 aa, synthetic construct
PHTHMAT

SEQ ID NO: 138194 - protein, 7 aa, synthetic construct
PHTRDKV

SEQ ID NO: 138195 - protein, 7 aa, synthetic construct
PHTSARM

SEQ ID NO: 138196 - protein, 7 aa, synthetic construct
PHVGMVR

SEQ ID NO: 138197 - protein, 7 aa, synthetic construct
PHVMKGL

SEQ ID NO: 138198 - protein, 7 aa, synthetic construct
PHVPKYG

SEQ ID NO: 138199 - protein, 7 aa, synthetic construct
PHVRAGM

SEQ ID NO: 138200 - protein, 7 aa, synthetic construct
PHVRNPG

SEQ ID NO: 138201 - protein, 7 aa, synthetic construct
PHYKERD

SEQ ID NO: 138202 - protein, 7 aa, synthetic construct
PIAHSVR

SEQ ID NO: 138203 - protein, 7 aa, synthetic construct
PIARQDK

SEQ ID NO: 138204 - protein, 7 aa, synthetic construct
PIAYKDK

SEQ ID NO: 138205 - protein, 7 aa, synthetic construct
PIERAKA

SEQ ID NO: 138206 - protein, 7 aa, synthetic construct
PIGARAM

SEQ ID NO: 138207 - protein, 7 aa, synthetic construct
PIGGPRV

SEQ ID NO: 138208 - protein, 7 aa, synthetic construct
PIGGQTK

SEQ ID NO: 138209 - protein, 7 aa, synthetic construct
PIGHVSR

SEQ ID NO: 138210 - protein, 7 aa, synthetic construct
PIGIQAK

SEQ ID NO: 138211 - protein, 7 aa, synthetic construct
PIGKIPM

SEQ ID NO: 138212 - protein, 7 aa, synthetic construct
PIGQTHR

SEQ ID NO: 138213 - protein, 7 aa, synthetic construct
PIGRAVT

SEQ ID NO: 138214 - protein, 7 aa, synthetic construct
PIGREVR

SEQ ID NO: 138215 - protein, 7 aa, synthetic construct
PIGYQKP

SEQ ID NO: 138216 - protein, 7 aa, synthetic construct
PIHKMQA

SEQ ID NO: 138217 - protein, 7 aa, synthetic construct
PIHNSTR

SEQ ID NO: 138218 - protein, 7 aa, synthetic construct
PIHQQQK

SEQ ID NO: 138219 - protein, 7 aa, synthetic construct
PIHRNNY

SEQ ID NO: 138220 - protein, 7 aa, synthetic construct
PIKMKYD

SEQ ID NO: 138221 - protein, 7 aa, synthetic construct
PIKPHYA

SEQ ID NO: 138222 - protein, 7 aa, synthetic construct
PIKPRGD

SEQ ID NO: 138223 - protein, 7 aa, synthetic construct
PIKYSTG

SEQ ID NO: 138224 - protein, 7 aa, synthetic construct
PIMAKYG

SEQ ID NO: 138225 - protein, 7 aa, synthetic construct
PIMRMGP

SEQ ID NO: 138226 - protein, 7 aa, synthetic construct
PINKHVI

SEQ ID NO: 138227 - protein, 7 aa, synthetic construct
PINKNVF

SEQ ID NO: 138228 - protein, 7 aa, synthetic construct
PINKYPA

SEQ ID NO: 138229 - protein, 7 aa, synthetic construct
PINVHRG

SEQ ID NO: 138230 - protein, 7 aa, synthetic construct
PINVRVG

SEQ ID NO: 138231 - protein, 7 aa, synthetic construct
PINYANK

SEQ ID NO: 138232 - protein, 7 aa, synthetic construct
PIPMNNR

SEQ ID NO: 138233 - protein, 7 aa, synthetic construct
PIPNKYV

SEQ ID NO: 138234 - protein, 7 aa, synthetic construct
PIPPKHP

SEQ ID NO: 138235 - protein, 7 aa, synthetic construct
PIPRTER

SEQ ID NO: 138236 - protein, 7 aa, synthetic construct
PIQRGIN

SEQ ID NO: 138237 - protein, 7 aa, synthetic construct
PIQRHSA

SEQ ID NO: 138238 - protein, 7 aa, synthetic construct
PIQRQKD

SEQ ID NO: 138239 - protein, 7 aa, synthetic construct
PIREVAR

SEQ ID NO: 138240 - protein, 7 aa, synthetic construct
PIRGKGD

SEQ ID NO: 138241 - protein, 7 aa, synthetic construct
PISARHG

SEQ ID NO: 138242 - protein, 7 aa, synthetic construct
PISGHTK

SEQ ID NO: 138243 - protein, 7 aa, synthetic construct
PISGKFN

SEQ ID NO: 138244 - protein, 7 aa, synthetic construct
PISMRNG

SEQ ID NO: 138245 - protein, 7 aa, synthetic construct
PISRENK

SEQ ID NO: 138246 - protein, 7 aa, synthetic construct
PISSRLG

SEQ ID NO: 138247 - protein, 7 aa, synthetic construct
PITNRHP

SEQ ID NO: 138248 - protein, 7 aa, synthetic construct
PITRPNL

SEQ ID NO: 138249 - protein, 7 aa, synthetic construct
PITRVAA

SEQ ID NO: 138250 - protein, 7 aa, synthetic construct
PIVARKE

SEQ ID NO: 138251 - protein, 7 aa, synthetic construct
PIVKHIG

SEQ ID NO: 138252 - protein, 7 aa, synthetic construct
PIVRHQG

SEQ ID NO: 138253 - protein, 7 aa, synthetic construct
PIYKTKE

SEQ ID NO: 138254 - protein, 7 aa, synthetic construct
PIYPSKA

SEQ ID NO: 138255 - protein, 7 aa, synthetic construct
PKAGTPY

SEQ ID NO: 138256 - protein, 7 aa, synthetic construct
PKAHADK

SEQ ID NO: 138257 - protein, 7 aa, synthetic construct
PKAHNSH

SEQ ID NO: 138258 - protein, 7 aa, synthetic construct
PKAMPMN

SEQ ID NO: 138259 - protein, 7 aa, synthetic construct
PKARDPM

SEQ ID NO: 138260 - protein, 7 aa, synthetic construct
PKAYSAQ

SEQ ID NO: 138261 - protein, 7 aa, synthetic construct
PKDTIQA

SEQ ID NO: 138262 - protein, 7 aa, synthetic construct
PKDTRHF

SEQ ID NO: 138263 - protein, 7 aa, synthetic construct
PKEKFPT

SEQ ID NO: 138264 - protein, 7 aa, synthetic construct
PKELHRS

SEQ ID NO: 138265 - protein, 7 aa, synthetic construct
PKEQRNQ

SEQ ID NO: 138266 - protein, 7 aa, synthetic construct
PKETRNS

SEQ ID NO: 138267 - protein, 7 aa, synthetic construct
PKFEAAR

SEQ ID NO: 138268 - protein, 7 aa, synthetic construct
PKFGPTN

SEQ ID NO: 138269 - protein, 7 aa, synthetic construct
PKFKADY

SEQ ID NO: 138270 - protein, 7 aa, synthetic construct
PKFMNAP

SEQ ID NO: 138271 - protein, 7 aa, synthetic construct
PKFSQDR

SEQ ID NO: 138272 - protein, 7 aa, synthetic construct
PKGGERY

SEQ ID NO: 138273 - protein, 7 aa, synthetic construct
PKGHQGQ

SEQ ID NO: 138274 - protein, 7 aa, synthetic construct
PKGLPMS

SEQ ID NO: 138275 - protein, 7 aa, synthetic construct
PKGNAER

SEQ ID NO: 138276 - protein, 7 aa, synthetic construct
PKGNEMR

SEQ ID NO: 138277 - protein, 7 aa, synthetic construct
PKGNEYK

SEQ ID NO: 138278 - protein, 7 aa, synthetic construct
PKGNNFH

SEQ ID NO: 138279 - protein, 7 aa, synthetic construct
PKGPQYP

SEQ ID NO: 138280 - protein, 7 aa, synthetic construct
PKGQHAF

SEQ ID NO: 138281 - protein, 7 aa, synthetic construct
PKGQREA

SEQ ID NO: 138282 - protein, 7 aa, synthetic construct
PKGRDIS

SEQ ID NO: 138283 - protein, 7 aa, synthetic construct
PKGRSDF

SEQ ID NO: 138284 - protein, 7 aa, synthetic construct
PKGSVAF

SEQ ID NO: 138285 - protein, 7 aa, synthetic construct
PKGTPFG

SEQ ID NO: 138286 - protein, 7 aa, synthetic construct
PKGVRND

SEQ ID NO: 138287 - protein, 7 aa, synthetic construct
PKHAIQM

SEQ ID NO: 138288 - protein, 7 aa, synthetic construct
PKHALHP

SEQ ID NO: 138289 - protein, 7 aa, synthetic construct
PKHANQA

SEQ ID NO: 138290 - protein, 7 aa, synthetic construct
PKHAPMS

SEQ ID NO: 138291 - protein, 7 aa, synthetic construct
PKHGTFA

SEQ ID NO: 138292 - protein, 7 aa, synthetic construct
PKHIPNQ

SEQ ID NO: 138293 - protein, 7 aa, synthetic construct
PKHNIAT

SEQ ID NO: 138294 - protein, 7 aa, synthetic construct
PKHPKFD

SEQ ID NO: 138295 - protein, 7 aa, synthetic construct
PKHQNLS

SEQ ID NO: 138296 - protein, 7 aa, synthetic construct
PKHQSGA

SEQ ID NO: 138297 - protein, 7 aa, synthetic construct
PKHQTLL

SEQ ID NO: 138298 - protein, 7 aa, synthetic construct
PKHTPMM

SEQ ID NO: 138299 - protein, 7 aa, synthetic construct
PKHTSTY

SEQ ID NO: 138300 - protein, 7 aa, synthetic construct
PKHVQSY

SEQ ID NO: 138301 - protein, 7 aa, synthetic construct
PKHVTGM

SEQ ID NO: 138302 - protein, 7 aa, synthetic construct
PKIASSY

SEQ ID NO: 138303 - protein, 7 aa, synthetic construct
PKIGAGY

SEQ ID NO: 138304 - protein, 7 aa, synthetic construct
PKINMMS

SEQ ID NO: 138305 - protein, 7 aa, synthetic construct
PKIPALT

SEQ ID NO: 138306 - protein, 7 aa, synthetic construct
PKKESYF

SEQ ID NO: 138307 - protein, 7 aa, synthetic construct
PKKGPND

SEQ ID NO: 138308 - protein, 7 aa, synthetic construct
PKKPVDY

SEQ ID NO: 138309 - protein, 7 aa, synthetic construct
PKKSPDY

SEQ ID NO: 138310 - protein, 7 aa, synthetic construct
PKKVENA

SEQ ID NO: 138311 - protein, 7 aa, synthetic construct
PKLHHVP

SEQ ID NO: 138312 - protein, 7 aa, synthetic construct
PKLHQIA

SEQ ID NO: 138313 - protein, 7 aa, synthetic construct
PKLPHAM

SEQ ID NO: 138314 - protein, 7 aa, synthetic construct
PKLPINS

SEQ ID NO: 138315 - protein, 7 aa, synthetic construct
PKLTHAM

SEQ ID NO: 138316 - protein, 7 aa, synthetic construct
PKLTNYP

SEQ ID NO: 138317 - protein, 7 aa, synthetic construct
PKMEPGD

SEQ ID NO: 138318 - protein, 7 aa, synthetic construct
PKMGFPS

SEQ ID NO: 138319 - protein, 7 aa, synthetic construct
PKMHALS

SEQ ID NO: 138320 - protein, 7 aa, synthetic construct
PKMHGNI

SEQ ID NO: 138321 - protein, 7 aa, synthetic construct
PKMHMGN

SEQ ID NO: 138322 - protein, 7 aa, synthetic construct
PKMIHNA

SEQ ID NO: 138323 - protein, 7 aa, synthetic construct
PKMRDAA

SEQ ID NO: 138324 - protein, 7 aa, synthetic construct
PKMSRGE

SEQ ID NO: 138325 - protein, 7 aa, synthetic construct
PKMVPGS

SEQ ID NO: 138326 - protein, 7 aa, synthetic construct
PKMVPHP

SEQ ID NO: 138327 - protein, 7 aa, synthetic construct
PKNARYE

SEQ ID NO: 138328 - protein, 7 aa, synthetic construct
PKNATNW

SEQ ID NO: 138329 - protein, 7 aa, synthetic construct
PKNHGVY

SEQ ID NO: 138330 - protein, 7 aa, synthetic construct
PKNHVMT

SEQ ID NO: 138331 - protein, 7 aa, synthetic construct
PKNRDQA

SEQ ID NO: 138332 - protein, 7 aa, synthetic construct
PKNVKYD

SEQ ID NO: 138333 - protein, 7 aa, synthetic construct
PKNYPTD

SEQ ID NO: 138334 - protein, 7 aa, synthetic construct
PKPARFD

SEQ ID NO: 138335 - protein, 7 aa, synthetic construct
PKPRDLI

SEQ ID NO: 138336 - protein, 7 aa, synthetic construct
PKPRDQL

SEQ ID NO: 138337 - protein, 7 aa, synthetic construct
PKPRPEN

SEQ ID NO: 138338 - protein, 7 aa, synthetic construct
PKPTNYL

SEQ ID NO: 138339 - protein, 7 aa, synthetic construct
PKPTRID

SEQ ID NO: 138340 - protein, 7 aa, synthetic construct
PKPTVSY

SEQ ID NO: 138341 - protein, 7 aa, synthetic construct
PKQDSNR

SEQ ID NO: 138342 - protein, 7 aa, synthetic construct
PKQFAVG

SEQ ID NO: 138343 - protein, 7 aa, synthetic construct
PKQFPTG

SEQ ID NO: 138344 - protein, 7 aa, synthetic construct
PKQHDTK

SEQ ID NO: 138345 - protein, 7 aa, synthetic construct
PKQHERI

SEQ ID NO: 138346 - protein, 7 aa, synthetic construct
PKQHRLE

SEQ ID NO: 138347 - protein, 7 aa, synthetic construct
PKQHSTF

SEQ ID NO: 138348 - protein, 7 aa, synthetic construct
PKQHSVM

SEQ ID NO: 138349 - protein, 7 aa, synthetic construct
PKQITHM

SEQ ID NO: 138350 - protein, 7 aa, synthetic construct
PKQQAYQ

SEQ ID NO: 138351 - protein, 7 aa, synthetic construct
PKQQVEK

SEQ ID NO: 138352 - protein, 7 aa, synthetic construct
PKQREMM

SEQ ID NO: 138353 - protein, 7 aa, synthetic construct
PKQSLMH

SEQ ID NO: 138354 - protein, 7 aa, synthetic construct
PKQVEAR

SEQ ID NO: 138355 - protein, 7 aa, synthetic construct
PKRTTDA

SEQ ID NO: 138356 - protein, 7 aa, synthetic construct
PKSGTWE

SEQ ID NO: 138357 - protein, 7 aa, synthetic construct
PKSHEFK

SEQ ID NO: 138358 - protein, 7 aa, synthetic construct
PKSPIPH

SEQ ID NO: 138359 - protein, 7 aa, synthetic construct
PKSRDQM

SEQ ID NO: 138360 - protein, 7 aa, synthetic construct
PKSTHIL

SEQ ID NO: 138361 - protein, 7 aa, synthetic construct
PKSTREM

SEQ ID NO: 138362 - protein, 7 aa, synthetic construct
PKSVPTF

SEQ ID NO: 138363 - protein, 7 aa, synthetic construct
PKSYPGQ

SEQ ID NO: 138364 - protein, 7 aa, synthetic construct
PKSYSAG

SEQ ID NO: 138365 - protein, 7 aa, synthetic construct
PKTHARD

SEQ ID NO: 138366 - protein, 7 aa, synthetic construct
PKTIHNP

SEQ ID NO: 138367 - protein, 7 aa, synthetic construct
PKTIPDR

SEQ ID NO: 138368 - protein, 7 aa, synthetic construct
PKTKPAD

SEQ ID NO: 138369 - protein, 7 aa, synthetic construct
PKTYNPS

SEQ ID NO: 138370 - protein, 7 aa, synthetic construct
PKTYPPH

SEQ ID NO: 138371 - protein, 7 aa, synthetic construct
PKTYQDK

SEQ ID NO: 138372 - protein, 7 aa, synthetic construct
PKVHHGI

SEQ ID NO: 138373 - protein, 7 aa, synthetic construct
PKVHSQL

SEQ ID NO: 138374 - protein, 7 aa, synthetic construct
PKVISDR

SEQ ID NO: 138375 - protein, 7 aa, synthetic construct
PKVLRSE

SEQ ID NO: 138376 - protein, 7 aa, synthetic construct
PKVPIHT

SEQ ID NO: 138377 - protein, 7 aa, synthetic construct
PKVPMGV

SEQ ID NO: 138378 - protein, 7 aa, synthetic construct
PKVQGPY

SEQ ID NO: 138379 - protein, 7 aa, synthetic construct
PKVRMLE

SEQ ID NO: 138380 - protein, 7 aa, synthetic construct
PKVRPID

SEQ ID NO: 138381 - protein, 7 aa, synthetic construct
PKVSTPF

SEQ ID NO: 138382 - protein, 7 aa, synthetic construct
PKVVHAN

SEQ ID NO: 138383 - protein, 7 aa, synthetic construct
PKYAAAM

SEQ ID NO: 138384 - protein, 7 aa, synthetic construct
PKYAHQP

SEQ ID NO: 138385 - protein, 7 aa, synthetic construct
PKYASSA

SEQ ID NO: 138386 - protein, 7 aa, synthetic construct
PKYDMPK

SEQ ID NO: 138387 - protein, 7 aa, synthetic construct
PKYEMRP

SEQ ID NO: 138388 - protein, 7 aa, synthetic construct
PKYETRV

SEQ ID NO: 138389 - protein, 7 aa, synthetic construct
PKYMGKD

SEQ ID NO: 138390 - protein, 7 aa, synthetic construct
PKYNHAV

SEQ ID NO: 138391 - protein, 7 aa, synthetic construct
PKYPGTV

SEQ ID NO: 138392 - protein, 7 aa, synthetic construct
PKYPHTV

SEQ ID NO: 138393 - protein, 7 aa, synthetic construct
PKYPTTL

SEQ ID NO: 138394 - protein, 7 aa, synthetic construct
PKYQPND

SEQ ID NO: 138395 - protein, 7 aa, synthetic construct
PKYSPAD

SEQ ID NO: 138396 - protein, 7 aa, synthetic construct
PKYVGRD

SEQ ID NO: 138397 - protein, 7 aa, synthetic construct
PLAHNRM

SEQ ID NO: 138398 - protein, 7 aa, synthetic construct
PLAYQNK

SEQ ID NO: 138399 - protein, 7 aa, synthetic construct
PLERLAK

SEQ ID NO: 138400 - protein, 7 aa, synthetic construct
PLGMNAK

SEQ ID NO: 138401 - protein, 7 aa, synthetic construct
PLHGGYK

SEQ ID NO: 138402 - protein, 7 aa, synthetic construct
PLHHVKT

SEQ ID NO: 138403 - protein, 7 aa, synthetic construct
PLHKADR

SEQ ID NO: 138404 - protein, 7 aa, synthetic construct
PLHNAFK

SEQ ID NO: 138405 - protein, 7 aa, synthetic construct
PLHQARA

SEQ ID NO: 138406 - protein, 7 aa, synthetic construct
PLHRVTG

SEQ ID NO: 138407 - protein, 7 aa, synthetic construct
PLHSSKY

SEQ ID NO: 138408 - protein, 7 aa, synthetic construct
PLIRQKE

SEQ ID NO: 138409 - protein, 7 aa, synthetic construct
PLKHLGS

SEQ ID NO: 138410 - protein, 7 aa, synthetic construct
PLKHPPQ

SEQ ID NO: 138411 - protein, 7 aa, synthetic construct
PLKPVSY

SEQ ID NO: 138412 - protein, 7 aa, synthetic construct
PLKRDQT

SEQ ID NO: 138413 - protein, 7 aa, synthetic construct
PLKSLPM

SEQ ID NO: 138414 - protein, 7 aa, synthetic construct
PLLDRAR

SEQ ID NO: 138415 - protein, 7 aa, synthetic construct
PLLGRKD

SEQ ID NO: 138416 - protein, 7 aa, synthetic construct
PLMDRSK

SEQ ID NO: 138417 - protein, 7 aa, synthetic construct
PLNHTRG

SEQ ID NO: 138418 - protein, 7 aa, synthetic construct
PLNPKFS

SEQ ID NO: 138419 - protein, 7 aa, synthetic construct
PLNYPKA

SEQ ID NO: 138420 - protein, 7 aa, synthetic construct
PLPTRSM

SEQ ID NO: 138421 - protein, 7 aa, synthetic construct
PLQAHAR

SEQ ID NO: 138422 - protein, 7 aa, synthetic construct
PLQHNVR

SEQ ID NO: 138423 - protein, 7 aa, synthetic construct
PLRAPSM

SEQ ID NO: 138424 - protein, 7 aa, synthetic construct
PLRDSRM

SEQ ID NO: 138425 - protein, 7 aa, synthetic construct
PLRMKDV

SEQ ID NO: 138426 - protein, 7 aa, synthetic construct
PLRNMRE

SEQ ID NO: 138427 - protein, 7 aa, synthetic construct
PLRQSPV

SEQ ID NO: 138428 - protein, 7 aa, synthetic construct
PLRSVDR

SEQ ID NO: 138429 - protein, 7 aa, synthetic construct
PLTKEKW

SEQ ID NO: 138430 - protein, 7 aa, synthetic construct
PLTRKDG

SEQ ID NO: 138431 - protein, 7 aa, synthetic construct
PLTTHRS

SEQ ID NO: 138432 - protein, 7 aa, synthetic construct
PLVKHPA

SEQ ID NO: 138433 - protein, 7 aa, synthetic construct
PMARQHA

SEQ ID NO: 138434 - protein, 7 aa, synthetic construct
PMAVSAK

SEQ ID NO: 138435 - protein, 7 aa, synthetic construct
PMDRKSG

SEQ ID NO: 138436 - protein, 7 aa, synthetic construct
PMFNTKA

SEQ ID NO: 138437 - protein, 7 aa, synthetic construct
PMGHTNK

SEQ ID NO: 138438 - protein, 7 aa, synthetic construct
PMGKYVA

SEQ ID NO: 138439 - protein, 7 aa, synthetic construct
PMHPPKF

SEQ ID NO: 138440 - protein, 7 aa, synthetic construct
PMHRDKI

SEQ ID NO: 138441 - protein, 7 aa, synthetic construct
PMKLRDM

SEQ ID NO: 138442 - protein, 7 aa, synthetic construct
PMKMVPA

SEQ ID NO: 138443 - protein, 7 aa, synthetic construct
PMKNAYA

SEQ ID NO: 138444 - protein, 7 aa, synthetic construct
PMKNTSS

SEQ ID NO: 138445 - protein, 7 aa, synthetic construct
PMKRDMS

SEQ ID NO: 138446 - protein, 7 aa, synthetic construct
PMKRDTA

SEQ ID NO: 138447 - protein, 7 aa, synthetic construct
PMKRQDN

SEQ ID NO: 138448 - protein, 7 aa, synthetic construct
PMLGKHS

SEQ ID NO: 138449 - protein, 7 aa, synthetic construct
PMMRERI

SEQ ID NO: 138450 - protein, 7 aa, synthetic construct
PMMRSNP

SEQ ID NO: 138451 - protein, 7 aa, synthetic construct
PMMTPKA

SEQ ID NO: 138452 - protein, 7 aa, synthetic construct
PMNHRVG

SEQ ID NO: 138453 - protein, 7 aa, synthetic construct
PMNRAGY

SEQ ID NO: 138454 - protein, 7 aa, synthetic construct
PMPGIRQ

SEQ ID NO: 138455 - protein, 7 aa, synthetic construct
PMPRNPP

SEQ ID NO: 138456 - protein, 7 aa, synthetic construct
PMPSAPR

SEQ ID NO: 138457 - protein, 7 aa, synthetic construct
PMQGMRQ

SEQ ID NO: 138458 - protein, 7 aa, synthetic construct
PMQRDTR

SEQ ID NO: 138459 - protein, 7 aa, synthetic construct
PMREVFK

SEQ ID NO: 138460 - protein, 7 aa, synthetic construct
PMRHAQA

SEQ ID NO: 138461 - protein, 7 aa, synthetic construct
PMRMKVD

SEQ ID NO: 138462 - protein, 7 aa, synthetic construct
PMRNPNI

SEQ ID NO: 138463 - protein, 7 aa, synthetic construct
PMRPATY

SEQ ID NO: 138464 - protein, 7 aa, synthetic construct
PMRPRDN

SEQ ID NO: 138465 - protein, 7 aa, synthetic construct
PMRSNHI

SEQ ID NO: 138466 - protein, 7 aa, synthetic construct
PMRSPMP

SEQ ID NO: 138467 - protein, 7 aa, synthetic construct
PMRSPTH

SEQ ID NO: 138468 - protein, 7 aa, synthetic construct
PMSITAK

SEQ ID NO: 138469 - protein, 7 aa, synthetic construct
PMSREVK

SEQ ID NO: 138470 - protein, 7 aa, synthetic construct
PMSSQRF

SEQ ID NO: 138471 - protein, 7 aa, synthetic construct
PMSVKLG

SEQ ID NO: 138472 - protein, 7 aa, synthetic construct
PMTNKFG

SEQ ID NO: 138473 - protein, 7 aa, synthetic construct
PMVQHKA

SEQ ID NO: 138474 - protein, 7 aa, synthetic construct
PMVQKRD

SEQ ID NO: 138475 - protein, 7 aa, synthetic construct
PMVRTRE

SEQ ID NO: 138476 - protein, 7 aa, synthetic construct
PNAAHRM

SEQ ID NO: 138477 - protein, 7 aa, synthetic construct
PNAHTRL

SEQ ID NO: 138478 - protein, 7 aa, synthetic construct
PNAIKGY

SEQ ID NO: 138479 - protein, 7 aa, synthetic construct
PNAKPYI

SEQ ID NO: 138480 - protein, 7 aa, synthetic construct
PNARNGH

SEQ ID NO: 138481 - protein, 7 aa, synthetic construct
PNARPVT

SEQ ID NO: 138482 - protein, 7 aa, synthetic construct
PNASTRW

SEQ ID NO: 138483 - protein, 7 aa, synthetic construct
PNDRSMK

SEQ ID NO: 138484 - protein, 7 aa, synthetic construct
PNEGNKR

SEQ ID NO: 138485 - protein, 7 aa, synthetic construct
PNEGRVR

SEQ ID NO: 138486 - protein, 7 aa, synthetic construct
PNEPSKR

SEQ ID NO: 138487 - protein, 7 aa, synthetic construct
PNERPGR

SEQ ID NO: 138488 - protein, 7 aa, synthetic construct
PNFKPRD

SEQ ID NO: 138489 - protein, 7 aa, synthetic construct
PNFTRQL

SEQ ID NO: 138490 - protein, 7 aa, synthetic construct
PNFVKGG

SEQ ID NO: 138491 - protein, 7 aa, synthetic construct
PNGPIRV

SEQ ID NO: 138492 - protein, 7 aa, synthetic construct
PNGPTRY

SEQ ID NO: 138493 - protein, 7 aa, synthetic construct
PNGYGHK

SEQ ID NO: 138494 - protein, 7 aa, synthetic construct
PNGYTAK

SEQ ID NO: 138495 - protein, 7 aa, synthetic construct
PNHAKNF

SEQ ID NO: 138496 - protein, 7 aa, synthetic construct
PNHAKNT

SEQ ID NO: 138497 - protein, 7 aa, synthetic construct
PNHGIPR

SEQ ID NO: 138498 - protein, 7 aa, synthetic construct
PNHITRM

SEQ ID NO: 138499 - protein, 7 aa, synthetic construct
PNHKVAT

SEQ ID NO: 138500 - protein, 7 aa, synthetic construct
PNHMKNN

SEQ ID NO: 138501 - protein, 7 aa, synthetic construct
PNHMPKQ

SEQ ID NO: 138502 - protein, 7 aa, synthetic construct
PNHPRGV

SEQ ID NO: 138503 - protein, 7 aa, synthetic construct
PNHTKQH

SEQ ID NO: 138504 - protein, 7 aa, synthetic construct
PNHVQRM

SEQ ID NO: 138505 - protein, 7 aa, synthetic construct
PNIQARM

SEQ ID NO: 138506 - protein, 7 aa, synthetic construct
PNKAYVT

SEQ ID NO: 138507 - protein, 7 aa, synthetic construct
PNKEKDK

SEQ ID NO: 138508 - protein, 7 aa, synthetic construct
PNKNPYV

SEQ ID NO: 138509 - protein, 7 aa, synthetic construct
PNKTTSP

SEQ ID NO: 138510 - protein, 7 aa, synthetic construct
PNKVNMF

SEQ ID NO: 138511 - protein, 7 aa, synthetic construct
PNLQNPR

SEQ ID NO: 138512 - protein, 7 aa, synthetic construct
PNLQSAR

SEQ ID NO: 138513 - protein, 7 aa, synthetic construct
PNLRTQY

SEQ ID NO: 138514 - protein, 7 aa, synthetic construct
PNMDRKM

SEQ ID NO: 138515 - protein, 7 aa, synthetic construct
PNMQRSL

SEQ ID NO: 138516 - protein, 7 aa, synthetic construct
PNMSLRG

SEQ ID NO: 138517 - protein, 7 aa, synthetic construct
PNMSQAR

SEQ ID NO: 138518 - protein, 7 aa, synthetic construct
PNMTRQM

SEQ ID NO: 138519 - protein, 7 aa, synthetic construct
PNNARSN

SEQ ID NO: 138520 - protein, 7 aa, synthetic construct
PNNARTY

SEQ ID NO: 138521 - protein, 7 aa, synthetic construct
PNNNIRM

SEQ ID NO: 138522 - protein, 7 aa, synthetic construct
PNNNRLM

SEQ ID NO: 138523 - protein, 7 aa, synthetic construct
PNNPARF

SEQ ID NO: 138524 - protein, 7 aa, synthetic construct
PNNSNRM

SEQ ID NO: 138525 - protein, 7 aa, synthetic construct
PNPIKPM

SEQ ID NO: 138526 - protein, 7 aa, synthetic construct
PNPKFSS

SEQ ID NO: 138527 - protein, 7 aa, synthetic construct
PNPKYSG

SEQ ID NO: 138528 - protein, 7 aa, synthetic construct
PNPRKDI

SEQ ID NO: 138529 - protein, 7 aa, synthetic construct
PNPRNNV

SEQ ID NO: 138530 - protein, 7 aa, synthetic construct
PNPRPKE

SEQ ID NO: 138531 - protein, 7 aa, synthetic construct
PNPVNVM

SEQ ID NO: 138532 - protein, 7 aa, synthetic construct
PNQARDK

SEQ ID NO: 138533 - protein, 7 aa, synthetic construct
PNQERMK

SEQ ID NO: 138534 - protein, 7 aa, synthetic construct
PNQHNYM

SEQ ID NO: 138535 - protein, 7 aa, synthetic construct
PNQSHVR

SEQ ID NO: 138536 - protein, 7 aa, synthetic construct
PNQTTFR

SEQ ID NO: 138537 - protein, 7 aa, synthetic construct
PNRDRSV

SEQ ID NO: 138538 - protein, 7 aa, synthetic construct
PNRDTGK

SEQ ID NO: 138539 - protein, 7 aa, synthetic construct
PNRGDQK

SEQ ID NO: 138540 - protein, 7 aa, synthetic construct
PNRHTPV

SEQ ID NO: 138541 - protein, 7 aa, synthetic construct
PNRLPMG

SEQ ID NO: 138542 - protein, 7 aa, synthetic construct
PNRMKVE

SEQ ID NO: 138543 - protein, 7 aa, synthetic construct
PNRQKGE

SEQ ID NO: 138544 - protein, 7 aa, synthetic construct
PNRQPQY

SEQ ID NO: 138545 - protein, 7 aa, synthetic construct
PNRQQDK

SEQ ID NO: 138546 - protein, 7 aa, synthetic construct
PNRSEMK

SEQ ID NO: 138547 - protein, 7 aa, synthetic construct
PNRSPGF

SEQ ID NO: 138548 - protein, 7 aa, synthetic construct
PNRVNPL

SEQ ID NO: 138549 - protein, 7 aa, synthetic construct
PNRVQSL

SEQ ID NO: 138550 - protein, 7 aa, synthetic construct
PNRVRDG

SEQ ID NO: 138551 - protein, 7 aa, synthetic construct
PNRYGNV

SEQ ID NO: 138552 - protein, 7 aa, synthetic construct
PNSHKQI

SEQ ID NO: 138553 - protein, 7 aa, synthetic construct
PNSHTVR

SEQ ID NO: 138554 - protein, 7 aa, synthetic construct
PNSMNRY

SEQ ID NO: 138555 - protein, 7 aa, synthetic construct
PNSRGPF

SEQ ID NO: 138556 - protein, 7 aa, synthetic construct
PNSSIRT

SEQ ID NO: 138557 - protein, 7 aa, synthetic construct
PNTGRVH

SEQ ID NO: 138558 - protein, 7 aa, synthetic construct
PNTGTKW

SEQ ID NO: 138559 - protein, 7 aa, synthetic construct
PNTQPRY

SEQ ID NO: 138560 - protein, 7 aa, synthetic construct
PNTRPVL

SEQ ID NO: 138561 - protein, 7 aa, synthetic construct
PNTRTPY

SEQ ID NO: 138562 - protein, 7 aa, synthetic construct
PNTTRNM

SEQ ID NO: 138563 - protein, 7 aa, synthetic construct
PNVHKNT

SEQ ID NO: 138564 - protein, 7 aa, synthetic construct
PNVQRDR

SEQ ID NO: 138565 - protein, 7 aa, synthetic construct
PNVQRNF

SEQ ID NO: 138566 - protein, 7 aa, synthetic construct
PNVRPMN

SEQ ID NO: 138567 - protein, 7 aa, synthetic construct
PNVRSGN

SEQ ID NO: 138568 - protein, 7 aa, synthetic construct
PNVTRSH

SEQ ID NO: 138569 - protein, 7 aa, synthetic construct
PNYAQRT

SEQ ID NO: 138570 - protein, 7 aa, synthetic construct
PNYASNK

SEQ ID NO: 138571 - protein, 7 aa, synthetic construct
PNYGNNH

SEQ ID NO: 138572 - protein, 7 aa, synthetic construct
PNYGPKM

SEQ ID NO: 138573 - protein, 7 aa, synthetic construct
PNYKAGG

SEQ ID NO: 138574 - protein, 7 aa, synthetic construct
PNYTKPM

SEQ ID NO: 138575 - protein, 7 aa, synthetic construct
PNYVPQD

SEQ ID NO: 138576 - protein, 7 aa, synthetic construct
PPAKQMF

SEQ ID NO: 138577 - protein, 7 aa, synthetic construct
PPANRSM

SEQ ID NO: 138578 - protein, 7 aa, synthetic construct
PPAPSAR

SEQ ID NO: 138579 - protein, 7 aa, synthetic construct
PPATSVR

SEQ ID NO: 138580 - protein, 7 aa, synthetic construct
PPATTRL

SEQ ID NO: 138581 - protein, 7 aa, synthetic construct
PPDGSRR

SEQ ID NO: 138582 - protein, 7 aa, synthetic construct
PPDRPGR

SEQ ID NO: 138583 - protein, 7 aa, synthetic construct
PPERGSK

SEQ ID NO: 138584 - protein, 7 aa, synthetic construct
PPERKQT

SEQ ID NO: 138585 - protein, 7 aa, synthetic construct
PPGIRPP

SEQ ID NO: 138586 - protein, 7 aa, synthetic construct
PPGKFKD

SEQ ID NO: 138587 - protein, 7 aa, synthetic construct
PPHAANR

SEQ ID NO: 138588 - protein, 7 aa, synthetic construct
PPHGMQR

SEQ ID NO: 138589 - protein, 7 aa, synthetic construct
PPHGTRV

SEQ ID NO: 138590 - protein, 7 aa, synthetic construct
PPHKQYS

SEQ ID NO: 138591 - protein, 7 aa, synthetic construct
PPHTIKA

SEQ ID NO: 138592 - protein, 7 aa, synthetic construct
PPHTPKV

SEQ ID NO: 138593 - protein, 7 aa, synthetic construct
PPHYQRD

SEQ ID NO: 138594 - protein, 7 aa, synthetic construct
PPIKRDT

SEQ ID NO: 138595 - protein, 7 aa, synthetic construct
PPIQTRP

SEQ ID NO: 138596 - protein, 7 aa, synthetic construct
PPIRSQP

SEQ ID NO: 138597 - protein, 7 aa, synthetic construct
PPKHMSV

SEQ ID NO: 138598 - protein, 7 aa, synthetic construct
PPKHQSN

SEQ ID NO: 138599 - protein, 7 aa, synthetic construct
PPKHSPN

SEQ ID NO: 138600 - protein, 7 aa, synthetic construct
PPKLSPS

SEQ ID NO: 138601 - protein, 7 aa, synthetic construct
PPKNDRM

SEQ ID NO: 138602 - protein, 7 aa, synthetic construct
PPKNTHF

SEQ ID NO: 138603 - protein, 7 aa, synthetic construct
PPKPPAH

SEQ ID NO: 138604 - protein, 7 aa, synthetic construct
PPKQGPF

SEQ ID NO: 138605 - protein, 7 aa, synthetic construct
PPKQHLN

SEQ ID NO: 138606 - protein, 7 aa, synthetic construct
PPKRVDS

SEQ ID NO: 138607 - protein, 7 aa, synthetic construct
PPLERRP

SEQ ID NO: 138608 - protein, 7 aa, synthetic construct
PPLHPNK

SEQ ID NO: 138609 - protein, 7 aa, synthetic construct
PPMASRN

SEQ ID NO: 138610 - protein, 7 aa, synthetic construct
PPMGNRP

SEQ ID NO: 138611 - protein, 7 aa, synthetic construct
PPMNRPT

SEQ ID NO: 138612 - protein, 7 aa, synthetic construct
PPMPPKV

SEQ ID NO: 138613 - protein, 7 aa, synthetic construct
PPNAKFT

SEQ ID NO: 138614 - protein, 7 aa, synthetic construct
PPNDRRP

SEQ ID NO: 138615 - protein, 7 aa, synthetic construct
PPNHRLA

SEQ ID NO: 138616 - protein, 7 aa, synthetic construct
PPPSRMA

SEQ ID NO: 138617 - protein, 7 aa, synthetic construct
PPQKQAW

SEQ ID NO: 138618 - protein, 7 aa, synthetic construct
PPQRMNY

SEQ ID NO: 138619 - protein, 7 aa, synthetic construct
PPQRPVM

SEQ ID NO: 138620 - protein, 7 aa, synthetic construct
PPQSIKY

SEQ ID NO: 138621 - protein, 7 aa, synthetic construct
PPQVRPQ

SEQ ID NO: 138622 - protein, 7 aa, synthetic construct
PPRDMQR

SEQ ID NO: 138623 - protein, 7 aa, synthetic construct
PPRDQGR

SEQ ID NO: 138624 - protein, 7 aa, synthetic construct
PPRDRQA

SEQ ID NO: 138625 - protein, 7 aa, synthetic construct
PPRHQPM

SEQ ID NO: 138626 - protein, 7 aa, synthetic construct
PPRPPTG

SEQ ID NO: 138627 - protein, 7 aa, synthetic construct
PPRRDSV

SEQ ID NO: 138628 - protein, 7 aa, synthetic construct
PPRSNQF

SEQ ID NO: 138629 - protein, 7 aa, synthetic construct
PPRSPNH

SEQ ID NO: 138630 - protein, 7 aa, synthetic construct
PPRSPVV

SEQ ID NO: 138631 - protein, 7 aa, synthetic construct
PPRVIRE

SEQ ID NO: 138632 - protein, 7 aa, synthetic construct
PPRWEKD

SEQ ID NO: 138633 - protein, 7 aa, synthetic construct
PPSDKNK

SEQ ID NO: 138634 - protein, 7 aa, synthetic construct
PPSLREK

SEQ ID NO: 138635 - protein, 7 aa, synthetic construct
PPSMVGR

SEQ ID NO: 138636 - protein, 7 aa, synthetic construct
PPSPRSA

SEQ ID NO: 138637 - protein, 7 aa, synthetic construct
PPSQSHR

SEQ ID NO: 138638 - protein, 7 aa, synthetic construct
PPSRGAL

SEQ ID NO: 138639 - protein, 7 aa, synthetic construct
PPSVKYT

SEQ ID NO: 138640 - protein, 7 aa, synthetic construct
PPSWDST

SEQ ID NO: 138641 - protein, 7 aa, synthetic construct
PPTGHNR

SEQ ID NO: 138642 - protein, 7 aa, synthetic construct
PPTHTRT

SEQ ID NO: 138643 - protein, 7 aa, synthetic construct
PPTKPFN

SEQ ID NO: 138644 - protein, 7 aa, synthetic construct
PPTQSGR

SEQ ID NO: 138645 - protein, 7 aa, synthetic construct
PPTRPTP

SEQ ID NO: 138646 - protein, 7 aa, synthetic construct
PPVLDRR

SEQ ID NO: 138647 - protein, 7 aa, synthetic construct
PPVRKDI

SEQ ID NO: 138648 - protein, 7 aa, synthetic construct
PPVRNSA

SEQ ID NO: 138649 - protein, 7 aa, synthetic construct
PPVSRMP

SEQ ID NO: 138650 - protein, 7 aa, synthetic construct
PQADRAR

SEQ ID NO: 138651 - protein, 7 aa, synthetic construct
PQAGWRE

SEQ ID NO: 138652 - protein, 7 aa, synthetic construct
PQAKREV

SEQ ID NO: 138653 - protein, 7 aa, synthetic construct
PQAMSNR

SEQ ID NO: 138654 - protein, 7 aa, synthetic construct
PQANHIR

SEQ ID NO: 138655 - protein, 7 aa, synthetic construct
PQARTEK

SEQ ID NO: 138656 - protein, 7 aa, synthetic construct
PQATKFY

SEQ ID NO: 138657 - protein, 7 aa, synthetic construct
PQATKRD

SEQ ID NO: 138658 - protein, 7 aa, synthetic construct
PQDKAFR

SEQ ID NO: 138659 - protein, 7 aa, synthetic construct
PQDKRTF

SEQ ID NO: 138660 - protein, 7 aa, synthetic construct
PQDRGYK

SEQ ID NO: 138661 - protein, 7 aa, synthetic construct
PQDRVKS

SEQ ID NO: 138662 - protein, 7 aa, synthetic construct
PQDRVRS

SEQ ID NO: 138663 - protein, 7 aa, synthetic construct
PQDVRRA

SEQ ID NO: 138664 - protein, 7 aa, synthetic construct
PQDVRRG

SEQ ID NO: 138665 - protein, 7 aa, synthetic construct
PQEKRQY

SEQ ID NO: 138666 - protein, 7 aa, synthetic construct
PQERTKQ

SEQ ID NO: 138667 - protein, 7 aa, synthetic construct
PQFKQSG

SEQ ID NO: 138668 - protein, 7 aa, synthetic construct
PQFNIGK

SEQ ID NO: 138669 - protein, 7 aa, synthetic construct
PQFQGPQ

SEQ ID NO: 138670 - protein, 7 aa, synthetic construct
PQGKAQW

SEQ ID NO: 138671 - protein, 7 aa, synthetic construct
PQGKREF

SEQ ID NO: 138672 - protein, 7 aa, synthetic construct
PQGKSPG

SEQ ID NO: 138673 - protein, 7 aa, synthetic construct
PQGNRDR

SEQ ID NO: 138674 - protein, 7 aa, synthetic construct
PQGNSFR

SEQ ID NO: 138675 - protein, 7 aa, synthetic construct
PQGRDNK

SEQ ID NO: 138676 - protein, 7 aa, synthetic construct
PQGREKV

SEQ ID NO: 138677 - protein, 7 aa, synthetic construct
PQGSPRF

SEQ ID NO: 138678 - protein, 7 aa, synthetic construct
PQGSRSW

SEQ ID NO: 138679 - protein, 7 aa, synthetic construct
PQHAAGR

SEQ ID NO: 138680 - protein, 7 aa, synthetic construct
PQHATNR

SEQ ID NO: 138681 - protein, 7 aa, synthetic construct
PQHGSRM

SEQ ID NO: 138682 - protein, 7 aa, synthetic construct
PQHKATA

SEQ ID NO: 138683 - protein, 7 aa, synthetic construct
PQHNVRQ

SEQ ID NO: 138684 - protein, 7 aa, synthetic construct
PQHQTSK

SEQ ID NO: 138685 - protein, 7 aa, synthetic construct
PQHRMAG

SEQ ID NO: 138686 - protein, 7 aa, synthetic construct
PQINRDK

SEQ ID NO: 138687 - protein, 7 aa, synthetic construct
PQIRQDK

SEQ ID NO: 138688 - protein, 7 aa, synthetic construct
PQKDWKA

SEQ ID NO: 138689 - protein, 7 aa, synthetic construct
PQKFIKD

SEQ ID NO: 138690 - protein, 7 aa, synthetic construct
PQKGYIA

SEQ ID NO: 138691 - protein, 7 aa, synthetic construct
PQKHQPL

SEQ ID NO: 138692 - protein, 7 aa, synthetic construct
PQKLTAF

SEQ ID NO: 138693 - protein, 7 aa, synthetic construct
PQKMHNL

SEQ ID NO: 138694 - protein, 7 aa, synthetic construct
PQKPGPY

SEQ ID NO: 138695 - protein, 7 aa, synthetic construct
PQKPKGD

SEQ ID NO: 138696 - protein, 7 aa, synthetic construct
PQKPRQE

SEQ ID NO: 138697 - protein, 7 aa, synthetic construct
PQKRDHI

SEQ ID NO: 138698 - protein, 7 aa, synthetic construct
PQKRDIM

SEQ ID NO: 138699 - protein, 7 aa, synthetic construct
PQKRESV

SEQ ID NO: 138700 - protein, 7 aa, synthetic construct
PQKRIDG

SEQ ID NO: 138701 - protein, 7 aa, synthetic construct
PQKSAPY

SEQ ID NO: 138702 - protein, 7 aa, synthetic construct
PQKYSTT

SEQ ID NO: 138703 - protein, 7 aa, synthetic construct
PQLGVRT

SEQ ID NO: 138704 - protein, 7 aa, synthetic construct
PQLNAPR

SEQ ID NO: 138705 - protein, 7 aa, synthetic construct
PQMARMA

SEQ ID NO: 138706 - protein, 7 aa, synthetic construct
PQMNARA

SEQ ID NO: 138707 - protein, 7 aa, synthetic construct
PQMPHKL

SEQ ID NO: 138708 - protein, 7 aa, synthetic construct
PQMPYKA

SEQ ID NO: 138709 - protein, 7 aa, synthetic construct
PQMQQLR

SEQ ID NO: 138710 - protein, 7 aa, synthetic construct
PQMQRTM

SEQ ID NO: 138711 - protein, 7 aa, synthetic construct
PQMRGRD

SEQ ID NO: 138712 - protein, 7 aa, synthetic construct
PQMRQAY

SEQ ID NO: 138713 - protein, 7 aa, synthetic construct
PQMRTPN

SEQ ID NO: 138714 - protein, 7 aa, synthetic construct
PQMSSVR

SEQ ID NO: 138715 - protein, 7 aa, synthetic construct
PQNLRPN

SEQ ID NO: 138716 - protein, 7 aa, synthetic construct
PQNRITI

SEQ ID NO: 138717 - protein, 7 aa, synthetic construct
PQNRTKE

SEQ ID NO: 138718 - protein, 7 aa, synthetic construct
PQNSSRM

SEQ ID NO: 138719 - protein, 7 aa, synthetic construct
PQNTYKM

SEQ ID NO: 138720 - protein, 7 aa, synthetic construct
PQNYTLG

SEQ ID NO: 138721 - protein, 7 aa, synthetic construct
PQPHSGR

SEQ ID NO: 138722 - protein, 7 aa, synthetic construct
PQPKFPA

SEQ ID NO: 138723 - protein, 7 aa, synthetic construct
PQPKFPS

SEQ ID NO: 138724 - protein, 7 aa, synthetic construct
PQPKTMF

SEQ ID NO: 138725 - protein, 7 aa, synthetic construct
PQPMKYG

SEQ ID NO: 138726 - protein, 7 aa, synthetic construct
PQPRERI

SEQ ID NO: 138727 - protein, 7 aa, synthetic construct
PQPRHQG

SEQ ID NO: 138728 - protein, 7 aa, synthetic construct
PQPRNDK

SEQ ID NO: 138729 - protein, 7 aa, synthetic construct
PQPVRQL

SEQ ID NO: 138730 - protein, 7 aa, synthetic construct
PQQARQM

SEQ ID NO: 138731 - protein, 7 aa, synthetic construct
PQQDRQK

SEQ ID NO: 138732 - protein, 7 aa, synthetic construct
PQQHNVR

SEQ ID NO: 138733 - protein, 7 aa, synthetic construct
PQQHVYG

SEQ ID NO: 138734 - protein, 7 aa, synthetic construct
PQQIRLA

SEQ ID NO: 138735 - protein, 7 aa, synthetic construct
PQQLRHM

SEQ ID NO: 138736 - protein, 7 aa, synthetic construct
PQQMRPL

SEQ ID NO: 138737 - protein, 7 aa, synthetic construct
PQQNQVR

SEQ ID NO: 138738 - protein, 7 aa, synthetic construct
PQQRKEF

SEQ ID NO: 138739 - protein, 7 aa, synthetic construct
PQQRLRE

SEQ ID NO: 138740 - protein, 7 aa, synthetic construct
PQQRPAF

SEQ ID NO: 138741 - protein, 7 aa, synthetic construct
PQQTRLG

SEQ ID NO: 138742 - protein, 7 aa, synthetic construct
PQQTSRS

SEQ ID NO: 138743 - protein, 7 aa, synthetic construct
PQRATTF

SEQ ID NO: 138744 - protein, 7 aa, synthetic construct
PQRDINK

SEQ ID NO: 138745 - protein, 7 aa, synthetic construct
PQRDPGK

SEQ ID NO: 138746 - protein, 7 aa, synthetic construct
PQRDRNV

SEQ ID NO: 138747 - protein, 7 aa, synthetic construct
PQREPQR

SEQ ID NO: 138748 - protein, 7 aa, synthetic construct
PQRGVQH

SEQ ID NO: 138749 - protein, 7 aa, synthetic construct
PQRKETF

SEQ ID NO: 138750 - protein, 7 aa, synthetic construct
PQRKLEL

SEQ ID NO: 138751 - protein, 7 aa, synthetic construct
PQRLATM

SEQ ID NO: 138752 - protein, 7 aa, synthetic construct
PQRLKET

SEQ ID NO: 138753 - protein, 7 aa, synthetic construct
PQRMNNH

SEQ ID NO: 138754 - protein, 7 aa, synthetic construct
PQRNSGL

SEQ ID NO: 138755 - protein, 7 aa, synthetic construct
PQRNTFP

SEQ ID NO: 138756 - protein, 7 aa, synthetic construct
PQRPADR

SEQ ID NO: 138757 - protein, 7 aa, synthetic construct
PQRQFKE

SEQ ID NO: 138758 - protein, 7 aa, synthetic construct
PQRQHMT

SEQ ID NO: 138759 - protein, 7 aa, synthetic construct
PQRQIHT

SEQ ID NO: 138760 - protein, 7 aa, synthetic construct
PQRSIQM

SEQ ID NO: 138761 - protein, 7 aa, synthetic construct
PQRSKEY

SEQ ID NO: 138762 - protein, 7 aa, synthetic construct
PQRVGPL

SEQ ID NO: 138763 - protein, 7 aa, synthetic construct
PQRVVKE

SEQ ID NO: 138764 - protein, 7 aa, synthetic construct
PQSARSF

SEQ ID NO: 138765 - protein, 7 aa, synthetic construct
PQSAVHR

SEQ ID NO: 138766 - protein, 7 aa, synthetic construct
PQSHQNR

SEQ ID NO: 138767 - protein, 7 aa, synthetic construct
PQSMKYA

SEQ ID NO: 138768 - protein, 7 aa, synthetic construct
PQSRGYI

SEQ ID NO: 138769 - protein, 7 aa, synthetic construct
PQSRMMP

SEQ ID NO: 138770 - protein, 7 aa, synthetic construct
PQSTRPQ

SEQ ID NO: 138771 - protein, 7 aa, synthetic construct
PQTKDWK

SEQ ID NO: 138772 - protein, 7 aa, synthetic construct
PQTVRTL

SEQ ID NO: 138773 - protein, 7 aa, synthetic construct
PQVKNHA

SEQ ID NO: 138774 - protein, 7 aa, synthetic construct
PQVNAAR

SEQ ID NO: 138775 - protein, 7 aa, synthetic construct
PQVNRAS

SEQ ID NO: 138776 - protein, 7 aa, synthetic construct
PQVRPRE

SEQ ID NO: 138777 - protein, 7 aa, synthetic construct
PQYPKSG

SEQ ID NO: 138778 - protein, 7 aa, synthetic construct
PQYPNNR

SEQ ID NO: 138779 - protein, 7 aa, synthetic construct
PQYQGPK

SEQ ID NO: 138780 - protein, 7 aa, synthetic construct
PRAAIMA

SEQ ID NO: 138781 - protein, 7 aa, synthetic construct
PRADLSK

SEQ ID NO: 138782 - protein, 7 aa, synthetic construct
PRAKAAD

SEQ ID NO: 138783 - protein, 7 aa, synthetic construct
PRAKIQD

SEQ ID NO: 138784 - protein, 7 aa, synthetic construct
PRAKNDS

SEQ ID NO: 138785 - protein, 7 aa, synthetic construct
PRAMATH

SEQ ID NO: 138786 - protein, 7 aa, synthetic construct
PRAMDLR

SEQ ID NO: 138787 - protein, 7 aa, synthetic construct
PRAPPNH

SEQ ID NO: 138788 - protein, 7 aa, synthetic construct
PRAQENR

SEQ ID NO: 138789 - protein, 7 aa, synthetic construct
PRAQMNM

SEQ ID NO: 138790 - protein, 7 aa, synthetic construct
PRASALM

SEQ ID NO: 138791 - protein, 7 aa, synthetic construct
PRASQSH

SEQ ID NO: 138792 - protein, 7 aa, synthetic construct
PRAVRIE

SEQ ID NO: 138793 - protein, 7 aa, synthetic construct
PRDPSAR

SEQ ID NO: 138794 - protein, 7 aa, synthetic construct
PRDRDQK

SEQ ID NO: 138795 - protein, 7 aa, synthetic construct
PRDRGYG

SEQ ID NO: 138796 - protein, 7 aa, synthetic construct
PREGPRN

SEQ ID NO: 138797 - protein, 7 aa, synthetic construct
PREIRST

SEQ ID NO: 138798 - protein, 7 aa, synthetic construct
PREPSSR

SEQ ID NO: 138799 - protein, 7 aa, synthetic construct
PRETRQA

SEQ ID NO: 138800 - protein, 7 aa, synthetic construct
PREVSRS

SEQ ID NO: 138801 - protein, 7 aa, synthetic construct
PRFDNKA

SEQ ID NO: 138802 - protein, 7 aa, synthetic construct
PRFDQKA

SEQ ID NO: 138803 - protein, 7 aa, synthetic construct
PRFKDSG

SEQ ID NO: 138804 - protein, 7 aa, synthetic construct
PRFQAGA

SEQ ID NO: 138805 - protein, 7 aa, synthetic construct
PRGETKQ

SEQ ID NO: 138806 - protein, 7 aa, synthetic construct
PRGGHPL

SEQ ID NO: 138807 - protein, 7 aa, synthetic construct
PRGGPMQ

SEQ ID NO: 138808 - protein, 7 aa, synthetic construct
PRGKDPA

SEQ ID NO: 138809 - protein, 7 aa, synthetic construct
PRGLGGM

SEQ ID NO: 138810 - protein, 7 aa, synthetic construct
PRGNDKT

SEQ ID NO: 138811 - protein, 7 aa, synthetic construct
PRGNQFP

SEQ ID NO: 138812 - protein, 7 aa, synthetic construct
PRGPGTY

SEQ ID NO: 138813 - protein, 7 aa, synthetic construct
PRGPRVE

SEQ ID NO: 138814 - protein, 7 aa, synthetic construct
PRGPYNA

SEQ ID NO: 138815 - protein, 7 aa, synthetic construct
PRGQKDN

SEQ ID NO: 138816 - protein, 7 aa, synthetic construct
PRGSNPF

SEQ ID NO: 138817 - protein, 7 aa, synthetic construct
PRGYGTN

SEQ ID NO: 138818 - protein, 7 aa, synthetic construct
PRHAGVL

SEQ ID NO: 138819 - protein, 7 aa, synthetic construct
PRHAPTT

SEQ ID NO: 138820 - protein, 7 aa, synthetic construct
PRHDRQF

SEQ ID NO: 138821 - protein, 7 aa, synthetic construct
PRHMASP

SEQ ID NO: 138822 - protein, 7 aa, synthetic construct
PRHQALA

SEQ ID NO: 138823 - protein, 7 aa, synthetic construct
PRHQVLP

SEQ ID NO: 138824 - protein, 7 aa, synthetic construct
PRHSQLT

SEQ ID NO: 138825 - protein, 7 aa, synthetic construct
PRHTEKP

SEQ ID NO: 138826 - protein, 7 aa, synthetic construct
PRHTTAS

SEQ ID NO: 138827 - protein, 7 aa, synthetic construct
PRHTVMV

SEQ ID NO: 138828 - protein, 7 aa, synthetic construct
PRHVSSI

SEQ ID NO: 138829 - protein, 7 aa, synthetic construct
PRHVVQA

SEQ ID NO: 138830 - protein, 7 aa, synthetic construct
PRINQDK

SEQ ID NO: 138831 - protein, 7 aa, synthetic construct
PRIPQPG

SEQ ID NO: 138832 - protein, 7 aa, synthetic construct
PRIQSSI

SEQ ID NO: 138833 - protein, 7 aa, synthetic construct
PRITSIQ

SEQ ID NO: 138834 - protein, 7 aa, synthetic construct
PRKPITD

SEQ ID NO: 138835 - protein, 7 aa, synthetic construct
PRKVPDN

SEQ ID NO: 138836 - protein, 7 aa, synthetic construct
PRLDKER

SEQ ID NO: 138837 - protein, 7 aa, synthetic construct
PRLGPST

SEQ ID NO: 138838 - protein, 7 aa, synthetic construct
PRLIKSE

SEQ ID NO: 138839 - protein, 7 aa, synthetic construct
PRLKIGD

SEQ ID NO: 138840 - protein, 7 aa, synthetic construct
PRLKPVE

SEQ ID NO: 138841 - protein, 7 aa, synthetic construct
PRLPHGM

SEQ ID NO: 138842 - protein, 7 aa, synthetic construct
PRLQRPE

SEQ ID NO: 138843 - protein, 7 aa, synthetic construct
PRMAADR

SEQ ID NO: 138844 - protein, 7 aa, synthetic construct
PRMAPLS

SEQ ID NO: 138845 - protein, 7 aa, synthetic construct
PRMEPRP

SEQ ID NO: 138846 - protein, 7 aa, synthetic construct
PRMEVSK

SEQ ID NO: 138847 - protein, 7 aa, synthetic construct
PRMGAIP

SEQ ID NO: 138848 - protein, 7 aa, synthetic construct
PRMHNMA

SEQ ID NO: 138849 - protein, 7 aa, synthetic construct
PRMKVDS

SEQ ID NO: 138850 - protein, 7 aa, synthetic construct
PRMMNQV

SEQ ID NO: 138851 - protein, 7 aa, synthetic construct
PRMPKSE

SEQ ID NO: 138852 - protein, 7 aa, synthetic construct
PRMPPIA

SEQ ID NO: 138853 - protein, 7 aa, synthetic construct
PRMQHGL

SEQ ID NO: 138854 - protein, 7 aa, synthetic construct
PRMSQVV

SEQ ID NO: 138855 - protein, 7 aa, synthetic construct
PRMSVNN

SEQ ID NO: 138856 - protein, 7 aa, synthetic construct
PRMTQQH

SEQ ID NO: 138857 - protein, 7 aa, synthetic construct
PRNARDL

SEQ ID NO: 138858 - protein, 7 aa, synthetic construct
PRNDMVR

SEQ ID NO: 138859 - protein, 7 aa, synthetic construct
PRNEGKQ

SEQ ID NO: 138860 - protein, 7 aa, synthetic construct
PRNHAQV

SEQ ID NO: 138861 - protein, 7 aa, synthetic construct
PRNHSLA

SEQ ID NO: 138862 - protein, 7 aa, synthetic construct
PRNPQFP

SEQ ID NO: 138863 - protein, 7 aa, synthetic construct
PRNPTYG

SEQ ID NO: 138864 - protein, 7 aa, synthetic construct
PRNQDRT

SEQ ID NO: 138865 - protein, 7 aa, synthetic construct
PRNQGSH

SEQ ID NO: 138866 - protein, 7 aa, synthetic construct
PRNQSYV

SEQ ID NO: 138867 - protein, 7 aa, synthetic construct
PRNRTDP

SEQ ID NO: 138868 - protein, 7 aa, synthetic construct
PRNVSLH

SEQ ID NO: 138869 - protein, 7 aa, synthetic construct
PRNVVRD

SEQ ID NO: 138870 - protein, 7 aa, synthetic construct
PRPAMMN

SEQ ID NO: 138871 - protein, 7 aa, synthetic construct
PRPGGML

SEQ ID NO: 138872 - protein, 7 aa, synthetic construct
PRPHMNT

SEQ ID NO: 138873 - protein, 7 aa, synthetic construct
PRPMGNI

SEQ ID NO: 138874 - protein, 7 aa, synthetic construct
PRPMTGI

SEQ ID NO: 138875 - protein, 7 aa, synthetic construct
PRPQTGY

SEQ ID NO: 138876 - protein, 7 aa, synthetic construct
PRPSIRD

SEQ ID NO: 138877 - protein, 7 aa, synthetic construct
PRPTIPQ

SEQ ID NO: 138878 - protein, 7 aa, synthetic construct
PRPTPPQ

SEQ ID NO: 138879 - protein, 7 aa, synthetic construct
PRPVSMS

SEQ ID NO: 138880 - protein, 7 aa, synthetic construct
PRQAGFG

SEQ ID NO: 138881 - protein, 7 aa, synthetic construct
PRQASQF

SEQ ID NO: 138882 - protein, 7 aa, synthetic construct
PRQAVDK

SEQ ID NO: 138883 - protein, 7 aa, synthetic construct
PRQDVRS

SEQ ID NO: 138884 - protein, 7 aa, synthetic construct
PRQESKS

SEQ ID NO: 138885 - protein, 7 aa, synthetic construct
PRQIHGV

SEQ ID NO: 138886 - protein, 7 aa, synthetic construct
PRQIREG

SEQ ID NO: 138887 - protein, 7 aa, synthetic construct
PRQKDLL

SEQ ID NO: 138888 - protein, 7 aa, synthetic construct
PRQKQGD

SEQ ID NO: 138889 - protein, 7 aa, synthetic construct
PRQMSHV

SEQ ID NO: 138890 - protein, 7 aa, synthetic construct
PRQNDAR

SEQ ID NO: 138891 - protein, 7 aa, synthetic construct
PRQNIQQ

SEQ ID NO: 138892 - protein, 7 aa, synthetic construct
PRQNMAQ

SEQ ID NO: 138893 - protein, 7 aa, synthetic construct
PRQSMGM

SEQ ID NO: 138894 - protein, 7 aa, synthetic construct
PRQSVGA

SEQ ID NO: 138895 - protein, 7 aa, synthetic construct
PRQTKDT

SEQ ID NO: 138896 - protein, 7 aa, synthetic construct
PRQYQAT

SEQ ID NO: 138897 - protein, 7 aa, synthetic construct
PRSGPML

SEQ ID NO: 138898 - protein, 7 aa, synthetic construct
PRSHGQI

SEQ ID NO: 138899 - protein, 7 aa, synthetic construct
PRSHLSP

SEQ ID NO: 138900 - protein, 7 aa, synthetic construct
PRSIAGM

SEQ ID NO: 138901 - protein, 7 aa, synthetic construct
PRSNQTH

SEQ ID NO: 138902 - protein, 7 aa, synthetic construct
PRSPMMS

SEQ ID NO: 138903 - protein, 7 aa, synthetic construct
PRSQPDK

SEQ ID NO: 138904 - protein, 7 aa, synthetic construct
PRSQQVY

SEQ ID NO: 138905 - protein, 7 aa, synthetic construct
PRSTNSF

SEQ ID NO: 138906 - protein, 7 aa, synthetic construct
PRSTPVM

SEQ ID NO: 138907 - protein, 7 aa, synthetic construct
PRSVTDR

SEQ ID NO: 138908 - protein, 7 aa, synthetic construct
PRTAPHQ

SEQ ID NO: 138909 - protein, 7 aa, synthetic construct
PRTDMAK

SEQ ID NO: 138910 - protein, 7 aa, synthetic construct
PRTDMNR

SEQ ID NO: 138911 - protein, 7 aa, synthetic construct
PRTGIER

SEQ ID NO: 138912 - protein, 7 aa, synthetic construct
PRTGPFA

SEQ ID NO: 138913 - protein, 7 aa, synthetic construct
PRTHTAS

SEQ ID NO: 138914 - protein, 7 aa, synthetic construct
PRTKDAY

SEQ ID NO: 138915 - protein, 7 aa, synthetic construct
PRTKSEL

SEQ ID NO: 138916 - protein, 7 aa, synthetic construct
PRTPVDR

SEQ ID NO: 138917 - protein, 7 aa, synthetic construct
PRTSQHL

SEQ ID NO: 138918 - protein, 7 aa, synthetic construct
PRTTLNM

SEQ ID NO: 138919 - protein, 7 aa, synthetic construct
PRTTPNY

SEQ ID NO: 138920 - protein, 7 aa, synthetic construct
PRTTSQF

SEQ ID NO: 138921 - protein, 7 aa, synthetic construct
PRTVQWE

SEQ ID NO: 138922 - protein, 7 aa, synthetic construct
PRVHAMG

SEQ ID NO: 138923 - protein, 7 aa, synthetic construct
PRVHMNA

SEQ ID NO: 138924 - protein, 7 aa, synthetic construct
PRVHSGV

SEQ ID NO: 138925 - protein, 7 aa, synthetic construct
PRVNPIT

SEQ ID NO: 138926 - protein, 7 aa, synthetic construct
PRVPERN

SEQ ID NO: 138927 - protein, 7 aa, synthetic construct
PRVPMAV

SEQ ID NO: 138928 - protein, 7 aa, synthetic construct
PRVQALS

SEQ ID NO: 138929 - protein, 7 aa, synthetic construct
PRVQHLP

SEQ ID NO: 138930 - protein, 7 aa, synthetic construct
PRVRQEI

SEQ ID NO: 138931 - protein, 7 aa, synthetic construct
PRVSHSL

SEQ ID NO: 138932 - protein, 7 aa, synthetic construct
PRVSPAF

SEQ ID NO: 138933 - protein, 7 aa, synthetic construct
PRVVSRE

SEQ ID NO: 138934 - protein, 7 aa, synthetic construct
PRYGVDK

SEQ ID NO: 138935 - protein, 7 aa, synthetic construct
PRYQVNG

SEQ ID NO: 138936 - protein, 7 aa, synthetic construct
PSAARPL

SEQ ID NO: 138937 - protein, 7 aa, synthetic construct
PSAMATR

SEQ ID NO: 138938 - protein, 7 aa, synthetic construct
PSANNRY

SEQ ID NO: 138939 - protein, 7 aa, synthetic construct
PSDRPLR

SEQ ID NO: 138940 - protein, 7 aa, synthetic construct
PSEKRNM

SEQ ID NO: 138941 - protein, 7 aa, synthetic construct
PSERSLK

SEQ ID NO: 138942 - protein, 7 aa, synthetic construct
PSFKAHG

SEQ ID NO: 138943 - protein, 7 aa, synthetic construct
PSGQKYQ

SEQ ID NO: 138944 - protein, 7 aa, synthetic construct
PSGVHKI

SEQ ID NO: 138945 - protein, 7 aa, synthetic construct
PSGVPRP

SEQ ID NO: 138946 - protein, 7 aa, synthetic construct
PSHAQMR

SEQ ID NO: 138947 - protein, 7 aa, synthetic construct
PSHKAIL

SEQ ID NO: 138948 - protein, 7 aa, synthetic construct
PSHKPSI

SEQ ID NO: 138949 - protein, 7 aa, synthetic construct
PSHKTYI

SEQ ID NO: 138950 - protein, 7 aa, synthetic construct
PSHMKDK

SEQ ID NO: 138951 - protein, 7 aa, synthetic construct
PSHRTTG

SEQ ID NO: 138952 - protein, 7 aa, synthetic construct
PSIHSTR

SEQ ID NO: 138953 - protein, 7 aa, synthetic construct
PSKASNM

SEQ ID NO: 138954 - protein, 7 aa, synthetic construct
PSKFGPP

SEQ ID NO: 138955 - protein, 7 aa, synthetic construct
PSKHMSM

SEQ ID NO: 138956 - protein, 7 aa, synthetic construct
PSKHTTY

SEQ ID NO: 138957 - protein, 7 aa, synthetic construct
PSKKEFF

SEQ ID NO: 138958 - protein, 7 aa, synthetic construct
PSKMNAY

SEQ ID NO: 138959 - protein, 7 aa, synthetic construct
PSKNHYV

SEQ ID NO: 138960 - protein, 7 aa, synthetic construct
PSKPRDP

SEQ ID NO: 138961 - protein, 7 aa, synthetic construct
PSKPYRE

SEQ ID NO: 138962 - protein, 7 aa, synthetic construct
PSKQNFL

SEQ ID NO: 138963 - protein, 7 aa, synthetic construct
PSKREFL

SEQ ID NO: 138964 - protein, 7 aa, synthetic construct
PSKRSDV

SEQ ID NO: 138965 - protein, 7 aa, synthetic construct
PSKTYKD

SEQ ID NO: 138966 - protein, 7 aa, synthetic construct
PSLKRET

SEQ ID NO: 138967 - protein, 7 aa, synthetic construct
PSLNKYG

SEQ ID NO: 138968 - protein, 7 aa, synthetic construct
PSLSYKA

SEQ ID NO: 138969 - protein, 7 aa, synthetic construct
PSMDRVR

SEQ ID NO: 138970 - protein, 7 aa, synthetic construct
PSMGMRA

SEQ ID NO: 138971 - protein, 7 aa, synthetic construct
PSMHKTM

SEQ ID NO: 138972 - protein, 7 aa, synthetic construct
PSMKNVY

SEQ ID NO: 138973 - protein, 7 aa, synthetic construct
PSMNAVR

SEQ ID NO: 138974 - protein, 7 aa, synthetic construct
PSMQKYG

SEQ ID NO: 138975 - protein, 7 aa, synthetic construct
PSNMTRF

SEQ ID NO: 138976 - protein, 7 aa, synthetic construct
PSNYTKI

SEQ ID NO: 138977 - protein, 7 aa, synthetic construct
PSPARIS

SEQ ID NO: 138978 - protein, 7 aa, synthetic construct
PSPNHSR

SEQ ID NO: 138979 - protein, 7 aa, synthetic construct
PSQKYTS

SEQ ID NO: 138980 - protein, 7 aa, synthetic construct
PSQPKLP

SEQ ID NO: 138981 - protein, 7 aa, synthetic construct
PSQRPLV

SEQ ID NO: 138982 - protein, 7 aa, synthetic construct
PSQTKNW

SEQ ID NO: 138983 - protein, 7 aa, synthetic construct
PSQTRNM

SEQ ID NO: 138984 - protein, 7 aa, synthetic construct
PSQWPDK

SEQ ID NO: 138985 - protein, 7 aa, synthetic construct
PSRAPPN

SEQ ID NO: 138986 - protein, 7 aa, synthetic construct
PSRDASK

SEQ ID NO: 138987 - protein, 7 aa, synthetic construct
PSRETVR

SEQ ID NO: 138988 - protein, 7 aa, synthetic construct
PSRHPGL

SEQ ID NO: 138989 - protein, 7 aa, synthetic construct
PSRKDQT

SEQ ID NO: 138990 - protein, 7 aa, synthetic construct
PSRMEVE

SEQ ID NO: 138991 - protein, 7 aa, synthetic construct
PSRMHGP

SEQ ID NO: 138992 - protein, 7 aa, synthetic construct
PSRNAML

SEQ ID NO: 138993 - protein, 7 aa, synthetic construct
PSRNDKT

SEQ ID NO: 138994 - protein, 7 aa, synthetic construct
PSRPMPI

SEQ ID NO: 138995 - protein, 7 aa, synthetic construct
PSRQLVS

SEQ ID NO: 138996 - protein, 7 aa, synthetic construct
PSRSANL

SEQ ID NO: 138997 - protein, 7 aa, synthetic construct
PSRTEIR

SEQ ID NO: 138998 - protein, 7 aa, synthetic construct
PSRTVPH

SEQ ID NO: 138999 - protein, 7 aa, synthetic construct
PSSGRYP

SEQ ID NO: 139000 - protein, 7 aa, synthetic construct
PSSKGAF

SEQ ID NO: 139001 - protein, 7 aa, synthetic construct
PSSTKVW

SEQ ID NO: 139002 - protein, 7 aa, synthetic construct
PSSVKML

SEQ ID NO: 139003 - protein, 7 aa, synthetic construct
PSSVMKI

SEQ ID NO: 139004 - protein, 7 aa, synthetic construct
PSTAKRD

SEQ ID NO: 139005 - protein, 7 aa, synthetic construct
PSTHSGR

SEQ ID NO: 139006 - protein, 7 aa, synthetic construct
PSTIRGS

SEQ ID NO: 139007 - protein, 7 aa, synthetic construct
PSTKMGF

SEQ ID NO: 139008 - protein, 7 aa, synthetic construct
PSTRPFN

SEQ ID NO: 139009 - protein, 7 aa, synthetic construct
PSVKHNA

SEQ ID NO: 139010 - protein, 7 aa, synthetic construct
PSVKTHY

SEQ ID NO: 139011 - protein, 7 aa, synthetic construct
PSYHKVV

SEQ ID NO: 139012 - protein, 7 aa, synthetic construct
PSYKPDK

SEQ ID NO: 139013 - protein, 7 aa, synthetic construct
PSYKVGA

SEQ ID NO: 139014 - protein, 7 aa, synthetic construct
PSYNAKL

SEQ ID NO: 139015 - protein, 7 aa, synthetic construct
PTAARHS

SEQ ID NO: 139016 - protein, 7 aa, synthetic construct
PTADSRK

SEQ ID NO: 139017 - protein, 7 aa, synthetic construct
PTAGYQK

SEQ ID NO: 139018 - protein, 7 aa, synthetic construct
PTAHASR

SEQ ID NO: 139019 - protein, 7 aa, synthetic construct
PTAHRQM

SEQ ID NO: 139020 - protein, 7 aa, synthetic construct
PTAHTQR

SEQ ID NO: 139021 - protein, 7 aa, synthetic construct
PTAKYKD

SEQ ID NO: 139022 - protein, 7 aa, synthetic construct
PTANTHR

SEQ ID NO: 139023 - protein, 7 aa, synthetic construct
PTAYQNM

SEQ ID NO: 139024 - protein, 7 aa, synthetic construct
PTDRKLI

SEQ ID NO: 139025 - protein, 7 aa, synthetic construct
PTEKPKY

SEQ ID NO: 139026 - protein, 7 aa, synthetic construct
PTEKYRA

SEQ ID NO: 139027 - protein, 7 aa, synthetic construct
PTESKRM

SEQ ID NO: 139028 - protein, 7 aa, synthetic construct
PTFKERA

SEQ ID NO: 139029 - protein, 7 aa, synthetic construct
PTGGKYT

SEQ ID NO: 139030 - protein, 7 aa, synthetic construct
PTGKIPY

SEQ ID NO: 139031 - protein, 7 aa, synthetic construct
PTGLKPY

SEQ ID NO: 139032 - protein, 7 aa, synthetic construct
PTGMRKD

SEQ ID NO: 139033 - protein, 7 aa, synthetic construct
PTGPKLF

SEQ ID NO: 139034 - protein, 7 aa, synthetic construct
PTGQRHV

SEQ ID NO: 139035 - protein, 7 aa, synthetic construct
PTGRIKE

SEQ ID NO: 139036 - protein, 7 aa, synthetic construct
PTHKAQY

SEQ ID NO: 139037 - protein, 7 aa, synthetic construct
PTHKNYI

SEQ ID NO: 139038 - protein, 7 aa, synthetic construct
PTHKTAY

SEQ ID NO: 139039 - protein, 7 aa, synthetic construct
PTHQSVR

SEQ ID NO: 139040 - protein, 7 aa, synthetic construct
PTHRSTA

SEQ ID NO: 139041 - protein, 7 aa, synthetic construct
PTHSNYK

SEQ ID NO: 139042 - protein, 7 aa, synthetic construct
PTKAKDW

SEQ ID NO: 139043 - protein, 7 aa, synthetic construct
PTKMHGF

SEQ ID NO: 139044 - protein, 7 aa, synthetic construct
PTKMTTY

SEQ ID NO: 139045 - protein, 7 aa, synthetic construct
PTKPVNF

SEQ ID NO: 139046 - protein, 7 aa, synthetic construct
PTKQHQY

SEQ ID NO: 139047 - protein, 7 aa, synthetic construct
PTLRDYK

SEQ ID NO: 139048 - protein, 7 aa, synthetic construct
PTLRPVS

SEQ ID NO: 139049 - protein, 7 aa, synthetic construct
PTMKHVT

SEQ ID NO: 139050 - protein, 7 aa, synthetic construct
PTMKYQG

SEQ ID NO: 139051 - protein, 7 aa, synthetic construct
PTMRPVS

SEQ ID NO: 139052 - protein, 7 aa, synthetic construct
PTNKLYP

SEQ ID NO: 139053 - protein, 7 aa, synthetic construct
PTNMHKM

SEQ ID NO: 139054 - protein, 7 aa, synthetic construct
PTNNPRN

SEQ ID NO: 139055 - protein, 7 aa, synthetic construct
PTNYAKM

SEQ ID NO: 139056 - protein, 7 aa, synthetic construct
PTPKSLL

SEQ ID NO: 139057 - protein, 7 aa, synthetic construct
PTPRMQS

SEQ ID NO: 139058 - protein, 7 aa, synthetic construct
PTPRTHL

SEQ ID NO: 139059 - protein, 7 aa, synthetic construct
PTPVRHG

SEQ ID NO: 139060 - protein, 7 aa, synthetic construct
PTQGHAK

SEQ ID NO: 139061 - protein, 7 aa, synthetic construct
PTQNKQW

SEQ ID NO: 139062 - protein, 7 aa, synthetic construct
PTQRGIY

SEQ ID NO: 139063 - protein, 7 aa, synthetic construct
PTQRPFG

SEQ ID NO: 139064 - protein, 7 aa, synthetic construct
PTREQAR

SEQ ID NO: 139065 - protein, 7 aa, synthetic construct
PTRGLRD

SEQ ID NO: 139066 - protein, 7 aa, synthetic construct
PTRIRDG

SEQ ID NO: 139067 - protein, 7 aa, synthetic construct
PTRMQPP

SEQ ID NO: 139068 - protein, 7 aa, synthetic construct
PTRNPDK

SEQ ID NO: 139069 - protein, 7 aa, synthetic construct
PTRPHMS

SEQ ID NO: 139070 - protein, 7 aa, synthetic construct
PTRQADK

SEQ ID NO: 139071 - protein, 7 aa, synthetic construct
PTRSLRE

SEQ ID NO: 139072 - protein, 7 aa, synthetic construct
PTRTIDR

SEQ ID NO: 139073 - protein, 7 aa, synthetic construct
PTSKMQY

SEQ ID NO: 139074 - protein, 7 aa, synthetic construct
PTSKYSG

SEQ ID NO: 139075 - protein, 7 aa, synthetic construct
PTSYSKT

SEQ ID NO: 139076 - protein, 7 aa, synthetic construct
PTTARFP

SEQ ID NO: 139077 - protein, 7 aa, synthetic construct
PTTGKYN

SEQ ID NO: 139078 - protein, 7 aa, synthetic construct
PTTHSRG

SEQ ID NO: 139079 - protein, 7 aa, synthetic construct
PTTIRHP

SEQ ID NO: 139080 - protein, 7 aa, synthetic construct
PTTLRDR

SEQ ID NO: 139081 - protein, 7 aa, synthetic construct
PTTVDDR

SEQ ID NO: 139082 - protein, 7 aa, synthetic construct
PTTYKSN

SEQ ID NO: 139083 - protein, 7 aa, synthetic construct
PTVGRMM

SEQ ID NO: 139084 - protein, 7 aa, synthetic construct
PTVIRSG

SEQ ID NO: 139085 - protein, 7 aa, synthetic construct
PTVRNNM

SEQ ID NO: 139086 - protein, 7 aa, synthetic construct
PTYKKDE

SEQ ID NO: 139087 - protein, 7 aa, synthetic construct
PTYKPAM

SEQ ID NO: 139088 - protein, 7 aa, synthetic construct
PTYLKER

SEQ ID NO: 139089 - protein, 7 aa, synthetic construct
PTYSPPN

SEQ ID NO: 139090 - protein, 7 aa, synthetic construct
PVAARAM

SEQ ID NO: 139091 - protein, 7 aa, synthetic construct
PVAHNAR

SEQ ID NO: 139092 - protein, 7 aa, synthetic construct
PVAKAER

SEQ ID NO: 139093 - protein, 7 aa, synthetic construct
PVAKIAY

SEQ ID NO: 139094 - protein, 7 aa, synthetic construct
PVAKRLD

SEQ ID NO: 139095 - protein, 7 aa, synthetic construct
PVANRSF

SEQ ID NO: 139096 - protein, 7 aa, synthetic construct
PVARHIG

SEQ ID NO: 139097 - protein, 7 aa, synthetic construct
PVDARPK

SEQ ID NO: 139098 - protein, 7 aa, synthetic construct
PVDKHRF

SEQ ID NO: 139099 - protein, 7 aa, synthetic construct
PVDKRYV

SEQ ID NO: 139100 - protein, 7 aa, synthetic construct
PVDMRNK

SEQ ID NO: 139101 - protein, 7 aa, synthetic construct
PVDRAKA

SEQ ID NO: 139102 - protein, 7 aa, synthetic construct
PVEKPFR

SEQ ID NO: 139103 - protein, 7 aa, synthetic construct
PVERLKA

SEQ ID NO: 139104 - protein, 7 aa, synthetic construct
PVERRPV

SEQ ID NO: 139105 - protein, 7 aa, synthetic construct
PVGHAKM

SEQ ID NO: 139106 - protein, 7 aa, synthetic construct
PVGNFHK

SEQ ID NO: 139107 - protein, 7 aa, synthetic construct
PVGNRAH

SEQ ID NO: 139108 - protein, 7 aa, synthetic construct
PVGRDYK

SEQ ID NO: 139109 - protein, 7 aa, synthetic construct
PVGRYGS

SEQ ID NO: 139110 - protein, 7 aa, synthetic construct
PVHAKFP

SEQ ID NO: 139111 - protein, 7 aa, synthetic construct
PVHKVSM

SEQ ID NO: 139112 - protein, 7 aa, synthetic construct
PVHRPNI

SEQ ID NO: 139113 - protein, 7 aa, synthetic construct
PVHRPPA

SEQ ID NO: 139114 - protein, 7 aa, synthetic construct
PVHRTVT

SEQ ID NO: 139115 - protein, 7 aa, synthetic construct
PVHVKGV

SEQ ID NO: 139116 - protein, 7 aa, synthetic construct
PVIRSDR

SEQ ID NO: 139117 - protein, 7 aa, synthetic construct
PVKAGIF

SEQ ID NO: 139118 - protein, 7 aa, synthetic construct
PVKFQPA

SEQ ID NO: 139119 - protein, 7 aa, synthetic construct
PVKHHPA

SEQ ID NO: 139120 - protein, 7 aa, synthetic construct
PVKHPTN

SEQ ID NO: 139121 - protein, 7 aa, synthetic construct
PVKHSFG

SEQ ID NO: 139122 - protein, 7 aa, synthetic construct
PVKNYIG

SEQ ID NO: 139123 - protein, 7 aa, synthetic construct
PVKRDQY

SEQ ID NO: 139124 - protein, 7 aa, synthetic construct
PVKRDYA

SEQ ID NO: 139125 - protein, 7 aa, synthetic construct
PVKYERG

SEQ ID NO: 139126 - protein, 7 aa, synthetic construct
PVLRDNR

SEQ ID NO: 139127 - protein, 7 aa, synthetic construct
PVLRGQG

SEQ ID NO: 139128 - protein, 7 aa, synthetic construct
PVMGAKY

SEQ ID NO: 139129 - protein, 7 aa, synthetic construct
PVMHQQK

SEQ ID NO: 139130 - protein, 7 aa, synthetic construct
PVMNARA

SEQ ID NO: 139131 - protein, 7 aa, synthetic construct
PVMNREK

SEQ ID NO: 139132 - protein, 7 aa, synthetic construct
PVMRPGI

SEQ ID NO: 139133 - protein, 7 aa, synthetic construct
PVNMKHV

SEQ ID NO: 139134 - protein, 7 aa, synthetic construct
PVPHNRA

SEQ ID NO: 139135 - protein, 7 aa, synthetic construct
PVPHRAA

SEQ ID NO: 139136 - protein, 7 aa, synthetic construct
PVPHRQG

SEQ ID NO: 139137 - protein, 7 aa, synthetic construct
PVPKHYI

SEQ ID NO: 139138 - protein, 7 aa, synthetic construct
PVPKLPM

SEQ ID NO: 139139 - protein, 7 aa, synthetic construct
PVPKMHI

SEQ ID NO: 139140 - protein, 7 aa, synthetic construct
PVPKQDR

SEQ ID NO: 139141 - protein, 7 aa, synthetic construct
PVPRAHG

SEQ ID NO: 139142 - protein, 7 aa, synthetic construct
PVPRAMN

SEQ ID NO: 139143 - protein, 7 aa, synthetic construct
PVPRIGH

SEQ ID NO: 139144 - protein, 7 aa, synthetic construct
PVPRMHG

SEQ ID NO: 139145 - protein, 7 aa, synthetic construct
PVPRQPM

SEQ ID NO: 139146 - protein, 7 aa, synthetic construct
PVPSMRA

SEQ ID NO: 139147 - protein, 7 aa, synthetic construct
PVPSPRG

SEQ ID NO: 139148 - protein, 7 aa, synthetic construct
PVQSPRS

SEQ ID NO: 139149 - protein, 7 aa, synthetic construct
PVQYGPA

SEQ ID NO: 139150 - protein, 7 aa, synthetic construct
PVRAPMG

SEQ ID NO: 139151 - protein, 7 aa, synthetic construct
PVRDHKM

SEQ ID NO: 139152 - protein, 7 aa, synthetic construct
PVRETPR

SEQ ID NO: 139153 - protein, 7 aa, synthetic construct
PVRHIAA

SEQ ID NO: 139154 - protein, 7 aa, synthetic construct
PVRHPPQ

SEQ ID NO: 139155 - protein, 7 aa, synthetic construct
PVRHSPA

SEQ ID NO: 139156 - protein, 7 aa, synthetic construct
PVRKDYV

SEQ ID NO: 139157 - protein, 7 aa, synthetic construct
PVRKIDG

SEQ ID NO: 139158 - protein, 7 aa, synthetic construct
PVRLKGD

SEQ ID NO: 139159 - protein, 7 aa, synthetic construct
PVRMAKD

SEQ ID NO: 139160 - protein, 7 aa, synthetic construct
PVRNPHV

SEQ ID NO: 139161 - protein, 7 aa, synthetic construct
PVRNQNN

SEQ ID NO: 139162 - protein, 7 aa, synthetic construct
PVRPLSN

SEQ ID NO: 139163 - protein, 7 aa, synthetic construct
PVRQIER

SEQ ID NO: 139164 - protein, 7 aa, synthetic construct
PVRTPLN

SEQ ID NO: 139165 - protein, 7 aa, synthetic construct
PVRVASH

SEQ ID NO: 139166 - protein, 7 aa, synthetic construct
PVSKAPY

SEQ ID NO: 139167 - protein, 7 aa, synthetic construct
PVSKTIY

SEQ ID NO: 139168 - protein, 7 aa, synthetic construct
PVSKYPA

SEQ ID NO: 139169 - protein, 7 aa, synthetic construct
PVSQKRD

SEQ ID NO: 139170 - protein, 7 aa, synthetic construct
PVSRPAY

SEQ ID NO: 139171 - protein, 7 aa, synthetic construct
PVSRPNI

SEQ ID NO: 139172 - protein, 7 aa, synthetic construct
PVSSRAL

SEQ ID NO: 139173 - protein, 7 aa, synthetic construct
PVTAPRS

SEQ ID NO: 139174 - protein, 7 aa, synthetic construct
PVTGRDR

SEQ ID NO: 139175 - protein, 7 aa, synthetic construct
PVTHNRA

SEQ ID NO: 139176 - protein, 7 aa, synthetic construct
PVTHRSA

SEQ ID NO: 139177 - protein, 7 aa, synthetic construct
PVTHVKY

SEQ ID NO: 139178 - protein, 7 aa, synthetic construct
PVTRANG

SEQ ID NO: 139179 - protein, 7 aa, synthetic construct
PVTRPNF

SEQ ID NO: 139180 - protein, 7 aa, synthetic construct
PVVFREE

SEQ ID NO: 139181 - protein, 7 aa, synthetic construct
PVVPRQG

SEQ ID NO: 139182 - protein, 7 aa, synthetic construct
PVVRAAG

SEQ ID NO: 139183 - protein, 7 aa, synthetic construct
PVVREKY

SEQ ID NO: 139184 - protein, 7 aa, synthetic construct
PVVRNAH

SEQ ID NO: 139185 - protein, 7 aa, synthetic construct
PVVRPNV

SEQ ID NO: 139186 - protein, 7 aa, synthetic construct
PVYNSKL

SEQ ID NO: 139187 - protein, 7 aa, synthetic construct
PVYPSKA

SEQ ID NO: 139188 - protein, 7 aa, synthetic construct
PWGGPVG

SEQ ID NO: 139189 - protein, 7 aa, synthetic construct
PWKAVPA

SEQ ID NO: 139190 - protein, 7 aa, synthetic construct
PWKDKQM

SEQ ID NO: 139191 - protein, 7 aa, synthetic construct
PWKDQKN

SEQ ID NO: 139192 - protein, 7 aa, synthetic construct
PWKESRN

SEQ ID NO: 139193 - protein, 7 aa, synthetic construct
PWKNIMA

SEQ ID NO: 139194 - protein, 7 aa, synthetic construct
PWKSQPN

SEQ ID NO: 139195 - protein, 7 aa, synthetic construct
PWKTPAT

SEQ ID NO: 139196 - protein, 7 aa, synthetic construct
PWNKEKF

SEQ ID NO: 139197 - protein, 7 aa, synthetic construct
PWQNKNL

SEQ ID NO: 139198 - protein, 7 aa, synthetic construct
PWRNDKP

SEQ ID NO: 139199 - protein, 7 aa, synthetic construct
PYAKGHS

SEQ ID NO: 139200 - protein, 7 aa, synthetic construct
PYAKSQH

SEQ ID NO: 139201 - protein, 7 aa, synthetic construct
PYANSKG

SEQ ID NO: 139202 - protein, 7 aa, synthetic construct
PYAQSLK

SEQ ID NO: 139203 - protein, 7 aa, synthetic construct
PYASAGK

SEQ ID NO: 139204 - protein, 7 aa, synthetic construct
PYASQKN

SEQ ID NO: 139205 - protein, 7 aa, synthetic construct
PYDKNVR

SEQ ID NO: 139206 - protein, 7 aa, synthetic construct
PYGAPQK

SEQ ID NO: 139207 - protein, 7 aa, synthetic construct
PYGGNKI

SEQ ID NO: 139208 - protein, 7 aa, synthetic construct
PYGKPVT

SEQ ID NO: 139209 - protein, 7 aa, synthetic construct
PYGNGNK

SEQ ID NO: 139210 - protein, 7 aa, synthetic construct
PYGNIKA

SEQ ID NO: 139211 - protein, 7 aa, synthetic construct
PYGNNLK

SEQ ID NO: 139212 - protein, 7 aa, synthetic construct
PYHAGKQ

SEQ ID NO: 139213 - protein, 7 aa, synthetic construct
PYHQKPA

SEQ ID NO: 139214 - protein, 7 aa, synthetic construct
PYHQQKM

SEQ ID NO: 139215 - protein, 7 aa, synthetic construct
PYHSQKV

SEQ ID NO: 139216 - protein, 7 aa, synthetic construct
PYKAINQ

SEQ ID NO: 139217 - protein, 7 aa, synthetic construct
PYKAMVN

SEQ ID NO: 139218 - protein, 7 aa, synthetic construct
PYKATHP

SEQ ID NO: 139219 - protein, 7 aa, synthetic construct
PYKDTSR

SEQ ID NO: 139220 - protein, 7 aa, synthetic construct
PYKETMR

SEQ ID NO: 139221 - protein, 7 aa, synthetic construct
PYKEYTK

SEQ ID NO: 139222 - protein, 7 aa, synthetic construct
PYKGPVQ

SEQ ID NO: 139223 - protein, 7 aa, synthetic construct
PYKHAAA

SEQ ID NO: 139224 - protein, 7 aa, synthetic construct
PYKINER

SEQ ID NO: 139225 - protein, 7 aa, synthetic construct
PYKKTEG

SEQ ID NO: 139226 - protein, 7 aa, synthetic construct
PYKMHGN

SEQ ID NO: 139227 - protein, 7 aa, synthetic construct
PYKMINA

SEQ ID NO: 139228 - protein, 7 aa, synthetic construct
PYKNSSL

SEQ ID NO: 139229 - protein, 7 aa, synthetic construct
PYKPAER

SEQ ID NO: 139230 - protein, 7 aa, synthetic construct
PYKPLRE

SEQ ID NO: 139231 - protein, 7 aa, synthetic construct
PYKPVPV

SEQ ID NO: 139232 - protein, 7 aa, synthetic construct
PYKQHLA

SEQ ID NO: 139233 - protein, 7 aa, synthetic construct
PYLNNKA

SEQ ID NO: 139234 - protein, 7 aa, synthetic construct
PYLRDKI

SEQ ID NO: 139235 - protein, 7 aa, synthetic construct
PYMKAMA

SEQ ID NO: 139236 - protein, 7 aa, synthetic construct
PYMNKHG

SEQ ID NO: 139237 - protein, 7 aa, synthetic construct
PYNAHKA

SEQ ID NO: 139238 - protein, 7 aa, synthetic construct
PYNAHKT

SEQ ID NO: 139239 - protein, 7 aa, synthetic construct
PYNAPRV

SEQ ID NO: 139240 - protein, 7 aa, synthetic construct
PYNDKAK

SEQ ID NO: 139241 - protein, 7 aa, synthetic construct
PYNKLDK

SEQ ID NO: 139242 - protein, 7 aa, synthetic construct
PYNKSER

SEQ ID NO: 139243 - protein, 7 aa, synthetic construct
PYNRQVG

SEQ ID NO: 139244 - protein, 7 aa, synthetic construct
PYNTAKQ

SEQ ID NO: 139245 - protein, 7 aa, synthetic construct
PYPKANQ

SEQ ID NO: 139246 - protein, 7 aa, synthetic construct
PYPKETK

SEQ ID NO: 139247 - protein, 7 aa, synthetic construct
PYPKHAT

SEQ ID NO: 139248 - protein, 7 aa, synthetic construct
PYPKHGG

SEQ ID NO: 139249 - protein, 7 aa, synthetic construct
PYQGPKQ

SEQ ID NO: 139250 - protein, 7 aa, synthetic construct
PYQGSKN

SEQ ID NO: 139251 - protein, 7 aa, synthetic construct
PYQKDTK

SEQ ID NO: 139252 - protein, 7 aa, synthetic construct
PYQKPHV

SEQ ID NO: 139253 - protein, 7 aa, synthetic construct
PYQKSSL

SEQ ID NO: 139254 - protein, 7 aa, synthetic construct
PYQTAGR

SEQ ID NO: 139255 - protein, 7 aa, synthetic construct
PYRQSAG

SEQ ID NO: 139256 - protein, 7 aa, synthetic construct
PYRREYD

SEQ ID NO: 139257 - protein, 7 aa, synthetic construct
PYRSSDK

SEQ ID NO: 139258 - protein, 7 aa, synthetic construct
PYSAGSR

SEQ ID NO: 139259 - protein, 7 aa, synthetic construct
PYSKAHA

SEQ ID NO: 139260 - protein, 7 aa, synthetic construct
PYSVTKG

SEQ ID NO: 139261 - protein, 7 aa, synthetic construct
PYTKDLR

SEQ ID NO: 139262 - protein, 7 aa, synthetic construct
PYTKEKP

SEQ ID NO: 139263 - protein, 7 aa, synthetic construct
PYVGTKQ

SEQ ID NO: 139264 - protein, 7 aa, synthetic construct
PYVPQKP

SEQ ID NO: 139265 - protein, 7 aa, synthetic construct
QAAGRVH

SEQ ID NO: 139266 - protein, 7 aa, synthetic construct
QAAHRQI

SEQ ID NO: 139267 - protein, 7 aa, synthetic construct
QAAKEFR

SEQ ID NO: 139268 - protein, 7 aa, synthetic construct
QAARMPI

SEQ ID NO: 139269 - protein, 7 aa, synthetic construct
QAASKNW

SEQ ID NO: 139270 - protein, 7 aa, synthetic construct
QAAYGKG

SEQ ID NO: 139271 - protein, 7 aa, synthetic construct
QADIRRV

SEQ ID NO: 139272 - protein, 7 aa, synthetic construct
QADPRRQ

SEQ ID NO: 139273 - protein, 7 aa, synthetic construct
QADQRRQ

SEQ ID NO: 139274 - protein, 7 aa, synthetic construct
QADRPKY

SEQ ID NO: 139275 - protein, 7 aa, synthetic construct
QADRVKM

SEQ ID NO: 139276 - protein, 7 aa, synthetic construct
QAEKMYK

SEQ ID NO: 139277 - protein, 7 aa, synthetic construct
QAEMQRK

SEQ ID NO: 139278 - protein, 7 aa, synthetic construct
QAENRKL

SEQ ID NO: 139279 - protein, 7 aa, synthetic construct
QAFHKNA

SEQ ID NO: 139280 - protein, 7 aa, synthetic construct
QAFNHKA

SEQ ID NO: 139281 - protein, 7 aa, synthetic construct
QAGAYKN

SEQ ID NO: 139282 - protein, 7 aa, synthetic construct
QAGDRRV

SEQ ID NO: 139283 - protein, 7 aa, synthetic construct
QAGEKRG

SEQ ID NO: 139284 - protein, 7 aa, synthetic construct
QAGGTYR

SEQ ID NO: 139285 - protein, 7 aa, synthetic construct
QAGHLRQ

SEQ ID NO: 139286 - protein, 7 aa, synthetic construct
QAGHRLV

SEQ ID NO: 139287 - protein, 7 aa, synthetic construct
QAGHYKG

SEQ ID NO: 139288 - protein, 7 aa, synthetic construct
QAGIIRA

SEQ ID NO: 139289 - protein, 7 aa, synthetic construct
QAGKFQN

SEQ ID NO: 139290 - protein, 7 aa, synthetic construct
QAGLKYT

SEQ ID NO: 139291 - protein, 7 aa, synthetic construct
QAGLPRT

SEQ ID NO: 139292 - protein, 7 aa, synthetic construct
QAGLRRE

SEQ ID NO: 139293 - protein, 7 aa, synthetic construct
QAGLVRG

SEQ ID NO: 139294 - protein, 7 aa, synthetic construct
QAGMKFQ

SEQ ID NO: 139295 - protein, 7 aa, synthetic construct
QAGMNHK

SEQ ID NO: 139296 - protein, 7 aa, synthetic construct
QAGMSVR

SEQ ID NO: 139297 - protein, 7 aa, synthetic construct
QAGQRRE

SEQ ID NO: 139298 - protein, 7 aa, synthetic construct
QAGQVRG

SEQ ID NO: 139299 - protein, 7 aa, synthetic construct
QAGSRHI

SEQ ID NO: 139300 - protein, 7 aa, synthetic construct
QAGSSRQ

SEQ ID NO: 139301 - protein, 7 aa, synthetic construct
QAGTVRG

SEQ ID NO: 139302 - protein, 7 aa, synthetic construct
QAGYMAM

SEQ ID NO: 139303 - protein, 7 aa, synthetic construct
QAHAQMK

SEQ ID NO: 139304 - protein, 7 aa, synthetic construct
QAHARSA

SEQ ID NO: 139305 - protein, 7 aa, synthetic construct
QAHGAKQ

SEQ ID NO: 139306 - protein, 7 aa, synthetic construct
QAHGIQK

SEQ ID NO: 139307 - protein, 7 aa, synthetic construct
QAHGPAR

SEQ ID NO: 139308 - protein, 7 aa, synthetic construct
QAHHFPS

SEQ ID NO: 139309 - protein, 7 aa, synthetic construct
QAHHKTA

SEQ ID NO: 139310 - protein, 7 aa, synthetic construct
QAHHKYS

SEQ ID NO: 139311 - protein, 7 aa, synthetic construct
QAHITRM

SEQ ID NO: 139312 - protein, 7 aa, synthetic construct
QAHKDRG

SEQ ID NO: 139313 - protein, 7 aa, synthetic construct
QAHKIYP

SEQ ID NO: 139314 - protein, 7 aa, synthetic construct
QAHKPMQ

SEQ ID NO: 139315 - protein, 7 aa, synthetic construct
QAHKPTY

SEQ ID NO: 139316 - protein, 7 aa, synthetic construct
QAHMTSR

SEQ ID NO: 139317 - protein, 7 aa, synthetic construct
QAHPQIR

SEQ ID NO: 139318 - protein, 7 aa, synthetic construct
QAHRPPV

SEQ ID NO: 139319 - protein, 7 aa, synthetic construct
QAHRSGL

SEQ ID NO: 139320 - protein, 7 aa, synthetic construct
QAHSAKM

SEQ ID NO: 139321 - protein, 7 aa, synthetic construct
QAHTPTR

SEQ ID NO: 139322 - protein, 7 aa, synthetic construct
QAHVIKH

SEQ ID NO: 139323 - protein, 7 aa, synthetic construct
QAHYMEK

SEQ ID NO: 139324 - protein, 7 aa, synthetic construct
QAIHSSK

SEQ ID NO: 139325 - protein, 7 aa, synthetic construct
QAIKRID

SEQ ID NO: 139326 - protein, 7 aa, synthetic construct
QAIPKHA

SEQ ID NO: 139327 - protein, 7 aa, synthetic construct
QAIRGQF

SEQ ID NO: 139328 - protein, 7 aa, synthetic construct
QAIRNSM

SEQ ID NO: 139329 - protein, 7 aa, synthetic construct
QAIRPVA

SEQ ID NO: 139330 - protein, 7 aa, synthetic construct
QAISARN

SEQ ID NO: 139331 - protein, 7 aa, synthetic construct
QAISSAR

SEQ ID NO: 139332 - protein, 7 aa, synthetic construct
QAKDVQR

SEQ ID NO: 139333 - protein, 7 aa, synthetic construct
QAKESAR

SEQ ID NO: 139334 - protein, 7 aa, synthetic construct
QAKEVTR

SEQ ID NO: 139335 - protein, 7 aa, synthetic construct
QAKGPDR

SEQ ID NO: 139336 - protein, 7 aa, synthetic construct
QAKGPGW

SEQ ID NO: 139337 - protein, 7 aa, synthetic construct
QAKGYRE

SEQ ID NO: 139338 - protein, 7 aa, synthetic construct
QAKHDVS

SEQ ID NO: 139339 - protein, 7 aa, synthetic construct
QAKHPSQ

SEQ ID NO: 139340 - protein, 7 aa, synthetic construct
QAKKYES

SEQ ID NO: 139341 - protein, 7 aa, synthetic construct
QAKNIYL

SEQ ID NO: 139342 - protein, 7 aa, synthetic construct
QAKPFPT

SEQ ID NO: 139343 - protein, 7 aa, synthetic construct
QAKPHIY

SEQ ID NO: 139344 - protein, 7 aa, synthetic construct
QAKPLTF

SEQ ID NO: 139345 - protein, 7 aa, synthetic construct
QAKQGGW

SEQ ID NO: 139346 - protein, 7 aa, synthetic construct
QAKREIN

SEQ ID NO: 139347 - protein, 7 aa, synthetic construct
QAKRETI

SEQ ID NO: 139348 - protein, 7 aa, synthetic construct
QAKREVN

SEQ ID NO: 139349 - protein, 7 aa, synthetic construct
QAKRFGE

SEQ ID NO: 139350 - protein, 7 aa, synthetic construct
QAKRMID

SEQ ID NO: 139351 - protein, 7 aa, synthetic construct
QAKRQEM

SEQ ID NO: 139352 - protein, 7 aa, synthetic construct
QAKRVEL

SEQ ID NO: 139353 - protein, 7 aa, synthetic construct
QAKSHYI

SEQ ID NO: 139354 - protein, 7 aa, synthetic construct
QAKSPDR

SEQ ID NO: 139355 - protein, 7 aa, synthetic construct
QAKTEVR

SEQ ID NO: 139356 - protein, 7 aa, synthetic construct
QAKTQQW

SEQ ID NO: 139357 - protein, 7 aa, synthetic construct
QAKVEPR

SEQ ID NO: 139358 - protein, 7 aa, synthetic construct
QAKYIKE

SEQ ID NO: 139359 - protein, 7 aa, synthetic construct
QAKYKTD

SEQ ID NO: 139360 - protein, 7 aa, synthetic construct
QAKYMSN

SEQ ID NO: 139361 - protein, 7 aa, synthetic construct
QAKYQVT

SEQ ID NO: 139362 - protein, 7 aa, synthetic construct
QALHKST

SEQ ID NO: 139363 - protein, 7 aa, synthetic construct
QALNAGR

SEQ ID NO: 139364 - protein, 7 aa, synthetic construct
QALNHSK

SEQ ID NO: 139365 - protein, 7 aa, synthetic construct
QAMAART

SEQ ID NO: 139366 - protein, 7 aa, synthetic construct
QAMARQT

SEQ ID NO: 139367 - protein, 7 aa, synthetic construct
QAMDRGK

SEQ ID NO: 139368 - protein, 7 aa, synthetic construct
QAMGTSR

SEQ ID NO: 139369 - protein, 7 aa, synthetic construct
QAMHGVR

SEQ ID NO: 139370 - protein, 7 aa, synthetic construct
QAMHNLK

SEQ ID NO: 139371 - protein, 7 aa, synthetic construct
QAMHQNR

SEQ ID NO: 139372 - protein, 7 aa, synthetic construct
QAMHRDK

SEQ ID NO: 139373 - protein, 7 aa, synthetic construct
QAMKHPF

SEQ ID NO: 139374 - protein, 7 aa, synthetic construct
QAMNSFK

SEQ ID NO: 139375 - protein, 7 aa, synthetic construct
QAMQNLR

SEQ ID NO: 139376 - protein, 7 aa, synthetic construct
QAMRDKA

SEQ ID NO: 139377 - protein, 7 aa, synthetic construct
QAMSQLR

SEQ ID NO: 139378 - protein, 7 aa, synthetic construct
QAMSSRT

SEQ ID NO: 139379 - protein, 7 aa, synthetic construct
QANGHRV

SEQ ID NO: 139380 - protein, 7 aa, synthetic construct
QANHKIV

SEQ ID NO: 139381 - protein, 7 aa, synthetic construct
QANHKQF

SEQ ID NO: 139382 - protein, 7 aa, synthetic construct
QANKPNN

SEQ ID NO: 139383 - protein, 7 aa, synthetic construct
QANKTAW

SEQ ID NO: 139384 - protein, 7 aa, synthetic construct
QANNQLR

SEQ ID NO: 139385 - protein, 7 aa, synthetic construct
QANPMPR

SEQ ID NO: 139386 - protein, 7 aa, synthetic construct
QANRSEK

SEQ ID NO: 139387 - protein, 7 aa, synthetic construct
QANSLHR

SEQ ID NO: 139388 - protein, 7 aa, synthetic construct
QANTARQ

SEQ ID NO: 139389 - protein, 7 aa, synthetic construct
QANTHGR

SEQ ID NO: 139390 - protein, 7 aa, synthetic construct
QANTMKW

SEQ ID NO: 139391 - protein, 7 aa, synthetic construct
QANTNYR

SEQ ID NO: 139392 - protein, 7 aa, synthetic construct
QANVHYK

SEQ ID NO: 139393 - protein, 7 aa, synthetic construct
QANVYGK

SEQ ID NO: 139394 - protein, 7 aa, synthetic construct
QAPAVSR

SEQ ID NO: 139395 - protein, 7 aa, synthetic construct
QAPGYAK

SEQ ID NO: 139396 - protein, 7 aa, synthetic construct
QAPKSPF

SEQ ID NO: 139397 - protein, 7 aa, synthetic construct
QAPNLLR

SEQ ID NO: 139398 - protein, 7 aa, synthetic construct
QAPRISH

SEQ ID NO: 139399 - protein, 7 aa, synthetic construct
QAPRVHI

SEQ ID NO: 139400 - protein, 7 aa, synthetic construct
QAPSYRG

SEQ ID NO: 139401 - protein, 7 aa, synthetic construct
QAPTVAR

SEQ ID NO: 139402 - protein, 7 aa, synthetic construct
QAQFKNI

SEQ ID NO: 139403 - protein, 7 aa, synthetic construct
QAQGHVK

SEQ ID NO: 139404 - protein, 7 aa, synthetic construct
QAQGMGR

SEQ ID NO: 139405 - protein, 7 aa, synthetic construct
QAQHKPI

SEQ ID NO: 139406 - protein, 7 aa, synthetic construct
QAQHKVM

SEQ ID NO: 139407 - protein, 7 aa, synthetic construct
QAQHQGR

SEQ ID NO: 139408 - protein, 7 aa, synthetic construct
QAQKIYP

SEQ ID NO: 139409 - protein, 7 aa, synthetic construct
QAQKSAW

SEQ ID NO: 139410 - protein, 7 aa, synthetic construct
QAQLRIT

SEQ ID NO: 139411 - protein, 7 aa, synthetic construct
QAQMMNR

SEQ ID NO: 139412 - protein, 7 aa, synthetic construct
QAQNRQI

SEQ ID NO: 139413 - protein, 7 aa, synthetic construct
QAQNRVL

SEQ ID NO: 139414 - protein, 7 aa, synthetic construct
QAQNVKY

SEQ ID NO: 139415 - protein, 7 aa, synthetic construct
QAQPRNS

SEQ ID NO: 139416 - protein, 7 aa, synthetic construct
QAQPRTM

SEQ ID NO: 139417 - protein, 7 aa, synthetic construct
QAQQKQW

SEQ ID NO: 139418 - protein, 7 aa, synthetic construct
QAQQVKW

SEQ ID NO: 139419 - protein, 7 aa, synthetic construct
QAQRANI

SEQ ID NO: 139420 - protein, 7 aa, synthetic construct
QAQRKDL

SEQ ID NO: 139421 - protein, 7 aa, synthetic construct
QAQRPQV

SEQ ID NO: 139422 - protein, 7 aa, synthetic construct
QAQRWSD

SEQ ID NO: 139423 - protein, 7 aa, synthetic construct
QAQSIRS

SEQ ID NO: 139424 - protein, 7 aa, synthetic construct
QAQTAYK

SEQ ID NO: 139425 - protein, 7 aa, synthetic construct
QAQTWPQ

SEQ ID NO: 139426 - protein, 7 aa, synthetic construct
QAQYIVH

SEQ ID NO: 139427 - protein, 7 aa, synthetic construct
QARDQLR

SEQ ID NO: 139428 - protein, 7 aa, synthetic construct
QAREAGK

SEQ ID NO: 139429 - protein, 7 aa, synthetic construct
QAREIMK

SEQ ID NO: 139430 - protein, 7 aa, synthetic construct
QARENRI

SEQ ID NO: 139431 - protein, 7 aa, synthetic construct
QARGFGA

SEQ ID NO: 139432 - protein, 7 aa, synthetic construct
QARGGYM

SEQ ID NO: 139433 - protein, 7 aa, synthetic construct
QARGHPP

SEQ ID NO: 139434 - protein, 7 aa, synthetic construct
QARHISA

SEQ ID NO: 139435 - protein, 7 aa, synthetic construct
QARHQSG

SEQ ID NO: 139436 - protein, 7 aa, synthetic construct
QARIHDK

SEQ ID NO: 139437 - protein, 7 aa, synthetic construct
QARIKDF

SEQ ID NO: 139438 - protein, 7 aa, synthetic construct
QARIRDV

SEQ ID NO: 139439 - protein, 7 aa, synthetic construct
QARKEDK

SEQ ID NO: 139440 - protein, 7 aa, synthetic construct
QARLESR

SEQ ID NO: 139441 - protein, 7 aa, synthetic construct
QARLKEI

SEQ ID NO: 139442 - protein, 7 aa, synthetic construct
QARNHGI

SEQ ID NO: 139443 - protein, 7 aa, synthetic construct
QARNNPN

SEQ ID NO: 139444 - protein, 7 aa, synthetic construct
QARPAMM

SEQ ID NO: 139445 - protein, 7 aa, synthetic construct
QARPTPS

SEQ ID NO: 139446 - protein, 7 aa, synthetic construct
QARPVHN

SEQ ID NO: 139447 - protein, 7 aa, synthetic construct
QARPVRD

SEQ ID NO: 139448 - protein, 7 aa, synthetic construct
QARSDKV

SEQ ID NO: 139449 - protein, 7 aa, synthetic construct
QARTETR

SEQ ID NO: 139450 - protein, 7 aa, synthetic construct
QARTISH

SEQ ID NO: 139451 - protein, 7 aa, synthetic construct
QARTTGY

SEQ ID NO: 139452 - protein, 7 aa, synthetic construct
QARVEAR

SEQ ID NO: 139453 - protein, 7 aa, synthetic construct
QARVEQR

SEQ ID NO: 139454 - protein, 7 aa, synthetic construct
QARVILS

SEQ ID NO: 139455 - protein, 7 aa, synthetic construct
QARVNQQ

SEQ ID NO: 139456 - protein, 7 aa, synthetic construct
QARVPDK

SEQ ID NO: 139457 - protein, 7 aa, synthetic construct
QASGHKQ

SEQ ID NO: 139458 - protein, 7 aa, synthetic construct
QASHPKN

SEQ ID NO: 139459 - protein, 7 aa, synthetic construct
QASHYGK

SEQ ID NO: 139460 - protein, 7 aa, synthetic construct
QASKQDK

SEQ ID NO: 139461 - protein, 7 aa, synthetic construct
QASKYTT

SEQ ID NO: 139462 - protein, 7 aa, synthetic construct
QASNPPR

SEQ ID NO: 139463 - protein, 7 aa, synthetic construct
QASPREK

SEQ ID NO: 139464 - protein, 7 aa, synthetic construct
QASQMPR

SEQ ID NO: 139465 - protein, 7 aa, synthetic construct
QASQPGR

SEQ ID NO: 139466 - protein, 7 aa, synthetic construct
QASRHLI

SEQ ID NO: 139467 - protein, 7 aa, synthetic construct
QASRTGY

SEQ ID NO: 139468 - protein, 7 aa, synthetic construct
QASRVLV

SEQ ID NO: 139469 - protein, 7 aa, synthetic construct
QASTHMK

SEQ ID NO: 139470 - protein, 7 aa, synthetic construct
QASTNRY

SEQ ID NO: 139471 - protein, 7 aa, synthetic construct
QASVKYQ

SEQ ID NO: 139472 - protein, 7 aa, synthetic construct
QATHPKF

SEQ ID NO: 139473 - protein, 7 aa, synthetic construct
QATIRTI

SEQ ID NO: 139474 - protein, 7 aa, synthetic construct
QATKFRD

SEQ ID NO: 139475 - protein, 7 aa, synthetic construct
QATKIDR

SEQ ID NO: 139476 - protein, 7 aa, synthetic construct
QATKNSW

SEQ ID NO: 139477 - protein, 7 aa, synthetic construct
QATKPHL

SEQ ID NO: 139478 - protein, 7 aa, synthetic construct
QATKQSW

SEQ ID NO: 139479 - protein, 7 aa, synthetic construct
QATMKSY

SEQ ID NO: 139480 - protein, 7 aa, synthetic construct
QATMKVY

SEQ ID NO: 139481 - protein, 7 aa, synthetic construct
QATRHMG

SEQ ID NO: 139482 - protein, 7 aa, synthetic construct
QATRNML

SEQ ID NO: 139483 - protein, 7 aa, synthetic construct
QATSHAR

SEQ ID NO: 139484 - protein, 7 aa, synthetic construct
QATTHRA

SEQ ID NO: 139485 - protein, 7 aa, synthetic construct
QATTTRF

SEQ ID NO: 139486 - protein, 7 aa, synthetic construct
QATTTYR

SEQ ID NO: 139487 - protein, 7 aa, synthetic construct
QATVRSI

SEQ ID NO: 139488 - protein, 7 aa, synthetic construct
QATYAGL

SEQ ID NO: 139489 - protein, 7 aa, synthetic construct
QAVAKRD

SEQ ID NO: 139490 - protein, 7 aa, synthetic construct
QAVDLRR

SEQ ID NO: 139491 - protein, 7 aa, synthetic construct
QAVGVHR

SEQ ID NO: 139492 - protein, 7 aa, synthetic construct
QAVHRTG

SEQ ID NO: 139493 - protein, 7 aa, synthetic construct
QAVREKQ

SEQ ID NO: 139494 - protein, 7 aa, synthetic construct
QAVRLKD

SEQ ID NO: 139495 - protein, 7 aa, synthetic construct
QAVTHKY

SEQ ID NO: 139496 - protein, 7 aa, synthetic construct
QAVVFSE

SEQ ID NO: 139497 - protein, 7 aa, synthetic construct
QAWKQSD

SEQ ID NO: 139498 - protein, 7 aa, synthetic construct
QAYAPMN

SEQ ID NO: 139499 - protein, 7 aa, synthetic construct
QAYGSNL

SEQ ID NO: 139500 - protein, 7 aa, synthetic construct
QAYHPPS

SEQ ID NO: 139501 - protein, 7 aa, synthetic construct
QAYKERA

SEQ ID NO: 139502 - protein, 7 aa, synthetic construct
QAYPQQR

SEQ ID NO: 139503 - protein, 7 aa, synthetic construct
QAYPSSK

SEQ ID NO: 139504 - protein, 7 aa, synthetic construct
QAYQLKA

SEQ ID NO: 139505 - protein, 7 aa, synthetic construct
QAYQVAA

SEQ ID NO: 139506 - protein, 7 aa, synthetic construct
QAYSNGK

SEQ ID NO: 139507 - protein, 7 aa, synthetic construct
QDANQKK

SEQ ID NO: 139508 - protein, 7 aa, synthetic construct
QDAPKGR

SEQ ID NO: 139509 - protein, 7 aa, synthetic construct
QDAQPRK

SEQ ID NO: 139510 - protein, 7 aa, synthetic construct
QDARTIR

SEQ ID NO: 139511 - protein, 7 aa, synthetic construct
QDFKATK

SEQ ID NO: 139512 - protein, 7 aa, synthetic construct
QDFKIQK

SEQ ID NO: 139513 - protein, 7 aa, synthetic construct
QDFKISK

SEQ ID NO: 139514 - protein, 7 aa, synthetic construct
QDGKNRV

SEQ ID NO: 139515 - protein, 7 aa, synthetic construct
QDGKPPR

SEQ ID NO: 139516 - protein, 7 aa, synthetic construct
QDGLRKI

SEQ ID NO: 139517 - protein, 7 aa, synthetic construct
QDGRNVR

SEQ ID NO: 139518 - protein, 7 aa, synthetic construct
QDGRTKS

SEQ ID NO: 139519 - protein, 7 aa, synthetic construct
QDGSFGR

SEQ ID NO: 139520 - protein, 7 aa, synthetic construct
QDHKNKM

SEQ ID NO: 139521 - protein, 7 aa, synthetic construct
QDHKTVK

SEQ ID NO: 139522 - protein, 7 aa, synthetic construct
QDHKVQR

SEQ ID NO: 139523 - protein, 7 aa, synthetic construct
QDHPKFK

SEQ ID NO: 139524 - protein, 7 aa, synthetic construct
QDIKGFK

SEQ ID NO: 139525 - protein, 7 aa, synthetic construct
QDIKQRL

SEQ ID NO: 139526 - protein, 7 aa, synthetic construct
QDIKSKY

SEQ ID NO: 139527 - protein, 7 aa, synthetic construct
QDIRARS

SEQ ID NO: 139528 - protein, 7 aa, synthetic construct
QDIRVTK

SEQ ID NO: 139529 - protein, 7 aa, synthetic construct
QDKFRPV

SEQ ID NO: 139530 - protein, 7 aa, synthetic construct
QDKGERK

SEQ ID NO: 139531 - protein, 7 aa, synthetic construct
QDKGIRM

SEQ ID NO: 139532 - protein, 7 aa, synthetic construct
QDKGRFN

SEQ ID NO: 139533 - protein, 7 aa, synthetic construct
QDKKDRM

SEQ ID NO: 139534 - protein, 7 aa, synthetic construct
QDKMKYF

SEQ ID NO: 139535 - protein, 7 aa, synthetic construct
QDKNPKY

SEQ ID NO: 139536 - protein, 7 aa, synthetic construct
QDKNPRY

SEQ ID NO: 139537 - protein, 7 aa, synthetic construct
QDKPGRF

SEQ ID NO: 139538 - protein, 7 aa, synthetic construct
QDKPVGR

SEQ ID NO: 139539 - protein, 7 aa, synthetic construct
QDKQMNR

SEQ ID NO: 139540 - protein, 7 aa, synthetic construct
QDKQNGR

SEQ ID NO: 139541 - protein, 7 aa, synthetic construct
QDKRPQS

SEQ ID NO: 139542 - protein, 7 aa, synthetic construct
QDKRQIS

SEQ ID NO: 139543 - protein, 7 aa, synthetic construct
QDKRQQS

SEQ ID NO: 139544 - protein, 7 aa, synthetic construct
QDKRSLN

SEQ ID NO: 139545 - protein, 7 aa, synthetic construct
QDKRVPF

SEQ ID NO: 139546 - protein, 7 aa, synthetic construct
QDKTGSR

SEQ ID NO: 139547 - protein, 7 aa, synthetic construct
QDKTMRM

SEQ ID NO: 139548 - protein, 7 aa, synthetic construct
QDKVRGH

SEQ ID NO: 139549 - protein, 7 aa, synthetic construct
QDKYKGL

SEQ ID NO: 139550 - protein, 7 aa, synthetic construct
QDKYKLT

SEQ ID NO: 139551 - protein, 7 aa, synthetic construct
QDLKRDK

SEQ ID NO: 139552 - protein, 7 aa, synthetic construct
QDLRQKS

SEQ ID NO: 139553 - protein, 7 aa, synthetic construct
QDMLRMK

SEQ ID NO: 139554 - protein, 7 aa, synthetic construct
QDNIGKR

SEQ ID NO: 139555 - protein, 7 aa, synthetic construct
QDNIRFH

SEQ ID NO: 139556 - protein, 7 aa, synthetic construct
QDNKIRY

SEQ ID NO: 139557 - protein, 7 aa, synthetic construct
QDNKMNR

SEQ ID NO: 139558 - protein, 7 aa, synthetic construct
QDNKPRL

SEQ ID NO: 139559 - protein, 7 aa, synthetic construct
QDNKQTR

SEQ ID NO: 139560 - protein, 7 aa, synthetic construct
QDNMRRP

SEQ ID NO: 139561 - protein, 7 aa, synthetic construct
QDNTNRK

SEQ ID NO: 139562 - protein, 7 aa, synthetic construct
QDNVGRK

SEQ ID NO: 139563 - protein, 7 aa, synthetic construct
QDPAKGR

SEQ ID NO: 139564 - protein, 7 aa, synthetic construct
QDPRKER

SEQ ID NO: 139565 - protein, 7 aa, synthetic construct
QDQIKRN

SEQ ID NO: 139566 - protein, 7 aa, synthetic construct
QDQKPQR

SEQ ID NO: 139567 - protein, 7 aa, synthetic construct
QDQKTAR

SEQ ID NO: 139568 - protein, 7 aa, synthetic construct
QDQKYIK

SEQ ID NO: 139569 - protein, 7 aa, synthetic construct
QDQRIPR

SEQ ID NO: 139570 - protein, 7 aa, synthetic construct
QDQRVTR

SEQ ID NO: 139571 - protein, 7 aa, synthetic construct
QDQTKRY

SEQ ID NO: 139572 - protein, 7 aa, synthetic construct
QDRASRG

SEQ ID NO: 139573 - protein, 7 aa, synthetic construct
QDRAVIK

SEQ ID NO: 139574 - protein, 7 aa, synthetic construct
QDRFKAY

SEQ ID NO: 139575 - protein, 7 aa, synthetic construct
QDRIKSF

SEQ ID NO: 139576 - protein, 7 aa, synthetic construct
QDRKAAI

SEQ ID NO: 139577 - protein, 7 aa, synthetic construct
QDRKLNS

SEQ ID NO: 139578 - protein, 7 aa, synthetic construct
QDRKLQV

SEQ ID NO: 139579 - protein, 7 aa, synthetic construct
QDRKQPL

SEQ ID NO: 139580 - protein, 7 aa, synthetic construct
QDRKSTI

SEQ ID NO: 139581 - protein, 7 aa, synthetic construct
QDRLATK

SEQ ID NO: 139582 - protein, 7 aa, synthetic construct
QDRLISK

SEQ ID NO: 139583 - protein, 7 aa, synthetic construct
QDRLNKM

SEQ ID NO: 139584 - protein, 7 aa, synthetic construct
QDRMKNN

SEQ ID NO: 139585 - protein, 7 aa, synthetic construct
QDRNPAV

SEQ ID NO: 139586 - protein, 7 aa, synthetic construct
QDRNQLR

SEQ ID NO: 139587 - protein, 7 aa, synthetic construct
QDRNTAK

SEQ ID NO: 139588 - protein, 7 aa, synthetic construct
QDRPAKA

SEQ ID NO: 139589 - protein, 7 aa, synthetic construct
QDRPMRV

SEQ ID NO: 139590 - protein, 7 aa, synthetic construct
QDRQIKT

SEQ ID NO: 139591 - protein, 7 aa, synthetic construct
QDRRTGI

SEQ ID NO: 139592 - protein, 7 aa, synthetic construct
QDSIKQR

SEQ ID NO: 139593 - protein, 7 aa, synthetic construct
QDSLTKR

SEQ ID NO: 139594 - protein, 7 aa, synthetic construct
QDSRNVR

SEQ ID NO: 139595 - protein, 7 aa, synthetic construct
QDSRTQK

SEQ ID NO: 139596 - protein, 7 aa, synthetic construct
QDSTKRN

SEQ ID NO: 139597 - protein, 7 aa, synthetic construct
QDSVRKS

SEQ ID NO: 139598 - protein, 7 aa, synthetic construct
QDTQKQR

SEQ ID NO: 139599 - protein, 7 aa, synthetic construct
QDTVKRF

SEQ ID NO: 139600 - protein, 7 aa, synthetic construct
QDVGKRY

SEQ ID NO: 139601 - protein, 7 aa, synthetic construct
QDVGRKT

SEQ ID NO: 139602 - protein, 7 aa, synthetic construct
QDVKHRV

SEQ ID NO: 139603 - protein, 7 aa, synthetic construct
QDVKPSR

SEQ ID NO: 139604 - protein, 7 aa, synthetic construct
QDVLKRA

SEQ ID NO: 139605 - protein, 7 aa, synthetic construct
QDVNRAK

SEQ ID NO: 139606 - protein, 7 aa, synthetic construct
QDVPKFR

SEQ ID NO: 139607 - protein, 7 aa, synthetic construct
QDVPNKR

SEQ ID NO: 139608 - protein, 7 aa, synthetic construct
QDVRIRN

SEQ ID NO: 139609 - protein, 7 aa, synthetic construct
QDVRRTG

SEQ ID NO: 139610 - protein, 7 aa, synthetic construct
QDWRGSG

SEQ ID NO: 139611 - protein, 7 aa, synthetic construct
QDYKLKN

SEQ ID NO: 139612 - protein, 7 aa, synthetic construct
QDYLNLK

SEQ ID NO: 139613 - protein, 7 aa, synthetic construct
QEAKKYA

SEQ ID NO: 139614 - protein, 7 aa, synthetic construct
QEAKPQR

SEQ ID NO: 139615 - protein, 7 aa, synthetic construct
QEAMRSK

SEQ ID NO: 139616 - protein, 7 aa, synthetic construct
QEARVQK

SEQ ID NO: 139617 - protein, 7 aa, synthetic construct
QEAVKRL

SEQ ID NO: 139618 - protein, 7 aa, synthetic construct
QEDRWNS

SEQ ID NO: 139619 - protein, 7 aa, synthetic construct
QEFKMNK

SEQ ID NO: 139620 - protein, 7 aa, synthetic construct
QEGILKK

SEQ ID NO: 139621 - protein, 7 aa, synthetic construct
QEGKIRS

SEQ ID NO: 139622 - protein, 7 aa, synthetic construct
QEGKPAR

SEQ ID NO: 139623 - protein, 7 aa, synthetic construct
QEGKQSK

SEQ ID NO: 139624 - protein, 7 aa, synthetic construct
QEGKVYR

SEQ ID NO: 139625 - protein, 7 aa, synthetic construct
QEGLKMR

SEQ ID NO: 139626 - protein, 7 aa, synthetic construct
QEGTKKL

SEQ ID NO: 139627 - protein, 7 aa, synthetic construct
QEGTRRV

SEQ ID NO: 139628 - protein, 7 aa, synthetic construct
QEHRRWE

SEQ ID NO: 139629 - protein, 7 aa, synthetic construct
QEIKRTI

SEQ ID NO: 139630 - protein, 7 aa, synthetic construct
QEKENRR

SEQ ID NO: 139631 - protein, 7 aa, synthetic construct
QEKGPGK

SEQ ID NO: 139632 - protein, 7 aa, synthetic construct
QEKGVMR

SEQ ID NO: 139633 - protein, 7 aa, synthetic construct
QEKHKYP

SEQ ID NO: 139634 - protein, 7 aa, synthetic construct
QEKHRGN

SEQ ID NO: 139635 - protein, 7 aa, synthetic construct
QEKIRHA

SEQ ID NO: 139636 - protein, 7 aa, synthetic construct
QEKKFVY

SEQ ID NO: 139637 - protein, 7 aa, synthetic construct
QEKKHLF

SEQ ID NO: 139638 - protein, 7 aa, synthetic construct
QEKNAYR

SEQ ID NO: 139639 - protein, 7 aa, synthetic construct
QEKQARQ

SEQ ID NO: 139640 - protein, 7 aa, synthetic construct
QEKQARV

SEQ ID NO: 139641 - protein, 7 aa, synthetic construct
QEKRMAI

SEQ ID NO: 139642 - protein, 7 aa, synthetic construct
QEKRPNS

SEQ ID NO: 139643 - protein, 7 aa, synthetic construct
QEKSKSW

SEQ ID NO: 139644 - protein, 7 aa, synthetic construct
QEKTTAR

SEQ ID NO: 139645 - protein, 7 aa, synthetic construct
QEKVQRG

SEQ ID NO: 139646 - protein, 7 aa, synthetic construct
QEKYQVK

SEQ ID NO: 139647 - protein, 7 aa, synthetic construct
QEMGRIK

SEQ ID NO: 139648 - protein, 7 aa, synthetic construct
QENAYRM

SEQ ID NO: 139649 - protein, 7 aa, synthetic construct
QENHRYM

SEQ ID NO: 139650 - protein, 7 aa, synthetic construct
QENLKNR

SEQ ID NO: 139651 - protein, 7 aa, synthetic construct
QENRIQR

SEQ ID NO: 139652 - protein, 7 aa, synthetic construct
QEPIKRS

SEQ ID NO: 139653 - protein, 7 aa, synthetic construct
QEPKYRN

SEQ ID NO: 139654 - protein, 7 aa, synthetic construct
QEPKYRP

SEQ ID NO: 139655 - protein, 7 aa, synthetic construct
QEPRMKM

SEQ ID NO: 139656 - protein, 7 aa, synthetic construct
QEPRQTK

SEQ ID NO: 139657 - protein, 7 aa, synthetic construct
QEPVKAR

SEQ ID NO: 139658 - protein, 7 aa, synthetic construct
QEQAKWA

SEQ ID NO: 139659 - protein, 7 aa, synthetic construct
QEQAKYK

SEQ ID NO: 139660 - protein, 7 aa, synthetic construct
QEQAQKK

SEQ ID NO: 139661 - protein, 7 aa, synthetic construct
QEQKTRF

SEQ ID NO: 139662 - protein, 7 aa, synthetic construct
QEQKVRM

SEQ ID NO: 139663 - protein, 7 aa, synthetic construct
QEQNMKR

SEQ ID NO: 139664 - protein, 7 aa, synthetic construct
QERAAKV

SEQ ID NO: 139665 - protein, 7 aa, synthetic construct
QERAIKN

SEQ ID NO: 139666 - protein, 7 aa, synthetic construct
QERALVK

SEQ ID NO: 139667 - protein, 7 aa, synthetic construct
QERISPR

SEQ ID NO: 139668 - protein, 7 aa, synthetic construct
QERKGTL

SEQ ID NO: 139669 - protein, 7 aa, synthetic construct
QERKGTQ

SEQ ID NO: 139670 - protein, 7 aa, synthetic construct
QERKQSV

SEQ ID NO: 139671 - protein, 7 aa, synthetic construct
QERKSMG

SEQ ID NO: 139672 - protein, 7 aa, synthetic construct
QERKVPF

SEQ ID NO: 139673 - protein, 7 aa, synthetic construct
QERLIKG

SEQ ID NO: 139674 - protein, 7 aa, synthetic construct
QERMIKA

SEQ ID NO: 139675 - protein, 7 aa, synthetic construct
QERMKVF

SEQ ID NO: 139676 - protein, 7 aa, synthetic construct
QERNTKA

SEQ ID NO: 139677 - protein, 7 aa, synthetic construct
QERNTQR

SEQ ID NO: 139678 - protein, 7 aa, synthetic construct
QERRAVG

SEQ ID NO: 139679 - protein, 7 aa, synthetic construct
QERSNIK

SEQ ID NO: 139680 - protein, 7 aa, synthetic construct
QERTKFS

SEQ ID NO: 139681 - protein, 7 aa, synthetic construct
QERTSRP

SEQ ID NO: 139682 - protein, 7 aa, synthetic construct
QERVYKG

SEQ ID NO: 139683 - protein, 7 aa, synthetic construct
QESGGKR

SEQ ID NO: 139684 - protein, 7 aa, synthetic construct
QESKARL

SEQ ID NO: 139685 - protein, 7 aa, synthetic construct
QESKNRG

SEQ ID NO: 139686 - protein, 7 aa, synthetic construct
QESLRKV

SEQ ID NO: 139687 - protein, 7 aa, synthetic construct
QESMRAK

SEQ ID NO: 139688 - protein, 7 aa, synthetic construct
QESQMKR

SEQ ID NO: 139689 - protein, 7 aa, synthetic construct
QETNRIR

SEQ ID NO: 139690 - protein, 7 aa, synthetic construct
QETRMKM

SEQ ID NO: 139691 - protein, 7 aa, synthetic construct
QETRWDK

SEQ ID NO: 139692 - protein, 7 aa, synthetic construct
QETTKRY

SEQ ID NO: 139693 - protein, 7 aa, synthetic construct
QEVAKRI

SEQ ID NO: 139694 - protein, 7 aa, synthetic construct
QEVANRK

SEQ ID NO: 139695 - protein, 7 aa, synthetic construct
QEVARIK

SEQ ID NO: 139696 - protein, 7 aa, synthetic construct
QEVKRLQ

SEQ ID NO: 139697 - protein, 7 aa, synthetic construct
QEVMKRV

SEQ ID NO: 139698 - protein, 7 aa, synthetic construct
QEVNMKR

SEQ ID NO: 139699 - protein, 7 aa, synthetic construct
QEWKRQD

SEQ ID NO: 139700 - protein, 7 aa, synthetic construct
QEWRNSS

SEQ ID NO: 139701 - protein, 7 aa, synthetic construct
QEYKTKQ

SEQ ID NO: 139702 - protein, 7 aa, synthetic construct
QEYKWRE

SEQ ID NO: 139703 - protein, 7 aa, synthetic construct
QFAGSMK

SEQ ID NO: 139704 - protein, 7 aa, synthetic construct
QFAMKRE

SEQ ID NO: 139705 - protein, 7 aa, synthetic construct
QFAPQRS

SEQ ID NO: 139706 - protein, 7 aa, synthetic construct
QFASSKL

SEQ ID NO: 139707 - protein, 7 aa, synthetic construct
QFATKRE

SEQ ID NO: 139708 - protein, 7 aa, synthetic construct
QFATTKY

SEQ ID NO: 139709 - protein, 7 aa, synthetic construct
QFDKQSR

SEQ ID NO: 139710 - protein, 7 aa, synthetic construct
QFEKSRN

SEQ ID NO: 139711 - protein, 7 aa, synthetic construct
QFEKTAR

SEQ ID NO: 139712 - protein, 7 aa, synthetic construct
QFGATRA

SEQ ID NO: 139713 - protein, 7 aa, synthetic construct
QFGEKTR

SEQ ID NO: 139714 - protein, 7 aa, synthetic construct
QFGKQMM

SEQ ID NO: 139715 - protein, 7 aa, synthetic construct
QFGKSKD

SEQ ID NO: 139716 - protein, 7 aa, synthetic construct
QFGMIKA

SEQ ID NO: 139717 - protein, 7 aa, synthetic construct
QFGNSTK

SEQ ID NO: 139718 - protein, 7 aa, synthetic construct
QFGSSRA

SEQ ID NO: 139719 - protein, 7 aa, synthetic construct
QFGTKDR

SEQ ID NO: 139720 - protein, 7 aa, synthetic construct
QFGTKFG

SEQ ID NO: 139721 - protein, 7 aa, synthetic construct
QFHKAIG

SEQ ID NO: 139722 - protein, 7 aa, synthetic construct
QFHKQSG

SEQ ID NO: 139723 - protein, 7 aa, synthetic construct
QFHPPKT

SEQ ID NO: 139724 - protein, 7 aa, synthetic construct
QFHSATK

SEQ ID NO: 139725 - protein, 7 aa, synthetic construct
QFHVAKI

SEQ ID NO: 139726 - protein, 7 aa, synthetic construct
QFIKERG

SEQ ID NO: 139727 - protein, 7 aa, synthetic construct
QFKADRM

SEQ ID NO: 139728 - protein, 7 aa, synthetic construct
QFKAGSF

SEQ ID NO: 139729 - protein, 7 aa, synthetic construct
QFKAGYS

SEQ ID NO: 139730 - protein, 7 aa, synthetic construct
QFKASHQ

SEQ ID NO: 139731 - protein, 7 aa, synthetic construct
QFKERVI

SEQ ID NO: 139732 - protein, 7 aa, synthetic construct
QFKGMQI

SEQ ID NO: 139733 - protein, 7 aa, synthetic construct
QFKHQTI

SEQ ID NO: 139734 - protein, 7 aa, synthetic construct
QFKLSTT

SEQ ID NO: 139735 - protein, 7 aa, synthetic construct
QFKMTSV

SEQ ID NO: 139736 - protein, 7 aa, synthetic construct
QFKNHNM

SEQ ID NO: 139737 - protein, 7 aa, synthetic construct
QFKNVAH

SEQ ID NO: 139738 - protein, 7 aa, synthetic construct
QFKPHLA

SEQ ID NO: 139739 - protein, 7 aa, synthetic construct
QFKPNPL

SEQ ID NO: 139740 - protein, 7 aa, synthetic construct
QFKPVHQ

SEQ ID NO: 139741 - protein, 7 aa, synthetic construct
QFKQAMI

SEQ ID NO: 139742 - protein, 7 aa, synthetic construct
QFKQHPS

SEQ ID NO: 139743 - protein, 7 aa, synthetic construct
QFKQLTQ

SEQ ID NO: 139744 - protein, 7 aa, synthetic construct
QFKQSDR

SEQ ID NO: 139745 - protein, 7 aa, synthetic construct
QFKSIAH

SEQ ID NO: 139746 - protein, 7 aa, synthetic construct
QFKSKFE

SEQ ID NO: 139747 - protein, 7 aa, synthetic construct
QFKSPDR

SEQ ID NO: 139748 - protein, 7 aa, synthetic construct
QFKVHAS

SEQ ID NO: 139749 - protein, 7 aa, synthetic construct
QFKVHMG

SEQ ID NO: 139750 - protein, 7 aa, synthetic construct
QFNHKGI

SEQ ID NO: 139751 - protein, 7 aa, synthetic construct
QFNKARE

SEQ ID NO: 139752 - protein, 7 aa, synthetic construct
QFNKMMP

SEQ ID NO: 139753 - protein, 7 aa, synthetic construct
QFNNNRH

SEQ ID NO: 139754 - protein, 7 aa, synthetic construct
QFNNPVR

SEQ ID NO: 139755 - protein, 7 aa, synthetic construct
QFNRGAG

SEQ ID NO: 139756 - protein, 7 aa, synthetic construct
QFNRQNQ

SEQ ID NO: 139757 - protein, 7 aa, synthetic construct
QFNRSTM

SEQ ID NO: 139758 - protein, 7 aa, synthetic construct
QFNVKPM

SEQ ID NO: 139759 - protein, 7 aa, synthetic construct
QFPKAHQ

SEQ ID NO: 139760 - protein, 7 aa, synthetic construct
QFPRQSG

SEQ ID NO: 139761 - protein, 7 aa, synthetic construct
QFQKRDT

SEQ ID NO: 139762 - protein, 7 aa, synthetic construct
QFQKVHN

SEQ ID NO: 139763 - protein, 7 aa, synthetic construct
QFQQAVK

SEQ ID NO: 139764 - protein, 7 aa, synthetic construct
QFQRATH

SEQ ID NO: 139765 - protein, 7 aa, synthetic construct
QFQRGSY

SEQ ID NO: 139766 - protein, 7 aa, synthetic construct
QFQTPRT

SEQ ID NO: 139767 - protein, 7 aa, synthetic construct
QFQVKHG

SEQ ID NO: 139768 - protein, 7 aa, synthetic construct
QFRMNGT

SEQ ID NO: 139769 - protein, 7 aa, synthetic construct
QFRVAKE

SEQ ID NO: 139770 - protein, 7 aa, synthetic construct
QFSATIK

SEQ ID NO: 139771 - protein, 7 aa, synthetic construct
QFSGAAK

SEQ ID NO: 139772 - protein, 7 aa, synthetic construct
QFSGNAK

SEQ ID NO: 139773 - protein, 7 aa, synthetic construct
QFSGNRI

SEQ ID NO: 139774 - protein, 7 aa, synthetic construct
QFSKERL

SEQ ID NO: 139775 - protein, 7 aa, synthetic construct
QFSMKGV

SEQ ID NO: 139776 - protein, 7 aa, synthetic construct
QFTAQYK

SEQ ID NO: 139777 - protein, 7 aa, synthetic construct
QFTGTPR

SEQ ID NO: 139778 - protein, 7 aa, synthetic construct
QFTKYKE

SEQ ID NO: 139779 - protein, 7 aa, synthetic construct
QFTNGMR

SEQ ID NO: 139780 - protein, 7 aa, synthetic construct
QFTNVNK

SEQ ID NO: 139781 - protein, 7 aa, synthetic construct
QFTTHAK

SEQ ID NO: 139782 - protein, 7 aa, synthetic construct
QFVKERS

SEQ ID NO: 139783 - protein, 7 aa, synthetic construct
QGAAVIR

SEQ ID NO: 139784 - protein, 7 aa, synthetic construct
QGAGRDK

SEQ ID NO: 139785 - protein, 7 aa, synthetic construct
QGAIYSK

SEQ ID NO: 139786 - protein, 7 aa, synthetic construct
QGAKRLE

SEQ ID NO: 139787 - protein, 7 aa, synthetic construct
QGAKSFT

SEQ ID NO: 139788 - protein, 7 aa, synthetic construct
QGAKYEK

SEQ ID NO: 139789 - protein, 7 aa, synthetic construct
QGAQQNR

SEQ ID NO: 139790 - protein, 7 aa, synthetic construct
QGARHTT

SEQ ID NO: 139791 - protein, 7 aa, synthetic construct
QGARPEK

SEQ ID NO: 139792 - protein, 7 aa, synthetic construct
QGASIHK

SEQ ID NO: 139793 - protein, 7 aa, synthetic construct
QGATASR

SEQ ID NO: 139794 - protein, 7 aa, synthetic construct
QGAYKST

SEQ ID NO: 139795 - protein, 7 aa, synthetic construct
QGDKRYG

SEQ ID NO: 139796 - protein, 7 aa, synthetic construct
QGDLKRF

SEQ ID NO: 139797 - protein, 7 aa, synthetic construct
QGDRQGK

SEQ ID NO: 139798 - protein, 7 aa, synthetic construct
QGEFVKK

SEQ ID NO: 139799 - protein, 7 aa, synthetic construct
QGEGMRR

SEQ ID NO: 139800 - protein, 7 aa, synthetic construct
QGENQRR

SEQ ID NO: 139801 - protein, 7 aa, synthetic construct
QGERAVR

SEQ ID NO: 139802 - protein, 7 aa, synthetic construct
QGFMLEP

SEQ ID NO: 139803 - protein, 7 aa, synthetic construct
QGFNSKN

SEQ ID NO: 139804 - protein, 7 aa, synthetic construct
QGGAHRP

SEQ ID NO: 139805 - protein, 7 aa, synthetic construct
QGGAMFK

SEQ ID NO: 139806 - protein, 7 aa, synthetic construct
QGGAMSK

SEQ ID NO: 139807 - protein, 7 aa, synthetic construct
QGGFKNV

SEQ ID NO: 139808 - protein, 7 aa, synthetic construct
QGGGLSR

SEQ ID NO: 139809 - protein, 7 aa, synthetic construct
QGGHKMV

SEQ ID NO: 139810 - protein, 7 aa, synthetic construct
QGGHKQT

SEQ ID NO: 139811 - protein, 7 aa, synthetic construct
QGGHKTS

SEQ ID NO: 139812 - protein, 7 aa, synthetic construct
QGGIRGN

SEQ ID NO: 139813 - protein, 7 aa, synthetic construct
QGGKFRE

SEQ ID NO: 139814 - protein, 7 aa, synthetic construct
QGGMQSR

SEQ ID NO: 139815 - protein, 7 aa, synthetic construct
QGGMSYS

SEQ ID NO: 139816 - protein, 7 aa, synthetic construct
QGGMTAK

SEQ ID NO: 139817 - protein, 7 aa, synthetic construct
QGGNIRA

SEQ ID NO: 139818 - protein, 7 aa, synthetic construct
QGGPKHA

SEQ ID NO: 139819 - protein, 7 aa, synthetic construct
QGGPKHV

SEQ ID NO: 139820 - protein, 7 aa, synthetic construct
QGGQSPK

SEQ ID NO: 139821 - protein, 7 aa, synthetic construct
QGGREKQ

SEQ ID NO: 139822 - protein, 7 aa, synthetic construct
QGGRENK

SEQ ID NO: 139823 - protein, 7 aa, synthetic construct
QGGSIRG

SEQ ID NO: 139824 - protein, 7 aa, synthetic construct
QGGSSLR

SEQ ID NO: 139825 - protein, 7 aa, synthetic construct
QGGSYIK

SEQ ID NO: 139826 - protein, 7 aa, synthetic construct
QGGTIYK

SEQ ID NO: 139827 - protein, 7 aa, synthetic construct
QGGVIIR

SEQ ID NO: 139828 - protein, 7 aa, synthetic construct
QGGVRHG

SEQ ID NO: 139829 - protein, 7 aa, synthetic construct
QGGVRVT

SEQ ID NO: 139830 - protein, 7 aa, synthetic construct
QGGVVFK

SEQ ID NO: 139831 - protein, 7 aa, synthetic construct
QGHGLDQ

SEQ ID NO: 139832 - protein, 7 aa, synthetic construct
QGHIPSK

SEQ ID NO: 139833 - protein, 7 aa, synthetic construct
QGHKGNT

SEQ ID NO: 139834 - protein, 7 aa, synthetic construct
QGHKIQV

SEQ ID NO: 139835 - protein, 7 aa, synthetic construct
QGHKMMI

SEQ ID NO: 139836 - protein, 7 aa, synthetic construct
QGHKSNA

SEQ ID NO: 139837 - protein, 7 aa, synthetic construct
QGHLIKT

SEQ ID NO: 139838 - protein, 7 aa, synthetic construct
QGHMTKV

SEQ ID NO: 139839 - protein, 7 aa, synthetic construct
QGHRAPS

SEQ ID NO: 139840 - protein, 7 aa, synthetic construct
QGHVIRA

SEQ ID NO: 139841 - protein, 7 aa, synthetic construct
QGHVTMR

SEQ ID NO: 139842 - protein, 7 aa, synthetic construct
QGIPGIM

SEQ ID NO: 139843 - protein, 7 aa, synthetic construct
QGIQNTR

SEQ ID NO: 139844 - protein, 7 aa, synthetic construct
QGISLTR

SEQ ID NO: 139845 - protein, 7 aa, synthetic construct
QGISMNR

SEQ ID NO: 139846 - protein, 7 aa, synthetic construct
QGKAENR

SEQ ID NO: 139847 - protein, 7 aa, synthetic construct
QGKAFER

SEQ ID NO: 139848 - protein, 7 aa, synthetic construct
QGKASYI

SEQ ID NO: 139849 - protein, 7 aa, synthetic construct
QGKAYLV

SEQ ID NO: 139850 - protein, 7 aa, synthetic construct
QGKDGIR

SEQ ID NO: 139851 - protein, 7 aa, synthetic construct
QGKFAIS

SEQ ID NO: 139852 - protein, 7 aa, synthetic construct
QGKFGAS

SEQ ID NO: 139853 - protein, 7 aa, synthetic construct
QGKFVTV

SEQ ID NO: 139854 - protein, 7 aa, synthetic construct
QGKGFVI

SEQ ID NO: 139855 - protein, 7 aa, synthetic construct
QGKGNYY

SEQ ID NO: 139856 - protein, 7 aa, synthetic construct
QGKKAGE

SEQ ID NO: 139857 - protein, 7 aa, synthetic construct
QGKKDQI

SEQ ID NO: 139858 - protein, 7 aa, synthetic construct
QGKKQEG

SEQ ID NO: 139859 - protein, 7 aa, synthetic construct
QGKLHTY

SEQ ID NO: 139860 - protein, 7 aa, synthetic construct
QGKLYQS

SEQ ID NO: 139861 - protein, 7 aa, synthetic construct
QGKMGYM

SEQ ID NO: 139862 - protein, 7 aa, synthetic construct
QGKNHPT

SEQ ID NO: 139863 - protein, 7 aa, synthetic construct
QGKPLPF

SEQ ID NO: 139864 - protein, 7 aa, synthetic construct
QGKQILH

SEQ ID NO: 139865 - protein, 7 aa, synthetic construct
QGKQWVG

SEQ ID NO: 139866 - protein, 7 aa, synthetic construct
QGKQYER

SEQ ID NO: 139867 - protein, 7 aa, synthetic construct
QGKVHQQ

SEQ ID NO: 139868 - protein, 7 aa, synthetic construct
QGKVKGD

SEQ ID NO: 139869 - protein, 7 aa, synthetic construct
QGKVPFI

SEQ ID NO: 139870 - protein, 7 aa, synthetic construct
QGKVPYM

SEQ ID NO: 139871 - protein, 7 aa, synthetic construct
QGKYERT

SEQ ID NO: 139872 - protein, 7 aa, synthetic construct
QGKYGMQ

SEQ ID NO: 139873 - protein, 7 aa, synthetic construct
QGKYIPV

SEQ ID NO: 139874 - protein, 7 aa, synthetic construct
QGKYTER

SEQ ID NO: 139875 - protein, 7 aa, synthetic construct
QGLHKNL

SEQ ID NO: 139876 - protein, 7 aa, synthetic construct
QGLPRQI

SEQ ID NO: 139877 - protein, 7 aa, synthetic construct
QGMGSSK

SEQ ID NO: 139878 - protein, 7 aa, synthetic construct
QGMHLIK

SEQ ID NO: 139879 - protein, 7 aa, synthetic construct
QGMKGLH

SEQ ID NO: 139880 - protein, 7 aa, synthetic construct
QGMKMIN

SEQ ID NO: 139881 - protein, 7 aa, synthetic construct
QGNGQPR

SEQ ID NO: 139882 - protein, 7 aa, synthetic construct
QGNIIVR

SEQ ID NO: 139883 - protein, 7 aa, synthetic construct
QGNPITR

SEQ ID NO: 139884 - protein, 7 aa, synthetic construct
QGNPSRY

SEQ ID NO: 139885 - protein, 7 aa, synthetic construct
QGNQGGK

SEQ ID NO: 139886 - protein, 7 aa, synthetic construct
QGNQSQK

SEQ ID NO: 139887 - protein, 7 aa, synthetic construct
QGNQTNR

SEQ ID NO: 139888 - protein, 7 aa, synthetic construct
QGNRFKE

SEQ ID NO: 139889 - protein, 7 aa, synthetic construct
QGNRHPI

SEQ ID NO: 139890 - protein, 7 aa, synthetic construct
QGNVPHK

SEQ ID NO: 139891 - protein, 7 aa, synthetic construct
QGNYIKG

SEQ ID NO: 139892 - protein, 7 aa, synthetic construct
QGNYQMK

SEQ ID NO: 139893 - protein, 7 aa, synthetic construct
QGPHTNR

SEQ ID NO: 139894 - protein, 7 aa, synthetic construct
QGPHYKP

SEQ ID NO: 139895 - protein, 7 aa, synthetic construct
QGPINAR

SEQ ID NO: 139896 - protein, 7 aa, synthetic construct
QGPNGNR

SEQ ID NO: 139897 - protein, 7 aa, synthetic construct
QGPNRAY

SEQ ID NO: 139898 - protein, 7 aa, synthetic construct
QGPQHRG

SEQ ID NO: 139899 - protein, 7 aa, synthetic construct
QGPRTSM

SEQ ID NO: 139900 - protein, 7 aa, synthetic construct
QGPSYKL

SEQ ID NO: 139901 - protein, 7 aa, synthetic construct
QGPVKMF

SEQ ID NO: 139902 - protein, 7 aa, synthetic construct
QGQAKYV

SEQ ID NO: 139903 - protein, 7 aa, synthetic construct
QGQARTH

SEQ ID NO: 139904 - protein, 7 aa, synthetic construct
QGQDKFR

SEQ ID NO: 139905 - protein, 7 aa, synthetic construct
QGQFPKF

SEQ ID NO: 139906 - protein, 7 aa, synthetic construct
QGQHRPV

SEQ ID NO: 139907 - protein, 7 aa, synthetic construct
QGQIATR

SEQ ID NO: 139908 - protein, 7 aa, synthetic construct
QGQIGQR

SEQ ID NO: 139909 - protein, 7 aa, synthetic construct
QGQISMK

SEQ ID NO: 139910 - protein, 7 aa, synthetic construct
QGQKRDI

SEQ ID NO: 139911 - protein, 7 aa, synthetic construct
QGQNLNR

SEQ ID NO: 139912 - protein, 7 aa, synthetic construct
QGQNPFK

SEQ ID NO: 139913 - protein, 7 aa, synthetic construct
QGQNYTK

SEQ ID NO: 139914 - protein, 7 aa, synthetic construct
QGQSNAR

SEQ ID NO: 139915 - protein, 7 aa, synthetic construct
QGQSTIR

SEQ ID NO: 139916 - protein, 7 aa, synthetic construct
QGQTRGT

SEQ ID NO: 139917 - protein, 7 aa, synthetic construct
QGQTRQT

SEQ ID NO: 139918 - protein, 7 aa, synthetic construct
QGQVKYM

SEQ ID NO: 139919 - protein, 7 aa, synthetic construct
QGQVRQN

SEQ ID NO: 139920 - protein, 7 aa, synthetic construct
QGQYGTL

SEQ ID NO: 139921 - protein, 7 aa, synthetic construct
QGQYIGK

SEQ ID NO: 139922 - protein, 7 aa, synthetic construct
QGQYKQI

SEQ ID NO: 139923 - protein, 7 aa, synthetic construct
QGRAGSY

SEQ ID NO: 139924 - protein, 7 aa, synthetic construct
QGRAPVI

SEQ ID NO: 139925 - protein, 7 aa, synthetic construct
QGRGGYP

SEQ ID NO: 139926 - protein, 7 aa, synthetic construct
QGRGQSL

SEQ ID NO: 139927 - protein, 7 aa, synthetic construct
QGRGTLS

SEQ ID NO: 139928 - protein, 7 aa, synthetic construct
QGRIIPG

SEQ ID NO: 139929 - protein, 7 aa, synthetic construct
QGRIQDK

SEQ ID NO: 139930 - protein, 7 aa, synthetic construct
QGRITDR

SEQ ID NO: 139931 - protein, 7 aa, synthetic construct
QGRIVAG

SEQ ID NO: 139932 - protein, 7 aa, synthetic construct
QGRLPMN

SEQ ID NO: 139933 - protein, 7 aa, synthetic construct
QGRMQPA

SEQ ID NO: 139934 - protein, 7 aa, synthetic construct
QGRMSGM

SEQ ID NO: 139935 - protein, 7 aa, synthetic construct
QGRMSPT

SEQ ID NO: 139936 - protein, 7 aa, synthetic construct
QGRNLQA

SEQ ID NO: 139937 - protein, 7 aa, synthetic construct
QGRNTGF

SEQ ID NO: 139938 - protein, 7 aa, synthetic construct
QGRNVTG

SEQ ID NO: 139939 - protein, 7 aa, synthetic construct
QGRPSTI

SEQ ID NO: 139940 - protein, 7 aa, synthetic construct
QGRPVIS

SEQ ID NO: 139941 - protein, 7 aa, synthetic construct
QGRPVTN

SEQ ID NO: 139942 - protein, 7 aa, synthetic construct
QGRQAGN

SEQ ID NO: 139943 - protein, 7 aa, synthetic construct
QGRSITI

SEQ ID NO: 139944 - protein, 7 aa, synthetic construct
QGRSLNA

SEQ ID NO: 139945 - protein, 7 aa, synthetic construct
QGRSVTG

SEQ ID NO: 139946 - protein, 7 aa, synthetic construct
QGRTEGR

SEQ ID NO: 139947 - protein, 7 aa, synthetic construct
QGRTENR

SEQ ID NO: 139948 - protein, 7 aa, synthetic construct
QGRTINS

SEQ ID NO: 139949 - protein, 7 aa, synthetic construct
QGRTMSA

SEQ ID NO: 139950 - protein, 7 aa, synthetic construct
QGRTQWD

SEQ ID NO: 139951 - protein, 7 aa, synthetic construct
QGRVIQV

SEQ ID NO: 139952 - protein, 7 aa, synthetic construct
QGRVLPA

SEQ ID NO: 139953 - protein, 7 aa, synthetic construct
QGRVSQF

SEQ ID NO: 139954 - protein, 7 aa, synthetic construct
QGRVTSG

SEQ ID NO: 139955 - protein, 7 aa, synthetic construct
QGSFRGT

SEQ ID NO: 139956 - protein, 7 aa, synthetic construct
QGSGHRV

SEQ ID NO: 139957 - protein, 7 aa, synthetic construct
QGSIKHF

SEQ ID NO: 139958 - protein, 7 aa, synthetic construct
QGSISNR

SEQ ID NO: 139959 - protein, 7 aa, synthetic construct
QGSISRA

SEQ ID NO: 139960 - protein, 7 aa, synthetic construct
QGSKADR

SEQ ID NO: 139961 - protein, 7 aa, synthetic construct
QGSKFHS

SEQ ID NO: 139962 - protein, 7 aa, synthetic construct
QGSKLHY

SEQ ID NO: 139963 - protein, 7 aa, synthetic construct
QGSKRET

SEQ ID NO: 139964 - protein, 7 aa, synthetic construct
QGSMSQK

SEQ ID NO: 139965 - protein, 7 aa, synthetic construct
QGSNNLR

SEQ ID NO: 139966 - protein, 7 aa, synthetic construct
QGSQSSK

SEQ ID NO: 139967 - protein, 7 aa, synthetic construct
QGSQYMK

SEQ ID NO: 139968 - protein, 7 aa, synthetic construct
QGSQYPR

SEQ ID NO: 139969 - protein, 7 aa, synthetic construct
QGSRENR

SEQ ID NO: 139970 - protein, 7 aa, synthetic construct
QGSRQQN

SEQ ID NO: 139971 - protein, 7 aa, synthetic construct
QGSRSTF

SEQ ID NO: 139972 - protein, 7 aa, synthetic construct
QGSRTHA

SEQ ID NO: 139973 - protein, 7 aa, synthetic construct
QGSTGQR

SEQ ID NO: 139974 - protein, 7 aa, synthetic construct
QGSTYTK

SEQ ID NO: 139975 - protein, 7 aa, synthetic construct
QGSYVKA

SEQ ID NO: 139976 - protein, 7 aa, synthetic construct
QGTANGR

SEQ ID NO: 139977 - protein, 7 aa, synthetic construct
QGTFAKN

SEQ ID NO: 139978 - protein, 7 aa, synthetic construct
QGTPTRY

SEQ ID NO: 139979 - protein, 7 aa, synthetic construct
QGTRPDR

SEQ ID NO: 139980 - protein, 7 aa, synthetic construct
QGTSMAR

SEQ ID NO: 139981 - protein, 7 aa, synthetic construct
QGTTMAR

SEQ ID NO: 139982 - protein, 7 aa, synthetic construct
QGTVQHK

SEQ ID NO: 139983 - protein, 7 aa, synthetic construct
QGTYQSR

SEQ ID NO: 139984 - protein, 7 aa, synthetic construct
QGVAYMK

SEQ ID NO: 139985 - protein, 7 aa, synthetic construct
QGVGVGR

SEQ ID NO: 139986 - protein, 7 aa, synthetic construct
QGVNRPF

SEQ ID NO: 139987 - protein, 7 aa, synthetic construct
QGVRHAV

SEQ ID NO: 139988 - protein, 7 aa, synthetic construct
QGVRNLV

SEQ ID NO: 139989 - protein, 7 aa, synthetic construct
QGVTFKQ

SEQ ID NO: 139990 - protein, 7 aa, synthetic construct
QGYKEQK

SEQ ID NO: 139991 - protein, 7 aa, synthetic construct
QGYKMSG

SEQ ID NO: 139992 - protein, 7 aa, synthetic construct
QGYKSGG

SEQ ID NO: 139993 - protein, 7 aa, synthetic construct
QGYPQKI

SEQ ID NO: 139994 - protein, 7 aa, synthetic construct
QGYVKGG

SEQ ID NO: 139995 - protein, 7 aa, synthetic construct
QHAGPGK

SEQ ID NO: 139996 - protein, 7 aa, synthetic construct
QHAGPKQ

SEQ ID NO: 139997 - protein, 7 aa, synthetic construct
QHAGTRS

SEQ ID NO: 139998 - protein, 7 aa, synthetic construct
QHAKAFI

SEQ ID NO: 139999 - protein, 7 aa, synthetic construct
QHAKVSF

SEQ ID NO: 140000 - protein, 7 aa, synthetic construct
QHANTLR

SEQ ID NO: 140001 - protein, 7 aa, synthetic construct
QHAPATR

SEQ ID NO: 140002 - protein, 7 aa, synthetic construct
QHAQPSD

SEQ ID NO: 140003 - protein, 7 aa, synthetic construct
QHARTQL

SEQ ID NO: 140004 - protein, 7 aa, synthetic construct
QHARVVG

SEQ ID NO: 140005 - protein, 7 aa, synthetic construct
QHASSAR

SEQ ID NO: 140006 - protein, 7 aa, synthetic construct
QHASTVR

SEQ ID NO: 140007 - protein, 7 aa, synthetic construct
QHATIRT

SEQ ID NO: 140008 - protein, 7 aa, synthetic construct
QHATKNQ

SEQ ID NO: 140009 - protein, 7 aa, synthetic construct
QHDKKAL

SEQ ID NO: 140010 - protein, 7 aa, synthetic construct
QHDVKKY

SEQ ID NO: 140011 - protein, 7 aa, synthetic construct
QHEAWRA

SEQ ID NO: 140012 - protein, 7 aa, synthetic construct
QHERTDN

SEQ ID NO: 140013 - protein, 7 aa, synthetic construct
QHEVKNR

SEQ ID NO: 140014 - protein, 7 aa, synthetic construct
QHGAIKM

SEQ ID NO: 140015 - protein, 7 aa, synthetic construct
QHGATSK

SEQ ID NO: 140016 - protein, 7 aa, synthetic construct
QHGATVR

SEQ ID NO: 140017 - protein, 7 aa, synthetic construct
QHGDHEI

SEQ ID NO: 140018 - protein, 7 aa, synthetic construct
QHGIKFN

SEQ ID NO: 140019 - protein, 7 aa, synthetic construct
QHGINAK

SEQ ID NO: 140020 - protein, 7 aa, synthetic construct
QHGIRPV

SEQ ID NO: 140021 - protein, 7 aa, synthetic construct
QHGIVRQ

SEQ ID NO: 140022 - protein, 7 aa, synthetic construct
QHGKMRE

SEQ ID NO: 140023 - protein, 7 aa, synthetic construct
QHGKNFQ

SEQ ID NO: 140024 - protein, 7 aa, synthetic construct
QHGKNVQ

SEQ ID NO: 140025 - protein, 7 aa, synthetic construct
QHGKYNI

SEQ ID NO: 140026 - protein, 7 aa, synthetic construct
QHGLATR

SEQ ID NO: 140027 - protein, 7 aa, synthetic construct
QHGLGTK

SEQ ID NO: 140028 - protein, 7 aa, synthetic construct
QHGLQAK

SEQ ID NO: 140029 - protein, 7 aa, synthetic construct
QHGLRMA

SEQ ID NO: 140030 - protein, 7 aa, synthetic construct
QHGMAKI

SEQ ID NO: 140031 - protein, 7 aa, synthetic construct
QHGMQAK

SEQ ID NO: 140032 - protein, 7 aa, synthetic construct
QHGNKLF

SEQ ID NO: 140033 - protein, 7 aa, synthetic construct
QHGNTRL

SEQ ID NO: 140034 - protein, 7 aa, synthetic construct
QHGPMRS

SEQ ID NO: 140035 - protein, 7 aa, synthetic construct
QHGPQVK

SEQ ID NO: 140036 - protein, 7 aa, synthetic construct
QHGQGPR

SEQ ID NO: 140037 - protein, 7 aa, synthetic construct
QHGQGYM

SEQ ID NO: 140038 - protein, 7 aa, synthetic construct
QHGQNKQ

SEQ ID NO: 140039 - protein, 7 aa, synthetic construct
QHGQTKM

SEQ ID NO: 140040 - protein, 7 aa, synthetic construct
QHGRIGI

SEQ ID NO: 140041 - protein, 7 aa, synthetic construct
QHGRPTP

SEQ ID NO: 140042 - protein, 7 aa, synthetic construct
QHGRVGQ

SEQ ID NO: 140043 - protein, 7 aa, synthetic construct
QHGSQVK

SEQ ID NO: 140044 - protein, 7 aa, synthetic construct
QHGVMSK

SEQ ID NO: 140045 - protein, 7 aa, synthetic construct
QHGYVHS

SEQ ID NO: 140046 - protein, 7 aa, synthetic construct
QHHIANK

SEQ ID NO: 140047 - protein, 7 aa, synthetic construct
QHHKLIN

SEQ ID NO: 140048 - protein, 7 aa, synthetic construct
QHHKMNA

SEQ ID NO: 140049 - protein, 7 aa, synthetic construct
QHHKVPV

SEQ ID NO: 140050 - protein, 7 aa, synthetic construct
QHHLPTD

SEQ ID NO: 140051 - protein, 7 aa, synthetic construct
QHHMPQD

SEQ ID NO: 140052 - protein, 7 aa, synthetic construct
QHHSIKG

SEQ ID NO: 140053 - protein, 7 aa, synthetic construct
QHHSYER

SEQ ID NO: 140054 - protein, 7 aa, synthetic construct
QHHTAKI

SEQ ID NO: 140055 - protein, 7 aa, synthetic construct
QHIAQGK

SEQ ID NO: 140056 - protein, 7 aa, synthetic construct
QHIKAIG

SEQ ID NO: 140057 - protein, 7 aa, synthetic construct
QHIPKPT

SEQ ID NO: 140058 - protein, 7 aa, synthetic construct
QHITRLD

SEQ ID NO: 140059 - protein, 7 aa, synthetic construct
QHKANGY

SEQ ID NO: 140060 - protein, 7 aa, synthetic construct
QHKAQAT

SEQ ID NO: 140061 - protein, 7 aa, synthetic construct
QHKFKDV

SEQ ID NO: 140062 - protein, 7 aa, synthetic construct
QHKFTNG

SEQ ID NO: 140063 - protein, 7 aa, synthetic construct
QHKGPLY

SEQ ID NO: 140064 - protein, 7 aa, synthetic construct
QHKGQLQ

SEQ ID NO: 140065 - protein, 7 aa, synthetic construct
QHKIAST

SEQ ID NO: 140066 - protein, 7 aa, synthetic construct
QHKIIPT

SEQ ID NO: 140067 - protein, 7 aa, synthetic construct
QHKILAQ

SEQ ID NO: 140068 - protein, 7 aa, synthetic construct
QHKIPGI

SEQ ID NO: 140069 - protein, 7 aa, synthetic construct
QHKISNY

SEQ ID NO: 140070 - protein, 7 aa, synthetic construct
QHKLAYG

SEQ ID NO: 140071 - protein, 7 aa, synthetic construct
QHKLPSL

SEQ ID NO: 140072 - protein, 7 aa, synthetic construct
QHKLQAQ

SEQ ID NO: 140073 - protein, 7 aa, synthetic construct
QHKLTAL

SEQ ID NO: 140074 - protein, 7 aa, synthetic construct
QHKMAYV

SEQ ID NO: 140075 - protein, 7 aa, synthetic construct
QHKNTDR

SEQ ID NO: 140076 - protein, 7 aa, synthetic construct
QHKPGPM

SEQ ID NO: 140077 - protein, 7 aa, synthetic construct
QHKPISQ

SEQ ID NO: 140078 - protein, 7 aa, synthetic construct
QHKPNLY

SEQ ID NO: 140079 - protein, 7 aa, synthetic construct
QHKPTSQ

SEQ ID NO: 140080 - protein, 7 aa, synthetic construct
QHKPYNH

SEQ ID NO: 140081 - protein, 7 aa, synthetic construct
QHKQAII

SEQ ID NO: 140082 - protein, 7 aa, synthetic construct
QHKQIPM

SEQ ID NO: 140083 - protein, 7 aa, synthetic construct
QHKQRDS

SEQ ID NO: 140084 - protein, 7 aa, synthetic construct
QHKQSPY

SEQ ID NO: 140085 - protein, 7 aa, synthetic construct
QHKQTLQ

SEQ ID NO: 140086 - protein, 7 aa, synthetic construct
QHKQVAA

SEQ ID NO: 140087 - protein, 7 aa, synthetic construct
QHKSANW

SEQ ID NO: 140088 - protein, 7 aa, synthetic construct
QHKSATT

SEQ ID NO: 140089 - protein, 7 aa, synthetic construct
QHKSDKI

SEQ ID NO: 140090 - protein, 7 aa, synthetic construct
QHKTAIM

SEQ ID NO: 140091 - protein, 7 aa, synthetic construct
QHKTLAY

SEQ ID NO: 140092 - protein, 7 aa, synthetic construct
QHKTLMM

SEQ ID NO: 140093 - protein, 7 aa, synthetic construct
QHKTQPQ

SEQ ID NO: 140094 - protein, 7 aa, synthetic construct
QHKVIVS

SEQ ID NO: 140095 - protein, 7 aa, synthetic construct
QHKVVSM

SEQ ID NO: 140096 - protein, 7 aa, synthetic construct
QHLGIQK

SEQ ID NO: 140097 - protein, 7 aa, synthetic construct
QHLKNYV

SEQ ID NO: 140098 - protein, 7 aa, synthetic construct
QHLKPLG

SEQ ID NO: 140099 - protein, 7 aa, synthetic construct
QHLNNSK

SEQ ID NO: 140100 - protein, 7 aa, synthetic construct
QHLQGRQ

SEQ ID NO: 140101 - protein, 7 aa, synthetic construct
QHLRNIV

SEQ ID NO: 140102 - protein, 7 aa, synthetic construct
QHLSKMI

SEQ ID NO: 140103 - protein, 7 aa, synthetic construct
QHLSKVI

SEQ ID NO: 140104 - protein, 7 aa, synthetic construct
QHLSNAR

SEQ ID NO: 140105 - protein, 7 aa, synthetic construct
QHLSSRA

SEQ ID NO: 140106 - protein, 7 aa, synthetic construct
QHMIAGK

SEQ ID NO: 140107 - protein, 7 aa, synthetic construct
QHMKSTL

SEQ ID NO: 140108 - protein, 7 aa, synthetic construct
QHMQIQK

SEQ ID NO: 140109 - protein, 7 aa, synthetic construct
QHMQTQR

SEQ ID NO: 140110 - protein, 7 aa, synthetic construct
QHMRVAA

SEQ ID NO: 140111 - protein, 7 aa, synthetic construct
QHNGKYM

SEQ ID NO: 140112 - protein, 7 aa, synthetic construct
QHNGMRM

SEQ ID NO: 140113 - protein, 7 aa, synthetic construct
QHNGSSK

SEQ ID NO: 140114 - protein, 7 aa, synthetic construct
QHNGVKY

SEQ ID NO: 140115 - protein, 7 aa, synthetic construct
QHNHPSD

SEQ ID NO: 140116 - protein, 7 aa, synthetic construct
QHNHRYD

SEQ ID NO: 140117 - protein, 7 aa, synthetic construct
QHNIKQM

SEQ ID NO: 140118 - protein, 7 aa, synthetic construct
QHNIVQK

SEQ ID NO: 140119 - protein, 7 aa, synthetic construct
QHNKLGY

SEQ ID NO: 140120 - protein, 7 aa, synthetic construct
QHNKLMT

SEQ ID NO: 140121 - protein, 7 aa, synthetic construct
QHNKPYA

SEQ ID NO: 140122 - protein, 7 aa, synthetic construct
QHNMKII

SEQ ID NO: 140123 - protein, 7 aa, synthetic construct
QHNNSLK

SEQ ID NO: 140124 - protein, 7 aa, synthetic construct
QHNRPTI

SEQ ID NO: 140125 - protein, 7 aa, synthetic construct
QHNSMPK

SEQ ID NO: 140126 - protein, 7 aa, synthetic construct
QHNTVRV

SEQ ID NO: 140127 - protein, 7 aa, synthetic construct
QHNVRPL

SEQ ID NO: 140128 - protein, 7 aa, synthetic construct
QHPGMRP

SEQ ID NO: 140129 - protein, 7 aa, synthetic construct
QHPGPRN

SEQ ID NO: 140130 - protein, 7 aa, synthetic construct
QHPHLKQ

SEQ ID NO: 140131 - protein, 7 aa, synthetic construct
QHPRAQN

SEQ ID NO: 140132 - protein, 7 aa, synthetic construct
QHPRPNS

SEQ ID NO: 140133 - protein, 7 aa, synthetic construct
QHPRSGQ

SEQ ID NO: 140134 - protein, 7 aa, synthetic construct
QHPRSIA

SEQ ID NO: 140135 - protein, 7 aa, synthetic construct
QHPSIMK

SEQ ID NO: 140136 - protein, 7 aa, synthetic construct
QHPSTRQ

SEQ ID NO: 140137 - protein, 7 aa, synthetic construct
QHPTKMY

SEQ ID NO: 140138 - protein, 7 aa, synthetic construct
QHPVPKI

SEQ ID NO: 140139 - protein, 7 aa, synthetic construct
QHQGGAK

SEQ ID NO: 140140 - protein, 7 aa, synthetic construct
QHQGHRL

SEQ ID NO: 140141 - protein, 7 aa, synthetic construct
QHQGPMK

SEQ ID NO: 140142 - protein, 7 aa, synthetic construct
QHQGPPR

SEQ ID NO: 140143 - protein, 7 aa, synthetic construct
QHQIKQV

SEQ ID NO: 140144 - protein, 7 aa, synthetic construct
QHQKLAN

SEQ ID NO: 140145 - protein, 7 aa, synthetic construct
QHQKNPN

SEQ ID NO: 140146 - protein, 7 aa, synthetic construct
QHQKPER

SEQ ID NO: 140147 - protein, 7 aa, synthetic construct
QHQKPLS

SEQ ID NO: 140148 - protein, 7 aa, synthetic construct
QHQKSTV

SEQ ID NO: 140149 - protein, 7 aa, synthetic construct
QHQKVLL

SEQ ID NO: 140150 - protein, 7 aa, synthetic construct
QHQKYSP

SEQ ID NO: 140151 - protein, 7 aa, synthetic construct
QHQMSKI

SEQ ID NO: 140152 - protein, 7 aa, synthetic construct
QHQQQIK

SEQ ID NO: 140153 - protein, 7 aa, synthetic construct
QHQSKFP

SEQ ID NO: 140154 - protein, 7 aa, synthetic construct
QHQTLKY

SEQ ID NO: 140155 - protein, 7 aa, synthetic construct
QHQTYKM

SEQ ID NO: 140156 - protein, 7 aa, synthetic construct
QHQVVRA

SEQ ID NO: 140157 - protein, 7 aa, synthetic construct
QHRAGFS

SEQ ID NO: 140158 - protein, 7 aa, synthetic construct
QHRAVLP

SEQ ID NO: 140159 - protein, 7 aa, synthetic construct
QHRGAPI

SEQ ID NO: 140160 - protein, 7 aa, synthetic construct
QHRGFNP

SEQ ID NO: 140161 - protein, 7 aa, synthetic construct
QHRTHQS

SEQ ID NO: 140162 - protein, 7 aa, synthetic construct
QHSAINR

SEQ ID NO: 140163 - protein, 7 aa, synthetic construct
QHSASLR

SEQ ID NO: 140164 - protein, 7 aa, synthetic construct
QHSIKMV

SEQ ID NO: 140165 - protein, 7 aa, synthetic construct
QHSKQFP

SEQ ID NO: 140166 - protein, 7 aa, synthetic construct
QHSKQQV

SEQ ID NO: 140167 - protein, 7 aa, synthetic construct
QHSKSYA

SEQ ID NO: 140168 - protein, 7 aa, synthetic construct
QHSNKAI

SEQ ID NO: 140169 - protein, 7 aa, synthetic construct
QHSQKGM

SEQ ID NO: 140170 - protein, 7 aa, synthetic construct
QHSQVVK

SEQ ID NO: 140171 - protein, 7 aa, synthetic construct
QHSSGNK

SEQ ID NO: 140172 - protein, 7 aa, synthetic construct
QHSSQQR

SEQ ID NO: 140173 - protein, 7 aa, synthetic construct
QHSTIAK

SEQ ID NO: 140174 - protein, 7 aa, synthetic construct
QHTGAPK

SEQ ID NO: 140175 - protein, 7 aa, synthetic construct
QHTIHKS

SEQ ID NO: 140176 - protein, 7 aa, synthetic construct
QHTIIRA

SEQ ID NO: 140177 - protein, 7 aa, synthetic construct
QHTKLYS

SEQ ID NO: 140178 - protein, 7 aa, synthetic construct
QHTKPPM

SEQ ID NO: 140179 - protein, 7 aa, synthetic construct
QHTNRQF

SEQ ID NO: 140180 - protein, 7 aa, synthetic construct
QHTPGAR

SEQ ID NO: 140181 - protein, 7 aa, synthetic construct
QHTPKAQ

SEQ ID NO: 140182 - protein, 7 aa, synthetic construct
QHTSAKQ

SEQ ID NO: 140183 - protein, 7 aa, synthetic construct
QHTTGGK

SEQ ID NO: 140184 - protein, 7 aa, synthetic construct
QHTTQGR

SEQ ID NO: 140185 - protein, 7 aa, synthetic construct
QHVGKYA

SEQ ID NO: 140186 - protein, 7 aa, synthetic construct
QHVKIGM

SEQ ID NO: 140187 - protein, 7 aa, synthetic construct
QHVKINY

SEQ ID NO: 140188 - protein, 7 aa, synthetic construct
QHVKQSQ

SEQ ID NO: 140189 - protein, 7 aa, synthetic construct
QHVRNIP

SEQ ID NO: 140190 - protein, 7 aa, synthetic construct
QHVRQAA

SEQ ID NO: 140191 - protein, 7 aa, synthetic construct
QHVRQAP

SEQ ID NO: 140192 - protein, 7 aa, synthetic construct
QHVRSAG

SEQ ID NO: 140193 - protein, 7 aa, synthetic construct
QHYKAHI

SEQ ID NO: 140194 - protein, 7 aa, synthetic construct
QHYQPLA

SEQ ID NO: 140195 - protein, 7 aa, synthetic construct
QHYSKTT

SEQ ID NO: 140196 - protein, 7 aa, synthetic construct
QHYTKQS

SEQ ID NO: 140197 - protein, 7 aa, synthetic construct
QIAGRNY

SEQ ID NO: 140198 - protein, 7 aa, synthetic construct
QIAHNSK

SEQ ID NO: 140199 - protein, 7 aa, synthetic construct
QIAVRTG

SEQ ID NO: 140200 - protein, 7 aa, synthetic construct
QIDGRAK

SEQ ID NO: 140201 - protein, 7 aa, synthetic construct
QIDRSAR

SEQ ID NO: 140202 - protein, 7 aa, synthetic construct
QIDTRRA

SEQ ID NO: 140203 - protein, 7 aa, synthetic construct
QIDVRKS

SEQ ID NO: 140204 - protein, 7 aa, synthetic construct
QIEPRKM

SEQ ID NO: 140205 - protein, 7 aa, synthetic construct
QIGHAKA

SEQ ID NO: 140206 - protein, 7 aa, synthetic construct
QIGHRAG

SEQ ID NO: 140207 - protein, 7 aa, synthetic construct
QIGLRKD

SEQ ID NO: 140208 - protein, 7 aa, synthetic construct
QIGMRAT

SEQ ID NO: 140209 - protein, 7 aa, synthetic construct
QIGMVRG

SEQ ID NO: 140210 - protein, 7 aa, synthetic construct
QIGNTYA

SEQ ID NO: 140211 - protein, 7 aa, synthetic construct
QIGQYKG

SEQ ID NO: 140212 - protein, 7 aa, synthetic construct
QIGRTGY

SEQ ID NO: 140213 - protein, 7 aa, synthetic construct
QIGYKAA

SEQ ID NO: 140214 - protein, 7 aa, synthetic construct
QIHGSRA

SEQ ID NO: 140215 - protein, 7 aa, synthetic construct
QIHKQQL

SEQ ID NO: 140216 - protein, 7 aa, synthetic construct
QIHMTKM

SEQ ID NO: 140217 - protein, 7 aa, synthetic construct
QIHNAVR

SEQ ID NO: 140218 - protein, 7 aa, synthetic construct
QIHQKHV

SEQ ID NO: 140219 - protein, 7 aa, synthetic construct
QIHRTSG

SEQ ID NO: 140220 - protein, 7 aa, synthetic construct
QIHSAKL

SEQ ID NO: 140221 - protein, 7 aa, synthetic construct
QIHSSKA

SEQ ID NO: 140222 - protein, 7 aa, synthetic construct
QIHVVGK

SEQ ID NO: 140223 - protein, 7 aa, synthetic construct
QIIRESK

SEQ ID NO: 140224 - protein, 7 aa, synthetic construct
QIKDLYR

SEQ ID NO: 140225 - protein, 7 aa, synthetic construct
QIKDRMY

SEQ ID NO: 140226 - protein, 7 aa, synthetic construct
QIKDYRQ

SEQ ID NO: 140227 - protein, 7 aa, synthetic construct
QIKESNR

SEQ ID NO: 140228 - protein, 7 aa, synthetic construct
QIKETSR

SEQ ID NO: 140229 - protein, 7 aa, synthetic construct
QIKHGMQ

SEQ ID NO: 140230 - protein, 7 aa, synthetic construct
QIKKMGD

SEQ ID NO: 140231 - protein, 7 aa, synthetic construct
QIKLGGM

SEQ ID NO: 140232 - protein, 7 aa, synthetic construct
QIKPHYN

SEQ ID NO: 140233 - protein, 7 aa, synthetic construct
QIKPRDS

SEQ ID NO: 140234 - protein, 7 aa, synthetic construct
QIKRNLE

SEQ ID NO: 140235 - protein, 7 aa, synthetic construct
QIKYASP

SEQ ID NO: 140236 - protein, 7 aa, synthetic construct
QILGTVV

SEQ ID NO: 140237 - protein, 7 aa, synthetic construct
QILPSTI

SEQ ID NO: 140238 - protein, 7 aa, synthetic construct
QILQHQK

SEQ ID NO: 140239 - protein, 7 aa, synthetic construct
QIMAQPR

SEQ ID NO: 140240 - protein, 7 aa, synthetic construct
QIMGQRT

SEQ ID NO: 140241 - protein, 7 aa, synthetic construct
QIMKARD

SEQ ID NO: 140242 - protein, 7 aa, synthetic construct
QIMRNIS

SEQ ID NO: 140243 - protein, 7 aa, synthetic construct
QINARVT

SEQ ID NO: 140244 - protein, 7 aa, synthetic construct
QINDRRM

SEQ ID NO: 140245 - protein, 7 aa, synthetic construct
QINHSQK

SEQ ID NO: 140246 - protein, 7 aa, synthetic construct
QINHTNK

SEQ ID NO: 140247 - protein, 7 aa, synthetic construct
QINKYEK

SEQ ID NO: 140248 - protein, 7 aa, synthetic construct
QINTVRY

SEQ ID NO: 140249 - protein, 7 aa, synthetic construct
QIPDIRK

SEQ ID NO: 140250 - protein, 7 aa, synthetic construct
QIPGRVM

SEQ ID NO: 140251 - protein, 7 aa, synthetic construct
QIPHIAK

SEQ ID NO: 140252 - protein, 7 aa, synthetic construct
QIPHVAK

SEQ ID NO: 140253 - protein, 7 aa, synthetic construct
QIPHVTK

SEQ ID NO: 140254 - protein, 7 aa, synthetic construct
QIPHYAK

SEQ ID NO: 140255 - protein, 7 aa, synthetic construct
QIPKYQP

SEQ ID NO: 140256 - protein, 7 aa, synthetic construct
QIPMSRA

SEQ ID NO: 140257 - protein, 7 aa, synthetic construct
QIPRASA

SEQ ID NO: 140258 - protein, 7 aa, synthetic construct
QIPRPNL

SEQ ID NO: 140259 - protein, 7 aa, synthetic construct
QIPRQLG

SEQ ID NO: 140260 - protein, 7 aa, synthetic construct
QIPRSMQ

SEQ ID NO: 140261 - protein, 7 aa, synthetic construct
QIPRSNM

SEQ ID NO: 140262 - protein, 7 aa, synthetic construct
QIPTNLR

SEQ ID NO: 140263 - protein, 7 aa, synthetic construct
QIPTTHK

SEQ ID NO: 140264 - protein, 7 aa, synthetic construct
QIQHAGK

SEQ ID NO: 140265 - protein, 7 aa, synthetic construct
QIQHKSI

SEQ ID NO: 140266 - protein, 7 aa, synthetic construct
QIQKVVT

SEQ ID NO: 140267 - protein, 7 aa, synthetic construct
QIQQRNM

SEQ ID NO: 140268 - protein, 7 aa, synthetic construct
QIRAKEQ

SEQ ID NO: 140269 - protein, 7 aa, synthetic construct
QIRDKFS

SEQ ID NO: 140270 - protein, 7 aa, synthetic construct
QIRGARE

SEQ ID NO: 140271 - protein, 7 aa, synthetic construct
QIRGSPN

SEQ ID NO: 140272 - protein, 7 aa, synthetic construct
QIRKDTN

SEQ ID NO: 140273 - protein, 7 aa, synthetic construct
QIRKEFG

SEQ ID NO: 140274 - protein, 7 aa, synthetic construct
QIRKGFE

SEQ ID NO: 140275 - protein, 7 aa, synthetic construct
QIRNHAA

SEQ ID NO: 140276 - protein, 7 aa, synthetic construct
QIRNPQM

SEQ ID NO: 140277 - protein, 7 aa, synthetic construct
QIRNTQL

SEQ ID NO: 140278 - protein, 7 aa, synthetic construct
QIRQGAF

SEQ ID NO: 140279 - protein, 7 aa, synthetic construct
QIRQNPI

SEQ ID NO: 140280 - protein, 7 aa, synthetic construct
QIRSISA

SEQ ID NO: 140281 - protein, 7 aa, synthetic construct
QIRTKEM

SEQ ID NO: 140282 - protein, 7 aa, synthetic construct
QIRTKVE

SEQ ID NO: 140283 - protein, 7 aa, synthetic construct
QIRTSAG

SEQ ID NO: 140284 - protein, 7 aa, synthetic construct
QIRVSDK

SEQ ID NO: 140285 - protein, 7 aa, synthetic construct
QISGAYM

SEQ ID NO: 140286 - protein, 7 aa, synthetic construct
QISGHKF

SEQ ID NO: 140287 - protein, 7 aa, synthetic construct
QISHGAK

SEQ ID NO: 140288 - protein, 7 aa, synthetic construct
QISHKTV

SEQ ID NO: 140289 - protein, 7 aa, synthetic construct
QISKLGY

SEQ ID NO: 140290 - protein, 7 aa, synthetic construct
QISKYRE

SEQ ID NO: 140291 - protein, 7 aa, synthetic construct
QISRGGF

SEQ ID NO: 140292 - protein, 7 aa, synthetic construct
QISRGPI

SEQ ID NO: 140293 - protein, 7 aa, synthetic construct
QITGYKN

SEQ ID NO: 140294 - protein, 7 aa, synthetic construct
QITRPAQ

SEQ ID NO: 140295 - protein, 7 aa, synthetic construct
QITRPTQ

SEQ ID NO: 140296 - protein, 7 aa, synthetic construct
QITRREG

SEQ ID NO: 140297 - protein, 7 aa, synthetic construct
QITSIRQ

SEQ ID NO: 140298 - protein, 7 aa, synthetic construct
QITVRSG

SEQ ID NO: 140299 - protein, 7 aa, synthetic construct
QITYGVN

SEQ ID NO: 140300 - protein, 7 aa, synthetic construct
QIVGKHM

SEQ ID NO: 140301 - protein, 7 aa, synthetic construct
QIVPRGQ

SEQ ID NO: 140302 - protein, 7 aa, synthetic construct
QIVRAQG

SEQ ID NO: 140303 - protein, 7 aa, synthetic construct
QIVRNVH

SEQ ID NO: 140304 - protein, 7 aa, synthetic construct
QIYGLSA

SEQ ID NO: 140305 - protein, 7 aa, synthetic construct
QIYGQKG

SEQ ID NO: 140306 - protein, 7 aa, synthetic construct
QIYPKDK

SEQ ID NO: 140307 - protein, 7 aa, synthetic construct
QKADHKS

SEQ ID NO: 140308 - protein, 7 aa, synthetic construct
QKAEFQK

SEQ ID NO: 140309 - protein, 7 aa, synthetic construct
QKAERYM

SEQ ID NO: 140310 - protein, 7 aa, synthetic construct
QKAHHAI

SEQ ID NO: 140311 - protein, 7 aa, synthetic construct
QKAHPPQ

SEQ ID NO: 140312 - protein, 7 aa, synthetic construct
QKAHVDK

SEQ ID NO: 140313 - protein, 7 aa, synthetic construct
QKAHVML

SEQ ID NO: 140314 - protein, 7 aa, synthetic construct
QKAHVPA

SEQ ID NO: 140315 - protein, 7 aa, synthetic construct
QKAIHLA

SEQ ID NO: 140316 - protein, 7 aa, synthetic construct
QKAKFDT

SEQ ID NO: 140317 - protein, 7 aa, synthetic construct
QKAKWDG

SEQ ID NO: 140318 - protein, 7 aa, synthetic construct
QKALSER

SEQ ID NO: 140319 - protein, 7 aa, synthetic construct
QKAMNDR

SEQ ID NO: 140320 - protein, 7 aa, synthetic construct
QKAMPDR

SEQ ID NO: 140321 - protein, 7 aa, synthetic construct
QKAMVQF

SEQ ID NO: 140322 - protein, 7 aa, synthetic construct
QKANHYS

SEQ ID NO: 140323 - protein, 7 aa, synthetic construct
QKANPPH

SEQ ID NO: 140324 - protein, 7 aa, synthetic construct
QKAPERA

SEQ ID NO: 140325 - protein, 7 aa, synthetic construct
QKAPHAV

SEQ ID NO: 140326 - protein, 7 aa, synthetic construct
QKAQHLQ

SEQ ID NO: 140327 - protein, 7 aa, synthetic construct
QKAQMAF

SEQ ID NO: 140328 - protein, 7 aa, synthetic construct
QKAQTER

SEQ ID NO: 140329 - protein, 7 aa, synthetic construct
QKASIEK

SEQ ID NO: 140330 - protein, 7 aa, synthetic construct
QKATAPY

SEQ ID NO: 140331 - protein, 7 aa, synthetic construct
QKATENR

SEQ ID NO: 140332 - protein, 7 aa, synthetic construct
QKATHQY

SEQ ID NO: 140333 - protein, 7 aa, synthetic construct
QKAVDPR

SEQ ID NO: 140334 - protein, 7 aa, synthetic construct
QKAVHNL

SEQ ID NO: 140335 - protein, 7 aa, synthetic construct
QKAVMEK

SEQ ID NO: 140336 - protein, 7 aa, synthetic construct
QKAYAQI

SEQ ID NO: 140337 - protein, 7 aa, synthetic construct
QKAYPTN

SEQ ID NO: 140338 - protein, 7 aa, synthetic construct
QKAYTTT

SEQ ID NO: 140339 - protein, 7 aa, synthetic construct
QKDALRW

SEQ ID NO: 140340 - protein, 7 aa, synthetic construct
QKDFQSR

SEQ ID NO: 140341 - protein, 7 aa, synthetic construct
QKDGHRM

SEQ ID NO: 140342 - protein, 7 aa, synthetic construct
QKDHNKM

SEQ ID NO: 140343 - protein, 7 aa, synthetic construct
QKDHPAR

SEQ ID NO: 140344 - protein, 7 aa, synthetic construct
QKDILQR

SEQ ID NO: 140345 - protein, 7 aa, synthetic construct
QKDKHTW

SEQ ID NO: 140346 - protein, 7 aa, synthetic construct
QKDMPPR

SEQ ID NO: 140347 - protein, 7 aa, synthetic construct
QKDNKDR

SEQ ID NO: 140348 - protein, 7 aa, synthetic construct
QKDQSRA

SEQ ID NO: 140349 - protein, 7 aa, synthetic construct
QKDRPHQ

SEQ ID NO: 140350 - protein, 7 aa, synthetic construct
QKDRRDY

SEQ ID NO: 140351 - protein, 7 aa, synthetic construct
QKDTAPR

SEQ ID NO: 140352 - protein, 7 aa, synthetic construct
QKDVTQR

SEQ ID NO: 140353 - protein, 7 aa, synthetic construct
QKDYKSF

SEQ ID NO: 140354 - protein, 7 aa, synthetic construct
QKDYNKA

SEQ ID NO: 140355 - protein, 7 aa, synthetic construct
QKDYPRN

SEQ ID NO: 140356 - protein, 7 aa, synthetic construct
QKDYSIK

SEQ ID NO: 140357 - protein, 7 aa, synthetic construct
QKEEVRR

SEQ ID NO: 140358 - protein, 7 aa, synthetic construct
QKEFQGR

SEQ ID NO: 140359 - protein, 7 aa, synthetic construct
QKEGNIR

SEQ ID NO: 140360 - protein, 7 aa, synthetic construct
QKEKQHN

SEQ ID NO: 140361 - protein, 7 aa, synthetic construct
QKELHGK

SEQ ID NO: 140362 - protein, 7 aa, synthetic construct
QKEMPGR

SEQ ID NO: 140363 - protein, 7 aa, synthetic construct
QKENAIR

SEQ ID NO: 140364 - protein, 7 aa, synthetic construct
QKENNKW

SEQ ID NO: 140365 - protein, 7 aa, synthetic construct
QKENVGK

SEQ ID NO: 140366 - protein, 7 aa, synthetic construct
QKERDKL

SEQ ID NO: 140367 - protein, 7 aa, synthetic construct
QKESSQK

SEQ ID NO: 140368 - protein, 7 aa, synthetic construct
QKETLRY

SEQ ID NO: 140369 - protein, 7 aa, synthetic construct
QKEVMTR

SEQ ID NO: 140370 - protein, 7 aa, synthetic construct
QKEWKSG

SEQ ID NO: 140371 - protein, 7 aa, synthetic construct
QKEYAAR

SEQ ID NO: 140372 - protein, 7 aa, synthetic construct
QKEYQNK

SEQ ID NO: 140373 - protein, 7 aa, synthetic construct
QKEYRIN

SEQ ID NO: 140374 - protein, 7 aa, synthetic construct
QKEYVKH

SEQ ID NO: 140375 - protein, 7 aa, synthetic construct
QKFAERN

SEQ ID NO: 140376 - protein, 7 aa, synthetic construct
QKFANLA

SEQ ID NO: 140377 - protein, 7 aa, synthetic construct
QKFASNN

SEQ ID NO: 140378 - protein, 7 aa, synthetic construct
QKFGIMA

SEQ ID NO: 140379 - protein, 7 aa, synthetic construct
QKFGPSN

SEQ ID NO: 140380 - protein, 7 aa, synthetic construct
QKFIPKE

SEQ ID NO: 140381 - protein, 7 aa, synthetic construct
QKFKLSD

SEQ ID NO: 140382 - protein, 7 aa, synthetic construct
QKFNANS

SEQ ID NO: 140383 - protein, 7 aa, synthetic construct
QKFNVGL

SEQ ID NO: 140384 - protein, 7 aa, synthetic construct
QKFNVMG

SEQ ID NO: 140385 - protein, 7 aa, synthetic construct
QKFPDSR

SEQ ID NO: 140386 - protein, 7 aa, synthetic construct
QKFPNTL

SEQ ID NO: 140387 - protein, 7 aa, synthetic construct
QKFPTIQ

SEQ ID NO: 140388 - protein, 7 aa, synthetic construct
QKFPVPQ

SEQ ID NO: 140389 - protein, 7 aa, synthetic construct
QKFQPTI

SEQ ID NO: 140390 - protein, 7 aa, synthetic construct
QKFQTPL

SEQ ID NO: 140391 - protein, 7 aa, synthetic construct
QKFVHNA

SEQ ID NO: 140392 - protein, 7 aa, synthetic construct
QKGAGYM

SEQ ID NO: 140393 - protein, 7 aa, synthetic construct
QKGAPHV

SEQ ID NO: 140394 - protein, 7 aa, synthetic construct
QKGDQKW

SEQ ID NO: 140395 - protein, 7 aa, synthetic construct
QKGEIPK

SEQ ID NO: 140396 - protein, 7 aa, synthetic construct
QKGELMR

SEQ ID NO: 140397 - protein, 7 aa, synthetic construct
QKGELSK

SEQ ID NO: 140398 - protein, 7 aa, synthetic construct
QKGFESK

SEQ ID NO: 140399 - protein, 7 aa, synthetic construct
QKGFQAH

SEQ ID NO: 140400 - protein, 7 aa, synthetic construct
QKGFSVQ

SEQ ID NO: 140401 - protein, 7 aa, synthetic construct
QKGGADR

SEQ ID NO: 140402 - protein, 7 aa, synthetic construct
QKGGAYA

SEQ ID NO: 140403 - protein, 7 aa, synthetic construct
QKGGAYG

SEQ ID NO: 140404 - protein, 7 aa, synthetic construct
QKGGDAR

SEQ ID NO: 140405 - protein, 7 aa, synthetic construct
QKGGYAN

SEQ ID NO: 140406 - protein, 7 aa, synthetic construct
QKGHGMI

SEQ ID NO: 140407 - protein, 7 aa, synthetic construct
QKGHHMA

SEQ ID NO: 140408 - protein, 7 aa, synthetic construct
QKGHLMQ

SEQ ID NO: 140409 - protein, 7 aa, synthetic construct
QKGHVAL

SEQ ID NO: 140410 - protein, 7 aa, synthetic construct
QKGIDRH

SEQ ID NO: 140411 - protein, 7 aa, synthetic construct
QKGIERQ

SEQ ID NO: 140412 - protein, 7 aa, synthetic construct
QKGISHL

SEQ ID NO: 140413 - protein, 7 aa, synthetic construct
QKGKYEN

SEQ ID NO: 140414 - protein, 7 aa, synthetic construct
QKGLHGL

SEQ ID NO: 140415 - protein, 7 aa, synthetic construct
QKGLQDK

SEQ ID NO: 140416 - protein, 7 aa, synthetic construct
QKGLSAY

SEQ ID NO: 140417 - protein, 7 aa, synthetic construct
QKGMQAQ

SEQ ID NO: 140418 - protein, 7 aa, synthetic construct
QKGNPHY

SEQ ID NO: 140419 - protein, 7 aa, synthetic construct
QKGPDPR

SEQ ID NO: 140420 - protein, 7 aa, synthetic construct
QKGPEAR

SEQ ID NO: 140421 - protein, 7 aa, synthetic construct
QKGPHDR

SEQ ID NO: 140422 - protein, 7 aa, synthetic construct
QKGPHGV

SEQ ID NO: 140423 - protein, 7 aa, synthetic construct
QKGPSTF

SEQ ID NO: 140424 - protein, 7 aa, synthetic construct
QKGPSYA

SEQ ID NO: 140425 - protein, 7 aa, synthetic construct
QKGQAMF

SEQ ID NO: 140426 - protein, 7 aa, synthetic construct
QKGQGLH

SEQ ID NO: 140427 - protein, 7 aa, synthetic construct
QKGQKDT

SEQ ID NO: 140428 - protein, 7 aa, synthetic construct
QKGRDFM

SEQ ID NO: 140429 - protein, 7 aa, synthetic construct
QKGRPSD

SEQ ID NO: 140430 - protein, 7 aa, synthetic construct
QKGSGSW

SEQ ID NO: 140431 - protein, 7 aa, synthetic construct
QKGSVSY

SEQ ID NO: 140432 - protein, 7 aa, synthetic construct
QKGSYGG

SEQ ID NO: 140433 - protein, 7 aa, synthetic construct
QKGSYQM

SEQ ID NO: 140434 - protein, 7 aa, synthetic construct
QKGTDQK

SEQ ID NO: 140435 - protein, 7 aa, synthetic construct
QKGVAMY

SEQ ID NO: 140436 - protein, 7 aa, synthetic construct
QKGVIDR

SEQ ID NO: 140437 - protein, 7 aa, synthetic construct
QKGVQMS

SEQ ID NO: 140438 - protein, 7 aa, synthetic construct
QKGYGVQ

SEQ ID NO: 140439 - protein, 7 aa, synthetic construct
QKGYSGT

SEQ ID NO: 140440 - protein, 7 aa, synthetic construct
QKGYVSP

SEQ ID NO: 140441 - protein, 7 aa, synthetic construct
QKHAITL

SEQ ID NO: 140442 - protein, 7 aa, synthetic construct
QKHAPLV

SEQ ID NO: 140443 - protein, 7 aa, synthetic construct
QKHAQGL

SEQ ID NO: 140444 - protein, 7 aa, synthetic construct
QKHAVTI

SEQ ID NO: 140445 - protein, 7 aa, synthetic construct
QKHDKQP

SEQ ID NO: 140446 - protein, 7 aa, synthetic construct
QKHDPRI

SEQ ID NO: 140447 - protein, 7 aa, synthetic construct
QKHDRGF

SEQ ID NO: 140448 - protein, 7 aa, synthetic construct
QKHGIMN

SEQ ID NO: 140449 - protein, 7 aa, synthetic construct
QKHGNSV

SEQ ID NO: 140450 - protein, 7 aa, synthetic construct
QKHGTLN

SEQ ID NO: 140451 - protein, 7 aa, synthetic construct
QKHGTPL

SEQ ID NO: 140452 - protein, 7 aa, synthetic construct
QKHGVIL

SEQ ID NO: 140453 - protein, 7 aa, synthetic construct
QKHHPMP

SEQ ID NO: 140454 - protein, 7 aa, synthetic construct
QKHHPNL

SEQ ID NO: 140455 - protein, 7 aa, synthetic construct
QKHIPST

SEQ ID NO: 140456 - protein, 7 aa, synthetic construct
QKHIQQI

SEQ ID NO: 140457 - protein, 7 aa, synthetic construct
QKHLQST

SEQ ID NO: 140458 - protein, 7 aa, synthetic construct
QKHLSMQ

SEQ ID NO: 140459 - protein, 7 aa, synthetic construct
QKHNPTT

SEQ ID NO: 140460 - protein, 7 aa, synthetic construct
QKHNTMT

SEQ ID NO: 140461 - protein, 7 aa, synthetic construct
QKHPALH

SEQ ID NO: 140462 - protein, 7 aa, synthetic construct
QKHQLPI

SEQ ID NO: 140463 - protein, 7 aa, synthetic construct
QKHQLYA

SEQ ID NO: 140464 - protein, 7 aa, synthetic construct
QKHQQGT

SEQ ID NO: 140465 - protein, 7 aa, synthetic construct
QKHQSLN

SEQ ID NO: 140466 - protein, 7 aa, synthetic construct
QKHSPLN

SEQ ID NO: 140467 - protein, 7 aa, synthetic construct
QKHSPPT

SEQ ID NO: 140468 - protein, 7 aa, synthetic construct
QKHSSFA

SEQ ID NO: 140469 - protein, 7 aa, synthetic construct
QKHTAPI

SEQ ID NO: 140470 - protein, 7 aa, synthetic construct
QKHTENR

SEQ ID NO: 140471 - protein, 7 aa, synthetic construct
QKHTGVM

SEQ ID NO: 140472 - protein, 7 aa, synthetic construct
QKHTLMA

SEQ ID NO: 140473 - protein, 7 aa, synthetic construct
QKHTPAL

SEQ ID NO: 140474 - protein, 7 aa, synthetic construct
QKHTRLD

SEQ ID NO: 140475 - protein, 7 aa, synthetic construct
QKHTTTT

SEQ ID NO: 140476 - protein, 7 aa, synthetic construct
QKHTTVS

SEQ ID NO: 140477 - protein, 7 aa, synthetic construct
QKHVLAP

SEQ ID NO: 140478 - protein, 7 aa, synthetic construct
QKHVQLV

SEQ ID NO: 140479 - protein, 7 aa, synthetic construct
QKHVYKD

SEQ ID NO: 140480 - protein, 7 aa, synthetic construct
QKIMKEY

SEQ ID NO: 140481 - protein, 7 aa, synthetic construct
QKIPALN

SEQ ID NO: 140482 - protein, 7 aa, synthetic construct
QKIPLAS

SEQ ID NO: 140483 - protein, 7 aa, synthetic construct
QKIPSQY

SEQ ID NO: 140484 - protein, 7 aa, synthetic construct
QKIRAAE

SEQ ID NO: 140485 - protein, 7 aa, synthetic construct
QKIREQQ

SEQ ID NO: 140486 - protein, 7 aa, synthetic construct
QKIRVDT

SEQ ID NO: 140487 - protein, 7 aa, synthetic construct
QKITYSG

SEQ ID NO: 140488 - protein, 7 aa, synthetic construct
QKIYKQD

SEQ ID NO: 140489 - protein, 7 aa, synthetic construct
QKIYKQE

SEQ ID NO: 140490 - protein, 7 aa, synthetic construct
QKIYKTE

SEQ ID NO: 140491 - protein, 7 aa, synthetic construct
QKKDKDV

SEQ ID NO: 140492 - protein, 7 aa, synthetic construct
QKKDSYQ

SEQ ID NO: 140493 - protein, 7 aa, synthetic construct
QKKEIYF

SEQ ID NO: 140494 - protein, 7 aa, synthetic construct
QKKEPNS

SEQ ID NO: 140495 - protein, 7 aa, synthetic construct
QKKEVMW

SEQ ID NO: 140496 - protein, 7 aa, synthetic construct
QKKFMVD

SEQ ID NO: 140497 - protein, 7 aa, synthetic construct
QKKGPEY

SEQ ID NO: 140498 - protein, 7 aa, synthetic construct
QKKIVDT

SEQ ID NO: 140499 - protein, 7 aa, synthetic construct
QKKLEFY

SEQ ID NO: 140500 - protein, 7 aa, synthetic construct
QKKLQDY

SEQ ID NO: 140501 - protein, 7 aa, synthetic construct
QKKMPEQ

SEQ ID NO: 140502 - protein, 7 aa, synthetic construct
QKKMSPE

SEQ ID NO: 140503 - protein, 7 aa, synthetic construct
QKKNDHI

SEQ ID NO: 140504 - protein, 7 aa, synthetic construct
QKKPDHS

SEQ ID NO: 140505 - protein, 7 aa, synthetic construct
QKKQDNS

SEQ ID NO: 140506 - protein, 7 aa, synthetic construct
QKKQDSQ

SEQ ID NO: 140507 - protein, 7 aa, synthetic construct
QKKQDST

SEQ ID NO: 140508 - protein, 7 aa, synthetic construct
QKKTPEM

SEQ ID NO: 140509 - protein, 7 aa, synthetic construct
QKKTSDT

SEQ ID NO: 140510 - protein, 7 aa, synthetic construct
QKKVEWG

SEQ ID NO: 140511 - protein, 7 aa, synthetic construct
QKKVIDT

SEQ ID NO: 140512 - protein, 7 aa, synthetic construct
QKKYELG

SEQ ID NO: 140513 - protein, 7 aa, synthetic construct
QKKYTDA

SEQ ID NO: 140514 - protein, 7 aa, synthetic construct
QKLDRYN

SEQ ID NO: 140515 - protein, 7 aa, synthetic construct
QKLGMDR

SEQ ID NO: 140516 - protein, 7 aa, synthetic construct
QKLGSFS

SEQ ID NO: 140517 - protein, 7 aa, synthetic construct
QKLHHTI

SEQ ID NO: 140518 - protein, 7 aa, synthetic construct
QKLHSAI

SEQ ID NO: 140519 - protein, 7 aa, synthetic construct
QKLHTAY

SEQ ID NO: 140520 - protein, 7 aa, synthetic construct
QKLIRHE

SEQ ID NO: 140521 - protein, 7 aa, synthetic construct
QKLLRGD

SEQ ID NO: 140522 - protein, 7 aa, synthetic construct
QKLRATE

SEQ ID NO: 140523 - protein, 7 aa, synthetic construct
QKLRDVI

SEQ ID NO: 140524 - protein, 7 aa, synthetic construct
QKLTRFE

SEQ ID NO: 140525 - protein, 7 aa, synthetic construct
QKMAPNY

SEQ ID NO: 140526 - protein, 7 aa, synthetic construct
QKMGAFP

SEQ ID NO: 140527 - protein, 7 aa, synthetic construct
QKMGLTY

SEQ ID NO: 140528 - protein, 7 aa, synthetic construct
QKMGNPF

SEQ ID NO: 140529 - protein, 7 aa, synthetic construct
QKMHDKY

SEQ ID NO: 140530 - protein, 7 aa, synthetic construct
QKMHIPQ

SEQ ID NO: 140531 - protein, 7 aa, synthetic construct
QKMHIQQ

SEQ ID NO: 140532 - protein, 7 aa, synthetic construct
QKMHISV

SEQ ID NO: 140533 - protein, 7 aa, synthetic construct
QKMHPLN

SEQ ID NO: 140534 - protein, 7 aa, synthetic construct
QKMINHP

SEQ ID NO: 140535 - protein, 7 aa, synthetic construct
QKMKDLF

SEQ ID NO: 140536 - protein, 7 aa, synthetic construct
QKMKEYY

SEQ ID NO: 140537 - protein, 7 aa, synthetic construct
QKMKNYD

SEQ ID NO: 140538 - protein, 7 aa, synthetic construct
QKMMDNR

SEQ ID NO: 140539 - protein, 7 aa, synthetic construct
QKMPHQQ

SEQ ID NO: 140540 - protein, 7 aa, synthetic construct
QKMQDGR

SEQ ID NO: 140541 - protein, 7 aa, synthetic construct
QKMQHGY

SEQ ID NO: 140542 - protein, 7 aa, synthetic construct
QKMQIGY

SEQ ID NO: 140543 - protein, 7 aa, synthetic construct
QKMQKNP

SEQ ID NO: 140544 - protein, 7 aa, synthetic construct
QKMRDHV

SEQ ID NO: 140545 - protein, 7 aa, synthetic construct
QKMSHER

SEQ ID NO: 140546 - protein, 7 aa, synthetic construct
QKNAERT

SEQ ID NO: 140547 - protein, 7 aa, synthetic construct
QKNDKAY

SEQ ID NO: 140548 - protein, 7 aa, synthetic construct
QKNGADR

SEQ ID NO: 140549 - protein, 7 aa, synthetic construct
QKNGDAR

SEQ ID NO: 140550 - protein, 7 aa, synthetic construct
QKNHPVS

SEQ ID NO: 140551 - protein, 7 aa, synthetic construct
QKNIHAL

SEQ ID NO: 140552 - protein, 7 aa, synthetic construct
QKNKSEY

SEQ ID NO: 140553 - protein, 7 aa, synthetic construct
QKNLPDK

SEQ ID NO: 140554 - protein, 7 aa, synthetic construct
QKNMGVF

SEQ ID NO: 140555 - protein, 7 aa, synthetic construct
QKNMNQH

SEQ ID NO: 140556 - protein, 7 aa, synthetic construct
QKNQNLH

SEQ ID NO: 140557 - protein, 7 aa, synthetic construct
QKNQNTW

SEQ ID NO: 140558 - protein, 7 aa, synthetic construct
QKNQRHE

SEQ ID NO: 140559 - protein, 7 aa, synthetic construct
QKNQSHF

SEQ ID NO: 140560 - protein, 7 aa, synthetic construct
QKNQYGA

SEQ ID NO: 140561 - protein, 7 aa, synthetic construct
QKNRMDT

SEQ ID NO: 140562 - protein, 7 aa, synthetic construct
QKNSDYK

SEQ ID NO: 140563 - protein, 7 aa, synthetic construct
QKNTHGT

SEQ ID NO: 140564 - protein, 7 aa, synthetic construct
QKNTPAH

SEQ ID NO: 140565 - protein, 7 aa, synthetic construct
QKNTRDT

SEQ ID NO: 140566 - protein, 7 aa, synthetic construct
QKNVAPH

SEQ ID NO: 140567 - protein, 7 aa, synthetic construct
QKNVAYH

SEQ ID NO: 140568 - protein, 7 aa, synthetic construct
QKNVDKN

SEQ ID NO: 140569 - protein, 7 aa, synthetic construct
QKNVFPP

SEQ ID NO: 140570 - protein, 7 aa, synthetic construct
QKNVLAH

SEQ ID NO: 140571 - protein, 7 aa, synthetic construct
QKNVPNF

SEQ ID NO: 140572 - protein, 7 aa, synthetic construct
QKNYEKN

SEQ ID NO: 140573 - protein, 7 aa, synthetic construct
QKNYSLT

SEQ ID NO: 140574 - protein, 7 aa, synthetic construct
QKNYVTS

SEQ ID NO: 140575 - protein, 7 aa, synthetic construct
QKPADYR

SEQ ID NO: 140576 - protein, 7 aa, synthetic construct
QKPAIML

SEQ ID NO: 140577 - protein, 7 aa, synthetic construct
QKPARYD

SEQ ID NO: 140578 - protein, 7 aa, synthetic construct
QKPEQQR

SEQ ID NO: 140579 - protein, 7 aa, synthetic construct
QKPFVNA

SEQ ID NO: 140580 - protein, 7 aa, synthetic construct
QKPGYGY

SEQ ID NO: 140581 - protein, 7 aa, synthetic construct
QKPHNNL

SEQ ID NO: 140582 - protein, 7 aa, synthetic construct
QKPHQLY

SEQ ID NO: 140583 - protein, 7 aa, synthetic construct
QKPHTYN

SEQ ID NO: 140584 - protein, 7 aa, synthetic construct
QKPINII

SEQ ID NO: 140585 - protein, 7 aa, synthetic construct
QKPISTI

SEQ ID NO: 140586 - protein, 7 aa, synthetic construct
QKPKFDT

SEQ ID NO: 140587 - protein, 7 aa, synthetic construct
QKPKGEW

SEQ ID NO: 140588 - protein, 7 aa, synthetic construct
QKPLVQL

SEQ ID NO: 140589 - protein, 7 aa, synthetic construct
QKPMGNF

SEQ ID NO: 140590 - protein, 7 aa, synthetic construct
QKPMHPI

SEQ ID NO: 140591 - protein, 7 aa, synthetic construct
QKPMMYA

SEQ ID NO: 140592 - protein, 7 aa, synthetic construct
QKPMVTH

SEQ ID NO: 140593 - protein, 7 aa, synthetic construct
QKPMYGV

SEQ ID NO: 140594 - protein, 7 aa, synthetic construct
QKPNGYY

SEQ ID NO: 140595 - protein, 7 aa, synthetic construct
QKPPYPM

SEQ ID NO: 140596 - protein, 7 aa, synthetic construct
QKPQHFS

SEQ ID NO: 140597 - protein, 7 aa, synthetic construct
QKPQNIY

SEQ ID NO: 140598 - protein, 7 aa, synthetic construct
QKPQPFV

SEQ ID NO: 140599 - protein, 7 aa, synthetic construct
QKPRDIA

SEQ ID NO: 140600 - protein, 7 aa, synthetic construct
QKPRGDM

SEQ ID NO: 140601 - protein, 7 aa, synthetic construct
QKPRTEG

SEQ ID NO: 140602 - protein, 7 aa, synthetic construct
QKPTHAY

SEQ ID NO: 140603 - protein, 7 aa, synthetic construct
QKPVHVV

SEQ ID NO: 140604 - protein, 7 aa, synthetic construct
QKPVPGF

SEQ ID NO: 140605 - protein, 7 aa, synthetic construct
QKPVTNW

SEQ ID NO: 140606 - protein, 7 aa, synthetic construct
QKQAPKD

SEQ ID NO: 140607 - protein, 7 aa, synthetic construct
QKQAQHA

SEQ ID NO: 140608 - protein, 7 aa, synthetic construct
QKQAWPA

SEQ ID NO: 140609 - protein, 7 aa, synthetic construct
QKQDKRD

SEQ ID NO: 140610 - protein, 7 aa, synthetic construct
QKQEFGK

SEQ ID NO: 140611 - protein, 7 aa, synthetic construct
QKQEREK

SEQ ID NO: 140612 - protein, 7 aa, synthetic construct
QKQETEH

SEQ ID NO: 140613 - protein, 7 aa, synthetic construct
QKQFDPK

SEQ ID NO: 140614 - protein, 7 aa, synthetic construct
QKQGYHT

SEQ ID NO: 140615 - protein, 7 aa, synthetic construct
QKQHAAL

SEQ ID NO: 140616 - protein, 7 aa, synthetic construct
QKQHAIY

SEQ ID NO: 140617 - protein, 7 aa, synthetic construct
QKQHNLL

SEQ ID NO: 140618 - protein, 7 aa, synthetic construct
QKQHQMP

SEQ ID NO: 140619 - protein, 7 aa, synthetic construct
QKQHSPL

SEQ ID NO: 140620 - protein, 7 aa, synthetic construct
QKQHSYQ

SEQ ID NO: 140621 - protein, 7 aa, synthetic construct
QKQHTPQ

SEQ ID NO: 140622 - protein, 7 aa, synthetic construct
QKQHYPI

SEQ ID NO: 140623 - protein, 7 aa, synthetic construct
QKQIDGR

SEQ ID NO: 140624 - protein, 7 aa, synthetic construct
QKQIHQM

SEQ ID NO: 140625 - protein, 7 aa, synthetic construct
QKQIMSH

SEQ ID NO: 140626 - protein, 7 aa, synthetic construct
QKQKDAF

SEQ ID NO: 140627 - protein, 7 aa, synthetic construct
QKQKDWV

SEQ ID NO: 140628 - protein, 7 aa, synthetic construct
QKQKSPD

SEQ ID NO: 140629 - protein, 7 aa, synthetic construct
QKQLKYD

SEQ ID NO: 140630 - protein, 7 aa, synthetic construct
QKQLNQH

SEQ ID NO: 140631 - protein, 7 aa, synthetic construct
QKQMELR

SEQ ID NO: 140632 - protein, 7 aa, synthetic construct
QKQMVEK

SEQ ID NO: 140633 - protein, 7 aa, synthetic construct
QKQNHNP

SEQ ID NO: 140634 - protein, 7 aa, synthetic construct
QKQNPIF

SEQ ID NO: 140635 - protein, 7 aa, synthetic construct
QKQPRFD

SEQ ID NO: 140636 - protein, 7 aa, synthetic construct
QKQQHMT

SEQ ID NO: 140637 - protein, 7 aa, synthetic construct
QKQQHQN

SEQ ID NO: 140638 - protein, 7 aa, synthetic construct
QKQQTVH

SEQ ID NO: 140639 - protein, 7 aa, synthetic construct
QKQRNLE

SEQ ID NO: 140640 - protein, 7 aa, synthetic construct
QKQRTDM

SEQ ID NO: 140641 - protein, 7 aa, synthetic construct
QKQSERT

SEQ ID NO: 140642 - protein, 7 aa, synthetic construct
QKQSFHA

SEQ ID NO: 140643 - protein, 7 aa, synthetic construct
QKQSHGF

SEQ ID NO: 140644 - protein, 7 aa, synthetic construct
QKQSHVF

SEQ ID NO: 140645 - protein, 7 aa, synthetic construct
QKQTDRA

SEQ ID NO: 140646 - protein, 7 aa, synthetic construct
QKQTFEK

SEQ ID NO: 140647 - protein, 7 aa, synthetic construct
QKQVMKP

SEQ ID NO: 140648 - protein, 7 aa, synthetic construct
QKQYLQA

SEQ ID NO: 140649 - protein, 7 aa, synthetic construct
QKQYPGT

SEQ ID NO: 140650 - protein, 7 aa, synthetic construct
QKQYQPH

SEQ ID NO: 140651 - protein, 7 aa, synthetic construct
QKRADML

SEQ ID NO: 140652 - protein, 7 aa, synthetic construct
QKRDAIL

SEQ ID NO: 140653 - protein, 7 aa, synthetic construct
QKRDALQ

SEQ ID NO: 140654 - protein, 7 aa, synthetic construct
QKRDATT

SEQ ID NO: 140655 - protein, 7 aa, synthetic construct
QKRDEKT

SEQ ID NO: 140656 - protein, 7 aa, synthetic construct
QKRDFMG

SEQ ID NO: 140657 - protein, 7 aa, synthetic construct
QKRDPHS

SEQ ID NO: 140658 - protein, 7 aa, synthetic construct
QKREAAH

SEQ ID NO: 140659 - protein, 7 aa, synthetic construct
QKREHMY

SEQ ID NO: 140660 - protein, 7 aa, synthetic construct
QKREIYG

SEQ ID NO: 140661 - protein, 7 aa, synthetic construct
QKRENLF

SEQ ID NO: 140662 - protein, 7 aa, synthetic construct
QKREYVS

SEQ ID NO: 140663 - protein, 7 aa, synthetic construct
QKRIDMS

SEQ ID NO: 140664 - protein, 7 aa, synthetic construct
QKRIEIS

SEQ ID NO: 140665 - protein, 7 aa, synthetic construct
QKRMEAG

SEQ ID NO: 140666 - protein, 7 aa, synthetic construct
QKRPDMY

SEQ ID NO: 140667 - protein, 7 aa, synthetic construct
QKRPDNY

SEQ ID NO: 140668 - protein, 7 aa, synthetic construct
QKRQGVE

SEQ ID NO: 140669 - protein, 7 aa, synthetic construct
QKRVDVM

SEQ ID NO: 140670 - protein, 7 aa, synthetic construct
QKRVEMS

SEQ ID NO: 140671 - protein, 7 aa, synthetic construct
QKSAHIF

SEQ ID NO: 140672 - protein, 7 aa, synthetic construct
QKSDNIR

SEQ ID NO: 140673 - protein, 7 aa, synthetic construct
QKSDPAR

SEQ ID NO: 140674 - protein, 7 aa, synthetic construct
QKSDQQK

SEQ ID NO: 140675 - protein, 7 aa, synthetic construct
QKSFELK

SEQ ID NO: 140676 - protein, 7 aa, synthetic construct
QKSFSAG

SEQ ID NO: 140677 - protein, 7 aa, synthetic construct
QKSFSSG

SEQ ID NO: 140678 - protein, 7 aa, synthetic construct
QKSHMIQ

SEQ ID NO: 140679 - protein, 7 aa, synthetic construct
QKSHQLM

SEQ ID NO: 140680 - protein, 7 aa, synthetic construct
QKSHTNV

SEQ ID NO: 140681 - protein, 7 aa, synthetic construct
QKSLHIH

SEQ ID NO: 140682 - protein, 7 aa, synthetic construct
QKSLRDT

SEQ ID NO: 140683 - protein, 7 aa, synthetic construct
QKSMSSF

SEQ ID NO: 140684 - protein, 7 aa, synthetic construct
QKSNHTL

SEQ ID NO: 140685 - protein, 7 aa, synthetic construct
QKSPIIL

SEQ ID NO: 140686 - protein, 7 aa, synthetic construct
QKSPVLM

SEQ ID NO: 140687 - protein, 7 aa, synthetic construct
QKSRGME

SEQ ID NO: 140688 - protein, 7 aa, synthetic construct
QKSYVIA

SEQ ID NO: 140689 - protein, 7 aa, synthetic construct
QKTDTMR

SEQ ID NO: 140690 - protein, 7 aa, synthetic construct
QKTDWQK

SEQ ID NO: 140691 - protein, 7 aa, synthetic construct
QKTERTT

SEQ ID NO: 140692 - protein, 7 aa, synthetic construct
QKTHANN

SEQ ID NO: 140693 - protein, 7 aa, synthetic construct
QKTHNQY

SEQ ID NO: 140694 - protein, 7 aa, synthetic construct
QKTHNST

SEQ ID NO: 140695 - protein, 7 aa, synthetic construct
QKTHQTY

SEQ ID NO: 140696 - protein, 7 aa, synthetic construct
QKTKEPQ

SEQ ID NO: 140697 - protein, 7 aa, synthetic construct
QKTMNDR

SEQ ID NO: 140698 - protein, 7 aa, synthetic construct
QKTNHVH

SEQ ID NO: 140699 - protein, 7 aa, synthetic construct
QKTRDFG

SEQ ID NO: 140700 - protein, 7 aa, synthetic construct
QKTRNDI

SEQ ID NO: 140701 - protein, 7 aa, synthetic construct
QKTRTDN

SEQ ID NO: 140702 - protein, 7 aa, synthetic construct
QKTTRDM

SEQ ID NO: 140703 - protein, 7 aa, synthetic construct
QKTVAVF

SEQ ID NO: 140704 - protein, 7 aa, synthetic construct
QKVADHR

SEQ ID NO: 140705 - protein, 7 aa, synthetic construct
QKVAMQY

SEQ ID NO: 140706 - protein, 7 aa, synthetic construct
QKVHGLM

SEQ ID NO: 140707 - protein, 7 aa, synthetic construct
QKVHITV

SEQ ID NO: 140708 - protein, 7 aa, synthetic construct
QKVHRDI

SEQ ID NO: 140709 - protein, 7 aa, synthetic construct
QKVIADR

SEQ ID NO: 140710 - protein, 7 aa, synthetic construct
QKVIKGP

SEQ ID NO: 140711 - protein, 7 aa, synthetic construct
QKVKDYM

SEQ ID NO: 140712 - protein, 7 aa, synthetic construct
QKVKETY

SEQ ID NO: 140713 - protein, 7 aa, synthetic construct
QKVMRDL

SEQ ID NO: 140714 - protein, 7 aa, synthetic construct
QKVMRND

SEQ ID NO: 140715 - protein, 7 aa, synthetic construct
QKVNHWE

SEQ ID NO: 140716 - protein, 7 aa, synthetic construct
QKVNIPY

SEQ ID NO: 140717 - protein, 7 aa, synthetic construct
QKVNKYD

SEQ ID NO: 140718 - protein, 7 aa, synthetic construct
QKVNLYA

SEQ ID NO: 140719 - protein, 7 aa, synthetic construct
QKVPMAQ

SEQ ID NO: 140720 - protein, 7 aa, synthetic construct
QKVPQSH

SEQ ID NO: 140721 - protein, 7 aa, synthetic construct
QKVSHAY

SEQ ID NO: 140722 - protein, 7 aa, synthetic construct
QKVSHMV

SEQ ID NO: 140723 - protein, 7 aa, synthetic construct
QKVSIDR

SEQ ID NO: 140724 - protein, 7 aa, synthetic construct
QKVTHVI

SEQ ID NO: 140725 - protein, 7 aa, synthetic construct
QKVYPSA

SEQ ID NO: 140726 - protein, 7 aa, synthetic construct
QKWDVNS

SEQ ID NO: 140727 - protein, 7 aa, synthetic construct
QKWKDHD

SEQ ID NO: 140728 - protein, 7 aa, synthetic construct
QKWMGAD

SEQ ID NO: 140729 - protein, 7 aa, synthetic construct
QKYDITK

SEQ ID NO: 140730 - protein, 7 aa, synthetic construct
QKYDQKQ

SEQ ID NO: 140731 - protein, 7 aa, synthetic construct
QKYEKAL

SEQ ID NO: 140732 - protein, 7 aa, synthetic construct
QKYEKMM

SEQ ID NO: 140733 - protein, 7 aa, synthetic construct
QKYEPAK

SEQ ID NO: 140734 - protein, 7 aa, synthetic construct
QKYGENK

SEQ ID NO: 140735 - protein, 7 aa, synthetic construct
QKYGLRD

SEQ ID NO: 140736 - protein, 7 aa, synthetic construct
QKYGSKD

SEQ ID NO: 140737 - protein, 7 aa, synthetic construct
QKYGTEK

SEQ ID NO: 140738 - protein, 7 aa, synthetic construct
QKYGVRE

SEQ ID NO: 140739 - protein, 7 aa, synthetic construct
QKYHVVA

SEQ ID NO: 140740 - protein, 7 aa, synthetic construct
QKYKMEP

SEQ ID NO: 140741 - protein, 7 aa, synthetic construct
QKYKTEL

SEQ ID NO: 140742 - protein, 7 aa, synthetic construct
QKYKVQE

SEQ ID NO: 140743 - protein, 7 aa, synthetic construct
QKYMVQS

SEQ ID NO: 140744 - protein, 7 aa, synthetic construct
QKYNIPQ

SEQ ID NO: 140745 - protein, 7 aa, synthetic construct
QKYPANV

SEQ ID NO: 140746 - protein, 7 aa, synthetic construct
QKYPVPM

SEQ ID NO: 140747 - protein, 7 aa, synthetic construct
QKYPVPS

SEQ ID NO: 140748 - protein, 7 aa, synthetic construct
QKYQIMA

SEQ ID NO: 140749 - protein, 7 aa, synthetic construct
QKYQTEK

SEQ ID NO: 140750 - protein, 7 aa, synthetic construct
QKYQWPE

SEQ ID NO: 140751 - protein, 7 aa, synthetic construct
QKYSINP

SEQ ID NO: 140752 - protein, 7 aa, synthetic construct
QKYSTLQ

SEQ ID NO: 140753 - protein, 7 aa, synthetic construct
QKYTHAA

SEQ ID NO: 140754 - protein, 7 aa, synthetic construct
QKYVGHA

SEQ ID NO: 140755 - protein, 7 aa, synthetic construct
QKYVNLG

SEQ ID NO: 140756 - protein, 7 aa, synthetic construct
QLAHTAK

SEQ ID NO: 140757 - protein, 7 aa, synthetic construct
QLAIKMQ

SEQ ID NO: 140758 - protein, 7 aa, synthetic construct
QLAPRRD

SEQ ID NO: 140759 - protein, 7 aa, synthetic construct
QLAQHVR

SEQ ID NO: 140760 - protein, 7 aa, synthetic construct
QLDALRK

SEQ ID NO: 140761 - protein, 7 aa, synthetic construct
QLDNKHR

SEQ ID NO: 140762 - protein, 7 aa, synthetic construct
QLDQKPR

SEQ ID NO: 140763 - protein, 7 aa, synthetic construct
QLDRVNK

SEQ ID NO: 140764 - protein, 7 aa, synthetic construct
QLDRVRQ

SEQ ID NO: 140765 - protein, 7 aa, synthetic construct
QLERATR

SEQ ID NO: 140766 - protein, 7 aa, synthetic construct
QLERVKI

SEQ ID NO: 140767 - protein, 7 aa, synthetic construct
QLGADRR

SEQ ID NO: 140768 - protein, 7 aa, synthetic construct
QLGASKY

SEQ ID NO: 140769 - protein, 7 aa, synthetic construct
QLGGRHQ

SEQ ID NO: 140770 - protein, 7 aa, synthetic construct
QLGHRQM

SEQ ID NO: 140771 - protein, 7 aa, synthetic construct
QLGHYVK

SEQ ID NO: 140772 - protein, 7 aa, synthetic construct
QLGKRYE

SEQ ID NO: 140773 - protein, 7 aa, synthetic construct
QLGNHKM

SEQ ID NO: 140774 - protein, 7 aa, synthetic construct
QLGPIRQ

SEQ ID NO: 140775 - protein, 7 aa, synthetic construct
QLGSAHK

SEQ ID NO: 140776 - protein, 7 aa, synthetic construct
QLGSPVR

SEQ ID NO: 140777 - protein, 7 aa, synthetic construct
QLGVNNR

SEQ ID NO: 140778 - protein, 7 aa, synthetic construct
QLHDRPK

SEQ ID NO: 140779 - protein, 7 aa, synthetic construct
QLHKPSI

SEQ ID NO: 140780 - protein, 7 aa, synthetic construct
QLHKQNI

SEQ ID NO: 140781 - protein, 7 aa, synthetic construct
QLHKTFA

SEQ ID NO: 140782 - protein, 7 aa, synthetic construct
QLHKYTV

SEQ ID NO: 140783 - protein, 7 aa, synthetic construct
QLHMTHK

SEQ ID NO: 140784 - protein, 7 aa, synthetic construct
QLHMVKA

SEQ ID NO: 140785 - protein, 7 aa, synthetic construct
QLHNQKQ

SEQ ID NO: 140786 - protein, 7 aa, synthetic construct
QLHNRTI

SEQ ID NO: 140787 - protein, 7 aa, synthetic construct
QLHQVPK

SEQ ID NO: 140788 - protein, 7 aa, synthetic construct
QLHRPTP

SEQ ID NO: 140789 - protein, 7 aa, synthetic construct
QLHRTGG

SEQ ID NO: 140790 - protein, 7 aa, synthetic construct
QLHRVQA

SEQ ID NO: 140791 - protein, 7 aa, synthetic construct
QLHTRSV

SEQ ID NO: 140792 - protein, 7 aa, synthetic construct
QLHTSQK

SEQ ID NO: 140793 - protein, 7 aa, synthetic construct
QLIKPER

SEQ ID NO: 140794 - protein, 7 aa, synthetic construct
QLINVKG

SEQ ID NO: 140795 - protein, 7 aa, synthetic construct
QLISKST

SEQ ID NO: 140796 - protein, 7 aa, synthetic construct
QLKDMGK

SEQ ID NO: 140797 - protein, 7 aa, synthetic construct
QLKFSTS

SEQ ID NO: 140798 - protein, 7 aa, synthetic construct
QLKGHLT

SEQ ID NO: 140799 - protein, 7 aa, synthetic construct
QLKGHRD

SEQ ID NO: 140800 - protein, 7 aa, synthetic construct
QLKGYGL

SEQ ID NO: 140801 - protein, 7 aa, synthetic construct
QLKHDRA

SEQ ID NO: 140802 - protein, 7 aa, synthetic construct
QLKHPTI

SEQ ID NO: 140803 - protein, 7 aa, synthetic construct
QLKKLDL

SEQ ID NO: 140804 - protein, 7 aa, synthetic construct
QLKLIHS

SEQ ID NO: 140805 - protein, 7 aa, synthetic construct
QLKNFNQ

SEQ ID NO: 140806 - protein, 7 aa, synthetic construct
QLKNHGY

SEQ ID NO: 140807 - protein, 7 aa, synthetic construct
QLKPGPH

SEQ ID NO: 140808 - protein, 7 aa, synthetic construct
QLKPHRD

SEQ ID NO: 140809 - protein, 7 aa, synthetic construct
QLKRQEF

SEQ ID NO: 140810 - protein, 7 aa, synthetic construct
QLKSYSS

SEQ ID NO: 140811 - protein, 7 aa, synthetic construct
QLKYAQG

SEQ ID NO: 140812 - protein, 7 aa, synthetic construct
QLKYSNA

SEQ ID NO: 140813 - protein, 7 aa, synthetic construct
QLKYTHG

SEQ ID NO: 140814 - protein, 7 aa, synthetic construct
QLLHGSK

SEQ ID NO: 140815 - protein, 7 aa, synthetic construct
QLMHSGK

SEQ ID NO: 140816 - protein, 7 aa, synthetic construct
QLMRPAT

SEQ ID NO: 140817 - protein, 7 aa, synthetic construct
QLMRRDV

SEQ ID NO: 140818 - protein, 7 aa, synthetic construct
QLNAGRH

SEQ ID NO: 140819 - protein, 7 aa, synthetic construct
QLNGHPR

SEQ ID NO: 140820 - protein, 7 aa, synthetic construct
QLNHGPK

SEQ ID NO: 140821 - protein, 7 aa, synthetic construct
QLNHKLQ

SEQ ID NO: 140822 - protein, 7 aa, synthetic construct
QLNHTVR

SEQ ID NO: 140823 - protein, 7 aa, synthetic construct
QLNKFTS

SEQ ID NO: 140824 - protein, 7 aa, synthetic construct
QLNRVRD

SEQ ID NO: 140825 - protein, 7 aa, synthetic construct
QLNTHAR

SEQ ID NO: 140826 - protein, 7 aa, synthetic construct
QLNTHMR

SEQ ID NO: 140827 - protein, 7 aa, synthetic construct
QLPGDKR

SEQ ID NO: 140828 - protein, 7 aa, synthetic construct
QLPHSRQ

SEQ ID NO: 140829 - protein, 7 aa, synthetic construct
QLPITSR

SEQ ID NO: 140830 - protein, 7 aa, synthetic construct
QLPLMAR

SEQ ID NO: 140831 - protein, 7 aa, synthetic construct
QLPNRER

SEQ ID NO: 140832 - protein, 7 aa, synthetic construct
QLPRHAQ

SEQ ID NO: 140833 - protein, 7 aa, synthetic construct
QLPRNDK

SEQ ID NO: 140834 - protein, 7 aa, synthetic construct
QLPSNYR

SEQ ID NO: 140835 - protein, 7 aa, synthetic construct
QLPTYRM

SEQ ID NO: 140836 - protein, 7 aa, synthetic construct
QLPTYTR

SEQ ID NO: 140837 - protein, 7 aa, synthetic construct
QLQGSNR

SEQ ID NO: 140838 - protein, 7 aa, synthetic construct
QLQRIPP

SEQ ID NO: 140839 - protein, 7 aa, synthetic construct
QLQRMQM

SEQ ID NO: 140840 - protein, 7 aa, synthetic construct
QLQRNKD

SEQ ID NO: 140841 - protein, 7 aa, synthetic construct
QLQRRDG

SEQ ID NO: 140842 - protein, 7 aa, synthetic construct
QLRAARE

SEQ ID NO: 140843 - protein, 7 aa, synthetic construct
QLRARPE

SEQ ID NO: 140844 - protein, 7 aa, synthetic construct
QLRDISK

SEQ ID NO: 140845 - protein, 7 aa, synthetic construct
QLRDVPR

SEQ ID NO: 140846 - protein, 7 aa, synthetic construct
QLREKTL

SEQ ID NO: 140847 - protein, 7 aa, synthetic construct
QLRGIQM

SEQ ID NO: 140848 - protein, 7 aa, synthetic construct
QLRGPVT

SEQ ID NO: 140849 - protein, 7 aa, synthetic construct
QLRGSSF

SEQ ID NO: 140850 - protein, 7 aa, synthetic construct
QLRKDTT

SEQ ID NO: 140851 - protein, 7 aa, synthetic construct
QLRLKDT

SEQ ID NO: 140852 - protein, 7 aa, synthetic construct
QLRMADK

SEQ ID NO: 140853 - protein, 7 aa, synthetic construct
QLRMATM

SEQ ID NO: 140854 - protein, 7 aa, synthetic construct
QLRMQTQ

SEQ ID NO: 140855 - protein, 7 aa, synthetic construct
QLRNKEN

SEQ ID NO: 140856 - protein, 7 aa, synthetic construct
QLRPIGT

SEQ ID NO: 140857 - protein, 7 aa, synthetic construct
QLRPIQQ

SEQ ID NO: 140858 - protein, 7 aa, synthetic construct
QLRSQQQ

SEQ ID NO: 140859 - protein, 7 aa, synthetic construct
QLRSVQH

SEQ ID NO: 140860 - protein, 7 aa, synthetic construct
QLSGHMR

SEQ ID NO: 140861 - protein, 7 aa, synthetic construct
QLSHSRG

SEQ ID NO: 140862 - protein, 7 aa, synthetic construct
QLSHVKL

SEQ ID NO: 140863 - protein, 7 aa, synthetic construct
QLSKITH

SEQ ID NO: 140864 - protein, 7 aa, synthetic construct
QLSRQVI

SEQ ID NO: 140865 - protein, 7 aa, synthetic construct
QLSSQRM

SEQ ID NO: 140866 - protein, 7 aa, synthetic construct
QLSYATM

SEQ ID NO: 140867 - protein, 7 aa, synthetic construct
QLTHGTR

SEQ ID NO: 140868 - protein, 7 aa, synthetic construct
QLTHSAR

SEQ ID NO: 140869 - protein, 7 aa, synthetic construct
QLTHVRA

SEQ ID NO: 140870 - protein, 7 aa, synthetic construct
QLTKHFS

SEQ ID NO: 140871 - protein, 7 aa, synthetic construct
QLTPKFQ

SEQ ID NO: 140872 - protein, 7 aa, synthetic construct
QLTQDKR

SEQ ID NO: 140873 - protein, 7 aa, synthetic construct
QLTREKI

SEQ ID NO: 140874 - protein, 7 aa, synthetic construct
QLTRERP

SEQ ID NO: 140875 - protein, 7 aa, synthetic construct
QLTRLRE

SEQ ID NO: 140876 - protein, 7 aa, synthetic construct
QLVKNQF

SEQ ID NO: 140877 - protein, 7 aa, synthetic construct
QLVTRTH

SEQ ID NO: 140878 - protein, 7 aa, synthetic construct
QMAGKYG

SEQ ID NO: 140879 - protein, 7 aa, synthetic construct
QMAHSRI

SEQ ID NO: 140880 - protein, 7 aa, synthetic construct
QMAMTKH

SEQ ID NO: 140881 - protein, 7 aa, synthetic construct
QMANQRQ

SEQ ID NO: 140882 - protein, 7 aa, synthetic construct
QMAQGRF

SEQ ID NO: 140883 - protein, 7 aa, synthetic construct
QMARGSF

SEQ ID NO: 140884 - protein, 7 aa, synthetic construct
QMARLSQ

SEQ ID NO: 140885 - protein, 7 aa, synthetic construct
QMARNQY

SEQ ID NO: 140886 - protein, 7 aa, synthetic construct
QMASAQR

SEQ ID NO: 140887 - protein, 7 aa, synthetic construct
QMAVHGR

SEQ ID NO: 140888 - protein, 7 aa, synthetic construct
QMAVRHQ

SEQ ID NO: 140889 - protein, 7 aa, synthetic construct
QMDGGRK

SEQ ID NO: 140890 - protein, 7 aa, synthetic construct
QMDGGRR

SEQ ID NO: 140891 - protein, 7 aa, synthetic construct
QMDKIRQ

SEQ ID NO: 140892 - protein, 7 aa, synthetic construct
QMEGRQK

SEQ ID NO: 140893 - protein, 7 aa, synthetic construct
QMEGVKK

SEQ ID NO: 140894 - protein, 7 aa, synthetic construct
QMEKPRM

SEQ ID NO: 140895 - protein, 7 aa, synthetic construct
QMGGARS

SEQ ID NO: 140896 - protein, 7 aa, synthetic construct
QMGGYQK

SEQ ID NO: 140897 - protein, 7 aa, synthetic construct
QMGHATR

SEQ ID NO: 140898 - protein, 7 aa, synthetic construct
QMGHIKS

SEQ ID NO: 140899 - protein, 7 aa, synthetic construct
QMGHRVI

SEQ ID NO: 140900 - protein, 7 aa, synthetic construct
QMGHSKF

SEQ ID NO: 140901 - protein, 7 aa, synthetic construct
QMGKGTW

SEQ ID NO: 140902 - protein, 7 aa, synthetic construct
QMGKSYV

SEQ ID NO: 140903 - protein, 7 aa, synthetic construct
QMGKYSA

SEQ ID NO: 140904 - protein, 7 aa, synthetic construct
QMGLGKH

SEQ ID NO: 140905 - protein, 7 aa, synthetic construct
QMGPPRT

SEQ ID NO: 140906 - protein, 7 aa, synthetic construct
QMGPRYG

SEQ ID NO: 140907 - protein, 7 aa, synthetic construct
QMGRDQK

SEQ ID NO: 140908 - protein, 7 aa, synthetic construct
QMGSHRG

SEQ ID NO: 140909 - protein, 7 aa, synthetic construct
QMGSVMR

SEQ ID NO: 140910 - protein, 7 aa, synthetic construct
QMGTNAR

SEQ ID NO: 140911 - protein, 7 aa, synthetic construct
QMGVQHK

SEQ ID NO: 140912 - protein, 7 aa, synthetic construct
QMGVTQR

SEQ ID NO: 140913 - protein, 7 aa, synthetic construct
QMGYIAK

SEQ ID NO: 140914 - protein, 7 aa, synthetic construct
QMHKREV

SEQ ID NO: 140915 - protein, 7 aa, synthetic construct
QMHLKGI

SEQ ID NO: 140916 - protein, 7 aa, synthetic construct
QMHLPAR

SEQ ID NO: 140917 - protein, 7 aa, synthetic construct
QMHRPMS

SEQ ID NO: 140918 - protein, 7 aa, synthetic construct
QMHRQSI

SEQ ID NO: 140919 - protein, 7 aa, synthetic construct
QMHTKYG

SEQ ID NO: 140920 - protein, 7 aa, synthetic construct
QMHVKSI

SEQ ID NO: 140921 - protein, 7 aa, synthetic construct
QMIAKEK

SEQ ID NO: 140922 - protein, 7 aa, synthetic construct
QMITRKE

SEQ ID NO: 140923 - protein, 7 aa, synthetic construct
QMKAYTN

SEQ ID NO: 140924 - protein, 7 aa, synthetic construct
QMKDRFS

SEQ ID NO: 140925 - protein, 7 aa, synthetic construct
QMKENAR

SEQ ID NO: 140926 - protein, 7 aa, synthetic construct
QMKERGQ

SEQ ID NO: 140927 - protein, 7 aa, synthetic construct
QMKFRGD

SEQ ID NO: 140928 - protein, 7 aa, synthetic construct
QMKGGSY

SEQ ID NO: 140929 - protein, 7 aa, synthetic construct
QMKGLPY

SEQ ID NO: 140930 - protein, 7 aa, synthetic construct
QMKGVQY

SEQ ID NO: 140931 - protein, 7 aa, synthetic construct
QMKIHPA

SEQ ID NO: 140932 - protein, 7 aa, synthetic construct
QMKIIDK

SEQ ID NO: 140933 - protein, 7 aa, synthetic construct
QMKIQHA

SEQ ID NO: 140934 - protein, 7 aa, synthetic construct
QMKIRMD

SEQ ID NO: 140935 - protein, 7 aa, synthetic construct
QMKKEER

SEQ ID NO: 140936 - protein, 7 aa, synthetic construct
QMKKMEQ

SEQ ID NO: 140937 - protein, 7 aa, synthetic construct
QMKKYQE

SEQ ID NO: 140938 - protein, 7 aa, synthetic construct
QMKLMGP

SEQ ID NO: 140939 - protein, 7 aa, synthetic construct
QMKPKDI

SEQ ID NO: 140940 - protein, 7 aa, synthetic construct
QMKPTSY

SEQ ID NO: 140941 - protein, 7 aa, synthetic construct
QMKQRGD

SEQ ID NO: 140942 - protein, 7 aa, synthetic construct
QMKRAEV

SEQ ID NO: 140943 - protein, 7 aa, synthetic construct
QMKRQDG

SEQ ID NO: 140944 - protein, 7 aa, synthetic construct
QMKRQDV

SEQ ID NO: 140945 - protein, 7 aa, synthetic construct
QMKYQAP

SEQ ID NO: 140946 - protein, 7 aa, synthetic construct
QMLKRDT

SEQ ID NO: 140947 - protein, 7 aa, synthetic construct
QMMRGSI

SEQ ID NO: 140948 - protein, 7 aa, synthetic construct
QMNAISR

SEQ ID NO: 140949 - protein, 7 aa, synthetic construct
QMNKFQV

SEQ ID NO: 140950 - protein, 7 aa, synthetic construct
QMNKKDY

SEQ ID NO: 140951 - protein, 7 aa, synthetic construct
QMNQMPR

SEQ ID NO: 140952 - protein, 7 aa, synthetic construct
QMNSSQR

SEQ ID NO: 140953 - protein, 7 aa, synthetic construct
QMPKDRY

SEQ ID NO: 140954 - protein, 7 aa, synthetic construct
QMPKYRE

SEQ ID NO: 140955 - protein, 7 aa, synthetic construct
QMPQVQR

SEQ ID NO: 140956 - protein, 7 aa, synthetic construct
QMPRAHA

SEQ ID NO: 140957 - protein, 7 aa, synthetic construct
QMPRGHL

SEQ ID NO: 140958 - protein, 7 aa, synthetic construct
QMPRHGN

SEQ ID NO: 140959 - protein, 7 aa, synthetic construct
QMPRHTA

SEQ ID NO: 140960 - protein, 7 aa, synthetic construct
QMPRIGA

SEQ ID NO: 140961 - protein, 7 aa, synthetic construct
QMPRSNQ

SEQ ID NO: 140962 - protein, 7 aa, synthetic construct
QMPSQRH

SEQ ID NO: 140963 - protein, 7 aa, synthetic construct
QMPVTRA

SEQ ID NO: 140964 - protein, 7 aa, synthetic construct
QMQGKHY

SEQ ID NO: 140965 - protein, 7 aa, synthetic construct
QMQGLRS

SEQ ID NO: 140966 - protein, 7 aa, synthetic construct
QMQGMIR

SEQ ID NO: 140967 - protein, 7 aa, synthetic construct
QMQHQTK

SEQ ID NO: 140968 - protein, 7 aa, synthetic construct
QMQKPSH

SEQ ID NO: 140969 - protein, 7 aa, synthetic construct
QMQKRDI

SEQ ID NO: 140970 - protein, 7 aa, synthetic construct
QMQMKSF

SEQ ID NO: 140971 - protein, 7 aa, synthetic construct
QMQNKRE

SEQ ID NO: 140972 - protein, 7 aa, synthetic construct
QMQNRQL

SEQ ID NO: 140973 - protein, 7 aa, synthetic construct
QMQPRIN

SEQ ID NO: 140974 - protein, 7 aa, synthetic construct
QMQRFKE

SEQ ID NO: 140975 - protein, 7 aa, synthetic construct
QMQRNIV

SEQ ID NO: 140976 - protein, 7 aa, synthetic construct
QMQRPHL

SEQ ID NO: 140977 - protein, 7 aa, synthetic construct
QMQRQLV

SEQ ID NO: 140978 - protein, 7 aa, synthetic construct
QMQTTNR

SEQ ID NO: 140979 - protein, 7 aa, synthetic construct
QMQVKHT

SEQ ID NO: 140980 - protein, 7 aa, synthetic construct
QMQVQGR

SEQ ID NO: 140981 - protein, 7 aa, synthetic construct
QMQVTAR

SEQ ID NO: 140982 - protein, 7 aa, synthetic construct
QMRDAFK

SEQ ID NO: 140983 - protein, 7 aa, synthetic construct
QMRDKGW

SEQ ID NO: 140984 - protein, 7 aa, synthetic construct
QMRERGL

SEQ ID NO: 140985 - protein, 7 aa, synthetic construct
QMRGASF

SEQ ID NO: 140986 - protein, 7 aa, synthetic construct
QMRGEKT

SEQ ID NO: 140987 - protein, 7 aa, synthetic construct
QMRITDM

SEQ ID NO: 140988 - protein, 7 aa, synthetic construct
QMRKDDK

SEQ ID NO: 140989 - protein, 7 aa, synthetic construct
QMRKMSE

SEQ ID NO: 140990 - protein, 7 aa, synthetic construct
QMRNGYH

SEQ ID NO: 140991 - protein, 7 aa, synthetic construct
QMRNHVV

SEQ ID NO: 140992 - protein, 7 aa, synthetic construct
QMRNMQY

SEQ ID NO: 140993 - protein, 7 aa, synthetic construct
QMRNMTH

SEQ ID NO: 140994 - protein, 7 aa, synthetic construct
QMRPLQN

SEQ ID NO: 140995 - protein, 7 aa, synthetic construct
QMRQIKE

SEQ ID NO: 140996 - protein, 7 aa, synthetic construct
QMRSSMI

SEQ ID NO: 140997 - protein, 7 aa, synthetic construct
QMRTQQT

SEQ ID NO: 140998 - protein, 7 aa, synthetic construct
QMRTVQQ

SEQ ID NO: 140999 - protein, 7 aa, synthetic construct
QMRVQNL

SEQ ID NO: 141000 - protein, 7 aa, synthetic construct
QMSGAYK

SEQ ID NO: 141001 - protein, 7 aa, synthetic construct
QMSGFPR

SEQ ID NO: 141002 - protein, 7 aa, synthetic construct
QMSGYKN

SEQ ID NO: 141003 - protein, 7 aa, synthetic construct
QMSHGGR

SEQ ID NO: 141004 - protein, 7 aa, synthetic construct
QMSHNSK

SEQ ID NO: 141005 - protein, 7 aa, synthetic construct
QMSKGMF

SEQ ID NO: 141006 - protein, 7 aa, synthetic construct
QMSKPSW

SEQ ID NO: 141007 - protein, 7 aa, synthetic construct
QMSKPYV

SEQ ID NO: 141008 - protein, 7 aa, synthetic construct
QMSLTPG

SEQ ID NO: 141009 - protein, 7 aa, synthetic construct
QMSNFVK

SEQ ID NO: 141010 - protein, 7 aa, synthetic construct
QMSNHGK

SEQ ID NO: 141011 - protein, 7 aa, synthetic construct
QMSNRHH

SEQ ID NO: 141012 - protein, 7 aa, synthetic construct
QMSSHKM

SEQ ID NO: 141013 - protein, 7 aa, synthetic construct
QMSSQKY

SEQ ID NO: 141014 - protein, 7 aa, synthetic construct
QMSTKGW

SEQ ID NO: 141015 - protein, 7 aa, synthetic construct
QMTGHPR

SEQ ID NO: 141016 - protein, 7 aa, synthetic construct
QMTKNQH

SEQ ID NO: 141017 - protein, 7 aa, synthetic construct
QMTKYKE

SEQ ID NO: 141018 - protein, 7 aa, synthetic construct
QMTNIAR

SEQ ID NO: 141019 - protein, 7 aa, synthetic construct
QMTQTKW

SEQ ID NO: 141020 - protein, 7 aa, synthetic construct
QMTRAHA

SEQ ID NO: 141021 - protein, 7 aa, synthetic construct
QMTYQKP

SEQ ID NO: 141022 - protein, 7 aa, synthetic construct
QMVASPR

SEQ ID NO: 141023 - protein, 7 aa, synthetic construct
QMVGPPR

SEQ ID NO: 141024 - protein, 7 aa, synthetic construct
QMVNTQR

SEQ ID NO: 141025 - protein, 7 aa, synthetic construct
QMVPRTG

SEQ ID NO: 141026 - protein, 7 aa, synthetic construct
QMVQNQR

SEQ ID NO: 141027 - protein, 7 aa, synthetic construct
QMVQSKY

SEQ ID NO: 141028 - protein, 7 aa, synthetic construct
QMVRAPA

SEQ ID NO: 141029 - protein, 7 aa, synthetic construct
QMVRMQN

SEQ ID NO: 141030 - protein, 7 aa, synthetic construct
QMVRNER

SEQ ID NO: 141031 - protein, 7 aa, synthetic construct
QMYKEKQ

SEQ ID NO: 141032 - protein, 7 aa, synthetic construct
QMYKPKE

SEQ ID NO: 141033 - protein, 7 aa, synthetic construct
QMYQTKV

SEQ ID NO: 141034 - protein, 7 aa, synthetic construct
QMYVSKP

SEQ ID NO: 141035 - protein, 7 aa, synthetic construct
QNAAKYL

SEQ ID NO: 141036 - protein, 7 aa, synthetic construct
QNAGTYR

SEQ ID NO: 141037 - protein, 7 aa, synthetic construct
QNAHGNK

SEQ ID NO: 141038 - protein, 7 aa, synthetic construct
QNAHSGK

SEQ ID NO: 141039 - protein, 7 aa, synthetic construct
QNAMGQR

SEQ ID NO: 141040 - protein, 7 aa, synthetic construct
QNAMNVR

SEQ ID NO: 141041 - protein, 7 aa, synthetic construct
QNAPKSY

SEQ ID NO: 141042 - protein, 7 aa, synthetic construct
QNATMSR

SEQ ID NO: 141043 - protein, 7 aa, synthetic construct
QNATNRF

SEQ ID NO: 141044 - protein, 7 aa, synthetic construct
QNATRLH

SEQ ID NO: 141045 - protein, 7 aa, synthetic construct
QNAVRLM

SEQ ID NO: 141046 - protein, 7 aa, synthetic construct
QNAYGAA

SEQ ID NO: 141047 - protein, 7 aa, synthetic construct
QNAYNRA

SEQ ID NO: 141048 - protein, 7 aa, synthetic construct
QNDAPRK

SEQ ID NO: 141049 - protein, 7 aa, synthetic construct
QNDKINR

SEQ ID NO: 141050 - protein, 7 aa, synthetic construct
QNDKRSN

SEQ ID NO: 141051 - protein, 7 aa, synthetic construct
QNDKSIR

SEQ ID NO: 141052 - protein, 7 aa, synthetic construct
QNDRPKL

SEQ ID NO: 141053 - protein, 7 aa, synthetic construct
QNDSKKW

SEQ ID NO: 141054 - protein, 7 aa, synthetic construct
QNDVNRR

SEQ ID NO: 141055 - protein, 7 aa, synthetic construct
QNEVRFK

SEQ ID NO: 141056 - protein, 7 aa, synthetic construct
QNFNQAR

SEQ ID NO: 141057 - protein, 7 aa, synthetic construct
QNFSQNK

SEQ ID NO: 141058 - protein, 7 aa, synthetic construct
QNFSSSK

SEQ ID NO: 141059 - protein, 7 aa, synthetic construct
QNFTKQM

SEQ ID NO: 141060 - protein, 7 aa, synthetic construct
QNGAGRY

SEQ ID NO: 141061 - protein, 7 aa, synthetic construct
QNGASMR

SEQ ID NO: 141062 - protein, 7 aa, synthetic construct
QNGFGAK

SEQ ID NO: 141063 - protein, 7 aa, synthetic construct
QNGFHPK

SEQ ID NO: 141064 - protein, 7 aa, synthetic construct
QNGGFKY

SEQ ID NO: 141065 - protein, 7 aa, synthetic construct
QNGGVKW

SEQ ID NO: 141066 - protein, 7 aa, synthetic construct
QNGIKHF

SEQ ID NO: 141067 - protein, 7 aa, synthetic construct
QNGMSSR

SEQ ID NO: 141068 - protein, 7 aa, synthetic construct
QNGMYSK

SEQ ID NO: 141069 - protein, 7 aa, synthetic construct
QNGQRFV

SEQ ID NO: 141070 - protein, 7 aa, synthetic construct
QNGQYGK

SEQ ID NO: 141071 - protein, 7 aa, synthetic construct
QNGRHQV

SEQ ID NO: 141072 - protein, 7 aa, synthetic construct
QNGSRAW

SEQ ID NO: 141073 - protein, 7 aa, synthetic construct
QNGTQRY

SEQ ID NO: 141074 - protein, 7 aa, synthetic construct
QNGTSSR

SEQ ID NO: 141075 - protein, 7 aa, synthetic construct
QNGYPNK

SEQ ID NO: 141076 - protein, 7 aa, synthetic construct
QNHAQTR

SEQ ID NO: 141077 - protein, 7 aa, synthetic construct
QNHGKGN

SEQ ID NO: 141078 - protein, 7 aa, synthetic construct
QNHGKPF

SEQ ID NO: 141079 - protein, 7 aa, synthetic construct
QNHGKTY

SEQ ID NO: 141080 - protein, 7 aa, synthetic construct
QNHGQRV

SEQ ID NO: 141081 - protein, 7 aa, synthetic construct
QNHIHKF

SEQ ID NO: 141082 - protein, 7 aa, synthetic construct
QNHIHVK

SEQ ID NO: 141083 - protein, 7 aa, synthetic construct
QNHISKY

SEQ ID NO: 141084 - protein, 7 aa, synthetic construct
QNHKGIT

SEQ ID NO: 141085 - protein, 7 aa, synthetic construct
QNHKVMM

SEQ ID NO: 141086 - protein, 7 aa, synthetic construct
QNHLKSL

SEQ ID NO: 141087 - protein, 7 aa, synthetic construct
QNHMPRA

SEQ ID NO: 141088 - protein, 7 aa, synthetic construct
QNHNRTT

SEQ ID NO: 141089 - protein, 7 aa, synthetic construct
QNHQARV

SEQ ID NO: 141090 - protein, 7 aa, synthetic construct
QNHRAPF

SEQ ID NO: 141091 - protein, 7 aa, synthetic construct
QNHRVGF

SEQ ID NO: 141092 - protein, 7 aa, synthetic construct
QNHSKMM

SEQ ID NO: 141093 - protein, 7 aa, synthetic construct
QNHTRGI

SEQ ID NO: 141094 - protein, 7 aa, synthetic construct
QNHTSGK

SEQ ID NO: 141095 - protein, 7 aa, synthetic construct
QNHVTQK

SEQ ID NO: 141096 - protein, 7 aa, synthetic construct
QNIKPSL

SEQ ID NO: 141097 - protein, 7 aa, synthetic construct
QNIPKAI

SEQ ID NO: 141098 - protein, 7 aa, synthetic construct
QNIQSKF

SEQ ID NO: 141099 - protein, 7 aa, synthetic construct
QNIQVRS

SEQ ID NO: 141100 - protein, 7 aa, synthetic construct
QNIRGNL

SEQ ID NO: 141101 - protein, 7 aa, synthetic construct
QNIRGQI

SEQ ID NO: 141102 - protein, 7 aa, synthetic construct
QNIRQAY

SEQ ID NO: 141103 - protein, 7 aa, synthetic construct
QNKDRTM

SEQ ID NO: 141104 - protein, 7 aa, synthetic construct
QNKDYNK

SEQ ID NO: 141105 - protein, 7 aa, synthetic construct
QNKERGF

SEQ ID NO: 141106 - protein, 7 aa, synthetic construct
QNKFTAI

SEQ ID NO: 141107 - protein, 7 aa, synthetic construct
QNKGDQK

SEQ ID NO: 141108 - protein, 7 aa, synthetic construct
QNKGHPY

SEQ ID NO: 141109 - protein, 7 aa, synthetic construct
QNKHLLI

SEQ ID NO: 141110 - protein, 7 aa, synthetic construct
QNKIKYE

SEQ ID NO: 141111 - protein, 7 aa, synthetic construct
QNKKMES

SEQ ID NO: 141112 - protein, 7 aa, synthetic construct
QNKLEMR

SEQ ID NO: 141113 - protein, 7 aa, synthetic construct
QNKLPRD

SEQ ID NO: 141114 - protein, 7 aa, synthetic construct
QNKPANW

SEQ ID NO: 141115 - protein, 7 aa, synthetic construct
QNKPRSD

SEQ ID NO: 141116 - protein, 7 aa, synthetic construct
QNKREGA

SEQ ID NO: 141117 - protein, 7 aa, synthetic construct
QNKRLVE

SEQ ID NO: 141118 - protein, 7 aa, synthetic construct
QNKTSNW

SEQ ID NO: 141119 - protein, 7 aa, synthetic construct
QNKTYEK

SEQ ID NO: 141120 - protein, 7 aa, synthetic construct
QNKVEKW

SEQ ID NO: 141121 - protein, 7 aa, synthetic construct
QNKYATM

SEQ ID NO: 141122 - protein, 7 aa, synthetic construct
QNKYVAS

SEQ ID NO: 141123 - protein, 7 aa, synthetic construct
QNLHATK

SEQ ID NO: 141124 - protein, 7 aa, synthetic construct
QNLNMVR

SEQ ID NO: 141125 - protein, 7 aa, synthetic construct
QNLPIRA

SEQ ID NO: 141126 - protein, 7 aa, synthetic construct
QNLPKQF

SEQ ID NO: 141127 - protein, 7 aa, synthetic construct
QNLQLKY

SEQ ID NO: 141128 - protein, 7 aa, synthetic construct
QNMANRT

SEQ ID NO: 141129 - protein, 7 aa, synthetic construct
QNMHITK

SEQ ID NO: 141130 - protein, 7 aa, synthetic construct
QNMHQRS

SEQ ID NO: 141131 - protein, 7 aa, synthetic construct
QNMKIPL

SEQ ID NO: 141132 - protein, 7 aa, synthetic construct
QNMQVSK

SEQ ID NO: 141133 - protein, 7 aa, synthetic construct
QNMRDGK

SEQ ID NO: 141134 - protein, 7 aa, synthetic construct
QNMRIGH

SEQ ID NO: 141135 - protein, 7 aa, synthetic construct
QNMRMTT

SEQ ID NO: 141136 - protein, 7 aa, synthetic construct
QNMRTPV

SEQ ID NO: 141137 - protein, 7 aa, synthetic construct
QNMRTQM

SEQ ID NO: 141138 - protein, 7 aa, synthetic construct
QNMTHLK

SEQ ID NO: 141139 - protein, 7 aa, synthetic construct
QNMTRQQ

SEQ ID NO: 141140 - protein, 7 aa, synthetic construct
QNMVKAL

SEQ ID NO: 141141 - protein, 7 aa, synthetic construct
QNNNSKW

SEQ ID NO: 141142 - protein, 7 aa, synthetic construct
QNNPARL

SEQ ID NO: 141143 - protein, 7 aa, synthetic construct
QNNPNNR

SEQ ID NO: 141144 - protein, 7 aa, synthetic construct
QNNQMQR

SEQ ID NO: 141145 - protein, 7 aa, synthetic construct
QNNQTFK

SEQ ID NO: 141146 - protein, 7 aa, synthetic construct
QNNSHYQ

SEQ ID NO: 141147 - protein, 7 aa, synthetic construct
QNNTHFK

SEQ ID NO: 141148 - protein, 7 aa, synthetic construct
QNNTIMW

SEQ ID NO: 141149 - protein, 7 aa, synthetic construct
QNNTKWT

SEQ ID NO: 141150 - protein, 7 aa, synthetic construct
QNNYPKY

SEQ ID NO: 141151 - protein, 7 aa, synthetic construct
QNPAMMR

SEQ ID NO: 141152 - protein, 7 aa, synthetic construct
QNPGVKW

SEQ ID NO: 141153 - protein, 7 aa, synthetic construct
QNPHRAQ

SEQ ID NO: 141154 - protein, 7 aa, synthetic construct
QNPNPRY

SEQ ID NO: 141155 - protein, 7 aa, synthetic construct
QNPNSTR

SEQ ID NO: 141156 - protein, 7 aa, synthetic construct
QNPQVLR

SEQ ID NO: 141157 - protein, 7 aa, synthetic construct
QNPQYVK

SEQ ID NO: 141158 - protein, 7 aa, synthetic construct
QNPRLDR

SEQ ID NO: 141159 - protein, 7 aa, synthetic construct
QNQGYKS

SEQ ID NO: 141160 - protein, 7 aa, synthetic construct
QNQHATK

SEQ ID NO: 141161 - protein, 7 aa, synthetic construct
QNQLRNV

SEQ ID NO: 141162 - protein, 7 aa, synthetic construct
QNQPDMG

SEQ ID NO: 141163 - protein, 7 aa, synthetic construct
QNQPKQN

SEQ ID NO: 141164 - protein, 7 aa, synthetic construct
QNQPKYI

SEQ ID NO: 141165 - protein, 7 aa, synthetic construct
QNQPQRS

SEQ ID NO: 141166 - protein, 7 aa, synthetic construct
QNQQRPF

SEQ ID NO: 141167 - protein, 7 aa, synthetic construct
QNQRITT

SEQ ID NO: 141168 - protein, 7 aa, synthetic construct
QNQSPNN

SEQ ID NO: 141169 - protein, 7 aa, synthetic construct
QNQTART

SEQ ID NO: 141170 - protein, 7 aa, synthetic construct
QNQTQRS

SEQ ID NO: 141171 - protein, 7 aa, synthetic construct
QNQVKDR

SEQ ID NO: 141172 - protein, 7 aa, synthetic construct
QNQVKFH

SEQ ID NO: 141173 - protein, 7 aa, synthetic construct
QNRDIAK

SEQ ID NO: 141174 - protein, 7 aa, synthetic construct
QNREKAL

SEQ ID NO: 141175 - protein, 7 aa, synthetic construct
QNRENPK

SEQ ID NO: 141176 - protein, 7 aa, synthetic construct
QNRGEKY

SEQ ID NO: 141177 - protein, 7 aa, synthetic construct
QNRGPFT

SEQ ID NO: 141178 - protein, 7 aa, synthetic construct
QNRGVIY

SEQ ID NO: 141179 - protein, 7 aa, synthetic construct
QNRPIIN

SEQ ID NO: 141180 - protein, 7 aa, synthetic construct
QNRPLNM

SEQ ID NO: 141181 - protein, 7 aa, synthetic construct
QNRPPAF

SEQ ID NO: 141182 - protein, 7 aa, synthetic construct
QNRQSKE

SEQ ID NO: 141183 - protein, 7 aa, synthetic construct
QNRTWND

SEQ ID NO: 141184 - protein, 7 aa, synthetic construct
QNSATRY

SEQ ID NO: 141185 - protein, 7 aa, synthetic construct
QNSNVGR

SEQ ID NO: 141186 - protein, 7 aa, synthetic construct
QNSPRTS

SEQ ID NO: 141187 - protein, 7 aa, synthetic construct
QNSTHRI

SEQ ID NO: 141188 - protein, 7 aa, synthetic construct
QNSTREK

SEQ ID NO: 141189 - protein, 7 aa, synthetic construct
QNSTYVR

SEQ ID NO: 141190 - protein, 7 aa, synthetic construct
QNSWVRE

SEQ ID NO: 141191 - protein, 7 aa, synthetic construct
QNSYRTS

SEQ ID NO: 141192 - protein, 7 aa, synthetic construct
QNTARMN

SEQ ID NO: 141193 - protein, 7 aa, synthetic construct
QNTARVI

SEQ ID NO: 141194 - protein, 7 aa, synthetic construct
QNTGYKY

SEQ ID NO: 141195 - protein, 7 aa, synthetic construct
QNTLRDR

SEQ ID NO: 141196 - protein, 7 aa, synthetic construct
QNTMTAR

SEQ ID NO: 141197 - protein, 7 aa, synthetic construct
QNTNPPR

SEQ ID NO: 141198 - protein, 7 aa, synthetic construct
QNTNSPR

SEQ ID NO: 141199 - protein, 7 aa, synthetic construct
QNTQKHY

SEQ ID NO: 141200 - protein, 7 aa, synthetic construct
QNTSFMK

SEQ ID NO: 141201 - protein, 7 aa, synthetic construct
QNTSSGR

SEQ ID NO: 141202 - protein, 7 aa, synthetic construct
QNTTRNQ

SEQ ID NO: 141203 - protein, 7 aa, synthetic construct
QNTYVAK

SEQ ID NO: 141204 - protein, 7 aa, synthetic construct
QNVAAGR

SEQ ID NO: 141205 - protein, 7 aa, synthetic construct
QNVAKMY

SEQ ID NO: 141206 - protein, 7 aa, synthetic construct
QNVATRN

SEQ ID NO: 141207 - protein, 7 aa, synthetic construct
QNVGHRG

SEQ ID NO: 141208 - protein, 7 aa, synthetic construct
QNVGHRM

SEQ ID NO: 141209 - protein, 7 aa, synthetic construct
QNVIKSY

SEQ ID NO: 141210 - protein, 7 aa, synthetic construct
QNVIKTH

SEQ ID NO: 141211 - protein, 7 aa, synthetic construct
QNVKARD

SEQ ID NO: 141212 - protein, 7 aa, synthetic construct
QNVKHRD

SEQ ID NO: 141213 - protein, 7 aa, synthetic construct
QNVKPQW

SEQ ID NO: 141214 - protein, 7 aa, synthetic construct
QNVMHSK

SEQ ID NO: 141215 - protein, 7 aa, synthetic construct
QNVRATI

SEQ ID NO: 141216 - protein, 7 aa, synthetic construct
QNVRGQT

SEQ ID NO: 141217 - protein, 7 aa, synthetic construct
QNVRHGI

SEQ ID NO: 141218 - protein, 7 aa, synthetic construct
QNVRKEF

SEQ ID NO: 141219 - protein, 7 aa, synthetic construct
QNVRNKE

SEQ ID NO: 141220 - protein, 7 aa, synthetic construct
QNVRPYQ

SEQ ID NO: 141221 - protein, 7 aa, synthetic construct
QNVRQMV

SEQ ID NO: 141222 - protein, 7 aa, synthetic construct
QNVRTMQ

SEQ ID NO: 141223 - protein, 7 aa, synthetic construct
QNVSARM

SEQ ID NO: 141224 - protein, 7 aa, synthetic construct
QNVSIRI

SEQ ID NO: 141225 - protein, 7 aa, synthetic construct
QNVTVRT

SEQ ID NO: 141226 - protein, 7 aa, synthetic construct
QNVVRDR

SEQ ID NO: 141227 - protein, 7 aa, synthetic construct
QNYAPSK

SEQ ID NO: 141228 - protein, 7 aa, synthetic construct
QNYPQMK

SEQ ID NO: 141229 - protein, 7 aa, synthetic construct
QPAARGH

SEQ ID NO: 141230 - protein, 7 aa, synthetic construct
QPAFKNM

SEQ ID NO: 141231 - protein, 7 aa, synthetic construct
QPAHHKA

SEQ ID NO: 141232 - protein, 7 aa, synthetic construct
QPAKRGE

SEQ ID NO: 141233 - protein, 7 aa, synthetic construct
QPAKVVM

SEQ ID NO: 141234 - protein, 7 aa, synthetic construct
QPAMAGR

SEQ ID NO: 141235 - protein, 7 aa, synthetic construct
QPANERR

SEQ ID NO: 141236 - protein, 7 aa, synthetic construct
QPAQRAF

SEQ ID NO: 141237 - protein, 7 aa, synthetic construct
QPAQRGA

SEQ ID NO: 141238 - protein, 7 aa, synthetic construct
QPAQSWN

SEQ ID NO: 141239 - protein, 7 aa, synthetic construct
QPARANY

SEQ ID NO: 141240 - protein, 7 aa, synthetic construct
QPARPKE

SEQ ID NO: 141241 - protein, 7 aa, synthetic construct
QPARPVT

SEQ ID NO: 141242 - protein, 7 aa, synthetic construct
QPASGFR

SEQ ID NO: 141243 - protein, 7 aa, synthetic construct
QPASYPR

SEQ ID NO: 141244 - protein, 7 aa, synthetic construct
QPAVRGH

SEQ ID NO: 141245 - protein, 7 aa, synthetic construct
QPAVSFK

SEQ ID NO: 141246 - protein, 7 aa, synthetic construct
QPAYNAR

SEQ ID NO: 141247 - protein, 7 aa, synthetic construct
QPAYQKQ

SEQ ID NO: 141248 - protein, 7 aa, synthetic construct
QPDQRGR

SEQ ID NO: 141249 - protein, 7 aa, synthetic construct
QPDQRKQ

SEQ ID NO: 141250 - protein, 7 aa, synthetic construct
QPDSRNK

SEQ ID NO: 141251 - protein, 7 aa, synthetic construct
QPEARMK

SEQ ID NO: 141252 - protein, 7 aa, synthetic construct
QPEKHPR

SEQ ID NO: 141253 - protein, 7 aa, synthetic construct
QPEMRKV

SEQ ID NO: 141254 - protein, 7 aa, synthetic construct
QPENRVR

SEQ ID NO: 141255 - protein, 7 aa, synthetic construct
QPERMMR

SEQ ID NO: 141256 - protein, 7 aa, synthetic construct
QPGFKNA

SEQ ID NO: 141257 - protein, 7 aa, synthetic construct
QPGGFKA

SEQ ID NO: 141258 - protein, 7 aa, synthetic construct
QPGHLNK

SEQ ID NO: 141259 - protein, 7 aa, synthetic construct
QPGIARN

SEQ ID NO: 141260 - protein, 7 aa, synthetic construct
QPGKHAF

SEQ ID NO: 141261 - protein, 7 aa, synthetic construct
QPGKKAD

SEQ ID NO: 141262 - protein, 7 aa, synthetic construct
QPGKQYT

SEQ ID NO: 141263 - protein, 7 aa, synthetic construct
QPGKYTQ

SEQ ID NO: 141264 - protein, 7 aa, synthetic construct
QPGLARM

SEQ ID NO: 141265 - protein, 7 aa, synthetic construct
QPGNNSR

SEQ ID NO: 141266 - protein, 7 aa, synthetic construct
QPGTPKH

SEQ ID NO: 141267 - protein, 7 aa, synthetic construct
QPGTPRN

SEQ ID NO: 141268 - protein, 7 aa, synthetic construct
QPGTQPR

SEQ ID NO: 141269 - protein, 7 aa, synthetic construct
QPHASRM

SEQ ID NO: 141270 - protein, 7 aa, synthetic construct
QPHATIR

SEQ ID NO: 141271 - protein, 7 aa, synthetic construct
QPHDRKP

SEQ ID NO: 141272 - protein, 7 aa, synthetic construct
QPHFQER

SEQ ID NO: 141273 - protein, 7 aa, synthetic construct
QPHHLKT

SEQ ID NO: 141274 - protein, 7 aa, synthetic construct
QPHHPKV

SEQ ID NO: 141275 - protein, 7 aa, synthetic construct
QPHKHTS

SEQ ID NO: 141276 - protein, 7 aa, synthetic construct
QPHKSVL

SEQ ID NO: 141277 - protein, 7 aa, synthetic construct
QPHLGKM

SEQ ID NO: 141278 - protein, 7 aa, synthetic construct
QPHLGKN

SEQ ID NO: 141279 - protein, 7 aa, synthetic construct
QPHLGSR

SEQ ID NO: 141280 - protein, 7 aa, synthetic construct
QPHLKSM

SEQ ID NO: 141281 - protein, 7 aa, synthetic construct
QPHMRTG

SEQ ID NO: 141282 - protein, 7 aa, synthetic construct
QPHNHAK

SEQ ID NO: 141283 - protein, 7 aa, synthetic construct
QPHNSRA

SEQ ID NO: 141284 - protein, 7 aa, synthetic construct
QPHPTAR

SEQ ID NO: 141285 - protein, 7 aa, synthetic construct
QPHQVRS

SEQ ID NO: 141286 - protein, 7 aa, synthetic construct
QPHRTQQ

SEQ ID NO: 141287 - protein, 7 aa, synthetic construct
QPHSATR

SEQ ID NO: 141288 - protein, 7 aa, synthetic construct
QPHSVRM

SEQ ID NO: 141289 - protein, 7 aa, synthetic construct
QPHVKYM

SEQ ID NO: 141290 - protein, 7 aa, synthetic construct
QPHVTIR

SEQ ID NO: 141291 - protein, 7 aa, synthetic construct
QPIHMRG

SEQ ID NO: 141292 - protein, 7 aa, synthetic construct
QPISKGY

SEQ ID NO: 141293 - protein, 7 aa, synthetic construct
QPKAGWV

SEQ ID NO: 141294 - protein, 7 aa, synthetic construct
QPKDQWR

SEQ ID NO: 141295 - protein, 7 aa, synthetic construct
QPKFQER

SEQ ID NO: 141296 - protein, 7 aa, synthetic construct
QPKHIGL

SEQ ID NO: 141297 - protein, 7 aa, synthetic construct
QPKHNGY

SEQ ID NO: 141298 - protein, 7 aa, synthetic construct
QPKHNHV

SEQ ID NO: 141299 - protein, 7 aa, synthetic construct
QPKIAYG

SEQ ID NO: 141300 - protein, 7 aa, synthetic construct
QPKIRTD

SEQ ID NO: 141301 - protein, 7 aa, synthetic construct
QPKLNYG

SEQ ID NO: 141302 - protein, 7 aa, synthetic construct
QPKNVYH

SEQ ID NO: 141303 - protein, 7 aa, synthetic construct
QPKPSYH

SEQ ID NO: 141304 - protein, 7 aa, synthetic construct
QPKQHQY

SEQ ID NO: 141305 - protein, 7 aa, synthetic construct
QPKQMPF

SEQ ID NO: 141306 - protein, 7 aa, synthetic construct
QPKRDAN

SEQ ID NO: 141307 - protein, 7 aa, synthetic construct
QPKVAVY

SEQ ID NO: 141308 - protein, 7 aa, synthetic construct
QPKYDKN

SEQ ID NO: 141309 - protein, 7 aa, synthetic construct
QPKYDPK

SEQ ID NO: 141310 - protein, 7 aa, synthetic construct
QPKYGMT

SEQ ID NO: 141311 - protein, 7 aa, synthetic construct
QPLHKHS

SEQ ID NO: 141312 - protein, 7 aa, synthetic construct
QPLKPKD

SEQ ID NO: 141313 - protein, 7 aa, synthetic construct
QPLREMK

SEQ ID NO: 141314 - protein, 7 aa, synthetic construct
QPMIGRS

SEQ ID NO: 141315 - protein, 7 aa, synthetic construct
QPMKRDT

SEQ ID NO: 141316 - protein, 7 aa, synthetic construct
QPMQHRS

SEQ ID NO: 141317 - protein, 7 aa, synthetic construct
QPMRIKD

SEQ ID NO: 141318 - protein, 7 aa, synthetic construct
QPMRKEY

SEQ ID NO: 141319 - protein, 7 aa, synthetic construct
QPMRKSE

SEQ ID NO: 141320 - protein, 7 aa, synthetic construct
QPNARIM

SEQ ID NO: 141321 - protein, 7 aa, synthetic construct
QPNHIKF

SEQ ID NO: 141322 - protein, 7 aa, synthetic construct
QPNHKFI

SEQ ID NO: 141323 - protein, 7 aa, synthetic construct
QPNLKFN

SEQ ID NO: 141324 - protein, 7 aa, synthetic construct
QPNQHMR

SEQ ID NO: 141325 - protein, 7 aa, synthetic construct
QPNQSFR

SEQ ID NO: 141326 - protein, 7 aa, synthetic construct
QPNVKFM

SEQ ID NO: 141327 - protein, 7 aa, synthetic construct
QPNVRPM

SEQ ID NO: 141328 - protein, 7 aa, synthetic construct
QPNYSQK

SEQ ID NO: 141329 - protein, 7 aa, synthetic construct
QPPAKYH

SEQ ID NO: 141330 - protein, 7 aa, synthetic construct
QPPLNLR

SEQ ID NO: 141331 - protein, 7 aa, synthetic construct
QPPMAMR

SEQ ID NO: 141332 - protein, 7 aa, synthetic construct
QPPMSVR

SEQ ID NO: 141333 - protein, 7 aa, synthetic construct
QPPPRHP

SEQ ID NO: 141334 - protein, 7 aa, synthetic construct
QPPQRYA

SEQ ID NO: 141335 - protein, 7 aa, synthetic construct
QPPRDNK

SEQ ID NO: 141336 - protein, 7 aa, synthetic construct
QPPSMAR

SEQ ID NO: 141337 - protein, 7 aa, synthetic construct
QPPVTQR

SEQ ID NO: 141338 - protein, 7 aa, synthetic construct
QPQGRSH

SEQ ID NO: 141339 - protein, 7 aa, synthetic construct
QPQIYKA

SEQ ID NO: 141340 - protein, 7 aa, synthetic construct
QPQKREF

SEQ ID NO: 141341 - protein, 7 aa, synthetic construct
QPQKVYN

SEQ ID NO: 141342 - protein, 7 aa, synthetic construct
QPQKYPL

SEQ ID NO: 141343 - protein, 7 aa, synthetic construct
QPQNNAR

SEQ ID NO: 141344 - protein, 7 aa, synthetic construct
QPQNSFR

SEQ ID NO: 141345 - protein, 7 aa, synthetic construct
QPQRDKM

SEQ ID NO: 141346 - protein, 7 aa, synthetic construct
QPQRDKQ

SEQ ID NO: 141347 - protein, 7 aa, synthetic construct
QPQRLAM

SEQ ID NO: 141348 - protein, 7 aa, synthetic construct
QPQRSMH

SEQ ID NO: 141349 - protein, 7 aa, synthetic construct
QPQRVDK

SEQ ID NO: 141350 - protein, 7 aa, synthetic construct
QPQRYPS

SEQ ID NO: 141351 - protein, 7 aa, synthetic construct
QPQVAMR

SEQ ID NO: 141352 - protein, 7 aa, synthetic construct
QPQVKRD

SEQ ID NO: 141353 - protein, 7 aa, synthetic construct
QPRANGH

SEQ ID NO: 141354 - protein, 7 aa, synthetic construct
QPRATGH

SEQ ID NO: 141355 - protein, 7 aa, synthetic construct
QPRAVGL

SEQ ID NO: 141356 - protein, 7 aa, synthetic construct
QPRDNRL

SEQ ID NO: 141357 - protein, 7 aa, synthetic construct
QPRETKY

SEQ ID NO: 141358 - protein, 7 aa, synthetic construct
QPRGVDR

SEQ ID NO: 141359 - protein, 7 aa, synthetic construct
QPRHMNV

SEQ ID NO: 141360 - protein, 7 aa, synthetic construct
QPRHSGP

SEQ ID NO: 141361 - protein, 7 aa, synthetic construct
QPRHVTS

SEQ ID NO: 141362 - protein, 7 aa, synthetic construct
QPRHVVQ

SEQ ID NO: 141363 - protein, 7 aa, synthetic construct
QPRIMAP

SEQ ID NO: 141364 - protein, 7 aa, synthetic construct
QPRLSAA

SEQ ID NO: 141365 - protein, 7 aa, synthetic construct
QPRMEKY

SEQ ID NO: 141366 - protein, 7 aa, synthetic construct
QPRMGSL

SEQ ID NO: 141367 - protein, 7 aa, synthetic construct
QPRMKIE

SEQ ID NO: 141368 - protein, 7 aa, synthetic construct
QPRNAML

SEQ ID NO: 141369 - protein, 7 aa, synthetic construct
QPRNLGM

SEQ ID NO: 141370 - protein, 7 aa, synthetic construct
QPRNQLQ

SEQ ID NO: 141371 - protein, 7 aa, synthetic construct
QPRNVTY

SEQ ID NO: 141372 - protein, 7 aa, synthetic construct
QPRQAHP

SEQ ID NO: 141373 - protein, 7 aa, synthetic construct
QPRQIHP

SEQ ID NO: 141374 - protein, 7 aa, synthetic construct
QPRQQAM

SEQ ID NO: 141375 - protein, 7 aa, synthetic construct
QPRQVTH

SEQ ID NO: 141376 - protein, 7 aa, synthetic construct
QPRSTHF

SEQ ID NO: 141377 - protein, 7 aa, synthetic construct
QPRTEKY

SEQ ID NO: 141378 - protein, 7 aa, synthetic construct
QPRTERG

SEQ ID NO: 141379 - protein, 7 aa, synthetic construct
QPRTGHI

SEQ ID NO: 141380 - protein, 7 aa, synthetic construct
QPRTSSQ

SEQ ID NO: 141381 - protein, 7 aa, synthetic construct
QPRVIGN

SEQ ID NO: 141382 - protein, 7 aa, synthetic construct
QPRVLEK

SEQ ID NO: 141383 - protein, 7 aa, synthetic construct
QPRVNPH

SEQ ID NO: 141384 - protein, 7 aa, synthetic construct
QPRVSLN

SEQ ID NO: 141385 - protein, 7 aa, synthetic construct
QPSGAKY

SEQ ID NO: 141386 - protein, 7 aa, synthetic construct
QPSHGKY

SEQ ID NO: 141387 - protein, 7 aa, synthetic construct
QPSKVDR

SEQ ID NO: 141388 - protein, 7 aa, synthetic construct
QPSLKIM

SEQ ID NO: 141389 - protein, 7 aa, synthetic construct
QPSQYSK

SEQ ID NO: 141390 - protein, 7 aa, synthetic construct
QPSRIPP

SEQ ID NO: 141391 - protein, 7 aa, synthetic construct
QPSSKVW

SEQ ID NO: 141392 - protein, 7 aa, synthetic construct
QPSTHGR

SEQ ID NO: 141393 - protein, 7 aa, synthetic construct
QPSVTRQ

SEQ ID NO: 141394 - protein, 7 aa, synthetic construct
QPSYGSM

SEQ ID NO: 141395 - protein, 7 aa, synthetic construct
QPSYKAN

SEQ ID NO: 141396 - protein, 7 aa, synthetic construct
QPTAYSK

SEQ ID NO: 141397 - protein, 7 aa, synthetic construct
QPTFSKS

SEQ ID NO: 141398 - protein, 7 aa, synthetic construct
QPTHRSV

SEQ ID NO: 141399 - protein, 7 aa, synthetic construct
QPTHTRM

SEQ ID NO: 141400 - protein, 7 aa, synthetic construct
QPTKHPQ

SEQ ID NO: 141401 - protein, 7 aa, synthetic construct
QPTREFK

SEQ ID NO: 141402 - protein, 7 aa, synthetic construct
QPTTRHG

SEQ ID NO: 141403 - protein, 7 aa, synthetic construct
QPTWTSD

SEQ ID NO: 141404 - protein, 7 aa, synthetic construct
QPVAERK

SEQ ID NO: 141405 - protein, 7 aa, synthetic construct
QPVHAKY

SEQ ID NO: 141406 - protein, 7 aa, synthetic construct
QPVKFSN

SEQ ID NO: 141407 - protein, 7 aa, synthetic construct
QPVKHYT

SEQ ID NO: 141408 - protein, 7 aa, synthetic construct
QPVKPYQ

SEQ ID NO: 141409 - protein, 7 aa, synthetic construct
QPVYVKG

SEQ ID NO: 141410 - protein, 7 aa, synthetic construct
QPYAKTG

SEQ ID NO: 141411 - protein, 7 aa, synthetic construct
QPYGAAF

SEQ ID NO: 141412 - protein, 7 aa, synthetic construct
QPYISPT

SEQ ID NO: 141413 - protein, 7 aa, synthetic construct
QPYKGPS

SEQ ID NO: 141414 - protein, 7 aa, synthetic construct
QPYKQPV

SEQ ID NO: 141415 - protein, 7 aa, synthetic construct
QPYNSTK

SEQ ID NO: 141416 - protein, 7 aa, synthetic construct
QPYQPSK

SEQ ID NO: 141417 - protein, 7 aa, synthetic construct
QPYTGPT

SEQ ID NO: 141418 - protein, 7 aa, synthetic construct
QPYTPTA

SEQ ID NO: 141419 - protein, 7 aa, synthetic construct
QPYVKKE

SEQ ID NO: 141420 - protein, 7 aa, synthetic construct
QQAAGKW

SEQ ID NO: 141421 - protein, 7 aa, synthetic construct
QQAARDK

SEQ ID NO: 141422 - protein, 7 aa, synthetic construct
QQAGYAK

SEQ ID NO: 141423 - protein, 7 aa, synthetic construct
QQAHKQM

SEQ ID NO: 141424 - protein, 7 aa, synthetic construct
QQAHNTK

SEQ ID NO: 141425 - protein, 7 aa, synthetic construct
QQAHSGK

SEQ ID NO: 141426 - protein, 7 aa, synthetic construct
QQAHVVR

SEQ ID NO: 141427 - protein, 7 aa, synthetic construct
QQAKQHW

SEQ ID NO: 141428 - protein, 7 aa, synthetic construct
QQALARQ

SEQ ID NO: 141429 - protein, 7 aa, synthetic construct
QQAMHKY

SEQ ID NO: 141430 - protein, 7 aa, synthetic construct
QQAMKSY

SEQ ID NO: 141431 - protein, 7 aa, synthetic construct
QQANPFD

SEQ ID NO: 141432 - protein, 7 aa, synthetic construct
QQAPKMH

SEQ ID NO: 141433 - protein, 7 aa, synthetic construct
QQAQPFR

SEQ ID NO: 141434 - protein, 7 aa, synthetic construct
QQAQPRF

SEQ ID NO: 141435 - protein, 7 aa, synthetic construct
QQAQRGM

SEQ ID NO: 141436 - protein, 7 aa, synthetic construct
QQASGQR

SEQ ID NO: 141437 - protein, 7 aa, synthetic construct
QQASVNR

SEQ ID NO: 141438 - protein, 7 aa, synthetic construct
QQATQKW

SEQ ID NO: 141439 - protein, 7 aa, synthetic construct
QQATRFI

SEQ ID NO: 141440 - protein, 7 aa, synthetic construct
QQDNKRM

SEQ ID NO: 141441 - protein, 7 aa, synthetic construct
QQDRQKQ

SEQ ID NO: 141442 - protein, 7 aa, synthetic construct
QQDWKNN

SEQ ID NO: 141443 - protein, 7 aa, synthetic construct
QQERPLR

SEQ ID NO: 141444 - protein, 7 aa, synthetic construct
QQERQKN

SEQ ID NO: 141445 - protein, 7 aa, synthetic construct
QQFGSQK

SEQ ID NO: 141446 - protein, 7 aa, synthetic construct
QQFKQRD

SEQ ID NO: 141447 - protein, 7 aa, synthetic construct
QQFRGHV

SEQ ID NO: 141448 - protein, 7 aa, synthetic construct
QQFSMKA

SEQ ID NO: 141449 - protein, 7 aa, synthetic construct
QQFVKSA

SEQ ID NO: 141450 - protein, 7 aa, synthetic construct
QQGAILR

SEQ ID NO: 141451 - protein, 7 aa, synthetic construct
QQGFIKS

SEQ ID NO: 141452 - protein, 7 aa, synthetic construct
QQGHFKG

SEQ ID NO: 141453 - protein, 7 aa, synthetic construct
QQGHIRT

SEQ ID NO: 141454 - protein, 7 aa, synthetic construct
QQGHLAK

SEQ ID NO: 141455 - protein, 7 aa, synthetic construct
QQGHNQK

SEQ ID NO: 141456 - protein, 7 aa, synthetic construct
QQGHNSK

SEQ ID NO: 141457 - protein, 7 aa, synthetic construct
QQGIHAR

SEQ ID NO: 141458 - protein, 7 aa, synthetic construct
QQGKPMF

SEQ ID NO: 141459 - protein, 7 aa, synthetic construct
QQGNQTR

SEQ ID NO: 141460 - protein, 7 aa, synthetic construct
QQGQTYY

SEQ ID NO: 141461 - protein, 7 aa, synthetic construct
QQGRQDK

SEQ ID NO: 141462 - protein, 7 aa, synthetic construct
QQGSHGK

SEQ ID NO: 141463 - protein, 7 aa, synthetic construct
QQGTHPK

SEQ ID NO: 141464 - protein, 7 aa, synthetic construct
QQGVGVR

SEQ ID NO: 141465 - protein, 7 aa, synthetic construct
QQGVIAR

SEQ ID NO: 141466 - protein, 7 aa, synthetic construct
QQGVNHK

SEQ ID NO: 141467 - protein, 7 aa, synthetic construct
QQGVRQT

SEQ ID NO: 141468 - protein, 7 aa, synthetic construct
QQGYMNK

SEQ ID NO: 141469 - protein, 7 aa, synthetic construct
QQGYQNR

SEQ ID NO: 141470 - protein, 7 aa, synthetic construct
QQGYSKV

SEQ ID NO: 141471 - protein, 7 aa, synthetic construct
QQHGKMT

SEQ ID NO: 141472 - protein, 7 aa, synthetic construct
QQHGTKY

SEQ ID NO: 141473 - protein, 7 aa, synthetic construct
QQHHLKG

SEQ ID NO: 141474 - protein, 7 aa, synthetic construct
QQHIGPK

SEQ ID NO: 141475 - protein, 7 aa, synthetic construct
QQHKFSV

SEQ ID NO: 141476 - protein, 7 aa, synthetic construct
QQHKTSL

SEQ ID NO: 141477 - protein, 7 aa, synthetic construct
QQHLSRT

SEQ ID NO: 141478 - protein, 7 aa, synthetic construct
QQHMKPY

SEQ ID NO: 141479 - protein, 7 aa, synthetic construct
QQHMNKL

SEQ ID NO: 141480 - protein, 7 aa, synthetic construct
QQHNPQD

SEQ ID NO: 141481 - protein, 7 aa, synthetic construct
QQHPKGL

SEQ ID NO: 141482 - protein, 7 aa, synthetic construct
QQHPKNN

SEQ ID NO: 141483 - protein, 7 aa, synthetic construct
QQHPRGA

SEQ ID NO: 141484 - protein, 7 aa, synthetic construct
QQHRINH

SEQ ID NO: 141485 - protein, 7 aa, synthetic construct
QQHRNIV

SEQ ID NO: 141486 - protein, 7 aa, synthetic construct
QQHSIQR

SEQ ID NO: 141487 - protein, 7 aa, synthetic construct
QQHSNVK

SEQ ID NO: 141488 - protein, 7 aa, synthetic construct
QQHSSNK

SEQ ID NO: 141489 - protein, 7 aa, synthetic construct
QQHSTQR

SEQ ID NO: 141490 - protein, 7 aa, synthetic construct
QQHTKNY

SEQ ID NO: 141491 - protein, 7 aa, synthetic construct
QQHTNYK

SEQ ID NO: 141492 - protein, 7 aa, synthetic construct
QQHYPPT

SEQ ID NO: 141493 - protein, 7 aa, synthetic construct
QQIDRPK

SEQ ID NO: 141494 - protein, 7 aa, synthetic construct
QQIKATF

SEQ ID NO: 141495 - protein, 7 aa, synthetic construct
QQIKSYS

SEQ ID NO: 141496 - protein, 7 aa, synthetic construct
QQINIAR

SEQ ID NO: 141497 - protein, 7 aa, synthetic construct
QQINTRM

SEQ ID NO: 141498 - protein, 7 aa, synthetic construct
QQIPVRQ

SEQ ID NO: 141499 - protein, 7 aa, synthetic construct
QQIQQRQ

SEQ ID NO: 141500 - protein, 7 aa, synthetic construct
QQIRQGY

SEQ ID NO: 141501 - protein, 7 aa, synthetic construct
QQKDMHK

SEQ ID NO: 141502 - protein, 7 aa, synthetic construct
QQKDREK

SEQ ID NO: 141503 - protein, 7 aa, synthetic construct
QQKDTTR

SEQ ID NO: 141504 - protein, 7 aa, synthetic construct
QQKERMM

SEQ ID NO: 141505 - protein, 7 aa, synthetic construct
QQKFNTV

SEQ ID NO: 141506 - protein, 7 aa, synthetic construct
QQKGGDR

SEQ ID NO: 141507 - protein, 7 aa, synthetic construct
QQKGRND

SEQ ID NO: 141508 - protein, 7 aa, synthetic construct
QQKHREV

SEQ ID NO: 141509 - protein, 7 aa, synthetic construct
QQKHVYP

SEQ ID NO: 141510 - protein, 7 aa, synthetic construct
QQKKANE

SEQ ID NO: 141511 - protein, 7 aa, synthetic construct
QQKKNDF

SEQ ID NO: 141512 - protein, 7 aa, synthetic construct
QQKLHAY

SEQ ID NO: 141513 - protein, 7 aa, synthetic construct
QQKLKFD

SEQ ID NO: 141514 - protein, 7 aa, synthetic construct
QQKLRME

SEQ ID NO: 141515 - protein, 7 aa, synthetic construct
QQKLRQD

SEQ ID NO: 141516 - protein, 7 aa, synthetic construct
QQKMPQY

SEQ ID NO: 141517 - protein, 7 aa, synthetic construct
QQKNGMW

SEQ ID NO: 141518 - protein, 7 aa, synthetic construct
QQKPKTE

SEQ ID NO: 141519 - protein, 7 aa, synthetic construct
QQKPMMF

SEQ ID NO: 141520 - protein, 7 aa, synthetic construct
QQKPPYI

SEQ ID NO: 141521 - protein, 7 aa, synthetic construct
QQKPVYS

SEQ ID NO: 141522 - protein, 7 aa, synthetic construct
QQKPYGL

SEQ ID NO: 141523 - protein, 7 aa, synthetic construct
QQKQDMR

SEQ ID NO: 141524 - protein, 7 aa, synthetic construct
QQKQRND

SEQ ID NO: 141525 - protein, 7 aa, synthetic construct
QQKRGNE

SEQ ID NO: 141526 - protein, 7 aa, synthetic construct
QQKRTQE

SEQ ID NO: 141527 - protein, 7 aa, synthetic construct
QQKSHTQ

SEQ ID NO: 141528 - protein, 7 aa, synthetic construct
QQKTDFR

SEQ ID NO: 141529 - protein, 7 aa, synthetic construct
QQKTIHF

SEQ ID NO: 141530 - protein, 7 aa, synthetic construct
QQKTLER

SEQ ID NO: 141531 - protein, 7 aa, synthetic construct
QQKTMGW

SEQ ID NO: 141532 - protein, 7 aa, synthetic construct
QQKVQDR

SEQ ID NO: 141533 - protein, 7 aa, synthetic construct
QQKVVDR

SEQ ID NO: 141534 - protein, 7 aa, synthetic construct
QQKYKDL

SEQ ID NO: 141535 - protein, 7 aa, synthetic construct
QQKYSMV

SEQ ID NO: 141536 - protein, 7 aa, synthetic construct
QQLGGYK

SEQ ID NO: 141537 - protein, 7 aa, synthetic construct
QQLGSRQ

SEQ ID NO: 141538 - protein, 7 aa, synthetic construct
QQLQRQV

SEQ ID NO: 141539 - protein, 7 aa, synthetic construct
QQMAMHK

SEQ ID NO: 141540 - protein, 7 aa, synthetic construct
QQMHATK

SEQ ID NO: 141541 - protein, 7 aa, synthetic construct
QQMKGYP

SEQ ID NO: 141542 - protein, 7 aa, synthetic construct
QQMKQTW

SEQ ID NO: 141543 - protein, 7 aa, synthetic construct
QQMNKVY

SEQ ID NO: 141544 - protein, 7 aa, synthetic construct
QQMPMKH

SEQ ID NO: 141545 - protein, 7 aa, synthetic construct
QQMQSFK

SEQ ID NO: 141546 - protein, 7 aa, synthetic construct
QQMQTRF

SEQ ID NO: 141547 - protein, 7 aa, synthetic construct
QQMREKI

SEQ ID NO: 141548 - protein, 7 aa, synthetic construct
QQMRNIA

SEQ ID NO: 141549 - protein, 7 aa, synthetic construct
QQMRQAI

SEQ ID NO: 141550 - protein, 7 aa, synthetic construct
QQMSPKF

SEQ ID NO: 141551 - protein, 7 aa, synthetic construct
QQMSTRT

SEQ ID NO: 141552 - protein, 7 aa, synthetic construct
QQNAHKT

SEQ ID NO: 141553 - protein, 7 aa, synthetic construct
QQNGMGR

SEQ ID NO: 141554 - protein, 7 aa, synthetic construct
QQNHAKW

SEQ ID NO: 141555 - protein, 7 aa, synthetic construct
QQNKGDR

SEQ ID NO: 141556 - protein, 7 aa, synthetic construct
QQNKKDT

SEQ ID NO: 141557 - protein, 7 aa, synthetic construct
QQNKVDR

SEQ ID NO: 141558 - protein, 7 aa, synthetic construct
QQNMKAW

SEQ ID NO: 141559 - protein, 7 aa, synthetic construct
QQNNAMR

SEQ ID NO: 141560 - protein, 7 aa, synthetic construct
QQNNSNR

SEQ ID NO: 141561 - protein, 7 aa, synthetic construct
QQNRDRF

SEQ ID NO: 141562 - protein, 7 aa, synthetic construct
QQNRIQM

SEQ ID NO: 141563 - protein, 7 aa, synthetic construct
QQNSHPK

SEQ ID NO: 141564 - protein, 7 aa, synthetic construct
QQNVGYY

SEQ ID NO: 141565 - protein, 7 aa, synthetic construct
QQNVREK

SEQ ID NO: 141566 - protein, 7 aa, synthetic construct
QQPHVGK

SEQ ID NO: 141567 - protein, 7 aa, synthetic construct
QQPKPFG

SEQ ID NO: 141568 - protein, 7 aa, synthetic construct
QQPKSER

SEQ ID NO: 141569 - protein, 7 aa, synthetic construct
QQPMKLL

SEQ ID NO: 141570 - protein, 7 aa, synthetic construct
QQPNKYI

SEQ ID NO: 141571 - protein, 7 aa, synthetic construct
QQPRNSL

SEQ ID NO: 141572 - protein, 7 aa, synthetic construct
QQPSTYK

SEQ ID NO: 141573 - protein, 7 aa, synthetic construct
QQPYNQK

SEQ ID NO: 141574 - protein, 7 aa, synthetic construct
QQQALGR

SEQ ID NO: 141575 - protein, 7 aa, synthetic construct
QQQARDK

SEQ ID NO: 141576 - protein, 7 aa, synthetic construct
QQQAYKS

SEQ ID NO: 141577 - protein, 7 aa, synthetic construct
QQQGLGR

SEQ ID NO: 141578 - protein, 7 aa, synthetic construct
QQQGSYM

SEQ ID NO: 141579 - protein, 7 aa, synthetic construct
QQQHKVS

SEQ ID NO: 141580 - protein, 7 aa, synthetic construct
QQQHQAK

SEQ ID NO: 141581 - protein, 7 aa, synthetic construct
QQQHVQK

SEQ ID NO: 141582 - protein, 7 aa, synthetic construct
QQQIKHN

SEQ ID NO: 141583 - protein, 7 aa, synthetic construct
QQQKHPH

SEQ ID NO: 141584 - protein, 7 aa, synthetic construct
QQQLKPY

SEQ ID NO: 141585 - protein, 7 aa, synthetic construct
QQQMGPK

SEQ ID NO: 141586 - protein, 7 aa, synthetic construct
QQQMHMK

SEQ ID NO: 141587 - protein, 7 aa, synthetic construct
QQQMPRT

SEQ ID NO: 141588 - protein, 7 aa, synthetic construct
QQQNERK

SEQ ID NO: 141589 - protein, 7 aa, synthetic construct
QQQNKPW

SEQ ID NO: 141590 - protein, 7 aa, synthetic construct
QQQQRMT

SEQ ID NO: 141591 - protein, 7 aa, synthetic construct
QQQQVSR

SEQ ID NO: 141592 - protein, 7 aa, synthetic construct
QQQRIQS

SEQ ID NO: 141593 - protein, 7 aa, synthetic construct
QQQRLEK

SEQ ID NO: 141594 - protein, 7 aa, synthetic construct
QQQRTTT

SEQ ID NO: 141595 - protein, 7 aa, synthetic construct
QQQTRVA

SEQ ID NO: 141596 - protein, 7 aa, synthetic construct
QQRATPL

SEQ ID NO: 141597 - protein, 7 aa, synthetic construct
QQRDGSK

SEQ ID NO: 141598 - protein, 7 aa, synthetic construct
QQREGAK

SEQ ID NO: 141599 - protein, 7 aa, synthetic construct
QQREKIL

SEQ ID NO: 141600 - protein, 7 aa, synthetic construct
QQRHIVP

SEQ ID NO: 141601 - protein, 7 aa, synthetic construct
QQRKDVL

SEQ ID NO: 141602 - protein, 7 aa, synthetic construct
QQRKETQ

SEQ ID NO: 141603 - protein, 7 aa, synthetic construct
QQRKIIE

SEQ ID NO: 141604 - protein, 7 aa, synthetic construct
QQRKQDM

SEQ ID NO: 141605 - protein, 7 aa, synthetic construct
QQRMGIT

SEQ ID NO: 141606 - protein, 7 aa, synthetic construct
QQRNIDR

SEQ ID NO: 141607 - protein, 7 aa, synthetic construct
QQRPKQD

SEQ ID NO: 141608 - protein, 7 aa, synthetic construct
QQRQADK

SEQ ID NO: 141609 - protein, 7 aa, synthetic construct
QQRQKEV

SEQ ID NO: 141610 - protein, 7 aa, synthetic construct
QQRQQVH

SEQ ID NO: 141611 - protein, 7 aa, synthetic construct
QQRQYDK

SEQ ID NO: 141612 - protein, 7 aa, synthetic construct
QQRSLSL

SEQ ID NO: 141613 - protein, 7 aa, synthetic construct
QQRTKDQ

SEQ ID NO: 141614 - protein, 7 aa, synthetic construct
QQRTKDY

SEQ ID NO: 141615 - protein, 7 aa, synthetic construct
QQRTLSQ

SEQ ID NO: 141616 - protein, 7 aa, synthetic construct
QQRTPPH

SEQ ID NO: 141617 - protein, 7 aa, synthetic construct
QQRVHPI

SEQ ID NO: 141618 - protein, 7 aa, synthetic construct
QQRVKGD

SEQ ID NO: 141619 - protein, 7 aa, synthetic construct
QQRWIED

SEQ ID NO: 141620 - protein, 7 aa, synthetic construct
QQSGAYM

SEQ ID NO: 141621 - protein, 7 aa, synthetic construct
QQSGLKW

SEQ ID NO: 141622 - protein, 7 aa, synthetic construct
QQSGRVF

SEQ ID NO: 141623 - protein, 7 aa, synthetic construct
QQSHIAK

SEQ ID NO: 141624 - protein, 7 aa, synthetic construct
QQSIGHK

SEQ ID NO: 141625 - protein, 7 aa, synthetic construct
QQSKHGT

SEQ ID NO: 141626 - protein, 7 aa, synthetic construct
QQSLPAD

SEQ ID NO: 141627 - protein, 7 aa, synthetic construct
QQSLYKG

SEQ ID NO: 141628 - protein, 7 aa, synthetic construct
QQSNTMR

SEQ ID NO: 141629 - protein, 7 aa, synthetic construct
QQSQHKF

SEQ ID NO: 141630 - protein, 7 aa, synthetic construct
QQSQQWK

SEQ ID NO: 141631 - protein, 7 aa, synthetic construct
QQSRMDK

SEQ ID NO: 141632 - protein, 7 aa, synthetic construct
QQSRQMP

SEQ ID NO: 141633 - protein, 7 aa, synthetic construct
QQSTHYK

SEQ ID NO: 141634 - protein, 7 aa, synthetic construct
QQSTYKM

SEQ ID NO: 141635 - protein, 7 aa, synthetic construct
QQSVSNR

SEQ ID NO: 141636 - protein, 7 aa, synthetic construct
QQSYAPK

SEQ ID NO: 141637 - protein, 7 aa, synthetic construct
QQTAKPW

SEQ ID NO: 141638 - protein, 7 aa, synthetic construct
QQTKYHI

SEQ ID NO: 141639 - protein, 7 aa, synthetic construct
QQTMNRM

SEQ ID NO: 141640 - protein, 7 aa, synthetic construct
QQTMSKY

SEQ ID NO: 141641 - protein, 7 aa, synthetic construct
QQTNRVV

SEQ ID NO: 141642 - protein, 7 aa, synthetic construct
QQTRDSK

SEQ ID NO: 141643 - protein, 7 aa, synthetic construct
QQTRKDF

SEQ ID NO: 141644 - protein, 7 aa, synthetic construct
QQTRQMH

SEQ ID NO: 141645 - protein, 7 aa, synthetic construct
QQTTKHY

SEQ ID NO: 141646 - protein, 7 aa, synthetic construct
QQTVRMQ

SEQ ID NO: 141647 - protein, 7 aa, synthetic construct
QQTVSRM

SEQ ID NO: 141648 - protein, 7 aa, synthetic construct
QQTYAKT

SEQ ID NO: 141649 - protein, 7 aa, synthetic construct
QQVASRN

SEQ ID NO: 141650 - protein, 7 aa, synthetic construct
QQVGRDK

SEQ ID NO: 141651 - protein, 7 aa, synthetic construct
QQVNNTR

SEQ ID NO: 141652 - protein, 7 aa, synthetic construct
QQVPRSQ

SEQ ID NO: 141653 - protein, 7 aa, synthetic construct
QQVRQNI

SEQ ID NO: 141654 - protein, 7 aa, synthetic construct
QQVRSMM

SEQ ID NO: 141655 - protein, 7 aa, synthetic construct
QQVTAIR

SEQ ID NO: 141656 - protein, 7 aa, synthetic construct
QQYAPPK

SEQ ID NO: 141657 - protein, 7 aa, synthetic construct
QQYGAAK

SEQ ID NO: 141658 - protein, 7 aa, synthetic construct
QQYGPTI

SEQ ID NO: 141659 - protein, 7 aa, synthetic construct
QQYHAKS

SEQ ID NO: 141660 - protein, 7 aa, synthetic construct
QQYKNDD

SEQ ID NO: 141661 - protein, 7 aa, synthetic construct
QQYLPTS

SEQ ID NO: 141662 - protein, 7 aa, synthetic construct
QQYNHKN

SEQ ID NO: 141663 - protein, 7 aa, synthetic construct
QQYPKPD

SEQ ID NO: 141664 - protein, 7 aa, synthetic construct
QQYQAQR

SEQ ID NO: 141665 - protein, 7 aa, synthetic construct
QQYQKIV

SEQ ID NO: 141666 - protein, 7 aa, synthetic construct
QQYQPSK

SEQ ID NO: 141667 - protein, 7 aa, synthetic construct
QRAAQNL

SEQ ID NO: 141668 - protein, 7 aa, synthetic construct
QRADTRW

SEQ ID NO: 141669 - protein, 7 aa, synthetic construct
QRAEKQI

SEQ ID NO: 141670 - protein, 7 aa, synthetic construct
QRAGHNN

SEQ ID NO: 141671 - protein, 7 aa, synthetic construct
QRAHVVV

SEQ ID NO: 141672 - protein, 7 aa, synthetic construct
QRAISQT

SEQ ID NO: 141673 - protein, 7 aa, synthetic construct
QRAKDAV

SEQ ID NO: 141674 - protein, 7 aa, synthetic construct
QRAKMPE

SEQ ID NO: 141675 - protein, 7 aa, synthetic construct
QRAKTQE

SEQ ID NO: 141676 - protein, 7 aa, synthetic construct
QRALKAE

SEQ ID NO: 141677 - protein, 7 aa, synthetic construct
QRALRQE

SEQ ID NO: 141678 - protein, 7 aa, synthetic construct
QRAMKAD

SEQ ID NO: 141679 - protein, 7 aa, synthetic construct
QRAMTQL

SEQ ID NO: 141680 - protein, 7 aa, synthetic construct
QRANITM

SEQ ID NO: 141681 - protein, 7 aa, synthetic construct
QRAPGLL

SEQ ID NO: 141682 - protein, 7 aa, synthetic construct
QRASHGI

SEQ ID NO: 141683 - protein, 7 aa, synthetic construct
QRASSSG

SEQ ID NO: 141684 - protein, 7 aa, synthetic construct
QRASVQN

SEQ ID NO: 141685 - protein, 7 aa, synthetic construct
QRATTDR

SEQ ID NO: 141686 - protein, 7 aa, synthetic construct
QRAVDPR

SEQ ID NO: 141687 - protein, 7 aa, synthetic construct
QRAVLSA

SEQ ID NO: 141688 - protein, 7 aa, synthetic construct
QRAVVNA

SEQ ID NO: 141689 - protein, 7 aa, synthetic construct
QRAYKDP

SEQ ID NO: 141690 - protein, 7 aa, synthetic construct
QRDANGK

SEQ ID NO: 141691 - protein, 7 aa, synthetic construct
QRDAPMK

SEQ ID NO: 141692 - protein, 7 aa, synthetic construct
QRDFKGL

SEQ ID NO: 141693 - protein, 7 aa, synthetic construct
QRDHKAI

SEQ ID NO: 141694 - protein, 7 aa, synthetic construct
QRDIQGK

SEQ ID NO: 141695 - protein, 7 aa, synthetic construct
QRDITFK

SEQ ID NO: 141696 - protein, 7 aa, synthetic construct
QRDKDKY

SEQ ID NO: 141697 - protein, 7 aa, synthetic construct
QRDKMTH

SEQ ID NO: 141698 - protein, 7 aa, synthetic construct
QRDKRDG

SEQ ID NO: 141699 - protein, 7 aa, synthetic construct
QRDKTVH

SEQ ID NO: 141700 - protein, 7 aa, synthetic construct
QRDKVGH

SEQ ID NO: 141701 - protein, 7 aa, synthetic construct
QRDKVYF

SEQ ID NO: 141702 - protein, 7 aa, synthetic construct
QRDKYSS

SEQ ID NO: 141703 - protein, 7 aa, synthetic construct
QRDQHWS

SEQ ID NO: 141704 - protein, 7 aa, synthetic construct
QRDQRWV

SEQ ID NO: 141705 - protein, 7 aa, synthetic construct
QRDQVSK

SEQ ID NO: 141706 - protein, 7 aa, synthetic construct
QRDSMKA

SEQ ID NO: 141707 - protein, 7 aa, synthetic construct
QRDTKLY

SEQ ID NO: 141708 - protein, 7 aa, synthetic construct
QRDTMVR

SEQ ID NO: 141709 - protein, 7 aa, synthetic construct
QRDTNKY

SEQ ID NO: 141710 - protein, 7 aa, synthetic construct
QRDVKAY

SEQ ID NO: 141711 - protein, 7 aa, synthetic construct
QREAKLQ

SEQ ID NO: 141712 - protein, 7 aa, synthetic construct
QREAMRA

SEQ ID NO: 141713 - protein, 7 aa, synthetic construct
QREAMTR

SEQ ID NO: 141714 - protein, 7 aa, synthetic construct
QREAPRM

SEQ ID NO: 141715 - protein, 7 aa, synthetic construct
QREAVNK

SEQ ID NO: 141716 - protein, 7 aa, synthetic construct
QREGQVK

SEQ ID NO: 141717 - protein, 7 aa, synthetic construct
QREGSFK

SEQ ID NO: 141718 - protein, 7 aa, synthetic construct
QREHTNK

SEQ ID NO: 141719 - protein, 7 aa, synthetic construct
QREIAMR

SEQ ID NO: 141720 - protein, 7 aa, synthetic construct
QREKNML

SEQ ID NO: 141721 - protein, 7 aa, synthetic construct
QREKSLY

SEQ ID NO: 141722 - protein, 7 aa, synthetic construct
QREKSSV

SEQ ID NO: 141723 - protein, 7 aa, synthetic construct
QREKVMH

SEQ ID NO: 141724 - protein, 7 aa, synthetic construct
QREMSMK

SEQ ID NO: 141725 - protein, 7 aa, synthetic construct
QRENKMV

SEQ ID NO: 141726 - protein, 7 aa, synthetic construct
QREPKPY

SEQ ID NO: 141727 - protein, 7 aa, synthetic construct
QREPRLA

SEQ ID NO: 141728 - protein, 7 aa, synthetic construct
QREPRNF

SEQ ID NO: 141729 - protein, 7 aa, synthetic construct
QRERAMY

SEQ ID NO: 141730 - protein, 7 aa, synthetic construct
QRESAMK

SEQ ID NO: 141731 - protein, 7 aa, synthetic construct
QREVGMK

SEQ ID NO: 141732 - protein, 7 aa, synthetic construct
QREVTKQ

SEQ ID NO: 141733 - protein, 7 aa, synthetic construct
QRFKEMS

SEQ ID NO: 141734 - protein, 7 aa, synthetic construct
QRGAHTN

SEQ ID NO: 141735 - protein, 7 aa, synthetic construct
QRGAMQV

SEQ ID NO: 141736 - protein, 7 aa, synthetic construct
QRGASHV

SEQ ID NO: 141737 - protein, 7 aa, synthetic construct
QRGASIH

SEQ ID NO: 141738 - protein, 7 aa, synthetic construct
QRGATAL

SEQ ID NO: 141739 - protein, 7 aa, synthetic construct
QRGAVHQ

SEQ ID NO: 141740 - protein, 7 aa, synthetic construct
QRGDKQG

SEQ ID NO: 141741 - protein, 7 aa, synthetic construct
QRGDTIK

SEQ ID NO: 141742 - protein, 7 aa, synthetic construct
QRGHQAT

SEQ ID NO: 141743 - protein, 7 aa, synthetic construct
QRGIHSG

SEQ ID NO: 141744 - protein, 7 aa, synthetic construct
QRGITAV

SEQ ID NO: 141745 - protein, 7 aa, synthetic construct
QRGKPEF

SEQ ID NO: 141746 - protein, 7 aa, synthetic construct
QRGLGPV

SEQ ID NO: 141747 - protein, 7 aa, synthetic construct
QRGLSTN

SEQ ID NO: 141748 - protein, 7 aa, synthetic construct
QRGMGAL

SEQ ID NO: 141749 - protein, 7 aa, synthetic construct
QRGMIPN

SEQ ID NO: 141750 - protein, 7 aa, synthetic construct
QRGMVLQ

SEQ ID NO: 141751 - protein, 7 aa, synthetic construct
QRGMVNN

SEQ ID NO: 141752 - protein, 7 aa, synthetic construct
QRGNIHN

SEQ ID NO: 141753 - protein, 7 aa, synthetic construct
QRGNSMN

SEQ ID NO: 141754 - protein, 7 aa, synthetic construct
QRGNVMA

SEQ ID NO: 141755 - protein, 7 aa, synthetic construct
QRGPGMS

SEQ ID NO: 141756 - protein, 7 aa, synthetic construct
QRGPHMI

SEQ ID NO: 141757 - protein, 7 aa, synthetic construct
QRGPPQH

SEQ ID NO: 141758 - protein, 7 aa, synthetic construct
QRGPYKE

SEQ ID NO: 141759 - protein, 7 aa, synthetic construct
QRGQASN

SEQ ID NO: 141760 - protein, 7 aa, synthetic construct
QRGQIPI

SEQ ID NO: 141761 - protein, 7 aa, synthetic construct
QRGQPTF

SEQ ID NO: 141762 - protein, 7 aa, synthetic construct
QRGQVMG

SEQ ID NO: 141763 - protein, 7 aa, synthetic construct
QRGQVNS

SEQ ID NO: 141764 - protein, 7 aa, synthetic construct
QRGTDKM

SEQ ID NO: 141765 - protein, 7 aa, synthetic construct
QRGTLEK

SEQ ID NO: 141766 - protein, 7 aa, synthetic construct
QRGTSNM

SEQ ID NO: 141767 - protein, 7 aa, synthetic construct
QRGVIMG

SEQ ID NO: 141768 - protein, 7 aa, synthetic construct
QRGVTAQ

SEQ ID NO: 141769 - protein, 7 aa, synthetic construct
QRGVVPQ

SEQ ID NO: 141770 - protein, 7 aa, synthetic construct
QRGVVYA

SEQ ID NO: 141771 - protein, 7 aa, synthetic construct
QRGVYPA

SEQ ID NO: 141772 - protein, 7 aa, synthetic construct
QRHAQGP

SEQ ID NO: 141773 - protein, 7 aa, synthetic construct
QRHASGP

SEQ ID NO: 141774 - protein, 7 aa, synthetic construct
QRHDKQF

SEQ ID NO: 141775 - protein, 7 aa, synthetic construct
QRHGVAA

SEQ ID NO: 141776 - protein, 7 aa, synthetic construct
QRHHPGD

SEQ ID NO: 141777 - protein, 7 aa, synthetic construct
QRHMTAA

SEQ ID NO: 141778 - protein, 7 aa, synthetic construct
QRHNQAA

SEQ ID NO: 141779 - protein, 7 aa, synthetic construct
QRHPISG

SEQ ID NO: 141780 - protein, 7 aa, synthetic construct
QRHPSSV

SEQ ID NO: 141781 - protein, 7 aa, synthetic construct
QRHQKDI

SEQ ID NO: 141782 - protein, 7 aa, synthetic construct
QRHSITA

SEQ ID NO: 141783 - protein, 7 aa, synthetic construct
QRHTTNP

SEQ ID NO: 141784 - protein, 7 aa, synthetic construct
QRHTVAG

SEQ ID NO: 141785 - protein, 7 aa, synthetic construct
QRHVGDY

SEQ ID NO: 141786 - protein, 7 aa, synthetic construct
QRHVVQP

SEQ ID NO: 141787 - protein, 7 aa, synthetic construct
QRIGPVM

SEQ ID NO: 141788 - protein, 7 aa, synthetic construct
QRINNGF

SEQ ID NO: 141789 - protein, 7 aa, synthetic construct
QRIPTTQ

SEQ ID NO: 141790 - protein, 7 aa, synthetic construct
QRIQDFK

SEQ ID NO: 141791 - protein, 7 aa, synthetic construct
QRISVMT

SEQ ID NO: 141792 - protein, 7 aa, synthetic construct
QRKAMVE

SEQ ID NO: 141793 - protein, 7 aa, synthetic construct
QRKDPGS

SEQ ID NO: 141794 - protein, 7 aa, synthetic construct
QRKDYTS

SEQ ID NO: 141795 - protein, 7 aa, synthetic construct
QRKGEAA

SEQ ID NO: 141796 - protein, 7 aa, synthetic construct
QRKIELT

SEQ ID NO: 141797 - protein, 7 aa, synthetic construct
QRKPEYQ

SEQ ID NO: 141798 - protein, 7 aa, synthetic construct
QRKQDSV

SEQ ID NO: 141799 - protein, 7 aa, synthetic construct
QRKQEGT

SEQ ID NO: 141800 - protein, 7 aa, synthetic construct
QRKQIFE

SEQ ID NO: 141801 - protein, 7 aa, synthetic construct
QRKWEDS

SEQ ID NO: 141802 - protein, 7 aa, synthetic construct
QRKYDAE

SEQ ID NO: 141803 - protein, 7 aa, synthetic construct
QRLDQVK

SEQ ID NO: 141804 - protein, 7 aa, synthetic construct
QRLEGNK

SEQ ID NO: 141805 - protein, 7 aa, synthetic construct
QRLHKEA

SEQ ID NO: 141806 - protein, 7 aa, synthetic construct
QRLHTVA

SEQ ID NO: 141807 - protein, 7 aa, synthetic construct
QRLNATM

SEQ ID NO: 141808 - protein, 7 aa, synthetic construct
QRLNKTE

SEQ ID NO: 141809 - protein, 7 aa, synthetic construct
QRLPPNN

SEQ ID NO: 141810 - protein, 7 aa, synthetic construct
QRLPVDK

SEQ ID NO: 141811 - protein, 7 aa, synthetic construct
QRLQKDT

SEQ ID NO: 141812 - protein, 7 aa, synthetic construct
QRLSNPM

SEQ ID NO: 141813 - protein, 7 aa, synthetic construct
QRMAAIP

SEQ ID NO: 141814 - protein, 7 aa, synthetic construct
QRMDAPK

SEQ ID NO: 141815 - protein, 7 aa, synthetic construct
QRMGHGY

SEQ ID NO: 141816 - protein, 7 aa, synthetic construct
QRMHPST

SEQ ID NO: 141817 - protein, 7 aa, synthetic construct
QRMHQAV

SEQ ID NO: 141818 - protein, 7 aa, synthetic construct
QRMKGND

SEQ ID NO: 141819 - protein, 7 aa, synthetic construct
QRMMKAE

SEQ ID NO: 141820 - protein, 7 aa, synthetic construct
QRMMNNV

SEQ ID NO: 141821 - protein, 7 aa, synthetic construct
QRMQTSI

SEQ ID NO: 141822 - protein, 7 aa, synthetic construct
QRMSAGA

SEQ ID NO: 141823 - protein, 7 aa, synthetic construct
QRMSTTV

SEQ ID NO: 141824 - protein, 7 aa, synthetic construct
QRMTPVT

SEQ ID NO: 141825 - protein, 7 aa, synthetic construct
QRMTSVV

SEQ ID NO: 141826 - protein, 7 aa, synthetic construct
QRMTVTA

SEQ ID NO: 141827 - protein, 7 aa, synthetic construct
QRMVKAD

SEQ ID NO: 141828 - protein, 7 aa, synthetic construct
QRNADLK

SEQ ID NO: 141829 - protein, 7 aa, synthetic construct
QRNEKFM

SEQ ID NO: 141830 - protein, 7 aa, synthetic construct
QRNERGG

SEQ ID NO: 141831 - protein, 7 aa, synthetic construct
QRNIESR

SEQ ID NO: 141832 - protein, 7 aa, synthetic construct
QRNIMGS

SEQ ID NO: 141833 - protein, 7 aa, synthetic construct
QRNIPPN

SEQ ID NO: 141834 - protein, 7 aa, synthetic construct
QRNISPL

SEQ ID NO: 141835 - protein, 7 aa, synthetic construct
QRNITLM

SEQ ID NO: 141836 - protein, 7 aa, synthetic construct
QRNITPL

SEQ ID NO: 141837 - protein, 7 aa, synthetic construct
QRNIVDY

SEQ ID NO: 141838 - protein, 7 aa, synthetic construct
QRNKGDI

SEQ ID NO: 141839 - protein, 7 aa, synthetic construct
QRNLSSV

SEQ ID NO: 141840 - protein, 7 aa, synthetic construct
QRNLTKD

SEQ ID NO: 141841 - protein, 7 aa, synthetic construct
QRNLVHA

SEQ ID NO: 141842 - protein, 7 aa, synthetic construct
QRNMKEF

SEQ ID NO: 141843 - protein, 7 aa, synthetic construct
QRNPHQP

SEQ ID NO: 141844 - protein, 7 aa, synthetic construct
QRNPKDS

SEQ ID NO: 141845 - protein, 7 aa, synthetic construct
QRNPKPD

SEQ ID NO: 141846 - protein, 7 aa, synthetic construct
QRNPMSL

SEQ ID NO: 141847 - protein, 7 aa, synthetic construct
QRNQIMM

SEQ ID NO: 141848 - protein, 7 aa, synthetic construct
QRNQKDP

SEQ ID NO: 141849 - protein, 7 aa, synthetic construct
QRNQKGE

SEQ ID NO: 141850 - protein, 7 aa, synthetic construct
QRNQQSA

SEQ ID NO: 141851 - protein, 7 aa, synthetic construct
QRNQTAT

SEQ ID NO: 141852 - protein, 7 aa, synthetic construct
QRNQTFI

SEQ ID NO: 141853 - protein, 7 aa, synthetic construct
QRNSGMH

SEQ ID NO: 141854 - protein, 7 aa, synthetic construct
QRNSIGN

SEQ ID NO: 141855 - protein, 7 aa, synthetic construct
QRNSQVY

SEQ ID NO: 141856 - protein, 7 aa, synthetic construct
QRNTQLT

SEQ ID NO: 141857 - protein, 7 aa, synthetic construct
QRNVSAL

SEQ ID NO: 141858 - protein, 7 aa, synthetic construct
QRNVSNI

SEQ ID NO: 141859 - protein, 7 aa, synthetic construct
QRNVVTA

SEQ ID NO: 141860 - protein, 7 aa, synthetic construct
QRPAHAQ

SEQ ID NO: 141861 - protein, 7 aa, synthetic construct
QRPAKSE

SEQ ID NO: 141862 - protein, 7 aa, synthetic construct
QRPAMGF

SEQ ID NO: 141863 - protein, 7 aa, synthetic construct
QRPARNE

SEQ ID NO: 141864 - protein, 7 aa, synthetic construct
QRPDHRQ

SEQ ID NO: 141865 - protein, 7 aa, synthetic construct
QRPETLK

SEQ ID NO: 141866 - protein, 7 aa, synthetic construct
QRPGHAQ

SEQ ID NO: 141867 - protein, 7 aa, synthetic construct
QRPGNTF

SEQ ID NO: 141868 - protein, 7 aa, synthetic construct
QRPGPGP

SEQ ID NO: 141869 - protein, 7 aa, synthetic construct
QRPGPVM

SEQ ID NO: 141870 - protein, 7 aa, synthetic construct
QRPGTNY

SEQ ID NO: 141871 - protein, 7 aa, synthetic construct
QRPHAVT

SEQ ID NO: 141872 - protein, 7 aa, synthetic construct
QRPHPQA

SEQ ID NO: 141873 - protein, 7 aa, synthetic construct
QRPHQII

SEQ ID NO: 141874 - protein, 7 aa, synthetic construct
QRPHTAG

SEQ ID NO: 141875 - protein, 7 aa, synthetic construct
QRPIAAN

SEQ ID NO: 141876 - protein, 7 aa, synthetic construct
QRPIERG

SEQ ID NO: 141877 - protein, 7 aa, synthetic construct
QRPISTT

SEQ ID NO: 141878 - protein, 7 aa, synthetic construct
QRPITLS

SEQ ID NO: 141879 - protein, 7 aa, synthetic construct
QRPKQPD

SEQ ID NO: 141880 - protein, 7 aa, synthetic construct
QRPLGTL

SEQ ID NO: 141881 - protein, 7 aa, synthetic construct
QRPLPTV

SEQ ID NO: 141882 - protein, 7 aa, synthetic construct
QRPMPQM

SEQ ID NO: 141883 - protein, 7 aa, synthetic construct
QRPNRGD

SEQ ID NO: 141884 - protein, 7 aa, synthetic construct
QRPPMVS

SEQ ID NO: 141885 - protein, 7 aa, synthetic construct
QRPPSLV

SEQ ID NO: 141886 - protein, 7 aa, synthetic construct
QRPPTGA

SEQ ID NO: 141887 - protein, 7 aa, synthetic construct
QRPRVDS

SEQ ID NO: 141888 - protein, 7 aa, synthetic construct
QRPSIMP

SEQ ID NO: 141889 - protein, 7 aa, synthetic construct
QRPSKLD

SEQ ID NO: 141890 - protein, 7 aa, synthetic construct
QRPSQFA

SEQ ID NO: 141891 - protein, 7 aa, synthetic construct
QRPTYGA

SEQ ID NO: 141892 - protein, 7 aa, synthetic construct
QRPTYKD

SEQ ID NO: 141893 - protein, 7 aa, synthetic construct
QRPVAGH

SEQ ID NO: 141894 - protein, 7 aa, synthetic construct
QRPVDRQ

SEQ ID NO: 141895 - protein, 7 aa, synthetic construct
QRQAKDG

SEQ ID NO: 141896 - protein, 7 aa, synthetic construct
QRQANST

SEQ ID NO: 141897 - protein, 7 aa, synthetic construct
QRQAVAQ

SEQ ID NO: 141898 - protein, 7 aa, synthetic construct
QRQDSVK

SEQ ID NO: 141899 - protein, 7 aa, synthetic construct
QRQFPMD

SEQ ID NO: 141900 - protein, 7 aa, synthetic construct
QRQGLYA

SEQ ID NO: 141901 - protein, 7 aa, synthetic construct
QRQGVAM

SEQ ID NO: 141902 - protein, 7 aa, synthetic construct
QRQKPET

SEQ ID NO: 141903 - protein, 7 aa, synthetic construct
QRQLANV

SEQ ID NO: 141904 - protein, 7 aa, synthetic construct
QRQLSIT

SEQ ID NO: 141905 - protein, 7 aa, synthetic construct
QRQREVG

SEQ ID NO: 141906 - protein, 7 aa, synthetic construct
QRQRVDA

SEQ ID NO: 141907 - protein, 7 aa, synthetic construct
QRQSHLS

SEQ ID NO: 141908 - protein, 7 aa, synthetic construct
QRQTALM

SEQ ID NO: 141909 - protein, 7 aa, synthetic construct
QRQTMNV

SEQ ID NO: 141910 - protein, 7 aa, synthetic construct
QRQTQAV

SEQ ID NO: 141911 - protein, 7 aa, synthetic construct
QRQTQGV

SEQ ID NO: 141912 - protein, 7 aa, synthetic construct
QRQTVNY

SEQ ID NO: 141913 - protein, 7 aa, synthetic construct
QRQVVLA

SEQ ID NO: 141914 - protein, 7 aa, synthetic construct
QRRALDD

SEQ ID NO: 141915 - protein, 7 aa, synthetic construct
QRRDLQA

SEQ ID NO: 141916 - protein, 7 aa, synthetic construct
QRRDPDL

SEQ ID NO: 141917 - protein, 7 aa, synthetic construct
QRREMSG

SEQ ID NO: 141918 - protein, 7 aa, synthetic construct
QRREQVG

SEQ ID NO: 141919 - protein, 7 aa, synthetic construct
QRRETMV

SEQ ID NO: 141920 - protein, 7 aa, synthetic construct
QRREVTS

SEQ ID NO: 141921 - protein, 7 aa, synthetic construct
QRSAKDI

SEQ ID NO: 141922 - protein, 7 aa, synthetic construct
QRSAPKD

SEQ ID NO: 141923 - protein, 7 aa, synthetic construct
QRSEKVI

SEQ ID NO: 141924 - protein, 7 aa, synthetic construct
QRSELKY

SEQ ID NO: 141925 - protein, 7 aa, synthetic construct
QRSELTR

SEQ ID NO: 141926 - protein, 7 aa, synthetic construct
QRSGNYL

SEQ ID NO: 141927 - protein, 7 aa, synthetic construct
QRSGSQW

SEQ ID NO: 141928 - protein, 7 aa, synthetic construct
QRSHMNP

SEQ ID NO: 141929 - protein, 7 aa, synthetic construct
QRSHTAA

SEQ ID NO: 141930 - protein, 7 aa, synthetic construct
QRSIPIS

SEQ ID NO: 141931 - protein, 7 aa, synthetic construct
QRSPHLN

SEQ ID NO: 141932 - protein, 7 aa, synthetic construct
QRSPLMS

SEQ ID NO: 141933 - protein, 7 aa, synthetic construct
QRSQFAP

SEQ ID NO: 141934 - protein, 7 aa, synthetic construct
QRSVASY

SEQ ID NO: 141935 - protein, 7 aa, synthetic construct
QRSVNYP

SEQ ID NO: 141936 - protein, 7 aa, synthetic construct
QRSVPDR

SEQ ID NO: 141937 - protein, 7 aa, synthetic construct
QRSVVKD

SEQ ID NO: 141938 - protein, 7 aa, synthetic construct
QRSYSPQ

SEQ ID NO: 141939 - protein, 7 aa, synthetic construct
QRTAHGL

SEQ ID NO: 141940 - protein, 7 aa, synthetic construct
QRTAQSM

SEQ ID NO: 141941 - protein, 7 aa, synthetic construct
QRTDKDK

SEQ ID NO: 141942 - protein, 7 aa, synthetic construct
QRTDKSM

SEQ ID NO: 141943 - protein, 7 aa, synthetic construct
QRTEKGW

SEQ ID NO: 141944 - protein, 7 aa, synthetic construct
QRTHPNN

SEQ ID NO: 141945 - protein, 7 aa, synthetic construct
QRTKEFM

SEQ ID NO: 141946 - protein, 7 aa, synthetic construct
QRTKMLD

SEQ ID NO: 141947 - protein, 7 aa, synthetic construct
QRTMAER

SEQ ID NO: 141948 - protein, 7 aa, synthetic construct
QRTNDQR

SEQ ID NO: 141949 - protein, 7 aa, synthetic construct
QRTNFAH

SEQ ID NO: 141950 - protein, 7 aa, synthetic construct
QRTPDLK

SEQ ID NO: 141951 - protein, 7 aa, synthetic construct
QRTPKQE

SEQ ID NO: 141952 - protein, 7 aa, synthetic construct
QRTQPAF

SEQ ID NO: 141953 - protein, 7 aa, synthetic construct
QRTQQNQ

SEQ ID NO: 141954 - protein, 7 aa, synthetic construct
QRTQVHL

SEQ ID NO: 141955 - protein, 7 aa, synthetic construct
QRTRDMV

SEQ ID NO: 141956 - protein, 7 aa, synthetic construct
QRTSAQY

SEQ ID NO: 141957 - protein, 7 aa, synthetic construct
QRTSDIR

SEQ ID NO: 141958 - protein, 7 aa, synthetic construct
QRTSINL

SEQ ID NO: 141959 - protein, 7 aa, synthetic construct
QRTSQML

SEQ ID NO: 141960 - protein, 7 aa, synthetic construct
QRTTDLR

SEQ ID NO: 141961 - protein, 7 aa, synthetic construct
QRTTFEK

SEQ ID NO: 141962 - protein, 7 aa, synthetic construct
QRTTKDI

SEQ ID NO: 141963 - protein, 7 aa, synthetic construct
QRTVEVR

SEQ ID NO: 141964 - protein, 7 aa, synthetic construct
QRTVQQF

SEQ ID NO: 141965 - protein, 7 aa, synthetic construct
QRTVQQN

SEQ ID NO: 141966 - protein, 7 aa, synthetic construct
QRTYGQG

SEQ ID NO: 141967 - protein, 7 aa, synthetic construct
QRVANVH

SEQ ID NO: 141968 - protein, 7 aa, synthetic construct
QRVASEK

SEQ ID NO: 141969 - protein, 7 aa, synthetic construct
QRVAVHG

SEQ ID NO: 141970 - protein, 7 aa, synthetic construct
QRVDAPK

SEQ ID NO: 141971 - protein, 7 aa, synthetic construct
QRVGQAY

SEQ ID NO: 141972 - protein, 7 aa, synthetic construct
QRVHSIA

SEQ ID NO: 141973 - protein, 7 aa, synthetic construct
QRVHSLA

SEQ ID NO: 141974 - protein, 7 aa, synthetic construct
QRVIKEL

SEQ ID NO: 141975 - protein, 7 aa, synthetic construct
QRVITKE

SEQ ID NO: 141976 - protein, 7 aa, synthetic construct
QRVKADT

SEQ ID NO: 141977 - protein, 7 aa, synthetic construct
QRVKPDL

SEQ ID NO: 141978 - protein, 7 aa, synthetic construct
QRVLSDK

SEQ ID NO: 141979 - protein, 7 aa, synthetic construct
QRVNKGD

SEQ ID NO: 141980 - protein, 7 aa, synthetic construct
QRVPHQI

SEQ ID NO: 141981 - protein, 7 aa, synthetic construct
QRVQATT

SEQ ID NO: 141982 - protein, 7 aa, synthetic construct
QRVQGMQ

SEQ ID NO: 141983 - protein, 7 aa, synthetic construct
QRVQIMN

SEQ ID NO: 141984 - protein, 7 aa, synthetic construct
QRVQKDI

SEQ ID NO: 141985 - protein, 7 aa, synthetic construct
QRVQQQM

SEQ ID NO: 141986 - protein, 7 aa, synthetic construct
QRVSAMV

SEQ ID NO: 141987 - protein, 7 aa, synthetic construct
QRVSTQQ

SEQ ID NO: 141988 - protein, 7 aa, synthetic construct
QRVTDSR

SEQ ID NO: 141989 - protein, 7 aa, synthetic construct
QRVTERI

SEQ ID NO: 141990 - protein, 7 aa, synthetic construct
QRVTMNV

SEQ ID NO: 141991 - protein, 7 aa, synthetic construct
QRVTPNS

SEQ ID NO: 141992 - protein, 7 aa, synthetic construct
QRYNEKL

SEQ ID NO: 141993 - protein, 7 aa, synthetic construct
QRYNTTP

SEQ ID NO: 141994 - protein, 7 aa, synthetic construct
QRYPQND

SEQ ID NO: 141995 - protein, 7 aa, synthetic construct
QRYQNTH

SEQ ID NO: 141996 - protein, 7 aa, synthetic construct
QSAHTYM

SEQ ID NO: 141997 - protein, 7 aa, synthetic construct
QSAKFAI

SEQ ID NO: 141998 - protein, 7 aa, synthetic construct
QSAKHLV

SEQ ID NO: 141999 - protein, 7 aa, synthetic construct
QSANEKK

SEQ ID NO: 142000 - protein, 7 aa, synthetic construct
QSANQLR

SEQ ID NO: 142001 - protein, 7 aa, synthetic construct
QSAQAYR

SEQ ID NO: 142002 - protein, 7 aa, synthetic construct
QSARLKE

SEQ ID NO: 142003 - protein, 7 aa, synthetic construct
QSATRTH

SEQ ID NO: 142004 - protein, 7 aa, synthetic construct
QSAYTQL

SEQ ID NO: 142005 - protein, 7 aa, synthetic construct
QSDGFKK

SEQ ID NO: 142006 - protein, 7 aa, synthetic construct
QSDKRFT

SEQ ID NO: 142007 - protein, 7 aa, synthetic construct
QSDRGKS

SEQ ID NO: 142008 - protein, 7 aa, synthetic construct
QSDRQLK

SEQ ID NO: 142009 - protein, 7 aa, synthetic construct
QSEKKGQ

SEQ ID NO: 142010 - protein, 7 aa, synthetic construct
QSEKMVR

SEQ ID NO: 142011 - protein, 7 aa, synthetic construct
QSENARK

SEQ ID NO: 142012 - protein, 7 aa, synthetic construct
QSERPIR

SEQ ID NO: 142013 - protein, 7 aa, synthetic construct
QSFATQK

SEQ ID NO: 142014 - protein, 7 aa, synthetic construct
QSFGHSM

SEQ ID NO: 142015 - protein, 7 aa, synthetic construct
QSFKAEK

SEQ ID NO: 142016 - protein, 7 aa, synthetic construct
QSFKNSS

SEQ ID NO: 142017 - protein, 7 aa, synthetic construct
QSGFSQK

SEQ ID NO: 142018 - protein, 7 aa, synthetic construct
QSGGQMR

SEQ ID NO: 142019 - protein, 7 aa, synthetic construct
QSGHLKY

SEQ ID NO: 142020 - protein, 7 aa, synthetic construct
QSGHLRG

SEQ ID NO: 142021 - protein, 7 aa, synthetic construct
QSGHMRP

SEQ ID NO: 142022 - protein, 7 aa, synthetic construct
QSGIRKD

SEQ ID NO: 142023 - protein, 7 aa, synthetic construct
QSGKFTQ

SEQ ID NO: 142024 - protein, 7 aa, synthetic construct
QSGKMYM

SEQ ID NO: 142025 - protein, 7 aa, synthetic construct
QSGKYMI

SEQ ID NO: 142026 - protein, 7 aa, synthetic construct
QSGMISR

SEQ ID NO: 142027 - protein, 7 aa, synthetic construct
QSGMLRG

SEQ ID NO: 142028 - protein, 7 aa, synthetic construct
QSGMQGK

SEQ ID NO: 142029 - protein, 7 aa, synthetic construct
QSGMSQR

SEQ ID NO: 142030 - protein, 7 aa, synthetic construct
QSGPATR

SEQ ID NO: 142031 - protein, 7 aa, synthetic construct
QSGPRIQ

SEQ ID NO: 142032 - protein, 7 aa, synthetic construct
QSGRDKP

SEQ ID NO: 142033 - protein, 7 aa, synthetic construct
QSGRQIL

SEQ ID NO: 142034 - protein, 7 aa, synthetic construct
QSGTPGR

SEQ ID NO: 142035 - protein, 7 aa, synthetic construct
QSGVTPR

SEQ ID NO: 142036 - protein, 7 aa, synthetic construct
QSHAAYK

SEQ ID NO: 142037 - protein, 7 aa, synthetic construct
QSHAIRI

SEQ ID NO: 142038 - protein, 7 aa, synthetic construct
QSHANRI

SEQ ID NO: 142039 - protein, 7 aa, synthetic construct
QSHITNK

SEQ ID NO: 142040 - protein, 7 aa, synthetic construct
QSHKNTQ

SEQ ID NO: 142041 - protein, 7 aa, synthetic construct
QSHKPPY

SEQ ID NO: 142042 - protein, 7 aa, synthetic construct
QSHLQRS

SEQ ID NO: 142043 - protein, 7 aa, synthetic construct
QSHLSKS

SEQ ID NO: 142044 - protein, 7 aa, synthetic construct
QSHNGYK

SEQ ID NO: 142045 - protein, 7 aa, synthetic construct
QSHNIKL

SEQ ID NO: 142046 - protein, 7 aa, synthetic construct
QSHNPHD

SEQ ID NO: 142047 - protein, 7 aa, synthetic construct
QSHNPNK

SEQ ID NO: 142048 - protein, 7 aa, synthetic construct
QSHQISR

SEQ ID NO: 142049 - protein, 7 aa, synthetic construct
QSHSSQR

SEQ ID NO: 142050 - protein, 7 aa, synthetic construct
QSHSTYK

SEQ ID NO: 142051 - protein, 7 aa, synthetic construct
QSHTIQK

SEQ ID NO: 142052 - protein, 7 aa, synthetic construct
QSHVKHS

SEQ ID NO: 142053 - protein, 7 aa, synthetic construct
QSHVKLN

SEQ ID NO: 142054 - protein, 7 aa, synthetic construct
QSHVMVK

SEQ ID NO: 142055 - protein, 7 aa, synthetic construct
QSHYRVA

SEQ ID NO: 142056 - protein, 7 aa, synthetic construct
QSIKGNF

SEQ ID NO: 142057 - protein, 7 aa, synthetic construct
QSIKKGD

SEQ ID NO: 142058 - protein, 7 aa, synthetic construct
QSIKTVH

SEQ ID NO: 142059 - protein, 7 aa, synthetic construct
QSKDTNR

SEQ ID NO: 142060 - protein, 7 aa, synthetic construct
QSKERAY

SEQ ID NO: 142061 - protein, 7 aa, synthetic construct
QSKESAK

SEQ ID NO: 142062 - protein, 7 aa, synthetic construct
QSKGRGD

SEQ ID NO: 142063 - protein, 7 aa, synthetic construct
QSKHQHI

SEQ ID NO: 142064 - protein, 7 aa, synthetic construct
QSKIQTF

SEQ ID NO: 142065 - protein, 7 aa, synthetic construct
QSKKEWG

SEQ ID NO: 142066 - protein, 7 aa, synthetic construct
QSKLESR

SEQ ID NO: 142067 - protein, 7 aa, synthetic construct
QSKMMNY

SEQ ID NO: 142068 - protein, 7 aa, synthetic construct
QSKNHVF

SEQ ID NO: 142069 - protein, 7 aa, synthetic construct
QSKPPMI

SEQ ID NO: 142070 - protein, 7 aa, synthetic construct
QSKPYNV

SEQ ID NO: 142071 - protein, 7 aa, synthetic construct
QSKQHFM

SEQ ID NO: 142072 - protein, 7 aa, synthetic construct
QSKQSDR

SEQ ID NO: 142073 - protein, 7 aa, synthetic construct
QSKSWPG

SEQ ID NO: 142074 - protein, 7 aa, synthetic construct
QSKVEKY

SEQ ID NO: 142075 - protein, 7 aa, synthetic construct
QSKYIVA

SEQ ID NO: 142076 - protein, 7 aa, synthetic construct
QSKYLAM

SEQ ID NO: 142077 - protein, 7 aa, synthetic construct
QSKYQSG

SEQ ID NO: 142078 - protein, 7 aa, synthetic construct
QSLKPAY

SEQ ID NO: 142079 - protein, 7 aa, synthetic construct
QSLPRTL

SEQ ID NO: 142080 - protein, 7 aa, synthetic construct
QSLQQHK

SEQ ID NO: 142081 - protein, 7 aa, synthetic construct
QSLQSNR

SEQ ID NO: 142082 - protein, 7 aa, synthetic construct
QSLRWAE

SEQ ID NO: 142083 - protein, 7 aa, synthetic construct
QSMAARV

SEQ ID NO: 142084 - protein, 7 aa, synthetic construct
QSNGYTK

SEQ ID NO: 142085 - protein, 7 aa, synthetic construct
QSNKKEQ

SEQ ID NO: 142086 - protein, 7 aa, synthetic construct
QSNNLAR

SEQ ID NO: 142087 - protein, 7 aa, synthetic construct
QSNNMTR

SEQ ID NO: 142088 - protein, 7 aa, synthetic construct
QSNNNGR

SEQ ID NO: 142089 - protein, 7 aa, synthetic construct
QSNNRWE

SEQ ID NO: 142090 - protein, 7 aa, synthetic construct
QSNNTHK

SEQ ID NO: 142091 - protein, 7 aa, synthetic construct
QSNPRLM

SEQ ID NO: 142092 - protein, 7 aa, synthetic construct
QSNQHQK

SEQ ID NO: 142093 - protein, 7 aa, synthetic construct
QSNSSRM

SEQ ID NO: 142094 - protein, 7 aa, synthetic construct
QSNVKHI

SEQ ID NO: 142095 - protein, 7 aa, synthetic construct
QSNYGLK

SEQ ID NO: 142096 - protein, 7 aa, synthetic construct
QSPAFTR

SEQ ID NO: 142097 - protein, 7 aa, synthetic construct
QSPETKR

SEQ ID NO: 142098 - protein, 7 aa, synthetic construct
QSPIRNL

SEQ ID NO: 142099 - protein, 7 aa, synthetic construct
QSPQGGR

SEQ ID NO: 142100 - protein, 7 aa, synthetic construct
QSPRQDR

SEQ ID NO: 142101 - protein, 7 aa, synthetic construct
QSPRVTT

SEQ ID NO: 142102 - protein, 7 aa, synthetic construct
QSQHVRG

SEQ ID NO: 142103 - protein, 7 aa, synthetic construct
QSQKHVN

SEQ ID NO: 142104 - protein, 7 aa, synthetic construct
QSQKNNY

SEQ ID NO: 142105 - protein, 7 aa, synthetic construct
QSQLKSY

SEQ ID NO: 142106 - protein, 7 aa, synthetic construct
QSQNFNK

SEQ ID NO: 142107 - protein, 7 aa, synthetic construct
QSQNKHM

SEQ ID NO: 142108 - protein, 7 aa, synthetic construct
QSQNRLQ

SEQ ID NO: 142109 - protein, 7 aa, synthetic construct
QSQPRVL

SEQ ID NO: 142110 - protein, 7 aa, synthetic construct
QSQQYPR

SEQ ID NO: 142111 - protein, 7 aa, synthetic construct
QSQRAKE

SEQ ID NO: 142112 - protein, 7 aa, synthetic construct
QSQRALV

SEQ ID NO: 142113 - protein, 7 aa, synthetic construct
QSQRMVL

SEQ ID NO: 142114 - protein, 7 aa, synthetic construct
QSQSHLR

SEQ ID NO: 142115 - protein, 7 aa, synthetic construct
QSQSNFK

SEQ ID NO: 142116 - protein, 7 aa, synthetic construct
QSQSQRM

SEQ ID NO: 142117 - protein, 7 aa, synthetic construct
QSQTRPF

SEQ ID NO: 142118 - protein, 7 aa, synthetic construct
QSQVQQR

SEQ ID NO: 142119 - protein, 7 aa, synthetic construct
QSQVQRY

SEQ ID NO: 142120 - protein, 7 aa, synthetic construct
QSQYIKY

SEQ ID NO: 142121 - protein, 7 aa, synthetic construct
QSQYIQQ

SEQ ID NO: 142122 - protein, 7 aa, synthetic construct
QSRAHVN

SEQ ID NO: 142123 - protein, 7 aa, synthetic construct
QSRASSA

SEQ ID NO: 142124 - protein, 7 aa, synthetic construct
QSREQQK

SEQ ID NO: 142125 - protein, 7 aa, synthetic construct
QSRGVAS

SEQ ID NO: 142126 - protein, 7 aa, synthetic construct
QSRIPNI

SEQ ID NO: 142127 - protein, 7 aa, synthetic construct
QSRMGHM

SEQ ID NO: 142128 - protein, 7 aa, synthetic construct
QSRPDNK

SEQ ID NO: 142129 - protein, 7 aa, synthetic construct
QSRQSTF

SEQ ID NO: 142130 - protein, 7 aa, synthetic construct
QSRQSVS

SEQ ID NO: 142131 - protein, 7 aa, synthetic construct
QSRQTDR

SEQ ID NO: 142132 - protein, 7 aa, synthetic construct
QSRQVGA

SEQ ID NO: 142133 - protein, 7 aa, synthetic construct
QSRSGHM

SEQ ID NO: 142134 - protein, 7 aa, synthetic construct
QSRSSNP

SEQ ID NO: 142135 - protein, 7 aa, synthetic construct
QSRTPQY

SEQ ID NO: 142136 - protein, 7 aa, synthetic construct
QSRTTRD

SEQ ID NO: 142137 - protein, 7 aa, synthetic construct
QSRYQVA

SEQ ID NO: 142138 - protein, 7 aa, synthetic construct
QSSNASR

SEQ ID NO: 142139 - protein, 7 aa, synthetic construct
QSSNIIR

SEQ ID NO: 142140 - protein, 7 aa, synthetic construct
QSSNSRN

SEQ ID NO: 142141 - protein, 7 aa, synthetic construct
QSSPKNH

SEQ ID NO: 142142 - protein, 7 aa, synthetic construct
QSSQRMF

SEQ ID NO: 142143 - protein, 7 aa, synthetic construct
QSSRPSI

SEQ ID NO: 142144 - protein, 7 aa, synthetic construct
QSSSHQK

SEQ ID NO: 142145 - protein, 7 aa, synthetic construct
QSSSIAR

SEQ ID NO: 142146 - protein, 7 aa, synthetic construct
QSSSQPR

SEQ ID NO: 142147 - protein, 7 aa, synthetic construct
QSSSSRA

SEQ ID NO: 142148 - protein, 7 aa, synthetic construct
QSSTKNW

SEQ ID NO: 142149 - protein, 7 aa, synthetic construct
QSSVKYM

SEQ ID NO: 142150 - protein, 7 aa, synthetic construct
QSTAVKW

SEQ ID NO: 142151 - protein, 7 aa, synthetic construct
QSTAVRF

SEQ ID NO: 142152 - protein, 7 aa, synthetic construct
QSTHYKI

SEQ ID NO: 142153 - protein, 7 aa, synthetic construct
QSTIKNF

SEQ ID NO: 142154 - protein, 7 aa, synthetic construct
QSTKHFM

SEQ ID NO: 142155 - protein, 7 aa, synthetic construct
QSTLRDR

SEQ ID NO: 142156 - protein, 7 aa, synthetic construct
QSTMAKY

SEQ ID NO: 142157 - protein, 7 aa, synthetic construct
QSTNHGR

SEQ ID NO: 142158 - protein, 7 aa, synthetic construct
QSTNNRM

SEQ ID NO: 142159 - protein, 7 aa, synthetic construct
QSTQMRY

SEQ ID NO: 142160 - protein, 7 aa, synthetic construct
QSTRMGH

SEQ ID NO: 142161 - protein, 7 aa, synthetic construct
QSTRQDK

SEQ ID NO: 142162 - protein, 7 aa, synthetic construct
QSTRQHG

SEQ ID NO: 142163 - protein, 7 aa, synthetic construct
QSTRSII

SEQ ID NO: 142164 - protein, 7 aa, synthetic construct
QSTRVRD

SEQ ID NO: 142165 - protein, 7 aa, synthetic construct
QSVHYQK

SEQ ID NO: 142166 - protein, 7 aa, synthetic construct
QSVKAFT

SEQ ID NO: 142167 - protein, 7 aa, synthetic construct
QSVPRDR

SEQ ID NO: 142168 - protein, 7 aa, synthetic construct
QSVPRSI

SEQ ID NO: 142169 - protein, 7 aa, synthetic construct
QSVRGQL

SEQ ID NO: 142170 - protein, 7 aa, synthetic construct
QSVRIHA

SEQ ID NO: 142171 - protein, 7 aa, synthetic construct
QSVSHPR

SEQ ID NO: 142172 - protein, 7 aa, synthetic construct
QSYAASM

SEQ ID NO: 142173 - protein, 7 aa, synthetic construct
QSYGVKI

SEQ ID NO: 142174 - protein, 7 aa, synthetic construct
QSYGYEK

SEQ ID NO: 142175 - protein, 7 aa, synthetic construct
QSYMENK

SEQ ID NO: 142176 - protein, 7 aa, synthetic construct
QSYNQQK

SEQ ID NO: 142177 - protein, 7 aa, synthetic construct
QSYPQKS

SEQ ID NO: 142178 - protein, 7 aa, synthetic construct
QSYPRQA

SEQ ID NO: 142179 - protein, 7 aa, synthetic construct
QSYQTSM

SEQ ID NO: 142180 - protein, 7 aa, synthetic construct
QSYTGLT

SEQ ID NO: 142181 - protein, 7 aa, synthetic construct
QTAGILR

SEQ ID NO: 142182 - protein, 7 aa, synthetic construct
QTAGVYR

SEQ ID NO: 142183 - protein, 7 aa, synthetic construct
QTALRHG

SEQ ID NO: 142184 - protein, 7 aa, synthetic construct
QTANYLK

SEQ ID NO: 142185 - protein, 7 aa, synthetic construct
QTAPRDR

SEQ ID NO: 142186 - protein, 7 aa, synthetic construct
QTAQSKW

SEQ ID NO: 142187 - protein, 7 aa, synthetic construct
QTARMPV

SEQ ID NO: 142188 - protein, 7 aa, synthetic construct
QTASYVR

SEQ ID NO: 142189 - protein, 7 aa, synthetic construct
QTDKAQR

SEQ ID NO: 142190 - protein, 7 aa, synthetic construct
QTDRPMK

SEQ ID NO: 142191 - protein, 7 aa, synthetic construct
QTEKRYG

SEQ ID NO: 142192 - protein, 7 aa, synthetic construct
QTERQLK

SEQ ID NO: 142193 - protein, 7 aa, synthetic construct
QTERSRN

SEQ ID NO: 142194 - protein, 7 aa, synthetic construct
QTESARK

SEQ ID NO: 142195 - protein, 7 aa, synthetic construct
QTFGPSR

SEQ ID NO: 142196 - protein, 7 aa, synthetic construct
QTFKHAP

SEQ ID NO: 142197 - protein, 7 aa, synthetic construct
QTFKHNG

SEQ ID NO: 142198 - protein, 7 aa, synthetic construct
QTFTSSY

SEQ ID NO: 142199 - protein, 7 aa, synthetic construct
QTGARSN

SEQ ID NO: 142200 - protein, 7 aa, synthetic construct
QTGASRS

SEQ ID NO: 142201 - protein, 7 aa, synthetic construct
QTGGPVR

SEQ ID NO: 142202 - protein, 7 aa, synthetic construct
QTGGSSR

SEQ ID NO: 142203 - protein, 7 aa, synthetic construct
QTGHLPR

SEQ ID NO: 142204 - protein, 7 aa, synthetic construct
QTGIKDR

SEQ ID NO: 142205 - protein, 7 aa, synthetic construct
QTGISKH

SEQ ID NO: 142206 - protein, 7 aa, synthetic construct
QTGKDKW

SEQ ID NO: 142207 - protein, 7 aa, synthetic construct
QTGNIMR

SEQ ID NO: 142208 - protein, 7 aa, synthetic construct
QTGPRFV

SEQ ID NO: 142209 - protein, 7 aa, synthetic construct
QTGPVRS

SEQ ID NO: 142210 - protein, 7 aa, synthetic construct
QTGRKES

SEQ ID NO: 142211 - protein, 7 aa, synthetic construct
QTGSYKI

SEQ ID NO: 142212 - protein, 7 aa, synthetic construct
QTGTHVR

SEQ ID NO: 142213 - protein, 7 aa, synthetic construct
QTGTRLY

SEQ ID NO: 142214 - protein, 7 aa, synthetic construct
QTGVKHY

SEQ ID NO: 142215 - protein, 7 aa, synthetic construct
QTGYKAN

SEQ ID NO: 142216 - protein, 7 aa, synthetic construct
QTGYKSI

SEQ ID NO: 142217 - protein, 7 aa, synthetic construct
QTHAVGK

SEQ ID NO: 142218 - protein, 7 aa, synthetic construct
QTHISQK

SEQ ID NO: 142219 - protein, 7 aa, synthetic construct
QTHKINL

SEQ ID NO: 142220 - protein, 7 aa, synthetic construct
QTHKLYP

SEQ ID NO: 142221 - protein, 7 aa, synthetic construct
QTHKPPF

SEQ ID NO: 142222 - protein, 7 aa, synthetic construct
QTHKSFN

SEQ ID NO: 142223 - protein, 7 aa, synthetic construct
QTHKSFS

SEQ ID NO: 142224 - protein, 7 aa, synthetic construct
QTHKSLM

SEQ ID NO: 142225 - protein, 7 aa, synthetic construct
QTHLSRA

SEQ ID NO: 142226 - protein, 7 aa, synthetic construct
QTHPRQV

SEQ ID NO: 142227 - protein, 7 aa, synthetic construct
QTHQIRG

SEQ ID NO: 142228 - protein, 7 aa, synthetic construct
QTHQRQW

SEQ ID NO: 142229 - protein, 7 aa, synthetic construct
QTHRPLS

SEQ ID NO: 142230 - protein, 7 aa, synthetic construct
QTHSKFA

SEQ ID NO: 142231 - protein, 7 aa, synthetic construct
QTHSPRV

SEQ ID NO: 142232 - protein, 7 aa, synthetic construct
QTHSQSK

SEQ ID NO: 142233 - protein, 7 aa, synthetic construct
QTHYGSL

SEQ ID NO: 142234 - protein, 7 aa, synthetic construct
QTIKGYY

SEQ ID NO: 142235 - protein, 7 aa, synthetic construct
QTIKPMQ

SEQ ID NO: 142236 - protein, 7 aa, synthetic construct
QTIKREI

SEQ ID NO: 142237 - protein, 7 aa, synthetic construct
QTINHRS

SEQ ID NO: 142238 - protein, 7 aa, synthetic construct
QTIRNGH

SEQ ID NO: 142239 - protein, 7 aa, synthetic construct
QTKAHMT

SEQ ID NO: 142240 - protein, 7 aa, synthetic construct
QTKATFY

SEQ ID NO: 142241 - protein, 7 aa, synthetic construct
QTKDYRL

SEQ ID NO: 142242 - protein, 7 aa, synthetic construct
QTKESTR

SEQ ID NO: 142243 - protein, 7 aa, synthetic construct
QTKFYKE

SEQ ID NO: 142244 - protein, 7 aa, synthetic construct
QTKGPGW

SEQ ID NO: 142245 - protein, 7 aa, synthetic construct
QTKGVPW

SEQ ID NO: 142246 - protein, 7 aa, synthetic construct
QTKHLYA

SEQ ID NO: 142247 - protein, 7 aa, synthetic construct
QTKHPSM

SEQ ID NO: 142248 - protein, 7 aa, synthetic construct
QTKHYPG

SEQ ID NO: 142249 - protein, 7 aa, synthetic construct
QTKKADV

SEQ ID NO: 142250 - protein, 7 aa, synthetic construct
QTKPSFI

SEQ ID NO: 142251 - protein, 7 aa, synthetic construct
QTKSIDR

SEQ ID NO: 142252 - protein, 7 aa, synthetic construct
QTKTHVF

SEQ ID NO: 142253 - protein, 7 aa, synthetic construct
QTKTNHF

SEQ ID NO: 142254 - protein, 7 aa, synthetic construct
QTKTPPY

SEQ ID NO: 142255 - protein, 7 aa, synthetic construct
QTKVEIR

SEQ ID NO: 142256 - protein, 7 aa, synthetic construct
QTKWEKN

SEQ ID NO: 142257 - protein, 7 aa, synthetic construct
QTKYLQA

SEQ ID NO: 142258 - protein, 7 aa, synthetic construct
QTKYQAI

SEQ ID NO: 142259 - protein, 7 aa, synthetic construct
QTKYTTS

SEQ ID NO: 142260 - protein, 7 aa, synthetic construct
QTLAHAR

SEQ ID NO: 142261 - protein, 7 aa, synthetic construct
QTLGHSK

SEQ ID NO: 142262 - protein, 7 aa, synthetic construct
QTLRKIE

SEQ ID NO: 142263 - protein, 7 aa, synthetic construct
QTMAYQK

SEQ ID NO: 142264 - protein, 7 aa, synthetic construct
QTMGHGK

SEQ ID NO: 142265 - protein, 7 aa, synthetic construct
QTMGIPR

SEQ ID NO: 142266 - protein, 7 aa, synthetic construct
QTMHQKL

SEQ ID NO: 142267 - protein, 7 aa, synthetic construct
QTMKPYS

SEQ ID NO: 142268 - protein, 7 aa, synthetic construct
QTMNNAR

SEQ ID NO: 142269 - protein, 7 aa, synthetic construct
QTMPKHT

SEQ ID NO: 142270 - protein, 7 aa, synthetic construct
QTNGLHR

SEQ ID NO: 142271 - protein, 7 aa, synthetic construct
QTNHQVR

SEQ ID NO: 142272 - protein, 7 aa, synthetic construct
QTNKKDQ

SEQ ID NO: 142273 - protein, 7 aa, synthetic construct
QTNKLGN

SEQ ID NO: 142274 - protein, 7 aa, synthetic construct
QTNNVNR

SEQ ID NO: 142275 - protein, 7 aa, synthetic construct
QTNPRGN

SEQ ID NO: 142276 - protein, 7 aa, synthetic construct
QTNRLDK

SEQ ID NO: 142277 - protein, 7 aa, synthetic construct
QTNSTKW

SEQ ID NO: 142278 - protein, 7 aa, synthetic construct
QTNVHQK

SEQ ID NO: 142279 - protein, 7 aa, synthetic construct
QTPAHTR

SEQ ID NO: 142280 - protein, 7 aa, synthetic construct
QTPRLPT

SEQ ID NO: 142281 - protein, 7 aa, synthetic construct
QTPRNLT

SEQ ID NO: 142282 - protein, 7 aa, synthetic construct
QTQGQQR

SEQ ID NO: 142283 - protein, 7 aa, synthetic construct
QTQHKNL

SEQ ID NO: 142284 - protein, 7 aa, synthetic construct
QTQHSTK

SEQ ID NO: 142285 - protein, 7 aa, synthetic construct
QTQMSRT

SEQ ID NO: 142286 - protein, 7 aa, synthetic construct
QTQQKKE

SEQ ID NO: 142287 - protein, 7 aa, synthetic construct
QTQRPQQ

SEQ ID NO: 142288 - protein, 7 aa, synthetic construct
QTQTHKQ

SEQ ID NO: 142289 - protein, 7 aa, synthetic construct
QTRAEYK

SEQ ID NO: 142290 - protein, 7 aa, synthetic construct
QTRDFLK

SEQ ID NO: 142291 - protein, 7 aa, synthetic construct
QTRDKFV

SEQ ID NO: 142292 - protein, 7 aa, synthetic construct
QTREGRT

SEQ ID NO: 142293 - protein, 7 aa, synthetic construct
QTRETLK

SEQ ID NO: 142294 - protein, 7 aa, synthetic construct
QTRGYPP

SEQ ID NO: 142295 - protein, 7 aa, synthetic construct
QTRHAMP

SEQ ID NO: 142296 - protein, 7 aa, synthetic construct
QTRHMPA

SEQ ID NO: 142297 - protein, 7 aa, synthetic construct
QTRKEAL

SEQ ID NO: 142298 - protein, 7 aa, synthetic construct
QTRLKET

SEQ ID NO: 142299 - protein, 7 aa, synthetic construct
QTRLNNL

SEQ ID NO: 142300 - protein, 7 aa, synthetic construct
QTRMDKA

SEQ ID NO: 142301 - protein, 7 aa, synthetic construct
QTRMSKE

SEQ ID NO: 142302 - protein, 7 aa, synthetic construct
QTRNMPA

SEQ ID NO: 142303 - protein, 7 aa, synthetic construct
QTRPPDR

SEQ ID NO: 142304 - protein, 7 aa, synthetic construct
QTRSLAM

SEQ ID NO: 142305 - protein, 7 aa, synthetic construct
QTRVFKE

SEQ ID NO: 142306 - protein, 7 aa, synthetic construct
QTRVTER

SEQ ID NO: 142307 - protein, 7 aa, synthetic construct
QTSERRG

SEQ ID NO: 142308 - protein, 7 aa, synthetic construct
QTSGRHV

SEQ ID NO: 142309 - protein, 7 aa, synthetic construct
QTSGTFR

SEQ ID NO: 142310 - protein, 7 aa, synthetic construct
QTSGYTK

SEQ ID NO: 142311 - protein, 7 aa, synthetic construct
QTSHFPK

SEQ ID NO: 142312 - protein, 7 aa, synthetic construct
QTSKVYL

SEQ ID NO: 142313 - protein, 7 aa, synthetic construct
QTSVHRS

SEQ ID NO: 142314 - protein, 7 aa, synthetic construct
QTTHKVL

SEQ ID NO: 142315 - protein, 7 aa, synthetic construct
QTTHQRQ

SEQ ID NO: 142316 - protein, 7 aa, synthetic construct
QTTNFQR

SEQ ID NO: 142317 - protein, 7 aa, synthetic construct
QTTQHTK

SEQ ID NO: 142318 - protein, 7 aa, synthetic construct
QTTQRQM

SEQ ID NO: 142319 - protein, 7 aa, synthetic construct
QTTQSGR

SEQ ID NO: 142320 - protein, 7 aa, synthetic construct
QTTRPYP

SEQ ID NO: 142321 - protein, 7 aa, synthetic construct
QTTRSYP

SEQ ID NO: 142322 - protein, 7 aa, synthetic construct
QTTRVHG

SEQ ID NO: 142323 - protein, 7 aa, synthetic construct
QTTSKYG

SEQ ID NO: 142324 - protein, 7 aa, synthetic construct
QTTVRSM

SEQ ID NO: 142325 - protein, 7 aa, synthetic construct
QTVHGSR

SEQ ID NO: 142326 - protein, 7 aa, synthetic construct
QTVNKSW

SEQ ID NO: 142327 - protein, 7 aa, synthetic construct
QTVPRVT

SEQ ID NO: 142328 - protein, 7 aa, synthetic construct
QTVQKYS

SEQ ID NO: 142329 - protein, 7 aa, synthetic construct
QTVRASI

SEQ ID NO: 142330 - protein, 7 aa, synthetic construct
QTVRHTG

SEQ ID NO: 142331 - protein, 7 aa, synthetic construct
QTVSPRM

SEQ ID NO: 142332 - protein, 7 aa, synthetic construct
QTYGQSK

SEQ ID NO: 142333 - protein, 7 aa, synthetic construct
QTYNLTS

SEQ ID NO: 142334 - protein, 7 aa, synthetic construct
QTYNTKM

SEQ ID NO: 142335 - protein, 7 aa, synthetic construct
QTYRGAS

SEQ ID NO: 142336 - protein, 7 aa, synthetic construct
QTYSAKG

SEQ ID NO: 142337 - protein, 7 aa, synthetic construct
QVAHARS

SEQ ID NO: 142338 - protein, 7 aa, synthetic construct
QVAKIER

SEQ ID NO: 142339 - protein, 7 aa, synthetic construct
QVAKYSS

SEQ ID NO: 142340 - protein, 7 aa, synthetic construct
QVANHRV

SEQ ID NO: 142341 - protein, 7 aa, synthetic construct
QVAQRDR

SEQ ID NO: 142342 - protein, 7 aa, synthetic construct
QVARAQF

SEQ ID NO: 142343 - protein, 7 aa, synthetic construct
QVARHGI

SEQ ID NO: 142344 - protein, 7 aa, synthetic construct
QVARNNN

SEQ ID NO: 142345 - protein, 7 aa, synthetic construct
QVARNSM

SEQ ID NO: 142346 - protein, 7 aa, synthetic construct
QVARQMM

SEQ ID NO: 142347 - protein, 7 aa, synthetic construct
QVASRER

SEQ ID NO: 142348 - protein, 7 aa, synthetic construct
QVASYHG

SEQ ID NO: 142349 - protein, 7 aa, synthetic construct
QVDKFIR

SEQ ID NO: 142350 - protein, 7 aa, synthetic construct
QVDKGGK

SEQ ID NO: 142351 - protein, 7 aa, synthetic construct
QVDKRYT

SEQ ID NO: 142352 - protein, 7 aa, synthetic construct
QVDRARL

SEQ ID NO: 142353 - protein, 7 aa, synthetic construct
QVDRKFQ

SEQ ID NO: 142354 - protein, 7 aa, synthetic construct
QVDRKIQ

SEQ ID NO: 142355 - protein, 7 aa, synthetic construct
QVFTSKG

SEQ ID NO: 142356 - protein, 7 aa, synthetic construct
QVGHRTG

SEQ ID NO: 142357 - protein, 7 aa, synthetic construct
QVGKKYE

SEQ ID NO: 142358 - protein, 7 aa, synthetic construct
QVGLIRP

SEQ ID NO: 142359 - protein, 7 aa, synthetic construct
QVGPKLL

SEQ ID NO: 142360 - protein, 7 aa, synthetic construct
QVGREKG

SEQ ID NO: 142361 - protein, 7 aa, synthetic construct
QVGRHVI

SEQ ID NO: 142362 - protein, 7 aa, synthetic construct
QVGTHVK

SEQ ID NO: 142363 - protein, 7 aa, synthetic construct
QVGYGNK

SEQ ID NO: 142364 - protein, 7 aa, synthetic construct
QVGYTAK

SEQ ID NO: 142365 - protein, 7 aa, synthetic construct
QVHAVKM

SEQ ID NO: 142366 - protein, 7 aa, synthetic construct
QVHKNQF

SEQ ID NO: 142367 - protein, 7 aa, synthetic construct
QVHKTMM

SEQ ID NO: 142368 - protein, 7 aa, synthetic construct
QVHKTYS

SEQ ID NO: 142369 - protein, 7 aa, synthetic construct
QVHRMQP

SEQ ID NO: 142370 - protein, 7 aa, synthetic construct
QVHRQTA

SEQ ID NO: 142371 - protein, 7 aa, synthetic construct
QVHSGRN

SEQ ID NO: 142372 - protein, 7 aa, synthetic construct
QVHSNSR

SEQ ID NO: 142373 - protein, 7 aa, synthetic construct
QVIRAGN

SEQ ID NO: 142374 - protein, 7 aa, synthetic construct
QVKAHVT

SEQ ID NO: 142375 - protein, 7 aa, synthetic construct
QVKDSAR

SEQ ID NO: 142376 - protein, 7 aa, synthetic construct
QVKEMGR

SEQ ID NO: 142377 - protein, 7 aa, synthetic construct
QVKHANQ

SEQ ID NO: 142378 - protein, 7 aa, synthetic construct
QVKHKDT

SEQ ID NO: 142379 - protein, 7 aa, synthetic construct
QVKMHGT

SEQ ID NO: 142380 - protein, 7 aa, synthetic construct
QVKMYAG

SEQ ID NO: 142381 - protein, 7 aa, synthetic construct
QVKMYPG

SEQ ID NO: 142382 - protein, 7 aa, synthetic construct
QVKNPSN

SEQ ID NO: 142383 - protein, 7 aa, synthetic construct
QVKRQES

SEQ ID NO: 142384 - protein, 7 aa, synthetic construct
QVKSKDH

SEQ ID NO: 142385 - protein, 7 aa, synthetic construct
QVKTHRD

SEQ ID NO: 142386 - protein, 7 aa, synthetic construct
QVKYAQN

SEQ ID NO: 142387 - protein, 7 aa, synthetic construct
QVKYIRE

SEQ ID NO: 142388 - protein, 7 aa, synthetic construct
QVKYKLE

SEQ ID NO: 142389 - protein, 7 aa, synthetic construct
QVKYQAN

SEQ ID NO: 142390 - protein, 7 aa, synthetic construct
QVLKKYE

SEQ ID NO: 142391 - protein, 7 aa, synthetic construct
QVLKRDL

SEQ ID NO: 142392 - protein, 7 aa, synthetic construct
QVMAHRP

SEQ ID NO: 142393 - protein, 7 aa, synthetic construct
QVMHLQK

SEQ ID NO: 142394 - protein, 7 aa, synthetic construct
QVMKERY

SEQ ID NO: 142395 - protein, 7 aa, synthetic construct
QVMPRKE

SEQ ID NO: 142396 - protein, 7 aa, synthetic construct
QVMRNIN

SEQ ID NO: 142397 - protein, 7 aa, synthetic construct
QVNHRVS

SEQ ID NO: 142398 - protein, 7 aa, synthetic construct
QVNKFER

SEQ ID NO: 142399 - protein, 7 aa, synthetic construct
QVNKYQT

SEQ ID NO: 142400 - protein, 7 aa, synthetic construct
QVNQHLR

SEQ ID NO: 142401 - protein, 7 aa, synthetic construct
QVNRIDK

SEQ ID NO: 142402 - protein, 7 aa, synthetic construct
QVNVRMP

SEQ ID NO: 142403 - protein, 7 aa, synthetic construct
QVNYPPK

SEQ ID NO: 142404 - protein, 7 aa, synthetic construct
QVPITSK

SEQ ID NO: 142405 - protein, 7 aa, synthetic construct
QVPKKFD

SEQ ID NO: 142406 - protein, 7 aa, synthetic construct
QVPQIPR

SEQ ID NO: 142407 - protein, 7 aa, synthetic construct
QVPRTTH

SEQ ID NO: 142408 - protein, 7 aa, synthetic construct
QVPTISR

SEQ ID NO: 142409 - protein, 7 aa, synthetic construct
QVPYAKS

SEQ ID NO: 142410 - protein, 7 aa, synthetic construct
QVPYSKA

SEQ ID NO: 142411 - protein, 7 aa, synthetic construct
QVQHRQI

SEQ ID NO: 142412 - protein, 7 aa, synthetic construct
QVQYSIS

SEQ ID NO: 142413 - protein, 7 aa, synthetic construct
QVRADRN

SEQ ID NO: 142414 - protein, 7 aa, synthetic construct
QVRDSVR

SEQ ID NO: 142415 - protein, 7 aa, synthetic construct
QVRDWQK

SEQ ID NO: 142416 - protein, 7 aa, synthetic construct
QVRHEKV

SEQ ID NO: 142417 - protein, 7 aa, synthetic construct
QVRKDPI

SEQ ID NO: 142418 - protein, 7 aa, synthetic construct
QVRKQVE

SEQ ID NO: 142419 - protein, 7 aa, synthetic construct
QVRKSDI

SEQ ID NO: 142420 - protein, 7 aa, synthetic construct
QVRLSGI

SEQ ID NO: 142421 - protein, 7 aa, synthetic construct
QVRLSHG

SEQ ID NO: 142422 - protein, 7 aa, synthetic construct
QVRMPTT

SEQ ID NO: 142423 - protein, 7 aa, synthetic construct
QVRNSSF

SEQ ID NO: 142424 - protein, 7 aa, synthetic construct
QVRPERM

SEQ ID NO: 142425 - protein, 7 aa, synthetic construct
QVRPRDI

SEQ ID NO: 142426 - protein, 7 aa, synthetic construct
QVRPVGM

SEQ ID NO: 142427 - protein, 7 aa, synthetic construct
QVRQGDK

SEQ ID NO: 142428 - protein, 7 aa, synthetic construct
QVRQIVA

SEQ ID NO: 142429 - protein, 7 aa, synthetic construct
QVRQTAG

SEQ ID NO: 142430 - protein, 7 aa, synthetic construct
QVRSHAG

SEQ ID NO: 142431 - protein, 7 aa, synthetic construct
QVRTEGK

SEQ ID NO: 142432 - protein, 7 aa, synthetic construct
QVRTGPL

SEQ ID NO: 142433 - protein, 7 aa, synthetic construct
QVRTMER

SEQ ID NO: 142434 - protein, 7 aa, synthetic construct
QVRTVLH

SEQ ID NO: 142435 - protein, 7 aa, synthetic construct
QVRVDKA

SEQ ID NO: 142436 - protein, 7 aa, synthetic construct
QVRVHAN

SEQ ID NO: 142437 - protein, 7 aa, synthetic construct
QVRVSLA

SEQ ID NO: 142438 - protein, 7 aa, synthetic construct
QVRVSSS

SEQ ID NO: 142439 - protein, 7 aa, synthetic construct
QVRVTSA

SEQ ID NO: 142440 - protein, 7 aa, synthetic construct
QVRVVQS

SEQ ID NO: 142441 - protein, 7 aa, synthetic construct
QVSHMKF

SEQ ID NO: 142442 - protein, 7 aa, synthetic construct
QVSHQRP

SEQ ID NO: 142443 - protein, 7 aa, synthetic construct
QVSKLQY

SEQ ID NO: 142444 - protein, 7 aa, synthetic construct
QVSKSYA

SEQ ID NO: 142445 - protein, 7 aa, synthetic construct
QVSNRHG

SEQ ID NO: 142446 - protein, 7 aa, synthetic construct
QVSQTHK

SEQ ID NO: 142447 - protein, 7 aa, synthetic construct
QVSRLHG

SEQ ID NO: 142448 - protein, 7 aa, synthetic construct
QVSRPHP

SEQ ID NO: 142449 - protein, 7 aa, synthetic construct
QVSRPTH

SEQ ID NO: 142450 - protein, 7 aa, synthetic construct
QVSRVSA

SEQ ID NO: 142451 - protein, 7 aa, synthetic construct
QVTFKSA

SEQ ID NO: 142452 - protein, 7 aa, synthetic construct
QVTGYKP

SEQ ID NO: 142453 - protein, 7 aa, synthetic construct
QVTKDRY

SEQ ID NO: 142454 - protein, 7 aa, synthetic construct
QVTKRLE

SEQ ID NO: 142455 - protein, 7 aa, synthetic construct
QVTKYQL

SEQ ID NO: 142456 - protein, 7 aa, synthetic construct
QVTPKHY

SEQ ID NO: 142457 - protein, 7 aa, synthetic construct
QVTRKEN

SEQ ID NO: 142458 - protein, 7 aa, synthetic construct
QVTRNTM

SEQ ID NO: 142459 - protein, 7 aa, synthetic construct
QVTTHAR

SEQ ID NO: 142460 - protein, 7 aa, synthetic construct
QVVHKYS

SEQ ID NO: 142461 - protein, 7 aa, synthetic construct
QVVKFDK

SEQ ID NO: 142462 - protein, 7 aa, synthetic construct
QVVKPRD

SEQ ID NO: 142463 - protein, 7 aa, synthetic construct
QVVRPNM

SEQ ID NO: 142464 - protein, 7 aa, synthetic construct
QVVRSKE

SEQ ID NO: 142465 - protein, 7 aa, synthetic construct
QVVRTGF

SEQ ID NO: 142466 - protein, 7 aa, synthetic construct
QWAGQEF

SEQ ID NO: 142467 - protein, 7 aa, synthetic construct
QWEKLTA

SEQ ID NO: 142468 - protein, 7 aa, synthetic construct
QWKDTKT

SEQ ID NO: 142469 - protein, 7 aa, synthetic construct
QWKSGHS

SEQ ID NO: 142470 - protein, 7 aa, synthetic construct
QWPDTTR

SEQ ID NO: 142471 - protein, 7 aa, synthetic construct
QWSKGPL

SEQ ID NO: 142472 - protein, 7 aa, synthetic construct
QWSMKND

SEQ ID NO: 142473 - protein, 7 aa, synthetic construct
QWSPQKA

SEQ ID NO: 142474 - protein, 7 aa, synthetic construct
QWVNGQK

SEQ ID NO: 142475 - protein, 7 aa, synthetic construct
QYAASKA

SEQ ID NO: 142476 - protein, 7 aa, synthetic construct
QYAATNK

SEQ ID NO: 142477 - protein, 7 aa, synthetic construct
QYAGAAR

SEQ ID NO: 142478 - protein, 7 aa, synthetic construct
QYALQKA

SEQ ID NO: 142479 - protein, 7 aa, synthetic construct
QYANGSK

SEQ ID NO: 142480 - protein, 7 aa, synthetic construct
QYAQASK

SEQ ID NO: 142481 - protein, 7 aa, synthetic construct
QYAQMRP

SEQ ID NO: 142482 - protein, 7 aa, synthetic construct
QYASQTK

SEQ ID NO: 142483 - protein, 7 aa, synthetic construct
QYATVSK

SEQ ID NO: 142484 - protein, 7 aa, synthetic construct
QYDKPGK

SEQ ID NO: 142485 - protein, 7 aa, synthetic construct
QYEKATK

SEQ ID NO: 142486 - protein, 7 aa, synthetic construct
QYEKSRN

SEQ ID NO: 142487 - protein, 7 aa, synthetic construct
QYGALSK

SEQ ID NO: 142488 - protein, 7 aa, synthetic construct
QYGHVKG

SEQ ID NO: 142489 - protein, 7 aa, synthetic construct
QYGIGTM

SEQ ID NO: 142490 - protein, 7 aa, synthetic construct
QYGITQK

SEQ ID NO: 142491 - protein, 7 aa, synthetic construct
QYGKEAK

SEQ ID NO: 142492 - protein, 7 aa, synthetic construct
QYGLAKI

SEQ ID NO: 142493 - protein, 7 aa, synthetic construct
QYGNRMQ

SEQ ID NO: 142494 - protein, 7 aa, synthetic construct
QYGQMRT

SEQ ID NO: 142495 - protein, 7 aa, synthetic construct
QYGTKIT

SEQ ID NO: 142496 - protein, 7 aa, synthetic construct
QYGTVTK

SEQ ID NO: 142497 - protein, 7 aa, synthetic construct
QYGVKSH

SEQ ID NO: 142498 - protein, 7 aa, synthetic construct
QYGVLAK

SEQ ID NO: 142499 - protein, 7 aa, synthetic construct
QYHGKGV

SEQ ID NO: 142500 - protein, 7 aa, synthetic construct
QYHPAKP

SEQ ID NO: 142501 - protein, 7 aa, synthetic construct
QYHQKSM

SEQ ID NO: 142502 - protein, 7 aa, synthetic construct
QYIKNKD

SEQ ID NO: 142503 - protein, 7 aa, synthetic construct
QYINPNK

SEQ ID NO: 142504 - protein, 7 aa, synthetic construct
QYIRNVD

SEQ ID NO: 142505 - protein, 7 aa, synthetic construct
QYISTKA

SEQ ID NO: 142506 - protein, 7 aa, synthetic construct
QYKAERS

SEQ ID NO: 142507 - protein, 7 aa, synthetic construct
QYKAISL

SEQ ID NO: 142508 - protein, 7 aa, synthetic construct
QYKASQL

SEQ ID NO: 142509 - protein, 7 aa, synthetic construct
QYKGEGR

SEQ ID NO: 142510 - protein, 7 aa, synthetic construct
QYKGMPI

SEQ ID NO: 142511 - protein, 7 aa, synthetic construct
QYKGMVA

SEQ ID NO: 142512 - protein, 7 aa, synthetic construct
QYKGRPE

SEQ ID NO: 142513 - protein, 7 aa, synthetic construct
QYKGTTN

SEQ ID NO: 142514 - protein, 7 aa, synthetic construct
QYKHGVM

SEQ ID NO: 142515 - protein, 7 aa, synthetic construct
QYKHIKE

SEQ ID NO: 142516 - protein, 7 aa, synthetic construct
QYKHNYP

SEQ ID NO: 142517 - protein, 7 aa, synthetic construct
QYKKGLE

SEQ ID NO: 142518 - protein, 7 aa, synthetic construct
QYKMGAM

SEQ ID NO: 142519 - protein, 7 aa, synthetic construct
QYKPERG

SEQ ID NO: 142520 - protein, 7 aa, synthetic construct
QYKPGVV

SEQ ID NO: 142521 - protein, 7 aa, synthetic construct
QYKPKTD

SEQ ID NO: 142522 - protein, 7 aa, synthetic construct
QYKPLIQ

SEQ ID NO: 142523 - protein, 7 aa, synthetic construct
QYKQAEK

SEQ ID NO: 142524 - protein, 7 aa, synthetic construct
QYKQGSW

SEQ ID NO: 142525 - protein, 7 aa, synthetic construct
QYKQPPY

SEQ ID NO: 142526 - protein, 7 aa, synthetic construct
QYKQRSE

SEQ ID NO: 142527 - protein, 7 aa, synthetic construct
QYKQVSG

SEQ ID NO: 142528 - protein, 7 aa, synthetic construct
QYKRNME

SEQ ID NO: 142529 - protein, 7 aa, synthetic construct
QYKSLPA

SEQ ID NO: 142530 - protein, 7 aa, synthetic construct
QYKSLSA

SEQ ID NO: 142531 - protein, 7 aa, synthetic construct
QYKSVIA

SEQ ID NO: 142532 - protein, 7 aa, synthetic construct
QYKTEGK

SEQ ID NO: 142533 - protein, 7 aa, synthetic construct
QYKTIRE

SEQ ID NO: 142534 - protein, 7 aa, synthetic construct
QYKVEKN

SEQ ID NO: 142535 - protein, 7 aa, synthetic construct
QYKVSAS

SEQ ID NO: 142536 - protein, 7 aa, synthetic construct
QYMAPKT

SEQ ID NO: 142537 - protein, 7 aa, synthetic construct
QYMVKNP

SEQ ID NO: 142538 - protein, 7 aa, synthetic construct
QYNAIPK

SEQ ID NO: 142539 - protein, 7 aa, synthetic construct
QYNKHQT

SEQ ID NO: 142540 - protein, 7 aa, synthetic construct
QYNKQAG

SEQ ID NO: 142541 - protein, 7 aa, synthetic construct
QYNNPRH

SEQ ID NO: 142542 - protein, 7 aa, synthetic construct
QYNQGPK

SEQ ID NO: 142543 - protein, 7 aa, synthetic construct
QYPDVKK

SEQ ID NO: 142544 - protein, 7 aa, synthetic construct
QYPKGYQ

SEQ ID NO: 142545 - protein, 7 aa, synthetic construct
QYPKNMQ

SEQ ID NO: 142546 - protein, 7 aa, synthetic construct
QYPTKNT

SEQ ID NO: 142547 - protein, 7 aa, synthetic construct
QYQAMAK

SEQ ID NO: 142548 - protein, 7 aa, synthetic construct
QYQGGSK

SEQ ID NO: 142549 - protein, 7 aa, synthetic construct
QYQKKDN

SEQ ID NO: 142550 - protein, 7 aa, synthetic construct
QYQRQMP

SEQ ID NO: 142551 - protein, 7 aa, synthetic construct
QYQRVIA

SEQ ID NO: 142552 - protein, 7 aa, synthetic construct
QYQTKPA

SEQ ID NO: 142553 - protein, 7 aa, synthetic construct
QYRDVGR

SEQ ID NO: 142554 - protein, 7 aa, synthetic construct
QYRNGSV

SEQ ID NO: 142555 - protein, 7 aa, synthetic construct
QYSGTQK

SEQ ID NO: 142556 - protein, 7 aa, synthetic construct
QYSKNQY

SEQ ID NO: 142557 - protein, 7 aa, synthetic construct
QYSLKGP

SEQ ID NO: 142558 - protein, 7 aa, synthetic construct
QYSPKTQ

SEQ ID NO: 142559 - protein, 7 aa, synthetic construct
QYSVHKG

SEQ ID NO: 142560 - protein, 7 aa, synthetic construct
QYSYQKD

SEQ ID NO: 142561 - protein, 7 aa, synthetic construct
QYTGAQR

SEQ ID NO: 142562 - protein, 7 aa, synthetic construct
QYTNIPK

SEQ ID NO: 142563 - protein, 7 aa, synthetic construct
QYTQAKS

SEQ ID NO: 142564 - protein, 7 aa, synthetic construct
QYVKPTN

SEQ ID NO: 142565 - protein, 7 aa, synthetic construct
QYVKQNV

SEQ ID NO: 142566 - protein, 7 aa, synthetic construct
QYVKSQM

SEQ ID NO: 142567 - protein, 7 aa, synthetic construct
QYVQNQK

SEQ ID NO: 142568 - protein, 7 aa, synthetic construct
RAAAPSY

SEQ ID NO: 142569 - protein, 7 aa, synthetic construct
RAAAQSY

SEQ ID NO: 142570 - protein, 7 aa, synthetic construct
RAAAQTY

SEQ ID NO: 142571 - protein, 7 aa, synthetic construct
RAAARLD

SEQ ID NO: 142572 - protein, 7 aa, synthetic construct
RAAASGH

SEQ ID NO: 142573 - protein, 7 aa, synthetic construct
RAAERNP

SEQ ID NO: 142574 - protein, 7 aa, synthetic construct
RAAGIMH

SEQ ID NO: 142575 - protein, 7 aa, synthetic construct
RAAHGTI

SEQ ID NO: 142576 - protein, 7 aa, synthetic construct
RAAHNQS

SEQ ID NO: 142577 - protein, 7 aa, synthetic construct
RAAHTNQ

SEQ ID NO: 142578 - protein, 7 aa, synthetic construct
RAAHVHP

SEQ ID NO: 142579 - protein, 7 aa, synthetic construct
RAAKMDF

SEQ ID NO: 142580 - protein, 7 aa, synthetic construct
RAALANH

SEQ ID NO: 142581 - protein, 7 aa, synthetic construct
RAALGGH

SEQ ID NO: 142582 - protein, 7 aa, synthetic construct
RAAMRDN

SEQ ID NO: 142583 - protein, 7 aa, synthetic construct
RAANERP

SEQ ID NO: 142584 - protein, 7 aa, synthetic construct
RAANLGY

SEQ ID NO: 142585 - protein, 7 aa, synthetic construct
RAAPFPD

SEQ ID NO: 142586 - protein, 7 aa, synthetic construct
RAAPNPH

SEQ ID NO: 142587 - protein, 7 aa, synthetic construct
RAAPQIL

SEQ ID NO: 142588 - protein, 7 aa, synthetic construct
RAAPSNH

SEQ ID NO: 142589 - protein, 7 aa, synthetic construct
RAAQQPI

SEQ ID NO: 142590 - protein, 7 aa, synthetic construct
RAAREDR

SEQ ID NO: 142591 - protein, 7 aa, synthetic construct
RAASMPF

SEQ ID NO: 142592 - protein, 7 aa, synthetic construct
RAASQIH

SEQ ID NO: 142593 - protein, 7 aa, synthetic construct
RAATTGY

SEQ ID NO: 142594 - protein, 7 aa, synthetic construct
RAAVARE

SEQ ID NO: 142595 - protein, 7 aa, synthetic construct
RAAVGPY

SEQ ID NO: 142596 - protein, 7 aa, synthetic construct
RAAVPHT

SEQ ID NO: 142597 - protein, 7 aa, synthetic construct
RAAVQHV

SEQ ID NO: 142598 - protein, 7 aa, synthetic construct
RAAVRDV

SEQ ID NO: 142599 - protein, 7 aa, synthetic construct
RAAVSAH

SEQ ID NO: 142600 - protein, 7 aa, synthetic construct
RADAYRV

SEQ ID NO: 142601 - protein, 7 aa, synthetic construct
RADGFKI

SEQ ID NO: 142602 - protein, 7 aa, synthetic construct
RADHVKA

SEQ ID NO: 142603 - protein, 7 aa, synthetic construct
RADKGFY

SEQ ID NO: 142604 - protein, 7 aa, synthetic construct
RADKHVL

SEQ ID NO: 142605 - protein, 7 aa, synthetic construct
RADKLIH

SEQ ID NO: 142606 - protein, 7 aa, synthetic construct
RADKPPY

SEQ ID NO: 142607 - protein, 7 aa, synthetic construct
RADKVHY

SEQ ID NO: 142608 - protein, 7 aa, synthetic construct
RADMPRM

SEQ ID NO: 142609 - protein, 7 aa, synthetic construct
RADQQRM

SEQ ID NO: 142610 - protein, 7 aa, synthetic construct
RADRTLM

SEQ ID NO: 142611 - protein, 7 aa, synthetic construct
RADRVSA

SEQ ID NO: 142612 - protein, 7 aa, synthetic construct
RADSSKY

SEQ ID NO: 142613 - protein, 7 aa, synthetic construct
RAEIPKI

SEQ ID NO: 142614 - protein, 7 aa, synthetic construct
RAEKNST

SEQ ID NO: 142615 - protein, 7 aa, synthetic construct
RAEKPIF

SEQ ID NO: 142616 - protein, 7 aa, synthetic construct
RAEKYHP

SEQ ID NO: 142617 - protein, 7 aa, synthetic construct
RAELGPR

SEQ ID NO: 142618 - protein, 7 aa, synthetic construct
RAEMYKT

SEQ ID NO: 142619 - protein, 7 aa, synthetic construct
RAEQRTI

SEQ ID NO: 142620 - protein, 7 aa, synthetic construct
RAERDIR

SEQ ID NO: 142621 - protein, 7 aa, synthetic construct
RAERSVS

SEQ ID NO: 142622 - protein, 7 aa, synthetic construct
RAEVNSR

SEQ ID NO: 142623 - protein, 7 aa, synthetic construct
RAEYYTG

SEQ ID NO: 142624 - protein, 7 aa, synthetic construct
RAFPQDK

SEQ ID NO: 142625 - protein, 7 aa, synthetic construct
RAGAHNT

SEQ ID NO: 142626 - protein, 7 aa, synthetic construct
RAGESRV

SEQ ID NO: 142627 - protein, 7 aa, synthetic construct
RAGGQFV

SEQ ID NO: 142628 - protein, 7 aa, synthetic construct
RAGGWHE

SEQ ID NO: 142629 - protein, 7 aa, synthetic construct
RAGHIGS

SEQ ID NO: 142630 - protein, 7 aa, synthetic construct
RAGHNIS

SEQ ID NO: 142631 - protein, 7 aa, synthetic construct
RAGHPPN

SEQ ID NO: 142632 - protein, 7 aa, synthetic construct
RAGHQPT

SEQ ID NO: 142633 - protein, 7 aa, synthetic construct
RAGHSSA

SEQ ID NO: 142634 - protein, 7 aa, synthetic construct
RAGISPL

SEQ ID NO: 142635 - protein, 7 aa, synthetic construct
RAGLPRD

SEQ ID NO: 142636 - protein, 7 aa, synthetic construct
RAGMSNN

SEQ ID NO: 142637 - protein, 7 aa, synthetic construct
RAGPVMV

SEQ ID NO: 142638 - protein, 7 aa, synthetic construct
RAGRDLI

SEQ ID NO: 142639 - protein, 7 aa, synthetic construct
RAGRESI

SEQ ID NO: 142640 - protein, 7 aa, synthetic construct
RAGRGTE

SEQ ID NO: 142641 - protein, 7 aa, synthetic construct
RAGRPEM

SEQ ID NO: 142642 - protein, 7 aa, synthetic construct
RAGRVDV

SEQ ID NO: 142643 - protein, 7 aa, synthetic construct
RAGSEAR

SEQ ID NO: 142644 - protein, 7 aa, synthetic construct
RAGSHVQ

SEQ ID NO: 142645 - protein, 7 aa, synthetic construct
RAGTRDM

SEQ ID NO: 142646 - protein, 7 aa, synthetic construct
RAGVDSR

SEQ ID NO: 142647 - protein, 7 aa, synthetic construct
RAGVNVL

SEQ ID NO: 142648 - protein, 7 aa, synthetic construct
RAHAAQI

SEQ ID NO: 142649 - protein, 7 aa, synthetic construct
RAHAGPI

SEQ ID NO: 142650 - protein, 7 aa, synthetic construct
RAHASPV

SEQ ID NO: 142651 - protein, 7 aa, synthetic construct
RAHGAST

SEQ ID NO: 142652 - protein, 7 aa, synthetic construct
RAHGHPA

SEQ ID NO: 142653 - protein, 7 aa, synthetic construct
RAHGIGV

SEQ ID NO: 142654 - protein, 7 aa, synthetic construct
RAHGLAT

SEQ ID NO: 142655 - protein, 7 aa, synthetic construct
RAHGMTV

SEQ ID NO: 142656 - protein, 7 aa, synthetic construct
RAHGVMQ

SEQ ID NO: 142657 - protein, 7 aa, synthetic construct
RAHINSV

SEQ ID NO: 142658 - protein, 7 aa, synthetic construct
RAHIPNN

SEQ ID NO: 142659 - protein, 7 aa, synthetic construct
RAHITNV

SEQ ID NO: 142660 - protein, 7 aa, synthetic construct
RAHLANV

SEQ ID NO: 142661 - protein, 7 aa, synthetic construct
RAHLKTE

SEQ ID NO: 142662 - protein, 7 aa, synthetic construct
RAHLQSV

SEQ ID NO: 142663 - protein, 7 aa, synthetic construct
RAHLQTT

SEQ ID NO: 142664 - protein, 7 aa, synthetic construct
RAHMKDS

SEQ ID NO: 142665 - protein, 7 aa, synthetic construct
RAHNAAN

SEQ ID NO: 142666 - protein, 7 aa, synthetic construct
RAHPAMI

SEQ ID NO: 142667 - protein, 7 aa, synthetic construct
RAHPTSI

SEQ ID NO: 142668 - protein, 7 aa, synthetic construct
RAHPTTL

SEQ ID NO: 142669 - protein, 7 aa, synthetic construct
RAHQTTI

SEQ ID NO: 142670 - protein, 7 aa, synthetic construct
RAHQVNV

SEQ ID NO: 142671 - protein, 7 aa, synthetic construct
RAHQVPT

SEQ ID NO: 142672 - protein, 7 aa, synthetic construct
RAHSAAA

SEQ ID NO: 142673 - protein, 7 aa, synthetic construct
RAHSAAP

SEQ ID NO: 142674 - protein, 7 aa, synthetic construct
RAHSGIV

SEQ ID NO: 142675 - protein, 7 aa, synthetic construct
RAHSMSG

SEQ ID NO: 142676 - protein, 7 aa, synthetic construct
RAHSQQA

SEQ ID NO: 142677 - protein, 7 aa, synthetic construct
RAHSSSA

SEQ ID NO: 142678 - protein, 7 aa, synthetic construct
RAHSTLT

SEQ ID NO: 142679 - protein, 7 aa, synthetic construct
RAHSVAV

SEQ ID NO: 142680 - protein, 7 aa, synthetic construct
RAHTGLQ

SEQ ID NO: 142681 - protein, 7 aa, synthetic construct
RAHTSQN

SEQ ID NO: 142682 - protein, 7 aa, synthetic construct
RAHVAGT

SEQ ID NO: 142683 - protein, 7 aa, synthetic construct
RAHVMSS

SEQ ID NO: 142684 - protein, 7 aa, synthetic construct
RAHVVVA

SEQ ID NO: 142685 - protein, 7 aa, synthetic construct
RAIAITQ

SEQ ID NO: 142686 - protein, 7 aa, synthetic construct
RAIGATY

SEQ ID NO: 142687 - protein, 7 aa, synthetic construct
RAIKHTE

SEQ ID NO: 142688 - protein, 7 aa, synthetic construct
RAIKPDN

SEQ ID NO: 142689 - protein, 7 aa, synthetic construct
RAINIQT

SEQ ID NO: 142690 - protein, 7 aa, synthetic construct
RAIPSSV

SEQ ID NO: 142691 - protein, 7 aa, synthetic construct
RAIQQST

SEQ ID NO: 142692 - protein, 7 aa, synthetic construct
RAIREAN

SEQ ID NO: 142693 - protein, 7 aa, synthetic construct
RAIRLTE

SEQ ID NO: 142694 - protein, 7 aa, synthetic construct
RAIRQGE

SEQ ID NO: 142695 - protein, 7 aa, synthetic construct
RAISSQQ

SEQ ID NO: 142696 - protein, 7 aa, synthetic construct
RAITPMA

SEQ ID NO: 142697 - protein, 7 aa, synthetic construct
RAIVPGA

SEQ ID NO: 142698 - protein, 7 aa, synthetic construct
RAKDGYI

SEQ ID NO: 142699 - protein, 7 aa, synthetic construct
RAKDNTI

SEQ ID NO: 142700 - protein, 7 aa, synthetic construct
RAKDPNN

SEQ ID NO: 142701 - protein, 7 aa, synthetic construct
RAKEGFL

SEQ ID NO: 142702 - protein, 7 aa, synthetic construct
RAKEGGM

SEQ ID NO: 142703 - protein, 7 aa, synthetic construct
RAKEIHN

SEQ ID NO: 142704 - protein, 7 aa, synthetic construct
RAKENNT

SEQ ID NO: 142705 - protein, 7 aa, synthetic construct
RAKENPQ

SEQ ID NO: 142706 - protein, 7 aa, synthetic construct
RAKENQF

SEQ ID NO: 142707 - protein, 7 aa, synthetic construct
RAKEVSF

SEQ ID NO: 142708 - protein, 7 aa, synthetic construct
RAKFPGE

SEQ ID NO: 142709 - protein, 7 aa, synthetic construct
RAKGDNY

SEQ ID NO: 142710 - protein, 7 aa, synthetic construct
RAKIEPF

SEQ ID NO: 142711 - protein, 7 aa, synthetic construct
RAKQDVH

SEQ ID NO: 142712 - protein, 7 aa, synthetic construct
RAKYEAG

SEQ ID NO: 142713 - protein, 7 aa, synthetic construct
RAKYNDG

SEQ ID NO: 142714 - protein, 7 aa, synthetic construct
RALEKFG

SEQ ID NO: 142715 - protein, 7 aa, synthetic construct
RALESMK

SEQ ID NO: 142716 - protein, 7 aa, synthetic construct
RALKVID

SEQ ID NO: 142717 - protein, 7 aa, synthetic construct
RALQERQ

SEQ ID NO: 142718 - protein, 7 aa, synthetic construct
RALQRNE

SEQ ID NO: 142719 - protein, 7 aa, synthetic construct
RALQSSH

SEQ ID NO: 142720 - protein, 7 aa, synthetic construct
RALRVES

SEQ ID NO: 142721 - protein, 7 aa, synthetic construct
RALSEGR

SEQ ID NO: 142722 - protein, 7 aa, synthetic construct
RAMAPST

SEQ ID NO: 142723 - protein, 7 aa, synthetic construct
RAMASTL

SEQ ID NO: 142724 - protein, 7 aa, synthetic construct
RAMKDLL

SEQ ID NO: 142725 - protein, 7 aa, synthetic construct
RAMNEKM

SEQ ID NO: 142726 - protein, 7 aa, synthetic construct
RAMPSMN

SEQ ID NO: 142727 - protein, 7 aa, synthetic construct
RAMQNTM

SEQ ID NO: 142728 - protein, 7 aa, synthetic construct
RAMQQQV

SEQ ID NO: 142729 - protein, 7 aa, synthetic construct
RAMQSQV

SEQ ID NO: 142730 - protein, 7 aa, synthetic construct
RAMRTNE

SEQ ID NO: 142731 - protein, 7 aa, synthetic construct
RAMSNQH

SEQ ID NO: 142732 - protein, 7 aa, synthetic construct
RAMTGMH

SEQ ID NO: 142733 - protein, 7 aa, synthetic construct
RANALER

SEQ ID NO: 142734 - protein, 7 aa, synthetic construct
RANFLKD

SEQ ID NO: 142735 - protein, 7 aa, synthetic construct
RANGEKY

SEQ ID NO: 142736 - protein, 7 aa, synthetic construct
RANGPSH

SEQ ID NO: 142737 - protein, 7 aa, synthetic construct
RANIHTS

SEQ ID NO: 142738 - protein, 7 aa, synthetic construct
RANKVDY

SEQ ID NO: 142739 - protein, 7 aa, synthetic construct
RANNAFV

SEQ ID NO: 142740 - protein, 7 aa, synthetic construct
RANPAPH

SEQ ID NO: 142741 - protein, 7 aa, synthetic construct
RANPIDK

SEQ ID NO: 142742 - protein, 7 aa, synthetic construct
RANPLGP

SEQ ID NO: 142743 - protein, 7 aa, synthetic construct
RANQHGS

SEQ ID NO: 142744 - protein, 7 aa, synthetic construct
RANQVFS

SEQ ID NO: 142745 - protein, 7 aa, synthetic construct
RANREGN

SEQ ID NO: 142746 - protein, 7 aa, synthetic construct
RANTGAH

SEQ ID NO: 142747 - protein, 7 aa, synthetic construct
RANTPEK

SEQ ID NO: 142748 - protein, 7 aa, synthetic construct
RANTPQN

SEQ ID NO: 142749 - protein, 7 aa, synthetic construct
RANTQGH

SEQ ID NO: 142750 - protein, 7 aa, synthetic construct
RANVDRA

SEQ ID NO: 142751 - protein, 7 aa, synthetic construct
RANVNQY

SEQ ID NO: 142752 - protein, 7 aa, synthetic construct
RANVSDK

SEQ ID NO: 142753 - protein, 7 aa, synthetic construct
RANYVGS

SEQ ID NO: 142754 - protein, 7 aa, synthetic construct
RAPAHTF

SEQ ID NO: 142755 - protein, 7 aa, synthetic construct
RAPGHYA

SEQ ID NO: 142756 - protein, 7 aa, synthetic construct
RAPGISF

SEQ ID NO: 142757 - protein, 7 aa, synthetic construct
RAPHPGV

SEQ ID NO: 142758 - protein, 7 aa, synthetic construct
RAPHSSQ

SEQ ID NO: 142759 - protein, 7 aa, synthetic construct
RAPHTTF

SEQ ID NO: 142760 - protein, 7 aa, synthetic construct
RAPINVH

SEQ ID NO: 142761 - protein, 7 aa, synthetic construct
RAPISRD

SEQ ID NO: 142762 - protein, 7 aa, synthetic construct
RAPMSGM

SEQ ID NO: 142763 - protein, 7 aa, synthetic construct
RAPPMSA

SEQ ID NO: 142764 - protein, 7 aa, synthetic construct
RAPPNIY

SEQ ID NO: 142765 - protein, 7 aa, synthetic construct
RAPPTSY

SEQ ID NO: 142766 - protein, 7 aa, synthetic construct
RAPQNVY

SEQ ID NO: 142767 - protein, 7 aa, synthetic construct
RAPREIS

SEQ ID NO: 142768 - protein, 7 aa, synthetic construct
RAPSMMM

SEQ ID NO: 142769 - protein, 7 aa, synthetic construct
RAPVGVH

SEQ ID NO: 142770 - protein, 7 aa, synthetic construct
RAPVMQQ

SEQ ID NO: 142771 - protein, 7 aa, synthetic construct
RAQAMAT

SEQ ID NO: 142772 - protein, 7 aa, synthetic construct
RAQDKQM

SEQ ID NO: 142773 - protein, 7 aa, synthetic construct
RAQDVKY

SEQ ID NO: 142774 - protein, 7 aa, synthetic construct
RAQFSGP

SEQ ID NO: 142775 - protein, 7 aa, synthetic construct
RAQGAGN

SEQ ID NO: 142776 - protein, 7 aa, synthetic construct
RAQGFPQ

SEQ ID NO: 142777 - protein, 7 aa, synthetic construct
RAQHNLP

SEQ ID NO: 142778 - protein, 7 aa, synthetic construct
RAQHNSL

SEQ ID NO: 142779 - protein, 7 aa, synthetic construct
RAQHTDK

SEQ ID NO: 142780 - protein, 7 aa, synthetic construct
RAQHTLQ

SEQ ID NO: 142781 - protein, 7 aa, synthetic construct
RAQHYGP

SEQ ID NO: 142782 - protein, 7 aa, synthetic construct
RAQIERP

SEQ ID NO: 142783 - protein, 7 aa, synthetic construct
RAQIVQH

SEQ ID NO: 142784 - protein, 7 aa, synthetic construct
RAQKDVI

SEQ ID NO: 142785 - protein, 7 aa, synthetic construct
RAQKGDM

SEQ ID NO: 142786 - protein, 7 aa, synthetic construct
RAQMGNF

SEQ ID NO: 142787 - protein, 7 aa, synthetic construct
RAQMPMN

SEQ ID NO: 142788 - protein, 7 aa, synthetic construct
RAQNVSV

SEQ ID NO: 142789 - protein, 7 aa, synthetic construct
RAQPPVL

SEQ ID NO: 142790 - protein, 7 aa, synthetic construct
RAQPSLH

SEQ ID NO: 142791 - protein, 7 aa, synthetic construct
RAQPSTQ

SEQ ID NO: 142792 - protein, 7 aa, synthetic construct
RAQPVAT

SEQ ID NO: 142793 - protein, 7 aa, synthetic construct
RAQQVSM

SEQ ID NO: 142794 - protein, 7 aa, synthetic construct
RAQRDTP

SEQ ID NO: 142795 - protein, 7 aa, synthetic construct
RAQREPV

SEQ ID NO: 142796 - protein, 7 aa, synthetic construct
RAQRVEM

SEQ ID NO: 142797 - protein, 7 aa, synthetic construct
RAQSAAL

SEQ ID NO: 142798 - protein, 7 aa, synthetic construct
RAQSGYQ

SEQ ID NO: 142799 - protein, 7 aa, synthetic construct
RAQSQTQ

SEQ ID NO: 142800 - protein, 7 aa, synthetic construct
RAQSTNW

SEQ ID NO: 142801 - protein, 7 aa, synthetic construct
RAQSVLM

SEQ ID NO: 142802 - protein, 7 aa, synthetic construct
RAQTGAH

SEQ ID NO: 142803 - protein, 7 aa, synthetic construct
RAQTIHT

SEQ ID NO: 142804 - protein, 7 aa, synthetic construct
RAQTISM

SEQ ID NO: 142805 - protein, 7 aa, synthetic construct
RAQTMIH

SEQ ID NO: 142806 - protein, 7 aa, synthetic construct
RARDIPI

SEQ ID NO: 142807 - protein, 7 aa, synthetic construct
RARDSNA

SEQ ID NO: 142808 - protein, 7 aa, synthetic construct
RARDTVP

SEQ ID NO: 142809 - protein, 7 aa, synthetic construct
RARELRE

SEQ ID NO: 142810 - protein, 7 aa, synthetic construct
RARMVEA

SEQ ID NO: 142811 - protein, 7 aa, synthetic construct
RARPEPI

SEQ ID NO: 142812 - protein, 7 aa, synthetic construct
RARPMDS

SEQ ID NO: 142813 - protein, 7 aa, synthetic construct
RARVDGM

SEQ ID NO: 142814 - protein, 7 aa, synthetic construct
RASAKFD

SEQ ID NO: 142815 - protein, 7 aa, synthetic construct
RASDLKF

SEQ ID NO: 142816 - protein, 7 aa, synthetic construct
RASEHPR

SEQ ID NO: 142817 - protein, 7 aa, synthetic construct
RASEPRI

SEQ ID NO: 142818 - protein, 7 aa, synthetic construct
RASHGFA

SEQ ID NO: 142819 - protein, 7 aa, synthetic construct
RASHSGG

SEQ ID NO: 142820 - protein, 7 aa, synthetic construct
RASLRDG

SEQ ID NO: 142821 - protein, 7 aa, synthetic construct
RASNHGL

SEQ ID NO: 142822 - protein, 7 aa, synthetic construct
RASNNNV

SEQ ID NO: 142823 - protein, 7 aa, synthetic construct
RASPHVA

SEQ ID NO: 142824 - protein, 7 aa, synthetic construct
RASPSVH

SEQ ID NO: 142825 - protein, 7 aa, synthetic construct
RASPTHT

SEQ ID NO: 142826 - protein, 7 aa, synthetic construct
RASQNNL

SEQ ID NO: 142827 - protein, 7 aa, synthetic construct
RASSKAD

SEQ ID NO: 142828 - protein, 7 aa, synthetic construct
RASSNER

SEQ ID NO: 142829 - protein, 7 aa, synthetic construct
RASSVNL

SEQ ID NO: 142830 - protein, 7 aa, synthetic construct
RASSYNL

SEQ ID NO: 142831 - protein, 7 aa, synthetic construct
RASTANW

SEQ ID NO: 142832 - protein, 7 aa, synthetic construct
RASTHMM

SEQ ID NO: 142833 - protein, 7 aa, synthetic construct
RASVHSS

SEQ ID NO: 142834 - protein, 7 aa, synthetic construct
RASYGGN

SEQ ID NO: 142835 - protein, 7 aa, synthetic construct
RATAPGM

SEQ ID NO: 142836 - protein, 7 aa, synthetic construct
RATDFVK

SEQ ID NO: 142837 - protein, 7 aa, synthetic construct
RATEKER

SEQ ID NO: 142838 - protein, 7 aa, synthetic construct
RATGLMH

SEQ ID NO: 142839 - protein, 7 aa, synthetic construct
RATGSSH

SEQ ID NO: 142840 - protein, 7 aa, synthetic construct
RATHGAS

SEQ ID NO: 142841 - protein, 7 aa, synthetic construct
RATHPVI

SEQ ID NO: 142842 - protein, 7 aa, synthetic construct
RATHQPV

SEQ ID NO: 142843 - protein, 7 aa, synthetic construct
RATHQVV

SEQ ID NO: 142844 - protein, 7 aa, synthetic construct
RATHTTL

SEQ ID NO: 142845 - protein, 7 aa, synthetic construct
RATIGMN

SEQ ID NO: 142846 - protein, 7 aa, synthetic construct
RATMIGH

SEQ ID NO: 142847 - protein, 7 aa, synthetic construct
RATMQVH

SEQ ID NO: 142848 - protein, 7 aa, synthetic construct
RATNTHF

SEQ ID NO: 142849 - protein, 7 aa, synthetic construct
RATPHPS

SEQ ID NO: 142850 - protein, 7 aa, synthetic construct
RATPTQF

SEQ ID NO: 142851 - protein, 7 aa, synthetic construct
RATPVGH

SEQ ID NO: 142852 - protein, 7 aa, synthetic construct
RATQEPR

SEQ ID NO: 142853 - protein, 7 aa, synthetic construct
RATQHAV

SEQ ID NO: 142854 - protein, 7 aa, synthetic construct
RATQIQH

SEQ ID NO: 142855 - protein, 7 aa, synthetic construct
RATQNMY

SEQ ID NO: 142856 - protein, 7 aa, synthetic construct
RATTTPY

SEQ ID NO: 142857 - protein, 7 aa, synthetic construct
RATTVGH

SEQ ID NO: 142858 - protein, 7 aa, synthetic construct
RATVHPS

SEQ ID NO: 142859 - protein, 7 aa, synthetic construct
RAVADSK

SEQ ID NO: 142860 - protein, 7 aa, synthetic construct
RAVAERA

SEQ ID NO: 142861 - protein, 7 aa, synthetic construct
RAVAHLA

SEQ ID NO: 142862 - protein, 7 aa, synthetic construct
RAVAMGQ

SEQ ID NO: 142863 - protein, 7 aa, synthetic construct
RAVDFKQ

SEQ ID NO: 142864 - protein, 7 aa, synthetic construct
RAVEKSQ

SEQ ID NO: 142865 - protein, 7 aa, synthetic construct
RAVGGMI

SEQ ID NO: 142866 - protein, 7 aa, synthetic construct
RAVGPSH

SEQ ID NO: 142867 - protein, 7 aa, synthetic construct
RAVNDAR

SEQ ID NO: 142868 - protein, 7 aa, synthetic construct
RAVNFHA

SEQ ID NO: 142869 - protein, 7 aa, synthetic construct
RAVNTNQ

SEQ ID NO: 142870 - protein, 7 aa, synthetic construct
RAVNVSQ

SEQ ID NO: 142871 - protein, 7 aa, synthetic construct
RAVPALQ

SEQ ID NO: 142872 - protein, 7 aa, synthetic construct
RAVPHTV

SEQ ID NO: 142873 - protein, 7 aa, synthetic construct
RAVPQSH

SEQ ID NO: 142874 - protein, 7 aa, synthetic construct
RAVPTAM

SEQ ID NO: 142875 - protein, 7 aa, synthetic construct
RAVQAAQ

SEQ ID NO: 142876 - protein, 7 aa, synthetic construct
RAVQRND

SEQ ID NO: 142877 - protein, 7 aa, synthetic construct
RAVQRPD

SEQ ID NO: 142878 - protein, 7 aa, synthetic construct
RAVRDTT

SEQ ID NO: 142879 - protein, 7 aa, synthetic construct
RAVRQDI

SEQ ID NO: 142880 - protein, 7 aa, synthetic construct
RAVTRLE

SEQ ID NO: 142881 - protein, 7 aa, synthetic construct
RAVTSNL

SEQ ID NO: 142882 - protein, 7 aa, synthetic construct
RAVTTMQ

SEQ ID NO: 142883 - protein, 7 aa, synthetic construct
RAVTVAQ

SEQ ID NO: 142884 - protein, 7 aa, synthetic construct
RAVVGMP

SEQ ID NO: 142885 - protein, 7 aa, synthetic construct
RAVVNDR

SEQ ID NO: 142886 - protein, 7 aa, synthetic construct
RAVVPHP

SEQ ID NO: 142887 - protein, 7 aa, synthetic construct
RAWKEDH

SEQ ID NO: 142888 - protein, 7 aa, synthetic construct
RAYGTNQ

SEQ ID NO: 142889 - protein, 7 aa, synthetic construct
RAYPGQG

SEQ ID NO: 142890 - protein, 7 aa, synthetic construct
RDAAKQV

SEQ ID NO: 142891 - protein, 7 aa, synthetic construct
RDAARVV

SEQ ID NO: 142892 - protein, 7 aa, synthetic construct
RDAFQRQ

SEQ ID NO: 142893 - protein, 7 aa, synthetic construct
RDAIRQV

SEQ ID NO: 142894 - protein, 7 aa, synthetic construct
RDAITRL

SEQ ID NO: 142895 - protein, 7 aa, synthetic construct
RDAKQGY

SEQ ID NO: 142896 - protein, 7 aa, synthetic construct
RDALQNR

SEQ ID NO: 142897 - protein, 7 aa, synthetic construct
RDAMQRV

SEQ ID NO: 142898 - protein, 7 aa, synthetic construct
RDAPRVQ

SEQ ID NO: 142899 - protein, 7 aa, synthetic construct
RDARMER

SEQ ID NO: 142900 - protein, 7 aa, synthetic construct
RDARNAY

SEQ ID NO: 142901 - protein, 7 aa, synthetic construct
RDARNGM

SEQ ID NO: 142902 - protein, 7 aa, synthetic construct
RDARTAN

SEQ ID NO: 142903 - protein, 7 aa, synthetic construct
RDARTSI

SEQ ID NO: 142904 - protein, 7 aa, synthetic construct
RDASEKR

SEQ ID NO: 142905 - protein, 7 aa, synthetic construct
RDAVKMT

SEQ ID NO: 142906 - protein, 7 aa, synthetic construct
RDDANKR

SEQ ID NO: 142907 - protein, 7 aa, synthetic construct
RDDKNKI

SEQ ID NO: 142908 - protein, 7 aa, synthetic construct
RDDKQYK

SEQ ID NO: 142909 - protein, 7 aa, synthetic construct
RDDKYKS

SEQ ID NO: 142910 - protein, 7 aa, synthetic construct
RDDRMTK

SEQ ID NO: 142911 - protein, 7 aa, synthetic construct
RDEIKAR

SEQ ID NO: 142912 - protein, 7 aa, synthetic construct
RDEIRKS

SEQ ID NO: 142913 - protein, 7 aa, synthetic construct
RDERIAR

SEQ ID NO: 142914 - protein, 7 aa, synthetic construct
RDETVRR

SEQ ID NO: 142915 - protein, 7 aa, synthetic construct
RDFKAAN

SEQ ID NO: 142916 - protein, 7 aa, synthetic construct
RDFKATQ

SEQ ID NO: 142917 - protein, 7 aa, synthetic construct
RDFTAKV

SEQ ID NO: 142918 - protein, 7 aa, synthetic construct
RDFVQVK

SEQ ID NO: 142919 - protein, 7 aa, synthetic construct
RDGAVTK

SEQ ID NO: 142920 - protein, 7 aa, synthetic construct
RDGIRIV

SEQ ID NO: 142921 - protein, 7 aa, synthetic construct
RDGKMYA

SEQ ID NO: 142922 - protein, 7 aa, synthetic construct
RDGLSQK

SEQ ID NO: 142923 - protein, 7 aa, synthetic construct
RDGMRNN

SEQ ID NO: 142924 - protein, 7 aa, synthetic construct
RDGPKYI

SEQ ID NO: 142925 - protein, 7 aa, synthetic construct
RDGPRQI

SEQ ID NO: 142926 - protein, 7 aa, synthetic construct
RDGQRGS

SEQ ID NO: 142927 - protein, 7 aa, synthetic construct
RDGRKDF

SEQ ID NO: 142928 - protein, 7 aa, synthetic construct
RDGRSAI

SEQ ID NO: 142929 - protein, 7 aa, synthetic construct
RDGRTGQ

SEQ ID NO: 142930 - protein, 7 aa, synthetic construct
RDGRTGT

SEQ ID NO: 142931 - protein, 7 aa, synthetic construct
RDGTKQF

SEQ ID NO: 142932 - protein, 7 aa, synthetic construct
RDGTNRV

SEQ ID NO: 142933 - protein, 7 aa, synthetic construct
RDHDKYR

SEQ ID NO: 142934 - protein, 7 aa, synthetic construct
RDHIRMA

SEQ ID NO: 142935 - protein, 7 aa, synthetic construct
RDHKFAA

SEQ ID NO: 142936 - protein, 7 aa, synthetic construct
RDHPGRM

SEQ ID NO: 142937 - protein, 7 aa, synthetic construct
RDHQRQG

SEQ ID NO: 142938 - protein, 7 aa, synthetic construct
RDHSTRA

SEQ ID NO: 142939 - protein, 7 aa, synthetic construct
RDHTLVK

SEQ ID NO: 142940 - protein, 7 aa, synthetic construct
RDHTPKT

SEQ ID NO: 142941 - protein, 7 aa, synthetic construct
RDHTRGS

SEQ ID NO: 142942 - protein, 7 aa, synthetic construct
RDHTRPI

SEQ ID NO: 142943 - protein, 7 aa, synthetic construct
RDHTVRG

SEQ ID NO: 142944 - protein, 7 aa, synthetic construct
RDHYTGN

SEQ ID NO: 142945 - protein, 7 aa, synthetic construct
RDIAARV

SEQ ID NO: 142946 - protein, 7 aa, synthetic construct
RDIKNMY

SEQ ID NO: 142947 - protein, 7 aa, synthetic construct
RDIRPQL

SEQ ID NO: 142948 - protein, 7 aa, synthetic construct
RDISYKV

SEQ ID NO: 142949 - protein, 7 aa, synthetic construct
RDITVSR

SEQ ID NO: 142950 - protein, 7 aa, synthetic construct
RDKAYSM

SEQ ID NO: 142951 - protein, 7 aa, synthetic construct
RDKDLMR

SEQ ID NO: 142952 - protein, 7 aa, synthetic construct
RDKHVTT

SEQ ID NO: 142953 - protein, 7 aa, synthetic construct
RDKIHAL

SEQ ID NO: 142954 - protein, 7 aa, synthetic construct
RDKLHDR

SEQ ID NO: 142955 - protein, 7 aa, synthetic construct
RDKMPTN

SEQ ID NO: 142956 - protein, 7 aa, synthetic construct
RDKNPMN

SEQ ID NO: 142957 - protein, 7 aa, synthetic construct
RDKPQGM

SEQ ID NO: 142958 - protein, 7 aa, synthetic construct
RDKPVLY

SEQ ID NO: 142959 - protein, 7 aa, synthetic construct
RDKQKEI

SEQ ID NO: 142960 - protein, 7 aa, synthetic construct
RDKQPTF

SEQ ID NO: 142961 - protein, 7 aa, synthetic construct
RDKRPDF

SEQ ID NO: 142962 - protein, 7 aa, synthetic construct
RDKSQYM

SEQ ID NO: 142963 - protein, 7 aa, synthetic construct
RDKSSSM

SEQ ID NO: 142964 - protein, 7 aa, synthetic construct
RDKTPPY

SEQ ID NO: 142965 - protein, 7 aa, synthetic construct
RDKYVNT

SEQ ID NO: 142966 - protein, 7 aa, synthetic construct
RDLHNRA

SEQ ID NO: 142967 - protein, 7 aa, synthetic construct
RDLMAVK

SEQ ID NO: 142968 - protein, 7 aa, synthetic construct
RDLPQKT

SEQ ID NO: 142969 - protein, 7 aa, synthetic construct
RDLQKIM

SEQ ID NO: 142970 - protein, 7 aa, synthetic construct
RDLQMSK

SEQ ID NO: 142971 - protein, 7 aa, synthetic construct
RDLQRNL

SEQ ID NO: 142972 - protein, 7 aa, synthetic construct
RDLRAAV

SEQ ID NO: 142973 - protein, 7 aa, synthetic construct
RDLRQGL

SEQ ID NO: 142974 - protein, 7 aa, synthetic construct
RDLRQQV

SEQ ID NO: 142975 - protein, 7 aa, synthetic construct
RDLSHRD

SEQ ID NO: 142976 - protein, 7 aa, synthetic construct
RDLTRVM

SEQ ID NO: 142977 - protein, 7 aa, synthetic construct
RDLTVGK

SEQ ID NO: 142978 - protein, 7 aa, synthetic construct
RDMAGKL

SEQ ID NO: 142979 - protein, 7 aa, synthetic construct
RDMAKAF

SEQ ID NO: 142980 - protein, 7 aa, synthetic construct
RDMKGSG

SEQ ID NO: 142981 - protein, 7 aa, synthetic construct
RDMKYNH

SEQ ID NO: 142982 - protein, 7 aa, synthetic construct
RDMPRGP

SEQ ID NO: 142983 - protein, 7 aa, synthetic construct
RDMRTNY

SEQ ID NO: 142984 - protein, 7 aa, synthetic construct
RDMRVTQ

SEQ ID NO: 142985 - protein, 7 aa, synthetic construct
RDMSIAK

SEQ ID NO: 142986 - protein, 7 aa, synthetic construct
RDNFVVK

SEQ ID NO: 142987 - protein, 7 aa, synthetic construct
RDNHMPR

SEQ ID NO: 142988 - protein, 7 aa, synthetic construct
RDNINTR

SEQ ID NO: 142989 - protein, 7 aa, synthetic construct
RDNITSR

SEQ ID NO: 142990 - protein, 7 aa, synthetic construct
RDNKASQ

SEQ ID NO: 142991 - protein, 7 aa, synthetic construct
RDNKHAL

SEQ ID NO: 142992 - protein, 7 aa, synthetic construct
RDNKWSS

SEQ ID NO: 142993 - protein, 7 aa, synthetic construct
RDNNKMQ

SEQ ID NO: 142994 - protein, 7 aa, synthetic construct
RDNPGSR

SEQ ID NO: 142995 - protein, 7 aa, synthetic construct
RDNPTRG

SEQ ID NO: 142996 - protein, 7 aa, synthetic construct
RDNSGVK

SEQ ID NO: 142997 - protein, 7 aa, synthetic construct
RDNSKLM

SEQ ID NO: 142998 - protein, 7 aa, synthetic construct
RDNTARP

SEQ ID NO: 142999 - protein, 7 aa, synthetic construct
RDNTNKF

SEQ ID NO: 143000 - protein, 7 aa, synthetic construct
RDNVRTS

SEQ ID NO: 143001 - protein, 7 aa, synthetic construct
RDPGRNQ

SEQ ID NO: 143002 - protein, 7 aa, synthetic construct
RDPKMVV

SEQ ID NO: 143003 - protein, 7 aa, synthetic construct
RDPKNLY

SEQ ID NO: 143004 - protein, 7 aa, synthetic construct
RDPKYMV

SEQ ID NO: 143005 - protein, 7 aa, synthetic construct
RDPLNSK

SEQ ID NO: 143006 - protein, 7 aa, synthetic construct
RDPPNTR

SEQ ID NO: 143007 - protein, 7 aa, synthetic construct
RDPRHTI

SEQ ID NO: 143008 - protein, 7 aa, synthetic construct
RDPTHKY

SEQ ID NO: 143009 - protein, 7 aa, synthetic construct
RDQIMKF

SEQ ID NO: 143010 - protein, 7 aa, synthetic construct
RDQIYKQ

SEQ ID NO: 143011 - protein, 7 aa, synthetic construct
RDQMKAM

SEQ ID NO: 143012 - protein, 7 aa, synthetic construct
RDQNTKS

SEQ ID NO: 143013 - protein, 7 aa, synthetic construct
RDQVRIT

SEQ ID NO: 143014 - protein, 7 aa, synthetic construct
RDRAPHM

SEQ ID NO: 143015 - protein, 7 aa, synthetic construct
RDRDRVM

SEQ ID NO: 143016 - protein, 7 aa, synthetic construct
RDRFSNV

SEQ ID NO: 143017 - protein, 7 aa, synthetic construct
RDRGEAR

SEQ ID NO: 143018 - protein, 7 aa, synthetic construct
RDRGLGI

SEQ ID NO: 143019 - protein, 7 aa, synthetic construct
RDRMKDI

SEQ ID NO: 143020 - protein, 7 aa, synthetic construct
RDRPALY

SEQ ID NO: 143021 - protein, 7 aa, synthetic construct
RDRPINN

SEQ ID NO: 143022 - protein, 7 aa, synthetic construct
RDRPVGM

SEQ ID NO: 143023 - protein, 7 aa, synthetic construct
RDRQKDM

SEQ ID NO: 143024 - protein, 7 aa, synthetic construct
RDRSPIH

SEQ ID NO: 143025 - protein, 7 aa, synthetic construct
RDRSTFG

SEQ ID NO: 143026 - protein, 7 aa, synthetic construct
RDRSTTH

SEQ ID NO: 143027 - protein, 7 aa, synthetic construct
RDRSTYA

SEQ ID NO: 143028 - protein, 7 aa, synthetic construct
RDRYPQT

SEQ ID NO: 143029 - protein, 7 aa, synthetic construct
RDSGARP

SEQ ID NO: 143030 - protein, 7 aa, synthetic construct
RDSHIRA

SEQ ID NO: 143031 - protein, 7 aa, synthetic construct
RDSKIYV

SEQ ID NO: 143032 - protein, 7 aa, synthetic construct
RDSKKEI

SEQ ID NO: 143033 - protein, 7 aa, synthetic construct
RDSLNLK

SEQ ID NO: 143034 - protein, 7 aa, synthetic construct
RDSLQTR

SEQ ID NO: 143035 - protein, 7 aa, synthetic construct
RDSMPMR

SEQ ID NO: 143036 - protein, 7 aa, synthetic construct
RDSPRMI

SEQ ID NO: 143037 - protein, 7 aa, synthetic construct
RDSPTPR

SEQ ID NO: 143038 - protein, 7 aa, synthetic construct
RDSPVQR

SEQ ID NO: 143039 - protein, 7 aa, synthetic construct
RDSQSSR

SEQ ID NO: 143040 - protein, 7 aa, synthetic construct
RDSRGPQ

SEQ ID NO: 143041 - protein, 7 aa, synthetic construct
RDSSLLR

SEQ ID NO: 143042 - protein, 7 aa, synthetic construct
RDSSTKM

SEQ ID NO: 143043 - protein, 7 aa, synthetic construct
RDSTKGF

SEQ ID NO: 143044 - protein, 7 aa, synthetic construct
RDSTLQR

SEQ ID NO: 143045 - protein, 7 aa, synthetic construct
RDSYSKG

SEQ ID NO: 143046 - protein, 7 aa, synthetic construct
RDTAKTY

SEQ ID NO: 143047 - protein, 7 aa, synthetic construct
RDTAYIK

SEQ ID NO: 143048 - protein, 7 aa, synthetic construct
RDTFRYE

SEQ ID NO: 143049 - protein, 7 aa, synthetic construct
RDTGFRG

SEQ ID NO: 143050 - protein, 7 aa, synthetic construct
RDTGRVS

SEQ ID NO: 143051 - protein, 7 aa, synthetic construct
RDTHSRM

SEQ ID NO: 143052 - protein, 7 aa, synthetic construct
RDTIKHA

SEQ ID NO: 143053 - protein, 7 aa, synthetic construct
RDTKLAY

SEQ ID NO: 143054 - protein, 7 aa, synthetic construct
RDTKPVW

SEQ ID NO: 143055 - protein, 7 aa, synthetic construct
RDTKTYV

SEQ ID NO: 143056 - protein, 7 aa, synthetic construct
RDTKYGI

SEQ ID NO: 143057 - protein, 7 aa, synthetic construct
RDTLKIT

SEQ ID NO: 143058 - protein, 7 aa, synthetic construct
RDTLTQK

SEQ ID NO: 143059 - protein, 7 aa, synthetic construct
RDTMNVK

SEQ ID NO: 143060 - protein, 7 aa, synthetic construct
RDTMRQF

SEQ ID NO: 143061 - protein, 7 aa, synthetic construct
RDTQTLR

SEQ ID NO: 143062 - protein, 7 aa, synthetic construct
RDTTHRT

SEQ ID NO: 143063 - protein, 7 aa, synthetic construct
RDTTKTH

SEQ ID NO: 143064 - protein, 7 aa, synthetic construct
RDTVTKW

SEQ ID NO: 143065 - protein, 7 aa, synthetic construct
RDTYLQH

SEQ ID NO: 143066 - protein, 7 aa, synthetic construct
RDVANGK

SEQ ID NO: 143067 - protein, 7 aa, synthetic construct
RDVGKTQ

SEQ ID NO: 143068 - protein, 7 aa, synthetic construct
RDVGLRQ

SEQ ID NO: 143069 - protein, 7 aa, synthetic construct
RDVGTYK

SEQ ID NO: 143070 - protein, 7 aa, synthetic construct
RDVHRSG

SEQ ID NO: 143071 - protein, 7 aa, synthetic construct
RDVLVRV

SEQ ID NO: 143072 - protein, 7 aa, synthetic construct
RDVPQRP

SEQ ID NO: 143073 - protein, 7 aa, synthetic construct
RDVRLMT

SEQ ID NO: 143074 - protein, 7 aa, synthetic construct
RDVRNQF

SEQ ID NO: 143075 - protein, 7 aa, synthetic construct
RDVSLRA

SEQ ID NO: 143076 - protein, 7 aa, synthetic construct
RDVTFKM

SEQ ID NO: 143077 - protein, 7 aa, synthetic construct
RDVTYKI

SEQ ID NO: 143078 - protein, 7 aa, synthetic construct
RDYHGSQ

SEQ ID NO: 143079 - protein, 7 aa, synthetic construct
RDYPKTI

SEQ ID NO: 143080 - protein, 7 aa, synthetic construct
RDYPRHD

SEQ ID NO: 143081 - protein, 7 aa, synthetic construct
REAASNR

SEQ ID NO: 143082 - protein, 7 aa, synthetic construct
REAIHKP

SEQ ID NO: 143083 - protein, 7 aa, synthetic construct
REAKPHT

SEQ ID NO: 143084 - protein, 7 aa, synthetic construct
REAKTSQ

SEQ ID NO: 143085 - protein, 7 aa, synthetic construct
REALRAG

SEQ ID NO: 143086 - protein, 7 aa, synthetic construct
REAMRQI

SEQ ID NO: 143087 - protein, 7 aa, synthetic construct
REAMTKQ

SEQ ID NO: 143088 - protein, 7 aa, synthetic construct
REANARG

SEQ ID NO: 143089 - protein, 7 aa, synthetic construct
REAPTRA

SEQ ID NO: 143090 - protein, 7 aa, synthetic construct
REAQARI

SEQ ID NO: 143091 - protein, 7 aa, synthetic construct
REARGGA

SEQ ID NO: 143092 - protein, 7 aa, synthetic construct
REARPGL

SEQ ID NO: 143093 - protein, 7 aa, synthetic construct
REARPPL

SEQ ID NO: 143094 - protein, 7 aa, synthetic construct
REARQSN

SEQ ID NO: 143095 - protein, 7 aa, synthetic construct
REARTNS

SEQ ID NO: 143096 - protein, 7 aa, synthetic construct
REARVNV

SEQ ID NO: 143097 - protein, 7 aa, synthetic construct
REASARG

SEQ ID NO: 143098 - protein, 7 aa, synthetic construct
REAVTKY

SEQ ID NO: 143099 - protein, 7 aa, synthetic construct
REDQKKY

SEQ ID NO: 143100 - protein, 7 aa, synthetic construct
REDRMLK

SEQ ID NO: 143101 - protein, 7 aa, synthetic construct
REDTQKR

SEQ ID NO: 143102 - protein, 7 aa, synthetic construct
REEKGNR

SEQ ID NO: 143103 - protein, 7 aa, synthetic construct
REERIKI

SEQ ID NO: 143104 - protein, 7 aa, synthetic construct
REERMRN

SEQ ID NO: 143105 - protein, 7 aa, synthetic construct
REEVNKK

SEQ ID NO: 143106 - protein, 7 aa, synthetic construct
REGAARG

SEQ ID NO: 143107 - protein, 7 aa, synthetic construct
REGAFQK

SEQ ID NO: 143108 - protein, 7 aa, synthetic construct
REGFISK

SEQ ID NO: 143109 - protein, 7 aa, synthetic construct
REGHMKL

SEQ ID NO: 143110 - protein, 7 aa, synthetic construct
REGIARQ

SEQ ID NO: 143111 - protein, 7 aa, synthetic construct
REGKHML

SEQ ID NO: 143112 - protein, 7 aa, synthetic construct
REGKIYI

SEQ ID NO: 143113 - protein, 7 aa, synthetic construct
REGKRES

SEQ ID NO: 143114 - protein, 7 aa, synthetic construct
REGMGKS

SEQ ID NO: 143115 - protein, 7 aa, synthetic construct
REGNSIK

SEQ ID NO: 143116 - protein, 7 aa, synthetic construct
REGPMKS

SEQ ID NO: 143117 - protein, 7 aa, synthetic construct
REGQKDR

SEQ ID NO: 143118 - protein, 7 aa, synthetic construct
REGQMIK

SEQ ID NO: 143119 - protein, 7 aa, synthetic construct
REGRAQN

SEQ ID NO: 143120 - protein, 7 aa, synthetic construct
REGRGPF

SEQ ID NO: 143121 - protein, 7 aa, synthetic construct
REGRKDG

SEQ ID NO: 143122 - protein, 7 aa, synthetic construct
REGRLLA

SEQ ID NO: 143123 - protein, 7 aa, synthetic construct
REGRPPI

SEQ ID NO: 143124 - protein, 7 aa, synthetic construct
REGRQQL

SEQ ID NO: 143125 - protein, 7 aa, synthetic construct
REGRTYA

SEQ ID NO: 143126 - protein, 7 aa, synthetic construct
REGTGRV

SEQ ID NO: 143127 - protein, 7 aa, synthetic construct
REGTGVR

SEQ ID NO: 143128 - protein, 7 aa, synthetic construct
REGVRQL

SEQ ID NO: 143129 - protein, 7 aa, synthetic construct
REGVYSK

SEQ ID NO: 143130 - protein, 7 aa, synthetic construct
REHAMKM

SEQ ID NO: 143131 - protein, 7 aa, synthetic construct
REHKEIR

SEQ ID NO: 143132 - protein, 7 aa, synthetic construct
REHKFVA

SEQ ID NO: 143133 - protein, 7 aa, synthetic construct
REHKQGY

SEQ ID NO: 143134 - protein, 7 aa, synthetic construct
REHKQLM

SEQ ID NO: 143135 - protein, 7 aa, synthetic construct
REHKSTF

SEQ ID NO: 143136 - protein, 7 aa, synthetic construct
REHLKYG

SEQ ID NO: 143137 - protein, 7 aa, synthetic construct
REHMRSG

SEQ ID NO: 143138 - protein, 7 aa, synthetic construct
REHNIRS

SEQ ID NO: 143139 - protein, 7 aa, synthetic construct
REHPNRV

SEQ ID NO: 143140 - protein, 7 aa, synthetic construct
REHPRPT

SEQ ID NO: 143141 - protein, 7 aa, synthetic construct
REHSKFA

SEQ ID NO: 143142 - protein, 7 aa, synthetic construct
REHTNWD

SEQ ID NO: 143143 - protein, 7 aa, synthetic construct
REHVIKT

SEQ ID NO: 143144 - protein, 7 aa, synthetic construct
REIATRT

SEQ ID NO: 143145 - protein, 7 aa, synthetic construct
REIKRIE

SEQ ID NO: 143146 - protein, 7 aa, synthetic construct
REIKSNI

SEQ ID NO: 143147 - protein, 7 aa, synthetic construct
REIKTSY

SEQ ID NO: 143148 - protein, 7 aa, synthetic construct
REIPKQI

SEQ ID NO: 143149 - protein, 7 aa, synthetic construct
REIPSMK

SEQ ID NO: 143150 - protein, 7 aa, synthetic construct
REIQKAT

SEQ ID NO: 143151 - protein, 7 aa, synthetic construct
REIRASS

SEQ ID NO: 143152 - protein, 7 aa, synthetic construct
REITKNQ

SEQ ID NO: 143153 - protein, 7 aa, synthetic construct
REITRQG

SEQ ID NO: 143154 - protein, 7 aa, synthetic construct
REKATTW

SEQ ID NO: 143155 - protein, 7 aa, synthetic construct
REKDRPT

SEQ ID NO: 143156 - protein, 7 aa, synthetic construct
REKDWKG

SEQ ID NO: 143157 - protein, 7 aa, synthetic construct
REKERLQ

SEQ ID NO: 143158 - protein, 7 aa, synthetic construct
REKERNP

SEQ ID NO: 143159 - protein, 7 aa, synthetic construct
REKFNGL

SEQ ID NO: 143160 - protein, 7 aa, synthetic construct
REKFVGM

SEQ ID NO: 143161 - protein, 7 aa, synthetic construct
REKGAYV

SEQ ID NO: 143162 - protein, 7 aa, synthetic construct
REKHMPF

SEQ ID NO: 143163 - protein, 7 aa, synthetic construct
REKHPSV

SEQ ID NO: 143164 - protein, 7 aa, synthetic construct
REKIYVA

SEQ ID NO: 143165 - protein, 7 aa, synthetic construct
REKKDTY

SEQ ID NO: 143166 - protein, 7 aa, synthetic construct
REKLKEI

SEQ ID NO: 143167 - protein, 7 aa, synthetic construct
REKLPDR

SEQ ID NO: 143168 - protein, 7 aa, synthetic construct
REKLQGH

SEQ ID NO: 143169 - protein, 7 aa, synthetic construct
REKMGLH

SEQ ID NO: 143170 - protein, 7 aa, synthetic construct
REKMVPF

SEQ ID NO: 143171 - protein, 7 aa, synthetic construct
REKNALM

SEQ ID NO: 143172 - protein, 7 aa, synthetic construct
REKPFGN

SEQ ID NO: 143173 - protein, 7 aa, synthetic construct
REKPINM

SEQ ID NO: 143174 - protein, 7 aa, synthetic construct
REKPMPM

SEQ ID NO: 143175 - protein, 7 aa, synthetic construct
REKPPFM

SEQ ID NO: 143176 - protein, 7 aa, synthetic construct
REKPPQN

SEQ ID NO: 143177 - protein, 7 aa, synthetic construct
REKPQHY

SEQ ID NO: 143178 - protein, 7 aa, synthetic construct
REKPQIV

SEQ ID NO: 143179 - protein, 7 aa, synthetic construct
REKPQTY

SEQ ID NO: 143180 - protein, 7 aa, synthetic construct
REKPTQY

SEQ ID NO: 143181 - protein, 7 aa, synthetic construct
REKQSNI

SEQ ID NO: 143182 - protein, 7 aa, synthetic construct
REKSIHI

SEQ ID NO: 143183 - protein, 7 aa, synthetic construct
REKSPGW

SEQ ID NO: 143184 - protein, 7 aa, synthetic construct
REKSPYI

SEQ ID NO: 143185 - protein, 7 aa, synthetic construct
REKSQAF

SEQ ID NO: 143186 - protein, 7 aa, synthetic construct
REKSSIY

SEQ ID NO: 143187 - protein, 7 aa, synthetic construct
REKTMFN

SEQ ID NO: 143188 - protein, 7 aa, synthetic construct
REKTWTQ

SEQ ID NO: 143189 - protein, 7 aa, synthetic construct
REKVMGL

SEQ ID NO: 143190 - protein, 7 aa, synthetic construct
REKVRFD

SEQ ID NO: 143191 - protein, 7 aa, synthetic construct
RELAQKQ

SEQ ID NO: 143192 - protein, 7 aa, synthetic construct
RELARQV

SEQ ID NO: 143193 - protein, 7 aa, synthetic construct
RELGGRN

SEQ ID NO: 143194 - protein, 7 aa, synthetic construct
RELGVVR

SEQ ID NO: 143195 - protein, 7 aa, synthetic construct
RELHLKQ

SEQ ID NO: 143196 - protein, 7 aa, synthetic construct
RELKIPM

SEQ ID NO: 143197 - protein, 7 aa, synthetic construct
RELKYSV

SEQ ID NO: 143198 - protein, 7 aa, synthetic construct
RELNKMI

SEQ ID NO: 143199 - protein, 7 aa, synthetic construct
RELPTRA

SEQ ID NO: 143200 - protein, 7 aa, synthetic construct
RELQTRT

SEQ ID NO: 143201 - protein, 7 aa, synthetic construct
RELSQKA

SEQ ID NO: 143202 - protein, 7 aa, synthetic construct
RELTARG

SEQ ID NO: 143203 - protein, 7 aa, synthetic construct
REMGRAY

SEQ ID NO: 143204 - protein, 7 aa, synthetic construct
REMIKMA

SEQ ID NO: 143205 - protein, 7 aa, synthetic construct
REMIKNS

SEQ ID NO: 143206 - protein, 7 aa, synthetic construct
REMKAML

SEQ ID NO: 143207 - protein, 7 aa, synthetic construct
REMKFGG

SEQ ID NO: 143208 - protein, 7 aa, synthetic construct
REMKGFM

SEQ ID NO: 143209 - protein, 7 aa, synthetic construct
REMKVLT

SEQ ID NO: 143210 - protein, 7 aa, synthetic construct
REMNQKI

SEQ ID NO: 143211 - protein, 7 aa, synthetic construct
REMPRTA

SEQ ID NO: 143212 - protein, 7 aa, synthetic construct
REMQMLG

SEQ ID NO: 143213 - protein, 7 aa, synthetic construct
REMQRTL

SEQ ID NO: 143214 - protein, 7 aa, synthetic construct
REMRVTP

SEQ ID NO: 143215 - protein, 7 aa, synthetic construct
REMYTTV

SEQ ID NO: 143216 - protein, 7 aa, synthetic construct
RENKELR

SEQ ID NO: 143217 - protein, 7 aa, synthetic construct
RENKTLL

SEQ ID NO: 143218 - protein, 7 aa, synthetic construct
RENPMKI

SEQ ID NO: 143219 - protein, 7 aa, synthetic construct
RENPPKA

SEQ ID NO: 143220 - protein, 7 aa, synthetic construct
RENPSAR

SEQ ID NO: 143221 - protein, 7 aa, synthetic construct
RENPTRP

SEQ ID NO: 143222 - protein, 7 aa, synthetic construct
RENRVHG

SEQ ID NO: 143223 - protein, 7 aa, synthetic construct
RENRVQN

SEQ ID NO: 143224 - protein, 7 aa, synthetic construct
RENYMAM

SEQ ID NO: 143225 - protein, 7 aa, synthetic construct
REPAQVR

SEQ ID NO: 143226 - protein, 7 aa, synthetic construct
REPGRYM

SEQ ID NO: 143227 - protein, 7 aa, synthetic construct
REPHSRV

SEQ ID NO: 143228 - protein, 7 aa, synthetic construct
REPNSVK

SEQ ID NO: 143229 - protein, 7 aa, synthetic construct
REPNTKY

SEQ ID NO: 143230 - protein, 7 aa, synthetic construct
REPNVPR

SEQ ID NO: 143231 - protein, 7 aa, synthetic construct
REPPRGY

SEQ ID NO: 143232 - protein, 7 aa, synthetic construct
REPPTNR

SEQ ID NO: 143233 - protein, 7 aa, synthetic construct
REPQMAR

SEQ ID NO: 143234 - protein, 7 aa, synthetic construct
REPQRVI

SEQ ID NO: 143235 - protein, 7 aa, synthetic construct
REPSKNF

SEQ ID NO: 143236 - protein, 7 aa, synthetic construct
REPTSRT

SEQ ID NO: 143237 - protein, 7 aa, synthetic construct
REPVRQL

SEQ ID NO: 143238 - protein, 7 aa, synthetic construct
REQAYKP

SEQ ID NO: 143239 - protein, 7 aa, synthetic construct
REQGKFI

SEQ ID NO: 143240 - protein, 7 aa, synthetic construct
REQKGLQ

SEQ ID NO: 143241 - protein, 7 aa, synthetic construct
REQKGTL

SEQ ID NO: 143242 - protein, 7 aa, synthetic construct
REQKNIS

SEQ ID NO: 143243 - protein, 7 aa, synthetic construct
REQKSMM

SEQ ID NO: 143244 - protein, 7 aa, synthetic construct
REQPKTS

SEQ ID NO: 143245 - protein, 7 aa, synthetic construct
REQPSRA

SEQ ID NO: 143246 - protein, 7 aa, synthetic construct
REQVKVM

SEQ ID NO: 143247 - protein, 7 aa, synthetic construct
REQVRNP

SEQ ID NO: 143248 - protein, 7 aa, synthetic construct
RERAKDS

SEQ ID NO: 143249 - protein, 7 aa, synthetic construct
RERFGQG

SEQ ID NO: 143250 - protein, 7 aa, synthetic construct
RERHIPN

SEQ ID NO: 143251 - protein, 7 aa, synthetic construct
RERPVAV

SEQ ID NO: 143252 - protein, 7 aa, synthetic construct
RERQDKG

SEQ ID NO: 143253 - protein, 7 aa, synthetic construct
RERSNMF

SEQ ID NO: 143254 - protein, 7 aa, synthetic construct
RERVHGG

SEQ ID NO: 143255 - protein, 7 aa, synthetic construct
RERWADG

SEQ ID NO: 143256 - protein, 7 aa, synthetic construct
RESGAKQ

SEQ ID NO: 143257 - protein, 7 aa, synthetic construct
RESNKAV

SEQ ID NO: 143258 - protein, 7 aa, synthetic construct
RESNKLT

SEQ ID NO: 143259 - protein, 7 aa, synthetic construct
RESNRSG

SEQ ID NO: 143260 - protein, 7 aa, synthetic construct
RESPRFV

SEQ ID NO: 143261 - protein, 7 aa, synthetic construct
RESRVLG

SEQ ID NO: 143262 - protein, 7 aa, synthetic construct
RESRVSG

SEQ ID NO: 143263 - protein, 7 aa, synthetic construct
RESTTRN

SEQ ID NO: 143264 - protein, 7 aa, synthetic construct
RESTVRN

SEQ ID NO: 143265 - protein, 7 aa, synthetic construct
RESVAAK

SEQ ID NO: 143266 - protein, 7 aa, synthetic construct
RETARVI

SEQ ID NO: 143267 - protein, 7 aa, synthetic construct
RETHLRN

SEQ ID NO: 143268 - protein, 7 aa, synthetic construct
RETKAYQ

SEQ ID NO: 143269 - protein, 7 aa, synthetic construct
RETKIML

SEQ ID NO: 143270 - protein, 7 aa, synthetic construct
RETKIQI

SEQ ID NO: 143271 - protein, 7 aa, synthetic construct
RETMKSL

SEQ ID NO: 143272 - protein, 7 aa, synthetic construct
RETPRGP

SEQ ID NO: 143273 - protein, 7 aa, synthetic construct
RETQGKP

SEQ ID NO: 143274 - protein, 7 aa, synthetic construct
RETSKPQ

SEQ ID NO: 143275 - protein, 7 aa, synthetic construct
RETSRII

SEQ ID NO: 143276 - protein, 7 aa, synthetic construct
RETSSRS

SEQ ID NO: 143277 - protein, 7 aa, synthetic construct
RETTIRS

SEQ ID NO: 143278 - protein, 7 aa, synthetic construct
RETYNPQ

SEQ ID NO: 143279 - protein, 7 aa, synthetic construct
REVAGRV

SEQ ID NO: 143280 - protein, 7 aa, synthetic construct
REVHRNG

SEQ ID NO: 143281 - protein, 7 aa, synthetic construct
REVHRTG

SEQ ID NO: 143282 - protein, 7 aa, synthetic construct
REVIKHA

SEQ ID NO: 143283 - protein, 7 aa, synthetic construct
REVKNTY

SEQ ID NO: 143284 - protein, 7 aa, synthetic construct
REVKSGT

SEQ ID NO: 143285 - protein, 7 aa, synthetic construct
REVKYGV

SEQ ID NO: 143286 - protein, 7 aa, synthetic construct
REVMKMT

SEQ ID NO: 143287 - protein, 7 aa, synthetic construct
REVMNPK

SEQ ID NO: 143288 - protein, 7 aa, synthetic construct
REVMVAK

SEQ ID NO: 143289 - protein, 7 aa, synthetic construct
REVQHKT

SEQ ID NO: 143290 - protein, 7 aa, synthetic construct
REVQKQV

SEQ ID NO: 143291 - protein, 7 aa, synthetic construct
REVTKTT

SEQ ID NO: 143292 - protein, 7 aa, synthetic construct
REVTSRS

SEQ ID NO: 143293 - protein, 7 aa, synthetic construct
REYATMT

SEQ ID NO: 143294 - protein, 7 aa, synthetic construct
REYKNSA

SEQ ID NO: 143295 - protein, 7 aa, synthetic construct
REYKPGV

SEQ ID NO: 143296 - protein, 7 aa, synthetic construct
RFAEKMN

SEQ ID NO: 143297 - protein, 7 aa, synthetic construct
RFAGNVP

SEQ ID NO: 143298 - protein, 7 aa, synthetic construct
RFAHSQS

SEQ ID NO: 143299 - protein, 7 aa, synthetic construct
RFAKETI

SEQ ID NO: 143300 - protein, 7 aa, synthetic construct
RFAKLEN

SEQ ID NO: 143301 - protein, 7 aa, synthetic construct
RFANGVP

SEQ ID NO: 143302 - protein, 7 aa, synthetic construct
RFDGNKS

SEQ ID NO: 143303 - protein, 7 aa, synthetic construct
RFDKNSN

SEQ ID NO: 143304 - protein, 7 aa, synthetic construct
RFDKQAV

SEQ ID NO: 143305 - protein, 7 aa, synthetic construct
RFDNANK

SEQ ID NO: 143306 - protein, 7 aa, synthetic construct
RFDSKVT

SEQ ID NO: 143307 - protein, 7 aa, synthetic construct
RFEPNKL

SEQ ID NO: 143308 - protein, 7 aa, synthetic construct
RFEQQKP

SEQ ID NO: 143309 - protein, 7 aa, synthetic construct
RFERSGM

SEQ ID NO: 143310 - protein, 7 aa, synthetic construct
RFESIKA

SEQ ID NO: 143311 - protein, 7 aa, synthetic construct
RFETRNM

SEQ ID NO: 143312 - protein, 7 aa, synthetic construct
RFGGEMK

SEQ ID NO: 143313 - protein, 7 aa, synthetic construct
RFGKTGD

SEQ ID NO: 143314 - protein, 7 aa, synthetic construct
RFGTQEK

SEQ ID NO: 143315 - protein, 7 aa, synthetic construct
RFKADIV

SEQ ID NO: 143316 - protein, 7 aa, synthetic construct
RFKAMMD

SEQ ID NO: 143317 - protein, 7 aa, synthetic construct
RFKDHHQ

SEQ ID NO: 143318 - protein, 7 aa, synthetic construct
RFKDSNT

SEQ ID NO: 143319 - protein, 7 aa, synthetic construct
RFKEISV

SEQ ID NO: 143320 - protein, 7 aa, synthetic construct
RFKGVPD

SEQ ID NO: 143321 - protein, 7 aa, synthetic construct
RFKPDPS

SEQ ID NO: 143322 - protein, 7 aa, synthetic construct
RFKPLME

SEQ ID NO: 143323 - protein, 7 aa, synthetic construct
RFKPQVD

SEQ ID NO: 143324 - protein, 7 aa, synthetic construct
RFKQNEI

SEQ ID NO: 143325 - protein, 7 aa, synthetic construct
RFKSDLN

SEQ ID NO: 143326 - protein, 7 aa, synthetic construct
RFKSQGD

SEQ ID NO: 143327 - protein, 7 aa, synthetic construct
RFKSTDL

SEQ ID NO: 143328 - protein, 7 aa, synthetic construct
RFKTMEN

SEQ ID NO: 143329 - protein, 7 aa, synthetic construct
RFKVDVN

SEQ ID NO: 143330 - protein, 7 aa, synthetic construct
RFNAPQV

SEQ ID NO: 143331 - protein, 7 aa, synthetic construct
RFNGMSQ

SEQ ID NO: 143332 - protein, 7 aa, synthetic construct
RFNKEQN

SEQ ID NO: 143333 - protein, 7 aa, synthetic construct
RFNQADK

SEQ ID NO: 143334 - protein, 7 aa, synthetic construct
RFNQQLT

SEQ ID NO: 143335 - protein, 7 aa, synthetic construct
RFNSDRL

SEQ ID NO: 143336 - protein, 7 aa, synthetic construct
RFNSPGL

SEQ ID NO: 143337 - protein, 7 aa, synthetic construct
RFPKEDR

SEQ ID NO: 143338 - protein, 7 aa, synthetic construct
RFPQDRI

SEQ ID NO: 143339 - protein, 7 aa, synthetic construct
RFPTSGM

SEQ ID NO: 143340 - protein, 7 aa, synthetic construct
RFPTTTQ

SEQ ID NO: 143341 - protein, 7 aa, synthetic construct
RFPVPAT

SEQ ID NO: 143342 - protein, 7 aa, synthetic construct
RFQAAGN

SEQ ID NO: 143343 - protein, 7 aa, synthetic construct
RFQKEMM

SEQ ID NO: 143344 - protein, 7 aa, synthetic construct
RFQKENA

SEQ ID NO: 143345 - protein, 7 aa, synthetic construct
RFQQQVQ

SEQ ID NO: 143346 - protein, 7 aa, synthetic construct
RFQTHTT

SEQ ID NO: 143347 - protein, 7 aa, synthetic construct
RFSAVDK

SEQ ID NO: 143348 - protein, 7 aa, synthetic construct
RFSEKTI

SEQ ID NO: 143349 - protein, 7 aa, synthetic construct
RFSGADK

SEQ ID NO: 143350 - protein, 7 aa, synthetic construct
RFSNPNP

SEQ ID NO: 143351 - protein, 7 aa, synthetic construct
RFSPTAV

SEQ ID NO: 143352 - protein, 7 aa, synthetic construct
RFSTKDI

SEQ ID NO: 143353 - protein, 7 aa, synthetic construct
RFSTNMP

SEQ ID NO: 143354 - protein, 7 aa, synthetic construct
RFTANPP

SEQ ID NO: 143355 - protein, 7 aa, synthetic construct
RFTNNAH

SEQ ID NO: 143356 - protein, 7 aa, synthetic construct
RFTTQTL

SEQ ID NO: 143357 - protein, 7 aa, synthetic construct
RFTVGPQ

SEQ ID NO: 143358 - protein, 7 aa, synthetic construct
RFVNAGP

SEQ ID NO: 143359 - protein, 7 aa, synthetic construct
RGAAGGM

SEQ ID NO: 143360 - protein, 7 aa, synthetic construct
RGAAHSN

SEQ ID NO: 143361 - protein, 7 aa, synthetic construct
RGAAQDR

SEQ ID NO: 143362 - protein, 7 aa, synthetic construct
RGAKDYT

SEQ ID NO: 143363 - protein, 7 aa, synthetic construct
RGALKDL

SEQ ID NO: 143364 - protein, 7 aa, synthetic construct
RGALNSM

SEQ ID NO: 143365 - protein, 7 aa, synthetic construct
RGAMNSI

SEQ ID NO: 143366 - protein, 7 aa, synthetic construct
RGAMNTM

SEQ ID NO: 143367 - protein, 7 aa, synthetic construct
RGANDGK

SEQ ID NO: 143368 - protein, 7 aa, synthetic construct
RGANNSI

SEQ ID NO: 143369 - protein, 7 aa, synthetic construct
RGANRDS

SEQ ID NO: 143370 - protein, 7 aa, synthetic construct
RGANVPY

SEQ ID NO: 143371 - protein, 7 aa, synthetic construct
RGAPATI

SEQ ID NO: 143372 - protein, 7 aa, synthetic construct
RGAPHSA

SEQ ID NO: 143373 - protein, 7 aa, synthetic construct
RGAPHSN

SEQ ID NO: 143374 - protein, 7 aa, synthetic construct
RGAPINP

SEQ ID NO: 143375 - protein, 7 aa, synthetic construct
RGAPISV

SEQ ID NO: 143376 - protein, 7 aa, synthetic construct
RGAPTMQ

SEQ ID NO: 143377 - protein, 7 aa, synthetic construct
RGAQDRT

SEQ ID NO: 143378 - protein, 7 aa, synthetic construct
RGAQMQV

SEQ ID NO: 143379 - protein, 7 aa, synthetic construct
RGAQQSM

SEQ ID NO: 143380 - protein, 7 aa, synthetic construct
RGAQSAF

SEQ ID NO: 143381 - protein, 7 aa, synthetic construct
RGARDIA

SEQ ID NO: 143382 - protein, 7 aa, synthetic construct
RGASQQT

SEQ ID NO: 143383 - protein, 7 aa, synthetic construct
RGAVNEK

SEQ ID NO: 143384 - protein, 7 aa, synthetic construct
RGAVQGY

SEQ ID NO: 143385 - protein, 7 aa, synthetic construct
RGDGHPK

SEQ ID NO: 143386 - protein, 7 aa, synthetic construct
RGDGKLM

SEQ ID NO: 143387 - protein, 7 aa, synthetic construct
RGDGMPR

SEQ ID NO: 143388 - protein, 7 aa, synthetic construct
RGDHRQG

SEQ ID NO: 143389 - protein, 7 aa, synthetic construct
RGDIRKD

SEQ ID NO: 143390 - protein, 7 aa, synthetic construct
RGDIVLR

SEQ ID NO: 143391 - protein, 7 aa, synthetic construct
RGDNMLR

SEQ ID NO: 143392 - protein, 7 aa, synthetic construct
RGDNNNK

SEQ ID NO: 143393 - protein, 7 aa, synthetic construct
RGDNRMF

SEQ ID NO: 143394 - protein, 7 aa, synthetic construct
RGDNSSR

SEQ ID NO: 143395 - protein, 7 aa, synthetic construct
RGDPKSV

SEQ ID NO: 143396 - protein, 7 aa, synthetic construct
RGDRGNI

SEQ ID NO: 143397 - protein, 7 aa, synthetic construct
RGDRGSN

SEQ ID NO: 143398 - protein, 7 aa, synthetic construct
RGDTYKS

SEQ ID NO: 143399 - protein, 7 aa, synthetic construct
RGDVARV

SEQ ID NO: 143400 - protein, 7 aa, synthetic construct
RGDVVRN

SEQ ID NO: 143401 - protein, 7 aa, synthetic construct
RGEAFKM

SEQ ID NO: 143402 - protein, 7 aa, synthetic construct
RGEAQRV

SEQ ID NO: 143403 - protein, 7 aa, synthetic construct
RGEGMKS

SEQ ID NO: 143404 - protein, 7 aa, synthetic construct
RGEIGGK

SEQ ID NO: 143405 - protein, 7 aa, synthetic construct
RGEIHKI

SEQ ID NO: 143406 - protein, 7 aa, synthetic construct
RGEITPR

SEQ ID NO: 143407 - protein, 7 aa, synthetic construct
RGEKQMI

SEQ ID NO: 143408 - protein, 7 aa, synthetic construct
RGEKRDS

SEQ ID NO: 143409 - protein, 7 aa, synthetic construct
RGEKTMQ

SEQ ID NO: 143410 - protein, 7 aa, synthetic construct
RGEKTVT

SEQ ID NO: 143411 - protein, 7 aa, synthetic construct
RGEMTRM

SEQ ID NO: 143412 - protein, 7 aa, synthetic construct
RGENNRG

SEQ ID NO: 143413 - protein, 7 aa, synthetic construct
RGENVKY

SEQ ID NO: 143414 - protein, 7 aa, synthetic construct
RGEPQRQ

SEQ ID NO: 143415 - protein, 7 aa, synthetic construct
RGEPRAF

SEQ ID NO: 143416 - protein, 7 aa, synthetic construct
RGEQKLQ

SEQ ID NO: 143417 - protein, 7 aa, synthetic construct
RGERFPM

SEQ ID NO: 143418 - protein, 7 aa, synthetic construct
RGERGYF

SEQ ID NO: 143419 - protein, 7 aa, synthetic construct
RGERIHL

SEQ ID NO: 143420 - protein, 7 aa, synthetic construct
RGETSPR

SEQ ID NO: 143421 - protein, 7 aa, synthetic construct
RGEVLRT

SEQ ID NO: 143422 - protein, 7 aa, synthetic construct
RGGAEGK

SEQ ID NO: 143423 - protein, 7 aa, synthetic construct
RGGARGD

SEQ ID NO: 143424 - protein, 7 aa, synthetic construct
RGGASAT

SEQ ID NO: 143425 - protein, 7 aa, synthetic construct
RGGEGVK

SEQ ID NO: 143426 - protein, 7 aa, synthetic construct
RGGESKN

SEQ ID NO: 143427 - protein, 7 aa, synthetic construct
RGGGLQL

SEQ ID NO: 143428 - protein, 7 aa, synthetic construct
RGGINQM

SEQ ID NO: 143429 - protein, 7 aa, synthetic construct
RGGKDDK

SEQ ID NO: 143430 - protein, 7 aa, synthetic construct
RGGNSAV

SEQ ID NO: 143431 - protein, 7 aa, synthetic construct
RGGPMIQ

SEQ ID NO: 143432 - protein, 7 aa, synthetic construct
RGGPSMT

SEQ ID NO: 143433 - protein, 7 aa, synthetic construct
RGGQKDM

SEQ ID NO: 143434 - protein, 7 aa, synthetic construct
RGGQMQV

SEQ ID NO: 143435 - protein, 7 aa, synthetic construct
RGGQQIQ

SEQ ID NO: 143436 - protein, 7 aa, synthetic construct
RGGSMMT

SEQ ID NO: 143437 - protein, 7 aa, synthetic construct
RGGVAMT

SEQ ID NO: 143438 - protein, 7 aa, synthetic construct
RGGVKDV

SEQ ID NO: 143439 - protein, 7 aa, synthetic construct
RGGVSNY

SEQ ID NO: 143440 - protein, 7 aa, synthetic construct
RGHGTPN

SEQ ID NO: 143441 - protein, 7 aa, synthetic construct
RGHIAAT

SEQ ID NO: 143442 - protein, 7 aa, synthetic construct
RGHIKDV

SEQ ID NO: 143443 - protein, 7 aa, synthetic construct
RGHINGP

SEQ ID NO: 143444 - protein, 7 aa, synthetic construct
RGHLAGP

SEQ ID NO: 143445 - protein, 7 aa, synthetic construct
RGHNMIT

SEQ ID NO: 143446 - protein, 7 aa, synthetic construct
RGHNQQS

SEQ ID NO: 143447 - protein, 7 aa, synthetic construct
RGHPGVM

SEQ ID NO: 143448 - protein, 7 aa, synthetic construct
RGHSASM

SEQ ID NO: 143449 - protein, 7 aa, synthetic construct
RGHTSAF

SEQ ID NO: 143450 - protein, 7 aa, synthetic construct
RGHVGTY

SEQ ID NO: 143451 - protein, 7 aa, synthetic construct
RGHVMNP

SEQ ID NO: 143452 - protein, 7 aa, synthetic construct
RGIAISH

SEQ ID NO: 143453 - protein, 7 aa, synthetic construct
RGIDRSV

SEQ ID NO: 143454 - protein, 7 aa, synthetic construct
RGKEAVI

SEQ ID NO: 143455 - protein, 7 aa, synthetic construct
RGKEMTL

SEQ ID NO: 143456 - protein, 7 aa, synthetic construct
RGKEQMI

SEQ ID NO: 143457 - protein, 7 aa, synthetic construct
RGKGPTE

SEQ ID NO: 143458 - protein, 7 aa, synthetic construct
RGKPGDL

SEQ ID NO: 143459 - protein, 7 aa, synthetic construct
RGKVDDR

SEQ ID NO: 143460 - protein, 7 aa, synthetic construct
RGKYAEG

SEQ ID NO: 143461 - protein, 7 aa, synthetic construct
RGMAQVL

SEQ ID NO: 143462 - protein, 7 aa, synthetic construct
RGMGATY

SEQ ID NO: 143463 - protein, 7 aa, synthetic construct
RGMGHNI

SEQ ID NO: 143464 - protein, 7 aa, synthetic construct
RGMGHSG

SEQ ID NO: 143465 - protein, 7 aa, synthetic construct
RGMGVPV

SEQ ID NO: 143466 - protein, 7 aa, synthetic construct
RGMHQGS

SEQ ID NO: 143467 - protein, 7 aa, synthetic construct
RGMKIDT

SEQ ID NO: 143468 - protein, 7 aa, synthetic construct
RGMQNSL

SEQ ID NO: 143469 - protein, 7 aa, synthetic construct
RGMQSVI

SEQ ID NO: 143470 - protein, 7 aa, synthetic construct
RGMSPNT

SEQ ID NO: 143471 - protein, 7 aa, synthetic construct
RGMTAQI

SEQ ID NO: 143472 - protein, 7 aa, synthetic construct
RGMTHQN

SEQ ID NO: 143473 - protein, 7 aa, synthetic construct
RGNAINT

SEQ ID NO: 143474 - protein, 7 aa, synthetic construct
RGNASLV

SEQ ID NO: 143475 - protein, 7 aa, synthetic construct
RGNEGKA

SEQ ID NO: 143476 - protein, 7 aa, synthetic construct
RGNEKML

SEQ ID NO: 143477 - protein, 7 aa, synthetic construct
RGNEKQY

SEQ ID NO: 143478 - protein, 7 aa, synthetic construct
RGNGHLT

SEQ ID NO: 143479 - protein, 7 aa, synthetic construct
RGNGMNV

SEQ ID NO: 143480 - protein, 7 aa, synthetic construct
RGNGMNY

SEQ ID NO: 143481 - protein, 7 aa, synthetic construct
RGNGQQQ

SEQ ID NO: 143482 - protein, 7 aa, synthetic construct
RGNIPST

SEQ ID NO: 143483 - protein, 7 aa, synthetic construct
RGNIPVM

SEQ ID NO: 143484 - protein, 7 aa, synthetic construct
RGNISVI

SEQ ID NO: 143485 - protein, 7 aa, synthetic construct
RGNLTTQ

SEQ ID NO: 143486 - protein, 7 aa, synthetic construct
RGNNGYG

SEQ ID NO: 143487 - protein, 7 aa, synthetic construct
RGNNLGF

SEQ ID NO: 143488 - protein, 7 aa, synthetic construct
RGNPEGR

SEQ ID NO: 143489 - protein, 7 aa, synthetic construct
RGNPVMT

SEQ ID NO: 143490 - protein, 7 aa, synthetic construct
RGNQGTT

SEQ ID NO: 143491 - protein, 7 aa, synthetic construct
RGNQKDI

SEQ ID NO: 143492 - protein, 7 aa, synthetic construct
RGNQNDK

SEQ ID NO: 143493 - protein, 7 aa, synthetic construct
RGNVDRI

SEQ ID NO: 143494 - protein, 7 aa, synthetic construct
RGNYAVT

SEQ ID NO: 143495 - protein, 7 aa, synthetic construct
RGNYMKD

SEQ ID NO: 143496 - protein, 7 aa, synthetic construct
RGPAFSA

SEQ ID NO: 143497 - protein, 7 aa, synthetic construct
RGPDTRQ

SEQ ID NO: 143498 - protein, 7 aa, synthetic construct
RGPEGRN

SEQ ID NO: 143499 - protein, 7 aa, synthetic construct
RGPGHAQ

SEQ ID NO: 143500 - protein, 7 aa, synthetic construct
RGPGSLM

SEQ ID NO: 143501 - protein, 7 aa, synthetic construct
RGPHVNP

SEQ ID NO: 143502 - protein, 7 aa, synthetic construct
RGPKPVD

SEQ ID NO: 143503 - protein, 7 aa, synthetic construct
RGPNQVI

SEQ ID NO: 143504 - protein, 7 aa, synthetic construct
RGPNVGY

SEQ ID NO: 143505 - protein, 7 aa, synthetic construct
RGPNVIY

SEQ ID NO: 143506 - protein, 7 aa, synthetic construct
RGPQAML

SEQ ID NO: 143507 - protein, 7 aa, synthetic construct
RGPSENR

SEQ ID NO: 143508 - protein, 7 aa, synthetic construct
RGPSVER

SEQ ID NO: 143509 - protein, 7 aa, synthetic construct
RGPTPIL

SEQ ID NO: 143510 - protein, 7 aa, synthetic construct
RGPTTER

SEQ ID NO: 143511 - protein, 7 aa, synthetic construct
RGQADKM

SEQ ID NO: 143512 - protein, 7 aa, synthetic construct
RGQAMVM

SEQ ID NO: 143513 - protein, 7 aa, synthetic construct
RGQAQNV

SEQ ID NO: 143514 - protein, 7 aa, synthetic construct
RGQATSI

SEQ ID NO: 143515 - protein, 7 aa, synthetic construct
RGQDKTL

SEQ ID NO: 143516 - protein, 7 aa, synthetic construct
RGQGSTT

SEQ ID NO: 143517 - protein, 7 aa, synthetic construct
RGQIHNV

SEQ ID NO: 143518 - protein, 7 aa, synthetic construct
RGQISMM

SEQ ID NO: 143519 - protein, 7 aa, synthetic construct
RGQMVPT

SEQ ID NO: 143520 - protein, 7 aa, synthetic construct
RGQNAPT

SEQ ID NO: 143521 - protein, 7 aa, synthetic construct
RGQNGTV

SEQ ID NO: 143522 - protein, 7 aa, synthetic construct
RGQNHTL

SEQ ID NO: 143523 - protein, 7 aa, synthetic construct
RGQNIGV

SEQ ID NO: 143524 - protein, 7 aa, synthetic construct
RGQNQIH

SEQ ID NO: 143525 - protein, 7 aa, synthetic construct
RGQPTMH

SEQ ID NO: 143526 - protein, 7 aa, synthetic construct
RGQRESV

SEQ ID NO: 143527 - protein, 7 aa, synthetic construct
RGQTLAV

SEQ ID NO: 143528 - protein, 7 aa, synthetic construct
RGQTLNT

SEQ ID NO: 143529 - protein, 7 aa, synthetic construct
RGQTTTL

SEQ ID NO: 143530 - protein, 7 aa, synthetic construct
RGQVAGH

SEQ ID NO: 143531 - protein, 7 aa, synthetic construct
RGQVGIV

SEQ ID NO: 143532 - protein, 7 aa, synthetic construct
RGQVGPY

SEQ ID NO: 143533 - protein, 7 aa, synthetic construct
RGQYNSN

SEQ ID NO: 143534 - protein, 7 aa, synthetic construct
RGQYTIA

SEQ ID NO: 143535 - protein, 7 aa, synthetic construct
RGRSVEE

SEQ ID NO: 143536 - protein, 7 aa, synthetic construct
RGSAVGI

SEQ ID NO: 143537 - protein, 7 aa, synthetic construct
RGSGSNI

SEQ ID NO: 143538 - protein, 7 aa, synthetic construct
RGSIGGM

SEQ ID NO: 143539 - protein, 7 aa, synthetic construct
RGSITTM

SEQ ID NO: 143540 - protein, 7 aa, synthetic construct
RGSKSES

SEQ ID NO: 143541 - protein, 7 aa, synthetic construct
RGSMDSK

SEQ ID NO: 143542 - protein, 7 aa, synthetic construct
RGSNIAV

SEQ ID NO: 143543 - protein, 7 aa, synthetic construct
RGSNQQV

SEQ ID NO: 143544 - protein, 7 aa, synthetic construct
RGSPMSM

SEQ ID NO: 143545 - protein, 7 aa, synthetic construct
RGSRTDG

SEQ ID NO: 143546 - protein, 7 aa, synthetic construct
RGSSAFA

SEQ ID NO: 143547 - protein, 7 aa, synthetic construct
RGSTVGY

SEQ ID NO: 143548 - protein, 7 aa, synthetic construct
RGSTWSD

SEQ ID NO: 143549 - protein, 7 aa, synthetic construct
RGSYEKF

SEQ ID NO: 143550 - protein, 7 aa, synthetic construct
RGSYGGQ

SEQ ID NO: 143551 - protein, 7 aa, synthetic construct
RGTAGLM

SEQ ID NO: 143552 - protein, 7 aa, synthetic construct
RGTARDN

SEQ ID NO: 143553 - protein, 7 aa, synthetic construct
RGTDQVK

SEQ ID NO: 143554 - protein, 7 aa, synthetic construct
RGTDVMK

SEQ ID NO: 143555 - protein, 7 aa, synthetic construct
RGTEMKH

SEQ ID NO: 143556 - protein, 7 aa, synthetic construct
RGTFSQN

SEQ ID NO: 143557 - protein, 7 aa, synthetic construct
RGTPLSL

SEQ ID NO: 143558 - protein, 7 aa, synthetic construct
RGTPQNV

SEQ ID NO: 143559 - protein, 7 aa, synthetic construct
RGTQDKF

SEQ ID NO: 143560 - protein, 7 aa, synthetic construct
RGTQISY

SEQ ID NO: 143561 - protein, 7 aa, synthetic construct
RGTQQNI

SEQ ID NO: 143562 - protein, 7 aa, synthetic construct
RGTRTDI

SEQ ID NO: 143563 - protein, 7 aa, synthetic construct
RGTTMDK

SEQ ID NO: 143564 - protein, 7 aa, synthetic construct
RGVDQRF

SEQ ID NO: 143565 - protein, 7 aa, synthetic construct
RGVIGTV

SEQ ID NO: 143566 - protein, 7 aa, synthetic construct
RGVNISL

SEQ ID NO: 143567 - protein, 7 aa, synthetic construct
RGVNVSY

SEQ ID NO: 143568 - protein, 7 aa, synthetic construct
RGVPGNI

SEQ ID NO: 143569 - protein, 7 aa, synthetic construct
RGVPYQS

SEQ ID NO: 143570 - protein, 7 aa, synthetic construct
RGVQIQT

SEQ ID NO: 143571 - protein, 7 aa, synthetic construct
RGVQVER

SEQ ID NO: 143572 - protein, 7 aa, synthetic construct
RGVTQSV

SEQ ID NO: 143573 - protein, 7 aa, synthetic construct
RGVVQGL

SEQ ID NO: 143574 - protein, 7 aa, synthetic construct
RGYGKEG

SEQ ID NO: 143575 - protein, 7 aa, synthetic construct
RGYIPEV

SEQ ID NO: 143576 - protein, 7 aa, synthetic construct
RGYNAPT

SEQ ID NO: 143577 - protein, 7 aa, synthetic construct
RHAAGQI

SEQ ID NO: 143578 - protein, 7 aa, synthetic construct
RHAASTI

SEQ ID NO: 143579 - protein, 7 aa, synthetic construct
RHAATAV

SEQ ID NO: 143580 - protein, 7 aa, synthetic construct
RHAGGTI

SEQ ID NO: 143581 - protein, 7 aa, synthetic construct
RHAGIPV

SEQ ID NO: 143582 - protein, 7 aa, synthetic construct
RHAGPMP

SEQ ID NO: 143583 - protein, 7 aa, synthetic construct
RHAGVNV

SEQ ID NO: 143584 - protein, 7 aa, synthetic construct
RHAGVPL

SEQ ID NO: 143585 - protein, 7 aa, synthetic construct
RHANVGN

SEQ ID NO: 143586 - protein, 7 aa, synthetic construct
RHAQVTQ

SEQ ID NO: 143587 - protein, 7 aa, synthetic construct
RHARAED

SEQ ID NO: 143588 - protein, 7 aa, synthetic construct
RHASGNH

SEQ ID NO: 143589 - protein, 7 aa, synthetic construct
RHATGAV

SEQ ID NO: 143590 - protein, 7 aa, synthetic construct
RHATPNM

SEQ ID NO: 143591 - protein, 7 aa, synthetic construct
RHAVKPD

SEQ ID NO: 143592 - protein, 7 aa, synthetic construct
RHAVPQS

SEQ ID NO: 143593 - protein, 7 aa, synthetic construct
RHDDAMI

SEQ ID NO: 143594 - protein, 7 aa, synthetic construct
RHDGIKF

SEQ ID NO: 143595 - protein, 7 aa, synthetic construct
RHDKVPN

SEQ ID NO: 143596 - protein, 7 aa, synthetic construct
RHDSKVP

SEQ ID NO: 143597 - protein, 7 aa, synthetic construct
RHDTTKP

SEQ ID NO: 143598 - protein, 7 aa, synthetic construct
RHEGMKN

SEQ ID NO: 143599 - protein, 7 aa, synthetic construct
RHEKGFI

SEQ ID NO: 143600 - protein, 7 aa, synthetic construct
RHEQRGM

SEQ ID NO: 143601 - protein, 7 aa, synthetic construct
RHERLGA

SEQ ID NO: 143602 - protein, 7 aa, synthetic construct
RHEVKQP

SEQ ID NO: 143603 - protein, 7 aa, synthetic construct
RHGAKDV

SEQ ID NO: 143604 - protein, 7 aa, synthetic construct
RHGALAS

SEQ ID NO: 143605 - protein, 7 aa, synthetic construct
RHGALPA

SEQ ID NO: 143606 - protein, 7 aa, synthetic construct
RHGAPVS

SEQ ID NO: 143607 - protein, 7 aa, synthetic construct
RHGDKNV

SEQ ID NO: 143608 - protein, 7 aa, synthetic construct
RHGDRGA

SEQ ID NO: 143609 - protein, 7 aa, synthetic construct
RHGGPGV

SEQ ID NO: 143610 - protein, 7 aa, synthetic construct
RHGNNMP

SEQ ID NO: 143611 - protein, 7 aa, synthetic construct
RHGNQQT

SEQ ID NO: 143612 - protein, 7 aa, synthetic construct
RHGNTQI

SEQ ID NO: 143613 - protein, 7 aa, synthetic construct
RHGNVNQ

SEQ ID NO: 143614 - protein, 7 aa, synthetic construct
RHGQLPV

SEQ ID NO: 143615 - protein, 7 aa, synthetic construct
RHGQNTI

SEQ ID NO: 143616 - protein, 7 aa, synthetic construct
RHGRNDE

SEQ ID NO: 143617 - protein, 7 aa, synthetic construct
RHGSNTV

SEQ ID NO: 143618 - protein, 7 aa, synthetic construct
RHGTIAN

SEQ ID NO: 143619 - protein, 7 aa, synthetic construct
RHGTMTV

SEQ ID NO: 143620 - protein, 7 aa, synthetic construct
RHGVNQA

SEQ ID NO: 143621 - protein, 7 aa, synthetic construct
RHHDRSD

SEQ ID NO: 143622 - protein, 7 aa, synthetic construct
RHHNIAQ

SEQ ID NO: 143623 - protein, 7 aa, synthetic construct
RHKLSEE

SEQ ID NO: 143624 - protein, 7 aa, synthetic construct
RHKSEEI

SEQ ID NO: 143625 - protein, 7 aa, synthetic construct
RHLNAQT

SEQ ID NO: 143626 - protein, 7 aa, synthetic construct
RHLQNIP

SEQ ID NO: 143627 - protein, 7 aa, synthetic construct
RHMALSA

SEQ ID NO: 143628 - protein, 7 aa, synthetic construct
RHMNPAP

SEQ ID NO: 143629 - protein, 7 aa, synthetic construct
RHMPEMM

SEQ ID NO: 143630 - protein, 7 aa, synthetic construct
RHMPGPP

SEQ ID NO: 143631 - protein, 7 aa, synthetic construct
RHMRPEP

SEQ ID NO: 143632 - protein, 7 aa, synthetic construct
RHMSASV

SEQ ID NO: 143633 - protein, 7 aa, synthetic construct
RHNASPP

SEQ ID NO: 143634 - protein, 7 aa, synthetic construct
RHNASVH

SEQ ID NO: 143635 - protein, 7 aa, synthetic construct
RHNLEER

SEQ ID NO: 143636 - protein, 7 aa, synthetic construct
RHNNSMS

SEQ ID NO: 143637 - protein, 7 aa, synthetic construct
RHNPERV

SEQ ID NO: 143638 - protein, 7 aa, synthetic construct
RHNPLTS

SEQ ID NO: 143639 - protein, 7 aa, synthetic construct
RHNPTTM

SEQ ID NO: 143640 - protein, 7 aa, synthetic construct
RHNVMFD

SEQ ID NO: 143641 - protein, 7 aa, synthetic construct
RHPAAEK

SEQ ID NO: 143642 - protein, 7 aa, synthetic construct
RHPAATN

SEQ ID NO: 143643 - protein, 7 aa, synthetic construct
RHPAQMP

SEQ ID NO: 143644 - protein, 7 aa, synthetic construct
RHPERMV

SEQ ID NO: 143645 - protein, 7 aa, synthetic construct
RHPERQV

SEQ ID NO: 143646 - protein, 7 aa, synthetic construct
RHPGPTS

SEQ ID NO: 143647 - protein, 7 aa, synthetic construct
RHPNANS

SEQ ID NO: 143648 - protein, 7 aa, synthetic construct
RHPPAAL

SEQ ID NO: 143649 - protein, 7 aa, synthetic construct
RHPPNSL

SEQ ID NO: 143650 - protein, 7 aa, synthetic construct
RHPPQLP

SEQ ID NO: 143651 - protein, 7 aa, synthetic construct
RHPPRDN

SEQ ID NO: 143652 - protein, 7 aa, synthetic construct
RHPPSIS

SEQ ID NO: 143653 - protein, 7 aa, synthetic construct
RHPPSNN

SEQ ID NO: 143654 - protein, 7 aa, synthetic construct
RHPQANT

SEQ ID NO: 143655 - protein, 7 aa, synthetic construct
RHPQSGQ

SEQ ID NO: 143656 - protein, 7 aa, synthetic construct
RHPSQGM

SEQ ID NO: 143657 - protein, 7 aa, synthetic construct
RHPTTVL

SEQ ID NO: 143658 - protein, 7 aa, synthetic construct
RHPVATQ

SEQ ID NO: 143659 - protein, 7 aa, synthetic construct
RHPVTRD

SEQ ID NO: 143660 - protein, 7 aa, synthetic construct
RHQGPTM

SEQ ID NO: 143661 - protein, 7 aa, synthetic construct
RHQPATI

SEQ ID NO: 143662 - protein, 7 aa, synthetic construct
RHQPKDP

SEQ ID NO: 143663 - protein, 7 aa, synthetic construct
RHQQTIP

SEQ ID NO: 143664 - protein, 7 aa, synthetic construct
RHQSHGN

SEQ ID NO: 143665 - protein, 7 aa, synthetic construct
RHQTSYN

SEQ ID NO: 143666 - protein, 7 aa, synthetic construct
RHSAMTV

SEQ ID NO: 143667 - protein, 7 aa, synthetic construct
RHSAPPP

SEQ ID NO: 143668 - protein, 7 aa, synthetic construct
RHSHMSA

SEQ ID NO: 143669 - protein, 7 aa, synthetic construct
RHSIQVP

SEQ ID NO: 143670 - protein, 7 aa, synthetic construct
RHSMPNF

SEQ ID NO: 143671 - protein, 7 aa, synthetic construct
RHSTLTV

SEQ ID NO: 143672 - protein, 7 aa, synthetic construct
RHSVTAN

SEQ ID NO: 143673 - protein, 7 aa, synthetic construct
RHTAIAI

SEQ ID NO: 143674 - protein, 7 aa, synthetic construct
RHTAQPV

SEQ ID NO: 143675 - protein, 7 aa, synthetic construct
RHTGPSI

SEQ ID NO: 143676 - protein, 7 aa, synthetic construct
RHTGPSP

SEQ ID NO: 143677 - protein, 7 aa, synthetic construct
RHTGVAI

SEQ ID NO: 143678 - protein, 7 aa, synthetic construct
RHTHGQG

SEQ ID NO: 143679 - protein, 7 aa, synthetic construct
RHTNGPF

SEQ ID NO: 143680 - protein, 7 aa, synthetic construct
RHTNPVP

SEQ ID NO: 143681 - protein, 7 aa, synthetic construct
RHTPMGG

SEQ ID NO: 143682 - protein, 7 aa, synthetic construct
RHTQLTA

SEQ ID NO: 143683 - protein, 7 aa, synthetic construct
RHTSDKF

SEQ ID NO: 143684 - protein, 7 aa, synthetic construct
RHTSPSQ

SEQ ID NO: 143685 - protein, 7 aa, synthetic construct
RHTTQLA

SEQ ID NO: 143686 - protein, 7 aa, synthetic construct
RHTTSQQ

SEQ ID NO: 143687 - protein, 7 aa, synthetic construct
RHTTTIV

SEQ ID NO: 143688 - protein, 7 aa, synthetic construct
RHTVQLN

SEQ ID NO: 143689 - protein, 7 aa, synthetic construct
RHVATQI

SEQ ID NO: 143690 - protein, 7 aa, synthetic construct
RHVDQER

SEQ ID NO: 143691 - protein, 7 aa, synthetic construct
RHVPVSA

SEQ ID NO: 143692 - protein, 7 aa, synthetic construct
RHYDSNQ

SEQ ID NO: 143693 - protein, 7 aa, synthetic construct
RIADAAK

SEQ ID NO: 143694 - protein, 7 aa, synthetic construct
RIADAQK

SEQ ID NO: 143695 - protein, 7 aa, synthetic construct
RIADQRQ

SEQ ID NO: 143696 - protein, 7 aa, synthetic construct
RIADSDH

SEQ ID NO: 143697 - protein, 7 aa, synthetic construct
RIAGPGN

SEQ ID NO: 143698 - protein, 7 aa, synthetic construct
RIAGRTD

SEQ ID NO: 143699 - protein, 7 aa, synthetic construct
RIAHEHI

SEQ ID NO: 143700 - protein, 7 aa, synthetic construct
RIAHNNP

SEQ ID NO: 143701 - protein, 7 aa, synthetic construct
RIAHQQA

SEQ ID NO: 143702 - protein, 7 aa, synthetic construct
RIAHTAA

SEQ ID NO: 143703 - protein, 7 aa, synthetic construct
RIAHTQI

SEQ ID NO: 143704 - protein, 7 aa, synthetic construct
RIAHTQV

SEQ ID NO: 143705 - protein, 7 aa, synthetic construct
RIAKESV

SEQ ID NO: 143706 - protein, 7 aa, synthetic construct
RIAPGGL

SEQ ID NO: 143707 - protein, 7 aa, synthetic construct
RIAPGSM

SEQ ID NO: 143708 - protein, 7 aa, synthetic construct
RIASLPH

SEQ ID NO: 143709 - protein, 7 aa, synthetic construct
RIASSGH

SEQ ID NO: 143710 - protein, 7 aa, synthetic construct
RIATGMT

SEQ ID NO: 143711 - protein, 7 aa, synthetic construct
RIDAHRV

SEQ ID NO: 143712 - protein, 7 aa, synthetic construct
RIDHARN

SEQ ID NO: 143713 - protein, 7 aa, synthetic construct
RIDHYKG

SEQ ID NO: 143714 - protein, 7 aa, synthetic construct
RIDKYMG

SEQ ID NO: 143715 - protein, 7 aa, synthetic construct
RIDRMAN

SEQ ID NO: 143716 - protein, 7 aa, synthetic construct
RIDRPPS

SEQ ID NO: 143717 - protein, 7 aa, synthetic construct
RIDSAKA

SEQ ID NO: 143718 - protein, 7 aa, synthetic construct
RIDSLQR

SEQ ID NO: 143719 - protein, 7 aa, synthetic construct
RIDTLQK

SEQ ID NO: 143720 - protein, 7 aa, synthetic construct
RIDTMRA

SEQ ID NO: 143721 - protein, 7 aa, synthetic construct
RIEDPSY

SEQ ID NO: 143722 - protein, 7 aa, synthetic construct
RIEKVQL

SEQ ID NO: 143723 - protein, 7 aa, synthetic construct
RIEKYQV

SEQ ID NO: 143724 - protein, 7 aa, synthetic construct
RIEMQRP

SEQ ID NO: 143725 - protein, 7 aa, synthetic construct
RIEQGAW

SEQ ID NO: 143726 - protein, 7 aa, synthetic construct
RIERLGG

SEQ ID NO: 143727 - protein, 7 aa, synthetic construct
RIERNAA

SEQ ID NO: 143728 - protein, 7 aa, synthetic construct
RIERNAN

SEQ ID NO: 143729 - protein, 7 aa, synthetic construct
RIERNMN

SEQ ID NO: 143730 - protein, 7 aa, synthetic construct
RIERSQN

SEQ ID NO: 143731 - protein, 7 aa, synthetic construct
RIETNKA

SEQ ID NO: 143732 - protein, 7 aa, synthetic construct
RIETRIG

SEQ ID NO: 143733 - protein, 7 aa, synthetic construct
RIEVKGF

SEQ ID NO: 143734 - protein, 7 aa, synthetic construct
RIGAHPS

SEQ ID NO: 143735 - protein, 7 aa, synthetic construct
RIGARDV

SEQ ID NO: 143736 - protein, 7 aa, synthetic construct
RIGDYKN

SEQ ID NO: 143737 - protein, 7 aa, synthetic construct
RIGHTNP

SEQ ID NO: 143738 - protein, 7 aa, synthetic construct
RIGKENY

SEQ ID NO: 143739 - protein, 7 aa, synthetic construct
RIGPMAP

SEQ ID NO: 143740 - protein, 7 aa, synthetic construct
RIGPVGS

SEQ ID NO: 143741 - protein, 7 aa, synthetic construct
RIGSIER

SEQ ID NO: 143742 - protein, 7 aa, synthetic construct
RIGTAHP

SEQ ID NO: 143743 - protein, 7 aa, synthetic construct
RIGTPAL

SEQ ID NO: 143744 - protein, 7 aa, synthetic construct
RIHGAPP

SEQ ID NO: 143745 - protein, 7 aa, synthetic construct
RIHGGPP

SEQ ID NO: 143746 - protein, 7 aa, synthetic construct
RIHGQNP

SEQ ID NO: 143747 - protein, 7 aa, synthetic construct
RIHGVST

SEQ ID NO: 143748 - protein, 7 aa, synthetic construct
RIHPNPS

SEQ ID NO: 143749 - protein, 7 aa, synthetic construct
RIHSGTS

SEQ ID NO: 143750 - protein, 7 aa, synthetic construct
RIIEKQQ

SEQ ID NO: 143751 - protein, 7 aa, synthetic construct
RIIPSDK

SEQ ID NO: 143752 - protein, 7 aa, synthetic construct
RIKAPDA

SEQ ID NO: 143753 - protein, 7 aa, synthetic construct
RIKDAQY

SEQ ID NO: 143754 - protein, 7 aa, synthetic construct
RIKELPV

SEQ ID NO: 143755 - protein, 7 aa, synthetic construct
RIKPLVD

SEQ ID NO: 143756 - protein, 7 aa, synthetic construct
RIKQYPE

SEQ ID NO: 143757 - protein, 7 aa, synthetic construct
RIKTPEL

SEQ ID NO: 143758 - protein, 7 aa, synthetic construct
RILHKGE

SEQ ID NO: 143759 - protein, 7 aa, synthetic construct
RIMKENF

SEQ ID NO: 143760 - protein, 7 aa, synthetic construct
RIMSQAP

SEQ ID NO: 143761 - protein, 7 aa, synthetic construct
RINASEK

SEQ ID NO: 143762 - protein, 7 aa, synthetic construct
RINEHNK

SEQ ID NO: 143763 - protein, 7 aa, synthetic construct
RINEVKY

SEQ ID NO: 143764 - protein, 7 aa, synthetic construct
RINGPQF

SEQ ID NO: 143765 - protein, 7 aa, synthetic construct
RINHLGA

SEQ ID NO: 143766 - protein, 7 aa, synthetic construct
RINLRGE

SEQ ID NO: 143767 - protein, 7 aa, synthetic construct
RINPHQA

SEQ ID NO: 143768 - protein, 7 aa, synthetic construct
RINPHSP

SEQ ID NO: 143769 - protein, 7 aa, synthetic construct
RINPKFD

SEQ ID NO: 143770 - protein, 7 aa, synthetic construct
RINPVGA

SEQ ID NO: 143771 - protein, 7 aa, synthetic construct
RINTGNH

SEQ ID NO: 143772 - protein, 7 aa, synthetic construct
RINWQEG

SEQ ID NO: 143773 - protein, 7 aa, synthetic construct
RIPAPQA

SEQ ID NO: 143774 - protein, 7 aa, synthetic construct
RIPAQAL

SEQ ID NO: 143775 - protein, 7 aa, synthetic construct
RIPATNV

SEQ ID NO: 143776 - protein, 7 aa, synthetic construct
RIPDVTR

SEQ ID NO: 143777 - protein, 7 aa, synthetic construct
RIPEPRT

SEQ ID NO: 143778 - protein, 7 aa, synthetic construct
RIPGGMI

SEQ ID NO: 143779 - protein, 7 aa, synthetic construct
RIPGNYA

SEQ ID NO: 143780 - protein, 7 aa, synthetic construct
RIPGSLT

SEQ ID NO: 143781 - protein, 7 aa, synthetic construct
RIPHAPA

SEQ ID NO: 143782 - protein, 7 aa, synthetic construct
RIPKVEP

SEQ ID NO: 143783 - protein, 7 aa, synthetic construct
RIPLAGA

SEQ ID NO: 143784 - protein, 7 aa, synthetic construct
RIPNMTT

SEQ ID NO: 143785 - protein, 7 aa, synthetic construct
RIPNPNI

SEQ ID NO: 143786 - protein, 7 aa, synthetic construct
RIPQAVM

SEQ ID NO: 143787 - protein, 7 aa, synthetic construct
RIPQGVH

SEQ ID NO: 143788 - protein, 7 aa, synthetic construct
RIPQNAF

SEQ ID NO: 143789 - protein, 7 aa, synthetic construct
RIPRVTE

SEQ ID NO: 143790 - protein, 7 aa, synthetic construct
RIPSALA

SEQ ID NO: 143791 - protein, 7 aa, synthetic construct
RIPSHVG

SEQ ID NO: 143792 - protein, 7 aa, synthetic construct
RIPTAHN

SEQ ID NO: 143793 - protein, 7 aa, synthetic construct
RIQALPH

SEQ ID NO: 143794 - protein, 7 aa, synthetic construct
RIQKDNT

SEQ ID NO: 143795 - protein, 7 aa, synthetic construct
RIQKNPE

SEQ ID NO: 143796 - protein, 7 aa, synthetic construct
RIQKVEL

SEQ ID NO: 143797 - protein, 7 aa, synthetic construct
RIQKVFE

SEQ ID NO: 143798 - protein, 7 aa, synthetic construct
RIQNGQF

SEQ ID NO: 143799 - protein, 7 aa, synthetic construct
RIQQEAR

SEQ ID NO: 143800 - protein, 7 aa, synthetic construct
RIQQPHP

SEQ ID NO: 143801 - protein, 7 aa, synthetic construct
RIQQQMQ

SEQ ID NO: 143802 - protein, 7 aa, synthetic construct
RIQQQQQ

SEQ ID NO: 143803 - protein, 7 aa, synthetic construct
RIQQVMA

SEQ ID NO: 143804 - protein, 7 aa, synthetic construct
RIQTKEL

SEQ ID NO: 143805 - protein, 7 aa, synthetic construct
RIQVKTD

SEQ ID NO: 143806 - protein, 7 aa, synthetic construct
RIRDTAI

SEQ ID NO: 143807 - protein, 7 aa, synthetic construct
RIREALN

SEQ ID NO: 143808 - protein, 7 aa, synthetic construct
RIREIQS

SEQ ID NO: 143809 - protein, 7 aa, synthetic construct
RIREPNP

SEQ ID NO: 143810 - protein, 7 aa, synthetic construct
RIREVSV

SEQ ID NO: 143811 - protein, 7 aa, synthetic construct
RISDQRS

SEQ ID NO: 143812 - protein, 7 aa, synthetic construct
RISDRPQ

SEQ ID NO: 143813 - protein, 7 aa, synthetic construct
RISERNI

SEQ ID NO: 143814 - protein, 7 aa, synthetic construct
RISEVRP

SEQ ID NO: 143815 - protein, 7 aa, synthetic construct
RISGMAH

SEQ ID NO: 143816 - protein, 7 aa, synthetic construct
RISIPEK

SEQ ID NO: 143817 - protein, 7 aa, synthetic construct
RISNAHS

SEQ ID NO: 143818 - protein, 7 aa, synthetic construct
RISNMHA

SEQ ID NO: 143819 - protein, 7 aa, synthetic construct
RISPVDR

SEQ ID NO: 143820 - protein, 7 aa, synthetic construct
RISSVSH

SEQ ID NO: 143821 - protein, 7 aa, synthetic construct
RISTHDK

SEQ ID NO: 143822 - protein, 7 aa, synthetic construct
RISVQDR

SEQ ID NO: 143823 - protein, 7 aa, synthetic construct
RITAGHP

SEQ ID NO: 143824 - protein, 7 aa, synthetic construct
RITASQH

SEQ ID NO: 143825 - protein, 7 aa, synthetic construct
RITASVH

SEQ ID NO: 143826 - protein, 7 aa, synthetic construct
RITATER

SEQ ID NO: 143827 - protein, 7 aa, synthetic construct
RITDHKY

SEQ ID NO: 143828 - protein, 7 aa, synthetic construct
RITDKHQ

SEQ ID NO: 143829 - protein, 7 aa, synthetic construct
RITETRI

SEQ ID NO: 143830 - protein, 7 aa, synthetic construct
RITKDMI

SEQ ID NO: 143831 - protein, 7 aa, synthetic construct
RITNNPM

SEQ ID NO: 143832 - protein, 7 aa, synthetic construct
RITPAHN

SEQ ID NO: 143833 - protein, 7 aa, synthetic construct
RITPIAH

SEQ ID NO: 143834 - protein, 7 aa, synthetic construct
RITPNIP

SEQ ID NO: 143835 - protein, 7 aa, synthetic construct
RITPVQQ

SEQ ID NO: 143836 - protein, 7 aa, synthetic construct
RITREGI

SEQ ID NO: 143837 - protein, 7 aa, synthetic construct
RITRQGE

SEQ ID NO: 143838 - protein, 7 aa, synthetic construct
RITSMNQ

SEQ ID NO: 143839 - protein, 7 aa, synthetic construct
RITVPSA

SEQ ID NO: 143840 - protein, 7 aa, synthetic construct
RIVAKDT

SEQ ID NO: 143841 - protein, 7 aa, synthetic construct
RIVETKV

SEQ ID NO: 143842 - protein, 7 aa, synthetic construct
RIVGPDR

SEQ ID NO: 143843 - protein, 7 aa, synthetic construct
RIVHNQV

SEQ ID NO: 143844 - protein, 7 aa, synthetic construct
RIVKPTD

SEQ ID NO: 143845 - protein, 7 aa, synthetic construct
RIVKVEN

SEQ ID NO: 143846 - protein, 7 aa, synthetic construct
RIVNGHP

SEQ ID NO: 143847 - protein, 7 aa, synthetic construct
RIYHSSE

SEQ ID NO: 143848 - protein, 7 aa, synthetic construct
RIYNGDK

SEQ ID NO: 143849 - protein, 7 aa, synthetic construct
RIYQNSS

SEQ ID NO: 143850 - protein, 7 aa, synthetic construct
RKADLLS

SEQ ID NO: 143851 - protein, 7 aa, synthetic construct
RKAEIVN

SEQ ID NO: 143852 - protein, 7 aa, synthetic construct
RKAEPHV

SEQ ID NO: 143853 - protein, 7 aa, synthetic construct
RKAETVT

SEQ ID NO: 143854 - protein, 7 aa, synthetic construct
RKAIPTE

SEQ ID NO: 143855 - protein, 7 aa, synthetic construct
RKAMETF

SEQ ID NO: 143856 - protein, 7 aa, synthetic construct
RKAQPQD
